United States Patent Application Publication US 2007/0048756 A1 - sequence listing, part 10

SEQ ID NO: 326525 - DNA, 33 bp, Homo sapien
aggagatgatatttgcaccacttcgaagacagg

SEQ ID NO: 326526 - DNA, 33 bp, Homo sapien
aggagatgatatttgcgccacttcgaagacagg

SEQ ID NO: 326527 - DNA, 33 bp, Homo sapien
gaggttcaaagctaacacttcatttccagtttg

SEQ ID NO: 326528 - DNA, 33 bp, Homo sapien
gaggttcaaagctaacgcttcatttccagtttg

SEQ ID NO: 326529 - DNA, 33 bp, Homo sapien
gtaccctgaggccggcagcacaatgaccactta

SEQ ID NO: 326530 - DNA, 33 bp, Homo sapien
gtaccctgaggccggcggcacaatgaccactta

SEQ ID NO: 326531 - DNA, 33 bp, Homo sapien
attgttcttcacgggaaacaccctgttggtggt

SEQ ID NO: 326532 - DNA, 33 bp, Homo sapien
attgttcttcacgggagacaccctgttggtggt

SEQ ID NO: 326533 - DNA, 33 bp, Homo sapien
cagtgggcaggaagaaactgtgtggtgattaca

SEQ ID NO: 326534 - DNA, 33 bp, Homo sapien
cagtgggcaggaagaacctgtgtggtgattaca

SEQ ID NO: 326535 - DNA, 33 bp, Homo sapien
acctacatcttagcagaattcaggccactctca

SEQ ID NO: 326536 - DNA, 33 bp, Homo sapien
acctacatcttagcagcattcaggccactctca

SEQ ID NO: 326537 - DNA, 33 bp, Homo sapien
taaggacagggaggcacctcttacaaaaccaga

SEQ ID NO: 326538 - DNA, 33 bp, Homo sapien
taaggacagggaggcatctcttacaaaaccaga

SEQ ID NO: 326539 - DNA, 33 bp, Homo sapien
ttcctttcccaatccccatttggcaaacagtat

SEQ ID NO: 326540 - DNA, 33 bp, Homo sapien
ttcctttcccaatcccgatttggcaaacagtat

SEQ ID NO: 326541 - DNA, 33 bp, Homo sapien
caaatattacctctaggcattaggttggatgat

SEQ ID NO: 326542 - DNA, 33 bp, Homo sapien
caaatattacctctagtcattaggttggatgat

SEQ ID NO: 326543 - DNA, 33 bp, Homo sapien
tacccagctacaaggacgacgcctcaggcttcc

SEQ ID NO: 326544 - DNA, 33 bp, Homo sapien
tacccagctacaaggatgacgcctcaggcttcc

SEQ ID NO: 326545 - DNA, 33 bp, Homo sapien
gactagagacctcccaatagacagatggcatga

SEQ ID NO: 326546 - DNA, 33 bp, Homo sapien
gactagagacctcccagtagacagatggcatga

SEQ ID NO: 326547 - DNA, 33 bp, Homo sapien
gtcaggtcttcagtgccgagttcttaaccatca

SEQ ID NO: 326548 - DNA, 33 bp, Homo sapien
gtcaggtcttcagtgctgagttcttaaccatca

SEQ ID NO: 326549 - DNA, 33 bp, Homo sapien
cgaagaggatcgtgtaactttttactaggaccc

SEQ ID NO: 326550 - DNA, 33 bp, Homo sapien
cgaagaggatcgtgtagctttttactaggaccc

SEQ ID NO: 326551 - DNA, 33 bp, Homo sapien
ccactgctaacctggaaatccaatggagctgct

SEQ ID NO: 326552 - DNA, 33 bp, Homo sapien
ccactgctaacctggagatccaatggagctgct

SEQ ID NO: 326553 - DNA, 33 bp, Homo sapien
tgtccaaatgactacacggatcccagaatagtc

SEQ ID NO: 326554 - DNA, 33 bp, Homo sapien
tgtccaaatgactacatggatcccagaatagtc

SEQ ID NO: 326555 - DNA, 33 bp, Homo sapien
accaaataattttctaactgttcctccagggca

SEQ ID NO: 326556 - DNA, 33 bp, Homo sapien
accaaataattttctagctgttcctccagggca

SEQ ID NO: 326557 - DNA, 33 bp, Homo sapien
gctctcagagggagaacaaggaagaagctgcaa

SEQ ID NO: 326558 - DNA, 33 bp, Homo sapien
gctctcagagggagaataaggaagaagctgcaa

SEQ ID NO: 326559 - DNA, 33 bp, Homo sapien
gagcttctaagagttccagcagtgcctcaaagg

SEQ ID NO: 326560 - DNA, 33 bp, Homo sapien
gagcttctaagagttctagcagtgcctcaaagg

SEQ ID NO: 326561 - DNA, 33 bp, Homo sapien
agcaatggaaaaccaccgatagacagatagact

SEQ ID NO: 326562 - DNA, 33 bp, Homo sapien
agcaatggaaaaccactgatagacagatagact

SEQ ID NO: 326563 - DNA, 33 bp, Homo sapien
ttctctctcagcctccagaaggaacgtagccct

SEQ ID NO: 326564 - DNA, 33 bp, Homo sapien
ttctctctcagcctccggaaggaacgtagccct

SEQ ID NO: 326565 - DNA, 33 bp, Homo sapien
gaggttgcgtgcaggaagcatattggggctatt

SEQ ID NO: 326566 - DNA, 33 bp, Homo sapien
gaggttgcgtgcaggaggcatattggggctatt

SEQ ID NO: 326567 - DNA, 33 bp, Homo sapien
caggctggaaccttccaatactgtcagggtctc

SEQ ID NO: 326568 - DNA, 33 bp, Homo sapien
caggctggaaccttccgatactgtcagggtctc

SEQ ID NO: 326569 - DNA, 33 bp, Homo sapien
tcattgtcatagaaataagagaagcacgtaggt

SEQ ID NO: 326570 - DNA, 33 bp, Homo sapien
tcattgtcatagaaatgagagaagcacgtaggt

SEQ ID NO: 326571 - DNA, 33 bp, Homo sapien
caccaaccttgagtcaccttgtctgcaatggtg

SEQ ID NO: 326572 - DNA, 33 bp, Homo sapien
caccaaccttgagtcatcttgtctgcaatggtg

SEQ ID NO: 326573 - DNA, 33 bp, Homo sapien
agtggcttcagagtgccgaggaagggtatgtgt

SEQ ID NO: 326574 - DNA, 33 bp, Homo sapien
agtggcttcagagtgctgaggaagggtatgtgt

SEQ ID NO: 326575 - DNA, 33 bp, Homo sapien
agtttattgatcctgggccactttccagagacc

SEQ ID NO: 326576 - DNA, 33 bp, Homo sapien
agtttattgatcctggtccactttccagagacc

SEQ ID NO: 326577 - DNA, 33 bp, Homo sapien
aacaattggcatctacggaggagttttatttgg

SEQ ID NO: 326578 - DNA, 33 bp, Homo sapien
aacaattggcatctactgaggagttttatttgg

SEQ ID NO: 326579 - DNA, 33 bp, Homo sapien
cacatcagcccgtttaactcaggctcagattgt

SEQ ID NO: 326580 - DNA, 33 bp, Homo sapien
cacatcagcccgtttacctcaggctcagattgt

SEQ ID NO: 326581 - DNA, 33 bp, Homo sapien
caaactgaggcacatccgagatgctggtttccc

SEQ ID NO: 326582 - DNA, 33 bp, Homo sapien
caaactgaggcacatctgagatgctggtttccc

SEQ ID NO: 326583 - DNA, 33 bp, Homo sapien
gtcacatgactgaatccacatgttgcaaaggaa

SEQ ID NO: 326584 - DNA, 33 bp, Homo sapien
gtcacatgactgaatctacatgttgcaaaggaa

SEQ ID NO: 326585 - DNA, 33 bp, Homo sapien
aaaattaaccatcatccacctcctaaaagcttt

SEQ ID NO: 326586 - DNA, 33 bp, Homo sapien
aaaattaaccatcatctacctcctaaaagcttt

SEQ ID NO: 326587 - DNA, 33 bp, Homo sapien
gagaattgccagtgtcaaggcatggaaaccaaa

SEQ ID NO: 326588 - DNA, 33 bp, Homo sapien
gagaattgccagtgtcgaggcatggaaaccaaa

SEQ ID NO: 326589 - DNA, 33 bp, Homo sapien
ctgtcaaaaggtataacgaaaagactacaaact

SEQ ID NO: 326590 - DNA, 33 bp, Homo sapien
ctgtcaaaaggtataatgaaaagactacaaact

SEQ ID NO: 326591 - DNA, 33 bp, Homo sapien
gctcctccactaactacctctgtgatcttggct

SEQ ID NO: 326592 - DNA, 33 bp, Homo sapien
gctcctccactaactatctctgtgatcttggct

SEQ ID NO: 326593 - DNA, 33 bp, Homo sapien
ttttagagatgaagaaccaaggctctgaaagca

SEQ ID NO: 326594 - DNA, 33 bp, Homo sapien
ttttagagatgaagaatcaaggctctgaaagca

SEQ ID NO: 326595 - DNA, 33 bp, Homo sapien
tctatctctgtctccactagactctggctcccg

SEQ ID NO: 326596 - DNA, 33 bp, Homo sapien
tctatctctgtctccattagactctggctcccg

SEQ ID NO: 326597 - DNA, 33 bp, Homo sapien
agttaggaagccagggacacacagcatcaagcc

SEQ ID NO: 326598 - DNA, 33 bp, Homo sapien
agttaggaagccaggggcacacagcatcaagcc

SEQ ID NO: 326599 - DNA, 33 bp, Homo sapien
catgagtgcaccatcaataccaggcaatcctgg

SEQ ID NO: 326600 - DNA, 33 bp, Homo sapien
catgagtgcaccatcagtaccaggcaatcctgg

SEQ ID NO: 326601 - DNA, 33 bp, Homo sapien
ctagttccctctcccaagcagaatccatcattc

SEQ ID NO: 326602 - DNA, 33 bp, Homo sapien
ctagttccctctcccaggcagaatccatcattc

SEQ ID NO: 326603 - DNA, 33 bp, Homo sapien
cccagggagttcttcaaaagtggttatcctacc

SEQ ID NO: 326604 - DNA, 33 bp, Homo sapien
cccagggagttcttcagaagtggttatcctacc

SEQ ID NO: 326605 - DNA, 33 bp, Homo sapien
cattttttttttctaactgactcatgtctatat

SEQ ID NO: 326606 - DNA, 33 bp, Homo sapien
cattttttttttctaagtgactcatgtctatat

SEQ ID NO: 326607 - DNA, 33 bp, Homo sapien
aggtatgaaatgaaaacgcaacatgaagagaat

SEQ ID NO: 326608 - DNA, 33 bp, Homo sapien
aggtatgaaatgaaaatgcaacatgaagagaat

SEQ ID NO: 326609 - DNA, 33 bp, Homo sapien
tccttgccagccaatcaaactccctaccattac

SEQ ID NO: 326610 - DNA, 33 bp, Homo sapien
tccttgccagccaatcgaactccctaccattac

SEQ ID NO: 326611 - DNA, 33 bp, Homo sapien
agtggagggctctggccgatcaatgccttctct

SEQ ID NO: 326612 - DNA, 33 bp, Homo sapien
agtggagggctctggctgatcaatgccttctct

SEQ ID NO: 326613 - DNA, 33 bp, Homo sapien
aagaaagtcatgcacaatgaaaaacatgtgaaa

SEQ ID NO: 326614 - DNA, 33 bp, Homo sapien
aagaaagtcatgcacattgaaaaacatgtgaaa

SEQ ID NO: 326615 - DNA, 33 bp, Homo sapien
agccccttcttgggaactaggctctctggatag

SEQ ID NO: 326616 - DNA, 33 bp, Homo sapien
agccccttcttgggaattaggctctctggatag

SEQ ID NO: 326617 - DNA, 33 bp, Homo sapien
tttgcatttcaaacagcagcctgcacactggaa

SEQ ID NO: 326618 - DNA, 33 bp, Homo sapien
tttgcatttcaaacaggagcctgcacactggaa

SEQ ID NO: 326619 - DNA, 33 bp, Homo sapien
cttgtctcattaaaaaatgctaatctaataaat

SEQ ID NO: 326620 - DNA, 33 bp, Homo sapien
cttgtctcattaaaaattgctaatctaataaat

SEQ ID NO: 326621 - DNA, 33 bp, Homo sapien
tcatctgtgaatgaagaatgtcaatattcagga

SEQ ID NO: 326622 - DNA, 33 bp, Homo sapien
tcatctgtgaatgaaggatgtcaatattcagga

SEQ ID NO: 326623 - DNA, 33 bp, Homo sapien
cagttggcagtaagagcatcatcacagttttct

SEQ ID NO: 326624 - DNA, 33 bp, Homo sapien
cagttggcagtaagagtatcatcacagttttct

SEQ ID NO: 326625 - DNA, 33 bp, Homo sapien
cttaggacaatgatgcaatcaagtaggaagaat

SEQ ID NO: 326626 - DNA, 33 bp, Homo sapien
cttaggacaatgatgcgatcaagtaggaagaat

SEQ ID NO: 326627 - DNA, 33 bp, Homo sapien
ttgaagttaggctttgaagagccctggattttg

SEQ ID NO: 326628 - DNA, 33 bp, Homo sapien
ttgaagttaggctttgcagagccctggattttg

SEQ ID NO: 326629 - DNA, 33 bp, Homo sapien
agcctaacttcaactcacctgcccaaccttacc

SEQ ID NO: 326630 - DNA, 33 bp, Homo sapien
agcctaacttcaactcgcctgcccaaccttacc

SEQ ID NO: 326631 - DNA, 33 bp, Homo sapien
gcttggccaactgtgacgacctttataaagtga

SEQ ID NO: 326632 - DNA, 33 bp, Homo sapien
gcttggccaactgtgatgacctttataaagtga

SEQ ID NO: 326633 - DNA, 33 bp, Homo sapien
ccaaaaggggtgaatgaaacatcaagctgtcac

SEQ ID NO: 326634 - DNA, 33 bp, Homo sapien
ccaaaaggggtgaatggaacatcaagctgtcac

SEQ ID NO: 326635 - DNA, 33 bp, Homo sapien
ataaacattttctttgcaacaatacagcattga

SEQ ID NO: 326636 - DNA, 33 bp, Homo sapien
ataaacattttctttgtaacaatacagcattga

SEQ ID NO: 326637 - DNA, 33 bp, Homo sapien
ttgggttctgtccccaccaaacactgggtgcca

SEQ ID NO: 326638 - DNA, 33 bp, Homo sapien
ttgggttctgtccccatcaaacactgggtgcca

SEQ ID NO: 326639 - DNA, 33 bp, Homo sapien
tgacttaggagtcaaaaagcatggatcctactg

SEQ ID NO: 326640 - DNA, 33 bp, Homo sapien
tgacttaggagtcaaagagcatggatcctactg

SEQ ID NO: 326641 - DNA, 33 bp, Homo sapien
accacttcaaactgcaccttggatcaaattgct

SEQ ID NO: 326642 - DNA, 33 bp, Homo sapien
accacttcaaactgcatcttggatcaaattgct

SEQ ID NO: 326643 - DNA, 33 bp, Homo sapien
cccaaggcatcggagaaccccaaaatagactac

SEQ ID NO: 326644 - DNA, 33 bp, Homo sapien
cccaaggcatcggagacccccaaaatagactac

SEQ ID NO: 326645 - DNA, 33 bp, Homo sapien
acaacagcaagttaaacccatctgaggcaacaa

SEQ ID NO: 326646 - DNA, 33 bp, Homo sapien
acaacagcaagttaaagccatctgaggcaacaa

SEQ ID NO: 326647 - DNA, 33 bp, Homo sapien
actgccaatgagtagcagaaccagtccctaatc

SEQ ID NO: 326648 - DNA, 33 bp, Homo sapien
actgccaatgagtagcggaaccagtccctaatc

SEQ ID NO: 326649 - DNA, 33 bp, Homo sapien
atgggatttccacaaccacaaaagcctccagtg

SEQ ID NO: 326650 - DNA, 33 bp, Homo sapien
atgggatttccacaacgacaaaagcctccagtg

SEQ ID NO: 326651 - DNA, 33 bp, Homo sapien
tccttgtctctccaaaacctgattctcccaggg

SEQ ID NO: 326652 - DNA, 33 bp, Homo sapien
tccttgtctctccaaaccctgattctcccaggg

SEQ ID NO: 326653 - DNA, 33 bp, Homo sapien
tccccatgggtccagaagaagctagacttcagc

SEQ ID NO: 326654 - DNA, 33 bp, Homo sapien
tccccatgggtccagaggaagctagacttcagc

SEQ ID NO: 326655 - DNA, 33 bp, Homo sapien
tgtttcccatcacaacaaaagataatatatgta

SEQ ID NO: 326656 - DNA, 33 bp, Homo sapien
tgtttcccatcacaacgaaagataatatatgta

SEQ ID NO: 326657 - DNA, 33 bp, Homo sapien
accagggcagtaatccccaaagtctgctgggtg

SEQ ID NO: 326658 - DNA, 33 bp, Homo sapien
accagggcagtaatccgcaaagtctgctgggtg

SEQ ID NO: 326659 - DNA, 33 bp, Homo sapien
aggcagggctactacacggactccccatccaaa

SEQ ID NO: 326660 - DNA, 33 bp, Homo sapien
aggcagggctactacatggactccccatccaaa

SEQ ID NO: 326661 - DNA, 33 bp, Homo sapien
ccctgctctttgattgcataacatgaaagagga

SEQ ID NO: 326662 - DNA, 33 bp, Homo sapien
ccctgctctttgattggataacatgaaagagga

SEQ ID NO: 326663 - DNA, 33 bp, Homo sapien
ccatttgtaaagtacccggacatcaccacatcc

SEQ ID NO: 326664 - DNA, 33 bp, Homo sapien
ccatttgtaaagtacctggacatcaccacatcc

SEQ ID NO: 326665 - DNA, 33 bp, Homo sapien
atcaattcaaatattccctgtttttcagagtca

SEQ ID NO: 326666 - DNA, 33 bp, Homo sapien
atcaattcaaatattctctgtttttcagagtca

SEQ ID NO: 326667 - DNA, 33 bp, Homo sapien
tgggcttcctgatccacggaaaaatggcagaat

SEQ ID NO: 326668 - DNA, 33 bp, Homo sapien
tgggcttcctgatccatggaaaaatggcagaat

SEQ ID NO: 326669 - DNA, 33 bp, Homo sapien
tttagagagggtaaggaactcgccaaacttgct

SEQ ID NO: 326670 - DNA, 33 bp, Homo sapien
tttagagagggtaaggcactcgccaaacttgct

SEQ ID NO: 326671 - DNA, 33 bp, Homo sapien
cccatatcaatctgccactggccacaggtcact

SEQ ID NO: 326672 - DNA, 33 bp, Homo sapien
cccatatcaatctgccgctggccacaggtcact

SEQ ID NO: 326673 - DNA, 33 bp, Homo sapien
cttccagaatttgagagaatacattttttttgt

SEQ ID NO: 326674 - DNA, 33 bp, Homo sapien
cttccagaatttgagataatacattttttttgt

SEQ ID NO: 326675 - DNA, 33 bp, Homo sapien
agtgtaggagtgaaagacaatgacacagagaaa

SEQ ID NO: 326676 - DNA, 33 bp, Homo sapien
agtgtaggagtgaaagtcaatgacacagagaaa

SEQ ID NO: 326677 - DNA, 33 bp, Homo sapien
actataagttactaacagtgccctgagacacca

SEQ ID NO: 326678 - DNA, 33 bp, Homo sapien
actataagttactaacggtgccctgagacacca

SEQ ID NO: 326679 - DNA, 33 bp, Homo sapien
gaccttgtccttaacactgaatgacctgatacc

SEQ ID NO: 326680 - DNA, 33 bp, Homo sapien
gaccttgtccttaacattgaatgacctgatacc

SEQ ID NO: 326681 - DNA, 33 bp, Homo sapien
ttgttctgagttcagcagatcattctacaattt

SEQ ID NO: 326682 - DNA, 33 bp, Homo sapien
ttgttctgagttcagcggatcattctacaattt

SEQ ID NO: 326683 - DNA, 33 bp, Homo sapien
aacatgtcccagtgtagataagaagctggagat

SEQ ID NO: 326684 - DNA, 33 bp, Homo sapien
aacatgtcccagtgtatataagaagctggagat

SEQ ID NO: 326685 - DNA, 33 bp, Homo sapien
gttgcatggtttgagaatatgtgccccttgaaa

SEQ ID NO: 326686 - DNA, 33 bp, Homo sapien
gttgcatggtttgagactatgtgccccttgaaa

SEQ ID NO: 326687 - DNA, 33 bp, Homo sapien
ggcaaggcacacagtacacttcaccagtccctc

SEQ ID NO: 326688 - DNA, 33 bp, Homo sapien
ggcaaggcacacagtatacttcaccagtccctc

SEQ ID NO: 326689 - DNA, 33 bp, Homo sapien
catgaggaagacagaaaggccagctagggaggg

SEQ ID NO: 326690 - DNA, 33 bp, Homo sapien
catgaggaagacagaacggccagctagggaggg

SEQ ID NO: 326691 - DNA, 33 bp, Homo sapien
cagaagatgcaagaaccattatgtaatttgggt

SEQ ID NO: 326692 - DNA, 33 bp, Homo sapien
cagaagatgcaagaactattatgtaatttgggt

SEQ ID NO: 326693 - DNA, 33 bp, Homo sapien
aacccagacagcagcaaaaagaatcgacccgtg

SEQ ID NO: 326694 - DNA, 33 bp, Homo sapien
aacccagacagcagcagaaagaatcgacccgtg

SEQ ID NO: 326695 - DNA, 33 bp, Homo sapien
gaaaggttcctctcaaactccagggaaaacccc

SEQ ID NO: 326696 - DNA, 33 bp, Homo sapien
gaaaggttcctctcaagctccagggaaaacccc

SEQ ID NO: 326697 - DNA, 33 bp, Homo sapien
tgctgccgcatgatatcaacataacaaagtgtt

SEQ ID NO: 326698 - DNA, 33 bp, Homo sapien
tgctgccgcatgatatgaacataacaaagtgtt

SEQ ID NO: 326699 - DNA, 33 bp, Homo sapien
ggggacaaagttctgacgaggattaaatgagtt

SEQ ID NO: 326700 - DNA, 33 bp, Homo sapien
ggggacaaagttctgatgaggattaaatgagtt

SEQ ID NO: 326701 - DNA, 33 bp, Homo sapien
aattacgaagaaaagacagtgactttacagtga

SEQ ID NO: 326702 - DNA, 33 bp, Homo sapien
aattacgaagaaaagatagtgactttacagtga

SEQ ID NO: 326703 - DNA, 33 bp, Homo sapien
tgctcttcctggcttgaagaactactgctggcc

SEQ ID NO: 326704 - DNA, 33 bp, Homo sapien
tgctcttcctggcttggagaactactgctggcc

SEQ ID NO: 326705 - DNA, 33 bp, Homo sapien
ctgcattttagagataaggaattgagacttaaa

SEQ ID NO: 326706 - DNA, 33 bp, Homo sapien
ctgcattttagagatatggaattgagacttaaa

SEQ ID NO: 326707 - DNA, 33 bp, Homo sapien
ggaaatgttctcaagacggagaaacactcagaa

SEQ ID NO: 326708 - DNA, 33 bp, Homo sapien
ggaaatgttctcaagatggagaaacactcagaa

SEQ ID NO: 326709 - DNA, 33 bp, Homo sapien
tgacagcctttctataatacagcagagatgttt

SEQ ID NO: 326710 - DNA, 33 bp, Homo sapien
tgacagcctttctatagtacagcagagatgttt

SEQ ID NO: 326711 - DNA, 33 bp, Homo sapien
aaaacaaaatattctcacttagcttgcacccac

SEQ ID NO: 326712 - DNA, 33 bp, Homo sapien
aaaacaaaatattctcgcttagcttgcacccac

SEQ ID NO: 326713 - DNA, 33 bp, Homo sapien
atggtaatcactagtgaaaatgatgaagacaga

SEQ ID NO: 326714 - DNA, 33 bp, Homo sapien
atggtaatcactagtggaaatgatgaagacaga

SEQ ID NO: 326715 - DNA, 33 bp, Homo sapien
agcggtcatgtaccgcaagagttgggaagaaca

SEQ ID NO: 326716 - DNA, 33 bp, Homo sapien
agcggtcatgtaccgcgagagttgggaagaaca

SEQ ID NO: 326717 - DNA, 33 bp, Homo sapien
tcccatctgcttcccacgacagggaggaatcat

SEQ ID NO: 326718 - DNA, 33 bp, Homo sapien
tcccatctgcttcccatgacagggaggaatcat

SEQ ID NO: 326719 - DNA, 33 bp, Homo sapien
cttcctgtggaagtcccattgagtcactgctga

SEQ ID NO: 326720 - DNA, 33 bp, Homo sapien
cttcctgtggaagtcctattgagtcactgctga

SEQ ID NO: 326721 - DNA, 33 bp, Homo sapien
gaggccatgagatccaagtgagctacaagcagt

SEQ ID NO: 326722 - DNA, 33 bp, Homo sapien
gaggccatgagatccaggtgagctacaagcagt

SEQ ID NO: 326723 - DNA, 33 bp, Homo sapien
gacaaaacattaacccaaaggaggtagtgctgt

SEQ ID NO: 326724 - DNA, 33 bp, Homo sapien
gacaaaacattaacccgaaggaggtagtgctgt

SEQ ID NO: 326725 - DNA, 33 bp, Homo sapien
ggaaatttcactaactaaaaagaaaagtgtcaa

SEQ ID NO: 326726 - DNA, 33 bp, Homo sapien
ggaaatttcactaactcaaaagaaaagtgtcaa

SEQ ID NO: 326727 - DNA, 33 bp, Homo sapien
tctctcattgttgcaaccttctttacaaatgca

SEQ ID NO: 326728 - DNA, 33 bp, Homo sapien
tctctcattgttgcaatcttctttacaaatgca

SEQ ID NO: 326729 - DNA, 33 bp, Homo sapien
cagcctggctgccatcaacaatgaattctgcac

SEQ ID NO: 326730 - DNA, 33 bp, Homo sapien
cagcctggctgccatcgacaatgaattctgcac

SEQ ID NO: 326731 - DNA, 33 bp, Homo sapien
catatgcttttaaacaacctgatctctcacaag

SEQ ID NO: 326732 - DNA, 33 bp, Homo sapien
catatgcttttaaacaccctgatctctcacaag

SEQ ID NO: 326733 - DNA, 33 bp, Homo sapien
agctacagatgagagactcaggaagattagtcg

SEQ ID NO: 326734 - DNA, 33 bp, Homo sapien
agctacagatgagagattcaggaagattagtcg

SEQ ID NO: 326735 - DNA, 33 bp, Homo sapien
acatgacaagacagaacgagtgtactaatttag

SEQ ID NO: 326736 - DNA, 33 bp, Homo sapien
acatgacaagacagaaggagtgtactaatttag

SEQ ID NO: 326737 - DNA, 33 bp, Homo sapien
aagggaaagaggtaaacgtattgcctagtcctt

SEQ ID NO: 326738 - DNA, 33 bp, Homo sapien
aagggaaagaggtaaatgtattgcctagtcctt

SEQ ID NO: 326739 - DNA, 33 bp, Homo sapien; identical to SEQ ID NO: 326737

SEQ ID NO: 326740 - DNA, 33 bp, Homo sapien; identical to SEQ ID NO: 326738

SEQ ID NO: 326741 - DNA, 33 bp, Homo sapien
cccggactgtaacaccgggtctaatgccttcat

SEQ ID NO: 326742 - DNA, 33 bp, Homo sapien
cccggactgtaacacctggtctaatgccttcat

SEQ ID NO: 326743 - DNA, 33 bp, Homo sapien
agaaaatctgtactcaaaaccccaatacccaca

SEQ ID NO: 326744 - DNA, 33 bp, Homo sapien
agaaaatctgtactcagaaccccaatacccaca

SEQ ID NO: 326745 - DNA, 33 bp, Homo sapien
tgatgtcccgagtccaatacatgaccccatcat

SEQ ID NO: 326746 - DNA, 33 bp, Homo sapien
tgatgtcccgagtccactacatgaccccatcat

SEQ ID NO: 326747 - DNA, 33 bp, Homo sapien
agaggctggggaaagcagaagaaggagaaggag

SEQ ID NO: 326748 - DNA, 33 bp, Homo sapien
agaggctggggaaagccgaagaaggagaaggag

SEQ ID NO: 326749 - DNA, 33 bp, Homo sapien
tccatgagcctggttccacccatgaggttattt

SEQ ID NO: 326750 - DNA, 33 bp, Homo sapien
tccatgagcctggttctacccatgaggttattt

SEQ ID NO: 326751 - DNA, 33 bp, Homo sapien; identical to SEQ ID NO: 326749

SEQ ID NO: 326752 - DNA, 33 bp, Homo sapien; identical to SEQ ID NO: 326750

SEQ ID NO: 326753 - DNA, 33 bp, Homo sapien
caaaactagagcctaaccatggatgccgaggat

SEQ ID NO: 326754 - DNA, 33 bp, Homo sapien
caaaactagagcctaatcatggatgccgaggat

SEQ ID NO: 326755 - DNA, 33 bp, Homo sapien
cctagcctgtcctgaccaatattctgactatgt

SEQ ID NO: 326756 - DNA, 33 bp, Homo sapien
cctagcctgtcctgactaatattctgactatgt

SEQ ID NO: 326757 - DNA, 33 bp, Homo sapien
ttgctcaacagggaaactgtaaaactgaaatgg

SEQ ID NO: 326758 - DNA, 33 bp, Homo sapien
ttgctcaacagggaaagtgtaaaactgaaatgg

SEQ ID NO: 326759 - DNA, 33 bp, Homo sapien
ggttgcgtcaaggtgaggtccacaggctctacc

SEQ ID NO: 326760 - DNA, 33 bp, Homo sapien
ggttgcgtcaaggtgatgtccacaggctctacc

SEQ ID NO: 326761 - DNA, 33 bp, Homo sapien
tttacaaaatgttttcacagacttgacgcaatt

SEQ ID NO: 326762 - DNA, 33 bp, Homo sapien
tttacaaaatgttttcgcagacttgacgcaatt

SEQ ID NO: 326763 - DNA, 33 bp, Homo sapien
aacagaatgcaacaaaacatgttcaaccaaaca

SEQ ID NO: 326764 - DNA, 33 bp, Homo sapien
aacagaatgcaacaaatcatgttcaaccaaaca

SEQ ID NO: 326765 - DNA, 33 bp, Homo sapien
ctccattagatctgaacgtagtttctcgaggtt

SEQ ID NO: 326766 - DNA, 33 bp, Homo sapien
ctccattagatctgaatgtagtttctcgaggtt

SEQ ID NO: 326767 - DNA, 33 bp, Homo sapien
ccctggccattgctacacttggagaattaaatg

SEQ ID NO: 326768 - DNA, 33 bp, Homo sapien
ccctggccattgctacccttggagaattaaatg

SEQ ID NO: 326769 - DNA, 33 bp, Homo sapien
gtggagaaatgctatgaaaaacacaaaatattg

SEQ ID NO: 326770 - DNA, 33 bp, Homo sapien
gtggagaaatgctatggaaaacacaaaatattg

SEQ ID NO: 326771 - DNA, 33 bp, Homo sapien
gtgacaggatgttccacgagacattgagggagc

SEQ ID NO: 326772 - DNA, 33 bp, Homo sapien
gtgacaggatgttccatgagacattgagggagc

SEQ ID NO: 326773 - DNA, 33 bp, Homo sapien
aaatggctacatttagcccaaaaaaagggatga

SEQ ID NO: 326774 - DNA, 33 bp, Homo sapien
aaatggctacatttagtccaaaaaaagggatga

SEQ ID NO: 326775 - DNA, 33 bp, Homo sapien
tctgagtggccagtgcccttttgtagcattcct

SEQ ID NO: 326776 - DNA, 33 bp, Homo sapien
tctgagtggccagtgctcttttgtagcattcct

SEQ ID NO: 326777 - DNA, 33 bp, Homo sapien
gccaagtgagctgcgacgtgctttatgatgtgt

SEQ ID NO: 326778 - DNA, 33 bp, Homo sapien
gccaagtgagctgcgatgtgctttatgatgtgt

SEQ ID NO: 326779 - DNA, 33 bp, Homo sapien
gagctgtgtgactgtgaactaatccctcaccct

SEQ ID NO: 326780 - DNA, 33 bp, Homo sapien
gagctgtgtgactgtggactaatccctcaccct

SEQ ID NO: 326781 - DNA, 33 bp, Homo sapien
cgaggagttagtcaaactttctgaggataaacc

SEQ ID NO: 326782 - DNA, 33 bp, Homo sapien
cgaggagttagtcaaagtttctgaggataaacc

SEQ ID NO: 326783 - DNA, 33 bp, Homo sapien
ttcctgcctcttaggaaaaagtcctcctgccca

SEQ ID NO: 326784 - DNA, 33 bp, Homo sapien
ttcctgcctcttaggagaaagtcctcctgccca

SEQ ID NO: 326785 - DNA, 33 bp, Homo sapien
ggaggctggctaagaaccttaagaagaaacagc

SEQ ID NO: 326786 - DNA, 33 bp, Homo sapien
ggaggctggctaagaatcttaagaagaaacagc

SEQ ID NO: 326787 - DNA, 33 bp, Homo sapien
actgggtccatagattcaaatgctaacctcatc

SEQ ID NO: 326788 - DNA, 33 bp, Homo sapien
actgggtccatagattgaaatgctaacctcatc

SEQ ID NO: 326789 - DNA, 33 bp, Homo sapien
gatttattatgaggaagtggcttacacaattat

SEQ ID NO: 326790 - DNA, 33 bp, Homo sapien
gatttattatgaggaattggcttacacaattat

SEQ ID NO: 326791 - DNA, 33 bp, Homo sapien
ggtgcctagagtcctacgttctttacctcgttg

SEQ ID NO: 326792 - DNA, 33 bp, Homo sapien
ggtgcctagagtcctatgttctttacctcgttg

SEQ ID NO: 326793 - DNA, 33 bp, Homo sapien
taaataatccatggatcaagagggaagtctcaa

SEQ ID NO: 326794 - DNA, 33 bp, Homo sapien
taaataatccatggatgaagagggaagtctcaa

SEQ ID NO: 326795 - DNA, 33 bp, Homo sapien
actgccaaaacaaagcaatgctctaaaagtttt

SEQ ID NO: 326796 - DNA, 33 bp, Homo sapien
actgccaaaacaaagcgatgctctaaaagtttt

SEQ ID NO: 326797 - DNA, 33 bp, Homo sapien
aggcctgcatcggatgaacagttaccgagcacc

SEQ ID NO: 326798 - DNA, 33 bp, Homo sapien
aggcctgcatcggatgcacagttaccgagcacc

SEQ ID NO: 326799 - DNA, 33 bp, Homo sapien
ggagtctgccctaataaataacaatgtgtgtac

SEQ ID NO: 326800 - DNA, 33 bp, Homo sapien
ggagtctgccctaatagataacaatgtgtgtac

SEQ ID NO: 326801 - DNA, 33 bp, Homo sapien
ccagtggctgggccagaagtgattacacaacca

SEQ ID NO: 326802 - DNA, 33 bp, Homo sapien
ccagtggctgggccaggagtgattacacaacca

SEQ ID NO: 326803 - DNA, 33 bp, Homo sapien
tcgcttacaagtcaggacatctgtgctgcctgc

SEQ ID NO: 326804 - DNA, 33 bp, Homo sapien
tcgcttacaagtcagggcatctgtgctgcctgc

SEQ ID NO: 326805 - DNA, 33 bp, Homo sapien
ttcaagcttcgagggaaaaagggaactgggtga

SEQ ID NO: 326806 - DNA, 33 bp, Homo sapien
ttcaagcttcgagggacaaagggaactgggtga

SEQ ID NO: 326807 - DNA, 33 bp, Homo sapien
agcagtcattgctaagcctgtgtcttccaagta

SEQ ID NO: 326808 - DNA, 33 bp, Homo sapien
agcagtcattgctaagtctgtgtcttccaagta

SEQ ID NO: 326809 - DNA, 33 bp, Homo sapien
caaggactaaatgggacctgaatctctcaagtc

SEQ ID NO: 326810 - DNA, 33 bp, Homo sapien
caaggactaaatgggagctgaatctctcaagtc

SEQ ID NO: 326811 - DNA, 33 bp, Homo sapien
ttctctttttggttccactcattagtctgattt

SEQ ID NO: 326812 - DNA, 33 bp, Homo sapien
ttctctttttggttcccctcattagtctgattt

SEQ ID NO: 326813 - DNA, 33 bp, Homo sapien
aacataatggcatctcaagtcatattcttttgg

SEQ ID NO: 326814 - DNA, 33 bp, Homo sapien
aacataatggcatctcgagtcatattcttttgg

SEQ ID NO: 326815 - DNA, 33 bp, Homo sapien
gattcaggcaagaggacatgtggagaacacata

SEQ ID NO: 326816 - DNA, 33 bp, Homo sapien
gattcaggcaagaggatatgtggagaacacata

SEQ ID NO: 326817 - DNA, 33 bp, Homo sapien
ttcagtctttctaaacaaaagcttcctagtgat

SEQ ID NO: 326818 - DNA, 33 bp, Homo sapien
ttcagtctttctaaaccaaagcttcctagtgat

SEQ ID NO: 326819 - DNA, 33 bp, Homo sapien
gcctaagtgctagacccatgaccaggtgtccct

SEQ ID NO: 326820 - DNA, 33 bp, Homo sapien
gcctaagtgctagacctatgaccaggtgtccct

SEQ ID NO: 326821 - DNA, 33 bp, Homo sapien
gtaggtgcccaagagaaccttattgatcaagtg

SEQ ID NO: 326822 - DNA, 33 bp, Homo sapien
gtaggtgcccaagagagccttattgatcaagtg

SEQ ID NO: 326823 - DNA, 33 bp, Homo sapien
acaagtcttcccacaacagagttttcagaggtc

SEQ ID NO: 326824 - DNA, 33 bp, Homo sapien
acaagtcttcccacaatagagttttcagaggtc

SEQ ID NO: 326825 - DNA, 33 bp, Homo sapien
ttgacttttattctccaaaatggggattttttt

SEQ ID NO: 326826 - DNA, 33 bp, Homo sapien
ttgacttttattctccgaaatggggattttttt

SEQ ID NO: 326827 - DNA, 33 bp, Homo sapien
tgtgttgtactatgtaactggcatatagtaacc

SEQ ID NO: 326828 - DNA, 33 bp, Homo sapien
tgtgttgtactatgtacctggcatatagtaacc

SEQ ID NO: 326829 - DNA, 33 bp, Homo sapien
tttttgataaagtgccaatataatccaatgggg

SEQ ID NO: 326830 - DNA, 33 bp, Homo sapien
tttttgataaagtgccgatataatccaatgggg

SEQ ID NO: 326831 - DNA, 33 bp, Homo sapien
caatgaattgtggaacaatcggatagtgatatg

SEQ ID NO: 326832 - DNA, 33 bp, Homo sapien
caatgaattgtggaacgatcggatagtgatatg

SEQ ID NO: 326833 - DNA, 33 bp, Homo sapien
tcttgaggagtccacgcagatgagaaggcagcc

SEQ ID NO: 326834 - DNA, 33 bp, Homo sapien
tcttgaggagtccacgtagatgagaaggcagcc

SEQ ID NO: 326835 - DNA, 33 bp, Homo sapien
agatttgaaatattacccacacaaagaaatgct

SEQ ID NO: 326836 - DNA, 33 bp, Homo sapien
agatttgaaatattactcacacaaagaaatgct

SEQ ID NO: 326837 - DNA, 33 bp, Homo sapien
gagcttgacacaacacgggtgagacacggggca

SEQ ID NO: 326838 - DNA, 33 bp, Homo sapien
gagcttgacacaacactggtgagacacggggca

SEQ ID NO: 326839 - DNA, 33 bp, Homo sapien
ctgatctgtgaaatggaattttaaagctcaatt

SEQ ID NO: 326840 - DNA, 33 bp, Homo sapien
ctgatctgtgaaatgggattttaaagctcaatt

SEQ ID NO: 326841 - DNA, 33 bp, Homo sapien
atgtctggaggtagagcatctctcttgtgatca

SEQ ID NO: 326842 - DNA, 33 bp, Homo sapien
atgtctggaggtagagtatctctcttgtgatca

SEQ ID NO: 326843 - DNA, 33 bp, Homo sapien
acttgaccacctttaactgcaaggcacctagga

SEQ ID NO: 326844 - DNA, 33 bp, Homo sapien
acttgaccacctttaattgcaaggcacctagga

SEQ ID NO: 326845 - DNA, 33 bp, Homo sapien
cccccaaatcttcttaagtggctaattctttct

SEQ ID NO: 326846 - DNA, 33 bp, Homo sapien
cccccaaatcttcttacgtggctaattctttct

SEQ ID NO: 326847 - DNA, 33 bp, Homo sapien
gatggcacagcgggaaagtcccagcagccaggc

SEQ ID NO: 326848 - DNA, 33 bp, Homo sapien
gatggcacagcgggaacgtcccagcagccaggc

SEQ ID NO: 326849 - DNA, 33 bp, Homo sapien
acacacttgcctagcagactggaagaaaataca

SEQ ID NO: 326850 - DNA, 33 bp, Homo sapien
acacacttgcctagcatactggaagaaaataca

SEQ ID NO: 326851 - DNA, 33 bp, Homo sapien
tggctccccagtgcacaaagtttcattgagact

SEQ ID NO: 326852 - DNA, 33 bp, Homo sapien
tggctccccagtgcacgaagtttcattgagact

SEQ ID NO: 326853 - DNA, 33 bp, Homo sapien
ccgtaagaaaccagccaagtgaggggtcagagg

SEQ ID NO: 326854 - DNA, 33 bp, Homo sapien
ccgtaagaaaccagccgagtgaggggtcagagg

SEQ ID NO: 326855 - DNA, 33 bp, Homo sapien
gaggcatgaggctgaaaagcttagggttccatg

SEQ ID NO: 326856 - DNA, 33 bp, Homo sapien
gaggcatgaggctgaacagcttagggttccatg

SEQ ID NO: 326857 - DNA, 33 bp, Homo sapien
aggagatgcacagaccacctgggtttctattgt

SEQ ID NO: 326858 - DNA, 33 bp, Homo sapien
aggagatgcacagaccgcctgggtttctattgt

SEQ ID NO: 326859 - DNA, 33 bp, Homo sapien
gaatacggagtgcttcaagacaaacaatagaaa

SEQ ID NO: 326860 - DNA, 33 bp, Homo sapien
gaatacggagtgcttcgagacaaacaatagaaa

SEQ ID NO: 326861 - DNA, 33 bp, Homo sapien
gttcgttccagggccacgtttaggaaggtggtg

SEQ ID NO: 326862 - DNA, 33 bp, Homo sapien
gttcgttccagggccatgtttaggaaggtggtg

SEQ ID NO: 326863 - DNA, 33 bp, Homo sapien
tgttagagtggagaaaagtctctgagttgggga

SEQ ID NO: 326864 - DNA, 33 bp, Homo sapien
tgttagagtggagaaaggtctctgagttgggga

SEQ ID NO: 326865 - DNA, 33 bp, Homo sapien
ttattgctatttatcacccggcacataggaggt

SEQ ID NO: 326866 - DNA, 33 bp, Homo sapien
ttattgctatttatcagccggcacataggaggt

SEQ ID NO: 326867 - DNA, 33 bp, Homo sapien
agactcccggaagatacggcccagaccacttgc

SEQ ID NO: 326868 - DNA, 33 bp, Homo sapien
agactcccggaagatatggcccagaccacttgc

SEQ ID NO: 326869 - DNA, 33 bp, Homo sapien
accaggtctgccttacgcttttgaccacaatca

SEQ ID NO: 326870 - DNA, 33 bp, Homo sapien
accaggtctgccttactcttttgaccacaatca

SEQ ID NO: 326871 - DNA, 33 bp, Homo sapien
gaaggaatattgtctaagggtcgtaggcccagg

SEQ ID NO: 326872 - DNA, 33 bp, Homo sapien
gaaggaatattgtctaggggtcgtaggcccagg

SEQ ID NO: 326873 - DNA, 33 bp, Homo sapien
caagaattccaacggcagaagaaagatggaggg

SEQ ID NO: 326874 - DNA, 33 bp, Homo sapien
caagaattccaacggcggaagaaagatggaggg

SEQ ID NO: 326875 - DNA, 33 bp, Homo sapien
caccaacacaaacacaaatgtgcacaaacacac

SEQ ID NO: 326876 - DNA, 33 bp, Homo sapien
caccaacacaaacacacatgtgcacaaacacac

SEQ ID NO: 326877 - DNA, 33 bp, Homo sapien
taggggttcctgcaaaccttttccaggtgttaa

SEQ ID NO: 326878 - DNA, 33 bp, Homo sapien
taggggttcctgcaaatcttttccaggtgttaa

SEQ ID NO: 326879 - DNA, 33 bp, Homo sapien
agttacgtctgcgtaaagatgcctcacatgtac

SEQ ID NO: 326880 - DNA, 33 bp, Homo sapien
agttacgtctgcgtaatgatgcctcacatgtac

SEQ ID NO: 326881 - DNA, 33 bp, Homo sapien
cctgcattactcaagggagtctgcaatccaggg

SEQ ID NO: 326882 - DNA, 33 bp, Homo sapien
cctgcattactcaaggtagtctgcaatccaggg

SEQ ID NO: 326883 - DNA, 33 bp, Homo sapien
gacttcttctcattgcaccagcttgctggagcc

SEQ ID NO: 326884 - DNA, 33 bp, Homo sapien
gacttcttctcattgcgccagcttgctggagcc

SEQ ID NO: 326885 - DNA, 33 bp, Homo sapien
caattcctgacccttacgtagctctgatccttc

SEQ ID NO: 326886 - DNA, 33 bp, Homo sapien
caattcctgacccttatgtagctctgatccttc

SEQ ID NO: 326887 - DNA, 33 bp, Homo sapien
acttagggaggtcaggaagacagtgagcaaatc

SEQ ID NO: 326888 - DNA, 33 bp, Homo sapien
acttagggaggtcagggagacagtgagcaaatc

SEQ ID NO: 326889 - DNA, 33 bp, Homo sapien
acccttactctgggctaaaactatcattcaatt

SEQ ID NO: 326890 - DNA, 33 bp, Homo sapien
acccttactctgggctgaaactatcattcaatt

SEQ ID NO: 326891 - DNA, 33 bp, Homo sapien
attcaggcctccgacaagttggatgccacccac

SEQ ID NO: 326892 - DNA, 33 bp, Homo sapien
attcaggcctccgacaggttggatgccacccac

SEQ ID NO: 326893 - DNA, 33 bp, Homo sapien
catgaactgactctcccgaggttacacagccaa

SEQ ID NO: 326894 - DNA, 33 bp, Homo sapien
catgaactgactctcctgaggttacacagccaa

SEQ ID NO: 326895 - DNA, 33 bp, Homo sapien
attttctaattggccaactggagatgacaatgg

SEQ ID NO: 326896 - DNA, 33 bp, Homo sapien
attttctaattggccagctggagatgacaatgg

SEQ ID NO: 326897 - DNA, 33 bp, Homo sapien
tcagtgtgttaaaggacggatatagtgagagaa

SEQ ID NO: 326898 - DNA, 33 bp, Homo sapien
tcagtgtgttaaaggatggatatagtgagagaa

SEQ ID NO: 326899 - DNA, 33 bp, Homo sapien
gagatcactttcactacaatatggatgatggct

SEQ ID NO: 326900 - DNA, 33 bp, Homo sapien
gagatcactttcactagaatatggatgatggct

SEQ ID NO: 326901 - DNA, 33 bp, Homo sapien
ctagaaaatggttcctcagcagcttgtcttttg

SEQ ID NO: 326902 - DNA, 33 bp, Homo sapien
ctagaaaatggttcctgagcagcttgtcttttg

SEQ ID NO: 326903 - DNA, 33 bp, Homo sapien
aggatgcaaatttcaaatatctgttatcccttg

SEQ ID NO: 326904 - DNA, 33 bp, Homo sapien
aggatgcaaatttcaactatctgttatcccttg

SEQ ID NO: 326905 - DNA, 33 bp, Homo sapien
atgtgtagttcaccaacaagctttctccaaggg

SEQ ID NO: 326906 - DNA, 33 bp, Homo sapien
atgtgtagttcaccaataagctttctccaaggg

SEQ ID NO: 326907 - DNA, 33 bp, Homo sapien
tgctggttgccactaccaggagagggaggctgc

SEQ ID NO: 326908 - DNA, 33 bp, Homo sapien
tgctggttgccactactaggagagggaggctgc

SEQ ID NO: 326909 - DNA, 33 bp, Homo sapien
aaaatatgtttacttcactgtttcacttgtatt

SEQ ID NO: 326910 - DNA, 33 bp, Homo sapien
aaaatatgtttacttcgctgtttcacttgtatt

SEQ ID NO: 326911 - DNA, 33 bp, Homo sapien
tggtatgtccagctgacgcatttgcagatacaa

SEQ ID NO: 326912 - DNA, 33 bp, Homo sapien
tggtatgtccagctgatgcatttgcagatacaa

SEQ ID NO: 326913 - DNA, 33 bp, Homo sapien
attaactcagattttcaatgtgtaaagagctgt

SEQ ID NO: 326914 - DNA, 33 bp, Homo sapien
attaactcagattttcgatgtgtaaagagctgt

SEQ ID NO: 326915 - DNA, 33 bp, Homo sapien
tgcccaccactgaacaatgccttttagataact

SEQ ID NO: 326916 - DNA, 33 bp, Homo sapien
tgcccaccactgaacattgccttttagataact

SEQ ID NO: 326917 - DNA, 33 bp, Homo sapien
tacctacattttccacacactagtgtcacaaca

SEQ ID NO: 326918 - DNA, 33 bp, Homo sapien
tacctacattttccacgcactagtgtcacaaca

SEQ ID NO: 326919 - DNA, 33 bp, Homo sapien
ggtaaactaaaatttcacattgggaagacagaa

SEQ ID NO: 326920 - DNA, 33 bp, Homo sapien
ggtaaactaaaatttcgcattgggaagacagaa

SEQ ID NO: 326921 - DNA, 33 bp, Homo sapien
tgctgccttcctcctacggtgattgttagaatt

SEQ ID NO: 326922 - DNA, 33 bp, Homo sapien
tgctgccttcctcctatggtgattgttagaatt

SEQ ID NO: 326923 - DNA, 33 bp, Homo sapien
gtcttccaaactctgtcaagctcttgagatgaa

SEQ ID NO: 326924 - DNA, 33 bp, Homo sapien
gtcttccaaactctgttaagctcttgagatgaa

SEQ ID NO: 326925 - DNA, 33 bp, Homo sapien
tagacagcgatcacacagcatttgtttctatca

SEQ ID NO: 326926 - DNA, 33 bp, Homo sapien
tagacagcgatcacacggcatttgtttctatca

SEQ ID NO: 326927 - DNA, 33 bp, Homo sapien
aaaaaaagaaagaaaactgggcttgctaagttt

SEQ ID NO: 326928 - DNA, 33 bp, Homo sapien
aaaaaaagaaagaaaattgggcttgctaagttt

SEQ ID NO: 326929 - DNA, 33 bp, Homo sapien
attacaaattcaattacctcctcatctgttaag

SEQ ID NO: 326930 - DNA, 33 bp, Homo sapien
attacaaattcaattatctcctcatctgttaag

SEQ ID NO: 326931 - DNA, 33 bp, Homo sapien
gataataggagttttcaaagtgatctctttagt

SEQ ID NO: 326932 - DNA, 33 bp, Homo sapien
gataataggagttttcgaagtgatctctttagt

SEQ ID NO: 326933 - DNA, 33 bp, Homo sapien
gacgccactacagaaacgtggacagaagatggt

SEQ ID NO: 326934 - DNA, 33 bp, Homo sapien
gacgccactacagaaatgtggacagaagatggt

SEQ ID NO: 326935 - DNA, 33 bp, Homo sapien
gggcagtacttgggataataattctgtcattgc

SEQ ID NO: 326936 - DNA, 33 bp, Homo sapien
gggcagtacttgggattataattctgtcattgc

SEQ ID NO: 326937 - DNA, 33 bp, Homo sapien
ttgttcttgtgattcaaaatgaacctgtttttt

SEQ ID NO: 326938 - DNA, 33 bp, Homo sapien
ttgttcttgtgattcataatgaacctgtttttt

SEQ ID NO: 326939 - DNA, 33 bp, Homo sapien
gagacaagtaattaaactgtgatgattatatac

SEQ ID NO: 326940 - DNA, 33 bp, Homo sapien
gagacaagtaattaaagtgtgatgattatatac

SEQ ID NO: 326941 - DNA, 33 bp, Homo sapien
tttgcaataccaggtcaatgtgtgaagttaatg

SEQ ID NO: 326942 - DNA, 33 bp, Homo sapien
tttgcaataccaggtcgatgtgtgaagttaatg

SEQ ID NO: 326943 - DNA, 33 bp, Homo sapien
gtacagaatgttgatacaaagcttaaaattctt

SEQ ID NO: 326944 - DNA, 33 bp, Homo sapien
gtacagaatgttgatataaagcttaaaattctt

SEQ ID NO: 326945 - DNA, 33 bp, Homo sapien
atgcttaactgggcaacgaagtctaacttcagg

SEQ ID NO: 326946 - DNA, 33 bp, Homo sapien
atgcttaactgggcaatgaagtctaacttcagg

SEQ ID NO: 326947 - DNA, 33 bp, Homo sapien
attttctgaagtggtcgccaaaggtgaaattat

SEQ ID NO: 326948 - DNA, 33 bp, Homo sapien
attttctgaagtggtctccaaaggtgaaattat

SEQ ID NO: 326949 - DNA, 33 bp, Homo sapien
taattaacttgtttccagatactgcactcctct

SEQ ID NO: 326950 - DNA, 33 bp, Homo sapien
taattaacttgtttccggatactgcactcctct

SEQ ID NO: 326951 - DNA, 33 bp, Homo sapien
catagatacaaagagaacaaagtgtgtttatga

SEQ ID NO: 326952 - DNA, 33 bp, Homo sapien
catagatacaaagagagcaaagtgtgtttatga

SEQ ID NO: 326953 - DNA, 33 bp, Homo sapien
aatccatcctccatagcaccacctcagccattt

SEQ ID NO: 326954 - DNA, 33 bp, Homo sapien
aatccatcctccatagtaccacctcagccattt

SEQ ID NO: 326955 - DNA, 33 bp, Homo sapien
aaacaatccatagatacgagacatgaagctaga

SEQ ID NO: 326956 - DNA, 33 bp, Homo sapien
aaacaatccatagataggagacatgaagctaga

SEQ ID NO: 326957 - DNA, 33 bp, Homo sapien
aaaagtcaccctaagccaccatctcagtgctca

SEQ ID NO: 326958 - DNA, 33 bp, Homo sapien
aaaagtcaccctaagctaccatctcagtgctca

SEQ ID NO: 326959 - DNA, 33 bp, Homo sapien
atcaaagtagtaatcacgtttcttctacctccc

SEQ ID NO: 326960 - DNA, 33 bp, Homo sapien
atcaaagtagtaatcaggtttcttctacctccc

SEQ ID NO: 326961 - DNA, 33 bp, Homo sapien
agcctcctgagtagtacctgagattacaggtgt

SEQ ID NO: 326962 - DNA, 33 bp, Homo sapien
agcctcctgagtagtatctgagattacaggtgt

SEQ ID NO: 326963 - DNA, 33 bp, Homo sapien
gctagtcagagattcaaactaggtaggacgcag

SEQ ID NO: 326964 - DNA, 33 bp, Homo sapien
gctagtcagagattcagactaggtaggacgcag

SEQ ID NO: 326965 - DNA, 33 bp, Homo sapien
tctggttattgtagtaccgccttcggactcatc

SEQ ID NO: 326966 - DNA, 33 bp, Homo sapien
tctggttattgtagtatcgccttcggactcatc

SEQ ID NO: 326967 - DNA, 33 bp, Homo sapien
gaatgggatgaagttaagagagggaaactaggt

SEQ ID NO: 326968 - DNA, 33 bp, Homo sapien
gaatgggatgaagttaggagagggaaactaggt

SEQ ID NO: 326969 - DNA, 33 bp, Homo sapien
tagggacccgaattccagcacaacagaaataag

SEQ ID NO: 326970 - DNA, 33 bp, Homo sapien
tagggacccgaattccggcacaacagaaataag

SEQ ID NO: 326971 - DNA, 33 bp, Homo sapien
tcttcaatcaatttttaaaaaagtttcactgca

SEQ ID NO: 326972 - DNA, 33 bp, Homo sapien
tcttcaatcaattttttaaaaagtttcactgca

SEQ ID NO: 326973 - DNA, 33 bp, Homo sapien
tgaagagaaactacagcactaaagcactacaga

SEQ ID NO: 326974 - DNA, 33 bp, Homo sapien
tgaagagaaactacaggactaaagcactacaga

SEQ ID NO: 326975 - DNA, 33 bp, Homo sapien
tctagccaaaaccttacgccaaaaactgcttct

SEQ ID NO: 326976 - DNA, 33 bp, Homo sapien
tctagccaaaaccttatgccaaaaactgcttct

SEQ ID NO: 326977 - DNA, 33 bp, Homo sapien
gcttttcttcaaaccaatatcacaaatggatgc

SEQ ID NO: 326978 - DNA, 33 bp, Homo sapien
gcttttcttcaaaccagtatcacaaatggatgc

SEQ ID NO: 326979 - DNA, 33 bp, Homo sapien
agctgaaaatttccccagctcagttctgtttcc

SEQ ID NO: 326980 - DNA, 33 bp, Homo sapien
agctgaaaatttccccggctcagttctgtttcc

SEQ ID NO: 326981 - DNA, 33 bp, Homo sapien
gttcttccagcaacacaggtgtgcttcagctta

SEQ ID NO: 326982 - DNA, 33 bp, Homo sapien
gttcttccagcaacacgggtgtgcttcagctta

SEQ ID NO: 326983 - DNA, 33 bp, Homo sapien
agtgtgaacttacaccactgatatgtctagaaa

SEQ ID NO: 326984 - DNA, 33 bp, Homo sapien
agtgtgaacttacaccgctgatatgtctagaaa

SEQ ID NO: 326985 - DNA, 33 bp, Homo sapien
tatggaaacaacattcaacagcagtgttttcta

SEQ ID NO: 326986 - DNA, 33 bp, Homo sapien
tatggaaacaacattccacagcagtgttttcta

SEQ ID NO: 326987 - DNA, 33 bp, Homo sapien
attcgagcaggcaggaccaatgtgagaggctct

SEQ ID NO: 326988 - DNA, 33 bp, Homo sapien
attcgagcaggcaggatcaatgtgagaggctct

SEQ ID NO: 326989 - DNA, 33 bp, Homo sapien
cttcagcctggacccaactgcgaagaagccaca

SEQ ID NO: 326990 - DNA, 33 bp, Homo sapien
cttcagcctggacccagctgcgaagaagccaca

SEQ ID NO: 326991 - DNA, 33 bp, Homo sapien
tctcagtgatagggcccaagcaagagtatattt

SEQ ID NO: 326992 - DNA, 33 bp, Homo sapien
tctcagtgatagggcctaagcaagagtatattt

SEQ ID NO: 326993 - DNA, 33 bp, Homo sapien
gtgtgcccctgtgtaaatgggcttcggtgtgtg

SEQ ID NO: 326994 - DNA, 33 bp, Homo sapien
gtgtgcccctgtgtaagtgggcttcggtgtgtg

SEQ ID NO: 326995 - DNA, 33 bp, Homo sapien
cctttagcgagtgagcaattttaaggctaatgg

SEQ ID NO: 326996 - DNA, 33 bp, Homo sapien
cctttagcgagtgagccattttaaggctaatgg

SEQ ID NO: 326997 - DNA, 33 bp, Homo sapien
tccgtcatctgtggatcagtaaataagcatccg

SEQ ID NO: 326998 - DNA, 33 bp, Homo sapien
tccgtcatctgtggattagtaaataagcatccg

SEQ ID NO: 326999 - DNA, 33 bp, Homo sapien
acgagtatctctccaagcgtgctgaaagtcgct

SEQ ID NO: 327000 - DNA, 33 bp, Homo sapien
acgagtatctctccaatcgtgctgaaagtcgct

SEQ ID NO: 327001 - DNA, 33 bp, Homo sapien
ggctggcacggtgctgaaaagaggcccaaagac

SEQ ID NO: 327002 - DNA, 33 bp, Homo sapien
ggctggcacggtgctgcaaagaggcccaaagac

SEQ ID NO: 327003 - DNA, 33 bp, Homo sapien
gctgagcatgttgagaagagatggtgtggtcaa

SEQ ID NO: 327004 - DNA, 33 bp, Homo sapien
gctgagcatgttgagaggagatggtgtggtcaa

SEQ ID NO: 327005 - DNA, 33 bp, Homo sapien
cccagttagacaaggacgcagcccagagccgtg

SEQ ID NO: 327006 - DNA, 33 bp, Homo sapien
cccagttagacaaggatgcagcccagagccgtg

SEQ ID NO: 327007 - DNA, 33 bp, Homo sapien
ctctaccccttagacccatagatctgaaagaga

SEQ ID NO: 327008 - DNA, 33 bp, Homo sapien
ctctaccccttagacctatagatctgaaagaga

SEQ ID NO: 327009 - DNA, 33 bp, Homo sapien
gaaaggtgatggctcacggggcaagatgtcacc

SEQ ID NO: 327010 - DNA, 33 bp, Homo sapien
gaaaggtgatggctcatggggcaagatgtcacc

SEQ ID NO: 327011 - DNA, 33 bp, Homo sapien
gtggagggaccccagaagtattgcagtctgacc

SEQ ID NO: 327012 - DNA, 33 bp, Homo sapien
gtggagggaccccagaggtattgcagtctgacc

SEQ ID NO: 327013 - DNA, 33 bp, Homo sapien
tgcttgcctagcataacatttctcgtaggcctg

SEQ ID NO: 327014 - DNA, 33 bp, Homo sapien
tgcttgcctagcataatatttctcgtaggcctg

SEQ ID NO: 327015 - DNA, 33 bp, Homo sapien
tcagaacatataggaacaagtaggtcctggagg

SEQ ID NO: 327016 - DNA, 33 bp, Homo sapien
tcagaacatataggaagaagtaggtcctggagg

SEQ ID NO: 327017 - DNA, 33 bp, Homo sapien
catgaccttcatgagacgagagaacctgcttta

SEQ ID NO: 327018 - DNA, 33 bp, Homo sapien
catgaccttcatgagatgagagaacctgcttta

SEQ ID NO: 327019 - DNA, 33 bp, Homo sapien
caggaggtgaaatcccaggagtgtactcacatt

SEQ ID NO: 327020 - DNA, 33 bp, Homo sapien
caggaggtgaaatcccgggagtgtactcacatt

SEQ ID NO: 327021 - DNA, 33 bp, Homo sapien
agtgattctgataaagcctagttcagatggcgg

SEQ ID NO: 327022 - DNA, 33 bp, Homo sapien
agtgattctgataaagtctagttcagatggcgg

SEQ ID NO: 327023 - DNA, 33 bp, Homo sapien
gatggcaagatttgggaactgccttgaatctca

SEQ ID NO: 327024 - DNA, 33 bp, Homo sapien
gatggcaagatttgggcactgccttgaatctca

SEQ ID NO: 327025 - DNA, 33 bp, Homo sapien
ctttcggtaaagaaaccatgcatttgtctggtg

SEQ ID NO: 327026 - DNA, 33 bp, Homo sapien
ctttcggtaaagaaactatgcatttgtctggtg

SEQ ID NO: 327027 - DNA, 33 bp, Homo sapien
tttgaggccttagccacgaaatcttgtctagac

SEQ ID NO: 327028 - DNA, 33 bp, Homo sapien
tttgaggccttagccatgaaatcttgtctagac

SEQ ID NO: 327029 - DNA, 33 bp, Homo sapien
ttataggttctgcaacagatgtttttttgtttt

SEQ ID NO: 327030 - DNA, 33 bp, Homo sapien
ttataggttctgcaacggatgtttttttgtttt

SEQ ID NO: 327031 - DNA, 33 bp, Homo sapien
gggtttgtcttgaaaacacttaacaatcaggag

SEQ ID NO: 327032 - DNA, 33 bp, Homo sapien
gggtttgtcttgaaaatacttaacaatcaggag

SEQ ID NO: 327033 - DNA, 33 bp, Homo sapien
tgctcagcagtcatgaaaatctggtgctctcag

SEQ ID NO: 327034 - DNA, 33 bp, Homo sapien
tgctcagcagtcatgacaatctggtgctctcag

SEQ ID NO: 327035 - DNA, 33 bp, Homo sapien
ttcattataaatcataaccagggcgccaaaaac

SEQ ID NO: 327036 - DNA, 33 bp, Homo sapien
ttcattataaatcatatccagggcgccaaaaac

SEQ ID NO: 327037 - DNA, 33 bp, Homo sapien
tttgcttatgactccaagtgtgggctatttgga

SEQ ID NO: 327038 - DNA, 33 bp, Homo sapien
tttgcttatgactccaggtgtgggctatttgga

SEQ ID NO: 327039 - DNA, 33 bp, Homo sapien
ccctgcacttcctcaaaagctgcccagatctcc

SEQ ID NO: 327040 - DNA, 33 bp, Homo sapien
ccctgcacttcctcaagagctgcccagatctcc

SEQ ID NO: 327041 - DNA, 33 bp, Homo sapien
ttgggccaactaaaggcagacaagaaacaatac

SEQ ID NO: 327042 - DNA, 33 bp, Homo sapien
ttgggccaactaaaggtagacaagaaacaatac

SEQ ID NO: 327043 - DNA, 33 bp, Homo sapien
gggaaagccggaaaaaatctccactttcagctt

SEQ ID NO: 327044 - DNA, 33 bp, Homo sapien
gggaaagccggaaaaattctccactttcagctt

SEQ ID NO: 327045 - DNA, 33 bp, Homo sapien
tccttctgtataacgaagcaggcaaaaggaaaa

SEQ ID NO: 327046 - DNA, 33 bp, Homo sapien
tccttctgtataacgatgcaggcaaaaggaaaa

SEQ ID NO: 327047 - DNA, 33 bp, Homo sapien
aaatctctgcaagacccgaaggacataataggg

SEQ ID NO: 327048 - DNA, 33 bp, Homo sapien
aaatctctgcaagacctgaaggacataataggg

SEQ ID NO: 327049 - DNA, 33 bp, Homo sapien
gtgaggaattggggccaatcatttaatctgcct

SEQ ID NO: 327050 - DNA, 33 bp, Homo sapien
gtgaggaattggggccgatcatttaatctgcct

SEQ ID NO: 327051 - DNA, 33 bp, Homo sapien
tttttcctttggcaaacaggactgaaatcccat

SEQ ID NO: 327052 - DNA, 33 bp, Homo sapien
tttttcctttggcaaataggactgaaatcccat

SEQ ID NO: 327053 - DNA, 33 bp, Homo sapien
ctcaagataatactcccatccccagcaggctgt

SEQ ID NO: 327054 - DNA, 33 bp, Homo sapien
ctcaagataatactcctatccccagcaggctgt

SEQ ID NO: 327055 - DNA, 33 bp, Homo sapien
ctcagccaatgacctacggcatgaatacattac

SEQ ID NO: 327056 - DNA, 33 bp, Homo sapien
ctcagccaatgacctatggcatgaatacattac

SEQ ID NO: 327057 - DNA, 33 bp, Homo sapien
ctctcttgacctcagagaaagtagttctgatac

SEQ ID NO: 327058 - DNA, 33 bp, Homo sapien
ctctcttgacctcagataaagtagttctgatac

SEQ ID NO: 327059 - DNA, 33 bp, Homo sapien
gcttgtaaccatggagaacccttcaaccagtga

SEQ ID NO: 327060 - DNA, 33 bp, Homo sapien
gcttgtaaccatggaggacccttcaaccagtga

SEQ ID NO: 327061 - DNA, 33 bp, Homo sapien
gacaaatgctccccggcccccacttccttgttc

SEQ ID NO: 327062 - DNA, 33 bp, Homo sapien
gacaaatgctccccggtccccacttccttgttc

SEQ ID NO: 327063 - DNA, 33 bp, Homo sapien
aaatggtggcattgggaaccctcagggaaccct

SEQ ID NO: 327064 - DNA, 33 bp, Homo sapien
aaatggtggcattggggaccctcagggaaccct

SEQ ID NO: 327065 - DNA, 33 bp, Homo sapien
ttaaaagtccaagccacgaggtttgtaaattaa

SEQ ID NO: 327066 - DNA, 33 bp, Homo sapien
ttaaaagtccaagccatgaggtttgtaaattaa

SEQ ID NO: 327067 - DNA, 33 bp, Homo sapien
cttgcctagatagaaccgtaattatctccccag

SEQ ID NO: 327068 - DNA, 33 bp, Homo sapien
cttgcctagatagaactgtaattatctccccag

SEQ ID NO: 327069 - DNA, 33 bp, Homo sapien
acagcatccacttgcactgagtccagcttggta

SEQ ID NO: 327070 - DNA, 33 bp, Homo sapien
acagcatccacttgcattgagtccagcttggta

SEQ ID NO: 327071 - DNA, 33 bp, Homo sapien
gctaaataattaaaaaatgtcttgctgccactc

SEQ ID NO: 327072 - DNA, 33 bp, Homo sapien
gctaaataattaaaaattgtcttgctgccactc

SEQ ID NO: 327073 - DNA, 33 bp, Homo sapien
ttttgttctgtcataacgatagccactgcttag

SEQ ID NO: 327074 - DNA, 33 bp, Homo sapien
ttttgttctgtcataatgatagccactgcttag

SEQ ID NO: 327075 - DNA, 33 bp, Homo sapien
ccctgcccattgaaccaactacaaatcgacgta

SEQ ID NO: 327076 - DNA, 33 bp, Homo sapien
ccctgcccattgaaccgactacaaatcgacgta

SEQ ID NO: 327077 - DNA, 33 bp, Homo sapien
gtttttgtcaccttagaagatcagggcagtcca

SEQ ID NO: 327078 - DNA, 33 bp, Homo sapien
gtttttgtcaccttaggagatcagggcagtcca

SEQ ID NO: 327079 - DNA, 33 bp, Homo sapien
cgagtctctcagccaaacaggaatggcgcccac

SEQ ID NO: 327080 - DNA, 33 bp, Homo sapien
cgagtctctcagccaagcaggaatggcgcccac

SEQ ID NO: 327081 - DNA, 33 bp, Homo sapien
agttttcactaacctacagccaagtgagaacaa

SEQ ID NO: 327082 - DNA, 33 bp, Homo sapien
agttttcactaacctatagccaagtgagaacaa

SEQ ID NO: 327083 - DNA, 33 bp, Homo sapien
aacatggatgggtagacgggcaaatacatatag

SEQ ID NO: 327084 - DNA, 33 bp, Homo sapien
aacatggatgggtagatgggcaaatacatatag

SEQ ID NO: 327085 - DNA, 33 bp, Homo sapien
ggggctccggtaagtcccttaagcaagtctgag

SEQ ID NO: 327086 - DNA, 33 bp, Homo sapien
ggggctccggtaagtctcttaagcaagtctgag

SEQ ID NO: 327087 - DNA, 33 bp, Homo sapien
aataaatggtttgaaacagcttctggcagtatt

SEQ ID NO: 327088 - DNA, 33 bp, Homo sapien
aataaatggtttgaaatagcttctggcagtatt

SEQ ID NO: 327089 - DNA, 33 bp, Homo sapien
gtgttttggaaggccacgttggctggtgctgtg

SEQ ID NO: 327090 - DNA, 33 bp, Homo sapien
gtgttttggaaggccatgttggctggtgctgtg

SEQ ID NO: 327091 - DNA, 33 bp, Homo sapien
tgcctatggcttagacccatcaaattttcatta

SEQ ID NO: 327092 - DNA, 33 bp, Homo sapien
tgcctatggcttagactcatcaaattttcatta

SEQ ID NO: 327093 - DNA, 33 bp, Homo sapien
ggcactcagtaaataagtcctgaatggatgaat

SEQ ID NO: 327094 - DNA, 33 bp, Homo sapien
ggcactcagtaaataattcctgaatggatgaat

SEQ ID NO: 327095 - DNA, 33 bp, Homo sapien
accctagctacaggccaaattcccaacactgtt

SEQ ID NO: 327096 - DNA, 33 bp, Homo sapien
accctagctacaggccgaattcccaacactgtt

SEQ ID NO: 327097 - DNA, 33 bp, Homo sapien
aacactgttttgtttcactgtcatagcactttc

SEQ ID NO: 327098 - DNA, 33 bp, Homo sapien
aacactgttttgtttcgctgtcatagcactttc

SEQ ID NO: 327099 - DNA, 33 bp, Homo sapien
ctgggccccatgtagacacttccagctggaatt

SEQ ID NO: 327100 - DNA, 33 bp, Homo sapien
ctgggccccatgtagagacttccagctggaatt

SEQ ID NO: 327101 - DNA, 33 bp, Homo sapien
ccaaaagtagcttctcaatgactcatgtcttcc

SEQ ID NO: 327102 - DNA, 33 bp, Homo sapien
ccaaaagtagcttctcgatgactcatgtcttcc

SEQ ID NO: 327103 - DNA, 33 bp, Homo sapien
tggaatctcaagaaccaagttgctttcatcgtg

SEQ ID NO: 327104 - DNA, 33 bp, Homo sapien
tggaatctcaagaaccgagttgctttcatcgtg

SEQ ID NO: 327105 - DNA, 33 bp, Homo sapien
aatgaatgaatacatccaaggaggcattatcac

SEQ ID NO: 327106 - DNA, 33 bp, Homo sapien
aatgaatgaatacatcgaaggaggcattatcac

SEQ ID NO: 327107 - DNA, 33 bp, Homo sapien
ttctctctgcacatttcactttttagaatcgta

SEQ ID NO: 327108 - DNA, 33 bp, Homo sapien
ttctctctgcacattttactttttagaatcgta

SEQ ID NO: 327109 - DNA, 33 bp, Homo sapien
ttgcgaaacaaatcaacctcgtattagtttccc

SEQ ID NO: 327110 - DNA, 33 bp, Homo sapien
ttgcgaaacaaatcaatctcgtattagtttccc

SEQ ID NO: 327111 - DNA, 33 bp, Homo sapien
gagactctgtagctataaaacagtaacttctgt

SEQ ID NO: 327112 - DNA, 33 bp, Homo sapien
gagactctgtagctatcaaacagtaacttctgt

SEQ ID NO: 327113 - DNA, 33 bp, Homo sapien
ccaagctattctttggccacaccattgactgtt

SEQ ID NO: 327114 - DNA, 33 bp, Homo sapien
ccaagctattctttggtcacaccattgactgtt

SEQ ID NO: 327115 - DNA, 33 bp, Homo sapien
accttttcccaagcacaatttcacagcactgat

SEQ ID NO: 327116 - DNA, 33 bp, Homo sapien
accttttcccaagcaccatttcacagcactgat

SEQ ID NO: 327117 - DNA, 33 bp, Homo sapien
gctctttcaacattcaccacaattgaccattct

SEQ ID NO: 327118 - DNA, 33 bp, Homo sapien
gctctttcaacattcagcacaattgaccattct

SEQ ID NO: 327119 - DNA, 33 bp, Homo sapien
ccaaagcatacatttccgaaactctgaaaatct

SEQ ID NO: 327120 - DNA, 33 bp, Homo sapien
ccaaagcatacatttctgaaactctgaaaatct

SEQ ID NO: 327121 - DNA, 33 bp, Homo sapien
catacatgttcatatccagtcgccagcttgcaa

SEQ ID NO: 327122 - DNA, 33 bp, Homo sapien
catacatgttcatatctagtcgccagcttgcaa

SEQ ID NO: 327123 - DNA, 33 bp, Homo sapien
ggcatctaacacttgacggagtcttagatttgc

SEQ ID NO: 327124 - DNA, 33 bp, Homo sapien
ggcatctaacacttgatggagtcttagatttgc

SEQ ID NO: 327125 - DNA, 33 bp, Homo sapien
cctactggtttgtaggaaaaggagcagagttca

SEQ ID NO: 327126 - DNA, 33 bp, Homo sapien
cctactggtttgtagggaaaggagcagagttca

SEQ ID NO: 327127 - DNA, 33 bp, Homo sapien
gccttgcccccttacaatctattcttgatgcgt

SEQ ID NO: 327128 - DNA, 33 bp, Homo sapien
gccttgcccccttacagtctattcttgatgcgt

SEQ ID NO: 327129 - DNA, 33 bp, Homo sapien
gtgcccgatctcgtctaaatatcagtcttgttc

SEQ ID NO: 327130 - DNA, 33 bp, Homo sapien
gtgcccgatctcgtctgaatatcagtcttgttc

SEQ ID NO: 327131 - DNA, 33 bp, Homo sapien
atacaggatggcataactccacatatcctgtag

SEQ ID NO: 327132 - DNA, 33 bp, Homo sapien
atacaggatggcataagtccacatatcctgtag

SEQ ID NO: 327133 - DNA, 33 bp, Homo sapien
ttaattcaccatgtaaaccatttcccaaatgcc

SEQ ID NO: 327134 - DNA, 33 bp, Homo sapien
ttaattcaccatgtaagccatttcccaaatgcc

SEQ ID NO: 327135 - DNA, 33 bp, Homo sapien
tcacacatagggaaacaagagagacagaaagtt

SEQ ID NO: 327136 - DNA, 33 bp, Homo sapien
tcacacatagggaaacgagagagacagaaagtt

SEQ ID NO: 327137 - DNA, 33 bp, Homo sapien
catcattctcaagcaaaataccaccactgacaa

SEQ ID NO: 327138 - DNA, 33 bp, Homo sapien
catcattctcaagcaacataccaccactgacaa

SEQ ID NO: 327139 - DNA, 33 bp, Homo sapien
cgtattacagaacaaactgggctacattagagt

SEQ ID NO: 327140 - DNA, 33 bp, Homo sapien
cgtattacagaacaaattgggctacattagagt

SEQ ID NO: 327141 - DNA, 33 bp, Homo sapien
ttattacattccctaaaagtggctgaaaataga

SEQ ID NO: 327142 - DNA, 33 bp, Homo sapien
ttattacattccctaacagtggctgaaaataga

SEQ ID NO: 327143 - DNA, 33 bp, Homo sapien
aatgcttaccatttccactgtactcaggatgca

SEQ ID NO: 327144 - DNA, 33 bp, Homo sapien
aatgcttaccatttccgctgtactcaggatgca

SEQ ID NO: 327145 - DNA, 33 bp, Homo sapien
aaaccactgcagatgaacttcaaaaaaccgtct

SEQ ID NO: 327146 - DNA, 33 bp, Homo sapien
aaaccactgcagatgatcttcaaaaaaccgtct

SEQ ID NO: 327147 - DNA, 33 bp, Homo sapien
gtgtgctcacatggcacgcggcaaatatgttgt

SEQ ID NO: 327148 - DNA, 33 bp, Homo sapien
gtgtgctcacatggcatgcggcaaatatgttgt

SEQ ID NO: 327149 - DNA, 33 bp, Homo sapien
gcccctcctcttgataacgccacaatggggatt

SEQ ID NO: 327150 - DNA, 33 bp, Homo sapien
gcccctcctcttgataccgccacaatggggatt

SEQ ID NO: 327151 - DNA, 33 bp, Homo sapien
ccttttctggcctgaaactttgataggtacatg

SEQ ID NO: 327152 - DNA, 33 bp, Homo sapien
ccttttctggcctgaacctttgataggtacatg

SEQ ID NO: 327153 - DNA, 33 bp, Homo sapien
acttgtaaccacagccaaagactattttgcttt

SEQ ID NO: 327154 - DNA, 33 bp, Homo sapien
acttgtaaccacagccgaagactattttgcttt

SEQ ID NO: 327155 - DNA, 33 bp, Homo sapien
gctcccttgaaactaaaggtggtcatgtgtgct

SEQ ID NO: 327156 - DNA, 33 bp, Homo sapien
gctcccttgaaactaagggtggtcatgtgtgct

SEQ ID NO: 327157 - DNA, 33 bp, Homo sapien
cccaggcacttgaggacgtaatgagccgctgag

SEQ ID NO: 327158 - DNA, 33 bp, Homo sapien
cccaggcacttgaggatgtaatgagccgctgag

SEQ ID NO: 327159 - DNA, 33 bp, Homo sapien
agaattacctggtaaacgtccctgttaaggctt

SEQ ID NO: 327160 - DNA, 33 bp, Homo sapien
agaattacctggtaaatgtccctgttaaggctt

SEQ ID NO: 327161 - DNA, 33 bp, Homo sapien
tgcgactgcacccatacggcaagtgcccattta

SEQ ID NO: 327162 - DNA, 33 bp, Homo sapien
tgcgactgcacccatatggcaagtgcccattta

SEQ ID NO: 327163 - DNA, 33 bp, Homo sapien
tagctttctggggccaccataaccaatcaccac

SEQ ID NO: 327164 - DNA, 33 bp, Homo sapien
tagctttctggggccatcataaccaatcaccac

SEQ ID NO: 327165 - DNA, 33 bp, Homo sapien
gcccagcctggttaccaatttcagttgtgttac

SEQ ID NO: 327166 - DNA, 33 bp, Homo sapien
gcccagcctggttaccgatttcagttgtgttac

SEQ ID NO: 327167 - DNA, 33 bp, Homo sapien
ttggggaaatcacagaaaatttgctaaagacaa

SEQ ID NO: 327168 - DNA, 33 bp, Homo sapien
ttggggaaatcacagagaatttgctaaagacaa

SEQ ID NO: 327169 - DNA, 33 bp, Homo sapien
tccattgtgaatctacaggagactctgctccat

SEQ ID NO: 327170 - DNA, 33 bp, Homo sapien
tccattgtgaatctacgggagactctgctccat

SEQ ID NO: 327171 - DNA, 33 bp, Homo sapien
tagatgtggcgttcccagaaggccgtccttccc

SEQ ID NO: 327172 - DNA, 33 bp, Homo sapien
tagatgtggcgttcccggaaggccgtccttccc

SEQ ID NO: 327173 - DNA, 33 bp, Homo sapien
tcaatgctcaccatgactactgtcaacatttca

SEQ ID NO: 327174 - DNA, 33 bp, Homo sapien
tcaatgctcaccatgattactgtcaacatttca

SEQ ID NO: 327175 - DNA, 33 bp, Homo sapien
gggagaggcaggcaaacgtgctcttcccaaatg

SEQ ID NO: 327176 - DNA, 33 bp, Homo sapien
gggagaggcaggcaaatgtgctcttcccaaatg

SEQ ID NO: 327177 - DNA, 33 bp, Homo sapien
aacggagcctccccaacgccttcagagggagca

SEQ ID NO: 327178 - DNA, 33 bp, Homo sapien
aacggagcctccccaatgccttcagagggagca

SEQ ID NO: 327179 - DNA, 33 bp, Homo sapien
cactttatatacagcacggctatggtctgatgc

SEQ ID NO: 327180 - DNA, 33 bp, Homo sapien
cactttatatacagcatggctatggtctgatgc

SEQ ID NO: 327181 - DNA, 33 bp, Homo sapien
tgatgtcatgctcctacgttaatgcctaaacta

SEQ ID NO: 327182 - DNA, 33 bp, Homo sapien
tgatgtcatgctcctatgttaatgcctaaacta

SEQ ID NO: 327183 - DNA, 33 bp, Homo sapien
tcattcaggggccaatcaatcacccagcgctga

SEQ ID NO: 327184 - DNA, 33 bp, Homo sapien
tcattcaggggccaatgaatcacccagcgctga

SEQ ID NO: 327185 - DNA, 33 bp, Homo sapien
cagcctggggcattaacggcttcctggaggagg

SEQ ID NO: 327186 - DNA, 33 bp, Homo sapien
cagcctggggcattaatggcttcctggaggagg

SEQ ID NO: 327187 - DNA, 33 bp, Homo sapien
ctgcgagacgagtgcacctctaaaaattaattt

SEQ ID NO: 327188 - DNA, 33 bp, Homo sapien
ctgcgagacgagtgcagctctaaaaattaattt

SEQ ID NO: 327189 - DNA, 33 bp, Homo sapien
taccattttgtcctcactctttgagacctgctt

SEQ ID NO: 327190 - DNA, 33 bp, Homo sapien
taccattttgtcctcattctttgagacctgctt

SEQ ID NO: 327191 - DNA, 33 bp, Homo sapien
tttaaaatagatgcaacgctaggcctgttgctg

SEQ ID NO: 327192 - DNA, 33 bp, Homo sapien
tttaaaatagatgcaatgctaggcctgttgctg

SEQ ID NO: 327193 - DNA, 33 bp, Homo sapien
cagccctgggttggagaaggtgagcagcccggc

SEQ ID NO: 327194 - DNA, 33 bp, Homo sapien
cagccctgggttggagtaggtgagcagcccggc

SEQ ID NO: 327195 - DNA, 33 bp, Homo sapien
tgattacttcaatccccactgatactttctaaa

SEQ ID NO: 327196 - DNA, 33 bp, Homo sapien
tgattacttcaatccctactgatactttctaaa

SEQ ID NO: 327197 - DNA, 33 bp, Homo sapien
taggggccttttgcgactccatacaaattcgag

SEQ ID NO: 327198 - DNA, 33 bp, Homo sapien
taggggccttttgcgattccatacaaattcgag

SEQ ID NO: 327199 - DNA, 33 bp, Homo sapien
cacatccaggttcatacgattctcccttcaaag

SEQ ID NO: 327200 - DNA, 33 bp, Homo sapien
cacatccaggttcatatgattctcccttcaaag

SEQ ID NO: 327201 - DNA, 33 bp, Homo sapien
tttccaatttattttacaattatcaaccgaact

SEQ ID NO: 327202 - DNA, 33 bp, Homo sapien
tttccaatttattttagaattatcaaccgaact

SEQ ID NO: 327203 - DNA, 33 bp, Homo sapien
cttggcaagacccaataagaataagcattttgc

SEQ ID NO: 327204 - DNA, 33 bp, Homo sapien
cttggcaagacccaatgagaataagcattttgc

SEQ ID NO: 327205 - DNA, 33 bp, Homo sapien
ggtaatggagagaagacggaaaacagtatggtg

SEQ ID NO: 327206 - DNA, 33 bp, Homo sapien
ggtaatggagagaagatggaaaacagtatggtg

SEQ ID NO: 327207 - DNA, 33 bp, Homo sapien
ttctccgactcaacaaacttgggcactcttcta

SEQ ID NO: 327208 - DNA, 33 bp, Homo sapien
ttctccgactcaacaatcttgggcactcttcta

SEQ ID NO: 327209 - DNA, 33 bp, Homo sapien
ttttaatcatgtttaactatcatccagtcaata

SEQ ID NO: 327210 - DNA, 33 bp, Homo sapien
ttttaatcatgtttaattatcatccagtcaata

SEQ ID NO: 327211 - DNA, 33 bp, Homo sapien
ggacagtactgaaacacatcaaagtgagcaatg

SEQ ID NO: 327212 - DNA, 33 bp, Homo sapien
ggacagtactgaaacagatcaaagtgagcaatg

SEQ ID NO: 327213 - DNA, 33 bp, Homo sapien
acaaaatgcaggacccaaagtctgacacattat

SEQ ID NO: 327214 - DNA, 33 bp, Homo sapien
acaaaatgcaggacccgaagtctgacacattat

SEQ ID NO: 327215 - DNA, 33 bp, Homo sapien
ctggccaggagcagtcagaataagtaactatgc

SEQ ID NO: 327216 - DNA, 33 bp, Homo sapien
ctggccaggagcagtcggaataagtaactatgc

SEQ ID NO: 327217 - DNA, 33 bp, Homo sapien
tttctgttccttgaaagctccaagcctgttcct

SEQ ID NO: 327218 - DNA, 33 bp, Homo sapien
tttctgttccttgaaatctccaagcctgttcct

SEQ ID NO: 327219 - DNA, 33 bp, Homo sapien
gcagggcgccatgagaaatgtattagtccattt

SEQ ID NO: 327220 - DNA, 33 bp, Homo sapien
gcagggcgccatgagatatgtattagtccattt

SEQ ID NO: 327221 - DNA, 33 bp, Homo sapien
tgggtctccgagaaaaacatctgatgctggcat

SEQ ID NO: 327222 - DNA, 33 bp, Homo sapien
tgggtctccgagaaaaccatctgatgctggcat

SEQ ID NO: 327223 - DNA, 33 bp, Homo sapien
cagtgggtgcttcagactagtagagatagaaaa

SEQ ID NO: 327224 - DNA, 33 bp, Homo sapien
cagtgggtgcttcagattagtagagatagaaaa

SEQ ID NO: 327225 - DNA, 33 bp, Homo sapien
cctcggggcacatatgaagaaagataaatgaga

SEQ ID NO: 327226 - DNA, 33 bp, Homo sapien
cctcggggcacatatgcagaaagataaatgaga

SEQ ID NO: 327227 - DNA, 33 bp, Homo sapien
tcaaatgaatcacaggacactcaagtgcagccg

SEQ ID NO: 327228 - DNA, 33 bp, Homo sapien
tcaaatgaatcacagggcactcaagtgcagccg

SEQ ID NO: 327229 - DNA, 33 bp, Homo sapien
tgttttctcttttgtacacagaaggtggtcata

SEQ ID NO: 327230 - DNA, 33 bp, Homo sapien
tgttttctcttttgtagacagaaggtggtcata

SEQ ID NO: 327231 - DNA, 33 bp, Homo sapien
ccctagtggcctgaaacctatgttggcttgtca

SEQ ID NO: 327232 - DNA, 33 bp, Homo sapien
ccctagtggcctgaaatctatgttggcttgtca

SEQ ID NO: 327233 - DNA, 33 bp, Homo sapien
atctggcaccctcttacggatgctgtcattgtg

SEQ ID NO: 327234 - DNA, 33 bp, Homo sapien
atctggcaccctcttatggatgctgtcattgtg

SEQ ID NO: 327235 - DNA, 33 bp, Homo sapien
gcagagcacaggcatacaaaacaagaagtacta

SEQ ID NO: 327236 - DNA, 33 bp, Homo sapien
gcagagcacaggcatagaaaacaagaagtacta

SEQ ID NO: 327237 - DNA, 33 bp, Homo sapien
catacactcttgcaaccacatgtatacacatgt

SEQ ID NO: 327238 - DNA, 33 bp, Homo sapien
catacactcttgcaactacatgtatacacatgt

SEQ ID NO: 327239 - DNA, 33 bp, Homo sapien
aatagcacaatacacacctgccttgtacacaca

SEQ ID NO: 327240 - DNA, 33 bp, Homo sapien
aatagcacaatacacagctgccttgtacacaca

SEQ ID NO: 327241 - DNA, 33 bp, Homo sapien
tggcaaattctgtccaaaagtactcttttaaat

SEQ ID NO: 327242 - DNA, 33 bp, Homo sapien
tggcaaattctgtccataagtactcttttaaat

SEQ ID NO: 327243 - DNA, 33 bp, Homo sapien
catcaataaggtctgacgggaacacagtccaca

SEQ ID NO: 327244 - DNA, 33 bp, Homo sapien
catcaataaggtctgatgggaacacagtccaca

SEQ ID NO: 327245 - DNA, 33 bp, Homo sapien
gaccctgcagtagttacgtaagaaataaggacc

SEQ ID NO: 327246 - DNA, 33 bp, Homo sapien
gaccctgcagtagttaggtaagaaataaggacc

SEQ ID NO: 327247 - DNA, 33 bp, Homo sapien
tttctctagcttagagaaaactcatctaggaag

SEQ ID NO: 327248 - DNA, 33 bp, Homo sapien
tttctctagcttagaggaaactcatctaggaag

SEQ ID NO: 327249 - DNA, 33 bp, Homo sapien
ggtgtctggttggggcgatgtctctatcatcca

SEQ ID NO: 327250 - DNA, 33 bp, Homo sapien
ggtgtctggttggggctatgtctctatcatcca

SEQ ID NO: 327251 - DNA, 33 bp, Homo sapien
aagcgaaatgtcattacgcacaggaaagcattc

SEQ ID NO: 327252 - DNA, 33 bp, Homo sapien
aagcgaaatgtcattaggcacaggaaagcattc

SEQ ID NO: 327253 - DNA, 33 bp, Homo sapien
acacagctagcaagcaacagacctgtgaggtgc

SEQ ID NO: 327254 - DNA, 33 bp, Homo sapien
acacagctagcaagcagcagacctgtgaggtgc

SEQ ID NO: 327255 - DNA, 33 bp, Homo sapien
ttctaagtcttagaagacattgcctcttggctc

SEQ ID NO: 327256 - DNA, 33 bp, Homo sapien
ttctaagtcttagaaggcattgcctcttggctc

SEQ ID NO: 327257 - DNA, 33 bp, Homo sapien
taataataggagagacaataaaagcacagatcc

SEQ ID NO: 327258 - DNA, 33 bp, Homo sapien
taataataggagagaccataaaagcacagatcc

SEQ ID NO: 327259 - DNA, 33 bp, Homo sapien
tccttggaagggaacacacatctgaagtggggg

SEQ ID NO: 327260 - DNA, 33 bp, Homo sapien
tccttggaagggaacatacatctgaagtggggg

SEQ ID NO: 327261 - DNA, 33 bp, Homo sapien
tggatctgctcattgggaagtcagaagtgagat

SEQ ID NO: 327262 - DNA, 33 bp, Homo sapien
tggatctgctcattggtaagtcagaagtgagat

SEQ ID NO: 327263 - DNA, 33 bp, Homo sapien
cagcacctacaaacccagcagaaaggggcagag

SEQ ID NO: 327264 - DNA, 33 bp, Homo sapien
cagcacctacaaacccggcagaaaggggcagag

SEQ ID NO: 327265 - DNA, 33 bp, Homo sapien
tagtttcttgcagggaagatacaggtgataaat

SEQ ID NO: 327266 - DNA, 33 bp, Homo sapien
tagtttcttgcagggatgatacaggtgataaat

SEQ ID NO: 327267 - DNA, 33 bp, Homo sapien
ttcaaattacaaaagcaaggctctgagagatgg

SEQ ID NO: 327268 - DNA, 33 bp, Homo sapien
ttcaaattacaaaagcgaggctctgagagatgg

SEQ ID NO: 327269 - DNA, 33 bp, Homo sapien
caaatcatgtgcttcacgcatggtagagaggcc

SEQ ID NO: 327270 - DNA, 33 bp, Homo sapien
caaatcatgtgcttcatgcatggtagagaggcc

SEQ ID NO: 327271 - DNA, 33 bp, Homo sapien
acaatgactccaagaaataagtgtggtcccatt

SEQ ID NO: 327272 - DNA, 33 bp, Homo sapien
acaatgactccaagaagtaagtgtggtcccatt

SEQ ID NO: 327273 - DNA, 33 bp, Homo sapien
tatgttcaacagtcaacgtttatatgttttgtg

SEQ ID NO: 327274 - DNA, 33 bp, Homo sapien
tatgttcaacagtcaatgtttatatgttttgtg

SEQ ID NO: 327275 - DNA, 33 bp, Homo sapien
agagtttccacaagacacatttctagaaataga

SEQ ID NO: 327276 - DNA, 33 bp, Homo sapien
agagtttccacaagactcatttctagaaataga

SEQ ID NO: 327277 - DNA, 33 bp, Homo sapien
ttgtctaagggcaagaagttatggctgcagttt

SEQ ID NO: 327278 - DNA, 33 bp, Homo sapien
ttgtctaagggcaagaggttatggctgcagttt

SEQ ID NO: 327279 - DNA, 33 bp, Homo sapien
acaatgtgagcactgcacatggagcacttgctg

SEQ ID NO: 327280 - DNA, 33 bp, Homo sapien
acaatgtgagcactgcgcatggagcacttgctg

SEQ ID NO: 327281 - DNA, 33 bp, Homo sapien
gacaaagaggtaattaaggtacaggtggaatta

SEQ ID NO: 327282 - DNA, 33 bp, Homo sapien
gacaaagaggtaattagggtacaggtggaatta

SEQ ID NO: 327283 - DNA, 33 bp, Homo sapien
ggaagtttaggaactcacatcttcaattctgta

SEQ ID NO: 327284 - DNA, 33 bp, Homo sapien
ggaagtttaggaactcgcatcttcaattctgta

SEQ ID NO: 327285 - DNA, 33 bp, Homo sapien
tttaagaaggacaagaaaaatgcacgaaaaact

SEQ ID NO: 327286 - DNA, 33 bp, Homo sapien
tttaagaaggacaagagaaatgcacgaaaaact

SEQ ID NO: 327287 - DNA, 33 bp, Homo sapien
ccataggagcttaaaaagtgaagtcatcagttt

SEQ ID NO: 327288 - DNA, 33 bp, Homo sapien
ccataggagcttaaaaggtgaagtcatcagttt

SEQ ID NO: 327289 - DNA, 33 bp, Homo sapien
tgttaagtacaagaaacgagagttgcacacacc

SEQ ID NO: 327290 - DNA, 33 bp, Homo sapien
tgttaagtacaagaaatgagagttgcacacacc

SEQ ID NO: 327291 - DNA, 33 bp, Homo sapien
ctcaatcattacacccaagactcgaacaaatga

SEQ ID NO: 327292 - DNA, 33 bp, Homo sapien
ctcaatcattacacccgagactcgaacaaatga

SEQ ID NO: 327293 - DNA, 33 bp, Homo sapien
gaagattcactcctgaaaaataactcagttgac

SEQ ID NO: 327294 - DNA, 33 bp, Homo sapien
gaagattcactcctgacaaataactcagttgac

SEQ ID NO: 327295 - DNA, 33 bp, Homo sapien
atggctgcttgtgttacgtgttttaccattaat

SEQ ID NO: 327296 - DNA, 33 bp, Homo sapien
atggctgcttgtgttatgtgttttaccattaat

SEQ ID NO: 327297 - DNA, 33 bp, Homo sapien
gggtcattgcaaattaagatgaggtcttcaggg

SEQ ID NO: 327298 - DNA, 33 bp, Homo sapien
gggtcattgcaaattacgatgaggtcttcaggg

SEQ ID NO: 327299 - DNA, 33 bp, Homo sapien
tgattccatttgaagacgatatgagttatctag

SEQ ID NO: 327300 - DNA, 33 bp, Homo sapien
tgattccatttgaagatgatatgagttatctag

SEQ ID NO: 327301 - DNA, 33 bp, Homo sapien
atagaactggataaacggtggttctcactcttg

SEQ ID NO: 327302 - DNA, 33 bp, Homo sapien
atagaactggataaactgtggttctcactcttg

SEQ ID NO: 327303 - DNA, 33 bp, Homo sapien
gcttgggtgaggtctacggtagtgtgcggtcaa

SEQ ID NO: 327304 - DNA, 33 bp, Homo sapien
gcttgggtgaggtctatggtagtgtgcggtcaa

SEQ ID NO: 327305 - DNA, 33 bp, Homo sapien
taaaaagccacatctaatacatagtttaggctt

SEQ ID NO: 327306 - DNA, 33 bp, Homo sapien
taaaaagccacatctagtacatagtttaggctt

SEQ ID NO: 327307 - DNA, 33 bp, Homo sapien
aaccctgcggtctttaacagttgaagcttgact

SEQ ID NO: 327308 - DNA, 33 bp, Homo sapien
aaccctgcggtctttagcagttgaagcttgact

SEQ ID NO: 327309 - DNA, 33 bp, Homo sapien
aagaaggcctcgtaggaaaaagaaatgggggca

SEQ ID NO: 327310 - DNA, 33 bp, Homo sapien
aagaaggcctcgtagggaaaagaaatgggggca

SEQ ID NO: 327311 - DNA, 33 bp, Homo sapien
ataagaggccccataaacattgttaaaatgatg

SEQ ID NO: 327312 - DNA, 33 bp, Homo sapien
ataagaggccccataaccattgttaaaatgatg

SEQ ID NO: 327313 - DNA, 33 bp, Homo sapien
cggggaatgagagctcaaactggagtgaagaat

SEQ ID NO: 327314 - DNA, 33 bp, Homo sapien
cggggaatgagagctcgaactggagtgaagaat

SEQ ID NO: 327315 - DNA, 33 bp, Homo sapien
cttgctagagtgttaaagtatgcatatctctct

SEQ ID NO: 327316 - DNA, 33 bp, Homo sapien
cttgctagagtgttaacgtatgcatatctctct

SEQ ID NO: 327317 - DNA, 33 bp, Homo sapien
aatttgtccacaggcacgtgtttctagagatgg

SEQ ID NO: 327318 - DNA, 33 bp, Homo sapien
aatttgtccacaggcatgtgtttctagagatgg

SEQ ID NO: 327319 - DNA, 33 bp, Homo sapien
tgacaataacacactacaggcttgaatgcctgg

SEQ ID NO: 327320 - DNA, 33 bp, Homo sapien
tgacaataacacactataggcttgaatgcctgg

SEQ ID NO: 327321 - DNA, 33 bp, Homo sapien
tgacatttggtcctgagtattctttgtcatggg

SEQ ID NO: 327322 - DNA, 33 bp, Homo sapien
tgacatttggtcctgattattctttgtcatggg

SEQ ID NO: 327323 - DNA, 33 bp, Homo sapien
aaagaagaggcttgggacatcaaggaaaagatg

SEQ ID NO: 327324 - DNA, 33 bp, Homo sapien
aaagaagaggcttggggcatcaaggaaaagatg

SEQ ID NO: 327325 - DNA, 33 bp, Homo sapien
tctggaagatgtcaaccgagctactgtattcta

SEQ ID NO: 327326 - DNA, 33 bp, Homo sapien
tctggaagatgtcaactgagctactgtattcta

SEQ ID NO: 327327 - DNA, 33 bp, Homo sapien
tcaagccacctgcagcaattttcattcctgata

SEQ ID NO: 327328 - DNA, 33 bp, Homo sapien
tcaagccacctgcagcgattttcattcctgata

SEQ ID NO: 327329 - DNA, 33 bp, Homo sapien
cagtactcttcttcgaaccttttcctaaaggaa

SEQ ID NO: 327330 - DNA, 33 bp, Homo sapien
cagtactcttcttcgagccttttcctaaaggaa

SEQ ID NO: 327331 - DNA, 33 bp, Homo sapien
tcaacttcagtctcaaaggaaatggaggatata

SEQ ID NO: 327332 - DNA, 33 bp, Homo sapien
tcaacttcagtctcaatggaaatggaggatata

SEQ ID NO: 327333 - DNA, 33 bp, Homo sapien
ctataaccctaacctacactctgagctgctaag

SEQ ID NO: 327334 - DNA, 33 bp, Homo sapien
ctataaccctaacctatactctgagctgctaag

SEQ ID NO: 327335 - DNA, 33 bp, Homo sapien
agttgtttatttaacacatattttctgggcaac

SEQ ID NO: 327336 - DNA, 33 bp, Homo sapien
agttgtttatttaacagatattttctgggcaac

SEQ ID NO: 327337 - DNA, 33 bp, Homo sapien
ttttaatgtacaccagaattacactggcttttt

SEQ ID NO: 327338 - DNA, 33 bp, Homo sapien
ttttaatgtacaccaggattacactggcttttt

SEQ ID NO: 327339 - DNA, 33 bp, Homo sapien
aagaacttttgaagagcctacagtgggcatcca

SEQ ID NO: 327340 - DNA, 33 bp, Homo sapien
aagaacttttgaagagtctacagtgggcatcca

SEQ ID NO: 327341 - DNA, 33 bp, Homo sapien
agaagccaattctccacgcaaaatttacacttt

SEQ ID NO: 327342 - DNA, 33 bp, Homo sapien
agaagccaattctccatgcaaaatttacacttt

SEQ ID NO: 327343 - DNA, 33 bp, Homo sapien
tggcctggtggaaagaactctgggcttaaattc

SEQ ID NO: 327344 - DNA, 33 bp, Homo sapien
tggcctggtggaaagagctctgggcttaaattc

SEQ ID NO: 327345 - DNA, 33 bp, Homo sapien
aggtgataaaacagaaatcttgagaaactctga

SEQ ID NO: 327346 - DNA, 33 bp, Homo sapien
aggtgataaaacagaattcttgagaaactctga

SEQ ID NO: 327347 - DNA, 33 bp, Homo sapien
acagagagaaatgatcaataatggcttgagact

SEQ ID NO: 327348 - DNA, 33 bp, Homo sapien
acagagagaaatgatcgataatggcttgagact

SEQ ID NO: 327349 - DNA, 33 bp, Homo sapien
aataccatattaataaaaaccttgcattcgtat

SEQ ID NO: 327350 - DNA, 33 bp, Homo sapien
aataccatattaataataaccttgcattcgtat

SEQ ID NO: 327351 - DNA, 33 bp, Homo sapien
gccttttctataacgcaccagaaagatgtgttt

SEQ ID NO: 327352 - DNA, 33 bp, Homo sapien
gccttttctataacgcgccagaaagatgtgttt

SEQ ID NO: 327353 - DNA, 33 bp, Homo sapien
tttctcctaacatcaacccttgtagttcttctg

SEQ ID NO: 327354 - DNA, 33 bp, Homo sapien
tttctcctaacatcaagccttgtagttcttctg

SEQ ID NO: 327355 - DNA, 33 bp, Homo sapien
attaaaagatactccacgcttctctacttgaca

SEQ ID NO: 327356 - DNA, 33 bp, Homo sapien
attaaaagatactccaggcttctctacttgaca

SEQ ID NO: 327357 - DNA, 33 bp, Homo sapien
ccttgagttacatggcagatgatcacctgaatg

SEQ ID NO: 327358 - DNA, 33 bp, Homo sapien
ccttgagttacatggcggatgatcacctgaatg

SEQ ID NO: 327359 - DNA, 33 bp, Homo sapien
aaccactagctgactcactgctcattccccacg

SEQ ID NO: 327360 - DNA, 33 bp, Homo sapien
aaccactagctgactctctgctcattccccacg

SEQ ID NO: 327361 - DNA, 33 bp, Homo sapien
tattcaaattactcaaccgtttgatccacttag

SEQ ID NO: 327362 - DNA, 33 bp, Homo sapien
tattcaaattactcaatcgtttgatccacttag

SEQ ID NO: 327363 - DNA, 33 bp, Homo sapien
tcacataattaactaacgtgaaagctcggtctc

SEQ ID NO: 327364 - DNA, 33 bp, Homo sapien
tcacataattaactaatgtgaaagctcggtctc

SEQ ID NO: 327365 - DNA, 33 bp, Homo sapien
tagttgatgggagaaggctcttgctggacatcg

SEQ ID NO: 327366 - DNA, 33 bp, Homo sapien
tagttgatgggagaagtctcttgctggacatcg

SEQ ID NO: 327367 - DNA, 33 bp, Homo sapien
tcgagttggctgggtaaggtctaaatgccaact

SEQ ID NO: 327368 - DNA, 33 bp, Homo sapien
tcgagttggctgggtagggtctaaatgccaact

SEQ ID NO: 327369 - DNA, 33 bp, Homo sapien
caactctgtctacatcacccccctgagtcctgt

SEQ ID NO: 327370 - DNA, 33 bp, Homo sapien
caactctgtctacatcgcccccctgagtcctgt

SEQ ID NO: 327371 - DNA, 33 bp, Homo sapien
cattgcctcagaagaacgatcacacggcagaaa

SEQ ID NO: 327372 - DNA, 33 bp, Homo sapien
cattgcctcagaagaaggatcacacggcagaaa

SEQ ID NO: 327373 - DNA, 33 bp, Homo sapien
aagtcattgttcaaaacgtagcctaatacagca

SEQ ID NO: 327374 - DNA, 33 bp, Homo sapien
aagtcattgttcaaaatgtagcctaatacagca

SEQ ID NO: 327375 - DNA, 33 bp, Homo sapien
ctagaccatattcctcaatcacttatcgaaccc

SEQ ID NO: 327376 - DNA, 33 bp, Homo sapien
ctagaccatattcctcgatcacttatcgaaccc

SEQ ID NO: 327377 - DNA, 33 bp, Homo sapien
tcctactttccatgccaaagtcttgtccttgtg

SEQ ID NO: 327378 - DNA, 33 bp, Homo sapien
tcctactttccatgccgaagtcttgtccttgtg

SEQ ID NO: 327379 - DNA, 33 bp, Homo sapien
gtgagcagggaagacaaaatagatgaggaatgg

SEQ ID NO: 327380 - DNA, 33 bp, Homo sapien
gtgagcagggaagacagaatagatgaggaatgg

SEQ ID NO: 327381 - DNA, 33 bp, Homo sapien
aatggttggtggacaactagtgaatggttgcat

SEQ ID NO: 327382 - DNA, 33 bp, Homo sapien
aatggttggtggacaattagtgaatggttgcat

SEQ ID NO: 327383 - DNA, 33 bp, Homo sapien
aaactgtatttgccaaaaaatgaaacttttaga

SEQ ID NO: 327384 - DNA, 33 bp, Homo sapien
aaactgtatttgccaagaaatgaaacttttaga

SEQ ID NO: 327385 - DNA, 33 bp, Homo sapien
ttgatccttcaagaacacagcttatctgctctg

SEQ ID NO: 327386 - DNA, 33 bp, Homo sapien
ttgatccttcaagaacgcagcttatctgctctg

SEQ ID NO: 327387 - DNA, 33 bp, Homo sapien
aactgggtcaccagcacgttttaatgattttga

SEQ ID NO: 327388 - DNA, 33 bp, Homo sapien
aactgggtcaccagcatgttttaatgattttga

SEQ ID NO: 327389 - DNA, 33 bp, Homo sapien
ggccaggcctctgaccaagaactggcatgatgg

SEQ ID NO: 327390 - DNA, 33 bp, Homo sapien
ggccaggcctctgacctagaactggcatgatgg

SEQ ID NO: 327391 - DNA, 33 bp, Homo sapien
aaggtcattgtgcctgcagaaggagatctttgt

SEQ ID NO: 327392 - DNA, 33 bp, Homo sapien
aaggtcattgtgcctgtagaaggagatctttgt

SEQ ID NO: 327393 - DNA, 33 bp, Homo sapien
catccatcatctctacagatctcaatactgttg

SEQ ID NO: 327394 - DNA, 33 bp, Homo sapien
catccatcatctctacggatctcaatactgttg

SEQ ID NO: 327395 - DNA, 33 bp, Homo sapien
gaggtgataatctgtgcaccctttggcttttta

SEQ ID NO: 327396 - DNA, 33 bp, Homo sapien
gaggtgataatctgtgtaccctttggcttttta

SEQ ID NO: 327397 - DNA, 33 bp, Homo sapien
ttgcaaccaaataggcacaatgaacgtaaccag

SEQ ID NO: 327398 - DNA, 33 bp, Homo sapien
ttgcaaccaaataggcgcaatgaacgtaaccag

SEQ ID NO: 327399 - DNA, 33 bp, Homo sapien
catttatcaatgtggaactctggaaagtagaaa

SEQ ID NO: 327400 - DNA, 33 bp, Homo sapien
catttatcaatgtggatctctggaaagtagaaa

SEQ ID NO: 327401 - DNA, 33 bp, Homo sapien
gttcctataacttatcacccatcagctttgtgc

SEQ ID NO: 327402 - DNA, 33 bp, Homo sapien
gttcctataacttatcgcccatcagctttgtgc

SEQ ID NO: 327403 - DNA, 33 bp, Homo sapien
tccaaccacctttagcgcacattaatcacaccc

SEQ ID NO: 327404 - DNA, 33 bp, Homo sapien
tccaaccacctttagctcacattaatcacaccc

SEQ ID NO: 327405 - DNA, 33 bp, Homo sapien
gtggcaggaaggtgtagaaaggaattttaggca

SEQ ID NO: 327406 - DNA, 33 bp, Homo sapien
gtggcaggaaggtgtataaaggaattttaggca

SEQ ID NO: 327407 - DNA, 33 bp, Homo sapien
aattcttcaggtggcaactctggacgaaaatcc

SEQ ID NO: 327408 - DNA, 33 bp, Homo sapien
aattcttcaggtggcatctctggacgaaaatcc

SEQ ID NO: 327409 - DNA, 33 bp, Homo sapien
gtgacaagaacagaaaggcaagttatttttggt

SEQ ID NO: 327410 - DNA, 33 bp, Homo sapien
gtgacaagaacagaaatgcaagttatttttggt

SEQ ID NO: 327411 - DNA, 33 bp, Homo sapien
tacacaaatgagtaaaacggaggaaatctgaat

SEQ ID NO: 327412 - DNA, 33 bp, Homo sapien
tacacaaatgagtaaagcggaggaaatctgaat

SEQ ID NO: 327413 - DNA, 33 bp, Homo sapien
ggaacttgtttgcaggcaacttccacggcaagg

SEQ ID NO: 327414 - DNA, 33 bp, Homo sapien
ggaacttgtttgcagggaacttccacggcaagg

SEQ ID NO: 327415 - DNA, 33 bp, Homo sapien
ccacatttttctgacacctttttctcaggtgtt

SEQ ID NO: 327416 - DNA, 33 bp, Homo sapien
ccacatttttctgacatctttttctcaggtgtt

SEQ ID NO: 327417 - DNA, 33 bp, Homo sapien
ccaaactccagccccaatagatctttgcaggag

SEQ ID NO: 327418 - DNA, 33 bp, Homo sapien
ccaaactccagccccagtagatctttgcaggag

SEQ ID NO: 327419 - DNA, 33 bp, Homo sapien
gtttttttctctcaaacgaagctcctgagcttg

SEQ ID NO: 327420 - DNA, 33 bp, Homo sapien
gtttttttctctcaaatgaagctcctgagcttg

SEQ ID NO: 327421 - DNA, 33 bp, Homo sapien
taccagctactttcacacacttggccaagagga

SEQ ID NO: 327422 - DNA, 33 bp, Homo sapien
taccagctactttcacgcacttggccaagagga

SEQ ID NO: 327423 - DNA, 33 bp, Homo sapien
gttttataaaacccacaaacacgggagtatcaa

SEQ ID NO: 327424 - DNA, 33 bp, Homo sapien
gttttataaaacccacgaacacgggagtatcaa

SEQ ID NO: 327425 - DNA, 33 bp, Homo sapien
atcatcatggttagaaagaaaagcaatacacca

SEQ ID NO: 327426 - DNA, 33 bp, Homo sapien
atcatcatggttagaaggaaaagcaatacacca

SEQ ID NO: 327427 - DNA, 33 bp, Homo sapien
gtcacagctacattgcacttccttcttagtctg

SEQ ID NO: 327428 - DNA, 33 bp, Homo sapien
gtcacagctacattgcgcttccttcttagtctg

SEQ ID NO: 327429 - DNA, 33 bp, Homo sapien
cttccaactgcaaggccgagactcataattcct

SEQ ID NO: 327430 - DNA, 33 bp, Homo sapien
cttccaactgcaaggctgagactcataattcct

SEQ ID NO: 327431 - DNA, 33 bp, Homo sapien
aggaacagctttgggcaagtgggcgacactctc

SEQ ID NO: 327432 - DNA, 33 bp, Homo sapien
aggaacagctttgggcgagtgggcgacactctc

SEQ ID NO: 327433 - DNA, 33 bp, Homo sapien
acctggacaatgaccaccgtttagtaaactgat

SEQ ID NO: 327434 - DNA, 33 bp, Homo sapien
acctggacaatgaccatcgtttagtaaactgat

SEQ ID NO: 327435 - DNA, 33 bp, Homo sapien
tcgacagaggttaaacaggacctcatatgcaga

SEQ ID NO: 327436 - DNA, 33 bp, Homo sapien
tcgacagaggttaaacgggacctcatatgcaga

SEQ ID NO: 327437 - DNA, 33 bp, Homo sapien
agaatacctaattgaccagaaggattgaccaga

SEQ ID NO: 327438 - DNA, 33 bp, Homo sapien
agaatacctaattgactagaaggattgaccaga

SEQ ID NO: 327439 - DNA, 33 bp, Homo sapien
tgaatgcatgacagaaatgcatacacccactga

SEQ ID NO: 327440 - DNA, 33 bp, Homo sapien
tgaatgcatgacagaagtgcatacacccactga

SEQ ID NO: 327441 - DNA, 33 bp, Homo sapien
ggaatttcacccgcataagctggttgaatcttc

SEQ ID NO: 327442 - DNA, 33 bp, Homo sapien
ggaatttcacccgcatcagctggttgaatcttc

SEQ ID NO: 327443 - DNA, 33 bp, Homo sapien
agaggaaggtatcaaccagcagacgtgaaactg

SEQ ID NO: 327444 - DNA, 33 bp, Homo sapien
agaggaaggtatcaacgagcagacgtgaaactg

SEQ ID NO: 327445 - DNA, 33 bp, Homo sapien
tcttgcctacagaaagacaggagatgcggcttt

SEQ ID NO: 327446 - DNA, 33 bp, Homo sapien
tcttgcctacagaaagccaggagatgcggcttt

SEQ ID NO: 327447 - DNA, 33 bp, Homo sapien
tattaaaaagtccctgcataccattagtacttc

SEQ ID NO: 327448 - DNA, 33 bp, Homo sapien
tattaaaaagtccctggataccattagtacttc

SEQ ID NO: 327449 - DNA, 33 bp, Homo sapien
cctggccgttggagaaaccatgagactagacct

SEQ ID NO: 327450 - DNA, 33 bp, Homo sapien
cctggccgttggagaagccatgagactagacct

SEQ ID NO: 327451 - DNA, 33 bp, Homo sapien
tcaagagttaactgtacatagttttactcctgt

SEQ ID NO: 327452 - DNA, 33 bp, Homo sapien
tcaagagttaactgtagatagttttactcctgt

SEQ ID NO: 327453 - DNA, 33 bp, Homo sapien
agtctcttatgaaaaccggtaggagacagcgta

SEQ ID NO: 327454 - DNA, 33 bp, Homo sapien
agtctcttatgaaaactggtaggagacagcgta

SEQ ID NO: 327455 - DNA, 33 bp, Homo sapien
taggcacgtggttaaacgctcaaaaggtatgag

SEQ ID NO: 327456 - DNA, 33 bp, Homo sapien
taggcacgtggttaaatgctcaaaaggtatgag

SEQ ID NO: 327457 - DNA, 33 bp, Homo sapien
tggaaaaactaggtataaaatatgcaatactga

SEQ ID NO: 327458 - DNA, 33 bp, Homo sapien
tggaaaaactaggtatgaaatatgcaatactga

SEQ ID NO: 327459 - DNA, 33 bp, Homo sapien
ggaatggggttaggaacaatgtctgggcaacta

SEQ ID NO: 327460 - DNA, 33 bp, Homo sapien
ggaatggggttaggaataatgtctgggcaacta

SEQ ID NO: 327461 - DNA, 33 bp, Homo sapien
gtctgggcaactagcaaaaggtgaagacagcca

SEQ ID NO: 327462 - DNA, 33 bp, Homo sapien
gtctgggcaactagcagaaggtgaagacagcca

SEQ ID NO: 327463 - DNA, 33 bp, Homo sapien
atcctcagatagcacgcaatatgaataggggtg

SEQ ID NO: 327464 - DNA, 33 bp, Homo sapien
atcctcagatagcacgtaatatgaataggggtg

SEQ ID NO: 327465 - DNA, 33 bp, Homo sapien
tcttgacttctgtgcacacgcaagctcaacacc

SEQ ID NO: 327466 - DNA, 33 bp, Homo sapien
tcttgacttctgtgcatacgcaagctcaacacc

SEQ ID NO: 327467 - DNA, 33 bp, Homo sapien
cttaaatattggctcaacagacaacttgccttg

SEQ ID NO: 327468 - DNA, 33 bp, Homo sapien
cttaaatattggctcagcagacaacttgccttg

SEQ ID NO: 327469 - DNA, 33 bp, Homo sapien
gcttggaggaggtcagactttgtcctatttagg

SEQ ID NO: 327470 - DNA, 33 bp, Homo sapien
gcttggaggaggtcagtctttgtcctatttagg

SEQ ID NO: 327471 - DNA, 33 bp, Homo sapien
taggcagtaggcaaataataattgaggaaacca

SEQ ID NO: 327472 - DNA, 33 bp, Homo sapien
taggcagtaggcaaatgataattgaggaaacca

SEQ ID NO: 327473 - DNA, 33 bp, Homo sapien
caccctatgatctcacaaaacaaaacaagagct

SEQ ID NO: 327474 - DNA, 33 bp, Homo sapien
caccctatgatctcactaaacaaaacaagagct

SEQ ID NO: 327475 - DNA, 33 bp, Homo sapien
accatcttcaccagtagaggtatttccccttga

SEQ ID NO: 327476 - DNA, 33 bp, Homo sapien
accatcttcaccagtataggtatttccccttga

SEQ ID NO: 327477 - DNA, 33 bp, Homo sapien
tgattttacaccattcaacctttctgcagaatt

SEQ ID NO: 327478 - DNA, 33 bp, Homo sapien
tgattttacaccattcgacctttctgcagaatt

SEQ ID NO: 327479 - DNA, 33 bp, Homo sapien
taggtagcatggcaaggctgctttaaaacaaca

SEQ ID NO: 327480 - DNA, 33 bp, Homo sapien
taggtagcatggcaagtctgctttaaaacaaca

SEQ ID NO: 327481 - DNA, 33 bp, Homo sapien
gggtcattcatttgaaccattagtgtcttagtc

SEQ ID NO: 327482 - DNA, 33 bp, Homo sapien
gggtcattcatttgaatcattagtgtcttagtc

SEQ ID NO: 327483 - DNA, 33 bp, Homo sapien
tcttctaaaaatcaaactgttgtcttttttggt

SEQ ID NO: 327484 - DNA, 33 bp, Homo sapien
tcttctaaaaatcaaattgttgtcttttttggt

SEQ ID NO: 327485 - DNA, 33 bp, Homo sapien
aaagttgttctgatgactaaagattgttacacc

SEQ ID NO: 327486 - DNA, 33 bp, Homo sapien
aaagttgttctgatgattaaagattgttacacc

SEQ ID NO: 327487 - DNA, 33 bp, Homo sapien
ttgaatgactgcaggcacatgctaccctaccct

SEQ ID NO: 327488 - DNA, 33 bp, Homo sapien
ttgaatgactgcaggctcatgctaccctaccct

SEQ ID NO: 327489 - DNA, 33 bp, Homo sapien
actaggctgtgttatacgacactcgagtctttt

SEQ ID NO: 327490 - DNA, 33 bp, Homo sapien
actaggctgtgttatatgacactcgagtctttt

SEQ ID NO: 327491 - DNA, 33 bp, Homo sapien
attattttgatgacggcagcaaggtttcaatta

SEQ ID NO: 327492 - DNA, 33 bp, Homo sapien
attattttgatgacggtagcaaggtttcaatta

SEQ ID NO: 327493 - DNA, 33 bp, Homo sapien
atttaacccagaataaagtgaaatggaaattgt

SEQ ID NO: 327494 - DNA, 33 bp, Homo sapien
atttaacccagaataacgtgaaatggaaattgt

SEQ ID NO: 327495 - DNA, 33 bp, Homo sapien
tccaaggtttagcgtgacaaagcctatcagaaa

SEQ ID NO: 327496 - DNA, 33 bp, Homo sapien
tccaaggtttagcgtggcaaagcctatcagaaa

SEQ ID NO: 327497 - DNA, 33 bp, Homo sapien
aaaatcaattagaacacgtgagggaagatggtt

SEQ ID NO: 327498 - DNA, 33 bp, Homo sapien
aaaatcaattagaacatgtgagggaagatggtt

SEQ ID NO: 327499 - DNA, 33 bp, Homo sapien
ttcataaagctcattaaccttcagcatacaggt

SEQ ID NO: 327500 - DNA, 33 bp, Homo sapien
ttcataaagctcattatccttcagcatacaggt

SEQ ID NO: 327501 - DNA, 33 bp, Homo sapien
ctatgatgagaagatgacaacaatgcagaggtt

SEQ ID NO: 327502 - DNA, 33 bp, Homo sapien
ctatgatgagaagatggcaacaatgcagaggtt

SEQ ID NO: 327503 - DNA, 33 bp, Homo sapien
gctttcagaatgaagaaggagaagtcaacattt

SEQ ID NO: 327504 - DNA, 33 bp, Homo sapien
gctttcagaatgaagacggagaagtcaacattt

SEQ ID NO: 327505 - DNA, 33 bp, Homo sapien
gctaagagcatgttcacagacagcctgagagtg

SEQ ID NO: 327506 - DNA, 33 bp, Homo sapien
gctaagagcatgttcatagacagcctgagagtg

SEQ ID NO: 327507 - DNA, 33 bp, Homo sapien
acgtacaatttagaccccatctttctaatcaca

SEQ ID NO: 327508 - DNA, 33 bp, Homo sapien
acgtacaatttagacctcatctttctaatcaca

SEQ ID NO: 327509 - DNA, 33 bp, Homo sapien
aatacagctttcaaatcacccttgcacttcata

SEQ ID NO: 327510 - DNA, 33 bp, Homo sapien
aatacagctttcaaattacccttgcacttcata

SEQ ID NO: 327511 - DNA, 33 bp, Homo sapien
aggaatgcagtaaaaacagactatgcatcctgt

SEQ ID NO: 327512 - DNA, 33 bp, Homo sapien
aggaatgcagtaaaaagagactatgcatcctgt

SEQ ID NO: 327513 - DNA, 33 bp, Homo sapien
taaaaaccactcttaactcacagatgatacaca

SEQ ID NO: 327514 - DNA, 33 bp, Homo sapien
taaaaaccactcttaagtcacagatgatacaca

SEQ ID NO: 327515 - DNA, 33 bp, Homo sapien
ctttctcttggaactccagtacttaaggtgctc

SEQ ID NO: 327516 - DNA, 33 bp, Homo sapien
ctttctcttggaactctagtacttaaggtgctc

SEQ ID NO: 327517 - DNA, 33 bp, Homo sapien
tgccttcgaggagggcaacatgcaaatcactcc

SEQ ID NO: 327518 - DNA, 33 bp, Homo sapien
tgccttcgaggagggcgacatgcaaatcactcc

SEQ ID NO: 327519 - DNA, 33 bp, Homo sapien
cctgtgctttgtaaaagtattgaaagatagaaa

SEQ ID NO: 327520 - DNA, 33 bp, Homo sapien
cctgtgctttgtaaaattattgaaagatagaaa

SEQ ID NO: 327521 - DNA, 33 bp, Homo sapien
cccttagtggaatatcaaccacaccaaagcagc

SEQ ID NO: 327522 - DNA, 33 bp, Homo sapien
cccttagtggaatatcgaccacaccaaagcagc

SEQ ID NO: 327523 - DNA, 33 bp, Homo sapien
acagacagtaaatatcaagcacataccacttac

SEQ ID NO: 327524 - DNA, 33 bp, Homo sapien
acagacagtaaatatctagcacataccacttac

SEQ ID NO: 327525 - DNA, 33 bp, Homo sapien
cacatgtgtcaagaacagctcttgtcatgaaaa

SEQ ID NO: 327526 - DNA, 33 bp, Homo sapien
cacatgtgtcaagaaccgctcttgtcatgaaaa

SEQ ID NO: 327527 - DNA, 33 bp, Homo sapien
tctctacatccctcacacctgtgctggtcatgc

SEQ ID NO: 327528 - DNA, 33 bp, Homo sapien
tctctacatccctcacccctgtgctggtcatgc

SEQ ID NO: 327529 - DNA, 33 bp, Homo sapien
accagcatcatatgaacgaacccacttggtcct

SEQ ID NO: 327530 - DNA, 33 bp, Homo sapien
accagcatcatatgaatgaacccacttggtcct

SEQ ID NO: 327531 - DNA, 33 bp, Homo sapien
ctttgtttcacatcagactatttccatctctcc

SEQ ID NO: 327532 - DNA, 33 bp, Homo sapien
ctttgtttcacatcaggctatttccatctctcc

SEQ ID NO: 327533 - DNA, 33 bp, Homo sapien
aactctgcaaaatgaaacagaaaaaaaccttgg

SEQ ID NO: 327534 - DNA, 33 bp, Homo sapien
aactctgcaaaatgaatcagaaaaaaaccttgg

SEQ ID NO: 327535 - DNA, 33 bp, Homo sapien
taacatgcctacctcccaagtttaaaacttgac

SEQ ID NO: 327536 - DNA, 33 bp, Homo sapien
taacatgcctacctcctaagtttaaaacttgac

SEQ ID NO: 327537 - DNA, 33 bp, Homo sapien
ccataacaaaatactacacactgggcaacttaa

SEQ ID NO: 327538 - DNA, 33 bp, Homo sapien
ccataacaaaatactatacactgggcaacttaa

SEQ ID NO: 327539 - DNA, 33 bp, Homo sapien
actgggtgcctgaaaacaatcagaattcattgt

SEQ ID NO: 327540 - DNA, 33 bp, Homo sapien
actgggtgcctgaaaataatcagaattcattgt

SEQ ID NO: 327541 - DNA, 33 bp, Homo sapien
tagctgcatagactggacatcagagtgagtgtt

SEQ ID NO: 327542 - DNA, 33 bp, Homo sapien
tagctgcatagactgggcatcagagtgagtgtt

SEQ ID NO: 327543 - DNA, 33 bp, Homo sapien
ggatggcaagatgtccaaaaaggaacagctttg

SEQ ID NO: 327544 - DNA, 33 bp, Homo sapien
ggatggcaagatgtccgaaaaggaacagctttg

SEQ ID NO: 327545 - DNA, 33 bp, Homo sapien
agtgtcacgaggtttcaaatttgatgagagtga

SEQ ID NO: 327546 - DNA, 33 bp, Homo sapien
agtgtcacgaggtttcgaatttgatgagagtga

SEQ ID NO: 327547 - DNA, 33 bp, Homo sapien
agcgttcatgtctccaaatgtcaggctgcgaat

SEQ ID NO: 327548 - DNA, 33 bp, Homo sapien
agcgttcatgtctccagatgtcaggctgcgaat

SEQ ID NO: 327549 - DNA, 33 bp, Homo sapien
aggcgagtgataggaaatggagctggaaaaatc

SEQ ID NO: 327550 - DNA, 33 bp, Homo sapien
aggcgagtgataggaagtggagctggaaaaatc

SEQ ID NO: 327551 - DNA, 33 bp, Homo sapien
gtatgagttgcaccaaacctctggagaaaagtc

SEQ ID NO: 327552 - DNA, 33 bp, Homo sapien
gtatgagttgcaccaagcctctggagaaaagtc

SEQ ID NO: 327553 - DNA, 33 bp, Homo sapien
gactagactcatataaagcccattagagaggcc

SEQ ID NO: 327554 - DNA, 33 bp, Homo sapien
gactagactcatataaggcccattagagaggcc

SEQ ID NO: 327555 - DNA, 33 bp, Homo sapien
cccttaatttctaagaggtctctccatactcac

SEQ ID NO: 327556 - DNA, 33 bp, Homo sapien
cccttaatttctaagatgtctctccatactcac

SEQ ID NO: 327557 - DNA, 33 bp, Homo sapien
tgacttctctgtactaccatggccatctcccac

SEQ ID NO: 327558 - DNA, 33 bp, Homo sapien
tgacttctctgtactatcatggccatctcccac

SEQ ID NO: 327559 - DNA, 33 bp, Homo sapien
tcgtctcagggaatgacacggtcttcattttct

SEQ ID NO: 327560 - DNA, 33 bp, Homo sapien
tcgtctcagggaatgatacggtcttcattttct

SEQ ID NO: 327561 - DNA, 33 bp, Homo sapien
cccacaaaaagacagcaaagagggtcatatggt

SEQ ID NO: 327562 - DNA, 33 bp, Homo sapien
cccacaaaaagacagcgaagagggtcatatggt

SEQ ID NO: 327563 - DNA, 33 bp, Homo sapien
cacacttgaattctaaacccagctatatcccct

SEQ ID NO: 327564 - DNA, 33 bp, Homo sapien
cacacttgaattctaagcccagctatatcccct

SEQ ID NO: 327565 - DNA, 33 bp, Homo sapien
ttcgttagtctttttaccactgggtcccaactt

SEQ ID NO: 327566 - DNA, 33 bp, Homo sapien
ttcgttagtctttttatcactgggtcccaactt

SEQ ID NO: 327567 - DNA, 33 bp, Homo sapien
tctggaatatccaatccctataaagctcaaagt

SEQ ID NO: 327568 - DNA, 33 bp, Homo sapien
tctggaatatccaatctctataaagctcaaagt

SEQ ID NO: 327569 - DNA, 33 bp, Homo sapien
ggctatgaaggagcgccctgtattttttgcaca

SEQ ID NO: 327570 - DNA, 33 bp, Homo sapien
ggctatgaaggagcgctctgtattttttgcaca

SEQ ID NO: 327571 - DNA, 33 bp, Homo sapien
attggttgttaatggacgtaccattctgtgggg

SEQ ID NO: 327572 - DNA, 33 bp, Homo sapien
attggttgttaatggatgtaccattctgtgggg

SEQ ID NO: 327573 - DNA, 33 bp, Homo sapien
ccttaatgtctttgcaaagtttcatctctcatt

SEQ ID NO: 327574 - DNA, 33 bp, Homo sapien
ccttaatgtctttgcatagtttcatctctcatt

SEQ ID NO: 327575 - DNA, 33 bp, Homo sapien
gaaatacacccgaacacatatagtcaactaatt

SEQ ID NO: 327576 - DNA, 33 bp, Homo sapien
gaaatacacccgaacatatatagtcaactaatt

SEQ ID NO: 327577 - DNA, 33 bp, Homo sapien
tgggcttcaacattgcccgttgaaagaggaaga

SEQ ID NO: 327578 - DNA, 33 bp, Homo sapien
tgggcttcaacattgctcgttgaaagaggaaga

SEQ ID NO: 327579 - DNA, 33 bp, Homo sapien
ggcagtatataaaaaacccagtggagatattgc

SEQ ID NO: 327580 - DNA, 33 bp, Homo sapien
ggcagtatataaaaaagccagtggagatattgc

SEQ ID NO: 327581 - DNA, 33 bp, Homo sapien
aatcagtcaaagggcacattctacatttttact

SEQ ID NO: 327582 - DNA, 33 bp, Homo sapien
aatcagtcaaagggcagattctacatttttact

SEQ ID NO: 327583 - DNA, 33 bp, Homo sapien
aaatgggcaagtaagtaaaaaatttgaaacaat

SEQ ID NO: 327584 - DNA, 33 bp, Homo sapien
aaatgggcaagtaagtcaaaaatttgaaacaat

SEQ ID NO: 327585 - DNA, 33 bp, Homo sapien
gagatgctaatcactacgggaaaaaaggattga

SEQ ID NO: 327586 - DNA, 33 bp, Homo sapien
gagatgctaatcactatgggaaaaaaggattga

SEQ ID NO: 327587 - DNA, 33 bp, Homo sapien
ccattgggtttacaaaagtagctacacaccttc

SEQ ID NO: 327588 - DNA, 33 bp, Homo sapien
ccattgggtttacaaaggtagctacacaccttc

SEQ ID NO: 327589 - DNA, 33 bp, Homo sapien
ctgcttctggttggacaatgatattccttggtt

SEQ ID NO: 327590 - DNA, 33 bp, Homo sapien
ctgcttctggttggacgatgatattccttggtt

SEQ ID NO: 327591 - DNA, 33 bp, Homo sapien
aagagccatgaaactcacacatcagggaacttc

SEQ ID NO: 327592 - DNA, 33 bp, Homo sapien
aagagccatgaaactcgcacatcagggaacttc

SEQ ID NO: 327593 - DNA, 33 bp, Homo sapien
agccttcctcagaaaccggctgtgtcttgtcag

SEQ ID NO: 327594 - DNA, 33 bp, Homo sapien
agccttcctcagaaactggctgtgtcttgtcag

SEQ ID NO: 327595 - DNA, 33 bp, Homo sapien
cagaaggtggggctcacgtcttctggatcccca

SEQ ID NO: 327596 - DNA, 33 bp, Homo sapien
cagaaggtggggctcatgtcttctggatcccca

SEQ ID NO: 327597 - DNA, 33 bp, Homo sapien
gtgtggtagctctgaacgtaaaatgagcactga

SEQ ID NO: 327598 - DNA, 33 bp, Homo sapien
gtgtggtagctctgaatgtaaaatgagcactga

SEQ ID NO: 327599 - DNA, 33 bp, Homo sapien
cctttctctctgcttagaagtgttctcaacctt

SEQ ID NO: 327600 - DNA, 33 bp, Homo sapien
cctttctctctgcttataagtgttctcaacctt

SEQ ID NO: 327601 - DNA, 33 bp, Homo sapien
gagatgtcacatagtacaaatgaaagttacaaa

SEQ ID NO: 327602 - DNA, 33 bp, Homo sapien
gagatgtcacatagtataaatgaaagttacaaa

SEQ ID NO: 327603 - DNA, 33 bp, Homo sapien
aagcacaactgatgccaacaaatcgtggccaag

SEQ ID NO: 327604 - DNA, 33 bp, Homo sapien
aagcacaactgatgccgacaaatcgtggccaag

SEQ ID NO: 327605 - DNA, 33 bp, Homo sapien
ttcggaaactgagctccagacagggtcagtgtt

SEQ ID NO: 327606 - DNA, 33 bp, Homo sapien
ttcggaaactgagctcgagacagggtcagtgtt

SEQ ID NO: 327607 - DNA, 33 bp, Homo sapien
tgtaccagccatatgaactgtgtgtgtcacatt

SEQ ID NO: 327608 - DNA, 33 bp, Homo sapien
tgtaccagccatatgacctgtgtgtgtcacatt

SEQ ID NO: 327609 - DNA, 33 bp, Homo sapien
aaactgtcaacattgactagctatcatgagcca

SEQ ID NO: 327610 - DNA, 33 bp, Homo sapien
aaactgtcaacattgattagctatcatgagcca

SEQ ID NO: 327611 - DNA, 33 bp, Homo sapien
atttctcatgggggcagaggagaaaagattgca

SEQ ID NO: 327612 - DNA, 33 bp, Homo sapien
atttctcatgggggcataggagaaaagattgca

SEQ ID NO: 327613 - DNA, 33 bp, Homo sapien
cagaatcctccccgctcacgttttatcttagta

SEQ ID NO: 327614 - DNA, 33 bp, Homo sapien
cagaatcctccccgctgacgttttatcttagta

SEQ ID NO: 327615 - DNA, 33 bp, Homo sapien
acaatgtggaggccaacctggcatgagacagtt

SEQ ID NO: 327616 - DNA, 33 bp, Homo sapien
acaatgtggaggccaatctggcatgagacagtt

SEQ ID NO: 327617 - DNA, 33 bp, Homo sapien
tctcaattcatcttcacaacttgcagctaaagc

SEQ ID NO: 327618 - DNA, 33 bp, Homo sapien
tctcaattcatcttcataacttgcagctaaagc

SEQ ID NO: 327619 - DNA, 33 bp, Homo sapien
tgtggagcaacttttcccagtacttgaatcctg

SEQ ID NO: 327620 - DNA, 33 bp, Homo sapien
tgtggagcaacttttctcagtacttgaatcctg

SEQ ID NO: 327621 - DNA, 33 bp, Homo sapien
tgaaaacattaacttcaaagaacggattgtgtt

SEQ ID NO: 327622 - DNA, 33 bp, Homo sapien
tgaaaacattaacttccaagaacggattgtgtt

SEQ ID NO: 327623 - DNA, 33 bp, Homo sapien
gcctgagatctgaacaaatggagaaaatgagta

SEQ ID NO: 327624 - DNA, 33 bp, Homo sapien
gcctgagatctgaacagatggagaaaatgagta

SEQ ID NO: 327625 - DNA, 33 bp, Homo sapien
tcccactatattcaaccgaggtgggctctgtct

SEQ ID NO: 327626 - DNA, 33 bp, Homo sapien
tcccactatattcaactgaggtgggctctgtct

SEQ ID NO: 327627 - DNA, 33 bp, Homo sapien
agaattctgaggtttagaattctccaatggaaa

SEQ ID NO: 327628 - DNA, 33 bp, Homo sapien
agaattctgaggtttataattctccaatggaaa

SEQ ID NO: 327629 - DNA, 33 bp, Homo sapien
cagatagacctgctaacggaactccaggaagag

SEQ ID NO: 327630 - DNA, 33 bp, Homo sapien
cagatagacctgctaagggaactccaggaagag

SEQ ID NO: 327631 - DNA, 33 bp, Homo sapien
ggtctatctgcctctcactctgagctctgccct

SEQ ID NO: 327632 - DNA, 33 bp, Homo sapien
ggtctatctgcctctcgctctgagctctgccct

SEQ ID NO: 327633 - DNA, 33 bp, Homo sapien
gggagctgtaagaagacgtacaatgagaatgtg

SEQ ID NO: 327634 - DNA, 33 bp, Homo sapien
gggagctgtaagaagaggtacaatgagaatgtg

SEQ ID NO: 327635 - DNA, 33 bp, Homo sapien
caaattgggcgacagaagaataccttgtctgca

SEQ ID NO: 327636 - DNA, 33 bp, Homo sapien
caaattgggcgacagaggaataccttgtctgca

SEQ ID NO: 327637 - DNA, 33 bp, Homo sapien
atgaaaggtggtctccaatctgcactaagtttg

SEQ ID NO: 327638 - DNA, 33 bp, Homo sapien
atgaaaggtggtctccgatctgcactaagtttg

SEQ ID NO: 327639 - DNA, 33 bp, Homo sapien
cagagaatccctcaaacggcccatgtttctgcc

SEQ ID NO: 327640 - DNA, 33 bp, Homo sapien
cagagaatccctcaaatggcccatgtttctgcc

SEQ ID NO: 327641 - DNA, 33 bp, Homo sapien
caattaccatgccacaaaatcattcactttgaa

SEQ ID NO: 327642 - DNA, 33 bp, Homo sapien
caattaccatgccacagaatcattcactttgaa

SEQ ID NO: 327643 - DNA, 33 bp, Homo sapien
cacaggccagtagtgtaaataataagacccctt

SEQ ID NO: 327644 - DNA, 33 bp, Homo sapien
cacaggccagtagtgtcaataataagacccctt

SEQ ID NO: 327645 - DNA, 33 bp, Homo sapien
ttggttcttttactcactctttgatgtattcac

SEQ ID NO: 327646 - DNA, 33 bp, Homo sapien
ttggttcttttactcattctttgatgtattcac

SEQ ID NO: 327647 - DNA, 33 bp, Homo sapien
tgagtagctgaaagaacggctggttacttggtt

SEQ ID NO: 327648 - DNA, 33 bp, Homo sapien
tgagtagctgaaagaatggctggttacttggtt

SEQ ID NO: 327649 - DNA, 33 bp, Homo sapien
aaaaagtaacttggaacaccagatcgagcagca

SEQ ID NO: 327650 - DNA, 33 bp, Homo sapien
aaaaagtaacttggaataccagatcgagcagca

SEQ ID NO: 327651 - DNA, 33 bp, Homo sapien
gctgtttatcacaagaagcactatctaaaatgc

SEQ ID NO: 327652 - DNA, 33 bp, Homo sapien
gctgtttatcacaagaggcactatctaaaatgc

SEQ ID NO: 327653 - DNA, 33 bp, Homo sapien
tggttggaccaggcaaactttaacactgaaaga

SEQ ID NO: 327654 - DNA, 33 bp, Homo sapien
tggttggaccaggcaagctttaacactgaaaga

SEQ ID NO: 327655 - DNA, 33 bp, Homo sapien
agtagacagcaagctaaattctactataccaga

SEQ ID NO: 327656 - DNA, 33 bp, Homo sapien
agtagacagcaagctacattctactataccaga

SEQ ID NO: 327657 - DNA, 33 bp, Homo sapien
gccagacacaaaagaactgttattcagaaggtt

SEQ ID NO: 327658 - DNA, 33 bp, Homo sapien
gccagacacaaaagaagtgttattcagaaggtt

SEQ ID NO: 327659 - DNA, 33 bp, Homo sapien
tagaatacaaagaagaataaagccaacgccata

SEQ ID NO: 327660 - DNA, 33 bp, Homo sapien
tagaatacaaagaagagtaaagccaacgccata

SEQ ID NO: 327661 - DNA, 33 bp, Homo sapien
tgcttaaggaactgtgccaaatgtctatggcgt

SEQ ID NO: 327662 - DNA, 33 bp, Homo sapien
tgcttaaggaactgtggcaaatgtctatggcgt

SEQ ID NO: 327663 - DNA, 33 bp, Homo sapien
agagaaaatttagacccacagagagacaccagg

SEQ ID NO: 327664 - DNA, 33 bp, Homo sapien
agagaaaatttagacctacagagagacaccagg

SEQ ID NO: 327665 - DNA, 33 bp, Homo sapien
aagtactgaagtggaacgattcttgtcttagac

SEQ ID NO: 327666 - DNA, 33 bp, Homo sapien
aagtactgaagtggaatgattcttgtcttagac

SEQ ID NO: 327667 - DNA, 33 bp, Homo sapien
ttaccatatgtggtcacagaacccaaggatcca

SEQ ID NO: 327668 - DNA, 33 bp, Homo sapien
ttaccatatgtggtcatagaacccaaggatcca

SEQ ID NO: 327669 - DNA, 33 bp, Homo sapien
aagaccttgtcttaaaaaagagaatgtgtccag

SEQ ID NO: 327670 - DNA, 33 bp, Homo sapien
aagaccttgtcttaaagaagagaatgtgtccag

SEQ ID NO: 327671 - DNA, 33 bp, Homo sapien
tgaatgaaaaacgaaacgaacaaattgcagaaa

SEQ ID NO: 327672 - DNA, 33 bp, Homo sapien
tgaatgaaaaacgaaatgaacaaattgcagaaa

SEQ ID NO: 327673 - DNA, 33 bp, Homo sapien
atatacccaatacataagaagggtccacaaata

SEQ ID NO: 327674 - DNA, 33 bp, Homo sapien
atatacccaatacatacgaagggtccacaaata

SEQ ID NO: 327675 - DNA, 33 bp, Homo sapien
gggttagagttttaaaacaaagaatggcacaat

SEQ ID NO: 327676 - DNA, 33 bp, Homo sapien
gggttagagttttaaaccaaagaatggcacaat

SEQ ID NO: 327677 - DNA, 33 bp, Homo sapien
atggaatgggaccaaaatataacagaaagcagt

SEQ ID NO: 327678 - DNA, 33 bp, Homo sapien
atggaatgggaccaaattataacagaaagcagt

SEQ ID NO: 327679 - DNA, 33 bp, Homo sapien
ggcactagcacaaatacgtttccttccattctc

SEQ ID NO: 327680 - DNA, 33 bp, Homo sapien
ggcactagcacaaatatgtttccttccattctc

SEQ ID NO: 327681 - DNA, 33 bp, Homo sapien
cccatcttccgcagcaaaggcataaatccagag

SEQ ID NO: 327682 - DNA, 33 bp, Homo sapien
cccatcttccgcagcacaggcataaatccagag

SEQ ID NO: 327683 - DNA, 33 bp, Homo sapien
ctctctgtgtggaagcaccctgctcagacccaa

SEQ ID NO: 327684 - DNA, 33 bp, Homo sapien
ctctctgtgtggaagcgccctgctcagacccaa

SEQ ID NO: 327685 - DNA, 33 bp, Homo sapien
ctggcctaccgaacaccgagctaataaatgggt

SEQ ID NO: 327686 - DNA, 33 bp, Homo sapien
ctggcctaccgaacactgagctaataaatgggt

SEQ ID NO: 327687 - DNA, 33 bp, Homo sapien
gtagtgcatcttgctaagggttttatgatattg

SEQ ID NO: 327688 - DNA, 33 bp, Homo sapien
gtagtgcatcttgctaggggttttatgatattg

SEQ ID NO: 327689 - DNA, 33 bp, Homo sapien
tactatttacaacacccggcttagtagggatca

SEQ ID NO: 327690 - DNA, 33 bp, Homo sapien
tactatttacaacacctggcttagtagggatca

SEQ ID NO: 327691 - DNA, 33 bp, Homo sapien
ccttatgtgcatttaaagagcctgatgtgtcag

SEQ ID NO: 327692 - DNA, 33 bp, Homo sapien
ccttatgtgcatttaaggagcctgatgtgtcag

SEQ ID NO: 327693 - DNA, 33 bp, Homo sapien
aaaaaatagagtgtgcgagatttctggatttgc

SEQ ID NO: 327694 - DNA, 33 bp, Homo sapien
aaaaaatagagtgtgctagatttctggatttgc

SEQ ID NO: 327695 - DNA, 33 bp, Homo sapien
tgtgcttgctccctccactttcacagtctatag

SEQ ID NO: 327696 - DNA, 33 bp, Homo sapien
tgtgcttgctccctccgctttcacagtctatag

SEQ ID NO: 327697 - DNA, 33 bp, Homo sapien
cttagacttttggaaaatgacagctgtggtttt

SEQ ID NO: 327698 - DNA, 33 bp, Homo sapien
cttagacttttggaaagtgacagctgtggtttt

SEQ ID NO: 327699 - DNA, 33 bp, Homo sapien
aggaagaggaagtaaacaatgatgtggatttgc

SEQ ID NO: 327700 - DNA, 33 bp, Homo sapien
aggaagaggaagtaaataatgatgtggatttgc

SEQ ID NO: 327701 - DNA, 33 bp, Homo sapien
cagatgttcaagttagaaattctctctctggca

SEQ ID NO: 327702 - DNA, 33 bp, Homo sapien
cagatgttcaagttaggaattctctctctggca

SEQ ID NO: 327703 - DNA, 33 bp, Homo sapien
agatgtgttagtatcaaatggaaacctttgttg

SEQ ID NO: 327704 - DNA, 33 bp, Homo sapien
agatgtgttagtatcatatggaaacctttgttg

SEQ ID NO: 327705 - DNA, 33 bp, Homo sapien
ctattttctgggattgacaatagtaaaaatgac

SEQ ID NO: 327706 - DNA, 33 bp, Homo sapien
ctattttctgggattggcaatagtaaaaatgac

SEQ ID NO: 327707 - DNA, 33 bp, Homo sapien
ccaggctgtttaagacgcaaaggaggttgttgt

SEQ ID NO: 327708 - DNA, 33 bp, Homo sapien
ccaggctgtttaagactcaaaggaggttgttgt

SEQ ID NO: 327709 - DNA, 33 bp, Homo sapien
ggacaattgtagtacaagataatctccccattt

SEQ ID NO: 327710 - DNA, 33 bp, Homo sapien
ggacaattgtagtacaggataatctccccattt

SEQ ID NO: 327711 - DNA, 33 bp, Homo sapien
gcagacccggtggaacaacctccatgctgaacc

SEQ ID NO: 327712 - DNA, 33 bp, Homo sapien
gcagacccggtggaacgacctccatgctgaacc

SEQ ID NO: 327713 - DNA, 33 bp, Homo sapien
acacaagcaagggagacgagaaaggaagaaaga

SEQ ID NO: 327714 - DNA, 33 bp, Homo sapien
acacaagcaagggagaggagaaaggaagaaaga

SEQ ID NO: 327715 - DNA, 33 bp, Homo sapien
tttctccaaagccttacgtacttacaagtcttt

SEQ ID NO: 327716 - DNA, 33 bp, Homo sapien
tttctccaaagccttatgtacttacaagtcttt

SEQ ID NO: 327717 - DNA, 33 bp, Homo sapien
agtacttagcctcctacgcagaaaagggttaat

SEQ ID NO: 327718 - DNA, 33 bp, Homo sapien
agtacttagcctcctatgcagaaaagggttaat

SEQ ID NO: 327719 - DNA, 33 bp, Homo sapien
ggaggctaagtacttacaacagacctttgcagc

SEQ ID NO: 327720 - DNA, 33 bp, Homo sapien
ggaggctaagtacttagaacagacctttgcagc

SEQ ID NO: 327721 - DNA, 33 bp, Homo sapien
ccaaacctcatagtccaaagagagaaaacagag

SEQ ID NO: 327722 - DNA, 33 bp, Homo sapien
ccaaacctcatagtccgaagagagaaaacagag

SEQ ID NO: 327723 - DNA, 33 bp, Homo sapien
ggtgtgactagccccacatacatgacatatcaa

SEQ ID NO: 327724 - DNA, 33 bp, Homo sapien
ggtgtgactagccccatatacatgacatatcaa

SEQ ID NO: 327725 - DNA, 33 bp, Homo sapien
tgaacatgacctgtgacgtgcaacttgcctttt

SEQ ID NO: 327726 - DNA, 33 bp, Homo sapien
tgaacatgacctgtgatgtgcaacttgcctttt

SEQ ID NO: 327727 - DNA, 33 bp, Homo sapien
cacaggtcatgttcaacgagaagccagttgtct

SEQ ID NO: 327728 - DNA, 33 bp, Homo sapien
cacaggtcatgttcaatgagaagccagttgtct

SEQ ID NO: 327729 - DNA, 33 bp, Homo sapien
ccagagtcaggatggaaggaactcaatgtcctt

SEQ ID NO: 327730 - DNA, 33 bp, Homo sapien
ccagagtcaggatggacggaactcaatgtcctt

SEQ ID NO: 327731 - DNA, 33 bp, Homo sapien
agtgcctgagaatgaaaacctctgatagtagcc

SEQ ID NO: 327732 - DNA, 33 bp, Homo sapien
agtgcctgagaatgaagacctctgatagtagcc

SEQ ID NO: 327733 - DNA, 33 bp, Homo sapien
ccttttcagttcctacacaactgtctttgagtt

SEQ ID NO: 327734 - DNA, 33 bp, Homo sapien
ccttttcagttcctacgcaactgtctttgagtt

SEQ ID NO: 327735 - DNA, 33 bp, Homo sapien
aagaatcaattcatgacggccacgagttttccg

SEQ ID NO: 327736 - DNA, 33 bp, Homo sapien
aagaatcaattcatgatggccacgagttttccg

SEQ ID NO: 327737 - DNA, 33 bp, Homo sapien
tttaatctcatggaccagaatgtagtcacataa

SEQ ID NO: 327738 - DNA, 33 bp, Homo sapien
tttaatctcatggaccggaatgtagtcacataa

SEQ ID NO: 327739 - DNA, 33 bp, Homo sapien
tttcctaaaatgggacacttcgttctggtctct

SEQ ID NO: 327740 - DNA, 33 bp, Homo sapien
tttcctaaaatgggacccttcgttctggtctct

SEQ ID NO: 327741 - DNA, 33 bp, Homo sapien
cagttctccagtcaaaccaatgatgcttctttg

SEQ ID NO: 327742 - DNA, 33 bp, Homo sapien
cagttctccagtcaaatcaatgatgcttctttg

SEQ ID NO: 327743 - DNA, 33 bp, Homo sapien
aaagctcatgctgttcgaactggaattacaatt

SEQ ID NO: 327744 - DNA, 33 bp, Homo sapien
aaagctcatgctgttctaactggaattacaatt

SEQ ID NO: 327745 - DNA, 33 bp, Homo sapien
tgccagtgattcttgcaaaggaatgtttgggga

SEQ ID NO: 327746 - DNA, 33 bp, Homo sapien
tgccagtgattcttgctaaggaatgtttgggga

SEQ ID NO: 327747 - DNA, 33 bp, Homo sapien
gtatttggtaaatcagaaatcatctccatgcta

SEQ ID NO: 327748 - DNA, 33 bp, Homo sapien
gtatttggtaaatcaggaatcatctccatgcta

SEQ ID NO: 327749 - DNA, 33 bp, Homo sapien
atttccacctctgcacggaagactcaataaaga

SEQ ID NO: 327750 - DNA, 33 bp, Homo sapien
atttccacctctgcactgaagactcaataaaga

SEQ ID NO: 327751 - DNA, 33 bp, Homo sapien
gcaatttgcttagaaacagtggccataagccag

SEQ ID NO: 327752 - DNA, 33 bp, Homo sapien
gcaatttgcttagaaatagtggccataagccag

SEQ ID NO: 327753 - DNA, 33 bp, Homo sapien
ctttctttctatcatacggtgccatctttcata

SEQ ID NO: 327754 - DNA, 33 bp, Homo sapien
ctttctttctatcatatggtgccatctttcata

SEQ ID NO: 327755 - DNA, 33 bp, Homo sapien
cttacctgattttgacagaaggaacaaaatcca

SEQ ID NO: 327756 - DNA, 33 bp, Homo sapien
cttacctgattttgacggaaggaacaaaatcca

SEQ ID NO: 327757 - DNA, 33 bp, Homo sapien
acttttacaacagagaaggtagcttccgcagac

SEQ ID NO: 327758 - DNA, 33 bp, Homo sapien
acttttacaacagagagggtagcttccgcagac

SEQ ID NO: 327759 - DNA, 33 bp, Homo sapien
ggctcactgtccttctaactaattccactggcc

SEQ ID NO: 327760 - DNA, 33 bp, Homo sapien
ggctcactgtccttctgactaattccactggcc

SEQ ID NO: 327761 - DNA, 33 bp, Homo sapien
ttggatcatctctctccactgattcaatttgat

SEQ ID NO: 327762 - DNA, 33 bp, Homo sapien
ttggatcatctctctctactgattcaatttgat

SEQ ID NO: 327763 - DNA, 33 bp, Homo sapien
gtgaattgccagtaacaggtcctttctgatagt

SEQ ID NO: 327764 - DNA, 33 bp, Homo sapien
gtgaattgccagtaacgggtcctttctgatagt

SEQ ID NO: 327765 - DNA, 33 bp, Homo sapien
gcagacaagttttaggaattaggacacgagcat

SEQ ID NO: 327766 - DNA, 33 bp, Homo sapien
gcagacaagttttagggattaggacacgagcat

SEQ ID NO: 327767 - DNA, 33 bp, Homo sapien
aaaaataccctggataagaattcactgtcaact

SEQ ID NO: 327768 - DNA, 33 bp, Homo sapien
aaaaataccctggatatgaattcactgtcaact

SEQ ID NO: 327769 - DNA, 33 bp, Homo sapien
tgcttgcctttttttcaaatatgctgagcattt

SEQ ID NO: 327770 - DNA, 33 bp, Homo sapien
tgcttgcctttttttccaatatgctgagcattt

SEQ ID NO: 327771 - DNA, 33 bp, Homo sapien
aacgtagaaaaatgtaaacacacagaacgtaga

SEQ ID NO: 327772 - DNA, 33 bp, Homo sapien
aacgtagaaaaatgtagacacacagaacgtaga

SEQ ID NO: 327773 - DNA, 33 bp, Homo sapien
agatggtaaatttcaaacaagaactggatactc

SEQ ID NO: 327774 - DNA, 33 bp, Homo sapien
agatggtaaatttcaagcaagaactggatactc

SEQ ID NO: 327775 - DNA, 33 bp, Homo sapien
tgtcctcaagtctctgcattccagccctgagta

SEQ ID NO: 327776 - DNA, 33 bp, Homo sapien
tgtcctcaagtctctgtattccagccctgagta

SEQ ID NO: 327777 - DNA, 33 bp, Homo sapien
aggaataaataactccaaaagtgtgagcagtca

SEQ ID NO: 327778 - DNA, 33 bp, Homo sapien
aggaataaataactccgaaagtgtgagcagtca

SEQ ID NO: 327779 - DNA, 33 bp, Homo sapien
acttcagctcctgttccccaaattcaactacgg

SEQ ID NO: 327780 - DNA, 33 bp, Homo sapien
acttcagctcctgttctccaaattcaactacgg

SEQ ID NO: 327781 - DNA, 33 bp, Homo sapien
ctttcccagcgttgggcacattccacacataca

SEQ ID NO: 327782 - DNA, 33 bp, Homo sapien
ctttcccagcgttgggtacattccacacataca

SEQ ID NO: 327783 - DNA, 33 bp, Homo sapien
tctgttaaactcacaacatcgtcttagcttctt

SEQ ID NO: 327784 - DNA, 33 bp, Homo sapien
tctgttaaactcacaatatcgtcttagcttctt

SEQ ID NO: 327785 - DNA, 33 bp, Homo sapien
tttactatatgtcaccacattgagttagagcac

SEQ ID NO: 327786 - DNA, 33 bp, Homo sapien
tttactatatgtcaccccattgagttagagcac

SEQ ID NO: 327787 - DNA, 33 bp, Homo sapien
gagagtcagggaaaaacagtagggagaatcagc

SEQ ID NO: 327788 - DNA, 33 bp, Homo sapien
gagagtcagggaaaaatagtagggagaatcagc

SEQ ID NO: 327789 - DNA, 33 bp, Homo sapien
taaaaacaagaaaacacattggccgtttctata

SEQ ID NO: 327790 - DNA, 33 bp, Homo sapien
taaaaacaagaaaacatattggccgtttctata

SEQ ID NO: 327791 - DNA, 33 bp, Homo sapien
tattccaaaattgttaaaattcccaaatctgga

SEQ ID NO: 327792 - DNA, 33 bp, Homo sapien
tattccaaaattgttagaattcccaaatctgga

SEQ ID NO: 327793 - DNA, 33 bp, Homo sapien
cagttgactgagttaacaagaaaggagatcatt

SEQ ID NO: 327794 - DNA, 33 bp, Homo sapien
cagttgactgagttaataagaaaggagatcatt

SEQ ID NO: 327795 - DNA, 33 bp, Homo sapien
ggtccatagaactggcaaataagtcaaaataat

SEQ ID NO: 327796 - DNA, 33 bp, Homo sapien
ggtccatagaactggctaataagtcaaaataat

SEQ ID NO: 327797 - DNA, 33 bp, Homo sapien
ttttattttttccataacacactgtcttctgac

SEQ ID NO: 327798 - DNA, 33 bp, Homo sapien
ttttattttttccatagcacactgtcttctgac

SEQ ID NO: 327799 - DNA, 33 bp, Homo sapien
atcatttttgtttggcaaaattctgagataaac

SEQ ID NO: 327800 - DNA, 33 bp, Homo sapien
atcatttttgtttggcgaaattctgagataaac

SEQ ID NO: 327801 - DNA, 33 bp, Homo sapien
gattagaggctctcaacataaatttaaccaaga

SEQ ID NO: 327802 - DNA, 33 bp, Homo sapien
gattagaggctctcaatataaatttaaccaaga

SEQ ID NO: 327803 - DNA, 33 bp, Homo sapien
actgattgcatttctacgatgagtccctactgt

SEQ ID NO: 327804 - DNA, 33 bp, Homo sapien
actgattgcatttctatgatgagtccctactgt

SEQ ID NO: 327805 - DNA, 33 bp, Homo sapien
catactagagaagtcacactcaatgaggaaaac

SEQ ID NO: 327806 - DNA, 33 bp, Homo sapien
catactagagaagtcatactcaatgaggaaaac

SEQ ID NO: 327807 - DNA, 33 bp, Homo sapien
aacatcctggaactggacataccttcatagcct

SEQ ID NO: 327808 - DNA, 33 bp, Homo sapien
aacatcctggaactggtcataccttcatagcct

SEQ ID NO: 327809 - DNA, 33 bp, Homo sapien
ttggtaatcatggataactggtagatgcttcag

SEQ ID NO: 327810 - DNA, 33 bp, Homo sapien
ttggtaatcatggatatctggtagatgcttcag

SEQ ID NO: 327811 - DNA, 33 bp, Homo sapien
gtggacggttcagatgacaaagcaacggtttct

SEQ ID NO: 327812 - DNA, 33 bp, Homo sapien
gtggacggttcagatggcaaagcaacggtttct

SEQ ID NO: 327813 - DNA, 33 bp, Homo sapien
aaaacaggagtctgcaacatcagattgtagcat

SEQ ID NO: 327814 - DNA, 33 bp, Homo sapien
aaaacaggagtctgcagcatcagattgtagcat

SEQ ID NO: 327815 - DNA, 33 bp, Homo sapien
gagcatgtgtatgcaaatctctctctctctctc

SEQ ID NO: 327816 - DNA, 33 bp, Homo sapien
gagcatgtgtatgcaattctctctctctctctc

SEQ ID NO: 327817 - DNA, 33 bp, Homo sapien
actgggaggtaggttccatccttttggttttct

SEQ ID NO: 327818 - DNA, 33 bp, Homo sapien
actgggaggtaggttctatccttttggttttct

SEQ ID NO: 327819 - DNA, 33 bp, Homo sapien
agagagaaaggtcctcacccacagtcgtagacc

SEQ ID NO: 327820 - DNA, 33 bp, Homo sapien
agagagaaaggtcctcgcccacagtcgtagacc

SEQ ID NO: 327821 - DNA, 33 bp, Homo sapien
cagggaggaagagccacatatacggttgagaca

SEQ ID NO: 327822 - DNA, 33 bp, Homo sapien
cagggaggaagagccatatatacggttgagaca

SEQ ID NO: 327823 - DNA, 33 bp, Homo sapien
atatacggttgagacaagctatggaagcccagt

SEQ ID NO: 327824 - DNA, 33 bp, Homo sapien
atatacggttgagacacgctatggaagcccagt

SEQ ID NO: 327825 - DNA, 33 bp, Homo sapien
aagctccgaagaacagcagtctacgaaaaacaa

SEQ ID NO: 327826 - DNA, 33 bp, Homo sapien
aagctccgaagaacagtagtctacgaaaaacaa

SEQ ID NO: 327827 - DNA, 33 bp, Homo sapien
accattgtgttctctgaatggcctaatggaacc

SEQ ID NO: 327828 - DNA, 33 bp, Homo sapien
accattgtgttctctggatggcctaatggaacc

SEQ ID NO: 327829 - DNA, 33 bp, Homo sapien
actctgctttgctaccagaaacctacttctaag

SEQ ID NO: 327830 - DNA, 33 bp, Homo sapien
actctgctttgctaccggaaacctacttctaag

SEQ ID NO: 327831 - DNA, 33 bp, Homo sapien
tggatatgcccagccacgggtttgtgagaattg

SEQ ID NO: 327832 - DNA, 33 bp, Homo sapien
tggatatgcccagccatgggtttgtgagaattg

SEQ ID NO: 327833 - DNA, 33 bp, Homo sapien
cccgtttatccgatcaaaatagacaggagctgg

SEQ ID NO: 327834 - DNA, 33 bp, Homo sapien
cccgtttatccgatcagaatagacaggagctgg

SEQ ID NO: 327835 - DNA, 33 bp, Homo sapien
tcactcagggatcagccaaggttaatcacaatg

SEQ ID NO: 327836 - DNA, 33 bp, Homo sapien
tcactcagggatcagctaaggttaatcacaatg

SEQ ID NO: 327837 - DNA, 33 bp, Homo sapien
attacccaacaaaccactaggcagggaatgaca

SEQ ID NO: 327838 - DNA, 33 bp, Homo sapien
attacccaacaaaccattaggcagggaatgaca

SEQ ID NO: 327839 - DNA, 33 bp, Homo sapien
tttgctaatcttgggaagcaggccttcaagaac

SEQ ID NO: 327840 - DNA, 33 bp, Homo sapien
tttgctaatcttgggatgcaggccttcaagaac

SEQ ID NO: 327841 - DNA, 33 bp, Homo sapien
aatgattgcaaaatcacgagcttaggaatcctt

SEQ ID NO: 327842 - DNA, 33 bp, Homo sapien
aatgattgcaaaatcatgagcttaggaatcctt

SEQ ID NO: 327843 - DNA, 33 bp, Homo sapien
agaattttggagaagacgtacctaactaaagtc

SEQ ID NO: 327844 - DNA, 33 bp, Homo sapien
agaattttggagaagatgtacctaactaaagtc

SEQ ID NO: 327845 - DNA, 33 bp, Homo sapien
gatcagcccagggaccaatgcacagtaagtgtt

SEQ ID NO: 327846 - DNA, 33 bp, Homo sapien
gatcagcccagggaccgatgcacagtaagtgtt

SEQ ID NO: 327847 - DNA, 33 bp, Homo sapien
tgagttccagtttggccgaggatgccacagact

SEQ ID NO: 327848 - DNA, 33 bp, Homo sapien
tgagttccagtttggctgaggatgccacagact

SEQ ID NO: 327849 - DNA, 33 bp, Homo sapien
agtgtatgtaagggagacggtttagtcatttgc

SEQ ID NO: 327850 - DNA, 33 bp, Homo sapien
agtgtatgtaagggagtcggtttagtcatttgc

SEQ ID NO: 327851 - DNA, 33 bp, Homo sapien
tcaatatccagtaagactctaagatcgtgcttt

SEQ ID NO: 327852 - DNA, 33 bp, Homo sapien
tcaatatccagtaagattctaagatcgtgcttt

SEQ ID NO: 327853 - DNA, 33 bp, Homo sapien
ttcatctcttgcctgccatatgaggaatatctc

SEQ ID NO: 327854 - DNA, 33 bp, Homo sapien
ttcatctcttgcctgcgatatgaggaatatctc

SEQ ID NO: 327855 - DNA, 33 bp, Homo sapien
ttgtttgagaaatgaacgcctagcgcaagaaat

SEQ ID NO: 327856 - DNA, 33 bp, Homo sapien
ttgtttgagaaatgaatgcctagcgcaagaaat

SEQ ID NO: 327857 - DNA, 33 bp, Homo sapien
atagctacataaacaccggaaaataggtcggca

SEQ ID NO: 327858 - DNA, 33 bp, Homo sapien
atagctacataaacactggaaaataggtcggca

SEQ ID NO: 327859 - DNA, 33 bp, Homo sapien
ctcatcttggagggaaaaaagatacattgctgt

SEQ ID NO: 327860 - DNA, 33 bp, Homo sapien
ctcatcttggagggaacaaagatacattgctgt

SEQ ID NO: 327861 - DNA, 33 bp, Homo sapien
ctgttactgagtcaaaagggttgcttatatgtg

SEQ ID NO: 327862 - DNA, 33 bp, Homo sapien
ctgttactgagtcaaaggggttgcttatatgtg

SEQ ID NO: 327863 - DNA, 33 bp, Homo sapien
ttgcacccttaatatcacattcactcctgagac

SEQ ID NO: 327864 - DNA, 33 bp, Homo sapien
ttgcacccttaatatcgcattcactcctgagac

SEQ ID NO: 327865 - DNA, 33 bp, Homo sapien
ctctgtgtcctgttccagcagcactctgagcat

SEQ ID NO: 327866 - DNA, 33 bp, Homo sapien
ctctgtgtcctgttccggcagcactctgagcat

SEQ ID NO: 327867 - DNA, 33 bp, Homo sapien
agactgcagtgctgaactgaacctcagaatggg

SEQ ID NO: 327868 - DNA, 33 bp, Homo sapien
agactgcagtgctgaattgaacctcagaatggg

SEQ ID NO: 327869 - DNA, 33 bp, Homo sapien
ctgctcctctcggtccagcttcttagagcaatt

SEQ ID NO: 327870 - DNA, 33 bp, Homo sapien
ctgctcctctcggtccggcttcttagagcaatt

SEQ ID NO: 327871 - DNA, 33 bp, Homo sapien
ccagggtccggacacaagggtatccaaatgatt

SEQ ID NO: 327872 - DNA, 33 bp, Homo sapien
ccagggtccggacacaggggtatccaaatgatt

SEQ ID NO: 327873 - DNA, 33 bp, Homo sapien
cagatgtctctgagctaagcaaagtgagtgtct

SEQ ID NO: 327874 - DNA, 33 bp, Homo sapien
cagatgtctctgagctcagcaaagtgagtgtct

SEQ ID NO: 327875 - DNA, 33 bp, Homo sapien
gtccctgaaaagattccacctgaactgacacca

SEQ ID NO: 327876 - DNA, 33 bp, Homo sapien
gtccctgaaaagattctacctgaactgacacca

SEQ ID NO: 327877 - DNA, 33 bp, Homo sapien
agtacgtagtcacacacaggctaatgcatacat

SEQ ID NO: 327878 - DNA, 33 bp, Homo sapien
agtacgtagtcacacataggctaatgcatacat

SEQ ID NO: 327879 - DNA, 33 bp, Homo sapien
tgttcacctgtgtacaatcatataccgtttgtc

SEQ ID NO: 327880 - DNA, 33 bp, Homo sapien
tgttcacctgtgtacagtcatataccgtttgtc

SEQ ID NO: 327881 - DNA, 33 bp, Homo sapien
acatgcatatccagtacataataggacacaggt

SEQ ID NO: 327882 - DNA, 33 bp, Homo sapien
acatgcatatccagtatataataggacacaggt

SEQ ID NO: 327883 - DNA, 33 bp, Homo sapien
aaagctcaagacccaaagctaattttattaata

SEQ ID NO: 327884 - DNA, 33 bp, Homo sapien
aaagctcaagacccaaggctaattttattaata

SEQ ID NO: 327885 - DNA, 33 bp, Homo sapien
aagcaaacttccttgacggttgtatggacccta

SEQ ID NO: 327886 - DNA, 33 bp, Homo sapien
aagcaaacttccttgatggttgtatggacccta

SEQ ID NO: 327887 - DNA, 33 bp, Homo sapien
cctttgaatgcctcgacgaagggctactgggaa

SEQ ID NO: 327888 - DNA, 33 bp, Homo sapien
cctttgaatgcctcgatgaagggctactgggaa

SEQ ID NO: 327889 - DNA, 33 bp, Homo sapien
ccctcaattttgcagaatatcgaattacctaaa

SEQ ID NO: 327890 - DNA, 33 bp, Homo sapien
ccctcaattttgcagactatcgaattacctaaa

SEQ ID NO: 327891 - DNA, 33 bp, Homo sapien
aatcagtccatatacacgatacactcccttggt

SEQ ID NO: 327892 - DNA, 33 bp, Homo sapien
aatcagtccatatacatgatacactcccttggt

SEQ ID NO: 327893 - DNA, 33 bp, Homo sapien
aactgagacataaaaaacagtaacagaacaaac

SEQ ID NO: 327894 - DNA, 33 bp, Homo sapien
aactgagacataaaaagcagtaacagaacaaac

SEQ ID NO: 327895 - DNA, 33 bp, Homo sapien
ctcatggactctctcagaaagcactagacaggg

SEQ ID NO: 327896 - DNA, 33 bp, Homo sapien
ctcatggactctctcataaagcactagacaggg

SEQ ID NO: 327897 - DNA, 33 bp, Homo sapien
cacaaacctcaatgccaatagcattcagttcac

SEQ ID NO: 327898 - DNA, 33 bp, Homo sapien
cacaaacctcaatgccgatagcattcagttcac

SEQ ID NO: 327899 - DNA, 33 bp, Homo sapien
gagattttaactcaaaagaaagtaaagtcagga

SEQ ID NO: 327900 - DNA, 33 bp, Homo sapien
gagattttaactcaaaggaaagtaaagtcagga

SEQ ID NO: 327901 - DNA, 33 bp, Homo sapien
attagaagtaaggatacggaaaagagcaacaat

SEQ ID NO: 327902 - DNA, 33 bp, Homo sapien
attagaagtaaggatatggaaaagagcaacaat

SEQ ID NO: 327903 - DNA, 33 bp, Homo sapien
gtgaaattgtagcccacgtacagctcagcaaat

SEQ ID NO: 327904 - DNA, 33 bp, Homo sapien
gtgaaattgtagcccatgtacagctcagcaaat

SEQ ID NO: 327905 - DNA, 33 bp, Homo sapien
ctggggctgtcattgaaagaaagcagtgtgtat

SEQ ID NO: 327906 - DNA, 33 bp, Homo sapien
ctggggctgtcattgagagaaagcagtgtgtat

SEQ ID NO: 327907 - DNA, 33 bp, Homo sapien
ccatcacttccttcaacattgctgaggatttct

SEQ ID NO: 327908 - DNA, 33 bp, Homo sapien
ccatcacttccttcaatattgctgaggatttct

SEQ ID NO: 327909 - DNA, 33 bp, Homo sapien
catgcttcaagtaggactcacactctgcctata

SEQ ID NO: 327910 - DNA, 33 bp, Homo sapien
catgcttcaagtaggattcacactctgcctata

SEQ ID NO: 327911 - DNA, 33 bp, Homo sapien
agagagacacataggcaagaaaatgcatttcaa

SEQ ID NO: 327912 - DNA, 33 bp, Homo sapien
agagagacacataggcgagaaaatgcatttcaa

SEQ ID NO: 327913 - DNA, 33 bp, Homo sapien
acagacattttgcataagaattgtagtgccaag

SEQ ID NO: 327914 - DNA, 33 bp, Homo sapien
acagacattttgcataggaattgtagtgccaag

SEQ ID NO: 327915 - DNA, 33 bp, Homo sapien
aatgaatgccataatccctgtgttttttgtccc

SEQ ID NO: 327916 - DNA, 33 bp, Homo sapien
aatgaatgccataatctctgtgttttttgtccc

SEQ ID NO: 327917 - DNA, 33 bp, Homo sapien
acttaaaaggcagaacaagagtaataatacctg

SEQ ID NO: 327918 - DNA, 33 bp, Homo sapien
acttaaaaggcagaacgagagtaataatacctg

SEQ ID NO: 327919 - DNA, 33 bp, Homo sapien
ccctgaatccctcttggatcctcttccaacaat

SEQ ID NO: 327920 - DNA, 33 bp, Homo sapien
ccctgaatccctcttgtatcctcttccaacaat

SEQ ID NO: 327921 - DNA, 33 bp, Homo sapien
agataagcatctacctcagagataagttggacc

SEQ ID NO: 327922 - DNA, 33 bp, Homo sapien
agataagcatctacctgagagataagttggacc

SEQ ID NO: 327923 - DNA, 33 bp, Homo sapien
gggcacgtgggagagaaaaaatttggatatccc

SEQ ID NO: 327924 - DNA, 33 bp, Homo sapien
gggcacgtgggagagagaaaatttggatatccc

SEQ ID NO: 327925 - DNA, 33 bp, Homo sapien
agctgaagaactataacgaaaggcctggattgt

SEQ ID NO: 327926 - DNA, 33 bp, Homo sapien
agctgaagaactataatgaaaggcctggattgt

SEQ ID NO: 327927 - DNA, 33 bp, Homo sapien
tgtgagcacagttccaagtactgcagaaagacg

SEQ ID NO: 327928 - DNA, 33 bp, Homo sapien
tgtgagcacagttccaggtactgcagaaagacg

SEQ ID NO: 327929 - DNA, 33 bp, Homo sapien
agagaactcaaaaataataaggtatcaagaagt

SEQ ID NO: 327930 - DNA, 33 bp, Homo sapien
agagaactcaaaaatagtaaggtatcaagaagt

SEQ ID NO: 327931 - DNA, 33 bp, Homo sapien
gcatcttattctatcacactcacctattttgga

SEQ ID NO: 327932 - DNA, 33 bp, Homo sapien
gcatcttattctatcatactcacctattttgga

SEQ ID NO: 327933 - DNA, 33 bp, Homo sapien
cctaagttagtgtaatcagtgtagacttggagg

SEQ ID NO: 327934 - DNA, 33 bp, Homo sapien
cctaagttagtgtaatgagtgtagacttggagg

SEQ ID NO: 327935 - DNA, 33 bp, Homo sapien
gtgcttcaatgtcatcaagctctgagtggcgtt

SEQ ID NO: 327936 - DNA, 33 bp, Homo sapien
gtgcttcaatgtcatcgagctctgagtggcgtt

SEQ ID NO: 327937 - DNA, 33 bp, Homo sapien
ttccaactcattatgcaaaataaggcagaaaca

SEQ ID NO: 327938 - DNA, 33 bp, Homo sapien
ttccaactcattatgccaaataaggcagaaaca

SEQ ID NO: 327939 - DNA, 33 bp, Homo sapien
ttacccagcagaaccacattgtaagtgatagta

SEQ ID NO: 327940 - DNA, 33 bp, Homo sapien
ttacccagcagaaccatattgtaagtgatagta

SEQ ID NO: 327941 - DNA, 33 bp, Homo sapien
gtttgtttgttttaagaaaaggtctcatctctc

SEQ ID NO: 327942 - DNA, 33 bp, Homo sapien
gtttgtttgttttaaggaaaggtctcatctctc

SEQ ID NO: 327943 - DNA, 33 bp, Homo sapien
tcttcatctcaaccaccaaatcaaattgtctgc

SEQ ID NO: 327944 - DNA, 33 bp, Homo sapien
tcttcatctcaaccacgaaatcaaattgtctgc

SEQ ID NO: 327945 - DNA, 33 bp, Homo sapien
catgccaggagactccaataaaggaagtgagct

SEQ ID NO: 327946 - DNA, 33 bp, Homo sapien
catgccaggagactccgataaaggaagtgagct

SEQ ID NO: 327947 - DNA, 33 bp, Homo sapien
agaatggctggagctcacttcccaccacagcac

SEQ ID NO: 327948 - DNA, 33 bp, Homo sapien
agaatggctggagctcgcttcccaccacagcac

SEQ ID NO: 327949 - DNA, 33 bp, Homo sapien
actattttaagaagaagtggtattggttttctg

SEQ ID NO: 327950 - DNA, 33 bp, Homo sapien
actattttaagaagaattggtattggttttctg

SEQ ID NO: 327951 - DNA, 33 bp, Homo sapien
aattaaaaggaggaacaacattgatggaggaga

SEQ ID NO: 327952 - DNA, 33 bp, Homo sapien
aattaaaaggaggaaccacattgatggaggaga

SEQ ID NO: 327953 - DNA, 33 bp, Homo sapien
ttgaggtataatccacccaccagattattacac

SEQ ID NO: 327954 - DNA, 33 bp, Homo sapien
ttgaggtataatccactcaccagattattacac

SEQ ID NO: 327955 - DNA, 33 bp, Homo sapien
ttatatggatactctgaattttgttatcatcct

SEQ ID NO: 327956 - DNA, 33 bp, Homo sapien
ttatatggatactctggattttgttatcatcct

SEQ ID NO: 327957 - DNA, 33 bp, Homo sapien
cttcaagacaatctcaagacaactcacatggat

SEQ ID NO: 327958 - DNA, 33 bp, Homo sapien
cttcaagacaatctcaggacaactcacatggat

SEQ ID NO: 327959 - DNA, 33 bp, Homo sapien
gtctttaaaagactcacaaggattcttggacat

SEQ ID NO: 327960 - DNA, 33 bp, Homo sapien
gtctttaaaagactcataaggattcttggacat

SEQ ID NO: 327961 - DNA, 33 bp, Homo sapien
ttggcttccatcatcacgtctcttacttttctc

SEQ ID NO: 327962 - DNA, 33 bp, Homo sapien
ttggcttccatcatcatgtctcttacttttctc

SEQ ID NO: 327963 - DNA, 33 bp, Homo sapien
agaagtcgccatcctgaacgccagagcacaggc

SEQ ID NO: 327964 - DNA, 33 bp, Homo sapien
agaagtcgccatcctggacgccagagcacaggc

SEQ ID NO: 327965 - DNA, 33 bp, Homo sapien
tatcctaaatgtgagggattgaagtctacaatt

SEQ ID NO: 327966 - DNA, 33 bp, Homo sapien
tatcctaaatgtgaggtattgaagtctacaatt

SEQ ID NO: 327967 - DNA, 33 bp, Homo sapien
ccacaaacattaaaaaatacagactatgtgcca

SEQ ID NO: 327968 - DNA, 33 bp, Homo sapien
ccacaaacattaaaaattacagactatgtgcca

SEQ ID NO: 327969 - DNA, 33 bp, Homo sapien
aaagaaggtttaacccccaatctcttgggcatc

SEQ ID NO: 327970 - DNA, 33 bp, Homo sapien
aaagaaggtttaaccctcaatctcttgggcatc

SEQ ID NO: 327971 - DNA, 33 bp, Homo sapien
agtcacagttctttggccataaattgagagtta

SEQ ID NO: 327972 - DNA, 33 bp, Homo sapien
agtcacagttctttggtcataaattgagagtta

SEQ ID NO: 327973 - DNA, 33 bp, Homo sapien
tctgctcctcacagacaatctctgcctgaggat

SEQ ID NO: 327974 - DNA, 33 bp, Homo sapien
tctgctcctcacagacgatctctgcctgaggat

SEQ ID NO: 327975 - DNA, 33 bp, Homo sapien
gataatttggaaagaaacttttgctcctgctgg

SEQ ID NO: 327976 - DNA, 33 bp, Homo sapien
gataatttggaaagaaccttttgctcctgctgg

SEQ ID NO: 327977 - DNA, 33 bp, Homo sapien
aatggaaacaaaaaatgacaattcatgtgaggc

SEQ ID NO: 327978 - DNA, 33 bp, Homo sapien
aatggaaacaaaaaattacaattcatgtgaggc

SEQ ID NO: 327979 - DNA, 33 bp, Homo sapien
tatcttttttaatatgccacacctatgcctttg

SEQ ID NO: 327980 - DNA, 33 bp, Homo sapien
tatcttttttaatatggcacacctatgcctttg

SEQ ID NO: 327981 - DNA, 33 bp, Homo sapien
aagtaagtttgtctgacgtgactttcatcatct

SEQ ID NO: 327982 - DNA, 33 bp, Homo sapien
aagtaagtttgtctgatgtgactttcatcatct

SEQ ID NO: 327983 - DNA, 33 bp, Homo sapien
agtcgggccaggtaaaaaggcttcacatcatgg

SEQ ID NO: 327984 - DNA, 33 bp, Homo sapien
agtcgggccaggtaaagaggcttcacatcatgg

SEQ ID NO: 327985 - DNA, 33 bp, Homo sapien
acttataaaacagcacagaatgtacatttctgc

SEQ ID NO: 327986 - DNA, 33 bp, Homo sapien
acttataaaacagcacggaatgtacatttctgc

SEQ ID NO: 327987 - DNA, 33 bp, Homo sapien
tcctcacagccttcagaaagaaccaattctgcc

SEQ ID NO: 327988 - DNA, 33 bp, Homo sapien
tcctcacagccttcaggaagaaccaattctgcc

SEQ ID NO: 327989 - DNA, 33 bp, Homo sapien
atcctgataaaacatgacacatcaaatttggaa

SEQ ID NO: 327990 - DNA, 33 bp, Homo sapien
atcctgataaaacatggcacatcaaatttggaa

SEQ ID NO: 327991 - DNA, 33 bp, Homo sapien
catgttcacattacaaagggcagcacttgggat

SEQ ID NO: 327992 - DNA, 33 bp, Homo sapien
catgttcacattacaaggggcagcacttgggat

SEQ ID NO: 327993 - DNA, 33 bp, Homo sapien
ctcttaaatagagaggcatgtttgagtaatgtt

SEQ ID NO: 327994 - DNA, 33 bp, Homo sapien
ctcttaaatagagaggtatgtttgagtaatgtt

SEQ ID NO: 327995 - DNA, 33 bp, Homo sapien
agtaattgccaagacactgaaggctgcagagat

SEQ ID NO: 327996 - DNA, 33 bp, Homo sapien
agtaattgccaagacagtgaaggctgcagagat

SEQ ID NO: 327997 - DNA, 33 bp, Homo sapien
gtaattactggacttacggtattggttgtgtta

SEQ ID NO: 327998 - DNA, 33 bp, Homo sapien
gtaattactggacttatggtattggttgtgtta

SEQ ID NO: 327999 - DNA, 33 bp, Homo sapien
ctttgttctgttcttacgagtttttaaaaataa

SEQ ID NO: 328000 - DNA, 33 bp, Homo sapien
ctttgttctgttcttatgagtttttaaaaataa

SEQ ID NO: 328001 - DNA, 33 bp, Homo sapien
tgtggtgcttatcgcaagtactcaagtcattct

SEQ ID NO: 328002 - DNA, 33 bp, Homo sapien
tgtggtgcttatcgcaggtactcaagtcattct

SEQ ID NO: 328003 - DNA, 33 bp, Homo sapien
gcacaactgatagatacgttttgacaagttcta

SEQ ID NO: 328004 - DNA, 33 bp, Homo sapien
gcacaactgatagatatgttttgacaagttcta

SEQ ID NO: 328005 - DNA, 33 bp, Homo sapien
atgccaacggaagaaggcctgtagttgctgaag

SEQ ID NO: 328006 - DNA, 33 bp, Homo sapien
atgccaacggaagaagtcctgtagttgctgaag

SEQ ID NO: 328007 - DNA, 33 bp, Homo sapien
gcaaattaaaatacacacacagaaagcaaaatt

SEQ ID NO: 328008 - DNA, 33 bp, Homo sapien
gcaaattaaaatacacgcacagaaagcaaaatt

SEQ ID NO: 328009 - DNA, 33 bp, Homo sapien
gtggccatgaacaaataaaatcacttcacctct

SEQ ID NO: 328010 - DNA, 33 bp, Homo sapien
gtggccatgaacaaatcaaatcacttcacctct

SEQ ID NO: 328011 - DNA, 33 bp, Homo sapien
ccactctctgccttcaataagaagagataccct

SEQ ID NO: 328012 - DNA, 33 bp, Homo sapien
ccactctctgccttcagtaagaagagataccct

SEQ ID NO: 328013 - DNA, 33 bp, Homo sapien
gcccactttgtgttcacacccagtcctcgcttg

SEQ ID NO: 328014 - DNA, 33 bp, Homo sapien
gcccactttgtgttcagacccagtcctcgcttg

SEQ ID NO: 328015 - DNA, 33 bp, Homo sapien
tgactcttctgagttacgaactgctgttgatag

SEQ ID NO: 328016 - DNA, 33 bp, Homo sapien
tgactcttctgagttatgaactgctgttgatag

SEQ ID NO: 328017 - DNA, 33 bp, Homo sapien
cttgtgtgcctgtacactcgtgtgatgctcact

SEQ ID NO: 328018 - DNA, 33 bp, Homo sapien
cttgtgtgcctgtacattcgtgtgatgctcact

SEQ ID NO: 328019 - DNA, 33 bp, Homo sapien
gatttgactaataaaacctggtccgttatcaga

SEQ ID NO: 328020 - DNA, 33 bp, Homo sapien
gatttgactaataaaagctggtccgttatcaga

SEQ ID NO: 328021 - DNA, 33 bp, Homo sapien
ggcacagatcctgaacgaatatgtaaggcttgt

SEQ ID NO: 328022 - DNA, 33 bp, Homo sapien
ggcacagatcctgaactaatatgtaaggcttgt

SEQ ID NO: 328023 - DNA, 33 bp, Homo sapien
gaaggactcacaagcaccgtgggaccagctgtt

SEQ ID NO: 328024 - DNA, 33 bp, Homo sapien
gaaggactcacaagcagcgtgggaccagctgtt

SEQ ID NO: 328025 - DNA, 33 bp, Homo sapien
taagtgaatgaaaggaagtgaattaaagaacat

SEQ ID NO: 328026 - DNA, 33 bp, Homo sapien
taagtgaatgaaaggacgtgaattaaagaacat

SEQ ID NO: 328027 - DNA, 33 bp, Homo sapien
atttaatgagcctcaacgttatgagaggtaggg

SEQ ID NO: 328028 - DNA, 33 bp, Homo sapien
atttaatgagcctcaaggttatgagaggtaggg

SEQ ID NO: 328029 - DNA, 33 bp, Homo sapien
tacctgtaaaataacaatgctaatacctactca

SEQ ID NO: 328030 - DNA, 33 bp, Homo sapien
tacctgtaaaataacattgctaatacctactca

SEQ ID NO: 328031 - DNA, 33 bp, Homo sapien
acagcccccacttcaaagagaagagtcctactg

SEQ ID NO: 328032 - DNA, 33 bp, Homo sapien
acagcccccacttcaacgagaagagtcctactg

SEQ ID NO: 328033 - DNA, 33 bp, Homo sapien
ttttcagggtgtgtaaaagtacagaaggtagaa

SEQ ID NO: 328034 - DNA, 33 bp, Homo sapien
ttttcagggtgtgtaagagtacagaaggtagaa

SEQ ID NO: 328035 - DNA, 33 bp, Homo sapien
ggcctggaatgacacacggtgtggacaagacat

SEQ ID NO: 328036 - DNA, 33 bp, Homo sapien
ggcctggaatgacacatggtgtggacaagacat

SEQ ID NO: 328037 - DNA, 33 bp, Homo sapien
ctttctaaggagagcccaccctggaccccataa

SEQ ID NO: 328038 - DNA, 33 bp, Homo sapien
ctttctaaggagagcctaccctggaccccataa

SEQ ID NO: 328039 - DNA, 33 bp, Homo sapien
aagcctagactcattgaatatgtgggagtgaag

SEQ ID NO: 328040 - DNA, 33 bp, Homo sapien
aagcctagactcattggatatgtgggagtgaag

SEQ ID NO: 328041 - DNA, 33 bp, Homo sapien
gtccttgtagattacaaggacaaacttgcttgt

SEQ ID NO: 328042 - DNA, 33 bp, Homo sapien
gtccttgtagattacagggacaaacttgcttgt

SEQ ID NO: 328043 - DNA, 33 bp, Homo sapien
accttaggagcttcacaactgtcctgcctgtta

SEQ ID NO: 328044 - DNA, 33 bp, Homo sapien
accttaggagcttcacgactgtcctgcctgtta

SEQ ID NO: 328045 - DNA, 33 bp, Homo sapien
gcaccctgccctgagcaaacagcacttctcaac

SEQ ID NO: 328046 - DNA, 33 bp, Homo sapien
gcaccctgccctgagcgaacagcacttctcaac

SEQ ID NO: 328047 - DNA, 33 bp, Homo sapien
atccatgctccaggcacagtaaggctacatact

SEQ ID NO: 328048 - DNA, 33 bp, Homo sapien
atccatgctccaggcagagtaaggctacatact

SEQ ID NO: 328049 - DNA, 33 bp, Homo sapien
ctctctatgtcctatcactgcgttttggtagga

SEQ ID NO: 328050 - DNA, 33 bp, Homo sapien
ctctctatgtcctatcgctgcgttttggtagga

SEQ ID NO: 328051 - DNA, 33 bp, Homo sapien
tgacaggtgtgttttgaatgtagctcccatgct

SEQ ID NO: 328052 - DNA, 33 bp, Homo sapien
tgacaggtgtgttttgcatgtagctcccatgct

SEQ ID NO: 328053 - DNA, 33 bp, Homo sapien
ctagatgttatttctgaatctgcttctggagaa

SEQ ID NO: 328054 - DNA, 33 bp, Homo sapien
ctagatgttatttctgcatctgcttctggagaa

SEQ ID NO: 328055 - DNA, 33 bp, Homo sapien
gcaaaggttgctgaagcaataattatataggat

SEQ ID NO: 328056 - DNA, 33 bp, Homo sapien
gcaaaggttgctgaagtaataattatataggat

SEQ ID NO: 328057 - DNA, 33 bp, Homo sapien
gtgaggccaaccagcaaattctattactcaaac

SEQ ID NO: 328058 - DNA, 33 bp, Homo sapien
gtgaggccaaccagcacattctattactcaaac

SEQ ID NO: 328059 - DNA, 33 bp, Homo sapien
cttcttccctcctggaaacttgcatggctggag

SEQ ID NO: 328060 - DNA, 33 bp, Homo sapien
cttcttccctcctggagacttgcatggctggag

SEQ ID NO: 328061 - DNA, 33 bp, Homo sapien
taattgcttctgggcacgattttggggtgaaac

SEQ ID NO: 328062 - DNA, 33 bp, Homo sapien
taattgcttctgggcatgattttggggtgaaac

SEQ ID NO: 328063 - DNA, 33 bp, Homo sapien
acttcatcacactgaaaacttatgatctaaaca

SEQ ID NO: 328064 - DNA, 33 bp, Homo sapien
acttcatcacactgaacacttatgatctaaaca

SEQ ID NO: 328065 - DNA, 33 bp, Homo sapien
aacaaacaacacacagcagcttgggtggagact

SEQ ID NO: 328066 - DNA, 33 bp, Homo sapien
aacaaacaacacacaggagcttgggtggagact

SEQ ID NO: 328067 - DNA, 33 bp, Homo sapien
ggaaaacagcaagtcccagccaaatggaggcaa

SEQ ID NO: 328068 - DNA, 33 bp, Homo sapien
ggaaaacagcaagtcctagccaaatggaggcaa

SEQ ID NO: 328069 - DNA, 33 bp, Homo sapien
ggggaagaattttgagaccttgagtaattgaga

SEQ ID NO: 328070 - DNA, 33 bp, Homo sapien
ggggaagaattttgaggccttgagtaattgaga

SEQ ID NO: 328071 - DNA, 33 bp, Homo sapien
gattgcttaggtatacaagtgaaaatgcctccc

SEQ ID NO: 328072 - DNA, 33 bp, Homo sapien
gattgcttaggtatacgagtgaaaatgcctccc

SEQ ID NO: 328073 - DNA, 33 bp, Homo sapien
aagaacatgctgaaaaataccaccaatatagag

SEQ ID NO: 328074 - DNA, 33 bp, Homo sapien
aagaacatgctgaaaagtaccaccaatatagag

SEQ ID NO: 328075 - DNA, 33 bp, Homo sapien
ttccttgcttaattccaaaattctttacagcag

SEQ ID NO: 328076 - DNA, 33 bp, Homo sapien
ttccttgcttaattcccaaattctttacagcag

SEQ ID NO: 328077 - DNA, 33 bp, Homo sapien
acacatcaaccatctaaaaattcctcttttctg

SEQ ID NO: 328078 - DNA, 33 bp, Homo sapien
acacatcaaccatctagaaattcctcttttctg

SEQ ID NO: 328079 - DNA, 33 bp, Homo sapien
gaattaattttttagcacagaagtcggccaatc

SEQ ID NO: 328080 - DNA, 33 bp, Homo sapien
gaattaattttttagcgcagaagtcggccaatc

SEQ ID NO: 328081 - DNA, 33 bp, Homo sapien
atctgataaaccaagcccatgctatcgctttca

SEQ ID NO: 328082 - DNA, 33 bp, Homo sapien
atctgataaaccaagctcatgctatcgctttca

SEQ ID NO: 328083 - DNA, 33 bp, Homo sapien
gtttaaacagtgagcaagtaaaaaaggtgtaag

SEQ ID NO: 328084 - DNA, 33 bp, Homo sapien
gtttaaacagtgagcaggtaaaaaaggtgtaag

SEQ ID NO: 328085 - DNA, 33 bp, Homo sapien
gatcactgtcttgagacgcatcagttaatcatc

SEQ ID NO: 328086 - DNA, 33 bp, Homo sapien
gatcactgtcttgagatgcatcagttaatcatc

SEQ ID NO: 328087 - DNA, 33 bp, Homo sapien
ccggcaacagcgggtcaccccattgtgtagcga

SEQ ID NO: 328088 - DNA, 33 bp, Homo sapien
ccggcaacagcgggtcgccccattgtgtagcga

SEQ ID NO: 328089 - DNA, 33 bp, Homo sapien
tctctgcacaaacgtaaacagatggagagatcg

SEQ ID NO: 328090 - DNA, 33 bp, Homo sapien
tctctgcacaaacgtagacagatggagagatcg

SEQ ID NO: 328091 - DNA, 33 bp, Homo sapien
gaggcattagcatccaagttcaatattctgaga

SEQ ID NO: 328092 - DNA, 33 bp, Homo sapien
gaggcattagcatccacgttcaatattctgaga

SEQ ID NO: 328093 - DNA, 33 bp, Homo sapien
acagaccctggattacagcaaaaaattgttact

SEQ ID NO: 328094 - DNA, 33 bp, Homo sapien
acagaccctggattacggcaaaaaattgttact

SEQ ID NO: 328095 - DNA, 33 bp, Homo sapien
tgctgatgattttctgcaaacattttaattgac

SEQ ID NO: 328096 - DNA, 33 bp, Homo sapien
tgctgatgattttctggaaacattttaattgac

SEQ ID NO: 328097 - DNA, 33 bp, Homo sapien
tccatcaccagaataacaaagcacatgatcaaa

SEQ ID NO: 328098 - DNA, 33 bp, Homo sapien
tccatcaccagaataagaaagcacatgatcaaa

SEQ ID NO: 328099 - DNA, 33 bp, Homo sapien
tctaactgtcaaatacaccttacttaatttttt

SEQ ID NO: 328100 - DNA, 33 bp, Homo sapien
tctaactgtcaaatacgccttacttaatttttt

SEQ ID NO: 328101 - DNA, 33 bp, Homo sapien
agagtacagatggagaaatcagcagtaagcaca

SEQ ID NO: 328102 - DNA, 33 bp, Homo sapien
agagtacagatggagagatcagcagtaagcaca

SEQ ID NO: 328103 - DNA, 33 bp, Homo sapien
cataaccttgagcagaaccttgcccaacataac

SEQ ID NO: 328104 - DNA, 33 bp, Homo sapien
cataaccttgagcagatccttgcccaacataac

SEQ ID NO: 328105 - DNA, 33 bp, Homo sapien
gattctgtgttttcccagcttctgccaaacata

SEQ ID NO: 328106 - DNA, 33 bp, Homo sapien
gattctgtgttttcccggcttctgccaaacata

SEQ ID NO: 328107 - DNA, 33 bp, Homo sapien
aacgtaatgagaaataacttctgagtgcagcca

SEQ ID NO: 328108 - DNA, 33 bp, Homo sapien
aacgtaatgagaaatagcttctgagtgcagcca

SEQ ID NO: 328109 - DNA, 33 bp, Homo sapien
ttgaagtgattcttgacgaaggatgatagaaat

SEQ ID NO: 328110 - DNA, 33 bp, Homo sapien
ttgaagtgattcttgatgaaggatgatagaaat

SEQ ID NO: 328111 - DNA, 33 bp, Homo sapien
tacattggtttctccacacaggaggagtttttg

SEQ ID NO: 328112 - DNA, 33 bp, Homo sapien
tacattggtttctccagacaggaggagtttttg

SEQ ID NO: 328113 - DNA, 33 bp, Homo sapien
ccttaggaaacaaaagccttgccagtcttcatg

SEQ ID NO: 328114 - DNA, 33 bp, Homo sapien
ccttaggaaacaaaaggcttgccagtcttcatg

SEQ ID NO: 328115 - DNA, 33 bp, Homo sapien
gcagaaaggacttgcccaaggatacaatgcaaa

SEQ ID NO: 328116 - DNA, 33 bp, Homo sapien
gcagaaaggacttgcctaaggatacaatgcaaa

SEQ ID NO: 328117 - DNA, 33 bp, Homo sapien
tttgggttccccgagaaagtctagtgtctaacc

SEQ ID NO: 328118 - DNA, 33 bp, Homo sapien
tttgggttccccgagagagtctagtgtctaacc

SEQ ID NO: 328119 - DNA, 33 bp, Homo sapien
ttcaattattcttctaaccactaatcacaaaaa

SEQ ID NO: 328120 - DNA, 33 bp, Homo sapien
ttcaattattcttctatccactaatcacaaaaa

SEQ ID NO: 328121 - DNA, 33 bp, Homo sapien
tatccaatctcatacaagcccatgtgtgtctgt

SEQ ID NO: 328122 - DNA, 33 bp, Homo sapien
tatccaatctcatacacgcccatgtgtgtctgt

SEQ ID NO: 328123 - DNA, 33 bp, Homo sapien
gggctaagcttgcaaacggaggtcctagaagcc

SEQ ID NO: 328124 - DNA, 33 bp, Homo sapien
gggctaagcttgcaaatggaggtcctagaagcc

SEQ ID NO: 328125 - DNA, 33 bp, Homo sapien
tccaaaaagttttatgaaacagtgtatagtaaa

SEQ ID NO: 328126 - DNA, 33 bp, Homo sapien
tccaaaaagttttatggaacagtgtatagtaaa

SEQ ID NO: 328127 - DNA, 33 bp, Homo sapien
agatttgtgtctggaacccagatgagcctaaag

SEQ ID NO: 328128 - DNA, 33 bp, Homo sapien
agatttgtgtctggaatccagatgagcctaaag

SEQ ID NO: 328129 - DNA, 33 bp, Homo sapien
ttttggagtagaggaaataaaagtcaaattcat

SEQ ID NO: 328130 - DNA, 33 bp, Homo sapien
ttttggagtagaggaagtaaaagtcaaattcat

SEQ ID NO: 328131 - DNA, 33 bp, Homo sapien
gttgcaaaaaatagcaaggagatttatgaatac

SEQ ID NO: 328132 - DNA, 33 bp, Homo sapien
gttgcaaaaaatagcatggagatttatgaatac

SEQ ID NO: 328133 - DNA, 33 bp, Homo sapien
cctgctttgaactcaccgtaggaattggagtct

SEQ ID NO: 328134 - DNA, 33 bp, Homo sapien
cctgctttgaactcactgtaggaattggagtct

SEQ ID NO: 328135 - DNA, 33 bp, Homo sapien
accgaatgttttcaaacgtgtgtattcctattt

SEQ ID NO: 328136 - DNA, 33 bp, Homo sapien
accgaatgttttcaaatgtgtgtattcctattt

SEQ ID NO: 328137 - DNA, 33 bp, Homo sapien
attgcataatgacaaacaagtttaagatcttgg

SEQ ID NO: 328138 - DNA, 33 bp, Homo sapien
attgcataatgacaaagaagtttaagatcttgg

SEQ ID NO: 328139 - DNA, 33 bp, Homo sapien
gaaactgcacattattcaaagcaactcatttaa

SEQ ID NO: 328140 - DNA, 33 bp, Homo sapien
gaaactgcacattattgaaagcaactcatttaa

SEQ ID NO: 328141 - DNA, 33 bp, Homo sapien
caacagaaaagcttccactgtcatgctgagcaa

SEQ ID NO: 328142 - DNA, 33 bp, Homo sapien
caacagaaaagcttcctctgtcatgctgagcaa

SEQ ID NO: 328143 - DNA, 33 bp, Homo sapien
atccatcaaatatcaacggtgccatcctaagca

SEQ ID NO: 328144 - DNA, 33 bp, Homo sapien
atccatcaaatatcaatggtgccatcctaagca

SEQ ID NO: 328145 - DNA, 33 bp, Homo sapien
taattgtggaacaaacacagaagtaaatgaaag

SEQ ID NO: 328146 - DNA, 33 bp, Homo sapien
taattgtggaacaaacgcagaagtaaatgaaag

SEQ ID NO: 328147 - DNA, 33 bp, Homo sapien
aaagaccctgtcattcaaacccctacagatggc

SEQ ID NO: 328148 - DNA, 33 bp, Homo sapien
aaagaccctgtcattcgaacccctacagatggc

SEQ ID NO: 328149 - DNA, 33 bp, Homo sapien
gggaacatttcagctaagtaggtacaatgtagg

SEQ ID NO: 328150 - DNA, 33 bp, Homo sapien
gggaacatttcagctatgtaggtacaatgtagg

SEQ ID NO: 328151 - DNA, 33 bp, Homo sapien
tacactcttctgcaaaaataactgattattgta

SEQ ID NO: 328152 - DNA, 33 bp, Homo sapien
tacactcttctgcaaatataactgattattgta

SEQ ID NO: 328153 - DNA, 33 bp, Homo sapien
tttctgtgctccttgcccaaacccctttttgtt

SEQ ID NO: 328154 - DNA, 33 bp, Homo sapien
tttctgtgctccttgctcaaacccctttttgtt

SEQ ID NO: 328155 - DNA, 33 bp, Homo sapien
agtaatgacacacaaaataaaatctctgcctcg

SEQ ID NO: 328156 - DNA, 33 bp, Homo sapien
agtaatgacacacaaagtaaaatctctgcctcg

SEQ ID NO: 328157 - DNA, 33 bp, Homo sapien
aagtcttaggaggtgacggtacacgattcatcc

SEQ ID NO: 328158 - DNA, 33 bp, Homo sapien
aagtcttaggaggtgatggtacacgattcatcc

SEQ ID NO: 328159 - DNA, 33 bp, Homo sapien
agcacttaccatgtgacacatcctggcctaagc

SEQ ID NO: 328160 - DNA, 33 bp, Homo sapien
agcacttaccatgtgatacatcctggcctaagc

SEQ ID NO: 328161 - DNA, 33 bp, Homo sapien
gataacaggttgtttaaaagtgtgtggaatgcc

SEQ ID NO: 328162 - DNA, 33 bp, Homo sapien
gataacaggttgtttacaagtgtgtggaatgcc

SEQ ID NO: 328163 - DNA, 33 bp, Homo sapien
gtcatctgttgtggacaaaattaccttagcttg

SEQ ID NO: 328164 - DNA, 33 bp, Homo sapien
gtcatctgttgtggacgaaattaccttagcttg

SEQ ID NO: 328165 - DNA, 33 bp, Homo sapien
agggaaacttggaaaacgaggctaaccattctc

SEQ ID NO: 328166 - DNA, 33 bp, Homo sapien
agggaaacttggaaaatgaggctaaccattctc

SEQ ID NO: 328167 - DNA, 33 bp, Homo sapien
taaaactgaaacagaccattaggtgttgccctg

SEQ ID NO: 328168 - DNA, 33 bp, Homo sapien
taaaactgaaacagactattaggtgttgccctg

SEQ ID NO: 328169 - DNA, 33 bp, Homo sapien
agatcaggttcctaccactgaggagcctgtaac

SEQ ID NO: 328170 - DNA, 33 bp, Homo sapien
agatcaggttcctaccgctgaggagcctgtaac

SEQ ID NO: 328171 - DNA, 33 bp, Homo sapien
ttgagtaagaaaactgcatttttgcagagttta

SEQ ID NO: 328172 - DNA, 33 bp, Homo sapien
ttgagtaagaaaactgtatttttgcagagttta

SEQ ID NO: 328173 - DNA, 33 bp, Homo sapien
gctctgactctgtacacggaattccttatcatc

SEQ ID NO: 328174 - DNA, 33 bp, Homo sapien
gctctgactctgtacatggaattccttatcatc

SEQ ID NO: 328175 - DNA, 33 bp, Homo sapien
gacaggtgtcctcccaagaggctctgactctgt

SEQ ID NO: 328176 - DNA, 33 bp, Homo sapien
gacaggtgtcctcccatgaggctctgactctgt

SEQ ID NO: 328177 - DNA, 33 bp, Homo sapien
ctaataaagttgctaaaggagcttaggactaag

SEQ ID NO: 328178 - DNA, 33 bp, Homo sapien
ctaataaagttgctaatggagcttaggactaag

SEQ ID NO: 328179 - DNA, 33 bp, Homo sapien
cacaaatggaagacaccgattaagctaataagc

SEQ ID NO: 328180 - DNA, 33 bp, Homo sapien
cacaaatggaagacactgattaagctaataagc

SEQ ID NO: 328181 - DNA, 33 bp, Homo sapien
tgggtggagggagaagaagtcccgggaaaatgg

SEQ ID NO: 328182 - DNA, 33 bp, Homo sapien
tgggtggagggagaagtagtcccgggaaaatgg

SEQ ID NO: 328183 - DNA, 33 bp, Homo sapien
ctagcactttcccgaacatatgcagtgacttct

SEQ ID NO: 328184 - DNA, 33 bp, Homo sapien
ctagcactttcccgaatatatgcagtgacttct

SEQ ID NO: 328185 - DNA, 33 bp, Homo sapien
aaaagaaagcattttgcacagagaatatttgta

SEQ ID NO: 328186 - DNA, 33 bp, Homo sapien
aaaagaaagcattttgtacagagaatatttgta

SEQ ID NO: 328187 - DNA, 33 bp, Homo sapien
ccatctcttcaaattccctgtctaacctcattt

SEQ ID NO: 328188 - DNA, 33 bp, Homo sapien
ccatctcttcaaattcgctgtctaacctcattt

SEQ ID NO: 328189 - DNA, 33 bp, Homo sapien
ctatctggccaataaaatatggttttttagaaa

SEQ ID NO: 328190 - DNA, 33 bp, Homo sapien
ctatctggccaataaagtatggttttttagaaa

SEQ ID NO: 328191 - DNA, 33 bp, Homo sapien
ccttctatattacaggaattatccatgcaatat

SEQ ID NO: 328192 - DNA, 33 bp, Homo sapien
ccttctatattacaggcattatccatgcaatat

SEQ ID NO: 328193 - DNA, 33 bp, Homo sapien
ctgaaatgtatcctacagcagtaagaaaatggt

SEQ ID NO: 328194 - DNA, 33 bp, Homo sapien
ctgaaatgtatcctacggcagtaagaaaatggt

SEQ ID NO: 328195 - DNA, 33 bp, Homo sapien
ttagacttaggtaaggccaataagaactcatta

SEQ ID NO: 328196 - DNA, 33 bp, Homo sapien
ttagacttaggtaagggcaataagaactcatta

SEQ ID NO: 328197 - DNA, 33 bp, Homo sapien
tacatatcttcgaataccctagaggaaagcaaa

SEQ ID NO: 328198 - DNA, 33 bp, Homo sapien
tacatatcttcgaatatcctagaggaaagcaaa

SEQ ID NO: 328199 - DNA, 33 bp, Homo sapien
attacctcctaaaagccccacctctaagtgcca

SEQ ID NO: 328200 - DNA, 33 bp, Homo sapien
attacctcctaaaagcgccacctctaagtgcca

SEQ ID NO: 328201 - DNA, 33 bp, Homo sapien
tgtctagaccactaataagctaattcgctttct

SEQ ID NO: 328202 - DNA, 33 bp, Homo sapien
tgtctagaccactaatgagctaattcgctttct

SEQ ID NO: 328203 - DNA, 33 bp, Homo sapien
gcatcgtcttctcctccctaacaatgaaagtct

SEQ ID NO: 328204 - DNA, 33 bp, Homo sapien
gcatcgtcttctcctctctaacaatgaaagtct

SEQ ID NO: 328205 - DNA, 33 bp, Homo sapien
ttggtccactggaatcacaataagacacttgtt

SEQ ID NO: 328206 - DNA, 33 bp, Homo sapien
ttggtccactggaatcgcaataagacacttgtt

SEQ ID NO: 328207 - DNA, 33 bp, Homo sapien
tgagtgtggtagattaagtgtttggctccaatt

SEQ ID NO: 328208 - DNA, 33 bp, Homo sapien
tgagtgtggtagattaggtgtttggctccaatt

SEQ ID NO: 328209 - DNA, 33 bp, Homo sapien
accatgttaagaggtacatcaggagccatcact

SEQ ID NO: 328210 - DNA, 33 bp, Homo sapien
accatgttaagaggtatatcaggagccatcact

SEQ ID NO: 328211 - DNA, 33 bp, Homo sapien
ctactgtaataatctaagtaagaaaggcaaaac

SEQ ID NO: 328212 - DNA, 33 bp, Homo sapien
ctactgtaataatctaggtaagaaaggcaaaac

SEQ ID NO: 328213 - DNA, 33 bp, Homo sapien
ctcttgaatataggaactggtgaatgtacaata

SEQ ID NO: 328214 - DNA, 33 bp, Homo sapien
ctcttgaatataggaattggtgaatgtacaata

SEQ ID NO: 328215 - DNA, 33 bp, Homo sapien
cgtttactgagaggtcagaacacagacttcaga

SEQ ID NO: 328216 - DNA, 33 bp, Homo sapien
cgtttactgagaggtcggaacacagacttcaga

SEQ ID NO: 328217 - DNA, 33 bp, Homo sapien
ctctagccttcaagaagagctatatttctgact

SEQ ID NO: 328218 - DNA, 33 bp, Homo sapien
ctctagccttcaagaatagctatatttctgact

SEQ ID NO: 328219 - DNA, 33 bp, Homo sapien
ttgttattatcatcaccattgtcgttgtcatat

SEQ ID NO: 328220 - DNA, 33 bp, Homo sapien
ttgttattatcatcactattgtcgttgtcatat

SEQ ID NO: 328221 - DNA, 33 bp, Homo sapien
ggttggagacttatcacattcactggcaacctg

SEQ ID NO: 328222 - DNA, 33 bp, Homo sapien
ggttggagacttatcatattcactggcaacctg

SEQ ID NO: 328223 - DNA, 33 bp, Homo sapien
aggattcaaagaggccagaaaaaatgtcctcat

SEQ ID NO: 328224 - DNA, 33 bp, Homo sapien
aggattcaaagaggccggaaaaaatgtcctcat

SEQ ID NO: 328225 - DNA, 33 bp, Homo sapien
tgagacagagtccagaatctcactttgttaccc

SEQ ID NO: 328226 - DNA, 33 bp, Homo sapien
tgagacagagtccagagtctcactttgttaccc

SEQ ID NO: 328227 - DNA, 33 bp, Homo sapien
aaattgtattatttccaatccccatgcctttgc

SEQ ID NO: 328228 - DNA, 33 bp, Homo sapien
aaattgtattatttcccatccccatgcctttgc

SEQ ID NO: 328229 - DNA, 33 bp, Homo sapien
tattttttatactttcaattggcgattttgaac

SEQ ID NO: 328230 - DNA, 33 bp, Homo sapien
tattttttatactttcgattggcgattttgaac

SEQ ID NO: 328231 - DNA, 33 bp, Homo sapien
gacataaagtattcaccatgaaactaatggcaa

SEQ ID NO: 328232 - DNA, 33 bp, Homo sapien
gacataaagtattcactatgaaactaatggcaa

SEQ ID NO: 328233 - DNA, 33 bp, Homo sapien
tctgaggaaacataaccgctgaattccttccct

SEQ ID NO: 328234 - DNA, 33 bp, Homo sapien
tctgaggaaacataactgctgaattccttccct

SEQ ID NO: 328235 - DNA, 33 bp, Homo sapien
tatgatctagcaagaacgttaatgctgtaaata

SEQ ID NO: 328236 - DNA, 33 bp, Homo sapien
tatgatctagcaagaatgttaatgctgtaaata

SEQ ID NO: 328237 - DNA, 33 bp, Homo sapien
gtagcagcatcagtgaataccagcaaatgtgac

SEQ ID NO: 328238 - DNA, 33 bp, Homo sapien
gtagcagcatcagtgagtaccagcaaatgtgac

SEQ ID NO: 328239 - DNA, 33 bp, Homo sapien
ggctttacccacgaaagaattcaagaacaggct

SEQ ID NO: 328240 - DNA, 33 bp, Homo sapien
ggctttacccacgaaataattcaagaacaggct

SEQ ID NO: 328241 - DNA, 33 bp, Homo sapien
ctcaactagatttttacgaattcacttcccttt

SEQ ID NO: 328242 - DNA, 33 bp, Homo sapien
ctcaactagatttttatgaattcacttcccttt

SEQ ID NO: 328243 - DNA, 33 bp, Homo sapien
gaactggaattacagccgctcaaagccaaggtg

SEQ ID NO: 328244 - DNA, 33 bp, Homo sapien
gaactggaattacagctgctcaaagccaaggtg

SEQ ID NO: 328245 - DNA, 33 bp, Homo sapien
tgaagatcatggagagaatgccaattgttaagg

SEQ ID NO: 328246 - DNA, 33 bp, Homo sapien
tgaagatcatggagaggatgccaattgttaagg

SEQ ID NO: 328247 - DNA, 33 bp, Homo sapien
taaattccgtgagggcccccgtgaagatcatgg

SEQ ID NO: 328248 - DNA, 33 bp, Homo sapien
taaattccgtgagggctcccgtgaagatcatgg

SEQ ID NO: 328249 - DNA, 33 bp, Homo sapien
agtccgtggtctgtcacgttcttttatcctgtg

SEQ ID NO: 328250 - DNA, 33 bp, Homo sapien
agtccgtggtctgtcatgttcttttatcctgtg

SEQ ID NO: 328251 - DNA, 33 bp, Homo sapien
ctatctctccccaaaaactgtgctcggtgactg

SEQ ID NO: 328252 - DNA, 33 bp, Homo sapien
ctatctctccccaaaacctgtgctcggtgactg

SEQ ID NO: 328253 - DNA, 33 bp, Homo sapien
atagagtcagctgtaactggagcataggaggag

SEQ ID NO: 328254 - DNA, 33 bp, Homo sapien
atagagtcagctgtaattggagcataggaggag

SEQ ID NO: 328255 - DNA, 33 bp, Homo sapien
tcaggggaaagccgagcagaaaagaatggatgc

SEQ ID NO: 328256 - DNA, 33 bp, Homo sapien
tcaggggaaagccgagtagaaaagaatggatgc

SEQ ID NO: 328257 - DNA, 33 bp, Homo sapien
ttaactctctaaggacaaggatgctagtttggt

SEQ ID NO: 328258 - DNA, 33 bp, Homo sapien
ttaactctctaaggaccaggatgctagtttggt

SEQ ID NO: 328259 - DNA, 33 bp, Homo sapien
ctcctgatgtactgaaagccgactgaggaatgg

SEQ ID NO: 328260 - DNA, 33 bp, Homo sapien
ctcctgatgtactgaaggccgactgaggaatgg

SEQ ID NO: 328261 - DNA, 33 bp, Homo sapien
gtgcatgagtcttgcaacctgcgtccaggaaaa

SEQ ID NO: 328262 - DNA, 33 bp, Homo sapien
gtgcatgagtcttgcatcctgcgtccaggaaaa

SEQ ID NO: 328263 - DNA, 33 bp, Homo sapien
ttggagcaaaaatgtacggacctccacagacca

SEQ ID NO: 328264 - DNA, 33 bp, Homo sapien
ttggagcaaaaatgtatggacctccacagacca

SEQ ID NO: 328265 - DNA, 33 bp, Homo sapien
tactcaatggccttggaaaaaaccatcaaccac

SEQ ID NO: 328266 - DNA, 33 bp, Homo sapien
tactcaatggccttgggaaaaaccatcaaccac

SEQ ID NO: 328267 - DNA, 33 bp, Homo sapien
tagaaggagttttgccccatcgtccaggctgga

SEQ ID NO: 328268 - DNA, 33 bp, Homo sapien
tagaaggagttttgccgcatcgtccaggctgga

SEQ ID NO: 328269 - DNA, 33 bp, Homo sapien
cctgttattgctctaacgctaaagctttgttgt

SEQ ID NO: 328270 - DNA, 33 bp, Homo sapien
cctgttattgctctaatgctaaagctttgttgt

SEQ ID NO: 328271 - DNA, 33 bp, Homo sapien
gcctggttggaattcaactttggaaaaaattgg

SEQ ID NO: 328272 - DNA, 33 bp, Homo sapien
gcctggttggaattcagctttggaaaaaattgg

SEQ ID NO: 328273 - DNA, 33 bp, Homo sapien
gttgtcagtaagggaaccttttctccagtctag

SEQ ID NO: 328274 - DNA, 33 bp, Homo sapien
gttgtcagtaagggaagcttttctccagtctag

SEQ ID NO: 328275 - DNA, 33 bp, Homo sapien
aatgccagcagtgcaccaaatgaggaagatatg

SEQ ID NO: 328276 - DNA, 33 bp, Homo sapien
aatgccagcagtgcactaaatgaggaagatatg

SEQ ID NO: 328277 - DNA, 33 bp, Homo sapien
tcagggcgattagcacaatctactgaaccaaat

SEQ ID NO: 328278 - DNA, 33 bp, Homo sapien
tcagggcgattagcactatctactgaaccaaat

SEQ ID NO: 328279 - DNA, 33 bp, Homo sapien
gttttccactggtgaccgaaacagtttatattt

SEQ ID NO: 328280 - DNA, 33 bp, Homo sapien
gttttccactggtgactgaaacagtttatattt

SEQ ID NO: 328281 - DNA, 33 bp, Homo sapien
aggaatgtgtactatacgctctttttaagtatg

SEQ ID NO: 328282 - DNA, 33 bp, Homo sapien
aggaatgtgtactatatgctctttttaagtatg

SEQ ID NO: 328283 - DNA, 33 bp, Homo sapien
ttaagtatgcatggaaaagttatagaaattgat

SEQ ID NO: 328284 - DNA, 33 bp, Homo sapien
ttaagtatgcatggaagagttatagaaattgat

SEQ ID NO: 328285 - DNA, 33 bp, Homo sapien
ggagaagatttaagacaagcgcacagattgaaa

SEQ ID NO: 328286 - DNA, 33 bp, Homo sapien
ggagaagatttaagaccagcgcacagattgaaa

SEQ ID NO: 328287 - DNA, 33 bp, Homo sapien
gtcccatgtaggaatacagtgaaattttaacaa

SEQ ID NO: 328288 - DNA, 33 bp, Homo sapien
gtcccatgtaggaatatagtgaaattttaacaa

SEQ ID NO: 328289 - DNA, 33 bp, Homo sapien
gtgacataccgtagtgaaaatgtcaggtggaag

SEQ ID NO: 328290 - DNA, 33 bp, Homo sapien
gtgacataccgtagtggaaatgtcaggtggaag

SEQ ID NO: 328291 - DNA, 33 bp, Homo sapien
gacttattctttgtggaatcaatcgccccttta

SEQ ID NO: 328292 - DNA, 33 bp, Homo sapien
gacttattctttgtggcatcaatcgccccttta

SEQ ID NO: 328293 - DNA, 33 bp, Homo sapien
caaagaaaagataacccgaaaaataagcttcca

SEQ ID NO: 328294 - DNA, 33 bp, Homo sapien
caaagaaaagataacctgaaaaataagcttcca

SEQ ID NO: 328295 - DNA, 33 bp, Homo sapien
cagggccccaggatgcaccaacgtgggccatat

SEQ ID NO: 328296 - DNA, 33 bp, Homo sapien
cagggccccaggatgcgccaacgtgggccatat

SEQ ID NO: 328297 - DNA, 33 bp, Homo sapien
tgctctttgggttgtacaggtcataagtgatac

SEQ ID NO: 328298 - DNA, 33 bp, Homo sapien
tgctctttgggttgtagaggtcataagtgatac

SEQ ID NO: 328299 - DNA, 33 bp, Homo sapien
cagtaacaccccacttaaaggacaacccacagg

SEQ ID NO: 328300 - DNA, 33 bp, Homo sapien
cagtaacaccccacttcaaggacaacccacagg

SEQ ID NO: 328301 - DNA, 33 bp, Homo sapien
gtgcctctgttacaggcaatttgtgctttaagg

SEQ ID NO: 328302 - DNA, 33 bp, Homo sapien
gtgcctctgttacaggtaatttgtgctttaagg

SEQ ID NO: 328303 - DNA, 33 bp, Homo sapien
ggagaattgaaggctaacaaaaaggcagcattc

SEQ ID NO: 328304 - DNA, 33 bp, Homo sapien
ggagaattgaaggctatcaaaaaggcagcattc

SEQ ID NO: 328305 - DNA, 33 bp, Homo sapien
tcctgcctaaactgccgcatggaacagaatgtc

SEQ ID NO: 328306 - DNA, 33 bp, Homo sapien
tcctgcctaaactgcctcatggaacagaatgtc

SEQ ID NO: 328307 - DNA, 33 bp, Homo sapien
atttaaggtcctctctgacactgggattttggg

SEQ ID NO: 328308 - DNA, 33 bp, Homo sapien
atttaaggtcctctcttacactgggattttggg

SEQ ID NO: 328309 - DNA, 33 bp, Homo sapien
actgttttcagctggacgtaaagctgcccagcc

SEQ ID NO: 328310 - DNA, 33 bp, Homo sapien
actgttttcagctggatgtaaagctgcccagcc

SEQ ID NO: 328311 - DNA, 33 bp, Homo sapien
ttgtggagaagatggacgtaccacgcctgagga

SEQ ID NO: 328312 - DNA, 33 bp, Homo sapien
ttgtggagaagatggatgtaccacgcctgagga

SEQ ID NO: 328313 - DNA, 33 bp, Homo sapien
aggagggttcccgtcacggcattgcctggcaag

SEQ ID NO: 328314 - DNA, 33 bp, Homo sapien
aggagggttcccgtcatggcattgcctggcaag

SEQ ID NO: 328315 - DNA, 33 bp, Homo sapien
cagtggtttaatccaacacatcccttctcacct

SEQ ID NO: 328316 - DNA, 33 bp, Homo sapien
cagtggtttaatccaatacatcccttctcacct

SEQ ID NO: 328317 - DNA, 33 bp, Homo sapien
gatagtacctgatacacagaaagccctttgtaa

SEQ ID NO: 328318 - DNA, 33 bp, Homo sapien
gatagtacctgatacatagaaagccctttgtaa

SEQ ID NO: 328319 - DNA, 33 bp, Homo sapien
ggacgaaggtgaacaaaaatggccaatataacc

SEQ ID NO: 328320 - DNA, 33 bp, Homo sapien
ggacgaaggtgaacaacaatggccaatataacc

SEQ ID NO: 328321 - DNA, 33 bp, Homo sapien
aaaactgaggcaacaaaaaaaaaatgccttgta

SEQ ID NO: 328322 - DNA, 33 bp, Homo sapien
aaaactgaggcaacaacaaaaaaatgccttgta

SEQ ID NO: 328323 - DNA, 33 bp, Homo sapien
taaacaagagaatcaaattacccagaatgaacc

SEQ ID NO: 328324 - DNA, 33 bp, Homo sapien
taaacaagagaatcaagttacccagaatgaacc

SEQ ID NO: 328325 - DNA, 33 bp, Homo sapien
aaactttgtttggaacagtcaactctcttctga

SEQ ID NO: 328326 - DNA, 33 bp, Homo sapien
aaactttgtttggaacggtcaactctcttctga

SEQ ID NO: 328327 - DNA, 33 bp, Homo sapien
gtgttacttaacgtaacggccagtcttaaacag

SEQ ID NO: 328328 - DNA, 33 bp, Homo sapien
gtgttacttaacgtaatggccagtcttaaacag

SEQ ID NO: 328329 - DNA, 33 bp, Homo sapien
ttcttaggactgccataagaaaagtcatcacaa

SEQ ID NO: 328330 - DNA, 33 bp, Homo sapien
ttcttaggactgccatgagaaaagtcatcacaa

SEQ ID NO: 328331 - DNA, 33 bp, Homo sapien
ctctgtctccacatgacctccatctctatgtat

SEQ ID NO: 328332 - DNA, 33 bp, Homo sapien
ctctgtctccacatgatctccatctctatgtat

SEQ ID NO: 328333 - DNA, 33 bp, Homo sapien
ggcgctgattcttttaacttttgcaattgtcct

SEQ ID NO: 328334 - DNA, 33 bp, Homo sapien
ggcgctgattcttttagcttttgcaattgtcct

SEQ ID NO: 328335 - DNA, 33 bp, Homo sapien
ctgaggctagagtcaaggttctaccccagatct

SEQ ID NO: 328336 - DNA, 33 bp, Homo sapien
ctgaggctagagtcaatgttctaccccagatct

SEQ ID NO: 328337 - DNA, 33 bp, Homo sapien
ggtcttcctaccaatacgcctttagcatcccag

SEQ ID NO: 328338 - DNA, 33 bp, Homo sapien
ggtcttcctaccaatatgcctttagcatcccag

SEQ ID NO: 328339 - DNA, 33 bp, Homo sapien
aatgtttctattccaccgtcagtattaacattg

SEQ ID NO: 328340 - DNA, 33 bp, Homo sapien
aatgtttctattccactgtcagtattaacattg

SEQ ID NO: 328341 - DNA, 33 bp, Homo sapien
ggcaccaagtcatgcaagtgcagatgtgaactc

SEQ ID NO: 328342 - DNA, 33 bp, Homo sapien
ggcaccaagtcatgcaggtgcagatgtgaactc

SEQ ID NO: 328343 - DNA, 33 bp, Homo sapien
tctgtgaaacaagtataaatggaatgtagagta

SEQ ID NO: 328344 - DNA, 33 bp, Homo sapien
tctgtgaaacaagtatgaatggaatgtagagta

SEQ ID NO: 328345 - DNA, 33 bp, Homo sapien
ggctttagataactgaaaacctgtttgaaaagt

SEQ ID NO: 328346 - DNA, 33 bp, Homo sapien
ggctttagataactgacaacctgtttgaaaagt

SEQ ID NO: 328347 - DNA, 33 bp, Homo sapien
aaccatgagtttgcccagctcaaagatagcggc

SEQ ID NO: 328348 - DNA, 33 bp, Homo sapien
aaccatgagtttgcccggctcaaagatagcggc

SEQ ID NO: 328349 - DNA, 33 bp, Homo sapien
tgtgtgtggcccagacagaggtgacaagtgggc

SEQ ID NO: 328350 - DNA, 33 bp, Homo sapien
tgtgtgtggcccagacggaggtgacaagtgggc

SEQ ID NO: 328351 - DNA, 33 bp, Homo sapien
ttgcgccaaagacagaagagatccctgcttcag

SEQ ID NO: 328352 - DNA, 33 bp, Homo sapien
ttgcgccaaagacagaggagatccctgcttcag

SEQ ID NO: 328353 - DNA, 33 bp, Homo sapien
gaggctataaaagtacagagtgtcactattatt

SEQ ID NO: 328354 - DNA, 33 bp, Homo sapien
gaggctataaaagtaccgagtgtcactattatt

SEQ ID NO: 328355 - DNA, 33 bp, Homo sapien
agatggtatcaaatcactgacatcttcaaaagt

SEQ ID NO: 328356 - DNA, 33 bp, Homo sapien
agatggtatcaaatcattgacatcttcaaaagt

SEQ ID NO: 328357 - DNA, 33 bp, Homo sapien
attattgataagcttcacccatctgtattgcca

SEQ ID NO: 328358 - DNA, 33 bp, Homo sapien
attattgataagcttcgcccatctgtattgcca

SEQ ID NO: 328359 - DNA, 33 bp, Homo sapien
taattatgtcttttaacgaggaatcaggacttc

SEQ ID NO: 328360 - DNA, 33 bp, Homo sapien
taattatgtcttttaatgaggaatcaggacttc

SEQ ID NO: 328361 - DNA, 33 bp, Homo sapien
caggattatttcagctaaacgcccagtatatct

SEQ ID NO: 328362 - DNA, 33 bp, Homo sapien
caggattatttcagctgaacgcccagtatatct

SEQ ID NO: 328363 - DNA, 33 bp, Homo sapien
taggtagggaagaaagcctggggatctattccc

SEQ ID NO: 328364 - DNA, 33 bp, Homo sapien
taggtagggaagaaagtctggggatctattccc

SEQ ID NO: 328365 - DNA, 33 bp, Homo sapien
tcattcaataaagcaacgtatgaatgcctgcct

SEQ ID NO: 328366 - DNA, 33 bp, Homo sapien
tcattcaataaagcaatgtatgaatgcctgcct

SEQ ID NO: 328367 - DNA, 33 bp, Homo sapien
atatctgcagcatttacagaaaatttgtgcacg

SEQ ID NO: 328368 - DNA, 33 bp, Homo sapien
atatctgcagcatttatagaaaatttgtgcacg

SEQ ID NO: 328369 - DNA, 33 bp, Homo sapien
agttagaaatggtcaacgctagcaaaatggaga

SEQ ID NO: 328370 - DNA, 33 bp, Homo sapien
agttagaaatggtcaatgctagcaaaatggaga

SEQ ID NO: 328371 - DNA, 33 bp, Homo sapien
tgcatccaattagtcccatagcaaccatttatt

SEQ ID NO: 328372 - DNA, 33 bp, Homo sapien
tgcatccaattagtcctatagcaaccatttatt

SEQ ID NO: 328373 - DNA, 33 bp, Homo sapien
ccatggcgggtgctgaaaagccagaagagagag

SEQ ID NO: 328374 - DNA, 33 bp, Homo sapien
ccatggcgggtgctgagaagccagaagagagag

SEQ ID NO: 328375 - DNA, 33 bp, Homo sapien
gttcttcaggtgcctacgctgggcttccaaatt

SEQ ID NO: 328376 - DNA, 33 bp, Homo sapien
gttcttcaggtgcctatgctgggcttccaaatt

SEQ ID NO: 328377 - DNA, 33 bp, Homo sapien
tacagaacagattgctaagatatggagacaaat

SEQ ID NO: 328378 - DNA, 33 bp, Homo sapien
tacagaacagattgctgagatatggagacaaat

SEQ ID NO: 328379 - DNA, 33 bp, Homo sapien
tgtgatggtgacaggacctcttgttttcaaata

SEQ ID NO: 328380 - DNA, 33 bp, Homo sapien
tgtgatggtgacaggagctcttgttttcaaata

SEQ ID NO: 328381 - DNA, 33 bp, Homo sapien
atcccagctactaggacggcactctttggccat

SEQ ID NO: 328382 - DNA, 33 bp, Homo sapien
atcccagctactaggatggcactctttggccat

SEQ ID NO: 328383 - DNA, 33 bp, Homo sapien
ctgaataaacaaatacacaatttcccagtgtgc

SEQ ID NO: 328384 - DNA, 33 bp, Homo sapien
ctgaataaacaaatacgcaatttcccagtgtgc

SEQ ID NO: 328385 - DNA, 33 bp, Homo sapien
atactcggttctgaccacaggagttgaatatca

SEQ ID NO: 328386 - DNA, 33 bp, Homo sapien
atactcggttctgaccgcaggagttgaatatca

SEQ ID NO: 328387 - DNA, 33 bp, Homo sapien
attccctgtgaatcatcataacccataggccac

SEQ ID NO: 328388 - DNA, 33 bp, Homo sapien
attccctgtgaatcattataacccataggccac

SEQ ID NO: 328389 - DNA, 33 bp, Homo sapien
gagatggactggcttcaattgtttaaaactggt

SEQ ID NO: 328390 - DNA, 33 bp, Homo sapien
gagatggactggcttccattgtttaaaactggt

SEQ ID NO: 328391 - DNA, 33 bp, Homo sapien
taaagacaaaaaattcaaaccatgtgacgatac

SEQ ID NO: 328392 - DNA, 33 bp, Homo sapien
taaagacaaaaaattccaaccatgtgacgatac

SEQ ID NO: 328393 - DNA, 33 bp, Homo sapien
aggggacttggcccacaaagtcggtagagatcc

SEQ ID NO: 328394 - DNA, 33 bp, Homo sapien
aggggacttggcccacgaagtcggtagagatcc

SEQ ID NO: 328395 - DNA, 33 bp, Homo sapien
acacctgggggccgagcattaaaagagaattag

SEQ ID NO: 328396 - DNA, 33 bp, Homo sapien
acacctgggggccgagtattaaaagagaattag

SEQ ID NO: 328397 - DNA, 33 bp, Homo sapien
ctatgcagatgacaaagctatgccttgtacact

SEQ ID NO: 328398 - DNA, 33 bp, Homo sapien
ctatgcagatgacaaatctatgccttgtacact

SEQ ID NO: 328399 - DNA, 33 bp, Homo sapien
ttcggaactccatttcgccacttgggctggatc

SEQ ID NO: 328400 - DNA, 33 bp, Homo sapien
ttcggaactccatttctccacttgggctggatc

SEQ ID NO: 328401 - DNA, 33 bp, Homo sapien
actgtgcctagaaagaactgccctgccacacct

SEQ ID NO: 328402 - DNA, 33 bp, Homo sapien
actgtgcctagaaagacctgccctgccacacct

SEQ ID NO: 328403 - DNA, 33 bp, Homo sapien
taaggcagcctggtgaaggccacatggtgaagg

SEQ ID NO: 328404 - DNA, 33 bp, Homo sapien
taaggcagcctggtgagggccacatggtgaagg

SEQ ID NO: 328405 - DNA, 33 bp, Homo sapien
tcagctgggagacaaacgtggctttcctcagag

SEQ ID NO: 328406 - DNA, 33 bp, Homo sapien
tcagctgggagacaaatgtggctttcctcagag

SEQ ID NO: 328407 - DNA, 33 bp, Homo sapien
aataaacgtctgcaacaaacaccagaggcagtc

SEQ ID NO: 328408 - DNA, 33 bp, Homo sapien
aataaacgtctgcaacgaacaccagaggcagtc

SEQ ID NO: 328409 - DNA, 33 bp, Homo sapien
tcatgtggttctccccaaactggtgcttgatgt

SEQ ID NO: 328410 - DNA, 33 bp, Homo sapien
tcatgtggttctccccgaactggtgcttgatgt

SEQ ID NO: 328411 - DNA, 33 bp, Homo sapien
gggcacagatgcagaaagttagagaccaaagca

SEQ ID NO: 328412 - DNA, 33 bp, Homo sapien
gggcacagatgcagaaggttagagaccaaagca

SEQ ID NO: 328413 - DNA, 33 bp, Homo sapien
aagaagctaatgctgacacaagccctggaaggc

SEQ ID NO: 328414 - DNA, 33 bp, Homo sapien
aagaagctaatgctgagacaagccctggaaggc

SEQ ID NO: 328415 - DNA, 33 bp, Homo sapien
cagtccgtagcaaccacgaacctactttctctt

SEQ ID NO: 328416 - DNA, 33 bp, Homo sapien
cagtccgtagcaaccatgaacctactttctctt

SEQ ID NO: 328417 - DNA, 33 bp, Homo sapien
ctaagttaattgataaaaacaaatcacttggca

SEQ ID NO: 328418 - DNA, 33 bp, Homo sapien
ctaagttaattgataacaacaaatcacttggca

SEQ ID NO: 328419 - DNA, 33 bp, Homo sapien
ccactttgtgcagaaccgtatggcaccaccctg

SEQ ID NO: 328420 - DNA, 33 bp, Homo sapien
ccactttgtgcagaactgtatggcaccaccctg

SEQ ID NO: 328421 - DNA, 33 bp, Homo sapien
gaaggacacagaccaaacttgatcatttccctc

SEQ ID NO: 328422 - DNA, 33 bp, Homo sapien
gaaggacacagaccaaccttgatcatttccctc

SEQ ID NO: 328423 - DNA, 33 bp, Homo sapien
cgagaaggctggtgccaccaacaaggactggag

SEQ ID NO: 328424 - DNA, 33 bp, Homo sapien
cgagaaggctggtgccgccaacaaggactggag

SEQ ID NO: 328425 - DNA, 33 bp, Homo sapien
tattctttaagcatcaatcacctcctgcaggaa

SEQ ID NO: 328426 - DNA, 33 bp, Homo sapien
tattctttaagcatcagtcacctcctgcaggaa

SEQ ID NO: 328427 - DNA, 33 bp, Homo sapien
gctaaacattctacaacggacagggcagcctct

SEQ ID NO: 328428 - DNA, 33 bp, Homo sapien
gctaaacattctacaatggacagggcagcctct

SEQ ID NO: 328429 - DNA, 33 bp, Homo sapien
gaaattcagaatgcacaatgcccaaaagggaaa

SEQ ID NO: 328430 - DNA, 33 bp, Homo sapien
gaaattcagaatgcacgatgcccaaaagggaaa

SEQ ID NO: 328431 - DNA, 33 bp, Homo sapien
agataactaattcttacgaggctattactaatg

SEQ ID NO: 328432 - DNA, 33 bp, Homo sapien
agataactaattcttatgaggctattactaatg

SEQ ID NO: 328433 - DNA, 33 bp, Homo sapien
tatggctactgaaggacggatttggttttgcca

SEQ ID NO: 328434 - DNA, 33 bp, Homo sapien
tatggctactgaaggatggatttggttttgcca

SEQ ID NO: 328435 - DNA, 33 bp, Homo sapien
attggaatattcctaacgtcagagagcttcata

SEQ ID NO: 328436 - DNA, 33 bp, Homo sapien
attggaatattcctaatgtcagagagcttcata

SEQ ID NO: 328437 - DNA, 33 bp, Homo sapien
atttattcattcaacaagcatctgctgctagca

SEQ ID NO: 328438 - DNA, 33 bp, Homo sapien
atttattcattcaacacgcatctgctgctagca

SEQ ID NO: 328439 - DNA, 33 bp, Homo sapien
agaaacgctcatacaacagaatattctgcagaa

SEQ ID NO: 328440 - DNA, 33 bp, Homo sapien
agaaacgctcatacaatagaatattctgcagaa

SEQ ID NO: 328441 - DNA, 33 bp, Homo sapien
gggttctttgctttaccgcacagctttctgttt

SEQ ID NO: 328442 - DNA, 33 bp, Homo sapien
gggttctttgctttactgcacagctttctgttt

SEQ ID NO: 328443 - DNA, 33 bp, Homo sapien
gggtacctggctcgtgaagttgtaatacataga

SEQ ID NO: 328444 - DNA, 33 bp, Homo sapien
gggtacctggctcgtgcagttgtaatacataga

SEQ ID NO: 328445 - DNA, 33 bp, Homo sapien
aagcagagcattggaacacttaaaagagcaggg

SEQ ID NO: 328446 - DNA, 33 bp, Homo sapien
aagcagagcattggaatacttaaaagagcaggg

SEQ ID NO: 328447 - DNA, 33 bp, Homo sapien
aataacaacaaattcaatgaaaatcatagacac

SEQ ID NO: 328448 - DNA, 33 bp, Homo sapien
aataacaacaaattcagtgaaaatcatagacac

SEQ ID NO: 328449 - DNA, 33 bp, Homo sapien
ttctcttatattttcagggacccaaaccatgtc

SEQ ID NO: 328450 - DNA, 33 bp, Homo sapien
ttctcttatattttcatggacccaaaccatgtc

SEQ ID NO: 328451 - DNA, 33 bp, Homo sapien
tatgcccaacatcagactctctgcagccccacc

SEQ ID NO: 328452 - DNA, 33 bp, Homo sapien
tatgcccaacatcagattctctgcagccccacc

SEQ ID NO: 328453 - DNA, 33 bp, Homo sapien
aggggtagtgccctacaaggtcccagcaggtcc

SEQ ID NO: 328454 - DNA, 33 bp, Homo sapien
aggggtagtgccctacgaggtcccagcaggtcc

SEQ ID NO: 328455 - DNA, 33 bp, Homo sapien
taagaacaagatgctacgtaaaaggaacaatca

SEQ ID NO: 328456 - DNA, 33 bp, Homo sapien
taagaacaagatgctatgtaaaaggaacaatca

SEQ ID NO: 328457 - DNA, 33 bp, Homo sapien
ttgtccagggcaaaaaaccttgaacttggagct

SEQ ID NO: 328458 - DNA, 33 bp, Homo sapien
ttgtccagggcaaaaagccttgaacttggagct

SEQ ID NO: 328459 - DNA, 33 bp, Homo sapien
aaccctccagacgaagacagagactctcactgg

SEQ ID NO: 328460 - DNA, 33 bp, Homo sapien
aaccctccagacgaaggcagagactctcactgg

SEQ ID NO: 328461 - DNA, 33 bp, Homo sapien
atgagccatgagcataaacacgtcatcacaccc

SEQ ID NO: 328462 - DNA, 33 bp, Homo sapien
atgagccatgagcatagacacgtcatcacaccc

SEQ ID NO: 328463 - DNA, 33 bp, Homo sapien
actgctggcagacccacaggaaaatgtagatcc

SEQ ID NO: 328464 - DNA, 33 bp, Homo sapien
actgctggcagacccagaggaaaatgtagatcc

SEQ ID NO: 328465 - DNA, 33 bp, Homo sapien
tagacacagtgaagagcagttagtcggtgaaag

SEQ ID NO: 328466 - DNA, 33 bp, Homo sapien
tagacacagtgaagagtagttagtcggtgaaag

SEQ ID NO: 328467 - DNA, 33 bp, Homo sapien
aatttcagagccctaacctggtaacactgaaag

SEQ ID NO: 328468 - DNA, 33 bp, Homo sapien
aatttcagagccctaagctggtaacactgaaag

SEQ ID NO: 328469 - DNA, 33 bp, Homo sapien
gcctccagggtgcgagactagtttatttccgag

SEQ ID NO: 328470 - DNA, 33 bp, Homo sapien
gcctccagggtgcgaggctagtttatttccgag

SEQ ID NO: 328471 - DNA, 33 bp, Homo sapien
cctgatgctttatggacctgggcaatagagcag

SEQ ID NO: 328472 - DNA, 33 bp, Homo sapien
cctgatgctttatggatctgggcaatagagcag

SEQ ID NO: 328473 - DNA, 33 bp, Homo sapien
aatggcctctttcccacgcgtactgcccggtgg

SEQ ID NO: 328474 - DNA, 33 bp, Homo sapien
aatggcctctttcccatgcgtactgcccggtgg

SEQ ID NO: 328475 - DNA, 33 bp, Homo sapien
ctaagaaaccaaattcaagatcaacaatttctc

SEQ ID NO: 328476 - DNA, 33 bp, Homo sapien
ctaagaaaccaaattctagatcaacaatttctc

SEQ ID NO: 328477 - DNA, 33 bp, Homo sapien
tatctcctcactgagacaaatttttttgtggtg

SEQ ID NO: 328478 - DNA, 33 bp, Homo sapien
tatctcctcactgagataaatttttttgtggtg

SEQ ID NO: 328479 - DNA, 33 bp, Homo sapien
cttgtagcactgtagcccgatcccagaagaaac

SEQ ID NO: 328480 - DNA, 33 bp, Homo sapien
cttgtagcactgtagcgcgatcccagaagaaac

SEQ ID NO: 328481 - DNA, 33 bp, Homo sapien
aaagagacatattttacccatgaacccaaaact

SEQ ID NO: 328482 - DNA, 33 bp, Homo sapien
aaagagacatattttatccatgaacccaaaact

SEQ ID NO: 328483 - DNA, 33 bp, Homo sapien
agcatgaagtagcctacagagtgaattggagct

SEQ ID NO: 328484 - DNA, 33 bp, Homo sapien
agcatgaagtagcctatagagtgaattggagct

SEQ ID NO: 328485 - DNA, 33 bp, Homo sapien
cagtaattccattctccatgtacccaaaagaaa

SEQ ID NO: 328486 - DNA, 33 bp, Homo sapien
cagtaattccattctctatgtacccaaaagaaa

SEQ ID NO: 328487 - DNA, 33 bp, Homo sapien
gagtgaatgcaggacactatagcaaggactgtg

SEQ ID NO: 328488 - DNA, 33 bp, Homo sapien
gagtgaatgcaggacagtatagcaaggactgtg

SEQ ID NO: 328489 - DNA, 33 bp, Homo sapien
caccagggcaataccccctagatcaatgcatta

SEQ ID NO: 328490 - DNA, 33 bp, Homo sapien
caccagggcaataccctctagatcaatgcatta

SEQ ID NO: 328491 - DNA, 33 bp, Homo sapien
caaggatggattgaaaacaaattttggaagttt

SEQ ID NO: 328492 - DNA, 33 bp, Homo sapien
caaggatggattgaaagcaaattttggaagttt

SEQ ID NO: 328493 - DNA, 33 bp, Homo sapien
aaaacggctgagccaacggcatagagtccaggg

SEQ ID NO: 328494 - DNA, 33 bp, Homo sapien
aaaacggctgagccaatggcatagagtccaggg

SEQ ID NO: 328495 - DNA, 33 bp, Homo sapien
aaggctggggacaaaagaatttagctctagtgt

SEQ ID NO: 328496 - DNA, 33 bp, Homo sapien
aaggctggggacaaaataatttagctctagtgt

SEQ ID NO: 328497 - DNA, 33 bp, Homo sapien
attgataatggcaaggacccttcaccctaggct

SEQ ID NO: 328498 - DNA, 33 bp, Homo sapien
attgataatggcaaggtcccttcaccctaggct

SEQ ID NO: 328499 - DNA, 33 bp, Homo sapien
tcatttagtcattctgaaattattaggcaccat

SEQ ID NO: 328500 - DNA, 33 bp, Homo sapien
tcatttagtcattctgcaattattaggcaccat

SEQ ID NO: 328501 - DNA, 33 bp, Homo sapien
ctgctggccaagactcactgggggcccaccaga

SEQ ID NO: 328502 - DNA, 33 bp, Homo sapien
ctgctggccaagactcgctgggggcccaccaga

SEQ ID NO: 328503 - DNA, 33 bp, Homo sapien
ttgagggagaaagagaccattcgttccacccta

SEQ ID NO: 328504 - DNA, 33 bp, Homo sapien
ttgagggagaaagagagcattcgttccacccta

SEQ ID NO: 328505 - DNA, 33 bp, Homo sapien
ttgactccagggtttaactcccttgactgacta

SEQ ID NO: 328506 - DNA, 33 bp, Homo sapien
ttgactccagggtttacctcccttgactgacta

SEQ ID NO: 328507 - DNA, 33 bp, Homo sapien
tcccaaagtggaacatcaatatctggagagaaa

SEQ ID NO: 328508 - DNA, 33 bp, Homo sapien
tcccaaagtggaacatgaatatctggagagaaa

SEQ ID NO: 328509 - DNA, 33 bp, Homo sapien
catccattctttctcccgaccaccacctatgtt

SEQ ID NO: 328510 - DNA, 33 bp, Homo sapien
catccattctttctcctgaccaccacctatgtt

SEQ ID NO: 328511 - DNA, 33 bp, Homo sapien
ccctctaaataggacacagctctgacactagac

SEQ ID NO: 328512 - DNA, 33 bp, Homo sapien
ccctctaaataggacatagctctgacactagac

SEQ ID NO: 328513 - DNA, 33 bp, Homo sapien
catattgatgaattcacattgcctttatatttt

SEQ ID NO: 328514 - DNA, 33 bp, Homo sapien
catattgatgaattcagattgcctttatatttt

SEQ ID NO: 328515 - DNA, 33 bp, Homo sapien
atagctggactaaggcagaggtcttacaaggag

SEQ ID NO: 328516 - DNA, 33 bp, Homo sapien
atagctggactaaggcggaggtcttacaaggag

SEQ ID NO: 328517 - DNA, 33 bp, Homo sapien
catcaaggggagctgcaatcacagatgcccaaa

SEQ ID NO: 328518 - DNA, 33 bp, Homo sapien
catcaaggggagctgcgatcacagatgcccaaa

SEQ ID NO: 328519 - DNA, 33 bp, Homo sapien
cagtccaatgacaggaagcagcaaaaagtagtt

SEQ ID NO: 328520 - DNA, 33 bp, Homo sapien
cagtccaatgacaggaggcagcaaaaagtagtt

SEQ ID NO: 328521 - DNA, 33 bp, Homo sapien
ctggctgactaactccaccttgctgagcctgtt

SEQ ID NO: 328522 - DNA, 33 bp, Homo sapien
ctggctgactaactccgccttgctgagcctgtt

SEQ ID NO: 328523 - DNA, 33 bp, Homo sapien
acacacttccattccaacctgcatttattaacc

SEQ ID NO: 328524 - DNA, 33 bp, Homo sapien
acacacttccattccagcctgcatttattaacc

SEQ ID NO: 328525 - DNA, 33 bp, Homo sapien
tctctacctggattaacctctccttaaacttta

SEQ ID NO: 328526 - DNA, 33 bp, Homo sapien
tctctacctggattaatctctccttaaacttta

SEQ ID NO: 328527 - DNA, 33 bp, Homo sapien
tttgctaaacattctaccatgtacaggacagtc

SEQ ID NO: 328528 - DNA, 33 bp, Homo sapien
tttgctaaacattctatcatgtacaggacagtc

SEQ ID NO: 328529 - DNA, 33 bp, Homo sapien
gaagaacaaagcggcaaaaaaaatcagctcagg

SEQ ID NO: 328530 - DNA, 33 bp, Homo sapien
gaagaacaaagcggcagaaaaaatcagctcagg

SEQ ID NO: 328531 - DNA, 33 bp, Homo sapien
gaccactaagcagatcacacaggaaatgcccta

SEQ ID NO: 328532 - DNA, 33 bp, Homo sapien
gaccactaagcagatcgcacaggaaatgcccta

SEQ ID NO: 328533 - DNA, 33 bp, Homo sapien
agtaagtgatgtaagaaccattgaacccatctt

SEQ ID NO: 328534 - DNA, 33 bp, Homo sapien
agtaagtgatgtaagagccattgaacccatctt

SEQ ID NO: 328535 - DNA, 33 bp, Homo sapien
tgctcggcttcgggtcaacacgtctacaggcca

SEQ ID NO: 328536 - DNA, 33 bp, Homo sapien
tgctcggcttcgggtcgacacgtctacaggcca

SEQ ID NO: 328537 - DNA, 33 bp, Homo sapien
ataagtagccagcgggaagtgggcaacagtcta

SEQ ID NO: 328538 - DNA, 33 bp, Homo sapien
ataagtagccagcggggagtgggcaacagtcta

SEQ ID NO: 328539 - DNA, 33 bp, Homo sapien
actacagcctggttcccgcggaggtcggcagca

SEQ ID NO: 328540 - DNA, 33 bp, Homo sapien
actacagcctggttcctgcggaggtcggcagca

SEQ ID NO: 328541 - DNA, 33 bp, Homo sapien
tctctgaggccatctacggtcatttggtggtca

SEQ ID NO: 328542 - DNA, 33 bp, Homo sapien
tctctgaggccatctatggtcatttggtggtca

SEQ ID NO: 328543 - DNA, 33 bp, Homo sapien
ccttctctaccacggacggaggtgtgagtcaga

SEQ ID NO: 328544 - DNA, 33 bp, Homo sapien
ccttctctaccacggatggaggtgtgagtcaga

SEQ ID NO: 328545 - DNA, 33 bp, Homo sapien
aactgcatttaagaatcatctccaagtgccaga

SEQ ID NO: 328546 - DNA, 33 bp, Homo sapien
aactgcatttaagaattatctccaagtgccaga

SEQ ID NO: 328547 - DNA, 33 bp, Homo sapien
cttgccttctctccaacggggaattacctacca

SEQ ID NO: 328548 - DNA, 33 bp, Homo sapien
cttgccttctctccaatggggaattacctacca

SEQ ID NO: 328549 - DNA, 33 bp, Homo sapien
gctcgtgccgggaaaaacaagaggcagggagag

SEQ ID NO: 328550 - DNA, 33 bp, Homo sapien
gctcgtgccgggaaaatcaagaggcagggagag

SEQ ID NO: 328551 - DNA, 33 bp, Homo sapien
ccaccctggctctggagatgtcatctgtccttt

SEQ ID NO: 328552 - DNA, 33 bp, Homo sapien
ccaccctggctctggatatgtcatctgtccttt

SEQ ID NO: 328553 - DNA, 33 bp, Homo sapien
cttcagcaccaggaacaagcagaggcctccctg

SEQ ID NO: 328554 - DNA, 33 bp, Homo sapien
cttcagcaccaggaaccagcagaggcctccctg

SEQ ID NO: 328555 - DNA, 33 bp, Homo sapien
tgagaataagaatcaccatcctcaagacaagaa

SEQ ID NO: 328556 - DNA, 33 bp, Homo sapien
tgagaataagaatcactatcctcaagacaagaa

SEQ ID NO: 328557 - DNA, 33 bp, Homo sapien
gatgtgacaaggacctcaatggagaggtagaca

SEQ ID NO: 328558 - DNA, 33 bp, Homo sapien
gatgtgacaaggaccttaatggagaggtagaca

SEQ ID NO: 328559 - DNA, 33 bp, Homo sapien
aggggcatccacaatggaagtgatattttatat

SEQ ID NO: 328560 - DNA, 33 bp, Homo sapien
aggggcatccacaatgtaagtgatattttatat

SEQ ID NO: 328561 - DNA, 33 bp, Homo sapien
gccatgcagcctagaacggttttgcccagggca

SEQ ID NO: 328562 - DNA, 33 bp, Homo sapien
gccatgcagcctagaagggttttgcccagggca

SEQ ID NO: 328563 - DNA, 33 bp, Homo sapien
ttaagtttgggtaaaaaagagcatacaactgtt

SEQ ID NO: 328564 - DNA, 33 bp, Homo sapien
ttaagtttgggtaaaagagagcatacaactgtt

SEQ ID NO: 328565 - DNA, 33 bp, Homo sapien
gaccctgcaagtctcagatcaagcatcacatct

SEQ ID NO: 328566 - DNA, 33 bp, Homo sapien
gaccctgcaagtctcatatcaagcatcacatct

SEQ ID NO: 328567 - DNA, 33 bp, Homo sapien
ttcccaccttcatcaaatatccacctaaattat

SEQ ID NO: 328568 - DNA, 33 bp, Homo sapien
ttcccaccttcatcaagtatccacctaaattat

SEQ ID NO: 328569 - DNA, 33 bp, Homo sapien
ttatgttatggaggcaccttctttctttaaacc

SEQ ID NO: 328570 - DNA, 33 bp, Homo sapien
ttatgttatggaggcagcttctttctttaaacc

SEQ ID NO: 328571 - DNA, 33 bp, Homo sapien
gataaaaccagccacaacgttcctctaagtcaa

SEQ ID NO: 328572 - DNA, 33 bp, Homo sapien
gataaaaccagccacagcgttcctctaagtcaa

SEQ ID NO: 328573 - DNA, 33 bp, Homo sapien
tgtgtctcagggagtaaagaggcctgaaagaga

SEQ ID NO: 328574 - DNA, 33 bp, Homo sapien
tgtgtctcagggagtatagaggcctgaaagaga

SEQ ID NO: 328575 - DNA, 33 bp, Homo sapien
ttcaaagtagaaaatacggtcacctttatcatg

SEQ ID NO: 328576 - DNA, 33 bp, Homo sapien
ttcaaagtagaaaatatggtcacctttatcatg

SEQ ID NO: 328577 - DNA, 33 bp, Homo sapien
tgcaaaggcactgtcacaaatcaaaacaagact

SEQ ID NO: 328578 - DNA, 33 bp, Homo sapien
tgcaaaggcactgtcataaatcaaaacaagact

SEQ ID NO: 328579 - DNA, 33 bp, Homo sapien
ataaccttccaaaagtaaagaagtgtttccctg

SEQ ID NO: 328580 - DNA, 33 bp, Homo sapien
ataaccttccaaaagtgaagaagtgtttccctg

SEQ ID NO: 328581 - DNA, 33 bp, Homo sapien
tcgcttccaatcccaccaccgtcacagtatgac

SEQ ID NO: 328582 - DNA, 33 bp, Homo sapien
tcgcttccaatcccactaccgtcacagtatgac

SEQ ID NO: 328583 - DNA, 33 bp, Homo sapien
gcttgatagtctgtccagcagtaaatgtttgtc

SEQ ID NO: 328584 - DNA, 33 bp, Homo sapien
gcttgatagtctgtccggcagtaaatgtttgtc

SEQ ID NO: 328585 - DNA, 33 bp, Homo sapien
atattaaatacccagacgttctaggcaaactca

SEQ ID NO: 328586 - DNA, 33 bp, Homo sapien
atattaaatacccagatgttctaggcaaactca

SEQ ID NO: 328587 - DNA, 33 bp, Homo sapien
agggaaattctgaagcacatttctagttcccat

SEQ ID NO: 328588 - DNA, 33 bp, Homo sapien
agggaaattctgaagcgcatttctagttcccat

SEQ ID NO: 328589 - DNA, 33 bp, Homo sapien
ccccaaccaaatttcacgctgaattataattcc

SEQ ID NO: 328590 - DNA, 33 bp, Homo sapien
ccccaaccaaatttcatgctgaattataattcc

SEQ ID NO: 328591 - DNA, 33 bp, Homo sapien
ttctgatagttacaccaaagaatcctaaatgaa

SEQ ID NO: 328592 - DNA, 33 bp, Homo sapien
ttctgatagttacacccaagaatcctaaatgaa

SEQ ID NO: 328593 - DNA, 33 bp, Homo sapien
atacctgacagatttgaaagacttgacttctag

SEQ ID NO: 328594 - DNA, 33 bp, Homo sapien
atacctgacagatttggaagacttgacttctag

SEQ ID NO: 328595 - DNA, 33 bp, Homo sapien
cacaaagttcaaccacaaggcggctctattttg

SEQ ID NO: 328596 - DNA, 33 bp, Homo sapien
cacaaagttcaaccacgaggcggctctattttg

SEQ ID NO: 328597 - DNA, 33 bp, Homo sapien
ccaccgcaccgagccaaaaaaaatacagaacac

SEQ ID NO: 328598 - DNA, 33 bp, Homo sapien
ccaccgcaccgagccagaaaaaatacagaacac

SEQ ID NO: 328599 - DNA, 33 bp, Homo sapien
agtaagttggtcggtaagttgattagttggtag

SEQ ID NO: 328600 - DNA, 33 bp, Homo sapien
agtaagttggtcggtaggttgattagttggtag

SEQ ID NO: 328601 - DNA, 33 bp, Homo sapien
atttccaggtgttacacaggaagtggcatggtg

SEQ ID NO: 328602 - DNA, 33 bp, Homo sapien
atttccaggtgttacataggaagtggcatggtg

SEQ ID NO: 328603 - DNA, 33 bp, Homo sapien
cagcataggcccagagcagtttctgcaggcctc

SEQ ID NO: 328604 - DNA, 33 bp, Homo sapien
cagcataggcccagaggagtttctgcaggcctc

SEQ ID NO: 328605 - DNA, 33 bp, Homo sapien
acaagtacccttgttcaagccccctcaacctcc

SEQ ID NO: 328606 - DNA, 33 bp, Homo sapien
acaagtacccttgttcgagccccctcaacctcc

SEQ ID NO: 328607 - DNA, 33 bp, Homo sapien
ggttccatcatgttccaccccaggactgctaaa

SEQ ID NO: 328608 - DNA, 33 bp, Homo sapien
ggttccatcatgttccgccccaggactgctaaa

SEQ ID NO: 328609 - DNA, 33 bp, Homo sapien
ccaggactgctaaatccccaggttgagagctgg

SEQ ID NO: 328610 - DNA, 33 bp, Homo sapien
ccaggactgctaaatctccaggttgagagctgg

SEQ ID NO: 328611 - DNA, 33 bp, Homo sapien
ccacagtcacctccccaccttccgacagtgtat

SEQ ID NO: 328612 - DNA, 33 bp, Homo sapien
ccacagtcacctccccgccttccgacagtgtat

SEQ ID NO: 328613 - DNA, 33 bp, Homo sapien
ggagagttaaaaaccgcagctgagctcgtgttg

SEQ ID NO: 328614 - DNA, 33 bp, Homo sapien
ggagagttaaaaaccgtagctgagctcgtgttg

SEQ ID NO: 328615 - DNA, 33 bp, Homo sapien
ctcttgtgcataatgaagttagcccagcaccct

SEQ ID NO: 328616 - DNA, 33 bp, Homo sapien
ctcttgtgcataatgaggttagcccagcaccct

SEQ ID NO: 328617 - DNA, 33 bp, Homo sapien
ctggatgcttgcagatgaacaggaggggtagag

SEQ ID NO: 328618 - DNA, 33 bp, Homo sapien
ctggatgcttgcagattaacaggaggggtagag

SEQ ID NO: 328619 - DNA, 33 bp, Homo sapien
actgttgatttagaagaaaacacaaattcattt

SEQ ID NO: 328620 - DNA, 33 bp, Homo sapien
actgttgatttagaaggaaacacaaattcattt

SEQ ID NO: 328621 - DNA, 33 bp, Homo sapien
caggagtcccgtctgccactggcttctggagtg

SEQ ID NO: 328622 - DNA, 33 bp, Homo sapien
caggagtcccgtctgctactggcttctggagtg

SEQ ID NO: 328623 - DNA, 33 bp, Homo sapien
gatccagcagaagacacggcatgcgagatcttg

SEQ ID NO: 328624 - DNA, 33 bp, Homo sapien
gatccagcagaagacatggcatgcgagatcttg

SEQ ID NO: 328625 - DNA, 33 bp, Homo sapien
ccaggtaactcagttcccccatgaaagagcccc

SEQ ID NO: 328626 - DNA, 33 bp, Homo sapien
ccaggtaactcagttctcccatgaaagagcccc

SEQ ID NO: 328627 - DNA, 33 bp, Homo sapien
taggtcaaggcctagactatttagaagcgattt

SEQ ID NO: 328628 - DNA, 33 bp, Homo sapien
taggtcaaggcctagattatttagaagcgattt

SEQ ID NO: 328629 - DNA, 33 bp, Homo sapien
caagacaaaggcggaaatggggaaataacactc

SEQ ID NO: 328630 - DNA, 33 bp, Homo sapien
caagacaaaggcggaactggggaaataacactc

SEQ ID NO: 328631 - DNA, 33 bp, Homo sapien
gcagtgaccattgaccaaagaaataagggaagc

SEQ ID NO: 328632 - DNA, 33 bp, Homo sapien
gcagtgaccattgaccgaagaaataagggaagc

SEQ ID NO: 328633 - DNA, 33 bp, Homo sapien
ctactcaagtcaagaactgttcagtattaagga

SEQ ID NO: 328634 - DNA, 33 bp, Homo sapien
ctactcaagtcaagaattgttcagtattaagga

SEQ ID NO: 328635 - DNA, 33 bp, Homo sapien
ggtgccttttgaagccaagggatggagaagtca

SEQ ID NO: 328636 - DNA, 33 bp, Homo sapien
ggtgccttttgaagccgagggatggagaagtca

SEQ ID NO: 328637 - DNA, 33 bp, Homo sapien
gacccatttgtgcaatgacagagtaaagaatga

SEQ ID NO: 328638 - DNA, 33 bp, Homo sapien
gacccatttgtgcaattacagagtaaagaatga

SEQ ID NO: 328639 - DNA, 33 bp, Homo sapien
agtggctggaagaccacgaggaggaagtccttc

SEQ ID NO: 328640 - DNA, 33 bp, Homo sapien
agtggctggaagaccatgaggaggaagtccttc

SEQ ID NO: 328641 - DNA, 33 bp, Homo sapien
cttgggcgcatttaaccagtcattgtagaagtg

SEQ ID NO: 328642 - DNA, 33 bp, Homo sapien
cttgggcgcatttaactagtcattgtagaagtg

SEQ ID NO: 328643 - DNA, 33 bp, Homo sapien
ctcatcacactacttgcagtggctcaaaattta

SEQ ID NO: 328644 - DNA, 33 bp, Homo sapien
ctcatcacactacttggagtggctcaaaattta

SEQ ID NO: 328645 - DNA, 33 bp, Homo sapien
gaagtgtgtttactgaaaaggttttctccaggg

SEQ ID NO: 328646 - DNA, 33 bp, Homo sapien
gaagtgtgtttactgagaaggttttctccaggg

SEQ ID NO: 328647 - DNA, 33 bp, Homo sapien
gtgactttgacactgacgtgcggaggagcctga

SEQ ID NO: 328648 - DNA, 33 bp, Homo sapien
gtgactttgacactgatgtgcggaggagcctga

SEQ ID NO: 328649 - DNA, 33 bp, Homo sapien
gaagtcctgagcgccacgatcccttccttgaga

SEQ ID NO: 328650 - DNA, 33 bp, Homo sapien
gaagtcctgagcgccatgatcccttccttgaga

SEQ ID NO: 328651 - DNA, 33 bp, Homo sapien
gaggaaacacagaaaacgctgctagccacattc

SEQ ID NO: 328652 - DNA, 33 bp, Homo sapien
gaggaaacacagaaaatgctgctagccacattc

SEQ ID NO: 328653 - DNA, 33 bp, Homo sapien
tgtccactacagcccaatgggaagccagacggg

SEQ ID NO: 328654 - DNA, 33 bp, Homo sapien
tgtccactacagcccagtgggaagccagacggg

SEQ ID NO: 328655 - DNA, 33 bp, Homo sapien
ggggggccatgctatcaaagatcagcctgagtg

SEQ ID NO: 328656 - DNA, 33 bp, Homo sapien
ggggggccatgctatcgaagatcagcctgagtg

SEQ ID NO: 328657 - DNA, 33 bp, Homo sapien
taaccaccaggtctagaatctgttaggagtggg

SEQ ID NO: 328658 - DNA, 33 bp, Homo sapien
taaccaccaggtctaggatctgttaggagtggg

SEQ ID NO: 328659 - DNA, 33 bp, Homo sapien
gtccacatgtctttcaaaattgggcctccgata

SEQ ID NO: 328660 - DNA, 33 bp, Homo sapien
gtccacatgtctttcagaattgggcctccgata

SEQ ID NO: 328661 - DNA, 33 bp, Homo sapien
ggggattgggggaaaacgaacagaaccagatta

SEQ ID NO: 328662 - DNA, 33 bp, Homo sapien
ggggattgggggaaaatgaacagaaccagatta

SEQ ID NO: 328663 - DNA, 33 bp, Homo sapien
caaattgactggtgaacaaatttctagtgaagg

SEQ ID NO: 328664 - DNA, 33 bp, Homo sapien
caaattgactggtgaagaaatttctagtgaagg

SEQ ID NO: 328665 - DNA, 33 bp, Homo sapien
agggatattcacatcaactcccatgagccttta

SEQ ID NO: 328666 - DNA, 33 bp, Homo sapien
agggatattcacatcagctcccatgagccttta

SEQ ID NO: 328667 - DNA, 33 bp, Homo sapien
tgttgccagcaacggaagtgccggggcctcaat

SEQ ID NO: 328668 - DNA, 33 bp, Homo sapien
tgttgccagcaacggacgtgccggggcctcaat

SEQ ID NO: 328669 - DNA, 33 bp, Homo sapien
tatagatttatgtaaccccccaccacaatcaag

SEQ ID NO: 328670 - DNA, 33 bp, Homo sapien
tatagatttatgtaacgccccaccacaatcaag

SEQ ID NO: 328671 - DNA, 33 bp, Homo sapien
agggcaatcagatgaacggtgcagtgggatcag

SEQ ID NO: 328672 - DNA, 33 bp, Homo sapien
agggcaatcagatgaatggtgcagtgggatcag

SEQ ID NO: 328673 - DNA, 33 bp, Homo sapien
acagcaaaccagagagaagtggactggcccaat

SEQ ID NO: 328674 - DNA, 33 bp, Homo sapien
acagcaaaccagagaggagtggactggcccaat

SEQ ID NO: 328675 - DNA, 33 bp, Homo sapien
ttctcaccgtgcccccaagagacacatcctaca

SEQ ID NO: 328676 - DNA, 33 bp, Homo sapien
ttctcaccgtgcccccgagagacacatcctaca

SEQ ID NO: 328677 - DNA, 33 bp, Homo sapien
ccagcatccacgcgcccgcttacctggcacagg

SEQ ID NO: 328678 - DNA, 33 bp, Homo sapien
ccagcatccacgcgcctgcttacctggcacagg

SEQ ID NO: 328679 - DNA, 33 bp, Homo sapien
agcaagggaatcggaaagaaacagaatggtagg

SEQ ID NO: 328680 - DNA, 33 bp, Homo sapien
agcaagggaatcggaaggaaacagaatggtagg

SEQ ID NO: 328681 - DNA, 33 bp, Homo sapien
ccttgtctcgaaactgcagggggagtccctttg

SEQ ID NO: 328682 - DNA, 33 bp, Homo sapien
ccttgtctcgaaactggagggggagtccctttg

SEQ ID NO: 328683 - DNA, 33 bp, Homo sapien
tgatggaaagattctacgctgagaccaaacata

SEQ ID NO: 328684 - DNA, 33 bp, Homo sapien
tgatggaaagattctatgctgagaccaaacata

SEQ ID NO: 328685 - DNA, 33 bp, Homo sapien
acacacacctgctggcagaataggagaacttgt

SEQ ID NO: 328686 - DNA, 33 bp, Homo sapien
acacacacctgctggcggaataggagaacttgt

SEQ ID NO: 328687 - DNA, 33 bp, Homo sapien
gctcactcaggaccaaagcagaaaatgccactc

SEQ ID NO: 328688 - DNA, 33 bp, Homo sapien
gctcactcaggaccaacgcagaaaatgccactc

SEQ ID NO: 328689 - DNA, 33 bp, Homo sapien
tggtggggactttcacagagatcagaaagctga

SEQ ID NO: 328690 - DNA, 33 bp, Homo sapien
tggtggggactttcacggagatcagaaagctga

SEQ ID NO: 328691 - DNA, 33 bp, Homo sapien
ggctttctccaactccagaaaaaatctacataa

SEQ ID NO: 328692 - DNA, 33 bp, Homo sapien
ggctttctccaactccggaaaaaatctacataa

SEQ ID NO: 328693 - DNA, 33 bp, Homo sapien
cagggaacagtattcccaatgtgcactgagaag

SEQ ID NO: 328694 - DNA, 33 bp, Homo sapien
cagggaacagtattcctaatgtgcactgagaag

SEQ ID NO: 328695 - DNA, 33 bp, Homo sapien
ggtagtgaggaaatcgcagtcaacaaaacagaa

SEQ ID NO: 328696 - DNA, 33 bp, Homo sapien
ggtagtgaggaaatcgtagtcaacaaaacagaa

SEQ ID NO: 328697 - DNA, 33 bp, Homo sapien
gttccagagctacccacgaggattctggagcca

SEQ ID NO: 328698 - DNA, 33 bp, Homo sapien
gttccagagctacccatgaggattctggagcca

SEQ ID NO: 328699 - DNA, 33 bp, Homo sapien
gtcacatgactgacaacagtgccaggaccaaca

SEQ ID NO: 328700 - DNA, 33 bp, Homo sapien
gtcacatgactgacaatagtgccaggaccaaca

SEQ ID NO: 328701 - DNA, 33 bp, Homo sapien
cagatttggaaactgacgctcagcaaggttaag

SEQ ID NO: 328702 - DNA, 33 bp, Homo sapien
cagatttggaaactgatgctcagcaaggttaag

SEQ ID NO: 328703 - DNA, 33 bp, Homo sapien
aaaggggaattttgcccgacaagatgtcaaaga

SEQ ID NO: 328704 - DNA, 33 bp, Homo sapien
aaaggggaattttgcctgacaagatgtcaaaga

SEQ ID NO: 328705 - DNA, 33 bp, Homo sapien
tgggtctgtctccccaccgaggtgctggcacag

SEQ ID NO: 328706 - DNA, 33 bp, Homo sapien
tgggtctgtctccccatcgaggtgctggcacag

SEQ ID NO: 328707 - DNA, 33 bp, Homo sapien
gtttggagctcaccacactaacctgcgtattca

SEQ ID NO: 328708 - DNA, 33 bp, Homo sapien
gtttggagctcaccacgctaacctgcgtattca

SEQ ID NO: 328709 - DNA, 33 bp, Homo sapien
aaataatacgctagcaacggaagatgttgtcag

SEQ ID NO: 328710 - DNA, 33 bp, Homo sapien
aaataatacgctagcaccggaagatgttgtcag

SEQ ID NO: 328711 - DNA, 33 bp, Homo sapien
aaaatatttggtgactgactttatacatacata

SEQ ID NO: 328712 - DNA, 33 bp, Homo sapien
aaaatatttggtgacttactttatacatacata

SEQ ID NO: 328713 - DNA, 33 bp, Homo sapien
ttgctaggtccagggccgaggttcccaaatcaa

SEQ ID NO: 328714 - DNA, 33 bp, Homo sapien
ttgctaggtccagggctgaggttcccaaatcaa

SEQ ID NO: 328715 - DNA, 33 bp, Homo sapien
agatcaataataacacaagcacggtgcagaagc

SEQ ID NO: 328716 - DNA, 33 bp, Homo sapien
agatcaataataacacgagcacggtgcagaagc

SEQ ID NO: 328717 - DNA, 33 bp, Homo sapien
attgacagacttggtcattaaggttattggatc

SEQ ID NO: 328718 - DNA, 33 bp, Homo sapien
attgacagacttggtcgttaaggttattggatc

SEQ ID NO: 328719 - DNA, 33 bp, Homo sapien
gttttaagcctctaagaagcaaagaaaaaaaaa

SEQ ID NO: 328720 - DNA, 33 bp, Homo sapien
gttttaagcctctaagcagcaaagaaaaaaaaa

SEQ ID NO: 328721 - DNA, 33 bp, Homo sapien
ggtagaggtaatatgccatgcaaatgcagaaag

SEQ ID NO: 328722 - DNA, 33 bp, Homo sapien
ggtagaggtaatatgcgatgcaaatgcagaaag

SEQ ID NO: 328723 - DNA, 33 bp, Homo sapien
ttgtgcacagaactcccatatacacttcaccta

SEQ ID NO: 328724 - DNA, 33 bp, Homo sapien
ttgtgcacagaactcctatatacacttcaccta

SEQ ID NO: 328725 - DNA, 33 bp, Homo sapien
gttagctgattccagaccccttcctggctgtaa

SEQ ID NO: 328726 - DNA, 33 bp, Homo sapien
gttagctgattccagatcccttcctggctgtaa

SEQ ID NO: 328727 - DNA, 33 bp, Homo sapien
tagtaggcatacccacaccgccagtcctccacc

SEQ ID NO: 328728 - DNA, 33 bp, Homo sapien
tagtaggcatacccacgccgccagtcctccacc

SEQ ID NO: 328729 - DNA, 33 bp, Homo sapien
agtaaacagtatctacacagaagagaaactaag

SEQ ID NO: 328730 - DNA, 33 bp, Homo sapien
agtaaacagtatctacgcagaagagaaactaag

SEQ ID NO: 328731 - DNA, 33 bp, Homo sapien
aacttgctaaaacaaggagaggcacttaataga

SEQ ID NO: 328732 - DNA, 33 bp, Homo sapien
aacttgctaaaacaagtagaggcacttaataga

SEQ ID NO: 328733 - DNA, 33 bp, Homo sapien
tttcacttccttaaaccaagaactctcaaacta

SEQ ID NO: 328734 - DNA, 33 bp, Homo sapien
tttcacttccttaaactaagaactctcaaacta

SEQ ID NO: 328735 - DNA, 33 bp, Homo sapien
cgttttagagctggaaaaaactctggcgagcta

SEQ ID NO: 328736 - DNA, 33 bp, Homo sapien
cgttttagagctggaagaaactctggcgagcta

SEQ ID NO: 328737 - DNA, 33 bp, Homo sapien
gtgtggcacactggaacgcgacgggagacctcg

SEQ ID NO: 328738 - DNA, 33 bp, Homo sapien
gtgtggcacactggaatgcgacgggagacctcg

SEQ ID NO: 328739 - DNA, 33 bp, Homo sapien
cttaagcaccttttcccatgcttaagaaatgtc

SEQ ID NO: 328740 - DNA, 33 bp, Homo sapien
cttaagcaccttttcctatgcttaagaaatgtc

SEQ ID NO: 328741 - DNA, 33 bp, Homo sapien
ttcaacttctattaccaattagttctgcctatt

SEQ ID NO: 328742 - DNA, 33 bp, Homo sapien
ttcaacttctattaccgattagttctgcctatt

SEQ ID NO: 328743 - DNA, 33 bp, Homo sapien
tgtgtaggtttctttcactcacacgtctttcca

SEQ ID NO: 328744 - DNA, 33 bp, Homo sapien
tgtgtaggtttctttcgctcacacgtctttcca

SEQ ID NO: 328745 - DNA, 33 bp, Homo sapien
ttctgtcttttggcaaactctttgggctgtttc

SEQ ID NO: 328746 - DNA, 33 bp, Homo sapien
ttctgtcttttggcaacctctttgggctgtttc

SEQ ID NO: 328747 - DNA, 33 bp, Homo sapien
gtcactgtgctcttacaagaagctttcgctata

SEQ ID NO: 328748 - DNA, 33 bp, Homo sapien
gtcactgtgctcttacgagaagctttcgctata

SEQ ID NO: 328749 - DNA, 33 bp, Homo sapien
actgttctctttctcaactgaatagtgttaaca

SEQ ID NO: 328750 - DNA, 33 bp, Homo sapien
actgttctctttctcagctgaatagtgttaaca

SEQ ID NO: 328751 - DNA, 33 bp, Homo sapien
ggctcctgtcacctaaaagggaaacaaaagttc

SEQ ID NO: 328752 - DNA, 33 bp, Homo sapien
ggctcctgtcacctaagagggaaacaaaagttc

SEQ ID NO: 328753 - DNA, 33 bp, Homo sapien
taaatcatcccaacaacacttactgaataaatg

SEQ ID NO: 328754 - DNA, 33 bp, Homo sapien
taaatcatcccaacaatacttactgaataaatg

SEQ ID NO: 328755 - DNA, 33 bp, Homo sapien
cataccagttcctactaaaatatgcaaagcaac

SEQ ID NO: 328756 - DNA, 33 bp, Homo sapien
cataccagttcctacttaaatatgcaaagcaac

SEQ ID NO: 328757 - DNA, 33 bp, Homo sapien
ccagtctgaaacataaatccaaaacaatacact

SEQ ID NO: 328758 - DNA, 33 bp, Homo sapien
ccagtctgaaacataagtccaaaacaatacact

SEQ ID NO: 328759 - DNA, 33 bp, Homo sapien
aatcagcacctcacacactaccttttgcctctg

SEQ ID NO: 328760 - DNA, 33 bp, Homo sapien
aatcagcacctcacactctaccttttgcctctg

SEQ ID NO: 328761 - DNA, 33 bp, Homo sapien
ttgcaggcaggcattcactgcaggacggggttc

SEQ ID NO: 328762 - DNA, 33 bp, Homo sapien
ttgcaggcaggcattcgctgcaggacggggttc

SEQ ID NO: 328763 - DNA, 33 bp, Homo sapien
atgctgcaggctcaaacggagctctcacaaaca

SEQ ID NO: 328764 - DNA, 33 bp, Homo sapien
atgctgcaggctcaaatggagctctcacaaaca

SEQ ID NO: 328765 - DNA, 33 bp, Homo sapien
cacatcaggaaaacacaaaaaaatcccatcccc

SEQ ID NO: 328766 - DNA, 33 bp, Homo sapien
cacatcaggaaaacacgaaaaaatcccatcccc

SEQ ID NO: 328767 - DNA, 33 bp, Homo sapien
aacccgtccataaccacattcatctaccgaaca

SEQ ID NO: 328768 - DNA, 33 bp, Homo sapien
aacccgtccataaccatattcatctaccgaaca

SEQ ID NO: 328769 - DNA, 33 bp, Homo sapien
tatgggtgataccacactggctttggatcacct

SEQ ID NO: 328770 - DNA, 33 bp, Homo sapien
tatgggtgataccacattggctttggatcacct

SEQ ID NO: 328771 - DNA, 33 bp, Homo sapien
gttgaggttttgtagaccatgaagtactggaac

SEQ ID NO: 328772 - DNA, 33 bp, Homo sapien
gttgaggttttgtagagcatgaagtactggaac

SEQ ID NO: 328773 - DNA, 33 bp, Homo sapien
gtgtagacagattcacagagcaagtggagccga

SEQ ID NO: 328774 - DNA, 33 bp, Homo sapien
gtgtagacagattcacggagcaagtggagccga

SEQ ID NO: 328775 - DNA, 33 bp, Homo sapien
agagccagtgccaggacgaggtcaatgtttggt

SEQ ID NO: 328776 - DNA, 33 bp, Homo sapien
agagccagtgccaggatgaggtcaatgtttggt

SEQ ID NO: 328777 - DNA, 33 bp, Homo sapien
ggtggggacaggctgacctttaaggcccacttg

SEQ ID NO: 328778 - DNA, 33 bp, Homo sapien
ggtggggacaggctgatctttaaggcccacttg

SEQ ID NO: 328779 - DNA, 33 bp, Homo sapien
tgcatgtctccaagagcctcccgcaaaccagtt

SEQ ID NO: 328780 - DNA, 33 bp, Homo sapien
tgcatgtctccaagagtctcccgcaaaccagtt

SEQ ID NO: 328781 - DNA, 33 bp, Homo sapien
ggggtgtgaacttgatcacgtggtttgggaggg

SEQ ID NO: 328782 - DNA, 33 bp, Homo sapien
ggggtgtgaacttgattacgtggtttgggaggg

SEQ ID NO: 328783 - DNA, 33 bp, Homo sapien
cattgacagtacagaccggttctttggtagaag

SEQ ID NO: 328784 - DNA, 33 bp, Homo sapien
cattgacagtacagactggttctttggtagaag

SEQ ID NO: 328785 - DNA, 33 bp, Homo sapien
ctttccttcatttggaactgtgtctcaatcttt

SEQ ID NO: 328786 - DNA, 33 bp, Homo sapien
ctttccttcatttggagctgtgtctcaatcttt

SEQ ID NO: 328787 - DNA, 33 bp, Homo sapien
atcctgcattagaaaacaatcactcaggccggg

SEQ ID NO: 328788 - DNA, 33 bp, Homo sapien
atcctgcattagaaaataatcactcaggccggg

SEQ ID NO: 328789 - DNA, 33 bp, Homo sapien
actgtcgcaaaaaaagaacgagaactttcatat

SEQ ID NO: 328790 - DNA, 33 bp, Homo sapien
actgtcgcaaaaaaaggacgagaactttcatat

SEQ ID NO: 328791 - DNA, 33 bp, Homo sapien
aaaagaaaaatcttcaactccatttatagaacc

SEQ ID NO: 328792 - DNA, 33 bp, Homo sapien
aaaagaaaaatcttcacctccatttatagaacc

SEQ ID NO: 328793 - DNA, 33 bp, Homo sapien
catctgtaaaatgataaaaaccacacactcaac

SEQ ID NO: 328794 - DNA, 33 bp, Homo sapien
catctgtaaaatgatacaaaccacacactcaac

SEQ ID NO: 328795 - DNA, 33 bp, Homo sapien
tcatctgcagactgagaaatggagggtctgccc

SEQ ID NO: 328796 - DNA, 33 bp, Homo sapien
tcatctgcagactgaggaatggagggtctgccc

SEQ ID NO: 328797 - DNA, 33 bp, Homo sapien
ctgtccccttcactgcacagaacaaacaacaaa

SEQ ID NO: 328798 - DNA, 33 bp, Homo sapien
ctgtccccttcactgcgcagaacaaacaacaaa

SEQ ID NO: 328799 - DNA, 33 bp, Homo sapien
ctcctgattgccccagacagatacttcctgcca

SEQ ID NO: 328800 - DNA, 33 bp, Homo sapien
ctcctgattgccccagccagatacttcctgcca

SEQ ID NO: 328801 - DNA, 33 bp, Homo sapien
ccagaaactgagctgcaacagaaaacccggggg

SEQ ID NO: 328802 - DNA, 33 bp, Homo sapien
ccagaaactgagctgctacagaaaacccggggg

SEQ ID NO: 328803 - DNA, 33 bp, Homo sapien
attccttctccagtgccgatggtggggtttcac

SEQ ID NO: 328804 - DNA, 33 bp, Homo sapien
attccttctccagtgctgatggtggggtttcac

SEQ ID NO: 328805 - DNA, 33 bp, Homo sapien
aacacagcccctgaagacaaccgtggaagttct

SEQ ID NO: 328806 - DNA, 33 bp, Homo sapien
aacacagcccctgaaggcaaccgtggaagttct

SEQ ID NO: 328807 - DNA, 33 bp, Homo sapien
gaagcaggatgggggccgacgaccctttgtaaa

SEQ ID NO: 328808 - DNA, 33 bp, Homo sapien
gaagcaggatgggggctgacgaccctttgtaaa

SEQ ID NO: 328809 - DNA, 33 bp, Homo sapien
gtcataccaccgtgaacgcacctgatctcagcc

SEQ ID NO: 328810 - DNA, 33 bp, Homo sapien
gtcataccaccgtgaatgcacctgatctcagcc

SEQ ID NO: 328811 - DNA, 33 bp, Homo sapien
gctctgagggctttagcagacagttaattgccc

SEQ ID NO: 328812 - DNA, 33 bp, Homo sapien
gctctgagggctttagtagacagttaattgccc

SEQ ID NO: 328813 - DNA, 33 bp, Homo sapien
taaactcccagatgaacagacagtaatgacaga

SEQ ID NO: 328814 - DNA, 33 bp, Homo sapien
taaactcccagatgaagagacagtaatgacaga

SEQ ID NO: 328815 - DNA, 33 bp, Homo sapien
cccaccggcggaaaacagattaggagcaaccac

SEQ ID NO: 328816 - DNA, 33 bp, Homo sapien
cccaccggcggaaaacggattaggagcaaccac

SEQ ID NO: 328817 - DNA, 33 bp, Homo sapien
tattctgggacttgtaactttaaattgagcaaa

SEQ ID NO: 328818 - DNA, 33 bp, Homo sapien
tattctgggacttgtagctttaaattgagcaaa

SEQ ID NO: 328819 - DNA, 33 bp, Homo sapien
ttgctccctggagatccaagcgtaaacgttgga

SEQ ID NO: 328820 - DNA, 33 bp, Homo sapien
ttgctccctggagatcgaagcgtaaacgttgga

SEQ ID NO: 328821 - DNA, 33 bp, Homo sapien
ccttttccttcaggaccctgtttcagccctggg

SEQ ID NO: 328822 - DNA, 33 bp, Homo sapien
ccttttccttcaggacgctgtttcagccctggg

SEQ ID NO: 328823 - DNA, 33 bp, Homo sapien
accaacaccacctgccacttatcctagactcag

SEQ ID NO: 328824 - DNA, 33 bp, Homo sapien
accaacaccacctgccgcttatcctagactcag

SEQ ID NO: 328825 - DNA, 33 bp, Homo sapien
ctgaggtccagtgaaacaaggattgtccaggaa

SEQ ID NO: 328826 - DNA, 33 bp, Homo sapien
ctgaggtccagtgaaataaggattgtccaggaa

SEQ ID NO: 328827 - DNA, 33 bp, Homo sapien
tccccactgttaaccagcgtgccaggcaccttt

SEQ ID NO: 328828 - DNA, 33 bp, Homo sapien
tccccactgttaaccatcgtgccaggcaccttt

SEQ ID NO: 328829 - DNA, 33 bp, Homo sapien
tgctacttataattacagggtttacatcaagtg

SEQ ID NO: 328830 - DNA, 33 bp, Homo sapien
tgctacttataattacggggtttacatcaagtg

SEQ ID NO: 328831 - DNA, 33 bp, Homo sapien
ttcgtgttttaaaaagaatttcagacacctaaa

SEQ ID NO: 328832 - DNA, 33 bp, Homo sapien
ttcgtgttttaaaaaggatttcagacacctaaa

SEQ ID NO: 328833 - DNA, 33 bp, Homo sapien
gatgctgggcccaaaaacagttggcaagtcaca

SEQ ID NO: 328834 - DNA, 33 bp, Homo sapien
gatgctgggcccaaaagcagttggcaagtcaca

SEQ ID NO: 328835 - DNA, 33 bp, Homo sapien
tcccttattatgaacaactcacattaccatagt

SEQ ID NO: 328836 - DNA, 33 bp, Homo sapien
tcccttattatgaacacctcacattaccatagt

SEQ ID NO: 328837 - DNA, 33 bp, Homo sapien
ggtaggatatccaccccaaaatgccacagtggt

SEQ ID NO: 328838 - DNA, 33 bp, Homo sapien
ggtaggatatccaccctaaaatgccacagtggt

SEQ ID NO: 328839 - DNA, 33 bp, Homo sapien
cctttccctgggagaacgtgattttgttgtcac

SEQ ID NO: 328840 - DNA, 33 bp, Homo sapien
cctttccctgggagaatgtgattttgttgtcac

SEQ ID NO: 328841 - DNA, 33 bp, Homo sapien
aaaatgtaaaaaagtgacacaccaaacaatgac

SEQ ID NO: 328842 - DNA, 33 bp, Homo sapien
aaaatgtaaaaaagtgtcacaccaaacaatgac

SEQ ID NO: 328843 - DNA, 33 bp, Homo sapien
atatatacttgccaaccatgtaagcattatgag

SEQ ID NO: 328844 - DNA, 33 bp, Homo sapien
atatatacttgccaactatgtaagcattatgag

SEQ ID NO: 328845 - DNA, 33 bp, Homo sapien
tgtaagcattatgagaaaaagtcaagggtgctg

SEQ ID NO: 328846 - DNA, 33 bp, Homo sapien
tgtaagcattatgagacaaagtcaagggtgctg

SEQ ID NO: 328847 - DNA, 33 bp, Homo sapien
acagtgactggattccgctttatcacattgcta

SEQ ID NO: 328848 - DNA, 33 bp, Homo sapien
acagtgactggattcctctttatcacattgcta

SEQ ID NO: 328849 - DNA, 33 bp, Homo sapien
gtcaaggaagaaagccaagtttattgagtagct

SEQ ID NO: 328850 - DNA, 33 bp, Homo sapien
gtcaaggaagaaagcctagtttattgagtagct

SEQ ID NO: 328851 - DNA, 33 bp, Homo sapien
gaccctgatgagttccaagagcctccgaggtgg

SEQ ID NO: 328852 - DNA, 33 bp, Homo sapien
gaccctgatgagttccgagagcctccgaggtgg

SEQ ID NO: 328853 - DNA, 33 bp, Homo sapien
attagagacaaaagaccgtcacgtggcattcta

SEQ ID NO: 328854 - DNA, 33 bp, Homo sapien
attagagacaaaagactgtcacgtggcattcta

SEQ ID NO: 328855 - DNA, 33 bp, Homo sapien
gagctcagcagtatcaagtccaattctggtttt

SEQ ID NO: 328856 - DNA, 33 bp, Homo sapien
gagctcagcagtatcaggtccaattctggtttt

SEQ ID NO: 328857 - DNA, 33 bp, Homo sapien
cagctcccttctttggaaaagagtgccactttt

SEQ ID NO: 328858 - DNA, 33 bp, Homo sapien
cagctcccttctttgggaaagagtgccactttt

SEQ ID NO: 328859 - DNA, 33 bp, Homo sapien
tcctgtgcttgcctccactctatcgggcgctgt

SEQ ID NO: 328860 - DNA, 33 bp, Homo sapien
tcctgtgcttgcctccgctctatcgggcgctgt

SEQ ID NO: 328861 - DNA, 33 bp, Homo sapien
gaggttcccttagggccgacagctgtgacatcc

SEQ ID NO: 328862 - DNA, 33 bp, Homo sapien
gaggttcccttagggctgacagctgtgacatcc

SEQ ID NO: 328863 - DNA, 33 bp, Homo sapien
gagggcaggaatatgcactttacagaaagtcct

SEQ ID NO: 328864 - DNA, 33 bp, Homo sapien
gagggcaggaatatgcgctttacagaaagtcct

SEQ ID NO: 328865 - DNA, 33 bp, Homo sapien
atcaggttacccttccagctgatccaagtgcta

SEQ ID NO: 328866 - DNA, 33 bp, Homo sapien
atcaggttacccttccggctgatccaagtgcta

SEQ ID NO: 328867 - DNA, 33 bp, Homo sapien
agcacctgtgccactgaattgcttttaaatcta

SEQ ID NO: 328868 - DNA, 33 bp, Homo sapien
agcacctgtgccactggattgcttttaaatcta

SEQ ID NO: 328869 - DNA, 33 bp, Homo sapien
ccagcagcatccgctaaacctgggagcttgtca

SEQ ID NO: 328870 - DNA, 33 bp, Homo sapien
ccagcagcatccgctagacctgggagcttgtca

SEQ ID NO: 328871 - DNA, 33 bp, Homo sapien
ctctgtacattcacagcctagtggagcatgcag

SEQ ID NO: 328872 - DNA, 33 bp, Homo sapien
ctctgtacattcacagtctagtggagcatgcag

SEQ ID NO: 328873 - DNA, 33 bp, Homo sapien
tgggcacagagtttccacttggcaagatgaaat

SEQ ID NO: 328874 - DNA, 33 bp, Homo sapien
tgggcacagagtttccgcttggcaagatgaaat

SEQ ID NO: 328875 - DNA, 33 bp, Homo sapien
agaactgaggcttggaaagaaatagtcttgccc

SEQ ID NO: 328876 - DNA, 33 bp, Homo sapien
agaactgaggcttggagagaaatagtcttgccc

SEQ ID NO: 328877 - DNA, 33 bp, Homo sapien
aatccaacactctaccaaaaatagttacacagt

SEQ ID NO: 328878 - DNA, 33 bp, Homo sapien
aatccaacactctaccgaaaatagttacacagt

SEQ ID NO: 328879 - DNA, 33 bp, Homo sapien
ccttactaacccatgcactaaccgtgccgcacg

SEQ ID NO: 328880 - DNA, 33 bp, Homo sapien
ccttactaacccatgcgctaaccgtgccgcacg

SEQ ID NO: 328881 - DNA, 33 bp, Homo sapien
cacggatgctaacatgaagacaacaaatagaaa

SEQ ID NO: 328882 - DNA, 33 bp, Homo sapien
cacggatgctaacatggagacaacaaatagaaa

SEQ ID NO: 328883 - DNA, 33 bp, Homo sapien
gtgctttgagggagaacaggaattaaataaata

SEQ ID NO: 328884 - DNA, 33 bp, Homo sapien
gtgctttgagggagaagaggaattaaataaata

SEQ ID NO: 328885 - DNA, 33 bp, Homo sapien
tggcttgtgaaaagtaacagtgacacttcacat

SEQ ID NO: 328886 - DNA, 33 bp, Homo sapien
tggcttgtgaaaagtagcagtgacacttcacat

SEQ ID NO: 328887 - DNA, 33 bp, Homo sapien
ttgtgcagccgaggaagggtcactgggaggtgg

SEQ ID NO: 328888 - DNA, 33 bp, Homo sapien
ttgtgcagccgaggaatggtcactgggaggtgg

SEQ ID NO: 328889 - DNA, 33 bp, Homo sapien
tcaaggaatcaaagcacggtgttacaaaatcaa

SEQ ID NO: 328890 - DNA, 33 bp, Homo sapien
tcaaggaatcaaagcatggtgttacaaaatcaa

SEQ ID NO: 328891 - DNA, 33 bp, Homo sapien
tcatagcaaaaggccaagttttaaagcatagtg

SEQ ID NO: 328892 - DNA, 33 bp, Homo sapien
tcatagcaaaaggccaggttttaaagcatagtg

SEQ ID NO: 328893 - DNA, 33 bp, Homo sapien
tcatgtgattatctcactatccagggataagag

SEQ ID NO: 328894 - DNA, 33 bp, Homo sapien
tcatgtgattatctcagtatccagggataagag

SEQ ID NO: 328895 - DNA, 33 bp, Homo sapien
agcccctacatcacccccagtttcagaagcaaa

SEQ ID NO: 328896 - DNA, 33 bp, Homo sapien
agcccctacatcacccgcagtttcagaagcaaa

SEQ ID NO: 328897 - DNA, 33 bp, Homo sapien
agtagtttggagttcaatcaatccattgtatac

SEQ ID NO: 328898 - DNA, 33 bp, Homo sapien
agtagtttggagttcagtcaatccattgtatac

SEQ ID NO: 328899 - DNA, 33 bp, Homo sapien
agaatcatagcaacaaaaagtagagaggtggtt

SEQ ID NO: 328900 - DNA, 33 bp, Homo sapien
agaatcatagcaacaagaagtagagaggtggtt

SEQ ID NO: 328901 - DNA, 33 bp, Homo sapien
aagccagtcacaaaagaacaagcactacttaga

SEQ ID NO: 328902 - DNA, 33 bp, Homo sapien
aagccagtcacaaaaggacaagcactacttaga

SEQ ID NO: 328903 - DNA, 33 bp, Homo sapien
agagaaagacatcctacgtttatggattggaag

SEQ ID NO: 328904 - DNA, 33 bp, Homo sapien
agagaaagacatcctatgtttatggattggaag

SEQ ID NO: 328905 - DNA, 33 bp, Homo sapien
gtagttctcagtgtataagtcttctaactcctt

SEQ ID NO: 328906 - DNA, 33 bp, Homo sapien
gtagttctcagtgtatgagtcttctaactcctt

SEQ ID NO: 328907 - DNA, 33 bp, Homo sapien
tggcatttatgtcaaaattatacactacactca

SEQ ID NO: 328908 - DNA, 33 bp, Homo sapien
tggcatttatgtcaaagttatacactacactca

SEQ ID NO: 328909 - DNA, 33 bp, Homo sapien
aaatgcagtcatgggccagacacgggtgtttct

SEQ ID NO: 328910 - DNA, 33 bp, Homo sapien
aaatgcagtcatgggctagacacgggtgtttct

SEQ ID NO: 328911 - DNA, 33 bp, Homo sapien
tggaagatgagacttaagcattttttactgaaa

SEQ ID NO: 328912 - DNA, 33 bp, Homo sapien
tggaagatgagacttacgcattttttactgaaa

SEQ ID NO: 328913 - DNA, 33 bp, Homo sapien
gtgctgtttgagcagaaatacttgcttttgaaa

SEQ ID NO: 328914 - DNA, 33 bp, Homo sapien
gtgctgtttgagcagagatacttgcttttgaaa

SEQ ID NO: 328915 - DNA, 33 bp, Homo sapien
cccaggacttcttacaaatgtcaccacgtgtcg

SEQ ID NO: 328916 - DNA, 33 bp, Homo sapien
cccaggacttcttacacatgtcaccacgtgtcg

SEQ ID NO: 328917 - DNA, 33 bp, Homo sapien
tgttaagttgtggccaatatctccaagacgaac

SEQ ID NO: 328918 - DNA, 33 bp, Homo sapien
tgttaagttgtggccagtatctccaagacgaac

SEQ ID NO: 328919 - DNA, 33 bp, Homo sapien
tcttctgaacaactgacagaaaggcaaacacac

SEQ ID NO: 328920 - DNA, 33 bp, Homo sapien
tcttctgaacaactgatagaaaggcaaacacac

SEQ ID NO: 328921 - DNA, 33 bp, Homo sapien
tcagggaagctaagcaatgcaaagcatgaactt

SEQ ID NO: 328922 - DNA, 33 bp, Homo sapien
tcagggaagctaagcagtgcaaagcatgaactt

SEQ ID NO: 328923 - DNA, 33 bp, Homo sapien
cccctcttttcaagaacgtcaatcgtttgggtg

SEQ ID NO: 328924 - DNA, 33 bp, Homo sapien
cccctcttttcaagaatgtcaatcgtttgggtg

SEQ ID NO: 328925 - DNA, 33 bp, Homo sapien
gaaatttcactgcagaccaaaggacctggtttt

SEQ ID NO: 328926 - DNA, 33 bp, Homo sapien
gaaatttcactgcagatcaaaggacctggtttt

SEQ ID NO: 328927 - DNA, 33 bp, Homo sapien
gttctcctgataataaaccgctcttatgaagct

SEQ ID NO: 328928 - DNA, 33 bp, Homo sapien
gttctcctgataataagccgctcttatgaagct

SEQ ID NO: 328929 - DNA, 33 bp, Homo sapien
acagacacaaacttcacgggttaaagtcacgac

SEQ ID NO: 328930 - DNA, 33 bp, Homo sapien
acagacacaaacttcatgggttaaagtcacgac

SEQ ID NO: 328931 - DNA, 33 bp, Homo sapien
atcatctgtacacaccaaatggctgattttggg

SEQ ID NO: 328932 - DNA, 33 bp, Homo sapien
atcatctgtacacaccgaatggctgattttggg

SEQ ID NO: 328933 - DNA, 33 bp, Homo sapien
aaatgccctttccccacgtgtattacttgagca

SEQ ID NO: 328934 - DNA, 33 bp, Homo sapien
aaatgccctttccccatgtgtattacttgagca

SEQ ID NO: 328935 - DNA, 33 bp, Homo sapien
tcctaaacactcctgcaaagtgccctttatcta

SEQ ID NO: 328936 - DNA, 33 bp, Homo sapien
tcctaaacactcctgccaagtgccctttatcta

SEQ ID NO: 328937 - DNA, 33 bp, Homo sapien
gtccagtcgtctgtaccgcgaagccttggccca

SEQ ID NO: 328938 - DNA, 33 bp, Homo sapien
gtccagtcgtctgtactgcgaagccttggccca

SEQ ID NO: 328939 - DNA, 33 bp, Homo sapien
cattcaagcaggaaaacatttttctctagaaaa

SEQ ID NO: 328940 - DNA, 33 bp, Homo sapien
cattcaagcaggaaaagatttttctctagaaaa

SEQ ID NO: 328941 - DNA, 33 bp, Homo sapien
gcaaagcttatggaaaagaggcctgttgtttct

SEQ ID NO: 328942 - DNA, 33 bp, Homo sapien
gcaaagcttatggaaacgaggcctgttgtttct

SEQ ID NO: 328943 - DNA, 33 bp, Homo sapien
agagagcttatgtaaccggctcaaagacactgc

SEQ ID NO: 328944 - DNA, 33 bp, Homo sapien
agagagcttatgtaactggctcaaagacactgc

SEQ ID NO: 328945 - DNA, 33 bp, Homo sapien
actggggctattttgcaaatcaaggttcaaggt

SEQ ID NO: 328946 - DNA, 33 bp, Homo sapien
actggggctattttgcgaatcaaggttcaaggt

SEQ ID NO: 328947 - DNA, 33 bp, Homo sapien
aacagtgacgatgaccacaataaacacaaaatg

SEQ ID NO: 328948 - DNA, 33 bp, Homo sapien
aacagtgacgatgaccgcaataaacacaaaatg

SEQ ID NO: 328949 - DNA, 33 bp, Homo sapien
atgaggtactgaaccacgatggctgttgaggaa

SEQ ID NO: 328950 - DNA, 33 bp, Homo sapien
atgaggtactgaaccatgatggctgttgaggaa

SEQ ID NO: 328951 - DNA, 33 bp, Homo sapien
tctgaacttgcagtaccctttgcccttcacact

SEQ ID NO: 328952 - DNA, 33 bp, Homo sapien
tctgaacttgcagtacgctttgcccttcacact

SEQ ID NO: 328953 - DNA, 33 bp, Homo sapien
ggaactgtgaatgtctaactgaatttgaaggtg

SEQ ID NO: 328954 - DNA, 33 bp, Homo sapien
ggaactgtgaatgtctgactgaatttgaaggtg

SEQ ID NO: 328955 - DNA, 33 bp, Homo sapien
tgatctcctgagaaaaacgtggtgtcctcagca

SEQ ID NO: 328956 - DNA, 33 bp, Homo sapien
tgatctcctgagaaaagcgtggtgtcctcagca

SEQ ID NO: 328957 - DNA, 33 bp, Homo sapien
ttcacgggaagaacctcagcttgggaacctgga

SEQ ID NO: 328958 - DNA, 33 bp, Homo sapien
ttcacgggaagaacctgagcttgggaacctgga

SEQ ID NO: 328959 - DNA, 33 bp, Homo sapien
ttacgaaatgccctgaagagcccagtgactagt

SEQ ID NO: 328960 - DNA, 33 bp, Homo sapien
ttacgaaatgccctgaggagcccagtgactagt

SEQ ID NO: 328961 - DNA, 33 bp, Homo sapien
tcagctgtccagagagcacaatgacataaaatg

SEQ ID NO: 328962 - DNA, 33 bp, Homo sapien
tcagctgtccagagagtacaatgacataaaatg

SEQ ID NO: 328963 - DNA, 33 bp, Homo sapien
aagtccgagatcaagacgccaggcagttcagtt

SEQ ID NO: 328964 - DNA, 33 bp, Homo sapien
aagtccgagatcaagatgccaggcagttcagtt

SEQ ID NO: 328965 - DNA, 33 bp, Homo sapien
attggactggatcttaccttcatgagaaccctg

SEQ ID NO: 328966 - DNA, 33 bp, Homo sapien
attggactggatcttatcttcatgagaaccctg

SEQ ID NO: 328967 - DNA, 33 bp, Homo sapien
agttttccatctgttacagaaagtgcaggctca

SEQ ID NO: 328968 - DNA, 33 bp, Homo sapien
agttttccatctgttatagaaagtgcaggctca

SEQ ID NO: 328969 - DNA, 33 bp, Homo sapien
gatggaaaactgaagcccagacatcttaagtgg

SEQ ID NO: 328970 - DNA, 33 bp, Homo sapien
gatggaaaactgaagctcagacatcttaagtgg

SEQ ID NO: 328971 - DNA, 33 bp, Homo sapien
caaagccattggactacactagttctcatccat

SEQ ID NO: 328972 - DNA, 33 bp, Homo sapien
caaagccattggactatactagttctcatccat

SEQ ID NO: 328973 - DNA, 33 bp, Homo sapien
aaagtggcaatagtgacaccagacctcaaagga

SEQ ID NO: 328974 - DNA, 33 bp, Homo sapien
aaagtggcaatagtgataccagacctcaaagga

SEQ ID NO: 328975 - DNA, 33 bp, Homo sapien
tcagccttctctctcacaacagcctgggatggg

SEQ ID NO: 328976 - DNA, 33 bp, Homo sapien
tcagccttctctctcataacagcctgggatggg

SEQ ID NO: 328977 - DNA, 33 bp, Homo sapien
gcattgcattggagaacgtggttgcctcttctt

SEQ ID NO: 328978 - DNA, 33 bp, Homo sapien
gcattgcattggagaatgtggttgcctcttctt

SEQ ID NO: 328979 - DNA, 33 bp, Homo sapien
atgcccagatctcctaacacttaaactgggtcc

SEQ ID NO: 328980 - DNA, 33 bp, Homo sapien
atgcccagatctcctagcacttaaactgggtcc

SEQ ID NO: 328981 - DNA, 33 bp, Homo sapien
cctgcatgtttactcaatcatgctacttagcat

SEQ ID NO: 328982 - DNA, 33 bp, Homo sapien
cctgcatgtttactcagtcatgctacttagcat

SEQ ID NO: 328983 - DNA, 33 bp, Homo sapien
tcactagacctgatgaagtcacacagtcagcag

SEQ ID NO: 328984 - DNA, 33 bp, Homo sapien
tcactagacctgatgaggtcacacagtcagcag

SEQ ID NO: 328985 - DNA, 33 bp, Homo sapien
tggcaaagtcttcttcccaaagggtgaaatctg

SEQ ID NO: 328986 - DNA, 33 bp, Homo sapien
tggcaaagtcttcttcgcaaagggtgaaatctg

SEQ ID NO: 328987 - DNA, 33 bp, Homo sapien
agctttcttacgggtaaagtggagctcacagca

SEQ ID NO: 328988 - DNA, 33 bp, Homo sapien
agctttcttacgggtagagtggagctcacagca

SEQ ID NO: 328989 - DNA, 33 bp, Homo sapien
agggtctagtacagaaaagaaggcagctcccaa

SEQ ID NO: 328990 - DNA, 33 bp, Homo sapien
agggtctagtacagaagagaaggcagctcccaa

SEQ ID NO: 328991 - DNA, 33 bp, Homo sapien
ggctctggcccctgcacctaagacctgattaaa

SEQ ID NO: 328992 - DNA, 33 bp, Homo sapien
ggctctggcccctgcatctaagacctgattaaa

SEQ ID NO: 328993 - DNA, 33 bp, Homo sapien
ttctgtcttgtttttcacaggcccctggctaca

SEQ ID NO: 328994 - DNA, 33 bp, Homo sapien
ttctgtcttgtttttcgcaggcccctggctaca

SEQ ID NO: 328995 - DNA, 33 bp, Homo sapien
ctctgcttgtcctgcaaagtcaacgaattcaag

SEQ ID NO: 328996 - DNA, 33 bp, Homo sapien
ctctgcttgtcctgcacagtcaacgaattcaag

SEQ ID NO: 328997 - DNA, 33 bp, Homo sapien
ggagacgggcgttaaacccttctcaggcagtct

SEQ ID NO: 328998 - DNA, 33 bp, Homo sapien
ggagacgggcgttaaatccttctcaggcagtct

SEQ ID NO: 328999 - DNA, 33 bp, Homo sapien
tggtgtctcagcaggaaccattccggcacagcc

SEQ ID NO: 329000 - DNA, 33 bp, Homo sapien
tggtgtctcagcaggagccattccggcacagcc

SEQ ID NO: 329001 - DNA, 33 bp, Homo sapien
aacagcgcgagccgcaacgacttcgagtgggtc

SEQ ID NO: 329002 - DNA, 33 bp, Homo sapien
aacagcgcgagccgcagcgacttcgagtgggtc

SEQ ID NO: 329003 - DNA, 33 bp, Homo sapien
ttcaaccggaaatagcaccttggaggatcctta

SEQ ID NO: 329004 - DNA, 33 bp, Homo sapien
ttcaaccggaaatagccccttggaggatcctta

SEQ ID NO: 329005 - DNA, 33 bp, Homo sapien
gctaaggagattagcacgtagaaggaagccagg

SEQ ID NO: 329006 - DNA, 33 bp, Homo sapien
gctaaggagattagcatgtagaaggaagccagg

SEQ ID NO: 329007 - DNA, 33 bp, Homo sapien
ggcagacattaagggtaaaagctggagaatgat

SEQ ID NO: 329008 - DNA, 33 bp, Homo sapien
ggcagacattaagggttaaagctggagaatgat

SEQ ID NO: 329009 - DNA, 33 bp, Homo sapien
tcaccttctgctatgaaatgttgctgaagtgag

SEQ ID NO: 329010 - DNA, 33 bp, Homo sapien
tcaccttctgctatgagatgttgctgaagtgag

SEQ ID NO: 329011 - DNA, 33 bp, Homo sapien
aattcgcccaaggtaacacaggattcagaacta

SEQ ID NO: 329012 - DNA, 33 bp, Homo sapien
aattcgcccaaggtaatacaggattcagaacta

SEQ ID NO: 329013 - DNA, 33 bp, Homo sapien
ggttctcacctccatacgtggaagtgacaggtt

SEQ ID NO: 329014 - DNA, 33 bp, Homo sapien
ggttctcacctccatatgtggaagtgacaggtt

SEQ ID NO: 329015 - DNA, 33 bp, Homo sapien
gctgggctgaaaagtgcatgtgtttttaaggtt

SEQ ID NO: 329016 - DNA, 33 bp, Homo sapien
gctgggctgaaaagtggatgtgtttttaaggtt

SEQ ID NO: 329017 - DNA, 33 bp, Homo sapien
caaatgagatcaagtaaacgaaagcagtaatgc

SEQ ID NO: 329018 - DNA, 33 bp, Homo sapien
caaatgagatcaagtacacgaaagcagtaatgc

SEQ ID NO: 329019 - DNA, 33 bp, Homo sapien
aaggaacccacacaacaactttatagctctgaa

SEQ ID NO: 329020 - DNA, 33 bp, Homo sapien
aaggaacccacacaacgactttatagctctgaa

SEQ ID NO: 329021 - DNA, 33 bp, Homo sapien
cgcttttcatgagacaaccagatgctgtaaaaa

SEQ ID NO: 329022 - DNA, 33 bp, Homo sapien
cgcttttcatgagacacccagatgctgtaaaaa

SEQ ID NO: 329023 - DNA, 33 bp, Homo sapien
aaagcgaataaaaacagaatttttctcaccacc

SEQ ID NO: 329024 - DNA, 33 bp, Homo sapien
aaagcgaataaaaacataatttttctcaccacc

SEQ ID NO: 329025 - DNA, 33 bp, Homo sapien
agaggcttaacctgaactggtctgagatcttgg

SEQ ID NO: 329026 - DNA, 33 bp, Homo sapien
agaggcttaacctgaattggtctgagatcttgg

SEQ ID NO: 329027 - DNA, 33 bp, Homo sapien
ttgcctcctcccaacccgagcaaggggcgagca

SEQ ID NO: 329028 - DNA, 33 bp, Homo sapien
ttgcctcctcccaacctgagcaaggggcgagca

SEQ ID NO: 329029 - DNA, 33 bp, Homo sapien
gccctgggaaactaaacgtttgcaaccaatggc

SEQ ID NO: 329030 - DNA, 33 bp, Homo sapien
gccctgggaaactaaaggtttgcaaccaatggc

SEQ ID NO: 329031 - DNA, 33 bp, Homo sapien
aacctctccactaagacgctacttctgtctgct

SEQ ID NO: 329032 - DNA, 33 bp, Homo sapien
aacctctccactaagatgctacttctgtctgct

SEQ ID NO: 329033 - DNA, 33 bp, Homo sapien
acacatatgtggagtccgacatgaatgagtacc

SEQ ID NO: 329034 - DNA, 33 bp, Homo sapien
acacatatgtggagtctgacatgaatgagtacc

SEQ ID NO: 329035 - DNA, 33 bp, Homo sapien
agaaagctttccacacaaagatgttaaaaatga

SEQ ID NO: 329036 - DNA, 33 bp, Homo sapien
agaaagctttccacacgaagatgttaaaaatga

SEQ ID NO: 329037 - DNA, 33 bp, Homo sapien
acgctctctgggagaaaaccagctcataacccc

SEQ ID NO: 329038 - DNA, 33 bp, Homo sapien
acgctctctgggagaagaccagctcataacccc

SEQ ID NO: 329039 - DNA, 33 bp, Homo sapien
ctgaagccacgcaccaaacatcaagtagaggag

SEQ ID NO: 329040 - DNA, 33 bp, Homo sapien
ctgaagccacgcaccagacatcaagtagaggag

SEQ ID NO: 329041 - DNA, 33 bp, Homo sapien
gcaggactgtagcttcacggcgtctgactggta

SEQ ID NO: 329042 - DNA, 33 bp, Homo sapien
gcaggactgtagcttcgcggcgtctgactggta

SEQ ID NO: 329043 - DNA, 33 bp, Homo sapien
aacacttcaaattctacctgcaaagaactccag

SEQ ID NO: 329044 - DNA, 33 bp, Homo sapien
aacacttcaaattctatctgcaaagaactccag

SEQ ID NO: 329045 - DNA, 33 bp, Homo sapien
ggttgttctcctgtaaccgtgaagtgccagtag

SEQ ID NO: 329046 - DNA, 33 bp, Homo sapien
ggttgttctcctgtaagcgtgaagtgccagtag

SEQ ID NO: 329047 - DNA, 33 bp, Homo sapien
aaaatgaagtgttttcaagccaatgacttgctg

SEQ ID NO: 329048 - DNA, 33 bp, Homo sapien
aaaatgaagtgttttcgagccaatgacttgctg

SEQ ID NO: 329049 - DNA, 33 bp, Homo sapien
gtatttttcctttatcaacattgggatgcctgt

SEQ ID NO: 329050 - DNA, 33 bp, Homo sapien
gtatttttcctttatcgacattgggatgcctgt

SEQ ID NO: 329051 - DNA, 33 bp, Homo sapien
cctataaaatggcgccaccaggaacttcatcta

SEQ ID NO: 329052 - DNA, 33 bp, Homo sapien
cctataaaatggcgccgccaggaacttcatcta

SEQ ID NO: 329053 - DNA, 33 bp, Homo sapien
aagcaagatgtaactacgttacgagtgctgtta

SEQ ID NO: 329054 - DNA, 33 bp, Homo sapien
aagcaagatgtaactatgttacgagtgctgtta

SEQ ID NO: 329055 - DNA, 33 bp, Homo sapien
aatggctattcaaatacggctgaataaactcag

SEQ ID NO: 329056 - DNA, 33 bp, Homo sapien
aatggctattcaaatatggctgaataaactcag

SEQ ID NO: 329057 - DNA, 33 bp, Homo sapien
ctgaacttggcagaggacagcgtaccttgatct

SEQ ID NO: 329058 - DNA, 33 bp, Homo sapien
ctgaacttggcagagggcagcgtaccttgatct

SEQ ID NO: 329059 - DNA, 33 bp, Homo sapien
aaagccttccttctgacgttgatatgtgtgtct

SEQ ID NO: 329060 - DNA, 33 bp, Homo sapien
aaagccttccttctgatgttgatatgtgtgtct

SEQ ID NO: 329061 - DNA, 33 bp, Homo sapien
ctgttcgctcagcatccgatgagtgattctggc

SEQ ID NO: 329062 - DNA, 33 bp, Homo sapien
ctgttcgctcagcatctgatgagtgattctggc

SEQ ID NO: 329063 - DNA, 33 bp, Homo sapien
ttcagagaacttggaacacaaatttataacttg

SEQ ID NO: 329064 - DNA, 33 bp, Homo sapien
ttcagagaacttggaatacaaatttataacttg

SEQ ID NO: 329065 - DNA, 33 bp, Homo sapien
aagctgcatgagagcaaggagagtgttttatca

SEQ ID NO: 329066 - DNA, 33 bp, Homo sapien
aagctgcatgagagcagggagagtgttttatca

SEQ ID NO: 329067 - DNA, 33 bp, Homo sapien
ggagggagctgggagactagaggtgcccaagtg

SEQ ID NO: 329068 - DNA, 33 bp, Homo sapien
ggagggagctgggagattagaggtgcccaagtg

SEQ ID NO: 329069 - DNA, 33 bp, Homo sapien
cctgccagcagccgtaccaggtgggaggcactc

SEQ ID NO: 329070 - DNA, 33 bp, Homo sapien
cctgccagcagccgtatcaggtgggaggcactc

SEQ ID NO: 329071 - DNA, 33 bp, Homo sapien
cttctctcctccaacaaaaggacagctgcccct

SEQ ID NO: 329072 - DNA, 33 bp, Homo sapien
cttctctcctccaacagaaggacagctgcccct

SEQ ID NO: 329073 - DNA, 33 bp, Homo sapien
cggctgcagggatgaaacaggtgtgaagggctg

SEQ ID NO: 329074 - DNA, 33 bp, Homo sapien
cggctgcagggatgaagcaggtgtgaagggctg

SEQ ID NO: 329075 - DNA, 33 bp, Homo sapien
tgccatacccgtccagaatgcagttttcttaac

SEQ ID NO: 329076 - DNA, 33 bp, Homo sapien
tgccatacccgtccaggatgcagttttcttaac

SEQ ID NO: 329077 - DNA, 33 bp, Homo sapien
gacagcaccaggtgtcacaacaagggcctgatc

SEQ ID NO: 329078 - DNA, 33 bp, Homo sapien
gacagcaccaggtgtctcaacaagggcctgatc

SEQ ID NO: 329079 - DNA, 33 bp, Homo sapien
tcattatcgttgaaaggctgtgagaaatgattc

SEQ ID NO: 329080 - DNA, 33 bp, Homo sapien
tcattatcgttgaaagtctgtgagaaatgattc

SEQ ID NO: 329081 - DNA, 33 bp, Homo sapien
aagcattattctctcaatcaacagaagttaaac

SEQ ID NO: 329082 - DNA, 33 bp, Homo sapien
aagcattattctctcagtcaacagaagttaaac

SEQ ID NO: 329083 - DNA, 33 bp, Homo sapien
ctaaaagacgatgatcaaactttttctgctaaa

SEQ ID NO: 329084 - DNA, 33 bp, Homo sapien
ctaaaagacgatgatcgaactttttctgctaaa

SEQ ID NO: 329085 - DNA, 33 bp, Homo sapien
ttttcttgacagagaacgggaagttttgtctgt

SEQ ID NO: 329086 - DNA, 33 bp, Homo sapien
ttttcttgacagagaatgggaagttttgtctgt

SEQ ID NO: 329087 - DNA, 33 bp, Homo sapien
tttatagcggaggcacaaattaaaactaggctc

SEQ ID NO: 329088 - DNA, 33 bp, Homo sapien
tttatagcggaggcacgaattaaaactaggctc

SEQ ID NO: 329089 - DNA, 33 bp, Homo sapien
cgccgtgagtgattgaggttggcaaccagagac

SEQ ID NO: 329090 - DNA, 33 bp, Homo sapien
cgccgtgagtgattgatgttggcaaccagagac

SEQ ID NO: 329091 - DNA, 33 bp, Homo sapien
caagagtgtgcacatgccaaaacttatccagtg

SEQ ID NO: 329092 - DNA, 33 bp, Homo sapien
caagagtgtgcacatggcaaaacttatccagtg

SEQ ID NO: 329093 - DNA, 33 bp, Homo sapien
acttacaactggataacagtaacacaaacaatc

SEQ ID NO: 329094 - DNA, 33 bp, Homo sapien
acttacaactggataatagtaacacaaacaatc

SEQ ID NO: 329095 - DNA, 33 bp, Homo sapien
ttttttgcatctaccaagatgatcgtatgtgtt

SEQ ID NO: 329096 - DNA, 33 bp, Homo sapien
ttttttgcatctaccaggatgatcgtatgtgtt

SEQ ID NO: 329097 - DNA, 33 bp, Homo sapien
ttttcctacatgatagccatttttggtgttctt

SEQ ID NO: 329098 - DNA, 33 bp, Homo sapien
ttttcctacatgatagtcatttttggtgttctt

SEQ ID NO: 329099 - DNA, 33 bp, Homo sapien
gactgctggtgatcaactccctctgatttaaaa

SEQ ID NO: 329100 - DNA, 33 bp, Homo sapien
gactgctggtgatcaattccctctgatttaaaa

SEQ ID NO: 329101 - DNA, 33 bp, Homo sapien
ttctttttcatacttaggatttctgctaccttc

SEQ ID NO: 329102 - DNA, 33 bp, Homo sapien
ttctttttcatacttatgatttctgctaccttc

SEQ ID NO: 329103 - DNA, 33 bp, Homo sapien
ttatagcagctcaagcagaccaagacagaaatg

SEQ ID NO: 329104 - DNA, 33 bp, Homo sapien
ttatagcagctcaagcggaccaagacagaaatg

SEQ ID NO: 329105 - DNA, 33 bp, Homo sapien
caatacctatttggaccattttaacagctctat

SEQ ID NO: 329106 - DNA, 33 bp, Homo sapien
caatacctatttggactattttaacagctctat

SEQ ID NO: 329107 - DNA, 33 bp, Homo sapien
acagccacagactaaacgcgtgttcctttaagc

SEQ ID NO: 329108 - DNA, 33 bp, Homo sapien
acagccacagactaaatgcgtgttcctttaagc

SEQ ID NO: 329109 - DNA, 33 bp, Homo sapien
ccattatcacaagaagaacttagtggaaatccc

SEQ ID NO: 329110 - DNA, 33 bp, Homo sapien
ccattatcacaagaaggacttagtggaaatccc

SEQ ID NO: 329111 - DNA, 33 bp, Homo sapien
tcatggcttcttacccaacttccagatctcagc

SEQ ID NO: 329112 - DNA, 33 bp, Homo sapien
tcatggcttcttacccgacttccagatctcagc

SEQ ID NO: 329113 - DNA, 33 bp, Homo sapien
gagctgcagtcttatcagaagggttccctggga

SEQ ID NO: 329114 - DNA, 33 bp, Homo sapien
gagctgcagtcttatcggaagggttccctggga

SEQ ID NO: 329115 - DNA, 33 bp, Homo sapien
ctcttgggaattctcgcaggagccagtcccctt

SEQ ID NO: 329116 - DNA, 33 bp, Homo sapien
ctcttgggaattctcgtaggagccagtcccctt

SEQ ID NO: 329117 - DNA, 33 bp, Homo sapien
acattcttgaagaagccgaagggcactgcgata

SEQ ID NO: 329118 - DNA, 33 bp, Homo sapien
acattcttgaagaagctgaagggcactgcgata

SEQ ID NO: 329119 - DNA, 33 bp, Homo sapien
ctcgtgaagatttctacatcgattacacattga

SEQ ID NO: 329120 - DNA, 33 bp, Homo sapien
ctcgtgaagatttctatatcgattacacattga

SEQ ID NO: 329121 - DNA, 33 bp, Homo sapien
atatgaagaattggcactcaatagacatagagt

SEQ ID NO: 329122 - DNA, 33 bp, Homo sapien
atatgaagaattggcattcaatagacatagagt

SEQ ID NO: 329123 - DNA, 33 bp, Homo sapien
ggcagtttgcacgttcacgtattcaactgatac

SEQ ID NO: 329124 - DNA, 33 bp, Homo sapien
ggcagtttgcacgttcgcgtattcaactgatac

SEQ ID NO: 329125 - DNA, 33 bp, Homo sapien
tccgagcaggaggcgcaagggagtccatctctg

SEQ ID NO: 329126 - DNA, 33 bp, Homo sapien
tccgagcaggaggcgcgagggagtccatctctg

SEQ ID NO: 329127 - DNA, 33 bp, Homo sapien
aggcaggaacgcagataaggaggcaggcggccc

SEQ ID NO: 329128 - DNA, 33 bp, Homo sapien
aggcaggaacgcagatgaggaggcaggcggccc

SEQ ID NO: 329129 - DNA, 33 bp, Homo sapien
gctctcacatgaaccaagtcagttgtcaacagc

SEQ ID NO: 329130 - DNA, 33 bp, Homo sapien
gctctcacatgaaccaggtcagttgtcaacagc

SEQ ID NO: 329131 - DNA, 33 bp, Homo sapien
ctctggcatctattaccggtttagctgtcctgg

SEQ ID NO: 329132 - DNA, 33 bp, Homo sapien
ctctggcatctattacgggtttagctgtcctgg

SEQ ID NO: 329133 - DNA, 33 bp, Homo sapien
ccacacgcacttcccaggtactctgcaaacacg

SEQ ID NO: 329134 - DNA, 33 bp, Homo sapien
ccacacgcacttcccatgtactctgcaaacacg

SEQ ID NO: 329135 - DNA, 33 bp, Homo sapien
ggcagaccaggatggaagaacaggcgactaagg

SEQ ID NO: 329136 - DNA, 33 bp, Homo sapien
ggcagaccaggatggaggaacaggcgactaagg

SEQ ID NO: 329137 - DNA, 33 bp, Homo sapien
agctcctgaagaccacaggccacctgacctctt

SEQ ID NO: 329138 - DNA, 33 bp, Homo sapien
agctcctgaagaccacgggccacctgacctctt

SEQ ID NO: 329139 - DNA, 33 bp, Homo sapien
gtcatgctgccaggagaaagacagccgattctc

SEQ ID NO: 329140 - DNA, 33 bp, Homo sapien
gtcatgctgccaggaggaagacagccgattctc

SEQ ID NO: 329141 - DNA, 33 bp, Homo sapien
acacgattaccaaacccgagacttctccctggg

SEQ ID NO: 329142 - DNA, 33 bp, Homo sapien
acacgattaccaaaccggagacttctccctggg

SEQ ID NO: 329143 - DNA, 33 bp, Homo sapien
ctggcctttaaggtcaccaagcctctctcaagg

SEQ ID NO: 329144 - DNA, 33 bp, Homo sapien
ctggcctttaaggtcatcaagcctctctcaagg

SEQ ID NO: 329145 - DNA, 33 bp, Homo sapien
gacaaatggtgataaccgaggtgtcgctgctct

SEQ ID NO: 329146 - DNA, 33 bp, Homo sapien
gacaaatggtgataactgaggtgtcgctgctct

SEQ ID NO: 329147 - DNA, 33 bp, Homo sapien
aaaggaccttccatcactgaagttggtttcttg

SEQ ID NO: 329148 - DNA, 33 bp, Homo sapien
aaaggaccttccatcattgaagttggtttcttg

SEQ ID NO: 329149 - DNA, 33 bp, Homo sapien
ttctgcatgacgtgaaaaccgtggcgaggctgc

SEQ ID NO: 329150 - DNA, 33 bp, Homo sapien
ttctgcatgacgtgaagaccgtggcgaggctgc

SEQ ID NO: 329151 - DNA, 33 bp, Homo sapien
tagttctctgttttaaaatccaatggtgcaagt

SEQ ID NO: 329152 - DNA, 33 bp, Homo sapien
tagttctctgttttaatatccaatggtgcaagt

SEQ ID NO: 329153 - DNA, 33 bp, Homo sapien
aaaccaaaagaatgaccagcctaagcttcccaa

SEQ ID NO: 329154 - DNA, 33 bp, Homo sapien
aaaccaaaagaatgactagcctaagcttcccaa

SEQ ID NO: 329155 - DNA, 33 bp, Homo sapien
tccatccttatcttcaacttggcaaagtgacat

SEQ ID NO: 329156 - DNA, 33 bp, Homo sapien
tccatccttatcttcagcttggcaaagtgacat

SEQ ID NO: 329157 - DNA, 33 bp, Homo sapien
tctggcaggacaccaccgaggcgattccaggct

SEQ ID NO: 329158 - DNA, 33 bp, Homo sapien
tctggcaggacaccactgaggcgattccaggct

SEQ ID NO: 329159 - DNA, 33 bp, Homo sapien
gtcatatcacagggggaactgtcatgtggaaat

SEQ ID NO: 329160 - DNA, 33 bp, Homo sapien
gtcatatcacaggggggactgtcatgtggaaat

SEQ ID NO: 329161 - DNA, 33 bp, Homo sapien
cacatagtcctaccaccgaactgggtttgccag

SEQ ID NO: 329162 - DNA, 33 bp, Homo sapien
cacatagtcctaccactgaactgggtttgccag

SEQ ID NO: 329163 - DNA, 33 bp, Homo sapien
aatgctcttggttacaatgaattagccagaact

SEQ ID NO: 329164 - DNA, 33 bp, Homo sapien
aatgctcttggttacagtgaattagccagaact

SEQ ID NO: 329165 - DNA, 33 bp, Homo sapien
ttcgttttaatgtaacagtacaagaaaagtgac

SEQ ID NO: 329166 - DNA, 33 bp, Homo sapien
ttcgttttaatgtaacggtacaagaaaagtgac

SEQ ID NO: 329167 - DNA, 33 bp, Homo sapien
caggacatgtgggtgaagatattaaggggcaaa

SEQ ID NO: 329168 - DNA, 33 bp, Homo sapien
caggacatgtgggtgaggatattaaggggcaaa

SEQ ID NO: 329169 - DNA, 33 bp, Homo sapien
cttggaaacagtatccaattctaattcacgaag

SEQ ID NO: 329170 - DNA, 33 bp, Homo sapien
cttggaaacagtatccgattctaattcacgaag

SEQ ID NO: 329171 - DNA, 33 bp, Homo sapien
attcttcattactattcaaagtcttctcattta

SEQ ID NO: 329172 - DNA, 33 bp, Homo sapien
attcttcattactattgaaagtcttctcattta

SEQ ID NO: 329173 - DNA, 33 bp, Homo sapien
cacaaaaccccaaatacgtgtttgcctgagacc

SEQ ID NO: 329174 - DNA, 33 bp, Homo sapien
cacaaaaccccaaatatgtgtttgcctgagacc

SEQ ID NO: 329175 - DNA, 33 bp, Homo sapien
gcaggcgggtgatgatcacttttccagaagttg

SEQ ID NO: 329176 - DNA, 33 bp, Homo sapien
gcaggcgggtgatgatgacttttccagaagttg

SEQ ID NO: 329177 - DNA, 33 bp, Homo sapien
cacagagatagctgggaatgttggcaaagctga

SEQ ID NO: 329178 - DNA, 33 bp, Homo sapien
cacagagatagctggggatgttggcaaagctga

SEQ ID NO: 329179 - DNA, 33 bp, Homo sapien
ttatttgtgtaacgacaggctctatttcttgag

SEQ ID NO: 329180 - DNA, 33 bp, Homo sapien
ttatttgtgtaacgacgggctctatttcttgag

SEQ ID NO: 329181 - DNA, 33 bp, Homo sapien
aacaagtcagtgagtacctaaatagacaaggat

SEQ ID NO: 329182 - DNA, 33 bp, Homo sapien
aacaagtcagtgagtatctaaatagacaaggat

SEQ ID NO: 329183 - DNA, 33 bp, Homo sapien
gggagcacgtgaaggacgttttatctctggctt

SEQ ID NO: 329184 - DNA, 33 bp, Homo sapien
gggagcacgtgaaggatgttttatctctggctt

SEQ ID NO: 329185 - DNA, 33 bp, Homo sapien
ggtctggggagagcgcaaacggctggtagctct

SEQ ID NO: 329186 - DNA, 33 bp, Homo sapien
ggtctggggagagcgcgaacggctggtagctct

SEQ ID NO: 329187 - DNA, 33 bp, Homo sapien
tggaggccatgtccgaagtgtttgagtaccgcc

SEQ ID NO: 329188 - DNA, 33 bp, Homo sapien
tggaggccatgtccgaggtgtttgagtaccgcc

SEQ ID NO: 329189 - DNA, 33 bp, Homo sapien
ttccaaaaaatgagaaaagcttgcaaaagggcc

SEQ ID NO: 329190 - DNA, 33 bp, Homo sapien
ttccaaaaaatgagaagagcttgcaaaagggcc

SEQ ID NO: 329191 - DNA, 33 bp, Homo sapien
tggggaaccttgcccactactgctagaaaccat

SEQ ID NO: 329192 - DNA, 33 bp, Homo sapien
tggggaaccttgcccattactgctagaaaccat

SEQ ID NO: 329193 - DNA, 33 bp, Homo sapien
aagtgttcatgcaaaagtgtagtgcataaatta

SEQ ID NO: 329194 - DNA, 33 bp, Homo sapien
aagtgttcatgcaaaattgtagtgcataaatta

SEQ ID NO: 329195 - DNA, 33 bp, Homo sapien
gtgatgaatcaatgacaagtgaataaatgaatg

SEQ ID NO: 329196 - DNA, 33 bp, Homo sapien
gtgatgaatcaatgacgagtgaataaatgaatg

SEQ ID NO: 329197 - DNA, 33 bp, Homo sapien
aacaaatacctgattaagtagctgactaaatgg

SEQ ID NO: 329198 - DNA, 33 bp, Homo sapien
aacaaatacctgattatgtagctgactaaatgg

SEQ ID NO: 329199 - DNA, 33 bp, Homo sapien
cacattttagaaagaacgaaacagcaaagactt

SEQ ID NO: 329200 - DNA, 33 bp, Homo sapien
cacattttagaaagaatgaaacagcaaagactt

SEQ ID NO: 329201 - DNA, 33 bp, Homo sapien
cacagtttcttcacaaatagactcttcctcagg

SEQ ID NO: 329202 - DNA, 33 bp, Homo sapien
cacagtttcttcacaagtagactcttcctcagg

SEQ ID NO: 329203 - DNA, 33 bp, Homo sapien
gcccatgctcctgttacgcatagccttgtgtag

SEQ ID NO: 329204 - DNA, 33 bp, Homo sapien
gcccatgctcctgttatgcatagccttgtgtag

SEQ ID NO: 329205 - DNA, 33 bp, Homo sapien
aacgtgctccacatcaaatattattgggaaaat

SEQ ID NO: 329206 - DNA, 33 bp, Homo sapien
aacgtgctccacatcatatattattgggaaaat

SEQ ID NO: 329207 - DNA, 33 bp, Homo sapien
acctctacctcaaaaactcaacaacttcaatgt

SEQ ID NO: 329208 - DNA, 33 bp, Homo sapien
acctctacctcaaaaagtcaacaacttcaatgt

SEQ ID NO: 329209 - DNA, 33 bp, Homo sapien
tcattctatatgcccacagtagattcttttctt

SEQ ID NO: 329210 - DNA, 33 bp, Homo sapien
tcattctatatgcccatagtagattcttttctt

SEQ ID NO: 329211 - DNA, 33 bp, Homo sapien
aacaatacaatcaaaactcatgaactacaaaag

SEQ ID NO: 329212 - DNA, 33 bp, Homo sapien
aacaatacaatcaaaattcatgaactacaaaag

SEQ ID NO: 329213 - DNA, 33 bp, Homo sapien
tctgaggtctgttagaaaagatacatggcccat

SEQ ID NO: 329214 - DNA, 33 bp, Homo sapien
tctgaggtctgttagagaagatacatggcccat

SEQ ID NO: 329215 - DNA, 33 bp, Homo sapien
taatccttgcttttcaactttagtcagtcattt

SEQ ID NO: 329216 - DNA, 33 bp, Homo sapien
taatccttgcttttcacctttagtcagtcattt

SEQ ID NO: 329217 - DNA, 33 bp, Homo sapien
aacccagtaataaatacgagatgtatgaaatat

SEQ ID NO: 329218 - DNA, 33 bp, Homo sapien
aacccagtaataaatatgagatgtatgaaatat

SEQ ID NO: 329219 - DNA, 33 bp, Homo sapien
aggatagttaatgaaacttatgttgatatgaga

SEQ ID NO: 329220 - DNA, 33 bp, Homo sapien
aggatagttaatgaaatttatgttgatatgaga

SEQ ID NO: 329221 - DNA, 33 bp, Homo sapien
acatcactttaaacacaggaatgaactagattc

SEQ ID NO: 329222 - DNA, 33 bp, Homo sapien
acatcactttaaacacgggaatgaactagattc

SEQ ID NO: 329223 - DNA, 33 bp, Homo sapien
atttttccttggctatcactgtttcagtacata

SEQ ID NO: 329224 - DNA, 33 bp, Homo sapien
atttttccttggctatgactgtttcagtacata

SEQ ID NO: 329225 - DNA, 33 bp, Homo sapien
agttcagagcatacaaggggactttctcgctca

SEQ ID NO: 329226 - DNA, 33 bp, Homo sapien
agttcagagcatacaatgggactttctcgctca

SEQ ID NO: 329227 - DNA, 33 bp, Homo sapien
agaatgcaaagagtaacgcagataatgtcttaa

SEQ ID NO: 329228 - DNA, 33 bp, Homo sapien
agaatgcaaagagtaatgcagataatgtcttaa

SEQ ID NO: 329229 - DNA, 33 bp, Homo sapien
gcaggtggagggaacacgtgaatgccacaaggc

SEQ ID NO: 329230 - DNA, 33 bp, Homo sapien
gcaggtggagggaacatgtgaatgccacaaggc

SEQ ID NO: 329231 - DNA, 33 bp, Homo sapien
attgtcctcaaactgaaatatacacagaattgg

SEQ ID NO: 329232 - DNA, 33 bp, Homo sapien
attgtcctcaaactgagatatacacagaattgg

SEQ ID NO: 329233 - DNA, 33 bp, Homo sapien
caagtagagcaatgcactgaggtttagaccagt

SEQ ID NO: 329234 - DNA, 33 bp, Homo sapien
caagtagagcaatgcattgaggtttagaccagt

SEQ ID NO: 329235 - DNA, 33 bp, Homo sapien
tgtggacataaataaggagacacgagcaaatgg

SEQ ID NO: 329236 - DNA, 33 bp, Homo sapien
tgtggacataaataagtagacacgagcaaatgg

SEQ ID NO: 329237 - DNA, 33 bp, Homo sapien
tgcttgtccatgtagacgtgctttatttatgcc

SEQ ID NO: 329238 - DNA, 33 bp, Homo sapien
tgcttgtccatgtagatgtgctttatttatgcc

SEQ ID NO: 329239 - DNA, 33 bp, Homo sapien
cctggctaccacctacaaagtgccgaccacggg

SEQ ID NO: 329240 - DNA, 33 bp, Homo sapien
cctggctaccacctacgaagtgccgaccacggg

SEQ ID NO: 329241 - DNA, 33 bp, Homo sapien
ggtatggaatggactaggaagcccagagcatac

SEQ ID NO: 329242 - DNA, 33 bp, Homo sapien
ggtatggaatggactatgaagcccagagcatac

SEQ ID NO: 329243 - DNA, 33 bp, Homo sapien
tcatcaagaaggcatactatgattcagaaaaac

SEQ ID NO: 329244 - DNA, 33 bp, Homo sapien
tcatcaagaaggcatattatgattcagaaaaac

SEQ ID NO: 329245 - DNA, 33 bp, Homo sapien
acccaccttggcaaagacattgaggtctggatg

SEQ ID NO: 329246 - DNA, 33 bp, Homo sapien
acccaccttggcaaaggcattgaggtctggatg

SEQ ID NO: 329247 - DNA, 33 bp, Homo sapien
aagaattgtaccaacactgatattcatagaaac

SEQ ID NO: 329248 - DNA, 33 bp, Homo sapien
aagaattgtaccaacattgatattcatagaaac

SEQ ID NO: 329249 - DNA, 33 bp, Homo sapien
cgcacaaatgtaaccaccttcacaagaattgta

SEQ ID NO: 329250 - DNA, 33 bp, Homo sapien
cgcacaaatgtaaccatcttcacaagaattgta

SEQ ID NO: 329251 - DNA, 33 bp, Homo sapien
gctttggaagtgtgacagaatggcatccccaat

SEQ ID NO: 329252 - DNA, 33 bp, Homo sapien
gctttggaagtgtgacggaatggcatccccaat

SEQ ID NO: 329253 - DNA, 33 bp, Homo sapien
ctggctctcagctacccgatgcttatgtcatat

SEQ ID NO: 329254 - DNA, 33 bp, Homo sapien
ctggctctcagctacctgatgcttatgtcatat

SEQ ID NO: 329255 - DNA, 33 bp, Homo sapien
atgggtgatggcaccaagttggagagatgacag

SEQ ID NO: 329256 - DNA, 33 bp, Homo sapien
atgggtgatggcaccatgttggagagatgacag

SEQ ID NO: 329257 - DNA, 33 bp, Homo sapien
atgctttgagtcttctgacaaagcaagcagccc

SEQ ID NO: 329258 - DNA, 33 bp, Homo sapien
atgctttgagtcttcttacaaagcaagcagccc

SEQ ID NO: 329259 - DNA, 33 bp, Homo sapien
gttcactccatgcaaccgaggcagtgaatatag

SEQ ID NO: 329260 - DNA, 33 bp, Homo sapien
gttcactccatgcaactgaggcagtgaatatag

SEQ ID NO: 329261 - DNA, 33 bp, Homo sapien
agacccacggagctcacggtcgtcaggggtcct

SEQ ID NO: 329262 - DNA, 33 bp, Homo sapien
agacccacggagctcatggtcgtcaggggtcct

SEQ ID NO: 329263 - DNA, 33 bp, Homo sapien
aaccgcaaacagcaacagcccgtttttgctctt

SEQ ID NO: 329264 - DNA, 33 bp, Homo sapien
aaccgcaaacagcaactgcccgtttttgctctt

SEQ ID NO: 329265 - DNA, 33 bp, Homo sapien
cctcaggaagggatgccgaaaagtcagtggact

SEQ ID NO: 329266 - DNA, 33 bp, Homo sapien
cctcaggaagggatgctgaaaagtcagtggact

SEQ ID NO: 329267 - DNA, 33 bp, Homo sapien
aaatggaccatgcacccattgggtcctcctggc

SEQ ID NO: 329268 - DNA, 33 bp, Homo sapien
aaatggaccatgcacctattgggtcctcctggc

SEQ ID NO: 329269 - DNA, 33 bp, Homo sapien
ctcctccaaaaaacacagatttgatacatgaat

SEQ ID NO: 329270 - DNA, 33 bp, Homo sapien
ctcctccaaaaaacaccgatttgatacatgaat

SEQ ID NO: 329271 - DNA, 33 bp, Homo sapien
actcagggtggttctacgatcaagcatctcgac

SEQ ID NO: 329272 - DNA, 33 bp, Homo sapien
actcagggtggttctatgatcaagcatctcgac

SEQ ID NO: 329273 - DNA, 33 bp, Homo sapien
aaacttcatccttttaccacagagagaacccaa

SEQ ID NO: 329274 - DNA, 33 bp, Homo sapien
aaacttcatccttttagcacagagagaacccaa

SEQ ID NO: 329275 - DNA, 33 bp, Homo sapien
aattctcacccagtccaatagtatgatcttaac

SEQ ID NO: 329276 - DNA, 33 bp, Homo sapien
aattctcacccagtcctatagtatgatcttaac

SEQ ID NO: 329277 - DNA, 33 bp, Homo sapien
gccaccgtccctcacaacagcagttctccagct

SEQ ID NO: 329278 - DNA, 33 bp, Homo sapien
gccaccgtccctcacatcagcagttctccagct

SEQ ID NO: 329279 - DNA, 33 bp, Homo sapien
taaagctctggccttcaagagtggctgtgcagg

SEQ ID NO: 329280 - DNA, 33 bp, Homo sapien
taaagctctggccttcgagagtggctgtgcagg

SEQ ID NO: 329281 - DNA, 33 bp, Homo sapien
ctatggacttgcaagaccttcttttctcagcaa

SEQ ID NO: 329282 - DNA, 33 bp, Homo sapien
ctatggacttgcaagatcttcttttctcagcaa

SEQ ID NO: 329283 - DNA, 33 bp, Homo sapien
catctttctgctctgccgaggcgaaagccgcct

SEQ ID NO: 329284 - DNA, 33 bp, Homo sapien
catctttctgctctgctgaggcgaaagccgcct

SEQ ID NO: 329285 - DNA, 33 bp, Homo sapien
gggaagatcggcacaaaaagataaattttacag

SEQ ID NO: 329286 - DNA, 33 bp, Homo sapien
gggaagatcggcacaagaagataaattttacag

SEQ ID NO: 329287 - DNA, 33 bp, Homo sapien
atcaagttctcgcctacaaactatttcaacttt

SEQ ID NO: 329288 - DNA, 33 bp, Homo sapien
atcaagttctcgcctataaactatttcaacttt

SEQ ID NO: 329289 - DNA, 33 bp, Homo sapien
tctctgtccatcctcccaagctctcagaatctg

SEQ ID NO: 329290 - DNA, 33 bp, Homo sapien
tctctgtccatcctcctaagctctcagaatctg

SEQ ID NO: 329291 - DNA, 33 bp, Homo sapien
tctcgatgaccaggtcgaccgtcatgatgtcat

SEQ ID NO: 329292 - DNA, 33 bp, Homo sapien
tctcgatgaccaggtctaccgtcatgatgtcat

SEQ ID NO: 329293 - DNA, 33 bp, Homo sapien
gtgagagatttcatccagccgtgcagaacgaca

SEQ ID NO: 329294 - DNA, 33 bp, Homo sapien
gtgagagatttcatccggccgtgcagaacgaca

SEQ ID NO: 329295 - DNA, 33 bp, Homo sapien
cctccaggagtgccgaagtgccccagacccggg

SEQ ID NO: 329296 - DNA, 33 bp, Homo sapien
cctccaggagtgccgacgtgccccagacccggg

SEQ ID NO: 329297 - DNA, 33 bp, Homo sapien
tattccttgaccactacgggcttgagagagcct

SEQ ID NO: 329298 - DNA, 33 bp, Homo sapien
tattccttgaccactatgggcttgagagagcct

SEQ ID NO: 329299 - DNA, 33 bp, Homo sapien
aagatcgtgctgcctacgtacctggagctttgg

SEQ ID NO: 329300 - DNA, 33 bp, Homo sapien
aagatcgtgctgcctatgtacctggagctttgg

SEQ ID NO: 329301 - DNA, 33 bp, Homo sapien
tggagcacagaaaatacgatcattcttatggta

SEQ ID NO: 329302 - DNA, 33 bp, Homo sapien
tggagcacagaaaatatgatcattcttatggta

SEQ ID NO: 329303 - DNA, 33 bp, Homo sapien
ttgaggcaaaaggcccaagtggtgatgagcagg

SEQ ID NO: 329304 - DNA, 33 bp, Homo sapien
ttgaggcaaaaggcccgagtggtgatgagcagg

SEQ ID NO: 329305 - DNA, 33 bp, Homo sapien
tatcaatcagttatcaatcaagtccaggtcatt

SEQ ID NO: 329306 - DNA, 33 bp, Homo sapien
tatcaatcagttatcagtcaagtccaggtcatt

SEQ ID NO: 329307 - DNA, 33 bp, Homo sapien
tcccttgttttgataccgcactagagttagcac

SEQ ID NO: 329308 - DNA, 33 bp, Homo sapien
tcccttgttttgatactgcactagagttagcac

SEQ ID NO: 329309 - DNA, 33 bp, Homo sapien
aggctggtggattttgaagtattaatatcacac

SEQ ID NO: 329310 - DNA, 33 bp, Homo sapien
aggctggtggattttggagtattaatatcacac

SEQ ID NO: 329311 - DNA, 33 bp, Homo sapien
aggggcctccaaagacactgttagtccgcgcag

SEQ ID NO: 329312 - DNA, 33 bp, Homo sapien
aggggcctccaaagacgctgttagtccgcgcag

SEQ ID NO: 329313 - DNA, 33 bp, Homo sapien
ctcttccgtttattcactagctgtagggagcca

SEQ ID NO: 329314 - DNA, 33 bp, Homo sapien
ctcttccgtttattcagtagctgtagggagcca

SEQ ID NO: 329315 - DNA, 33 bp, Homo sapien
tgtagggagccacttccacgtaccaggggctat

SEQ ID NO: 329316 - DNA, 33 bp, Homo sapien
tgtagggagccacttctacgtaccaggggctat

SEQ ID NO: 329317 - DNA, 33 bp, Homo sapien
ctgctgagacccagagaaagacattgcagcagg

SEQ ID NO: 329318 - DNA, 33 bp, Homo sapien
ctgctgagacccagaggaagacattgcagcagg

SEQ ID NO: 329319 - DNA, 33 bp, Homo sapien
aattgaaacaactctcaataggaaaatggacaa

SEQ ID NO: 329320 - DNA, 33 bp, Homo sapien
aattgaaacaactctcgataggaaaatggacaa

SEQ ID NO: 329321 - DNA, 33 bp, Homo sapien
agttgaatgtttctgacagacaaaagagcaata

SEQ ID NO: 329322 - DNA, 33 bp, Homo sapien
agttgaatgtttctgatagacaaaagagcaata

SEQ ID NO: 329323 - DNA, 33 bp, Homo sapien
aacagtcaatgacagaagaggcagaatttacct

SEQ ID NO: 329324 - DNA, 33 bp, Homo sapien
aacagtcaatgacagacgaggcagaatttacct

SEQ ID NO: 329325 - DNA, 33 bp, Homo sapien
ggcagccgccagaaagaaaaaatggctagaagc

SEQ ID NO: 329326 - DNA, 33 bp, Homo sapien
ggcagccgccagaaaggaaaaatggctagaagc

SEQ ID NO: 329327 - DNA, 33 bp, Homo sapien
gtgagcaggtaggcacaagtaagcctgaattca

SEQ ID NO: 329328 - DNA, 33 bp, Homo sapien
gtgagcaggtaggcactagtaagcctgaattca

SEQ ID NO: 329329 - DNA, 33 bp, Homo sapien
cttacattgacttaacgaagcttccatttcctc

SEQ ID NO: 329330 - DNA, 33 bp, Homo sapien
cttacattgacttaactaagcttccatttcctc

SEQ ID NO: 329331 - DNA, 33 bp, Homo sapien
atgcatagaagtcaccgggctctcgataatcat

SEQ ID NO: 329332 - DNA, 33 bp, Homo sapien
atgcatagaagtcacctggctctcgataatcat

SEQ ID NO: 329333 - DNA, 33 bp, Homo sapien
caacacaacttccttacagaggcctcattccac

SEQ ID NO: 329334 - DNA, 33 bp, Homo sapien
caacacaacttccttagagaggcctcattccac

SEQ ID NO: 329335 - DNA, 33 bp, Homo sapien
ggcccacatgtccaggaacagcgctgagtcaca

SEQ ID NO: 329336 - DNA, 33 bp, Homo sapien
ggcccacatgtccaggcacagcgctgagtcaca

SEQ ID NO: 329337 - DNA, 33 bp, Homo sapien
agcttccaaacaaggcgattgtctctggggtgg

SEQ ID NO: 329338 - DNA, 33 bp, Homo sapien
agcttccaaacaaggctattgtctctggggtgg

SEQ ID NO: 329339 - DNA, 33 bp, Homo sapien
ttccatattcacagagccagatgaaaatagggt

SEQ ID NO: 329340 - DNA, 33 bp, Homo sapien
ttccatattcacagagtcagatgaaaatagggt

SEQ ID NO: 329341 - DNA, 33 bp, Homo sapien
gaaggttgcagatgggacaagcttgaaggacgt

SEQ ID NO: 329342 - DNA, 33 bp, Homo sapien
gaaggttgcagatggggcaagcttgaaggacgt

SEQ ID NO: 329343 - DNA, 33 bp, Homo sapien
tagccatgaccaggagaacgtggccaccttgga

SEQ ID NO: 329344 - DNA, 33 bp, Homo sapien
tagccatgaccaggagcacgtggccaccttgga

SEQ ID NO: 329345 - DNA, 33 bp, Homo sapien
ctctctgtgcctgcccgcatagtgtgcacaaaa

SEQ ID NO: 329346 - DNA, 33 bp, Homo sapien
ctctctgtgcctgccctcatagtgtgcacaaaa

SEQ ID NO: 329347 - DNA, 33 bp, Homo sapien
ctgatgggtacagatacgcccaatggtgggctg

SEQ ID NO: 329348 - DNA, 33 bp, Homo sapien
ctgatgggtacagatatgcccaatggtgggctg

SEQ ID NO: 329349 - DNA, 33 bp, Homo sapien
gtggtgtctgtaccaccgcccattagtcactta

SEQ ID NO: 329350 - DNA, 33 bp, Homo sapien
gtggtgtctgtaccactgcccattagtcactta

SEQ ID NO: 329351 - DNA, 33 bp, Homo sapien
agaactttcactttcaatccatctatttctcat

SEQ ID NO: 329352 - DNA, 33 bp, Homo sapien
agaactttcactttcactccatctatttctcat

SEQ ID NO: 329353 - DNA, 33 bp, Homo sapien
caacagttttgtagaccactggttaggtatatt

SEQ ID NO: 329354 - DNA, 33 bp, Homo sapien
caacagttttgtagactactggttaggtatatt

SEQ ID NO: 329355 - DNA, 33 bp, Homo sapien
ctataagaatgagtaaaggaagtgcctcaggct

SEQ ID NO: 329356 - DNA, 33 bp, Homo sapien
ctataagaatgagtaagggaagtgcctcaggct

SEQ ID NO: 329357 - DNA, 33 bp, Homo sapien
attttttcaattcaaccagattttctggggagg

SEQ ID NO: 329358 - DNA, 33 bp, Homo sapien
attttttcaattcaactagattttctggggagg

SEQ ID NO: 329359 - DNA, 33 bp, Homo sapien
ctctttcacactgcagaaggagccgctgtgagt

SEQ ID NO: 329360 - DNA, 33 bp, Homo sapien
ctctttcacactgcaggaggagccgctgtgagt

SEQ ID NO: 329361 - DNA, 33 bp, Homo sapien
tggaaactgccggaggaatggtgaagatgagga

SEQ ID NO: 329362 - DNA, 33 bp, Homo sapien
tggaaactgccggagggatggtgaagatgagga

SEQ ID NO: 329363 - DNA, 33 bp, Homo sapien
agaagacagaccctcacgccttttcttccacct

SEQ ID NO: 329364 - DNA, 33 bp, Homo sapien
agaagacagaccctcatgccttttcttccacct

SEQ ID NO: 329365 - DNA, 33 bp, Homo sapien
tgaccttttttaagcacgcagttgaatggcagt

SEQ ID NO: 329366 - DNA, 33 bp, Homo sapien
tgaccttttttaagcatgcagttgaatggcagt

SEQ ID NO: 329367 - DNA, 33 bp, Homo sapien
tcacccattgtcttcacgttcctggaatttgtg

SEQ ID NO: 329368 - DNA, 33 bp, Homo sapien
tcacccattgtcttcatgttcctggaatttgtg

SEQ ID NO: 329369 - DNA, 33 bp, Homo sapien
caggtgcatggtggaaactgtgggtgggtctac

SEQ ID NO: 329370 - DNA, 33 bp, Homo sapien
caggtgcatggtggaagctgtgggtgggtctac

SEQ ID NO: 329371 - DNA, 33 bp, Homo sapien
ggtgcacagatgtcaacgattgaagtttcagaa

SEQ ID NO: 329372 - DNA, 33 bp, Homo sapien
ggtgcacagatgtcaaggattgaagtttcagaa

SEQ ID NO: 329373 - DNA, 33 bp, Homo sapien
tatcagaggtaaagaacggcactggataatgat

SEQ ID NO: 329374 - DNA, 33 bp, Homo sapien
tatcagaggtaaagaatggcactggataatgat

SEQ ID NO: 329375 - DNA, 33 bp, Homo sapien
gacgcagaaggatgacacaaaagctggagggtg

SEQ ID NO: 329376 - DNA, 33 bp, Homo sapien
gacgcagaaggatgacgcaaaagctggagggtg

SEQ ID NO: 329377 - DNA, 33 bp, Homo sapien
gatgtgattgctgttgcacaggtcacagactgc

SEQ ID NO: 329378 - DNA, 33 bp, Homo sapien
gatgtgattgctgttggacaggtcacagactgc

SEQ ID NO: 329379 - DNA, 33 bp, Homo sapien
tggggctatagccacgaacaacaacaacgaaaa

SEQ ID NO: 329380 - DNA, 33 bp, Homo sapien
tggggctatagccacggacaacaacaacgaaaa

SEQ ID NO: 329381 - DNA, 33 bp, Homo sapien
gatgccttttcattgacggaacacacctgtgta

SEQ ID NO: 329382 - DNA, 33 bp, Homo sapien
gatgccttttcattgatggaacacacctgtgta

SEQ ID NO: 329383 - DNA, 33 bp, Homo sapien
cccaggagtctgataccagtctggccaacatgg

SEQ ID NO: 329384 - DNA, 33 bp, Homo sapien
cccaggagtctgatactagtctggccaacatgg

SEQ ID NO: 329385 - DNA, 33 bp, Homo sapien
gaagaaggaacagtaaaagaggaaactatgctg

SEQ ID NO: 329386 - DNA, 33 bp, Homo sapien
gaagaaggaacagtaacagaggaaactatgctg

SEQ ID NO: 329387 - DNA, 33 bp, Homo sapien
tgtaaaggaatataaaattatccggcacctaca

SEQ ID NO: 329388 - DNA, 33 bp, Homo sapien
tgtaaaggaatataaagttatccggcacctaca

SEQ ID NO: 329389 - DNA, 33 bp, Homo sapien
agtcaggttgtcccaaagtctgctcgagtctgg

SEQ ID NO: 329390 - DNA, 33 bp, Homo sapien
agtcaggttgtcccaacgtctgctcgagtctgg

SEQ ID NO: 329391 - DNA, 33 bp, Homo sapien
ccatgttttctttaaacgccgctatcccatctt

SEQ ID NO: 329392 - DNA, 33 bp, Homo sapien
ccatgttttctttaaatgccgctatcccatctt

SEQ ID NO: 329393 - DNA, 33 bp, Homo sapien
agcatttctgatgaaaataactaaaacctgatc

SEQ ID NO: 329394 - DNA, 33 bp, Homo sapien
agcatttctgatgaaagtaactaaaacctgatc

SEQ ID NO: 329395 - DNA, 33 bp, Homo sapien
gagaatgagagggtccagagagagagtctcctc

SEQ ID NO: 329396 - DNA, 33 bp, Homo sapien
gagaatgagagggtccggagagagagtctcctc

SEQ ID NO: 329397 - DNA, 33 bp, Homo sapien
ctcctcatgtcctccacgatccaggaaccagca

SEQ ID NO: 329398 - DNA, 33 bp, Homo sapien
ctcctcatgtcctccatgatccaggaaccagca

SEQ ID NO: 329399 - DNA, 33 bp, Homo sapien
ccaaagcccaagactcactggatagatgtgttc

SEQ ID NO: 329400 - DNA, 33 bp, Homo sapien
ccaaagcccaagactcgctggatagatgtgttc

SEQ ID NO: 329401 - DNA, 33 bp, Homo sapien
gaagataaataaactacagctacatgaagcaac

SEQ ID NO: 329402 - DNA, 33 bp, Homo sapien
gaagataaataaactagagctacatgaagcaac

SEQ ID NO: 329403 - DNA, 33 bp, Homo sapien
gattggattagcagaagatcagacattacagaa

SEQ ID NO: 329404 - DNA, 33 bp, Homo sapien
gattggattagcagaatatcagacattacagaa

SEQ ID NO: 329405 - DNA, 33 bp, Homo sapien
agtacagaacaaggctaaaagctggtaaattca

SEQ ID NO: 329406 - DNA, 33 bp, Homo sapien
agtacagaacaaggctgaaagctggtaaattca

SEQ ID NO: 329407 - DNA, 33 bp, Homo sapien
tctggagggaaaggaaaaattgcaaccacactg

SEQ ID NO: 329408 - DNA, 33 bp, Homo sapien
tctggagggaaaggaagaattgcaaccacactg

SEQ ID NO: 329409 - DNA, 33 bp, Homo sapien
aggttggagacatctgaaaaaggtagcaaatga

SEQ ID NO: 329410 - DNA, 33 bp, Homo sapien
aggttggagacatctggaaaaggtagcaaatga

SEQ ID NO: 329411 - DNA, 33 bp, Homo sapien
caggtgctccgccagacgtcaaacagccacaca

SEQ ID NO: 329412 - DNA, 33 bp, Homo sapien
caggtgctccgccagatgtcaaacagccacaca

SEQ ID NO: 329413 - DNA, 33 bp, Homo sapien
ggggttgagtggagtaactgacacattaactga

SEQ ID NO: 329414 - DNA, 33 bp, Homo sapien
ggggttgagtggagtagctgacacattaactga

SEQ ID NO: 329415 - DNA, 33 bp, Homo sapien
ggaccacagatcctcacgttgccttatcaagtt

SEQ ID NO: 329416 - DNA, 33 bp, Homo sapien
ggaccacagatcctcatgttgccttatcaagtt

SEQ ID NO: 329417 - DNA, 33 bp, Homo sapien
actaggaatgaatactaacacttaacgaaatat

SEQ ID NO: 329418 - DNA, 33 bp, Homo sapien
actaggaatgaatactgacacttaacgaaatat

SEQ ID NO: 329419 - DNA, 33 bp, Homo sapien
gagggcactggtcccacgtgcagccggcaactc

SEQ ID NO: 329420 - DNA, 33 bp, Homo sapien
gagggcactggtcccatgtgcagccggcaactc

SEQ ID NO: 329421 - DNA, 33 bp, Homo sapien
aaggcctgctggagaacgaagacctggaggaag

SEQ ID NO: 329422 - DNA, 33 bp, Homo sapien
aaggcctgctggagaatgaagacctggaggaag

SEQ ID NO: 329423 - DNA, 33 bp, Homo sapien
tctgtcactcaccccccaaaaaagtgctgatgg

SEQ ID NO: 329424 - DNA, 33 bp, Homo sapien
tctgtcactcaccccctaaaaaagtgctgatgg

SEQ ID NO: 329425 - DNA, 33 bp, Homo sapien
acgaagctcgagtaccacctgggttccaagaca

SEQ ID NO: 329426 - DNA, 33 bp, Homo sapien
acgaagctcgagtaccgcctgggttccaagaca

SEQ ID NO: 329427 - DNA, 33 bp, Homo sapien
ctgctttcagcatcacaggaacgagaggtgatt

SEQ ID NO: 329428 - DNA, 33 bp, Homo sapien
ctgctttcagcatcacgggaacgagaggtgatt

SEQ ID NO: 329429 - DNA, 33 bp, Homo sapien
tatctgcatggattgaaatagacaggtctctaa

SEQ ID NO: 329430 - DNA, 33 bp, Homo sapien
tatctgcatggattgagatagacaggtctctaa

SEQ ID NO: 329431 - DNA, 33 bp, Homo sapien
cgctaatgaacgaaatcagtgcccttataagaa

SEQ ID NO: 329432 - DNA, 33 bp, Homo sapien
cgctaatgaacgaaattagtgcccttataagaa

SEQ ID NO: 329433 - DNA, 33 bp, Homo sapien
gctaactggacctctgaacaacctgctcttcac

SEQ ID NO: 329434 - DNA, 33 bp, Homo sapien
gctaactggacctctggacaacctgctcttcac

SEQ ID NO: 329435 - DNA, 33 bp, Homo sapien
ccctctgatgtcctgcacggtcatcgcaagcac

SEQ ID NO: 329436 - DNA, 33 bp, Homo sapien
ccctctgatgtcctgcgcggtcatcgcaagcac

SEQ ID NO: 329437 - DNA, 33 bp, Homo sapien
tttcagtagctggaaacggaattcctcagggcc

SEQ ID NO: 329438 - DNA, 33 bp, Homo sapien
tttcagtagctggaaatggaattcctcagggcc

SEQ ID NO: 329439 - DNA, 33 bp, Homo sapien
tggagcagcagcaaggcagggctgaccacatcc

SEQ ID NO: 329440 - DNA, 33 bp, Homo sapien
tggagcagcagcaagggagggctgaccacatcc

SEQ ID NO: 329441 - DNA, 33 bp, Homo sapien
agacatgttctggataaggacacgacagatgca

SEQ ID NO: 329442 - DNA, 33 bp, Homo sapien
agacatgttctggatacggacacgacagatgca

SEQ ID NO: 329443 - DNA, 33 bp, Homo sapien
tgaccaaggcagaggacggaaactcaggtcaca

SEQ ID NO: 329444 - DNA, 33 bp, Homo sapien
tgaccaaggcagaggatggaaactcaggtcaca

SEQ ID NO: 329445 - DNA, 33 bp, Homo sapien
taccccacaaggtctaggcctttattcagaaag

SEQ ID NO: 329446 - DNA, 33 bp, Homo sapien
taccccacaaggtctatgcctttattcagaaag

SEQ ID NO: 329447 - DNA, 33 bp, Homo sapien
cacgtgtgtgtgagaacgtatgggggtatacca

SEQ ID NO: 329448 - DNA, 33 bp, Homo sapien
cacgtgtgtgtgagaatgtatgggggtatacca

SEQ ID NO: 329449 - DNA, 33 bp, Homo sapien
ggtcttatgcaagcccccgtgatgctattgcag

SEQ ID NO: 329450 - DNA, 33 bp, Homo sapien
ggtcttatgcaagcccgcgtgatgctattgcag

SEQ ID NO: 329451 - DNA, 33 bp, Homo sapien
tggcattgccagtcaaactctggtgttcagtgg

SEQ ID NO: 329452 - DNA, 33 bp, Homo sapien
tggcattgccagtcaacctctggtgttcagtgg

SEQ ID NO: 329453 - DNA, 33 bp, Homo sapien
ttgagcaacaaaatcaactattattggattata

SEQ ID NO: 329454 - DNA, 33 bp, Homo sapien
ttgagcaacaaaatcagctattattggattata

SEQ ID NO: 329455 - DNA, 33 bp, Homo sapien
aggatttcttgcagtaaaggaatgaattctctt

SEQ ID NO: 329456 - DNA, 33 bp, Homo sapien
aggatttcttgcagtacaggaatgaattctctt

SEQ ID NO: 329457 - DNA, 33 bp, Homo sapien
taaaaaaactaatggacagagtgtctcatacac

SEQ ID NO: 329458 - DNA, 33 bp, Homo sapien
taaaaaaactaatggagagagtgtctcatacac

SEQ ID NO: 329459 - DNA, 33 bp, Homo sapien
tgactttctgaatggaaccaatgtacatcctac

SEQ ID NO: 329460 - DNA, 33 bp, Homo sapien
tgactttctgaatggagccaatgtacatcctac

SEQ ID NO: 329461 - DNA, 33 bp, Homo sapien
taatctgtagtgttagacatctatagagagatc

SEQ ID NO: 329462 - DNA, 33 bp, Homo sapien
taatctgtagtgttaggcatctatagagagatc

SEQ ID NO: 329463 - DNA, 33 bp, Homo sapien
tgtgctcctaaccatcacattaggccacctctc

SEQ ID NO: 329464 - DNA, 33 bp, Homo sapien
tgtgctcctaaccatcgcattaggccacctctc

SEQ ID NO: 329465 - DNA, 33 bp, Homo sapien
tcgtgatggctctggacgttctagaggagaatc

SEQ ID NO: 329466 - DNA, 33 bp, Homo sapien
tcgtgatggctctggaggttctagaggagaatc

SEQ ID NO: 329467 - DNA, 33 bp, Homo sapien
ctctatgattttgcccacagtaggagcctctta

SEQ ID NO: 329468 - DNA, 33 bp, Homo sapien
ctctatgattttgcccccagtaggagcctctta

SEQ ID NO: 329469 - DNA, 33 bp, Homo sapien
ttgcatcctctcacccccttagtgacacttcca

SEQ ID NO: 329470 - DNA, 33 bp, Homo sapien
ttgcatcctctcacccgcttagtgacacttcca

SEQ ID NO: 329471 - DNA, 33 bp, Homo sapien
ttgttttccagccatcaaacctgaaagtctcta

SEQ ID NO: 329472 - DNA, 33 bp, Homo sapien
ttgttttccagccatcgaacctgaaagtctcta

SEQ ID NO: 329473 - DNA, 33 bp, Homo sapien
aagaacaccatgagaaccctgacttgatttatt

SEQ ID NO: 329474 - DNA, 33 bp, Homo sapien
aagaacaccatgagaagcctgacttgatttatt

SEQ ID NO: 329475 - DNA, 33 bp, Homo sapien
tgtcaggaaaacagaaattcagtggcagcgcag

SEQ ID NO: 329476 - DNA, 33 bp, Homo sapien
tgtcaggaaaacagaagttcagtggcagcgcag

SEQ ID NO: 329477 - DNA, 33 bp, Homo sapien
tcaactgttagagatacgaaataagatggaaca

SEQ ID NO: 329478 - DNA, 33 bp, Homo sapien
tcaactgttagagatatgaaataagatggaaca

SEQ ID NO: 329479 - DNA, 33 bp, Homo sapien; identical to SEQ ID NO: 329477

SEQ ID NO: 329480 - DNA, 33 bp, Homo sapien; identical to SEQ ID NO: 329478

SEQ ID NO: 329481 - DNA, 33 bp, Homo sapien
tcgctttggaatgttacatagactgcatttgca

SEQ ID NO: 329482 - DNA, 33 bp, Homo sapien
tcgctttggaatgttatatagactgcatttgca

SEQ ID NO: 329483 - DNA, 33 bp, Homo sapien
gaatacatataaccaacagactcatatccagaa

SEQ ID NO: 329484 - DNA, 33 bp, Homo sapien
gaatacatataaccaatagactcatatccagaa

SEQ ID NO: 329485 - DNA, 33 bp, Homo sapien
gtaagaaactgacctacggattcaatgctatcc

SEQ ID NO: 329486 - DNA, 33 bp, Homo sapien
gtaagaaactgacctatggattcaatgctatcc

SEQ ID NO: 329487 - DNA, 33 bp, Homo sapien
caccatgccagccccaagtgtattcttccatgc

SEQ ID NO: 329488 - DNA, 33 bp, Homo sapien
caccatgccagccccacgtgtattcttccatgc

SEQ ID NO: 329489 - DNA, 33 bp, Homo sapien
taagcagctgaagcagccaagtttcaaacacag

SEQ ID NO: 329490 - DNA, 33 bp, Homo sapien
taagcagctgaagcagtcaagtttcaaacacag

SEQ ID NO: 329491 - DNA, 33 bp, Homo sapien
gcgttataaacactgcacagtaactgatactca

SEQ ID NO: 329492 - DNA, 33 bp, Homo sapien
gcgttataaacactgctcagtaactgatactca

SEQ ID NO: 329493 - DNA, 33 bp, Homo sapien
cctactaaactcctcaaaacggttgcaaatcct

SEQ ID NO: 329494 - DNA, 33 bp, Homo sapien
cctactaaactcctcagaacggttgcaaatcct

SEQ ID NO: 329495 - DNA, 33 bp, Homo sapien
aatatatatatattgcaaaggggcttaacactt

SEQ ID NO: 329496 - DNA, 33 bp, Homo sapien
aatatatatatattgcgaaggggcttaacactt

SEQ ID NO: 329497 - DNA, 33 bp, Homo sapien
tatgcacgaacagttaacattacacagcacttc

SEQ ID NO: 329498 - DNA, 33 bp, Homo sapien
tatgcacgaacagttagcattacacagcacttc

SEQ ID NO: 329499 - DNA, 33 bp, Homo sapien
ccaggcaacaagaagcacatctatttgtgcaaa

SEQ ID NO: 329500 - DNA, 33 bp, Homo sapien
ccaggcaacaagaagcgcatctatttgtgcaaa

SEQ ID NO: 329501 - DNA, 33 bp, Homo sapien
aaacctggaattcgtaaatgttcaaacctaata

SEQ ID NO: 329502 - DNA, 33 bp, Homo sapien
aaacctggaattcgtagatgttcaaacctaata

SEQ ID NO: 329503 - DNA, 33 bp, Homo sapien
agtgtttctgtcaaccaatgagaactaaccaag

SEQ ID NO: 329504 - DNA, 33 bp, Homo sapien
agtgtttctgtcaacctatgagaactaaccaag

SEQ ID NO: 329505 - DNA, 33 bp, Homo sapien
caattcctggccccgcacttgcgtcaatatggt

SEQ ID NO: 329506 - DNA, 33 bp, Homo sapien
caattcctggccccgctcttgcgtcaatatggt

SEQ ID NO: 329507 - DNA, 33 bp, Homo sapien
acatgacattgaccaaccctttgtgatttttca

SEQ ID NO: 329508 - DNA, 33 bp, Homo sapien
acatgacattgaccaagcctttgtgatttttca

SEQ ID NO: 329509 - DNA, 33 bp, Homo sapien
attaaatttgcttaaacgcttgggcagggacca

SEQ ID NO: 329510 - DNA, 33 bp, Homo sapien
attaaatttgcttaaatgcttgggcagggacca

SEQ ID NO: 329511 - DNA, 33 bp, Homo sapien
agaaatgctgaccaaacgaaggctttaaaattt

SEQ ID NO: 329512 - DNA, 33 bp, Homo sapien
agaaatgctgaccaaatgaaggctttaaaattt

SEQ ID NO: 329513 - DNA, 33 bp, Homo sapien
gccagtgctttacactaaacaagaattccaact

SEQ ID NO: 329514 - DNA, 33 bp, Homo sapien
gccagtgctttacactcaacaagaattccaact

SEQ ID NO: 329515 - DNA, 33 bp, Homo sapien
gcaaggattagcaaaacatggttagcaggccaa

SEQ ID NO: 329516 - DNA, 33 bp, Homo sapien
gcaaggattagcaaaatatggttagcaggccaa

SEQ ID NO: 329517 - DNA, 33 bp, Homo sapien
gttcaagtgttgagcacattttcagctttcacc

SEQ ID NO: 329518 - DNA, 33 bp, Homo sapien
gttcaagtgttgagcatattttcagctttcacc

SEQ ID NO: 329519 - DNA, 33 bp, Homo sapien
cctgggaaaaggccaacatttacctactgggaa

SEQ ID NO: 329520 - DNA, 33 bp, Homo sapien
cctgggaaaaggccaagatttacctactgggaa

SEQ ID NO: 329521 - DNA, 33 bp, Homo sapien
tggcctacgcagagaccgagaagaagacgagga

SEQ ID NO: 329522 - DNA, 33 bp, Homo sapien
tggcctacgcagagactgagaagaagacgagga

SEQ ID NO: 329523 - DNA, 33 bp, Homo sapien
ctcggttccaagtcacactctgccaaagctgtc

SEQ ID NO: 329524 - DNA, 33 bp, Homo sapien
ctcggttccaagtcacgctctgccaaagctgtc

SEQ ID NO: 329525 - DNA, 33 bp, Homo sapien
agtgaaaggtgcgtgaaaggccgaactcgtggt

SEQ ID NO: 329526 - DNA, 33 bp, Homo sapien
agtgaaaggtgcgtgagaggccgaactcgtggt

SEQ ID NO: 329527 - DNA, 33 bp, Homo sapien
ctctttcatctgcttaaggctaaccctctcctc

SEQ ID NO: 329528 - DNA, 33 bp, Homo sapien
ctctttcatctgcttagggctaaccctctcctc

SEQ ID NO: 329529 - DNA, 33 bp, Homo sapien
agggaatgaaaagttcaaaaagtagatcctaca

SEQ ID NO: 329530 - DNA, 33 bp, Homo sapien
agggaatgaaaagttcgaaaagtagatcctaca

SEQ ID NO: 329531 - DNA, 33 bp, Homo sapien
cacgtcgttcttacaaccttgtaggctctgtgg

SEQ ID NO: 329532 - DNA, 33 bp, Homo sapien
cacgtcgttcttacaatcttgtaggctctgtgg

SEQ ID NO: 329533 - DNA, 33 bp, Homo sapien
tccactcctgcttcacagccttttctgtccagc

SEQ ID NO: 329534 - DNA, 33 bp, Homo sapien
tccactcctgcttcaccgccttttctgtccagc

SEQ ID NO: 329535 - DNA, 33 bp, Homo sapien
tgggagaatcaggaaaatgagaattatgtgacc

SEQ ID NO: 329536 - DNA, 33 bp, Homo sapien
tgggagaatcaggaaagtgagaattatgtgacc

SEQ ID NO: 329537 - DNA, 33 bp, Homo sapien
ctgcattccctgtcaccgcgtcactggccttca

SEQ ID NO: 329538 - DNA, 33 bp, Homo sapien
ctgcattccctgtcactgcgtcactggccttca

SEQ ID NO: 329539 - DNA, 33 bp, Homo sapien
gtggatccagacaccaacagatgccagagaaac

SEQ ID NO: 329540 - DNA, 33 bp, Homo sapien
gtggatccagacaccatcagatgccagagaaac

SEQ ID NO: 329541 - DNA, 33 bp, Homo sapien
ctctactgtactcttgaataccagaacttattc

SEQ ID NO: 329542 - DNA, 33 bp, Homo sapien
ctctactgtactcttgcataccagaacttattc

SEQ ID NO: 329543 - DNA, 33 bp, Homo sapien
ctgggcaacatagaccccatctcaattaaaaaa

SEQ ID NO: 329544 - DNA, 33 bp, Homo sapien
ctgggcaacatagaccgcatctcaattaaaaaa

SEQ ID NO: 329545 - DNA, 33 bp, Homo sapien
gcaaaatgccggggtaaattctgaagtgctcgg

SEQ ID NO: 329546 - DNA, 33 bp, Homo sapien
gcaaaatgccggggtagattctgaagtgctcgg

SEQ ID NO: 329547 - DNA, 33 bp, Homo sapien
taggaatatatctaacaattgacatgaaagacc

SEQ ID NO: 329548 - DNA, 33 bp, Homo sapien
taggaatatatctaaccattgacatgaaagacc

SEQ ID NO: 329549 - DNA, 33 bp, Homo sapien
cttcatgtccaagcacaaccgtctcccactcgc

SEQ ID NO: 329550 - DNA, 33 bp, Homo sapien
cttcatgtccaagcacgaccgtctcccactcgc

SEQ ID NO: 329551 - DNA, 33 bp, Homo sapien
tgtacccccacagagaacaacttcaaggactcc

SEQ ID NO: 329552 - DNA, 33 bp, Homo sapien
tgtacccccacagagatcaacttcaaggactcc

SEQ ID NO: 329553 - DNA, 33 bp, Homo sapien
ggactctagtgatttcaatgttgaataggatgg

SEQ ID NO: 329554 - DNA, 33 bp, Homo sapien
ggactctagtgatttctatgttgaataggatgg

SEQ ID NO: 329555 - DNA, 33 bp, Homo sapien
tgccatctcggggccaacaaaagttttggacac

SEQ ID NO: 329556 - DNA, 33 bp, Homo sapien
tgccatctcggggccagcaaaagttttggacac

SEQ ID NO: 329557 - DNA, 33 bp, Homo sapien
aggtgacagtttgatccgaaactgcgagtccct

SEQ ID NO: 329558 - DNA, 33 bp, Homo sapien
aggtgacagtttgatctgaaactgcgagtccct

SEQ ID NO: 329559 - DNA, 33 bp, Homo sapien
aggctacaggtagtaagccttctagaagagcct

SEQ ID NO: 329560 - DNA, 33 bp, Homo sapien
aggctacaggtagtaatccttctagaagagcct

SEQ ID NO: 329561 - DNA, 33 bp, Homo sapien
ggagttttgctgacaaattcagggtgagacagg

SEQ ID NO: 329562 - DNA, 33 bp, Homo sapien
ggagttttgctgacaagttcagggtgagacagg

SEQ ID NO: 329563 - DNA, 33 bp, Homo sapien
cagcatcttaatcttgcacttatcaccctccag

SEQ ID NO: 329564 - DNA, 33 bp, Homo sapien
cagcatcttaatcttgtacttatcaccctccag

SEQ ID NO: 329565 - DNA, 33 bp, Homo sapien
taatatgaaaaacctcaagcatatacaaaatga

SEQ ID NO: 329566 - DNA, 33 bp, Homo sapien
taatatgaaaaacctcgagcatatacaaaatga

SEQ ID NO: 329567 - DNA, 33 bp, Homo sapien
cttttagagagactaacaaattccttgcctttg

SEQ ID NO: 329568 - DNA, 33 bp, Homo sapien
cttttagagagactaataaattccttgcctttg

SEQ ID NO: 329569 - DNA, 33 bp, Homo sapien
agtttcagtcaataacagcaacttaatattagg

SEQ ID NO: 329570 - DNA, 33 bp, Homo sapien
agtttcagtcaataacggcaacttaatattagg

SEQ ID NO: 329571 - DNA, 33 bp, Homo sapien
aacatggtctctacaacgtcacttctgagaacc

SEQ ID NO: 329572 - DNA, 33 bp, Homo sapien
aacatggtctctacaatgtcacttctgagaacc

SEQ ID NO: 329573 - DNA, 33 bp, Homo sapien
ttacacgaagtttccaagctgcaggattctcgg

SEQ ID NO: 329574 - DNA, 33 bp, Homo sapien
ttacacgaagtttccacgctgcaggattctcgg

SEQ ID NO: 329575 - DNA, 33 bp, Homo sapien
atgatatcatctcctgcaacttgaaagggcttt

SEQ ID NO: 329576 - DNA, 33 bp, Homo sapien
atgatatcatctcctggaacttgaaagggcttt

SEQ ID NO: 329577 - DNA, 33 bp, Homo sapien
aaagacacgggtttcaagcacagggtttaagag

SEQ ID NO: 329578 - DNA, 33 bp, Homo sapien
aaagacacgggtttcaggcacagggtttaagag

SEQ ID NO: 329579 - DNA, 33 bp, Homo sapien
attattccaaaacttaccaagtcaagcagcttt

SEQ ID NO: 329580 - DNA, 33 bp, Homo sapien
attattccaaaacttatcaagtcaagcagcttt

SEQ ID NO: 329581 - DNA, 33 bp, Homo sapien
atgtggagagcgacagcaggctgcatctggaga

SEQ ID NO: 329582 - DNA, 33 bp, Homo sapien
atgtggagagcgacagtaggctgcatctggaga

SEQ ID NO: 329583 - DNA, 33 bp, Homo sapien
caaggtttccacagacgatcttcacgcaggaaa

SEQ ID NO: 329584 - DNA, 33 bp, Homo sapien
caaggtttccacagactatcttcacgcaggaaa

SEQ ID NO: 329585 - DNA, 33 bp, Homo sapien
agaaatgtgttaaataaataggtctgatatgtg

SEQ ID NO: 329586 - DNA, 33 bp, Homo sapien
agaaatgtgttaaatatataggtctgatatgtg

SEQ ID NO: 329587 - DNA, 33 bp, Homo sapien
acagatcatgcgttgacgagtctacagtcatgg

SEQ ID NO: 329588 - DNA, 33 bp, Homo sapien
acagatcatgcgttgatgagtctacagtcatgg

SEQ ID NO: 329589 - DNA, 33 bp, Homo sapien
atttccccaaggctcaataaaatctctctcctt

SEQ ID NO: 329590 - DNA, 33 bp, Homo sapien
atttccccaaggctcagtaaaatctctctcctt

SEQ ID NO: 329591 - DNA, 33 bp, Homo sapien
tgttctgccttgttcacagatatcccccgatga

SEQ ID NO: 329592 - DNA, 33 bp, Homo sapien
tgttctgccttgttcatagatatcccccgatga

SEQ ID NO: 329593 - DNA, 33 bp, Homo sapien
tgttctgaagaggaaacggcatcaggagagaac

SEQ ID NO: 329594 - DNA, 33 bp, Homo sapien
tgttctgaagaggaaagggcatcaggagagaac

SEQ ID NO: 329595 - DNA, 33 bp, Homo sapien
aagaaatcatcagtcacccaaccaatgttctcc

SEQ ID NO: 329596 - DNA, 33 bp, Homo sapien
aagaaatcatcagtcatccaaccaatgttctcc

SEQ ID NO: 329597 - DNA, 33 bp, Homo sapien
tggtgtcgtgttgcagaaaagatgagtccactg

SEQ ID NO: 329598 - DNA, 33 bp, Homo sapien
tggtgtcgtgttgcaggaaagatgagtccactg

SEQ ID NO: 329599 - DNA, 33 bp, Homo sapien
aaccaggggacaaactaagatgttcacctgggt

SEQ ID NO: 329600 - DNA, 33 bp, Homo sapien
aaccaggggacaaactgagatgttcacctgggt

SEQ ID NO: 329601 - DNA, 33 bp, Homo sapien
ctctaaagactgcagacggaagcagatcaacca

SEQ ID NO: 329602 - DNA, 33 bp, Homo sapien
ctctaaagactgcagatggaagcagatcaacca

SEQ ID NO: 329603 - DNA, 33 bp, Homo sapien
agcttcaacctgaagactcatccccagctgacg

SEQ ID NO: 329604 - DNA, 33 bp, Homo sapien
agcttcaacctgaagattcatccccagctgacg

SEQ ID NO: 329605 - DNA, 33 bp, Homo sapien
ggtgggcaattctgaacagagaccgtcatgaca

SEQ ID NO: 329606 - DNA, 33 bp, Homo sapien
ggtgggcaattctgaatagagaccgtcatgaca

SEQ ID NO: 329607 - DNA, 33 bp, Homo sapien
ctcaagagtgtgagggaaacaggaacaagtcca

SEQ ID NO: 329608 - DNA, 33 bp, Homo sapien
ctcaagagtgtgagggcaacaggaacaagtcca

SEQ ID NO: 329609 - DNA, 33 bp, Homo sapien
agttagcagcagttagcaccatccaattccaga

SEQ ID NO: 329610 - DNA, 33 bp, Homo sapien
agttagcagcagttagtaccatccaattccaga

SEQ ID NO: 329611 - DNA, 33 bp, Homo sapien
cctcgcaacgtctctggaacataaaacttccct

SEQ ID NO: 329612 - DNA, 33 bp, Homo sapien
cctcgcaacgtctctgtaacataaaacttccct

SEQ ID NO: 329613 - DNA, 33 bp, Homo sapien
tcactttgctctccccaccatcgtactcagagg

SEQ ID NO: 329614 - DNA, 33 bp, Homo sapien
tcactttgctctccccgccatcgtactcagagg

SEQ ID NO: 329615 - DNA, 33 bp, Homo sapien
gcaagcacagaggccccggaaagtgtgtgagga

SEQ ID NO: 329616 - DNA, 33 bp, Homo sapien
gcaagcacagaggccctggaaagtgtgtgagga

SEQ ID NO: 329617 - DNA, 33 bp, Homo sapien
agtctactcagttttcaccaggagcctgtacac

SEQ ID NO: 329618 - DNA, 33 bp, Homo sapien
agtctactcagttttcgccaggagcctgtacac

SEQ ID NO: 329619 - DNA, 33 bp, Homo sapien
gtgctgcaaacagaaacgagcatgcttggcttc

SEQ ID NO: 329620 - DNA, 33 bp, Homo sapien
gtgctgcaaacagaaaggagcatgcttggcttc

SEQ ID NO: 329621 - DNA, 33 bp, Homo sapien
catgttgcaggggtacagcgtaacactcgcatg

SEQ ID NO: 329622 - DNA, 33 bp, Homo sapien
catgttgcaggggtaccgcgtaacactcgcatg

SEQ ID NO: 329623 - DNA, 33 bp, Homo sapien
cttgttcacacaggtcacaggaatatgctgggt

SEQ ID NO: 329624 - DNA, 33 bp, Homo sapien
cttgttcacacaggtcccaggaatatgctgggt

SEQ ID NO: 329625 - DNA, 33 bp, Homo sapien
gccagacattaaagatcagaacattcggccagg

SEQ ID NO: 329626 - DNA, 33 bp, Homo sapien
gccagacattaaagattagaacattcggccagg

SEQ ID NO: 329627 - DNA, 33 bp, Homo sapien
cagccccagctaccagaaatctactacagcacc

SEQ ID NO: 329628 - DNA, 33 bp, Homo sapien
cagccccagctaccaggaatctactacagcacc

SEQ ID NO: 329629 - DNA, 33 bp, Homo sapien
tgtctatagtgcaacaacgtgtagcattactta

SEQ ID NO: 329630 - DNA, 33 bp, Homo sapien
tgtctatagtgcaacagcgtgtagcattactta

SEQ ID NO: 329631 - DNA, 33 bp, Homo sapien
ttaaaggaagacaggaactgtggaagcaatgag

SEQ ID NO: 329632 - DNA, 33 bp, Homo sapien
ttaaaggaagacaggagctgtggaagcaatgag

SEQ ID NO: 329633 - DNA, 33 bp, Homo sapien
gcagctggggcacgagaagtaaagggaaagagg

SEQ ID NO: 329634 - DNA, 33 bp, Homo sapien
gcagctggggcacgaggagtaaagggaaagagg

SEQ ID NO: 329635 - DNA, 33 bp, Homo sapien
taaaaaagtcttaggccgatttgatgataatac

SEQ ID NO: 329636 - DNA, 33 bp, Homo sapien
taaaaaagtcttaggctgatttgatgataatac

SEQ ID NO: 329637 - DNA, 33 bp, Homo sapien
ttttatttagattccaatagttttcccattaat

SEQ ID NO: 329638 - DNA, 33 bp, Homo sapien
ttttatttagattccactagttttcccattaat

SEQ ID NO: 329639 - DNA, 33 bp, Homo sapien
ttttcccattaatgtccatttctgttctagaat

SEQ ID NO: 329640 - DNA, 33 bp, Homo sapien
ttttcccattaatgtcgatttctgttctagaat

SEQ ID NO: 329641 - DNA, 33 bp, Homo sapien
gtatgtctattctcaacgtttcaaaaccttgta

SEQ ID NO: 329642 - DNA, 33 bp, Homo sapien
gtatgtctattctcaatgtttcaaaaccttgta

SEQ ID NO: 329643 - DNA, 33 bp, Homo sapien
cgtgcctggccctggaacataattctgatcaaa

SEQ ID NO: 329644 - DNA, 33 bp, Homo sapien
cgtgcctggccctggagcataattctgatcaaa

SEQ ID NO: 329645 - DNA, 33 bp, Homo sapien
ttcctaggtagaaacaaagagttgaagatggtt

SEQ ID NO: 329646 - DNA, 33 bp, Homo sapien
ttcctaggtagaaacagagagttgaagatggtt

SEQ ID NO: 329647 - DNA, 33 bp, Homo sapien
cagaagcacctaaaaccgtagcccaccttacag

SEQ ID NO: 329648 - DNA, 33 bp, Homo sapien
cagaagcacctaaaactgtagcccaccttacag

SEQ ID NO: 329649 - DNA, 33 bp, Homo sapien
gtagttaaagcaacaacgaccaagtatttttga

SEQ ID NO: 329650 - DNA, 33 bp, Homo sapien
gtagttaaagcaacaatgaccaagtatttttga

SEQ ID NO: 329651 - DNA, 33 bp, Homo sapien
aaggctaccagagagaagcagccgaggcctgat

SEQ ID NO: 329652 - DNA, 33 bp, Homo sapien
aaggctaccagagagaggcagccgaggcctgat

SEQ ID NO: 329653 - DNA, 33 bp, Homo sapien
aattacattgtcaaataaaactttccatcaaag

SEQ ID NO: 329654 - DNA, 33 bp, Homo sapien
aattacattgtcaaatgaaactttccatcaaag

SEQ ID NO: 329655 - DNA, 33 bp, Homo sapien
cacatggaagctccttaaaaacagagatcagac

SEQ ID NO: 329656 - DNA, 33 bp, Homo sapien
cacatggaagctccttgaaaacagagatcagac

SEQ ID NO: 329657 - DNA, 33 bp, Homo sapien
aatatctattttctaacatgcagaacacagaga

SEQ ID NO: 329658 - DNA, 33 bp, Homo sapien
aatatctattttctaagatgcagaacacagaga

SEQ ID NO: 329659 - DNA, 33 bp, Homo sapien
gaggaatttaaccaaacgagcttctgcagagaa

SEQ ID NO: 329660 - DNA, 33 bp, Homo sapien
gaggaatttaaccaaatgagcttctgcagagaa

SEQ ID NO: 329661 - DNA, 33 bp, Homo sapien
gtgttcttctttcacacccatctccattgcgaa

SEQ ID NO: 329662 - DNA, 33 bp, Homo sapien
gtgttcttctttcacatccatctccattgcgaa

SEQ ID NO: 329663 - DNA, 33 bp, Homo sapien
gcaaccctactatctgaaggtatttttcacttc

SEQ ID NO: 329664 - DNA, 33 bp, Homo sapien
gcaaccctactatctgcaggtatttttcacttc

SEQ ID NO: 329665 - DNA, 33 bp, Homo sapien
caattcgaccatctgactaagggcagcaaggtt

SEQ ID NO: 329666 - DNA, 33 bp, Homo sapien
caattcgaccatctgattaagggcagcaaggtt

SEQ ID NO: 329667 - DNA, 33 bp, Homo sapien
aaacattatgctctaactacttctcactatttg

SEQ ID NO: 329668 - DNA, 33 bp, Homo sapien
aaacattatgctctaattacttctcactatttg

SEQ ID NO: 329669 - DNA, 33 bp, Homo sapien
aaagtcttcatccataagtctaatgcctgggct

SEQ ID NO: 329670 - DNA, 33 bp, Homo sapien
aaagtcttcatccatacgtctaatgcctgggct

SEQ ID NO: 329671 - DNA, 33 bp, Homo sapien
cagccccgtgaccttcaatatcaatgaggtggc

SEQ ID NO: 329672 - DNA, 33 bp, Homo sapien
cagccccgtgaccttctatatcaatgaggtggc

SEQ ID NO: 329673 - DNA, 33 bp, Homo sapien
ttctgggggccacaccaggacttcaacccagag

SEQ ID NO: 329674 - DNA, 33 bp, Homo sapien
ttctgggggccacaccgggacttcaacccagag

SEQ ID NO: 329675 - DNA, 33 bp, Homo sapien
aacagagaccccgatacaaccaaacacaaagac

SEQ ID NO: 329676 - DNA, 33 bp, Homo sapien
aacagagaccccgatataaccaaacacaaagac

SEQ ID NO: 329677 - DNA, 33 bp, Homo sapien
gtctgtgaagtgtggaaggcagtgtcgacgctg

SEQ ID NO: 329678 - DNA, 33 bp, Homo sapien
gtctgtgaagtgtggagggcagtgtcgacgctg

SEQ ID NO: 329679 - DNA, 33 bp, Homo sapien
tgctcagtgggccacacgtggggaccgatggca

SEQ ID NO: 329680 - DNA, 33 bp, Homo sapien
tgctcagtgggccacatgtggggaccgatggca

SEQ ID NO: 329681 - DNA, 33 bp, Homo sapien
ggaaaacctgaaggaaggaaccaagcggccctg

SEQ ID NO: 329682 - DNA, 33 bp, Homo sapien
ggaaaacctgaaggaatgaaccaagcggccctg

SEQ ID NO: 329683 - DNA, 33 bp, Homo sapien
acacccaaatccttgcagactcaatcccacagt

SEQ ID NO: 329684 - DNA, 33 bp, Homo sapien
acacccaaatccttgcggactcaatcccacagt

SEQ ID NO: 329685 - DNA, 33 bp, Homo sapien
catccctacaggtttcaaagaggaggaaaggct

SEQ ID NO: 329686 - DNA, 33 bp, Homo sapien
catccctacaggtttcgaagaggaggaaaggct

SEQ ID NO: 329687 - DNA, 33 bp, Homo sapien
atcgatccccaatgccaaactctacagctacac

SEQ ID NO: 329688 - DNA, 33 bp, Homo sapien
atcgatccccaatgccgaactctacagctacac

SEQ ID NO: 329689 - DNA, 33 bp, Homo sapien
aaaagctcgtaacttcactgatattcgtatcta

SEQ ID NO: 329690 - DNA, 33 bp, Homo sapien
aaaagctcgtaacttcgctgatattcgtatcta

SEQ ID NO: 329691 - DNA, 33 bp, Homo sapien
accacgatgtgaagaacgctatgaattgatggg

SEQ ID NO: 329692 - DNA, 33 bp, Homo sapien
accacgatgtgaagaaggctatgaattgatggg

SEQ ID NO: 329693 - DNA, 33 bp, Homo sapien
aaggtcacgttcatgcagatgatggaagacctc

SEQ ID NO: 329694 - DNA, 33 bp, Homo sapien
aaggtcacgttcatgccgatgatggaagacctc

SEQ ID NO: 329695 - DNA, 33 bp, Homo sapien
cctcaagctgtcgctccagcctgtttgaatctg

SEQ ID NO: 329696 - DNA, 33 bp, Homo sapien
cctcaagctgtcgctcgagcctgtttgaatctg

SEQ ID NO: 329697 - DNA, 33 bp, Homo sapien
taactggggactaaacaaggggcagtgatacga

SEQ ID NO: 329698 - DNA, 33 bp, Homo sapien
taactggggactaaacgaggggcagtgatacga

SEQ ID NO: 329699 - DNA, 33 bp, Homo sapien
acacctctcgagagcaacctcaaggtggaagac

SEQ ID NO: 329700 - DNA, 33 bp, Homo sapien
acacctctcgagagcagcctcaaggtggaagac

SEQ ID NO: 329701 - DNA, 33 bp, Homo sapien
gggaactcgcggggaaatgacgggctcagccct

SEQ ID NO: 329702 - DNA, 33 bp, Homo sapien
gggaactcgcggggaagtgacgggctcagccct

SEQ ID NO: 329703 - DNA, 33 bp, Homo sapien
agccaacgtgcgtgtccacctgaagctcctggg

SEQ ID NO: 329704 - DNA, 33 bp, Homo sapien
agccaacgtgcgtgtctacctgaagctcctggg

SEQ ID NO: 329705 - DNA, 33 bp, Homo sapien
aatggtggcttagaaacgaatgggacagtggtc

SEQ ID NO: 329706 - DNA, 33 bp, Homo sapien
aatggtggcttagaaatgaatgggacagtggtc

SEQ ID NO: 329707 - DNA, 33 bp, Homo sapien
ctgcaacttggagcctcgtgagtgctggctggt

SEQ ID NO: 329708 - DNA, 33 bp, Homo sapien
ctgcaacttggagccttgtgagtgctggctggt

SEQ ID NO: 329709 - DNA, 33 bp, Homo sapien
ttgatgctctagaaaacaatggattaatcaatc

SEQ ID NO: 329710 - DNA, 33 bp, Homo sapien
ttgatgctctagaaaagaatggattaatcaatc

SEQ ID NO: 329711 - DNA, 33 bp, Homo sapien
cttcagctcttgacaccgtcctctttcctcaga

SEQ ID NO: 329712 - DNA, 33 bp, Homo sapien
cttcagctcttgacactgtcctctttcctcaga

SEQ ID NO: 329713 - DNA, 33 bp, Homo sapien
ctctctctgcaggaggaccggatgcatagcgcg

SEQ ID NO: 329714 - DNA, 33 bp, Homo sapien
ctctctctgcaggaggtccggatgcatagcgcg

SEQ ID NO: 329715 - DNA, 33 bp, Homo sapien
agaagcatttttgacaactcttgtagcttgtga

SEQ ID NO: 329716 - DNA, 33 bp, Homo sapien
agaagcatttttgacagctcttgtagcttgtga

SEQ ID NO: 329717 - DNA, 33 bp, Homo sapien
gagcaggagcttcgccagaacaggcccgtatct

SEQ ID NO: 329718 - DNA, 33 bp, Homo sapien
gagcaggagcttcgccggaacaggcccgtatct

SEQ ID NO: 329719 - DNA, 33 bp, Homo sapien
tgttacagtagacagacgtgagcagggcaggag

SEQ ID NO: 329720 - DNA, 33 bp, Homo sapien
tgttacagtagacagatgtgagcagggcaggag

SEQ ID NO: 329721 - DNA, 33 bp, Homo sapien
taaggcttgggctcctcaagagggtaccagccc

SEQ ID NO: 329722 - DNA, 33 bp, Homo sapien
taaggcttgggctcctgaagagggtaccagccc

SEQ ID NO: 329723 - DNA, 33 bp, Homo sapien
tggatgtgacgtctaacgctggcggtgctcaca

SEQ ID NO: 329724 - DNA, 33 bp, Homo sapien
tggatgtgacgtctaatgctggcggtgctcaca

SEQ ID NO: 329725 - DNA, 33 bp, Homo sapien
aacacgctaactcctacacacgtacaaagacct

SEQ ID NO: 329726 - DNA, 33 bp, Homo sapien
aacacgctaactcctatacacgtacaaagacct

SEQ ID NO: 329727 - DNA, 33 bp, Homo sapien
tgagcccgtctctgaacacaaaccagacctcct

SEQ ID NO: 329728 - DNA, 33 bp, Homo sapien
tgagcccgtctctgaatacaaaccagacctcct

SEQ ID NO: 329729 - DNA, 33 bp, Homo sapien
gctatacggccaaatacctccttcctaacttct

SEQ ID NO: 329730 - DNA, 33 bp, Homo sapien
gctatacggccaaatagctccttcctaacttct

SEQ ID NO: 329731 - DNA, 33 bp, Homo sapien
aactaggaccagtggcacatgcaataaaggaat

SEQ ID NO: 329732 - DNA, 33 bp, Homo sapien
aactaggaccagtggcgcatgcaataaaggaat

SEQ ID NO: 329733 - DNA, 33 bp, Homo sapien
ggcacggatttgtaccgctgggcatctctctgt

SEQ ID NO: 329734 - DNA, 33 bp, Homo sapien
ggcacggatttgtacctctgggcatctctctgt

SEQ ID NO: 329735 - DNA, 33 bp, Homo sapien
accttcgtgtcttaaccacatgaatcctggctt

SEQ ID NO: 329736 - DNA, 33 bp, Homo sapien
accttcgtgtcttaactacatgaatcctggctt

SEQ ID NO: 329737 - DNA, 33 bp, Homo sapien
actactctggcaaaaacgtaaatcaaaaattta

SEQ ID NO: 329738 - DNA, 33 bp, Homo sapien
actactctggcaaaaatgtaaatcaaaaattta

SEQ ID NO: 329739 - DNA, 33 bp, Homo sapien
ccacatctgcgttaaagcatctgtctgtcgctg

SEQ ID NO: 329740 - DNA, 33 bp, Homo sapien
ccacatctgcgttaaatcatctgtctgtcgctg

SEQ ID NO: 329741 - DNA, 33 bp, Homo sapien
ccaacccctatcccagacgaaggagaactcacc

SEQ ID NO: 329742 - DNA, 33 bp, Homo sapien
ccaacccctatcccaggcgaaggagaactcacc

SEQ ID NO: 329743 - DNA, 33 bp, Homo sapien
atataatttttcttccacaaagaacagaaacac

SEQ ID NO: 329744 - DNA, 33 bp, Homo sapien
atataatttttcttccgcaaagaacagaaacac

SEQ ID NO: 329745 - DNA, 33 bp, Homo sapien
gttacaaagtttcacaaaagttctaatttccta

SEQ ID NO: 329746 - DNA, 33 bp, Homo sapien
gttacaaagtttcacacaagttctaatttccta

SEQ ID NO: 329747 - DNA, 33 bp, Homo sapien
ctaaggcagcaggttaccaagacaatcaagcag

SEQ ID NO: 329748 - DNA, 33 bp, Homo sapien
ctaaggcagcaggttatcaagacaatcaagcag

SEQ ID NO: 329749 - DNA, 33 bp, Homo sapien
tttcgttgacatcttacgtggtttaaaactgtg

SEQ ID NO: 329750 - DNA, 33 bp, Homo sapien
tttcgttgacatcttatgtggtttaaaactgtg

SEQ ID NO: 329751 - DNA, 33 bp, Homo sapien
agcccagccagcatgaaaaaaccctgtctctac

SEQ ID NO: 329752 - DNA, 33 bp, Homo sapien
agcccagccagcatgacaaaaccctgtctctac

SEQ ID NO: 329753 - DNA, 33 bp, Homo sapien
tggtttaagactgccaagcatgaataaaataat

SEQ ID NO: 329754 - DNA, 33 bp, Homo sapien
tggtttaagactgccacgcatgaataaaataat

SEQ ID NO: 329755 - DNA, 33 bp, Homo sapien
gtttgtccctgccggcaccaaagtggccagcta

SEQ ID NO: 329756 - DNA, 33 bp, Homo sapien
gtttgtccctgccggcgccaaagtggccagcta

SEQ ID NO: 329757 - DNA, 33 bp, Homo sapien
acgtatcccaaatgagcccccataaatgagcag

SEQ ID NO: 329758 - DNA, 33 bp, Homo sapien
acgtatcccaaatgaggccccataaatgagcag

SEQ ID NO: 329759 - DNA, 33 bp, Homo sapien
caagaagggacaattcaacctattattacacct

SEQ ID NO: 329760 - DNA, 33 bp, Homo sapien
caagaagggacaattctacctattattacacct

SEQ ID NO: 329761 - DNA, 33 bp, Homo sapien
gtgcagagggtctccacgctgcactttggtcac

SEQ ID NO: 329762 - DNA, 33 bp, Homo sapien
gtgcagagggtctccatgctgcactttggtcac

SEQ ID NO: 329763 - DNA, 33 bp, Homo sapien
aacaacctgctgacacaactcgttttaccctct

SEQ ID NO: 329764 - DNA, 33 bp, Homo sapien
aacaacctgctgacacgactcgttttaccctct

SEQ ID NO: 329765 - DNA, 33 bp, Homo sapien
gacatcctaaagaccactcacgctacagatatc

SEQ ID NO: 329766 - DNA, 33 bp, Homo sapien
gacatcctaaagaccattcacgctacagatatc

SEQ ID NO: 329767 - DNA, 33 bp, Homo sapien
acagagatgaatcctcaaaattaaaatgtttta

SEQ ID NO: 329768 - DNA, 33 bp, Homo sapien
acagagatgaatcctcgaaattaaaatgtttta

SEQ ID NO: 329769 - DNA, 33 bp, Homo sapien
ctctccctggaggtcaagtaggactgaaggttc

SEQ ID NO: 329770 - DNA, 33 bp, Homo sapien
ctctccctggaggtcaggtaggactgaaggttc

SEQ ID NO: 329771 - DNA, 33 bp, Homo sapien
aagttttgttccttcaaccaactgcaaattaaa

SEQ ID NO: 329772 - DNA, 33 bp, Homo sapien
aagttttgttccttcagccaactgcaaattaaa

SEQ ID NO: 329773 - DNA, 33 bp, Homo sapien
gactttatcaagtagaaagggcttaagtggagg

SEQ ID NO: 329774 - DNA, 33 bp, Homo sapien
gactttatcaagtagagagggcttaagtggagg

SEQ ID NO: 329775 - DNA, 33 bp, Homo sapien
ggcacatgaagtaatgacatgacaactgagagg

SEQ ID NO: 329776 - DNA, 33 bp, Homo sapien
ggcacatgaagtaatggcatgacaactgagagg

SEQ ID NO: 329777 - DNA, 33 bp, Homo sapien
cagtgcattttgacaactgcattcgctacatgg

SEQ ID NO: 329778 - DNA, 33 bp, Homo sapien
cagtgcattttgacaagtgcattcgctacatgg

SEQ ID NO: 329779 - DNA, 33 bp, Homo sapien
agataaaataagagcactctgcagtcatgtcga

SEQ ID NO: 329780 - DNA, 33 bp, Homo sapien
agataaaataagagcattctgcagtcatgtcga

SEQ ID NO: 329781 - DNA, 33 bp, Homo sapien
gtccaaaccacgtcaaatcatcgaaccttggcc

SEQ ID NO: 329782 - DNA, 33 bp, Homo sapien
gtccaaaccacgtcaagtcatcgaaccttggcc

SEQ ID NO: 329783 - DNA, 33 bp, Homo sapien
ttagatttggtcaaaacgacagtgagatatcat

SEQ ID NO: 329784 - DNA, 33 bp, Homo sapien
ttagatttggtcaaaatgacagtgagatatcat

SEQ ID NO: 329785 - DNA, 33 bp, Homo sapien
ttgggaccggcttaacaaattgattctggaagt

SEQ ID NO: 329786 - DNA, 33 bp, Homo sapien
ttgggaccggcttaacgaattgattctggaagt

SEQ ID NO: 329787 - DNA, 33 bp, Homo sapien
gaatcaggaactgacacggatttctgtctgtct

SEQ ID NO: 329788 - DNA, 33 bp, Homo sapien
gaatcaggaactgacatggatttctgtctgtct

SEQ ID NO: 329789 - DNA, 33 bp, Homo sapien
acaaatctgaaactcagggatataagatagaca

SEQ ID NO: 329790 - DNA, 33 bp, Homo sapien
acaaatctgaaactcatggatataagatagaca

SEQ ID NO: 329791 - DNA, 33 bp, Homo sapien
tctatttacctgtctaaaacatttgctgttcta

SEQ ID NO: 329792 - DNA, 33 bp, Homo sapien
tctatttacctgtctataacatttgctgttcta

SEQ ID NO: 329793 - DNA, 33 bp, Homo sapien
caccctgcccagcctcaatgttctatttgttat

SEQ ID NO: 329794 - DNA, 33 bp, Homo sapien
caccctgcccagcctcgatgttctatttgttat

SEQ ID NO: 329795 - DNA, 33 bp, Homo sapien
acgaatcatcaacctacagctggaaacattttt

SEQ ID NO: 329796 - DNA, 33 bp, Homo sapien
acgaatcatcaacctatagctggaaacattttt

SEQ ID NO: 329797 - DNA, 33 bp, Homo sapien
ttggttctttaaaatgacatcagtgccttttgg

SEQ ID NO: 329798 - DNA, 33 bp, Homo sapien
ttggttctttaaaatggcatcagtgccttttgg

SEQ ID NO: 329799 - DNA, 33 bp, Homo sapien
tccatgttttccaaaacgcctggagaacatgta

SEQ ID NO: 329800 - DNA, 33 bp, Homo sapien
tccatgttttccaaaatgcctggagaacatgta

SEQ ID NO: 329801 - DNA, 33 bp, Homo sapien
acaattccaaatacccccttgcctgtgctgcac

SEQ ID NO: 329802 - DNA, 33 bp, Homo sapien
acaattccaaatacccgcttgcctgtgctgcac

SEQ ID NO: 329803 - DNA, 33 bp, Homo sapien
ttcctaaaggtaatcaatcatgtaaatcacgtg

SEQ ID NO: 329804 - DNA, 33 bp, Homo sapien
ttcctaaaggtaatcagtcatgtaaatcacgtg

SEQ ID NO: 329805 - DNA, 33 bp, Homo sapien
agacatcggaagccagacacttttgatggtaag

SEQ ID NO: 329806 - DNA, 33 bp, Homo sapien
agacatcggaagccaggcacttttgatggtaag

SEQ ID NO: 329807 - DNA, 33 bp, Homo sapien
ttgctttctgcgcatcaacaggctctggctaag

SEQ ID NO: 329808 - DNA, 33 bp, Homo sapien
ttgctttctgcgcatcgacaggctctggctaag

SEQ ID NO: 329809 - DNA, 33 bp, Homo sapien
gtgatgctgcaaatgacgagtggctgaaattat

SEQ ID NO: 329810 - DNA, 33 bp, Homo sapien
gtgatgctgcaaatgatgagtggctgaaattat

SEQ ID NO: 329811 - DNA, 33 bp, Homo sapien
tacaaacccttctggacgtgtagaatatcattg

SEQ ID NO: 329812 - DNA, 33 bp, Homo sapien
tacaaacccttctggatgtgtagaatatcattg

SEQ ID NO: 329813 - DNA, 33 bp, Homo sapien
agcttgtaaatgagacggaacgtaaaccacaag

SEQ ID NO: 329814 - DNA, 33 bp, Homo sapien
agcttgtaaatgagactgaacgtaaaccacaag

SEQ ID NO: 329815 - DNA, 33 bp, Homo sapien
gtaacatcacagatcaccgtaacagatataatt

SEQ ID NO: 329816 - DNA, 33 bp, Homo sapien
gtaacatcacagatcatcgtaacagatataatt

SEQ ID NO: 329817 - DNA, 33 bp, Homo sapien
tggagctttaacttcaaggattctggcagtttt

SEQ ID NO: 329818 - DNA, 33 bp, Homo sapien
tggagctttaacttcagggattctggcagtttt

SEQ ID NO: 329819 - DNA, 33 bp, Homo sapien
tttcaagagtgatcagaaaaggctagaagaatg

SEQ ID NO: 329820 - DNA, 33 bp, Homo sapien
tttcaagagtgatcaggaaaggctagaagaatg

SEQ ID NO: 329821 - DNA, 33 bp, Homo sapien
agaggctggccctgcaactttgctttctgactt

SEQ ID NO: 329822 - DNA, 33 bp, Homo sapien
agaggctggccctgcatctttgctttctgactt

SEQ ID NO: 329823 - DNA, 33 bp, Homo sapien
gtcgcgttctatgaacagcatttccaggaaagg

SEQ ID NO: 329824 - DNA, 33 bp, Homo sapien
gtcgcgttctatgaacggcatttccaggaaagg

SEQ ID NO: 329825 - DNA, 33 bp, Homo sapien
ggagcatcaggaagtacggaggaaatgggcaac

SEQ ID NO: 329826 - DNA, 33 bp, Homo sapien
ggagcatcaggaagtatggaggaaatgggcaac

SEQ ID NO: 329827 - DNA, 33 bp, Homo sapien
agttccatagtccagaaggtacaaaatccttgg

SEQ ID NO: 329828 - DNA, 33 bp, Homo sapien
agttccatagtccagagggtacaaaatccttgg

SEQ ID NO: 329829 - DNA, 33 bp, Homo sapien
gataatgtattccaagaacttagaaaactccta

SEQ ID NO: 329830 - DNA, 33 bp, Homo sapien
gataatgtattccaaggacttagaaaactccta

SEQ ID NO: 329831 - DNA, 33 bp, Homo sapien
atacacagggccactacaaggaagcaaaaacgt

SEQ ID NO: 329832 - DNA, 33 bp, Homo sapien
atacacagggccactagaaggaagcaaaaacgt

SEQ ID NO: 329833 - DNA, 33 bp, Homo sapien
cgtttgcatctttaaacagtatgttgtttggtt

SEQ ID NO: 329834 - DNA, 33 bp, Homo sapien
cgtttgcatctttaaagagtatgttgtttggtt

SEQ ID NO: 329835 - DNA, 33 bp, Homo sapien
ctagccagtattcctgaatgatatggcactaac

SEQ ID NO: 329836 - DNA, 33 bp, Homo sapien
ctagccagtattcctggatgatatggcactaac

SEQ ID NO: 329837 - DNA, 33 bp, Homo sapien; identical to SEQ ID NO: 329835

SEQ ID NO: 329838 - DNA, 33 bp, Homo sapien; identical to SEQ ID NO: 329836

SEQ ID NO: 329839 - DNA, 33 bp, Homo sapien
taatatttattgagtaccagttttgtaccaact

SEQ ID NO: 329840 - DNA, 33 bp, Homo sapien
taatatttattgagtagcagttttgtaccaact

SEQ ID NO: 329841 - DNA, 33 bp, Homo sapien
cgtggccttggtctcgccacagtgctgctgttc

SEQ ID NO: 329842 - DNA, 33 bp, Homo sapien
cgtggccttggtctcgtcacagtgctgctgttc

SEQ ID NO: 329843 - DNA, 33 bp, Homo sapien; identical to SEQ ID NO: 329841

SEQ ID NO: 329844 - DNA, 33 bp, Homo sapien; identical to SEQ ID NO: 329842

SEQ ID NO: 329845 - DNA, 33 bp, Homo sapien
attgatattttaatgacgccaagtctttctttc

SEQ ID NO: 329846 - DNA, 33 bp, Homo sapien
attgatattttaatgatgccaagtctttctttc

SEQ ID NO: 329847 - DNA, 33 bp, Homo sapien
tgcctggcaattctataacatttctctagtcca

SEQ ID NO: 329848 - DNA, 33 bp, Homo sapien
tgcctggcaattctattacatttctctagtcca

SEQ ID NO: 329849 - DNA, 33 bp, Homo sapien
tccttgctgcacgtacacatgtcacatcaaatg

SEQ ID NO: 329850 - DNA, 33 bp, Homo sapien
tccttgctgcacgtacgcatgtcacatcaaatg

SEQ ID NO: 329851 - DNA, 33 bp, Homo sapien
gatagactttctctgcactaaaaatgttatttc

SEQ ID NO: 329852 - DNA, 33 bp, Homo sapien
gatagactttctctgcgctaaaaatgttatttc

SEQ ID NO: 329853 - DNA, 33 bp, Homo sapien
ttgggtatggtagagcagacaacttggttaaaa

SEQ ID NO: 329854 - DNA, 33 bp, Homo sapien
ttgggtatggtagagcggacaacttggttaaaa

SEQ ID NO: 329855 - DNA, 33 bp, Homo sapien
caagacttcataacaaggcttttgcccctctta

SEQ ID NO: 329856 - DNA, 33 bp, Homo sapien
caagacttcataacaatgcttttgcccctctta

SEQ ID NO: 329857 - DNA, 33 bp, Homo sapien
aacttataatttgaaaacaaggagaaccagttc

SEQ ID NO: 329858 - DNA, 33 bp, Homo sapien
aacttataatttgaaagcaaggagaaccagttc

SEQ ID NO: 329859 - DNA, 33 bp, Homo sapien
aaacttgggtgcaaatgaggcctttgtgagaga

SEQ ID NO: 329860 - DNA, 33 bp, Homo sapien
aaacttgggtgcaaattaggcctttgtgagaga

SEQ ID NO: 329861 - DNA, 33 bp, Homo sapien
cctttccacataggccactgcttctcttcttcc

SEQ ID NO: 329862 - DNA, 33 bp, Homo sapien
cctttccacataggccgctgcttctcttcttcc

SEQ ID NO: 329863 - DNA, 33 bp, Homo sapien
agtggcttttcttcacagtctgaacgtatcaga

SEQ ID NO: 329864 - DNA, 33 bp, Homo sapien
agtggcttttcttcacggtctgaacgtatcaga

SEQ ID NO: 329865 - DNA, 33 bp, Homo sapien
gagcacatatggaagtcacactgaacattcaga

SEQ ID NO: 329866 - DNA, 33 bp, Homo sapien
gagcacatatggaagtgacactgaacattcaga

SEQ ID NO: 329867 - DNA, 33 bp, Homo sapien
ttgcttttcatagttacagtttatatgtgcatg

SEQ ID NO: 329868 - DNA, 33 bp, Homo sapien
ttgcttttcatagttagagtttatatgtgcatg

SEQ ID NO: 329869 - DNA, 33 bp, Homo sapien
catacaaattagtgcaagtaaaactggggaaat

SEQ ID NO: 329870 - DNA, 33 bp, Homo sapien
catacaaattagtgcaggtaaaactggggaaat

SEQ ID NO: 329871 - DNA, 33 bp, Homo sapien
agatggctgagtctaaatagaaacactggagaa

SEQ ID NO: 329872 - DNA, 33 bp, Homo sapien
agatggctgagtctaagtagaaacactggagaa

SEQ ID NO: 329873 - DNA, 33 bp, Homo sapien
tggtgattgcctccccccaaatccatgcaatga

SEQ ID NO: 329874 - DNA, 33 bp, Homo sapien
tggtgattgcctcccctcaaatccatgcaatga

SEQ ID NO: 329875 - DNA, 33 bp, Homo sapien
gtctgtcttcctctctcaacctgagtttccctg

SEQ ID NO: 329876 - DNA, 33 bp, Homo sapien
gtctgtcttcctctctgaacctgagtttccctg

SEQ ID NO: 329877 - DNA, 33 bp, Homo sapien
gagaacagattgaaaccagaaacaaagccatgc

SEQ ID NO: 329878 - DNA, 33 bp, Homo sapien
gagaacagattgaaactagaaacaaagccatgc

SEQ ID NO: 329879 - DNA, 33 bp, Homo sapien
gaagccttgtgctgtaataagttatcattcttg

SEQ ID NO: 329880 - DNA, 33 bp, Homo sapien
gaagccttgtgctgtagtaagttatcattcttg

SEQ ID NO: 329881 - DNA, 33 bp, Homo sapien
cactgggagtccacaacggcctaatgcacgttt

SEQ ID NO: 329882 - DNA, 33 bp, Homo sapien
cactgggagtccacaatggcctaatgcacgttt

SEQ ID NO: 329883 - DNA, 33 bp, Homo sapien
gagtggggcgcgtctacactgtggaggtgctgg

SEQ ID NO: 329884 - DNA, 33 bp, Homo sapien
gagtggggcgcgtctatactgtggaggtgctgg

SEQ ID NO: 329885 - DNA, 33 bp, Homo sapien
cgagccaccgtatccaacctacaaatattttaa

SEQ ID NO: 329886 - DNA, 33 bp, Homo sapien
cgagccaccgtatccagcctacaaatattttaa

SEQ ID NO: 329887 - DNA, 33 bp, Homo sapien
tcccccaggaagtgacaatcatttgaatcctgg

SEQ ID NO: 329888 - DNA, 33 bp, Homo sapien
tcccccaggaagtgacgatcatttgaatcctgg

SEQ ID NO: 329889 - DNA, 33 bp, Homo sapien
tgatggaacaggcagaaatggaacaaagatgat

SEQ ID NO: 329890 - DNA, 33 bp, Homo sapien
tgatggaacaggcagagatggaacaaagatgat

SEQ ID NO: 329891 - DNA, 33 bp, Homo sapien
aggtgaacaagatagaaaagatctctgctttct

SEQ ID NO: 329892 - DNA, 33 bp, Homo sapien
aggtgaacaagatagataagatctctgctttct

SEQ ID NO: 329893 - DNA, 33 bp, Homo sapien
cactagtttagtgaaaaacactttagaaaactg

SEQ ID NO: 329894 - DNA, 33 bp, Homo sapien
cactagtttagtgaaagacactttagaaaactg

SEQ ID NO: 329895 - DNA, 33 bp, Homo sapien
ttgtggaggttatgaacgttaagtggagacaaa

SEQ ID NO: 329896 - DNA, 33 bp, Homo sapien
ttgtggaggttatgaatgttaagtggagacaaa

SEQ ID NO: 329897 - DNA, 33 bp, Homo sapien
aaataccttgcccatacgtctcaaaactatcaa

SEQ ID NO: 329898 - DNA, 33 bp, Homo sapien
aaataccttgcccatatgtctcaaaactatcaa

SEQ ID NO: 329899 - DNA, 33 bp, Homo sapien
acagttcggatagacaaggtaactgtagcatgt

SEQ ID NO: 329900 - DNA, 33 bp, Homo sapien
acagttcggatagacagggtaactgtagcatgt

SEQ ID NO: 329901 - DNA, 33 bp, Homo sapien
caagctttcaataaaagtcatgtaaaagagaag

SEQ ID NO: 329902 - DNA, 33 bp, Homo sapien
caagctttcaataaaattcatgtaaaagagaag

SEQ ID NO: 329903 - DNA, 33 bp, Homo sapien
ccacaggggacgattaccattaaccagtttgtc

SEQ ID NO: 329904 - DNA, 33 bp, Homo sapien
ccacaggggacgattatcattaaccagtttgtc

SEQ ID NO: 329905 - DNA, 33 bp, Homo sapien
agcacgctagtcatcacgttaacagagttttga

SEQ ID NO: 329906 - DNA, 33 bp, Homo sapien
agcacgctagtcatcatgttaacagagttttga

SEQ ID NO: 329907 - DNA, 33 bp, Homo sapien
gtatttttctcaaagaagccccaactatagaag

SEQ ID NO: 329908 - DNA, 33 bp, Homo sapien
gtatttttctcaaagaggccccaactatagaag

SEQ ID NO: 329909 - DNA, 33 bp, Homo sapien
acgggaggaggtcgtcactaaacagactttgag

SEQ ID NO: 329910 - DNA, 33 bp, Homo sapien
acgggaggaggtcgtcgctaaacagactttgag

SEQ ID NO: 329911 - DNA, 33 bp, Homo sapien
taaatacacgccccgcaaaagaggaaaggcaga

SEQ ID NO: 329912 - DNA, 33 bp, Homo sapien
taaatacacgccccgcgaaagaggaaaggcaga

SEQ ID NO: 329913 - DNA, 33 bp, Homo sapien
ttccagcactcgctccaacaatacactgctgaa

SEQ ID NO: 329914 - DNA, 33 bp, Homo sapien
ttccagcactcgctccgacaatacactgctgaa

SEQ ID NO: 329915 - DNA, 33 bp, Homo sapien
gctgagctgctgcccccactctgaaggtgagca

SEQ ID NO: 329916 - DNA, 33 bp, Homo sapien
gctgagctgctgccccgactctgaaggtgagca

SEQ ID NO: 329917 - DNA, 33 bp, Homo sapien
tggaggcagcaggaaactcaaaaaggaccaaaa

SEQ ID NO: 329918 - DNA, 33 bp, Homo sapien
tggaggcagcaggaaattcaaaaaggaccaaaa

SEQ ID NO: 329919 - DNA, 33 bp, Homo sapien
tgactcagattttaaaactgcttggctgagaag

SEQ ID NO: 329920 - DNA, 33 bp, Homo sapien
tgactcagattttaaacctgcttggctgagaag

SEQ ID NO: 329921 - DNA, 33 bp, Homo sapien
ttaaggagagctgtgaagaaaggggggagtgtg

SEQ ID NO: 329922 - DNA, 33 bp, Homo sapien
ttaaggagagctgtgaggaaaggggggagtgtg

SEQ ID NO: 329923 - DNA, 33 bp, Homo sapien
aaaatgcacgtaaaaccgctctgtagacaataa

SEQ ID NO: 329924 - DNA, 33 bp, Homo sapien
aaaatgcacgtaaaactgctctgtagacaataa

SEQ ID NO: 329925 - DNA, 33 bp, Homo sapien
tgaactcaagcaaataaaaggacaatcctttgt

SEQ ID NO: 329926 - DNA, 33 bp, Homo sapien
tgaactcaagcaaatacaaggacaatcctttgt

SEQ ID NO: 329927 - DNA, 33 bp, Homo sapien
acctagagttccgtaaaatgtcactaagggctt

SEQ ID NO: 329928 - DNA, 33 bp, Homo sapien
acctagagttccgtaagatgtcactaagggctt

SEQ ID NO: 329929 - DNA, 33 bp, Homo sapien
aatcatatgcttactcaaatgcagagattttaa

SEQ ID NO: 329930 - DNA, 33 bp, Homo sapien
aatcatatgcttactcgaatgcagagattttaa

SEQ ID NO: 329931 - DNA, 33 bp, Homo sapien
tgcccaaaacagtcaaatccatagagaaagaaa

SEQ ID NO: 329932 - DNA, 33 bp, Homo sapien
tgcccaaaacagtcaactccatagagaaagaaa

SEQ ID NO: 329933 - DNA, 33 bp, Homo sapien
tatttattagttcagcagacttgggacaaatta

SEQ ID NO: 329934 - DNA, 33 bp, Homo sapien
tatttattagttcagcggacttgggacaaatta

SEQ ID NO: 329935 - DNA, 33 bp, Homo sapien
ccaaaaggaacttaaccgctacaattattatca

SEQ ID NO: 329936 - DNA, 33 bp, Homo sapien
ccaaaaggaacttaactgctacaattattatca

SEQ ID NO: 329937 - DNA, 33 bp, Homo sapien
ttatgtgaaggattgaagaagtctacaaactga

SEQ ID NO: 329938 - DNA, 33 bp, Homo sapien
ttatgtgaaggattgaggaagtctacaaactga

SEQ ID NO: 329939 - DNA, 33 bp, Homo sapien
tccttctacctaaaagcccttccctatcacctt

SEQ ID NO: 329940 - DNA, 33 bp, Homo sapien
tccttctacctaaaagtccttccctatcacctt

SEQ ID NO: 329941 - DNA, 33 bp, Homo sapien
actctgctgcaccttgcatcctgacttttatct

SEQ ID NO: 329942 - DNA, 33 bp, Homo sapien
actctgctgcaccttgtatcctgacttttatct

SEQ ID NO: 329943 - DNA, 33 bp, Homo sapien
gtctgaacaacagtcacatagctatctctgcag

SEQ ID NO: 329944 - DNA, 33 bp, Homo sapien
gtctgaacaacagtcatatagctatctctgcag

SEQ ID NO: 329945 - DNA, 33 bp, Homo sapien
gtgaagaagaaaagacagaagactaaagtgtgt

SEQ ID NO: 329946 - DNA, 33 bp, Homo sapien
gtgaagaagaaaagacggaagactaaagtgtgt

SEQ ID NO: 329947 - DNA, 33 bp, Homo sapien
cttaaccacatgacacaagtgagcgtaggtggg

SEQ ID NO: 329948 - DNA, 33 bp, Homo sapien
cttaaccacatgacacgagtgagcgtaggtggg

SEQ ID NO: 329949 - DNA, 33 bp, Homo sapien
agcattcagcagagcccgcattcagacccgcag

SEQ ID NO: 329950 - DNA, 33 bp, Homo sapien
agcattcagcagagcctgcattcagacccgcag

SEQ ID NO: 329951 - DNA, 33 bp, Homo sapien
aggctgctggtaaggaggaggaggttaaagtgt

SEQ ID NO: 329952 - DNA, 33 bp, Homo sapien
aggctgctggtaaggatgaggaggttaaagtgt

SEQ ID NO: 329953 - DNA, 33 bp, Homo sapien
gatggcttctaagacacccaaataccaaatgct

SEQ ID NO: 329954 - DNA, 33 bp, Homo sapien
gatggcttctaagacatccaaataccaaatgct

SEQ ID NO: 329955 - DNA, 33 bp, Homo sapien
tgtcctctgtgatggtaaactttgtgtgtcaac

SEQ ID NO: 329956 - DNA, 33 bp, Homo sapien
tgtcctctgtgatggttaactttgtgtgtcaac

SEQ ID NO: 329957 - DNA, 33 bp, Homo sapien
ggatctcatcattctcaaagttaaacttcccag

SEQ ID NO: 329958 - DNA, 33 bp, Homo sapien
ggatctcatcattctcgaagttaaacttcccag

SEQ ID NO: 329959 - DNA, 33 bp, Homo sapien
tccacctataaacactcaagcaccccaggtggg

SEQ ID NO: 329960 - DNA, 33 bp, Homo sapien
tccacctataaacactgaagcaccccaggtggg

SEQ ID NO: 329961 - DNA, 33 bp, Homo sapien
aaaaggagactgagaacaagtggtcagagggac

SEQ ID NO: 329962 - DNA, 33 bp, Homo sapien
aaaaggagactgagaataagtggtcagagggac

SEQ ID NO: 329963 - DNA, 33 bp, Homo sapien
gcaatgggaagggagcaacgggaagcactgaat

SEQ ID NO: 329964 - DNA, 33 bp, Homo sapien
gcaatgggaagggagcgacgggaagcactgaat

SEQ ID NO: 329965 - DNA, 33 bp, Homo sapien
tgaagaataaaagcaacgtggctatttttagag

SEQ ID NO: 329966 - DNA, 33 bp, Homo sapien
tgaagaataaaagcaatgtggctatttttagag

SEQ ID NO: 329967 - DNA, 33 bp, Homo sapien
gccagtgacctaaaaacgtcagcttgtgttttg

SEQ ID NO: 329968 - DNA, 33 bp, Homo sapien
gccagtgacctaaaaatgtcagcttgtgttttg

SEQ ID NO: 329969 - DNA, 33 bp, Homo sapien
atttatttattgctatcactgatgtattttagt

SEQ ID NO: 329970 - DNA, 33 bp, Homo sapien
atttatttattgctatgactgatgtattttagt

SEQ ID NO: 329971 - DNA, 33 bp, Homo sapien
acaacaccatttttataagctcaaaattaacac

SEQ ID NO: 329972 - DNA, 33 bp, Homo sapien
acaacaccatttttatgagctcaaaattaacac

SEQ ID NO: 329973 - DNA, 33 bp, Homo sapien
aagtctcaaagcaaatgagttacttcctagata

SEQ ID NO: 329974 - DNA, 33 bp, Homo sapien
aagtctcaaagcaaattagttacttcctagata

SEQ ID NO: 329975 - DNA, 33 bp, Homo sapien
cagccttcaccatctcacaggagcctccatcct

SEQ ID NO: 329976 - DNA, 33 bp, Homo sapien
cagccttcaccatctcgcaggagcctccatcct

SEQ ID NO: 329977 - DNA, 33 bp, Homo sapien
tacagctggttttagaagcccaactcaatcgca

SEQ ID NO: 329978 - DNA, 33 bp, Homo sapien
tacagctggttttagaggcccaactcaatcgca

SEQ ID NO: 329979 - DNA, 33 bp, Homo sapien
ttctattcagtgaccaatattataaaatccaat

SEQ ID NO: 329980 - DNA, 33 bp, Homo sapien
ttctattcagtgaccagtattataaaatccaat

SEQ ID NO: 329981 - DNA, 33 bp, Homo sapien
caataacacaaaggaaacatcttgcagactctg

SEQ ID NO: 329982 - DNA, 33 bp, Homo sapien
caataacacaaaggaagcatcttgcagactctg

SEQ ID NO: 329983 - DNA, 33 bp, Homo sapien
ttttcactgctctgataacatatgtacctttga

SEQ ID NO: 329984 - DNA, 33 bp, Homo sapien
ttttcactgctctgatgacatatgtacctttga

SEQ ID NO: 329985 - DNA, 33 bp, Homo sapien
aagagaggacaaggaacaaacaggatctttaaa

SEQ ID NO: 329986 - DNA, 33 bp, Homo sapien
aagagaggacaaggaataaacaggatctttaaa

SEQ ID NO: 329987 - DNA, 33 bp, Homo sapien
ggagaaaccagcattccacctacccagtcctgt

SEQ ID NO: 329988 - DNA, 33 bp, Homo sapien
ggagaaaccagcattctacctacccagtcctgt

SEQ ID NO: 329989 - DNA, 33 bp, Homo sapien
ctttcttcatatatggacacaagcctcttcatt

SEQ ID NO: 329990 - DNA, 33 bp, Homo sapien
ctttcttcatatatgggcacaagcctcttcatt

SEQ ID NO: 329991 - DNA, 33 bp, Homo sapien
actgccttaaaacaataaggtgtgttaatcaac

SEQ ID NO: 329992 - DNA, 33 bp, Homo sapien
actgccttaaaacaatgaggtgtgttaatcaac

SEQ ID NO: 329993 - DNA, 33 bp, Homo sapien
ctgaagacaaggagacaagctgaggcccagtgg

SEQ ID NO: 329994 - DNA, 33 bp, Homo sapien
ctgaagacaaggagacgagctgaggcccagtgg

SEQ ID NO: 329995 - DNA, 33 bp, Homo sapien
acggtatttcttgacactgactgctataacatg

SEQ ID NO: 329996 - DNA, 33 bp, Homo sapien
acggtatttcttgacattgactgctataacatg

SEQ ID NO: 329997 - DNA, 33 bp, Homo sapien
aagagatgctgggaaacgtaatctcgtaggtaa

SEQ ID NO: 329998 - DNA, 33 bp, Homo sapien
aagagatgctgggaaatgtaatctcgtaggtaa

SEQ ID NO: 329999 - DNA, 33 bp, Homo sapien
tctcttgcttaaaaagacttttcaaatgaatgt

SEQ ID NO: 330000 - DNA, 33 bp, Homo sapien
tctcttgcttaaaaagccttttcaaatgaatgt

SEQ ID NO: 330001 - DNA, 33 bp, Homo sapien
ctttcacacctaactacgattttgtaacttgta

SEQ ID NO: 330002 - DNA, 33 bp, Homo sapien
ctttcacacctaactatgattttgtaacttgta

SEQ ID NO: 330003 - DNA, 33 bp, Homo sapien
tcttctctcaagcaaaacactccatatgtgctt

SEQ ID NO: 330004 - DNA, 33 bp, Homo sapien
tcttctctcaagcaaatcactccatatgtgctt

SEQ ID NO: 330005 - DNA, 33 bp, Homo sapien
ctgctttagctcccagaatggtgtggaatgtgg

SEQ ID NO: 330006 - DNA, 33 bp, Homo sapien
ctgctttagctcccagcatggtgtggaatgtgg

SEQ ID NO: 330007 - DNA, 33 bp, Homo sapien
gcttagctggggacccacatggaaggcactgtc

SEQ ID NO: 330008 - DNA, 33 bp, Homo sapien
gcttagctggggacccgcatggaaggcactgtc

SEQ ID NO: 330009 - DNA, 33 bp, Homo sapien
cggccctgtggaggcacgaacttactttctgag

SEQ ID NO: 330010 - DNA, 33 bp, Homo sapien
cggccctgtggaggcaggaacttactttctgag

SEQ ID NO: 330011 - DNA, 33 bp, Homo sapien
cattgtcacctcatcccactttggagatgtaga

SEQ ID NO: 330012 - DNA, 33 bp, Homo sapien
cattgtcacctcatccgactttggagatgtaga

SEQ ID NO: 330013 - DNA, 33 bp, Homo sapien
acactattgaatgacaaatctgtggaacaactg

SEQ ID NO: 330014 - DNA, 33 bp, Homo sapien
acactattgaatgacacatctgtggaacaactg

SEQ ID NO: 330015 - DNA, 33 bp, Homo sapien
tttggacaccagggtcacatgagtgcacagagg

SEQ ID NO: 330016 - DNA, 33 bp, Homo sapien
tttggacaccagggtcgcatgagtgcacagagg

SEQ ID NO: 330017 - DNA, 33 bp, Homo sapien
agcaaccatctctcaagagtactgctgcccaac

SEQ ID NO: 330018 - DNA, 33 bp, Homo sapien
agcaaccatctctcaatagtactgctgcccaac

SEQ ID NO: 330019 - DNA, 33 bp, Homo sapien
agctacggagcccaaactgcagaatctggagtc

SEQ ID NO: 330020 - DNA, 33 bp, Homo sapien
agctacggagcccaaattgcagaatctggagtc

SEQ ID NO: 330021 - DNA, 33 bp, Homo sapien
ccagggcttatgctcactacacttttcctgtgc

SEQ ID NO: 330022 - DNA, 33 bp, Homo sapien
ccagggcttatgctcattacacttttcctgtgc

SEQ ID NO: 330023 - DNA, 33 bp, Homo sapien
tcaatatagttagtcaatcaagtggaaactaac

SEQ ID NO: 330024 - DNA, 33 bp, Homo sapien
tcaatatagttagtcattcaagtggaaactaac

SEQ ID NO: 330025 - DNA, 33 bp, Homo sapien
acttcagtaaagctacagagtacaatttttaaa

SEQ ID NO: 330026 - DNA, 33 bp, Homo sapien
acttcagtaaagctacggagtacaatttttaaa

SEQ ID NO: 330027 - DNA, 33 bp, Homo sapien
agaattcaatgaaactcaaaacatgaaagtgat

SEQ ID NO: 330028 - DNA, 33 bp, Homo sapien
agaattcaatgaaactgaaaacatgaaagtgat

SEQ ID NO: 330029 - DNA, 33 bp, Homo sapien
gggtggaaagtgctcccccagcaaggatgaagg

SEQ ID NO: 330030 - DNA, 33 bp, Homo sapien
gggtggaaagtgctcctccagcaaggatgaagg

SEQ ID NO: 330031 - DNA, 33 bp, Homo sapien
ggcctgacatgccgcacgatggcgtcccctagc

SEQ ID NO: 330032 - DNA, 33 bp, Homo sapien
ggcctgacatgccgcatgatggcgtcccctagc

SEQ ID NO: 330033 - DNA, 33 bp, Homo sapien
ccatatgacaggccacacttgcaacaaatcctg

SEQ ID NO: 330034 - DNA, 33 bp, Homo sapien
ccatatgacaggccacgcttgcaacaaatcctg

SEQ ID NO: 330035 - DNA, 33 bp, Homo sapien
gatgttctttagcaaacgaggaacttcacctct

SEQ ID NO: 330036 - DNA, 33 bp, Homo sapien
gatgttctttagcaaatgaggaacttcacctct

SEQ ID NO: 330037 - DNA, 33 bp, Homo sapien
ctgcctttcccagcacaaggaaacatccacagc

SEQ ID NO: 330038 - DNA, 33 bp, Homo sapien
ctgcctttcccagcaccaggaaacatccacagc

SEQ ID NO: 330039 - DNA, 33 bp, Homo sapien
tcatagggtaagagtaagtttggtttcataaga

SEQ ID NO: 330040 - DNA, 33 bp, Homo sapien
tcatagggtaagagtacgtttggtttcataaga

SEQ ID NO: 330041 - DNA, 33 bp, Homo sapien
ggcacaaaatcaataccccaatccaactgcatt

SEQ ID NO: 330042 - DNA, 33 bp, Homo sapien
ggcacaaaatcaatactccaatccaactgcatt

SEQ ID NO: 330043 - DNA, 33 bp, Homo sapien
attcaatcattagacaaggaaggtagatataac

SEQ ID NO: 330044 - DNA, 33 bp, Homo sapien
attcaatcattagacagggaaggtagatataac

SEQ ID NO: 330045 - DNA, 33 bp, Homo sapien
ctcaagctctcccaacaaagattctcagtacaa

SEQ ID NO: 330046 - DNA, 33 bp, Homo sapien
ctcaagctctcccaacgaagattctcagtacaa

SEQ ID NO: 330047 - DNA, 33 bp, Homo sapien
gcaggaatgaacgacacggcagacccaagcact

SEQ ID NO: 330048 - DNA, 33 bp, Homo sapien
gcaggaatgaacgacagggcagacccaagcact

SEQ ID NO: 330049 - DNA, 33 bp, Homo sapien
gtgacaatggaaagtaagtgtgtccatgtgggg

SEQ ID NO: 330050 - DNA, 33 bp, Homo sapien
gtgacaatggaaagtaggtgtgtccatgtgggg

SEQ ID NO: 330051 - DNA, 33 bp, Homo sapien
aggagccagagaacaaatagccaacattcaagg

SEQ ID NO: 330052 - DNA, 33 bp, Homo sapien
aggagccagagaacaagtagccaacattcaagg

SEQ ID NO: 330053 - DNA, 33 bp, Homo sapien
gttaaaacagtgaaaacgggtactcttcaatcc

SEQ ID NO: 330054 - DNA, 33 bp, Homo sapien
gttaaaacagtgaaaatgggtactcttcaatcc

SEQ ID NO: 330055 - DNA, 33 bp, Homo sapien
gggacagcagctgaaacaggacgggcagtgcac

SEQ ID NO: 330056 - DNA, 33 bp, Homo sapien
gggacagcagctgaaagaggacgggcagtgcac

SEQ ID NO: 330057 - DNA, 33 bp, Homo sapien
ttgcatcatctttatcaagttactgtgagtgcc

SEQ ID NO: 330058 - DNA, 33 bp, Homo sapien
ttgcatcatctttatcgagttactgtgagtgcc

SEQ ID NO: 330059 - DNA, 33 bp, Homo sapien
ccaaccagaagaaagcaagtagagtgatagaaa

SEQ ID NO: 330060 - DNA, 33 bp, Homo sapien
ccaaccagaagaaagcgagtagagtgatagaaa

SEQ ID NO: 330061 - DNA, 33 bp, Homo sapien
cactccaggaagctatcacagccccaagtaagc

SEQ ID NO: 330062 - DNA, 33 bp, Homo sapien
cactccaggaagctattacagccccaagtaagc

SEQ ID NO: 330063 - DNA, 33 bp, Homo sapien
aatcaacaatctatgaaggtttaacatgggaaa

SEQ ID NO: 330064 - DNA, 33 bp, Homo sapien
aatcaacaatctatgacggtttaacatgggaaa

SEQ ID NO: 330065 - DNA, 33 bp, Homo sapien
tgagattggagtaaaacgagttcacacccactc

SEQ ID NO: 330066 - DNA, 33 bp, Homo sapien
tgagattggagtaaaatgagttcacacccactc

SEQ ID NO: 330067 - DNA, 33 bp, Homo sapien
taaaggtgtttctccactatcttctggatttca

SEQ ID NO: 330068 - DNA, 33 bp, Homo sapien
taaaggtgtttctccattatcttctggatttca

SEQ ID NO: 330069 - DNA, 33 bp, Homo sapien
tgggcacacagttcccaagtcctgttccattgc

SEQ ID NO: 330070 - DNA, 33 bp, Homo sapien
tgggcacacagttcccgagtcctgttccattgc

SEQ ID NO: 330071 - DNA, 33 bp, Homo sapien; identical to SEQ ID NO: 330069

SEQ ID NO: 330072 - DNA, 33 bp, Homo sapien; identical to SEQ ID NO: 330070

SEQ ID NO: 330073 - DNA, 33 bp, Homo sapien
gacccttgtttctctacgtggaagtacatgaga

SEQ ID NO: 330074 - DNA, 33 bp, Homo sapien
gacccttgtttctctatgtggaagtacatgaga

SEQ ID NO: 330075 - DNA, 33 bp, Homo sapien
agtgattcctgccgggaaggagatagcccagca

SEQ ID NO: 330076 - DNA, 33 bp, Homo sapien
agtgattcctgccggggaggagatagcccagca

SEQ ID NO: 330077 - DNA, 33 bp, Homo sapien
cacattgagacagagacggagttggagggaggc

SEQ ID NO: 330078 - DNA, 33 bp, Homo sapien
cacattgagacagagatggagttggagggaggc

SEQ ID NO: 330079 - DNA, 33 bp, Homo sapien
ctgacaaatcccaacacaaacccccagctgtat

SEQ ID NO: 330080 - DNA, 33 bp, Homo sapien
ctgacaaatcccaacataaacccccagctgtat

SEQ ID NO: 330081 - DNA, 33 bp, Homo sapien
cgtctgattatttccaaccccctgaagtttaac

SEQ ID NO: 330082 - DNA, 33 bp, Homo sapien
cgtctgattatttccatccccctgaagtttaac

SEQ ID NO: 330083 - DNA, 33 bp, Homo sapien
aagtgaattcgtgtaaccgtgcagctccccagc

SEQ ID NO: 330084 - DNA, 33 bp, Homo sapien
aagtgaattcgtgtaagcgtgcagctccccagc

SEQ ID NO: 330085 - DNA, 33 bp, Homo sapien
ccagcacctggttaatgatgcatgcacttttgt

SEQ ID NO: 330086 - DNA, 33 bp, Homo sapien
ccagcacctggttaattatgcatgcacttttgt

SEQ ID NO: 330087 - DNA, 33 bp, Homo sapien
tcgatggccctgagagcccttgtccaccacatg

SEQ ID NO: 330088 - DNA, 33 bp, Homo sapien
tcgatggccctgagagtccttgtccaccacatg

SEQ ID NO: 330089 - DNA, 33 bp, Homo sapien
gagcccaccaagtgccaagcaggataaacacaa

SEQ ID NO: 330090 - DNA, 33 bp, Homo sapien
gagcccaccaagtgcctagcaggataaacacaa

SEQ ID NO: 330091 - DNA, 33 bp, Homo sapien
tctctttgaactgagacccatagtcactgatcc

SEQ ID NO: 330092 - DNA, 33 bp, Homo sapien
tctctttgaactgagatccatagtcactgatcc

SEQ ID NO: 330093 - DNA, 33 bp, Homo sapien
cctggtgaacacttacgccttttctgactgtgt

SEQ ID NO: 330094 - DNA, 33 bp, Homo sapien
cctggtgaacacttactccttttctgactgtgt

SEQ ID NO: 330095 - DNA, 33 bp, Homo sapien
aaggaaaaattccatacctcaggaaagcaagat

SEQ ID NO: 330096 - DNA, 33 bp, Homo sapien
aaggaaaaattccatatctcaggaaagcaagat

SEQ ID NO: 330097 - DNA, 33 bp, Homo sapien
ggtgggcagcagtcacaaggaaccaatgccaat

SEQ ID NO: 330098 - DNA, 33 bp, Homo sapien
ggtgggcagcagtcacgaggaaccaatgccaat

SEQ ID NO: 330099 - DNA, 33 bp, Homo sapien
gctcacaagtgacatccaactacatgctgtatt

SEQ ID NO: 330100 - DNA, 33 bp, Homo sapien
gctcacaagtgacatcgaactacatgctgtatt

SEQ ID NO: 330101 - DNA, 33 bp, Homo sapien
agaggcgagagctaacacccagatggagcctca

SEQ ID NO: 330102 - DNA, 33 bp, Homo sapien
agaggcgagagctaacgcccagatggagcctca

SEQ ID NO: 330103 - DNA, 33 bp, Homo sapien
cactttccttgtgcgcaatgcagggttcacggc

SEQ ID NO: 330104 - DNA, 33 bp, Homo sapien
cactttccttgtgcgcgatgcagggttcacggc

SEQ ID NO: 330105 - DNA, 33 bp, Homo sapien
tccagctgttttagtcacagactgagctgatcc

SEQ ID NO: 330106 - DNA, 33 bp, Homo sapien
tccagctgttttagtcgcagactgagctgatcc

SEQ ID NO: 330107 - DNA, 33 bp, Homo sapien
ctcaatgacccaggatcaagggtgactataagg

SEQ ID NO: 330108 - DNA, 33 bp, Homo sapien
ctcaatgacccaggatgaagggtgactataagg

SEQ ID NO: 330109 - DNA, 33 bp, Homo sapien
gccctccagcgcaagcacaaaaacctcctggga

SEQ ID NO: 330110 - DNA, 33 bp, Homo sapien
gccctccagcgcaagcccaaaaacctcctggga

SEQ ID NO: 330111 - DNA, 33 bp, Homo sapien
acgggactcactgtccaaacaggaggagagcag

SEQ ID NO: 330112 - DNA, 33 bp, Homo sapien
acgggactcactgtccgaacaggaggagagcag

SEQ ID NO: 330113 - DNA, 33 bp, Homo sapien
agaattgctgtaactcagaaacaaaaactccct

SEQ ID NO: 330114 - DNA, 33 bp, Homo sapien
agaattgctgtaactccgaaacaaaaactccct

SEQ ID NO: 330115 - DNA, 33 bp, Homo sapien
aaacaaactaaaatgccgcagggaccatgtaga

SEQ ID NO: 330116 - DNA, 33 bp, Homo sapien
aaacaaactaaaatgctgcagggaccatgtaga

SEQ ID NO: 330117 - DNA, 33 bp, Homo sapien
tggcagaatttaccaacgctatacatatgccta

SEQ ID NO: 330118 - DNA, 33 bp, Homo sapien
tggcagaatttaccaatgctatacatatgccta

SEQ ID NO: 330119 - DNA, 33 bp, Homo sapien
cttttgctcattgcgacgtctggagaatcatcc

SEQ ID NO: 330120 - DNA, 33 bp, Homo sapien
cttttgctcattgcgatgtctggagaatcatcc

SEQ ID NO: 330121 - DNA, 33 bp, Homo sapien
cagagctggccagacacatctgttggaggaaga

SEQ ID NO: 330122 - DNA, 33 bp, Homo sapien
cagagctggccagacatatctgttggaggaaga

SEQ ID NO: 330123 - DNA, 33 bp, Homo sapien
tacccagggaagcatgcagattacaaaatacaa

SEQ ID NO: 330124 - DNA, 33 bp, Homo sapien
tacccagggaagcatggagattacaaaatacaa

SEQ ID NO: 330125 - DNA, 33 bp, Homo sapien
cccccacagggttctcacgtggccttggttctc

SEQ ID NO: 330126 - DNA, 33 bp, Homo sapien
cccccacagggttctcgcgtggccttggttctc

SEQ ID NO: 330127 - DNA, 33 bp, Homo sapien
ccatgagaagacttccacatttcccattgtgga

SEQ ID NO: 330128 - DNA, 33 bp, Homo sapien
ccatgagaagacttccgcatttcccattgtgga

SEQ ID NO: 330129 - DNA, 33 bp, Homo sapien
cagtctgaccgatggacggcaccagggagctac

SEQ ID NO: 330130 - DNA, 33 bp, Homo sapien
cagtctgaccgatggatggcaccagggagctac

SEQ ID NO: 330131 - DNA, 33 bp, Homo sapien
agggatcatgctttgcagaagcaccacacacag

SEQ ID NO: 330132 - DNA, 33 bp, Homo sapien
agggatcatgctttgcggaagcaccacacacag

SEQ ID NO: 330133 - DNA, 33 bp, Homo sapien
gtggaagctccgtgagaccagatattttgctgg

SEQ ID NO: 330134 - DNA, 33 bp, Homo sapien
gtggaagctccgtgaggccagatattttgctgg

SEQ ID NO: 330135 - DNA, 33 bp, Homo sapien
ggaagtccacaagactcaaaggaagaaaacaag

SEQ ID NO: 330136 - DNA, 33 bp, Homo sapien
ggaagtccacaagacttaaaggaagaaaacaag

SEQ ID NO: 330137 - DNA, 33 bp, Homo sapien
gtgatgagcctttgcaatattctcaggagtggc

SEQ ID NO: 330138 - DNA, 33 bp, Homo sapien
gtgatgagcctttgcagtattctcaggagtggc

SEQ ID NO: 330139 - DNA, 33 bp, Homo sapien
tcacagccgcctctgacgcattgacacgtgagc

SEQ ID NO: 330140 - DNA, 33 bp, Homo sapien
tcacagccgcctctgatgcattgacacgtgagc

SEQ ID NO: 330141 - DNA, 33 bp, Homo sapien
atcccaagcctgcataacaatggattaatttag

SEQ ID NO: 330142 - DNA, 33 bp, Homo sapien
atcccaagcctgcatagcaatggattaatttag

SEQ ID NO: 330143 - DNA, 33 bp, Homo sapien
ggacatgattagtaaccgacaacctctccagtt

SEQ ID NO: 330144 - DNA, 33 bp, Homo sapien
ggacatgattagtaactgacaacctctccagtt

SEQ ID NO: 330145 - DNA, 33 bp, Homo sapien
gagatggcctagaacacgtttggctttctctgg

SEQ ID NO: 330146 - DNA, 33 bp, Homo sapien
gagatggcctagaacatgtttggctttctctgg

SEQ ID NO: 330147 - DNA, 33 bp, Homo sapien
tcacataggtctctagcataaggagcgtcttaa

SEQ ID NO: 330148 - DNA, 33 bp, Homo sapien
tcacataggtctctaggataaggagcgtcttaa

SEQ ID NO: 330149 - DNA, 33 bp, Homo sapien
tgtctctctacagttacagagcaaaggcccccg

SEQ ID NO: 330150 - DNA, 33 bp, Homo sapien
tgtctctctacagttatagagcaaaggcccccg

SEQ ID NO: 330151 - DNA, 33 bp, Homo sapien
ttaccatgaaagacacagtaatataactttgcc

SEQ ID NO: 330152 - DNA, 33 bp, Homo sapien
ttaccatgaaagacacggtaatataactttgcc

SEQ ID NO: 330153 - DNA, 33 bp, Homo sapien
tagaagtaaacagaaacagatctccaggtgaac

SEQ ID NO: 330154 - DNA, 33 bp, Homo sapien
tagaagtaaacagaaatagatctccaggtgaac

SEQ ID NO: 330155 - DNA, 33 bp, Homo sapien
ggatgtctgcacgggaacccatgtctctgctgc

SEQ ID NO: 330156 - DNA, 33 bp, Homo sapien
ggatgtctgcacgggagcccatgtctctgctgc

SEQ ID NO: 330157 - DNA, 33 bp, Homo sapien
catttgcaatatacataatggaagaaatgacag

SEQ ID NO: 330158 - DNA, 33 bp, Homo sapien
catttgcaatatacatgatggaagaaatgacag

SEQ ID NO: 330159 - DNA, 33 bp, Homo sapien
ttacagcaaaaagatacggattaaaagcagcca

SEQ ID NO: 330160 - DNA, 33 bp, Homo sapien
ttacagcaaaaagatatggattaaaagcagcca

SEQ ID NO: 330161 - DNA, 33 bp, Homo sapien
cgtagcaactatgtgtaaataaatctcaagacc

SEQ ID NO: 330162 - DNA, 33 bp, Homo sapien
cgtagcaactatgtgtgaataaatctcaagacc

SEQ ID NO: 330163 - DNA, 33 bp, Homo sapien
tctcatagatttttaagagcttctgtcctgctg

SEQ ID NO: 330164 - DNA, 33 bp, Homo sapien
tctcatagatttttaatagcttctgtcctgctg

SEQ ID NO: 330165 - DNA, 33 bp, Homo sapien
gtcaactccaaagaccaggaatatttgctcctt

SEQ ID NO: 330166 - DNA, 33 bp, Homo sapien
gtcaactccaaagaccgggaatatttgctcctt

SEQ ID NO: 330167 - DNA, 33 bp, Homo sapien
tatcgtatggactgcaccttgcctaaaaaaatt

SEQ ID NO: 330168 - DNA, 33 bp, Homo sapien
tatcgtatggactgcatcttgcctaaaaaaatt

SEQ ID NO: 330169 - DNA, 33 bp, Homo sapien
cctgaggtcccaaagagcaaccgggcagcagaa

SEQ ID NO: 330170 - DNA, 33 bp, Homo sapien
cctgaggtcccaaagatcaaccgggcagcagaa

SEQ ID NO: 330171 - DNA, 33 bp, Homo sapien
gacctgatacaacaataaagaacataaaggcat

SEQ ID NO: 330172 - DNA, 33 bp, Homo sapien
gacctgatacaacaattaagaacataaaggcat

SEQ ID NO: 330173 - DNA, 33 bp, Homo sapien
gggtgccaggatagaactgctgagccgccagag

SEQ ID NO: 330174 - DNA, 33 bp, Homo sapien
gggtgccaggatagaattgctgagccgccagag

SEQ ID NO: 330175 - DNA, 33 bp, Homo sapien
gcaggagtggactataaggtgaaacaggctctc

SEQ ID NO: 330176 - DNA, 33 bp, Homo sapien
gcaggagtggactatagggtgaaacaggctctc

SEQ ID NO: 330177 - DNA, 33 bp, Homo sapien
tcctgcaaagactacccgaggcggcctccatcc

SEQ ID NO: 330178 - DNA, 33 bp, Homo sapien
tcctgcaaagactacctgaggcggcctccatcc

SEQ ID NO: 330179 - DNA, 33 bp, Homo sapien
tttttgttatagaaacacgctatggaaaatacc

SEQ ID NO: 330180 - DNA, 33 bp, Homo sapien
tttttgttatagaaacgcgctatggaaaatacc

SEQ ID NO: 330181 - DNA, 33 bp, Homo sapien
ttgggggaacacacatcatatgatttggctctg

SEQ ID NO: 330182 - DNA, 33 bp, Homo sapien
ttgggggaacacacatgatatgatttggctctg

SEQ ID NO: 330183 - DNA, 33 bp, Homo sapien
agaactcaggaggaacaaagcaaaactaagtag

SEQ ID NO: 330184 - DNA, 33 bp, Homo sapien
agaactcaggaggaacgaagcaaaactaagtag

SEQ ID NO: 330185 - DNA, 33 bp, Homo sapien
agtccgaggtgttgacaaggatgatgttttcgg

SEQ ID NO: 330186 - DNA, 33 bp, Homo sapien
agtccgaggtgttgacgaggatgatgttttcgg

SEQ ID NO: 330187 - DNA, 33 bp, Homo sapien
aatgtttgtttgatacagtaacactttgttaat

SEQ ID NO: 330188 - DNA, 33 bp, Homo sapien
aatgtttgtttgatacggtaacactttgttaat

SEQ ID NO: 330189 - DNA, 33 bp, Homo sapien
tgcagctcgcctcaaactccttcctgcatgaga

SEQ ID NO: 330190 - DNA, 33 bp, Homo sapien
tgcagctcgcctcaaattccttcctgcatgaga

SEQ ID NO: 330191 - DNA, 33 bp, Homo sapien
ttcagtcaatgaaaacagactaagtgttccagt

SEQ ID NO: 330192 - DNA, 33 bp, Homo sapien
ttcagtcaatgaaaacggactaagtgttccagt

SEQ ID NO: 330193 - DNA, 33 bp, Homo sapien
gtgaataatgatcacaatgggctctttgaaaaa

SEQ ID NO: 330194 - DNA, 33 bp, Homo sapien
gtgaataatgatcacagtgggctctttgaaaaa

SEQ ID NO: 330195 - DNA, 33 bp, Homo sapien
aagaggaaatggagaacccggaaatggtggacc

SEQ ID NO: 330196 - DNA, 33 bp, Homo sapien
aagaggaaatggagaatccggaaatggtggacc

SEQ ID NO: 330197 - DNA, 33 bp, Homo sapien
aggcaagtccccaagccgagtctgcagaggaag

SEQ ID NO: 330198 - DNA, 33 bp, Homo sapien
aggcaagtccccaagctgagtctgcagaggaag

SEQ ID NO: 330199 - DNA, 33 bp, Homo sapien
cagtgccagcccgtcactcaggacagtacagag

SEQ ID NO: 330200 - DNA, 33 bp, Homo sapien
cagtgccagcccgtcattcaggacagtacagag

SEQ ID NO: 330201 - DNA, 33 bp, Homo sapien
ttttctgtagttttgacgctgacgtcttgccca

SEQ ID NO: 330202 - DNA, 33 bp, Homo sapien
ttttctgtagttttgatgctgacgtcttgccca

SEQ ID NO: 330203 - DNA, 33 bp, Homo sapien
tctgcagccaggctcacgtctctttagcaactt

SEQ ID NO: 330204 - DNA, 33 bp, Homo sapien
tctgcagccaggctcaggtctctttagcaactt

SEQ ID NO: 330205 - DNA, 33 bp, Homo sapien
tgagaaagtgcaggaacccctgagttaggacaa

SEQ ID NO: 330206 - DNA, 33 bp, Homo sapien
tgagaaagtgcaggaatccctgagttaggacaa

SEQ ID NO: 330207 - DNA, 33 bp, Homo sapien
tgcgggttaaactggacgttgctccgtgtgggg

SEQ ID NO: 330208 - DNA, 33 bp, Homo sapien
tgcgggttaaactggatgttgctccgtgtgggg

SEQ ID NO: 330209 - DNA, 33 bp, Homo sapien
aaggctttgaccggaacatcctatcttcagata

SEQ ID NO: 330210 - DNA, 33 bp, Homo sapien
aaggctttgaccggaatatcctatcttcagata

SEQ ID NO: 330211 - DNA, 33 bp, Homo sapien
ccctcggatatcacaccgtcataccacatcata

SEQ ID NO: 330212 - DNA, 33 bp, Homo sapien
ccctcggatatcacactgtcataccacatcata

SEQ ID NO: 330213 - DNA, 33 bp, Homo sapien
agacctacacctgcaacgtagatcacaagccca

SEQ ID NO: 330214 - DNA, 33 bp, Homo sapien
agacctacacctgcaatgtagatcacaagccca

SEQ ID NO: 330215 - DNA, 33 bp, Homo sapien
ggggctggactgagaccggcagcgattatgacc

SEQ ID NO: 330216 - DNA, 33 bp, Homo sapien
ggggctggactgagactggcagcgattatgacc

SEQ ID NO: 330217 - DNA, 33 bp, Homo sapien
tggaacaggaagcgtcaagcgtggaacaggaag

SEQ ID NO: 330218 - DNA, 33 bp, Homo sapien
tggaacaggaagcgtccagcgtggaacaggaag

SEQ ID NO: 330219 - DNA, 33 bp, Homo sapien
acacattttaacccacaacagtttgccctccgc

SEQ ID NO: 330220 - DNA, 33 bp, Homo sapien
acacattttaacccacgacagtttgccctccgc

SEQ ID NO: 330221 - DNA, 33 bp, Homo sapien
gtccacaatctcagagaaatatcacctgcatca

SEQ ID NO: 330222 - DNA, 33 bp, Homo sapien
gtccacaatctcagaggaatatcacctgcatca

SEQ ID NO: 330223 - DNA, 33 bp, Homo sapien
ctgatattagctgctccagcattactggaatca

SEQ ID NO: 330224 - DNA, 33 bp, Homo sapien
ctgatattagctgctctagcattactggaatca

SEQ ID NO: 330225 - DNA, 33 bp, Homo sapien
acagaaacagatccataatataaagaagacccc

SEQ ID NO: 330226 - DNA, 33 bp, Homo sapien
acagaaacagatccatgatataaagaagacccc

SEQ ID NO: 330227 - DNA, 33 bp, Homo sapien
atagtcagaagaaaaacggatcaatggagatca

SEQ ID NO: 330228 - DNA, 33 bp, Homo sapien
atagtcagaagaaaaagggatcaatggagatca

SEQ ID NO: 330229 - DNA, 33 bp, Homo sapien
ctgggctggtcttctccccaccaagtcctcctg

SEQ ID NO: 330230 - DNA, 33 bp, Homo sapien
ctgggctggtcttctcgccaccaagtcctcctg

SEQ ID NO: 330231 - DNA, 33 bp, Homo sapien
ttcagacgaatatttcacggaataatccttact

SEQ ID NO: 330232 - DNA, 33 bp, Homo sapien
ttcagacgaatatttcgcggaataatccttact

SEQ ID NO: 330233 - DNA, 33 bp, Homo sapien
cctcacccgggcgaaccgcacagcacccagacc

SEQ ID NO: 330234 - DNA, 33 bp, Homo sapien
cctcacccgggcgaactgcacagcacccagacc

SEQ ID NO: 330235 - DNA, 33 bp, Homo sapien
acattctgatgctgaaaaggagtgtagaatcag

SEQ ID NO: 330236 - DNA, 33 bp, Homo sapien
acattctgatgctgaagaggagtgtagaatcag

SEQ ID NO: 330237 - DNA, 33 bp, Homo sapien
aattcccttatagcaacttaatggacaaagaca

SEQ ID NO: 330238 - DNA, 33 bp, Homo sapien
aattcccttatagcaatttaatggacaaagaca

SEQ ID NO: 330239 - DNA, 33 bp, Homo sapien
tgtctcacatatttgaagaccacaggcataatt

SEQ ID NO: 330240 - DNA, 33 bp, Homo sapien
tgtctcacatatttgaggaccacaggcataatt

SEQ ID NO: 330241 - DNA, 33 bp, Homo sapien
gctggtgccagagggaataaaaaagccgttgtc

SEQ ID NO: 330242 - DNA, 33 bp, Homo sapien
gctggtgccagagggagtaaaaaagccgttgtc

SEQ ID NO: 330243 - DNA, 33 bp, Homo sapien
tgctgatgacttactacgcttaagactgatgaa

SEQ ID NO: 330244 - DNA, 33 bp, Homo sapien
tgctgatgacttactatgcttaagactgatgaa

SEQ ID NO: 330245 - DNA, 33 bp, Homo sapien; identical to SEQ ID NO: 330243

SEQ ID NO: 330246 - DNA, 33 bp, Homo sapien; identical to SEQ ID NO: 330244

SEQ ID NO: 330247 - DNA, 33 bp, Homo sapien
ggagtagctgacaaggcagaacgtgagctgcca

SEQ ID NO: 330248 - DNA, 33 bp, Homo sapien
ggagtagctgacaaggtagaacgtgagctgcca

SEQ ID NO: 330249 - DNA, 33 bp, Homo sapien
tccagaaaatgacatcacctgaggtataaccag

SEQ ID NO: 330250 - DNA, 33 bp, Homo sapien
tccagaaaatgacatcgcctgaggtataaccag

SEQ ID NO: 330251 - DNA, 33 bp, Homo sapien
atgttgaaaaaaatggcattgctacgtagaatt

SEQ ID NO: 330252 - DNA, 33 bp, Homo sapien
atgttgaaaaaaatggtattgctacgtagaatt

SEQ ID NO: 330253 - DNA, 33 bp, Homo sapien
tggatttttgagttaacgctgaaacaagttgac

SEQ ID NO: 330254 - DNA, 33 bp, Homo sapien
tggatttttgagttaatgctgaaacaagttgac

SEQ ID NO: 330255 - DNA, 33 bp, Homo sapien
ggtaatttggtaacaacgcagccccagatcaag

SEQ ID NO: 330256 - DNA, 33 bp, Homo sapien
ggtaatttggtaacaaggcagccccagatcaag

SEQ ID NO: 330257 - DNA, 33 bp, Homo sapien
cctgttgaccacgaaacgattatttctgccccc

SEQ ID NO: 330258 - DNA, 33 bp, Homo sapien
cctgttgaccacgaaaggattatttctgccccc

SEQ ID NO: 330259 - DNA, 33 bp, Homo sapien
ttgttattctcaaatacgctagctcccatttta

SEQ ID NO: 330260 - DNA, 33 bp, Homo sapien
ttgttattctcaaatatgctagctcccatttta

SEQ ID NO: 330261 - DNA, 33 bp, Homo sapien
aaaggacctctgttcacgagtgttcataaatgg

SEQ ID NO: 330262 - DNA, 33 bp, Homo sapien
aaaggacctctgttcatgagtgttcataaatgg

SEQ ID NO: 330263 - DNA, 33 bp, Homo sapien
ttattaacagtgtttcaataaacataggatgca

SEQ ID NO: 330264 - DNA, 33 bp, Homo sapien
ttattaacagtgtttcgataaacataggatgca

SEQ ID NO: 330265 - DNA, 33 bp, Homo sapien
gcactgttagtagctaaggaaattgatccattg

SEQ ID NO: 330266 - DNA, 33 bp, Homo sapien
gcactgttagtagctatggaaattgatccattg

SEQ ID NO: 330267 - DNA, 33 bp, Homo sapien
gaaaactcagtaaggccagtcatcgtatttgat

SEQ ID NO: 330268 - DNA, 33 bp, Homo sapien
gaaaactcagtaaggctagtcatcgtatttgat

SEQ ID NO: 330269 - DNA, 33 bp, Homo sapien
caataatgtggagagtcacaaaaatctttccgt

SEQ ID NO: 330270 - DNA, 33 bp, Homo sapien
caataatgtggagagttacaaaaatctttccgt

SEQ ID NO: 330271 - DNA, 33 bp, Homo sapien
tagattgttggttaccagaagcctgggtggata

SEQ ID NO: 330272 - DNA, 33 bp, Homo sapien
tagattgttggttacccgaagcctgggtggata

SEQ ID NO: 330273 - DNA, 33 bp, Homo sapien; identical to SEQ ID NO: 330271

SEQ ID NO: 330274 - DNA, 33 bp, Homo sapien; identical to SEQ ID NO: 330272

SEQ ID NO: 330275 - DNA, 33 bp, Homo sapien
gtatgctcttttgtgaatacctaacaattgtaa

SEQ ID NO: 330276 - DNA, 33 bp, Homo sapien
gtatgctcttttgtgattacctaacaattgtaa

SEQ ID NO: 330277 - DNA, 33 bp, Homo sapien
cctgtgatagcccaaagggtgtcataatcccga

SEQ ID NO: 330278 - DNA, 33 bp, Homo sapien
cctgtgatagcccaaatggtgtcataatcccga

SEQ ID NO: 330279 - DNA, 33 bp, Homo sapien
caaaagcaagcccagcaaaaaactacatgcaat

SEQ ID NO: 330280 - DNA, 33 bp, Homo sapien
caaaagcaagcccagcgaaaaactacatgcaat

SEQ ID NO: 330281 - DNA, 33 bp, Homo sapien
aaatgtgatttttgctaaacgggtagatcgtag

SEQ ID NO: 330282 - DNA, 33 bp, Homo sapien
aaatgtgatttttgctgaacgggtagatcgtag

SEQ ID NO: 330283 - DNA, 33 bp, Homo sapien
atatctataacataggccatcttaaactgcagg

SEQ ID NO: 330284 - DNA, 33 bp, Homo sapien
atatctataacatagggcatcttaaactgcagg

SEQ ID NO: 330285 - DNA, 33 bp, Homo sapien
gccccaccatggacacactttgctacacactcc

SEQ ID NO: 330286 - DNA, 33 bp, Homo sapien
gccccaccatggacacgctttgctacacactcc

SEQ ID NO: 330287 - DNA, 33 bp, Homo sapien; identical to SEQ ID NO: 330285

SEQ ID NO: 330288 - DNA, 33 bp, Homo sapien; identical to SEQ ID NO: 330286

SEQ ID NO: 330289 - DNA, 33 bp, Homo sapien
acatgctggcaagataagttttattttgaggct

SEQ ID NO: 330290 - DNA, 33 bp, Homo sapien
acatgctggcaagataggttttattttgaggct

SEQ ID NO: 330291 - DNA, 33 bp, Homo sapien
gagtaatactagcaataatctctcgggacaatt

SEQ ID NO: 330292 - DNA, 33 bp, Homo sapien
gagtaatactagcaatgatctctcgggacaatt

SEQ ID NO: 330293 - DNA, 33 bp, Homo sapien
aatgccaagagatctcaactaaaattttctgtg

SEQ ID NO: 330294 - DNA, 33 bp, Homo sapien
aatgccaagagatctcgactaaaattttctgtg

SEQ ID NO: 330295 - DNA, 33 bp, Homo sapien
gacgtgaaatctgtgacgttctacatgacgctg

SEQ ID NO: 330296 - DNA, 33 bp, Homo sapien
gacgtgaaatctgtgaggttctacatgacgctg

SEQ ID NO: 330297 - DNA, 33 bp, Homo sapien
agtaggtctcatttatgagttgttgtgtaggta

SEQ ID NO: 330298 - DNA, 33 bp, Homo sapien
agtaggtctcatttattagttgttgtgtaggta

SEQ ID NO: 330299 - DNA, 33 bp, Homo sapien
ctatagtaaacacttaacatacatcatcttaac

SEQ ID NO: 330300 - DNA, 33 bp, Homo sapien
ctatagtaaacacttagcatacatcatcttaac

SEQ ID NO: 330301 - DNA, 33 bp, Homo sapien
tttaagataataaaaccgagagcccaagacaag

SEQ ID NO: 330302 - DNA, 33 bp, Homo sapien
tttaagataataaaactgagagcccaagacaag

SEQ ID NO: 330303 - DNA, 33 bp, Homo sapien
ggggaggattaattaccgagaaatgtaccaaga

SEQ ID NO: 330304 - DNA, 33 bp, Homo sapien
ggggaggattaattactgagaaatgtaccaaga

SEQ ID NO: 330305 - DNA, 33 bp, Homo sapien
tcacacatagcattcaggatacacacatcagat

SEQ ID NO: 330306 - DNA, 33 bp, Homo sapien
tcacacatagcattcatgatacacacatcagat

SEQ ID NO: 330307 - DNA, 33 bp, Homo sapien
atgttatgtatgtaaaagttatgtaaagcttat

SEQ ID NO: 330308 - DNA, 33 bp, Homo sapien
atgttatgtatgtaaaggttatgtaaagcttat

SEQ ID NO: 330309 - DNA, 33 bp, Homo sapien
ctatggtgattggtgcacagcattttcacccaa

SEQ ID NO: 330310 - DNA, 33 bp, Homo sapien
ctatggtgattggtgcgcagcattttcacccaa

SEQ ID NO: 330311 - DNA, 33 bp, Homo sapien
taacaatcaagataccaatgaattacacttaaa

SEQ ID NO: 330312 - DNA, 33 bp, Homo sapien
taacaatcaagataccgatgaattacacttaaa

SEQ ID NO: 330313 - DNA, 33 bp, Homo sapien
tccttaatagttgtgtaaattccagttactgag

SEQ ID NO: 330314 - DNA, 33 bp, Homo sapien
tccttaatagttgtgttaattccagttactgag

SEQ ID NO: 330315 - DNA, 33 bp, Homo sapien
atattacaacctgctacacatgagacccttctt

SEQ ID NO: 330316 - DNA, 33 bp, Homo sapien
atattacaacctgctatacatgagacccttctt

SEQ ID NO: 330317 - DNA, 33 bp, Homo sapien
ctgctgagttaacccactgctatacacaagtcc

SEQ ID NO: 330318 - DNA, 33 bp, Homo sapien
ctgctgagttaacccagtgctatacacaagtcc

SEQ ID NO: 330319 - DNA, 33 bp, Homo sapien
aaggggttaagaaccaagaagcagagcaaggga

SEQ ID NO: 330320 - DNA, 33 bp, Homo sapien
aaggggttaagaaccaggaagcagagcaaggga

SEQ ID NO: 330321 - DNA, 33 bp, Homo sapien
tcctttcagagtcttcacaatttctccatctaa

SEQ ID NO: 330322 - DNA, 33 bp, Homo sapien
tcctttcagagtcttcgcaatttctccatctaa

SEQ ID NO: 330323 - DNA, 33 bp, Homo sapien
cacacaatatgttcaccatttgacaaacattga

SEQ ID NO: 330324 - DNA, 33 bp, Homo sapien
cacacaatatgttcactatttgacaaacattga

SEQ ID NO: 330325 - DNA, 33 bp, Homo sapien
atttgttttctctgtgaatggtcattaggtcaa

SEQ ID NO: 330326 - DNA, 33 bp, Homo sapien
atttgttttctctgtgtatggtcattaggtcaa

SEQ ID NO: 330327 - DNA, 33 bp, Homo sapien
cacagagaaaacaaatcaattcgcctctcaatt

SEQ ID NO: 330328 - DNA, 33 bp, Homo sapien
cacagagaaaacaaatgaattcgcctctcaatt

SEQ ID NO: 330329 - DNA, 33 bp, Homo sapien
tttctctttgtctctcacaatttctccctccta

SEQ ID NO: 330330 - DNA, 33 bp, Homo sapien
tttctctttgtctctcgcaatttctccctccta

SEQ ID NO: 330331 - DNA, 33 bp, Homo sapien
tcatgaattaaagatcgctgacatttcctcttc

SEQ ID NO: 330332 - DNA, 33 bp, Homo sapien
tcatgaattaaagatctctgacatttcctcttc

SEQ ID NO: 330333 - DNA, 33 bp, Homo sapien
tatttccaaataaggacgtgttctgaagtgctg

SEQ ID NO: 330334 - DNA, 33 bp, Homo sapien
tatttccaaataaggatgtgttctgaagtgctg

SEQ ID NO: 330335 - DNA, 33 bp, Homo sapien
ctgacgatagcaataccaatagctaccatgtaa

SEQ ID NO: 330336 - DNA, 33 bp, Homo sapien
ctgacgatagcaatacgaatagctaccatgtaa

SEQ ID NO: 330337 - DNA, 33 bp, Homo sapien
cacacactccaaatgagattcccttgcagactt

SEQ ID NO: 330338 - DNA, 33 bp, Homo sapien
cacacactccaaatgatattcccttgcagactt

SEQ ID NO: 330339 - DNA, 33 bp, Homo sapien
ggctctgtccatgcaaataagtcccgggttcaa

SEQ ID NO: 330340 - DNA, 33 bp, Homo sapien
ggctctgtccatgcaagtaagtcccgggttcaa

SEQ ID NO: 330341 - DNA, 33 bp, Homo sapien
tttatgtcttctattacggaaaaacatccctta

SEQ ID NO: 330342 - DNA, 33 bp, Homo sapien
tttatgtcttctattatggaaaaacatccctta

SEQ ID NO: 330343 - DNA, 33 bp, Homo sapien
gaaaaaaaaaattgtacagtgggctgcattgat

SEQ ID NO: 330344 - DNA, 33 bp, Homo sapien
gaaaaaaaaaattgtagagtgggctgcattgat

SEQ ID NO: 330345 - DNA, 33 bp, Homo sapien
taagtcaggagtcacaaaatctataggaacata

SEQ ID NO: 330346 - DNA, 33 bp, Homo sapien
taagtcaggagtcacagaatctataggaacata

SEQ ID NO: 330347 - DNA, 33 bp, Homo sapien
cagatgtcaaatataaatgagcttcttcatata

SEQ ID NO: 330348 - DNA, 33 bp, Homo sapien
cagatgtcaaatataactgagcttcttcatata

SEQ ID NO: 330349 - DNA, 33 bp, Homo sapien
actcaagtgctgctctcacacaggattgtgaag

SEQ ID NO: 330350 - DNA, 33 bp, Homo sapien
actcaagtgctgctctgacacaggattgtgaag

SEQ ID NO: 330351 - DNA, 33 bp, Homo sapien
tttaatttgtgcatcccggaagtatcatatgta

SEQ ID NO: 330352 - DNA, 33 bp, Homo sapien
tttaatttgtgcatcctggaagtatcatatgta

SEQ ID NO: 330353 - DNA, 33 bp, Homo sapien
aaattctccagatagaagatccaggggaagaac

SEQ ID NO: 330354 - DNA, 33 bp, Homo sapien
aaattctccagatagacgatccaggggaagaac

SEQ ID NO: 330355 - DNA, 33 bp, Homo sapien
acttttaatttaaggaagcaatttatgatgtat

SEQ ID NO: 330356 - DNA, 33 bp, Homo sapien
acttttaatttaaggacgcaatttatgatgtat

SEQ ID NO: 330357 - DNA, 33 bp, Homo sapien
gaatccataggtttacacagtgaaaatgaggtg

SEQ ID NO: 330358 - DNA, 33 bp, Homo sapien
gaatccataggtttacgcagtgaaaatgaggtg

SEQ ID NO: 330359 - DNA, 33 bp, Homo sapien
gataatcctctcaaaacgacttatgtaacccac

SEQ ID NO: 330360 - DNA, 33 bp, Homo sapien
gataatcctctcaaaatgacttatgtaacccac

SEQ ID NO: 330361 - DNA, 33 bp, Homo sapien
tgagcttgcgtggacaaaatgggatgtggatgt

SEQ ID NO: 330362 - DNA, 33 bp, Homo sapien
tgagcttgcgtggacagaatgggatgtggatgt

SEQ ID NO: 330363 - DNA, 33 bp, Homo sapien
tgttgtgtggagactacctgggaacgaatgtgg

SEQ ID NO: 330364 - DNA, 33 bp, Homo sapien
tgttgtgtggagactatctgggaacgaatgtgg

SEQ ID NO: 330365 - DNA, 33 bp, Homo sapien
atttagcaaaaactacaatgcgtctttacatac

SEQ ID NO: 330366 - DNA, 33 bp, Homo sapien
atttagcaaaaactacgatgcgtctttacatac

SEQ ID NO: 330367 - DNA, 33 bp, Homo sapien
acatggctcaaagctcacaaaaattaaaacaca

SEQ ID NO: 330368 - DNA, 33 bp, Homo sapien
acatggctcaaagctcgcaaaaattaaaacaca

SEQ ID NO: 330369 - DNA, 33 bp, Homo sapien
aaggctgaacatgaataaggtaaacgacaaata

SEQ ID NO: 330370 - DNA, 33 bp, Homo sapien
aaggctgaacatgaattaggtaaacgacaaata

SEQ ID NO: 330371 - DNA, 33 bp, Homo sapien
tgtacttatttgttgacaaacattgatactata

SEQ ID NO: 330372 - DNA, 33 bp, Homo sapien
tgtacttatttgttgataaacattgatactata

SEQ ID NO: 330373 - DNA, 33 bp, Homo sapien
agtaattgtggactccagctctgacaatttgta

SEQ ID NO: 330374 - DNA, 33 bp, Homo sapien
agtaattgtggactccggctctgacaatttgta

SEQ ID NO: 330375 - DNA, 33 bp, Homo sapien
gaacctgtaaaaatcacgggaatacaagtgctg

SEQ ID NO: 330376 - DNA, 33 bp, Homo sapien
gaacctgtaaaaatcatgggaatacaagtgctg

SEQ ID NO: 330377 - DNA, 33 bp, Homo sapien
aggttccatgacgcacagcatctagagggcagt

SEQ ID NO: 330378 - DNA, 33 bp, Homo sapien
aggttccatgacgcacggcatctagagggcagt

SEQ ID NO: 330379 - DNA, 33 bp, Homo sapien
ctgcatctgctcaaaccataaactcagaactac

SEQ ID NO: 330380 - DNA, 33 bp, Homo sapien
ctgcatctgctcaaacgataaactcagaactac

SEQ ID NO: 330381 - DNA, 33 bp, Homo sapien
aggcactctcctatggaaatccaaaacttaaca

SEQ ID NO: 330382 - DNA, 33 bp, Homo sapien
aggcactctcctatgggaatccaaaacttaaca

SEQ ID NO: 330383 - DNA, 33 bp, Homo sapien
gaagaggataaagagaagatgattactgaagac

SEQ ID NO: 330384 - DNA, 33 bp, Homo sapien
gaagaggataaagagaggatgattactgaagac

SEQ ID NO: 330385 - DNA, 33 bp, Homo sapien
caacctaaatgtttgacagatgagtaaggtgac

SEQ ID NO: 330386 - DNA, 33 bp, Homo sapien
caacctaaatgtttgatagatgagtaaggtgac

SEQ ID NO: 330387 - DNA, 33 bp, Homo sapien
ccaagataccagcgatcacttatcccaaacatg

SEQ ID NO: 330388 - DNA, 33 bp, Homo sapien
ccaagataccagcgattacttatcccaaacatg

SEQ ID NO: 330389 - DNA, 33 bp, Homo sapien
tcttattttttacaaccgcatcaacaataacag

SEQ ID NO: 330390 - DNA, 33 bp, Homo sapien
tcttattttttacaactgcatcaacaataacag

SEQ ID NO: 330391 - DNA, 33 bp, Homo sapien
agctctagtgttctcaatcagtgtcatcacctt

SEQ ID NO: 330392 - DNA, 33 bp, Homo sapien
agctctagtgttctcagtcagtgtcatcacctt

SEQ ID NO: 330393 - DNA, 33 bp, Homo sapien
ctgcaatcatgcttgaactccaaataaagacaa

SEQ ID NO: 330394 - DNA, 33 bp, Homo sapien
ctgcaatcatgcttgatctccaaataaagacaa

SEQ ID NO: 330395 - DNA, 33 bp, Homo sapien
tgaatttggtttctcaccacccttgagagtttt

SEQ ID NO: 330396 - DNA, 33 bp, Homo sapien
tgaatttggtttctcatcacccttgagagtttt

SEQ ID NO: 330397 - DNA, 33 bp, Homo sapien
actggttttcccactccatagaaatgactgaat

SEQ ID NO: 330398 - DNA, 33 bp, Homo sapien
actggttttcccactcgatagaaatgactgaat

SEQ ID NO: 330399 - DNA, 33 bp, Homo sapien
tcagagaaagagctgaaattgatccaactttgt

SEQ ID NO: 330400 - DNA, 33 bp, Homo sapien
tcagagaaagagctgagattgatccaactttgt

SEQ ID NO: 330401 - DNA, 33 bp, Homo sapien
tggtccttcccacacaataagcctcaccttcct

SEQ ID NO: 330402 - DNA, 33 bp, Homo sapien
tggtccttcccacacagtaagcctcaccttcct

SEQ ID NO: 330403 - DNA, 33 bp, Homo sapien
ctgaaccaaaccaaagaatgtgatccccatgtg

SEQ ID NO: 330404 - DNA, 33 bp, Homo sapien
ctgaaccaaaccaaagtatgtgatccccatgtg

SEQ ID NO: 330405 - DNA, 33 bp, Homo sapien
cttctctcagatgacacagaggatcaagaaaac

SEQ ID NO: 330406 - DNA, 33 bp, Homo sapien
cttctctcagatgacatagaggatcaagaaaac

SEQ ID NO: 330407 - DNA, 33 bp, Homo sapien
ctgacaacaaagacataaaaaatcagggaacac

SEQ ID NO: 330408 - DNA, 33 bp, Homo sapien
ctgacaacaaagacatgaaaaatcagggaacac

SEQ ID NO: 330409 - DNA, 33 bp, Homo sapien
aataaacaggagcagacgataatcttttctggg

SEQ ID NO: 330410 - DNA, 33 bp, Homo sapien
aataaacaggagcagatgataatcttttctggg

SEQ ID NO: 330411 - DNA, 33 bp, Homo sapien
taattattatggcttcactttatgcaaatgatc

SEQ ID NO: 330412 - DNA, 33 bp, Homo sapien
taattattatggcttcgctttatgcaaatgatc

SEQ ID NO: 330413 - DNA, 33 bp, Homo sapien
cccacattcgaatgcaacagggacaacttgagc

SEQ ID NO: 330414 - DNA, 33 bp, Homo sapien
cccacattcgaatgcaccagggacaacttgagc

SEQ ID NO: 330415 - DNA, 33 bp, Homo sapien
aaaccatatgattccaacactggcgcctcttaa

SEQ ID NO: 330416 - DNA, 33 bp, Homo sapien
aaaccatatgattccaccactggcgcctcttaa

SEQ ID NO: 330417 - DNA, 33 bp, Homo sapien
ttaccctattggctaaacttactcatttgtata

SEQ ID NO: 330418 - DNA, 33 bp, Homo sapien
ttaccctattggctaaccttactcatttgtata

SEQ ID NO: 330419 - DNA, 33 bp, Homo sapien
attactgaaaaatataccaggagccttctccaa

SEQ ID NO: 330420 - DNA, 33 bp, Homo sapien
attactgaaaaatatatcaggagccttctccaa

SEQ ID NO: 330421 - DNA, 33 bp, Homo sapien
cctcccacagctctcacaatctctgttggtgtc

SEQ ID NO: 330422 - DNA, 33 bp, Homo sapien
cctcccacagctctcataatctctgttggtgtc

SEQ ID NO: 330423 - DNA, 33 bp, Homo sapien; identical to SEQ ID NO: 330421

SEQ ID NO: 330424 - DNA, 33 bp, Homo sapien; identical to SEQ ID NO: 330422

SEQ ID NO: 330425 - DNA, 33 bp, Homo sapien
tcgggaaaacttggaaagtcacactcagactca

SEQ ID NO: 330426 - DNA, 33 bp, Homo sapien
tcgggaaaacttggaaggtcacactcagactca

SEQ ID NO: 330427 - DNA, 33 bp, Homo sapien
gagattctctgtagaacggaatgaggtgaatag

SEQ ID NO: 330428 - DNA, 33 bp, Homo sapien
gagattctctgtagaatggaatgaggtgaatag

SEQ ID NO: 330429 - DNA, 33 bp, Homo sapien
tttataagtcaaagcaaataataatgagaagca

SEQ ID NO: 330430 - DNA, 33 bp, Homo sapien
tttataagtcaaagcacataataatgagaagca

SEQ ID NO: 330431 - DNA, 33 bp, Homo sapien
ataaacagatcgatgtcaacacaaggaatatga

SEQ ID NO: 330432 - DNA, 33 bp, Homo sapien
ataaacagatcgatgttaacacaaggaatatga

SEQ ID NO: 330433 - DNA, 33 bp, Homo sapien
gacacatacttttaaaccatcagcggttgttag

SEQ ID NO: 330434 - DNA, 33 bp, Homo sapien
gacacatacttttaaatcatcagcggttgttag

SEQ ID NO: 330435 - DNA, 33 bp, Homo sapien
atgagtaaaatgagccaaagtgataaaagtgca

SEQ ID NO: 330436 - DNA, 33 bp, Homo sapien
atgagtaaaatgagcccaagtgataaaagtgca

SEQ ID NO: 330437 - DNA, 33 bp, Homo sapien
gaagctgagccttgaacctgttctttctgaatc

SEQ ID NO: 330438 - DNA, 33 bp, Homo sapien
gaagctgagccttgaagctgttctttctgaatc

SEQ ID NO: 330439 - DNA, 33 bp, Homo sapien; identical to SEQ ID NO: 330437

SEQ ID NO: 330440 - DNA, 33 bp, Homo sapien; identical to SEQ ID NO: 330438

SEQ ID NO: 330441 - DNA, 33 bp, Homo sapien
aatatgtagaaatgacactagtaatcacagaat

SEQ ID NO: 330442 - DNA, 33 bp, Homo sapien
aatatgtagaaatgaccctagtaatcacagaat

SEQ ID NO: 330443 - DNA, 33 bp, Homo sapien; identical to SEQ ID NO: 330441

SEQ ID NO: 330444 - DNA, 33 bp, Homo sapien; identical to SEQ ID NO: 330442

SEQ ID NO: 330445 - DNA, 33 bp, Homo sapien
tagcacatattatgcaaactctgtgaagggcag

SEQ ID NO: 330446 - DNA, 33 bp, Homo sapien
tagcacatattatgcagactctgtgaagggcag

SEQ ID NO: 330447 - DNA, 33 bp, Homo sapien; identical to SEQ ID NO: 330445

SEQ ID NO: 330448 - DNA, 33 bp, Homo sapien; identical to SEQ ID NO: 330446

SEQ ID NO: 330449 - DNA, 33 bp, Homo sapien
actttttcagatgcacagcttataattatattc

SEQ ID NO: 330450 - DNA, 33 bp, Homo sapien
actttttcagatgcacggcttataattatattc

SEQ ID NO: 330451 - DNA, 33 bp, Homo sapien
gcttatcgctgtgaaccaaccaatgatctctgg

SEQ ID NO: 330452 - DNA, 33 bp, Homo sapien
gcttatcgctgtgaacgaaccaatgatctctgg

SEQ ID NO: 330453 - DNA, 33 bp, Homo sapien
agaatgtccaacccaccaaggtcattgtgcaca

SEQ ID NO: 330454 - DNA, 33 bp, Homo sapien
agaatgtccaacccacgaaggtcattgtgcaca

SEQ ID NO: 330455 - DNA, 33 bp, Homo sapien
aaaccaggccatacaacataatgaaagagccat

SEQ ID NO: 330456 - DNA, 33 bp, Homo sapien
aaaccaggccatacaatataatgaaagagccat

SEQ ID NO: 330457 - DNA, 33 bp, Homo sapien
caatgtgttgtactgacgaggaggccaatattt

SEQ ID NO: 330458 - DNA, 33 bp, Homo sapien
caatgtgttgtactgatgaggaggccaatattt

SEQ ID NO: 330459 - DNA, 33 bp, Homo sapien
ttctccaaacccctagactaatgcagatgccat

SEQ ID NO: 330460 - DNA, 33 bp, Homo sapien
ttctccaaacccctaggctaatgcagatgccat

SEQ ID NO: 330461 - DNA, 33 bp, Homo sapien
tgacatcagcaatgcaatacattctctggtggc

SEQ ID NO: 330462 - DNA, 33 bp, Homo sapien
tgacatcagcaatgcagtacattctctggtggc

SEQ ID NO: 330463 - DNA, 33 bp, Homo sapien
gcagcttcttattgcccgattgaggtcactcgc

SEQ ID NO: 330464 - DNA, 33 bp, Homo sapien
gcagcttcttattgcctgattgaggtcactcgc

SEQ ID NO: 330465 - DNA, 33 bp, Homo sapien
tgcagcatctccggtccatttttgtttaatctt

SEQ ID NO: 330466 - DNA, 33 bp, Homo sapien
tgcagcatctccggtctatttttgtttaatctt

SEQ ID NO: 330467 - DNA, 33 bp, Homo sapien
tttttctacaaaatggccatcatccctagtgtt

SEQ ID NO: 330468 - DNA, 33 bp, Homo sapien
tttttctacaaaatggtcatcatccctagtgtt

SEQ ID NO: 330469 - DNA, 33 bp, Homo sapien
tctttacttatttgaacactgcttgtcaatcac

SEQ ID NO: 330470 - DNA, 33 bp, Homo sapien
tctttacttatttgaatactgcttgtcaatcac

SEQ ID NO: 330471 - DNA, 33 bp, Homo sapien
aaaaatactatcataaaaatacaagtcacaatt

SEQ ID NO: 330472 - DNA, 33 bp, Homo sapien
aaaaatactatcataacaatacaagtcacaatt

SEQ ID NO: 330473 - DNA, 33 bp, Homo sapien
tagtcaagtaaacagacagaggatgttccagga

SEQ ID NO: 330474 - DNA, 33 bp, Homo sapien
tagtcaagtaaacagatagaggatgttccagga

SEQ ID NO: 330475 - DNA, 33 bp, Homo sapien
taacctttgatctaccacgggtgcttaattgct

SEQ ID NO: 330476 - DNA, 33 bp, Homo sapien
taacctttgatctaccgcgggtgcttaattgct

SEQ ID NO: 330477 - DNA, 33 bp, Homo sapien
tactgggcaagatacacggtgcgagaacccaca

SEQ ID NO: 330478 - DNA, 33 bp, Homo sapien
tactgggcaagatacatggtgcgagaacccaca

SEQ ID NO: 330479 - DNA, 33 bp, Homo sapien
tgtgattgttgggtgaagctctcagggcacaga

SEQ ID NO: 330480 - DNA, 33 bp, Homo sapien
tgtgattgttgggtgacgctctcagggcacaga

SEQ ID NO: 330481 - DNA, 33 bp, Homo sapien
gtccccagaatgatccaagtggtctctgtgcta

SEQ ID NO: 330482 - DNA, 33 bp, Homo sapien
gtccccagaatgatcccagtggtctctgtgcta

SEQ ID NO: 330483 - DNA, 33 bp, Homo sapien; identical to SEQ ID NO: 330481

SEQ ID NO: 330484 - DNA, 33 bp, Homo sapien; identical to SEQ ID NO: 330482

SEQ ID NO: 330485 - DNA, 33 bp, Homo sapien
ctcggtccatgacacacagcaggtgccttggcc

SEQ ID NO: 330486 - DNA, 33 bp, Homo sapien
ctcggtccatgacacagagcaggtgccttggcc

SEQ ID NO: 330487 - DNA, 33 bp, Homo sapien; identical to SEQ ID NO: 330485

SEQ ID NO: 330488 - DNA, 33 bp, Homo sapien; identical to SEQ ID NO: 330486

SEQ ID NO: 330489 - DNA, 33 bp, Homo sapien
ccccagggatctcagaagaacgtgctggcactc

SEQ ID NO: 330490 - DNA, 33 bp, Homo sapien
ccccagggatctcagaggaacgtgctggcactc

SEQ ID NO: 330491 - DNA, 33 bp, Homo sapien
gttggaccagctgaccaagaaagtgttgtaaga

SEQ ID NO: 330492 - DNA, 33 bp, Homo sapien
gttggaccagctgaccgagaaagtgttgtaaga

SEQ ID NO: 330493 - DNA, 33 bp, Homo sapien
tgtgatcacgggaacacgagtctgcgatccagc

SEQ ID NO: 330494 - DNA, 33 bp, Homo sapien
tgtgatcacgggaacatgagtctgcgatccagc

SEQ ID NO: 330495 - DNA, 33 bp, Homo sapien
ttttatgttacttgtacaggtaattgattgtta

SEQ ID NO: 330496 - DNA, 33 bp, Homo sapien
ttttatgttacttgtataggtaattgattgtta

SEQ ID NO: 330497 - DNA, 33 bp, Homo sapien
tcagtgagcaccgaaaccatgaagagcttgtgt

SEQ ID NO: 330498 - DNA, 33 bp, Homo sapien
tcagtgagcaccgaaatcatgaagagcttgtgt

SEQ ID NO: 330499 - DNA, 33 bp, Homo sapien
ctacatatttctctcacgggtgtgaccagcctt

SEQ ID NO: 330500 - DNA, 33 bp, Homo sapien
ctacatatttctctcatgggtgtgaccagcctt

SEQ ID NO: 330501 - DNA, 33 bp, Homo sapien
ctgaagaaacagagctcaatactaaatacactg

SEQ ID NO: 330502 - DNA, 33 bp, Homo sapien
ctgaagaaacagagctgaatactaaatacactg

SEQ ID NO: 330503 - DNA, 33 bp, Homo sapien
gcggggttggaatcacagaagtaatgagaagct

SEQ ID NO: 330504 - DNA, 33 bp, Homo sapien
gcggggttggaatcaccgaagtaatgagaagct

SEQ ID NO: 330505 - DNA, 33 bp, Homo sapien
caatgtcaataagttaccaatgcttctgaagtt

SEQ ID NO: 330506 - DNA, 33 bp, Homo sapien
caatgtcaataagttatcaatgcttctgaagtt

SEQ ID NO: 330507 - DNA, 33 bp, Homo sapien
gcacaaggacaacatcaatttttcatggaacat

SEQ ID NO: 330508 - DNA, 33 bp, Homo sapien
gcacaaggacaacatcgatttttcatggaacat

SEQ ID NO: 330509 - DNA, 33 bp, Homo sapien
catttaggagcaggtgaatcaaggaaccagcca

SEQ ID NO: 330510 - DNA, 33 bp, Homo sapien
catttaggagcaggtgcatcaaggaaccagcca

SEQ ID NO: 330511 - DNA, 33 bp, Homo sapien; identical to SEQ ID NO: 330509

SEQ ID NO: 330512 - DNA, 33 bp, Homo sapien; identical to SEQ ID NO: 330510

SEQ ID NO: 330513 - DNA, 33 bp, Homo sapien
catccacatccctttgaagaaaactagtattat

SEQ ID NO: 330514 - DNA, 33 bp, Homo sapien
catccacatccctttggagaaaactagtattat

SEQ ID NO: 330515 - DNA, 33 bp, Homo sapien; identical to SEQ ID NO: 330513

SEQ ID NO: 330516 - DNA, 33 bp, Homo sapien; identical to SEQ ID NO: 330514

SEQ ID NO: 330517 - DNA, 33 bp, Homo sapien
tattggcctgcattcacaggttagagtcgagta

SEQ ID NO: 330518 - DNA, 33 bp, Homo sapien
tattggcctgcattcataggttagagtcgagta

SEQ ID NO: 330519 - DNA, 33 bp, Homo sapien
gcattattacctggaacctggtagtggtaattt

SEQ ID NO: 330520 - DNA, 33 bp, Homo sapien
gcattattacctggaatctggtagtggtaattt

SEQ ID NO: 330521 - DNA, 33 bp, Homo sapien
cagctcccctctcttacggaatcagagccttag

SEQ ID NO: 330522 - DNA, 33 bp, Homo sapien
cagctcccctctcttatggaatcagagccttag

SEQ ID NO: 330523 - DNA, 33 bp, Homo sapien; identical to SEQ ID NO: 330521

SEQ ID NO: 330524 - DNA, 33 bp, Homo sapien; identical to SEQ ID NO: 330522

SEQ ID NO: 330525 - DNA, 33 bp, Homo sapien
ccctctctcctgagaaatgggaagaccacagga

SEQ ID NO: 330526 - DNA, 33 bp, Homo sapien
ccctctctcctgagaactgggaagaccacagga

SEQ ID NO: 330527 - DNA, 33 bp, Homo sapien
cagatggtggttccacagtgctatacttcctta

SEQ ID NO: 330528 - DNA, 33 bp, Homo sapien
cagatggtggttccacggtgctatacttcctta

SEQ ID NO: 330529 - DNA, 33 bp, Homo sapien
tcacggtgttatgttacagaggagcagaaaggt

SEQ ID NO: 330530 - DNA, 33 bp, Homo sapien
tcacggtgttatgttagagaggagcagaaaggt

SEQ ID NO: 330531 - DNA, 33 bp, Homo sapien
aagatccagtgttgtgaaggatctgtttacctt

SEQ ID NO: 330532 - DNA, 33 bp, Homo sapien
aagatccagtgttgtgtaggatctgtttacctt

SEQ ID NO: 330533 - DNA, 33 bp, Homo sapien
agaagttagtaaaaccacaaatgcaacaatcat

SEQ ID NO: 330534 - DNA, 33 bp, Homo sapien
agaagttagtaaaaccgcaaatgcaacaatcat

SEQ ID NO: 330535 - DNA, 33 bp, Homo sapien
acagaggtggaggtatcaacaaccagatttcaa

SEQ ID NO: 330536 - DNA, 33 bp, Homo sapien
acagaggtggaggtattaacaaccagatttcaa

SEQ ID NO: 330537 - DNA, 33 bp, Homo sapien
cacagtcacgtttcaccctcaccaaacaagctt

SEQ ID NO: 330538 - DNA, 33 bp, Homo sapien
cacagtcacgtttcactctcaccaaacaagctt

SEQ ID NO: 330539 - DNA, 33 bp, Homo sapien
caaaaatgtatcctaaaataagccaacacataa

SEQ ID NO: 330540 - DNA, 33 bp, Homo sapien
caaaaatgtatcctaagataagccaacacataa

SEQ ID NO: 330541 - DNA, 33 bp, Homo sapien
gcactgggtcaagggaaggaagtcttttaaaca

SEQ ID NO: 330542 - DNA, 33 bp, Homo sapien
gcactgggtcaagggagggaagtcttttaaaca

SEQ ID NO: 330543 - DNA, 33 bp, Homo sapien
ttgccttgtttctgtcaatccccatatctgtcc

SEQ ID NO: 330544 - DNA, 33 bp, Homo sapien
ttgccttgtttctgtcgatccccatatctgtcc

SEQ ID NO: 330545 - DNA, 33 bp, Homo sapien
cctgtttttgttagacccagctgatcatgtcag

SEQ ID NO: 330546 - DNA, 33 bp, Homo sapien
cctgtttttgttagactcagctgatcatgtcag

SEQ ID NO: 330547 - DNA, 33 bp, Homo sapien
aagtcagcgatgtttcaagtgttaatagccatc

SEQ ID NO: 330548 - DNA, 33 bp, Homo sapien
aagtcagcgatgtttccagtgttaatagccatc

SEQ ID NO: 330549 - DNA, 33 bp, Homo sapien
tattcagaactacgataaacattggatgcatcc

SEQ ID NO: 330550 - DNA, 33 bp, Homo sapien
tattcagaactacgatcaacattggatgcatcc

SEQ ID NO: 330551 - DNA, 33 bp, Homo sapien
ggagttgactgtaaaaatagcatgaagatgtgt

SEQ ID NO: 330552 - DNA, 33 bp, Homo sapien
ggagttgactgtaaaagtagcatgaagatgtgt

SEQ ID NO: 330553 - DNA, 33 bp, Homo sapien
gtgtctactttctgcaaacagaattaaagaaaa

SEQ ID NO: 330554 - DNA, 33 bp, Homo sapien
gtgtctactttctgcatacagaattaaagaaaa

SEQ ID NO: 330555 - DNA, 33 bp, Homo sapien
ataactaataagacaaacatcacttttaaaact

SEQ ID NO: 330556 - DNA, 33 bp, Homo sapien
ataactaataagacaagcatcacttttaaaact

SEQ ID NO: 330557 - DNA, 33 bp, Homo sapien
ttagatgtaccacgtaaccttgtaatttattta

SEQ ID NO: 330558 - DNA, 33 bp, Homo sapien
ttagatgtaccacgtacccttgtaatttattta

SEQ ID NO: 330559 - DNA, 33 bp, Homo sapien
atttgctggggcaaagccaggttaaaaatgtca

SEQ ID NO: 330560 - DNA, 33 bp, Homo sapien
atttgctggggcaaaggcaggttaaaaatgtca

SEQ ID NO: 330561 - DNA, 33 bp, Homo sapien
ccattatcctgggtaaatgagtatggggaactc

SEQ ID NO: 330562 - DNA, 33 bp, Homo sapien
ccattatcctgggtaagtgagtatggggaactc

SEQ ID NO: 330563 - DNA, 33 bp, Homo sapien
aagatggcagcactgacaattccagaaataaag

SEQ ID NO: 330564 - DNA, 33 bp, Homo sapien
aagatggcagcactgataattccagaaataaag

SEQ ID NO: 330565 - DNA, 33 bp, Homo sapien
agggataaattggccaaaggaacaaccaacagg

SEQ ID NO: 330566 - DNA, 33 bp, Homo sapien
agggataaattggccagaggaacaaccaacagg

SEQ ID NO: 330567 - DNA, 33 bp, Homo sapien
atataaagtcctgataagaaaccttgaatcata

SEQ ID NO: 330568 - DNA, 33 bp, Homo sapien
atataaagtcctgataggaaaccttgaatcata

SEQ ID NO: 330569 - DNA, 33 bp, Homo sapien
cacagctgtgactttaaattttaccatcagatg

SEQ ID NO: 330570 - DNA, 33 bp, Homo sapien
cacagctgtgactttagattttaccatcagatg

SEQ ID NO: 330571 - DNA, 33 bp, Homo sapien
ttattgttgtcataaccatgtttagtcttccaa

SEQ ID NO: 330572 - DNA, 33 bp, Homo sapien
ttattgttgtcataactatgtttagtcttccaa

SEQ ID NO: 330573 - DNA, 33 bp, Homo sapien
tagaaacagtccacaaactaggaatagaaagaa

SEQ ID NO: 330574 - DNA, 33 bp, Homo sapien
tagaaacagtccacaagctaggaatagaaagaa

SEQ ID NO: 330575 - DNA, 33 bp, Homo sapien
gatgaaggaacagaagaaaacactgcataattt

SEQ ID NO: 330576 - DNA, 33 bp, Homo sapien
gatgaaggaacagaaggaaacactgcataattt

SEQ ID NO: 330577 - DNA, 33 bp, Homo sapien
ttaaaaagccattgcacagttataataataaag

SEQ ID NO: 330578 - DNA, 33 bp, Homo sapien
ttaaaaagccattgcatagttataataataaag

SEQ ID NO: 330579 - DNA, 33 bp, Homo sapien
ggcattctctggcttacaaggaggaaagatttt

SEQ ID NO: 330580 - DNA, 33 bp, Homo sapien
ggcattctctggcttataaggaggaaagatttt

SEQ ID NO: 330581 - DNA, 33 bp, Homo sapien
agtgtagagtttcagacaccaggccattcactt

SEQ ID NO: 330582 - DNA, 33 bp, Homo sapien
agtgtagagtttcagagaccaggccattcactt

SEQ ID NO: 330583 - DNA, 33 bp, Homo sapien
tttagtgagagttaaacgagatcacttgtgtaa

SEQ ID NO: 330584 - DNA, 33 bp, Homo sapien
tttagtgagagttaaatgagatcacttgtgtaa

SEQ ID NO: 330585 - DNA, 33 bp, Homo sapien
tttaaatctaaattaacgcaaaaatccataaag

SEQ ID NO: 330586 - DNA, 33 bp, Homo sapien
tttaaatctaaattaatgcaaaaatccataaag

SEQ ID NO: 330587 - DNA, 33 bp, Homo sapien
ctcccttaaatgcataggtaataagctcacttg

SEQ ID NO: 330588 - DNA, 33 bp, Homo sapien
ctcccttaaatgcatatgtaataagctcacttg

SEQ ID NO: 330589 - DNA, 33 bp, Homo sapien
tatgttggccaaaagccgcagaatacacaagta

SEQ ID NO: 330590 - DNA, 33 bp, Homo sapien
tatgttggccaaaagctgcagaatacacaagta

SEQ ID NO: 330591 - DNA, 33 bp, Homo sapien
aatgcctccctatgagcaacacaacaaggtatg

SEQ ID NO: 330592 - DNA, 33 bp, Homo sapien
aatgcctccctatgaggaacacaacaaggtatg

SEQ ID NO: 330593 - DNA, 33 bp, Homo sapien
atttaggcattgaaaccgggagataaatcagtg

SEQ ID NO: 330594 - DNA, 33 bp, Homo sapien
atttaggcattgaaactgggagataaatcagtg

SEQ ID NO: 330595 - DNA, 33 bp, Homo sapien
caggcctatatttaaaacaagtcatcaggtcag

SEQ ID NO: 330596 - DNA, 33 bp, Homo sapien
caggcctatatttaaaccaagtcatcaggtcag

SEQ ID NO: 330597 - DNA, 33 bp, Homo sapien; identical to SEQ ID NO: 330595

SEQ ID NO: 330598 - DNA, 33 bp, Homo sapien; identical to SEQ ID NO: 330596

SEQ ID NO: 330599 - DNA, 33 bp, Homo sapien
ctaaaacccatctaggacaatctcagccttatt

SEQ ID NO: 330600 - DNA, 33 bp, Homo sapien
ctaaaacccatctagggcaatctcagccttatt

SEQ ID NO: 330601 - DNA, 33 bp, Homo sapien
tgtttatgtgtctctccgagaaggctgtgagca

SEQ ID NO: 330602 - DNA, 33 bp, Homo sapien
tgtttatgtgtctctcggagaaggctgtgagca

SEQ ID NO: 330603 - DNA, 33 bp, Homo sapien
ctccttagtctccaggcagcagttggagtgata

SEQ ID NO: 330604 - DNA, 33 bp, Homo sapien
ctccttagtctccagggagcagttggagtgata

SEQ ID NO: 330605 - DNA, 33 bp, Homo sapien
ctccctggaagcaccaatctggggctgcacctg

SEQ ID NO: 330606 - DNA, 33 bp, Homo sapien
ctccctggaagcaccagtctggggctgcacctg

SEQ ID NO: 330607 - DNA, 33 bp, Homo sapien
ctgaccttgactgcagcagggttttatgagtgg

SEQ ID NO: 330608 - DNA, 33 bp, Homo sapien
ctgaccttgactgcagtagggttttatgagtgg

SEQ ID NO: 330609 - DNA, 33 bp, Homo sapien
ccagaatgtgtgaatacggccttttttggatgg

SEQ ID NO: 330610 - DNA, 33 bp, Homo sapien
ccagaatgtgtgaatatggccttttttggatgg

SEQ ID NO: 330611 - DNA, 33 bp, Homo sapien
gccactgttctaaagacgttgcacgtcccacgc

SEQ ID NO: 330612 - DNA, 33 bp, Homo sapien
gccactgttctaaagaggttgcacgtcccacgc

SEQ ID NO: 330613 - DNA, 33 bp, Homo sapien
ttatggtctgagacacggcttccatctaaagaa

SEQ ID NO: 330614 - DNA, 33 bp, Homo sapien
ttatggtctgagacactgcttccatctaaagaa

SEQ ID NO: 330615 - DNA, 33 bp, Homo sapien
ctatttgaagcacttaagttaattattctattc

SEQ ID NO: 330616 - DNA, 33 bp, Homo sapien
ctatttgaagcacttacgttaattattctattc

SEQ ID NO: 330617 - DNA, 33 bp, Homo sapien
tttacttatttatcaccattgatggtgtccttg

SEQ ID NO: 330618 - DNA, 33 bp, Homo sapien
tttacttatttatcactattgatggtgtccttg

SEQ ID NO: 330619 - DNA, 33 bp, Homo sapien
acatttttgtttttgaagctctctgctcagtgc

SEQ ID NO: 330620 - DNA, 33 bp, Homo sapien
acatttttgtttttgaggctctctgctcagtgc

SEQ ID NO: 330621 - DNA, 33 bp, Homo sapien
gggcagttgtctcctacgaaggtcagtgaagga

SEQ ID NO: 330622 - DNA, 33 bp, Homo sapien
gggcagttgtctcctatgaaggtcagtgaagga

SEQ ID NO: 330623 - DNA, 33 bp, Homo sapien
agtaattttcagataaacatttgtcaaacgtat

SEQ ID NO: 330624 - DNA, 33 bp, Homo sapien
agtaattttcagataagcatttgtcaaacgtat

SEQ ID NO: 330625 - DNA, 33 bp, Homo sapien
tatcattactatacagaaacacctagagaacat

SEQ ID NO: 330626 - DNA, 33 bp, Homo sapien
tatcattactatacagtaacacctagagaacat

SEQ ID NO: 330627 - DNA, 33 bp, Homo sapien
aggcaaaacagagacagagttgactaaaaagaa

SEQ ID NO: 330628 - DNA, 33 bp, Homo sapien
aggcaaaacagagacatagttgactaaaaagaa

SEQ ID NO: 330629 - DNA, 33 bp, Homo sapien
caatctctaaactcaaagaattttcattactaa

SEQ ID NO: 330630 - DNA, 33 bp, Homo sapien
caatctctaaactcaatgaattttcattactaa

SEQ ID NO: 330631 - DNA, 33 bp, Homo sapien
tttttttccataaaaacgcatggtattttaatt

SEQ ID NO: 330632 - DNA, 33 bp, Homo sapien
tttttttccataaaaatgcatggtattttaatt

SEQ ID NO: 330633 - DNA, 33 bp, Homo sapien
attcttcagttctcaacgttctctctccacatg

SEQ ID NO: 330634 - DNA, 33 bp, Homo sapien
attcttcagttctcaaggttctctctccacatg

SEQ ID NO: 330635 - DNA, 33 bp, Homo sapien
cagcaggcactgaagcaagcgtagataagccca

SEQ ID NO: 330636 - DNA, 33 bp, Homo sapien
cagcaggcactgaagcgagcgtagataagccca

SEQ ID NO: 330637 - DNA, 33 bp, Homo sapien
ttaagccacaatatttgaaaggtagtttgctcc

SEQ ID NO: 330638 - DNA, 33 bp, Homo sapien
ttaagccacaatattttaaaggtagtttgctcc

SEQ ID NO: 330639 - DNA, 33 bp, Homo sapien
atagcaagagtataaaccaacaacatcttcatg

SEQ ID NO: 330640 - DNA, 33 bp, Homo sapien
atagcaagagtataaatcaacaacatcttcatg

SEQ ID NO: 330641 - DNA, 33 bp, Homo sapien
agaatctagagaatcaagtgcgcaatttataac

SEQ ID NO: 330642 - DNA, 33 bp, Homo sapien
agaatctagagaatcatgtgcgcaatttataac

SEQ ID NO: 330643 - DNA, 33 bp, Homo sapien
taatctacgatagttaaggcactgtttttgttt

SEQ ID NO: 330644 - DNA, 33 bp, Homo sapien
taatctacgatagttacggcactgtttttgttt

SEQ ID NO: 330645 - DNA, 33 bp, Homo sapien
cttgttccttaaacacaagacattccaatgaga

SEQ ID NO: 330646 - DNA, 33 bp, Homo sapien
cttgttccttaaacacgagacattccaatgaga

SEQ ID NO: 330647 - DNA, 33 bp, Homo sapien
tactgctgctattttacattaacaccttattag

SEQ ID NO: 330648 - DNA, 33 bp, Homo sapien
tactgctgctattttatattaacaccttattag

SEQ ID NO: 330649 - DNA, 33 bp, Homo sapien
gcagaattttggaagcaattcattaattaaagg

SEQ ID NO: 330650 - DNA, 33 bp, Homo sapien
gcagaattttggaagcgattcattaattaaagg

SEQ ID NO: 330651 - DNA, 33 bp, Homo sapien
agtgcctacacatgaacagttctacgaaaacta

SEQ ID NO: 330652 - DNA, 33 bp, Homo sapien
agtgcctacacatgaatagttctacgaaaacta

SEQ ID NO: 330653 - DNA, 33 bp, Homo sapien
tgtatcattattttgacgctcgagatttggcca

SEQ ID NO: 330654 - DNA, 33 bp, Homo sapien
tgtatcattattttgatgctcgagatttggcca

SEQ ID NO: 330655 - DNA, 33 bp, Homo sapien
gaccattataaacatagccacttgatgaattca

SEQ ID NO: 330656 - DNA, 33 bp, Homo sapien
gaccattataaacatatccacttgatgaattca

SEQ ID NO: 330657 - DNA, 33 bp, Homo sapien
tttaaaaacagatctacacttggataatttata

SEQ ID NO: 330658 - DNA, 33 bp, Homo sapien
tttaaaaacagatctatacttggataatttata

SEQ ID NO: 330659 - DNA, 33 bp, Homo sapien
cattataggctaatctaaatgttggaacaatct

SEQ ID NO: 330660 - DNA, 33 bp, Homo sapien
cattataggctaatctgaatgttggaacaatct

SEQ ID NO: 330661 - DNA, 33 bp, Homo sapien
taggcaagggagcgtcccaagcattaaaacagg

SEQ ID NO: 330662 - DNA, 33 bp, Homo sapien
taggcaagggagcgtctcaagcattaaaacagg

SEQ ID NO: 330663 - DNA, 33 bp, Homo sapien
catcattttccttaaaaagatacaggattacaa

SEQ ID NO: 330664 - DNA, 33 bp, Homo sapien
catcattttccttaaagagatacaggattacaa

SEQ ID NO: 330665 - DNA, 33 bp, Homo sapien
accctttacgatctgacacttgaaataaacatt

SEQ ID NO: 330666 - DNA, 33 bp, Homo sapien
accctttacgatctgatacttgaaataaacatt

SEQ ID NO: 330667 - DNA, 33 bp, Homo sapien
atcgagaaggggataaaaggtattataggcctt

SEQ ID NO: 330668 - DNA, 33 bp, Homo sapien
atcgagaaggggataagaggtattataggcctt

SEQ ID NO: 330669 - DNA, 33 bp, Homo sapien
gctgtggaacaaactacagactaggaagacaga

SEQ ID NO: 330670 - DNA, 33 bp, Homo sapien
gctgtggaacaaactatagactaggaagacaga

SEQ ID NO: 330671 - DNA, 33 bp, Homo sapien
agtaatgcaacagcacagtaatatataggcaaa

SEQ ID NO: 330672 - DNA, 33 bp, Homo sapien
agtaatgcaacagcacggtaatatataggcaaa

SEQ ID NO: 330673 - DNA, 33 bp, Homo sapien; identical to SEQ ID NO: 330671

SEQ ID NO: 330674 - DNA, 33 bp, Homo sapien; identical to SEQ ID NO: 330672

SEQ ID NO: 330675 - DNA, 33 bp, Homo sapien
ttatttcttctgaaaaacacatactaaataaaa

SEQ ID NO: 330676 - DNA, 33 bp, Homo sapien
ttatttcttctgaaaagcacatactaaataaaa

SEQ ID NO: 330677 - DNA, 33 bp, Homo sapien
gatcttcctctttctccgaacgtgttactatgc

SEQ ID NO: 330678 - DNA, 33 bp, Homo sapien
gatcttcctctttctctgaacgtgttactatgc

SEQ ID NO: 330679 - DNA, 33 bp, Homo sapien; identical to SEQ ID NO: 330677

SEQ ID NO: 330680 - DNA, 33 bp, Homo sapien; identical to SEQ ID NO: 330678

SEQ ID NO: 330681 - DNA, 33 bp, Homo sapien; identical to SEQ ID NO: 330677

SEQ ID NO: 330682 - DNA, 33 bp, Homo sapien; identical to SEQ ID NO: 330678

SEQ ID NO: 330683 - DNA, 33 bp, Homo sapien
agccaggtcctttaaacgctttgaatgtttttc

SEQ ID NO: 330684 - DNA, 33 bp, Homo sapien
agccaggtcctttaaatgctttgaatgtttttc

SEQ ID NO: 330685 - DNA, 33 bp, Homo sapien
gttatgcataatgcacgcaggaattcatttaaa

SEQ ID NO: 330686 - DNA, 33 bp, Homo sapien
gttatgcataatgcactcaggaattcatttaaa

SEQ ID NO: 330687 - DNA, 33 bp, Homo sapien
gttcctaaaccactaccaacagcaatattagtc

SEQ ID NO: 330688 - DNA, 33 bp, Homo sapien
gttcctaaaccactactaacagcaatattagtc

SEQ ID NO: 330689 - DNA, 33 bp, Homo sapien
cttcccctttgcctacaaatcctgccttctagc

SEQ ID NO: 330690 - DNA, 33 bp, Homo sapien
cttcccctttgcctaccaatcctgccttctagc

SEQ ID NO: 330691 - DNA, 33 bp, Homo sapien
tcagtaactctcttccccttcttgctgcaagac

SEQ ID NO: 330692 - DNA, 33 bp, Homo sapien
tcagtaactctcttcctcttcttgctgcaagac

SEQ ID NO: 330693 - DNA, 33 bp, Homo sapien
gaaggagatgtgaaagccaggtagagaggtaag

SEQ ID NO: 330694 - DNA, 33 bp, Homo sapien
gaaggagatgtgaaagtcaggtagagaggtaag

SEQ ID NO: 330695 - DNA, 33 bp, Homo sapien
tacagtaaagagtagacgagatggcgctgagca

SEQ ID NO: 330696 - DNA, 33 bp, Homo sapien
tacagtaaagagtagatgagatggcgctgagca

SEQ ID NO: 330697 - DNA, 33 bp, Homo sapien
ggttgacttcttaatccgatcaaatgaaaatgt

SEQ ID NO: 330698 - DNA, 33 bp, Homo sapien
ggttgacttcttaatctgatcaaatgaaaatgt

SEQ ID NO: 330699 - DNA, 33 bp, Homo sapien
tagctacaacttcttcaatagttacctgcatgt

SEQ ID NO: 330700 - DNA, 33 bp, Homo sapien
tagctacaacttcttcgatagttacctgcatgt

SEQ ID NO: 330701 - DNA, 33 bp, Homo sapien
aatcagaatcattgagcacatcttcaggagcga

SEQ ID NO: 330702 - DNA, 33 bp, Homo sapien
aatcagaatcattgagtacatcttcaggagcga

SEQ ID NO: 330703 - DNA, 33 bp, Homo sapien
agagcttcaacacaaacgaaacaaacaccaata

SEQ ID NO: 330704 - DNA, 33 bp, Homo sapien
agagcttcaacacaaatgaaacaaacaccaata

SEQ ID NO: 330705 - DNA, 33 bp, Homo sapien
gaccctgttctccttacaaaacgacattcttca

SEQ ID NO: 330706 - DNA, 33 bp, Homo sapien
gaccctgttctccttataaaacgacattcttca

SEQ ID NO: 330707 - DNA, 33 bp, Homo sapien
aatgacaccaataatcaccagctgtgtagtctt

SEQ ID NO: 330708 - DNA, 33 bp, Homo sapien
aatgacaccaataatcgccagctgtgtagtctt

SEQ ID NO: 330709 - DNA, 33 bp, Homo sapien
tgtattcacatatgaacagaagtagtggaaaag

SEQ ID NO: 330710 - DNA, 33 bp, Homo sapien
tgtattcacatatgaagagaagtagtggaaaag

SEQ ID NO: 330711 - DNA, 33 bp, Homo sapien
aatttccactgtctaaaagaataaaacagcaaa

SEQ ID NO: 330712 - DNA, 33 bp, Homo sapien
aatttccactgtctaacagaataaaacagcaaa

SEQ ID NO: 330713 - DNA, 33 bp, Homo sapien
atgccatgatcaatccgcaggggtaggggaaac

SEQ ID NO: 330714 - DNA, 33 bp, Homo sapien
atgccatgatcaatcctcaggggtaggggaaac

SEQ ID NO: 330715 - DNA, 33 bp, Homo sapien
caaagaggattgtctcaccagagattagtgaca

SEQ ID NO: 330716 - DNA, 33 bp, Homo sapien
caaagaggattgtctcgccagagattagtgaca

SEQ ID NO: 330717 - DNA, 33 bp, Homo sapien
tgctctctaaaggaaacgcaagaaatattgccc

SEQ ID NO: 330718 - DNA, 33 bp, Homo sapien
tgctctctaaaggaaatgcaagaaatattgccc

SEQ ID NO: 330719 - DNA, 33 bp, Homo sapien
tagggaccaaaggactaaaagaagtcagaacaa

SEQ ID NO: 330720 - DNA, 33 bp, Homo sapien
tagggaccaaaggactgaaagaagtcagaacaa

SEQ ID NO: 330721 - DNA, 33 bp, Homo sapien
attgaaagtgatcagacggaaaaatatatttta

SEQ ID NO: 330722 - DNA, 33 bp, Homo sapien
attgaaagtgatcagatggaaaaatatatttta

SEQ ID NO: 330723 - DNA, 33 bp, Homo sapien
aataatttgttaaggaatagcaatatacaaaga

SEQ ID NO: 330724 - DNA, 33 bp, Homo sapien
aataatttgttaaggactagcaatatacaaaga

SEQ ID NO: 330725 - DNA, 33 bp, Homo sapien
ttcataaccttgttcacgtattgaggttctgtt

SEQ ID NO: 330726 - DNA, 33 bp, Homo sapien
ttcataaccttgttcatgtattgaggttctgtt

SEQ ID NO: 330727 - DNA, 33 bp, Homo sapien
gatgtggctagtacaactgaccagctaatgtta

SEQ ID NO: 330728 - DNA, 33 bp, Homo sapien
gatgtggctagtacaagtgaccagctaatgtta

SEQ ID NO: 330729 - DNA, 33 bp, Homo sapien
aaatagatcttgctgaagaggaagaatgattgg

SEQ ID NO: 330730 - DNA, 33 bp, Homo sapien
aaatagatcttgctgaggaggaagaatgattgg

SEQ ID NO: 330731 - DNA, 33 bp, Homo sapien
gatggaccaaagttaactctgatgagggaaatg

SEQ ID NO: 330732 - DNA, 33 bp, Homo sapien
gatggaccaaagttaattctgatgagggaaatg

SEQ ID NO: 330733 - DNA, 33 bp, Homo sapien; identical to SEQ ID NO: 330731

SEQ ID NO: 330734 - DNA, 33 bp, Homo sapien; identical to SEQ ID NO: 330732

SEQ ID NO: 330735 - DNA, 33 bp, Homo sapien
tgtgtctgttttccaacctgaacaatggaataa

SEQ ID NO: 330736 - DNA, 33 bp, Homo sapien
tgtgtctgttttccaatctgaacaatggaataa

SEQ ID NO: 330737 - DNA, 33 bp, Homo sapien
ggttcggagcaggcctcagaagtgtgcccttag

SEQ ID NO: 330738 - DNA, 33 bp, Homo sapien
ggttcggagcaggcctgagaagtgtgcccttag

SEQ ID NO: 330739 - DNA, 33 bp, Homo sapien; identical to SEQ ID NO: 330737

SEQ ID NO: 330740 - DNA, 33 bp, Homo sapien; identical to SEQ ID NO: 330738

SEQ ID NO: 330741 - DNA, 33 bp, Homo sapien
cacatataagtgataccatgagatatttgtctt

SEQ ID NO: 330742 - DNA, 33 bp, Homo sapien
cacatataagtgatactatgagatatttgtctt

SEQ ID NO: 330743 - DNA, 33 bp, Homo sapien
ctgctatgaagattcacgtaaaatcctttgaat

SEQ ID NO: 330744 - DNA, 33 bp, Homo sapien
ctgctatgaagattcatgtaaaatcctttgaat

SEQ ID NO: 330745 - DNA, 33 bp, Homo sapien
gaggtcttgccaaagacgatgtgggctttctgg

SEQ ID NO: 330746 - DNA, 33 bp, Homo sapien
gaggtcttgccaaagatgatgtgggctttctgg

SEQ ID NO: 330747 - DNA, 33 bp, Homo sapien
aaactaaaattctgaaatgtacatcgatgggta

SEQ ID NO: 330748 - DNA, 33 bp, Homo sapien
aaactaaaattctgaactgtacatcgatgggta

SEQ ID NO: 330749 - DNA, 33 bp, Homo sapien; identical to SEQ ID NO: 330747

SEQ ID NO: 330750 - DNA, 33 bp, Homo sapien; identical to SEQ ID NO: 330748

SEQ ID NO: 330751 - DNA, 33 bp, Homo sapien
tcctgcattaggcaaaattctaagtccggtcag

SEQ ID NO: 330752 - DNA, 33 bp, Homo sapien
tcctgcattaggcaaagttctaagtccggtcag

SEQ ID NO: 330753 - DNA, 33 bp, Homo sapien
ctcttcaccaatgatacgatcttatgcctagaa

SEQ ID NO: 330754 - DNA, 33 bp, Homo sapien
ctcttcaccaatgatatgatcttatgcctagaa

SEQ ID NO: 330755 - DNA, 33 bp, Homo sapien
aaaaagaaaaagtcacaagaaagaagactgagg

SEQ ID NO: 330756 - DNA, 33 bp, Homo sapien
aaaaagaaaaagtcacgagaaagaagactgagg

SEQ ID NO: 330757 - DNA, 33 bp, Homo sapien; identical to SEQ ID NO: 330755

SEQ ID NO: 330758 - DNA, 33 bp, Homo sapien; identical to SEQ ID NO: 330756

SEQ ID NO: 330759 - DNA, 33 bp, Homo sapien
caacacacagattaaaagaaataaccatacctt

SEQ ID NO: 330760 - DNA, 33 bp, Homo sapien
caacacacagattaaacgaaataaccatacctt

SEQ ID NO: 330761 - DNA, 33 bp, Homo sapien
taagtccataagcttccagttcagttgagagat

SEQ ID NO: 330762 - DNA, 33 bp, Homo sapien
taagtccataagcttctagttcagttgagagat

SEQ ID NO: 330763 - DNA, 33 bp, Homo sapien
tacctgtaacgggtacacttcgcttcgcgttcc

SEQ ID NO: 330764 - DNA, 33 bp, Homo sapien
tacctgtaacgggtacgcttcgcttcgcgttcc

SEQ ID NO: 330765 - DNA, 33 bp, Homo sapien
attcagtccccgtgacgaaataactactgcatt

SEQ ID NO: 330766 - DNA, 33 bp, Homo sapien
attcagtccccgtgactaaataactactgcatt

SEQ ID NO: 330767 - DNA, 33 bp, Homo sapien
gtttatcttagccaaactaatttaagcttcttg

SEQ ID NO: 330768 - DNA, 33 bp, Homo sapien
gtttatcttagccaaagtaatttaagcttcttg

SEQ ID NO: 330769 - DNA, 33 bp, Homo sapien
aaacttatcacaatggaattttgttcaggatat

SEQ ID NO: 330770 - DNA, 33 bp, Homo sapien
aaacttatcacaatggcattttgttcaggatat

SEQ ID NO: 330771 - DNA, 33 bp, Homo sapien
agactaaaatagtggaacgagaggctaagatat

SEQ ID NO: 330772 - DNA, 33 bp, Homo sapien
agactaaaatagtggagcgagaggctaagatat

SEQ ID NO: 330773 - DNA, 33 bp, Homo sapien
tgcttatgactgacaaatgaaatgacaaaaaca

SEQ ID NO: 330774 - DNA, 33 bp, Homo sapien
tgcttatgactgacaagtgaaatgacaaaaaca

SEQ ID NO: 330775 - DNA, 33 bp, Homo sapien
tgctgctaatggtttcacctctggcccttctgt

SEQ ID NO: 330776 - DNA, 33 bp, Homo sapien
tgctgctaatggtttcgcctctggcccttctgt

SEQ ID NO: 330777 - DNA, 33 bp, Homo sapien
aatatctaagagaaaaaactgaggagtgaggtg

SEQ ID NO: 330778 - DNA, 33 bp, Homo sapien
aatatctaagagaaaagactgaggagtgaggtg

SEQ ID NO: 330779 - DNA, 33 bp, Homo sapien
attcagttttattttaaaagctgtttcaataga

SEQ ID NO: 330780 - DNA, 33 bp, Homo sapien
attcagttttattttacaagctgtttcaataga

SEQ ID NO: 330781 - DNA, 33 bp, Homo sapien
aatggcagaatggtagaagaagaaaattctcaa

SEQ ID NO: 330782 - DNA, 33 bp, Homo sapien
aatggcagaatggtagtagaagaaaattctcaa

SEQ ID NO: 330783 - DNA, 33 bp, Homo sapien
tcgttctgtaaggcaaacattactctcatacta

SEQ ID NO: 330784 - DNA, 33 bp, Homo sapien
tcgttctgtaaggcaagcattactctcatacta

SEQ ID NO: 330785 - DNA, 33 bp, Homo sapien
ttcactaaaacactatgagaactcacaatttta

SEQ ID NO: 330786 - DNA, 33 bp, Homo sapien
ttcactaaaacactattagaactcacaatttta

SEQ ID NO: 330787 - DNA, 33 bp, Homo sapien
cagacagcttgataaagttaagccaaatacagt

SEQ ID NO: 330788 - DNA, 33 bp, Homo sapien
cagacagcttgataaatttaagccaaatacagt

SEQ ID NO: 330789 - DNA, 33 bp, Homo sapien
ttttgacatctataaaccttcaggcagccagac

SEQ ID NO: 330790 - DNA, 33 bp, Homo sapien
ttttgacatctataaatcttcaggcagccagac

SEQ ID NO: 330791 - DNA, 33 bp, Homo sapien
aggtaaacttgtcttcaattcctgttaagtcaa

SEQ ID NO: 330792 - DNA, 33 bp, Homo sapien
aggtaaacttgtcttcgattcctgttaagtcaa

SEQ ID NO: 330793 - DNA, 33 bp, Homo sapien
ctggatgctttattacaaattgagatcacatcc

SEQ ID NO: 330794 - DNA, 33 bp, Homo sapien
ctggatgctttattacgaattgagatcacatcc

SEQ ID NO: 330795 - DNA, 33 bp, Homo sapien
taagagagagacctaacagccatatgatgtttt

SEQ ID NO: 330796 - DNA, 33 bp, Homo sapien
taagagagagacctaatagccatatgatgtttt

SEQ ID NO: 330797 - DNA, 33 bp, Homo sapien
tctactgaaatgtagcagaaacatactttaaga

SEQ ID NO: 330798 - DNA, 33 bp, Homo sapien
tctactgaaatgtagcggaaacatactttaaga

SEQ ID NO: 330799 - DNA, 33 bp, Homo sapien
ctccactcagatgggacattcgactcctaacaa

SEQ ID NO: 330800 - DNA, 33 bp, Homo sapien
ctccactcagatgggatattcgactcctaacaa

SEQ ID NO: 330801 - DNA, 33 bp, Homo sapien
ttcattcaactattaccattgactatattatct

SEQ ID NO: 330802 - DNA, 33 bp, Homo sapien
ttcattcaactattactattgactatattatct

SEQ ID NO: 330803 - DNA, 33 bp, Homo sapien
acttatttgtgctaaagtagaatatgaatttgg

SEQ ID NO: 330804 - DNA, 33 bp, Homo sapien
acttatttgtgctaaattagaatatgaatttgg

SEQ ID NO: 330805 - DNA, 33 bp, Homo sapien
ttggaccacaaaagagcacctgagatattagtg

SEQ ID NO: 330806 - DNA, 33 bp, Homo sapien
ttggaccacaaaagaggacctgagatattagtg

SEQ ID NO: 330807 - DNA, 33 bp, Homo sapien
gaaagatgatgagagcactaatgataccacaag

SEQ ID NO: 330808 - DNA, 33 bp, Homo sapien
gaaagatgatgagagcgctaatgataccacaag

SEQ ID NO: 330809 - DNA, 33 bp, Homo sapien
ctaacatacatcaccacaagagaaccatagaag

SEQ ID NO: 330810 - DNA, 33 bp, Homo sapien
ctaacatacatcaccataagagaaccatagaag

SEQ ID NO: 330811 - DNA, 33 bp, Homo sapien
cttgtcttttctgcaacaagtgtgctaccttct

SEQ ID NO: 330812 - DNA, 33 bp, Homo sapien
cttgtcttttctgcaataagtgtgctaccttct

SEQ ID NO: 330813 - DNA, 33 bp, Homo sapien
aaatgttctaaggaaaagtacttgttgcctaga

SEQ ID NO: 330814 - DNA, 33 bp, Homo sapien
aaatgttctaaggaaatgtacttgttgcctaga

SEQ ID NO: 330815 - DNA, 33 bp, Homo sapien
cattgcgtgataggcacacctaatcgttaaaga

SEQ ID NO: 330816 - DNA, 33 bp, Homo sapien
cattgcgtgataggcatacctaatcgttaaaga

SEQ ID NO: 330817 - DNA, 33 bp, Homo sapien
atagttgtaaagaaagaagactctcccatcaga

SEQ ID NO: 330818 - DNA, 33 bp, Homo sapien
atagttgtaaagaaagtagactctcccatcaga

SEQ ID NO: 330819 - DNA, 33 bp, Homo sapien
ctttccctttttccctaaaggctgaaccaatta

SEQ ID NO: 330820 - DNA, 33 bp, Homo sapien
ctttccctttttccctgaaggctgaaccaatta

SEQ ID NO: 330821 - DNA, 33 bp, Homo sapien
agacattattactcaaggaaaggcagcttctgt

SEQ ID NO: 330822 - DNA, 33 bp, Homo sapien
agacattattactcaatgaaaggcagcttctgt

SEQ ID NO: 330823 - DNA, 33 bp, Homo sapien
tttatttttttccatacacatttgcaagagttt

SEQ ID NO: 330824 - DNA, 33 bp, Homo sapien
tttatttttttccatagacatttgcaagagttt

SEQ ID NO: 330825 - DNA, 33 bp, Homo sapien
gactgcagtggactgactatctttagaagcacg

SEQ ID NO: 330826 - DNA, 33 bp, Homo sapien
gactgcagtggactgattatctttagaagcacg

SEQ ID NO: 330827 - DNA, 33 bp, Homo sapien
acacagataaataaaacgtaggtatccatggtg

SEQ ID NO: 330828 - DNA, 33 bp, Homo sapien
acacagataaataaaaggtaggtatccatggtg

SEQ ID NO: 330829 - DNA, 33 bp, Homo sapien
agattgtatttctctgaagcaaaattcaagagt

SEQ ID NO: 330830 - DNA, 33 bp, Homo sapien
agattgtatttctctggagcaaaattcaagagt

SEQ ID NO: 330831 - DNA, 33 bp, Homo sapien
tcttaactttacataacagcacttgggttggga

SEQ ID NO: 330832 - DNA, 33 bp, Homo sapien
tcttaactttacataatagcacttgggttggga

SEQ ID NO: 330833 - DNA, 33 bp, Homo sapien
tgccagctgcccttccaaacatccagaggcagg

SEQ ID NO: 330834 - DNA, 33 bp, Homo sapien
tgccagctgcccttcctaacatccagaggcagg

SEQ ID NO: 330835 - DNA, 33 bp, Homo sapien
caggaggcaaagtagaatagagttgacactgaa

SEQ ID NO: 330836 - DNA, 33 bp, Homo sapien
caggaggcaaagtagagtagagttgacactgaa

SEQ ID NO: 330837 - DNA, 33 bp, Homo sapien
gaaggtaacattatcaagtatagcagttatttg

SEQ ID NO: 330838 - DNA, 33 bp, Homo sapien
gaaggtaacattatcaggtatagcagttatttg

SEQ ID NO: 330839 - DNA, 33 bp, Homo sapien
ctagacttgaaaccaggaatgcaaattttgtga

SEQ ID NO: 330840 - DNA, 33 bp, Homo sapien
ctagacttgaaaccagtaatgcaaattttgtga

SEQ ID NO: 330841 - DNA, 33 bp, Homo sapien
aaatccgtacatcaacagtgagctcattttcta

SEQ ID NO: 330842 - DNA, 33 bp, Homo sapien
aaatccgtacatcaaccgtgagctcattttcta

SEQ ID NO: 330843 - DNA, 33 bp, Homo sapien
aacagtaaacataaaaatagcatcagagtcaga

SEQ ID NO: 330844 - DNA, 33 bp, Homo sapien
aacagtaaacataaaagtagcatcagagtcaga

SEQ ID NO: 330845 - DNA, 33 bp, Homo sapien
atcctacacactgttacaatttagtctcagaat

SEQ ID NO: 330846 - DNA, 33 bp, Homo sapien
atcctacacactgttataatttagtctcagaat

SEQ ID NO: 330847 - DNA, 33 bp, Homo sapien
ttaaatgctggaggaaaggaacacaaaaagaga

SEQ ID NO: 330848 - DNA, 33 bp, Homo sapien
ttaaatgctggaggaatggaacacaaaaagaga

SEQ ID NO: 330849 - DNA, 33 bp, Homo sapien
cattatcagatactacacaaccatacaaaagaa

SEQ ID NO: 330850 - DNA, 33 bp, Homo sapien
cattatcagatactacgcaaccatacaaaagaa

SEQ ID NO: 330851 - DNA, 33 bp, Homo sapien
tctctctccctcacaaagatagtattttatgag

SEQ ID NO: 330852 - DNA, 33 bp, Homo sapien
tctctctccctcacaaggatagtattttatgag

SEQ ID NO: 330853 - DNA, 33 bp, Homo sapien
gtttctactggtctacccaggttcttaggttaa

SEQ ID NO: 330854 - DNA, 33 bp, Homo sapien
gtttctactggtctactcaggttcttaggttaa

SEQ ID NO: 330855 - DNA, 33 bp, Homo sapien
atttctctttcatcaaacaaataaagatgagac

SEQ ID NO: 330856 - DNA, 33 bp, Homo sapien
atttctctttcatcaagcaaataaagatgagac

SEQ ID NO: 330857 - DNA, 33 bp, Homo sapien
gggaaaagttcctggacattggtctcatcttta

SEQ ID NO: 330858 - DNA, 33 bp, Homo sapien
gggaaaagttcctggatattggtctcatcttta

SEQ ID NO: 330859 - DNA, 33 bp, Homo sapien
ttttatctccacttaccggatgatttaaaatgc

SEQ ID NO: 330860 - DNA, 33 bp, Homo sapien
ttttatctccacttactggatgatttaaaatgc

SEQ ID NO: 330861 - DNA, 33 bp, Homo sapien
agatctcacgacctcaacatcacgcagattctt

SEQ ID NO: 330862 - DNA, 33 bp, Homo sapien
agatctcacgacctcagcatcacgcagattctt

SEQ ID NO: 330863 - DNA, 33 bp, Homo sapien
caaatcttaggccaccaataaggttttcattag

SEQ ID NO: 330864 - DNA, 33 bp, Homo sapien
caaatcttaggccaccgataaggttttcattag

SEQ ID NO: 330865 - DNA, 33 bp, Homo sapien
accccatacctcaaaactggaagctaatattaa

SEQ ID NO: 330866 - DNA, 33 bp, Homo sapien
accccatacctcaaaattggaagctaatattaa

SEQ ID NO: 330867 - DNA, 33 bp, Homo sapien
tggtctggcatgaagagaattgtagagagcacc

SEQ ID NO: 330868 - DNA, 33 bp, Homo sapien
tggtctggcatgaagataattgtagagagcacc

SEQ ID NO: 330869 - DNA, 33 bp, Homo sapien
gcccagactccagtaacctctctgtgttggtct

SEQ ID NO: 330870 - DNA, 33 bp, Homo sapien
gcccagactccagtaatctctctgtgttggtct

SEQ ID NO: 330871 - DNA, 33 bp, Homo sapien
ctttcctagaaggattaaaaagtctccattttg

SEQ ID NO: 330872 - DNA, 33 bp, Homo sapien
ctttcctagaaggatttaaaagtctccattttg

SEQ ID NO: 330873 - DNA, 33 bp, Homo sapien
attttgcttagaggaacgctcatctgattagtc

SEQ ID NO: 330874 - DNA, 33 bp, Homo sapien
attttgcttagaggaatgctcatctgattagtc

SEQ ID NO: 330875 - DNA, 33 bp, Homo sapien
ttatctctaccttctccaaattgtggttggaat

SEQ ID NO: 330876 - DNA, 33 bp, Homo sapien
ttatctctaccttctctaaattgtggttggaat

SEQ ID NO: 330877 - DNA, 33 bp, Homo sapien
ttgtagatccttcaaacgagcttttctgctcat

SEQ ID NO: 330878 - DNA, 33 bp, Homo sapien
ttgtagatccttcaaatgagcttttctgctcat

SEQ ID NO: 330879 - DNA, 33 bp, Homo sapien
tattttctaccttaacagcggtctatttttact

SEQ ID NO: 330880 - DNA, 33 bp, Homo sapien
tattttctaccttaacggcggtctatttttact

SEQ ID NO: 330881 - DNA, 33 bp, Homo sapien
actgctggtcactacacgttgatggaatggtgc

SEQ ID NO: 330882 - DNA, 33 bp, Homo sapien
actgctggtcactacatgttgatggaatggtgc

SEQ ID NO: 330883 - DNA, 33 bp, Homo sapien
aaaatagacagtatagaaaagaacataactgac

SEQ ID NO: 330884 - DNA, 33 bp, Homo sapien
aaaatagacagtataggaaagaacataactgac

SEQ ID NO: 330885 - DNA, 33 bp, Homo sapien
ttgcatactttgctgacagtaaccaagtcacac

SEQ ID NO: 330886 - DNA, 33 bp, Homo sapien
ttgcatactttgctgatagtaaccaagtcacac

SEQ ID NO: 330887 - DNA, 33 bp, Homo sapien
catggagctttggacaacatcacattactgtct

SEQ ID NO: 330888 - DNA, 33 bp, Homo sapien
catggagctttggacatcatcacattactgtct

SEQ ID NO: 330889 - DNA, 33 bp, Homo sapien
ttctctcagataagcacaactcgccccacctgg

SEQ ID NO: 330890 - DNA, 33 bp, Homo sapien
ttctctcagataagcagaactcgccccacctgg

SEQ ID NO: 330891 - DNA, 33 bp, Homo sapien
acagaagttaaggtacaaaccatggtgaacaca

SEQ ID NO: 330892 - DNA, 33 bp, Homo sapien
acagaagttaaggtacgaaccatggtgaacaca

SEQ ID NO: 330893 - DNA, 33 bp, Homo sapien; identical to SEQ ID NO: 330891

SEQ ID NO: 330894 - DNA, 33 bp, Homo sapien; identical to SEQ ID NO: 330892

SEQ ID NO: 330895 - DNA, 33 bp, Homo sapien
ctagaggcattacaataaactgattgagagtta

SEQ ID NO: 330896 - DNA, 33 bp, Homo sapien
ctagaggcattacaatgaactgattgagagtta

SEQ ID NO: 330897 - DNA, 33 bp, Homo sapien
tgaacagaggatgggaagttaatacagacaaaa

SEQ ID NO: 330898 - DNA, 33 bp, Homo sapien
tgaacagaggatgggaggttaatacagacaaaa

SEQ ID NO: 330899 - DNA, 33 bp, Homo sapien
cagtgcctaccaaatgacatggtgcactgattt

SEQ ID NO: 330900 - DNA, 33 bp, Homo sapien
cagtgcctaccaaatggcatggtgcactgattt

SEQ ID NO: 330901 - DNA, 33 bp, Homo sapien
aggctccctagtcccaatgatgagaaagagatt

SEQ ID NO: 330902 - DNA, 33 bp, Homo sapien
aggctccctagtcccagtgatgagaaagagatt

SEQ ID NO: 330903 - DNA, 33 bp, Homo sapien
gtctgcaagagccaaaatgagaaaagagccacc

SEQ ID NO: 330904 - DNA, 33 bp, Homo sapien
gtctgcaagagccaaattgagaaaagagccacc

SEQ ID NO: 330905 - DNA, 33 bp, Homo sapien
tccaggtgttgggagccgagcactgaccaccta

SEQ ID NO: 330906 - DNA, 33 bp, Homo sapien
tccaggtgttgggagctgagcactgaccaccta

SEQ ID NO: 330907 - DNA, 33 bp, Homo sapien; identical to SEQ ID NO: 330905

SEQ ID NO: 330908 - DNA, 33 bp, Homo sapien; identical to SEQ ID NO: 330906

SEQ ID NO: 330909 - DNA, 33 bp, Homo sapien
gatgccaacagtgagcaatcaagtatgaattct

SEQ ID NO: 330910 - DNA, 33 bp, Homo sapien
gatgccaacagtgagcgatcaagtatgaattct

SEQ ID NO: 330911 - DNA, 33 bp, Homo sapien; identical to SEQ ID NO: 330909

SEQ ID NO: 330912 - DNA, 33 bp, Homo sapien; identical to SEQ ID NO: 330910

SEQ ID NO: 330913 - DNA, 33 bp, Homo sapien
ccccagggaggaagcaactgtactggcatggag

SEQ ID NO: 330914 - DNA, 33 bp, Homo sapien
ccccagggaggaagcagctgtactggcatggag

SEQ ID NO: 330915 - DNA, 33 bp, Homo sapien
tttgaaagaagcaagtcacaggaccagcttgga

SEQ ID NO: 330916 - DNA, 33 bp, Homo sapien
tttgaaagaagcaagttacaggaccagcttgga

SEQ ID NO: 330917 - DNA, 33 bp, Homo sapien
ctgatctaaattttcgaaggataaactcaagac

SEQ ID NO: 330918 - DNA, 33 bp, Homo sapien
ctgatctaaattttcggaggataaactcaagac

SEQ ID NO: 330919 - DNA, 33 bp, Homo sapien
agagagatgagatacaatgatttgtggcttaac

SEQ ID NO: 330920 - DNA, 33 bp, Homo sapien
agagagatgagatacagtgatttgtggcttaac

SEQ ID NO: 330921 - DNA, 33 bp, Homo sapien
ttgttcatgtcaccacagctttattaggtgcta

SEQ ID NO: 330922 - DNA, 33 bp, Homo sapien
ttgttcatgtcaccaccgctttattaggtgcta

SEQ ID NO: 330923 - DNA, 33 bp, Homo sapien
gagatggactaccttaaccaacatagataatgt

SEQ ID NO: 330924 - DNA, 33 bp, Homo sapien
gagatggactaccttagccaacatagataatgt

SEQ ID NO: 330925 - DNA, 33 bp, Homo sapien
atatctctaggctttcaagtattgtcatttgca

SEQ ID NO: 330926 - DNA, 33 bp, Homo sapien
atatctctaggctttcgagtattgtcatttgca

SEQ ID NO: 330927 - DNA, 33 bp, Homo sapien; identical to SEQ ID NO: 330925

SEQ ID NO: 330928 - DNA, 33 bp, Homo sapien; identical to SEQ ID NO: 330926

SEQ ID NO: 330929 - DNA, 33 bp, Homo sapien
ggtcatctcatccataaggcagtgagaaatact

SEQ ID NO: 330930 - DNA, 33 bp, Homo sapien
ggtcatctcatccatagggcagtgagaaatact

SEQ ID NO: 330931 - DNA, 33 bp, Homo sapien
attgattaatagataaatagatggcacctctcc

SEQ ID NO: 330932 - DNA, 33 bp, Homo sapien
attgattaatagataagtagatggcacctctcc

SEQ ID NO: 330933 - DNA, 33 bp, Homo sapien
agggtgccatcagggacggatctgtccatgcag

SEQ ID NO: 330934 - DNA, 33 bp, Homo sapien
agggtgccatcagggatggatctgtccatgcag

SEQ ID NO: 330935 - DNA, 33 bp, Homo sapien
agtgggagtgtttataccctggaaatcagcaaa

SEQ ID NO: 330936 - DNA, 33 bp, Homo sapien
agtgggagtgtttatatcctggaaatcagcaaa

SEQ ID NO: 330937 - DNA, 33 bp, Homo sapien
tggccacaccaacatacgtcccatccacgtgtc

SEQ ID NO: 330938 - DNA, 33 bp, Homo sapien
tggccacaccaacatatgtcccatccacgtgtc

SEQ ID NO: 330939 - DNA, 33 bp, Homo sapien
ggacgttgttcggggccgattgcccatttatga

SEQ ID NO: 330940 - DNA, 33 bp, Homo sapien
ggacgttgttcggggctgattgcccatttatga

SEQ ID NO: 330941 - DNA, 33 bp, Homo sapien
gtgctcatggaaagaaagtccttgctggctgga

SEQ ID NO: 330942 - DNA, 33 bp, Homo sapien
gtgctcatggaaagaatgtccttgctggctgga

SEQ ID NO: 330943 - DNA, 33 bp, Homo sapien; identical to SEQ ID NO: 330941

SEQ ID NO: 330944 - DNA, 33 bp, Homo sapien; identical to SEQ ID NO: 330942

SEQ ID NO: 330945 - DNA, 33 bp, Homo sapien
taaggtagtgaaataacgtgagcatcaagacag

SEQ ID NO: 330946 - DNA, 33 bp, Homo sapien
taaggtagtgaaataatgtgagcatcaagacag

SEQ ID NO: 330947 - DNA, 33 bp, Homo sapien; identical to SEQ ID NO: 330945

SEQ ID NO: 330948 - DNA, 33 bp, Homo sapien; identical to SEQ ID NO: 330946

SEQ ID NO: 330949 - DNA, 33 bp, Homo sapien
catgcttttccaacaaatctacatgagtcttaa

SEQ ID NO: 330950 - DNA, 33 bp, Homo sapien
catgcttttccaacaagtctacatgagtcttaa

SEQ ID NO: 330951 - DNA, 33 bp, Homo sapien
aaagaaaataattgcacggcaaagtcaaaagac

SEQ ID NO: 330952 - DNA, 33 bp, Homo sapien
aaagaaaataattgcatggcaaagtcaaaagac

SEQ ID NO: 330953 - DNA, 33 bp, Homo sapien
ctagctctcagctaacgcattcacaaccttgta

SEQ ID NO: 330954 - DNA, 33 bp, Homo sapien
ctagctctcagctaactcattcacaaccttgta

SEQ ID NO: 330955 - DNA, 33 bp, Homo sapien
ctgaaatgagggttaccagttccatcttttcag

SEQ ID NO: 330956 - DNA, 33 bp, Homo sapien
ctgaaatgagggttactagttccatcttttcag

SEQ ID NO: 330957 - DNA, 33 bp, Homo sapien
gaactcctcagtgttagactgaatgaaaattac

SEQ ID NO: 330958 - DNA, 33 bp, Homo sapien
gaactcctcagtgttatactgaatgaaaattac

SEQ ID NO: 330959 - DNA, 33 bp, Homo sapien
ataagttgtttgccacgcactaccctttactca

SEQ ID NO: 330960 - DNA, 33 bp, Homo sapien
ataagttgtttgccactcactaccctttactca

SEQ ID NO: 330961 - DNA, 33 bp, Homo sapien; identical to SEQ ID NO: 330959

SEQ ID NO: 330962 - DNA, 33 bp, Homo sapien; identical to SEQ ID NO: 330960

SEQ ID NO: 330963 - DNA, 33 bp, Homo sapien
attttgtttaattcttcaacgaggcaagaggca

SEQ ID NO: 330964 - DNA, 33 bp, Homo sapien
attttgtttaattctttaacgaggcaagaggca

SEQ ID NO: 330965 - DNA, 33 bp, Homo sapien
atatatttatgattgaccacattttattaattg

SEQ ID NO: 330966 - DNA, 33 bp, Homo sapien
atatatttatgattgatcacattttattaattg

SEQ ID NO: 330967 - DNA, 33 bp, Homo sapien
atatgtatatataacacagcatacagcatatgc

SEQ ID NO: 330968 - DNA, 33 bp, Homo sapien
atatgtatatataacagagcatacagcatatgc

SEQ ID NO: 330969 - DNA, 33 bp, Homo sapien
tcagttgtttctagaactcttactttcttagtt

SEQ ID NO: 330970 - DNA, 33 bp, Homo sapien
tcagttgtttctagaattcttactttcttagtt

SEQ ID NO: 330971 - DNA, 33 bp, Homo sapien
ggtcattatttgcttacaatctgtaaatgattg

SEQ ID NO: 330972 - DNA, 33 bp, Homo sapien
ggtcattatttgcttataatctgtaaatgattg

SEQ ID NO: 330973 - DNA, 33 bp, Homo sapien
agcagtgtgcaaagcaatagagtccataccgag

SEQ ID NO: 330974 - DNA, 33 bp, Homo sapien
agcagtgtgcaaagcactagagtccataccgag

SEQ ID NO: 330975 - DNA, 33 bp, Homo sapien
ctgtggatagctcacagaggctcttttgtggac

SEQ ID NO: 330976 - DNA, 33 bp, Homo sapien
ctgtggatagctcacataggctcttttgtggac

SEQ ID NO: 330977 - DNA, 33 bp, Homo sapien
attaccatttgccttcactgggctgttaacatt

SEQ ID NO: 330978 - DNA, 33 bp, Homo sapien
attaccatttgccttccctgggctgttaacatt

SEQ ID NO: 330979 - DNA, 33 bp, Homo sapien
tcgatgtatatttacactccttgcctacaggtt

SEQ ID NO: 330980 - DNA, 33 bp, Homo sapien
tcgatgtatatttacagtccttgcctacaggtt

SEQ ID NO: 330981 - DNA, 33 bp, Homo sapien
ggcaatatcagcaaaaaaaattacacagtcttg

SEQ ID NO: 330982 - DNA, 33 bp, Homo sapien
ggcaatatcagcaaaagaaattacacagtcttg

SEQ ID NO: 330983 - DNA, 33 bp, Homo sapien; identical to SEQ ID NO: 330981

SEQ ID NO: 330984 - DNA, 33 bp, Homo sapien; identical to SEQ ID NO: 330982

SEQ ID NO: 330985 - DNA, 33 bp, Homo sapien
caagttctttgattgcaagtcttaagaatcaat

SEQ ID NO: 330986 - DNA, 33 bp, Homo sapien
caagttctttgattgcgagtcttaagaatcaat

SEQ ID NO: 330987 - DNA, 33 bp, Homo sapien
ggttgcagggagctgaaatggtgtcactgcatt

SEQ ID NO: 330988 - DNA, 33 bp, Homo sapien
ggttgcagggagctgagatggtgtcactgcatt

SEQ ID NO: 330989 - DNA, 33 bp, Homo sapien
ggtttggacactgataacaacacttttacctat

SEQ ID NO: 330990 - DNA, 33 bp, Homo sapien
ggtttggacactgataccaacacttttacctat

SEQ ID NO: 330991 - DNA, 33 bp, Homo sapien
cttatgaaatattcatcactgtggtgctctgat

SEQ ID NO: 330992 - DNA, 33 bp, Homo sapien
cttatgaaatattcatgactgtggtgctctgat

SEQ ID NO: 330993 - DNA, 33 bp, Homo sapien
tccctactggccctaccagtgcacacctgctac

SEQ ID NO: 330994 - DNA, 33 bp, Homo sapien
tccctactggccctacgagtgcacacctgctac

SEQ ID NO: 330995 - DNA, 33 bp, Homo sapien
ctgaacctttcctgctcacagtgtgtgggaaga

SEQ ID NO: 330996 - DNA, 33 bp, Homo sapien
ctgaacctttcctgcttacagtgtgtgggaaga

SEQ ID NO: 330997 - DNA, 33 bp, Homo sapien
tcgagggataaggtgaagggagccagcagataa

SEQ ID NO: 330998 - DNA, 33 bp, Homo sapien
tcgagggataaggtgaggggagccagcagataa

SEQ ID NO: 330999 - DNA, 33 bp, Homo sapien
agcaaagggaacagccaaactgccgcccatctt

SEQ ID NO: 331000 - DNA, 33 bp, Homo sapien
agcaaagggaacagccgaactgccgcccatctt

SEQ ID NO: 331001 - DNA, 33 bp, Homo sapien
tatggaacacctctgcgctttcggccaccacag

SEQ ID NO: 331002 - DNA, 33 bp, Homo sapien
tatggaacacctctgctctttcggccaccacag

SEQ ID NO: 331003 - DNA, 33 bp, Homo sapien
aaaatgttcagaaagaaaaaataacactacaac

SEQ ID NO: 331004 - DNA, 33 bp, Homo sapien
aaaatgttcagaaagagaaaataacactacaac

SEQ ID NO: 331005 - DNA, 33 bp, Homo sapien
agccagcacccatgcaaagtaggaacgtgactg

SEQ ID NO: 331006 - DNA, 33 bp, Homo sapien
agccagcacccatgcagagtaggaacgtgactg

SEQ ID NO: 331007 - DNA, 33 bp, Homo sapien
cctcaatttcgtcgtacaggaactgcttgttga

SEQ ID NO: 331008 - DNA, 33 bp, Homo sapien
cctcaatttcgtcgtagaggaactgcttgttga

SEQ ID NO: 331009 - DNA, 33 bp, Homo sapien
gagctccttgggtgaaagggagaaaggaccttg

SEQ ID NO: 331010 - DNA, 33 bp, Homo sapien
gagctccttgggtgaaggggagaaaggaccttg

SEQ ID NO: 331011 - DNA, 33 bp, Homo sapien
tgagacttccgaaggccgatcgtttgtgccagc

SEQ ID NO: 331012 - DNA, 33 bp, Homo sapien
tgagacttccgaaggctgatcgtttgtgccagc

SEQ ID NO: 331013 - DNA, 33 bp, Homo sapien
aggggtcctgaacagacgacagccacagcaggc

SEQ ID NO: 331014 - DNA, 33 bp, Homo sapien
aggggtcctgaacagatgacagccacagcaggc

SEQ ID NO: 331015 - DNA, 33 bp, Homo sapien
cctagatttcaaaggacatgtggaaatgcctga

SEQ ID NO: 331016 - DNA, 33 bp, Homo sapien
cctagatttcaaaggatatgtggaaatgcctga

SEQ ID NO: 331017 - DNA, 33 bp, Homo sapien
tttcttttcctgtgaaatgccccattgagttct

SEQ ID NO: 331018 - DNA, 33 bp, Homo sapien
tttcttttcctgtgaagtgccccattgagttct

SEQ ID NO: 331019 - DNA, 33 bp, Homo sapien
ggcttgtgcatgggaacggcacttcgtctccag

SEQ ID NO: 331020 - DNA, 33 bp, Homo sapien
ggcttgtgcatgggaatggcacttcgtctccag

SEQ ID NO: 331021 - DNA, 33 bp, Homo sapien
aaaagaaatgatgtaaagaaaagcttttgacac

SEQ ID NO: 331022 - DNA, 33 bp, Homo sapien
aaaagaaatgatgtaatgaaaagcttttgacac

SEQ ID NO: 331023 - DNA, 33 bp, Homo sapien
tcctgttacactgccaaactcactcaagtgaca

SEQ ID NO: 331024 - DNA, 33 bp, Homo sapien
tcctgttacactgccagactcactcaagtgaca

SEQ ID NO: 331025 - DNA, 33 bp, Homo sapien
tagaaggccaataataaagttggaaaaaaggga

SEQ ID NO: 331026 - DNA, 33 bp, Homo sapien
tagaaggccaataatacagttggaaaaaaggga

SEQ ID NO: 331027 - DNA, 33 bp, Homo sapien
tttgcagttttccatcaacttcttcataaacaa

SEQ ID NO: 331028 - DNA, 33 bp, Homo sapien
tttgcagttttccatcgacttcttcataaacaa

SEQ ID NO: 331029 - DNA, 33 bp, Homo sapien
aagggtacagaacaaaatcgtcccagtgactca

SEQ ID NO: 331030 - DNA, 33 bp, Homo sapien
aagggtacagaacaaagtcgtcccagtgactca

SEQ ID NO: 331031 - DNA, 33 bp, Homo sapien
agtgaaaatgcaaggaaaatggttatacggact

SEQ ID NO: 331032 - DNA, 33 bp, Homo sapien
agtgaaaatgcaaggacaatggttatacggact

SEQ ID NO: 331033 - DNA, 33 bp, Homo sapien
gccgggcctaagctaacttagatagcagtggaa

SEQ ID NO: 331034 - DNA, 33 bp, Homo sapien
gccgggcctaagctaatttagatagcagtggaa

SEQ ID NO: 331035 - DNA, 33 bp, Homo sapien
gatcgcttaagtccagaattaggagaccagccg

SEQ ID NO: 331036 - DNA, 33 bp, Homo sapien
gatcgcttaagtccaggattaggagaccagccg

SEQ ID NO: 331037 - DNA, 33 bp, Homo sapien
aaggaaattaaaacagccaggctcaaaacgtca

SEQ ID NO: 331038 - DNA, 33 bp, Homo sapien
aaggaaattaaaacagtcaggctcaaaacgtca

SEQ ID NO: 331039 - DNA, 33 bp, Homo sapien
attgaatattgaaagacggttgacaagttggtc

SEQ ID NO: 331040 - DNA, 33 bp, Homo sapien
attgaatattgaaagatggttgacaagttggtc

SEQ ID NO: 331041 - DNA, 33 bp, Homo sapien
tccggtgggaggtccaaataatgacagaaagct

SEQ ID NO: 331042 - DNA, 33 bp, Homo sapien
tccggtgggaggtccagataatgacagaaagct

SEQ ID NO: 331043 - DNA, 33 bp, Homo sapien
agccgagcacatgagaaagaggtgtggaactgg

SEQ ID NO: 331044 - DNA, 33 bp, Homo sapien
agccgagcacatgagagagaggtgtggaactgg

SEQ ID NO: 331045 - DNA, 33 bp, Homo sapien
gaacctgagactacataagcatttcaagtaaag

SEQ ID NO: 331046 - DNA, 33 bp, Homo sapien
gaacctgagactacatgagcatttcaagtaaag

SEQ ID NO: 331047 - DNA, 33 bp, Homo sapien
agcacatcacaccatcagaaggtgatctttctg

SEQ ID NO: 331048 - DNA, 33 bp, Homo sapien
agcacatcacaccatcggaaggtgatctttctg

SEQ ID NO: 331049 - DNA, 33 bp, Homo sapien
acctgaaagattctaactgtcccaggaccagtc

SEQ ID NO: 331050 - DNA, 33 bp, Homo sapien
acctgaaagattctaagtgtcccaggaccagtc

SEQ ID NO: 331051 - DNA, 33 bp, Homo sapien
attatagagaagatcaccgggtatcacctctca

SEQ ID NO: 331052 - DNA, 33 bp, Homo sapien
attatagagaagatcatcgggtatcacctctca

SEQ ID NO: 331053 - DNA, 33 bp, Homo sapien
ttccagtgaatatacactcatgaaccacgtaac

SEQ ID NO: 331054 - DNA, 33 bp, Homo sapien
ttccagtgaatatacagtcatgaaccacgtaac

SEQ ID NO: 331055 - DNA, 33 bp, Homo sapien
aagacctcaagtgtccaagtcaataacattaca

SEQ ID NO: 331056 - DNA, 33 bp, Homo sapien
aagacctcaagtgtcccagtcaataacattaca

SEQ ID NO: 331057 - DNA, 33 bp, Homo sapien
ggatgccatcaatgaagtgaaaactcgtgggag

SEQ ID NO: 331058 - DNA, 33 bp, Homo sapien
ggatgccatcaatgaattgaaaactcgtgggag

SEQ ID NO: 331059 - DNA, 33 bp, Homo sapien
tgtaaacttcaatacacccatcatggacacact

SEQ ID NO: 331060 - DNA, 33 bp, Homo sapien
tgtaaacttcaatacatccatcatggacacact

SEQ ID NO: 331061 - DNA, 33 bp, Homo sapien
tgggcaaaacttgcaacataatcacagaaattt

SEQ ID NO: 331062 - DNA, 33 bp, Homo sapien
tgggcaaaacttgcaagataatcacagaaattt

SEQ ID NO: 331063 - DNA, 33 bp, Homo sapien
accccagagccagtgcaagtgtggaaggcttgg

SEQ ID NO: 331064 - DNA, 33 bp, Homo sapien
accccagagccagtgcgagtgtggaaggcttgg

SEQ ID NO: 331065 - DNA, 33 bp, Homo sapien
agctaggaaaacttaacagccatgtgcagaaaa

SEQ ID NO: 331066 - DNA, 33 bp, Homo sapien
agctaggaaaacttaatagccatgtgcagaaaa

SEQ ID NO: 331067 - DNA, 33 bp, Homo sapien
ggtagttttgtacttacgttcacaagagaaagt

SEQ ID NO: 331068 - DNA, 33 bp, Homo sapien
ggtagttttgtacttatgttcacaagagaaagt

SEQ ID NO: 331069 - DNA, 33 bp, Homo sapien
atgtatattaccataaaacgtacgtacacacac

SEQ ID NO: 331070 - DNA, 33 bp, Homo sapien
atgtatattaccataatacgtacgtacacacac

SEQ ID NO: 331071 - DNA, 33 bp, Homo sapien
ctacgttaaactgggaagtgacatcagcctctt

SEQ ID NO: 331072 - DNA, 33 bp, Homo sapien
ctacgttaaactgggacgtgacatcagcctctt

SEQ ID NO: 331073 - DNA, 33 bp, Homo sapien
agtcatgtacaagacaccaaaaagaatacaaag

SEQ ID NO: 331074 - DNA, 33 bp, Homo sapien
agtcatgtacaagacagcaaaaagaatacaaag

SEQ ID NO: 331075 - DNA, 33 bp, Homo sapien
aacacatacaggccataagttaataatctttca

SEQ ID NO: 331076 - DNA, 33 bp, Homo sapien
aacacatacaggccatgagttaataatctttca

SEQ ID NO: 331077 - DNA, 33 bp, Homo sapien
ataaatgcaactattcaaaaacatgctttcaaa

SEQ ID NO: 331078 - DNA, 33 bp, Homo sapien
ataaatgcaactattccaaaacatgctttcaaa

SEQ ID NO: 331079 - DNA, 33 bp, Homo sapien
acaccctggccttacaacttttgatctccttat

SEQ ID NO: 331080 - DNA, 33 bp, Homo sapien
acaccctggccttacaccttttgatctccttat

SEQ ID NO: 331081 - DNA, 33 bp, Homo sapien
agcctttcagtgaaaaagaatgttttgggcaga

SEQ ID NO: 331082 - DNA, 33 bp, Homo sapien
agcctttcagtgaaaatgaatgttttgggcaga

SEQ ID NO: 331083 - DNA, 33 bp, Homo sapien
ctcaatggttattaaaagcttatcacaaagatg

SEQ ID NO: 331084 - DNA, 33 bp, Homo sapien
ctcaatggttattaaatgcttatcacaaagatg

SEQ ID NO: 331085 - DNA, 33 bp, Homo sapien
tgactttttgaaagaacgatacattggcatagt

SEQ ID NO: 331086 - DNA, 33 bp, Homo sapien
tgactttttgaaagaatgatacattggcatagt

SEQ ID NO: 331087 - DNA, 33 bp, Homo sapien
atgtacgactctaaaccaaacagtgtacacttt

SEQ ID NO: 331088 - DNA, 33 bp, Homo sapien
atgtacgactctaaacgaaacagtgtacacttt

SEQ ID NO: 331089 - DNA, 33 bp, Homo sapien; identical to SEQ ID NO: 331087

SEQ ID NO: 331090 - DNA, 33 bp, Homo sapien; identical to SEQ ID NO: 331088

SEQ ID NO: 331091 - DNA, 33 bp, Homo sapien
gagtcagtgaaatatacgagtgagtaatggagt

SEQ ID NO: 331092 - DNA, 33 bp, Homo sapien
gagtcagtgaaatatatgagtgagtaatggagt

SEQ ID NO: 331093 - DNA, 33 bp, Homo sapien
ccatagacataaagaaaggtaaggcctacatga

SEQ ID NO: 331094 - DNA, 33 bp, Homo sapien
ccatagacataaagaagggtaaggcctacatga

SEQ ID NO: 331095 - DNA, 33 bp, Homo sapien
ttaaattgcaatcccacataaagccccagaaaa

SEQ ID NO: 331096 - DNA, 33 bp, Homo sapien
ttaaattgcaatcccatataaagccccagaaaa

SEQ ID NO: 331097 - DNA, 33 bp, Homo sapien
ccaaggataatccaaagatactgagagtgaaga

SEQ ID NO: 331098 - DNA, 33 bp, Homo sapien
ccaaggataatccaaatatactgagagtgaaga

SEQ ID NO: 331099 - DNA, 33 bp, Homo sapien
cacacgtgatttaaaaatgagacagaataaata

SEQ ID NO: 331100 - DNA, 33 bp, Homo sapien
cacacgtgatttaaaagtgagacagaataaata

SEQ ID NO: 331101 - DNA, 33 bp, Homo sapien
tagaatggggcatgaaagagctaaacatgcttt

SEQ ID NO: 331102 - DNA, 33 bp, Homo sapien
tagaatggggcatgaatgagctaaacatgcttt

SEQ ID NO: 331103 - DNA, 33 bp, Homo sapien
ttttgcccttccctgacattgactaccttgtta

SEQ ID NO: 331104 - DNA, 33 bp, Homo sapien
ttttgcccttccctgatattgactaccttgtta

SEQ ID NO: 331105 - DNA, 33 bp, Homo sapien
gtctcattgagagacaagttggactcaggccaa

SEQ ID NO: 331106 - DNA, 33 bp, Homo sapien
gtctcattgagagacaggttggactcaggccaa

SEQ ID NO: 331107 - DNA, 33 bp, Homo sapien
ttgctcctttcaaatacggtgagacttgtttta

SEQ ID NO: 331108 - DNA, 33 bp, Homo sapien
ttgctcctttcaaatatggtgagacttgtttta

SEQ ID NO: 331109 - DNA, 33 bp, Homo sapien
tgcaatcactatcaaaatttaagtagtttttgt

SEQ ID NO: 331110 - DNA, 33 bp, Homo sapien
tgcaatcactatcaaactttaagtagtttttgt

SEQ ID NO: 331111 - DNA, 33 bp, Homo sapien
ctttaaaaaatcttccaatcacaattgtctata

SEQ ID NO: 331112 - DNA, 33 bp, Homo sapien
ctttaaaaaatcttcccatcacaattgtctata

SEQ ID NO: 331113 - DNA, 33 bp, Homo sapien
cccattgatgcatacaaggtgcctttctgttgt

SEQ ID NO: 331114 - DNA, 33 bp, Homo sapien
cccattgatgcatacatggtgcctttctgttgt

SEQ ID NO: 331115 - DNA, 33 bp, Homo sapien
tggttcacaggaatacacggggttagtttaaag

SEQ ID NO: 331116 - DNA, 33 bp, Homo sapien
tggttcacaggaatacgcggggttagtttaaag

SEQ ID NO: 331117 - DNA, 33 bp, Homo sapien
attcatgaaaagctgaaatgttatggagtatca

SEQ ID NO: 331118 - DNA, 33 bp, Homo sapien
attcatgaaaagctgagatgttatggagtatca

SEQ ID NO: 331119 - DNA, 33 bp, Homo sapien
ttccaaaaccatatgcaatatctaaggttataa

SEQ ID NO: 331120 - DNA, 33 bp, Homo sapien
ttccaaaaccatatgcgatatctaaggttataa

SEQ ID NO: 331121 - DNA, 33 bp, Homo sapien
tccttcaatatctggaagaagctacccttgaga

SEQ ID NO: 331122 - DNA, 33 bp, Homo sapien
tccttcaatatctggaggaagctacccttgaga

SEQ ID NO: 331123 - DNA, 33 bp, Homo sapien
ctatcgaaagggtgagcaggagcagaaccataa

SEQ ID NO: 331124 - DNA, 33 bp, Homo sapien
ctatcgaaagggtgagtaggagcagaaccataa

SEQ ID NO: 331125 - DNA, 33 bp, Homo sapien
aagtgtgattgcaaaacatgaggttggaatgaa

SEQ ID NO: 331126 - DNA, 33 bp, Homo sapien
aagtgtgattgcaaaagatgaggttggaatgaa

SEQ ID NO: 331127 - DNA, 33 bp, Homo sapien
ttgatttcacaagccaatagctagaggggaatt

SEQ ID NO: 331128 - DNA, 33 bp, Homo sapien
ttgatttcacaagccagtagctagaggggaatt

SEQ ID NO: 331129 - DNA, 33 bp, Homo sapien
caggatggattgaaacagccaattggttcagtt

SEQ ID NO: 331130 - DNA, 33 bp, Homo sapien
caggatggattgaaacggccaattggttcagtt

SEQ ID NO: 331131 - DNA, 33 bp, Homo sapien
tgaaggtagttcagaaaaatcttagaggcaagg

SEQ ID NO: 331132 - DNA, 33 bp, Homo sapien
tgaaggtagttcagaagaatcttagaggcaagg

SEQ ID NO: 331133 - DNA, 33 bp, Homo sapien
aaatcactagttgcacaatttttcatttgctgg

SEQ ID NO: 331134 - DNA, 33 bp, Homo sapien
aaatcactagttgcacgatttttcatttgctgg

SEQ ID NO: 331135 - DNA, 33 bp, Homo sapien
atactcaagcaaccaacaggaaattctggagcc

SEQ ID NO: 331136 - DNA, 33 bp, Homo sapien
atactcaagcaaccaataggaaattctggagcc

SEQ ID NO: 331137 - DNA, 33 bp, Homo sapien
tcccagatgatcaggagggtgaaactggaggtg

SEQ ID NO: 331138 - DNA, 33 bp, Homo sapien
tcccagatgatcaggatggtgaaactggaggtg

SEQ ID NO: 331139 - DNA, 33 bp, Homo sapien
aaaggacacacatccaaattttatcattccacc

SEQ ID NO: 331140 - DNA, 33 bp, Homo sapien
aaaggacacacatccagattttatcattccacc

SEQ ID NO: 331141 - DNA, 33 bp, Homo sapien
ctcttgctctcctcacactggttgagttccctg

SEQ ID NO: 331142 - DNA, 33 bp, Homo sapien
ctcttgctctcctcacgctggttgagttccctg

SEQ ID NO: 331143 - DNA, 33 bp, Homo sapien
gtgcttctgtgcaccaccccttgttgcatctgt

SEQ ID NO: 331144 - DNA, 33 bp, Homo sapien
gtgcttctgtgcaccatcccttgttgcatctgt

SEQ ID NO: 331145 - DNA, 33 bp, Homo sapien
actataaggggaacaggatcatttaacaaacaa

SEQ ID NO: 331146 - DNA, 33 bp, Homo sapien
actataaggggaacagtatcatttaacaaacaa

SEQ ID NO: 331147 - DNA, 33 bp, Homo sapien
cacagagctcctagaaactcgtaattttatgag

SEQ ID NO: 331148 - DNA, 33 bp, Homo sapien
cacagagctcctagaatctcgtaattttatgag

SEQ ID NO: 331149 - DNA, 33 bp, Homo sapien
ctgagattcccctccccacaagaagcaccaaga

SEQ ID NO: 331150 - DNA, 33 bp, Homo sapien
ctgagattcccctcccgacaagaagcaccaaga

SEQ ID NO: 331151 - DNA, 33 bp, Homo sapien
aagccatttgtttctcacagttcttcacagttc

SEQ ID NO: 331152 - DNA, 33 bp, Homo sapien
aagccatttgtttctcccagttcttcacagttc

SEQ ID NO: 331153 - DNA, 33 bp, Homo sapien
tgcccgtagagtttacaacccatagctgtgaat

SEQ ID NO: 331154 - DNA, 33 bp, Homo sapien
tgcccgtagagtttacgacccatagctgtgaat

SEQ ID NO: 331155 - DNA, 33 bp, Homo sapien
gttatattttaagtaactgaatagcacatattt

SEQ ID NO: 331156 - DNA, 33 bp, Homo sapien
gttatattttaagtaattgaatagcacatattt

SEQ ID NO: 331157 - DNA, 33 bp, Homo sapien
tttacagttttccaaacgtcatagaggcatggt

SEQ ID NO: 331158 - DNA, 33 bp, Homo sapien
tttacagttttccaaatgtcatagaggcatggt

SEQ ID NO: 331159 - DNA, 33 bp, Homo sapien
ctctggtttcagtagtaaattggttctgccctt

SEQ ID NO: 331160 - DNA, 33 bp, Homo sapien
ctctggtttcagtagttaattggttctgccctt

SEQ ID NO: 331161 - DNA, 33 bp, Homo sapien
aataaattggtcccaccatgatttgtcattgtt

SEQ ID NO: 331162 - DNA, 33 bp, Homo sapien
aataaattggtcccactatgatttgtcattgtt

SEQ ID NO: 331163 - DNA, 33 bp, Homo sapien
gatcaaaatcaccaaacagcataagaaaaaaag

SEQ ID NO: 331164 - DNA, 33 bp, Homo sapien
gatcaaaatcaccaaagagcataagaaaaaaag

SEQ ID NO: 331165 - DNA, 33 bp, Homo sapien
actcaatttcttaaccccttatcatgcagcata

SEQ ID NO: 331166 - DNA, 33 bp, Homo sapien
actcaatttcttaacctcttatcatgcagcata

SEQ ID NO: 331167 - DNA, 33 bp, Homo sapien
acacaaaaatgggaaaaatgtggagactgcctc

SEQ ID NO: 331168 - DNA, 33 bp, Homo sapien
acacaaaaatgggaaatatgtggagactgcctc

SEQ ID NO: 331169 - DNA, 33 bp, Homo sapien
tgagattttattggaaacctcttttgcctctcc

SEQ ID NO: 331170 - DNA, 33 bp, Homo sapien
tgagattttattggaagcctcttttgcctctcc

SEQ ID NO: 331171 - DNA, 33 bp, Homo sapien; identical to SEQ ID NO: 331169

SEQ ID NO: 331172 - DNA, 33 bp, Homo sapien; identical to SEQ ID NO: 331170

SEQ ID NO: 331173 - DNA, 33 bp, Homo sapien
tcaactttctcataccgcaaatggagctcagtc

SEQ ID NO: 331174 - DNA, 33 bp, Homo sapien
tcaactttctcatacctcaaatggagctcagtc

SEQ ID NO: 331175 - DNA, 33 bp, Homo sapien
tcaaaagttcctgagcagccagttataatcatg

SEQ ID NO: 331176 - DNA, 33 bp, Homo sapien
tcaaaagttcctgagcggccagttataatcatg

SEQ ID NO: 331177 - DNA, 33 bp, Homo sapien
atggttgtgccaagccactgttggaaaacatct

SEQ ID NO: 331178 - DNA, 33 bp, Homo sapien
atggttgtgccaagccgctgttggaaaacatct

SEQ ID NO: 331179 - DNA, 33 bp, Homo sapien
ccatcacataacctacaagccattcttctaaaa

SEQ ID NO: 331180 - DNA, 33 bp, Homo sapien
ccatcacataacctaccagccattcttctaaaa

SEQ ID NO: 331181 - DNA, 33 bp, Homo sapien
gaagggcaatcttctggagtccctctcagcagt

SEQ ID NO: 331182 - DNA, 33 bp, Homo sapien
gaagggcaatcttctgtagtccctctcagcagt

SEQ ID NO: 331183 - DNA, 33 bp, Homo sapien
agtcatctcccttgaaatgctgtatccagggtg

SEQ ID NO: 331184 - DNA, 33 bp, Homo sapien
agtcatctcccttgaagtgctgtatccagggtg

SEQ ID NO: 331185 - DNA, 33 bp, Homo sapien
aattccttgctcctgacgttaggaagaaaacat

SEQ ID NO: 331186 - DNA, 33 bp, Homo sapien
aattccttgctcctgatgttaggaagaaaacat

SEQ ID NO: 331187 - DNA, 33 bp, Homo sapien
cgtttccatcccggtaacagtgtgttgatgaaa

SEQ ID NO: 331188 - DNA, 33 bp, Homo sapien
cgtttccatcccggtagcagtgtgttgatgaaa

SEQ ID NO: 331189 - DNA, 33 bp, Homo sapien
caatcaaatgcagtccaaaaaattaaatggaaa

SEQ ID NO: 331190 - DNA, 33 bp, Homo sapien
caatcaaatgcagtccgaaaaattaaatggaaa

SEQ ID NO: 331191 - DNA, 33 bp, Homo sapien
agctcaagatagagaagcatagccctgcactgg

SEQ ID NO: 331192 - DNA, 33 bp, Homo sapien
agctcaagatagagaatcatagccctgcactgg

SEQ ID NO: 331193 - DNA, 33 bp, Homo sapien
caggaaatggcacctgaatctcatagctgcact

SEQ ID NO: 331194 - DNA, 33 bp, Homo sapien
caggaaatggcacctgcatctcatagctgcact

SEQ ID NO: 331195 - DNA, 33 bp, Homo sapien
cagcaaaaacgcctgcactggaaagttaagttt

SEQ ID NO: 331196 - DNA, 33 bp, Homo sapien
cagcaaaaacgcctgcgctggaaagttaagttt

SEQ ID NO: 331197 - DNA, 33 bp, Homo sapien
cacaatgaaacattacaccattctcagatcatt

SEQ ID NO: 331198 - DNA, 33 bp, Homo sapien
cacaatgaaacattacgccattctcagatcatt

SEQ ID NO: 331199 - DNA, 33 bp, Homo sapien
aaaaaattaaaattgcaaacattgtcagattgg

SEQ ID NO: 331200 - DNA, 33 bp, Homo sapien
aaaaaattaaaattgcgaacattgtcagattgg

SEQ ID NO: 331201 - DNA, 33 bp, Homo sapien
gtggacaaagttaaaagctgtcatatacacata

SEQ ID NO: 331202 - DNA, 33 bp, Homo sapien
gtggacaaagttaaaatctgtcatatacacata

SEQ ID NO: 331203 - DNA, 33 bp, Homo sapien
ttaggggtgtagatggaaaatccagcagttaat

SEQ ID NO: 331204 - DNA, 33 bp, Homo sapien
ttaggggtgtagatgggaaatccagcagttaat

SEQ ID NO: 331205 - DNA, 33 bp, Homo sapien
attcaggttgcctcagccaatccaaagtgatac

SEQ ID NO: 331206 - DNA, 33 bp, Homo sapien
attcaggttgcctcagtcaatccaaagtgatac

SEQ ID NO: 331207 - DNA, 33 bp, Homo sapien
gggaaacaaatatcaacgtgaggtttggagggg

SEQ ID NO: 331208 - DNA, 33 bp, Homo sapien
gggaaacaaatatcaatgtgaggtttggagggg

SEQ ID NO: 331209 - DNA, 33 bp, Homo sapien
ggtatttcaagtttcaagattattttatgcccc

SEQ ID NO: 331210 - DNA, 33 bp, Homo sapien
ggtatttcaagtttcatgattattttatgcccc

SEQ ID NO: 331211 - DNA, 33 bp, Homo sapien
cactctgaaaacactacgtactgcacaatccaa

SEQ ID NO: 331212 - DNA, 33 bp, Homo sapien
cactctgaaaacactatgtactgcacaatccaa

SEQ ID NO: 331213 - DNA, 33 bp, Homo sapien
tgatagaatgctctaactggattaagcacattc

SEQ ID NO: 331214 - DNA, 33 bp, Homo sapien
tgatagaatgctctaattggattaagcacattc

SEQ ID NO: 331215 - DNA, 33 bp, Homo sapien
tcactactaagcgaccaatactgacatgattgt

SEQ ID NO: 331216 - DNA, 33 bp, Homo sapien
tcactactaagcgacccatactgacatgattgt

SEQ ID NO: 331217 - DNA, 33 bp, Homo sapien
ggggcagggtaatctcaataaatactcgctttc

SEQ ID NO: 331218 - DNA, 33 bp, Homo sapien
ggggcagggtaatctcgataaatactcgctttc

SEQ ID NO: 331219 - DNA, 33 bp, Homo sapien
catttcttaccatagcaataacctagtgaaaat

SEQ ID NO: 331220 - DNA, 33 bp, Homo sapien
catttcttaccatagcgataacctagtgaaaat

SEQ ID NO: 331221 - DNA, 33 bp, Homo sapien
tggatgaatgccaagaacaatgtgcttatacag

SEQ ID NO: 331222 - DNA, 33 bp, Homo sapien
tggatgaatgccaagagcaatgtgcttatacag

SEQ ID NO: 331223 - DNA, 33 bp, Homo sapien
ttcccctctgctttacaggatacttgtgtgata

SEQ ID NO: 331224 - DNA, 33 bp, Homo sapien
ttcccctctgctttacgggatacttgtgtgata

SEQ ID NO: 331225 - DNA, 33 bp, Homo sapien
agtgctgagattttggaaagacgtgtgagcatt

SEQ ID NO: 331226 - DNA, 33 bp, Homo sapien
agtgctgagattttgggaagacgtgtgagcatt

SEQ ID NO: 331227 - DNA, 33 bp, Homo sapien
actgcagaacatggccaataggaacacagagtc

SEQ ID NO: 331228 - DNA, 33 bp, Homo sapien
actgcagaacatggccgataggaacacagagtc

SEQ ID NO: 331229 - DNA, 33 bp, Homo sapien
atctatttaagacaagcaatggaaaatcctgtg

SEQ ID NO: 331230 - DNA, 33 bp, Homo sapien
atctatttaagacaaggaatggaaaatcctgtg

SEQ ID NO: 331231 - DNA, 33 bp, Homo sapien
tgggtgtgcatagggacagaagggccaacctag

SEQ ID NO: 331232 - DNA, 33 bp, Homo sapien
tgggtgtgcatagggagagaagggccaacctag

SEQ ID NO: 331233 - DNA, 33 bp, Homo sapien
acggacataagtataaagtgaacaaaatctcta

SEQ ID NO: 331234 - DNA, 33 bp, Homo sapien
acggacataagtataaggtgaacaaaatctcta

SEQ ID NO: 331235 - DNA, 33 bp, Homo sapien
aggagtatgccagaaaataggacactcctcctc

SEQ ID NO: 331236 - DNA, 33 bp, Homo sapien
aggagtatgccagaaagtaggacactcctcctc

SEQ ID NO: 331237 - DNA, 33 bp, Homo sapien
tactttctacttctaaatcactttcaatatgag

SEQ ID NO: 331238 - DNA, 33 bp, Homo sapien
tactttctacttctaagtcactttcaatatgag

SEQ ID NO: 331239 - DNA, 33 bp, Homo sapien
ctctcaagtgagaccacgtggcatttgttgttc

SEQ ID NO: 331240 - DNA, 33 bp, Homo sapien
ctctcaagtgagaccatgtggcatttgttgttc

SEQ ID NO: 331241 - DNA, 33 bp, Homo sapien
ctgatgggtctgaaaactggaggcctgtcatgc

SEQ ID NO: 331242 - DNA, 33 bp, Homo sapien
ctgatgggtctgaaaattggaggcctgtcatgc

SEQ ID NO: 331243 - DNA, 33 bp, Homo sapien
cttcccaagagcataacaacttgaacttcatct

SEQ ID NO: 331244 - DNA, 33 bp, Homo sapien
cttcccaagagcataagaacttgaacttcatct

SEQ ID NO: 331245 - DNA, 33 bp, Homo sapien
acaaatatttcctatcacttagaatttttatct

SEQ ID NO: 331246 - DNA, 33 bp, Homo sapien
acaaatatttcctatctcttagaatttttatct

SEQ ID NO: 331247 - DNA, 33 bp, Homo sapien
tgccacatttcttgagcaagtcctgtgctactc

SEQ ID NO: 331248 - DNA, 33 bp, Homo sapien
tgccacatttcttgagtaagtcctgtgctactc

SEQ ID NO: 331249 - DNA, 33 bp, Homo sapien
gagaatgagcaattgcagagaaagtagtgcatt

SEQ ID NO: 331250 - DNA, 33 bp, Homo sapien
gagaatgagcaattgctgagaaagtagtgcatt

SEQ ID NO: 331251 - DNA, 33 bp, Homo sapien
aaagcattagctttgcagagaaaaaatctggca

SEQ ID NO: 331252 - DNA, 33 bp, Homo sapien
aaagcattagctttgcggagaaaaaatctggca

SEQ ID NO: 331253 - DNA, 33 bp, Homo sapien
ttgggagaactttctaactcttgacatgaaggc

SEQ ID NO: 331254 - DNA, 33 bp, Homo sapien
ttgggagaactttctatctcttgacatgaaggc

SEQ ID NO: 331255 - DNA, 33 bp, Homo sapien
acataatggatcaacaaaatgtggcatgtttat

SEQ ID NO: 331256 - DNA, 33 bp, Homo sapien
acataatggatcaacacaatgtggcatgtttat

SEQ ID NO: 331257 - DNA, 33 bp, Homo sapien
atattaaaattaaggccgaattggagatttgtt

SEQ ID NO: 331258 - DNA, 33 bp, Homo sapien
atattaaaattaaggctgaattggagatttgtt

SEQ ID NO: 331259 - DNA, 33 bp, Homo sapien
attttgcctatgtcctaagcaactatttcttta

SEQ ID NO: 331260 - DNA, 33 bp, Homo sapien
attttgcctatgtcctgagcaactatttcttta

SEQ ID NO: 331261 - DNA, 33 bp, Homo sapien
tttgtaattcaagcctaaagaccatgttttaag

SEQ ID NO: 331262 - DNA, 33 bp, Homo sapien
tttgtaattcaagcctgaagaccatgttttaag

SEQ ID NO: 331263 - DNA, 33 bp, Homo sapien
aatgaaaacagtatcaatgagctgtagtatagc

SEQ ID NO: 331264 - DNA, 33 bp, Homo sapien
aatgaaaacagtatcagtgagctgtagtatagc

SEQ ID NO: 331265 - DNA, 33 bp, Homo sapien
cttctttattttcaccccatctctattaacttt

SEQ ID NO: 331266 - DNA, 33 bp, Homo sapien
cttctttattttcacctcatctctattaacttt

SEQ ID NO: 331267 - DNA, 33 bp, Homo sapien
gattcattcatctggcaattattcaattattat

SEQ ID NO: 331268 - DNA, 33 bp, Homo sapien
gattcattcatctggcgattattcaattattat

SEQ ID NO: 331269 - DNA, 33 bp, Homo sapien
agaaacgggaacaagaccatctaagcacccgag

SEQ ID NO: 331270 - DNA, 33 bp, Homo sapien
agaaacgggaacaagagcatctaagcacccgag

SEQ ID NO: 331271 - DNA, 33 bp, Homo sapien
gggagcttaaggagaaatgctacgtaattatca

SEQ ID NO: 331272 - DNA, 33 bp, Homo sapien
gggagcttaaggagaagtgctacgtaattatca

SEQ ID NO: 331273 - DNA, 33 bp, Homo sapien
aaaccactgacccttaccctgagtgttacagct

SEQ ID NO: 331274 - DNA, 33 bp, Homo sapien
aaaccactgacccttatcctgagtgttacagct

SEQ ID NO: 331275 - DNA, 33 bp, Homo sapien
aaaggtttgtggcttcactcttgaaatcagcaa

SEQ ID NO: 331276 - DNA, 33 bp, Homo sapien
aaaggtttgtggcttcgctcttgaaatcagcaa

SEQ ID NO: 331277 - DNA, 33 bp, Homo sapien
gcctatcacttctcaacgagtaaaatatgagct

SEQ ID NO: 331278 - DNA, 33 bp, Homo sapien
gcctatcacttctcaatgagtaaaatatgagct

SEQ ID NO: 331279 - DNA, 33 bp, Homo sapien
gaatttggtgaaggatcatattccatgtataca

SEQ ID NO: 331280 - DNA, 33 bp, Homo sapien
gaatttggtgaaggatgatattccatgtataca

SEQ ID NO: 331281 - DNA, 33 bp, Homo sapien
aagaagtagaaatgaaaaaggagtgacccatct

SEQ ID NO: 331282 - DNA, 33 bp, Homo sapien
aagaagtagaaatgaacaaggagtgacccatct

SEQ ID NO: 331283 - DNA, 33 bp, Homo sapien
aaactttatcttttcacgggagatatttcagaa

SEQ ID NO: 331284 - DNA, 33 bp, Homo sapien
aaactttatcttttcatgggagatatttcagaa

SEQ ID NO: 331285 - DNA, 33 bp, Homo sapien
tcattactttatatatcacactggaataataaa

SEQ ID NO: 331286 - DNA, 33 bp, Homo sapien
tcattactttatatatgacactggaataataaa

SEQ ID NO: 331287 - DNA, 33 bp, Homo sapien
aaatgaactttcttaagaacaagacagtgtggt

SEQ ID NO: 331288 - DNA, 33 bp, Homo sapien
aaatgaactttcttaataacaagacagtgtggt

SEQ ID NO: 331289 - DNA, 33 bp, Homo sapien
atgtggtacaaggaatcaagtatgacaggcaat

SEQ ID NO: 331290 - DNA, 33 bp, Homo sapien
atgtggtacaaggaatgaagtatgacaggcaat

SEQ ID NO: 331291 - DNA, 33 bp, Homo sapien
gctggctggagacgtaggtacacattatctgag

SEQ ID NO: 331292 - DNA, 33 bp, Homo sapien
gctggctggagacgtatgtacacattatctgag

SEQ ID NO: 331293 - DNA, 33 bp, Homo sapien
tgagaaatcccatcatcacaagccaagacactc

SEQ ID NO: 331294 - DNA, 33 bp, Homo sapien
tgagaaatcccatcattacaagccaagacactc

SEQ ID NO: 331295 - DNA, 33 bp, Homo sapien
gcaccaaaagcaacacagaagagtctcctctat

SEQ ID NO: 331296 - DNA, 33 bp, Homo sapien
gcaccaaaagcaacacggaagagtctcctctat

SEQ ID NO: 331297 - DNA, 33 bp, Homo sapien
cctcccctatctgctgcacgtactgctccccac

SEQ ID NO: 331298 - DNA, 33 bp, Homo sapien
cctcccctatctgctggacgtactgctccccac

SEQ ID NO: 331299 - DNA, 33 bp, Homo sapien
atctacaacaaacccacgctacctttcacacag

SEQ ID NO: 331300 - DNA, 33 bp, Homo sapien
atctacaacaaacccatgctacctttcacacag

SEQ ID NO: 331301 - DNA, 33 bp, Homo sapien
ctcatgggcaggttaccacaaaaaccatttgga

SEQ ID NO: 331302 - DNA, 33 bp, Homo sapien
ctcatgggcaggttactacaaaaaccatttgga

SEQ ID NO: 331303 - DNA, 33 bp, Homo sapien
ttctataatgaaactgcaatggtgaacacatga

SEQ ID NO: 331304 - DNA, 33 bp, Homo sapien
ttctataatgaaactgtaatggtgaacacatga

SEQ ID NO: 331305 - DNA, 33 bp, Homo sapien
ggttgtagtctaagggcaaactagccttacaaa

SEQ ID NO: 331306 - DNA, 33 bp, Homo sapien
ggttgtagtctaagggtaaactagccttacaaa

SEQ ID NO: 331307 - DNA, 33 bp, Homo sapien
aattataatatttgacacataatagccttattt

SEQ ID NO: 331308 - DNA, 33 bp, Homo sapien
aattataatatttgactcataatagccttattt

SEQ ID NO: 331309 - DNA, 33 bp, Homo sapien
tttctccaaacgactacagaaatgtccactaag

SEQ ID NO: 331310 - DNA, 33 bp, Homo sapien
tttctccaaacgactatagaaatgtccactaag

SEQ ID NO: 331311 - DNA, 33 bp, Homo sapien
atattctgggaaccatgatgctattgacacttg

SEQ ID NO: 331312 - DNA, 33 bp, Homo sapien
atattctgggaaccattatgctattgacacttg

SEQ ID NO: 331313 - DNA, 33 bp, Homo sapien
agcctacttcatcaaacaaattcagactacaca

SEQ ID NO: 331314 - DNA, 33 bp, Homo sapien
agcctacttcatcaaataaattcagactacaca

SEQ ID NO: 331315 - DNA, 33 bp, Homo sapien
tccttagctgttacaaggaactattatggtgaa

SEQ ID NO: 331316 - DNA, 33 bp, Homo sapien
tccttagctgttacaatgaactattatggtgaa

SEQ ID NO: 331317 - DNA, 33 bp, Homo sapien
attctgtgtgacgttacagtgatggatacataa

SEQ ID NO: 331318 - DNA, 33 bp, Homo sapien
attctgtgtgacgttatagtgatggatacataa

SEQ ID NO: 331319 - DNA, 33 bp, Homo sapien
ttcaccttaaagacaaccatgaataactcacat

SEQ ID NO: 331320 - DNA, 33 bp, Homo sapien
ttcaccttaaagacaatcatgaataactcacat

SEQ ID NO: 331321 - DNA, 33 bp, Homo sapien
taccaaaatcggtcaccgaaattatctgtgtac

SEQ ID NO: 331322 - DNA, 33 bp, Homo sapien
taccaaaatcggtcactgaaattatctgtgtac

SEQ ID NO: 331323 - DNA, 33 bp, Homo sapien
tctaactcctcacctacattcttgtcttcttcc

SEQ ID NO: 331324 - DNA, 33 bp, Homo sapien
tctaactcctcacctatattcttgtcttcttcc

SEQ ID NO: 331325 - DNA, 33 bp, Homo sapien
ctgttgtttcaaggcaagtcacaattcctgctt

SEQ ID NO: 331326 - DNA, 33 bp, Homo sapien
ctgttgtttcaaggcacgtcacaattcctgctt

SEQ ID NO: 331327 - DNA, 33 bp, Homo sapien
caagtgaagaccaagacactgtttcatatagga

SEQ ID NO: 331328 - DNA, 33 bp, Homo sapien
caagtgaagaccaagatactgtttcatatagga

SEQ ID NO: 331329 - DNA, 33 bp, Homo sapien
ataatagctattggtgaagataaggtgaaaagg

SEQ ID NO: 331330 - DNA, 33 bp, Homo sapien
ataatagctattggtgcagataaggtgaaaagg

SEQ ID NO: 331331 - DNA, 33 bp, Homo sapien
tcatctgtcagcctaacaaatcaaaacaagtta

SEQ ID NO: 331332 - DNA, 33 bp, Homo sapien
tcatctgtcagcctaagaaatcaaaacaagtta

SEQ ID NO: 331333 - DNA, 33 bp, Homo sapien
cttcatcttgccttcaacctccaagttgtcctt

SEQ ID NO: 331334 - DNA, 33 bp, Homo sapien
cttcatcttgccttcagcctccaagttgtcctt

SEQ ID NO: 331335 - DNA, 33 bp, Homo sapien
aaacagatctatgtgactaaactttttgtcatt

SEQ ID NO: 331336 - DNA, 33 bp, Homo sapien
aaacagatctatgtgattaaactttttgtcatt

SEQ ID NO: 331337 - DNA, 33 bp, Homo sapien
ccagtcatgattgattcaaacacctcttaaagg

SEQ ID NO: 331338 - DNA, 33 bp, Homo sapien
ccagtcatgattgattgaaacacctcttaaagg

SEQ ID NO: 331339 - DNA, 33 bp, Homo sapien
cctagcaagtgctggaaccgaagtctccaaagg

SEQ ID NO: 331340 - DNA, 33 bp, Homo sapien
cctagcaagtgctggacccgaagtctccaaagg

SEQ ID NO: 331341 - DNA, 33 bp, Homo sapien
gtgggtggggaatgaaactgactagtgtcatag

SEQ ID NO: 331342 - DNA, 33 bp, Homo sapien
gtgggtggggaatgaagctgactagtgtcatag

SEQ ID NO: 331343 - DNA, 33 bp, Homo sapien
ccatcatcacatgagactagtatatacaaaact

SEQ ID NO: 331344 - DNA, 33 bp, Homo sapien
ccatcatcacatgagagtagtatatacaaaact

SEQ ID NO: 331345 - DNA, 33 bp, Homo sapien
tttaaatgcatgaacaaaaggcatggggttctt

SEQ ID NO: 331346 - DNA, 33 bp, Homo sapien
tttaaatgcatgaacagaaggcatggggttctt

SEQ ID NO: 331347 - DNA, 33 bp, Homo sapien
tctgctattctgtgcacatgtgatgtatgaaga

SEQ ID NO: 331348 - DNA, 33 bp, Homo sapien
tctgctattctgtgcatatgtgatgtatgaaga

SEQ ID NO: 331349 - DNA, 33 bp, Homo sapien
gctgactaaagccatacagtgacaacaggccag

SEQ ID NO: 331350 - DNA, 33 bp, Homo sapien
gctgactaaagccatatagtgacaacaggccag

SEQ ID NO: 331351 - DNA, 33 bp, Homo sapien
ggagagtctaattcagaaaatatttgcttgcct

SEQ ID NO: 331352 - DNA, 33 bp, Homo sapien
ggagagtctaattcaggaaatatttgcttgcct

SEQ ID NO: 331353 - DNA, 33 bp, Homo sapien
tgtaaattgacttccacaaagataaaacccaga

SEQ ID NO: 331354 - DNA, 33 bp, Homo sapien
tgtaaattgacttccataaagataaaacccaga

SEQ ID NO: 331355 - DNA, 33 bp, Homo sapien
agagaaggtatattacgggcattgttgctgaaa

SEQ ID NO: 331356 - DNA, 33 bp, Homo sapien
agagaaggtatattactggcattgttgctgaaa

SEQ ID NO: 331357 - DNA, 33 bp, Homo sapien
tagtggactcccctgaagcagttgctgaggaat

SEQ ID NO: 331358 - DNA, 33 bp, Homo sapien
tagtggactcccctgaggcagttgctgaggaat

SEQ ID NO: 331359 - DNA, 33 bp, Homo sapien
ataaaatatgtcactcacttaagacaacatcac

SEQ ID NO: 331360 - DNA, 33 bp, Homo sapien
ataaaatatgtcactcgcttaagacaacatcac

SEQ ID NO: 331361 - DNA, 33 bp, Homo sapien
catcttcactgtctagaatctttatgaccatct

SEQ ID NO: 331362 - DNA, 33 bp, Homo sapien
catcttcactgtctaggatctttatgaccatct

SEQ ID NO: 331363 - DNA, 33 bp, Homo sapien
ggaactgagagtcaagaacaaattagctgagtt

SEQ ID NO: 331364 - DNA, 33 bp, Homo sapien
ggaactgagagtcaagcacaaattagctgagtt

SEQ ID NO: 331365 - DNA, 33 bp, Homo sapien
gaactaggtgatcctacggtctttataaaatat

SEQ ID NO: 331366 - DNA, 33 bp, Homo sapien
gaactaggtgatcctatggtctttataaaatat

SEQ ID NO: 331367 - DNA, 33 bp, Homo sapien
gttatttacgtgagcacgtgaaggctttccaga

SEQ ID NO: 331368 - DNA, 33 bp, Homo sapien
gttatttacgtgagcatgtgaaggctttccaga

SEQ ID NO: 331369 - DNA, 33 bp, Homo sapien
agaaaatcattgcaagccatgtagctaattaag

SEQ ID NO: 331370 - DNA, 33 bp, Homo sapien
agaaaatcattgcaagtcatgtagctaattaag

SEQ ID NO: 331371 - DNA, 33 bp, Homo sapien
gaagcttttccaagcaagtggtcaatgctgtga

SEQ ID NO: 331372 - DNA, 33 bp, Homo sapien
gaagcttttccaagcaggtggtcaatgctgtga

SEQ ID NO: 331373 - DNA, 33 bp, Homo sapien
agtagagcaatattaaatgggaatgtaggttgg

SEQ ID NO: 331374 - DNA, 33 bp, Homo sapien
agtagagcaatattaagtgggaatgtaggttgg

SEQ ID NO: 331375 - DNA, 33 bp, Homo sapien
atagaggtgaccatatcataagtgctctgccct

SEQ ID NO: 331376 - DNA, 33 bp, Homo sapien
atagaggtgaccatattataagtgctctgccct

SEQ ID NO: 331377 - DNA, 33 bp, Homo sapien
cattcactattcctaacgtaacactagcaaaaa

SEQ ID NO: 331378 - DNA, 33 bp, Homo sapien
cattcactattcctaatgtaacactagcaaaaa

SEQ ID NO: 331379 - DNA, 33 bp, Homo sapien
acatgagaactcaggaactgccaaacaaatgcg

SEQ ID NO: 331380 - DNA, 33 bp, Homo sapien
acatgagaactcaggagctgccaaacaaatgcg

SEQ ID NO: 331381 - DNA, 33 bp, Homo sapien
gtaagttgcttttaaacggcagatccattctag

SEQ ID NO: 331382 - DNA, 33 bp, Homo sapien
gtaagttgcttttaaatggcagatccattctag

SEQ ID NO: 331383 - DNA, 33 bp, Homo sapien
tgcttactaagacctccatatgaatctgtggac

SEQ ID NO: 331384 - DNA, 33 bp, Homo sapien
tgcttactaagacctcgatatgaatctgtggac

SEQ ID NO: 331385 - DNA, 33 bp, Homo sapien
aactggtgactgaaaaatgcggaatatgatgaa

SEQ ID NO: 331386 - DNA, 33 bp, Homo sapien
aactggtgactgaaaactgcggaatatgatgaa

SEQ ID NO: 331387 - DNA, 33 bp, Homo sapien
atctgtctttcaaaaaatcgttacgtagttagc

SEQ ID NO: 331388 - DNA, 33 bp, Homo sapien
atctgtctttcaaaaactcgttacgtagttagc

SEQ ID NO: 331389 - DNA, 33 bp, Homo sapien
aaatacaagggacgtacaggtgattttataaat

SEQ ID NO: 331390 - DNA, 33 bp, Homo sapien
aaatacaagggacgtagaggtgattttataaat

SEQ ID NO: 331391 - DNA, 33 bp, Homo sapien; identical to SEQ ID NO: 331389

SEQ ID NO: 331392 - DNA, 33 bp, Homo sapien; identical to SEQ ID NO: 331390

SEQ ID NO: 331393 - DNA, 33 bp, Homo sapien
cagtagtttgaacacagaatctgttctacgact

SEQ ID NO: 331394 - DNA, 33 bp, Homo sapien
cagtagtttgaacacataatctgttctacgact

SEQ ID NO: 331395 - DNA, 33 bp, Homo sapien
tgggaatatgtaataagagatgggcacttgccc

SEQ ID NO: 331396 - DNA, 33 bp, Homo sapien
tgggaatatgtaataatagatgggcacttgccc

SEQ ID NO: 331397 - DNA, 33 bp, Homo sapien
gaatgtgagacttaacccttgcctggcatgttt

SEQ ID NO: 331398 - DNA, 33 bp, Homo sapien
gaatgtgagacttaacgcttgcctggcatgttt

SEQ ID NO: 331399 - DNA, 33 bp, Homo sapien
taaagttttcttgctagaatttgcctatctgtt

SEQ ID NO: 331400 - DNA, 33 bp, Homo sapien
taaagttttcttgctataatttgcctatctgtt

SEQ ID NO: 331401 - DNA, 33 bp, Homo sapien
tgcacaatgatcctcacagcttaattagaatat

SEQ ID NO: 331402 - DNA, 33 bp, Homo sapien
tgcacaatgatcctcagagcttaattagaatat

SEQ ID NO: 331403 - DNA, 33 bp, Homo sapien
aaagacttcagccaaacggtgcaatactatgtc

SEQ ID NO: 331404 - DNA, 33 bp, Homo sapien
aaagacttcagccaaatggtgcaatactatgtc

SEQ ID NO: 331405 - DNA, 33 bp, Homo sapien
gttcatttgcagtgacacctcctggaatgaaac

SEQ ID NO: 331406 - DNA, 33 bp, Homo sapien
gttcatttgcagtgacgcctcctggaatgaaac

SEQ ID NO: 331407 - DNA, 33 bp, Homo sapien; identical to SEQ ID NO: 331405

SEQ ID NO: 331408 - DNA, 33 bp, Homo sapien; identical to SEQ ID NO: 331406

SEQ ID NO: 331409 - DNA, 33 bp, Homo sapien
caatctcacatatttcgcatctgtatctcaagg

SEQ ID NO: 331410 - DNA, 33 bp, Homo sapien
caatctcacatatttctcatctgtatctcaagg

SEQ ID NO: 331411 - DNA, 33 bp, Homo sapien
agtgcagaactatgtaaaacaaaaatgactgac

SEQ ID NO: 331412 - DNA, 33 bp, Homo sapien
agtgcagaactatgtagaacaaaaatgactgac

SEQ ID NO: 331413 - DNA, 33 bp, Homo sapien; identical to SEQ ID NO: 331411

SEQ ID NO: 331414 - DNA, 33 bp, Homo sapien; identical to SEQ ID NO: 331412

SEQ ID NO: 331415 - DNA, 33 bp, Homo sapien
cttgtacctagctagcactgagaaagaaatgag

SEQ ID NO: 331416 - DNA, 33 bp, Homo sapien
cttgtacctagctagcgctgagaaagaaatgag

SEQ ID NO: 331417 - DNA, 33 bp, Homo sapien
ccccaagcctgtggcacctagcagtgaaatgag

SEQ ID NO: 331418 - DNA, 33 bp, Homo sapien
ccccaagcctgtggcatctagcagtgaaatgag

SEQ ID NO: 331419 - DNA, 33 bp, Homo sapien
gtggtgtagacaatagaccccatgtttatagac

SEQ ID NO: 331420 - DNA, 33 bp, Homo sapien
gtggtgtagacaatagtccccatgtttatagac

SEQ ID NO: 331421 - DNA, 33 bp, Homo sapien
aaatgaatcaaacataaaggcccagctgtggta

SEQ ID NO: 331422 - DNA, 33 bp, Homo sapien
aaatgaatcaaacatacaggcccagctgtggta

SEQ ID NO: 331423 - DNA, 33 bp, Homo sapien
gcacatcagttgatccactattatttaatagaa

SEQ ID NO: 331424 - DNA, 33 bp, Homo sapien
gcacatcagttgatccgctattatttaatagaa

SEQ ID NO: 331425 - DNA, 33 bp, Homo sapien
tgaaatgctttgctctcaccatttgtcactctt

SEQ ID NO: 331426 - DNA, 33 bp, Homo sapien
tgaaatgctttgctctgaccatttgtcactctt

SEQ ID NO: 331427 - DNA, 33 bp, Homo sapien
tggaattcatgtcttccgaaaaggttagtggga

SEQ ID NO: 331428 - DNA, 33 bp, Homo sapien
tggaattcatgtcttctgaaaaggttagtggga

SEQ ID NO: 331429 - DNA, 33 bp, Homo sapien
tgttcaggaccatgcaatctgttgatactcaca

SEQ ID NO: 331430 - DNA, 33 bp, Homo sapien
tgttcaggaccatgcactctgttgatactcaca

SEQ ID NO: 331431 - DNA, 33 bp, Homo sapien
tactaagcctacactaaccccgagaaatcaata

SEQ ID NO: 331432 - DNA, 33 bp, Homo sapien
tactaagcctacactagccccgagaaatcaata

SEQ ID NO: 331433 - DNA, 33 bp, Homo sapien
acaggagaggcctaacagaaccttgagtttgat

SEQ ID NO: 331434 - DNA, 33 bp, Homo sapien
acaggagaggcctaacggaaccttgagtttgat

SEQ ID NO: 331435 - DNA, 33 bp, Homo sapien; identical to SEQ ID NO: 331433

SEQ ID NO: 331436 - DNA, 33 bp, Homo sapien; identical to SEQ ID NO: 331434

SEQ ID NO: 331437 - DNA, 33 bp, Homo sapien
aaatacagaggaggcaactcaacaaaatgtgta

SEQ ID NO: 331438 - DNA, 33 bp, Homo sapien
aaatacagaggaggcagctcaacaaaatgtgta

SEQ ID NO: 331439 - DNA, 33 bp, Homo sapien
ggactgaatcctgaaacctctcagagctaaagt

SEQ ID NO: 331440 - DNA, 33 bp, Homo sapien
ggactgaatcctgaaatctctcagagctaaagt

SEQ ID NO: 331441 - DNA, 33 bp, Homo sapien
aagctgcccaatgtaaacaacctaccacaagga

SEQ ID NO: 331442 - DNA, 33 bp, Homo sapien
aagctgcccaatgtaatcaacctaccacaagga

SEQ ID NO: 331443 - DNA, 33 bp, Homo sapien
cctggccaatgggagaacttttacatcttaaat

SEQ ID NO: 331444 - DNA, 33 bp, Homo sapien
cctggccaatgggagagcttttacatcttaaat

SEQ ID NO: 331445 - DNA, 33 bp, Homo sapien
tcataatattgtaaaacactattggttagaaga

SEQ ID NO: 331446 - DNA, 33 bp, Homo sapien
tcataatattgtaaaagactattggttagaaga

SEQ ID NO: 331447 - DNA, 33 bp, Homo sapien
cttggatatgacagtaaacaactggacactact

SEQ ID NO: 331448 - DNA, 33 bp, Homo sapien
cttggatatgacagtagacaactggacactact

SEQ ID NO: 331449 - DNA, 33 bp, Homo sapien
acagttttccatacctaaagcagttaaacagtt

SEQ ID NO: 331450 - DNA, 33 bp, Homo sapien
acagttttccatacctgaagcagttaaacagtt

SEQ ID NO: 331451 - DNA, 33 bp, Homo sapien
cataataattcttaaaggatttaagtgcctaac

SEQ ID NO: 331452 - DNA, 33 bp, Homo sapien
cataataattcttaaatgatttaagtgcctaac

SEQ ID NO: 331453 - DNA, 33 bp, Homo sapien
cactggatgtcaagaaatgctagatgcgatcca

SEQ ID NO: 331454 - DNA, 33 bp, Homo sapien
cactggatgtcaagaactgctagatgcgatcca

SEQ ID NO: 331455 - DNA, 33 bp, Homo sapien
gatcacagtctgaaaaagcaagagtcttgactt

SEQ ID NO: 331456 - DNA, 33 bp, Homo sapien
gatcacagtctgaaaacgcaagagtcttgactt

SEQ ID NO: 331457 - DNA, 33 bp, Homo sapien; identical to SEQ ID NO: 331455

SEQ ID NO: 331458 - DNA, 33 bp, Homo sapien; identical to SEQ ID NO: 331456

SEQ ID NO: 331459 - DNA, 33 bp, Homo sapien
acatataggtgccaacgagaaaggtgttggact

SEQ ID NO: 331460 - DNA, 33 bp, Homo sapien
acatataggtgccaactagaaaggtgttggact

SEQ ID NO: 331461 - DNA, 33 bp, Homo sapien
ctaatacaagaccacaataatcgttttatgact

SEQ ID NO: 331462 - DNA, 33 bp, Homo sapien
ctaatacaagaccacagtaatcgttttatgact

SEQ ID NO: 331463 - DNA, 33 bp, Homo sapien
catcacggaatctgccaacctgtgatgtctccc

SEQ ID NO: 331464 - DNA, 33 bp, Homo sapien
catcacggaatctgccgacctgtgatgtctccc

SEQ ID NO: 331465 - DNA, 33 bp, Homo sapien; identical to SEQ ID NO: 331463

SEQ ID NO: 331466 - DNA, 33 bp, Homo sapien; identical to SEQ ID NO: 331464

SEQ ID NO: 331467 - DNA, 33 bp, Homo sapien
tatagacatcataaaagctctaataaaacataa

SEQ ID NO: 331468 - DNA, 33 bp, Homo sapien
tatagacatcataaaatctctaataaaacataa

SEQ ID NO: 331469 - DNA, 33 bp, Homo sapien
catcggaatccagaccaatggtttcaggaactc

SEQ ID NO: 331470 - DNA, 33 bp, Homo sapien
catcggaatccagaccgatggtttcaggaactc

SEQ ID NO: 331471 - DNA, 33 bp, Homo sapien
gtatgagttttttcatcactcagtgtactcatg

SEQ ID NO: 331472 - DNA, 33 bp, Homo sapien
gtatgagttttttcattactcagtgtactcatg

SEQ ID NO: 331473 - DNA, 33 bp, Homo sapien
acaagttggttaactacacatacttaacaggct

SEQ ID NO: 331474 - DNA, 33 bp, Homo sapien
acaagttggttaactatacatacttaacaggct

SEQ ID NO: 331475 - DNA, 33 bp, Homo sapien
tgagtcatatgttccacggatatttgttaatac

SEQ ID NO: 331476 - DNA, 33 bp, Homo sapien
tgagtcatatgttccatggatatttgttaatac

SEQ ID NO: 331477 - DNA, 33 bp, Homo sapien
ttttatgaagatcacaatgcatctacttctaca

SEQ ID NO: 331478 - DNA, 33 bp, Homo sapien
ttttatgaagatcacagtgcatctacttctaca

SEQ ID NO: 331479 - DNA, 33 bp, Homo sapien
ggtgaatgagaatgaacaaaaacagagatcaag

SEQ ID NO: 331480 - DNA, 33 bp, Homo sapien
ggtgaatgagaatgaagaaaaacagagatcaag

SEQ ID NO: 331481 - DNA, 33 bp, Homo sapien
gatggagcctgtagaaagaagagaactaaatta

SEQ ID NO: 331482 - DNA, 33 bp, Homo sapien
gatggagcctgtagaatgaagagaactaaatta

SEQ ID NO: 331483 - DNA, 33 bp, Homo sapien
tgagtacactgagtaacgaaaaaactcatacag

SEQ ID NO: 331484 - DNA, 33 bp, Homo sapien
tgagtacactgagtaatgaaaaaactcatacag

SEQ ID NO: 331485 - DNA, 33 bp, Homo sapien
aaaacagaatgtgtaacgtctgccacttctaat

SEQ ID NO: 331486 - DNA, 33 bp, Homo sapien
aaaacagaatgtgtaatgtctgccacttctaat

SEQ ID NO: 331487 - DNA, 33 bp, Homo sapien
attatgctctgtatttaaaaagttcttttgagg

SEQ ID NO: 331488 - DNA, 33 bp, Homo sapien
attatgctctgtattttaaaagttcttttgagg

SEQ ID NO: 331489 - DNA, 33 bp, Homo sapien
aaaattaagaacaataagccttatgaataaaga

SEQ ID NO: 331490 - DNA, 33 bp, Homo sapien
aaaattaagaacaatatgccttatgaataaaga

SEQ ID NO: 331491 - DNA, 33 bp, Homo sapien
acctgaagaaaactatgaagaaagtctgtagtt

SEQ ID NO: 331492 - DNA, 33 bp, Homo sapien
acctgaagaaaactattaagaaagtctgtagtt

SEQ ID NO: 331493 - DNA, 33 bp, Homo sapien
acaaagcatatactgaatcactcacatgacttc

SEQ ID NO: 331494 - DNA, 33 bp, Homo sapien
acaaagcatatactgactcactcacatgacttc

SEQ ID NO: 331495 - DNA, 33 bp, Homo sapien
gaccaccatgtggtagccctcataactcatgtc

SEQ ID NO: 331496 - DNA, 33 bp, Homo sapien
gaccaccatgtggtagtcctcataactcatgtc

SEQ ID NO: 331497 - DNA, 33 bp, Homo sapien
ccatattatcatggacacaaaggacagagtgct

SEQ ID NO: 331498 - DNA, 33 bp, Homo sapien
ccatattatcatggacgcaaaggacagagtgct

SEQ ID NO: 331499 - DNA, 33 bp, Homo sapien
aagccactgattgattcaaagaccagctgagag

SEQ ID NO: 331500 - DNA, 33 bp, Homo sapien
aagccactgattgattgaaagaccagctgagag

SEQ ID NO: 331501 - DNA, 33 bp, Homo sapien
atattggtgtggatgaagtgaaaagagaatgct

SEQ ID NO: 331502 - DNA, 33 bp, Homo sapien
atattggtgtggatgaggtgaaaagagaatgct

SEQ ID NO: 331503 - DNA, 33 bp, Homo sapien
acttgcttcgaaacaacagaatagtgcaaaggt

SEQ ID NO: 331504 - DNA, 33 bp, Homo sapien
acttgcttcgaaacaatagaatagtgcaaaggt

SEQ ID NO: 331505 - DNA, 33 bp, Homo sapien
gcaacgcagatacatacgcaaagaaacaaagaa

SEQ ID NO: 331506 - DNA, 33 bp, Homo sapien
gcaacgcagatacataggcaaagaaacaaagaa

SEQ ID NO: 331507 - DNA, 33 bp, Homo sapien
aagtgacatcctgtcaggttgtagtcttctgat

SEQ ID NO: 331508 - DNA, 33 bp, Homo sapien
aagtgacatcctgtcatgttgtagtcttctgat

SEQ ID NO: 331509 - DNA, 33 bp, Homo sapien; identical to SEQ ID NO: 331507

SEQ ID NO: 331510 - DNA, 33 bp, Homo sapien; identical to SEQ ID NO: 331508

SEQ ID NO: 331511 - DNA, 33 bp, Homo sapien
cagagacatcccaaaggatttcaacgatatcag

SEQ ID NO: 331512 - DNA, 33 bp, Homo sapien
cagagacatcccaaagtatttcaacgatatcag

SEQ ID NO: 331513 - DNA, 33 bp, Homo sapien; identical to SEQ ID NO: 331511

SEQ ID NO: 331514 - DNA, 33 bp, Homo sapien; identical to SEQ ID NO: 331512

SEQ ID NO: 331515 - DNA, 33 bp, Homo sapien
attgtgaagatttcacagacaattactagttcc

SEQ ID NO: 331516 - DNA, 33 bp, Homo sapien
attgtgaagatttcacggacaattactagttcc

SEQ ID NO: 331517 - DNA, 33 bp, Homo sapien
agtaactttgtctaaccgtggtataaggctgat

SEQ ID NO: 331518 - DNA, 33 bp, Homo sapien
agtaactttgtctaactgtggtataaggctgat

SEQ ID NO: 331519 - DNA, 33 bp, Homo sapien
gccacctcagtataataagagaacagagatggc

SEQ ID NO: 331520 - DNA, 33 bp, Homo sapien
gccacctcagtataatgagagaacagagatggc

SEQ ID NO: 331521 - DNA, 33 bp, Homo sapien
aaatatatttgctgaacagaacaaaattatgtg

SEQ ID NO: 331522 - DNA, 33 bp, Homo sapien
aaatatatttgctgaatagaacaaaattatgtg

SEQ ID NO: 331523 - DNA, 33 bp, Homo sapien; identical to SEQ ID NO: 331521

SEQ ID NO: 331524 - DNA, 33 bp, Homo sapien; identical to SEQ ID NO: 331522

SEQ ID NO: 331525 - DNA, 33 bp, Homo sapien
tactttctggcactacaaggtacttaagcttaa

SEQ ID NO: 331526 - DNA, 33 bp, Homo sapien
tactttctggcactacgaggtacttaagcttaa

SEQ ID NO: 331527 - DNA, 33 bp, Homo sapien
cgttacagtcatcatgaaatgctttgctctgac

SEQ ID NO: 331528 - DNA, 33 bp, Homo sapien
cgttacagtcatcatggaatgctttgctctgac

SEQ ID NO: 331529 - DNA, 33 bp, Homo sapien
acacaaactagaggataacaagtaattcacagt

SEQ ID NO: 331530 - DNA, 33 bp, Homo sapien
acacaaactagaggatgacaagtaattcacagt

SEQ ID NO: 331531 - DNA, 33 bp, Homo sapien
caaagtaatagtaatcaagatttgtggtactag

SEQ ID NO: 331532 - DNA, 33 bp, Homo sapien
caaagtaatagtaatcgagatttgtggtactag

SEQ ID NO: 331533 - DNA, 33 bp, Homo sapien
cgagtttctattttcaaccttctgaaacctcct

SEQ ID NO: 331534 - DNA, 33 bp, Homo sapien
cgagtttctattttcatccttctgaaacctcct

SEQ ID NO: 331535 - DNA, 33 bp, Homo sapien
gaggaaataattaggactattctgttaatacaa

SEQ ID NO: 331536 - DNA, 33 bp, Homo sapien
gaggaaataattaggagtattctgttaatacaa

SEQ ID NO: 331537 - DNA, 33 bp, Homo sapien
actaactgttctccacaaaaatataaaccacag

SEQ ID NO: 331538 - DNA, 33 bp, Homo sapien
actaactgttctccacgaaaatataaaccacag

SEQ ID NO: 331539 - DNA, 33 bp, Homo sapien
ggaactgactcaatgcaaaaggacagctgttgc

SEQ ID NO: 331540 - DNA, 33 bp, Homo sapien
ggaactgactcaatgccaaaggacagctgttgc

SEQ ID NO: 331541 - DNA, 33 bp, Homo sapien
cacacagccagaggcgacaagattactaacctc

SEQ ID NO: 331542 - DNA, 33 bp, Homo sapien
cacacagccagaggcgtcaagattactaacctc

SEQ ID NO: 331543 - DNA, 33 bp, Homo sapien
gagaaaattattacacccaaagagatatgacct

SEQ ID NO: 331544 - DNA, 33 bp, Homo sapien
gagaaaattattacactcaaagagatatgacct

SEQ ID NO: 331545 - DNA, 33 bp, Homo sapien
cagaaaaaaaattatacgacagcatgtgaatac

SEQ ID NO: 331546 - DNA, 33 bp, Homo sapien
cagaaaaaaaattataggacagcatgtgaatac

SEQ ID NO: 331547 - DNA, 33 bp, Homo sapien
ttctcggcccctttgacgtttaacgctcacttt

SEQ ID NO: 331548 - DNA, 33 bp, Homo sapien
ttctcggcccctttgatgtttaacgctcacttt

SEQ ID NO: 331549 - DNA, 33 bp, Homo sapien
cagacattaatgaagacgtggaagttctcacat

SEQ ID NO: 331550 - DNA, 33 bp, Homo sapien
cagacattaatgaagatgtggaagttctcacat

SEQ ID NO: 331551 - DNA, 33 bp, Homo sapien
gttctcaaattaaacaacaggtcctgggagtgt

SEQ ID NO: 331552 - DNA, 33 bp, Homo sapien
gttctcaaattaaacagcaggtcctgggagtgt

SEQ ID NO: 331553 - DNA, 33 bp, Homo sapien
tctgtagatacttccacatgattgttgcaggcc

SEQ ID NO: 331554 - DNA, 33 bp, Homo sapien
tctgtagatacttccatatgattgttgcaggcc

SEQ ID NO: 331555 - DNA, 33 bp, Homo sapien
gtgattcaagtgcttacgcttgttcttgtctct

SEQ ID NO: 331556 - DNA, 33 bp, Homo sapien
gtgattcaagtgcttatgcttgttcttgtctct

SEQ ID NO: 331557 - DNA, 33 bp, Homo sapien
tttgattttctgataccgagtgtctgactgcta

SEQ ID NO: 331558 - DNA, 33 bp, Homo sapien
tttgattttctgatactgagtgtctgactgcta

SEQ ID NO: 331559 - DNA, 33 bp, Homo sapien
caaatgcctatagttccactgtatcttggaagt

SEQ ID NO: 331560 - DNA, 33 bp, Homo sapien
caaatgcctatagttctactgtatcttggaagt

SEQ ID NO: 331561 - DNA, 33 bp, Homo sapien
ttgcggcctactcatacggtagaaaagtaaagc

SEQ ID NO: 331562 - DNA, 33 bp, Homo sapien
ttgcggcctactcatatggtagaaaagtaaagc

SEQ ID NO: 331563 - DNA, 33 bp, Homo sapien
caagatatttacgaacaactggccagaacactc

SEQ ID NO: 331564 - DNA, 33 bp, Homo sapien
caagatatttacgaacgactggccagaacactc

SEQ ID NO: 331565 - DNA, 33 bp, Homo sapien
aagtttgatcgtctgacgagttgagagaagaag

SEQ ID NO: 331566 - DNA, 33 bp, Homo sapien
aagtttgatcgtctgatgagttgagagaagaag

SEQ ID NO: 331567 - DNA, 33 bp, Homo sapien
gtctaatcattgttcaatagtacacattacatc

SEQ ID NO: 331568 - DNA, 33 bp, Homo sapien
gtctaatcattgttcagtagtacacattacatc

SEQ ID NO: 331569 - DNA, 33 bp, Homo sapien
ttgccattagtcttcaagccacagaggatgata

SEQ ID NO: 331570 - DNA, 33 bp, Homo sapien
ttgccattagtcttcatgccacagaggatgata

SEQ ID NO: 331571 - DNA, 33 bp, Homo sapien
ccacatccatgcattcaaccaactggaagtcta

SEQ ID NO: 331572 - DNA, 33 bp, Homo sapien
ccacatccatgcattcgaccaactggaagtcta

SEQ ID NO: 331573 - DNA, 33 bp, Homo sapien
tgattcctcaagaaaaattaaagtcttgaatgc

SEQ ID NO: 331574 - DNA, 33 bp, Homo sapien
tgattcctcaagaaaagttaaagtcttgaatgc

SEQ ID NO: 331575 - DNA, 33 bp, Homo sapien
tgctggcatgcggacaatgaccaaattgtattg

SEQ ID NO: 331576 - DNA, 33 bp, Homo sapien
tgctggcatgcggacagtgaccaaattgtattg

SEQ ID NO: 331577 - DNA, 33 bp, Homo sapien
gctctaaatatcttcacgttagaggtctagaaa

SEQ ID NO: 331578 - DNA, 33 bp, Homo sapien
gctctaaatatcttcatgttagaggtctagaaa

SEQ ID NO: 331579 - DNA, 33 bp, Homo sapien
cctttcctattaacacacattcttcaaattata

SEQ ID NO: 331580 - DNA, 33 bp, Homo sapien
cctttcctattaacacgcattcttcaaattata

SEQ ID NO: 331581 - DNA, 33 bp, Homo sapien
tttagtgagccacagaataaatgaccaagaaat

SEQ ID NO: 331582 - DNA, 33 bp, Homo sapien
tttagtgagccacagactaaatgaccaagaaat

SEQ ID NO: 331583 - DNA, 33 bp, Homo sapien
aagtagagacaacacaatggccaagatcttcct

SEQ ID NO: 331584 - DNA, 33 bp, Homo sapien
aagtagagacaacacagtggccaagatcttcct

SEQ ID NO: 331585 - DNA, 33 bp, Homo sapien
atgccatgtgaaaacaaaaaattcacaggtata

SEQ ID NO: 331586 - DNA, 33 bp, Homo sapien
atgccatgtgaaaacataaaattcacaggtata

SEQ ID NO: 331587 - DNA, 33 bp, Homo sapien
tacatgaccgagcttacgcagccatcttagcac

SEQ ID NO: 331588 - DNA, 33 bp, Homo sapien
tacatgaccgagcttatgcagccatcttagcac

SEQ ID NO: 331589 - DNA, 33 bp, Homo sapien
acaagaatgacatagaaaaggtcataaagttgg

SEQ ID NO: 331590 - DNA, 33 bp, Homo sapien
acaagaatgacatagagaaggtcataaagttgg

SEQ ID NO: 331591 - DNA, 33 bp, Homo sapien
ttctctgtacaaataacgacacttaattactaa

SEQ ID NO: 331592 - DNA, 33 bp, Homo sapien
ttctctgtacaaataatgacacttaattactaa

SEQ ID NO: 331593 - DNA, 33 bp, Homo sapien
acttaaccagagttaaacgaggactttctcacc

SEQ ID NO: 331594 - DNA, 33 bp, Homo sapien
acttaaccagagttaagcgaggactttctcacc

SEQ ID NO: 331595 - DNA, 33 bp, Homo sapien
gtcacatgcttaaaataatctttcattgtttgc

SEQ ID NO: 331596 - DNA, 33 bp, Homo sapien
gtcacatgcttaaaatgatctttcattgtttgc

SEQ ID NO: 331597 - DNA, 33 bp, Homo sapien
tagatgtttctccatgaacatacacttgttcac

SEQ ID NO: 331598 - DNA, 33 bp, Homo sapien
tagatgtttctccatgtacatacacttgttcac

SEQ ID NO: 331599 - DNA, 33 bp, Homo sapien
aatttcttcctcccagaccttgcatatttttct

SEQ ID NO: 331600 - DNA, 33 bp, Homo sapien
aatttcttcctcccagcccttgcatatttttct

SEQ ID NO: 331601 - DNA, 33 bp, Homo sapien
ttttcctcggtttctaagaaggcaacactgtcc

SEQ ID NO: 331602 - DNA, 33 bp, Homo sapien
ttttcctcggtttctacgaaggcaacactgtcc

SEQ ID NO: 331603 - DNA, 33 bp, Homo sapien
gtttatggagcataaacgtgtcgaatgttacct

SEQ ID NO: 331604 - DNA, 33 bp, Homo sapien
gtttatggagcataaatgtgtcgaatgttacct

SEQ ID NO: 331605 - DNA, 33 bp, Homo sapien
gggacaatagtagtaactaatgaacgaatatta

SEQ ID NO: 331606 - DNA, 33 bp, Homo sapien
gggacaatagtagtaattaatgaacgaatatta

SEQ ID NO: 331607 - DNA, 33 bp, Homo sapien
agtggggcactatatcacactgctggcaggcac

SEQ ID NO: 331608 - DNA, 33 bp, Homo sapien
agtggggcactatatcgcactgctggcaggcac

SEQ ID NO: 331609 - DNA, 33 bp, Homo sapien
tgttcctggaccactaaccacaatatttcaata

SEQ ID NO: 331610 - DNA, 33 bp, Homo sapien
tgttcctggaccactagccacaatatttcaata

SEQ ID NO: 331611 - DNA, 33 bp, Homo sapien
ccaagcattcatcttcactctatttttgtatta

SEQ ID NO: 331612 - DNA, 33 bp, Homo sapien
ccaagcattcatcttcgctctatttttgtatta

SEQ ID NO: 331613 - DNA, 33 bp, Homo sapien
cttcgtctcagaaacaaagagtgcattcatccc

SEQ ID NO: 331614 - DNA, 33 bp, Homo sapien
cttcgtctcagaaacagagagtgcattcatccc

SEQ ID NO: 331615 - DNA, 33 bp, Homo sapien
tcaaagtgttcttccagaatcgccgttccatct

SEQ ID NO: 331616 - DNA, 33 bp, Homo sapien
tcaaagtgttcttccataatcgccgttccatct

SEQ ID NO: 331617 - DNA, 33 bp, Homo sapien
cctcttttatgaagaaatgttttattgccatca

SEQ ID NO: 331618 - DNA, 33 bp, Homo sapien
cctcttttatgaagaagtgttttattgccatca

SEQ ID NO: 331619 - DNA, 33 bp, Homo sapien
agcagacaagaatatacgtgaagagtttgagag

SEQ ID NO: 331620 - DNA, 33 bp, Homo sapien
agcagacaagaatataggtgaagagtttgagag

SEQ ID NO: 331621 - DNA, 33 bp, Homo sapien
cataggtttttctttacgagtttcattcacatt

SEQ ID NO: 331622 - DNA, 33 bp, Homo sapien
cataggtttttctttatgagtttcattcacatt

SEQ ID NO: 331623 - DNA, 33 bp, Homo sapien
tagagtcacgcattgactaatggcaaatacagt

SEQ ID NO: 331624 - DNA, 33 bp, Homo sapien
tagagtcacgcattgattaatggcaaatacagt

SEQ ID NO: 331625 - DNA, 33 bp, Homo sapien
ggataacatttcataaaagaactgagacattca

SEQ ID NO: 331626 - DNA, 33 bp, Homo sapien
ggataacatttcataagagaactgagacattca

SEQ ID NO: 331627 - DNA, 33 bp, Homo sapien
gcagctgtacagatgacgaacgtagaactcaaa

SEQ ID NO: 331628 - DNA, 33 bp, Homo sapien
gcagctgtacagatgatgaacgtagaactcaaa

SEQ ID NO: 331629 - DNA, 33 bp, Homo sapien
caaaagaatgatgacccagtgaggtacacacgt

SEQ ID NO: 331630 - DNA, 33 bp, Homo sapien
caaaagaatgatgacctagtgaggtacacacgt

SEQ ID NO: 331631 - DNA, 33 bp, Homo sapien
aagtaaccaggaaagaacaagaggctgggagtc

SEQ ID NO: 331632 - DNA, 33 bp, Homo sapien
aagtaaccaggaaagatcaagaggctgggagtc

SEQ ID NO: 331633 - DNA, 33 bp, Homo sapien
attctcaatccaccacaaagatgaacacataga

SEQ ID NO: 331634 - DNA, 33 bp, Homo sapien
attctcaatccaccacgaagatgaacacataga

SEQ ID NO: 331635 - DNA, 33 bp, Homo sapien
taaagaatgatcatggaaaagatgaaaataact

SEQ ID NO: 331636 - DNA, 33 bp, Homo sapien
taaagaatgatcatgggaaagatgaaaataact

SEQ ID NO: 331637 - DNA, 33 bp, Homo sapien
acttgcgctgcaacccactgtcatttcttacag

SEQ ID NO: 331638 - DNA, 33 bp, Homo sapien
acttgcgctgcaacccgctgtcatttcttacag

SEQ ID NO: 331639 - DNA, 33 bp, Homo sapien
tcttcaggaatgattaagcaaacatatacaaag

SEQ ID NO: 331640 - DNA, 33 bp, Homo sapien
tcttcaggaatgattaggcaaacatatacaaag

SEQ ID NO: 331641 - DNA, 33 bp, Homo sapien
ggagtgttgaagtcaccgaccgtaatagtggat

SEQ ID NO: 331642 - DNA, 33 bp, Homo sapien
ggagtgttgaagtcactgaccgtaatagtggat

SEQ ID NO: 331643 - DNA, 33 bp, Homo sapien
acctctgttggctataagctttcacaattctgc

SEQ ID NO: 331644 - DNA, 33 bp, Homo sapien
acctctgttggctatatgctttcacaattctgc

SEQ ID NO: 331645 - DNA, 33 bp, Homo sapien
ccagctctcagggggagtatctaggcctgcctt

SEQ ID NO: 331646 - DNA, 33 bp, Homo sapien
ccagctctcagggggattatctaggcctgcctt

SEQ ID NO: 331647 - DNA, 33 bp, Homo sapien
tcagcttgaccagatacgtgatggcaatttcaa

SEQ ID NO: 331648 - DNA, 33 bp, Homo sapien
tcagcttgaccagatatgtgatggcaatttcaa

SEQ ID NO: 331649 - DNA, 33 bp, Homo sapien
gaacaaggtctttcaagccagatttggcctatg

SEQ ID NO: 331650 - DNA, 33 bp, Homo sapien
gaacaaggtctttcaatccagatttggcctatg

SEQ ID NO: 331651 - DNA, 33 bp, Homo sapien
ggtccttgagtgattacgaacagaaaataacaa

SEQ ID NO: 331652 - DNA, 33 bp, Homo sapien
ggtccttgagtgattatgaacagaaaataacaa

SEQ ID NO: 331653 - DNA, 33 bp, Homo sapien
aaggccgttatactaacgaggacaaaatataac

SEQ ID NO: 331654 - DNA, 33 bp, Homo sapien
aaggccgttatactaaggaggacaaaatataac

SEQ ID NO: 331655 - DNA, 33 bp, Homo sapien
tatggtgagttactccagccttctccctgtaac

SEQ ID NO: 331656 - DNA, 33 bp, Homo sapien
tatggtgagttactccggccttctccctgtaac

SEQ ID NO: 331657 - DNA, 33 bp, Homo sapien
attcacatattgaaaccgggcttcagctctgct

SEQ ID NO: 331658 - DNA, 33 bp, Homo sapien
attcacatattgaaactgggcttcagctctgct

SEQ ID NO: 331659 - DNA, 33 bp, Homo sapien
caggccataaaaaaacacacctgcatcctcacg

SEQ ID NO: 331660 - DNA, 33 bp, Homo sapien
caggccataaaaaaacgcacctgcatcctcacg

SEQ ID NO: 331661 - DNA, 33 bp, Homo sapien
caagggctgatcataacgtcatttaccaagccc

SEQ ID NO: 331662 - DNA, 33 bp, Homo sapien
caagggctgatcataaggtcatttaccaagccc

SEQ ID NO: 331663 - DNA, 33 bp, Homo sapien
aggagaatcgcttcaacgcagaaggcggaggtt

SEQ ID NO: 331664 - DNA, 33 bp, Homo sapien
aggagaatcgcttcaatgcagaaggcggaggtt

SEQ ID NO: 331665 - DNA, 33 bp, Homo sapien
tgcgcccagccaagtactaacacttctttatac

SEQ ID NO: 331666 - DNA, 33 bp, Homo sapien
tgcgcccagccaagtagtaacacttctttatac

SEQ ID NO: 331667 - DNA, 33 bp, Homo sapien
ttcctatgtgcggtacaaaaaagctggtttgga

SEQ ID NO: 331668 - DNA, 33 bp, Homo sapien
ttcctatgtgcggtacgaaaaagctggtttgga

SEQ ID NO: 331669 - DNA, 33 bp, Homo sapien
ctaagcgtcattttccaaaatttagtatttttc

SEQ ID NO: 331670 - DNA, 33 bp, Homo sapien
ctaagcgtcattttcccaaatttagtatttttc

SEQ ID NO: 331671 - DNA, 33 bp, Homo sapien
tggtttttcctatcagaacaggttaaggataat

SEQ ID NO: 331672 - DNA, 33 bp, Homo sapien
tggtttttcctatcagtacaggttaaggataat

SEQ ID NO: 331673 - DNA, 33 bp, Homo sapien
caggtcagctgcaaataaatttttcactcatcc

SEQ ID NO: 331674 - DNA, 33 bp, Homo sapien
caggtcagctgcaaatcaatttttcactcatcc

SEQ ID NO: 331675 - DNA, 33 bp, Homo sapien
atgagaaattgaagtcaccaaaaatgagaactg

SEQ ID NO: 331676 - DNA, 33 bp, Homo sapien
atgagaaattgaagtcgccaaaaatgagaactg

SEQ ID NO: 331677 - DNA, 33 bp, Homo sapien
tgctgtcataaaagcaataagaggtattactgt

SEQ ID NO: 331678 - DNA, 33 bp, Homo sapien
tgctgtcataaaagcagtaagaggtattactgt

SEQ ID NO: 331679 - DNA, 33 bp, Homo sapien
ttcatattcaagcacaatataacaaggccagag

SEQ ID NO: 331680 - DNA, 33 bp, Homo sapien
ttcatattcaagcacagtataacaaggccagag

SEQ ID NO: 331681 - DNA, 33 bp, Homo sapien
acactgcaaagggccacgatggtctgcagcctc

SEQ ID NO: 331682 - DNA, 33 bp, Homo sapien
acactgcaaagggccatgatggtctgcagcctc

SEQ ID NO: 331683 - DNA, 33 bp, Homo sapien
tcattgctcagtggcaccgctctagtggggccg

SEQ ID NO: 331684 - DNA, 33 bp, Homo sapien
tcattgctcagtggcatcgctctagtggggccg

SEQ ID NO: 331685 - DNA, 33 bp, Homo sapien; identical to SEQ ID NO: 331683

SEQ ID NO: 331686 - DNA, 33 bp, Homo sapien; identical to SEQ ID NO: 331684

SEQ ID NO: 331687 - DNA, 33 bp, Homo sapien
ggctactaagtgagccacgagccgcagaatgac

SEQ ID NO: 331688 - DNA, 33 bp, Homo sapien
ggctactaagtgagccgcgagccgcagaatgac

SEQ ID NO: 331689 - DNA, 33 bp, Homo sapien
taatgtgcgtgtgatggcagacatttacctgcg

SEQ ID NO: 331690 - DNA, 33 bp, Homo sapien
taatgtgcgtgtgatgtcagacatttacctgcg

SEQ ID NO: 331691 - DNA, 33 bp, Homo sapien
ggatttctttgcctcccgaaatgtaagatgcct

SEQ ID NO: 331692 - DNA, 33 bp, Homo sapien
ggatttctttgcctcctgaaatgtaagatgcct

SEQ ID NO: 331693 - DNA, 33 bp, Homo sapien
tcaccctatgactctccgacctgtgtacctgac

SEQ ID NO: 331694 - DNA, 33 bp, Homo sapien
tcaccctatgactctctgacctgtgtacctgac

SEQ ID NO: 331695 - DNA, 33 bp, Homo sapien
cactgtgacttcaaaccggctaagggaactgaa

SEQ ID NO: 331696 - DNA, 33 bp, Homo sapien
cactgtgacttcaaactggctaagggaactgaa

SEQ ID NO: 331697 - DNA, 33 bp, Homo sapien
acattaggtgcctttgaaaaaccaatacttacc

SEQ ID NO: 331698 - DNA, 33 bp, Homo sapien
acattaggtgcctttggaaaaccaatacttacc

SEQ ID NO: 331699 - DNA, 33 bp, Homo sapien
cacaacatgaaagctaagccaggtgattggaac

SEQ ID NO: 331700 - DNA, 33 bp, Homo sapien
cacaacatgaaagctatgccaggtgattggaac

SEQ ID NO: 331701 - DNA, 33 bp, Homo sapien
agccaggtgtgtcgtcaatttgtaccttgggtc

SEQ ID NO: 331702 - DNA, 33 bp, Homo sapien
agccaggtgtgtcgtcgatttgtaccttgggtc

SEQ ID NO: 331703 - DNA, 33 bp, Homo sapien
cacattattcatgcccaaaaatgaggaaaatca

SEQ ID NO: 331704 - DNA, 33 bp, Homo sapien
cacattattcatgcccgaaaatgaggaaaatca

SEQ ID NO: 331705 - DNA, 33 bp, Homo sapien; identical to SEQ ID NO: 331703

SEQ ID NO: 331706 - DNA, 33 bp, Homo sapien; identical to SEQ ID NO: 331704

SEQ ID NO: 331707 - DNA, 33 bp, Homo sapien
aaacaggtgtgtttgacaacagcaggcaggtac

SEQ ID NO: 331708 - DNA, 33 bp, Homo sapien
aaacaggtgtgtttgagaacagcaggcaggtac

SEQ ID NO: 331709 - DNA, 33 bp, Homo sapien
ttcaacagcctgtgaaagagtccacaccatgtg

SEQ ID NO: 331710 - DNA, 33 bp, Homo sapien
ttcaacagcctgtgaaggagtccacaccatgtg

SEQ ID NO: 331711 - DNA, 33 bp, Homo sapien; identical to SEQ ID NO: 331709

SEQ ID NO: 331712 - DNA, 33 bp, Homo sapien; identical to SEQ ID NO: 331710

SEQ ID NO: 331713 - DNA, 33 bp, Homo sapien
agagtggtggctcccacgtataggaaatttctt

SEQ ID NO: 331714 - DNA, 33 bp, Homo sapien
agagtggtggctcccatgtataggaaatttctt

SEQ ID NO: 331715 - DNA, 33 bp, Homo sapien
acccatgtcaaaaaacagatgttggccctctct

SEQ ID NO: 331716 - DNA, 33 bp, Homo sapien
acccatgtcaaaaaacggatgttggccctctct

SEQ ID NO: 331717 - DNA, 33 bp, Homo sapien; identical to SEQ ID NO: 331715

SEQ ID NO: 331718 - DNA, 33 bp, Homo sapien; identical to SEQ ID NO: 331716

SEQ ID NO: 331719 - DNA, 33 bp, Homo sapien
aaagttctatctgtatcagtctgatcaaagatg

SEQ ID NO: 331720 - DNA, 33 bp, Homo sapien
aaagttctatctgtatgagtctgatcaaagatg

SEQ ID NO: 331721 - DNA, 33 bp, Homo sapien
tgagaaagaaatcttccacatcgaatgtttcct

SEQ ID NO: 331722 - DNA, 33 bp, Homo sapien
tgagaaagaaatcttctacatcgaatgtttcct

SEQ ID NO: 331723 - DNA, 33 bp, Homo sapien
actgtcttgtgcttgacggaccagcagacacat

SEQ ID NO: 331724 - DNA, 33 bp, Homo sapien
actgtcttgtgcttgatggaccagcagacacat

SEQ ID NO: 331725 - DNA, 33 bp, Homo sapien
atgacttaatagggtggatcagtgtgtcccaga

SEQ ID NO: 331726 - DNA, 33 bp, Homo sapien
atgacttaatagggtgtatcagtgtgtcccaga

SEQ ID NO: 331727 - DNA, 33 bp, Homo sapien
acttgtcaggaagcaaaagaatgaattaaagaa

SEQ ID NO: 331728 - DNA, 33 bp, Homo sapien
acttgtcaggaagcaagagaatgaattaaagaa

SEQ ID NO: 331729 - DNA, 33 bp, Homo sapien
acatttttctgcaaatcacctctttcatttaac

SEQ ID NO: 331730 - DNA, 33 bp, Homo sapien
acatttttctgcaaattacctctttcatttaac

SEQ ID NO: 331731 - DNA, 33 bp, Homo sapien
agtaagatgagagaagacattaccaatgcctcc

SEQ ID NO: 331732 - DNA, 33 bp, Homo sapien
agtaagatgagagaagccattaccaatgcctcc

SEQ ID NO: 331733 - DNA, 33 bp, Homo sapien
cttctgaaagcagagaatagcccacaactttgt

SEQ ID NO: 331734 - DNA, 33 bp, Homo sapien
cttctgaaagcagagactagcccacaactttgt

SEQ ID NO: 331735 - DNA, 33 bp, Homo sapien
tcctacttttcacaacaatttcaaggaccctaa

SEQ ID NO: 331736 - DNA, 33 bp, Homo sapien
tcctacttttcacaacgatttcaaggaccctaa

SEQ ID NO: 331737 - DNA, 33 bp, Homo sapien
gacgcccaaattagaccagttcaacggaagtgt

SEQ ID NO: 331738 - DNA, 33 bp, Homo sapien
gacgcccaaattagacgagttcaacggaagtgt

SEQ ID NO: 331739 - DNA, 33 bp, Homo sapien
accgcacacctccaaacgcagagccaggccatg

SEQ ID NO: 331740 - DNA, 33 bp, Homo sapien
accgcacacctccaaatgcagagccaggccatg

SEQ ID NO: 331741 - DNA, 33 bp, Homo sapien
gacgtgggccacctgacgctctctccgccactg

SEQ ID NO: 331742 - DNA, 33 bp, Homo sapien
gacgtgggccacctgatgctctctccgccactg

SEQ ID NO: 331743 - DNA, 33 bp, Homo sapien; identical to SEQ ID NO: 331741

SEQ ID NO: 331744 - DNA, 33 bp, Homo sapien; identical to SEQ ID NO: 331742

SEQ ID NO: 331745 - DNA, 33 bp, Homo sapien
tgggtccccaggctgcaatttccggtgtggtgt

SEQ ID NO: 331746 - DNA, 33 bp, Homo sapien
tgggtccccaggctgcgatttccggtgtggtgt

SEQ ID NO: 331747 - DNA, 33 bp, Homo sapien
cagcctggtgtccagcccctggtgtgctgaagc

SEQ ID NO: 331748 - DNA, 33 bp, Homo sapien
cagcctggtgtccagctcctggtgtgctgaagc

SEQ ID NO: 331749 - DNA, 33 bp, Homo sapien
ccaggatgcaatttccagcgtgcttatagaggg

SEQ ID NO: 331750 - DNA, 33 bp, Homo sapien
ccaggatgcaatttccggcgtgcttatagaggg

SEQ ID NO: 331751 - DNA, 33 bp, Homo sapien
gacacatgtccaagtaaggcctcatgcttccat

SEQ ID NO: 331752 - DNA, 33 bp, Homo sapien
gacacatgtccaagtagggcctcatgcttccat

SEQ ID NO: 331753 - DNA, 33 bp, Homo sapien
aatctccacggcccaaccccataggctcattca

SEQ ID NO: 331754 - DNA, 33 bp, Homo sapien
aatctccacggcccaatcccataggctcattca

SEQ ID NO: 331755 - DNA, 33 bp, Homo sapien; identical to SEQ ID NO: 331753

SEQ ID NO: 331756 - DNA, 33 bp, Homo sapien; identical to SEQ ID NO: 331754

SEQ ID NO: 331757 - DNA, 33 bp, Homo sapien
ccatttgtgcatgacacaccgaatactgagagc

SEQ ID NO: 331758 - DNA, 33 bp, Homo sapien
ccatttgtgcatgacataccgaatactgagagc

SEQ ID NO: 331759 - DNA, 33 bp, Homo sapien
cattgctcaataaggacggtcctattcagggcc

SEQ ID NO: 331760 - DNA, 33 bp, Homo sapien
cattgctcaataaggatggtcctattcagggcc

SEQ ID NO: 331761 - DNA, 33 bp, Homo sapien
ataggggtgggcccacaagatgcccttcagggc

SEQ ID NO: 331762 - DNA, 33 bp, Homo sapien
ataggggtgggcccaccagatgcccttcagggc

SEQ ID NO: 331763 - DNA, 33 bp, Homo sapien
agacttccattgggccaacttttcatgggacag

SEQ ID NO: 331764 - DNA, 33 bp, Homo sapien
agacttccattgggcccacttttcatgggacag

SEQ ID NO: 331765 - DNA, 33 bp, Homo sapien; identical to SEQ ID NO: 331763

SEQ ID NO: 331766 - DNA, 33 bp, Homo sapien; identical to SEQ ID NO: 331764

SEQ ID NO: 331767 - DNA, 33 bp, Homo sapien
tgctcgtccttcatggccacgtgtgatgagatc

SEQ ID NO: 331768 - DNA, 33 bp, Homo sapien
tgctcgtccttcatggtcacgtgtgatgagatc

SEQ ID NO: 331769 - DNA, 33 bp, Homo sapien
aaagcaagttcgccacaatggtgtctttttctc

SEQ ID NO: 331770 - DNA, 33 bp, Homo sapien
aaagcaagttcgccacgatggtgtctttttctc

SEQ ID NO: 331771 - DNA, 33 bp, Homo sapien
cagtgaaaaaaggaaacatatcaatgattctcc

SEQ ID NO: 331772 - DNA, 33 bp, Homo sapien
cagtgaaaaaaggaaatatatcaatgattctcc

SEQ ID NO: 331773 - DNA, 33 bp, Homo sapien
tcatgttgggtgaaaacaatcttgtagtgaaat

SEQ ID NO: 331774 - DNA, 33 bp, Homo sapien
tcatgttgggtgaaaataatcttgtagtgaaat

SEQ ID NO: 331775 - DNA, 33 bp, Homo sapien
ggttttgttggcaagacgggagggatgcatccc

SEQ ID NO: 331776 - DNA, 33 bp, Homo sapien
ggttttgttggcaagatgggagggatgcatccc

SEQ ID NO: 331777 - DNA, 33 bp, Homo sapien
tcgaaaaatagtatgcgaagcgaacgaagccaa

SEQ ID NO: 331778 - DNA, 33 bp, Homo sapien
tcgaaaaatagtatgctaagcgaacgaagccaa

SEQ ID NO: 331779 - DNA, 33 bp, Homo sapien
agcagagaagagaatacactgaagctgtagaaa

SEQ ID NO: 331780 - DNA, 33 bp, Homo sapien
agcagagaagagaatatactgaagctgtagaaa

SEQ ID NO: 331781 - DNA, 33 bp, Homo sapien
tcctttgtgcaggaagcaggttttgtggaaatg

SEQ ID NO: 331782 - DNA, 33 bp, Homo sapien
tcctttgtgcaggaaggaggttttgtggaaatg

SEQ ID NO: 331783 - DNA, 33 bp, Homo sapien
ataaaactcaaggaaacagagaagtcctactca

SEQ ID NO: 331784 - DNA, 33 bp, Homo sapien
ataaaactcaaggaaatagagaagtcctactca

SEQ ID NO: 331785 - DNA, 33 bp, Homo sapien
tagcttctacataaccaaagtggaagtagtcat

SEQ ID NO: 331786 - DNA, 33 bp, Homo sapien
tagcttctacataaccgaagtggaagtagtcat

SEQ ID NO: 331787 - DNA, 33 bp, Homo sapien
atagttcttactctcacgaggcttaaaatttca

SEQ ID NO: 331788 - DNA, 33 bp, Homo sapien
atagttcttactctcatgaggcttaaaatttca

SEQ ID NO: 331789 - DNA, 33 bp, Homo sapien
tctgccttttccaggagaattttcctagccaca

SEQ ID NO: 331790 - DNA, 33 bp, Homo sapien
tctgccttttccaggataattttcctagccaca

SEQ ID NO: 331791 - DNA, 33 bp, Homo sapien
ttcaagctacggagtacacagaattctgaggag

SEQ ID NO: 331792 - DNA, 33 bp, Homo sapien
ttcaagctacggagtatacagaattctgaggag

SEQ ID NO: 331793 - DNA, 33 bp, Homo sapien
taagggtatatttggcacaatggaggtaggatt

SEQ ID NO: 331794 - DNA, 33 bp, Homo sapien
taagggtatatttggcgcaatggaggtaggatt

SEQ ID NO: 331795 - DNA, 33 bp, Homo sapien
atattcttaatagaacaaacctgagaattagtt

SEQ ID NO: 331796 - DNA, 33 bp, Homo sapien
atattcttaatagaaccaacctgagaattagtt

SEQ ID NO: 331797 - DNA, 33 bp, Homo sapien
gtcacctacctggacaaagagtgaaagttcttc

SEQ ID NO: 331798 - DNA, 33 bp, Homo sapien
gtcacctacctggacagagagtgaaagttcttc

SEQ ID NO: 331799 - DNA, 33 bp, Homo sapien
acttaacctgtcctaactggagctcctgatttt

SEQ ID NO: 331800 - DNA, 33 bp, Homo sapien
acttaacctgtcctaagtggagctcctgatttt

SEQ ID NO: 331801 - DNA, 33 bp, Homo sapien
gcactagtggtagaaacgcaaataggtacagtt

SEQ ID NO: 331802 - DNA, 33 bp, Homo sapien
gcactagtggtagaaatgcaaataggtacagtt

SEQ ID NO: 331803 - DNA, 33 bp, Homo sapien
ctatccttttacctaccattcagaataatcaag

SEQ ID NO: 331804 - DNA, 33 bp, Homo sapien
ctatccttttacctacgattcagaataatcaag

SEQ ID NO: 331805 - DNA, 33 bp, Homo sapien
gccagattttgagaaactggggctaatctctct

SEQ ID NO: 331806 - DNA, 33 bp, Homo sapien
gccagattttgagaaattggggctaatctctct

SEQ ID NO: 331807 - DNA, 33 bp, Homo sapien
ttagaaactgaatttgaatgatcttaaacagca

SEQ ID NO: 331808 - DNA, 33 bp, Homo sapien
ttagaaactgaatttggatgatcttaaacagca

SEQ ID NO: 331809 - DNA, 33 bp, Homo sapien
accaataaccaattcacgcctgctctagtgctg

SEQ ID NO: 331810 - DNA, 33 bp, Homo sapien
accaataaccaattcatgcctgctctagtgctg

SEQ ID NO: 331811 - DNA, 33 bp, Homo sapien
ggcctgtgctctcagccactttgctacactaat

SEQ ID NO: 331812 - DNA, 33 bp, Homo sapien
ggcctgtgctctcagctactttgctacactaat

SEQ ID NO: 331813 - DNA, 33 bp, Homo sapien
ctcttttctcatcacaatattatcccctttaca

SEQ ID NO: 331814 - DNA, 33 bp, Homo sapien
ctcttttctcatcacagtattatcccctttaca

SEQ ID NO: 331815 - DNA, 33 bp, Homo sapien
tcgtttagcagaataaatgttcaccaagggaaa

SEQ ID NO: 331816 - DNA, 33 bp, Homo sapien
tcgtttagcagaataactgttcaccaagggaaa

SEQ ID NO: 331817 - DNA, 33 bp, Homo sapien
taccatgcctcaaggagaatattagtgatttag

SEQ ID NO: 331818 - DNA, 33 bp, Homo sapien
taccatgcctcaaggataatattagtgatttag

SEQ ID NO: 331819 - DNA, 33 bp, Homo sapien
aatagaaaataaatagcaagactgcagatataa

SEQ ID NO: 331820 - DNA, 33 bp, Homo sapien
aatagaaaataaataggaagactgcagatataa

SEQ ID NO: 331821 - DNA, 33 bp, Homo sapien
ctcatagtcacattcaatcgatccctgggaaac

SEQ ID NO: 331822 - DNA, 33 bp, Homo sapien
ctcatagtcacattcagtcgatccctgggaaac

SEQ ID NO: 331823 - DNA, 33 bp, Homo sapien
cagtactgtcaatatacgtaaatgaaggaaacc

SEQ ID NO: 331824 - DNA, 33 bp, Homo sapien
cagtactgtcaatatatgtaaatgaaggaaacc

SEQ ID NO: 331825 - DNA, 33 bp, Homo sapien
cttttatagtttcatacgtattacgctttggaa

SEQ ID NO: 331826 - DNA, 33 bp, Homo sapien
cttttatagtttcatatgtattacgctttggaa

SEQ ID NO: 331827 - DNA, 33 bp, Homo sapien
tggtcatttattgtcaagtgttatgatctgtac

SEQ ID NO: 331828 - DNA, 33 bp, Homo sapien
tggtcatttattgtcaggtgttatgatctgtac

SEQ ID NO: 331829 - DNA, 33 bp, Homo sapien
attatgagatattaaacaaggctcaagtaaata

SEQ ID NO: 331830 - DNA, 33 bp, Homo sapien
attatgagatattaaagaaggctcaagtaaata

SEQ ID NO: 331831 - DNA, 33 bp, Homo sapien
tgggaattagtcaccacaacatggcaagaaccc

SEQ ID NO: 331832 - DNA, 33 bp, Homo sapien
tgggaattagtcaccagaacatggcaagaaccc

SEQ ID NO: 331833 - DNA, 33 bp, Homo sapien
gaggcctagcccattaagcagcatctactgtga

SEQ ID NO: 331834 - DNA, 33 bp, Homo sapien
gaggcctagcccattaggcagcatctactgtga

SEQ ID NO: 331835 - DNA, 33 bp, Homo sapien
ctagaatccatttgaaagtcatcctggtctttg

SEQ ID NO: 331836 - DNA, 33 bp, Homo sapien
ctagaatccatttgaacgtcatcctggtctttg

SEQ ID NO: 331837 - DNA, 33 bp, Homo sapien
ggtgtggctccctaacactcatggccataaaag

SEQ ID NO: 331838 - DNA, 33 bp, Homo sapien
ggtgtggctccctaacgctcatggccataaaag

SEQ ID NO: 331839 - DNA, 33 bp, Homo sapien
aacttttggtgggtccagatttaagttgggttt

SEQ ID NO: 331840 - DNA, 33 bp, Homo sapien
aacttttggtgggtccggatttaagttgggttt

SEQ ID NO: 331841 - DNA, 33 bp, Homo sapien
atctgtcctgaaggaaatggaagagaaacctca

SEQ ID NO: 331842 - DNA, 33 bp, Homo sapien
atctgtcctgaaggaagtggaagagaaacctca

SEQ ID NO: 331843 - DNA, 33 bp, Homo sapien
caggtctgttacctggaacacgtgaattggatc

SEQ ID NO: 331844 - DNA, 33 bp, Homo sapien
caggtctgttacctgggacacgtgaattggatc

SEQ ID NO: 331845 - DNA, 33 bp, Homo sapien
aatgtccagactctcactcagagtgtctcatgt

SEQ ID NO: 331846 - DNA, 33 bp, Homo sapien
aatgtccagactctcattcagagtgtctcatgt

SEQ ID NO: 331847 - DNA, 33 bp, Homo sapien
gagctgaaatcatcagaaaagtttgcaagccag

SEQ ID NO: 331848 - DNA, 33 bp, Homo sapien
gagctgaaatcatcagtaaagtttgcaagccag

SEQ ID NO: 331849 - DNA, 33 bp, Homo sapien
gaatacatcctagaggaaggaaattgagtttct

SEQ ID NO: 331850 - DNA, 33 bp, Homo sapien
gaatacatcctagagggaggaaattgagtttct

SEQ ID NO: 331851 - DNA, 33 bp, Homo sapien
ttgtgttattgctggacgatgtttcttagatta

SEQ ID NO: 331852 - DNA, 33 bp, Homo sapien
ttgtgttattgctggatgatgtttcttagatta

SEQ ID NO: 331853 - DNA, 33 bp, Homo sapien
cacctcctcgtgaagaccaaaaaacagaagtta

SEQ ID NO: 331854 - DNA, 33 bp, Homo sapien
cacctcctcgtgaagatcaaaaaacagaagtta

SEQ ID NO: 331855 - DNA, 33 bp, Homo sapien
tttcattccgtttgaactaacatgaaattcaaa

SEQ ID NO: 331856 - DNA, 33 bp, Homo sapien
tttcattccgtttgaattaacatgaaattcaaa

SEQ ID NO: 331857 - DNA, 33 bp, Homo sapien
ctcagagaaataaaataagtggcctcagtatgc

SEQ ID NO: 331858 - DNA, 33 bp, Homo sapien
ctcagagaaataaaatcagtggcctcagtatgc

SEQ ID NO: 331859 - DNA, 33 bp, Homo sapien
gtgcgcagagacatcccagactgagggctggag

SEQ ID NO: 331860 - DNA, 33 bp, Homo sapien
gtgcgcagagacatccgagactgagggctggag

SEQ ID NO: 331861 - DNA, 33 bp, Homo sapien
cattgccattgacctcaagatgagagtggagtg

SEQ ID NO: 331862 - DNA, 33 bp, Homo sapien
cattgccattgacctcgagatgagagtggagtg

SEQ ID NO: 331863 - DNA, 33 bp, Homo sapien
atagtgctgctgctacaaagaaaagcatgacag

SEQ ID NO: 331864 - DNA, 33 bp, Homo sapien
atagtgctgctgctacgaagaaaagcatgacag

SEQ ID NO: 331865 - DNA, 33 bp, Homo sapien
gtccgcgttttcacaacatcattttcaatctgc

SEQ ID NO: 331866 - DNA, 33 bp, Homo sapien
gtccgcgttttcacaagatcattttcaatctgc

SEQ ID NO: 331867 - DNA, 33 bp, Homo sapien
attaagtgaaagaagcacaaatctgtctaacac

SEQ ID NO: 331868 - DNA, 33 bp, Homo sapien
attaagtgaaagaagcgcaaatctgtctaacac

SEQ ID NO: 331869 - DNA, 33 bp, Homo sapien
caatgaagaggcagccactgaaatctgcatagc

SEQ ID NO: 331870 - DNA, 33 bp, Homo sapien
caatgaagaggcagccgctgaaatctgcatagc

SEQ ID NO: 331871 - DNA, 33 bp, Homo sapien
caagaatttggtctcaggatagctctgacccac

SEQ ID NO: 331872 - DNA, 33 bp, Homo sapien
caagaatttggtctcatgatagctctgacccac

SEQ ID NO: 331873 - DNA, 33 bp, Homo sapien
attgattgatcaaagaagtcaaggtaacacaat

SEQ ID NO: 331874 - DNA, 33 bp, Homo sapien
attgattgatcaaagatgtcaaggtaacacaat

SEQ ID NO: 331875 - DNA, 33 bp, Homo sapien
tcccaacagaccttcaaaaatactgtccaactt

SEQ ID NO: 331876 - DNA, 33 bp, Homo sapien
tcccaacagaccttcagaaatactgtccaactt

SEQ ID NO: 331877 - DNA, 33 bp, Homo sapien
agctatggactttgcagaaataagtgaaggtca

SEQ ID NO: 331878 - DNA, 33 bp, Homo sapien
agctatggactttgcataaataagtgaaggtca

SEQ ID NO: 331879 - DNA, 33 bp, Homo sapien
gtatctgaaatctacaagtgagggaagccccaa

SEQ ID NO: 331880 - DNA, 33 bp, Homo sapien
gtatctgaaatctacaggtgagggaagccccaa

SEQ ID NO: 331881 - DNA, 33 bp, Homo sapien
gaggcaggaacgaccacgtaggaagtgatcctc

SEQ ID NO: 331882 - DNA, 33 bp, Homo sapien
gaggcaggaacgaccatgtaggaagtgatcctc

SEQ ID NO: 331883 - DNA, 33 bp, Homo sapien
cttcagtggttttctacggagaaataagcagtc

SEQ ID NO: 331884 - DNA, 33 bp, Homo sapien
cttcagtggttttctatggagaaataagcagtc

SEQ ID NO: 331885 - DNA, 33 bp, Homo sapien
aaggttgcctagtactaagaaccttgcaaatgg

SEQ ID NO: 331886 - DNA, 33 bp, Homo sapien
aaggttgcctagtactgagaaccttgcaaatgg

SEQ ID NO: 331887 - DNA, 33 bp, Homo sapien
catatttattgacacacgtttgctgtgctgggc

SEQ ID NO: 331888 - DNA, 33 bp, Homo sapien
catatttattgacacatgtttgctgtgctgggc

SEQ ID NO: 331889 - DNA, 33 bp, Homo sapien
gcaaaaacctgaatgacaaactttccacagtgt

SEQ ID NO: 331890 - DNA, 33 bp, Homo sapien
gcaaaaacctgaatgataaactttccacagtgt

SEQ ID NO: 331891 - DNA, 33 bp, Homo sapien
tggccctaaattccaccactaaatgtattctca

SEQ ID NO: 331892 - DNA, 33 bp, Homo sapien
tggccctaaattccacgactaaatgtattctca

SEQ ID NO: 331893 - DNA, 33 bp, Homo sapien
aattgaactgctgagaacatccagattcgacaa

SEQ ID NO: 331894 - DNA, 33 bp, Homo sapien
aattgaactgctgagagcatccagattcgacaa

SEQ ID NO: 331895 - DNA, 33 bp, Homo sapien
ccccaacacctatcaccggatcttccttccaga

SEQ ID NO: 331896 - DNA, 33 bp, Homo sapien
ccccaacacctatcactggatcttccttccaga

SEQ ID NO: 331897 - DNA, 33 bp, Homo sapien
taccctgtataaaaacacaaccagctgagggta

SEQ ID NO: 331898 - DNA, 33 bp, Homo sapien
taccctgtataaaaacgcaaccagctgagggta

SEQ ID NO: 331899 - DNA, 33 bp, Homo sapien
tggaaagtccaaataacgtccagaaaaatagtt

SEQ ID NO: 331900 - DNA, 33 bp, Homo sapien
tggaaagtccaaataaggtccagaaaaatagtt

SEQ ID NO: 331901 - DNA, 33 bp, Homo sapien
agttttctaggggagacgggtgacaagtttaat

SEQ ID NO: 331902 - DNA, 33 bp, Homo sapien
agttttctaggggagatgggtgacaagtttaat

SEQ ID NO: 331903 - DNA, 33 bp, Homo sapien
catttttgatcatgataaaaaacgagaaataca

SEQ ID NO: 331904 - DNA, 33 bp, Homo sapien
catttttgatcatgatgaaaaacgagaaataca

SEQ ID NO: 331905 - DNA, 33 bp, Homo sapien
ggatttttagtttcgaggacttggaagaatatg

SEQ ID NO: 331906 - DNA, 33 bp, Homo sapien
ggatttttagtttcgatgacttggaagaatatg

SEQ ID NO: 331907 - DNA, 33 bp, Homo sapien
ctctctccagatttcacggtgctgttcactcca

SEQ ID NO: 331908 - DNA, 33 bp, Homo sapien
ctctctccagatttcagggtgctgttcactcca

SEQ ID NO: 331909 - DNA, 33 bp, Homo sapien
tggattagttctcataagcatgaattagttcct

SEQ ID NO: 331910 - DNA, 33 bp, Homo sapien
tggattagttctcataggcatgaattagttcct

SEQ ID NO: 331911 - DNA, 33 bp, Homo sapien
ttgaaagccaaaggaactggaattggaaaagtc

SEQ ID NO: 331912 - DNA, 33 bp, Homo sapien
ttgaaagccaaaggaattggaattggaaaagtc

SEQ ID NO: 331913 - DNA, 33 bp, Homo sapien
aaaggctcatgctattcaaggacaggataatag

SEQ ID NO: 331914 - DNA, 33 bp, Homo sapien
aaaggctcatgctattgaaggacaggataatag

SEQ ID NO: 331915 - DNA, 33 bp, Homo sapien
aaaaaataagctgaagcctcaaagcgaattttg

SEQ ID NO: 331916 - DNA, 33 bp, Homo sapien
aaaaaataagctgaaggctcaaagcgaattttg

SEQ ID NO: 331917 - DNA, 33 bp, Homo sapien
aatccatgctctgtcacgatggtatgcagagaa

SEQ ID NO: 331918 - DNA, 33 bp, Homo sapien
aatccatgctctgtcatgatggtatgcagagaa

SEQ ID NO: 331919 - DNA, 33 bp, Homo sapien
ctttggttctaatcacagtatttgactgaaaga

SEQ ID NO: 331920 - DNA, 33 bp, Homo sapien
ctttggttctaatcaccgtatttgactgaaaga

SEQ ID NO: 331921 - DNA, 33 bp, Homo sapien
acaactaccatacccaaaaaaactgtgcttcaa

SEQ ID NO: 331922 - DNA, 33 bp, Homo sapien
acaactaccatacccagaaaaactgtgcttcaa

SEQ ID NO: 331923 - DNA, 33 bp, Homo sapien
tctatggggggttctgaaaataatcttctgtga

SEQ ID NO: 331924 - DNA, 33 bp, Homo sapien
tctatggggggttctggaaataatcttctgtga

SEQ ID NO: 331925 - DNA, 33 bp, Homo sapien
tgttggaagtcttcaccgtccacaatgccaggc

SEQ ID NO: 331926 - DNA, 33 bp, Homo sapien
tgttggaagtcttcacggtccacaatgccaggc

SEQ ID NO: 331927 - DNA, 33 bp, Homo sapien
gttatcctggttcacacggaggtatttttattt

SEQ ID NO: 331928 - DNA, 33 bp, Homo sapien
gttatcctggttcacatggaggtatttttattt

SEQ ID NO: 331929 - DNA, 33 bp, Homo sapien
catcaaccagcggcaactgtgaatgtaaacaaa

SEQ ID NO: 331930 - DNA, 33 bp, Homo sapien
catcaaccagcggcaattgtgaatgtaaacaaa

SEQ ID NO: 331931 - DNA, 33 bp, Homo sapien
tacttgctggatgacaactcctactggctgtct

SEQ ID NO: 331932 - DNA, 33 bp, Homo sapien
tacttgctggatgacacctcctactggctgtct

SEQ ID NO: 331933 - DNA, 33 bp, Homo sapien
ccatccacgtggaagactaatggagccactaca

SEQ ID NO: 331934 - DNA, 33 bp, Homo sapien
ccatccacgtggaagattaatggagccactaca

SEQ ID NO: 331935 - DNA, 33 bp, Homo sapien
agcgtcagtgtgcatgaatatatgtgtgagtgt

SEQ ID NO: 331936 - DNA, 33 bp, Homo sapien
agcgtcagtgtgcatgcatatatgtgtgagtgt

SEQ ID NO: 331937 - DNA, 33 bp, Homo sapien
ctccagcctgcttttcacttgcgctggcccagt

SEQ ID NO: 331938 - DNA, 33 bp, Homo sapien
ctccagcctgcttttcgcttgcgctggcccagt

SEQ ID NO: 331939 - DNA, 33 bp, Homo sapien
ttcaataaatgatgccacaataactggctagcc

SEQ ID NO: 331940 - DNA, 33 bp, Homo sapien
ttcaataaatgatgccgcaataactggctagcc

SEQ ID NO: 331941 - DNA, 33 bp, Homo sapien
tagggtcagagaagaccgagagaacctctccgg

SEQ ID NO: 331942 - DNA, 33 bp, Homo sapien
tagggtcagagaagactgagagaacctctccgg

SEQ ID NO: 331943 - DNA, 33 bp, Homo sapien
tacagaacctcatgacccccatcaccacagggc

SEQ ID NO: 331944 - DNA, 33 bp, Homo sapien
tacagaacctcatgactcccatcaccacagggc

SEQ ID NO: 331945 - DNA, 33 bp, Homo sapien
ggtgctgtccagagtcacttcaatgacaaactc

SEQ ID NO: 331946 - DNA, 33 bp, Homo sapien
ggtgctgtccagagtcccttcaatgacaaactc

SEQ ID NO: 331947 - DNA, 33 bp, Homo sapien
gtctctctcacctgcacattctcacagcaccta

SEQ ID NO: 331948 - DNA, 33 bp, Homo sapien
gtctctctcacctgcatattctcacagcaccta

SEQ ID NO: 331949 - DNA, 33 bp, Homo sapien
gaatgaatttgaggcagatcttgcagaatgagt

SEQ ID NO: 331950 - DNA, 33 bp, Homo sapien
gaatgaatttgaggcatatcttgcagaatgagt

SEQ ID NO: 331951 - DNA, 33 bp, Homo sapien
acatgtgatgttctgacaccggcatacgatgtg

SEQ ID NO: 331952 - DNA, 33 bp, Homo sapien
acatgtgatgttctgataccggcatacgatgtg

SEQ ID NO: 331953 - DNA, 33 bp, Homo sapien
gagatattacctctcactcgttagaatggacag

SEQ ID NO: 331954 - DNA, 33 bp, Homo sapien
gagatattacctctcagtcgttagaatggacag

SEQ ID NO: 331955 - DNA, 33 bp, Homo sapien
gctgctcttgctcttgcagaagttacagctgag

SEQ ID NO: 331956 - DNA, 33 bp, Homo sapien
gctgctcttgctcttgtagaagttacagctgag

SEQ ID NO: 331957 - DNA, 33 bp, Homo sapien
agcccatgaagcatgacggtgagaacagaaaac

SEQ ID NO: 331958 - DNA, 33 bp, Homo sapien
agcccatgaagcatgatggtgagaacagaaaac

SEQ ID NO: 331959 - DNA, 33 bp, Homo sapien
catgaagacagggaaaactccagcagtgcagta

SEQ ID NO: 331960 - DNA, 33 bp, Homo sapien
catgaagacagggaaagctccagcagtgcagta

SEQ ID NO: 331961 - DNA, 33 bp, Homo sapien
ggaaaaaactcttgtaagatatgtttggtggtt

SEQ ID NO: 331962 - DNA, 33 bp, Homo sapien
ggaaaaaactcttgtaggatatgtttggtggtt

SEQ ID NO: 331963 - DNA, 33 bp, Homo sapien
tgcacacatccgtacaagtgtctcaggagcagt

SEQ ID NO: 331964 - DNA, 33 bp, Homo sapien
tgcacacatccgtacaggtgtctcaggagcagt

SEQ ID NO: 331965 - DNA, 33 bp, Homo sapien
aggttaccaaatcctaataacaaatctaaaata

SEQ ID NO: 331966 - DNA, 33 bp, Homo sapien
aggttaccaaatcctagtaacaaatctaaaata

SEQ ID NO: 331967 - DNA, 33 bp, Homo sapien
ctggactcagcaactcagacctgggcttttctc

SEQ ID NO: 331968 - DNA, 33 bp, Homo sapien
ctggactcagcaactcggacctgggcttttctc

SEQ ID NO: 331969 - DNA, 33 bp, Homo sapien
cttacggaagtgccctcagatcatactctgtga

SEQ ID NO: 331970 - DNA, 33 bp, Homo sapien
cttacggaagtgccctgagatcatactctgtga

SEQ ID NO: 331971 - DNA, 33 bp, Homo sapien
gccgatcaggacttcaagggccagaccacagac

SEQ ID NO: 331972 - DNA, 33 bp, Homo sapien
gccgatcaggacttcaggggccagaccacagac

SEQ ID NO: 331973 - DNA, 33 bp, Homo sapien
accaagagaggcaaaaactggtcaaagtggaag

SEQ ID NO: 331974 - DNA, 33 bp, Homo sapien
accaagagaggcaaaacctggtcaaagtggaag

SEQ ID NO: 331975 - DNA, 33 bp, Homo sapien
acaaagtcagaatgaacgaactatagttgaccc

SEQ ID NO: 331976 - DNA, 33 bp, Homo sapien
acaaagtcagaatgaatgaactatagttgaccc

SEQ ID NO: 331977 - DNA, 33 bp, Homo sapien
aagtgcctgctgggaccgagccatcgaaagcca

SEQ ID NO: 331978 - DNA, 33 bp, Homo sapien
aagtgcctgctgggactgagccatcgaaagcca

SEQ ID NO: 331979 - DNA, 33 bp, Homo sapien
ctcacccataacaaagcctttgagaggcaaact

SEQ ID NO: 331980 - DNA, 33 bp, Homo sapien
ctcacccataacaaaggctttgagaggcaaact

SEQ ID NO: 331981 - DNA, 33 bp, Homo sapien
actcaaaacttcttgcaccggctttcaggcttc

SEQ ID NO: 331982 - DNA, 33 bp, Homo sapien
actcaaaacttcttgcgccggctttcaggcttc

SEQ ID NO: 331983 - DNA, 33 bp, Homo sapien
acaaacgatgtctaaaaatggcataggacatac

SEQ ID NO: 331984 - DNA, 33 bp, Homo sapien
acaaacgatgtctaaatatggcataggacatac

SEQ ID NO: 331985 - DNA, 33 bp, Homo sapien
tagaagatgcagataaacttttcccagaatcag

SEQ ID NO: 331986 - DNA, 33 bp, Homo sapien
tagaagatgcagataaccttttcccagaatcag

SEQ ID NO: 331987 - DNA, 33 bp, Homo sapien
tcccctcgaagttacccacctgtgaccgcctgc

SEQ ID NO: 331988 - DNA, 33 bp, Homo sapien
tcccctcgaagttaccgacctgtgaccgcctgc

SEQ ID NO: 331989 - DNA, 33 bp, Homo sapien
catgatgatgaccaccacggggcgagatcttcc

SEQ ID NO: 331990 - DNA, 33 bp, Homo sapien
catgatgatgaccaccgcggggcgagatcttcc

SEQ ID NO: 331991 - DNA, 33 bp, Homo sapien
cgctgccatctctcacccttcatttaacatctg

SEQ ID NO: 331992 - DNA, 33 bp, Homo sapien
cgctgccatctctcactcttcatttaacatctg

SEQ ID NO: 331993 - DNA, 33 bp, Homo sapien
caggagaaggatatcacgcccgacccaaagctg

SEQ ID NO: 331994 - DNA, 33 bp, Homo sapien
caggagaaggatatcatgcccgacccaaagctg

SEQ ID NO: 331995 - DNA, 33 bp, Homo sapien
gagaagtgagcaataacctctgaaagagccttt

SEQ ID NO: 331996 - DNA, 33 bp, Homo sapien
gagaagtgagcaataatctctgaaagagccttt

SEQ ID NO: 331997 - DNA, 33 bp, Homo sapien
gggtccaagctgtgcaatctgggagtgtgagcc

SEQ ID NO: 331998 - DNA, 33 bp, Homo sapien
gggtccaagctgtgcagtctgggagtgtgagcc

SEQ ID NO: 331999 - DNA, 33 bp, Homo sapien
aggcgattcatctttccagttcccaggaacact

SEQ ID NO: 332000 - DNA, 33 bp, Homo sapien
aggcgattcatctttctagttcccaggaacact

SEQ ID NO: 332001 - DNA, 33 bp, Homo sapien
agtcataaaatcctcagaagggcactggctaat

SEQ ID NO: 332002 - DNA, 33 bp, Homo sapien
agtcataaaatcctcataagggcactggctaat

SEQ ID NO: 332003 - DNA, 33 bp, Homo sapien
gaacaattctcctcgaaattaatgtttgcttac

SEQ ID NO: 332004 - DNA, 33 bp, Homo sapien
gaacaattctcctcgatattaatgtttgcttac

SEQ ID NO: 332005 - DNA, 33 bp, Homo sapien
tagagtaacagtattgaactaatgtttacagac

SEQ ID NO: 332006 - DNA, 33 bp, Homo sapien
tagagtaacagtattggactaatgtttacagac

SEQ ID NO: 332007 - DNA, 33 bp, Homo sapien
cttcagttcccaggagaacccagttagtctgtg

SEQ ID NO: 332008 - DNA, 33 bp, Homo sapien
cttcagttcccaggagtacccagttagtctgtg

SEQ ID NO: 332009 - DNA, 33 bp, Homo sapien
gtatgaagcacatatacgagacagcaaaggttc

SEQ ID NO: 332010 - DNA, 33 bp, Homo sapien
gtatgaagcacatatatgagacagcaaaggttc

SEQ ID NO: 332011 - DNA, 33 bp, Homo sapien
tgagcaggagatgtacagagaccacgtagcaag

SEQ ID NO: 332012 - DNA, 33 bp, Homo sapien
tgagcaggagatgtacggagaccacgtagcaag

SEQ ID NO: 332013 - DNA, 33 bp, Homo sapien
gtcagggaatgtgactcaagaagctggaacaag

SEQ ID NO: 332014 - DNA, 33 bp, Homo sapien
gtcagggaatgtgacttaagaagctggaacaag

SEQ ID NO: 332015 - DNA, 33 bp, Homo sapien
cagtaataaccacttacggcaactgctgtcagt

SEQ ID NO: 332016 - DNA, 33 bp, Homo sapien
cagtaataaccacttatggcaactgctgtcagt

SEQ ID NO: 332017 - DNA, 33 bp, Homo sapien
tgctgggccggcatgacgaggaaaccgctggac

SEQ ID NO: 332018 - DNA, 33 bp, Homo sapien
tgctgggccggcatgatgaggaaaccgctggac

SEQ ID NO: 332019 - DNA, 33 bp, Homo sapien
gtttctcatctataaaatggtgtgataatcatt

SEQ ID NO: 332020 - DNA, 33 bp, Homo sapien
gtttctcatctataaattggtgtgataatcatt

SEQ ID NO: 332021 - DNA, 33 bp, Homo sapien
ataacaggctaactaacgtcacaaaggtcattt

SEQ ID NO: 332022 - DNA, 33 bp, Homo sapien
ataacaggctaactaatgtcacaaaggtcattt

SEQ ID NO: 332023 - DNA, 33 bp, Homo sapien
gtagaggcttaaaatgacaggggacactcctct

SEQ ID NO: 332024 - DNA, 33 bp, Homo sapien
gtagaggcttaaaatggcaggggacactcctct

SEQ ID NO: 332025 - DNA, 33 bp, Homo sapien
atcaggagtcaccaaactgtgttttttttgcta

SEQ ID NO: 332026 - DNA, 33 bp, Homo sapien
atcaggagtcaccaaattgtgttttttttgcta

SEQ ID NO: 332027 - DNA, 33 bp, Homo sapien
aaattgccaaaaatacagtagtgtagactagat

SEQ ID NO: 332028 - DNA, 33 bp, Homo sapien
aaattgccaaaaatacggtagtgtagactagat

SEQ ID NO: 332029 - DNA, 33 bp, Homo sapien
gtcagaaagggctgaacgttgtcccagcggaac

SEQ ID NO: 332030 - DNA, 33 bp, Homo sapien
gtcagaaagggctgaatgttgtcccagcggaac

SEQ ID NO: 332031 - DNA, 33 bp, Homo sapien
gaggttttaaaaagacaaagcagctggttttgc

SEQ ID NO: 332032 - DNA, 33 bp, Homo sapien
gaggttttaaaaagacgaagcagctggttttgc

SEQ ID NO: 332033 - DNA, 33 bp, Homo sapien
ctaagacagtcacctacgtccctgtattataca

SEQ ID NO: 332034 - DNA, 33 bp, Homo sapien
ctaagacagtcacctatgtccctgtattataca

SEQ ID NO: 332035 - DNA, 33 bp, Homo sapien
atgctcaggtcgtaacagaggaaaatgaacatc

SEQ ID NO: 332036 - DNA, 33 bp, Homo sapien
atgctcaggtcgtaacggaggaaaatgaacatc

SEQ ID NO: 332037 - DNA, 33 bp, Homo sapien
agcaacaaaattgacactccaaacaagtctcct

SEQ ID NO: 332038 - DNA, 33 bp, Homo sapien
agcaacaaaattgacattccaaacaagtctcct

SEQ ID NO: 332039 - DNA, 33 bp, Homo sapien
ttggacgttgactcaaccccctcttcatcctga

SEQ ID NO: 332040 - DNA, 33 bp, Homo sapien
ttggacgttgactcaatcccctcttcatcctga

SEQ ID NO: 332041 - DNA, 33 bp, Homo sapien
tttgtttcagagcttacaaatatgagtgtggca

SEQ ID NO: 332042 - DNA, 33 bp, Homo sapien
tttgtttcagagcttataaatatgagtgtggca

SEQ ID NO: 332043 - DNA, 33 bp, Homo sapien
ggttccctcatctgacactttcttccaccttaa

SEQ ID NO: 332044 - DNA, 33 bp, Homo sapien
ggttccctcatctgactctttcttccaccttaa

SEQ ID NO: 332045 - DNA, 33 bp, Homo sapien
ctcacctcacaaagacacagcccttggccataa

SEQ ID NO: 332046 - DNA, 33 bp, Homo sapien
ctcacctcacaaagactcagcccttggccataa

SEQ ID NO: 332047 - DNA, 33 bp, Homo sapien
attcagtccttgtacccgagaagcaggagagaa

SEQ ID NO: 332048 - DNA, 33 bp, Homo sapien
attcagtccttgtacctgagaagcaggagagaa

SEQ ID NO: 332049 - DNA, 33 bp, Homo sapien
cacccagtctttaccacgatggacaactcgcaa

SEQ ID NO: 332050 - DNA, 33 bp, Homo sapien
cacccagtctttaccatgatggacaactcgcaa

SEQ ID NO: 332051 - DNA, 33 bp, Homo sapien
gcctgtgtattgcttcaccccaagacacatgtg

SEQ ID NO: 332052 - DNA, 33 bp, Homo sapien
gcctgtgtattgcttcgccccaagacacatgtg

SEQ ID NO: 332053 - DNA, 33 bp, Homo sapien
cacatatggctaaacacggaaaggacaaatgac

SEQ ID NO: 332054 - DNA, 33 bp, Homo sapien
cacatatggctaaacatggaaaggacaaatgac

SEQ ID NO: 332055 - DNA, 33 bp, Homo sapien
gtgaaggtcaattgaacgatttctttgaggaag

SEQ ID NO: 332056 - DNA, 33 bp, Homo sapien
gtgaaggtcaattgaatgatttctttgaggaag

SEQ ID NO: 332057 - DNA, 33 bp, Homo sapien
aataaccttgaggaacagggaagattcatggca

SEQ ID NO: 332058 - DNA, 33 bp, Homo sapien
aataaccttgaggaactgggaagattcatggca

SEQ ID NO: 332059 - DNA, 33 bp, Homo sapien
actggcacaaagataacatagatccaggtcagc

SEQ ID NO: 332060 - DNA, 33 bp, Homo sapien
actggcacaaagataatatagatccaggtcagc

SEQ ID NO: 332061 - DNA, 33 bp, Homo sapien
tggacaggcattaacactagagcaaggttcccc

SEQ ID NO: 332062 - DNA, 33 bp, Homo sapien
tggacaggcattaacattagagcaaggttcccc

SEQ ID NO: 332063 - DNA, 33 bp, Homo sapien
gtatgttgctggagaccagagattaaatgcagg

SEQ ID NO: 332064 - DNA, 33 bp, Homo sapien
gtatgttgctggagacgagagattaaatgcagg

SEQ ID NO: 332065 - DNA, 33 bp, Homo sapien
tactgtaacttaagcacgggaagatcctaaaac

SEQ ID NO: 332066 - DNA, 33 bp, Homo sapien
tactgtaacttaagcatgggaagatcctaaaac

SEQ ID NO: 332067 - DNA, 33 bp, Homo sapien
tacacaaggaatgaaactcaccagaaatggcaa

SEQ ID NO: 332068 - DNA, 33 bp, Homo sapien
tacacaaggaatgaaagtcaccagaaatggcaa

SEQ ID NO: 332069 - DNA, 33 bp, Homo sapien
tattcccgacactttaaaaatagcatctataca

SEQ ID NO: 332070 - DNA, 33 bp, Homo sapien
tattcccgacactttagaaatagcatctataca

SEQ ID NO: 332071 - DNA, 33 bp, Homo sapien
atgtacattgcaaacagaattttatcatcatca

SEQ ID NO: 332072 - DNA, 33 bp, Homo sapien
atgtacattgcaaacataattttatcatcatca

SEQ ID NO: 332073 - DNA, 33 bp, Homo sapien
ctagtgaaaaccaaaaatgaatacaactttgta

SEQ ID NO: 332074 - DNA, 33 bp, Homo sapien
ctagtgaaaaccaaaagtgaatacaactttgta

SEQ ID NO: 332075 - DNA, 33 bp, Homo sapien
ttaagactggatttacaaaaatgggggctgtag

SEQ ID NO: 332076 - DNA, 33 bp, Homo sapien
ttaagactggatttacgaaaatgggggctgtag

SEQ ID NO: 332077 - DNA, 33 bp, Homo sapien
gctttgtagcgttttacgtttccgtatttccta

SEQ ID NO: 332078 - DNA, 33 bp, Homo sapien
gctttgtagcgttttatgtttccgtatttccta

SEQ ID NO: 332079 - DNA, 33 bp, Homo sapien
ccgcctccttactccacgttggttcttgcaaac

SEQ ID NO: 332080 - DNA, 33 bp, Homo sapien
ccgcctccttactccatgttggttcttgcaaac

SEQ ID NO: 332081 - DNA, 33 bp, Homo sapien
aaacatgctatgtgaacgaaaccagttacaaag

SEQ ID NO: 332082 - DNA, 33 bp, Homo sapien
aaacatgctatgtgaaggaaaccagttacaaag

SEQ ID NO: 332083 - DNA, 33 bp, Homo sapien
ggttccaggttccaataagtgatgatcatgccc

SEQ ID NO: 332084 - DNA, 33 bp, Homo sapien
ggttccaggttccaatgagtgatgatcatgccc

SEQ ID NO: 332085 - DNA, 33 bp, Homo sapien
gcaacctaagtgtccaatgaggaatgaatggat

SEQ ID NO: 332086 - DNA, 33 bp, Homo sapien
gcaacctaagtgtccactgaggaatgaatggat

SEQ ID NO: 332087 - DNA, 33 bp, Homo sapien
ggcttatttcacttcaagtccctcaggttcatc

SEQ ID NO: 332088 - DNA, 33 bp, Homo sapien
ggcttatttcacttcaggtccctcaggttcatc

SEQ ID NO: 332089 - DNA, 33 bp, Homo sapien
tggaaatctgaacacacactgggtatttaacag

SEQ ID NO: 332090 - DNA, 33 bp, Homo sapien
tggaaatctgaacacagactgggtatttaacag

SEQ ID NO: 332091 - DNA, 33 bp, Homo sapien
caataagattatattcaagtcatcacaaagtac

SEQ ID NO: 332092 - DNA, 33 bp, Homo sapien
caataagattatattcgagtcatcacaaagtac

SEQ ID NO: 332093 - DNA, 33 bp, Homo sapien
gagatctcctatcagaagaagactttgtgcctt

SEQ ID NO: 332094 - DNA, 33 bp, Homo sapien
gagatctcctatcagaggaagactttgtgcctt

SEQ ID NO: 332095 - DNA, 33 bp, Homo sapien
ctctaaagtctacataccatacaattccattaa

SEQ ID NO: 332096 - DNA, 33 bp, Homo sapien
ctctaaagtctacatatcatacaattccattaa

SEQ ID NO: 332097 - DNA, 33 bp, Homo sapien
caaagggcagaacgtgaagcagcatttgaggct

SEQ ID NO: 332098 - DNA, 33 bp, Homo sapien
caaagggcagaacgtggagcagcatttgaggct

SEQ ID NO: 332099 - DNA, 33 bp, Homo sapien
aaaggtcttctgctgacaatgctgctacgctac

SEQ ID NO: 332100 - DNA, 33 bp, Homo sapien
aaaggtcttctgctgataatgctgctacgctac

SEQ ID NO: 332101 - DNA, 33 bp, Homo sapien
aatagaatattacaaaacctcacaaagttccct

SEQ ID NO: 332102 - DNA, 33 bp, Homo sapien
aatagaatattacaaaccctcacaaagttccct

SEQ ID NO: 332103 - DNA, 33 bp, Homo sapien
tggatgacttactgtccatatatgctatcctcc

SEQ ID NO: 332104 - DNA, 33 bp, Homo sapien
tggatgacttactgtcgatatatgctatcctcc

SEQ ID NO: 332105 - DNA, 33 bp, Homo sapien
tctgttgcattctctaccaaagtgttttcaaaa

SEQ ID NO: 332106 - DNA, 33 bp, Homo sapien
tctgttgcattctctagcaaagtgttttcaaaa

SEQ ID NO: 332107 - DNA, 33 bp, Homo sapien
catttgaatttgaataagtgcagtccttccaaa

SEQ ID NO: 332108 - DNA, 33 bp, Homo sapien
catttgaatttgaataggtgcagtccttccaaa

SEQ ID NO: 332109 - DNA, 33 bp, Homo sapien
cacccagtgcaggaacaatatgaataagtattt

SEQ ID NO: 332110 - DNA, 33 bp, Homo sapien
cacccagtgcaggaacgatatgaataagtattt

SEQ ID NO: 332111 - DNA, 33 bp, Homo sapien
tgtcttggaccattcacgatcctcttcctcaaa

SEQ ID NO: 332112 - DNA, 33 bp, Homo sapien
tgtcttggaccattcatgatcctcttcctcaaa

SEQ ID NO: 332113 - DNA, 33 bp, Homo sapien
atggggatgacagacccggaactgataacagga

SEQ ID NO: 332114 - DNA, 33 bp, Homo sapien
atggggatgacagacctggaactgataacagga

SEQ ID NO: 332115 - DNA, 33 bp, Homo sapien
cctgaggatgctccacagaaatcatgcatgggg

SEQ ID NO: 332116 - DNA, 33 bp, Homo sapien
cctgaggatgctccacggaaatcatgcatgggg

SEQ ID NO: 332117 - DNA, 33 bp, Homo sapien
ctaggttattgaccaacggtaaaggaagtcagg

SEQ ID NO: 332118 - DNA, 33 bp, Homo sapien
ctaggttattgaccaatggtaaaggaagtcagg

SEQ ID NO: 332119 - DNA, 33 bp, Homo sapien
attggaaatggctgaaaaccaagttgcaaatct

SEQ ID NO: 332120 - DNA, 33 bp, Homo sapien
attggaaatggctgaacaccaagttgcaaatct

SEQ ID NO: 332121 - DNA, 33 bp, Homo sapien
tggagccagaagctacagacagtggttacctca

SEQ ID NO: 332122 - DNA, 33 bp, Homo sapien
tggagccagaagctacggacagtggttacctca

SEQ ID NO: 332123 - DNA, 33 bp, Homo sapien
aaaacaggagttgcaggagaaaaaatggatact

SEQ ID NO: 332124 - DNA, 33 bp, Homo sapien
aaaacaggagttgcagtagaaaaaatggatact

SEQ ID NO: 332125 - DNA, 33 bp, Homo sapien
caataaggaaatcaaactcatgtggtcaaataa

SEQ ID NO: 332126 - DNA, 33 bp, Homo sapien
caataaggaaatcaaagtcatgtggtcaaataa

SEQ ID NO: 332127 - DNA, 33 bp, Homo sapien
ttaaaaagccactttacagaagtatgactgata

SEQ ID NO: 332128 - DNA, 33 bp, Homo sapien
ttaaaaagccactttatagaagtatgactgata

SEQ ID NO: 332129 - DNA, 33 bp, Homo sapien
ctgtgacagagtatgaatataattcggtagagg

SEQ ID NO: 332130 - DNA, 33 bp, Homo sapien
ctgtgacagagtatgactataattcggtagagg

SEQ ID NO: 332131 - DNA, 33 bp, Homo sapien
gcttagtgcaaaaaaaaacttcaaattgcaaga

SEQ ID NO: 332132 - DNA, 33 bp, Homo sapien
gcttagtgcaaaaaaacacttcaaattgcaaga

SEQ ID NO: 332133 - DNA, 33 bp, Homo sapien
aaggatatatgtgccaagatttaatgcccacgg

SEQ ID NO: 332134 - DNA, 33 bp, Homo sapien
aaggatatatgtgccaggatttaatgcccacgg

SEQ ID NO: 332135 - DNA, 33 bp, Homo sapien
taaggcataagcaataacaagagttgccaacag

SEQ ID NO: 332136 - DNA, 33 bp, Homo sapien
taaggcataagcaataccaagagttgccaacag

SEQ ID NO: 332137 - DNA, 33 bp, Homo sapien; identical to SEQ ID NO: 332135

SEQ ID NO: 332138 - DNA, 33 bp, Homo sapien; identical to SEQ ID NO: 332136

SEQ ID NO: 332139 - DNA, 33 bp, Homo sapien
tcttacattaggttcgaaattagtcaaactcat

SEQ ID NO: 332140 - DNA, 33 bp, Homo sapien
tcttacattaggttcgtaattagtcaaactcat

SEQ ID NO: 332141 - DNA, 33 bp, Homo sapien
gaaattgctatgggaaaccaaaatgatcacagt

SEQ ID NO: 332142 - DNA, 33 bp, Homo sapien
gaaattgctatgggaagccaaaatgatcacagt

SEQ ID NO: 332143 - DNA, 33 bp, Homo sapien
ctcaggccagacttgacggcaaaggtcagaatt

SEQ ID NO: 332144 - DNA, 33 bp, Homo sapien
ctcaggccagacttgatggcaaaggtcagaatt

SEQ ID NO: 332145 - DNA, 33 bp, Homo sapien
tcctctggcccacagccgagtgcttgtcctcat

SEQ ID NO: 332146 - DNA, 33 bp, Homo sapien
tcctctggcccacagctgagtgcttgtcctcat

SEQ ID NO: 332147 - DNA, 33 bp, Homo sapien
tgccatgtggagataaccaaaaaatagaaaaga

SEQ ID NO: 332148 - DNA, 33 bp, Homo sapien
tgccatgtggagataagcaaaaaatagaaaaga

SEQ ID NO: 332149 - DNA, 33 bp, Homo sapien
ctccatagaggaattcagaaatcagctttcaac

SEQ ID NO: 332150 - DNA, 33 bp, Homo sapien
ctccatagaggaattcggaaatcagctttcaac

SEQ ID NO: 332151 - DNA, 33 bp, Homo sapien
cagaattactcaccacagtgctttgcttgacgc

SEQ ID NO: 332152 - DNA, 33 bp, Homo sapien
cagaattactcaccacggtgctttgcttgacgc

SEQ ID NO: 332153 - DNA, 33 bp, Homo sapien
gactagtgctgtatgaaacccccgaggagccaa

SEQ ID NO: 332154 - DNA, 33 bp, Homo sapien
gactagtgctgtatgagacccccgaggagccaa

SEQ ID NO: 332155 - DNA, 33 bp, Homo sapien
gaaacccctacagcaaatacaatggattatgga

SEQ ID NO: 332156 - DNA, 33 bp, Homo sapien
gaaacccctacagcaactacaatggattatgga

SEQ ID NO: 332157 - DNA, 33 bp, Homo sapien
ttctgagttaggtagaacttcaatatggccaga

SEQ ID NO: 332158 - DNA, 33 bp, Homo sapien
ttctgagttaggtagaccttcaatatggccaga

SEQ ID NO: 332159 - DNA, 33 bp, Homo sapien
tgtaggagctttgtgacgactgacgtgatgtga

SEQ ID NO: 332160 - DNA, 33 bp, Homo sapien
tgtaggagctttgtgatgactgacgtgatgtga

SEQ ID NO: 332161 - DNA, 33 bp, Homo sapien
caggaggagctgatgaacaaaggctgcagaggg

SEQ ID NO: 332162 - DNA, 33 bp, Homo sapien
caggaggagctgatgagcaaaggctgcagaggg

SEQ ID NO: 332163 - DNA, 33 bp, Homo sapien
ctgaatttatctccccaagtagccaccatttat

SEQ ID NO: 332164 - DNA, 33 bp, Homo sapien
ctgaatttatctccccgagtagccaccatttat

SEQ ID NO: 332165 - DNA, 33 bp, Homo sapien
gtaccgacttgccgcacacatcgggcagtggac

SEQ ID NO: 332166 - DNA, 33 bp, Homo sapien
gtaccgacttgccgcatacatcgggcagtggac

SEQ ID NO: 332167 - DNA, 33 bp, Homo sapien
catctgtaatcctgaaaccatccccacaacagt

SEQ ID NO: 332168 - DNA, 33 bp, Homo sapien
catctgtaatcctgaagccatccccacaacagt

SEQ ID NO: 332169 - DNA, 33 bp, Homo sapien
tgcccagtgacccagaagttttcaagctatgga

SEQ ID NO: 332170 - DNA, 33 bp, Homo sapien
tgcccagtgacccagatgttttcaagctatgga

SEQ ID NO: 332171 - DNA, 33 bp, Homo sapien
tgcttgaaagcccaagaaaatttactccgtgca

SEQ ID NO: 332172 - DNA, 33 bp, Homo sapien
tgcttgaaagcccaaggaaatttactccgtgca

SEQ ID NO: 332173 - DNA, 33 bp, Homo sapien
ttaacatttacatctagtaatgcactttcacat

SEQ ID NO: 332174 - DNA, 33 bp, Homo sapien
ttaacatttacatctattaatgcactttcacat

SEQ ID NO: 332175 - DNA, 33 bp, Homo sapien
ggctaacctgcattagacacgatttcaagcacg

SEQ ID NO: 332176 - DNA, 33 bp, Homo sapien
ggctaacctgcattagccacgatttcaagcacg

SEQ ID NO: 332177 - DNA, 33 bp, Homo sapien
ggttagccaggtctcaaaaccacagctgcgact

SEQ ID NO: 332178 - DNA, 33 bp, Homo sapien
ggttagccaggtctcacaaccacagctgcgact

SEQ ID NO: 332179 - DNA, 33 bp, Homo sapien
ggcaataatgtgtagactaaaaacaaagagaga

SEQ ID NO: 332180 - DNA, 33 bp, Homo sapien
ggcaataatgtgtagattaaaaacaaagagaga

SEQ ID NO: 332181 - DNA, 33 bp, Homo sapien
catgaacaaatgacacacctgccaaagtctgtg

SEQ ID NO: 332182 - DNA, 33 bp, Homo sapien
catgaacaaatgacacgcctgccaaagtctgtg

SEQ ID NO: 332183 - DNA, 33 bp, Homo sapien
ttttgtggtatgtgtacgtcttcatgccccttt

SEQ ID NO: 332184 - DNA, 33 bp, Homo sapien
ttttgtggtatgtgtatgtcttcatgccccttt

SEQ ID NO: 332185 - DNA, 33 bp, Homo sapien
agagacacatacattgaaattgagaacttctga

SEQ ID NO: 332186 - DNA, 33 bp, Homo sapien
agagacacatacattgcaattgagaacttctga

SEQ ID NO: 332187 - DNA, 33 bp, Homo sapien
acaaatttatgacagaagacaagttgacaaaac

SEQ ID NO: 332188 - DNA, 33 bp, Homo sapien
acaaatttatgacagaggacaagttgacaaaac

SEQ ID NO: 332189 - DNA, 33 bp, Homo sapien
tctattccacttgtcaagttgtaagtccctcat

SEQ ID NO: 332190 - DNA, 33 bp, Homo sapien
tctattccacttgtcatgttgtaagtccctcat

SEQ ID NO: 332191 - DNA, 33 bp, Homo sapien
tgacagcttaagagaacgttcacatatatttac

SEQ ID NO: 332192 - DNA, 33 bp, Homo sapien
tgacagcttaagagaatgttcacatatatttac

SEQ ID NO: 332193 - DNA, 33 bp, Homo sapien
tgacactcaggatgcactgaagagctggaagta

SEQ ID NO: 332194 - DNA, 33 bp, Homo sapien
tgacactcaggatgcattgaagagctggaagta

SEQ ID NO: 332195 - DNA, 33 bp, Homo sapien
gtcctgccagtaccaaagaggtcacaccgagca

SEQ ID NO: 332196 - DNA, 33 bp, Homo sapien
gtcctgccagtaccaaggaggtcacaccgagca

SEQ ID NO: 332197 - DNA, 33 bp, Homo sapien
gttatctggaagccccccactacttctagttgt

SEQ ID NO: 332198 - DNA, 33 bp, Homo sapien
gttatctggaagccccgcactacttctagttgt

SEQ ID NO: 332199 - DNA, 33 bp, Homo sapien
tggctgtttcacataaattatctcagttaaact

SEQ ID NO: 332200 - DNA, 33 bp, Homo sapien
tggctgtttcacataagttatctcagttaaact

SEQ ID NO: 332201 - DNA, 33 bp, Homo sapien
caaatagttgacaatcactcattaaggaagttg

SEQ ID NO: 332202 - DNA, 33 bp, Homo sapien
caaatagttgacaatcgctcattaaggaagttg

SEQ ID NO: 332203 - DNA, 33 bp, Homo sapien
atgttatttgatcccacatctgtttttagaagt

SEQ ID NO: 332204 - DNA, 33 bp, Homo sapien
atgttatttgatcccatatctgtttttagaagt

SEQ ID NO: 332205 - DNA, 33 bp, Homo sapien
gtaagacaacgtaggcaaaacaaaggtactatg

SEQ ID NO: 332206 - DNA, 33 bp, Homo sapien
gtaagacaacgtaggcgaaacaaaggtactatg

SEQ ID NO: 332207 - DNA, 33 bp, Homo sapien
aacaaaatccggacacaccacatttgagagctg

SEQ ID NO: 332208 - DNA, 33 bp, Homo sapien
aacaaaatccggacacgccacatttgagagctg

SEQ ID NO: 332209 - DNA, 33 bp, Homo sapien
tacccattattcaaaaagattcaactaattttt

SEQ ID NO: 332210 - DNA, 33 bp, Homo sapien
tacccattattcaaaaggattcaactaattttt

SEQ ID NO: 332211 - DNA, 33 bp, Homo sapien
caaacaagtagtaacaaaaagtatgatacatgt

SEQ ID NO: 332212 - DNA, 33 bp, Homo sapien
caaacaagtagtaacagaaagtatgatacatgt

SEQ ID NO: 332213 - DNA, 33 bp, Homo sapien
aaatgggctcagttacggaagtattgatggggc

SEQ ID NO: 332214 - DNA, 33 bp, Homo sapien
aaatgggctcagttactgaagtattgatggggc

SEQ ID NO: 332215 - DNA, 33 bp, Homo sapien
ttggccaacaagcaaaagtgtggaaatgtcagg

SEQ ID NO: 332216 - DNA, 33 bp, Homo sapien
ttggccaacaagcaaaggtgtggaaatgtcagg

SEQ ID NO: 332217 - DNA, 33 bp, Homo sapien
acacaggtattttcaaagcagtatttcttcgtg

SEQ ID NO: 332218 - DNA, 33 bp, Homo sapien
acacaggtattttcaaggcagtatttcttcgtg

SEQ ID NO: 332219 - DNA, 33 bp, Homo sapien
ctgaagaggaaagcacacatgtacacacagaga

SEQ ID NO: 332220 - DNA, 33 bp, Homo sapien
ctgaagaggaaagcacgcatgtacacacagaga

SEQ ID NO: 332221 - DNA, 33 bp, Homo sapien
caaatttattgtccaaaaaaaactgatatggga

SEQ ID NO: 332222 - DNA, 33 bp, Homo sapien
caaatttattgtccaagaaaaactgatatggga

SEQ ID NO: 332223 - DNA, 33 bp, Homo sapien
acatggtctttatcagcacaatgttcatatctg

SEQ ID NO: 332224 - DNA, 33 bp, Homo sapien
acatggtctttatcagtacaatgttcatatctg

SEQ ID NO: 332225 - DNA, 33 bp, Homo sapien
caacctatactgtaaactgatcgtgctcatctc

SEQ ID NO: 332226 - DNA, 33 bp, Homo sapien
caacctatactgtaaagtgatcgtgctcatctc

SEQ ID NO: 332227 - DNA, 33 bp, Homo sapien
ttaagtagaatgtaaacagggagaaaggctgtg

SEQ ID NO: 332228 - DNA, 33 bp, Homo sapien
ttaagtagaatgtaaatagggagaaaggctgtg

SEQ ID NO: 332229 - DNA, 33 bp, Homo sapien
agctctaaacttctctcagaaagagacagatct

SEQ ID NO: 332230 - DNA, 33 bp, Homo sapien
agctctaaacttctctgagaaagagacagatct

SEQ ID NO: 332231 - DNA, 33 bp, Homo sapien
aatgagtaaccggaaagaataaatgtgtgtgtc

SEQ ID NO: 332232 - DNA, 33 bp, Homo sapien
aatgagtaaccggaaataataaatgtgtgtgtc

SEQ ID NO: 332233 - DNA, 33 bp, Homo sapien
ggaaaaggcttctcgacgacacatgacttgggg

SEQ ID NO: 332234 - DNA, 33 bp, Homo sapien
ggaaaaggcttctcgatgacacatgacttgggg

SEQ ID NO: 332235 - DNA, 33 bp, Homo sapien
actaacgatcctcctacagtggaatttataggg

SEQ ID NO: 332236 - DNA, 33 bp, Homo sapien
actaacgatcctcctatagtggaatttataggg

SEQ ID NO: 332237 - DNA, 33 bp, Homo sapien
ttgagttggaagatccacagtttccaaacagtc

SEQ ID NO: 332238 - DNA, 33 bp, Homo sapien
ttgagttggaagatccgcagtttccaaacagtc

SEQ ID NO: 332239 - DNA, 33 bp, Homo sapien
cacctggccttacccaacaacaaaagggctgag

SEQ ID NO: 332240 - DNA, 33 bp, Homo sapien
cacctggccttacccagcaacaaaagggctgag

SEQ ID NO: 332241 - DNA, 33 bp, Homo sapien
taagatatctaactaccctaagtccaagctggc

SEQ ID NO: 332242 - DNA, 33 bp, Homo sapien
taagatatctaactactctaagtccaagctggc

SEQ ID NO: 332243 - DNA, 33 bp, Homo sapien
ggcagaggctgggaaaccttgacccggtgcccg

SEQ ID NO: 332244 - DNA, 33 bp, Homo sapien
ggcagaggctgggaaagcttgacccggtgcccg

SEQ ID NO: 332245 - DNA, 33 bp, Homo sapien
aaaagacacaaaaatcagaatgaatgttttcag

SEQ ID NO: 332246 - DNA, 33 bp, Homo sapien
aaaagacacaaaaatcggaatgaatgttttcag

SEQ ID NO: 332247 - DNA, 33 bp, Homo sapien
atctgcagggatggaagtgcttgctattttttg

SEQ ID NO: 332248 - DNA, 33 bp, Homo sapien
atctgcagggatggaattgcttgctattttttg

SEQ ID NO: 332249 - DNA, 33 bp, Homo sapien
aaccagaattatgatggaaacaaaaaactccac

SEQ ID NO: 332250 - DNA, 33 bp, Homo sapien
aaccagaattatgatgtaaacaaaaaactccac

SEQ ID NO: 332251 - DNA, 33 bp, Homo sapien
aagctaaatgcagagcaccaaggagggcaaggg

SEQ ID NO: 332252 - DNA, 33 bp, Homo sapien
aagctaaatgcagagcgccaaggagggcaaggg

SEQ ID NO: 332253 - DNA, 33 bp, Homo sapien
ttctggtgtgccaccaatactctgtttcctaac

SEQ ID NO: 332254 - DNA, 33 bp, Homo sapien
ttctggtgtgccaccagtactctgtttcctaac

SEQ ID NO: 332255 - DNA, 33 bp, Homo sapien
aaacctcttccatgaaacttttcctcatcccct

SEQ ID NO: 332256 - DNA, 33 bp, Homo sapien
aaacctcttccatgaagcttttcctcatcccct

SEQ ID NO: 332257 - DNA, 33 bp, Homo sapien
gtcagggtagacggagcagaatgtgcaaaacta

SEQ ID NO: 332258 - DNA, 33 bp, Homo sapien
gtcagggtagacggaggagaatgtgcaaaacta

SEQ ID NO: 332259 - DNA, 33 bp, Homo sapien
gtccatgttgtgacataaatgcggggactattg

SEQ ID NO: 332260 - DNA, 33 bp, Homo sapien
gtccatgttgtgacatgaatgcggggactattg

SEQ ID NO: 332261 - DNA, 33 bp, Homo sapien
gggaaacttggtcccacgacattgttctttagc

SEQ ID NO: 332262 - DNA, 33 bp, Homo sapien
gggaaacttggtcccatgacattgttctttagc

SEQ ID NO: 332263 - DNA, 33 bp, Homo sapien
tgtacacaattaatgacgccaaagatttatagg

SEQ ID NO: 332264 - DNA, 33 bp, Homo sapien
tgtacacaattaatgatgccaaagatttatagg

SEQ ID NO: 332265 - DNA, 33 bp, Homo sapien
ttttctcccatcatgcacttacagcaggagatg

SEQ ID NO: 332266 - DNA, 33 bp, Homo sapien
ttttctcccatcatgcccttacagcaggagatg

SEQ ID NO: 332267 - DNA, 33 bp, Homo sapien
gtatccctaacacaccccttgcacgtgagaaca

SEQ ID NO: 332268 - DNA, 33 bp, Homo sapien
gtatccctaacacaccgcttgcacgtgagaaca

SEQ ID NO: 332269 - DNA, 33 bp, Homo sapien
agaacatgggatgtcaacctcaaagcctgtatc

SEQ ID NO: 332270 - DNA, 33 bp, Homo sapien
agaacatgggatgtcaccctcaaagcctgtatc

SEQ ID NO: 332271 - DNA, 33 bp, Homo sapien
aagaatacaagttgatcaacctcgtactactct

SEQ ID NO: 332272 - DNA, 33 bp, Homo sapien
aagaatacaagttgattaacctcgtactactct

SEQ ID NO: 332273 - DNA, 33 bp, Homo sapien
tcttgggtcatatttcccttcttagagcatagg

SEQ ID NO: 332274 - DNA, 33 bp, Homo sapien
tcttgggtcatatttctcttcttagagcatagg

SEQ ID NO: 332275 - DNA, 33 bp, Homo sapien
gaacttcctgtgaaaacgctgatttccacatat

SEQ ID NO: 332276 - DNA, 33 bp, Homo sapien
gaacttcctgtgaaaatgctgatttccacatat

SEQ ID NO: 332277 - DNA, 33 bp, Homo sapien
tgtcatatcactttaccaagataattgctttca

SEQ ID NO: 332278 - DNA, 33 bp, Homo sapien
tgtcatatcactttactaagataattgctttca

SEQ ID NO: 332279 - DNA, 33 bp, Homo sapien
catgaagaagagtatacctgtaacaaaaacact

SEQ ID NO: 332280 - DNA, 33 bp, Homo sapien
catgaagaagagtatatctgtaacaaaaacact

SEQ ID NO: 332281 - DNA, 33 bp, Homo sapien
cctgcaaagggtgaaccgatcttaattcctctc

SEQ ID NO: 332282 - DNA, 33 bp, Homo sapien
cctgcaaagggtgaactgatcttaattcctctc

SEQ ID NO: 332283 - DNA, 33 bp, Homo sapien
tttaaattttcttacaaaggcaaatgaaaagca

SEQ ID NO: 332284 - DNA, 33 bp, Homo sapien
tttaaattttcttacagaggcaaatgaaaagca

SEQ ID NO: 332285 - DNA, 33 bp, Homo sapien
gtcaatatcctaatacacgtcttctctggtatt

SEQ ID NO: 332286 - DNA, 33 bp, Homo sapien
gtcaatatcctaatacgcgtcttctctggtatt

SEQ ID NO: 332287 - DNA, 33 bp, Homo sapien
tataatgtagagttaaccttatccatagatcac

SEQ ID NO: 332288 - DNA, 33 bp, Homo sapien
tataatgtagagttaatcttatccatagatcac

SEQ ID NO: 332289 - DNA, 33 bp, Homo sapien
gctcctggcagcatgaatcaatcttctggacac

SEQ ID NO: 332290 - DNA, 33 bp, Homo sapien
gctcctggcagcatgagtcaatcttctggacac

SEQ ID NO: 332291 - DNA, 33 bp, Homo sapien
gtagcattgcctttggcagcagagttaatgatt

SEQ ID NO: 332292 - DNA, 33 bp, Homo sapien
gtagcattgcctttggtagcagagttaatgatt

SEQ ID NO: 332293 - DNA, 33 bp, Homo sapien
cttccttcaaggagctaaaacagaccactgaaa

SEQ ID NO: 332294 - DNA, 33 bp, Homo sapien
cttccttcaaggagctcaaacagaccactgaaa

SEQ ID NO: 332295 - DNA, 33 bp, Homo sapien
agagctaggctaagcaaaccacctttacccttc

SEQ ID NO: 332296 - DNA, 33 bp, Homo sapien
agagctaggctaagcagaccacctttacccttc

SEQ ID NO: 332297 - DNA, 33 bp, Homo sapien
cacctgaaatcattacaggtaggtttttctgct

SEQ ID NO: 332298 - DNA, 33 bp, Homo sapien
cacctgaaatcattacgggtaggtttttctgct

SEQ ID NO: 332299 - DNA, 33 bp, Homo sapien
aagagagttggccccactggctgagtgcctagg

SEQ ID NO: 332300 - DNA, 33 bp, Homo sapien
aagagagttggccccattggctgagtgcctagg

SEQ ID NO: 332301 - DNA, 33 bp, Homo sapien
ggaataacatcaagcaccttccttgcatgaggg

SEQ ID NO: 332302 - DNA, 33 bp, Homo sapien
ggaataacatcaagcatcttccttgcatgaggg

SEQ ID NO: 332303 - DNA, 33 bp, Homo sapien
ccctgagttgagatgacggaattgggagcgcaa

SEQ ID NO: 332304 - DNA, 33 bp, Homo sapien
ccctgagttgagatgatggaattgggagcgcaa

SEQ ID NO: 332305 - DNA, 33 bp, Homo sapien
ttatgttaaaataggacgtcattacttgaatta

SEQ ID NO: 332306 - DNA, 33 bp, Homo sapien
ttatgttaaaataggatgtcattacttgaatta

SEQ ID NO: 332307 - DNA, 33 bp, Homo sapien
tcagcaccctattccaagcatttttgtgtaagc

SEQ ID NO: 332308 - DNA, 33 bp, Homo sapien
tcagcaccctattccaggcatttttgtgtaagc

SEQ ID NO: 332309 - DNA, 33 bp, Homo sapien
ctggttattcaatcggacactaatttggggctg

SEQ ID NO: 332310 - DNA, 33 bp, Homo sapien
ctggttattcaatcgggcactaatttggggctg

SEQ ID NO: 332311 - DNA, 33 bp, Homo sapien
ataggagggattcagaaggggttgaggagaggg

SEQ ID NO: 332312 - DNA, 33 bp, Homo sapien
ataggagggattcagagggggttgaggagaggg

SEQ ID NO: 332313 - DNA, 33 bp, Homo sapien
tgagatgcgcgggaagaagcctctggggatcag

SEQ ID NO: 332314 - DNA, 33 bp, Homo sapien
tgagatgcgcgggaagcagcctctggggatcag

SEQ ID NO: 332315 - DNA, 33 bp, Homo sapien
gaggtggtatcgcccacgcaacatctgggaccc

SEQ ID NO: 332316 - DNA, 33 bp, Homo sapien
gaggtggtatcgcccatgcaacatctgggaccc

SEQ ID NO: 332317 - DNA, 33 bp, Homo sapien
atatataattttagaaatcctgaggactcctct

SEQ ID NO: 332318 - DNA, 33 bp, Homo sapien
atatataattttagaactcctgaggactcctct

SEQ ID NO: 332319 - DNA, 33 bp, Homo sapien
ctgaaggaccaaatgcacaccaagaagtagaag

SEQ ID NO: 332320 - DNA, 33 bp, Homo sapien
ctgaaggaccaaatgcgcaccaagaagtagaag

SEQ ID NO: 332321 - DNA, 33 bp, Homo sapien
tgcatgaatttatgtacctgtcaaaaatgagta

SEQ ID NO: 332322 - DNA, 33 bp, Homo sapien
tgcatgaatttatgtatctgtcaaaaatgagta

SEQ ID NO: 332323 - DNA, 33 bp, Homo sapien
gaagagcgtgggcatcgattggcaggagagttg

SEQ ID NO: 332324 - DNA, 33 bp, Homo sapien
gaagagcgtgggcatctattggcaggagagttg

SEQ ID NO: 332325 - DNA, 33 bp, Homo sapien
atccaatgtatcagaacggaattgtaattaaag

SEQ ID NO: 332326 - DNA, 33 bp, Homo sapien
atccaatgtatcagaatggaattgtaattaaag

SEQ ID NO: 332327 - DNA, 33 bp, Homo sapien
taaaaaacagccaaaacaccatgatcacatcta

SEQ ID NO: 332328 - DNA, 33 bp, Homo sapien
taaaaaacagccaaaataccatgatcacatcta

SEQ ID NO: 332329 - DNA, 33 bp, Homo sapien
gtctaatgtccaaagacgggtgtggatgcttct

SEQ ID NO: 332330 - DNA, 33 bp, Homo sapien
gtctaatgtccaaagatgggtgtggatgcttct

SEQ ID NO: 332331 - DNA, 33 bp, Homo sapien
tagagtcactgtcccacgtccaacataacaacc

SEQ ID NO: 332332 - DNA, 33 bp, Homo sapien
tagagtcactgtcccatgtccaacataacaacc

SEQ ID NO: 332333 - DNA, 33 bp, Homo sapien
tgatgttctgattgaccacttgagaaattgtta

SEQ ID NO: 332334 - DNA, 33 bp, Homo sapien
tgatgttctgattgactacttgagaaattgtta

SEQ ID NO: 332335 - DNA, 33 bp, Homo sapien
ggagtgaaattgcttagaaagtattgaatttgt

SEQ ID NO: 332336 - DNA, 33 bp, Homo sapien
ggagtgaaattgcttataaagtattgaatttgt

SEQ ID NO: 332337 - DNA, 33 bp, Homo sapien
tatcttcagggctcagcataagtcatttaagat

SEQ ID NO: 332338 - DNA, 33 bp, Homo sapien
tatcttcagggctcaggataagtcatttaagat

SEQ ID NO: 332339 - DNA, 33 bp, Homo sapien
actatcaactaaaagccgacaactctaaaattt

SEQ ID NO: 332340 - DNA, 33 bp, Homo sapien
actatcaactaaaagctgacaactctaaaattt

SEQ ID NO: 332341 - DNA, 33 bp, Homo sapien
taatctctttcatcacaattttagggcctttct

SEQ ID NO: 332342 - DNA, 33 bp, Homo sapien
taatctctttcatcacgattttagggcctttct

SEQ ID NO: 332343 - DNA, 33 bp, Homo sapien
gaggggcaactcaataaaacagctgaggaccag

SEQ ID NO: 332344 - DNA, 33 bp, Homo sapien
gaggggcaactcaatacaacagctgaggaccag

SEQ ID NO: 332345 - DNA, 33 bp, Homo sapien
caacaccacagtctcaacaatgcttgtatacta

SEQ ID NO: 332346 - DNA, 33 bp, Homo sapien
caacaccacagtctcagcaatgcttgtatacta

SEQ ID NO: 332347 - DNA, 33 bp, Homo sapien
gaagcatggcgttccacgtctggattctcactt

SEQ ID NO: 332348 - DNA, 33 bp, Homo sapien
gaagcatggcgttccatgtctggattctcactt

SEQ ID NO: 332349 - DNA, 33 bp, Homo sapien
ctcgggtgatgcttaactgacagagactggact

SEQ ID NO: 332350 - DNA, 33 bp, Homo sapien
ctcgggtgatgcttaattgacagagactggact

SEQ ID NO: 332351 - DNA, 33 bp, Homo sapien
atcaagttaaggataccgagatgaggaggtaac

SEQ ID NO: 332352 - DNA, 33 bp, Homo sapien
atcaagttaaggatactgagatgaggaggtaac

SEQ ID NO: 332353 - DNA, 33 bp, Homo sapien
tttcttgacaaagacaatggctaacttgaagag

SEQ ID NO: 332354 - DNA, 33 bp, Homo sapien
tttcttgacaaagacactggctaacttgaagag

SEQ ID NO: 332355 - DNA, 33 bp, Homo sapien
acaaacaaggacaataccaaatctttgccatga

SEQ ID NO: 332356 - DNA, 33 bp, Homo sapien
acaaacaaggacaatatcaaatctttgccatga

SEQ ID NO: 332357 - DNA, 33 bp, Homo sapien
aaggactatcttatcaataaacggtgctgaaac

SEQ ID NO: 332358 - DNA, 33 bp, Homo sapien
aaggactatcttatcagtaaacggtgctgaaac

SEQ ID NO: 332359 - DNA, 33 bp, Homo sapien
gtcgtgtgctgtaaaaatgtaaataagttttac

SEQ ID NO: 332360 - DNA, 33 bp, Homo sapien
gtcgtgtgctgtaaaactgtaaataagttttac

SEQ ID NO: 332361 - DNA, 33 bp, Homo sapien
cctgttttacacttaaaatcacgtgaacttagc

SEQ ID NO: 332362 - DNA, 33 bp, Homo sapien
cctgttttacacttaacatcacgtgaacttagc

SEQ ID NO: 332363 - DNA, 33 bp, Homo sapien
cttcccataaacaatcagaatcagaatttgaga

SEQ ID NO: 332364 - DNA, 33 bp, Homo sapien
cttcccataaacaatcggaatcagaatttgaga

SEQ ID NO: 332365 - DNA, 33 bp, Homo sapien
agaatttatttcctgacgttctagggcagacat

SEQ ID NO: 332366 - DNA, 33 bp, Homo sapien
agaatttatttcctgatgttctagggcagacat

SEQ ID NO: 332367 - DNA, 33 bp, Homo sapien
gtgcagctggctggtccagatagtaacgtcaac

SEQ ID NO: 332368 - DNA, 33 bp, Homo sapien
gtgcagctggctggtctagatagtaacgtcaac

SEQ ID NO: 332369 - DNA, 33 bp, Homo sapien
ttttaaatctttaaaacaaaacagtgaagtggc

SEQ ID NO: 332370 - DNA, 33 bp, Homo sapien
ttttaaatctttaaaagaaaacagtgaagtggc

SEQ ID NO: 332371 - DNA, 33 bp, Homo sapien
tttaaagatttaaaacagatcagagtcaaagct

SEQ ID NO: 332372 - DNA, 33 bp, Homo sapien
tttaaagatttaaaacggatcagagtcaaagct

SEQ ID NO: 332373 - DNA, 33 bp, Homo sapien
tgacagcagtgagaagcagagcatcctctctgc

SEQ ID NO: 332374 - DNA, 33 bp, Homo sapien
tgacagcagtgagaaggagagcatcctctctgc

SEQ ID NO: 332375 - DNA, 33 bp, Homo sapien
attttgttcaaagccccccttctctgtgcagca

SEQ ID NO: 332376 - DNA, 33 bp, Homo sapien
attttgttcaaagccctccttctctgtgcagca

SEQ ID NO: 332377 - DNA, 33 bp, Homo sapien
gtggtgagacaagccacgcatcttttgaataag

SEQ ID NO: 332378 - DNA, 33 bp, Homo sapien
gtggtgagacaagccaggcatcttttgaataag

SEQ ID NO: 332379 - DNA, 33 bp, Homo sapien
ttagcttttctgcaacgaaatggatcaagagat

SEQ ID NO: 332380 - DNA, 33 bp, Homo sapien
ttagcttttctgcaactaaatggatcaagagat

SEQ ID NO: 332381 - DNA, 33 bp, Homo sapien
gtggggtttggatgtaaccatagtcccttaagt

SEQ ID NO: 332382 - DNA, 33 bp, Homo sapien
gtggggtttggatgtagccatagtcccttaagt

SEQ ID NO: 332383 - DNA, 33 bp, Homo sapien
taccctaaatagcaacagtgctgtaaaatactt

SEQ ID NO: 332384 - DNA, 33 bp, Homo sapien
taccctaaatagcaactgtgctgtaaaatactt

SEQ ID NO: 332385 - DNA, 33 bp, Homo sapien
tggagtgaggctgtaacgacaacgtgcttgggg

SEQ ID NO: 332386 - DNA, 33 bp, Homo sapien
tggagtgaggctgtaatgacaacgtgcttgggg

SEQ ID NO: 332387 - DNA, 33 bp, Homo sapien
tttggatgaacttcaacagctatgctttatcag

SEQ ID NO: 332388 - DNA, 33 bp, Homo sapien
tttggatgaacttcaagagctatgctttatcag

SEQ ID NO: 332389 - DNA, 33 bp, Homo sapien
gggctggaagtacaaacatgaaaagagtaccct

SEQ ID NO: 332390 - DNA, 33 bp, Homo sapien
gggctggaagtacaaagatgaaaagagtaccct

SEQ ID NO: 332391 - DNA, 33 bp, Homo sapien
tatggcaatgctaaaaacggacattgagttagt

SEQ ID NO: 332392 - DNA, 33 bp, Homo sapien
tatggcaatgctaaaagcggacattgagttagt

SEQ ID NO: 332393 - DNA, 33 bp, Homo sapien
aacagagggaaactcacggacaatggtgggaga

SEQ ID NO: 332394 - DNA, 33 bp, Homo sapien
aacagagggaaactcatggacaatggtgggaga

SEQ ID NO: 332395 - DNA, 33 bp, Homo sapien
ttcccagctggccacaagcaacttagtattcaa

SEQ ID NO: 332396 - DNA, 33 bp, Homo sapien
ttcccagctggccacaggcaacttagtattcaa

SEQ ID NO: 332397 - DNA, 33 bp, Homo sapien
tccttcctcacaagcacggaaatacagaaaaac

SEQ ID NO: 332398 - DNA, 33 bp, Homo sapien
tccttcctcacaagcatggaaatacagaaaaac

SEQ ID NO: 332399 - DNA, 33 bp, Homo sapien
aattctcaaacctgtcccgccagctgactaaca

SEQ ID NO: 332400 - DNA, 33 bp, Homo sapien
aattctcaaacctgtctcgccagctgactaaca

SEQ ID NO: 332401 - DNA, 33 bp, Homo sapien
ggttacttcttactcaatcagtctttgtgacca

SEQ ID NO: 332402 - DNA, 33 bp, Homo sapien
ggttacttcttactcagtcagtctttgtgacca

SEQ ID NO: 332403 - DNA, 33 bp, Homo sapien
gtgaaccagtttgtatcactaccttccacttgg

SEQ ID NO: 332404 - DNA, 33 bp, Homo sapien
gtgaaccagtttgtattactaccttccacttgg

SEQ ID NO: 332405 - DNA, 33 bp, Homo sapien
ttctgtcttggcttccaaccctctcaggagaga

SEQ ID NO: 332406 - DNA, 33 bp, Homo sapien
ttctgtcttggcttccgaccctctcaggagaga

SEQ ID NO: 332407 - DNA, 33 bp, Homo sapien
ctttatgaggcgtatactacattgattttggat

SEQ ID NO: 332408 - DNA, 33 bp, Homo sapien
ctttatgaggcgtatagtacattgattttggat

SEQ ID NO: 332409 - DNA, 33 bp, Homo sapien
gtttcattaatctgtacaaattggcttgattgc

SEQ ID NO: 332410 - DNA, 33 bp, Homo sapien
gtttcattaatctgtagaaattggcttgattgc

SEQ ID NO: 332411 - DNA, 33 bp, Homo sapien
cagacatgctgctgggcacatgtaaatgaaaaa

SEQ ID NO: 332412 - DNA, 33 bp, Homo sapien
cagacatgctgctgggtacatgtaaatgaaaaa

SEQ ID NO: 332413 - DNA, 33 bp, Homo sapien
atttattgacatttcaacaactcttcttaatta

SEQ ID NO: 332414 - DNA, 33 bp, Homo sapien
atttattgacatttcagcaactcttcttaatta

SEQ ID NO: 332415 - DNA, 33 bp, Homo sapien
tggcctctactcatcagattccagttgcataac

SEQ ID NO: 332416 - DNA, 33 bp, Homo sapien
tggcctctactcatcatattccagttgcataac

SEQ ID NO: 332417 - DNA, 33 bp, Homo sapien
aaacaggacctgtaaacaattcccaaagaatct

SEQ ID NO: 332418 - DNA, 33 bp, Homo sapien
aaacaggacctgtaaagaattcccaaagaatct

SEQ ID NO: 332419 - DNA, 33 bp, Homo sapien
taaggtttgaagtcaacgtatgattatgtgtat

SEQ ID NO: 332420 - DNA, 33 bp, Homo sapien
taaggtttgaagtcaatgtatgattatgtgtat

SEQ ID NO: 332421 - DNA, 33 bp, Homo sapien
gggtaggctctccaccaccttgaccccacctgg

SEQ ID NO: 332422 - DNA, 33 bp, Homo sapien
gggtaggctctccaccgccttgaccccacctgg

SEQ ID NO: 332423 - DNA, 33 bp, Homo sapien
ttttatgtcaggagaaagggaatgtttaatcgt

SEQ ID NO: 332424 - DNA, 33 bp, Homo sapien
ttttatgtcaggagaacgggaatgtttaatcgt

SEQ ID NO: 332425 - DNA, 33 bp, Homo sapien
aaagtggcactgcataaaaaaaggatctgattg

SEQ ID NO: 332426 - DNA, 33 bp, Homo sapien
aaagtggcactgcatagaaaaaggatctgattg

SEQ ID NO: 332427 - DNA, 33 bp, Homo sapien
taacagcactccttccaatgatcctgtgctgtg

SEQ ID NO: 332428 - DNA, 33 bp, Homo sapien
taacagcactccttccgatgatcctgtgctgtg

SEQ ID NO: 332429 - DNA, 33 bp, Homo sapien
caattatgaaccaaaactgggtgggtaagttct

SEQ ID NO: 332430 - DNA, 33 bp, Homo sapien
caattatgaaccaaaattgggtgggtaagttct

SEQ ID NO: 332431 - DNA, 33 bp, Homo sapien
gggtctctgtgactacaaggtatgtttctgata

SEQ ID NO: 332432 - DNA, 33 bp, Homo sapien
gggtctctgtgactacgaggtatgtttctgata

SEQ ID NO: 332433 - DNA, 33 bp, Homo sapien
tggttactaaatgtataagtggatatggcctct

SEQ ID NO: 332434 - DNA, 33 bp, Homo sapien
tggttactaaatgtatgagtggatatggcctct

SEQ ID NO: 332435 - DNA, 33 bp, Homo sapien
gcaggaccaaacagcaaccaaattagcaaatta

SEQ ID NO: 332436 - DNA, 33 bp, Homo sapien
gcaggaccaaacagcatccaaattagcaaatta

SEQ ID NO: 332437 - DNA, 33 bp, Homo sapien
tcacatactgtctctacgaattgacctattcta

SEQ ID NO: 332438 - DNA, 33 bp, Homo sapien
tcacatactgtctctatgaattgacctattcta

SEQ ID NO: 332439 - DNA, 33 bp, Homo sapien
aatgcataggacaatccaagttgacctctcagg

SEQ ID NO: 332440 - DNA, 33 bp, Homo sapien
aatgcataggacaatcgaagttgacctctcagg

SEQ ID NO: 332441 - DNA, 33 bp, Homo sapien
cacttttctcaggtgtaaagtaggcaccattac

SEQ ID NO: 332442 - DNA, 33 bp, Homo sapien
cacttttctcaggtgtgaagtaggcaccattac

SEQ ID NO: 332443 - DNA, 33 bp, Homo sapien
caaactctctctgcaacttgagccactttcctc

SEQ ID NO: 332444 - DNA, 33 bp, Homo sapien
caaactctctctgcaatttgagccactttcctc

SEQ ID NO: 332445 - DNA, 33 bp, Homo sapien
gaccataaaatcacccagagatgatgacatatt

SEQ ID NO: 332446 - DNA, 33 bp, Homo sapien
gaccataaaatcacccggagatgatgacatatt

SEQ ID NO: 332447 - DNA, 33 bp, Homo sapien
tgtcgcttaaaatgtacaggatgtgatgtcaca

SEQ ID NO: 332448 - DNA, 33 bp, Homo sapien
tgtcgcttaaaatgtataggatgtgatgtcaca

SEQ ID NO: 332449 - DNA, 33 bp, Homo sapien
tgaatagtgctgctaaactcatccatgtatgag

SEQ ID NO: 332450 - DNA, 33 bp, Homo sapien
tgaatagtgctgctaatctcatccatgtatgag

SEQ ID NO: 332451 - DNA, 33 bp, Homo sapien
gtctcctcttccatataaggacacagcattcct

SEQ ID NO: 332452 - DNA, 33 bp, Homo sapien
gtctcctcttccatattaggacacagcattcct

SEQ ID NO: 332453 - DNA, 33 bp, Homo sapien
gcatagatagatggtaactatggaaacaatatg

SEQ ID NO: 332454 - DNA, 33 bp, Homo sapien
gcatagatagatggtagctatggaaacaatatg

SEQ ID NO: 332455 - DNA, 33 bp, Homo sapien
ttcatcacttaagaaaattatccggcttcacca

SEQ ID NO: 332456 - DNA, 33 bp, Homo sapien
ttcatcacttaagaaagttatccggcttcacca

SEQ ID NO: 332457 - DNA, 33 bp, Homo sapien
gaattcagctggtgatcaggaaccatgagtctc

SEQ ID NO: 332458 - DNA, 33 bp, Homo sapien
gaattcagctggtgattaggaaccatgagtctc

SEQ ID NO: 332459 - DNA, 33 bp, Homo sapien
agcacagaatctttgaaaattgtagcattcatg

SEQ ID NO: 332460 - DNA, 33 bp, Homo sapien
agcacagaatctttgagaattgtagcattcatg

SEQ ID NO: 332461 - DNA, 33 bp, Homo sapien
gtatccttccatgttcacctgtagtttctgaac

SEQ ID NO: 332462 - DNA, 33 bp, Homo sapien
gtatccttccatgttcgcctgtagtttctgaac

SEQ ID NO: 332463 - DNA, 33 bp, Homo sapien
agcagttaagatgaaacggggcggatgaaaatg

SEQ ID NO: 332464 - DNA, 33 bp, Homo sapien
agcagttaagatgaaagggggcggatgaaaatg

SEQ ID NO: 332465 - DNA, 33 bp, Homo sapien
ccacaccttttgtagaaggctgatgcattttaa

SEQ ID NO: 332466 - DNA, 33 bp, Homo sapien
ccacaccttttgtagagggctgatgcattttaa

SEQ ID NO: 332467 - DNA, 33 bp, Homo sapien
gaaagggaacagtaacaggacctacctcacagg

SEQ ID NO: 332468 - DNA, 33 bp, Homo sapien
gaaagggaacagtaacgggacctacctcacagg

SEQ ID NO: 332469 - DNA, 33 bp, Homo sapien
ctcttcttttgagaaccctcagcctcatacata

SEQ ID NO: 332470 - DNA, 33 bp, Homo sapien
ctcttcttttgagaactctcagcctcatacata

SEQ ID NO: 332471 - DNA, 33 bp, Homo sapien
tagcttctgatttacactgagggacgtgcaact

SEQ ID NO: 332472 - DNA, 33 bp, Homo sapien
tagcttctgatttacattgagggacgtgcaact

SEQ ID NO: 332473 - DNA, 33 bp, Homo sapien
atatgaatgactgttacaaaaatgaccaccaac

SEQ ID NO: 332474 - DNA, 33 bp, Homo sapien
atatgaatgactgttataaaaatgaccaccaac

SEQ ID NO: 332475 - DNA, 33 bp, Homo sapien
aataactaagtgataccgataaataacagtatg

SEQ ID NO: 332476 - DNA, 33 bp, Homo sapien
aataactaagtgatactgataaataacagtatg

SEQ ID NO: 332477 - DNA, 33 bp, Homo sapien
agaaactccacaaataacatcggtgacacacct

SEQ ID NO: 332478 - DNA, 33 bp, Homo sapien
agaaactccacaaatagcatcggtgacacacct

SEQ ID NO: 332479 - DNA, 33 bp, Homo sapien
ttattttggccagctgcaactgttgtgacatta

SEQ ID NO: 332480 - DNA, 33 bp, Homo sapien
ttattttggccagctggaactgttgtgacatta

SEQ ID NO: 332481 - DNA, 33 bp, Homo sapien
ttcatttttctggaaacgtttagagactgctag

SEQ ID NO: 332482 - DNA, 33 bp, Homo sapien
ttcatttttctggaaatgtttagagactgctag

SEQ ID NO: 332483 - DNA, 33 bp, Homo sapien
catgtggtggaaataccgctctggtggaactcc

SEQ ID NO: 332484 - DNA, 33 bp, Homo sapien
catgtggtggaaatactgctctggtggaactcc

SEQ ID NO: 332485 - DNA, 33 bp, Homo sapien
cctcaatttgattccaaagccctaagtgactat

SEQ ID NO: 332486 - DNA, 33 bp, Homo sapien
cctcaatttgattccagagccctaagtgactat

SEQ ID NO: 332487 - DNA, 33 bp, Homo sapien
gcaccagatgccacagaatcataagagagaaag

SEQ ID NO: 332488 - DNA, 33 bp, Homo sapien
gcaccagatgccacaggatcataagagagaaag

SEQ ID NO: 332489 - DNA, 33 bp, Homo sapien
gctagccaaactccaaagctatcagagtttcaa

SEQ ID NO: 332490 - DNA, 33 bp, Homo sapien
gctagccaaactccaaggctatcagagtttcaa

SEQ ID NO: 332491 - DNA, 33 bp, Homo sapien
gtgaaagacaaatctgaagtctgtggagaacac

SEQ ID NO: 332492 - DNA, 33 bp, Homo sapien
gtgaaagacaaatctgtagtctgtggagaacac

SEQ ID NO: 332493 - DNA, 33 bp, Homo sapien
taaatacaattctaaaacccattgatgttttat

SEQ ID NO: 332494 - DNA, 33 bp, Homo sapien
taaatacaattctaaatcccattgatgttttat

SEQ ID NO: 332495 - DNA, 33 bp, Homo sapien
tcactgctaaatacaaagttgtgaagattttgc

SEQ ID NO: 332496 - DNA, 33 bp, Homo sapien
tcactgctaaatacaatgttgtgaagattttgc

SEQ ID NO: 332497 - DNA, 33 bp, Homo sapien
tattcatatgtgggcaagaacagctataggtct

SEQ ID NO: 332498 - DNA, 33 bp, Homo sapien
tattcatatgtgggcaggaacagctataggtct

SEQ ID NO: 332499 - DNA, 33 bp, Homo sapien
tggaaagaaaggctcacgtttgggactgcagac

SEQ ID NO: 332500 - DNA, 33 bp, Homo sapien
tggaaagaaaggctcatgtttgggactgcagac

SEQ ID NO: 332501 - DNA, 33 bp, Homo sapien
acgctctttagtaagaaaggcttgtgtttaata

SEQ ID NO: 332502 - DNA, 33 bp, Homo sapien
acgctctttagtaagagaggcttgtgtttaata

SEQ ID NO: 332503 - DNA, 33 bp, Homo sapien
ggcatctggaaacctccgactgaattcctgagg

SEQ ID NO: 332504 - DNA, 33 bp, Homo sapien
ggcatctggaaacctctgactgaattcctgagg

SEQ ID NO: 332505 - DNA, 33 bp, Homo sapien
ggtgatatgttactagaatgtttgattccaatg

SEQ ID NO: 332506 - DNA, 33 bp, Homo sapien
ggtgatatgttactaggatgtttgattccaatg

SEQ ID NO: 332507 - DNA, 33 bp, Homo sapien
ggtgtatagtggcaacccattgtggtcttaatt

SEQ ID NO: 332508 - DNA, 33 bp, Homo sapien
ggtgtatagtggcaacgcattgtggtcttaatt

SEQ ID NO: 332509 - DNA, 33 bp, Homo sapien
tttgcctggtgatatgcaagtaagcctatttca

SEQ ID NO: 332510 - DNA, 33 bp, Homo sapien
tttgcctggtgatatgtaagtaagcctatttca

SEQ ID NO: 332511 - DNA, 33 bp, Homo sapien
aaaaaaaaccctctcaaatcgccataaaaaaga

SEQ ID NO: 332512 - DNA, 33 bp, Homo sapien
aaaaaaaaccctctcacatcgccataaaaaaga

SEQ ID NO: 332513 - DNA, 33 bp, Homo sapien
attcatcttttcaaataatctgtttttggttgc

SEQ ID NO: 332514 - DNA, 33 bp, Homo sapien
attcatcttttcaaatgatctgtttttggttgc

SEQ ID NO: 332515 - DNA, 33 bp, Homo sapien
cagtagtattccaaaacatttagtatgctatat

SEQ ID NO: 332516 - DNA, 33 bp, Homo sapien
cagtagtattccaaaagatttagtatgctatat

SEQ ID NO: 332517 - DNA, 33 bp, Homo sapien
cttttaatggtttgaaattagagaacatacttc

SEQ ID NO: 332518 - DNA, 33 bp, Homo sapien
cttttaatggtttgaagttagagaacatacttc

SEQ ID NO: 332519 - DNA, 33 bp, Homo sapien
acttgagcagatagtgcattctgttctttggag

SEQ ID NO: 332520 - DNA, 33 bp, Homo sapien
acttgagcagatagtggattctgttctttggag

SEQ ID NO: 332521 - DNA, 33 bp, Homo sapien
tcttgtccggtgacacaatcttttcagaaattg

SEQ ID NO: 332522 - DNA, 33 bp, Homo sapien
tcttgtccggtgacaccatcttttcagaaattg

SEQ ID NO: 332523 - DNA, 33 bp, Homo sapien
ttctgaaagagttgtaataatatctctcactaa

SEQ ID NO: 332524 - DNA, 33 bp, Homo sapien
ttctgaaagagttgtattaatatctctcactaa

SEQ ID NO: 332525 - DNA, 33 bp, Homo sapien
atgaaggtatgagatccctccccctctctctcc

SEQ ID NO: 332526 - DNA, 33 bp, Homo sapien
atgaaggtatgagatctctccccctctctctcc

SEQ ID NO: 332527 - DNA, 33 bp, Homo sapien
tagtgaaagaaaccaaacccaaatgactgtatg

SEQ ID NO: 332528 - DNA, 33 bp, Homo sapien
tagtgaaagaaaccaagcccaaatgactgtatg

SEQ ID NO: 332529 - DNA, 33 bp, Homo sapien
ctcaataggtgcgaaaaaaacaggcaaaattca

SEQ ID NO: 332530 - DNA, 33 bp, Homo sapien
ctcaataggtgcgaaagaaacaggcaaaattca

SEQ ID NO: 332531 - DNA, 33 bp, Homo sapien
gacgtgggcatcagagaacatatatcacacatt

SEQ ID NO: 332532 - DNA, 33 bp, Homo sapien
gacgtgggcatcagaggacatatatcacacatt

SEQ ID NO: 332533 - DNA, 33 bp, Homo sapien
tgtgatgactaataataaaagtagtaggcctgc

SEQ ID NO: 332534 - DNA, 33 bp, Homo sapien
tgtgatgactaataatgaaagtagtaggcctgc

SEQ ID NO: 332535 - DNA, 33 bp, Homo sapien
aactcctacaggaacccacttcttgtcactttc

SEQ ID NO: 332536 - DNA, 33 bp, Homo sapien
aactcctacaggaacctacttcttgtcactttc

SEQ ID NO: 332537 - DNA, 33 bp, Homo sapien
catttgagtgcatccacgttaactttgtcttgt

SEQ ID NO: 332538 - DNA, 33 bp, Homo sapien
catttgagtgcatccatgttaactttgtcttgt

SEQ ID NO: 332539 - DNA, 33 bp, Homo sapien
tatgtgcgatacagaaatcgataatgaaaggaa

SEQ ID NO: 332540 - DNA, 33 bp, Homo sapien
tatgtgcgatacagaagtcgataatgaaaggaa

SEQ ID NO: 332541 - DNA, 33 bp, Homo sapien
tgtctggagagaagacaaccatctccatatcca

SEQ ID NO: 332542 - DNA, 33 bp, Homo sapien
tgtctggagagaagacgaccatctccatatcca

SEQ ID NO: 332543 - DNA, 33 bp, Homo sapien
gcaataaatgtgaagacgagcacacgaggaaac

SEQ ID NO: 332544 - DNA, 33 bp, Homo sapien
gcaataaatgtgaagatgagcacacgaggaaac

SEQ ID NO: 332545 - DNA, 33 bp, Homo sapien
caggcagcctgtgaggaattctacctgcattga

SEQ ID NO: 332546 - DNA, 33 bp, Homo sapien
caggcagcctgtgagggattctacctgcattga

SEQ ID NO: 332547 - DNA, 33 bp, Homo sapien
ccgaaggctcttacaaccaatcccatttaggat

SEQ ID NO: 332548 - DNA, 33 bp, Homo sapien
ccgaaggctcttacaagcaatcccatttaggat

SEQ ID NO: 332549 - DNA, 33 bp, Homo sapien
gtgggccacagcctccacacttcacgaatccca

SEQ ID NO: 332550 - DNA, 33 bp, Homo sapien
gtgggccacagcctccgcacttcacgaatccca

SEQ ID NO: 332551 - DNA, 33 bp, Homo sapien
ttgtagaatgcaaataagagtagaaatcccagt

SEQ ID NO: 332552 - DNA, 33 bp, Homo sapien
ttgtagaatgcaaataggagtagaaatcccagt

SEQ ID NO: 332553 - DNA, 33 bp, Homo sapien
atttcaaagaacaggcaacacctctctggtagg

SEQ ID NO: 332554 - DNA, 33 bp, Homo sapien
atttcaaagaacaggcgacacctctctggtagg

SEQ ID NO: 332555 - DNA, 33 bp, Homo sapien
actttacagtttacaaagatgtgagcatccagg

SEQ ID NO: 332556 - DNA, 33 bp, Homo sapien
actttacagtttacaacgatgtgagcatccagg

SEQ ID NO: 332557 - DNA, 33 bp, Homo sapien
aagctatgtgaactgcaagagtccagcaggcct

SEQ ID NO: 332558 - DNA, 33 bp, Homo sapien
aagctatgtgaactgcgagagtccagcaggcct

SEQ ID NO: 332559 - DNA, 33 bp, Homo sapien
caggcagggcagagtgaaaaacggaaacagggg

SEQ ID NO: 332560 - DNA, 33 bp, Homo sapien
caggcagggcagagtgtaaaacggaaacagggg

SEQ ID NO: 332561 - DNA, 33 bp, Homo sapien
aataacattcgtggacagtaaataaagcagcat

SEQ ID NO: 332562 - DNA, 33 bp, Homo sapien
aataacattcgtggacggtaaataaagcagcat

SEQ ID NO: 332563 - DNA, 33 bp, Homo sapien
caggctgttctcagacaatagaggttcttggcc

SEQ ID NO: 332564 - DNA, 33 bp, Homo sapien
caggctgttctcagacgatagaggttcttggcc

SEQ ID NO: 332565 - DNA, 33 bp, Homo sapien
cgtttcacactacaaactttgcttcaaaggaat

SEQ ID NO: 332566 - DNA, 33 bp, Homo sapien
cgtttcacactacaaattttgcttcaaaggaat

SEQ ID NO: 332567 - DNA, 33 bp, Homo sapien
attcccagaggaatacagatcattctaccataa

SEQ ID NO: 332568 - DNA, 33 bp, Homo sapien
attcccagaggaatacggatcattctaccataa

SEQ ID NO: 332569 - DNA, 33 bp, Homo sapien
tatccttgctctaaaaatatggtactgtaattt

SEQ ID NO: 332570 - DNA, 33 bp, Homo sapien
tatccttgctctaaaagtatggtactgtaattt

SEQ ID NO: 332571 - DNA, 33 bp, Homo sapien
attagagctcacttcaaatttttccttctgagg

SEQ ID NO: 332572 - DNA, 33 bp, Homo sapien
attagagctcacttcatatttttccttctgagg

SEQ ID NO: 332573 - DNA, 33 bp, Homo sapien
tctaattgatccaatacgctcatttaaatccaa

SEQ ID NO: 332574 - DNA, 33 bp, Homo sapien
tctaattgatccaatatgctcatttaaatccaa

SEQ ID NO: 332575 - DNA, 33 bp, Homo sapien
agactaactttctgaacgattatgacaaatgaa

SEQ ID NO: 332576 - DNA, 33 bp, Homo sapien
agactaactttctgaatgattatgacaaatgaa

SEQ ID NO: 332577 - DNA, 33 bp, Homo sapien
gagatgttgacaatgaatatacggcatatgtct

SEQ ID NO: 332578 - DNA, 33 bp, Homo sapien
gagatgttgacaatgagtatacggcatatgtct

SEQ ID NO: 332579 - DNA, 33 bp, Homo sapien
aagggatgagaaggcccgatggttatagcaaat

SEQ ID NO: 332580 - DNA, 33 bp, Homo sapien
aagggatgagaaggcctgatggttatagcaaat

SEQ ID NO: 332581 - DNA, 33 bp, Homo sapien
tctttatctgagaagcaaagtgcaactttcaag

SEQ ID NO: 332582 - DNA, 33 bp, Homo sapien
tctttatctgagaagcgaagtgcaactttcaag

SEQ ID NO: 332583 - DNA, 33 bp, Homo sapien
ctggtaactggtgggagaactcattatgtgagt

SEQ ID NO: 332584 - DNA, 33 bp, Homo sapien
ctggtaactggtgggataactcattatgtgagt

SEQ ID NO: 332585 - DNA, 33 bp, Homo sapien
gtgatgaaatgcagacagctgaactgaaagttc

SEQ ID NO: 332586 - DNA, 33 bp, Homo sapien
gtgatgaaatgcagaccgctgaactgaaagttc

SEQ ID NO: 332587 - DNA, 33 bp, Homo sapien
ctaaattgtgataacaaactcaaagacacacag

SEQ ID NO: 332588 - DNA, 33 bp, Homo sapien
ctaaattgtgataacagactcaaagacacacag

SEQ ID NO: 332589 - DNA, 33 bp, Homo sapien
gtcatgtgtcctctgacaaaaatgcaaatatct

SEQ ID NO: 332590 - DNA, 33 bp, Homo sapien
gtcatgtgtcctctgataaaaatgcaaatatct

SEQ ID NO: 332591 - DNA, 33 bp, Homo sapien
ctcccttgtacatgataagtcacttttctcttt

SEQ ID NO: 332592 - DNA, 33 bp, Homo sapien
ctcccttgtacatgatgagtcacttttctcttt

SEQ ID NO: 332593 - DNA, 33 bp, Homo sapien
tttacaggttgtaatacaatagcaagaatagca

SEQ ID NO: 332594 - DNA, 33 bp, Homo sapien
tttacaggttgtaatataatagcaagaatagca

SEQ ID NO: 332595 - DNA, 33 bp, Homo sapien
ttgtggaacataaagacggtgctcttgtcagag

SEQ ID NO: 332596 - DNA, 33 bp, Homo sapien
ttgtggaacataaagatggtgctcttgtcagag

SEQ ID NO: 332597 - DNA, 33 bp, Homo sapien
gaggctgtggatttgagaaatataacctccaag

SEQ ID NO: 332598 - DNA, 33 bp, Homo sapien
gaggctgtggatttgataaatataacctccaag

SEQ ID NO: 332599 - DNA, 33 bp, Homo sapien
acatcgaataaacaaacatgcacactgttattt

SEQ ID NO: 332600 - DNA, 33 bp, Homo sapien
acatcgaataaacaaatatgcacactgttattt

SEQ ID NO: 332601 - DNA, 33 bp, Homo sapien
cgcccggccggcatctaaaagtgaaacacgtta

SEQ ID NO: 332602 - DNA, 33 bp, Homo sapien
cgcccggccggcatctgaaagtgaaacacgtta

SEQ ID NO: 332603 - DNA, 33 bp, Homo sapien
gagattgcaccattacactgcaggctgggcgac

SEQ ID NO: 332604 - DNA, 33 bp, Homo sapien
gagattgcaccattacgctgcaggctgggcgac

SEQ ID NO: 332605 - DNA, 33 bp, Homo sapien
gtgggaaagatatcgacacagtctgtgccactt

SEQ ID NO: 332606 - DNA, 33 bp, Homo sapien
gtgggaaagatatcgatacagtctgtgccactt

SEQ ID NO: 332607 - DNA, 33 bp, Homo sapien
tcttaaagttgtttccccttactcagtgtcccc

SEQ ID NO: 332608 - DNA, 33 bp, Homo sapien
tcttaaagttgtttccgcttactcagtgtcccc

SEQ ID NO: 332609 - DNA, 33 bp, Homo sapien
aagatggacaagccaggaagggatgcgcacagc

SEQ ID NO: 332610 - DNA, 33 bp, Homo sapien
aagatggacaagccagtaagggatgcgcacagc

SEQ ID NO: 332611 - DNA, 33 bp, Homo sapien
taaactgtgcattgccaaatatttctcaagtat

SEQ ID NO: 332612 - DNA, 33 bp, Homo sapien
taaactgtgcattgccgaatatttctcaagtat

SEQ ID NO: 332613 - DNA, 33 bp, Homo sapien
ccctcttcagagtaaacgagcacatgagaggca

SEQ ID NO: 332614 - DNA, 33 bp, Homo sapien
ccctcttcagagtaaatgagcacatgagaggca

SEQ ID NO: 332615 - DNA, 33 bp, Homo sapien
gtgttacaagaaaggcagaaatgcatccgttta

SEQ ID NO: 332616 - DNA, 33 bp, Homo sapien
gtgttacaagaaaggcggaaatgcatccgttta

SEQ ID NO: 332617 - DNA, 33 bp, Homo sapien
gatccgtcagatggaacggatacagatcagtct

SEQ ID NO: 332618 - DNA, 33 bp, Homo sapien
gatccgtcagatggaatggatacagatcagtct

SEQ ID NO: 332619 - DNA, 33 bp, Homo sapien
tgcatttcagataaggaatacccaaccagtaat

SEQ ID NO: 332620 - DNA, 33 bp, Homo sapien
tgcatttcagataagggatacccaaccagtaat

SEQ ID NO: 332621 - DNA, 33 bp, Homo sapien
tagacctcaggccaccagaaggactttcagaaa

SEQ ID NO: 332622 - DNA, 33 bp, Homo sapien
tagacctcaggccaccggaaggactttcagaaa

SEQ ID NO: 332623 - DNA, 33 bp, Homo sapien
tttgtgaattttctaaagtcaagtataattttg

SEQ ID NO: 332624 - DNA, 33 bp, Homo sapien
tttgtgaattttctaaggtcaagtataattttg

SEQ ID NO: 332625 - DNA, 33 bp, Homo sapien
tgatacacggtagaaccgtagaagtgcacaaca

SEQ ID NO: 332626 - DNA, 33 bp, Homo sapien
tgatacacggtagaactgtagaagtgcacaaca

SEQ ID NO: 332627 - DNA, 33 bp, Homo sapien
gtaacattgtgaggtacatcaactttgtcttca

SEQ ID NO: 332628 - DNA, 33 bp, Homo sapien
gtaacattgtgaggtagatcaactttgtcttca

SEQ ID NO: 332629 - DNA, 33 bp, Homo sapien
gaggacactcaaaataacttcagataccacctc

SEQ ID NO: 332630 - DNA, 33 bp, Homo sapien
gaggacactcaaaatagcttcagataccacctc

SEQ ID NO: 332631 - DNA, 33 bp, Homo sapien
actccagagggtacaacgactcaaatgacacca

SEQ ID NO: 332632 - DNA, 33 bp, Homo sapien
actccagagggtacaatgactcaaatgacacca

SEQ ID NO: 332633 - DNA, 33 bp, Homo sapien
gattctgtaacgctgccgaagtttcatgcttga

SEQ ID NO: 332634 - DNA, 33 bp, Homo sapien
gattctgtaacgctgctgaagtttcatgcttga

SEQ ID NO: 332635 - DNA, 33 bp, Homo sapien
gaggagttacaatggactaaggccccaccctac

SEQ ID NO: 332636 - DNA, 33 bp, Homo sapien
gaggagttacaatggattaaggccccaccctac

SEQ ID NO: 332637 - DNA, 33 bp, Homo sapien
gaaaactggatcatgcaagcctcagacatagca

SEQ ID NO: 332638 - DNA, 33 bp, Homo sapien
gaaaactggatcatgcgagcctcagacatagca

SEQ ID NO: 332639 - DNA, 33 bp, Homo sapien
atggtatttgagtctgaactgaaagaatcaaca

SEQ ID NO: 332640 - DNA, 33 bp, Homo sapien
atggtatttgagtctggactgaaagaatcaaca

SEQ ID NO: 332641 - DNA, 33 bp, Homo sapien
ctgcctttgtaaatgcacagaactctgacctgc

SEQ ID NO: 332642 - DNA, 33 bp, Homo sapien
ctgcctttgtaaatgcgcagaactctgacctgc

SEQ ID NO: 332643 - DNA, 33 bp, Homo sapien
gcatctatgtggagaccgagacctacacaaggg

SEQ ID NO: 332644 - DNA, 33 bp, Homo sapien
gcatctatgtggagacggagacctacacaaggg

SEQ ID NO: 332645 - DNA, 33 bp, Homo sapien
aagcacttgtgaaccacacaaatgagattcttt

SEQ ID NO: 332646 - DNA, 33 bp, Homo sapien
aagcacttgtgaaccatacaaatgagattcttt

SEQ ID NO: 332647 - DNA, 33 bp, Homo sapien
tcttgcagaattcataagtggcaaattatcata

SEQ ID NO: 332648 - DNA, 33 bp, Homo sapien
tcttgcagaattcatatgtggcaaattatcata

SEQ ID NO: 332649 - DNA, 33 bp, Homo sapien
ttacctaacttcatcaatcttatagctgtgcat

SEQ ID NO: 332650 - DNA, 33 bp, Homo sapien
ttacctaacttcatcagtcttatagctgtgcat

SEQ ID NO: 332651 - DNA, 33 bp, Homo sapien
gatgattttccatacgaacccaatgacctcagt

SEQ ID NO: 332652 - DNA, 33 bp, Homo sapien
gatgattttccatacggacccaatgacctcagt

SEQ ID NO: 332653 - DNA, 33 bp, Homo sapien
catcccatcagtgagcacttgggttgcatccaa

SEQ ID NO: 332654 - DNA, 33 bp, Homo sapien
catcccatcagtgagcccttgggttgcatccaa

SEQ ID NO: 332655 - DNA, 33 bp, Homo sapien
cagagggctctgcgaagaagtcatttcagttct

SEQ ID NO: 332656 - DNA, 33 bp, Homo sapien
cagagggctctgcgaataagtcatttcagttct

SEQ ID NO: 332657 - DNA, 33 bp, Homo sapien
agcatacactttattaacgagcagactgcaggt

SEQ ID NO: 332658 - DNA, 33 bp, Homo sapien
agcatacactttattagcgagcagactgcaggt

SEQ ID NO: 332659 - DNA, 33 bp, Homo sapien
ccaactgtttcataacactgactccctaactta

SEQ ID NO: 332660 - DNA, 33 bp, Homo sapien
ccaactgtttcataactctgactccctaactta

SEQ ID NO: 332661 - DNA, 33 bp, Homo sapien
gctcaccaaaaaattcaaaggaaaagctaagga

SEQ ID NO: 332662 - DNA, 33 bp, Homo sapien
gctcaccaaaaaattcgaaggaaaagctaagga

SEQ ID NO: 332663 - DNA, 33 bp, Homo sapien
ttccacttcagaaataggattctttctctgttg

SEQ ID NO: 332664 - DNA, 33 bp, Homo sapien
ttccacttcagaaatatgattctttctctgttg

SEQ ID NO: 332665 - DNA, 33 bp, Homo sapien
gctgtcaaatgacaaacgattactggcttttct

SEQ ID NO: 332666 - DNA, 33 bp, Homo sapien
gctgtcaaatgacaaatgattactggcttttct

SEQ ID NO: 332667 - DNA, 33 bp, Homo sapien
ttgaatttctttaggcccttcccgtatttcata

SEQ ID NO: 332668 - DNA, 33 bp, Homo sapien
ttgaatttctttaggctcttcccgtatttcata

SEQ ID NO: 332669 - DNA, 33 bp, Homo sapien
ggtagaaaataatttcacctgagagttgtgcaa

SEQ ID NO: 332670 - DNA, 33 bp, Homo sapien
ggtagaaaataatttcccctgagagttgtgcaa

SEQ ID NO: 332671 - DNA, 33 bp, Homo sapien
aaagcatcattaaaaacgtatgcagacattgta

SEQ ID NO: 332672 - DNA, 33 bp, Homo sapien
aaagcatcattaaaaaggtatgcagacattgta

SEQ ID NO: 332673 - DNA, 33 bp, Homo sapien
tcaatgacctaatgaaaaggatgtccatttggc

SEQ ID NO: 332674 - DNA, 33 bp, Homo sapien
tcaatgacctaatgaacaggatgtccatttggc

SEQ ID NO: 332675 - DNA, 33 bp, Homo sapien
gaaaaatgggcaaagactaagaacactttgtaa

SEQ ID NO: 332676 - DNA, 33 bp, Homo sapien
gaaaaatgggcaaagattaagaacactttgtaa

SEQ ID NO: 332677 - DNA, 33 bp, Homo sapien
aatgatcaaaaggacacagaaggatattaccta

SEQ ID NO: 332678 - DNA, 33 bp, Homo sapien
aatgatcaaaaggacatagaaggatattaccta

SEQ ID NO: 332679 - DNA, 33 bp, Homo sapien
acttaacaaacattgacctcctatgatgtacca

SEQ ID NO: 332680 - DNA, 33 bp, Homo sapien
acttaacaaacattgatctcctatgatgtacca

SEQ ID NO: 332681 - DNA, 33 bp, Homo sapien
actaaattggtggtaactgtattttgacataac

SEQ ID NO: 332682 - DNA, 33 bp, Homo sapien
actaaattggtggtaattgtattttgacataac

SEQ ID NO: 332683 - DNA, 33 bp, Homo sapien
tcaatcacacatcttaacgaagccaaagtctgt

SEQ ID NO: 332684 - DNA, 33 bp, Homo sapien
tcaatcacacatcttagcgaagccaaagtctgt

SEQ ID NO: 332685 - DNA, 33 bp, Homo sapien
cagaaaaagacacgagcatagattatttgtaaa

SEQ ID NO: 332686 - DNA, 33 bp, Homo sapien
cagaaaaagacacgagtatagattatttgtaaa

SEQ ID NO: 332687 - DNA, 33 bp, Homo sapien
taaggtcttaatcacactcatgggcacagagct

SEQ ID NO: 332688 - DNA, 33 bp, Homo sapien
taaggtcttaatcacattcatgggcacagagct

SEQ ID NO: 332689 - DNA, 33 bp, Homo sapien
caccagtttcacaatacacctgttcctgattag

SEQ ID NO: 332690 - DNA, 33 bp, Homo sapien
caccagtttcacaatatacctgttcctgattag

SEQ ID NO: 332691 - DNA, 33 bp, Homo sapien
caaatggtgtcacagaataagtgcaaagtaatg

SEQ ID NO: 332692 - DNA, 33 bp, Homo sapien
caaatggtgtcacagagtaagtgcaaagtaatg

SEQ ID NO: 332693 - DNA, 33 bp, Homo sapien
ggcatcccaagtcccaatgagcaaggacacaag

SEQ ID NO: 332694 - DNA, 33 bp, Homo sapien
ggcatcccaagtcccagtgagcaaggacacaag

SEQ ID NO: 332695 - DNA, 33 bp, Homo sapien
agtgactgaaaagttcaaaaatatccaactcct

SEQ ID NO: 332696 - DNA, 33 bp, Homo sapien
agtgactgaaaagttcgaaaatatccaactcct

SEQ ID NO: 332697 - DNA, 33 bp, Homo sapien
attgaccaagtttagacattgggcaacagtttc

SEQ ID NO: 332698 - DNA, 33 bp, Homo sapien
attgaccaagtttagatattgggcaacagtttc

SEQ ID NO: 332699 - DNA, 33 bp, Homo sapien
tcacacttcctggagcaacaggttttcagcaca

SEQ ID NO: 332700 - DNA, 33 bp, Homo sapien
tcacacttcctggagcgacaggttttcagcaca

SEQ ID NO: 332701 - DNA, 33 bp, Homo sapien
acaacacagtcctgtcactgaatgcctggtttg

SEQ ID NO: 332702 - DNA, 33 bp, Homo sapien
acaacacagtcctgtcgctgaatgcctggtttg

SEQ ID NO: 332703 - DNA, 33 bp, Homo sapien
taactatgcactagaacagcggctgatgtgtgt

SEQ ID NO: 332704 - DNA, 33 bp, Homo sapien
taactatgcactagaatagcggctgatgtgtgt

SEQ ID NO: 332705 - DNA, 33 bp, Homo sapien
attttgttaataccaagtcaacatcagttaata

SEQ ID NO: 332706 - DNA, 33 bp, Homo sapien
attttgttaataccaattcaacatcagttaata

SEQ ID NO: 332707 - DNA, 33 bp, Homo sapien
aaatggaagagttttaagtgagaaggaaaacac

SEQ ID NO: 332708 - DNA, 33 bp, Homo sapien
aaatggaagagttttaggtgagaaggaaaacac

SEQ ID NO: 332709 - DNA, 33 bp, Homo sapien
gtgacactggatgttgcaagacaaagggcctgg

SEQ ID NO: 332710 - DNA, 33 bp, Homo sapien
gtgacactggatgttgtaagacaaagggcctgg

SEQ ID NO: 332711 - DNA, 33 bp, Homo sapien
ggccaagatgaaggaagaaggattagatatacc

SEQ ID NO: 332712 - DNA, 33 bp, Homo sapien
ggccaagatgaaggaataaggattagatatacc

SEQ ID NO: 332713 - DNA, 33 bp, Homo sapien
tgggcgtgtaataggcaactgaagtgatccgtg

SEQ ID NO: 332714 - DNA, 33 bp, Homo sapien
tgggcgtgtaataggcgactgaagtgatccgtg

SEQ ID NO: 332715 - DNA, 33 bp, Homo sapien
ctcaatctctggaaacagtgaatatgttacatc

SEQ ID NO: 332716 - DNA, 33 bp, Homo sapien
ctcaatctctggaaactgtgaatatgttacatc

SEQ ID NO: 332717 - DNA, 33 bp, Homo sapien
agccctagacccttgacagacaataacatcggg

SEQ ID NO: 332718 - DNA, 33 bp, Homo sapien
agccctagacccttgagagacaataacatcggg

SEQ ID NO: 332719 - DNA, 33 bp, Homo sapien
ggtatgttttcactctgactcttgcctccattg

SEQ ID NO: 332720 - DNA, 33 bp, Homo sapien
ggtatgttttcactcttactcttgcctccattg

SEQ ID NO: 332721 - DNA, 33 bp, Homo sapien
tctatcagaaagagaactggggaggtgaggatg

SEQ ID NO: 332722 - DNA, 33 bp, Homo sapien
tctatcagaaagagaattggggaggtgaggatg

SEQ ID NO: 332723 - DNA, 33 bp, Homo sapien
aagtctgccctcatgcaacatgtgtaaaaataa

SEQ ID NO: 332724 - DNA, 33 bp, Homo sapien
aagtctgccctcatgccacatgtgtaaaaataa

SEQ ID NO: 332725 - DNA, 33 bp, Homo sapien
tcagaggaagtgttcaatagaaagcccgttatt

SEQ ID NO: 332726 - DNA, 33 bp, Homo sapien
tcagaggaagtgttcagtagaaagcccgttatt

SEQ ID NO: 332727 - DNA, 33 bp, Homo sapien
cgtggggttaagctccacctcctagcaagaagt

SEQ ID NO: 332728 - DNA, 33 bp, Homo sapien
cgtggggttaagctccgcctcctagcaagaagt

SEQ ID NO: 332729 - DNA, 33 bp, Homo sapien
gctgaattctggaacggcaagagggtactagca

SEQ ID NO: 332730 - DNA, 33 bp, Homo sapien
gctgaattctggaacgtcaagagggtactagca

SEQ ID NO: 332731 - DNA, 33 bp, Homo sapien
acaggttgcttctttccaactgtgcttggaaat

SEQ ID NO: 332732 - DNA, 33 bp, Homo sapien
acaggttgcttctttctaactgtgcttggaaat

SEQ ID NO: 332733 - DNA, 33 bp, Homo sapien
tgtttgttgattgaaacgattgcctcaaagaac

SEQ ID NO: 332734 - DNA, 33 bp, Homo sapien
tgtttgttgattgaaatgattgcctcaaagaac

SEQ ID NO: 332735 - DNA, 33 bp, Homo sapien
catacgaaggtaactacgggaagtgatggatat

SEQ ID NO: 332736 - DNA, 33 bp, Homo sapien
catacgaaggtaactatgggaagtgatggatat

SEQ ID NO: 332737 - DNA, 33 bp, Homo sapien
ctccatctcattatccagctgagaggcaatcaa

SEQ ID NO: 332738 - DNA, 33 bp, Homo sapien
ctccatctcattatccggctgagaggcaatcaa

SEQ ID NO: 332739 - DNA, 33 bp, Homo sapien
cagcaagagttattgcaaagagaaacaacaaag

SEQ ID NO: 332740 - DNA, 33 bp, Homo sapien
cagcaagagttattgcgaagagaaacaacaaag

SEQ ID NO: 332741 - DNA, 33 bp, Homo sapien
ctcctgcaatctactgcatttaagtcaggtctc

SEQ ID NO: 332742 - DNA, 33 bp, Homo sapien
ctcctgcaatctactgtatttaagtcaggtctc

SEQ ID NO: 332743 - DNA, 33 bp, Homo sapien
ggaggctggcaggaacaggaacgagaactcacc

SEQ ID NO: 332744 - DNA, 33 bp, Homo sapien
ggaggctggcaggaacgggaacgagaactcacc

SEQ ID NO: 332745 - DNA, 33 bp, Homo sapien
tggaagtgctcagaaccctgtcctttggggcct

SEQ ID NO: 332746 - DNA, 33 bp, Homo sapien
tggaagtgctcagaactctgtcctttggggcct

SEQ ID NO: 332747 - DNA, 33 bp, Homo sapien
gtcttgctggcttaaaaaagaacgctgccatat

SEQ ID NO: 332748 - DNA, 33 bp, Homo sapien
gtcttgctggcttaaataagaacgctgccatat

SEQ ID NO: 332749 - DNA, 33 bp, Homo sapien
agtatttaaactcctgcaactagttgagatcct

SEQ ID NO: 332750 - DNA, 33 bp, Homo sapien
agtatttaaactcctggaactagttgagatcct

SEQ ID NO: 332751 - DNA, 33 bp, Homo sapien
taaatagaaaagccccaactagtccactgtgac

SEQ ID NO: 332752 - DNA, 33 bp, Homo sapien
taaatagaaaagcccctactagtccactgtgac

SEQ ID NO: 332753 - DNA, 33 bp, Homo sapien
agtggcaccaaagtcccagtgctaggcgcatga

SEQ ID NO: 332754 - DNA, 33 bp, Homo sapien
agtggcaccaaagtcctagtgctaggcgcatga

SEQ ID NO: 332755 - DNA, 33 bp, Homo sapien
ccctagaggaataaacaaacaagctaacataca

SEQ ID NO: 332756 - DNA, 33 bp, Homo sapien
ccctagaggaataaaccaacaagctaacataca

SEQ ID NO: 332757 - DNA, 33 bp, Homo sapien
ggcctagacaagaaatcaatggagatgctttgg

SEQ ID NO: 332758 - DNA, 33 bp, Homo sapien
ggcctagacaagaaatgaatggagatgctttgg

SEQ ID NO: 332759 - DNA, 33 bp, Homo sapien
tctgatccttttgtaacccaggacttaagctgt

SEQ ID NO: 332760 - DNA, 33 bp, Homo sapien
tctgatccttttgtaagccaggacttaagctgt

SEQ ID NO: 332761 - DNA, 33 bp, Homo sapien
aattaaaacaaagtgcaaagttgataagcaaaa

SEQ ID NO: 332762 - DNA, 33 bp, Homo sapien
aattaaaacaaagtgcgaagttgataagcaaaa

SEQ ID NO: 332763 - DNA, 33 bp, Homo sapien
ttgatgagctattatcacttgagtccttccata

SEQ ID NO: 332764 - DNA, 33 bp, Homo sapien
ttgatgagctattatcgcttgagtccttccata

SEQ ID NO: 332765 - DNA, 33 bp, Homo sapien
gctacaaagagtgacacgcctcaaaaacactgt

SEQ ID NO: 332766 - DNA, 33 bp, Homo sapien
gctacaaagagtgacatgcctcaaaaacactgt

SEQ ID NO: 332767 - DNA, 33 bp, Homo sapien
gaaaagtcttgttgaactgggtatttgtatcat

SEQ ID NO: 332768 - DNA, 33 bp, Homo sapien
gaaaagtcttgttgaattgggtatttgtatcat

SEQ ID NO: 332769 - DNA, 33 bp, Homo sapien
ttttcctgcgtgactaccaaactgaatgcaggg

SEQ ID NO: 332770 - DNA, 33 bp, Homo sapien
ttttcctgcgtgactatcaaactgaatgcaggg

SEQ ID NO: 332771 - DNA, 33 bp, Homo sapien
atctgcctttattaacaaacaattgcaataaag

SEQ ID NO: 332772 - DNA, 33 bp, Homo sapien
atctgcctttattaacgaacaattgcaataaag

SEQ ID NO: 332773 - DNA, 33 bp, Homo sapien
tgggctcatccagatgaactgaagtcgattgac

SEQ ID NO: 332774 - DNA, 33 bp, Homo sapien
tgggctcatccagatgcactgaagtcgattgac

SEQ ID NO: 332775 - DNA, 33 bp, Homo sapien
ctcacattttaatgtaactgcaaatgtcaatcg

SEQ ID NO: 332776 - DNA, 33 bp, Homo sapien
ctcacattttaatgtatctgcaaatgtcaatcg

SEQ ID NO: 332777 - DNA, 33 bp, Homo sapien
ggttcacaaataaaacaagtaggaaaggaggca

SEQ ID NO: 332778 - DNA, 33 bp, Homo sapien
ggttcacaaataaaacgagtaggaaaggaggca

SEQ ID NO: 332779 - DNA, 33 bp, Homo sapien
cttcgatgtggggatgccaggtatgtcgctgag

SEQ ID NO: 332780 - DNA, 33 bp, Homo sapien
cttcgatgtggggatgtcaggtatgtcgctgag

SEQ ID NO: 332781 - DNA, 33 bp, Homo sapien
tgtcgctgagctctcaaaaatcttgagcaaaaa

SEQ ID NO: 332782 - DNA, 33 bp, Homo sapien
tgtcgctgagctctcagaaatcttgagcaaaaa

SEQ ID NO: 332783 - DNA, 33 bp, Homo sapien
cagtgtttaaattccaccactcagtcatcaagt

SEQ ID NO: 332784 - DNA, 33 bp, Homo sapien
cagtgtttaaattccatcactcagtcatcaagt

SEQ ID NO: 332785 - DNA, 33 bp, Homo sapien
atggcaacttccaaggaaatccctttgccctgg

SEQ ID NO: 332786 - DNA, 33 bp, Homo sapien
atggcaacttccaaggtaatccctttgccctgg

SEQ ID NO: 332787 - DNA, 33 bp, Homo sapien
ctgcacatgttttctaagggagctcctgccagt

SEQ ID NO: 332788 - DNA, 33 bp, Homo sapien
ctgcacatgttttctaggggagctcctgccagt

SEQ ID NO: 332789 - DNA, 33 bp, Homo sapien
agagatcttgagggggaattgttagtcacaagt

SEQ ID NO: 332790 - DNA, 33 bp, Homo sapien
agagatcttgaggggggattgttagtcacaagt

SEQ ID NO: 332791 - DNA, 33 bp, Homo sapien
acataaataaacagcactgagaatagaataatt

SEQ ID NO: 332792 - DNA, 33 bp, Homo sapien
acataaataaacagcattgagaatagaataatt

SEQ ID NO: 332793 - DNA, 33 bp, Homo sapien
attatgcaaaccaaaaagcaatggagtgagaat

SEQ ID NO: 332794 - DNA, 33 bp, Homo sapien
attatgcaaaccaaaaggcaatggagtgagaat

SEQ ID NO: 332795 - DNA, 33 bp, Homo sapien
cactttggggttatcaacaatggctccagtcca

SEQ ID NO: 332796 - DNA, 33 bp, Homo sapien
cactttggggttatcagcaatggctccagtcca

SEQ ID NO: 332797 - DNA, 33 bp, Homo sapien
ccccagccgataagaacgcttcctgtctctcct

SEQ ID NO: 332798 - DNA, 33 bp, Homo sapien
ccccagccgataagaatgcttcctgtctctcct

SEQ ID NO: 332799 - DNA, 33 bp, Homo sapien
cagagtctggaggacacaaatatggctgcgtga

SEQ ID NO: 332800 - DNA, 33 bp, Homo sapien
cagagtctggaggacataaatatggctgcgtga

SEQ ID NO: 332801 - DNA, 33 bp, Homo sapien
gtaaatgcttttatgcgccattaaaattggtca

SEQ ID NO: 332802 - DNA, 33 bp, Homo sapien
gtaaatgcttttatgctccattaaaattggtca

SEQ ID NO: 332803 - DNA, 33 bp, Homo sapien
aggaaatgttttgctaccgctgaacgtatctgt

SEQ ID NO: 332804 - DNA, 33 bp, Homo sapien
aggaaatgttttgctatcgctgaacgtatctgt

SEQ ID NO: 332805 - DNA, 33 bp, Homo sapien
ttataaatacagctgaacaaagctaatacaaga

SEQ ID NO: 332806 - DNA, 33 bp, Homo sapien
ttataaatacagctgagcaaagctaatacaaga

SEQ ID NO: 332807 - DNA, 33 bp, Homo sapien
gagctggagccatggaaacctatccaacaggag

SEQ ID NO: 332808 - DNA, 33 bp, Homo sapien
gagctggagccatggagacctatccaacaggag

SEQ ID NO: 332809 - DNA, 33 bp, Homo sapien
gtgaagcaataccctaccagcctttgcctgcct

SEQ ID NO: 332810 - DNA, 33 bp, Homo sapien
gtgaagcaataccctatcagcctttgcctgcct

SEQ ID NO: 332811 - DNA, 33 bp, Homo sapien
ctttaggctcatgcccaggctcaggctaacctc

SEQ ID NO: 332812 - DNA, 33 bp, Homo sapien
ctttaggctcatgcccgggctcaggctaacctc

SEQ ID NO: 332813 - DNA, 33 bp, Homo sapien
tcactgactgtggcaagaaaatgtaatcaacaa

SEQ ID NO: 332814 - DNA, 33 bp, Homo sapien
tcactgactgtggcaataaaatgtaatcaacaa

SEQ ID NO: 332815 - DNA, 33 bp, Homo sapien
gagagaaaggcgagcacgtgaggaagagcaatc

SEQ ID NO: 332816 - DNA, 33 bp, Homo sapien
gagagaaaggcgagcatgtgaggaagagcaatc

SEQ ID NO: 332817 - DNA, 33 bp, Homo sapien
tctaaacaatctctcacgaaggtaattttcagg

SEQ ID NO: 332818 - DNA, 33 bp, Homo sapien
tctaaacaatctctcaggaaggtaattttcagg

SEQ ID NO: 332819 - DNA, 33 bp, Homo sapien
gcaaggcaatagaaggacaccattgatttttgc

SEQ ID NO: 332820 - DNA, 33 bp, Homo sapien
gcaaggcaatagaagggcaccattgatttttgc

SEQ ID NO: 332821 - DNA, 33 bp, Homo sapien
cagggatattgactgaccttcctggagaaagaa

SEQ ID NO: 332822 - DNA, 33 bp, Homo sapien
cagggatattgactgatcttcctggagaaagaa

SEQ ID NO: 332823 - DNA, 33 bp, Homo sapien
agcaggctagaattgaagagaaaaccaatatct

SEQ ID NO: 332824 - DNA, 33 bp, Homo sapien
agcaggctagaattgaggagaaaaccaatatct

SEQ ID NO: 332825 - DNA, 33 bp, Homo sapien
tatttatggatctcaaaggaacagggcccagca

SEQ ID NO: 332826 - DNA, 33 bp, Homo sapien
tatttatggatctcaacggaacagggcccagca

SEQ ID NO: 332827 - DNA, 33 bp, Homo sapien
ctgttgaaatacgcacagtaacattactttcta

SEQ ID NO: 332828 - DNA, 33 bp, Homo sapien
ctgttgaaatacgcacggtaacattactttcta

SEQ ID NO: 332829 - DNA, 33 bp, Homo sapien
tgaactggaaggcaataaactcctgttgcttag

SEQ ID NO: 332830 - DNA, 33 bp, Homo sapien
tgaactggaaggcaattaactcctgttgcttag

SEQ ID NO: 332831 - DNA, 33 bp, Homo sapien
cactgtcataagcaagaagcaacattcatgctc

SEQ ID NO: 332832 - DNA, 33 bp, Homo sapien
cactgtcataagcaaggagcaacattcatgctc

SEQ ID NO: 332833 - DNA, 33 bp, Homo sapien
gtgtgctgggcaccgaatccgtgatggccagca

SEQ ID NO: 332834 - DNA, 33 bp, Homo sapien
gtgtgctgggcaccgagtccgtgatggccagca

SEQ ID NO: 332835 - DNA, 33 bp, Homo sapien
accaggttgaaacaaccgcaaggctgaagccca

SEQ ID NO: 332836 - DNA, 33 bp, Homo sapien
accaggttgaaacaactgcaaggctgaagccca

SEQ ID NO: 332837 - DNA, 33 bp, Homo sapien
ttaacttggtgcatgggaaacaaggggatgttt

SEQ ID NO: 332838 - DNA, 33 bp, Homo sapien
ttaacttggtgcatggtaaacaaggggatgttt

SEQ ID NO: 332839 - DNA, 33 bp, Homo sapien
atgacaagccaagtaaactttgaaaatgcaatt

SEQ ID NO: 332840 - DNA, 33 bp, Homo sapien
atgacaagccaagtaatctttgaaaatgcaatt

SEQ ID NO: 332841 - DNA, 33 bp, Homo sapien
tcagaaacatgacagacaatcttacctaattct

SEQ ID NO: 332842 - DNA, 33 bp, Homo sapien
tcagaaacatgacagagaatcttacctaattct

SEQ ID NO: 332843 - DNA, 33 bp, Homo sapien
actttatggtttaaaggatgtcacatgtactgt

SEQ ID NO: 332844 - DNA, 33 bp, Homo sapien
actttatggtttaaagtatgtcacatgtactgt

SEQ ID NO: 332845 - DNA, 33 bp, Homo sapien
ctattatctgagattcaacaatgttctctagcc

SEQ ID NO: 332846 - DNA, 33 bp, Homo sapien
ctattatctgagattcgacaatgttctctagcc

SEQ ID NO: 332847 - DNA, 33 bp, Homo sapien
cctgtccactaccctccagttgtcaggagcatg

SEQ ID NO: 332848 - DNA, 33 bp, Homo sapien
cctgtccactaccctctagttgtcaggagcatg

SEQ ID NO: 332849 - DNA, 33 bp, Homo sapien
tataaatgaagggataagattcataagctgtat

SEQ ID NO: 332850 - DNA, 33 bp, Homo sapien
tataaatgaagggataggattcataagctgtat

SEQ ID NO: 332851 - DNA, 33 bp, Homo sapien
ctagagcctgaaagaacctgatggaacttctgg

SEQ ID NO: 332852 - DNA, 33 bp, Homo sapien
ctagagcctgaaagaatctgatggaacttctgg

SEQ ID NO: 332853 - DNA, 33 bp, Homo sapien
ttttagtattattccagtctacatattctgaaa

SEQ ID NO: 332854 - DNA, 33 bp, Homo sapien
ttttagtattattccattctacatattctgaaa

SEQ ID NO: 332855 - DNA, 33 bp, Homo sapien
gtaacatcagcaagtaaatgccttaagataagt

SEQ ID NO: 332856 - DNA, 33 bp, Homo sapien
gtaacatcagcaagtacatgccttaagataagt

SEQ ID NO: 332857 - DNA, 33 bp, Homo sapien
aaagaacttatgcaaaactagggaatgtggcca

SEQ ID NO: 332858 - DNA, 33 bp, Homo sapien
aaagaacttatgcaaatctagggaatgtggcca

SEQ ID NO: 332859 - DNA, 33 bp, Homo sapien
aatcctggcagtgaaaaaccataattatgaagg

SEQ ID NO: 332860 - DNA, 33 bp, Homo sapien
aatcctggcagtgaaacaccataattatgaagg

SEQ ID NO: 332861 - DNA, 33 bp, Homo sapien
agctacattttcccctcaccacacagctccagc

SEQ ID NO: 332862 - DNA, 33 bp, Homo sapien
agctacattttcccctgaccacacagctccagc

SEQ ID NO: 332863 - DNA, 33 bp, Homo sapien
ccactttaagagcaaccctctccactgtcaagt

SEQ ID NO: 332864 - DNA, 33 bp, Homo sapien
ccactttaagagcaactctctccactgtcaagt

SEQ ID NO: 332865 - DNA, 33 bp, Homo sapien
ctaaccgacatagacaaaaccttagtttcaggc

SEQ ID NO: 332866 - DNA, 33 bp, Homo sapien
ctaaccgacatagacacaaccttagtttcaggc

SEQ ID NO: 332867 - DNA, 33 bp, Homo sapien
caaattacacaacgataagcttcacactgagca

SEQ ID NO: 332868 - DNA, 33 bp, Homo sapien
caaattacacaacgatcagcttcacactgagca

SEQ ID NO: 332869 - DNA, 33 bp, Homo sapien
ggaaccactgctgtcactcagagtcactcaagc

SEQ ID NO: 332870 - DNA, 33 bp, Homo sapien
ggaaccactgctgtcattcagagtcactcaagc

SEQ ID NO: 332871 - DNA, 33 bp, Homo sapien
cctatctgtgcttttgaactcattaactaaaca

SEQ ID NO: 332872 - DNA, 33 bp, Homo sapien
cctatctgtgcttttgtactcattaactaaaca

SEQ ID NO: 332873 - DNA, 33 bp, Homo sapien
actgaaagccttaagacgaaacagactgaggtc

SEQ ID NO: 332874 - DNA, 33 bp, Homo sapien
actgaaagccttaagaggaaacagactgaggtc

SEQ ID NO: 332875 - DNA, 33 bp, Homo sapien
gtgtatataatttttacctcctcagctatgatc

SEQ ID NO: 332876 - DNA, 33 bp, Homo sapien
gtgtatataatttttagctcctcagctatgatc

SEQ ID NO: 332877 - DNA, 33 bp, Homo sapien
agaatgtcacttattcaatactaaagggcacat

SEQ ID NO: 332878 - DNA, 33 bp, Homo sapien
agaatgtcacttattccatactaaagggcacat

SEQ ID NO: 332879 - DNA, 33 bp, Homo sapien
aataaataaatagtcccaatcactggtgatgca

SEQ ID NO: 332880 - DNA, 33 bp, Homo sapien
aataaataaatagtcctaatcactggtgatgca

SEQ ID NO: 332881 - DNA, 33 bp, Homo sapien
ccctaggcataactaaatcacccttgactctct

SEQ ID NO: 332882 - DNA, 33 bp, Homo sapien
ccctaggcataactaattcacccttgactctct

SEQ ID NO: 332883 - DNA, 33 bp, Homo sapien
gggtgggttgtgatgaagcttagaggccaggat

SEQ ID NO: 332884 - DNA, 33 bp, Homo sapien
gggtgggttgtgatgacgcttagaggccaggat

SEQ ID NO: 332885 - DNA, 33 bp, Homo sapien
ctgaagtctgagtggacacttgtagtcaagcca

SEQ ID NO: 332886 - DNA, 33 bp, Homo sapien
ctgaagtctgagtggatacttgtagtcaagcca

SEQ ID NO: 332887 - DNA, 33 bp, Homo sapien
tatctgagggggtaaaacacggatgaaatgacc

SEQ ID NO: 332888 - DNA, 33 bp, Homo sapien
tatctgagggggtaaagcacggatgaaatgacc

SEQ ID NO: 332889 - DNA, 33 bp, Homo sapien
accccagccaatgaggaaaaagtacagaggcag

SEQ ID NO: 332890 - DNA, 33 bp, Homo sapien
accccagccaatgagggaaaagtacagaggcag

SEQ ID NO: 332891 - DNA, 33 bp, Homo sapien
gagcattattcccaacaagaagcttcaccgtga

SEQ ID NO: 332892 - DNA, 33 bp, Homo sapien
gagcattattcccaacgagaagcttcaccgtga

SEQ ID NO: 332893 - DNA, 33 bp, Homo sapien
tgaagaatctcagacacataaaccttcattgcc

SEQ ID NO: 332894 - DNA, 33 bp, Homo sapien
tgaagaatctcagacatataaaccttcattgcc

SEQ ID NO: 332895 - DNA, 33 bp, Homo sapien
gctttcaggaggcgcactcttcactgtttaaga

SEQ ID NO: 332896 - DNA, 33 bp, Homo sapien
gctttcaggaggcgcattcttcactgtttaaga

SEQ ID NO: 332897 - DNA, 33 bp, Homo sapien
ccagtgtcttgaactacgcatctcttccaacct

SEQ ID NO: 332898 - DNA, 33 bp, Homo sapien
ccagtgtcttgaactatgcatctcttccaacct

SEQ ID NO: 332899 - DNA, 33 bp, Homo sapien
gaactttaaaaaatccaaacatctgaatgtaac

SEQ ID NO: 332900 - DNA, 33 bp, Homo sapien
gaactttaaaaaatccgaacatctgaatgtaac

SEQ ID NO: 332901 - DNA, 33 bp, Homo sapien
gattgagtaataaaacaaattggatgttgtctt

SEQ ID NO: 332902 - DNA, 33 bp, Homo sapien
gattgagtaataaaacgaattggatgttgtctt

SEQ ID NO: 332903 - DNA, 33 bp, Homo sapien
tgtgtacagaagaaacagaagatggcttttggc

SEQ ID NO: 332904 - DNA, 33 bp, Homo sapien
tgtgtacagaagaaacggaagatggcttttggc

SEQ ID NO: 332905 - DNA, 33 bp, Homo sapien
aaatacaaggcttgaacgggccaaattcctgga

SEQ ID NO: 332906 - DNA, 33 bp, Homo sapien
aaatacaaggcttgaatgggccaaattcctgga

SEQ ID NO: 332907 - DNA, 33 bp, Homo sapien
tgactcactctacacaatctgtcacagaggaac

SEQ ID NO: 332908 - DNA, 33 bp, Homo sapien
tgactcactctacacagtctgtcacagaggaac

SEQ ID NO: 332909 - DNA, 33 bp, Homo sapien
tcacttgggagcacggaaaaaccacccaccagg

SEQ ID NO: 332910 - DNA, 33 bp, Homo sapien
tcacttgggagcacggcaaaaccacccaccagg

SEQ ID NO: 332911 - DNA, 33 bp, Homo sapien
agagcccttatctcataaagatgcacacagcag

SEQ ID NO: 332912 - DNA, 33 bp, Homo sapien
agagcccttatctcatgaagatgcacacagcag

SEQ ID NO: 332913 - DNA, 33 bp, Homo sapien
atttgtgcgtatacaagtcctgaattcttgtag

SEQ ID NO: 332914 - DNA, 33 bp, Homo sapien
atttgtgcgtatacaattcctgaattcttgtag

SEQ ID NO: 332915 - DNA, 33 bp, Homo sapien
gcttgtagactgtcaccaagtccctcaaatctg

SEQ ID NO: 332916 - DNA, 33 bp, Homo sapien
gcttgtagactgtcacgaagtccctcaaatctg

SEQ ID NO: 332917 - DNA, 33 bp, Homo sapien
ttcaggctagccaggaggacttggttcgtggtt

SEQ ID NO: 332918 - DNA, 33 bp, Homo sapien
ttcaggctagccaggatgacttggttcgtggtt

SEQ ID NO: 332919 - DNA, 33 bp, Homo sapien
agcagaataaatgccaacaagcaaacaaatcaa

SEQ ID NO: 332920 - DNA, 33 bp, Homo sapien
agcagaataaatgccatcaagcaaacaaatcaa

SEQ ID NO: 332921 - DNA, 33 bp, Homo sapien
ttggagcttttggcacaccttatcttctcctcc

SEQ ID NO: 332922 - DNA, 33 bp, Homo sapien
ttggagcttttggcacgccttatcttctcctcc

SEQ ID NO: 332923 - DNA, 33 bp, Homo sapien
cactcctggaatggaacgaacgtaagccactcg

SEQ ID NO: 332924 - DNA, 33 bp, Homo sapien
cactcctggaatggaatgaacgtaagccactcg

SEQ ID NO: 332925 - DNA, 33 bp, Homo sapien
ggagcacagacgctacagaaatgtgcttattta

SEQ ID NO: 332926 - DNA, 33 bp, Homo sapien
ggagcacagacgctacggaaatgtgcttattta

SEQ ID NO: 332927 - DNA, 33 bp, Homo sapien
taatgatatggagaaccagagagatggttgttg

SEQ ID NO: 332928 - DNA, 33 bp, Homo sapien
taatgatatggagaactagagagatggttgttg

SEQ ID NO: 332929 - DNA, 33 bp, Homo sapien
actgacagtgactgtacctgcgtgtgaagtggg

SEQ ID NO: 332930 - DNA, 33 bp, Homo sapien
actgacagtgactgtatctgcgtgtgaagtggg

SEQ ID NO: 332931 - DNA, 33 bp, Homo sapien
ctagcacaagggctaaatagggagttcgtgttt

SEQ ID NO: 332932 - DNA, 33 bp, Homo sapien
ctagcacaagggctaagtagggagttcgtgttt

SEQ ID NO: 332933 - DNA, 33 bp, Homo sapien
gggcgagcttggggagaaagcaagggaattcag

SEQ ID NO: 332934 - DNA, 33 bp, Homo sapien
gggcgagcttggggagtaagcaagggaattcag

SEQ ID NO: 332935 - DNA, 33 bp, Homo sapien
tattttagagcactgcaatatgttccacgctca

SEQ ID NO: 332936 - DNA, 33 bp, Homo sapien
tattttagagcactgcgatatgttccacgctca

SEQ ID NO: 332937 - DNA, 33 bp, Homo sapien
catgtatgtacaagaaacccaactatcttctaa

SEQ ID NO: 332938 - DNA, 33 bp, Homo sapien
catgtatgtacaagaatcccaactatcttctaa

SEQ ID NO: 332939 - DNA, 33 bp, Homo sapien
tccacaaccctggtcaaatcgtgagaaaaatgt

SEQ ID NO: 332940 - DNA, 33 bp, Homo sapien
tccacaaccctggtcacatcgtgagaaaaatgt

SEQ ID NO: 332941 - DNA, 33 bp, Homo sapien
cactgagcagtcagtccctagcccgcatccttt

SEQ ID NO: 332942 - DNA, 33 bp, Homo sapien
cactgagcagtcagtctctagcccgcatccttt

SEQ ID NO: 332943 - DNA, 33 bp, Homo sapien
tttggaaagaggcagaagaaaaatttacagaga

SEQ ID NO: 332944 - DNA, 33 bp, Homo sapien
tttggaaagaggcagaggaaaaatttacagaga

SEQ ID NO: 332945 - DNA, 33 bp, Homo sapien
ttcatgaaatatggccggattaaatatctgatt

SEQ ID NO: 332946 - DNA, 33 bp, Homo sapien
ttcatgaaatatggcctgattaaatatctgatt

SEQ ID NO: 332947 - DNA, 33 bp, Homo sapien
aaaatttagccaatcaatatgctatcgtgacag

SEQ ID NO: 332948 - DNA, 33 bp, Homo sapien
aaaatttagccaatcagtatgctatcgtgacag

SEQ ID NO: 332949 - DNA, 33 bp, Homo sapien
ccaccctcctgacacacgaattcgttcaccaac

SEQ ID NO: 332950 - DNA, 33 bp, Homo sapien
ccaccctcctgacacatgaattcgttcaccaac

SEQ ID NO: 332951 - DNA, 33 bp, Homo sapien
ggatcagctggagtaaagagtagaaaaagccac

SEQ ID NO: 332952 - DNA, 33 bp, Homo sapien
ggatcagctggagtaaggagtagaaaaagccac

SEQ ID NO: 332953 - DNA, 33 bp, Homo sapien
ggccttccggacgtaacgggatgcagaaagcaa

SEQ ID NO: 332954 - DNA, 33 bp, Homo sapien
ggccttccggacgtaatgggatgcagaaagcaa

SEQ ID NO: 332955 - DNA, 33 bp, Homo sapien
tgcccaagacttgtaacccatatgatctcataa

SEQ ID NO: 332956 - DNA, 33 bp, Homo sapien
tgcccaagacttgtaatccatatgatctcataa

SEQ ID NO: 332957 - DNA, 33 bp, Homo sapien
tcctaataataaaacacagcatgagaatctaaa

SEQ ID NO: 332958 - DNA, 33 bp, Homo sapien
tcctaataataaaacagagcatgagaatctaaa

SEQ ID NO: 332959 - DNA, 33 bp, Homo sapien
cacacacgacgtttgccgacgcgccaatcagtg

SEQ ID NO: 332960 - DNA, 33 bp, Homo sapien
cacacacgacgtttgctgacgcgccaatcagtg

SEQ ID NO: 332961 - DNA, 33 bp, Homo sapien
gtgttcacgaacaggcacgtgatttgggctcag

SEQ ID NO: 332962 - DNA, 33 bp, Homo sapien
gtgttcacgaacaggcgcgtgatttgggctcag

SEQ ID NO: 332963 - DNA, 33 bp, Homo sapien
cccaggcctttctgtacacagccatgcagtgtc

SEQ ID NO: 332964 - DNA, 33 bp, Homo sapien
cccaggcctttctgtagacagccatgcagtgtc

SEQ ID NO: 332965 - DNA, 33 bp, Homo sapien
agcagctgcgatatgcaagtcttcggggcagtg

SEQ ID NO: 332966 - DNA, 33 bp, Homo sapien
agcagctgcgatatgcgagtcttcggggcagtg

SEQ ID NO: 332967 - DNA, 33 bp, Homo sapien
attagtgattgaaaaaaatgcccattttccaat

SEQ ID NO: 332968 - DNA, 33 bp, Homo sapien
attagtgattgaaaaagatgcccattttccaat

SEQ ID NO: 332969 - DNA, 33 bp, Homo sapien
gcttttaatctgatacacactaactgttgcttt

SEQ ID NO: 332970 - DNA, 33 bp, Homo sapien
gcttttaatctgatacgcactaactgttgcttt

SEQ ID NO: 332971 - DNA, 33 bp, Homo sapien
atgcaaagtgcatcaacgtcagaaaggtgcacc

SEQ ID NO: 332972 - DNA, 33 bp, Homo sapien
atgcaaagtgcatcaatgtcagaaaggtgcacc

SEQ ID NO: 332973 - DNA, 33 bp, Homo sapien
atacaagagacagacaataaatataagacacaa

SEQ ID NO: 332974 - DNA, 33 bp, Homo sapien
atacaagagacagacagtaaatataagacacaa

SEQ ID NO: 332975 - DNA, 33 bp, Homo sapien
gtggcagacagaaaaaattaaaactaatgaatg

SEQ ID NO: 332976 - DNA, 33 bp, Homo sapien
gtggcagacagaaaaatttaaaactaatgaatg

SEQ ID NO: 332977 - DNA, 33 bp, Homo sapien
gcacggctctgaaggcaagagtgtgaaaccagg

SEQ ID NO: 332978 - DNA, 33 bp, Homo sapien
gcacggctctgaaggcgagagtgtgaaaccagg

SEQ ID NO: 332979 - DNA, 33 bp, Homo sapien
ctgcaggggtctcatccgaacacttactccaag

SEQ ID NO: 332980 - DNA, 33 bp, Homo sapien
ctgcaggggtctcatctgaacacttactccaag

SEQ ID NO: 332981 - DNA, 33 bp, Homo sapien
acatttaaaagaatgacgggatgcctttgttta

SEQ ID NO: 332982 - DNA, 33 bp, Homo sapien
acatttaaaagaatgatgggatgcctttgttta

SEQ ID NO: 332983 - DNA, 33 bp, Homo sapien
aggtaaaagaaaccagccgctgtgaagttacta

SEQ ID NO: 332984 - DNA, 33 bp, Homo sapien
aggtaaaagaaaccagtcgctgtgaagttacta

SEQ ID NO: 332985 - DNA, 33 bp, Homo sapien
gcccatgcatctccccggagtgactgtgccacg

SEQ ID NO: 332986 - DNA, 33 bp, Homo sapien
gcccatgcatctcccctgagtgactgtgccacg

SEQ ID NO: 332987 - DNA, 33 bp, Homo sapien
aaaagcaaacttgatgaagaatcgtgattgaag

SEQ ID NO: 332988 - DNA, 33 bp, Homo sapien
aaaagcaaacttgatggagaatcgtgattgaag

SEQ ID NO: 332989 - DNA, 33 bp, Homo sapien
gccagaactaccagtgacaatgaagtttttggt

SEQ ID NO: 332990 - DNA, 33 bp, Homo sapien
gccagaactaccagtggcaatgaagtttttggt

SEQ ID NO: 332991 - DNA, 33 bp, Homo sapien
tcttcctgtattgaacaaactgtttctggtaag

SEQ ID NO: 332992 - DNA, 33 bp, Homo sapien
tcttcctgtattgaacgaactgtttctggtaag

SEQ ID NO: 332993 - DNA, 33 bp, Homo sapien
cccagtgggctgtgacagagatagtgacattca

SEQ ID NO: 332994 - DNA, 33 bp, Homo sapien
cccagtgggctgtgacggagatagtgacattca

SEQ ID NO: 332995 - DNA, 33 bp, Homo sapien
cagaataggcagtacaacctgagagagagagaa

SEQ ID NO: 332996 - DNA, 33 bp, Homo sapien
cagaataggcagtacaccctgagagagagagaa

SEQ ID NO: 332997 - DNA, 33 bp, Homo sapien
tattttatttttccaaatgactacctggttgtc

SEQ ID NO: 332998 - DNA, 33 bp, Homo sapien
tattttatttttccaagtgactacctggttgtc

SEQ ID NO: 332999 - DNA, 33 bp, Homo sapien
acactttatgtagacaaatttactagttatgtc

SEQ ID NO: 333000 - DNA, 33 bp, Homo sapien
acactttatgtagacagatttactagttatgtc

SEQ ID NO: 333001 - DNA, 33 bp, Homo sapien
tttgtggtatagactgaaattatttactcctag

SEQ ID NO: 333002 - DNA, 33 bp, Homo sapien
tttgtggtatagactgcaattatttactcctag

SEQ ID NO: 333003 - DNA, 33 bp, Homo sapien
attctattcgttgttaagctgcagtatcccaat

SEQ ID NO: 333004 - DNA, 33 bp, Homo sapien
attctattcgttgttatgctgcagtatcccaat

SEQ ID NO: 333005 - DNA, 33 bp, Homo sapien
ataaagctgctacgaacgtctatgtgcaacttt

SEQ ID NO: 333006 - DNA, 33 bp, Homo sapien
ataaagctgctacgaatgtctatgtgcaacttt

SEQ ID NO: 333007 - DNA, 33 bp, Homo sapien
aagctggttaacttaaaatagtccaattacaac

SEQ ID NO: 333008 - DNA, 33 bp, Homo sapien
aagctggttaacttaagatagtccaattacaac

SEQ ID NO: 333009 - DNA, 33 bp, Homo sapien
tcagaacaaagagcgcggcaaaaaacagaaggg

SEQ ID NO: 333010 - DNA, 33 bp, Homo sapien
tcagaacaaagagcgctgcaaaaaacagaaggg

SEQ ID NO: 333011 - DNA, 33 bp, Homo sapien
cccatttggtttaagaagacctaatctatgtaa

SEQ ID NO: 333012 - DNA, 33 bp, Homo sapien
cccatttggtttaagaggacctaatctatgtaa

SEQ ID NO: 333013 - DNA, 33 bp, Homo sapien
ctgcccacaacttgcaaaggcaagactccaggc

SEQ ID NO: 333014 - DNA, 33 bp, Homo sapien
ctgcccacaacttgcagaggcaagactccaggc

SEQ ID NO: 333015 - DNA, 33 bp, Homo sapien
acaggctcatggagaagacagctcacatacaac

SEQ ID NO: 333016 - DNA, 33 bp, Homo sapien
acaggctcatggagaatacagctcacatacaac

SEQ ID NO: 333017 - DNA, 33 bp, Homo sapien
ctcacacaccaaggtaccataggggtctctcag

SEQ ID NO: 333018 - DNA, 33 bp, Homo sapien
ctcacacaccaaggtatcataggggtctctcag

SEQ ID NO: 333019 - DNA, 33 bp, Homo sapien
tcagctaaatccatacgcttgctgaggccatgg

SEQ ID NO: 333020 - DNA, 33 bp, Homo sapien
tcagctaaatccatactcttgctgaggccatgg

SEQ ID NO: 333021 - DNA, 33 bp, Homo sapien
cccgtcagatatcctacgctgtaagagagaaac

SEQ ID NO: 333022 - DNA, 33 bp, Homo sapien
cccgtcagatatcctatgctgtaagagagaaac

SEQ ID NO: 333023 - DNA, 33 bp, Homo sapien
aagcagattaccatgaaggtgtcctaaagcaag

SEQ ID NO: 333024 - DNA, 33 bp, Homo sapien
aagcagattaccatgagggtgtcctaaagcaag

SEQ ID NO: 333025 - DNA, 33 bp, Homo sapien
agaccaggagaacaagacaaatcccaatgaaca

SEQ ID NO: 333026 - DNA, 33 bp, Homo sapien
agaccaggagaacaaggcaaatcccaatgaaca

SEQ ID NO: 333027 - DNA, 33 bp, Homo sapien
tttattataggctccactcagtcattttcttct

SEQ ID NO: 333028 - DNA, 33 bp, Homo sapien
tttattataggctccattcagtcattttcttct

SEQ ID NO: 333029 - DNA, 33 bp, Homo sapien
tcctgtcgtttctgcccaatgctcggaaaatgt

SEQ ID NO: 333030 - DNA, 33 bp, Homo sapien
tcctgtcgtttctgcctaatgctcggaaaatgt

SEQ ID NO: 333031 - DNA, 33 bp, Homo sapien
acctgtcacaaatggaagaaaatgaaagtagtc

SEQ ID NO: 333032 - DNA, 33 bp, Homo sapien
acctgtcacaaatggaggaaaatgaaagtagtc

SEQ ID NO: 333033 - DNA, 33 bp, Homo sapien
agtgggagagagagtaactttcattatgtgaat

SEQ ID NO: 333034 - DNA, 33 bp, Homo sapien
agtgggagagagagtacctttcattatgtgaat

SEQ ID NO: 333035 - DNA, 33 bp, Homo sapien
aaaacaaaggacacgcacacccaggatacagac

SEQ ID NO: 333036 - DNA, 33 bp, Homo sapien
aaaacaaaggacacgcgcacccaggatacagac

SEQ ID NO: 333037 - DNA, 33 bp, Homo sapien
gagtgtcggctcgaccagagaggagtgcagtga

SEQ ID NO: 333038 - DNA, 33 bp, Homo sapien
gagtgtcggctcgaccggagaggagtgcagtga

SEQ ID NO: 333039 - DNA, 33 bp, Homo sapien
gatgggtcacgctgaacgcaaaagagacggggg

SEQ ID NO: 333040 - DNA, 33 bp, Homo sapien
gatgggtcacgctgaatgcaaaagagacggggg

SEQ ID NO: 333041 - DNA, 33 bp, Homo sapien
agagacagctccatgtaaagcagcgatgtgggg

SEQ ID NO: 333042 - DNA, 33 bp, Homo sapien
agagacagctccatgtcaagcagcgatgtgggg

SEQ ID NO: 333043 - DNA, 33 bp, Homo sapien
ttacttggtaaattgtaaaggcctgtgacattt

SEQ ID NO: 333044 - DNA, 33 bp, Homo sapien
ttacttggtaaattgtgaaggcctgtgacattt

SEQ ID NO: 333045 - DNA, 33 bp, Homo sapien
gttttattcatccacacaagtcttattgtctat

SEQ ID NO: 333046 - DNA, 33 bp, Homo sapien
gttttattcatccacagaagtcttattgtctat

SEQ ID NO: 333047 - DNA, 33 bp, Homo sapien
tattaatactcatcaaataaaatcctggtaata

SEQ ID NO: 333048 - DNA, 33 bp, Homo sapien
tattaatactcatcaactaaaatcctggtaata

SEQ ID NO: 333049 - DNA, 33 bp, Homo sapien
aggctctgactgtacacgggtgaggaatcatag

SEQ ID NO: 333050 - DNA, 33 bp, Homo sapien
aggctctgactgtacatgggtgaggaatcatag

SEQ ID NO: 333051 - DNA, 33 bp, Homo sapien
ataatctctttcctgaaaagtctgtgaatctgt

SEQ ID NO: 333052 - DNA, 33 bp, Homo sapien
ataatctctttcctgagaagtctgtgaatctgt

SEQ ID NO: 333053 - DNA, 33 bp, Homo sapien
cttaaatagaaagaaacggagtaagtactaatt

SEQ ID NO: 333054 - DNA, 33 bp, Homo sapien
cttaaatagaaagaaatggagtaagtactaatt

SEQ ID NO: 333055 - DNA, 33 bp, Homo sapien
tgcccagccttgcgaaatgatcaccttgctgct

SEQ ID NO: 333056 - DNA, 33 bp, Homo sapien
tgcccagccttgcgaagtgatcaccttgctgct

SEQ ID NO: 333057 - DNA, 33 bp, Homo sapien
aaaaaaataaaattcacagcagcaaggtgatca

SEQ ID NO: 333058 - DNA, 33 bp, Homo sapien
aaaaaaataaaattcatagcagcaaggtgatca

SEQ ID NO: 333059 - DNA, 33 bp, Homo sapien
ggatggctatcataaaaaagatggcaatgacaa

SEQ ID NO: 333060 - DNA, 33 bp, Homo sapien
ggatggctatcataaacaagatggcaatgacaa

SEQ ID NO: 333061 - DNA, 33 bp, Homo sapien
caattagttcttgatacagcagtagtaaagatt

SEQ ID NO: 333062 - DNA, 33 bp, Homo sapien
caattagttcttgatatagcagtagtaaagatt

SEQ ID NO: 333063 - DNA, 33 bp, Homo sapien
tgagcacagtaaagtaaactgcagccgtactca

SEQ ID NO: 333064 - DNA, 33 bp, Homo sapien
tgagcacagtaaagtagactgcagccgtactca

SEQ ID NO: 333065 - DNA, 33 bp, Homo sapien
cattcacagacccatcactgatgaacttccact

SEQ ID NO: 333066 - DNA, 33 bp, Homo sapien
cattcacagacccatcgctgatgaacttccact

SEQ ID NO: 333067 - DNA, 33 bp, Homo sapien
aacagcaggccttatcacatattcttacagcat

SEQ ID NO: 333068 - DNA, 33 bp, Homo sapien
aacagcaggccttatcgcatattcttacagcat

SEQ ID NO: 333069 - DNA, 33 bp, Homo sapien
tattctccacctaaacaatgcaaaaaccttagt

SEQ ID NO: 333070 - DNA, 33 bp, Homo sapien
tattctccacctaaacgatgcaaaaaccttagt

SEQ ID NO: 333071 - DNA, 33 bp, Homo sapien
aatgatttgttattgaaatctgtaggctatcct

SEQ ID NO: 333072 - DNA, 33 bp, Homo sapien
aatgatttgttattgacatctgtaggctatcct

SEQ ID NO: 333073 - DNA, 33 bp, Homo sapien
aggacatggtttcagccacaaataaacagcatg

SEQ ID NO: 333074 - DNA, 33 bp, Homo sapien
aggacatggtttcagctacaaataaacagcatg

SEQ ID NO: 333075 - DNA, 33 bp, Homo sapien
atgctaggtcttggcacggaagtggaacactga

SEQ ID NO: 333076 - DNA, 33 bp, Homo sapien
atgctaggtcttggcatggaagtggaacactga

SEQ ID NO: 333077 - DNA, 33 bp, Homo sapien
caaaagtctcttacgacctttagataaactact

SEQ ID NO: 333078 - DNA, 33 bp, Homo sapien
caaaagtctcttacgatctttagataaactact

SEQ ID NO: 333079 - DNA, 33 bp, Homo sapien
aaaagtcacatgcagcaaggatgaagacacagg

SEQ ID NO: 333080 - DNA, 33 bp, Homo sapien
aaaagtcacatgcagcgaggatgaagacacagg

SEQ ID NO: 333081 - DNA, 33 bp, Homo sapien; identical to SEQ ID NO: 333079

SEQ ID NO: 333082 - DNA, 33 bp, Homo sapien; identical to SEQ ID NO: 333080

SEQ ID NO: 333083 - DNA, 33 bp, Homo sapien
atcatattctcccatccgagatttaacaatgca

SEQ ID NO: 333084 - DNA, 33 bp, Homo sapien
atcatattctcccatctgagatttaacaatgca

SEQ ID NO: 333085 - DNA, 33 bp, Homo sapien
ggagattagccttgcactctttatgtgtagttg

SEQ ID NO: 333086 - DNA, 33 bp, Homo sapien
ggagattagccttgcattctttatgtgtagttg

SEQ ID NO: 333087 - DNA, 33 bp, Homo sapien
ttcaaacagataggacagcggttactaagtcct

SEQ ID NO: 333088 - DNA, 33 bp, Homo sapien
ttcaaacagataggacggcggttactaagtcct

SEQ ID NO: 333089 - DNA, 33 bp, Homo sapien
atgcagtttgagtagacagaaggctggccaagg

SEQ ID NO: 333090 - DNA, 33 bp, Homo sapien
atgcagtttgagtagatagaaggctggccaagg

SEQ ID NO: 333091 - DNA, 33 bp, Homo sapien
tgacttagggttggtgaattaattggaatgtat

SEQ ID NO: 333092 - DNA, 33 bp, Homo sapien
tgacttagggttggtggattaattggaatgtat

SEQ ID NO: 333093 - DNA, 33 bp, Homo sapien
attcaaaacgtgcatacaccaaacaaacaaaga

SEQ ID NO: 333094 - DNA, 33 bp, Homo sapien
attcaaaacgtgcatataccaaacaaacaaaga

SEQ ID NO: 333095 - DNA, 33 bp, Homo sapien
ccaatcaaaatttacaaaacactccagccaata

SEQ ID NO: 333096 - DNA, 33 bp, Homo sapien
ccaatcaaaatttacagaacactccagccaata

SEQ ID NO: 333097 - DNA, 33 bp, Homo sapien
atgttgtgaacatgaagtgtgtattaatacagg

SEQ ID NO: 333098 - DNA, 33 bp, Homo sapien
atgttgtgaacatgaattgtgtattaatacagg

SEQ ID NO: 333099 - DNA, 33 bp, Homo sapien
ggataaatgttgtagaaagatcaattaaagtga

SEQ ID NO: 333100 - DNA, 33 bp, Homo sapien
ggataaatgttgtagagagatcaattaaagtga

SEQ ID NO: 333101 - DNA, 33 bp, Homo sapien; identical to SEQ ID NO: 333099

SEQ ID NO: 333102 - DNA, 33 bp, Homo sapien; identical to SEQ ID NO: 333100

SEQ ID NO: 333103 - DNA, 33 bp, Homo sapien; identical to SEQ ID NO: 333099

SEQ ID NO: 333104 - DNA, 33 bp, Homo sapien; identical to SEQ ID NO: 333100

SEQ ID NO: 333105 - DNA, 33 bp, Homo sapien
aaaatttaccatattaaccacttgtaagtatac

SEQ ID NO: 333106 - DNA, 33 bp, Homo sapien
aaaatttaccatattagccacttgtaagtatac

SEQ ID NO: 333107 - DNA, 33 bp, Homo sapien
ccatcctttgactttcacagcttctgatggctg

SEQ ID NO: 333108 - DNA, 33 bp, Homo sapien
ccatcctttgactttcgcagcttctgatggctg

SEQ ID NO: 333109 - DNA, 33 bp, Homo sapien
ttcagcactgtgcttccgaagattgtttaataa

SEQ ID NO: 333110 - DNA, 33 bp, Homo sapien
ttcagcactgtgcttctgaagattgtttaataa

SEQ ID NO: 333111 - DNA, 33 bp, Homo sapien
actcatgctttcatccaagtgttcagtatcata

SEQ ID NO: 333112 - DNA, 33 bp, Homo sapien
actcatgctttcatccgagtgttcagtatcata

SEQ ID NO: 333113 - DNA, 33 bp, Homo sapien
aaacaaatcctgagaaccatataggagtgaatg

SEQ ID NO: 333114 - DNA, 33 bp, Homo sapien
aaacaaatcctgagaagcatataggagtgaatg

SEQ ID NO: 333115 - DNA, 33 bp, Homo sapien
ctcatcttcctaccacaccaaacgagggagctg

SEQ ID NO: 333116 - DNA, 33 bp, Homo sapien
ctcatcttcctaccacgccaaacgagggagctg

SEQ ID NO: 333117 - DNA, 33 bp, Homo sapien
aataatggtaacgatacactgtatgattatgac

SEQ ID NO: 333118 - DNA, 33 bp, Homo sapien
aataatggtaacgatatactgtatgattatgac

SEQ ID NO: 333119 - DNA, 33 bp, Homo sapien
ccctgtttgggaatcaaggtgaagccacctccc

SEQ ID NO: 333120 - DNA, 33 bp, Homo sapien
ccctgtttgggaatcatggtgaagccacctccc

SEQ ID NO: 333121 - DNA, 33 bp, Homo sapien
ctggttgatactccctaaatcacaggtcgcctt

SEQ ID NO: 333122 - DNA, 33 bp, Homo sapien
ctggttgatactccctgaatcacaggtcgcctt

SEQ ID NO: 333123 - DNA, 33 bp, Homo sapien
tggtttcctaacccaccgaacaggattaactgc

SEQ ID NO: 333124 - DNA, 33 bp, Homo sapien
tggtttcctaacccactgaacaggattaactgc

SEQ ID NO: 333125 - DNA, 33 bp, Homo sapien
agagctctgggtgaccacaattcatgttctttt

SEQ ID NO: 333126 - DNA, 33 bp, Homo sapien
agagctctgggtgaccgcaattcatgttctttt

SEQ ID NO: 333127 - DNA, 33 bp, Homo sapien
gccatcctctattttgcacgctcagtcacccca

SEQ ID NO: 333128 - DNA, 33 bp, Homo sapien
gccatcctctattttgtacgctcagtcacccca

SEQ ID NO: 333129 - DNA, 33 bp, Homo sapien
actgtccatccggtaccctctgcctgggatgcc

SEQ ID NO: 333130 - DNA, 33 bp, Homo sapien
actgtccatccggtactctctgcctgggatgcc

SEQ ID NO: 333131 - DNA, 33 bp, Homo sapien
tgggaaggtgtcctgcagaagggcggaagtaga

SEQ ID NO: 333132 - DNA, 33 bp, Homo sapien
tgggaaggtgtcctgcggaagggcggaagtaga

SEQ ID NO: 333133 - DNA, 33 bp, Homo sapien
agagtcctgacagtgacgccgcggctggctgtg

SEQ ID NO: 333134 - DNA, 33 bp, Homo sapien
agagtcctgacagtgatgccgcggctggctgtg

SEQ ID NO: 333135 - DNA, 33 bp, Homo sapien
aaggtttctgtttggcacggggacgaccagagg

SEQ ID NO: 333136 - DNA, 33 bp, Homo sapien
aaggtttctgtttggcgcggggacgaccagagg

SEQ ID NO: 333137 - DNA, 33 bp, Homo sapien
gtcggctgaatacttaggctctaccagtctcct

SEQ ID NO: 333138 - DNA, 33 bp, Homo sapien
gtcggctgaatacttatgctctaccagtctcct

SEQ ID NO: 333139 - DNA, 33 bp, Homo sapien
aataggcttgttatccactgcttcaacccgtca

SEQ ID NO: 333140 - DNA, 33 bp, Homo sapien
aataggcttgttatccgctgcttcaacccgtca

SEQ ID NO: 333141 - DNA, 33 bp, Homo sapien
tctctgaatgacaaacactctttaaattggaat

SEQ ID NO: 333142 - DNA, 33 bp, Homo sapien
tctctgaatgacaaacgctctttaaattggaat

SEQ ID NO: 333143 - DNA, 33 bp, Homo sapien
agtcctggtactgagtaaaaagtcaatcgttca

SEQ ID NO: 333144 - DNA, 33 bp, Homo sapien
agtcctggtactgagtgaaaagtcaatcgttca

SEQ ID NO: 333145 - DNA, 33 bp, Homo sapien
gtcacatagtagaaagaaaaacttggacaactt

SEQ ID NO: 333146 - DNA, 33 bp, Homo sapien
gtcacatagtagaaaggaaaacttggacaactt

SEQ ID NO: 333147 - DNA, 33 bp, Homo sapien
agccacagctttctcaaccgtacttcctgttct

SEQ ID NO: 333148 - DNA, 33 bp, Homo sapien
agccacagctttctcagccgtacttcctgttct

SEQ ID NO: 333149 - DNA, 33 bp, Homo sapien
cagctctgttcaagaaatgttattgtagttgct

SEQ ID NO: 333150 - DNA, 33 bp, Homo sapien
cagctctgttcaagaagtgttattgtagttgct

SEQ ID NO: 333151 - DNA, 33 bp, Homo sapien
cccacacagaattccaagttatctcctttttat

SEQ ID NO: 333152 - DNA, 33 bp, Homo sapien
cccacacagaattccaggttatctcctttttat

SEQ ID NO: 333153 - DNA, 33 bp, Homo sapien
gattccacttgctctacaacccaggcacagtgc

SEQ ID NO: 333154 - DNA, 33 bp, Homo sapien
gattccacttgctctataacccaggcacagtgc

SEQ ID NO: 333155 - DNA, 33 bp, Homo sapien
acatgtatatcggcaacaataggtagcactcga

SEQ ID NO: 333156 - DNA, 33 bp, Homo sapien
acatgtatatcggcaataataggtagcactcga

SEQ ID NO: 333157 - DNA, 33 bp, Homo sapien
catcatcctggctctccatcaggaacctcactg

SEQ ID NO: 333158 - DNA, 33 bp, Homo sapien
catcatcctggctctctatcaggaacctcactg

SEQ ID NO: 333159 - DNA, 33 bp, Homo sapien
atagtttgagaatgccagcttgcacactaatgt

SEQ ID NO: 333160 - DNA, 33 bp, Homo sapien
atagtttgagaatgccggcttgcacactaatgt

SEQ ID NO: 333161 - DNA, 33 bp, Homo sapien
agcctctttcctcaaacagcaagagtctagact

SEQ ID NO: 333162 - DNA, 33 bp, Homo sapien
agcctctttcctcaaatagcaagagtctagact

SEQ ID NO: 333163 - DNA, 33 bp, Homo sapien
gccaggtcccaaaaccacgtgtgcagattcctc

SEQ ID NO: 333164 - DNA, 33 bp, Homo sapien
gccaggtcccaaaaccgcgtgtgcagattcctc

SEQ ID NO: 333165 - DNA, 33 bp, Homo sapien
gagattccggcgcacactggagttcgagcagcc

SEQ ID NO: 333166 - DNA, 33 bp, Homo sapien
gagattccggcgcacattggagttcgagcagcc

SEQ ID NO: 333167 - DNA, 33 bp, Homo sapien
ccacctgattaacaaacgaacaaagggcttgaa

SEQ ID NO: 333168 - DNA, 33 bp, Homo sapien
ccacctgattaacaaatgaacaaagggcttgaa

SEQ ID NO: 333169 - DNA, 33 bp, Homo sapien
ttgtgatttcgacttgcaattctctaacgattt

SEQ ID NO: 333170 - DNA, 33 bp, Homo sapien
ttgtgatttcgacttggaattctctaacgattt

SEQ ID NO: 333171 - DNA, 33 bp, Homo sapien
atttttgaaaatccacccactgtttggaaactt

SEQ ID NO: 333172 - DNA, 33 bp, Homo sapien
atttttgaaaatccactcactgtttggaaactt

SEQ ID NO: 333173 - DNA, 33 bp, Homo sapien
gcttatttttaaagtgcacgctgaacttatatg

SEQ ID NO: 333174 - DNA, 33 bp, Homo sapien
gcttatttttaaagtgtacgctgaacttatatg

SEQ ID NO: 333175 - DNA, 33 bp, Homo sapien
agccctgagtgatgcaacttggataaggatggc

SEQ ID NO: 333176 - DNA, 33 bp, Homo sapien
agccctgagtgatgcagcttggataaggatggc

SEQ ID NO: 333177 - DNA, 33 bp, Homo sapien
aatgctgatgatgtcaagcctagctgaacgctg

SEQ ID NO: 333178 - DNA, 33 bp, Homo sapien
aatgctgatgatgtcaggcctagctgaacgctg

SEQ ID NO: 333179 - DNA, 33 bp, Homo sapien
agaacagcaaataccgaccaggccagaagtgca

SEQ ID NO: 333180 - DNA, 33 bp, Homo sapien
agaacagcaaataccggccaggccagaagtgca

SEQ ID NO: 333181 - DNA, 33 bp, Homo sapien
tcctcatctcgaaataagcaaagggcgatgatc

SEQ ID NO: 333182 - DNA, 33 bp, Homo sapien
tcctcatctcgaaatacgcaaagggcgatgatc

SEQ ID NO: 333183 - DNA, 33 bp, Homo sapien
gatgtgggtttgaacaatcctggagaatgcttg

SEQ ID NO: 333184 - DNA, 33 bp, Homo sapien
gatgtgggtttgaacagtcctggagaatgcttg

SEQ ID NO: 333185 - DNA, 33 bp, Homo sapien
aatggtgacttctgaaagtgacatcatttacct

SEQ ID NO: 333186 - DNA, 33 bp, Homo sapien
aatggtgacttctgaaggtgacatcatttacct

SEQ ID NO: 333187 - DNA, 33 bp, Homo sapien
acgaagaaggagataagtatttcatccagtcca

SEQ ID NO: 333188 - DNA, 33 bp, Homo sapien
acgaagaaggagataattatttcatccagtcca

SEQ ID NO: 333189 - DNA, 33 bp, Homo sapien
cctcccagctctccaaccgcaagatctctgtgt

SEQ ID NO: 333190 - DNA, 33 bp, Homo sapien
cctcccagctctccaatcgcaagatctctgtgt

SEQ ID NO: 333191 - DNA, 33 bp, Homo sapien
gaggggaaatggtcaacgttgatgtacggcatg

SEQ ID NO: 333192 - DNA, 33 bp, Homo sapien
gaggggaaatggtcaatgttgatgtacggcatg

SEQ ID NO: 333193 - DNA, 33 bp, Homo sapien
ttgctttggtctggtcaatacgaaaaatgagtt

SEQ ID NO: 333194 - DNA, 33 bp, Homo sapien
ttgctttggtctggtcgatacgaaaaatgagtt

SEQ ID NO: 333195 - DNA, 33 bp, Homo sapien
tcctccttttgccttacggcttgttgattcctt

SEQ ID NO: 333196 - DNA, 33 bp, Homo sapien
tcctccttttgccttatggcttgttgattcctt

SEQ ID NO: 333197 - DNA, 33 bp, Homo sapien
actcctgccacctttgaagaaaattatcctgaa

SEQ ID NO: 333198 - DNA, 33 bp, Homo sapien
actcctgccacctttggagaaaattatcctgaa

SEQ ID NO: 333199 - DNA, 33 bp, Homo sapien
tgtgttggaaatgacacggctttttctttgtga

SEQ ID NO: 333200 - DNA, 33 bp, Homo sapien
tgtgttggaaatgacatggctttttctttgtga

SEQ ID NO: 333201 - DNA, 33 bp, Homo sapien
ggcattttgtgccaaacatactggttctggttt

SEQ ID NO: 333202 - DNA, 33 bp, Homo sapien
ggcattttgtgccaaatatactggttctggttt

SEQ ID NO: 333203 - DNA, 33 bp, Homo sapien
tctctggtggcttgaaaacaatttcctataaat

SEQ ID NO: 333204 - DNA, 33 bp, Homo sapien
tctctggtggcttgaagacaatttcctataaat

SEQ ID NO: 333205 - DNA, 33 bp, Homo sapien
gatccaaaagaaaagcaagtccgagagagggtt

SEQ ID NO: 333206 - DNA, 33 bp, Homo sapien
gatccaaaagaaaagccagtccgagagagggtt

SEQ ID NO: 333207 - DNA, 33 bp, Homo sapien
gagaacagctgaaaggccagaggctgatctcga

SEQ ID NO: 333208 - DNA, 33 bp, Homo sapien
gagaacagctgaaaggtcagaggctgatctcga

SEQ ID NO: 333209 - DNA, 33 bp, Homo sapien
ggcagggcggcagatggacccggaaacccctga

SEQ ID NO: 333210 - DNA, 33 bp, Homo sapien
ggcagggcggcagatgtacccggaaacccctga

SEQ ID NO: 333211 - DNA, 33 bp, Homo sapien
catccgagactctttacggacgaccttctgttt

SEQ ID NO: 333212 - DNA, 33 bp, Homo sapien
catccgagactctttatggacgaccttctgttt

SEQ ID NO: 333213 - DNA, 33 bp, Homo sapien
gcaccttacagcgtctaaatgcgctgtccatat

SEQ ID NO: 333214 - DNA, 33 bp, Homo sapien
gcaccttacagcgtctgaatgcgctgtccatat

SEQ ID NO: 333215 - DNA, 33 bp, Homo sapien
ccttaagttctcatgacgtgcaaagctgcggtc

SEQ ID NO: 333216 - DNA, 33 bp, Homo sapien
ccttaagttctcatgaggtgcaaagctgcggtc

SEQ ID NO: 333217 - DNA, 33 bp, Homo sapien
ggaatggtgccttgaactggaaagtgttttggt

SEQ ID NO: 333218 - DNA, 33 bp, Homo sapien
ggaatggtgccttgaattggaaagtgttttggt

SEQ ID NO: 333219 - DNA, 33 bp, Homo sapien
ctgtaaatatcacatcaatttgaccaaacttac

SEQ ID NO: 333220 - DNA, 33 bp, Homo sapien
ctgtaaatatcacatccatttgaccaaacttac

SEQ ID NO: 333221 - DNA, 33 bp, Homo sapien
gagacagaaagagaccaaggcagaaagacacac

SEQ ID NO: 333222 - DNA, 33 bp, Homo sapien
gagacagaaagagaccgaggcagaaagacacac

SEQ ID NO: 333223 - DNA, 33 bp, Homo sapien
aacacagcctactgatcagaatgctactgagta

SEQ ID NO: 333224 - DNA, 33 bp, Homo sapien
aacacagcctactgattagaatgctactgagta

SEQ ID NO: 333225 - DNA, 33 bp, Homo sapien
acaggaagagcgttcactatttatgagatgtgt

SEQ ID NO: 333226 - DNA, 33 bp, Homo sapien
acaggaagagcgttcattatttatgagatgtgt

SEQ ID NO: 333227 - DNA, 33 bp, Homo sapien
ctcagggttcattagcaaatcaaaaatgcacag

SEQ ID NO: 333228 - DNA, 33 bp, Homo sapien
ctcagggttcattagccaatcaaaaatgcacag

SEQ ID NO: 333229 - DNA, 33 bp, Homo sapien
ccaactggaaaagaaccgatcttctaacacctc

SEQ ID NO: 333230 - DNA, 33 bp, Homo sapien
ccaactggaaaagaactgatcttctaacacctc

SEQ ID NO: 333231 - DNA, 33 bp, Homo sapien
gccatcctagagaacacgacagtggcagaaccc

SEQ ID NO: 333232 - DNA, 33 bp, Homo sapien
gccatcctagagaacatgacagtggcagaaccc

SEQ ID NO: 333233 - DNA, 33 bp, Homo sapien
agatggtctcctccgacgtcctgcagatggtga

SEQ ID NO: 333234 - DNA, 33 bp, Homo sapien
agatggtctcctccgatgtcctgcagatggtga

SEQ ID NO: 333235 - DNA, 33 bp, Homo sapien
atgaccatccacttcacggaggttttgttttgt

SEQ ID NO: 333236 - DNA, 33 bp, Homo sapien
atgaccatccacttcatggaggttttgttttgt

SEQ ID NO: 333237 - DNA, 33 bp, Homo sapien
gggccatttttatcaaacacaacctataactca

SEQ ID NO: 333238 - DNA, 33 bp, Homo sapien
gggccatttttatcaatcacaacctataactca

SEQ ID NO: 333239 - DNA, 33 bp, Homo sapien
gtcgaagtgcaatatagccttcattgagaagct

SEQ ID NO: 333240 - DNA, 33 bp, Homo sapien
gtcgaagtgcaatatatccttcattgagaagct

SEQ ID NO: 333241 - DNA, 33 bp, Homo sapien
attgcaaacagcataacaacaaagcttccacag

SEQ ID NO: 333242 - DNA, 33 bp, Homo sapien
attgcaaacagcataataacaaagcttccacag

SEQ ID NO: 333243 - DNA, 33 bp, Homo sapien
cctgtgttttcaatccaatcagacactcagatg

SEQ ID NO: 333244 - DNA, 33 bp, Homo sapien
cctgtgttttcaatccgatcagacactcagatg

SEQ ID NO: 333245 - DNA, 33 bp, Homo sapien
gttggtcattttgttacacccgagcgagttcca

SEQ ID NO: 333246 - DNA, 33 bp, Homo sapien
gttggtcattttgttatacccgagcgagttcca

SEQ ID NO: 333247 - DNA, 33 bp, Homo sapien
tattgctaatgagtcaataggaagaagaaagct

SEQ ID NO: 333248 - DNA, 33 bp, Homo sapien
tattgctaatgagtcagtaggaagaagaaagct

SEQ ID NO: 333249 - DNA, 33 bp, Homo sapien
tctgctgtcatatctgcacctgtgagcctgttc

SEQ ID NO: 333250 - DNA, 33 bp, Homo sapien
tctgctgtcatatctgtacctgtgagcctgttc

SEQ ID NO: 333251 - DNA, 33 bp, Homo sapien
tgatagttcagttttaaatttatgtcacaaaat

SEQ ID NO: 333252 - DNA, 33 bp, Homo sapien
tgatagttcagttttatatttatgtcacaaaat

SEQ ID NO: 333253 - DNA, 33 bp, Homo sapien
tgcctatgattgatgaacacatgaaaagatgct

SEQ ID NO: 333254 - DNA, 33 bp, Homo sapien
tgcctatgattgatgagcacatgaaaagatgct

SEQ ID NO: 333255 - DNA, 33 bp, Homo sapien
cttatccttatttccacgtctacctgagggatg

SEQ ID NO: 333256 - DNA, 33 bp, Homo sapien
cttatccttatttccatgtctacctgagggatg

SEQ ID NO: 333257 - DNA, 33 bp, Homo sapien
agtgatcacacacaataaggaataaaatctgct

SEQ ID NO: 333258 - DNA, 33 bp, Homo sapien
agtgatcacacacaatgaggaataaaatctgct

SEQ ID NO: 333259 - DNA, 33 bp, Homo sapien
gattatcttccctcctcaatgatgcctgataac

SEQ ID NO: 333260 - DNA, 33 bp, Homo sapien
gattatcttccctccttaatgatgcctgataac

SEQ ID NO: 333261 - DNA, 33 bp, Homo sapien
ttcaaataatttgcaaaagcagtccacacaact

SEQ ID NO: 333262 - DNA, 33 bp, Homo sapien
ttcaaataatttgcaagagcagtccacacaact

SEQ ID NO: 333263 - DNA, 33 bp, Homo sapien
aaccaatccactatcccctctgccacaccatcc

SEQ ID NO: 333264 - DNA, 33 bp, Homo sapien
aaccaatccactatcctctctgccacaccatcc

SEQ ID NO: 333265 - DNA, 33 bp, Homo sapien
tcctgttctactggacccccataccagacatct

SEQ ID NO: 333266 - DNA, 33 bp, Homo sapien
tcctgttctactggactcccataccagacatct

SEQ ID NO: 333267 - DNA, 33 bp, Homo sapien
taagccaccacatcaacacatcgaaactggcag

SEQ ID NO: 333268 - DNA, 33 bp, Homo sapien
taagccaccacatcaatacatcgaaactggcag

SEQ ID NO: 333269 - DNA, 33 bp, Homo sapien
cattaaaagttgctaaaatcacagagaacacca

SEQ ID NO: 333270 - DNA, 33 bp, Homo sapien
cattaaaagttgctaacatcacagagaacacca

SEQ ID NO: 333271 - DNA, 33 bp, Homo sapien
ttaacactgttttgagcatttgagatagatcag

SEQ ID NO: 333272 - DNA, 33 bp, Homo sapien
ttaacactgttttgaggatttgagatagatcag

SEQ ID NO: 333273 - DNA, 33 bp, Homo sapien
aagaaagctggttgtacaataaatataggcata

SEQ ID NO: 333274 - DNA, 33 bp, Homo sapien
aagaaagctggttgtataataaatataggcata

SEQ ID NO: 333275 - DNA, 33 bp, Homo sapien
ttgtatacagacataactcagagatattgcagg

SEQ ID NO: 333276 - DNA, 33 bp, Homo sapien
ttgtatacagacataattcagagatattgcagg

SEQ ID NO: 333277 - DNA, 33 bp, Homo sapien
ctattagttgtgatcacggcattgtgactatat

SEQ ID NO: 333278 - DNA, 33 bp, Homo sapien
ctattagttgtgatcatggcattgtgactatat

SEQ ID NO: 333279 - DNA, 33 bp, Homo sapien
cactgtcgaggtcataagaagtgaggaaagtct

SEQ ID NO: 333280 - DNA, 33 bp, Homo sapien
cactgtcgaggtcatacgaagtgaggaaagtct

SEQ ID NO: 333281 - DNA, 33 bp, Homo sapien
ggattctaagggctacaatgaaagtctctgcta

SEQ ID NO: 333282 - DNA, 33 bp, Homo sapien
ggattctaagggctacgatgaaagtctctgcta

SEQ ID NO: 333283 - DNA, 33 bp, Homo sapien
tcttttggaaaacaaactcatagtaatttgtgg

SEQ ID NO: 333284 - DNA, 33 bp, Homo sapien
tcttttggaaaacaaagtcatagtaatttgtgg

SEQ ID NO: 333285 - DNA, 33 bp, Homo sapien
tgaaaggttcgcaaaactagctctgaagaagtg

SEQ ID NO: 333286 - DNA, 33 bp, Homo sapien
tgaaaggttcgcaaaagtagctctgaagaagtg

SEQ ID NO: 333287 - DNA, 33 bp, Homo sapien
tctttttttctggatccccatcaaatgcaccag

SEQ ID NO: 333288 - DNA, 33 bp, Homo sapien
tctttttttctggatctccatcaaatgcaccag

SEQ ID NO: 333289 - DNA, 33 bp, Homo sapien
tcagcaaaagctactggagaaaaacactccaag

SEQ ID NO: 333290 - DNA, 33 bp, Homo sapien
tcagcaaaagctactgtagaaaaacactccaag

SEQ ID NO: 333291 - DNA, 33 bp, Homo sapien
tttttaggtctttgccactttttctgatgtcat

SEQ ID NO: 333292 - DNA, 33 bp, Homo sapien
tttttaggtctttgcctctttttctgatgtcat

SEQ ID NO: 333293 - DNA, 33 bp, Homo sapien
ttggtttcttagccaactctttggggtttttgg

SEQ ID NO: 333294 - DNA, 33 bp, Homo sapien
ttggtttcttagccaattctttggggtttttgg

SEQ ID NO: 333295 - DNA, 33 bp, Homo sapien
ctacagttggctggaaaaaaggaggatttggga

SEQ ID NO: 333296 - DNA, 33 bp, Homo sapien
ctacagttggctggaacaaaggaggatttggga

SEQ ID NO: 333297 - DNA, 33 bp, Homo sapien
gctgccttcagtgacacggggacagctgcctcc

SEQ ID NO: 333298 - DNA, 33 bp, Homo sapien
gctgccttcagtgacatggggacagctgcctcc

SEQ ID NO: 333299 - DNA, 33 bp, Homo sapien
tgacagccttgtccacacgctcttgtctccacc

SEQ ID NO: 333300 - DNA, 33 bp, Homo sapien
tgacagccttgtccactcgctcttgtctccacc

SEQ ID NO: 333301 - DNA, 33 bp, Homo sapien
ctacttcccatgtctaccagatgaaatcttacc

SEQ ID NO: 333302 - DNA, 33 bp, Homo sapien
ctacttcccatgtctagcagatgaaatcttacc

SEQ ID NO: 333303 - DNA, 33 bp, Homo sapien
cactgtagaattttgagagtttaatacacttca

SEQ ID NO: 333304 - DNA, 33 bp, Homo sapien
cactgtagaattttgatagtttaatacacttca

SEQ ID NO: 333305 - DNA, 33 bp, Homo sapien
taactacaactaggaagggatcaaattctccta

SEQ ID NO: 333306 - DNA, 33 bp, Homo sapien
taactacaactaggaatggatcaaattctccta

SEQ ID NO: 333307 - DNA, 33 bp, Homo sapien
taagtgagaacgggcaatcctgttttcatgccc

SEQ ID NO: 333308 - DNA, 33 bp, Homo sapien
taagtgagaacgggcagtcctgttttcatgccc

SEQ ID NO: 333309 - DNA, 33 bp, Homo sapien
aggatgacgccttcacaatgggactggtagctc

SEQ ID NO: 333310 - DNA, 33 bp, Homo sapien
aggatgacgccttcacgatgggactggtagctc

SEQ ID NO: 333311 - DNA, 33 bp, Homo sapien
acacaggtccaaataccaaggccaaatagattg

SEQ ID NO: 333312 - DNA, 33 bp, Homo sapien
acacaggtccaaatacgaaggccaaatagattg

SEQ ID NO: 333313 - DNA, 33 bp, Homo sapien
tagccatgaaattaccacatcatgaaaccttca

SEQ ID NO: 333314 - DNA, 33 bp, Homo sapien
tagccatgaaattaccgcatcatgaaaccttca

SEQ ID NO: 333315 - DNA, 33 bp, Homo sapien
tataagttccatgcaactctaattaaaatacca

SEQ ID NO: 333316 - DNA, 33 bp, Homo sapien
tataagttccatgcaattctaattaaaatacca

SEQ ID NO: 333317 - DNA, 33 bp, Homo sapien
aatgcgtagacctactcaattttctaaagcaag

SEQ ID NO: 333318 - DNA, 33 bp, Homo sapien
aatgcgtagacctactgaattttctaaagcaag

SEQ ID NO: 333319 - DNA, 33 bp, Homo sapien
gcgtgttaaataagggaagagtacaagacaact

SEQ ID NO: 333320 - DNA, 33 bp, Homo sapien
gcgtgttaaataagggtagagtacaagacaact

SEQ ID NO: 333321 - DNA, 33 bp, Homo sapien
ttgagaatggaaaaataacaacagcaattaata

SEQ ID NO: 333322 - DNA, 33 bp, Homo sapien
ttgagaatggaaaaatgacaacagcaattaata

SEQ ID NO: 333323 - DNA, 33 bp, Homo sapien
acagctaatgtaaaaacagatctgggtatgtca

SEQ ID NO: 333324 - DNA, 33 bp, Homo sapien
acagctaatgtaaaaatagatctgggtatgtca

SEQ ID NO: 333325 - DNA, 33 bp, Homo sapien
ccagcaaagcaggtgacgtttttaatgggttac

SEQ ID NO: 333326 - DNA, 33 bp, Homo sapien
ccagcaaagcaggtgatgtttttaatgggttac

SEQ ID NO: 333327 - DNA, 33 bp, Homo sapien
gccgttaccaaaaggcactcctagcgagccagg

SEQ ID NO: 333328 - DNA, 33 bp, Homo sapien
gccgttaccaaaaggcgctcctagcgagccagg

SEQ ID NO: 333329 - DNA, 33 bp, Homo sapien
aagccacccacataccccatctatacaataggg

SEQ ID NO: 333330 - DNA, 33 bp, Homo sapien
aagccacccacatacctcatctatacaataggg

SEQ ID NO: 333331 - DNA, 33 bp, Homo sapien
ggagccgtgtcagtaaaaccaggaacctgggga

SEQ ID NO: 333332 - DNA, 33 bp, Homo sapien
ggagccgtgtcagtaagaccaggaacctgggga

SEQ ID NO: 333333 - DNA, 33 bp, Homo sapien
ttaaggctgctcatagcaattcacatatccatg

SEQ ID NO: 333334 - DNA, 33 bp, Homo sapien
ttaaggctgctcatagtaattcacatatccatg

SEQ ID NO: 333335 - DNA, 33 bp, Homo sapien
aaagaaccaaaaagcacgtcattcacctgatgg

SEQ ID NO: 333336 - DNA, 33 bp, Homo sapien
aaagaaccaaaaagcatgtcattcacctgatgg

SEQ ID NO: 333337 - DNA, 33 bp, Homo sapien
aattcttttgacttgcactccttgtttgtaatt

SEQ ID NO: 333338 - DNA, 33 bp, Homo sapien
aattcttttgacttgccctccttgtttgtaatt

SEQ ID NO: 333339 - DNA, 33 bp, Homo sapien
gcctccacaaatgaccactttacaaagatcaca

SEQ ID NO: 333340 - DNA, 33 bp, Homo sapien
gcctccacaaatgaccgctttacaaagatcaca

SEQ ID NO: 333341 - DNA, 33 bp, Homo sapien
ttggttagcagtgtcaaatgccatggagttctg

SEQ ID NO: 333342 - DNA, 33 bp, Homo sapien
ttggttagcagtgtcagatgccatggagttctg

SEQ ID NO: 333343 - DNA, 33 bp, Homo sapien
ccattcttcagtgatcgcaacattctctcttaa

SEQ ID NO: 333344 - DNA, 33 bp, Homo sapien
ccattcttcagtgatctcaacattctctcttaa

SEQ ID NO: 333345 - DNA, 33 bp, Homo sapien
gacaacctccatgaaacgatgtgtttgagctga

SEQ ID NO: 333346 - DNA, 33 bp, Homo sapien
gacaacctccatgaaaggatgtgtttgagctga

SEQ ID NO: 333347 - DNA, 33 bp, Homo sapien
attaaaaccgtgctttcaaagaatattcagtgg

SEQ ID NO: 333348 - DNA, 33 bp, Homo sapien
attaaaaccgtgctttgaaagaatattcagtgg

SEQ ID NO: 333349 - DNA, 33 bp, Homo sapien
ttaacatcaaatggaaaaaatctgcagtggact

SEQ ID NO: 333350 - DNA, 33 bp, Homo sapien
ttaacatcaaatggaacaaatctgcagtggact

SEQ ID NO: 333351 - DNA, 33 bp, Homo sapien
catgcttgaacacaaacgtttttttctggtttg

SEQ ID NO: 333352 - DNA, 33 bp, Homo sapien
catgcttgaacacaaatgtttttttctggtttg

SEQ ID NO: 333353 - DNA, 33 bp, Homo sapien
tgtcttttcttaatcactcacatttaggtacca

SEQ ID NO: 333354 - DNA, 33 bp, Homo sapien
tgtcttttcttaatcattcacatttaggtacca

SEQ ID NO: 333355 - DNA, 33 bp, Homo sapien
aggctggaagagcatccgaggtggttccacccc

SEQ ID NO: 333356 - DNA, 33 bp, Homo sapien
aggctggaagagcatctgaggtggttccacccc

SEQ ID NO: 333357 - DNA, 33 bp, Homo sapien
agaggacaaatcctgcaagattctgcttctttt

SEQ ID NO: 333358 - DNA, 33 bp, Homo sapien
agaggacaaatcctgcgagattctgcttctttt

SEQ ID NO: 333359 - DNA, 33 bp, Homo sapien
agttggtgttgaatgactacagagtttcagctt

SEQ ID NO: 333360 - DNA, 33 bp, Homo sapien
agttggtgttgaatgagtacagagtttcagctt

SEQ ID NO: 333361 - DNA, 33 bp, Homo sapien
gcaggtctcgataatcaaaacccaccttaaaaa

SEQ ID NO: 333362 - DNA, 33 bp, Homo sapien
gcaggtctcgataatccaaacccaccttaaaaa

SEQ ID NO: 333363 - DNA, 33 bp, Homo sapien
actcctagtaaccgtcacaagcccgtctgtaac

SEQ ID NO: 333364 - DNA, 33 bp, Homo sapien
actcctagtaaccgtcgcaagcccgtctgtaac

SEQ ID NO: 333365 - DNA, 33 bp, Homo sapien
gaatgtgtcggcagcactgactctaagacccga

SEQ ID NO: 333366 - DNA, 33 bp, Homo sapien
gaatgtgtcggcagcattgactctaagacccga

SEQ ID NO: 333367 - DNA, 33 bp, Homo sapien
tggtgggaacactaaacactacagccactttgg

SEQ ID NO: 333368 - DNA, 33 bp, Homo sapien
tggtgggaacactaaatactacagccactttgg

SEQ ID NO: 333369 - DNA, 33 bp, Homo sapien
aatctccttatgagaacagacctgcttctgcaa

SEQ ID NO: 333370 - DNA, 33 bp, Homo sapien
aatctccttatgagaatagacctgcttctgcaa

SEQ ID NO: 333371 - DNA, 33 bp, Homo sapien
cctctgcaggaaacccacttaacacatgggagc

SEQ ID NO: 333372 - DNA, 33 bp, Homo sapien
cctctgcaggaaacccgcttaacacatgggagc

SEQ ID NO: 333373 - DNA, 33 bp, Homo sapien
tttgggaatcttatgtaaaaatgagccctcctc

SEQ ID NO: 333374 - DNA, 33 bp, Homo sapien
tttgggaatcttatgtcaaaatgagccctcctc

SEQ ID NO: 333375 - DNA, 33 bp, Homo sapien
tggcttcaatatctgacagtttaccagtggatt

SEQ ID NO: 333376 - DNA, 33 bp, Homo sapien
tggcttcaatatctgagagtttaccagtggatt

SEQ ID NO: 333377 - DNA, 33 bp, Homo sapien
tattagatgctcacaaaatagacgaacctcaaa

SEQ ID NO: 333378 - DNA, 33 bp, Homo sapien
tattagatgctcacaacatagacgaacctcaaa

SEQ ID NO: 333379 - DNA, 33 bp, Homo sapien
tgtatattagcaaaaactcagttcaagtggcac

SEQ ID NO: 333380 - DNA, 33 bp, Homo sapien
tgtatattagcaaaaattcagttcaagtggcac

SEQ ID NO: 333381 - DNA, 33 bp, Homo sapien
aattattctgctccaaatatcaattaatattga

SEQ ID NO: 333382 - DNA, 33 bp, Homo sapien
aattattctgctccaagtatcaattaatattga

SEQ ID NO: 333383 - DNA, 33 bp, Homo sapien
atgctgtcaatgctaaaaggacacaaaaggtca

SEQ ID NO: 333384 - DNA, 33 bp, Homo sapien
atgctgtcaatgctaagaggacacaaaaggtca

SEQ ID NO: 333385 - DNA, 33 bp, Homo sapien
tctagtactatggataagcaatggaaaacatct

SEQ ID NO: 333386 - DNA, 33 bp, Homo sapien
tctagtactatggataggcaatggaaaacatct

SEQ ID NO: 333387 - DNA, 33 bp, Homo sapien
tatctctcttggaccccgatttccattttttcg

SEQ ID NO: 333388 - DNA, 33 bp, Homo sapien
tatctctcttggaccctgatttccattttttcg

SEQ ID NO: 333389 - DNA, 33 bp, Homo sapien
tcctcaccaacaagatcataaacaaaataaaac

SEQ ID NO: 333390 - DNA, 33 bp, Homo sapien
tcctcaccaacaagattataaacaaaataaaac

SEQ ID NO: 333391 - DNA, 33 bp, Homo sapien
ccctattactcttccagaggcagaaattgtgag

SEQ ID NO: 333392 - DNA, 33 bp, Homo sapien
ccctattactcttccataggcagaaattgtgag

SEQ ID NO: 333393 - DNA, 33 bp, Homo sapien
ggcagcctcacctcccactgttcttcagtaacc

SEQ ID NO: 333394 - DNA, 33 bp, Homo sapien
ggcagcctcacctcccgctgttcttcagtaacc

SEQ ID NO: 333395 - DNA, 33 bp, Homo sapien
ttggaaatgtagggacagtattgtgagatccat

SEQ ID NO: 333396 - DNA, 33 bp, Homo sapien
ttggaaatgtagggactgtattgtgagatccat

SEQ ID NO: 333397 - DNA, 33 bp, Homo sapien
tgctggagataacttacggaaggcttcttaaca

SEQ ID NO: 333398 - DNA, 33 bp, Homo sapien
tgctggagataacttatggaaggcttcttaaca

SEQ ID NO: 333399 - DNA, 33 bp, Homo sapien
tgttggaagtgatgcaaacttagaaaggagtat

SEQ ID NO: 333400 - DNA, 33 bp, Homo sapien
tgttggaagtgatgcagacttagaaaggagtat

SEQ ID NO: 333401 - DNA, 33 bp, Homo sapien
attaagtattaaattacatggtcacaaggtccc

SEQ ID NO: 333402 - DNA, 33 bp, Homo sapien
attaagtattaaattatatggtcacaaggtccc

SEQ ID NO: 333403 - DNA, 33 bp, Homo sapien
tacttctgtgttcaaaaatagagccacctgctt

SEQ ID NO: 333404 - DNA, 33 bp, Homo sapien
tacttctgtgttcaaacatagagccacctgctt

SEQ ID NO: 333405 - DNA, 33 bp, Homo sapien
tcagctcgagggtgcgaaagcgaatattataag

SEQ ID NO: 333406 - DNA, 33 bp, Homo sapien
tcagctcgagggtgcggaagcgaatattataag

SEQ ID NO: 333407 - DNA, 33 bp, Homo sapien
gaaaagtgcctgtgaaagacaaagtgtcacctg

SEQ ID NO: 333408 - DNA, 33 bp, Homo sapien
gaaaagtgcctgtgaaggacaaagtgtcacctg

SEQ ID NO: 333409 - DNA, 33 bp, Homo sapien
cacaataaaaagagtgcatcaatgtttttcggt

SEQ ID NO: 333410 - DNA, 33 bp, Homo sapien
cacaataaaaagagtggatcaatgtttttcggt

SEQ ID NO: 333411 - DNA, 33 bp, Homo sapien
tgctatgtttaaagcaatatgtctccatctgat

SEQ ID NO: 333412 - DNA, 33 bp, Homo sapien
tgctatgtttaaagcagtatgtctccatctgat

SEQ ID NO: 333413 - DNA, 33 bp, Homo sapien
cctgaattcatcatcacagaagtgagtcctggc

SEQ ID NO: 333414 - DNA, 33 bp, Homo sapien
cctgaattcatcatcatagaagtgagtcctggc

SEQ ID NO: 333415 - DNA, 33 bp, Homo sapien
aaaaatgtgtccagcaacaaaggaggactcaaa

SEQ ID NO: 333416 - DNA, 33 bp, Homo sapien
aaaaatgtgtccagcatcaaaggaggactcaaa

SEQ ID NO: 333417 - DNA, 33 bp, Homo sapien
acactctacccaaaaactggacactcataggat

SEQ ID NO: 333418 - DNA, 33 bp, Homo sapien
acactctacccaaaaattggacactcataggat

SEQ ID NO: 333419 - DNA, 33 bp, Homo sapien
tagaagacccatgcaccggtaagttttaccact

SEQ ID NO: 333420 - DNA, 33 bp, Homo sapien
tagaagacccatgcactggtaagttttaccact

SEQ ID NO: 333421 - DNA, 33 bp, Homo sapien
atgcatacagttgaaacctagtctcatggcttg

SEQ ID NO: 333422 - DNA, 33 bp, Homo sapien
atgcatacagttgaaatctagtctcatggcttg

SEQ ID NO: 333423 - DNA, 33 bp, Homo sapien
acaacatacatgagccaatcatgaatttcaact

SEQ ID NO: 333424 - DNA, 33 bp, Homo sapien
acaacatacatgagccgatcatgaatttcaact

SEQ ID NO: 333425 - DNA, 33 bp, Homo sapien
aaggttcatttgaaagaatcagacaattgcatc

SEQ ID NO: 333426 - DNA, 33 bp, Homo sapien
aaggttcatttgaaaggatcagacaattgcatc

SEQ ID NO: 333427 - DNA, 33 bp, Homo sapien
tccatttcaatacaaacgtagtcagtgacacac

SEQ ID NO: 333428 - DNA, 33 bp, Homo sapien
tccatttcaatacaaatgtagtcagtgacacac

SEQ ID NO: 333429 - DNA, 33 bp, Homo sapien
gttcaagcagccagaaactccctggttgaggca

SEQ ID NO: 333430 - DNA, 33 bp, Homo sapien
gttcaagcagccagaagctccctggttgaggca

SEQ ID NO: 333431 - DNA, 33 bp, Homo sapien
gaaacctggaaatggcaccctattcactggatg

SEQ ID NO: 333432 - DNA, 33 bp, Homo sapien
gaaacctggaaatggcgccctattcactggatg

SEQ ID NO: 333433 - DNA, 33 bp, Homo sapien
caatttctcaggccaggcggggtttcaacagtg

SEQ ID NO: 333434 - DNA, 33 bp, Homo sapien
caatttctcaggccagtcggggtttcaacagtg

SEQ ID NO: 333435 - DNA, 33 bp, Homo sapien
cccatattccagttagacatttgacccactgac

SEQ ID NO: 333436 - DNA, 33 bp, Homo sapien
cccatattccagttagtcatttgacccactgac

SEQ ID NO: 333437 - DNA, 33 bp, Homo sapien
tggaacggcagagtaaagagtttggcaaatcct

SEQ ID NO: 333438 - DNA, 33 bp, Homo sapien
tggaacggcagagtaaggagtttggcaaatcct

SEQ ID NO: 333439 - DNA, 33 bp, Homo sapien
tatatagtcaacccccagcatcaacaggggatt

SEQ ID NO: 333440 - DNA, 33 bp, Homo sapien
tatatagtcaacccccggcatcaacaggggatt

SEQ ID NO: 333441 - DNA, 33 bp, Homo sapien
aaggcttccacgcttcaccagtggatttgtgtg

SEQ ID NO: 333442 - DNA, 33 bp, Homo sapien
aaggcttccacgcttcgccagtggatttgtgtg

SEQ ID NO: 333443 - DNA, 33 bp, Homo sapien
ggtgtattatctaaacagaaatcgtgctgatgt

SEQ ID NO: 333444 - DNA, 33 bp, Homo sapien
ggtgtattatctaaacggaaatcgtgctgatgt

SEQ ID NO: 333445 - DNA, 33 bp, Homo sapien
agtagtagtaaaagcaaagcacctgtgtattat

SEQ ID NO: 333446 - DNA, 33 bp, Homo sapien
agtagtagtaaaagcagagcacctgtgtattat

SEQ ID NO: 333447 - DNA, 33 bp, Homo sapien
aatttttgaaggcaatcagtcaaacgaccttca

SEQ ID NO: 333448 - DNA, 33 bp, Homo sapien
aatttttgaaggcaattagtcaaacgaccttca

SEQ ID NO: 333449 - DNA, 33 bp, Homo sapien
cacctccaaagtaaatcagaagtttccaggatt

SEQ ID NO: 333450 - DNA, 33 bp, Homo sapien
cacctccaaagtaaattagaagtttccaggatt

SEQ ID NO: 333451 - DNA, 33 bp, Homo sapien
tggccatttggacgtacagaaaaccaaaattca

SEQ ID NO: 333452 - DNA, 33 bp, Homo sapien
tggccatttggacgtatagaaaaccaaaattca

SEQ ID NO: 333453 - DNA, 33 bp, Homo sapien
ttttgctgttgttgaactgcttctttcagcgca

SEQ ID NO: 333454 - DNA, 33 bp, Homo sapien
ttttgctgttgttgaattgcttctttcagcgca

SEQ ID NO: 333455 - DNA, 33 bp, Homo sapien; identical to SEQ ID NO: 333453

SEQ ID NO: 333456 - DNA, 33 bp, Homo sapien; identical to SEQ ID NO: 333454

SEQ ID NO: 333457 - DNA, 33 bp, Homo sapien
tacatatagcaggataccatatagctatttaaa

SEQ ID NO: 333458 - DNA, 33 bp, Homo sapien
tacatatagcaggatatcatatagctatttaaa

SEQ ID NO: 333459 - DNA, 33 bp, Homo sapien
tccatcttttggtagacaatggaaatgcactaa

SEQ ID NO: 333460 - DNA, 33 bp, Homo sapien
tccatcttttggtagataatggaaatgcactaa

SEQ ID NO: 333461 - DNA, 33 bp, Homo sapien
tttttcttgacccctcaatcatctgccctgaca

SEQ ID NO: 333462 - DNA, 33 bp, Homo sapien
tttttcttgacccctccatcatctgccctgaca

SEQ ID NO: 333463 - DNA, 33 bp, Homo sapien
aaacaacaaacacaaacaacttacaagcattca

SEQ ID NO: 333464 - DNA, 33 bp, Homo sapien
aaacaacaaacacaaagaacttacaagcattca

SEQ ID NO: 333465 - DNA, 33 bp, Homo sapien
ctttgactctgaaaagccactcctagaaaatta

SEQ ID NO: 333466 - DNA, 33 bp, Homo sapien
ctttgactctgaaaagtcactcctagaaaatta

SEQ ID NO: 333467 - DNA, 33 bp, Homo sapien
acacacagcacaagtagcctcggttagcaaggc

SEQ ID NO: 333468 - DNA, 33 bp, Homo sapien
acacacagcacaagtatcctcggttagcaaggc

SEQ ID NO: 333469 - DNA, 33 bp, Homo sapien
tgattaagaccaccgaaccttcaactgggcctg

SEQ ID NO: 333470 - DNA, 33 bp, Homo sapien
tgattaagaccaccgacccttcaactgggcctg

SEQ ID NO: 333471 - DNA, 33 bp, Homo sapien
tcagacagatgctggtaaacaggaaatgaacta

SEQ ID NO: 333472 - DNA, 33 bp, Homo sapien
tcagacagatgctggtgaacaggaaatgaacta

SEQ ID NO: 333473 - DNA, 33 bp, Homo sapien
aaaagaagccatatacaacagaattcacactag

SEQ ID NO: 333474 - DNA, 33 bp, Homo sapien
aaaagaagccatatacgacagaattcacactag

SEQ ID NO: 333475 - DNA, 33 bp, Homo sapien
accagacagaaagtgacactgcccgtttggggc

SEQ ID NO: 333476 - DNA, 33 bp, Homo sapien
accagacagaaagtgatactgcccgtttggggc

SEQ ID NO: 333477 - DNA, 33 bp, Homo sapien
gagtaggttttgttgaataactagtaggcttga

SEQ ID NO: 333478 - DNA, 33 bp, Homo sapien
gagtaggttttgttgagtaactagtaggcttga

SEQ ID NO: 333479 - DNA, 33 bp, Homo sapien
atacttaagtgtcatacgtttttgagttaattt

SEQ ID NO: 333480 - DNA, 33 bp, Homo sapien
atacttaagtgtcatatgtttttgagttaattt

SEQ ID NO: 333481 - DNA, 33 bp, Homo sapien
cagtcaagacgtcagccagaactacaggcacct

SEQ ID NO: 333482 - DNA, 33 bp, Homo sapien
cagtcaagacgtcagcgagaactacaggcacct

SEQ ID NO: 333483 - DNA, 33 bp, Homo sapien
caagcacatttagtaaccttgtaaaattgcatt

SEQ ID NO: 333484 - DNA, 33 bp, Homo sapien
caagcacatttagtaatcttgtaaaattgcatt

SEQ ID NO: 333485 - DNA, 33 bp, Homo sapien
aaagcacaactggtataaaaatctagtgagatc

SEQ ID NO: 333486 - DNA, 33 bp, Homo sapien
aaagcacaactggtatgaaaatctagtgagatc

SEQ ID NO: 333487 - DNA, 33 bp, Homo sapien
tcaggttgccacataacctagcacagttatttg

SEQ ID NO: 333488 - DNA, 33 bp, Homo sapien
tcaggttgccacataatctagcacagttatttg

SEQ ID NO: 333489 - DNA, 33 bp, Homo sapien
tgtagtaagcagaaaactgacttgcctaaagga

SEQ ID NO: 333490 - DNA, 33 bp, Homo sapien
tgtagtaagcagaaaagtgacttgcctaaagga

SEQ ID NO: 333491 - DNA, 33 bp, Homo sapien
ctactctgtcctgttaagtgtgcagccctatga

SEQ ID NO: 333492 - DNA, 33 bp, Homo sapien
ctactctgtcctgttaggtgtgcagccctatga

SEQ ID NO: 333493 - DNA, 33 bp, Homo sapien
attccccaagtgcaccaactaaaaagaccaagt

SEQ ID NO: 333494 - DNA, 33 bp, Homo sapien
attccccaagtgcaccgactaaaaagaccaagt

SEQ ID NO: 333495 - DNA, 33 bp, Homo sapien
tttctcggttttctgaaaagagcaaagagtaat

SEQ ID NO: 333496 - DNA, 33 bp, Homo sapien
tttctcggttttctgagaagagcaaagagtaat

SEQ ID NO: 333497 - DNA, 33 bp, Homo sapien
tccaaagccacctccacatttctaggcatttgt

SEQ ID NO: 333498 - DNA, 33 bp, Homo sapien
tccaaagccacctccatatttctaggcatttgt

SEQ ID NO: 333499 - DNA, 33 bp, Homo sapien
ctaatctcatttgttacggctccactcatgacc

SEQ ID NO: 333500 - DNA, 33 bp, Homo sapien
ctaatctcatttgttatggctccactcatgacc

SEQ ID NO: 333501 - DNA, 33 bp, Homo sapien
agaaaatcgatgagaacggcacagctgggaaaa

SEQ ID NO: 333502 - DNA, 33 bp, Homo sapien
agaaaatcgatgagaatggcacagctgggaaaa

SEQ ID NO: 333503 - DNA, 33 bp, Homo sapien
tgatcatcattcagtaacgggtaagcgttccgt

SEQ ID NO: 333504 - DNA, 33 bp, Homo sapien
tgatcatcattcagtagcgggtaagcgttccgt

SEQ ID NO: 333505 - DNA, 33 bp, Homo sapien
acaagaaactgtgtacacattgcgatcttcagg

SEQ ID NO: 333506 - DNA, 33 bp, Homo sapien
acaagaaactgtgtacgcattgcgatcttcagg

SEQ ID NO: 333507 - DNA, 33 bp, Homo sapien
agccaaaccatatcacagaagttcagtctcata

SEQ ID NO: 333508 - DNA, 33 bp, Homo sapien
agccaaaccatatcacggaagttcagtctcata

SEQ ID NO: 333509 - DNA, 33 bp, Homo sapien
tagctcagctgtaaacaaaaggatacgaccttg

SEQ ID NO: 333510 - DNA, 33 bp, Homo sapien
tagctcagctgtaaacgaaaggatacgaccttg

SEQ ID NO: 333511 - DNA, 33 bp, Homo sapien
ctagaagatgtttcaacgatcggataactagca

SEQ ID NO: 333512 - DNA, 33 bp, Homo sapien
ctagaagatgtttcaatgatcggataactagca

SEQ ID NO: 333513 - DNA, 33 bp, Homo sapien
caactctgtgaatataatacaagccactgaatt

SEQ ID NO: 333514 - DNA, 33 bp, Homo sapien
caactctgtgaatatagtacaagccactgaatt

SEQ ID NO: 333515 - DNA, 33 bp, Homo sapien
taaaaatgaaacatgcgcattgtgaaaatttct

SEQ ID NO: 333516 - DNA, 33 bp, Homo sapien
taaaaatgaaacatgctcattgtgaaaatttct

SEQ ID NO: 333517 - DNA, 33 bp, Homo sapien
atgaaaacacagacaacaagaagtagcaaatag

SEQ ID NO: 333518 - DNA, 33 bp, Homo sapien
atgaaaacacagacaagaagaagtagcaaatag

SEQ ID NO: 333519 - DNA, 33 bp, Homo sapien
ttcacactgtcttatacagcaggaattactttc

SEQ ID NO: 333520 - DNA, 33 bp, Homo sapien
ttcacactgtcttatagagcaggaattactttc

SEQ ID NO: 333521 - DNA, 33 bp, Homo sapien
gttctcagatgatagtcaatgcttcaaaggaaa

SEQ ID NO: 333522 - DNA, 33 bp, Homo sapien
gttctcagatgatagttaatgcttcaaaggaaa

SEQ ID NO: 333523 - DNA, 33 bp, Homo sapien
tacgggtctatttgtccatccctgagccaacct

SEQ ID NO: 333524 - DNA, 33 bp, Homo sapien
tacgggtctatttgtctatccctgagccaacct

SEQ ID NO: 333525 - DNA, 33 bp, Homo sapien
gttacctccaccaaacaggagcagaataattta

SEQ ID NO: 333526 - DNA, 33 bp, Homo sapien
gttacctccaccaaacgggagcagaataattta

SEQ ID NO: 333527 - DNA, 33 bp, Homo sapien
tgaacctcctgacatccgagttatacaaactaa

SEQ ID NO: 333528 - DNA, 33 bp, Homo sapien
tgaacctcctgacatctgagttatacaaactaa

SEQ ID NO: 333529 - DNA, 33 bp, Homo sapien
ctgctccatttagttagagctggctttagcaag

SEQ ID NO: 333530 - DNA, 33 bp, Homo sapien
ctgctccatttagttatagctggctttagcaag

SEQ ID NO: 333531 - DNA, 33 bp, Homo sapien
gatggattggggtgaccatttttagaaaggacc

SEQ ID NO: 333532 - DNA, 33 bp, Homo sapien
gatggattggggtgactatttttagaaaggacc

SEQ ID NO: 333533 - DNA, 33 bp, Homo sapien
ttgaataattctaaagcctataacaatcttcca

SEQ ID NO: 333534 - DNA, 33 bp, Homo sapien
ttgaataattctaaagtctataacaatcttcca

SEQ ID NO: 333535 - DNA, 33 bp, Homo sapien
ctctacgtttctaaataatccactggagatggt

SEQ ID NO: 333536 - DNA, 33 bp, Homo sapien
ctctacgtttctaaatgatccactggagatggt

SEQ ID NO: 333537 - DNA, 33 bp, Homo sapien
ctaaagagatgagctaaaatacatgggcaggat

SEQ ID NO: 333538 - DNA, 33 bp, Homo sapien
ctaaagagatgagctacaatacatgggcaggat

SEQ ID NO: 333539 - DNA, 33 bp, Homo sapien
ctaggaagatgggaaacgtctctggcactccag

SEQ ID NO: 333540 - DNA, 33 bp, Homo sapien
ctaggaagatgggaaatgtctctggcactccag

SEQ ID NO: 333541 - DNA, 33 bp, Homo sapien
aagaaaatgtgacatagacatacaacacaacgt

SEQ ID NO: 333542 - DNA, 33 bp, Homo sapien
aagaaaatgtgacatatacatacaacacaacgt

SEQ ID NO: 333543 - DNA, 33 bp, Homo sapien
gcctccatatactcaaaccataatacacctcca

SEQ ID NO: 333544 - DNA, 33 bp, Homo sapien
gcctccatatactcaagccataatacacctcca

SEQ ID NO: 333545 - DNA, 33 bp, Homo sapien
gtttcattgagagtaaatacgccaggcaaggcc

SEQ ID NO: 333546 - DNA, 33 bp, Homo sapien
gtttcattgagagtaactacgccaggcaaggcc

SEQ ID NO: 333547 - DNA, 33 bp, Homo sapien
cacacagctaataaaaatcactgccaaaatcca

SEQ ID NO: 333548 - DNA, 33 bp, Homo sapien
cacacagctaataaaagtcactgccaaaatcca

SEQ ID NO: 333549 - DNA, 33 bp, Homo sapien
gttcttgattctttaccaacagtggcctcgtga

SEQ ID NO: 333550 - DNA, 33 bp, Homo sapien
gttcttgattctttacgaacagtggcctcgtga

SEQ ID NO: 333551 - DNA, 33 bp, Homo sapien
ggcttaagagactgtgaagcagtagtagatcca

SEQ ID NO: 333552 - DNA, 33 bp, Homo sapien
ggcttaagagactgtggagcagtagtagatcca

SEQ ID NO: 333553 - DNA, 33 bp, Homo sapien
atagagggaagtctaacctccttttcttggact

SEQ ID NO: 333554 - DNA, 33 bp, Homo sapien
atagagggaagtctaatctccttttcttggact

SEQ ID NO: 333555 - DNA, 33 bp, Homo sapien
caaggggggacgcgtccatccatcccgcgtgtc

SEQ ID NO: 333556 - DNA, 33 bp, Homo sapien
caaggggggacgcgtctatccatcccgcgtgtc

SEQ ID NO: 333557 - DNA, 33 bp, Homo sapien
cagtgatttattactcaaatgtttactgaagat

SEQ ID NO: 333558 - DNA, 33 bp, Homo sapien
cagtgatttattactcgaatgtttactgaagat

SEQ ID NO: 333559 - DNA, 33 bp, Homo sapien
tccaccaggaaacaaaatgattccattgaacct

SEQ ID NO: 333560 - DNA, 33 bp, Homo sapien
tccaccaggaaacaaagtgattccattgaacct

SEQ ID NO: 333561 - DNA, 33 bp, Homo sapien
gaaacaaaataacaaaagtatgatgatgagaaa

SEQ ID NO: 333562 - DNA, 33 bp, Homo sapien
gaaacaaaataacaaacgtatgatgatgagaaa

SEQ ID NO: 333563 - DNA, 33 bp, Homo sapien; identical to SEQ ID NO: 333561

SEQ ID NO: 333564 - DNA, 33 bp, Homo sapien; identical to SEQ ID NO: 333562

SEQ ID NO: 333565 - DNA, 33 bp, Homo sapien
aatgagggttaggtgaactaacatctaaggaaa

SEQ ID NO: 333566 - DNA, 33 bp, Homo sapien
aatgagggttaggtgatctaacatctaaggaaa

SEQ ID NO: 333567 - DNA, 33 bp, Homo sapien
gcaactttagtcaaacggtgttatttattttcc

SEQ ID NO: 333568 - DNA, 33 bp, Homo sapien
gcaactttagtcaaactgtgttatttattttcc

SEQ ID NO: 333569 - DNA, 33 bp, Homo sapien
agcactttacttgatacagttggcactgggttt

SEQ ID NO: 333570 - DNA, 33 bp, Homo sapien
agcactttacttgatatagttggcactgggttt

SEQ ID NO: 333571 - DNA, 33 bp, Homo sapien; identical to SEQ ID NO: 333569

SEQ ID NO: 333572 - DNA, 33 bp, Homo sapien; identical to SEQ ID NO: 333570

SEQ ID NO: 333573 - DNA, 33 bp, Homo sapien
tccctagggcagaaatcataaaggactcatttt

SEQ ID NO: 333574 - DNA, 33 bp, Homo sapien
tccctagggcagaaattataaaggactcatttt

SEQ ID NO: 333575 - DNA, 33 bp, Homo sapien
tgtagttgttctagaaatgaaaagcaatactac

SEQ ID NO: 333576 - DNA, 33 bp, Homo sapien
tgtagttgttctagaagtgaaaagcaatactac

SEQ ID NO: 333577 - DNA, 33 bp, Homo sapien
aacaaacaagaaaaaaataggtggtcatggtgg

SEQ ID NO: 333578 - DNA, 33 bp, Homo sapien
aacaaacaagaaaaaattaggtggtcatggtgg

SEQ ID NO: 333579 - DNA, 33 bp, Homo sapien
acagtgttcctgccagaaatacacaacagagtc

SEQ ID NO: 333580 - DNA, 33 bp, Homo sapien
acagtgttcctgccagcaatacacaacagagtc

SEQ ID NO: 333581 - DNA, 33 bp, Homo sapien
ttcatcagagcaaccacgtgagaagagtcagag

SEQ ID NO: 333582 - DNA, 33 bp, Homo sapien
ttcatcagagcaaccatgtgagaagagtcagag

SEQ ID NO: 333583 - DNA, 33 bp, Homo sapien
agagaacttcaataaacggatgggaagactata

SEQ ID NO: 333584 - DNA, 33 bp, Homo sapien
agagaacttcaataaatggatgggaagactata

SEQ ID NO: 333585 - DNA, 33 bp, Homo sapien
gatggtatcatggaacacttgcaccagccgtag

SEQ ID NO: 333586 - DNA, 33 bp, Homo sapien
gatggtatcatggaacgcttgcaccagccgtag

SEQ ID NO: 333587 - DNA, 33 bp, Homo sapien
ctttgccggtggagtgcaaatgcatccttgtgt

SEQ ID NO: 333588 - DNA, 33 bp, Homo sapien
ctttgccggtggagtgtaaatgcatccttgtgt

SEQ ID NO: 333589 - DNA, 33 bp, Homo sapien; identical to SEQ ID NO: 333587

SEQ ID NO: 333590 - DNA, 33 bp, Homo sapien; identical to SEQ ID NO: 333588

SEQ ID NO: 333591 - DNA, 33 bp, Homo sapien
acggcactaccttggcactcctgggacctacag

SEQ ID NO: 333592 - DNA, 33 bp, Homo sapien
acggcactaccttggcgctcctgggacctacag

SEQ ID NO: 333593 - DNA, 33 bp, Homo sapien
gaagaattcaaaggaaatgtcagctgtcatctt

SEQ ID NO: 333594 - DNA, 33 bp, Homo sapien
gaagaattcaaaggaactgtcagctgtcatctt

SEQ ID NO: 333595 - DNA, 33 bp, Homo sapien
attgggaaagagaaaccgctttttatccctagt

SEQ ID NO: 333596 - DNA, 33 bp, Homo sapien
attgggaaagagaaacggctttttatccctagt

SEQ ID NO: 333597 - DNA, 33 bp, Homo sapien
cgcagctgttgatgaaatcagccgagtcttact

SEQ ID NO: 333598 - DNA, 33 bp, Homo sapien
cgcagctgttgatgaactcagccgagtcttact

SEQ ID NO: 333599 - DNA, 33 bp, Homo sapien
gatcgactttggaatacgtatgatccatgaaag

SEQ ID NO: 333600 - DNA, 33 bp, Homo sapien
gatcgactttggaatatgtatgatccatgaaag

SEQ ID NO: 333601 - DNA, 33 bp, Homo sapien
aaaaactgccaaacataaaaaccagaccagaat

SEQ ID NO: 333602 - DNA, 33 bp, Homo sapien
aaaaactgccaaacatgaaaaccagaccagaat

SEQ ID NO: 333603 - DNA, 33 bp, Homo sapien
accaaaagcctaagaacgacaccagcaacaact

SEQ ID NO: 333604 - DNA, 33 bp, Homo sapien
accaaaagcctaagaatgacaccagcaacaact

SEQ ID NO: 333605 - DNA, 33 bp, Homo sapien
acagccacaaaacatacccgtaaaagaacacaa

SEQ ID NO: 333606 - DNA, 33 bp, Homo sapien
acagccacaaaacatatccgtaaaagaacacaa

SEQ ID NO: 333607 - DNA, 33 bp, Homo sapien
aatctttattggttgccgattgaatagaatcag

SEQ ID NO: 333608 - DNA, 33 bp, Homo sapien
aatctttattggttgctgattgaatagaatcag

SEQ ID NO: 333609 - DNA, 33 bp, Homo sapien
cttcccaggaagaggtaaagtccatgagtaatg

SEQ ID NO: 333610 - DNA, 33 bp, Homo sapien
cttcccaggaagaggtgaagtccatgagtaatg

SEQ ID NO: 333611 - DNA, 33 bp, Homo sapien
cttatgtgaatgctcaccaaaggataaacaatt

SEQ ID NO: 333612 - DNA, 33 bp, Homo sapien
cttatgtgaatgctcatcaaaggataaacaatt

SEQ ID NO: 333613 - DNA, 33 bp, Homo sapien
caccagtcaaaaagccaaacgctgtgcactggg

SEQ ID NO: 333614 - DNA, 33 bp, Homo sapien
caccagtcaaaaagccgaacgctgtgcactggg

SEQ ID NO: 333615 - DNA, 33 bp, Homo sapien; identical to SEQ ID NO: 333613

SEQ ID NO: 333616 - DNA, 33 bp, Homo sapien; identical to SEQ ID NO: 333614

SEQ ID NO: 333617 - DNA, 33 bp, Homo sapien
tgctgattttgtaccacgaaatattactgaatt

SEQ ID NO: 333618 - DNA, 33 bp, Homo sapien
tgctgattttgtaccatgaaatattactgaatt

SEQ ID NO: 333619 - DNA, 33 bp, Homo sapien
actgctgttttcaaggccatgtaatcatcaaat

SEQ ID NO: 333620 - DNA, 33 bp, Homo sapien
actgctgttttcaaggtcatgtaatcatcaaat

SEQ ID NO: 333621 - DNA, 33 bp, Homo sapien
ttaaatagtgaattgccagaggaatactataaa

SEQ ID NO: 333622 - DNA, 33 bp, Homo sapien
ttaaatagtgaattgctagaggaatactataaa

SEQ ID NO: 333623 - DNA, 33 bp, Homo sapien
agtagggactgagaaccgaaaatcttccttcaa

SEQ ID NO: 333624 - DNA, 33 bp, Homo sapien
agtagggactgagaactgaaaatcttccttcaa

SEQ ID NO: 333625 - DNA, 33 bp, Homo sapien
atttacatcttaaggccctctgcttaaccaagg

SEQ ID NO: 333626 - DNA, 33 bp, Homo sapien
atttacatcttaaggctctctgcttaaccaagg

SEQ ID NO: 333627 - DNA, 33 bp, Homo sapien
ccctgagctcctgaccacaagtccaatgccaca

SEQ ID NO: 333628 - DNA, 33 bp, Homo sapien
ccctgagctcctgaccgcaagtccaatgccaca

SEQ ID NO: 333629 - DNA, 33 bp, Homo sapien
atctaagaatttgtgagcaaacttttacatttg

SEQ ID NO: 333630 - DNA, 33 bp, Homo sapien
atctaagaatttgtgatcaaacttttacatttg

SEQ ID NO: 333631 - DNA, 33 bp, Homo sapien
tataagacaataataacaagtgacaaagcagac

SEQ ID NO: 333632 - DNA, 33 bp, Homo sapien
tataagacaataataagaagtgacaaagcagac

SEQ ID NO: 333633 - DNA, 33 bp, Homo sapien
acctttgtgcctaaaactgatgacttgagttca

SEQ ID NO: 333634 - DNA, 33 bp, Homo sapien
acctttgtgcctaaaattgatgacttgagttca

SEQ ID NO: 333635 - DNA, 33 bp, Homo sapien
gtgtgttccagagacacgtggcagaataacacc

SEQ ID NO: 333636 - DNA, 33 bp, Homo sapien
gtgtgttccagagacatgtggcagaataacacc

SEQ ID NO: 333637 - DNA, 33 bp, Homo sapien
aagaaatagctaaaacggatgtgatttacttga

SEQ ID NO: 333638 - DNA, 33 bp, Homo sapien
aagaaatagctaaaactgatgtgatttacttga

SEQ ID NO: 333639 - DNA, 33 bp, Homo sapien
actgctttctactgaaggcacatagctttcgca

SEQ ID NO: 333640 - DNA, 33 bp, Homo sapien
actgctttctactgaatgcacatagctttcgca

SEQ ID NO: 333641 - DNA, 33 bp, Homo sapien
cgatttgctgtaggataaactgcaagtacagac

SEQ ID NO: 333642 - DNA, 33 bp, Homo sapien
cgatttgctgtaggatgaactgcaagtacagac

SEQ ID NO: 333643 - DNA, 33 bp, Homo sapien; identical to SEQ ID NO: 333641

SEQ ID NO: 333644 - DNA, 33 bp, Homo sapien; identical to SEQ ID NO: 333642

SEQ ID NO: 333645 - DNA, 33 bp, Homo sapien
atgcaggttcatgacaaattacatattttaatg

SEQ ID NO: 333646 - DNA, 33 bp, Homo sapien
atgcaggttcatgacacattacatattttaatg

SEQ ID NO: 333647 - DNA, 33 bp, Homo sapien
gcctggtgtccttaaccatagcctgtcaagaga

SEQ ID NO: 333648 - DNA, 33 bp, Homo sapien
gcctggtgtccttaacgatagcctgtcaagaga

SEQ ID NO: 333649 - DNA, 33 bp, Homo sapien
gacactgatcagacaacaattactagtgggcaa

SEQ ID NO: 333650 - DNA, 33 bp, Homo sapien
gacactgatcagacaataattactagtgggcaa

SEQ ID NO: 333651 - DNA, 33 bp, Homo sapien
agatgcaaaagagaaggcccctaactctcgctg

SEQ ID NO: 333652 - DNA, 33 bp, Homo sapien
agatgcaaaagagaagtcccctaactctcgctg

SEQ ID NO: 333653 - DNA, 33 bp, Homo sapien
cataaaatacaagccaatgactggagattaaat

SEQ ID NO: 333654 - DNA, 33 bp, Homo sapien
cataaaatacaagccagtgactggagattaaat

SEQ ID NO: 333655 - DNA, 33 bp, Homo sapien
ataacttataagcccacattcatagcattaaag

SEQ ID NO: 333656 - DNA, 33 bp, Homo sapien
ataacttataagcccatattcatagcattaaag

SEQ ID NO: 333657 - DNA, 33 bp, Homo sapien
aggatacaagagccaacatgaaataactctcaa

SEQ ID NO: 333658 - DNA, 33 bp, Homo sapien
aggatacaagagccaagatgaaataactctcaa

SEQ ID NO: 333659 - DNA, 33 bp, Homo sapien
tgacaacgatagtgaggagtttggaggggtaag

SEQ ID NO: 333660 - DNA, 33 bp, Homo sapien
tgacaacgatagtgagtagtttggaggggtaag

SEQ ID NO: 333661 - DNA, 33 bp, Homo sapien
gtgaagcaggacaaaacagtgacattagagcca

SEQ ID NO: 333662 - DNA, 33 bp, Homo sapien
gtgaagcaggacaaaatagtgacattagagcca

SEQ ID NO: 333663 - DNA, 33 bp, Homo sapien
tttttaaaactggcaaatgggaaaaatcaatca

SEQ ID NO: 333664 - DNA, 33 bp, Homo sapien
tttttaaaactggcaactgggaaaaatcaatca

SEQ ID NO: 333665 - DNA, 33 bp, Homo sapien
ggttcagggctccagaagtgagtgtcccattga

SEQ ID NO: 333666 - DNA, 33 bp, Homo sapien
ggttcagggctccagacgtgagtgtcccattga

SEQ ID NO: 333667 - DNA, 33 bp, Homo sapien
ctttaagagagcatcaaccttaattaaagggaa

SEQ ID NO: 333668 - DNA, 33 bp, Homo sapien
ctttaagagagcatcagccttaattaaagggaa

SEQ ID NO: 333669 - DNA, 33 bp, Homo sapien
tgtagagaatgctaaacaggactaactcaaatg

SEQ ID NO: 333670 - DNA, 33 bp, Homo sapien
tgtagagaatgctaaataggactaactcaaatg

SEQ ID NO: 333671 - DNA, 33 bp, Homo sapien
tcagcttggggtacaacatgaggtcatatatct

SEQ ID NO: 333672 - DNA, 33 bp, Homo sapien
tcagcttggggtacaatatgaggtcatatatct

SEQ ID NO: 333673 - DNA, 33 bp, Homo sapien
actaatcataaaagaaaaagactcacgtctttc

SEQ ID NO: 333674 - DNA, 33 bp, Homo sapien
actaatcataaaagaacaagactcacgtctttc

SEQ ID NO: 333675 - DNA, 33 bp, Homo sapien
ttcaaagtcagatcagcaacaagggtgtcatcc

SEQ ID NO: 333676 - DNA, 33 bp, Homo sapien
ttcaaagtcagatcaggaacaagggtgtcatcc

SEQ ID NO: 333677 - DNA, 33 bp, Homo sapien
agagcagagtaactgacacttcccaccatcctc

SEQ ID NO: 333678 - DNA, 33 bp, Homo sapien
agagcagagtaactgatacttcccaccatcctc

SEQ ID NO: 333679 - DNA, 33 bp, Homo sapien
ctactggaaaacactaccagccttatcctgggg

SEQ ID NO: 333680 - DNA, 33 bp, Homo sapien
ctactggaaaacactatcagccttatcctgggg

SEQ ID NO: 333681 - DNA, 33 bp, Homo sapien
agaaagggaagaattacaagaaaagatgggagt

SEQ ID NO: 333682 - DNA, 33 bp, Homo sapien
agaaagggaagaattagaagaaaagatgggagt

SEQ ID NO: 333683 - DNA, 33 bp, Homo sapien
gtcaccctacagttgaaatatggtatggaagaa

SEQ ID NO: 333684 - DNA, 33 bp, Homo sapien
gtcaccctacagttgagatatggtatggaagaa

SEQ ID NO: 333685 - DNA, 33 bp, Homo sapien
ttctagctgggcctcactcaaattctgcaggtg

SEQ ID NO: 333686 - DNA, 33 bp, Homo sapien
ttctagctgggcctcattcaaattctgcaggtg

SEQ ID NO: 333687 - DNA, 33 bp, Homo sapien
ccaggctggtttcgaagtactgctatctcaagt

SEQ ID NO: 333688 - DNA, 33 bp, Homo sapien
ccaggctggtttcgaattactgctatctcaagt

SEQ ID NO: 333689 - DNA, 33 bp, Homo sapien
tctgtgaattctataacgcgcccattgtcaagt

SEQ ID NO: 333690 - DNA, 33 bp, Homo sapien
tctgtgaattctataatgcgcccattgtcaagt

SEQ ID NO: 333691 - DNA, 33 bp, Homo sapien
aaacatccaaggaaaacgaggatggcaaagaaa

SEQ ID NO: 333692 - DNA, 33 bp, Homo sapien
aaacatccaaggaaaatgaggatggcaaagaaa

SEQ ID NO: 333693 - DNA, 33 bp, Homo sapien
tggaatttcgcacatacgatgatttctcgtatc

SEQ ID NO: 333694 - DNA, 33 bp, Homo sapien
tggaatttcgcacatatgatgatttctcgtatc

SEQ ID NO: 333695 - DNA, 33 bp, Homo sapien
aagatttgccttcctcaaaatttcatgtaagga

SEQ ID NO: 333696 - DNA, 33 bp, Homo sapien
aagatttgccttcctcgaaatttcatgtaagga

SEQ ID NO: 333697 - DNA, 33 bp, Homo sapien
cttttgttgtctaggccgagcccatgttagtcc

SEQ ID NO: 333698 - DNA, 33 bp, Homo sapien
cttttgttgtctaggctgagcccatgttagtcc

SEQ ID NO: 333699 - DNA, 33 bp, Homo sapien
aataggaagctacgaaagggtttgaaaaagata

SEQ ID NO: 333700 - DNA, 33 bp, Homo sapien
aataggaagctacgaaggggtttgaaaaagata

SEQ ID NO: 333701 - DNA, 33 bp, Homo sapien
taatatcctggtcaaacatacatagccctttta

SEQ ID NO: 333702 - DNA, 33 bp, Homo sapien
taatatcctggtcaaatatacatagccctttta

SEQ ID NO: 333703 - DNA, 33 bp, Homo sapien
aagagttaatactgcccgagaaaggagtgactg

SEQ ID NO: 333704 - DNA, 33 bp, Homo sapien
aagagttaatactgcctgagaaaggagtgactg

SEQ ID NO: 333705 - DNA, 33 bp, Homo sapien
agccgcctgccattaaatacggacctcccagct

SEQ ID NO: 333706 - DNA, 33 bp, Homo sapien
agccgcctgccattaagtacggacctcccagct

SEQ ID NO: 333707 - DNA, 33 bp, Homo sapien
acagtgagtgctctagaaaaagggaaggaagcg

SEQ ID NO: 333708 - DNA, 33 bp, Homo sapien
acagtgagtgctctaggaaaagggaaggaagcg

SEQ ID NO: 333709 - DNA, 33 bp, Homo sapien
cggacagcaaagccacagagaaggagaagaagc

SEQ ID NO: 333710 - DNA, 33 bp, Homo sapien
cggacagcaaagccacggagaaggagaagaagc

SEQ ID NO: 333711 - DNA, 33 bp, Homo sapien
caagaaagagccttagcaccatttcccaactct

SEQ ID NO: 333712 - DNA, 33 bp, Homo sapien
caagaaagagccttagtaccatttcccaactct

SEQ ID NO: 333713 - DNA, 33 bp, Homo sapien
ctttaagtatgcaaagccgctgcatcaagtcaa

SEQ ID NO: 333714 - DNA, 33 bp, Homo sapien
ctttaagtatgcaaagtcgctgcatcaagtcaa

SEQ ID NO: 333715 - DNA, 33 bp, Homo sapien
catttgcttgaaatagaagatacatccttgtga

SEQ ID NO: 333716 - DNA, 33 bp, Homo sapien
catttgcttgaaataggagatacatccttgtga

SEQ ID NO: 333717 - DNA, 33 bp, Homo sapien
aaatgatctgaaagagcagtttgtttttcccat

SEQ ID NO: 333718 - DNA, 33 bp, Homo sapien
aaatgatctgaaagagtagtttgtttttcccat

SEQ ID NO: 333719 - DNA, 33 bp, Homo sapien
cagggcaagtgtccctaaatttcatgaatgatg

SEQ ID NO: 333720 - DNA, 33 bp, Homo sapien
cagggcaagtgtccctcaatttcatgaatgatg

SEQ ID NO: 333721 - DNA, 33 bp, Homo sapien
ttgctcgttatcatgaactcagactttcagtgt

SEQ ID NO: 333722 - DNA, 33 bp, Homo sapien
ttgctcgttatcatgagctcagactttcagtgt

SEQ ID NO: 333723 - DNA, 33 bp, Homo sapien
ttttccgaaagagcaaccatccaatgtgtctaa

SEQ ID NO: 333724 - DNA, 33 bp, Homo sapien
ttttccgaaagagcaatcatccaatgtgtctaa

SEQ ID NO: 333725 - DNA, 33 bp, Homo sapien
gccttgtaaagtcatgcaagtagagattaattt

SEQ ID NO: 333726 - DNA, 33 bp, Homo sapien
gccttgtaaagtcatgtaagtagagattaattt

SEQ ID NO: 333727 - DNA, 33 bp, Homo sapien
ttgtacacaaaacatcaaacaattttattcacc

SEQ ID NO: 333728 - DNA, 33 bp, Homo sapien
ttgtacacaaaacatccaacaattttattcacc

SEQ ID NO: 333729 - DNA, 33 bp, Homo sapien
tttgtaattcctagcacgaaagactctaacagg

SEQ ID NO: 333730 - DNA, 33 bp, Homo sapien
tttgtaattcctagcatgaaagactctaacagg

SEQ ID NO: 333731 - DNA, 33 bp, Homo sapien
ggatattggaccaatacattcccaagccatcat

SEQ ID NO: 333732 - DNA, 33 bp, Homo sapien
ggatattggaccaatatattcccaagccatcat

SEQ ID NO: 333733 - DNA, 33 bp, Homo sapien
ctagtaccttttaagaaaaatggcttgcaagta

SEQ ID NO: 333734 - DNA, 33 bp, Homo sapien
ctagtaccttttaagagaaatggcttgcaagta

SEQ ID NO: 333735 - DNA, 33 bp, Homo sapien
tccagatggtaaacaacacttgcactgcagttt

SEQ ID NO: 333736 - DNA, 33 bp, Homo sapien
tccagatggtaaacaatacttgcactgcagttt

SEQ ID NO: 333737 - DNA, 33 bp, Homo sapien
acgtctccattatgaactgaaaaaaaaagcgta

SEQ ID NO: 333738 - DNA, 33 bp, Homo sapien
acgtctccattatgaattgaaaaaaaaagcgta

SEQ ID NO: 333739 - DNA, 33 bp, Homo sapien
accaatagttagtctcaaaacctgttcagattc

SEQ ID NO: 333740 - DNA, 33 bp, Homo sapien
accaatagttagtctcgaaacctgttcagattc

SEQ ID NO: 333741 - DNA, 33 bp, Homo sapien
gtagagagtgtgagcacacagagcttgggtagg

SEQ ID NO: 333742 - DNA, 33 bp, Homo sapien
gtagagagtgtgagcatacagagcttgggtagg

SEQ ID NO: 333743 - DNA, 33 bp, Homo sapien
tttgaggggttcctgactcagagatagctctta

SEQ ID NO: 333744 - DNA, 33 bp, Homo sapien
tttgaggggttcctgattcagagatagctctta

SEQ ID NO: 333745 - DNA, 33 bp, Homo sapien
tgaagatgtgaacagcaaaacaacgacgctccc

SEQ ID NO: 333746 - DNA, 33 bp, Homo sapien
tgaagatgtgaacagcgaaacaacgacgctccc

SEQ ID NO: 333747 - DNA, 33 bp, Homo sapien
tggcttcacctctcacaagtacccttatttttt

SEQ ID NO: 333748 - DNA, 33 bp, Homo sapien
tggcttcacctctcactagtacccttatttttt

SEQ ID NO: 333749 - DNA, 33 bp, Homo sapien
atgcattgcataagaaaaagtgaggtaaatagg

SEQ ID NO: 333750 - DNA, 33 bp, Homo sapien
atgcattgcataagaagaagtgaggtaaatagg

SEQ ID NO: 333751 - DNA, 33 bp, Homo sapien
agagaatattgtagaacgagtggcaacagaaat

SEQ ID NO: 333752 - DNA, 33 bp, Homo sapien
agagaatattgtagaatgagtggcaacagaaat

SEQ ID NO: 333753 - DNA, 33 bp, Homo sapien
cagaagagagttctaacccaaccatggggcacc

SEQ ID NO: 333754 - DNA, 33 bp, Homo sapien
cagaagagagttctaatccaaccatggggcacc

SEQ ID NO: 333755 - DNA, 33 bp, Homo sapien
agcactggctggaagcacagatgatgcactctc

SEQ ID NO: 333756 - DNA, 33 bp, Homo sapien
agcactggctggaagcgcagatgatgcactctc

SEQ ID NO: 333757 - DNA, 33 bp, Homo sapien
tggagcttcgtgtagcactgtttttggacaagt

SEQ ID NO: 333758 - DNA, 33 bp, Homo sapien
tggagcttcgtgtagcgctgtttttggacaagt

SEQ ID NO: 333759 - DNA, 33 bp, Homo sapien
ttcatgtatttttcagaaagttgacaaactaca

SEQ ID NO: 333760 - DNA, 33 bp, Homo sapien
ttcatgtatttttcaggaagttgacaaactaca

SEQ ID NO: 333761 - DNA, 33 bp, Homo sapien
aaggctgtgtgtattacggagaatcctggcata

SEQ ID NO: 333762 - DNA, 33 bp, Homo sapien
aaggctgtgtgtattatggagaatcctggcata

SEQ ID NO: 333763 - DNA, 33 bp, Homo sapien
tgccatctttagaagtaaacactgacgaaaacc

SEQ ID NO: 333764 - DNA, 33 bp, Homo sapien
tgccatctttagaagtgaacactgacgaaaacc

SEQ ID NO: 333765 - DNA, 33 bp, Homo sapien
caaatctgtcaacaaacccctgaacgtgtatag

SEQ ID NO: 333766 - DNA, 33 bp, Homo sapien
caaatctgtcaacaaatccctgaacgtgtatag

SEQ ID NO: 333767 - DNA, 33 bp, Homo sapien
gaatataggcaattccaacagaaagttaataga

SEQ ID NO: 333768 - DNA, 33 bp, Homo sapien
gaatataggcaattccgacagaaagttaataga

SEQ ID NO: 333769 - DNA, 33 bp, Homo sapien
ccatactcagtattaaactccttatcgtcacaa

SEQ ID NO: 333770 - DNA, 33 bp, Homo sapien
ccatactcagtattaacctccttatcgtcacaa

SEQ ID NO: 333771 - DNA, 33 bp, Homo sapien
gaaattcacatcatcacagaggagaattctttg

SEQ ID NO: 333772 - DNA, 33 bp, Homo sapien
gaaattcacatcatcatagaggagaattctttg

SEQ ID NO: 333773 - DNA, 33 bp, Homo sapien
ggaaaacactcaagtaacctaatagccaatgtc

SEQ ID NO: 333774 - DNA, 33 bp, Homo sapien
ggaaaacactcaagtagcctaatagccaatgtc

SEQ ID NO: 333775 - DNA, 33 bp, Homo sapien
tacacatgtttacaaaaagattacatctatcag

SEQ ID NO: 333776 - DNA, 33 bp, Homo sapien
tacacatgtttacaaagagattacatctatcag

SEQ ID NO: 333777 - DNA, 33 bp, Homo sapien
ccaattctagttttaacgtttagcaaaatgata

SEQ ID NO: 333778 - DNA, 33 bp, Homo sapien
ccaattctagttttaatgtttagcaaaatgata

SEQ ID NO: 333779 - DNA, 33 bp, Homo sapien
cgagagtcatttcccccacacctccggctcctc

SEQ ID NO: 333780 - DNA, 33 bp, Homo sapien
cgagagtcatttcccctacacctccggctcctc

SEQ ID NO: 333781 - DNA, 33 bp, Homo sapien
ggacctcttttgtgtacgaaataattatacgtg

SEQ ID NO: 333782 - DNA, 33 bp, Homo sapien
ggacctcttttgtgtatgaaataattatacgtg

SEQ ID NO: 333783 - DNA, 33 bp, Homo sapien
cttggcctgctagagacccccaggcgcagtgcc

SEQ ID NO: 333784 - DNA, 33 bp, Homo sapien
cttggcctgctagagatccccaggcgcagtgcc

SEQ ID NO: 333785 - DNA, 33 bp, Homo sapien
aacatccaacagaagaaccagtgctaggcggga

SEQ ID NO: 333786 - DNA, 33 bp, Homo sapien
aacatccaacagaagagccagtgctaggcggga

SEQ ID NO: 333787 - DNA, 33 bp, Homo sapien
tgtggtttccatacaacgagtgtggttttatta

SEQ ID NO: 333788 - DNA, 33 bp, Homo sapien
tgtggtttccatacaatgagtgtggttttatta

SEQ ID NO: 333789 - DNA, 33 bp, Homo sapien
atagacattaggacacagggagtaggtacaggc

SEQ ID NO: 333790 - DNA, 33 bp, Homo sapien
atagacattaggacaccgggagtaggtacaggc

SEQ ID NO: 333791 - DNA, 33 bp, Homo sapien
cactgcctatactgcaccatctataccctactg

SEQ ID NO: 333792 - DNA, 33 bp, Homo sapien
cactgcctatactgcatcatctataccctactg

SEQ ID NO: 333793 - DNA, 33 bp, Homo sapien
caggccagtgcactccaatctgtaatgtgcatg

SEQ ID NO: 333794 - DNA, 33 bp, Homo sapien
caggccagtgcactcctatctgtaatgtgcatg

SEQ ID NO: 333795 - DNA, 33 bp, Homo sapien
atcctgtagggcgtaacgactcagccagtcctg

SEQ ID NO: 333796 - DNA, 33 bp, Homo sapien
atcctgtagggcgtaatgactcagccagtcctg

SEQ ID NO: 333797 - DNA, 33 bp, Homo sapien
aaatactagagaacccagaagtagacctacaca

SEQ ID NO: 333798 - DNA, 33 bp, Homo sapien
aaatactagagaacccggaagtagacctacaca

SEQ ID NO: 333799 - DNA, 33 bp, Homo sapien
tatgactttatacaaaagtttggatctgcgttg

SEQ ID NO: 333800 - DNA, 33 bp, Homo sapien
tatgactttatacaaatgtttggatctgcgttg

SEQ ID NO: 333801 - DNA, 33 bp, Homo sapien
atggtgccattcaaaccgaggcaaaggccaagg

SEQ ID NO: 333802 - DNA, 33 bp, Homo sapien
atggtgccattcaaactgaggcaaaggccaagg

SEQ ID NO: 333803 - DNA, 33 bp, Homo sapien
acgttaaccatcacacagtgtcgtctatgtcaa

SEQ ID NO: 333804 - DNA, 33 bp, Homo sapien
acgttaaccatcacacggtgtcgtctatgtcaa

SEQ ID NO: 333805 - DNA, 33 bp, Homo sapien
ccaaagaacaaacttccaggcttgtctgaggca

SEQ ID NO: 333806 - DNA, 33 bp, Homo sapien
ccaaagaacaaacttcgaggcttgtctgaggca

SEQ ID NO: 333807 - DNA, 33 bp, Homo sapien
ccctgagcctagagccacctttctacaatttcc

SEQ ID NO: 333808 - DNA, 33 bp, Homo sapien
ccctgagcctagagcctcctttctacaatttcc

SEQ ID NO: 333809 - DNA, 33 bp, Homo sapien
ctttcttgtgctttgacgatccctttctcctag

SEQ ID NO: 333810 - DNA, 33 bp, Homo sapien
ctttcttgtgctttgatgatccctttctcctag

SEQ ID NO: 333811 - DNA, 33 bp, Homo sapien
agccttcacagcctcacgtggaatcctcccaca

SEQ ID NO: 333812 - DNA, 33 bp, Homo sapien
agccttcacagcctcatgtggaatcctcccaca

SEQ ID NO: 333813 - DNA, 33 bp, Homo sapien
agactgaaaaggggaaacagataggagccaact

SEQ ID NO: 333814 - DNA, 33 bp, Homo sapien
agactgaaaaggggaagcagataggagccaact

SEQ ID NO: 333815 - DNA, 33 bp, Homo sapien
acaaatggaaaacaccgatttgaaagcaagtgc

SEQ ID NO: 333816 - DNA, 33 bp, Homo sapien
acaaatggaaaacacctatttgaaagcaagtgc

SEQ ID NO: 333817 - DNA, 33 bp, Homo sapien
tcagtcacctttgattaaagtacctggtgcagg

SEQ ID NO: 333818 - DNA, 33 bp, Homo sapien
tcagtcacctttgattgaagtacctggtgcagg

SEQ ID NO: 333819 - DNA, 33 bp, Homo sapien
ttatttttttcttctccatacccttgctccaat

SEQ ID NO: 333820 - DNA, 33 bp, Homo sapien
ttatttttttcttctctatacccttgctccaat

SEQ ID NO: 333821 - DNA, 33 bp, Homo sapien
atcaagtcttattcaccatttgaagacaatgca

SEQ ID NO: 333822 - DNA, 33 bp, Homo sapien
atcaagtcttattcactatttgaagacaatgca

SEQ ID NO: 333823 - DNA, 33 bp, Homo sapien
gagctggaggcaggcagcacaaaccaactgggc

SEQ ID NO: 333824 - DNA, 33 bp, Homo sapien
gagctggaggcaggcatcacaaaccaactgggc

SEQ ID NO: 333825 - DNA, 33 bp, Homo sapien
cgtcactggaaggggccaggtaggatgctgttg

SEQ ID NO: 333826 - DNA, 33 bp, Homo sapien
cgtcactggaaggggcgaggtaggatgctgttg

SEQ ID NO: 333827 - DNA, 33 bp, Homo sapien
cctctttgctttgggtaacagatgaagtcagcc

SEQ ID NO: 333828 - DNA, 33 bp, Homo sapien
cctctttgctttgggtgacagatgaagtcagcc

SEQ ID NO: 333829 - DNA, 33 bp, Homo sapien
gtgctgagttactgtacagtccgtgctcaattg

SEQ ID NO: 333830 - DNA, 33 bp, Homo sapien
gtgctgagttactgtagagtccgtgctcaattg

SEQ ID NO: 333831 - DNA, 33 bp, Homo sapien
tctccaaagatatttacgggttcagatacatca

SEQ ID NO: 333832 - DNA, 33 bp, Homo sapien
tctccaaagatatttatgggttcagatacatca

SEQ ID NO: 333833 - DNA, 33 bp, Homo sapien
acagccacctgggtaacgctggaagcagacctc

SEQ ID NO: 333834 - DNA, 33 bp, Homo sapien
acagccacctgggtaatgctggaagcagacctc

SEQ ID NO: 333835 - DNA, 33 bp, Homo sapien
ttgttatttcagctgcaaggcttgggagtaact

SEQ ID NO: 333836 - DNA, 33 bp, Homo sapien
ttgttatttcagctgcgaggcttgggagtaact

SEQ ID NO: 333837 - DNA, 33 bp, Homo sapien
tggcactgaacactagaaggcatttctccattt

SEQ ID NO: 333838 - DNA, 33 bp, Homo sapien
tggcactgaacactaggaggcatttctccattt

SEQ ID NO: 333839 - DNA, 33 bp, Homo sapien
gcattttcttggacaaacccatagttatatttt

SEQ ID NO: 333840 - DNA, 33 bp, Homo sapien
gcattttcttggacaagcccatagttatatttt

SEQ ID NO: 333841 - DNA, 33 bp, Homo sapien
cccttctttgctgatacaggtagtttttatctt

SEQ ID NO: 333842 - DNA, 33 bp, Homo sapien
cccttctttgctgatataggtagtttttatctt

SEQ ID NO: 333843 - DNA, 33 bp, Homo sapien
agtttcaagttgatgcacaaaggaattaagtgc

SEQ ID NO: 333844 - DNA, 33 bp, Homo sapien
agtttcaagttgatgcgcaaaggaattaagtgc

SEQ ID NO: 333845 - DNA, 33 bp, Homo sapien
cgatctccagccttgacgacaattatccattct

SEQ ID NO: 333846 - DNA, 33 bp, Homo sapien
cgatctccagccttgatgacaattatccattct

SEQ ID NO: 333847 - DNA, 33 bp, Homo sapien
aaataataaagtagcacgagctgcaaagatgtt

SEQ ID NO: 333848 - DNA, 33 bp, Homo sapien
aaataataaagtagcaggagctgcaaagatgtt

SEQ ID NO: 333849 - DNA, 33 bp, Homo sapien
tttttagtgtttaagaaaaaactcgtgctgggc

SEQ ID NO: 333850 - DNA, 33 bp, Homo sapien
tttttagtgtttaagagaaaactcgtgctgggc

SEQ ID NO: 333851 - DNA, 33 bp, Homo sapien
ctgggtctcccgtgaaactcccaagtgtgctca

SEQ ID NO: 333852 - DNA, 33 bp, Homo sapien
ctgggtctcccgtgaagctcccaagtgtgctca

SEQ ID NO: 333853 - DNA, 33 bp, Homo sapien
tggctgagatgccgaccgcagcgatgagctcgc

SEQ ID NO: 333854 - DNA, 33 bp, Homo sapien
tggctgagatgccgactgcagcgatgagctcgc

SEQ ID NO: 333855 - DNA, 33 bp, Homo sapien
gcatctgacgactttacaccaggctggcagggc

SEQ ID NO: 333856 - DNA, 33 bp, Homo sapien
gcatctgacgactttataccaggctggcagggc

SEQ ID NO: 333857 - DNA, 33 bp, Homo sapien
tagcctcaccttctccactggcatggccacctc

SEQ ID NO: 333858 - DNA, 33 bp, Homo sapien
tagcctcaccttctccgctggcatggccacctc

SEQ ID NO: 333859 - DNA, 33 bp, Homo sapien
ctgatttatttcttctcacatttgcaagctgtt

SEQ ID NO: 333860 - DNA, 33 bp, Homo sapien
ctgatttatttcttctgacatttgcaagctgtt

SEQ ID NO: 333861 - DNA, 33 bp, Homo sapien
actgttagcccagtatgaaaattagacgtatca

SEQ ID NO: 333862 - DNA, 33 bp, Homo sapien
actgttagcccagtattaaaattagacgtatca

SEQ ID NO: 333863 - DNA, 33 bp, Homo sapien
cagggctgtgttggtacgcaagcagtcacattg

SEQ ID NO: 333864 - DNA, 33 bp, Homo sapien
cagggctgtgttggtatgcaagcagtcacattg

SEQ ID NO: 333865 - DNA, 33 bp, Homo sapien
cccagaacaaggatgtcaaccgcacactggctc

SEQ ID NO: 333866 - DNA, 33 bp, Homo sapien
cccagaacaaggatgttaaccgcacactggctc

SEQ ID NO: 333867 - DNA, 33 bp, Homo sapien
agctcattttaattcgcatgtatttactttgtg

SEQ ID NO: 333868 - DNA, 33 bp, Homo sapien
agctcattttaattcggatgtatttactttgtg

SEQ ID NO: 333869 - DNA, 33 bp, Homo sapien
ttgcacacctacaaaacgggatatgctcctgat

SEQ ID NO: 333870 - DNA, 33 bp, Homo sapien
ttgcacacctacaaaatgggatatgctcctgat

SEQ ID NO: 333871 - DNA, 33 bp, Homo sapien
cccgtttaagtccccaatgaacactaactgccc

SEQ ID NO: 333872 - DNA, 33 bp, Homo sapien
cccgtttaagtccccagtgaacactaactgccc

SEQ ID NO: 333873 - DNA, 33 bp, Homo sapien
taggaaagctggagagcctacagtaatagacaa

SEQ ID NO: 333874 - DNA, 33 bp, Homo sapien
taggaaagctggagaggctacagtaatagacaa

SEQ ID NO: 333875 - DNA, 33 bp, Homo sapien
tcagactatgacctcacggcctagaaatttacc

SEQ ID NO: 333876 - DNA, 33 bp, Homo sapien
tcagactatgacctcatggcctagaaatttacc

SEQ ID NO: 333877 - DNA, 33 bp, Homo sapien
gggtgtcactgaagataagcggtgacagtaccg

SEQ ID NO: 333878 - DNA, 33 bp, Homo sapien
gggtgtcactgaagatgagcggtgacagtaccg

SEQ ID NO: 333879 - DNA, 33 bp, Homo sapien
actggttcatgatggacacacgggcggccacgc

SEQ ID NO: 333880 - DNA, 33 bp, Homo sapien
actggttcatgatggatacacgggcggccacgc

SEQ ID NO: 333881 - DNA, 33 bp, Homo sapien; identical to SEQ ID NO: 333879

SEQ ID NO: 333882 - DNA, 33 bp, Homo sapien; identical to SEQ ID NO: 333880

SEQ ID NO: 333883 - DNA, 33 bp, Homo sapien
gtaggataaccacagacatccacaaagagtaaa

SEQ ID NO: 333884 - DNA, 33 bp, Homo sapien
gtaggataaccacagagatccacaaagagtaaa

SEQ ID NO: 333885 - DNA, 33 bp, Homo sapien
acatttgcagaataaaatcctacagaagaaatc

SEQ ID NO: 333886 - DNA, 33 bp, Homo sapien
acatttgcagaataaagtcctacagaagaaatc

SEQ ID NO: 333887 - DNA, 33 bp, Homo sapien
aatgctgatttagttaaaagagagtgatgcaga

SEQ ID NO: 333888 - DNA, 33 bp, Homo sapien
aatgctgatttagttagaagagagtgatgcaga

SEQ ID NO: 333889 - DNA, 33 bp, Homo sapien
agaggtgactcacataccctggtgttctgtgac

SEQ ID NO: 333890 - DNA, 33 bp, Homo sapien
agaggtgactcacatatcctggtgttctgtgac

SEQ ID NO: 333891 - DNA, 33 bp, Homo sapien
tccaaaatgtacgtgacaaaatggtggaaatat

SEQ ID NO: 333892 - DNA, 33 bp, Homo sapien
tccaaaatgtacgtgataaaatggtggaaatat

SEQ ID NO: 333893 - DNA, 33 bp, Homo sapien
gcattctataatgtcactccaaaatgtacgtga

SEQ ID NO: 333894 - DNA, 33 bp, Homo sapien
gcattctataatgtcattccaaaatgtacgtga

SEQ ID NO: 333895 - DNA, 33 bp, Homo sapien
agcacaaatctggaacggatgagtgttgggact

SEQ ID NO: 333896 - DNA, 33 bp, Homo sapien
agcacaaatctggaactgatgagtgttgggact

SEQ ID NO: 333897 - DNA, 33 bp, Homo sapien
ctcagatgtggaaaaccccatgtgcaaggaaca

SEQ ID NO: 333898 - DNA, 33 bp, Homo sapien
ctcagatgtggaaaactccatgtgcaaggaaca

SEQ ID NO: 333899 - DNA, 33 bp, Homo sapien
actgtttggcaatttcgaataaagttaagtaca

SEQ ID NO: 333900 - DNA, 33 bp, Homo sapien
actgtttggcaatttctaataaagttaagtaca

SEQ ID NO: 333901 - DNA, 33 bp, Homo sapien
cttcccagatgcaggacgagaactcggacaaag

SEQ ID NO: 333902 - DNA, 33 bp, Homo sapien
cttcccagatgcaggatgagaactcggacaaag

SEQ ID NO: 333903 - DNA, 33 bp, Homo sapien
ccatgaatcagtgtaaatcatggtttttcaata

SEQ ID NO: 333904 - DNA, 33 bp, Homo sapien
ccatgaatcagtgtaactcatggtttttcaata

SEQ ID NO: 333905 - DNA, 33 bp, Homo sapien
ggggcagcttgtctccactaacttaggaccaaa

SEQ ID NO: 333906 - DNA, 33 bp, Homo sapien
ggggcagcttgtctccgctaacttaggaccaaa

SEQ ID NO: 333907 - DNA, 33 bp, Homo sapien
cgtaacacagcataaaatctaccaacagaatac

SEQ ID NO: 333908 - DNA, 33 bp, Homo sapien
cgtaacacagcataaagtctaccaacagaatac

SEQ ID NO: 333909 - DNA, 33 bp, Homo sapien
gtttccaggctaaaagacatacaagaggccttt

SEQ ID NO: 333910 - DNA, 33 bp, Homo sapien
gtttccaggctaaaaggcatacaagaggccttt

SEQ ID NO: 333911 - DNA, 33 bp, Homo sapien
ggctggcatccctttgaaacagtgctttgggtc

SEQ ID NO: 333912 - DNA, 33 bp, Homo sapien
ggctggcatccctttggaacagtgctttgggtc

SEQ ID NO: 333913 - DNA, 33 bp, Homo sapien
agatacaataatcacaagccccaggaagagcag

SEQ ID NO: 333914 - DNA, 33 bp, Homo sapien
agatacaataatcacaggccccaggaagagcag

SEQ ID NO: 333915 - DNA, 33 bp, Homo sapien
aagtcacaggaagagagacgactggaggctaca

SEQ ID NO: 333916 - DNA, 33 bp, Homo sapien
aagtcacaggaagagatacgactggaggctaca

SEQ ID NO: 333917 - DNA, 33 bp, Homo sapien
catgaggagtaggaataaacaacttatcttgac

SEQ ID NO: 333918 - DNA, 33 bp, Homo sapien
catgaggagtaggaatcaacaacttatcttgac

SEQ ID NO: 333919 - DNA, 33 bp, Homo sapien
actgttttgttcccatcatgaatagatcagatg

SEQ ID NO: 333920 - DNA, 33 bp, Homo sapien
actgttttgttcccatgatgaatagatcagatg

SEQ ID NO: 333921 - DNA, 33 bp, Homo sapien
atataatatccatggaacccatctgggaaacac

SEQ ID NO: 333922 - DNA, 33 bp, Homo sapien
atataatatccatggagcccatctgggaaacac

SEQ ID NO: 333923 - DNA, 33 bp, Homo sapien
cagaggaggagcctgtcaaaatagcagagtccc

SEQ ID NO: 333924 - DNA, 33 bp, Homo sapien
cagaggaggagcctgttaaaatagcagagtccc

SEQ ID NO: 333925 - DNA, 33 bp, Homo sapien
cttcccattaaggcaactaggtgaatgaagcag

SEQ ID NO: 333926 - DNA, 33 bp, Homo sapien
cttcccattaaggcaagtaggtgaatgaagcag

SEQ ID NO: 333927 - DNA, 33 bp, Homo sapien
ccttgtcctgcatataactgcctacaggcctga

SEQ ID NO: 333928 - DNA, 33 bp, Homo sapien
ccttgtcctgcatatatctgcctacaggcctga

SEQ ID NO: 333929 - DNA, 33 bp, Homo sapien
gtgagtggtgagggacaatgaagagaagtgggt

SEQ ID NO: 333930 - DNA, 33 bp, Homo sapien
gtgagtggtgagggacgatgaagagaagtgggt

SEQ ID NO: 333931 - DNA, 33 bp, Homo sapien
gcccacgatccgctgaaccttaacaggagccct

SEQ ID NO: 333932 - DNA, 33 bp, Homo sapien
gcccacgatccgctgacccttaacaggagccct

SEQ ID NO: 333933 - DNA, 33 bp, Homo sapien
cattgtgtacagcacacattcgtcagcatttaa

SEQ ID NO: 333934 - DNA, 33 bp, Homo sapien
cattgtgtacagcacatattcgtcagcatttaa

SEQ ID NO: 333935 - DNA, 33 bp, Homo sapien
cgggaaactagctggaacagtctggactctgtt

SEQ ID NO: 333936 - DNA, 33 bp, Homo sapien
cgggaaactagctggaccagtctggactctgtt

SEQ ID NO: 333937 - DNA, 33 bp, Homo sapien
tgcacttcagggacacaagtaaacctcccagac

SEQ ID NO: 333938 - DNA, 33 bp, Homo sapien
tgcacttcagggacacgagtaaacctcccagac

SEQ ID NO: 333939 - DNA, 33 bp, Homo sapien
tttatgttgggcaccacgaagagaaccaactgg

SEQ ID NO: 333940 - DNA, 33 bp, Homo sapien
tttatgttgggcaccatgaagagaaccaactgg

SEQ ID NO: 333941 - DNA, 33 bp, Homo sapien
gctgctatgatcacccaagctattagcaatcgt

SEQ ID NO: 333942 - DNA, 33 bp, Homo sapien
gctgctatgatcacccgagctattagcaatcgt

SEQ ID NO: 333943 - DNA, 33 bp, Homo sapien
atggagaaggatagacagtagatctgtggggcc

SEQ ID NO: 333944 - DNA, 33 bp, Homo sapien
atggagaaggatagacggtagatctgtggggcc

SEQ ID NO: 333945 - DNA, 33 bp, Homo sapien
ctccgtgggtgttgaacgaaagataggaaagac

SEQ ID NO: 333946 - DNA, 33 bp, Homo sapien
ctccgtgggtgttgaatgaaagataggaaagac

SEQ ID NO: 333947 - DNA, 33 bp, Homo sapien
ttgcaccttgttctcacgtcttctaagagattc

SEQ ID NO: 333948 - DNA, 33 bp, Homo sapien
ttgcaccttgttctcatgtcttctaagagattc

SEQ ID NO: 333949 - DNA, 33 bp, Homo sapien
tgctgcagcaaagataggagttggaacttatat

SEQ ID NO: 333950 - DNA, 33 bp, Homo sapien
tgctgcagcaaagatatgagttggaacttatat

SEQ ID NO: 333951 - DNA, 33 bp, Homo sapien
aagccagctagtaagcaacggagctgagattca

SEQ ID NO: 333952 - DNA, 33 bp, Homo sapien
aagccagctagtaagcgacggagctgagattca

SEQ ID NO: 333953 - DNA, 33 bp, Homo sapien
ggagacttcctctacaaaacaagagcctcggct

SEQ ID NO: 333954 - DNA, 33 bp, Homo sapien
ggagacttcctctacataacaagagcctcggct

SEQ ID NO: 333955 - DNA, 33 bp, Homo sapien
gtcacccacccgttcaacactaagtggccatct

SEQ ID NO: 333956 - DNA, 33 bp, Homo sapien
gtcacccacccgttcatcactaagtggccatct

SEQ ID NO: 333957 - DNA, 33 bp, Homo sapien
gaggcgcaatgtcctccaagtcaccaaacccat

SEQ ID NO: 333958 - DNA, 33 bp, Homo sapien
gaggcgcaatgtcctctaagtcaccaaacccat

SEQ ID NO: 333959 - DNA, 33 bp, Homo sapien
gaagggcagggaagccacagatagaaacacata

SEQ ID NO: 333960 - DNA, 33 bp, Homo sapien
gaagggcagggaagccgcagatagaaacacata

SEQ ID NO: 333961 - DNA, 33 bp, Homo sapien
gctccagaaagagccccggctgtattcatatgt

SEQ ID NO: 333962 - DNA, 33 bp, Homo sapien
gctccagaaagagccctggctgtattcatatgt

SEQ ID NO: 333963 - DNA, 33 bp, Homo sapien
acatagcaggcattaactcattgttgacttatt

SEQ ID NO: 333964 - DNA, 33 bp, Homo sapien
acatagcaggcattaattcattgttgacttatt

SEQ ID NO: 333965 - DNA, 33 bp, Homo sapien
gagaagctcaacaagacgggcaagtgtgctcag

SEQ ID NO: 333966 - DNA, 33 bp, Homo sapien
gagaagctcaacaagatgggcaagtgtgctcag

SEQ ID NO: 333967 - DNA, 33 bp, Homo sapien
actggctattggactgcaaaggaggtcctgcat

SEQ ID NO: 333968 - DNA, 33 bp, Homo sapien
actggctattggactggaaaggaggtcctgcat

SEQ ID NO: 333969 - DNA, 33 bp, Homo sapien
atgtagcctgcaatcacggaacaaatcgattaa

SEQ ID NO: 333970 - DNA, 33 bp, Homo sapien
atgtagcctgcaatcatggaacaaatcgattaa

SEQ ID NO: 333971 - DNA, 33 bp, Homo sapien
tatagaaaaggtaatacattgcactagaacatt

SEQ ID NO: 333972 - DNA, 33 bp, Homo sapien
tatagaaaaggtaatatattgcactagaacatt

SEQ ID NO: 333973 - DNA, 33 bp, Homo sapien
taagtccagtctagaactgaaaaatagatgaac

SEQ ID NO: 333974 - DNA, 33 bp, Homo sapien
taagtccagtctagaattgaaaaatagatgaac

SEQ ID NO: 333975 - DNA, 33 bp, Homo sapien
catcactatctccagcactcctgaacttacatt

SEQ ID NO: 333976 - DNA, 33 bp, Homo sapien
catcactatctccagcgctcctgaacttacatt

SEQ ID NO: 333977 - DNA, 33 bp, Homo sapien
tgatgcggccagaaaagaagaaaattatttgac

SEQ ID NO: 333978 - DNA, 33 bp, Homo sapien
tgatgcggccagaaaataagaaaattatttgac

SEQ ID NO: 333979 - DNA, 33 bp, Homo sapien
gttgtggatgaaataacgtgttatctggaattt

SEQ ID NO: 333980 - DNA, 33 bp, Homo sapien
gttgtggatgaaataatgtgttatctggaattt

SEQ ID NO: 333981 - DNA, 33 bp, Homo sapien
gaatcaagatagtcaacggcagtggctctttcc

SEQ ID NO: 333982 - DNA, 33 bp, Homo sapien
gaatcaagatagtcaatggcagtggctctttcc

SEQ ID NO: 333983 - DNA, 33 bp, Homo sapien
cacagcgcctgagaacactggaaaagacaatga

SEQ ID NO: 333984 - DNA, 33 bp, Homo sapien
cacagcgcctgagaactctggaaaagacaatga

SEQ ID NO: 333985 - DNA, 33 bp, Homo sapien
gcagaatctgtgcatacggacaaagggaggagg

SEQ ID NO: 333986 - DNA, 33 bp, Homo sapien
gcagaatctgtgcatatggacaaagggaggagg

SEQ ID NO: 333987 - DNA, 33 bp, Homo sapien
tcaaacagaaaatgtaaacactacggacagaat

SEQ ID NO: 333988 - DNA, 33 bp, Homo sapien
tcaaacagaaaatgtacacactacggacagaat

SEQ ID NO: 333989 - DNA, 33 bp, Homo sapien
atacaacagggaatgaaacacccacagtattgg

SEQ ID NO: 333990 - DNA, 33 bp, Homo sapien
atacaacagggaatgacacacccacagtattgg

SEQ ID NO: 333991 - DNA, 33 bp, Homo sapien
gctaggcattgaagtcaccatgctgttatttct

SEQ ID NO: 333992 - DNA, 33 bp, Homo sapien
gctaggcattgaagtcgccatgctgttatttct

SEQ ID NO: 333993 - DNA, 33 bp, Homo sapien
tccatcatgtccatcactgacctcctgtagacc

SEQ ID NO: 333994 - DNA, 33 bp, Homo sapien
tccatcatgtccatcagtgacctcctgtagacc

SEQ ID NO: 333995 - DNA, 33 bp, Homo sapien
agcaccagactcctggaataatgcatttgtggc

SEQ ID NO: 333996 - DNA, 33 bp, Homo sapien
agcaccagactcctgggataatgcatttgtggc

SEQ ID NO: 333997 - DNA, 33 bp, Homo sapien
ccacagaaaactgtcacggcagataatcctcct

SEQ ID NO: 333998 - DNA, 33 bp, Homo sapien
ccacagaaaactgtcatggcagataatcctcct

SEQ ID NO: 333999 - DNA, 33 bp, Homo sapien
atatatgaaactattcacacaatttaattttgg

SEQ ID NO: 334000 - DNA, 33 bp, Homo sapien
atatatgaaactattcgcacaatttaattttgg

SEQ ID NO: 334001 - DNA, 33 bp, Homo sapien
ttttcagagctttcgcaatgctatttggatcct

SEQ ID NO: 334002 - DNA, 33 bp, Homo sapien
ttttcagagctttcgctatgctatttggatcct

SEQ ID NO: 334003 - DNA, 33 bp, Homo sapien
atcagatatattgtcaccagatacagtagacta

SEQ ID NO: 334004 - DNA, 33 bp, Homo sapien
atcagatatattgtcatcagatacagtagacta

SEQ ID NO: 334005 - DNA, 33 bp, Homo sapien
gagaagtcaccgtgtacgaaccaggagcagggc

SEQ ID NO: 334006 - DNA, 33 bp, Homo sapien
gagaagtcaccgtgtatgaaccaggagcagggc

SEQ ID NO: 334007 - DNA, 33 bp, Homo sapien
tcctcaggaatcgtcacgctggcactaatgcaa

SEQ ID NO: 334008 - DNA, 33 bp, Homo sapien
tcctcaggaatcgtcatgctggcactaatgcaa

SEQ ID NO: 334009 - DNA, 33 bp, Homo sapien
tctgattatctcagtactaaagatgccacttct

SEQ ID NO: 334010 - DNA, 33 bp, Homo sapien
tctgattatctcagtattaaagatgccacttct

SEQ ID NO: 334011 - DNA, 33 bp, Homo sapien
ctctatcctccgacaagtcttattgccaaattt

SEQ ID NO: 334012 - DNA, 33 bp, Homo sapien
ctctatcctccgacaattcttattgccaaattt

SEQ ID NO: 334013 - DNA, 33 bp, Homo sapien
gttttgttttctctgtcaagggcatctatttaa

SEQ ID NO: 334014 - DNA, 33 bp, Homo sapien
gttttgttttctctgttaagggcatctatttaa

SEQ ID NO: 334015 - DNA, 33 bp, Homo sapien
ccagacagagggaatacaggacaaaagaagctc

SEQ ID NO: 334016 - DNA, 33 bp, Homo sapien
ccagacagagggaatagaggacaaaagaagctc

SEQ ID NO: 334017 - DNA, 33 bp, Homo sapien
aagagcaagttctgccacattatcagaaaggac

SEQ ID NO: 334018 - DNA, 33 bp, Homo sapien
aagagcaagttctgccgcattatcagaaaggac

SEQ ID NO: 334019 - DNA, 33 bp, Homo sapien
atttgcatttcaggaacgtgcaggccggggaga

SEQ ID NO: 334020 - DNA, 33 bp, Homo sapien
atttgcatttcaggaatgtgcaggccggggaga

SEQ ID NO: 334021 - DNA, 33 bp, Homo sapien
ctgcaaactgagaatgaaactgtgttattctgg

SEQ ID NO: 334022 - DNA, 33 bp, Homo sapien
ctgcaaactgagaatggaactgtgttattctgg

SEQ ID NO: 334023 - DNA, 33 bp, Homo sapien
aggactgtgtaatgataaaattgattaacttca

SEQ ID NO: 334024 - DNA, 33 bp, Homo sapien
aggactgtgtaatgattaaattgattaacttca

SEQ ID NO: 334025 - DNA, 33 bp, Homo sapien
aggaaagcttcttggacgcaaccttaaaaccac

SEQ ID NO: 334026 - DNA, 33 bp, Homo sapien
aggaaagcttcttggatgcaaccttaaaaccac

SEQ ID NO: 334027 - DNA, 33 bp, Homo sapien
caaccttaaaaccacaactctgatggagtgcct

SEQ ID NO: 334028 - DNA, 33 bp, Homo sapien
caaccttaaaaccacagctctgatggagtgcct

SEQ ID NO: 334029 - DNA, 33 bp, Homo sapien
gttggtttgaaacttaccacttgtcatgggtgc

SEQ ID NO: 334030 - DNA, 33 bp, Homo sapien
gttggtttgaaacttatcacttgtcatgggtgc

SEQ ID NO: 334031 - DNA, 33 bp, Homo sapien
gaggcccatgtgatgcacgggttgaggctctga

SEQ ID NO: 334032 - DNA, 33 bp, Homo sapien
gaggcccatgtgatgcgcgggttgaggctctga

SEQ ID NO: 334033 - DNA, 33 bp, Homo sapien
cccaagctgagtctccccttggtcctcaggacc

SEQ ID NO: 334034 - DNA, 33 bp, Homo sapien
cccaagctgagtctcctcttggtcctcaggacc

SEQ ID NO: 334035 - DNA, 33 bp, Homo sapien
tatccctgaattaggacgtgtcacatgaacagg

SEQ ID NO: 334036 - DNA, 33 bp, Homo sapien
tatccctgaattaggatgtgtcacatgaacagg

SEQ ID NO: 334037 - DNA, 33 bp, Homo sapien
tattcattattgttaccgaatgcgtacatttat

SEQ ID NO: 334038 - DNA, 33 bp, Homo sapien
tattcattattgttactgaatgcgtacatttat

SEQ ID NO: 334039 - DNA, 33 bp, Homo sapien
ggagaaaacgggtgaaataaggtgagagagtgt

SEQ ID NO: 334040 - DNA, 33 bp, Homo sapien
ggagaaaacgggtgaagtaaggtgagagagtgt

SEQ ID NO: 334041 - DNA, 33 bp, Homo sapien
ggccccctactagtccgaactcattttgagggt

SEQ ID NO: 334042 - DNA, 33 bp, Homo sapien
ggccccctactagtcctaactcattttgagggt

SEQ ID NO: 334043 - DNA, 33 bp, Homo sapien
agcccttttcctttgacatccacaaataccata

SEQ ID NO: 334044 - DNA, 33 bp, Homo sapien
agcccttttcctttgagatccacaaataccata

SEQ ID NO: 334045 - DNA, 33 bp, Homo sapien
cttcttagagcttgtccgaatcccctcacacac

SEQ ID NO: 334046 - DNA, 33 bp, Homo sapien
cttcttagagcttgtctgaatcccctcacacac

SEQ ID NO: 334047 - DNA, 33 bp, Homo sapien
gcttgtcacagtaccacgctgggagggcttctg

SEQ ID NO: 334048 - DNA, 33 bp, Homo sapien
gcttgtcacagtaccatgctgggagggcttctg

SEQ ID NO: 334049 - DNA, 33 bp, Homo sapien
aacttcatgtactctacctggaaaccttattct

SEQ ID NO: 334050 - DNA, 33 bp, Homo sapien
aacttcatgtactctatctggaaaccttattct

SEQ ID NO: 334051 - DNA, 33 bp, Homo sapien
aaaaatactctttccagcaggtagaagctagaa

SEQ ID NO: 334052 - DNA, 33 bp, Homo sapien
aaaaatactctttccatcaggtagaagctagaa

SEQ ID NO: 334053 - DNA, 33 bp, Homo sapien
tgagattctactgccacaaaaagtggtgcagcc

SEQ ID NO: 334054 - DNA, 33 bp, Homo sapien
tgagattctactgccataaaaagtggtgcagcc

SEQ ID NO: 334055 - DNA, 33 bp, Homo sapien
ttaacaatatcacaaacgcactctgaattctga

SEQ ID NO: 334056 - DNA, 33 bp, Homo sapien
ttaacaatatcacaaatgcactctgaattctga

SEQ ID NO: 334057 - DNA, 33 bp, Homo sapien
ctcatatacaactcccagaactcctgattccat

SEQ ID NO: 334058 - DNA, 33 bp, Homo sapien
ctcatatacaactcccggaactcctgattccat

SEQ ID NO: 334059 - DNA, 33 bp, Homo sapien
gtatgcacagagaggaacaaaatgctgagagtg

SEQ ID NO: 334060 - DNA, 33 bp, Homo sapien
gtatgcacagagaggagcaaaatgctgagagtg

SEQ ID NO: 334061 - DNA, 33 bp, Homo sapien
agggagcataccaaagaattgttcaaacctttg

SEQ ID NO: 334062 - DNA, 33 bp, Homo sapien
agggagcataccaaaggattgttcaaacctttg

SEQ ID NO: 334063 - DNA, 33 bp, Homo sapien
gtctttggtcttcagtaacacacccagatgctg

SEQ ID NO: 334064 - DNA, 33 bp, Homo sapien
gtctttggtcttcagtgacacacccagatgctg

SEQ ID NO: 334065 - DNA, 33 bp, Homo sapien
atgctcaattaaaatcagagaaggcagaaaaag

SEQ ID NO: 334066 - DNA, 33 bp, Homo sapien
atgctcaattaaaatcggagaaggcagaaaaag

SEQ ID NO: 334067 - DNA, 33 bp, Homo sapien
taagctcaaatgaacacgaacaaaagctagaag

SEQ ID NO: 334068 - DNA, 33 bp, Homo sapien
taagctcaaatgaacatgaacaaaagctagaag

SEQ ID NO: 334069 - DNA, 33 bp, Homo sapien
gtttggaatatggacaagatgtggcctctagct

SEQ ID NO: 334070 - DNA, 33 bp, Homo sapien
gtttggaatatggacaggatgtggcctctagct

SEQ ID NO: 334071 - DNA, 33 bp, Homo sapien
ctgtggattatttcctcaaatgtggtataactt

SEQ ID NO: 334072 - DNA, 33 bp, Homo sapien
ctgtggattatttccttaaatgtggtataactt

SEQ ID NO: 334073 - DNA, 33 bp, Homo sapien
tctgttgccatctcgacatattcacagatgtat

SEQ ID NO: 334074 - DNA, 33 bp, Homo sapien
tctgttgccatctcgatatattcacagatgtat

SEQ ID NO: 334075 - DNA, 33 bp, Homo sapien
gcttccagtttcacccccaagatatagcagctg

SEQ ID NO: 334076 - DNA, 33 bp, Homo sapien
gcttccagtttcaccctcaagatatagcagctg

SEQ ID NO: 334077 - DNA, 33 bp, Homo sapien
catgtaaagaattctcaaaacacaacagtaaaa

SEQ ID NO: 334078 - DNA, 33 bp, Homo sapien
catgtaaagaattctcgaaacacaacagtaaaa

SEQ ID NO: 334079 - DNA, 33 bp, Homo sapien
gtttcttacactttttaaatgaagtttcacaat

SEQ ID NO: 334080 - DNA, 33 bp, Homo sapien
gtttcttacacttttttaatgaagtttcacaat

SEQ ID NO: 334081 - DNA, 33 bp, Homo sapien
aatagtgcttaacttaaaggaagtcctacttag

SEQ ID NO: 334082 - DNA, 33 bp, Homo sapien
aatagtgcttaacttagaggaagtcctacttag

SEQ ID NO: 334083 - DNA, 33 bp, Homo sapien
tagagatcacactagaaaagactagaaccttgt

SEQ ID NO: 334084 - DNA, 33 bp, Homo sapien
tagagatcacactagagaagactagaaccttgt

SEQ ID NO: 334085 - DNA, 33 bp, Homo sapien
tttctgggacagccatgaaggacagtagtgaag

SEQ ID NO: 334086 - DNA, 33 bp, Homo sapien
tttctgggacagccattaaggacagtagtgaag

SEQ ID NO: 334087 - DNA, 33 bp, Homo sapien
agggaaatcttctcaacgggaagaaatggccag

SEQ ID NO: 334088 - DNA, 33 bp, Homo sapien
agggaaatcttctcaatgggaagaaatggccag

SEQ ID NO: 334089 - DNA, 33 bp, Homo sapien
aaatttatatccagagaaaatatgcatttcggt

SEQ ID NO: 334090 - DNA, 33 bp, Homo sapien
aaatttatatccagagcaaatatgcatttcggt

SEQ ID NO: 334091 - DNA, 33 bp, Homo sapien
ctttttactgacattgcaaagtactaggccaca

SEQ ID NO: 334092 - DNA, 33 bp, Homo sapien
ctttttactgacattggaaagtactaggccaca

SEQ ID NO: 334093 - DNA, 33 bp, Homo sapien
gattgatctgggtaacaattttttggatatgac

SEQ ID NO: 334094 - DNA, 33 bp, Homo sapien
gattgatctgggtaacgattttttggatatgac

SEQ ID NO: 334095 - DNA, 33 bp, Homo sapien
cctgaaactttctttcaagccatgtgggcatga

SEQ ID NO: 334096 - DNA, 33 bp, Homo sapien
cctgaaactttctttcgagccatgtgggcatga

SEQ ID NO: 334097 - DNA, 33 bp, Homo sapien
gagacttggtgcaggggacagggcaagcttaga

SEQ ID NO: 334098 - DNA, 33 bp, Homo sapien
gagacttggtgcagggtacagggcaagcttaga

SEQ ID NO: 334099 - DNA, 33 bp, Homo sapien
caacagtgaatccacactgcagatatactacac

SEQ ID NO: 334100 - DNA, 33 bp, Homo sapien
caacagtgaatccacattgcagatatactacac

SEQ ID NO: 334101 - DNA, 33 bp, Homo sapien
ctgactcagcttgtccaaagggccccatgagaa

SEQ ID NO: 334102 - DNA, 33 bp, Homo sapien
ctgactcagcttgtccgaagggccccatgagaa

SEQ ID NO: 334103 - DNA, 33 bp, Homo sapien
tgttggtcctgtaacaataacaggggagatgag

SEQ ID NO: 334104 - DNA, 33 bp, Homo sapien
tgttggtcctgtaacagtaacaggggagatgag

SEQ ID NO: 334105 - DNA, 33 bp, Homo sapien
tgccttaaatcagtaactggctcacttaagttt

SEQ ID NO: 334106 - DNA, 33 bp, Homo sapien
tgccttaaatcagtaattggctcacttaagttt

SEQ ID NO: 334107 - DNA, 33 bp, Homo sapien
gcagcttttgatctggaagatgcattttttatt

SEQ ID NO: 334108 - DNA, 33 bp, Homo sapien
gcagcttttgatctggtagatgcattttttatt

SEQ ID NO: 334109 - DNA, 33 bp, Homo sapien
aatgttattaccttgtcaagtctagtggacact

SEQ ID NO: 334110 - DNA, 33 bp, Homo sapien
aatgttattaccttgttaagtctagtggacact

SEQ ID NO: 334111 - DNA, 33 bp, Homo sapien
gggaaactgctcgtcagcgacttacaaggtggt

SEQ ID NO: 334112 - DNA, 33 bp, Homo sapien
gggaaactgctcgtcatcgacttacaaggtggt

SEQ ID NO: 334113 - DNA, 33 bp, Homo sapien
caacacaccactttacaaaacctgagtctcacc

SEQ ID NO: 334114 - DNA, 33 bp, Homo sapien
caacacaccactttacgaaacctgagtctcacc

SEQ ID NO: 334115 - DNA, 33 bp, Homo sapien
gtgcttggagaggagacggccattagcatggct

SEQ ID NO: 334116 - DNA, 33 bp, Homo sapien
gtgcttggagaggagagggccattagcatggct

SEQ ID NO: 334117 - DNA, 33 bp, Homo sapien
catttctttaaggtgagcattctctacccagga

SEQ ID NO: 334118 - DNA, 33 bp, Homo sapien
catttctttaaggtgatcattctctacccagga

SEQ ID NO: 334119 - DNA, 33 bp, Homo sapien
agccattaagaaattacgagttgaagattagct

SEQ ID NO: 334120 - DNA, 33 bp, Homo sapien
agccattaagaaattatgagttgaagattagct

SEQ ID NO: 334121 - DNA, 33 bp, Homo sapien
caggcagactcagttacgggaacccgtgtggcc

SEQ ID NO: 334122 - DNA, 33 bp, Homo sapien
caggcagactcagttatgggaacccgtgtggcc

SEQ ID NO: 334123 - DNA, 33 bp, Homo sapien
tctaatctggttttaccattcagcttggtatct

SEQ ID NO: 334124 - DNA, 33 bp, Homo sapien
tctaatctggttttactattcagcttggtatct

SEQ ID NO: 334125 - DNA, 33 bp, Homo sapien
cactgctttttgaaataacttaggtcagctctt

SEQ ID NO: 334126 - DNA, 33 bp, Homo sapien
cactgctttttgaaatgacttaggtcagctctt

SEQ ID NO: 334127 - DNA, 33 bp, Homo sapien
gagaaaatttttgagacaataatggctgagaat

SEQ ID NO: 334128 - DNA, 33 bp, Homo sapien
gagaaaatttttgagataataatggctgagaat

SEQ ID NO: 334129 - DNA, 33 bp, Homo sapien
acaacataaacagtgaactttcaaaaggactga

SEQ ID NO: 334130 - DNA, 33 bp, Homo sapien
acaacataaacagtgacctttcaaaaggactga

SEQ ID NO: 334131 - DNA, 33 bp, Homo sapien
ttaacatacagataacagatggaggtctactat

SEQ ID NO: 334132 - DNA, 33 bp, Homo sapien
ttaacatacagataacggatggaggtctactat

SEQ ID NO: 334133 - DNA, 33 bp, Homo sapien
ccaactagggatgtcaagacagaaaaataactc

SEQ ID NO: 334134 - DNA, 33 bp, Homo sapien
ccaactagggatgtcaggacagaaaaataactc

SEQ ID NO: 334135 - DNA, 33 bp, Homo sapien
aacacaacagaaatgcaaataatcacaacatag

SEQ ID NO: 334136 - DNA, 33 bp, Homo sapien
aacacaacagaaatgcgaataatcacaacatag

SEQ ID NO: 334137 - DNA, 33 bp, Homo sapien
tccctggagagcagacaggcgtgcccttagctt

SEQ ID NO: 334138 - DNA, 33 bp, Homo sapien
tccctggagagcagaccggcgtgcccttagctt

SEQ ID NO: 334139 - DNA, 33 bp, Homo sapien
ccatgaagtgtcttaaatgtattactgttaatg

SEQ ID NO: 334140 - DNA, 33 bp, Homo sapien
ccatgaagtgtcttaagtgtattactgttaatg

SEQ ID NO: 334141 - DNA, 33 bp, Homo sapien
taaaggaagcagcagacgaaagacaaaggactt

SEQ ID NO: 334142 - DNA, 33 bp, Homo sapien
taaaggaagcagcagatgaaagacaaaggactt

SEQ ID NO: 334143 - DNA, 33 bp, Homo sapien
aacctactagtaagcccatcaaatatattcttt

SEQ ID NO: 334144 - DNA, 33 bp, Homo sapien
aacctactagtaagcctatcaaatatattcttt

SEQ ID NO: 334145 - DNA, 33 bp, Homo sapien
actttaaaaaggagtcaataaatgggactaaca

SEQ ID NO: 334146 - DNA, 33 bp, Homo sapien
actttaaaaaggagtcgataaatgggactaaca

SEQ ID NO: 334147 - DNA, 33 bp, Homo sapien
aaccacttgagggaccccttccatgagccactt

SEQ ID NO: 334148 - DNA, 33 bp, Homo sapien
aaccacttgagggacctcttccatgagccactt

SEQ ID NO: 334149 - DNA, 33 bp, Homo sapien
ggagcaacttcatcaactagagtgcaatgctga

SEQ ID NO: 334150 - DNA, 33 bp, Homo sapien
ggagcaacttcatcaagtagagtgcaatgctga

SEQ ID NO: 334151 - DNA, 33 bp, Homo sapien
ctttttctcccagtcacgtcagtaaggtcgttt

SEQ ID NO: 334152 - DNA, 33 bp, Homo sapien
ctttttctcccagtcatgtcagtaaggtcgttt

SEQ ID NO: 334153 - DNA, 33 bp, Homo sapien
tttcaatgaattgtcaaaaagctagctgcaaca

SEQ ID NO: 334154 - DNA, 33 bp, Homo sapien
tttcaatgaattgtcagaaagctagctgcaaca

SEQ ID NO: 334155 - DNA, 33 bp, Homo sapien
gccaccgtgcagggccaaaagtcttttattaat

SEQ ID NO: 334156 - DNA, 33 bp, Homo sapien
gccaccgtgcagggccgaaagtcttttattaat

SEQ ID NO: 334157 - DNA, 33 bp, Homo sapien
acagcctttatgctagcccagtgtcctgtgtat

SEQ ID NO: 334158 - DNA, 33 bp, Homo sapien
acagcctttatgctagtccagtgtcctgtgtat

SEQ ID NO: 334159 - DNA, 33 bp, Homo sapien
tcgtaactttgcgtcaaattattttggtctaaa

SEQ ID NO: 334160 - DNA, 33 bp, Homo sapien
tcgtaactttgcgtcagattattttggtctaaa

SEQ ID NO: 334161 - DNA, 33 bp, Homo sapien
cctttagaaattctgagaggttcccatgcagct

SEQ ID NO: 334162 - DNA, 33 bp, Homo sapien
cctttagaaattctgataggttcccatgcagct

SEQ ID NO: 334163 - DNA, 33 bp, Homo sapien
ggtcactcggtgatcccgctggacaagcaatgt

SEQ ID NO: 334164 - DNA, 33 bp, Homo sapien
ggtcactcggtgatcctgctggacaagcaatgt

SEQ ID NO: 334165 - DNA, 33 bp, Homo sapien
gctttgaaaaacgtctaaaataggagtaagtgg

SEQ ID NO: 334166 - DNA, 33 bp, Homo sapien
gctttgaaaaacgtctgaaataggagtaagtgg

SEQ ID NO: 334167 - DNA, 33 bp, Homo sapien
cagctttgcacactcaatgaaaatggatggctg

SEQ ID NO: 334168 - DNA, 33 bp, Homo sapien
cagctttgcacactcagtgaaaatggatggctg

SEQ ID NO: 334169 - DNA, 33 bp, Homo sapien
ttcttagtaagcagaacgtagtatggattctac

SEQ ID NO: 334170 - DNA, 33 bp, Homo sapien
ttcttagtaagcagaaggtagtatggattctac

SEQ ID NO: 334171 - DNA, 33 bp, Homo sapien
tttcatcgtatagtaacgcttaacattgagtag

SEQ ID NO: 334172 - DNA, 33 bp, Homo sapien
tttcatcgtatagtaatgcttaacattgagtag

SEQ ID NO: 334173 - DNA, 33 bp, Homo sapien
tggatatggcataggacggattacagcaaagct

SEQ ID NO: 334174 - DNA, 33 bp, Homo sapien
tggatatggcataggatggattacagcaaagct

SEQ ID NO: 334175 - DNA, 33 bp, Homo sapien
ggaaatgaagaacctcagaaatgtgagtggcca

SEQ ID NO: 334176 - DNA, 33 bp, Homo sapien
ggaaatgaagaacctcggaaatgtgagtggcca

SEQ ID NO: 334177 - DNA, 33 bp, Homo sapien
aaaacacaggcagccaatcaaagtaccagcacc

SEQ ID NO: 334178 - DNA, 33 bp, Homo sapien
aaaacacaggcagccagtcaaagtaccagcacc

SEQ ID NO: 334179 - DNA, 33 bp, Homo sapien
tatttttatagctgcaatgaaactggtcttgtg

SEQ ID NO: 334180 - DNA, 33 bp, Homo sapien
tatttttatagctgcagtgaaactggtcttgtg

SEQ ID NO: 334181 - DNA, 33 bp, Homo sapien
aatctctttaagaagaatatcggatggtagttt

SEQ ID NO: 334182 - DNA, 33 bp, Homo sapien
aatctctttaagaagagtatcggatggtagttt

SEQ ID NO: 334183 - DNA, 33 bp, Homo sapien
tagatagacaggtagaatatatagtcatgtacc

SEQ ID NO: 334184 - DNA, 33 bp, Homo sapien
tagatagacaggtagagtatatagtcatgtacc

SEQ ID NO: 334185 - DNA, 33 bp, Homo sapien
atagacatgtaaaatagggtgaatgcatgatac

SEQ ID NO: 334186 - DNA, 33 bp, Homo sapien
atagacatgtaaaatatggtgaatgcatgatac

SEQ ID NO: 334187 - DNA, 33 bp, Homo sapien
atactgtatttgtctcaagttgtcttgactctg

SEQ ID NO: 334188 - DNA, 33 bp, Homo sapien
atactgtatttgtctccagttgtcttgactctg

SEQ ID NO: 334189 - DNA, 33 bp, Homo sapien
acagtaatattcatcacagaagtccgttttcag

SEQ ID NO: 334190 - DNA, 33 bp, Homo sapien
acagtaatattcatcatagaagtccgttttcag

SEQ ID NO: 334191 - DNA, 33 bp, Homo sapien
gatattaaagctctagaatctgggaagagcaca

SEQ ID NO: 334192 - DNA, 33 bp, Homo sapien
gatattaaagctctagtatctgggaagagcaca

SEQ ID NO: 334193 - DNA, 33 bp, Homo sapien
gcactccaatcacctcacttgtgaccaccttat

SEQ ID NO: 334194 - DNA, 33 bp, Homo sapien
gcactccaatcacctcgcttgtgaccaccttat

SEQ ID NO: 334195 - DNA, 33 bp, Homo sapien
cttaagccgttggtataaggataaaataaaata

SEQ ID NO: 334196 - DNA, 33 bp, Homo sapien
cttaagccgttggtatgaggataaaataaaata

SEQ ID NO: 334197 - DNA, 33 bp, Homo sapien
acctgctaaattcacacctctcctaaaaatgct

SEQ ID NO: 334198 - DNA, 33 bp, Homo sapien
acctgctaaattcacagctctcctaaaaatgct

SEQ ID NO: 334199 - DNA, 33 bp, Homo sapien
gcatttggtaattgagaaaaacaaaggaatgat

SEQ ID NO: 334200 - DNA, 33 bp, Homo sapien
gcatttggtaattgaggaaaacaaaggaatgat

SEQ ID NO: 334201 - DNA, 33 bp, Homo sapien
acctcagtacctggtacgtaataagcactccat

SEQ ID NO: 334202 - DNA, 33 bp, Homo sapien
acctcagtacctggtatgtaataagcactccat

SEQ ID NO: 334203 - DNA, 33 bp, Homo sapien
tgcagtttcagataaaagagctgtcactgccgt

SEQ ID NO: 334204 - DNA, 33 bp, Homo sapien
tgcagtttcagataaaggagctgtcactgccgt

SEQ ID NO: 334205 - DNA, 33 bp, Homo sapien
tgttgttcatgcatccaacccactttcctaccc

SEQ ID NO: 334206 - DNA, 33 bp, Homo sapien
tgttgttcatgcatcccacccactttcctaccc

SEQ ID NO: 334207 - DNA, 33 bp, Homo sapien
actttggcttcttggaaaaagtacattacacaa

SEQ ID NO: 334208 - DNA, 33 bp, Homo sapien
actttggcttcttggagaaagtacattacacaa

SEQ ID NO: 334209 - DNA, 33 bp, Homo sapien
tcctgctaatcctaaccctagctcttaaggaga

SEQ ID NO: 334210 - DNA, 33 bp, Homo sapien
tcctgctaatcctaacgctagctcttaaggaga

SEQ ID NO: 334211 - DNA, 33 bp, Homo sapien
atacagtgttgcctcacgtaaaactcaatgtca

SEQ ID NO: 334212 - DNA, 33 bp, Homo sapien
atacagtgttgcctcatgtaaaactcaatgtca

SEQ ID NO: 334213 - DNA, 33 bp, Homo sapien
acataatttaccagtaacacggcttgaatatct

SEQ ID NO: 334214 - DNA, 33 bp, Homo sapien
acataatttaccagtatcacggcttgaatatct

SEQ ID NO: 334215 - DNA, 33 bp, Homo sapien
tctgctgtgagtttccagaggacattgtaagca

SEQ ID NO: 334216 - DNA, 33 bp, Homo sapien
tctgctgtgagtttccggaggacattgtaagca

SEQ ID NO: 334217 - DNA, 33 bp, Homo sapien
gagaagacaaatatagaagtgccttgagttttt

SEQ ID NO: 334218 - DNA, 33 bp, Homo sapien
gagaagacaaatatagcagtgccttgagttttt

SEQ ID NO: 334219 - DNA, 33 bp, Homo sapien
actgagtattgaatccagcacttaggaataata

SEQ ID NO: 334220 - DNA, 33 bp, Homo sapien
actgagtattgaatccggcacttaggaataata

SEQ ID NO: 334221 - DNA, 33 bp, Homo sapien
ctttgtgcctagctgactaaataggaaaggtcc

SEQ ID NO: 334222 - DNA, 33 bp, Homo sapien
ctttgtgcctagctgagtaaataggaaaggtcc

SEQ ID NO: 334223 - DNA, 33 bp, Homo sapien
tgataagccattcttccgaacagaaaccataac

SEQ ID NO: 334224 - DNA, 33 bp, Homo sapien
tgataagccattcttctgaacagaaaccataac

SEQ ID NO: 334225 - DNA, 33 bp, Homo sapien
aagagtggaaacataacgaggggttctggctag

SEQ ID NO: 334226 - DNA, 33 bp, Homo sapien
aagagtggaaacataatgaggggttctggctag

SEQ ID NO: 334227 - DNA, 33 bp, Homo sapien
ttgcttgtgaaacatacggtcatgtgcatggat

SEQ ID NO: 334228 - DNA, 33 bp, Homo sapien
ttgcttgtgaaacatatggtcatgtgcatggat

SEQ ID NO: 334229 - DNA, 33 bp, Homo sapien
cacagctgtgtagcaaacattttccttctctct

SEQ ID NO: 334230 - DNA, 33 bp, Homo sapien
cacagctgtgtagcaaccattttccttctctct

SEQ ID NO: 334231 - DNA, 33 bp, Homo sapien
ttgccaatcactcttaccactaggaagcttttc

SEQ ID NO: 334232 - DNA, 33 bp, Homo sapien
ttgccaatcactcttatcactaggaagcttttc

SEQ ID NO: 334233 - DNA, 33 bp, Homo sapien
gattctgtatttagaacatcacatagagctctt

SEQ ID NO: 334234 - DNA, 33 bp, Homo sapien
gattctgtatttagaatatcacatagagctctt

SEQ ID NO: 334235 - DNA, 33 bp, Homo sapien
gctgtttgttttttcagtcctcacctcaatgac

SEQ ID NO: 334236 - DNA, 33 bp, Homo sapien
gctgtttgttttttcattcctcacctcaatgac

SEQ ID NO: 334237 - DNA, 33 bp, Homo sapien
tgaagtcagcacctgcaacaatctatctgaaca

SEQ ID NO: 334238 - DNA, 33 bp, Homo sapien
tgaagtcagcacctgcgacaatctatctgaaca

SEQ ID NO: 334239 - DNA, 33 bp, Homo sapien
aggtaaccaggagacaccactgtaaattgaaat

SEQ ID NO: 334240 - DNA, 33 bp, Homo sapien
aggtaaccaggagacatcactgtaaattgaaat

SEQ ID NO: 334241 - DNA, 33 bp, Homo sapien
tgaagtttaaagcatacagaattctccagtgcc

SEQ ID NO: 334242 - DNA, 33 bp, Homo sapien
tgaagtttaaagcatatagaattctccagtgcc

SEQ ID NO: 334243 - DNA, 33 bp, Homo sapien
accgaggtgataaaacaatacagaagagcaaaa

SEQ ID NO: 334244 - DNA, 33 bp, Homo sapien
accgaggtgataaaactatacagaagagcaaaa

SEQ ID NO: 334245 - DNA, 33 bp, Homo sapien
tgtatgtgtatctccgcaccaaagtgcatctgc

SEQ ID NO: 334246 - DNA, 33 bp, Homo sapien
tgtatgtgtatctccgtaccaaagtgcatctgc

SEQ ID NO: 334247 - DNA, 33 bp, Homo sapien
tgagctcttgactgaaagacacgatcctatcag

SEQ ID NO: 334248 - DNA, 33 bp, Homo sapien
tgagctcttgactgaaggacacgatcctatcag

SEQ ID NO: 334249 - DNA, 33 bp, Homo sapien
gagaaaaggtcttctacggccctggttatcacc

SEQ ID NO: 334250 - DNA, 33 bp, Homo sapien
gagaaaaggtcttctatggccctggttatcacc

SEQ ID NO: 334251 - DNA, 33 bp, Homo sapien
agatttctttatgaggacaaagtagcagacatg

SEQ ID NO: 334252 - DNA, 33 bp, Homo sapien
agatttctttatgaggtcaaagtagcagacatg

SEQ ID NO: 334253 - DNA, 33 bp, Homo sapien
tgtaactttcaagaaacgaagagtatcattaaa

SEQ ID NO: 334254 - DNA, 33 bp, Homo sapien
tgtaactttcaagaaaggaagagtatcattaaa

SEQ ID NO: 334255 - DNA, 33 bp, Homo sapien
acaaaagtgtcagagaagtcaaaggtggtttcc

SEQ ID NO: 334256 - DNA, 33 bp, Homo sapien
acaaaagtgtcagagaggtcaaaggtggtttcc

SEQ ID NO: 334257 - DNA, 33 bp, Homo sapien
cagtcacagcacataacgtagaactcggctgcg

SEQ ID NO: 334258 - DNA, 33 bp, Homo sapien
cagtcacagcacataatgtagaactcggctgcg

SEQ ID NO: 334259 - DNA, 33 bp, Homo sapien
ttgcccattcatgaacagtccaaaatgtaaaag

SEQ ID NO: 334260 - DNA, 33 bp, Homo sapien
ttgcccattcatgaacggtccaaaatgtaaaag

SEQ ID NO: 334261 - DNA, 33 bp, Homo sapien
aagaatgggcctcactgaacaactgatgtcaac

SEQ ID NO: 334262 - DNA, 33 bp, Homo sapien
aagaatgggcctcacttaacaactgatgtcaac

SEQ ID NO: 334263 - DNA, 33 bp, Homo sapien
tagtctggataatacacgttcttggacctcttc

SEQ ID NO: 334264 - DNA, 33 bp, Homo sapien
tagtctggataatacatgttcttggacctcttc

SEQ ID NO: 334265 - DNA, 33 bp, Homo sapien
aatgggttctaagttacaaagtgagattatttc

SEQ ID NO: 334266 - DNA, 33 bp, Homo sapien
aatgggttctaagttataaagtgagattatttc

SEQ ID NO: 334267 - DNA, 33 bp, Homo sapien
gtacctttttgctggacgcttcaaatcctttga

SEQ ID NO: 334268 - DNA, 33 bp, Homo sapien
gtacctttttgctggatgcttcaaatcctttga

SEQ ID NO: 334269 - DNA, 33 bp, Homo sapien
gcacacgttagttacaatgaattcaacattctt

SEQ ID NO: 334270 - DNA, 33 bp, Homo sapien
gcacacgttagttacagtgaattcaacattctt

SEQ ID NO: 334271 - DNA, 33 bp, Homo sapien
attgctcttttcttaaatgacaaagcactttgt

SEQ ID NO: 334272 - DNA, 33 bp, Homo sapien
attgctcttttcttaagtgacaaagcactttgt

SEQ ID NO: 334273 - DNA, 33 bp, Homo sapien
taaatttgcaaatttacgacacagggctgattt

SEQ ID NO: 334274 - DNA, 33 bp, Homo sapien
taaatttgcaaatttatgacacagggctgattt

SEQ ID NO: 334275 - DNA, 33 bp, Homo sapien
acctactgagtctcacaaaaaactagcactgag

SEQ ID NO: 334276 - DNA, 33 bp, Homo sapien
acctactgagtctcaccaaaaactagcactgag

SEQ ID NO: 334277 - DNA, 33 bp, Homo sapien
tttcatcattgtgcgaacattatagagtgtact

SEQ ID NO: 334278 - DNA, 33 bp, Homo sapien
tttcatcattgtgcgagcattatagagtgtact

SEQ ID NO: 334279 - DNA, 33 bp, Homo sapien
tgatagagtcctgaatcagagcagagacacctc

SEQ ID NO: 334280 - DNA, 33 bp, Homo sapien
tgatagagtcctgaattagagcagagacacctc

SEQ ID NO: 334281 - DNA, 33 bp, Homo sapien
ttcatctgcaattcaacatgtctcggttggaaa

SEQ ID NO: 334282 - DNA, 33 bp, Homo sapien
ttcatctgcaattcaatatgtctcggttggaaa

SEQ ID NO: 334283 - DNA, 33 bp, Homo sapien
taacagcagcaagtaacagacttaaaacaaaaa

SEQ ID NO: 334284 - DNA, 33 bp, Homo sapien
taacagcagcaagtaatagacttaaaacaaaaa

SEQ ID NO: 334285 - DNA, 33 bp, Homo sapien
gctatagatgtttaccaatttcaagagggcaat

SEQ ID NO: 334286 - DNA, 33 bp, Homo sapien
gctatagatgtttaccgatttcaagagggcaat

SEQ ID NO: 334287 - DNA, 33 bp, Homo sapien
aaaattattttgactacagcatgggaatacata

SEQ ID NO: 334288 - DNA, 33 bp, Homo sapien
aaaattattttgactatagcatgggaatacata

SEQ ID NO: 334289 - DNA, 33 bp, Homo sapien
gtgttattgagcatgaacaacagaaagataaag

SEQ ID NO: 334290 - DNA, 33 bp, Homo sapien
gtgttattgagcatgagcaacagaaagataaag

SEQ ID NO: 334291 - DNA, 33 bp, Homo sapien
gattttcagtggtcaacctctgtgaatcaaaac

SEQ ID NO: 334292 - DNA, 33 bp, Homo sapien
gattttcagtggtcaatctctgtgaatcaaaac

SEQ ID NO: 334293 - DNA, 33 bp, Homo sapien
cctgtatattagagaaaattctcctggttgtta

SEQ ID NO: 334294 - DNA, 33 bp, Homo sapien
cctgtatattagagaagattctcctggttgtta

SEQ ID NO: 334295 - DNA, 33 bp, Homo sapien
gatggtcttttatttacggaagctggagaagga

SEQ ID NO: 334296 - DNA, 33 bp, Homo sapien
gatggtcttttatttatggaagctggagaagga

SEQ ID NO: 334297 - DNA, 33 bp, Homo sapien
ttcccagaaatgaaaagacattgcatctcttat

SEQ ID NO: 334298 - DNA, 33 bp, Homo sapien
ttcccagaaatgaaaatacattgcatctcttat

SEQ ID NO: 334299 - DNA, 33 bp, Homo sapien
ttttgtacaactcctacgtttaaatccaattcc

SEQ ID NO: 334300 - DNA, 33 bp, Homo sapien
ttttgtacaactcctatgtttaaatccaattcc

SEQ ID NO: 334301 - DNA, 33 bp, Homo sapien
ctgtcttttctacttcaaaaacatagtcttgaa

SEQ ID NO: 334302 - DNA, 33 bp, Homo sapien
ctgtcttttctacttcgaaaacatagtcttgaa

SEQ ID NO: 334303 - DNA, 33 bp, Homo sapien
gagatggaaaagtatggatgaattcaagactat

SEQ ID NO: 334304 - DNA, 33 bp, Homo sapien
gagatggaaaagtatgtatgaattcaagactat

SEQ ID NO: 334305 - DNA, 33 bp, Homo sapien
aaaactccagcccaaaagaagcaaaatttcctt

SEQ ID NO: 334306 - DNA, 33 bp, Homo sapien
aaaactccagcccaaatgaagcaaaatttcctt

SEQ ID NO: 334307 - DNA, 33 bp, Homo sapien
ccagcctcaactaacccgagttggtgaaaggaa

SEQ ID NO: 334308 - DNA, 33 bp, Homo sapien
ccagcctcaactaacctgagttggtgaaaggaa

SEQ ID NO: 334309 - DNA, 33 bp, Homo sapien
tggaaacatggttatacgtaattaaggtcttac

SEQ ID NO: 334310 - DNA, 33 bp, Homo sapien
tggaaacatggttatatgtaattaaggtcttac

SEQ ID NO: 334311 - DNA, 33 bp, Homo sapien
ttagtcatgaaatgggaaacaacaatgtaaaaa

SEQ ID NO: 334312 - DNA, 33 bp, Homo sapien
ttagtcatgaaatggggaacaacaatgtaaaaa

SEQ ID NO: 334313 - DNA, 33 bp, Homo sapien
cttaggtttgttcaacactagtttcttatgttg

SEQ ID NO: 334314 - DNA, 33 bp, Homo sapien
cttaggtttgttcaacgctagtttcttatgttg

SEQ ID NO: 334315 - DNA, 33 bp, Homo sapien
gttcttctttaaacaacgattctcccactgttt

SEQ ID NO: 334316 - DNA, 33 bp, Homo sapien
gttcttctttaaacaatgattctcccactgttt

SEQ ID NO: 334317 - DNA, 33 bp, Homo sapien
ccactggctggataaacggtgataaatgctggt

SEQ ID NO: 334318 - DNA, 33 bp, Homo sapien
ccactggctggataaatggtgataaatgctggt

SEQ ID NO: 334319 - DNA, 33 bp, Homo sapien
atatttctcaaacatactaaatggacaatatcc

SEQ ID NO: 334320 - DNA, 33 bp, Homo sapien
atatttctcaaacatattaaatggacaatatcc

SEQ ID NO: 334321 - DNA, 33 bp, Homo sapien
gcggagtagaaaactgaagcaaatgggacttta

SEQ ID NO: 334322 - DNA, 33 bp, Homo sapien
gcggagtagaaaactgcagcaaatgggacttta

SEQ ID NO: 334323 - DNA, 33 bp, Homo sapien
ggtcagggtgagctcaatcccagcgttgttact

SEQ ID NO: 334324 - DNA, 33 bp, Homo sapien
ggtcagggtgagctcagtcccagcgttgttact

SEQ ID NO: 334325 - DNA, 33 bp, Homo sapien
ttatatggtggtttccaatgtatgttatctaat

SEQ ID NO: 334326 - DNA, 33 bp, Homo sapien
ttatatggtggtttcccatgtatgttatctaat

SEQ ID NO: 334327 - DNA, 33 bp, Homo sapien
tctcactacattcagaacacttaaaaacacaac

SEQ ID NO: 334328 - DNA, 33 bp, Homo sapien
tctcactacattcagatcacttaaaaacacaac

SEQ ID NO: 334329 - DNA, 33 bp, Homo sapien
atgaggagattacccaataacaccatcatgagg

SEQ ID NO: 334330 - DNA, 33 bp, Homo sapien
atgaggagattacccagtaacaccatcatgagg

SEQ ID NO: 334331 - DNA, 33 bp, Homo sapien
actttgagtaggccctcaaccatgtaagaattg

SEQ ID NO: 334332 - DNA, 33 bp, Homo sapien
actttgagtaggcccttaaccatgtaagaattg

SEQ ID NO: 334333 - DNA, 33 bp, Homo sapien
aggaaagaccctgtaaaagttaatgatacttat

SEQ ID NO: 334334 - DNA, 33 bp, Homo sapien
aggaaagaccctgtaagagttaatgatacttat

SEQ ID NO: 334335 - DNA, 33 bp, Homo sapien
ttctcctacttcaatacagacaacctttcatca

SEQ ID NO: 334336 - DNA, 33 bp, Homo sapien
ttctcctacttcaatatagacaacctttcatca

SEQ ID NO: 334337 - DNA, 33 bp, Homo sapien
gtggttacatactcacagtagataaagttgtcc

SEQ ID NO: 334338 - DNA, 33 bp, Homo sapien
gtggttacatactcacggtagataaagttgtcc

SEQ ID NO: 334339 - DNA, 33 bp, Homo sapien
atggtagtgggaaggacatacttaccatttggc

SEQ ID NO: 334340 - DNA, 33 bp, Homo sapien
atggtagtgggaaggatatacttaccatttggc

SEQ ID NO: 334341 - DNA, 33 bp, Homo sapien
tttaagagacagaggacatcaagagttaaattt

SEQ ID NO: 334342 - DNA, 33 bp, Homo sapien
tttaagagacagaggagatcaagagttaaattt

SEQ ID NO: 334343 - DNA, 33 bp, Homo sapien
caatgttttccagttacattattcggcattccc

SEQ ID NO: 334344 - DNA, 33 bp, Homo sapien
caatgttttccagttatattattcggcattccc

SEQ ID NO: 334345 - DNA, 33 bp, Homo sapien
taactgaactcaataagagaaatacaagtaaag

SEQ ID NO: 334346 - DNA, 33 bp, Homo sapien
taactgaactcaataatagaaatacaagtaaag

SEQ ID NO: 334347 - DNA, 33 bp, Homo sapien
acaattaagaatgtgccaaagctattgttttaa

SEQ ID NO: 334348 - DNA, 33 bp, Homo sapien
acaattaagaatgtgcgaaagctattgttttaa

SEQ ID NO: 334349 - DNA, 33 bp, Homo sapien
tgtatgccactgagctaaatgttggggacaaat

SEQ ID NO: 334350 - DNA, 33 bp, Homo sapien
tgtatgccactgagctgaatgttggggacaaat

SEQ ID NO: 334351 - DNA, 33 bp, Homo sapien
ttgctgaacaaattaactgattgaaaaggtcaa

SEQ ID NO: 334352 - DNA, 33 bp, Homo sapien
ttgctgaacaaattaattgattgaaaaggtcaa

SEQ ID NO: 334353 - DNA, 33 bp, Homo sapien
ttttttctttgatacccggagatttgatgacac

SEQ ID NO: 334354 - DNA, 33 bp, Homo sapien
ttttttctttgatacctggagatttgatgacac

SEQ ID NO: 334355 - DNA, 33 bp, Homo sapien
ctagaactttcctgtagatggtgaaagtaggag

SEQ ID NO: 334356 - DNA, 33 bp, Homo sapien
ctagaactttcctgtatatggtgaaagtaggag

SEQ ID NO: 334357 - DNA, 33 bp, Homo sapien
catgtcattacttaccacttgatctcattcttt

SEQ ID NO: 334358 - DNA, 33 bp, Homo sapien
catgtcattacttaccgcttgatctcattcttt

SEQ ID NO: 334359 - DNA, 33 bp, Homo sapien
gtgattagattaggccaacttggacggtccagg

SEQ ID NO: 334360 - DNA, 33 bp, Homo sapien
gtgattagattaggcccacttggacggtccagg

SEQ ID NO: 334361 - DNA, 33 bp, Homo sapien
ccctagaatctgtgaacatgttgccttacatgg

SEQ ID NO: 334362 - DNA, 33 bp, Homo sapien
ccctagaatctgtgaagatgttgccttacatgg

SEQ ID NO: 334363 - DNA, 33 bp, Homo sapien
atgttttactggttcaatgaaagtaacagcttg

SEQ ID NO: 334364 - DNA, 33 bp, Homo sapien
atgttttactggttcagtgaaagtaacagcttg

SEQ ID NO: 334365 - DNA, 33 bp, Homo sapien
cttcaccaaaacacatcaagtaccacaaaggca

SEQ ID NO: 334366 - DNA, 33 bp, Homo sapien
cttcaccaaaacacatgaagtaccacaaaggca

SEQ ID NO: 334367 - DNA, 33 bp, Homo sapien
gcaaagtagcctgtgcagagagaggaataattg

SEQ ID NO: 334368 - DNA, 33 bp, Homo sapien
gcaaagtagcctgtgcggagagaggaataattg

SEQ ID NO: 334369 - DNA, 33 bp, Homo sapien
attgtctcttttttaccgcctgtaatacaggtg

SEQ ID NO: 334370 - DNA, 33 bp, Homo sapien
attgtctcttttttactgcctgtaatacaggtg

SEQ ID NO: 334371 - DNA, 33 bp, Homo sapien
acctttctgtatcaacagccctagaaatacgtg

SEQ ID NO: 334372 - DNA, 33 bp, Homo sapien
acctttctgtatcaacggccctagaaatacgtg

SEQ ID NO: 334373 - DNA, 33 bp, Homo sapien
actccctcataatgcagcattctctaaaggtgt

SEQ ID NO: 334374 - DNA, 33 bp, Homo sapien
actccctcataatgcatcattctctaaaggtgt

SEQ ID NO: 334375 - DNA, 33 bp, Homo sapien
gtcttcagtttgcttaacctgtataaatacacc

SEQ ID NO: 334376 - DNA, 33 bp, Homo sapien
gtcttcagtttgcttagcctgtataaatacacc

SEQ ID NO: 334377 - DNA, 33 bp, Homo sapien
tccttaaaaatgtggcaagacagatcttaaaag

SEQ ID NO: 334378 - DNA, 33 bp, Homo sapien
tccttaaaaatgtggctagacagatcttaaaag

SEQ ID NO: 334379 - DNA, 33 bp, Homo sapien
gtggttggcctggagaatatgtcgctctttcca

SEQ ID NO: 334380 - DNA, 33 bp, Homo sapien
gtggttggcctggagagtatgtcgctctttcca

SEQ ID NO: 334381 - DNA, 33 bp, Homo sapien
gtgtcagggaccatgcgaagatctgagaacaga

SEQ ID NO: 334382 - DNA, 33 bp, Homo sapien
gtgtcagggaccatgctaagatctgagaacaga

SEQ ID NO: 334383 - DNA, 33 bp, Homo sapien
tcaagatgggactgtaaattaagctctgttctc

SEQ ID NO: 334384 - DNA, 33 bp, Homo sapien
tcaagatgggactgtagattaagctctgttctc

SEQ ID NO: 334385 - DNA, 33 bp, Homo sapien
ttctggatccatcaccaagagcactcattcaca

SEQ ID NO: 334386 - DNA, 33 bp, Homo sapien
ttctggatccatcaccgagagcactcattcaca

SEQ ID NO: 334387 - DNA, 33 bp, Homo sapien
actgtgccccaatacaaccaaatggccttttca

SEQ ID NO: 334388 - DNA, 33 bp, Homo sapien
actgtgccccaatacatccaaatggccttttca

SEQ ID NO: 334389 - DNA, 33 bp, Homo sapien
tgattcacaatattcccaggctttagaaaccta

SEQ ID NO: 334390 - DNA, 33 bp, Homo sapien
tgattcacaatattcctaggctttagaaaccta

SEQ ID NO: 334391 - DNA, 33 bp, Homo sapien
ggtttactcagttgacaacaaacctacatgatg

SEQ ID NO: 334392 - DNA, 33 bp, Homo sapien
ggtttactcagttgacgacaaacctacatgatg

SEQ ID NO: 334393 - DNA, 33 bp, Homo sapien
actgggttccagggcacgtaaatggtgtccacc

SEQ ID NO: 334394 - DNA, 33 bp, Homo sapien
actgggttccagggcatgtaaatggtgtccacc

SEQ ID NO: 334395 - DNA, 33 bp, Homo sapien
atgactgagctgttcacgttctttggtagtaag

SEQ ID NO: 334396 - DNA, 33 bp, Homo sapien
atgactgagctgttcatgttctttggtagtaag

SEQ ID NO: 334397 - DNA, 33 bp, Homo sapien
ctctcacaaaaatcaaacaacatgagcgcataa

SEQ ID NO: 334398 - DNA, 33 bp, Homo sapien
ctctcacaaaaatcaaccaacatgagcgcataa

SEQ ID NO: 334399 - DNA, 33 bp, Homo sapien
ttgtgtgatcctgacacgttaaattttctgagc

SEQ ID NO: 334400 - DNA, 33 bp, Homo sapien
ttgtgtgatcctgacatgttaaattttctgagc

SEQ ID NO: 334401 - DNA, 33 bp, Homo sapien
aaaggggataaggcataaacaagcattaaaaca

SEQ ID NO: 334402 - DNA, 33 bp, Homo sapien
aaaggggataaggcattaacaagcattaaaaca

SEQ ID NO: 334403 - DNA, 33 bp, Homo sapien
atggattgatgagaaagattgaaattatagata

SEQ ID NO: 334404 - DNA, 33 bp, Homo sapien
atggattgatgagaaatattgaaattatagata

SEQ ID NO: 334405 - DNA, 33 bp, Homo sapien
gtggaagagacagagacagaaagtgagtgtttt

SEQ ID NO: 334406 - DNA, 33 bp, Homo sapien
gtggaagagacagagatagaaagtgagtgtttt

SEQ ID NO: 334407 - DNA, 33 bp, Homo sapien
ctttgtgctagtggtaagcggatagggctaggt

SEQ ID NO: 334408 - DNA, 33 bp, Homo sapien
ctttgtgctagtggtaggcggatagggctaggt

SEQ ID NO: 334409 - DNA, 33 bp, Homo sapien
ttgttttatctgaaaacgcccccctctcaccaa

SEQ ID NO: 334410 - DNA, 33 bp, Homo sapien
ttgttttatctgaaaatgcccccctctcaccaa

SEQ ID NO: 334411 - DNA, 33 bp, Homo sapien
tcaatttagttcatcaatcagtgtatctaaaaa

SEQ ID NO: 334412 - DNA, 33 bp, Homo sapien
tcaatttagttcatcagtcagtgtatctaaaaa

SEQ ID NO: 334413 - DNA, 33 bp, Homo sapien
cctccaatctttttagcaatgtcatcttctgag

SEQ ID NO: 334414 - DNA, 33 bp, Homo sapien
cctccaatctttttagtaatgtcatcttctgag

SEQ ID NO: 334415 - DNA, 33 bp, Homo sapien
caaaagtttcttcaaacgaacacgcaccaagct

SEQ ID NO: 334416 - DNA, 33 bp, Homo sapien
caaaagtttcttcaaatgaacacgcaccaagct

SEQ ID NO: 334417 - DNA, 33 bp, Homo sapien
tataaaatttctgttacgcaaggtgaaaaagtt

SEQ ID NO: 334418 - DNA, 33 bp, Homo sapien
tataaaatttctgttatgcaaggtgaaaaagtt

SEQ ID NO: 334419 - DNA, 33 bp, Homo sapien
agcagatttccaattcaccgttgttccagcccc

SEQ ID NO: 334420 - DNA, 33 bp, Homo sapien
agcagatttccaattcgccgttgttccagcccc

SEQ ID NO: 334421 - DNA, 33 bp, Homo sapien
catgtggctgtatttgaaaaaactctctgctta

SEQ ID NO: 334422 - DNA, 33 bp, Homo sapien
catgtggctgtatttggaaaaactctctgctta

SEQ ID NO: 334423 - DNA, 33 bp, Homo sapien
gatggggtgccaaatacgttctcagactcaaga

SEQ ID NO: 334424 - DNA, 33 bp, Homo sapien
gatggggtgccaaatatgttctcagactcaaga

SEQ ID NO: 334425 - DNA, 33 bp, Homo sapien
ttctagagtctagaagcctaaaatcaaagctgt

SEQ ID NO: 334426 - DNA, 33 bp, Homo sapien
ttctagagtctagaagtctaaaatcaaagctgt

SEQ ID NO: 334427 - DNA, 33 bp, Homo sapien
cacggagtcctttactaaagctattgtactcat

SEQ ID NO: 334428 - DNA, 33 bp, Homo sapien
cacggagtcctttactgaagctattgtactcat

SEQ ID NO: 334429 - DNA, 33 bp, Homo sapien
ctgggacataacaccgcaaaccctaacaaaatc

SEQ ID NO: 334430 - DNA, 33 bp, Homo sapien
ctgggacataacaccgtaaaccctaacaaaatc

SEQ ID NO: 334431 - DNA, 33 bp, Homo sapien
ggaacatttatgttcccgaattggacaggaagg

SEQ ID NO: 334432 - DNA, 33 bp, Homo sapien
ggaacatttatgttcctgaattggacaggaagg

SEQ ID NO: 334433 - DNA, 33 bp, Homo sapien
tccataaaggtgtaaactgcactctgaattttc

SEQ ID NO: 334434 - DNA, 33 bp, Homo sapien
tccataaaggtgtaaattgcactctgaattttc

SEQ ID NO: 334435 - DNA, 33 bp, Homo sapien
tttcagcacaaatatccagaacacctaaagcat

SEQ ID NO: 334436 - DNA, 33 bp, Homo sapien
tttcagcacaaatatctagaacacctaaagcat

SEQ ID NO: 334437 - DNA, 33 bp, Homo sapien
gtgaacttaactgcccaatttgtgttctgccca

SEQ ID NO: 334438 - DNA, 33 bp, Homo sapien
gtgaacttaactgcccgatttgtgttctgccca

SEQ ID NO: 334439 - DNA, 33 bp, Homo sapien
tgaactcattgttgccaaaccccaatgtgttcc

SEQ ID NO: 334440 - DNA, 33 bp, Homo sapien
tgaactcattgttgccgaaccccaatgtgttcc

SEQ ID NO: 334441 - DNA, 33 bp, Homo sapien
tcattgccaaaagaacccattgatattgtgttg

SEQ ID NO: 334442 - DNA, 33 bp, Homo sapien
tcattgccaaaagaactcattgatattgtgttg

SEQ ID NO: 334443 - DNA, 33 bp, Homo sapien
ggtgtttaccaatcataagagagataaagtgta

SEQ ID NO: 334444 - DNA, 33 bp, Homo sapien
ggtgtttaccaatcatgagagagataaagtgta

SEQ ID NO: 334445 - DNA, 33 bp, Homo sapien
gctcataataaacacaatagttatgatagatag

SEQ ID NO: 334446 - DNA, 33 bp, Homo sapien
gctcataataaacacagtagttatgatagatag

SEQ ID NO: 334447 - DNA, 33 bp, Homo sapien
gtacagacacagggataaacaaataggctaata

SEQ ID NO: 334448 - DNA, 33 bp, Homo sapien
gtacagacacagggattaacaaataggctaata

SEQ ID NO: 334449 - DNA, 33 bp, Homo sapien
tcgttcagaaataccacactgcaaatgaccaca

SEQ ID NO: 334450 - DNA, 33 bp, Homo sapien
tcgttcagaaataccatactgcaaatgaccaca

SEQ ID NO: 334451 - DNA, 33 bp, Homo sapien; identical to SEQ ID NO: 334449

SEQ ID NO: 334452 - DNA, 33 bp, Homo sapien; identical to SEQ ID NO: 334450

SEQ ID NO: 334453 - DNA, 33 bp, Homo sapien
gtggttttggtgggaacgacatctttggttatg

SEQ ID NO: 334454 - DNA, 33 bp, Homo sapien
gtggttttggtgggaatgacatctttggttatg

SEQ ID NO: 334455 - DNA, 33 bp, Homo sapien; identical to SEQ ID NO: 334453

SEQ ID NO: 334456 - DNA, 33 bp, Homo sapien; identical to SEQ ID NO: 334454

SEQ ID NO: 334457 - DNA, 33 bp, Homo sapien
tatattgatatttgagaaaacgaatgtaaccag

SEQ ID NO: 334458 - DNA, 33 bp, Homo sapien
tatattgatatttgaggaaacgaatgtaaccag

SEQ ID NO: 334459 - DNA, 33 bp, Homo sapien
ctgtgccctcaatctccagttcaacaaagcagc

SEQ ID NO: 334460 - DNA, 33 bp, Homo sapien
ctgtgccctcaatctctagttcaacaaagcagc

SEQ ID NO: 334461 - DNA, 33 bp, Homo sapien
ttttatagtttatccactgcttgggtaaaatat

SEQ ID NO: 334462 - DNA, 33 bp, Homo sapien
ttttatagtttatccagtgcttgggtaaaatat

SEQ ID NO: 334463 - DNA, 33 bp, Homo sapien
gacaacaggacaaccaactgtggagagaaacta

SEQ ID NO: 334464 - DNA, 33 bp, Homo sapien
gacaacaggacaaccatctgtggagagaaacta

SEQ ID NO: 334465 - DNA, 33 bp, Homo sapien
aaaatcttagctaataacatttcagcaaggcaa

SEQ ID NO: 334466 - DNA, 33 bp, Homo sapien
aaaatcttagctaataccatttcagcaaggcaa

SEQ ID NO: 334467 - DNA, 33 bp, Homo sapien
aaatggcaaaatgttaataaagataactcacag

SEQ ID NO: 334468 - DNA, 33 bp, Homo sapien
aaatggcaaaatgttagtaaagataactcacag

SEQ ID NO: 334469 - DNA, 33 bp, Homo sapien
tgtgtgtctttctgcacggttctatcataagga

SEQ ID NO: 334470 - DNA, 33 bp, Homo sapien
tgtgtgtctttctgcatggttctatcataagga

SEQ ID NO: 334471 - DNA, 33 bp, Homo sapien
agtgatagtgttagcagcggcctcaattctttc

SEQ ID NO: 334472 - DNA, 33 bp, Homo sapien
agtgatagtgttagcatcggcctcaattctttc

SEQ ID NO: 334473 - DNA, 33 bp, Homo sapien
aatctcaaggctaagacaccagcatagttatgt

SEQ ID NO: 334474 - DNA, 33 bp, Homo sapien
aatctcaaggctaagataccagcatagttatgt

SEQ ID NO: 334475 - DNA, 33 bp, Homo sapien
ttcaactcagaaagcacgagtgtttttcttcaa

SEQ ID NO: 334476 - DNA, 33 bp, Homo sapien
ttcaactcagaaagcatgagtgtttttcttcaa

SEQ ID NO: 334477 - DNA, 33 bp, Homo sapien
agatgtacatcatgacaatgtattttttaaatg

SEQ ID NO: 334478 - DNA, 33 bp, Homo sapien
agatgtacatcatgactatgtattttttaaatg

SEQ ID NO: 334479 - DNA, 33 bp, Homo sapien
ctcaaaagcattactcaaagacaaacaacaaat

SEQ ID NO: 334480 - DNA, 33 bp, Homo sapien
ctcaaaagcattactcgaagacaaacaacaaat

SEQ ID NO: 334481 - DNA, 33 bp, Homo sapien
tgttgaatctaatttacgctgtggagtttgtta

SEQ ID NO: 334482 - DNA, 33 bp, Homo sapien
tgttgaatctaatttaggctgtggagtttgtta

SEQ ID NO: 334483 - DNA, 33 bp, Homo sapien
ctgagtgcctacatttgaaaggttttattcttt

SEQ ID NO: 334484 - DNA, 33 bp, Homo sapien
ctgagtgcctacattttaaaggttttattcttt

SEQ ID NO: 334485 - DNA, 33 bp, Homo sapien
tttggcaggcagcaaacggttgaacctgcattt

SEQ ID NO: 334486 - DNA, 33 bp, Homo sapien
tttggcaggcagcaaatggttgaacctgcattt

SEQ ID NO: 334487 - DNA, 33 bp, Homo sapien
agctctgtttgggtaagtatcctgcaaatcctg

SEQ ID NO: 334488 - DNA, 33 bp, Homo sapien
agctctgtttgggtaattatcctgcaaatcctg

SEQ ID NO: 334489 - DNA, 33 bp, Homo sapien
ttctgaaacagctcagaaacaatattggtgaaa

SEQ ID NO: 334490 - DNA, 33 bp, Homo sapien
ttctgaaacagctcaggaacaatattggtgaaa

SEQ ID NO: 334491 - DNA, 33 bp, Homo sapien
gctgtatgaaacattacaagtgtccagtacaac

SEQ ID NO: 334492 - DNA, 33 bp, Homo sapien
gctgtatgaaacattagaagtgtccagtacaac

SEQ ID NO: 334493 - DNA, 33 bp, Homo sapien
tttcaatcacacttcaaaatgatgcaggtcaca

SEQ ID NO: 334494 - DNA, 33 bp, Homo sapien
tttcaatcacacttcagaatgatgcaggtcaca

SEQ ID NO: 334495 - DNA, 33 bp, Homo sapien
acaagagagtgaaacagtcccataacaacaagg

SEQ ID NO: 334496 - DNA, 33 bp, Homo sapien
acaagagagtgaaacattcccataacaacaagg

SEQ ID NO: 334497 - DNA, 33 bp, Homo sapien
aatattttgtgaaaaactgaatcagtcttatca

SEQ ID NO: 334498 - DNA, 33 bp, Homo sapien
aatattttgtgaaaaattgaatcagtcttatca

SEQ ID NO: 334499 - DNA, 33 bp, Homo sapien
ttaatgtctcagtgaaacctacaatctcctaaa

SEQ ID NO: 334500 - DNA, 33 bp, Homo sapien
ttaatgtctcagtgaatcctacaatctcctaaa

SEQ ID NO: 334501 - DNA, 33 bp, Homo sapien
atttatcaaaatagaccgcacactgggccacaa

SEQ ID NO: 334502 - DNA, 33 bp, Homo sapien
atttatcaaaatagactgcacactgggccacaa

SEQ ID NO: 334503 - DNA, 33 bp, Homo sapien
tacagggtctaattcaacactgagcagagagta

SEQ ID NO: 334504 - DNA, 33 bp, Homo sapien
tacagggtctaattcagcactgagcagagagta

SEQ ID NO: 334505 - DNA, 33 bp, Homo sapien
ggataaaattagagaacacatttgttgaaccat

SEQ ID NO: 334506 - DNA, 33 bp, Homo sapien
ggataaaattagagaagacatttgttgaaccat

SEQ ID NO: 334507 - DNA, 33 bp, Homo sapien
aaatactcttctacataacaaaatgaagctcat

SEQ ID NO: 334508 - DNA, 33 bp, Homo sapien
aaatactcttctacatgacaaaatgaagctcat

SEQ ID NO: 334509 - DNA, 33 bp, Homo sapien
aaagaccctggcacctcaaatactcttctacat

SEQ ID NO: 334510 - DNA, 33 bp, Homo sapien
aaagaccctggcaccttaaatactcttctacat

SEQ ID NO: 334511 - DNA, 33 bp, Homo sapien
gtggtgatttctgtgacaagcaataagcaaaag

SEQ ID NO: 334512 - DNA, 33 bp, Homo sapien
gtggtgatttctgtgataagcaataagcaaaag

SEQ ID NO: 334513 - DNA, 33 bp, Homo sapien
accaagagggatttaactgccttttccttgatt

SEQ ID NO: 334514 - DNA, 33 bp, Homo sapien
accaagagggatttaattgccttttccttgatt

SEQ ID NO: 334515 - DNA, 33 bp, Homo sapien
ttttagtattagactgcataactccttctctgt

SEQ ID NO: 334516 - DNA, 33 bp, Homo sapien
ttttagtattagactggataactccttctctgt

SEQ ID NO: 334517 - DNA, 33 bp, Homo sapien
agcacttcacctagcaactggacacagcaagtt

SEQ ID NO: 334518 - DNA, 33 bp, Homo sapien
agcacttcacctagcacctggacacagcaagtt

SEQ ID NO: 334519 - DNA, 33 bp, Homo sapien
aaggatacgaaaaaaaacttccattatcaccac

SEQ ID NO: 334520 - DNA, 33 bp, Homo sapien
aaggatacgaaaaaaaccttccattatcaccac

SEQ ID NO: 334521 - DNA, 33 bp, Homo sapien
tcaagatgcctttgtacagcaattatgataatt

SEQ ID NO: 334522 - DNA, 33 bp, Homo sapien
tcaagatgcctttgtatagcaattatgataatt

SEQ ID NO: 334523 - DNA, 33 bp, Homo sapien
aaagtatagcatcctaaaagcctaacttctgga

SEQ ID NO: 334524 - DNA, 33 bp, Homo sapien
aaagtatagcatcctagaagcctaacttctgga

SEQ ID NO: 334525 - DNA, 33 bp, Homo sapien
tgctgtaatgtctcctaaactataaactccata

SEQ ID NO: 334526 - DNA, 33 bp, Homo sapien
tgctgtaatgtctcctgaactataaactccata

SEQ ID NO: 334527 - DNA, 33 bp, Homo sapien
cggaatcatatgatacaaagataactaagacaa

SEQ ID NO: 334528 - DNA, 33 bp, Homo sapien
cggaatcatatgatacgaagataactaagacaa

SEQ ID NO: 334529 - DNA, 33 bp, Homo sapien
ataatttgtttacaaaacttggcacaccctgct

SEQ ID NO: 334530 - DNA, 33 bp, Homo sapien
ataatttgtttacaaaccttggcacaccctgct

SEQ ID NO: 334531 - DNA, 33 bp, Homo sapien
gatggctaactttgaaaatgtcttccctgccgg

SEQ ID NO: 334532 - DNA, 33 bp, Homo sapien
gatggctaactttgaacatgtcttccctgccgg

SEQ ID NO: 334533 - DNA, 33 bp, Homo sapien
tgtcagttcatatatacctacatcattctttta

SEQ ID NO: 334534 - DNA, 33 bp, Homo sapien
tgtcagttcatatatatctacatcattctttta

SEQ ID NO: 334535 - DNA, 33 bp, Homo sapien
ttctagatgattctacaatttgggctttagtta

SEQ ID NO: 334536 - DNA, 33 bp, Homo sapien
ttctagatgattctacgatttgggctttagtta

SEQ ID NO: 334537 - DNA, 33 bp, Homo sapien
tttcaacgtcatatcggcaagccttgtggatct

SEQ ID NO: 334538 - DNA, 33 bp, Homo sapien
tttcaacgtcatatcgtcaagccttgtggatct

SEQ ID NO: 334539 - DNA, 33 bp, Homo sapien
cagagccagaagactcaccaggaaggcggatcg

SEQ ID NO: 334540 - DNA, 33 bp, Homo sapien
cagagccagaagactcgccaggaaggcggatcg

SEQ ID NO: 334541 - DNA, 33 bp, Homo sapien
cacccacgacagtggacggttgtgagactcata

SEQ ID NO: 334542 - DNA, 33 bp, Homo sapien
cacccacgacagtggatggttgtgagactcata

SEQ ID NO: 334543 - DNA, 33 bp, Homo sapien
gtcttctgaacacaacaaatttctcctcaatga

SEQ ID NO: 334544 - DNA, 33 bp, Homo sapien
gtcttctgaacacaacgaatttctcctcaatga

SEQ ID NO: 334545 - DNA, 33 bp, Homo sapien
ctcagttgcataatcccctcttccttgtgagtt

SEQ ID NO: 334546 - DNA, 33 bp, Homo sapien
ctcagttgcataatcctctcttccttgtgagtt

SEQ ID NO: 334547 - DNA, 33 bp, Homo sapien
cttatcattttatagacggctggcatggcttat

SEQ ID NO: 334548 - DNA, 33 bp, Homo sapien
cttatcattttatagatggctggcatggcttat

SEQ ID NO: 334549 - DNA, 33 bp, Homo sapien
tgtgtttatggttatacgtctttcttgtctacg

SEQ ID NO: 334550 - DNA, 33 bp, Homo sapien
tgtgtttatggttatatgtctttcttgtctacg

SEQ ID NO: 334551 - DNA, 33 bp, Homo sapien
gtagagccattaccacaatccttgcttctgttt

SEQ ID NO: 334552 - DNA, 33 bp, Homo sapien
gtagagccattaccacgatccttgcttctgttt

SEQ ID NO: 334553 - DNA, 33 bp, Homo sapien
ataaagcagagtactgaatattgaaagcgtatg

SEQ ID NO: 334554 - DNA, 33 bp, Homo sapien
ataaagcagagtactggatattgaaagcgtatg

SEQ ID NO: 334555 - DNA, 33 bp, Homo sapien
acacttgacaaggaaactctctgagattattaa

SEQ ID NO: 334556 - DNA, 33 bp, Homo sapien
acacttgacaaggaaattctctgagattattaa

SEQ ID NO: 334557 - DNA, 33 bp, Homo sapien
ttttcaagcagactccaacgaaagacattctaa

SEQ ID NO: 334558 - DNA, 33 bp, Homo sapien
ttttcaagcagactcccacgaaagacattctaa

SEQ ID NO: 334559 - DNA, 33 bp, Homo sapien
gccttctactaacaaactggttttccatctaat

SEQ ID NO: 334560 - DNA, 33 bp, Homo sapien
gccttctactaacaaattggttttccatctaat

SEQ ID NO: 334561 - DNA, 33 bp, Homo sapien
tacagtgacaataaccacatctgctatgtctgc

SEQ ID NO: 334562 - DNA, 33 bp, Homo sapien
tacagtgacaataaccgcatctgctatgtctgc

SEQ ID NO: 334563 - DNA, 33 bp, Homo sapien
tctttgaaacatcttaaattgagcaagaactaa

SEQ ID NO: 334564 - DNA, 33 bp, Homo sapien
tctttgaaacatcttagattgagcaagaactaa

SEQ ID NO: 334565 - DNA, 33 bp, Homo sapien
atgtgggttgatcattgaaacaaaagtccaccc

SEQ ID NO: 334566 - DNA, 33 bp, Homo sapien
atgtgggttgatcatttaaacaaaagtccaccc

SEQ ID NO: 334567 - DNA, 33 bp, Homo sapien
taaaaaacttcttcctcactaggcacaggggct

SEQ ID NO: 334568 - DNA, 33 bp, Homo sapien
taaaaaacttcttcctgactaggcacaggggct

SEQ ID NO: 334569 - DNA, 33 bp, Homo sapien
ctttaaacacctgaccaccaatcatgtttcctg

SEQ ID NO: 334570 - DNA, 33 bp, Homo sapien
ctttaaacacctgaccgccaatcatgtttcctg

SEQ ID NO: 334571 - DNA, 33 bp, Homo sapien
aaatcagctttattaggacgcacagggctgaga

SEQ ID NO: 334572 - DNA, 33 bp, Homo sapien
aaatcagctttattagtacgcacagggctgaga

SEQ ID NO: 334573 - DNA, 33 bp, Homo sapien
taaaaccaggtcccaaaaagagattatgaatag

SEQ ID NO: 334574 - DNA, 33 bp, Homo sapien
taaaaccaggtcccaacaagagattatgaatag

SEQ ID NO: 334575 - DNA, 33 bp, Homo sapien
ccattaaaggcaagatcatctaaagcacaccac

SEQ ID NO: 334576 - DNA, 33 bp, Homo sapien
ccattaaaggcaagatgatctaaagcacaccac

SEQ ID NO: 334577 - DNA, 33 bp, Homo sapien
gaacactcaatctggaccatacctgaagagatc

SEQ ID NO: 334578 - DNA, 33 bp, Homo sapien
gaacactcaatctggatcatacctgaagagatc

SEQ ID NO: 334579 - DNA, 33 bp, Homo sapien
acaaaattcaagataaagctacagaacctagac

SEQ ID NO: 334580 - DNA, 33 bp, Homo sapien
acaaaattcaagataaggctacagaacctagac

SEQ ID NO: 334581 - DNA, 33 bp, Homo sapien
caatattgacaggccaactgttattactagtgt

SEQ ID NO: 334582 - DNA, 33 bp, Homo sapien
caatattgacaggccagctgttattactagtgt

SEQ ID NO: 334583 - DNA, 33 bp, Homo sapien
tctacccaattgaattgaatggtggcacatctg

SEQ ID NO: 334584 - DNA, 33 bp, Homo sapien
tctacccaattgaatttaatggtggcacatctg

SEQ ID NO: 334585 - DNA, 33 bp, Homo sapien
gtaattacggattgcactagggcttagacactg

SEQ ID NO: 334586 - DNA, 33 bp, Homo sapien
gtaattacggattgcagtagggcttagacactg

SEQ ID NO: 334587 - DNA, 33 bp, Homo sapien
tactttctcttcttccacagtcgtgtcaatacc

SEQ ID NO: 334588 - DNA, 33 bp, Homo sapien
tactttctcttcttccgcagtcgtgtcaatacc

SEQ ID NO: 334589 - DNA, 33 bp, Homo sapien
gtgaatagaatataaactcttttgaagtaggat

SEQ ID NO: 334590 - DNA, 33 bp, Homo sapien
gtgaatagaatataaagtcttttgaagtaggat

SEQ ID NO: 334591 - DNA, 33 bp, Homo sapien
atctgggtttatgtaccgcaggtggaaaatcac

SEQ ID NO: 334592 - DNA, 33 bp, Homo sapien
atctgggtttatgtactgcaggtggaaaatcac

SEQ ID NO: 334593 - DNA, 33 bp, Homo sapien
tcaggcaaagttgataagggaaagtagggaatg

SEQ ID NO: 334594 - DNA, 33 bp, Homo sapien
tcaggcaaagttgataggggaaagtagggaatg

SEQ ID NO: 334595 - DNA, 33 bp, Homo sapien
aagaaaattaatgcaccctgaacttttttccca

SEQ ID NO: 334596 - DNA, 33 bp, Homo sapien
aagaaaattaatgcactctgaacttttttccca

SEQ ID NO: 334597 - DNA, 33 bp, Homo sapien
tattctgatcagtggaggatgtgtttattcttg

SEQ ID NO: 334598 - DNA, 33 bp, Homo sapien
tattctgatcagtggatgatgtgtttattcttg

SEQ ID NO: 334599 - DNA, 33 bp, Homo sapien
acagtggtgcaatataactcacttttacctcaa

SEQ ID NO: 334600 - DNA, 33 bp, Homo sapien
acagtggtgcaatatatctcacttttacctcaa

SEQ ID NO: 334601 - DNA, 33 bp, Homo sapien
gctctttttgttcatacacatccattccggtca

SEQ ID NO: 334602 - DNA, 33 bp, Homo sapien
gctctttttgttcatatacatccattccggtca

SEQ ID NO: 334603 - DNA, 33 bp, Homo sapien
tgtggaggaaaagtccaagtagaggcagaatat

SEQ ID NO: 334604 - DNA, 33 bp, Homo sapien
tgtggaggaaaagtccgagtagaggcagaatat

SEQ ID NO: 334605 - DNA, 33 bp, Homo sapien
ctggcccaggttttcacgtctgtgtgccttact

SEQ ID NO: 334606 - DNA, 33 bp, Homo sapien
ctggcccaggttttcatgtctgtgtgccttact

SEQ ID NO: 334607 - DNA, 33 bp, Homo sapien
cctcttcgctttttgaagtcttaaattgccgga

SEQ ID NO: 334608 - DNA, 33 bp, Homo sapien
cctcttcgctttttgaggtcttaaattgccgga

SEQ ID NO: 334609 - DNA, 33 bp, Homo sapien
atcaggattctgcgaacatgaataaagtgtgag

SEQ ID NO: 334610 - DNA, 33 bp, Homo sapien
atcaggattctgcgaatatgaataaagtgtgag

SEQ ID NO: 334611 - DNA, 33 bp, Homo sapien
cctcaagataattgtacgaagtaggcacacatc

SEQ ID NO: 334612 - DNA, 33 bp, Homo sapien
cctcaagataattgtatgaagtaggcacacatc

SEQ ID NO: 334613 - DNA, 33 bp, Homo sapien
gagggactattaatgacgctgaaccagtttaga

SEQ ID NO: 334614 - DNA, 33 bp, Homo sapien
gagggactattaatgatgctgaaccagtttaga

SEQ ID NO: 334615 - DNA, 33 bp, Homo sapien
aaaaaccagaatatctaaagtagaggtgactga

SEQ ID NO: 334616 - DNA, 33 bp, Homo sapien
aaaaaccagaatatctgaagtagaggtgactga

SEQ ID NO: 334617 - DNA, 33 bp, Homo sapien
agcatatttgtatcatcacaaaagatttgcagc

SEQ ID NO: 334618 - DNA, 33 bp, Homo sapien
agcatatttgtatcatgacaaaagatttgcagc

SEQ ID NO: 334619 - DNA, 33 bp, Homo sapien
ctacataaacctcaaaccttccagaaaaatgaa

SEQ ID NO: 334620 - DNA, 33 bp, Homo sapien
ctacataaacctcaaatcttccagaaaaatgaa

SEQ ID NO: 334621 - DNA, 33 bp, Homo sapien
caaaatgctgtatcaccacaactggatctaatc

SEQ ID NO: 334622 - DNA, 33 bp, Homo sapien
caaaatgctgtatcactacaactggatctaatc

SEQ ID NO: 334623 - DNA, 33 bp, Homo sapien
gaggaatatatgaggaaagatggtagtttatgg

SEQ ID NO: 334624 - DNA, 33 bp, Homo sapien
gaggaatatatgaggagagatggtagtttatgg

SEQ ID NO: 334625 - DNA, 33 bp, Homo sapien
cttggtgccagaattaccattttaccttagtgt

SEQ ID NO: 334626 - DNA, 33 bp, Homo sapien
cttggtgccagaattatcattttaccttagtgt

SEQ ID NO: 334627 - DNA, 33 bp, Homo sapien
actcatgtgacctgggcccaataaaagaggtct

SEQ ID NO: 334628 - DNA, 33 bp, Homo sapien
actcatgtgacctgggtccaataaaagaggtct

SEQ ID NO: 334629 - DNA, 33 bp, Homo sapien
gaatgaggatcacataccgtaatgggcttattc

SEQ ID NO: 334630 - DNA, 33 bp, Homo sapien
gaatgaggatcacatagcgtaatgggcttattc

SEQ ID NO: 334631 - DNA, 33 bp, Homo sapien
taatgtataaagcacccatgtcagcctattttc

SEQ ID NO: 334632 - DNA, 33 bp, Homo sapien
taatgtataaagcacctatgtcagcctattttc

SEQ ID NO: 334633 - DNA, 33 bp, Homo sapien
cagacttgctcaataggcatctgatgaataaat

SEQ ID NO: 334634 - DNA, 33 bp, Homo sapien
cagacttgctcaatagtcatctgatgaataaat

SEQ ID NO: 334635 - DNA, 33 bp, Homo sapien
ctcctgcttgacgccacgagaggaaaactaaaa

SEQ ID NO: 334636 - DNA, 33 bp, Homo sapien
ctcctgcttgacgccatgagaggaaaactaaaa

SEQ ID NO: 334637 - DNA, 33 bp, Homo sapien
aggccacactttgagaccagttatcattatgta

SEQ ID NO: 334638 - DNA, 33 bp, Homo sapien
aggccacactttgagatcagttatcattatgta

SEQ ID NO: 334639 - DNA, 33 bp, Homo sapien
atttgagaagcatgataaggtcctcctgcccca

SEQ ID NO: 334640 - DNA, 33 bp, Homo sapien
atttgagaagcatgatgaggtcctcctgcccca

SEQ ID NO: 334641 - DNA, 33 bp, Homo sapien
aagcaagtgttgattgaatggagtggcagaaaa

SEQ ID NO: 334642 - DNA, 33 bp, Homo sapien
aagcaagtgttgattgtatggagtggcagaaaa

SEQ ID NO: 334643 - DNA, 33 bp, Homo sapien
tggctaagctatgatccccagttattcaaccaa

SEQ ID NO: 334644 - DNA, 33 bp, Homo sapien
tggctaagctatgatctccagttattcaaccaa

SEQ ID NO: 334645 - DNA, 33 bp, Homo sapien
tctctttctatcttaccgctctgtatttttctt

SEQ ID NO: 334646 - DNA, 33 bp, Homo sapien
tctctttctatcttactgctctgtatttttctt

SEQ ID NO: 334647 - DNA, 33 bp, Homo sapien
cctctctaattttgcacgtctctctgtggcagt

SEQ ID NO: 334648 - DNA, 33 bp, Homo sapien
cctctctaattttgcatgtctctctgtggcagt

SEQ ID NO: 334649 - DNA, 33 bp, Homo sapien
gtgcaggaatggggaaactgtatcccagaggcc

SEQ ID NO: 334650 - DNA, 33 bp, Homo sapien
gtgcaggaatggggaagctgtatcccagaggcc

SEQ ID NO: 334651 - DNA, 33 bp, Homo sapien
cccacactaacagtgaggagataacacaaaggg

SEQ ID NO: 334652 - DNA, 33 bp, Homo sapien
cccacactaacagtgatgagataacacaaaggg

SEQ ID NO: 334653 - DNA, 33 bp, Homo sapien
tctagaaggatatacacggtgatctttctctga

SEQ ID NO: 334654 - DNA, 33 bp, Homo sapien
tctagaaggatatacatggtgatctttctctga

SEQ ID NO: 334655 - DNA, 33 bp, Homo sapien
cttggaagccataccaaaaatccttgattcaga

SEQ ID NO: 334656 - DNA, 33 bp, Homo sapien
cttggaagccataccacaaatccttgattcaga

SEQ ID NO: 334657 - DNA, 33 bp, Homo sapien
ttggtgtcagtaggaaagatggtatacacattt

SEQ ID NO: 334658 - DNA, 33 bp, Homo sapien
ttggtgtcagtaggaacgatggtatacacattt

SEQ ID NO: 334659 - DNA, 33 bp, Homo sapien
ttcttccattaattgcactcatggctttggtct

SEQ ID NO: 334660 - DNA, 33 bp, Homo sapien
ttcttccattaattgcgctcatggctttggtct

SEQ ID NO: 334661 - DNA, 33 bp, Homo sapien
taaggtagcatcaagaaatagatgtcgtccaca

SEQ ID NO: 334662 - DNA, 33 bp, Homo sapien
taaggtagcatcaagagatagatgtcgtccaca

SEQ ID NO: 334663 - DNA, 33 bp, Homo sapien
gcaagagactgttcaaagcaaaaggcaccagag

SEQ ID NO: 334664 - DNA, 33 bp, Homo sapien
gcaagagactgttcaaggcaaaaggcaccagag

SEQ ID NO: 334665 - DNA, 33 bp, Homo sapien
tgggggcagtgactccaaatgtggcgttattgg

SEQ ID NO: 334666 - DNA, 33 bp, Homo sapien
tgggggcagtgactccgaatgtggcgttattgg

SEQ ID NO: 334667 - DNA, 33 bp, Homo sapien
ccccctattaaaatgccgaaatgcaaagttgtt

SEQ ID NO: 334668 - DNA, 33 bp, Homo sapien
ccccctattaaaatgctgaaatgcaaagttgtt

SEQ ID NO: 334669 - DNA, 33 bp, Homo sapien
acacaaagttaaaaacccaaccgcattatggaa

SEQ ID NO: 334670 - DNA, 33 bp, Homo sapien
acacaaagttaaaaacgcaaccgcattatggaa

SEQ ID NO: 334671 - DNA, 33 bp, Homo sapien
aaaaaaactccactgacagagaactggcattgc

SEQ ID NO: 334672 - DNA, 33 bp, Homo sapien
aaaaaaactccactgagagagaactggcattgc

SEQ ID NO: 334673 - DNA, 33 bp, Homo sapien
cagtagagataccaaagagaatcacgacgtgaa

SEQ ID NO: 334674 - DNA, 33 bp, Homo sapien
cagtagagataccaaatagaatcacgacgtgaa

SEQ ID NO: 334675 - DNA, 33 bp, Homo sapien
gtctttttaaagccacacagctgataatgagca

SEQ ID NO: 334676 - DNA, 33 bp, Homo sapien
gtctttttaaagccacgcagctgataatgagca

SEQ ID NO: 334677 - DNA, 33 bp, Homo sapien
gaactcagtctatcaacaataagtgaaacttgc

SEQ ID NO: 334678 - DNA, 33 bp, Homo sapien
gaactcagtctatcaagaataagtgaaacttgc

SEQ ID NO: 334679 - DNA, 33 bp, Homo sapien
ccctgccttgtgcctacggttttgcaagctgct

SEQ ID NO: 334680 - DNA, 33 bp, Homo sapien
ccctgccttgtgcctatggttttgcaagctgct

SEQ ID NO: 334681 - DNA, 33 bp, Homo sapien
tctgccacttgcaaaccatctcaggaaggaaga

SEQ ID NO: 334682 - DNA, 33 bp, Homo sapien
tctgccacttgcaaacgatctcaggaaggaaga

SEQ ID NO: 334683 - DNA, 33 bp, Homo sapien
gaaaatggataatctacgacaatcaatagtaaa

SEQ ID NO: 334684 - DNA, 33 bp, Homo sapien
gaaaatggataatctatgacaatcaatagtaaa

SEQ ID NO: 334685 - DNA, 33 bp, Homo sapien
ttctggggcactccgacaaggtgcatgggaagg

SEQ ID NO: 334686 - DNA, 33 bp, Homo sapien
ttctggggcactccgataaggtgcatgggaagg

SEQ ID NO: 334687 - DNA, 33 bp, Homo sapien
agcccacctgatgaaaaaggccttctccatcac

SEQ ID NO: 334688 - DNA, 33 bp, Homo sapien
agcccacctgatgaaagaggccttctccatcac

SEQ ID NO: 334689 - DNA, 33 bp, Homo sapien
tctccaatctcgagacactagagcccacctgat

SEQ ID NO: 334690 - DNA, 33 bp, Homo sapien
tctccaatctcgagacgctagagcccacctgat

SEQ ID NO: 334691 - DNA, 33 bp, Homo sapien
actttaaaggaagataccatgtccatttttttc

SEQ ID NO: 334692 - DNA, 33 bp, Homo sapien
actttaaaggaagatatcatgtccatttttttc

SEQ ID NO: 334693 - DNA, 33 bp, Homo sapien
ttaacttgttagggcccattgtctacgtctgtc

SEQ ID NO: 334694 - DNA, 33 bp, Homo sapien
ttaacttgttagggcctattgtctacgtctgtc

SEQ ID NO: 334695 - DNA, 33 bp, Homo sapien
acaaatatgacatatcaccgaagtgtggcgtat

SEQ ID NO: 334696 - DNA, 33 bp, Homo sapien
acaaatatgacatatccccgaagtgtggcgtat

SEQ ID NO: 334697 - DNA, 33 bp, Homo sapien
aaagtggttgctactaaggaataacagcagctg

SEQ ID NO: 334698 - DNA, 33 bp, Homo sapien
aaagtggttgctactagggaataacagcagctg

SEQ ID NO: 334699 - DNA, 33 bp, Homo sapien
aggagcaactcaaggaaaattcgacaacaaagg

SEQ ID NO: 334700 - DNA, 33 bp, Homo sapien
aggagcaactcaaggacaattcgacaacaaagg

SEQ ID NO: 334701 - DNA, 33 bp, Homo sapien
cttcaaagagataccaaggagaaaatcagctca

SEQ ID NO: 334702 - DNA, 33 bp, Homo sapien
cttcaaagagataccatggagaaaatcagctca

SEQ ID NO: 334703 - DNA, 33 bp, Homo sapien
atgtttggttggtaaaagccccagagattaaga

SEQ ID NO: 334704 - DNA, 33 bp, Homo sapien
atgtttggttggtaaaggccccagagattaaga

SEQ ID NO: 334705 - DNA, 33 bp, Homo sapien
tacacagctataagcacgggcactagttttcca

SEQ ID NO: 334706 - DNA, 33 bp, Homo sapien
tacacagctataagcatgggcactagttttcca

SEQ ID NO: 334707 - DNA, 33 bp, Homo sapien
aagaaactatcacaaacatagcagtgctccagg

SEQ ID NO: 334708 - DNA, 33 bp, Homo sapien
aagaaactatcacaaatatagcagtgctccagg

SEQ ID NO: 334709 - DNA, 33 bp, Homo sapien
ggcagaggccagaagaccattcaggtgacaacc

SEQ ID NO: 334710 - DNA, 33 bp, Homo sapien
ggcagaggccagaagatcattcaggtgacaacc

SEQ ID NO: 334711 - DNA, 33 bp, Homo sapien
atcccaagttctccaacttctaatcttctcaac

SEQ ID NO: 334712 - DNA, 33 bp, Homo sapien
atcccaagttctccaatttctaatcttctcaac

SEQ ID NO: 334713 - DNA, 33 bp, Homo sapien
ggcttgagatctctcaactaaagacagaaaagt

SEQ ID NO: 334714 - DNA, 33 bp, Homo sapien
ggcttgagatctctcatctaaagacagaaaagt

SEQ ID NO: 334715 - DNA, 33 bp, Homo sapien
tttctccttcaacccccctttatagactgaaac

SEQ ID NO: 334716 - DNA, 33 bp, Homo sapien
tttctccttcaaccccgctttatagactgaaac

SEQ ID NO: 334717 - DNA, 33 bp, Homo sapien
ttaaatgattaggtcacagtgaattttggcagt

SEQ ID NO: 334718 - DNA, 33 bp, Homo sapien
ttaaatgattaggtcatagtgaattttggcagt

SEQ ID NO: 334719 - DNA, 33 bp, Homo sapien
acaagataaagcaacacggcaattttgtaaggt

SEQ ID NO: 334720 - DNA, 33 bp, Homo sapien
acaagataaagcaacatggcaattttgtaaggt

SEQ ID NO: 334721 - DNA, 33 bp, Homo sapien
cacaaagtagtagactcagaaagatgaggttct

SEQ ID NO: 334722 - DNA, 33 bp, Homo sapien
cacaaagtagtagactgagaaagatgaggttct

SEQ ID NO: 334723 - DNA, 33 bp, Homo sapien
aaattatggctaacaaactctcttttggcttcc

SEQ ID NO: 334724 - DNA, 33 bp, Homo sapien
aaattatggctaacaatctctcttttggcttcc

SEQ ID NO: 334725 - DNA, 33 bp, Homo sapien
gtggggatcaagtgtcaacatgaatttggagag

SEQ ID NO: 334726 - DNA, 33 bp, Homo sapien
gtggggatcaagtgtccacatgaatttggagag

SEQ ID NO: 334727 - DNA, 33 bp, Homo sapien
tccatccaatgacacaaaatcaaagctatcaaa

SEQ ID NO: 334728 - DNA, 33 bp, Homo sapien
tccatccaatgacacagaatcaaagctatcaaa

SEQ ID NO: 334729 - DNA, 33 bp, Homo sapien
agagaaaatagaggcacctctagaaaacaggag

SEQ ID NO: 334730 - DNA, 33 bp, Homo sapien
agagaaaatagaggcatctctagaaaacaggag

SEQ ID NO: 334731 - DNA, 33 bp, Homo sapien
ccccaaagaacatagaagtcaatttgaaggaaa

SEQ ID NO: 334732 - DNA, 33 bp, Homo sapien
ccccaaagaacatagaggtcaatttgaaggaaa

SEQ ID NO: 334733 - DNA, 33 bp, Homo sapien
ttgaataatgaggatgaacctttagtgacaaaa

SEQ ID NO: 334734 - DNA, 33 bp, Homo sapien
ttgaataatgaggatggacctttagtgacaaaa

SEQ ID NO: 334735 - DNA, 33 bp, Homo sapien
ttattcaaactcaggaacagtcatccgtaatag

SEQ ID NO: 334736 - DNA, 33 bp, Homo sapien
ttattcaaactcaggaccagtcatccgtaatag

SEQ ID NO: 334737 - DNA, 33 bp, Homo sapien
cttcagagtaacccaactgtcagatgtagaagc

SEQ ID NO: 334738 - DNA, 33 bp, Homo sapien
cttcagagtaacccaattgtcagatgtagaagc

SEQ ID NO: 334739 - DNA, 33 bp, Homo sapien
attattaaattactaaaatcttcgaagtacaaa

SEQ ID NO: 334740 - DNA, 33 bp, Homo sapien
attattaaattactaagatcttcgaagtacaaa

SEQ ID NO: 334741 - DNA, 33 bp, Homo sapien
ttgtttatctgagataactgggtgaggattatt

SEQ ID NO: 334742 - DNA, 33 bp, Homo sapien
ttgtttatctgagatatctgggtgaggattatt

SEQ ID NO: 334743 - DNA, 33 bp, Homo sapien
cttaaatggatataggaaaacccagaaatgtag

SEQ ID NO: 334744 - DNA, 33 bp, Homo sapien
cttaaatggatatagggaaacccagaaatgtag

SEQ ID NO: 334745 - DNA, 33 bp, Homo sapien
atcttagattgaaacacacctgcaaagtttttt

SEQ ID NO: 334746 - DNA, 33 bp, Homo sapien
atcttagattgaaacatacctgcaaagtttttt

SEQ ID NO: 334747 - DNA, 33 bp, Homo sapien
tttagacatgtggaaacatggagaggaataagt

SEQ ID NO: 334748 - DNA, 33 bp, Homo sapien
tttagacatgtggaaatatggagaggaataagt

SEQ ID NO: 334749 - DNA, 33 bp, Homo sapien
cattcaacagtgaccacagaaaaacatcctaat

SEQ ID NO: 334750 - DNA, 33 bp, Homo sapien
cattcaacagtgaccagagaaaaacatcctaat

SEQ ID NO: 334751 - DNA, 33 bp, Homo sapien
tcccatgcgtgttttaagatagactagttcagt

SEQ ID NO: 334752 - DNA, 33 bp, Homo sapien
tcccatgcgtgttttaggatagactagttcagt

SEQ ID NO: 334753 - DNA, 33 bp, Homo sapien
tctttaaatatgcagacgagcttgatatatgtg

SEQ ID NO: 334754 - DNA, 33 bp, Homo sapien
tctttaaatatgcagatgagcttgatatatgtg

SEQ ID NO: 334755 - DNA, 33 bp, Homo sapien
agtcttactgctcccaaatccacagctcttagc

SEQ ID NO: 334756 - DNA, 33 bp, Homo sapien
agtcttactgctcccagatccacagctcttagc

SEQ ID NO: 334757 - DNA, 33 bp, Homo sapien
tggtgttgtgtgacagcagtttcttacccagtt

SEQ ID NO: 334758 - DNA, 33 bp, Homo sapien
tggtgttgtgtgacagtagtttcttacccagtt

SEQ ID NO: 334759 - DNA, 33 bp, Homo sapien
caccattattacatgacacgtctttgcaaactc

SEQ ID NO: 334760 - DNA, 33 bp, Homo sapien
caccattattacatgatacgtctttgcaaactc

SEQ ID NO: 334761 - DNA, 33 bp, Homo sapien
atgtcaacagaagccacgttttccaatactaca

SEQ ID NO: 334762 - DNA, 33 bp, Homo sapien
atgtcaacagaagccatgttttccaatactaca

SEQ ID NO: 334763 - DNA, 33 bp, Homo sapien
tggaagagttttaagcaatgtagtgagctgctg

SEQ ID NO: 334764 - DNA, 33 bp, Homo sapien
tggaagagttttaagcgatgtagtgagctgctg

SEQ ID NO: 334765 - DNA, 33 bp, Homo sapien
tcctgagaggtttggaatcagtggctcccgagg

SEQ ID NO: 334766 - DNA, 33 bp, Homo sapien
tcctgagaggtttggattcagtggctcccgagg

SEQ ID NO: 334767 - DNA, 33 bp, Homo sapien
aatggtctatgtggaactggaatcagtgtttag

SEQ ID NO: 334768 - DNA, 33 bp, Homo sapien
aatggtctatgtggaagtggaatcagtgtttag

SEQ ID NO: 334769 - DNA, 33 bp, Homo sapien
ataggtgaaagtaacactcatctctagcaaaac

SEQ ID NO: 334770 - DNA, 33 bp, Homo sapien
ataggtgaaagtaacattcatctctagcaaaac

SEQ ID NO: 334771 - DNA, 33 bp, Homo sapien
tgacataccgatttcaagaagaatcaaggtctc

SEQ ID NO: 334772 - DNA, 33 bp, Homo sapien
tgacataccgatttcaggaagaatcaaggtctc

SEQ ID NO: 334773 - DNA, 33 bp, Homo sapien
gaaaacaggtcacttacaggcaaaataagtgtt

SEQ ID NO: 334774 - DNA, 33 bp, Homo sapien
gaaaacaggtcacttagaggcaaaataagtgtt

SEQ ID NO: 334775 - DNA, 33 bp, Homo sapien
agcactgtggctccaaagagacagaagagcatc

SEQ ID NO: 334776 - DNA, 33 bp, Homo sapien
agcactgtggctccaacgagacagaagagcatc

SEQ ID NO: 334777 - DNA, 33 bp, Homo sapien
agtcgtgaaatgatgcaatctcaggtttttaaa

SEQ ID NO: 334778 - DNA, 33 bp, Homo sapien
agtcgtgaaatgatgcgatctcaggtttttaaa

SEQ ID NO: 334779 - DNA, 33 bp, Homo sapien
atgatcaaaccacattgaaacataaccacatca

SEQ ID NO: 334780 - DNA, 33 bp, Homo sapien
atgatcaaaccacatttaaacataaccacatca

SEQ ID NO: 334781 - DNA, 33 bp, Homo sapien
tacttctcacatgtcccgatgccaaatttggac

SEQ ID NO: 334782 - DNA, 33 bp, Homo sapien
tacttctcacatgtcctgatgccaaatttggac

SEQ ID NO: 334783 - DNA, 33 bp, Homo sapien
gggactctgggccaaactgatgcttctccaaac

SEQ ID NO: 334784 - DNA, 33 bp, Homo sapien
gggactctgggccaaattgatgcttctccaaac

SEQ ID NO: 334785 - DNA, 33 bp, Homo sapien
aaagactaggggctataaccagagactcagaaa

SEQ ID NO: 334786 - DNA, 33 bp, Homo sapien
aaagactaggggctattaccagagactcagaaa

SEQ ID NO: 334787 - DNA, 33 bp, Homo sapien
gaacaacggcctgatgaaggctagtttctcaat

SEQ ID NO: 334788 - DNA, 33 bp, Homo sapien
gaacaacggcctgatgtaggctagtttctcaat

SEQ ID NO: 334789 - DNA, 33 bp, Homo sapien
tgttagaaatagcagaacgtgaggagcaatgtg

SEQ ID NO: 334790 - DNA, 33 bp, Homo sapien
tgttagaaatagcagagcgtgaggagcaatgtg

SEQ ID NO: 334791 - DNA, 33 bp, Homo sapien
attcttaacttcctgacaatagagcaaatagtt

SEQ ID NO: 334792 - DNA, 33 bp, Homo sapien
attcttaacttcctgataatagagcaaatagtt

SEQ ID NO: 334793 - DNA, 33 bp, Homo sapien
tctcatttttgtattgaatggggccaggaacta

SEQ ID NO: 334794 - DNA, 33 bp, Homo sapien
tctcatttttgtattggatggggccaggaacta

SEQ ID NO: 334795 - DNA, 33 bp, Homo sapien
aggcagaatgtcaaacaggagataaaaatcaac

SEQ ID NO: 334796 - DNA, 33 bp, Homo sapien
aggcagaatgtcaaacgggagataaaaatcaac

SEQ ID NO: 334797 - DNA, 33 bp, Homo sapien
tggtcggcatgttacaaagctaaggtgccaata

SEQ ID NO: 334798 - DNA, 33 bp, Homo sapien
tggtcggcatgttacagagctaaggtgccaata

SEQ ID NO: 334799 - DNA, 33 bp, Homo sapien
gatggatgaataggaacgcaaaaaggtggcttt

SEQ ID NO: 334800 - DNA, 33 bp, Homo sapien
gatggatgaataggaatgcaaaaaggtggcttt

SEQ ID NO: 334801 - DNA, 33 bp, Homo sapien
gaaggggtgagtacccaaattgtgtcctaggtt

SEQ ID NO: 334802 - DNA, 33 bp, Homo sapien
gaaggggtgagtacccgaattgtgtcctaggtt

SEQ ID NO: 334803 - DNA, 33 bp, Homo sapien
aagacaaaggattttaaaacaggcaactgtaat

SEQ ID NO: 334804 - DNA, 33 bp, Homo sapien
aagacaaaggattttacaacaggcaactgtaat

SEQ ID NO: 334805 - DNA, 33 bp, Homo sapien
tctctcttctcaagtcccttttctctgagatct

SEQ ID NO: 334806 - DNA, 33 bp, Homo sapien
tctctcttctcaagtctcttttctctgagatct

SEQ ID NO: 334807 - DNA, 33 bp, Homo sapien
ggttcttgcagaaataatatctttccaggtcac

SEQ ID NO: 334808 - DNA, 33 bp, Homo sapien
ggttcttgcagaaatagtatctttccaggtcac

SEQ ID NO: 334809 - DNA, 33 bp, Homo sapien
tctaaggacctttacacggatatagcataatgt

SEQ ID NO: 334810 - DNA, 33 bp, Homo sapien
tctaaggacctttacatggatatagcataatgt

SEQ ID NO: 334811 - DNA, 33 bp, Homo sapien
tctagatcacagatacaattatgacaagattat

SEQ ID NO: 334812 - DNA, 33 bp, Homo sapien
tctagatcacagataccattatgacaagattat

SEQ ID NO: 334813 - DNA, 33 bp, Homo sapien
atatttgtagtgagaaatgaatgaactagagca

SEQ ID NO: 334814 - DNA, 33 bp, Homo sapien
atatttgtagtgagaattgaatgaactagagca

SEQ ID NO: 334815 - DNA, 33 bp, Homo sapien
ccatgaaaccagagaacggaaagaacatacagt

SEQ ID NO: 334816 - DNA, 33 bp, Homo sapien
ccatgaaaccagagaatggaaagaacatacagt

SEQ ID NO: 334817 - DNA, 33 bp, Homo sapien
agtccgattaccttgacgtgaaaatttgaacac

SEQ ID NO: 334818 - DNA, 33 bp, Homo sapien
agtccgattaccttgatgtgaaaatttgaacac

SEQ ID NO: 334819 - DNA, 33 bp, Homo sapien
aaaagacaccataataagaaacatgtgttaggg

SEQ ID NO: 334820 - DNA, 33 bp, Homo sapien
aaaagacaccataatacgaaacatgtgttaggg

SEQ ID NO: 334821 - DNA, 33 bp, Homo sapien
tggctgagttggtccaggcccacttggaagatt

SEQ ID NO: 334822 - DNA, 33 bp, Homo sapien
tggctgagttggtccatgcccacttggaagatt

SEQ ID NO: 334823 - DNA, 33 bp, Homo sapien
tgctggttagcatgataaagagatacttaggtg

SEQ ID NO: 334824 - DNA, 33 bp, Homo sapien
tgctggttagcatgatgaagagatacttaggtg

SEQ ID NO: 334825 - DNA, 33 bp, Homo sapien
aaactcaagtgagctaaaatcaggctacctgtg

SEQ ID NO: 334826 - DNA, 33 bp, Homo sapien
aaactcaagtgagctacaatcaggctacctgtg

SEQ ID NO: 334827 - DNA, 33 bp, Homo sapien
gtaagcaaaaataaaaatgtggaaactcaggga

SEQ ID NO: 334828 - DNA, 33 bp, Homo sapien
gtaagcaaaaataaaattgtggaaactcaggga

SEQ ID NO: 334829 - DNA, 33 bp, Homo sapien
gtaggcattacacaaaaggaaaagaaaacatga

SEQ ID NO: 334830 - DNA, 33 bp, Homo sapien
gtaggcattacacaaagggaaaagaaaacatga

SEQ ID NO: 334831 - DNA, 33 bp, Homo sapien
gttttgatcagaggtcacaagattctcagaaag

SEQ ID NO: 334832 - DNA, 33 bp, Homo sapien
gttttgatcagaggtcgcaagattctcagaaag

SEQ ID NO: 334833 - DNA, 33 bp, Homo sapien
tttcacttttagaacaaggtcaaagtccacttt

SEQ ID NO: 334834 - DNA, 33 bp, Homo sapien
tttcacttttagaacagggtcaaagtccacttt

SEQ ID NO: 334835 - DNA, 33 bp, Homo sapien
aataactgcaagataacgttatgtccagaatgt

SEQ ID NO: 334836 - DNA, 33 bp, Homo sapien
aataactgcaagataatgttatgtccagaatgt

SEQ ID NO: 334837 - DNA, 33 bp, Homo sapien
accatccaactgtctgccagaagttagctcagc

SEQ ID NO: 334838 - DNA, 33 bp, Homo sapien
accatccaactgtctgtcagaagttagctcagc

SEQ ID NO: 334839 - DNA, 33 bp, Homo sapien
atgagtgttctggaaacatcatccaagcatgag

SEQ ID NO: 334840 - DNA, 33 bp, Homo sapien
atgagtgttctggaaagatcatccaagcatgag

SEQ ID NO: 334841 - DNA, 33 bp, Homo sapien
ttgctcttttccagaaataaatcttgatatgtg

SEQ ID NO: 334842 - DNA, 33 bp, Homo sapien
ttgctcttttccagaattaaatcttgatatgtg

SEQ ID NO: 334843 - DNA, 33 bp, Homo sapien
taaagggcatgtgaaacgtaggcagggaagtca

SEQ ID NO: 334844 - DNA, 33 bp, Homo sapien
taaagggcatgtgaaatgtaggcagggaagtca

SEQ ID NO: 334845 - DNA, 33 bp, Homo sapien
taagattcaaatgcctaaagacaacatcactta

SEQ ID NO: 334846 - DNA, 33 bp, Homo sapien
taagattcaaatgcctgaagacaacatcactta

SEQ ID NO: 334847 - DNA, 33 bp, Homo sapien
aaataatggatgtcaaagatgtgatgcttttat

SEQ ID NO: 334848 - DNA, 33 bp, Homo sapien
aaataatggatgtcaaggatgtgatgcttttat

SEQ ID NO: 334849 - DNA, 33 bp, Homo sapien
aggtagtcatgatgaaaagttttccagaatgca

SEQ ID NO: 334850 - DNA, 33 bp, Homo sapien
aggtagtcatgatgaacagttttccagaatgca

SEQ ID NO: 334851 - DNA, 33 bp, Homo sapien
ccctctttcctattcccatcttaggcttcttgt

SEQ ID NO: 334852 - DNA, 33 bp, Homo sapien
ccctctttcctattcctatcttaggcttcttgt

SEQ ID NO: 334853 - DNA, 33 bp, Homo sapien
taaatgtgttatctgaacaagcaaaacctaaga

SEQ ID NO: 334854 - DNA, 33 bp, Homo sapien
taaatgtgttatctgagcaagcaaaacctaaga

SEQ ID NO: 334855 - DNA, 33 bp, Homo sapien
taagaggaaaatcaatcatgaggtatgttatcg

SEQ ID NO: 334856 - DNA, 33 bp, Homo sapien
taagaggaaaatcaattatgaggtatgttatcg

SEQ ID NO: 334857 - DNA, 33 bp, Homo sapien
catggcaaaacagctccaacagggcagagtagg

SEQ ID NO: 334858 - DNA, 33 bp, Homo sapien
catggcaaaacagctctaacagggcagagtagg

SEQ ID NO: 334859 - DNA, 33 bp, Homo sapien
ctctggaaattgactaaaggcatacaaaaaatc

SEQ ID NO: 334860 - DNA, 33 bp, Homo sapien
ctctggaaattgactagaggcatacaaaaaatc

SEQ ID NO: 334861 - DNA, 33 bp, Homo sapien
atgcttggcatggggaacaatggtgaaaacaga

SEQ ID NO: 334862 - DNA, 33 bp, Homo sapien
atgcttggcatggggagcaatggtgaaaacaga

SEQ ID NO: 334863 - DNA, 33 bp, Homo sapien
tattttccaggtgctacatggaagcataagagg

SEQ ID NO: 334864 - DNA, 33 bp, Homo sapien
tattttccaggtgctatatggaagcataagagg

SEQ ID NO: 334865 - DNA, 33 bp, Homo sapien
tgatatttgggttgccactaagcctcttatgct

SEQ ID NO: 334866 - DNA, 33 bp, Homo sapien
tgatatttgggttgccgctaagcctcttatgct

SEQ ID NO: 334867 - DNA, 33 bp, Homo sapien
atgcctgctttccttcactccatttgttgatgg

SEQ ID NO: 334868 - DNA, 33 bp, Homo sapien
atgcctgctttccttcgctccatttgttgatgg

SEQ ID NO: 334869 - DNA, 33 bp, Homo sapien
ctgtgcgattgtttccactaaaaaccatgagat

SEQ ID NO: 334870 - DNA, 33 bp, Homo sapien
ctgtgcgattgtttccgctaaaaaccatgagat

SEQ ID NO: 334871 - DNA, 33 bp, Homo sapien
ggctctctcataaacacgtgcatgcagaaagac

SEQ ID NO: 334872 - DNA, 33 bp, Homo sapien
ggctctctcataaacatgtgcatgcagaaagac

SEQ ID NO: 334873 - DNA, 33 bp, Homo sapien
gctacgctattgtagacatttaagcggtcaatg

SEQ ID NO: 334874 - DNA, 33 bp, Homo sapien
gctacgctattgtagatatttaagcggtcaatg

SEQ ID NO: 334875 - DNA, 33 bp, Homo sapien
gtaggtgtctgtcaaacagtttcccaggtagtt

SEQ ID NO: 334876 - DNA, 33 bp, Homo sapien
gtaggtgtctgtcaaagagtttcccaggtagtt

SEQ ID NO: 334877 - DNA, 33 bp, Homo sapien
ttcaccaaaatgaaataaattacaggccaaagc

SEQ ID NO: 334878 - DNA, 33 bp, Homo sapien
ttcaccaaaatgaaatgaattacaggccaaagc

SEQ ID NO: 334879 - DNA, 33 bp, Homo sapien
cttcccttttatacaaagcagctatatgagctg

SEQ ID NO: 334880 - DNA, 33 bp, Homo sapien
cttcccttttatacaacgcagctatatgagctg

SEQ ID NO: 334881 - DNA, 33 bp, Homo sapien
gatctcaaaaaaatgacatagcattccacttag

SEQ ID NO: 334882 - DNA, 33 bp, Homo sapien
gatctcaaaaaaatgatatagcattccacttag

SEQ ID NO: 334883 - DNA, 33 bp, Homo sapien
catgggatctgaaatcacttttccaaatgcagc

SEQ ID NO: 334884 - DNA, 33 bp, Homo sapien
catgggatctgaaatcgcttttccaaatgcagc

SEQ ID NO: 334885 - DNA, 33 bp, Homo sapien
atgacagactaggagcagaagttgaatattctt

SEQ ID NO: 334886 - DNA, 33 bp, Homo sapien
atgacagactaggagcggaagttgaatattctt

SEQ ID NO: 334887 - DNA, 33 bp, Homo sapien
ccaggagacttgtaaacaccttattgtctgtga

SEQ ID NO: 334888 - DNA, 33 bp, Homo sapien
ccaggagacttgtaaataccttattgtctgtga

SEQ ID NO: 334889 - DNA, 33 bp, Homo sapien
atggtaccagtgctgcacttctggggatcacac

SEQ ID NO: 334890 - DNA, 33 bp, Homo sapien
atggtaccagtgctgctcttctggggatcacac

SEQ ID NO: 334891 - DNA, 33 bp, Homo sapien
tctatgaaagacatcaactgtggaaacttgaaa

SEQ ID NO: 334892 - DNA, 33 bp, Homo sapien
tctatgaaagacatcagctgtggaaacttgaaa

SEQ ID NO: 334893 - DNA, 33 bp, Homo sapien
tcagtggccactttgaaagactgaaatgaggct

SEQ ID NO: 334894 - DNA, 33 bp, Homo sapien
tcagtggccactttgagagactgaaatgaggct

SEQ ID NO: 334895 - DNA, 33 bp, Homo sapien
cgcaaacagcagtcgacaaataacagccacgat

SEQ ID NO: 334896 - DNA, 33 bp, Homo sapien
cgcaaacagcagtcgataaataacagccacgat

SEQ ID NO: 334897 - DNA, 33 bp, Homo sapien
actttggagttcagatcagccctcttttcctgc

SEQ ID NO: 334898 - DNA, 33 bp, Homo sapien
actttggagttcagatgagccctcttttcctgc

SEQ ID NO: 334899 - DNA, 33 bp, Homo sapien
tcatacttttagagacaaactgttcttgggctg

SEQ ID NO: 334900 - DNA, 33 bp, Homo sapien
tcatacttttagagacgaactgttcttgggctg

SEQ ID NO: 334901 - DNA, 33 bp, Homo sapien
gattcctaacataaaaactctaagtggtgtatc

SEQ ID NO: 334902 - DNA, 33 bp, Homo sapien
gattcctaacataaaatctctaagtggtgtatc

SEQ ID NO: 334903 - DNA, 33 bp, Homo sapien
atgttgctttaaatgacactgcaagcccaaatc

SEQ ID NO: 334904 - DNA, 33 bp, Homo sapien
atgttgctttaaatgatactgcaagcccaaatc

SEQ ID NO: 334905 - DNA, 33 bp, Homo sapien
aggggattttcagggtaaaaccactccagtagg

SEQ ID NO: 334906 - DNA, 33 bp, Homo sapien
aggggattttcagggtgaaaccactccagtagg

SEQ ID NO: 334907 - DNA, 33 bp, Homo sapien
ttgagtaccattcgcagaggacaattctttatt

SEQ ID NO: 334908 - DNA, 33 bp, Homo sapien
ttgagtaccattcgcataggacaattctttatt

SEQ ID NO: 334909 - DNA, 33 bp, Homo sapien
cagaccaatgtggagaagcagctgcctcatact

SEQ ID NO: 334910 - DNA, 33 bp, Homo sapien
cagaccaatgtggagacgcagctgcctcatact

SEQ ID NO: 334911 - DNA, 33 bp, Homo sapien
cctaatcgtgaaactgcaaaataaagcctcttt

SEQ ID NO: 334912 - DNA, 33 bp, Homo sapien
cctaatcgtgaaactggaaaataaagcctcttt

SEQ ID NO: 334913 - DNA, 33 bp, Homo sapien
ttccccatgcaaaaagaaggtgaaagtaagcta

SEQ ID NO: 334914 - DNA, 33 bp, Homo sapien
ttccccatgcaaaaaggaggtgaaagtaagcta

SEQ ID NO: 334915 - DNA, 33 bp, Homo sapien
gccccttgtaataccacgtgaatgtgtctctct

SEQ ID NO: 334916 - DNA, 33 bp, Homo sapien
gccccttgtaataccatgtgaatgtgtctctct

SEQ ID NO: 334917 - DNA, 33 bp, Homo sapien
taacttcctccctgagacacattcctttgtgaa

SEQ ID NO: 334918 - DNA, 33 bp, Homo sapien
taacttcctccctgagccacattcctttgtgaa

SEQ ID NO: 334919 - DNA, 33 bp, Homo sapien
tggcaaataccttcaacgtttatcctcctgcat

SEQ ID NO: 334920 - DNA, 33 bp, Homo sapien
tggcaaataccttcaatgtttatcctcctgcat

SEQ ID NO: 334921 - DNA, 33 bp, Homo sapien
aaaccatattaaacaacttctgattcaaaacaa

SEQ ID NO: 334922 - DNA, 33 bp, Homo sapien
aaaccatattaaacaagttctgattcaaaacaa

SEQ ID NO: 334923 - DNA, 33 bp, Homo sapien
ttatggtagctatataaatacacaagtgtggga

SEQ ID NO: 334924 - DNA, 33 bp, Homo sapien
ttatggtagctatatatatacacaagtgtggga

SEQ ID NO: 334925 - DNA, 33 bp, Homo sapien
gagcacatggtaagaacgctacgcaaataaggc

SEQ ID NO: 334926 - DNA, 33 bp, Homo sapien
gagcacatggtaagaatgctacgcaaataaggc

SEQ ID NO: 334927 - DNA, 33 bp, Homo sapien
tggctccggtatgaatgaactaatgtgcacata

SEQ ID NO: 334928 - DNA, 33 bp, Homo sapien
tggctccggtatgaattaactaatgtgcacata

SEQ ID NO: 334929 - DNA, 33 bp, Homo sapien
ctacattatgtacacaagactgttggtatatag

SEQ ID NO: 334930 - DNA, 33 bp, Homo sapien
ctacattatgtacacaggactgttggtatatag

SEQ ID NO: 334931 - DNA, 33 bp, Homo sapien
cctcatcatctacagacataaaaatgagttcct

SEQ ID NO: 334932 - DNA, 33 bp, Homo sapien
cctcatcatctacagagataaaaatgagttcct

SEQ ID NO: 334933 - DNA, 33 bp, Homo sapien
gcacccttggactttaacctctaggaaatgagg

SEQ ID NO: 334934 - DNA, 33 bp, Homo sapien
gcacccttggactttaccctctaggaaatgagg

SEQ ID NO: 334935 - DNA, 33 bp, Homo sapien
gactgtgccttttgcaaattttcttctcaaacc

SEQ ID NO: 334936 - DNA, 33 bp, Homo sapien
gactgtgccttttgcagattttcttctcaaacc

SEQ ID NO: 334937 - DNA, 33 bp, Homo sapien
aataccgtgtctaaataaaagagaatgtcaatg

SEQ ID NO: 334938 - DNA, 33 bp, Homo sapien
aataccgtgtctaaatgaaagagaatgtcaatg

SEQ ID NO: 334939 - DNA, 33 bp, Homo sapien
gctgtcccaattaagacgcctgcaactgcagct

SEQ ID NO: 334940 - DNA, 33 bp, Homo sapien
gctgtcccaattaagatgcctgcaactgcagct

SEQ ID NO: 334941 - DNA, 33 bp, Homo sapien
gaggcaagtcttagtccatgtagggccagaact

SEQ ID NO: 334942 - DNA, 33 bp, Homo sapien
gaggcaagtcttagtcgatgtagggccagaact

SEQ ID NO: 334943 - DNA, 33 bp, Homo sapien
cttgaaagaggttgctcaagaaaaagttcatct

SEQ ID NO: 334944 - DNA, 33 bp, Homo sapien
cttgaaagaggttgcttaagaaaaagttcatct

SEQ ID NO: 334945 - DNA, 33 bp, Homo sapien
ctaaagcatctgtaaacggattttgtatttatt

SEQ ID NO: 334946 - DNA, 33 bp, Homo sapien
ctaaagcatctgtaaatggattttgtatttatt

SEQ ID NO: 334947 - DNA, 33 bp, Homo sapien
tcactgtgtagatgaaaagagcaatgttcagag

SEQ ID NO: 334948 - DNA, 33 bp, Homo sapien
tcactgtgtagatgaagagagcaatgttcagag

SEQ ID NO: 334949 - DNA, 33 bp, Homo sapien
aggcatgataagccataagagaaactgtggcag

SEQ ID NO: 334950 - DNA, 33 bp, Homo sapien
aggcatgataagccatgagagaaactgtggcag

SEQ ID NO: 334951 - DNA, 33 bp, Homo sapien
tcgtccgggaagaggcagatattcctggtggtg

SEQ ID NO: 334952 - DNA, 33 bp, Homo sapien
tcgtccgggaagaggcggatattcctggtggtg

SEQ ID NO: 334953 - DNA, 33 bp, Homo sapien
tgtgaataacagaagacacaatgacatggtgat

SEQ ID NO: 334954 - DNA, 33 bp, Homo sapien
tgtgaataacagaagatacaatgacatggtgat

SEQ ID NO: 334955 - DNA, 33 bp, Homo sapien
gctgctcatggttccacatcttgggaaggacaa

SEQ ID NO: 334956 - DNA, 33 bp, Homo sapien
gctgctcatggttccagatcttgggaaggacaa

SEQ ID NO: 334957 - DNA, 33 bp, Homo sapien
aaccatcatagtgtcacaaagaacatttaaaaa

SEQ ID NO: 334958 - DNA, 33 bp, Homo sapien
aaccatcatagtgtcagaaagaacatttaaaaa

SEQ ID NO: 334959 - DNA, 33 bp, Homo sapien
aagaaacttactttcagactgtcctgaaacctg

SEQ ID NO: 334960 - DNA, 33 bp, Homo sapien
aagaaacttactttcatactgtcctgaaacctg

SEQ ID NO: 334961 - DNA, 33 bp, Homo sapien
ccgatatagaaagatacaagtgtacatacccaa

SEQ ID NO: 334962 - DNA, 33 bp, Homo sapien
ccgatatagaaagatagaagtgtacatacccaa

SEQ ID NO: 334963 - DNA, 33 bp, Homo sapien
accattaggtaacgtacgtagattacagacagc

SEQ ID NO: 334964 - DNA, 33 bp, Homo sapien
accattaggtaacgtatgtagattacagacagc

SEQ ID NO: 334965 - DNA, 33 bp, Homo sapien
gttaactcttttctgaagctacaaaccagactg

SEQ ID NO: 334966 - DNA, 33 bp, Homo sapien
gttaactcttttctgaggctacaaaccagactg

SEQ ID NO: 334967 - DNA, 33 bp, Homo sapien
ttaagttgtttattgcgctccacttgttgtttt

SEQ ID NO: 334968 - DNA, 33 bp, Homo sapien
ttaagttgtttattgctctccacttgttgtttt

SEQ ID NO: 334969 - DNA, 33 bp, Homo sapien
tatgtgtgaccaagctaaagtacagttaaaaaa

SEQ ID NO: 334970 - DNA, 33 bp, Homo sapien
tatgtgtgaccaagctgaagtacagttaaaaaa

SEQ ID NO: 334971 - DNA, 33 bp, Homo sapien
ggcaagttgccaggggaaagatctctgtcactt

SEQ ID NO: 334972 - DNA, 33 bp, Homo sapien
ggcaagttgccagggggaagatctctgtcactt

SEQ ID NO: 334973 - DNA, 33 bp, Homo sapien
ggtatggatggcaggaagatccttaattcaggc

SEQ ID NO: 334974 - DNA, 33 bp, Homo sapien
ggtatggatggcaggaggatccttaattcaggc

SEQ ID NO: 334975 - DNA, 33 bp, Homo sapien
gacagtaaaatttccgaaaaaccagtatgagcc

SEQ ID NO: 334976 - DNA, 33 bp, Homo sapien
gacagtaaaatttccgtaaaaccagtatgagcc

SEQ ID NO: 334977 - DNA, 33 bp, Homo sapien
gtttcctctgtcaaccaaactcctgaagaagcc

SEQ ID NO: 334978 - DNA, 33 bp, Homo sapien
gtttcctctgtcaaccgaactcctgaagaagcc

SEQ ID NO: 334979 - DNA, 33 bp, Homo sapien
atgaggtaaaactgtacgactatgccaacacta

SEQ ID NO: 334980 - DNA, 33 bp, Homo sapien
atgaggtaaaactgtatgactatgccaacacta

SEQ ID NO: 334981 - DNA, 33 bp, Homo sapien
tcggttcacactaccaaccgggaccatgtattt

SEQ ID NO: 334982 - DNA, 33 bp, Homo sapien
tcggttcacactaccagccgggaccatgtattt

SEQ ID NO: 334983 - DNA, 33 bp, Homo sapien
tgaatacgaattaatacaaaatcggttcacact

SEQ ID NO: 334984 - DNA, 33 bp, Homo sapien
tgaatacgaattaatagaaaatcggttcacact

SEQ ID NO: 334985 - DNA, 33 bp, Homo sapien
attagcaagaaaaggacagaggaagacactcag

SEQ ID NO: 334986 - DNA, 33 bp, Homo sapien
attagcaagaaaaggagagaggaagacactcag

SEQ ID NO: 334987 - DNA, 33 bp, Homo sapien
tgaggcggcctcactacgtcttttccccatccc

SEQ ID NO: 334988 - DNA, 33 bp, Homo sapien
tgaggcggcctcactatgtcttttccccatccc

SEQ ID NO: 334989 - DNA, 33 bp, Homo sapien
attcagcgtgtagagaactgtaaaactttttaa

SEQ ID NO: 334990 - DNA, 33 bp, Homo sapien
attcagcgtgtagagagctgtaaaactttttaa

SEQ ID NO: 334991 - DNA, 33 bp, Homo sapien
gtcacattgaagcttaaagatttttgagggtag

SEQ ID NO: 334992 - DNA, 33 bp, Homo sapien
gtcacattgaagcttagagatttttgagggtag

SEQ ID NO: 334993 - DNA, 33 bp, Homo sapien
aggactaattgaaatcggaggtagtagatgatg

SEQ ID NO: 334994 - DNA, 33 bp, Homo sapien
aggactaattgaaatctgaggtagtagatgatg

SEQ ID NO: 334995 - DNA, 33 bp, Homo sapien
tggagaaggaactaagacatctgtaactgattg

SEQ ID NO: 334996 - DNA, 33 bp, Homo sapien
tggagaaggaactaaggcatctgtaactgattg

SEQ ID NO: 334997 - DNA, 33 bp, Homo sapien
agctttgagaaacctacgccaagaacactatag

SEQ ID NO: 334998 - DNA, 33 bp, Homo sapien
agctttgagaaacctatgccaagaacactatag

SEQ ID NO: 334999 - DNA, 33 bp, Homo sapien
gcaatgaaaatacatacaggaaccttaaaccca

SEQ ID NO: 335000 - DNA, 33 bp, Homo sapien
gcaatgaaaatacatagaggaaccttaaaccca

SEQ ID NO: 335001 - DNA, 33 bp, Homo sapien
cagcttgttccataaaacagttaaagcctgtag

SEQ ID NO: 335002 - DNA, 33 bp, Homo sapien
cagcttgttccataaagcagttaaagcctgtag

SEQ ID NO: 335003 - DNA, 33 bp, Homo sapien
gtttgatgtaaaattccaatttctcggccaggc

SEQ ID NO: 335004 - DNA, 33 bp, Homo sapien
gtttgatgtaaaattctaatttctcggccaggc

SEQ ID NO: 335005 - DNA, 33 bp, Homo sapien
acagttgtgaaacagacgacttttgttctccat

SEQ ID NO: 335006 - DNA, 33 bp, Homo sapien
acagttgtgaaacagatgacttttgttctccat

SEQ ID NO: 335007 - DNA, 33 bp, Homo sapien
gttagctaacaagatacatcccacaaaaccaag

SEQ ID NO: 335008 - DNA, 33 bp, Homo sapien
gttagctaacaagatagatcccacaaaaccaag

SEQ ID NO: 335009 - DNA, 33 bp, Homo sapien
cacaaaatctaagtccccgtattaaatgcagct

SEQ ID NO: 335010 - DNA, 33 bp, Homo sapien
cacaaaatctaagtcctcgtattaaatgcagct

SEQ ID NO: 335011 - DNA, 33 bp, Homo sapien
ttttgagatgaacacaatctgaaaacctaatta

SEQ ID NO: 335012 - DNA, 33 bp, Homo sapien
ttttgagatgaacacattctgaaaacctaatta

SEQ ID NO: 335013 - DNA, 33 bp, Homo sapien
taatgttttctcagaacgttttcaaaagcatcc

SEQ ID NO: 335014 - DNA, 33 bp, Homo sapien
taatgttttctcagaatgttttcaaaagcatcc

SEQ ID NO: 335015 - DNA, 33 bp, Homo sapien
taggaattcatgcttgaagtgatatttgcagga

SEQ ID NO: 335016 - DNA, 33 bp, Homo sapien
taggaattcatgcttggagtgatatttgcagga

SEQ ID NO: 335017 - DNA, 33 bp, Homo sapien
tagtactttcgtagcacgcttaggtatttgtat

SEQ ID NO: 335018 - DNA, 33 bp, Homo sapien
tagtactttcgtagcatgcttaggtatttgtat

SEQ ID NO: 335019 - DNA, 33 bp, Homo sapien
gaacagccccagcttacgctcactttccaagcc

SEQ ID NO: 335020 - DNA, 33 bp, Homo sapien
gaacagccccagcttatgctcactttccaagcc

SEQ ID NO: 335021 - DNA, 33 bp, Homo sapien
ctaagtcactgttttacaagccttacaaagatg

SEQ ID NO: 335022 - DNA, 33 bp, Homo sapien
ctaagtcactgttttagaagccttacaaagatg

SEQ ID NO: 335023 - DNA, 33 bp, Homo sapien
gatttctctagtagaaaccatctttgtaaggct

SEQ ID NO: 335024 - DNA, 33 bp, Homo sapien
gatttctctagtagaatccatctttgtaaggct

SEQ ID NO: 335025 - DNA, 33 bp, Homo sapien
ttattggagttataaacgacatccataatacaa

SEQ ID NO: 335026 - DNA, 33 bp, Homo sapien
ttattggagttataaatgacatccataatacaa

SEQ ID NO: 335027 - DNA, 33 bp, Homo sapien
ctggtacgatatgataccttgaatgccaaggaa

SEQ ID NO: 335028 - DNA, 33 bp, Homo sapien
ctggtacgatatgatatcttgaatgccaaggaa

SEQ ID NO: 335029 - DNA, 33 bp, Homo sapien
gaaaagttcagggaccaggagaaggcacaggac

SEQ ID NO: 335030 - DNA, 33 bp, Homo sapien
gaaaagttcagggaccgggagaaggcacaggac

SEQ ID NO: 335031 - DNA, 33 bp, Homo sapien
tgtgaataaacaggtgaacactgctttccatcc

SEQ ID NO: 335032 - DNA, 33 bp, Homo sapien
tgtgaataaacaggtggacactgctttccatcc

SEQ ID NO: 335033 - DNA, 33 bp, Homo sapien
catgagtttgcatcaaatacccgtctctgaaaa

SEQ ID NO: 335034 - DNA, 33 bp, Homo sapien
catgagtttgcatcaactacccgtctctgaaaa

SEQ ID NO: 335035 - DNA, 33 bp, Homo sapien
tgaactgagaaaaagacagtgctaacttctagg

SEQ ID NO: 335036 - DNA, 33 bp, Homo sapien
tgaactgagaaaaagagagtgctaacttctagg

SEQ ID NO: 335037 - DNA, 33 bp, Homo sapien
aaatcctccactgagcaatcccagttcctttgt

SEQ ID NO: 335038 - DNA, 33 bp, Homo sapien
aaatcctccactgagcgatcccagttcctttgt

SEQ ID NO: 335039 - DNA, 33 bp, Homo sapien
ggacaattcagataagcccactaataaaaatct

SEQ ID NO: 335040 - DNA, 33 bp, Homo sapien
ggacaattcagataaggccactaataaaaatct

SEQ ID NO: 335041 - DNA, 33 bp, Homo sapien
ttaatactgttatgagccagttattcaaaacta

SEQ ID NO: 335042 - DNA, 33 bp, Homo sapien
ttaatactgttatgagtcagttattcaaaacta

SEQ ID NO: 335043 - DNA, 33 bp, Homo sapien
ataggatgctttggtccgacatctagtgttctg

SEQ ID NO: 335044 - DNA, 33 bp, Homo sapien
ataggatgctttggtctgacatctagtgttctg

SEQ ID NO: 335045 - DNA, 33 bp, Homo sapien
acatacatttgtatttgcagtcttctgctttat

SEQ ID NO: 335046 - DNA, 33 bp, Homo sapien
acatacatttgtattttcagtcttctgctttat

SEQ ID NO: 335047 - DNA, 33 bp, Homo sapien
ccagttcaccatcatcacttctattctacagaa

SEQ ID NO: 335048 - DNA, 33 bp, Homo sapien
ccagttcaccatcatcgcttctattctacagaa

SEQ ID NO: 335049 - DNA, 33 bp, Homo sapien
tagaactcaggaaagcacattaataattacagg

SEQ ID NO: 335050 - DNA, 33 bp, Homo sapien
tagaactcaggaaagcgcattaataattacagg

SEQ ID NO: 335051 - DNA, 33 bp, Homo sapien
aaagaaaaggaagccacgctcctgtgtcaactt

SEQ ID NO: 335052 - DNA, 33 bp, Homo sapien
aaagaaaaggaagccatgctcctgtgtcaactt

SEQ ID NO: 335053 - DNA, 33 bp, Homo sapien
gtcatggctgaggttaaggttgaagagtttttg

SEQ ID NO: 335054 - DNA, 33 bp, Homo sapien
gtcatggctgaggttagggttgaagagtttttg

SEQ ID NO: 335055 - DNA, 33 bp, Homo sapien
ccactgagaaggtaacagaagcaatgacaagtc

SEQ ID NO: 335056 - DNA, 33 bp, Homo sapien
ccactgagaaggtaaccgaagcaatgacaagtc

SEQ ID NO: 335057 - DNA, 33 bp, Homo sapien
tggtctttgatggctacctaattcgtctttgtt

SEQ ID NO: 335058 - DNA, 33 bp, Homo sapien
tggtctttgatggctatctaattcgtctttgtt

SEQ ID NO: 335059 - DNA, 33 bp, Homo sapien
atgacccagctgtaaaatggcaactgaacctct

SEQ ID NO: 335060 - DNA, 33 bp, Homo sapien
atgacccagctgtaaagtggcaactgaacctct

SEQ ID NO: 335061 - DNA, 33 bp, Homo sapien
gtagtgtacttccatacgcttacttggctgact

SEQ ID NO: 335062 - DNA, 33 bp, Homo sapien
gtagtgtacttccatatgcttacttggctgact

SEQ ID NO: 335063 - DNA, 33 bp, Homo sapien
gtgtgttctatcagtacaaaaaatggaaaatgt

SEQ ID NO: 335064 - DNA, 33 bp, Homo sapien
gtgtgttctatcagtataaaaaatggaaaatgt

SEQ ID NO: 335065 - DNA, 33 bp, Homo sapien
aggccctgggatataaaccttatgaatgccaag

SEQ ID NO: 335066 - DNA, 33 bp, Homo sapien
aggccctgggatataacccttatgaatgccaag

SEQ ID NO: 335067 - DNA, 33 bp, Homo sapien
ccctgtgtcaaccacaacatttcactgttttaa

SEQ ID NO: 335068 - DNA, 33 bp, Homo sapien
ccctgtgtcaaccacagcatttcactgttttaa

SEQ ID NO: 335069 - DNA, 33 bp, Homo sapien
gaaaggattagcaccacagaaagcaaatgttga

SEQ ID NO: 335070 - DNA, 33 bp, Homo sapien
gaaaggattagcaccatagaaagcaaatgttga

SEQ ID NO: 335071 - DNA, 33 bp, Homo sapien
gtgtttgtaagttgacaaaatggtggcaaggaa

SEQ ID NO: 335072 - DNA, 33 bp, Homo sapien
gtgtttgtaagttgacgaaatggtggcaaggaa

SEQ ID NO: 335073 - DNA, 33 bp, Homo sapien
catgggacaagtcagacggggctggtagagtgt

SEQ ID NO: 335074 - DNA, 33 bp, Homo sapien
catgggacaagtcagatggggctggtagagtgt

SEQ ID NO: 335075 - DNA, 33 bp, Homo sapien
agaagtgttttgatcacgtgggaatcagaaaga

SEQ ID NO: 335076 - DNA, 33 bp, Homo sapien
agaagtgttttgatcatgtgggaatcagaaaga

SEQ ID NO: 335077 - DNA, 33 bp, Homo sapien
cacaggaaaaaaagaacagcaggtagtatacag

SEQ ID NO: 335078 - DNA, 33 bp, Homo sapien
cacaggaaaaaaagaatagcaggtagtatacag

SEQ ID NO: 335079 - DNA, 33 bp, Homo sapien
ggtcttatgctttttacatgatggttgcagtta

SEQ ID NO: 335080 - DNA, 33 bp, Homo sapien
ggtcttatgctttttagatgatggttgcagtta

SEQ ID NO: 335081 - DNA, 33 bp, Homo sapien
cttgcagtgtttacaacatagccagtgtttaca

SEQ ID NO: 335082 - DNA, 33 bp, Homo sapien
cttgcagtgtttacaagatagccagtgtttaca

SEQ ID NO: 335083 - DNA, 33 bp, Homo sapien
cactctttagtaagaaaagaacccgctatatac

SEQ ID NO: 335084 - DNA, 33 bp, Homo sapien
cactctttagtaagaagagaacccgctatatac

SEQ ID NO: 335085 - DNA, 33 bp, Homo sapien
ctttctagaaaacataataccaaaattcttctg

SEQ ID NO: 335086 - DNA, 33 bp, Homo sapien
ctttctagaaaacatattaccaaaattcttctg

SEQ ID NO: 335087 - DNA, 33 bp, Homo sapien
tactaaacacatggtgaatctgactaaaaggta

SEQ ID NO: 335088 - DNA, 33 bp, Homo sapien
tactaaacacatggtggatctgactaaaaggta

SEQ ID NO: 335089 - DNA, 33 bp, Homo sapien
attaaacttgctagaactcctcagtactaatat

SEQ ID NO: 335090 - DNA, 33 bp, Homo sapien
attaaacttgctagaattcctcagtactaatat

SEQ ID NO: 335091 - DNA, 33 bp, Homo sapien
gtcttcctcacaaagacaaagtgttaggtgtcg

SEQ ID NO: 335092 - DNA, 33 bp, Homo sapien
gtcttcctcacaaagagaaagtgttaggtgtcg

SEQ ID NO: 335093 - DNA, 33 bp, Homo sapien
gtgacacctgatccgacggaaaacaaagagctg

SEQ ID NO: 335094 - DNA, 33 bp, Homo sapien
gtgacacctgatccgatggaaaacaaagagctg

SEQ ID NO: 335095 - DNA, 33 bp, Homo sapien
atgaagcttgccaaaaatatagggcaaaaatgt

SEQ ID NO: 335096 - DNA, 33 bp, Homo sapien
atgaagcttgccaaaagtatagggcaaaaatgt

SEQ ID NO: 335097 - DNA, 33 bp, Homo sapien
aaatttctgtggggataaatttctaaagcttgc

SEQ ID NO: 335098 - DNA, 33 bp, Homo sapien
aaatttctgtggggatgaatttctaaagcttgc

SEQ ID NO: 335099 - DNA, 33 bp, Homo sapien
aaatggtcctgaagagaagtataatttgggtta

SEQ ID NO: 335100 - DNA, 33 bp, Homo sapien
aaatggtcctgaagaggagtataatttgggtta

SEQ ID NO: 335101 - DNA, 33 bp, Homo sapien
acttctccaaggtttcacagcaagtaagtagtg

SEQ ID NO: 335102 - DNA, 33 bp, Homo sapien
acttctccaaggtttcccagcaagtaagtagtg

SEQ ID NO: 335103 - DNA, 33 bp, Homo sapien
ccaatgagagaattgaagcttagataatttaag

SEQ ID NO: 335104 - DNA, 33 bp, Homo sapien
ccaatgagagaattgaggcttagataatttaag

SEQ ID NO: 335105 - DNA, 33 bp, Homo sapien
catcttatgtttagcacacctgttacctactgt

SEQ ID NO: 335106 - DNA, 33 bp, Homo sapien
catcttatgtttagcatacctgttacctactgt

SEQ ID NO: 335107 - DNA, 33 bp, Homo sapien
ggaggtactgagaaaacctagaaatagaagaaa

SEQ ID NO: 335108 - DNA, 33 bp, Homo sapien
ggaggtactgagaaaatctagaaatagaagaaa

SEQ ID NO: 335109 - DNA, 33 bp, Homo sapien
tagtagcagtattcaagtattttaacaacacat

SEQ ID NO: 335110 - DNA, 33 bp, Homo sapien
tagtagcagtattcaattattttaacaacacat

SEQ ID NO: 335111 - DNA, 33 bp, Homo sapien
aaatttggaatctttcaatatagggagtatagc

SEQ ID NO: 335112 - DNA, 33 bp, Homo sapien
aaatttggaatctttcgatatagggagtatagc

SEQ ID NO: 335113 - DNA, 33 bp, Homo sapien
taattgaacttcctaaaacttaagtgagatgat

SEQ ID NO: 335114 - DNA, 33 bp, Homo sapien
taattgaacttcctaagacttaagtgagatgat

SEQ ID NO: 335115 - DNA, 33 bp, Homo sapien
ttaacatttatatgccacagcggataacagtca

SEQ ID NO: 335116 - DNA, 33 bp, Homo sapien
ttaacatttatatgcctcagcggataacagtca

SEQ ID NO: 335117 - DNA, 33 bp, Homo sapien
atcttcagcaattagaaaccaagcaattcttct

SEQ ID NO: 335118 - DNA, 33 bp, Homo sapien
atcttcagcaattagagaccaagcaattcttct

SEQ ID NO: 335119 - DNA, 33 bp, Homo sapien
agcgtaaccaggatacaaggtaaatacatgata

SEQ ID NO: 335120 - DNA, 33 bp, Homo sapien
agcgtaaccaggataccaggtaaatacatgata

SEQ ID NO: 335121 - DNA, 33 bp, Homo sapien
ttaatctaataacaaactttcagcaaaagattt

SEQ ID NO: 335122 - DNA, 33 bp, Homo sapien
ttaatctaataacaaattttcagcaaaagattt

SEQ ID NO: 335123 - DNA, 33 bp, Homo sapien
gcctgcttcctcttgcaccatagcagtcatgac

SEQ ID NO: 335124 - DNA, 33 bp, Homo sapien
gcctgcttcctcttgcgccatagcagtcatgac

SEQ ID NO: 335125 - DNA, 33 bp, Homo sapien
agttctggagatctaacaaacagcatagtgact

SEQ ID NO: 335126 - DNA, 33 bp, Homo sapien
agttctggagatctaataaacagcatagtgact

SEQ ID NO: 335127 - DNA, 33 bp, Homo sapien
agttgagtttgtgggaatagatgcagattgaaa

SEQ ID NO: 335128 - DNA, 33 bp, Homo sapien
agttgagtttgtgggactagatgcagattgaaa

SEQ ID NO: 335129 - DNA, 33 bp, Homo sapien
ttacctccaatactaaactagtcaggaaaaatg

SEQ ID NO: 335130 - DNA, 33 bp, Homo sapien
ttacctccaatactaagctagtcaggaaaaatg

SEQ ID NO: 335131 - DNA, 33 bp, Homo sapien
aatttaggaattagcaagaggttatgatgatga

SEQ ID NO: 335132 - DNA, 33 bp, Homo sapien
aatttaggaattagcaggaggttatgatgatga

SEQ ID NO: 335133 - DNA, 33 bp, Homo sapien
aaaaaatacagttaacaactccacgcataatta

SEQ ID NO: 335134 - DNA, 33 bp, Homo sapien
aaaaaatacagttaactactccacgcataatta

SEQ ID NO: 335135 - DNA, 33 bp, Homo sapien
attttgttgctaaaaaaggtagtgcggattttg

SEQ ID NO: 335136 - DNA, 33 bp, Homo sapien
attttgttgctaaaaatggtagtgcggattttg

SEQ ID NO: 335137 - DNA, 33 bp, Homo sapien
ttctgtttttctcaaacgcctggggacgaattt

SEQ ID NO: 335138 - DNA, 33 bp, Homo sapien
ttctgtttttctcaaatgcctggggacgaattt

SEQ ID NO: 335139 - DNA, 33 bp, Homo sapien
gtatgtcaacctttctaaacaggatgaaaaaga

SEQ ID NO: 335140 - DNA, 33 bp, Homo sapien
gtatgtcaacctttctgaacaggatgaaaaaga

SEQ ID NO: 335141 - DNA, 33 bp, Homo sapien
attgcatttttcttgaccactggagctccttag

SEQ ID NO: 335142 - DNA, 33 bp, Homo sapien
attgcatttttcttgatcactggagctccttag

SEQ ID NO: 335143 - DNA, 33 bp, Homo sapien
gttgctctgagtcatactagtttactatgagat

SEQ ID NO: 335144 - DNA, 33 bp, Homo sapien
gttgctctgagtcatattagtttactatgagat

SEQ ID NO: 335145 - DNA, 33 bp, Homo sapien
atactcttgttgataacgttttgcatatggtac

SEQ ID NO: 335146 - DNA, 33 bp, Homo sapien
atactcttgttgataatgttttgcatatggtac

SEQ ID NO: 335147 - DNA, 33 bp, Homo sapien
attatattttgaagtcagaatggtattgcaagt

SEQ ID NO: 335148 - DNA, 33 bp, Homo sapien
attatattttgaagtcggaatggtattgcaagt

SEQ ID NO: 335149 - DNA, 33 bp, Homo sapien
ccctaaaaatcgtatcactagagcctccaatca

SEQ ID NO: 335150 - DNA, 33 bp, Homo sapien
ccctaaaaatcgtatcgctagagcctccaatca

SEQ ID NO: 335151 - DNA, 33 bp, Homo sapien
aggtttttctgagcaacggattttagacgtgga

SEQ ID NO: 335152 - DNA, 33 bp, Homo sapien
aggtttttctgagcaatggattttagacgtgga

SEQ ID NO: 335153 - DNA, 33 bp, Homo sapien
tgaatggggttaatgaaggtacgtttgtaaaac

SEQ ID NO: 335154 - DNA, 33 bp, Homo sapien
tgaatggggttaatgagggtacgtttgtaaaac

SEQ ID NO: 335155 - DNA, 33 bp, Homo sapien
ctatgtttgctactaaagtttgtctcattttta

SEQ ID NO: 335156 - DNA, 33 bp, Homo sapien
ctatgtttgctactaacgtttgtctcattttta

SEQ ID NO: 335157 - DNA, 33 bp, Homo sapien
tgagtcttttggcctacggaagttggtcaggtg

SEQ ID NO: 335158 - DNA, 33 bp, Homo sapien
tgagtcttttggcctatggaagttggtcaggtg

SEQ ID NO: 335159 - DNA, 33 bp, Homo sapien
tcttttctagctgaacggctttctattgctcct

SEQ ID NO: 335160 - DNA, 33 bp, Homo sapien
tcttttctagctgaactgctttctattgctcct

SEQ ID NO: 335161 - DNA, 33 bp, Homo sapien
ctgcagctcttttcaactgtgacctttaggaag

SEQ ID NO: 335162 - DNA, 33 bp, Homo sapien
ctgcagctcttttcaattgtgacctttaggaag

SEQ ID NO: 335163 - DNA, 33 bp, Homo sapien
taggctgaataaaaaacgagcaggaagcaggca

SEQ ID NO: 335164 - DNA, 33 bp, Homo sapien
taggctgaataaaaaatgagcaggaagcaggca

SEQ ID NO: 335165 - DNA, 33 bp, Homo sapien
cgtgctcataaaataaaacctggccacatctta

SEQ ID NO: 335166 - DNA, 33 bp, Homo sapien
cgtgctcataaaataacacctggccacatctta

SEQ ID NO: 335167 - DNA, 33 bp, Homo sapien
ccagtgttagcaccacaaagcatctaaaagagc

SEQ ID NO: 335168 - DNA, 33 bp, Homo sapien
ccagtgttagcaccacgaagcatctaaaagagc

SEQ ID NO: 335169 - DNA, 33 bp, Homo sapien
cctcagataattgaagaaaattgtcagaaaaaa

SEQ ID NO: 335170 - DNA, 33 bp, Homo sapien
cctcagataattgaagtaaattgtcagaaaaaa

SEQ ID NO: 335171 - DNA, 33 bp, Homo sapien
actgcctagaagcaaactaggtattagtaaagt

SEQ ID NO: 335172 - DNA, 33 bp, Homo sapien
actgcctagaagcaaattaggtattagtaaagt

SEQ ID NO: 335173 - DNA, 33 bp, Homo sapien
atgagagctgctacacaaaagggaatacttgta

SEQ ID NO: 335174 - DNA, 33 bp, Homo sapien
atgagagctgctacaccaaagggaatacttgta

SEQ ID NO: 335175 - DNA, 33 bp, Homo sapien
ccgctacagcctcaaactgacctttagtgatct

SEQ ID NO: 335176 - DNA, 33 bp, Homo sapien
ccgctacagcctcaaattgacctttagtgatct

SEQ ID NO: 335177 - DNA, 33 bp, Homo sapien
gcctttgtttcagtcccaaccagagcagaagta

SEQ ID NO: 335178 - DNA, 33 bp, Homo sapien
gcctttgtttcagtccgaaccagagcagaagta

SEQ ID NO: 335179 - DNA, 33 bp, Homo sapien
caagtgtctaagataccaccagcaaagaagggt

SEQ ID NO: 335180 - DNA, 33 bp, Homo sapien
caagtgtctaagatacgaccagcaaagaagggt

SEQ ID NO: 335181 - DNA, 33 bp, Homo sapien
catctacccatttgcacattgatgatagtaaat

SEQ ID NO: 335182 - DNA, 33 bp, Homo sapien
catctacccatttgcagattgatgatagtaaat

SEQ ID NO: 335183 - DNA, 33 bp, Homo sapien
ttgttgtgagcgagaacaaaaagaatgagatcc

SEQ ID NO: 335184 - DNA, 33 bp, Homo sapien
ttgttgtgagcgagaataaaaagaatgagatcc

SEQ ID NO: 335185 - DNA, 33 bp, Homo sapien
aaagtgatcatgcacaaccatatgttacttgaa

SEQ ID NO: 335186 - DNA, 33 bp, Homo sapien
aaagtgatcatgcacagccatatgttacttgaa

SEQ ID NO: 335187 - DNA, 33 bp, Homo sapien
ttattaacagtggttacggaaaaacaaccatca

SEQ ID NO: 335188 - DNA, 33 bp, Homo sapien
ttattaacagtggttatggaaaaacaaccatca

SEQ ID NO: 335189 - DNA, 33 bp, Homo sapien
tgcataaccactgtacaatgtcaatttcaccag

SEQ ID NO: 335190 - DNA, 33 bp, Homo sapien
tgcataaccactgtacgatgtcaatttcaccag

SEQ ID NO: 335191 - DNA, 33 bp, Homo sapien
cttttaaccattattcccatcacgatcactcat

SEQ ID NO: 335192 - DNA, 33 bp, Homo sapien
cttttaaccattattctcatcacgatcactcat

SEQ ID NO: 335193 - DNA, 33 bp, Homo sapien
cttttactttattaccaggcatactgctatcat

SEQ ID NO: 335194 - DNA, 33 bp, Homo sapien
cttttactttattaccgggcatactgctatcat

SEQ ID NO: 335195 - DNA, 33 bp, Homo sapien
aaccgtgttgcttcacacctttcagttctgcac

SEQ ID NO: 335196 - DNA, 33 bp, Homo sapien
aaccgtgttgcttcacgcctttcagttctgcac

SEQ ID NO: 335197 - DNA, 33 bp, Homo sapien
ttttttctctagatgacaacgtacatagtctgc

SEQ ID NO: 335198 - DNA, 33 bp, Homo sapien
ttttttctctagatgataacgtacatagtctgc

SEQ ID NO: 335199 - DNA, 33 bp, Homo sapien
caagcctctagaactaaacaaaataaacctctg

SEQ ID NO: 335200 - DNA, 33 bp, Homo sapien
caagcctctagaactatacaaaataaacctctg

SEQ ID NO: 335201 - DNA, 33 bp, Homo sapien
gctgatgcgttcataaaaattactaacccaata

SEQ ID NO: 335202 - DNA, 33 bp, Homo sapien
gctgatgcgttcataagaattactaacccaata

SEQ ID NO: 335203 - DNA, 33 bp, Homo sapien
atacaaaaatgtaacaaagacgtcattactgac

SEQ ID NO: 335204 - DNA, 33 bp, Homo sapien
atacaaaaatgtaacacagacgtcattactgac

SEQ ID NO: 335205 - DNA, 33 bp, Homo sapien
tatctgacagtggaccaatatccagaatttata

SEQ ID NO: 335206 - DNA, 33 bp, Homo sapien
tatctgacagtggaccgatatccagaatttata

SEQ ID NO: 335207 - DNA, 33 bp, Homo sapien
tgaggaagtatttccaccaaaggcactgcttgg

SEQ ID NO: 335208 - DNA, 33 bp, Homo sapien
tgaggaagtatttccatcaaaggcactgcttgg

SEQ ID NO: 335209 - DNA, 33 bp, Homo sapien
ccattacttgtcttaactctttagcctcccttg

SEQ ID NO: 335210 - DNA, 33 bp, Homo sapien
ccattacttgtcttaattctttagcctcccttg

SEQ ID NO: 335211 - DNA, 33 bp, Homo sapien
gctcttgcagtaacacaattgagcctgaaccta

SEQ ID NO: 335212 - DNA, 33 bp, Homo sapien
gctcttgcagtaacacgattgagcctgaaccta

SEQ ID NO: 335213 - DNA, 33 bp, Homo sapien
ttgtagctgatatataaaataccgaaataccag

SEQ ID NO: 335214 - DNA, 33 bp, Homo sapien
ttgtagctgatatatacaataccgaaataccag

SEQ ID NO: 335215 - DNA, 33 bp, Homo sapien
tgttcacctctcatcccaatccaagccaccatc

SEQ ID NO: 335216 - DNA, 33 bp, Homo sapien
tgttcacctctcatcctaatccaagccaccatc

SEQ ID NO: 335217 - DNA, 33 bp, Homo sapien
cctacttgatggtaggaaattggagttggtatt

SEQ ID NO: 335218 - DNA, 33 bp, Homo sapien
cctacttgatggtagggaattggagttggtatt

SEQ ID NO: 335219 - DNA, 33 bp, Homo sapien
ctttctttagtgccaaagttactgagcggctac

SEQ ID NO: 335220 - DNA, 33 bp, Homo sapien
ctttctttagtgccaacgttactgagcggctac

SEQ ID NO: 335221 - DNA, 33 bp, Homo sapien
aaatatagctaaaaaacgtttgcatcttggctt

SEQ ID NO: 335222 - DNA, 33 bp, Homo sapien
aaatatagctaaaaaatgtttgcatcttggctt

SEQ ID NO: 335223 - DNA, 33 bp, Homo sapien
atatgggaatgggagaagcgaaaaagaaaacat

SEQ ID NO: 335224 - DNA, 33 bp, Homo sapien
atatgggaatgggagaggcgaaaaagaaaacat

SEQ ID NO: 335225 - DNA, 33 bp, Homo sapien
ctgaaatgaaaaagaaattagttctgaacaact

SEQ ID NO: 335226 - DNA, 33 bp, Homo sapien
ctgaaatgaaaaagaagttagttctgaacaact

SEQ ID NO: 335227 - DNA, 33 bp, Homo sapien
aactgtcctttgcaacagaagatgtttccaact

SEQ ID NO: 335228 - DNA, 33 bp, Homo sapien
aactgtcctttgcaacggaagatgtttccaact

SEQ ID NO: 335229 - DNA, 33 bp, Homo sapien
gtaaaggagtactgaagaaggacagctttacta

SEQ ID NO: 335230 - DNA, 33 bp, Homo sapien
gtaaaggagtactgaataaggacagctttacta

SEQ ID NO: 335231 - DNA, 33 bp, Homo sapien
gggaattagcaccatggcagtgaatctttatgg

SEQ ID NO: 335232 - DNA, 33 bp, Homo sapien
gggaattagcaccatgtcagtgaatctttatgg

SEQ ID NO: 335233 - DNA, 33 bp, Homo sapien
gattcttctgtaactcaagtcaatttttcaatg

SEQ ID NO: 335234 - DNA, 33 bp, Homo sapien
gattcttctgtaactcgagtcaatttttcaatg

SEQ ID NO: 335235 - DNA, 33 bp, Homo sapien
aacttaagaatggcaacatgagattaaaaaaaa

SEQ ID NO: 335236 - DNA, 33 bp, Homo sapien
aacttaagaatggcaatatgagattaaaaaaaa

SEQ ID NO: 335237 - DNA, 33 bp, Homo sapien
ggtgggtacatggagaactcacacctaatttaa

SEQ ID NO: 335238 - DNA, 33 bp, Homo sapien
ggtgggtacatggagacctcacacctaatttaa

SEQ ID NO: 335239 - DNA, 33 bp, Homo sapien
aaatgtttgtgctagaatatctttaaaatctct

SEQ ID NO: 335240 - DNA, 33 bp, Homo sapien
aaatgtttgtgctagactatctttaaaatctct

SEQ ID NO: 335241 - DNA, 33 bp, Homo sapien
accataaaagcagtgactcaatttaagaaaaaa

SEQ ID NO: 335242 - DNA, 33 bp, Homo sapien
accataaaagcagtgattcaatttaagaaaaaa

SEQ ID NO: 335243 - DNA, 33 bp, Homo sapien
caagattttcctaatacgacccaatcttcccaa

SEQ ID NO: 335244 - DNA, 33 bp, Homo sapien
caagattttcctaatatgacccaatcttcccaa

SEQ ID NO: 335245 - DNA, 33 bp, Homo sapien
aaatagcaggatttaacatacctaacataaaaa

SEQ ID NO: 335246 - DNA, 33 bp, Homo sapien
aaatagcaggatttaatatacctaacataaaaa

SEQ ID NO: 335247 - DNA, 33 bp, Homo sapien
cataggcatgtttggccctacattttcactact

SEQ ID NO: 335248 - DNA, 33 bp, Homo sapien
cataggcatgtttggctctacattttcactact

SEQ ID NO: 335249 - DNA, 33 bp, Homo sapien
agatggatcaaagagacgattgctaagtaaatt

SEQ ID NO: 335250 - DNA, 33 bp, Homo sapien
agatggatcaaagagatgattgctaagtaaatt

SEQ ID NO: 335251 - DNA, 33 bp, Homo sapien
tattttaaagaaaagacagccagacaaggctgg

SEQ ID NO: 335252 - DNA, 33 bp, Homo sapien
tattttaaagaaaagatagccagacaaggctgg

SEQ ID NO: 335253 - DNA, 33 bp, Homo sapien
gagaaaacagaatgggaaggaagaaaacagtca

SEQ ID NO: 335254 - DNA, 33 bp, Homo sapien
gagaaaacagaatgggtaggaagaaaacagtca

SEQ ID NO: 335255 - DNA, 33 bp, Homo sapien
atgtttctaatgctgacgtttaaggcaacttat

SEQ ID NO: 335256 - DNA, 33 bp, Homo sapien
atgtttctaatgctgatgtttaaggcaacttat

SEQ ID NO: 335257 - DNA, 33 bp, Homo sapien
ggtcactgagaaagtagaaagttccacgagaat

SEQ ID NO: 335258 - DNA, 33 bp, Homo sapien
ggtcactgagaaagtataaagttccacgagaat

SEQ ID NO: 335259 - DNA, 33 bp, Homo sapien
gagagacttccggttacgcaggaaggaaattga

SEQ ID NO: 335260 - DNA, 33 bp, Homo sapien
gagagacttccggttatgcaggaaggaaattga

SEQ ID NO: 335261 - DNA, 33 bp, Homo sapien
gttcccttgatccttaagtgtatagaccaatgt

SEQ ID NO: 335262 - DNA, 33 bp, Homo sapien
gttcccttgatccttacgtgtatagaccaatgt

SEQ ID NO: 335263 - DNA, 33 bp, Homo sapien
ttgggaatctgagaaaaagtttacaaatagccc

SEQ ID NO: 335264 - DNA, 33 bp, Homo sapien
ttgggaatctgagaaagagtttacaaatagccc

SEQ ID NO: 335265 - DNA, 33 bp, Homo sapien
agacgctgtacatctacgactttgggggaacat

SEQ ID NO: 335266 - DNA, 33 bp, Homo sapien
agacgctgtacatctaggactttgggggaacat

SEQ ID NO: 335267 - DNA, 33 bp, Homo sapien
tctcagaactaaaacaccttgtgcctctactct

SEQ ID NO: 335268 - DNA, 33 bp, Homo sapien
tctcagaactaaaacatcttgtgcctctactct

SEQ ID NO: 335269 - DNA, 33 bp, Homo sapien
tttaaaggagaagccaatggcggcaaacactct

SEQ ID NO: 335270 - DNA, 33 bp, Homo sapien
tttaaaggagaagccagtggcggcaaacactct

SEQ ID NO: 335271 - DNA, 33 bp, Homo sapien
ggcggttgagtttagccccagttcccaacaggt

SEQ ID NO: 335272 - DNA, 33 bp, Homo sapien
ggcggttgagtttagctccagttcccaacaggt

SEQ ID NO: 335273 - DNA, 33 bp, Homo sapien
ctgtgggtcaggaaaacctcgacttcacccaat

SEQ ID NO: 335274 - DNA, 33 bp, Homo sapien
ctgtgggtcaggaaaatctcgacttcacccaat

SEQ ID NO: 335275 - DNA, 33 bp, Homo sapien
gaggattgcaacgattaaataaaataggatgat

SEQ ID NO: 335276 - DNA, 33 bp, Homo sapien
gaggattgcaacgattgaataaaataggatgat

SEQ ID NO: 335277 - DNA, 33 bp, Homo sapien
atccatttatgtatgcacgtatctctttgtttg

SEQ ID NO: 335278 - DNA, 33 bp, Homo sapien
atccatttatgtatgcgcgtatctctttgtttg

SEQ ID NO: 335279 - DNA, 33 bp, Homo sapien
tattttctgttttctacagcagcttttatattg

SEQ ID NO: 335280 - DNA, 33 bp, Homo sapien
tattttctgttttctatagcagcttttatattg

SEQ ID NO: 335281 - DNA, 33 bp, Homo sapien; identical to SEQ ID NO: 335279

SEQ ID NO: 335282 - DNA, 33 bp, Homo sapien; identical to SEQ ID NO: 335280

SEQ ID NO: 335283 - DNA, 33 bp, Homo sapien
tcgatgttaatgtctgaaatcaggaactctatt

SEQ ID NO: 335284 - DNA, 33 bp, Homo sapien
tcgatgttaatgtctgcaatcaggaactctatt

SEQ ID NO: 335285 - DNA, 33 bp, Homo sapien
agtacatattgattgactataacatgatagcct

SEQ ID NO: 335286 - DNA, 33 bp, Homo sapien
agtacatattgattgagtataacatgatagcct

SEQ ID NO: 335287 - DNA, 33 bp, Homo sapien
aaggagagagacatcaatgaagccaagtttgtt

SEQ ID NO: 335288 - DNA, 33 bp, Homo sapien
aaggagagagacatcagtgaagccaagtttgtt

SEQ ID NO: 335289 - DNA, 33 bp, Homo sapien
catttgttatcctgaaagcctacggcattgact

SEQ ID NO: 335290 - DNA, 33 bp, Homo sapien
catttgttatcctgaacgcctacggcattgact

SEQ ID NO: 335291 - DNA, 33 bp, Homo sapien
ctgccagatagtgtggaccaaattctcagcttc

SEQ ID NO: 335292 - DNA, 33 bp, Homo sapien
ctgccagatagtgtgggccaaattctcagcttc

SEQ ID NO: 335293 - DNA, 33 bp, Homo sapien
tttcctctgtttcatacctaatattgtactgtg

SEQ ID NO: 335294 - DNA, 33 bp, Homo sapien
tttcctctgtttcatagctaatattgtactgtg

SEQ ID NO: 335295 - DNA, 33 bp, Homo sapien
aatgtactgtgttcataaaaatgccactgttgg

SEQ ID NO: 335296 - DNA, 33 bp, Homo sapien
aatgtactgtgttcatgaaaatgccactgttgg

SEQ ID NO: 335297 - DNA, 33 bp, Homo sapien; identical to SEQ ID NO: 335295

SEQ ID NO: 335298 - DNA, 33 bp, Homo sapien; identical to SEQ ID NO: 335296

SEQ ID NO: 335299 - DNA, 33 bp, Homo sapien
atgttacatgcttaggacagaaaatagggacta

SEQ ID NO: 335300 - DNA, 33 bp, Homo sapien
atgttacatgcttagggcagaaaatagggacta

SEQ ID NO: 335301 - DNA, 33 bp, Homo sapien; identical to SEQ ID NO: 335299

SEQ ID NO: 335302 - DNA, 33 bp, Homo sapien; identical to SEQ ID NO: 335300

SEQ ID NO: 335303 - DNA, 33 bp, Homo sapien
catttgaaaagactgacgtgtatgatggctatt

SEQ ID NO: 335304 - DNA, 33 bp, Homo sapien
catttgaaaagactgatgtgtatgatggctatt

SEQ ID NO: 335305 - DNA, 33 bp, Homo sapien
ggcagaggcctgaaaccgtctagagccatgtgg

SEQ ID NO: 335306 - DNA, 33 bp, Homo sapien
ggcagaggcctgaaactgtctagagccatgtgg

SEQ ID NO: 335307 - DNA, 33 bp, Homo sapien
tcatccttgttcgagcaatgttccttctgtcag

SEQ ID NO: 335308 - DNA, 33 bp, Homo sapien
tcatccttgttcgagcgatgttccttctgtcag

SEQ ID NO: 335309 - DNA, 33 bp, Homo sapien
tctccaactgccagcccatcgggtcacgcaagt

SEQ ID NO: 335310 - DNA, 33 bp, Homo sapien
tctccaactgccagccgatcgggtcacgcaagt

SEQ ID NO: 335311 - DNA, 33 bp, Homo sapien
ctctgccgaagacattcaagccacccagtgatg

SEQ ID NO: 335312 - DNA, 33 bp, Homo sapien
ctctgccgaagacattgaagccacccagtgatg

SEQ ID NO: 335313 - DNA, 33 bp, Homo sapien
agttatttcttgataaacaggatcaaccaaccc

SEQ ID NO: 335314 - DNA, 33 bp, Homo sapien
agttatttcttgataaccaggatcaaccaaccc

SEQ ID NO: 335315 - DNA, 33 bp, Homo sapien; identical to SEQ ID NO: 335313

SEQ ID NO: 335316 - DNA, 33 bp, Homo sapien; identical to SEQ ID NO: 335314

SEQ ID NO: 335317 - DNA, 33 bp, Homo sapien
gtctagtcatcacataacaaatatcaaggccat

SEQ ID NO: 335318 - DNA, 33 bp, Homo sapien
gtctagtcatcacatatcaaatatcaaggccat

SEQ ID NO: 335319 - DNA, 33 bp, Homo sapien
aggaagcattcaataaatgttggttactagaaa

SEQ ID NO: 335320 - DNA, 33 bp, Homo sapien
aggaagcattcaataagtgttggttactagaaa

SEQ ID NO: 335321 - DNA, 33 bp, Homo sapien; identical to SEQ ID NO: 335319

SEQ ID NO: 335322 - DNA, 33 bp, Homo sapien; identical to SEQ ID NO: 335320

SEQ ID NO: 335323 - DNA, 33 bp, Homo sapien
tgtgtataaaatcaaacggaaaatttcacaaaa

SEQ ID NO: 335324 - DNA, 33 bp, Homo sapien
tgtgtataaaatcaaatggaaaatttcacaaaa

SEQ ID NO: 335325 - DNA, 33 bp, Homo sapien
cagatgcccagatagaaatacaacagaaacaga

SEQ ID NO: 335326 - DNA, 33 bp, Homo sapien
cagatgcccagatagagatacaacagaaacaga

SEQ ID NO: 335327 - DNA, 33 bp, Homo sapien
gttgattacagaagcaactagttccagatattc

SEQ ID NO: 335328 - DNA, 33 bp, Homo sapien
gttgattacagaagcagctagttccagatattc

SEQ ID NO: 335329 - DNA, 33 bp, Homo sapien; identical to SEQ ID NO: 335327

SEQ ID NO: 335330 - DNA, 33 bp, Homo sapien; identical to SEQ ID NO: 335328

SEQ ID NO: 335331 - DNA, 33 bp, Homo sapien
ttatttgctcatttcccgacaattcttgctaat

SEQ ID NO: 335332 - DNA, 33 bp, Homo sapien
ttatttgctcatttccggacaattcttgctaat

SEQ ID NO: 335333 - DNA, 33 bp, Homo sapien
ctggtggagatagccacggtgagatcgagcatt

SEQ ID NO: 335334 - DNA, 33 bp, Homo sapien
ctggtggagatagccatggtgagatcgagcatt

SEQ ID NO: 335335 - DNA, 33 bp, Homo sapien
tgttcaagcacttaaacgtaaatatgtttacat

SEQ ID NO: 335336 - DNA, 33 bp, Homo sapien
tgttcaagcacttaaaggtaaatatgtttacat

SEQ ID NO: 335337 - DNA, 33 bp, Homo sapien
tcagtgaaataccaaaatctcaagaggctgttt

SEQ ID NO: 335338 - DNA, 33 bp, Homo sapien
tcagtgaaataccaaagtctcaagaggctgttt

SEQ ID NO: 335339 - DNA, 33 bp, Homo sapien
tgaagatgagaccttcaaatcactgaagcagag

SEQ ID NO: 335340 - DNA, 33 bp, Homo sapien
tgaagatgagaccttcgaatcactgaagcagag

SEQ ID NO: 335341 - DNA, 33 bp, Homo sapien
ttttattcctagcttaaactctcctctgtaata

SEQ ID NO: 335342 - DNA, 33 bp, Homo sapien
ttttattcctagcttagactctcctctgtaata

SEQ ID NO: 335343 - DNA, 33 bp, Homo sapien; identical to SEQ ID NO: 335341

SEQ ID NO: 335344 - DNA, 33 bp, Homo sapien; identical to SEQ ID NO: 335342

SEQ ID NO: 335345 - DNA, 33 bp, Homo sapien
ttacaatgagtaataaatagcagcatctacctt

SEQ ID NO: 335346 - DNA, 33 bp, Homo sapien
ttacaatgagtaataactagcagcatctacctt

SEQ ID NO: 335347 - DNA, 33 bp, Homo sapien; identical to SEQ ID NO: 335345

SEQ ID NO: 335348 - DNA, 33 bp, Homo sapien; identical to SEQ ID NO: 335346

SEQ ID NO: 335349 - DNA, 33 bp, Homo sapien
ctatagagaaaataagccggttcaaataatcct

SEQ ID NO: 335350 - DNA, 33 bp, Homo sapien
ctatagagaaaataagtcggttcaaataatcct

SEQ ID NO: 335351 - DNA, 33 bp, Homo sapien
aggttttaagaaaggacgttctgactgactaca

SEQ ID NO: 335352 - DNA, 33 bp, Homo sapien
aggttttaagaaaggatgttctgactgactaca

SEQ ID NO: 335353 - DNA, 33 bp, Homo sapien; identical to SEQ ID NO: 335351

SEQ ID NO: 335354 - DNA, 33 bp, Homo sapien; identical to SEQ ID NO: 335352

SEQ ID NO: 335355 - DNA, 33 bp, Homo sapien
attactttgaaaaacacatgaattttttatgta

SEQ ID NO: 335356 - DNA, 33 bp, Homo sapien
attactttgaaaaacagatgaattttttatgta

SEQ ID NO: 335357 - DNA, 33 bp, Homo sapien
ttgactaaaatatctccaaaacacagtacatct

SEQ ID NO: 335358 - DNA, 33 bp, Homo sapien
ttgactaaaatatctcgaaaacacagtacatct

SEQ ID NO: 335359 - DNA, 33 bp, Homo sapien
gcttatatctgtataaatccctgggaatggaat

SEQ ID NO: 335360 - DNA, 33 bp, Homo sapien
gcttatatctgtataagtccctgggaatggaat

SEQ ID NO: 335361 - DNA, 33 bp, Homo sapien
ttctccttattattgacgcacattttgattccc

SEQ ID NO: 335362 - DNA, 33 bp, Homo sapien
ttctccttattattgatgcacattttgattccc

SEQ ID NO: 335363 - DNA, 33 bp, Homo sapien
gcatagaaacagcagacaggacatccccacggt

SEQ ID NO: 335364 - DNA, 33 bp, Homo sapien
gcatagaaacagcagagaggacatccccacggt

SEQ ID NO: 335365 - DNA, 33 bp, Homo sapien
aaataaagtgttttgcacatggacttgatcata

SEQ ID NO: 335366 - DNA, 33 bp, Homo sapien
aaataaagtgttttgcgcatggacttgatcata

SEQ ID NO: 335367 - DNA, 33 bp, Homo sapien
cagaaaaacaagtcaccggttttcaggcacaca

SEQ ID NO: 335368 - DNA, 33 bp, Homo sapien
cagaaaaacaagtcactggttttcaggcacaca

SEQ ID NO: 335369 - DNA, 33 bp, Homo sapien
aggctggtgaaaaagaactggacttagcagaga

SEQ ID NO: 335370 - DNA, 33 bp, Homo sapien
aggctggtgaaaaagagctggacttagcagaga

SEQ ID NO: 335371 - DNA, 33 bp, Homo sapien
taaatctatccatttccctatatctatgaatac

SEQ ID NO: 335372 - DNA, 33 bp, Homo sapien
taaatctatccatttctctatatctatgaatac

SEQ ID NO: 335373 - DNA, 33 bp, Homo sapien
caagaaacatctctacaaacaaccaacaaccaa

SEQ ID NO: 335374 - DNA, 33 bp, Homo sapien
caagaaacatctctaccaacaaccaacaaccaa

SEQ ID NO: 335375 - DNA, 33 bp, Homo sapien
cctgatcatcttagacaaacatggtagtgccat

SEQ ID NO: 335376 - DNA, 33 bp, Homo sapien
cctgatcatcttagacgaacatggtagtgccat

SEQ ID NO: 335377 - DNA, 33 bp, Homo sapien
aagagctaaaaaatagaaggagccatgtgcagt

SEQ ID NO: 335378 - DNA, 33 bp, Homo sapien
aagagctaaaaaatagtaggagccatgtgcagt

SEQ ID NO: 335379 - DNA, 33 bp, Homo sapien
tctttttttccatagaaccccactactacttcc

SEQ ID NO: 335380 - DNA, 33 bp, Homo sapien
tctttttttccatagagccccactactacttcc

SEQ ID NO: 335381 - DNA, 33 bp, Homo sapien
gtgaaatatgagctagcccttaagttagataca

SEQ ID NO: 335382 - DNA, 33 bp, Homo sapien
gtgaaatatgagctagtccttaagttagataca

SEQ ID NO: 335383 - DNA, 33 bp, Homo sapien
tggtaagcccccatgcaaatagtgttcccgagt

SEQ ID NO: 335384 - DNA, 33 bp, Homo sapien
tggtaagcccccatgccaatagtgttcccgagt

SEQ ID NO: 335385 - DNA, 33 bp, Homo sapien
ttgagaattggttgaccatacactcaacatacc

SEQ ID NO: 335386 - DNA, 33 bp, Homo sapien
ttgagaattggttgacgatacactcaacatacc

SEQ ID NO: 335387 - DNA, 33 bp, Homo sapien
tccttcacaacagctcaagtaacagctccttgt

SEQ ID NO: 335388 - DNA, 33 bp, Homo sapien
tccttcacaacagctcgagtaacagctccttgt

SEQ ID NO: 335389 - DNA, 33 bp, Homo sapien
agaaggccaggacacaccattctgaaatgtctc

SEQ ID NO: 335390 - DNA, 33 bp, Homo sapien
agaaggccaggacacatcattctgaaatgtctc

SEQ ID NO: 335391 - DNA, 33 bp, Homo sapien
aattcctgcacacagaagaaaggatcagtgaaa

SEQ ID NO: 335392 - DNA, 33 bp, Homo sapien
aattcctgcacacagaggaaaggatcagtgaaa

SEQ ID NO: 335393 - DNA, 33 bp, Homo sapien
tcattctttaaaacgacgctatggtgtaagtac

SEQ ID NO: 335394 - DNA, 33 bp, Homo sapien
tcattctttaaaacgatgctatggtgtaagtac

SEQ ID NO: 335395 - DNA, 33 bp, Homo sapien
tagcactctcttcaatcacctcaataatttaga

SEQ ID NO: 335396 - DNA, 33 bp, Homo sapien
tagcactctcttcaatgacctcaataatttaga

SEQ ID NO: 335397 - DNA, 33 bp, Homo sapien
tgtagcttcccactgacatagttcagggctgca

SEQ ID NO: 335398 - DNA, 33 bp, Homo sapien
tgtagcttcccactgagatagttcagggctgca

SEQ ID NO: 335399 - DNA, 33 bp, Homo sapien
aagcactgtacttgccacatggtaacttttcag

SEQ ID NO: 335400 - DNA, 33 bp, Homo sapien
aagcactgtacttgcctcatggtaacttttcag

SEQ ID NO: 335401 - DNA, 33 bp, Homo sapien
ttccctcattctatacaggagaaaactggggca

SEQ ID NO: 335402 - DNA, 33 bp, Homo sapien
ttccctcattctatactggagaaaactggggca

SEQ ID NO: 335403 - DNA, 33 bp, Homo sapien
tctacaggacataagaccgtaccctcttgttgc

SEQ ID NO: 335404 - DNA, 33 bp, Homo sapien
tctacaggacataagatcgtaccctcttgttgc

SEQ ID NO: 335405 - DNA, 33 bp, Homo sapien
ctcttcaggtcattaaaagtagctccaatttat

SEQ ID NO: 335406 - DNA, 33 bp, Homo sapien
ctcttcaggtcattaacagtagctccaatttat

SEQ ID NO: 335407 - DNA, 33 bp, Homo sapien
tcaagactgtccaccccctgttcttggtgttat

SEQ ID NO: 335408 - DNA, 33 bp, Homo sapien
tcaagactgtccaccctctgttcttggtgttat

SEQ ID NO: 335409 - DNA, 33 bp, Homo sapien
gtcttcctgtgatagacgaacaagagaagcagg

SEQ ID NO: 335410 - DNA, 33 bp, Homo sapien
gtcttcctgtgatagatgaacaagagaagcagg

SEQ ID NO: 335411 - DNA, 33 bp, Homo sapien
cttcattgcaaataccaagccttaaaccaaggg

SEQ ID NO: 335412 - DNA, 33 bp, Homo sapien
cttcattgcaaataccgagccttaaaccaaggg

SEQ ID NO: 335413 - DNA, 33 bp, Homo sapien
gggaaagtagaagaacaaccaataaccaatgcc

SEQ ID NO: 335414 - DNA, 33 bp, Homo sapien
gggaaagtagaagaacgaccaataaccaatgcc

SEQ ID NO: 335415 - DNA, 33 bp, Homo sapien
gaagagctacaacgaactagaccttaaacttta

SEQ ID NO: 335416 - DNA, 33 bp, Homo sapien
gaagagctacaacgaattagaccttaaacttta

SEQ ID NO: 335417 - DNA, 33 bp, Homo sapien
gctatgtccagctgctatcatcacacactacac

SEQ ID NO: 335418 - DNA, 33 bp, Homo sapien
gctatgtccagctgctgtcatcacacactacac

SEQ ID NO: 335419 - DNA, 33 bp, Homo sapien
atacgaatttccatacaatgcatttttgtcaaa

SEQ ID NO: 335420 - DNA, 33 bp, Homo sapien
atacgaatttccatacgatgcatttttgtcaaa

SEQ ID NO: 335421 - DNA, 33 bp, Homo sapien
aaccagatgcagacataaggcagtttatgtata

SEQ ID NO: 335422 - DNA, 33 bp, Homo sapien
aaccagatgcagacatgaggcagtttatgtata

SEQ ID NO: 335423 - DNA, 33 bp, Homo sapien
gttaaagggaaaatgcacgcaagtacactcagc

SEQ ID NO: 335424 - DNA, 33 bp, Homo sapien
gttaaagggaaaatgcgcgcaagtacactcagc

SEQ ID NO: 335425 - DNA, 33 bp, Homo sapien
tcagaatcaaacatccaaagacttcatgtagaa

SEQ ID NO: 335426 - DNA, 33 bp, Homo sapien
tcagaatcaaacatccgaagacttcatgtagaa

SEQ ID NO: 335427 - DNA, 33 bp, Homo sapien
gagtgaatgcatcttggaagcaaggagaaaact

SEQ ID NO: 335428 - DNA, 33 bp, Homo sapien
gagtgaatgcatcttgtaagcaaggagaaaact

SEQ ID NO: 335429 - DNA, 33 bp, Homo sapien
tgaaaatgtggaatgacagtcttgtaactcagc

SEQ ID NO: 335430 - DNA, 33 bp, Homo sapien
tgaaaatgtggaatgatagtcttgtaactcagc

SEQ ID NO: 335431 - DNA, 33 bp, Homo sapien
agctctgatttatatcacacaagagtaggatct

SEQ ID NO: 335432 - DNA, 33 bp, Homo sapien
agctctgatttatatcgcacaagagtaggatct

SEQ ID NO: 335433 - DNA, 33 bp, Homo sapien
gctgctgttggcaagccacgttttccttcatgg

SEQ ID NO: 335434 - DNA, 33 bp, Homo sapien
gctgctgttggcaagctacgttttccttcatgg

SEQ ID NO: 335435 - DNA, 33 bp, Homo sapien
agcgtatttatctccactcacaggcaatactag

SEQ ID NO: 335436 - DNA, 33 bp, Homo sapien
agcgtatttatctccagtcacaggcaatactag

SEQ ID NO: 335437 - DNA, 33 bp, Homo sapien
atgagcctaggccagacatgatggctcatgcct

SEQ ID NO: 335438 - DNA, 33 bp, Homo sapien
atgagcctaggccagatatgatggctcatgcct

SEQ ID NO: 335439 - DNA, 33 bp, Homo sapien
taacacaatgctaaccaggtagtcaagcagatc

SEQ ID NO: 335440 - DNA, 33 bp, Homo sapien
taacacaatgctaacccggtagtcaagcagatc

SEQ ID NO: 335441 - DNA, 33 bp, Homo sapien
cggtctaagcttcgccaccagaaagatcactga

SEQ ID NO: 335442 - DNA, 33 bp, Homo sapien
cggtctaagcttcgccgccagaaagatcactga

SEQ ID NO: 335443 - DNA, 33 bp, Homo sapien
aacactatgaaacaaacggatgatagatttcct

SEQ ID NO: 335444 - DNA, 33 bp, Homo sapien
aacactatgaaacaaatggatgatagatttcct

SEQ ID NO: 335445 - DNA, 33 bp, Homo sapien
agccaagggtttgtcacgagcatggactccaac

SEQ ID NO: 335446 - DNA, 33 bp, Homo sapien
agccaagggtttgtcatgagcatggactccaac

SEQ ID NO: 335447 - DNA, 33 bp, Homo sapien
gcttcttttattgatcgacaaagtgctcctact

SEQ ID NO: 335448 - DNA, 33 bp, Homo sapien
gcttcttttattgatctacaaagtgctcctact

SEQ ID NO: 335449 - DNA, 33 bp, Homo sapien
gtagactgagatgaaacgagatgggtgtttgca

SEQ ID NO: 335450 - DNA, 33 bp, Homo sapien
gtagactgagatgaaatgagatgggtgtttgca

SEQ ID NO: 335451 - DNA, 33 bp, Homo sapien
ggctcaggaaattctaggcttttgattgaaata

SEQ ID NO: 335452 - DNA, 33 bp, Homo sapien
ggctcaggaaattctatgcttttgattgaaata

SEQ ID NO: 335453 - DNA, 33 bp, Homo sapien
cattttaaaatggaggccactaacaagtatctg

SEQ ID NO: 335454 - DNA, 33 bp, Homo sapien
cattttaaaatggaggtcactaacaagtatctg

SEQ ID NO: 335455 - DNA, 33 bp, Homo sapien
tgacctgttgtagagacaaagtttagcaaaatt

SEQ ID NO: 335456 - DNA, 33 bp, Homo sapien
tgacctgttgtagagataaagtttagcaaaatt

SEQ ID NO: 335457 - DNA, 33 bp, Homo sapien
tcattgcttggtggtagagcgaatggtgtgggg

SEQ ID NO: 335458 - DNA, 33 bp, Homo sapien
tcattgcttggtggtatagcgaatggtgtgggg

SEQ ID NO: 335459 - DNA, 33 bp, Homo sapien
ttcattcaagtgtcacaagaaggaaaatttgtt

SEQ ID NO: 335460 - DNA, 33 bp, Homo sapien
ttcattcaagtgtcaccagaaggaaaatttgtt

SEQ ID NO: 335461 - DNA, 33 bp, Homo sapien
taagagataatgtgaccagtagataaagagaga

SEQ ID NO: 335462 - DNA, 33 bp, Homo sapien
taagagataatgtgactagtagataaagagaga

SEQ ID NO: 335463 - DNA, 33 bp, Homo sapien
ctctgactggtccacaccaaaggagaaagaagt

SEQ ID NO: 335464 - DNA, 33 bp, Homo sapien
ctctgactggtccacagcaaaggagaaagaagt

SEQ ID NO: 335465 - DNA, 33 bp, Homo sapien
ggaaggaagctaagtgcatatgggtgttacatg

SEQ ID NO: 335466 - DNA, 33 bp, Homo sapien
ggaaggaagctaagtgtatatgggtgttacatg

SEQ ID NO: 335467 - DNA, 33 bp, Homo sapien
taattcatgccatagcccccttctgaggctaca

SEQ ID NO: 335468 - DNA, 33 bp, Homo sapien
taattcatgccatagctcccttctgaggctaca

SEQ ID NO: 335469 - DNA, 33 bp, Homo sapien
ggactttcaatgcaggacaatcactctgcagca

SEQ ID NO: 335470 - DNA, 33 bp, Homo sapien
ggactttcaatgcaggtcaatcactctgcagca

SEQ ID NO: 335471 - DNA, 33 bp, Homo sapien
caaactgctaaagacacggaaagttttatatta

SEQ ID NO: 335472 - DNA, 33 bp, Homo sapien
caaactgctaaagacatggaaagttttatatta

SEQ ID NO: 335473 - DNA, 33 bp, Homo sapien
tattacatgcagggcccatgctaggtactgaag

SEQ ID NO: 335474 - DNA, 33 bp, Homo sapien
tattacatgcagggcctatgctaggtactgaag

SEQ ID NO: 335475 - DNA, 33 bp, Homo sapien
tggactggcaatctaccgctgctttattcataa

SEQ ID NO: 335476 - DNA, 33 bp, Homo sapien
tggactggcaatctacggctgctttattcataa

SEQ ID NO: 335477 - DNA, 33 bp, Homo sapien
tcattcaccttcaccccgctactactctcccat

SEQ ID NO: 335478 - DNA, 33 bp, Homo sapien
tcattcaccttcaccctgctactactctcccat

SEQ ID NO: 335479 - DNA, 33 bp, Homo sapien
ttgctgcatgatttgaccaggtcatttaatctc

SEQ ID NO: 335480 - DNA, 33 bp, Homo sapien
ttgctgcatgatttgagcaggtcatttaatctc

SEQ ID NO: 335481 - DNA, 33 bp, Homo sapien
agtcccaaaggttcagaaactggggctgaagag

SEQ ID NO: 335482 - DNA, 33 bp, Homo sapien
agtcccaaaggttcaggaactggggctgaagag

SEQ ID NO: 335483 - DNA, 33 bp, Homo sapien
atctataagagcaaacaaaatagaaagctggaa

SEQ ID NO: 335484 - DNA, 33 bp, Homo sapien
atctataagagcaaacgaaatagaaagctggaa

SEQ ID NO: 335485 - DNA, 33 bp, Homo sapien
attctcacttcactcacgttagatacgtacaat

SEQ ID NO: 335486 - DNA, 33 bp, Homo sapien
attctcacttcactcatgttagatacgtacaat

SEQ ID NO: 335487 - DNA, 33 bp, Homo sapien
tgtttgtttaaaacgacgacacattgtgcccaa

SEQ ID NO: 335488 - DNA, 33 bp, Homo sapien
tgtttgtttaaaacgatgacacattgtgcccaa

SEQ ID NO: 335489 - DNA, 33 bp, Homo sapien
ttcctatcaaatcaccaatgtcattttttcaca

SEQ ID NO: 335490 - DNA, 33 bp, Homo sapien
ttcctatcaaatcaccgatgtcattttttcaca

SEQ ID NO: 335491 - DNA, 33 bp, Homo sapien
gaaccatgagccaatcaagtatcttttctttat

SEQ ID NO: 335492 - DNA, 33 bp, Homo sapien
gaaccatgagccaatccagtatcttttctttat

SEQ ID NO: 335493 - DNA, 33 bp, Homo sapien
tcagcgcagtgtagcaacttggagtgcagcagt

SEQ ID NO: 335494 - DNA, 33 bp, Homo sapien
tcagcgcagtgtagcagcttggagtgcagcagt

SEQ ID NO: 335495 - DNA, 33 bp, Homo sapien
gaaataacaagcaatacgattttaccccaattt

SEQ ID NO: 335496 - DNA, 33 bp, Homo sapien
gaaataacaagcaataggattttaccccaattt

SEQ ID NO: 335497 - DNA, 33 bp, Homo sapien
taactggtgtgaactgaaggaaaaacacaagca

SEQ ID NO: 335498 - DNA, 33 bp, Homo sapien
taactggtgtgaactggaggaaaaacacaagca

SEQ ID NO: 335499 - DNA, 33 bp, Homo sapien
tttttctatattttcacgagacaaggcagttct

SEQ ID NO: 335500 - DNA, 33 bp, Homo sapien
tttttctatattttcatgagacaaggcagttct

SEQ ID NO: 335501 - DNA, 33 bp, Homo sapien
aataagatgtggctacactttaaaatatacaca

SEQ ID NO: 335502 - DNA, 33 bp, Homo sapien
aataagatgtggctaccctttaaaatatacaca

SEQ ID NO: 335503 - DNA, 33 bp, Homo sapien
tcttgatatgcccacaaaaaactacagagaaga

SEQ ID NO: 335504 - DNA, 33 bp, Homo sapien
tcttgatatgcccacacaaaactacagagaaga

SEQ ID NO: 335505 - DNA, 33 bp, Homo sapien
gatcacctaagtataaaaaattcattcagaatc

SEQ ID NO: 335506 - DNA, 33 bp, Homo sapien
gatcacctaagtataacaaattcattcagaatc

SEQ ID NO: 335507 - DNA, 33 bp, Homo sapien
actcagctgtttaaacggaggaagtacaacagg

SEQ ID NO: 335508 - DNA, 33 bp, Homo sapien
actcagctgtttaaactgaggaagtacaacagg

SEQ ID NO: 335509 - DNA, 33 bp, Homo sapien
gtacagagcctcaaataattgctatagtttttc

SEQ ID NO: 335510 - DNA, 33 bp, Homo sapien
gtacagagcctcaaatcattgctatagtttttc

SEQ ID NO: 335511 - DNA, 33 bp, Homo sapien
cataagctgtgtatccagatctcctgctggtca

SEQ ID NO: 335512 - DNA, 33 bp, Homo sapien
cataagctgtgtatccggatctcctgctggtca

SEQ ID NO: 335513 - DNA, 33 bp, Homo sapien
cttgagtttgacaccactatcccctttttacga

SEQ ID NO: 335514 - DNA, 33 bp, Homo sapien
cttgagtttgacaccattatcccctttttacga

SEQ ID NO: 335515 - DNA, 33 bp, Homo sapien
agtgtgggattcagtaagtctggaggagttaca

SEQ ID NO: 335516 - DNA, 33 bp, Homo sapien
agtgtgggattcagtaggtctggaggagttaca

SEQ ID NO: 335517 - DNA, 33 bp, Homo sapien
caatgaggatgtggcaatacaacaagcagatgt

SEQ ID NO: 335518 - DNA, 33 bp, Homo sapien
caatgaggatgtggcagtacaacaagcagatgt

SEQ ID NO: 335519 - DNA, 33 bp, Homo sapien
agtatttgttggataaatgagtacatggcccat

SEQ ID NO: 335520 - DNA, 33 bp, Homo sapien
agtatttgttggataagtgagtacatggcccat

SEQ ID NO: 335521 - DNA, 33 bp, Homo sapien
gggagtgtgagagaagcagtatgtgcccctcag

SEQ ID NO: 335522 - DNA, 33 bp, Homo sapien
gggagtgtgagagaaggagtatgtgcccctcag

SEQ ID NO: 335523 - DNA, 33 bp, Homo sapien
atttgcaatcataaagcatttggacatcagcta

SEQ ID NO: 335524 - DNA, 33 bp, Homo sapien
atttgcaatcataaagtatttggacatcagcta

SEQ ID NO: 335525 - DNA, 33 bp, Homo sapien
tatgtatctcggaatgccataaaaaaggtcaca

SEQ ID NO: 335526 - DNA, 33 bp, Homo sapien
tatgtatctcggaatgtcataaaaaaggtcaca

SEQ ID NO: 335527 - DNA, 33 bp, Homo sapien
ttacgtgtggaggggaaccataagaaagcttat

SEQ ID NO: 335528 - DNA, 33 bp, Homo sapien
ttacgtgtggaggggagccataagaaagcttat

SEQ ID NO: 335529 - DNA, 33 bp, Homo sapien
gaatctgtcgagaacaaacttccctacttctcc

SEQ ID NO: 335530 - DNA, 33 bp, Homo sapien
gaatctgtcgagaacacacttccctacttctcc

SEQ ID NO: 335531 - DNA, 33 bp, Homo sapien
ataaaatactagcaaacgtaatatagcacttat

SEQ ID NO: 335532 - DNA, 33 bp, Homo sapien
ataaaatactagcaaatgtaatatagcacttat

SEQ ID NO: 335533 - DNA, 33 bp, Homo sapien
atctctgctgagaaagcctatcatgaagagctt

SEQ ID NO: 335534 - DNA, 33 bp, Homo sapien
atctctgctgagaaaggctatcatgaagagctt

SEQ ID NO: 335535 - DNA, 33 bp, Homo sapien
ttttatcttgcactcaaatggtatttttagaga

SEQ ID NO: 335536 - DNA, 33 bp, Homo sapien
ttttatcttgcactcagatggtatttttagaga

SEQ ID NO: 335537 - DNA, 33 bp, Homo sapien
ggtggtagggtcacataaagcctcaagtgtcag

SEQ ID NO: 335538 - DNA, 33 bp, Homo sapien
ggtggtagggtcacatgaagcctcaagtgtcag

SEQ ID NO: 335539 - DNA, 33 bp, Homo sapien
tttccttccaccaatcacttactaatcccagaa

SEQ ID NO: 335540 - DNA, 33 bp, Homo sapien
tttccttccaccaatcgcttactaatcccagaa

SEQ ID NO: 335541 - DNA, 33 bp, Homo sapien
ttcccttatttgggaacgcattagctcctggtt

SEQ ID NO: 335542 - DNA, 33 bp, Homo sapien
ttcccttatttgggaatgcattagctcctggtt

SEQ ID NO: 335543 - DNA, 33 bp, Homo sapien
agtttatttgcgcctaaggcagaaaggataaag

SEQ ID NO: 335544 - DNA, 33 bp, Homo sapien
agtttatttgcgcctatggcagaaaggataaag

SEQ ID NO: 335545 - DNA, 33 bp, Homo sapien
tattgtctaagagaaacagtgttaagtgagaat

SEQ ID NO: 335546 - DNA, 33 bp, Homo sapien
tattgtctaagagaaatagtgttaagtgagaat

SEQ ID NO: 335547 - DNA, 33 bp, Homo sapien
tttatttacgtcttgacaaattactggaaatgg

SEQ ID NO: 335548 - DNA, 33 bp, Homo sapien
tttatttacgtcttgagaaattactggaaatgg

SEQ ID NO: 335549 - DNA, 33 bp, Homo sapien
tgggtactactgtccagatttcacaatgaggct

SEQ ID NO: 335550 - DNA, 33 bp, Homo sapien
tgggtactactgtccatatttcacaatgaggct

SEQ ID NO: 335551 - DNA, 33 bp, Homo sapien
atgattgggatatgtaaagtagttgaggatgta

SEQ ID NO: 335552 - DNA, 33 bp, Homo sapien
atgattgggatatgtatagtagttgaggatgta

SEQ ID NO: 335553 - DNA, 33 bp, Homo sapien
agccagtactttggcaatattctgtcttttgca

SEQ ID NO: 335554 - DNA, 33 bp, Homo sapien
agccagtactttggcagtattctgtcttttgca

SEQ ID NO: 335555 - DNA, 33 bp, Homo sapien
ttcattaattcacttacgtatccatttgacaaa

SEQ ID NO: 335556 - DNA, 33 bp, Homo sapien
ttcattaattcacttatgtatccatttgacaaa

SEQ ID NO: 335557 - DNA, 33 bp, Homo sapien
ttcctgacaacttaaacgagattagaggtctct

SEQ ID NO: 335558 - DNA, 33 bp, Homo sapien
ttcctgacaacttaaatgagattagaggtctct

SEQ ID NO: 335559 - DNA, 33 bp, Homo sapien
cacctccaaatagacccatctaaaaacagagta

SEQ ID NO: 335560 - DNA, 33 bp, Homo sapien
cacctccaaatagacctatctaaaaacagagta

SEQ ID NO: 335561 - DNA, 33 bp, Homo sapien
gcattgaaactcagtaataagaaaccaagttat

SEQ ID NO: 335562 - DNA, 33 bp, Homo sapien
gcattgaaactcagtagtaagaaaccaagttat

SEQ ID NO: 335563 - DNA, 33 bp, Homo sapien
cacataaatccacgcaaaataaaacaatctgac

SEQ ID NO: 335564 - DNA, 33 bp, Homo sapien
cacataaatccacgcagaataaaacaatctgac

SEQ ID NO: 335565 - DNA, 33 bp, Homo sapien
tgaagttccataagagccaggagatttttgtta

SEQ ID NO: 335566 - DNA, 33 bp, Homo sapien
tgaagttccataagaggcaggagatttttgtta

SEQ ID NO: 335567 - DNA, 33 bp, Homo sapien
cacctctgccctaccacgttctgtcctgccccc

SEQ ID NO: 335568 - DNA, 33 bp, Homo sapien
cacctctgccctaccatgttctgtcctgccccc

SEQ ID NO: 335569 - DNA, 33 bp, Homo sapien
ggaaagataagagagacgggatggaaccaggag

SEQ ID NO: 335570 - DNA, 33 bp, Homo sapien
ggaaagataagagagatgggatggaaccaggag

SEQ ID NO: 335571 - DNA, 33 bp, Homo sapien
tatcaattacaaagcacgtggagtcaggtgtga

SEQ ID NO: 335572 - DNA, 33 bp, Homo sapien
tatcaattacaaagcatgtggagtcaggtgtga

SEQ ID NO: 335573 - DNA, 33 bp, Homo sapien
gaaacaacgatataagaataacaccactggccg

SEQ ID NO: 335574 - DNA, 33 bp, Homo sapien
gaaacaacgatataaggataacaccactggccg

SEQ ID NO: 335575 - DNA, 33 bp, Homo sapien
aggagcgtaatgcagaagatagtttaatagatt

SEQ ID NO: 335576 - DNA, 33 bp, Homo sapien
aggagcgtaatgcagaggatagtttaatagatt

SEQ ID NO: 335577 - DNA, 33 bp, Homo sapien
tgaataacctgcaaagaaattctcctgcaaaaa

SEQ ID NO: 335578 - DNA, 33 bp, Homo sapien
tgaataacctgcaaagcaattctcctgcaaaaa

SEQ ID NO: 335579 - DNA, 33 bp, Homo sapien
cctctgggaagcctcaaggaaatttttggacct

SEQ ID NO: 335580 - DNA, 33 bp, Homo sapien
cctctgggaagcctcagggaaatttttggacct

SEQ ID NO: 335581 - DNA, 33 bp, Homo sapien
ccaatcacgtaaaatgaacacctcctaagattt

SEQ ID NO: 335582 - DNA, 33 bp, Homo sapien
ccaatcacgtaaaatgtacacctcctaagattt

SEQ ID NO: 335583 - DNA, 33 bp, Homo sapien
cctactgggtcctcaaatagccacagcctgagg

SEQ ID NO: 335584 - DNA, 33 bp, Homo sapien
cctactgggtcctcaagtagccacagcctgagg

SEQ ID NO: 335585 - DNA, 33 bp, Homo sapien
actcatgtcattacgacgcagcaaatacgagac

SEQ ID NO: 335586 - DNA, 33 bp, Homo sapien
actcatgtcattacgatgcagcaaatacgagac

SEQ ID NO: 335587 - DNA, 33 bp, Homo sapien
ttgccttgctttgaagaatccgactgtaaagaa

SEQ ID NO: 335588 - DNA, 33 bp, Homo sapien
ttgccttgctttgaagcatccgactgtaaagaa

SEQ ID NO: 335589 - DNA, 33 bp, Homo sapien; identical to SEQ ID NO: 335587

SEQ ID NO: 335590 - DNA, 33 bp, Homo sapien; identical to SEQ ID NO: 335588

SEQ ID NO: 335591 - DNA, 33 bp, Homo sapien
agagtgtttgcaatgacgatgattgttgtagtt

SEQ ID NO: 335592 - DNA, 33 bp, Homo sapien
agagtgtttgcaatgatgatgattgttgtagtt

SEQ ID NO: 335593 - DNA, 33 bp, Homo sapien
agtacatgaagtaaaccgaagatggggcaaaca

SEQ ID NO: 335594 - DNA, 33 bp, Homo sapien
agtacatgaagtaaactgaagatggggcaaaca

SEQ ID NO: 335595 - DNA, 33 bp, Homo sapien
catcttgaaatactagaagctgagttagttagt

SEQ ID NO: 335596 - DNA, 33 bp, Homo sapien
catcttgaaatactagcagctgagttagttagt

SEQ ID NO: 335597 - DNA, 33 bp, Homo sapien
tcttctacatatgtaaacccctgtaatggattt

SEQ ID NO: 335598 - DNA, 33 bp, Homo sapien
tcttctacatatgtaaccccctgtaatggattt

SEQ ID NO: 335599 - DNA, 33 bp, Homo sapien
ctcggtctgcagctgcccaatgggagaataagc

SEQ ID NO: 335600 - DNA, 33 bp, Homo sapien
ctcggtctgcagctgctcaatgggagaataagc

SEQ ID NO: 335601 - DNA, 33 bp, Homo sapien
aatgaaactactcatcaaaaacttatgccacaa

SEQ ID NO: 335602 - DNA, 33 bp, Homo sapien
aatgaaactactcatcgaaaacttatgccacaa

SEQ ID NO: 335603 - DNA, 33 bp, Homo sapien
gttaaccttgtctagaatccatgcttattgtct

SEQ ID NO: 335604 - DNA, 33 bp, Homo sapien
gttaaccttgtctagactccatgcttattgtct

SEQ ID NO: 335605 - DNA, 33 bp, Homo sapien
ttgaaataaactaaatgactctggatcaattac

SEQ ID NO: 335606 - DNA, 33 bp, Homo sapien
ttgaaataaactaaattactctggatcaattac

SEQ ID NO: 335607 - DNA, 33 bp, Homo sapien
gagttacaatatgaaaatactgcttgggagctg

SEQ ID NO: 335608 - DNA, 33 bp, Homo sapien
gagttacaatatgaaagtactgcttgggagctg

SEQ ID NO: 335609 - DNA, 33 bp, Homo sapien
atatttcatagttgcacacccaaataaacaaaa

SEQ ID NO: 335610 - DNA, 33 bp, Homo sapien
atatttcatagttgcatacccaaataaacaaaa

SEQ ID NO: 335611 - DNA, 33 bp, Homo sapien
tgtctccaaaacctcacagaaacatcatcattt

SEQ ID NO: 335612 - DNA, 33 bp, Homo sapien
tgtctccaaaacctcatagaaacatcatcattt

SEQ ID NO: 335613 - DNA, 33 bp, Homo sapien
ggtttgagacactggcacaaagaagagtacatc

SEQ ID NO: 335614 - DNA, 33 bp, Homo sapien
ggtttgagacactggcccaaagaagagtacatc

SEQ ID NO: 335615 - DNA, 33 bp, Homo sapien
agaggcctaagttcctaaagtcctaattgagtg

SEQ ID NO: 335616 - DNA, 33 bp, Homo sapien
agaggcctaagttcctgaagtcctaattgagtg

SEQ ID NO: 335617 - DNA, 33 bp, Homo sapien
cttgagtggttcatctcacctagatctccagag

SEQ ID NO: 335618 - DNA, 33 bp, Homo sapien
cttgagtggttcatcttacctagatctccagag

SEQ ID NO: 335619 - DNA, 33 bp, Homo sapien
tagttttacattttgactatgactgaaaggaac

SEQ ID NO: 335620 - DNA, 33 bp, Homo sapien
tagttttacattttgattatgactgaaaggaac

SEQ ID NO: 335621 - DNA, 33 bp, Homo sapien
atatcttctgtgtgaaactcttactactctatg

SEQ ID NO: 335622 - DNA, 33 bp, Homo sapien
atatcttctgtgtgaacctcttactactctatg

SEQ ID NO: 335623 - DNA, 33 bp, Homo sapien
ggatgagacataggaacccactgtttccactgt

SEQ ID NO: 335624 - DNA, 33 bp, Homo sapien
ggatgagacataggaatccactgtttccactgt

SEQ ID NO: 335625 - DNA, 33 bp, Homo sapien
ctccctatctgatgtacataggactctagagga

SEQ ID NO: 335626 - DNA, 33 bp, Homo sapien
ctccctatctgatgtatataggactctagagga

SEQ ID NO: 335627 - DNA, 33 bp, Homo sapien
aaaaatccaacgtctgaagcacttctgttcccc

SEQ ID NO: 335628 - DNA, 33 bp, Homo sapien
aaaaatccaacgtctgcagcacttctgttcccc

SEQ ID NO: 335629 - DNA, 33 bp, Homo sapien
taacttagtctgtggcaccattcttttcattga

SEQ ID NO: 335630 - DNA, 33 bp, Homo sapien
taacttagtctgtggcgccattcttttcattga

SEQ ID NO: 335631 - DNA, 33 bp, Homo sapien
tctgttccattgatacagaaggtcctgctctaa

SEQ ID NO: 335632 - DNA, 33 bp, Homo sapien
tctgttccattgataccgaaggtcctgctctaa

SEQ ID NO: 335633 - DNA, 33 bp, Homo sapien
aagctggggctgttatgaaggtaccaacacata

SEQ ID NO: 335634 - DNA, 33 bp, Homo sapien
aagctggggctgttattaaggtaccaacacata

SEQ ID NO: 335635 - DNA, 33 bp, Homo sapien
gtagcattcattggcaaatacaaatacaatcaa

SEQ ID NO: 335636 - DNA, 33 bp, Homo sapien
gtagcattcattggcagatacaaatacaatcaa

SEQ ID NO: 335637 - DNA, 33 bp, Homo sapien
ctacttaacattattaccacttacatttgctat

SEQ ID NO: 335638 - DNA, 33 bp, Homo sapien
ctacttaacattattatcacttacatttgctat

SEQ ID NO: 335639 - DNA, 33 bp, Homo sapien
gaaggaccttatgtccaagctctgaagtttgag

SEQ ID NO: 335640 - DNA, 33 bp, Homo sapien
gaaggaccttatgtccgagctctgaagtttgag

SEQ ID NO: 335641 - DNA, 33 bp, Homo sapien
tggtgagagactagcgaatctgtgatatgaagc

SEQ ID NO: 335642 - DNA, 33 bp, Homo sapien
tggtgagagactagcgtatctgtgatatgaagc

SEQ ID NO: 335643 - DNA, 33 bp, Homo sapien
ctaataagttacaaagcaaagtggtgagagact

SEQ ID NO: 335644 - DNA, 33 bp, Homo sapien
ctaataagttacaaaggaaagtggtgagagact

SEQ ID NO: 335645 - DNA, 33 bp, Homo sapien
atgcaagcctctaggacagtcaaaagtaatgta

SEQ ID NO: 335646 - DNA, 33 bp, Homo sapien
atgcaagcctctaggatagtcaaaagtaatgta

SEQ ID NO: 335647 - DNA, 33 bp, Homo sapien
gagacagcttatagaacaaaggacattaagctc

SEQ ID NO: 335648 - DNA, 33 bp, Homo sapien
gagacagcttatagaagaaaggacattaagctc

SEQ ID NO: 335649 - DNA, 33 bp, Homo sapien
aaaaagattcctactaggtgatcatcccttcct

SEQ ID NO: 335650 - DNA, 33 bp, Homo sapien
aaaaagattcctactatgtgatcatcccttcct

SEQ ID NO: 335651 - DNA, 33 bp, Homo sapien
tatagtttccaggtagaagtacgcattagacca

SEQ ID NO: 335652 - DNA, 33 bp, Homo sapien
tatagtttccaggtagcagtacgcattagacca

SEQ ID NO: 335653 - DNA, 33 bp, Homo sapien
tttttgtcagcacatacaatcccaagtaactaa

SEQ ID NO: 335654 - DNA, 33 bp, Homo sapien
tttttgtcagcacatataatcccaagtaactaa

SEQ ID NO: 335655 - DNA, 33 bp, Homo sapien
acattgcaattatgaacgtgaagaaggggttag

SEQ ID NO: 335656 - DNA, 33 bp, Homo sapien
acattgcaattatgaatgtgaagaaggggttag

SEQ ID NO: 335657 - DNA, 33 bp, Homo sapien
gcatttcttctaaatcactaagcctctcttcag

SEQ ID NO: 335658 - DNA, 33 bp, Homo sapien
gcatttcttctaaatcgctaagcctctcttcag

SEQ ID NO: 335659 - DNA, 33 bp, Homo sapien
caactgcagggaactaaaaggaataggctgtgt

SEQ ID NO: 335660 - DNA, 33 bp, Homo sapien
caactgcagggaactagaaggaataggctgtgt

SEQ ID NO: 335661 - DNA, 33 bp, Homo sapien
cttccatgtacttggacgaagtcaggcaaacct

SEQ ID NO: 335662 - DNA, 33 bp, Homo sapien
cttccatgtacttggatgaagtcaggcaaacct

SEQ ID NO: 335663 - DNA, 33 bp, Homo sapien
gcttctaggatggaaagtgataagactcttcat

SEQ ID NO: 335664 - DNA, 33 bp, Homo sapien
gcttctaggatggaaattgataagactcttcat

SEQ ID NO: 335665 - DNA, 33 bp, Homo sapien
caacactatgttttgacatgaaaatccagttta

SEQ ID NO: 335666 - DNA, 33 bp, Homo sapien
caacactatgttttgatatgaaaatccagttta

SEQ ID NO: 335667 - DNA, 33 bp, Homo sapien
gaaatggattgatggcaaatgataggtatgtga

SEQ ID NO: 335668 - DNA, 33 bp, Homo sapien
gaaatggattgatggcgaatgataggtatgtga

SEQ ID NO: 335669 - DNA, 33 bp, Homo sapien
gaagagaagctactgaagaagataggagaaatc

SEQ ID NO: 335670 - DNA, 33 bp, Homo sapien
gaagagaagctactgaggaagataggagaaatc

SEQ ID NO: 335671 - DNA, 33 bp, Homo sapien
ccctgaataccactctgaaaatcaatctgtttt

SEQ ID NO: 335672 - DNA, 33 bp, Homo sapien
ccctgaataccactcttaaaatcaatctgtttt

SEQ ID NO: 335673 - DNA, 33 bp, Homo sapien
aatatttggctccaaactattaaactttcataa

SEQ ID NO: 335674 - DNA, 33 bp, Homo sapien
aatatttggctccaaattattaaactttcataa

SEQ ID NO: 335675 - DNA, 33 bp, Homo sapien
aagcaagaaaaccttacagtagtgagctttgaa

SEQ ID NO: 335676 - DNA, 33 bp, Homo sapien
aagcaagaaaaccttatagtagtgagctttgaa

SEQ ID NO: 335677 - DNA, 33 bp, Homo sapien
tgtggacaattgactgacaaggggcaagacagg

SEQ ID NO: 335678 - DNA, 33 bp, Homo sapien
tgtggacaattgactgtcaaggggcaagacagg

SEQ ID NO: 335679 - DNA, 33 bp, Homo sapien
ggaggaaggctatggagggaaccacaatatata

SEQ ID NO: 335680 - DNA, 33 bp, Homo sapien
ggaggaaggctatggatggaaccacaatatata

SEQ ID NO: 335681 - DNA, 33 bp, Homo sapien
caattctgtgcaaaaggcattcatagaaaaaat

SEQ ID NO: 335682 - DNA, 33 bp, Homo sapien
caattctgtgcaaaagtcattcatagaaaaaat

SEQ ID NO: 335683 - DNA, 33 bp, Homo sapien
gtagccttcgagctccaaaacttggaattgagt

SEQ ID NO: 335684 - DNA, 33 bp, Homo sapien
gtagccttcgagctccgaaacttggaattgagt

SEQ ID NO: 335685 - DNA, 33 bp, Homo sapien; identical to SEQ ID NO: 335683

SEQ ID NO: 335686 - DNA, 33 bp, Homo sapien; identical to SEQ ID NO: 335684

SEQ ID NO: 335687 - DNA, 33 bp, Homo sapien
aaaatggaaccaggaacgcctcgctcccctctt

SEQ ID NO: 335688 - DNA, 33 bp, Homo sapien
aaaatggaaccaggaatgcctcgctcccctctt

SEQ ID NO: 335689 - DNA, 33 bp, Homo sapien
tgatggaactctattccacaaggaatctcagat

SEQ ID NO: 335690 - DNA, 33 bp, Homo sapien
tgatggaactctattctacaaggaatctcagat

SEQ ID NO: 335691 - DNA, 33 bp, Homo sapien
tcacccaggcttaagaggtacaggtaacataag

SEQ ID NO: 335692 - DNA, 33 bp, Homo sapien
tcacccaggcttaagatgtacaggtaacataag

SEQ ID NO: 335693 - DNA, 33 bp, Homo sapien
taattacttctccctccaattgatacaactatt

SEQ ID NO: 335694 - DNA, 33 bp, Homo sapien
taattacttctccctctaattgatacaactatt

SEQ ID NO: 335695 - DNA, 33 bp, Homo sapien
taaatatactttactaggtctgcggtggttcag

SEQ ID NO: 335696 - DNA, 33 bp, Homo sapien
taaatatactttactatgtctgcggtggttcag

SEQ ID NO: 335697 - DNA, 33 bp, Homo sapien
atattcctagctgatcaagatctcatcataaaa

SEQ ID NO: 335698 - DNA, 33 bp, Homo sapien
atattcctagctgatcgagatctcatcataaaa

SEQ ID NO: 335699 - DNA, 33 bp, Homo sapien
tcatataagtgctagaaggtaatccataaagct

SEQ ID NO: 335700 - DNA, 33 bp, Homo sapien
tcatataagtgctagacggtaatccataaagct

SEQ ID NO: 335701 - DNA, 33 bp, Homo sapien
agcaaataatacataccggcactagcatcaaaa

SEQ ID NO: 335702 - DNA, 33 bp, Homo sapien
agcaaataatacatactggcactagcatcaaaa

SEQ ID NO: 335703 - DNA, 33 bp, Homo sapien
ataaactcttagattacaaagtcttaaacttga

SEQ ID NO: 335704 - DNA, 33 bp, Homo sapien
ataaactcttagattagaaagtcttaaacttga

SEQ ID NO: 335705 - DNA, 33 bp, Homo sapien
agacataaatattacacatgaccataatctaat

SEQ ID NO: 335706 - DNA, 33 bp, Homo sapien
agacataaatattacagatgaccataatctaat

SEQ ID NO: 335707 - DNA, 33 bp, Homo sapien
gatatatagagaaattcaaaataagcatttaga

SEQ ID NO: 335708 - DNA, 33 bp, Homo sapien
gatatatagagaaattgaaaataagcatttaga

SEQ ID NO: 335709 - DNA, 33 bp, Homo sapien
atatatagtgcatacagaaaccaataaggtatg

SEQ ID NO: 335710 - DNA, 33 bp, Homo sapien
atatatagtgcatacataaaccaataaggtatg

SEQ ID NO: 335711 - DNA, 33 bp, Homo sapien
agtgagctccattagaataagcctttaacgtat

SEQ ID NO: 335712 - DNA, 33 bp, Homo sapien
agtgagctccattagactaagcctttaacgtat

SEQ ID NO: 335713 - DNA, 33 bp, Homo sapien
gtccttaataggtcaaaacttacagccagtatc

SEQ ID NO: 335714 - DNA, 33 bp, Homo sapien
gtccttaataggtcaatacttacagccagtatc

SEQ ID NO: 335715 - DNA, 33 bp, Homo sapien
caactctaactgtttcacatacattgtacaggt

SEQ ID NO: 335716 - DNA, 33 bp, Homo sapien
caactctaactgtttcccatacattgtacaggt

SEQ ID NO: 335717 - DNA, 33 bp, Homo sapien
gaaatactatttttacccatagccgactgactc

SEQ ID NO: 335718 - DNA, 33 bp, Homo sapien
gaaatactatttttactcatagccgactgactc

SEQ ID NO: 335719 - DNA, 33 bp, Homo sapien
caccattacttagcacagaacacagaaaggaaa

SEQ ID NO: 335720 - DNA, 33 bp, Homo sapien
caccattacttagcacggaacacagaaaggaaa

SEQ ID NO: 335721 - DNA, 33 bp, Homo sapien
ttaaaagagcaattagcaaatgatttctgagtc

SEQ ID NO: 335722 - DNA, 33 bp, Homo sapien
ttaaaagagcaattagtaaatgatttctgagtc

SEQ ID NO: 335723 - DNA, 33 bp, Homo sapien
aacacattattgcaacactcttaggcaagagaa

SEQ ID NO: 335724 - DNA, 33 bp, Homo sapien
aacacattattgcaaccctcttaggcaagagaa

SEQ ID NO: 335725 - DNA, 33 bp, Homo sapien
taaatatgtgaaactaacagaggacgcttcatg

SEQ ID NO: 335726 - DNA, 33 bp, Homo sapien
taaatatgtgaaactagcagaggacgcttcatg

SEQ ID NO: 335727 - DNA, 33 bp, Homo sapien
aaaataatgtaagggtaaaatgattatgaggct

SEQ ID NO: 335728 - DNA, 33 bp, Homo sapien
aaaataatgtaagggtcaaatgattatgaggct

SEQ ID NO: 335729 - DNA, 33 bp, Homo sapien
tggttgggaaataaaccgcctttgccagaaatt

SEQ ID NO: 335730 - DNA, 33 bp, Homo sapien
tggttgggaaataaactgcctttgccagaaatt

SEQ ID NO: 335731 - DNA, 33 bp, Homo sapien
ggagaagaatctttagacatctcaggatccagt

SEQ ID NO: 335732 - DNA, 33 bp, Homo sapien
ggagaagaatctttagtcatctcaggatccagt

SEQ ID NO: 335733 - DNA, 33 bp, Homo sapien
agtcttcccttcttaaggcaaatgttcagtcag

SEQ ID NO: 335734 - DNA, 33 bp, Homo sapien
agtcttcccttcttaatgcaaatgttcagtcag

SEQ ID NO: 335735 - DNA, 33 bp, Homo sapien
aaaagatgtgcattccagcaccagtcttccctt

SEQ ID NO: 335736 - DNA, 33 bp, Homo sapien
aaaagatgtgcattccggcaccagtcttccctt

SEQ ID NO: 335737 - DNA, 33 bp, Homo sapien
agatgctatttagaacccaagctgtttttcttg

SEQ ID NO: 335738 - DNA, 33 bp, Homo sapien
agatgctatttagaactcaagctgtttttcttg

SEQ ID NO: 335739 - DNA, 33 bp, Homo sapien
atagagaaatttggcacaacttttcccagaaac

SEQ ID NO: 335740 - DNA, 33 bp, Homo sapien
atagagaaatttggcagaacttttcccagaaac

SEQ ID NO: 335741 - DNA, 33 bp, Homo sapien
caaagaagcgctggggccaattttagttcagtg

SEQ ID NO: 335742 - DNA, 33 bp, Homo sapien
caaagaagcgctggggtcaattttagttcagtg

SEQ ID NO: 335743 - DNA, 33 bp, Homo sapien
ccctaaacaacctctgaaactagttactgaatg

SEQ ID NO: 335744 - DNA, 33 bp, Homo sapien
ccctaaacaacctctggaactagttactgaatg

SEQ ID NO: 335745 - DNA, 33 bp, Homo sapien
ttgtttagggtttctcaagctcagagtcactgt

SEQ ID NO: 335746 - DNA, 33 bp, Homo sapien
ttgtttagggtttctcgagctcagagtcactgt

SEQ ID NO: 335747 - DNA, 33 bp, Homo sapien
ggctatttcagggggaaaaaaccatgtctccac

SEQ ID NO: 335748 - DNA, 33 bp, Homo sapien
ggctatttcagggggacaaaaccatgtctccac

SEQ ID NO: 335749 - DNA, 33 bp, Homo sapien
aacaagaaccatgaaaaccttgaacttttctgt

SEQ ID NO: 335750 - DNA, 33 bp, Homo sapien
aacaagaaccatgaaacccttgaacttttctgt

SEQ ID NO: 335751 - DNA, 33 bp, Homo sapien
gagagcttttatctgcactcttagacaagaaaa

SEQ ID NO: 335752 - DNA, 33 bp, Homo sapien
gagagcttttatctgcgctcttagacaagaaaa

SEQ ID NO: 335753 - DNA, 33 bp, Homo sapien
tttacatttgaagacaacttctggagacaatgt

SEQ ID NO: 335754 - DNA, 33 bp, Homo sapien
tttacatttgaagacagcttctggagacaatgt

SEQ ID NO: 335755 - DNA, 33 bp, Homo sapien
ggatacaagtttattaagctaggagatgcaggg

SEQ ID NO: 335756 - DNA, 33 bp, Homo sapien
ggatacaagtttattatgctaggagatgcaggg

SEQ ID NO: 335757 - DNA, 33 bp, Homo sapien
ttgtctatgtttcacagtggaacagcaccatat

SEQ ID NO: 335758 - DNA, 33 bp, Homo sapien
ttgtctatgtttcacattggaacagcaccatat

SEQ ID NO: 335759 - DNA, 33 bp, Homo sapien
catcagtggcacctgccaccacatggaaccagg

SEQ ID NO: 335760 - DNA, 33 bp, Homo sapien
catcagtggcacctgctaccacatggaaccagg

SEQ ID NO: 335761 - DNA, 33 bp, Homo sapien
ttggctagtataatgcaatgaaagttgggaaac

SEQ ID NO: 335762 - DNA, 33 bp, Homo sapien
ttggctagtataatgccatgaaagttgggaaac

SEQ ID NO: 335763 - DNA, 33 bp, Homo sapien
atcgaggttgaggaggaaattcaagttttgggg

SEQ ID NO: 335764 - DNA, 33 bp, Homo sapien
atcgaggttgaggaggcaattcaagttttgggg

SEQ ID NO: 335765 - DNA, 33 bp, Homo sapien
ttcatgcccagattccaaagtaatcaagaaata

SEQ ID NO: 335766 - DNA, 33 bp, Homo sapien
ttcatgcccagattccgaagtaatcaagaaata

SEQ ID NO: 335767 - DNA, 33 bp, Homo sapien
ggttctctggtctacacagctcctgagtacttg

SEQ ID NO: 335768 - DNA, 33 bp, Homo sapien
ggttctctggtctacatagctcctgagtacttg

SEQ ID NO: 335769 - DNA, 33 bp, Homo sapien
gtgtattcctcaagggaccaaagatatggcaag

SEQ ID NO: 335770 - DNA, 33 bp, Homo sapien
gtgtattcctcaagggtccaaagatatggcaag

SEQ ID NO: 335771 - DNA, 33 bp, Homo sapien
ttttcaaatcaagctaccagaaatttttcaaac

SEQ ID NO: 335772 - DNA, 33 bp, Homo sapien
ttttcaaatcaagctatcagaaatttttcaaac

SEQ ID NO: 335773 - DNA, 33 bp, Homo sapien
ttactgtggttagttacaatagctgaatgaata

SEQ ID NO: 335774 - DNA, 33 bp, Homo sapien
ttactgtggttagttataatagctgaatgaata

SEQ ID NO: 335775 - DNA, 33 bp, Homo sapien
atgtaaaggacagaatgaccttacttgacacag

SEQ ID NO: 335776 - DNA, 33 bp, Homo sapien
atgtaaaggacagaattaccttacttgacacag

SEQ ID NO: 335777 - DNA, 33 bp, Homo sapien
tggacttttatgagtgaatcacagtgacttttt

SEQ ID NO: 335778 - DNA, 33 bp, Homo sapien
tggacttttatgagtgtatcacagtgacttttt

SEQ ID NO: 335779 - DNA, 33 bp, Homo sapien
tattcatcatgtagacactggctttaaacttga

SEQ ID NO: 335780 - DNA, 33 bp, Homo sapien
tattcatcatgtagacgctggctttaaacttga

SEQ ID NO: 335781 - DNA, 33 bp, Homo sapien
ttattcatgagctgaaatggaataatgagaatg

SEQ ID NO: 335782 - DNA, 33 bp, Homo sapien
ttattcatgagctgaagtggaataatgagaatg

SEQ ID NO: 335783 - DNA, 33 bp, Homo sapien
agaaaagtcacgaataataaatgagaaattgct

SEQ ID NO: 335784 - DNA, 33 bp, Homo sapien
agaaaagtcacgaatagtaaatgagaaattgct

SEQ ID NO: 335785 - DNA, 33 bp, Homo sapien
tagtcagtgaacactacggactaagtagaatac

SEQ ID NO: 335786 - DNA, 33 bp, Homo sapien
tagtcagtgaacactatggactaagtagaatac

SEQ ID NO: 335787 - DNA, 33 bp, Homo sapien
ttagattatgatttggccagctgagatgatgtt

SEQ ID NO: 335788 - DNA, 33 bp, Homo sapien
ttagattatgatttggtcagctgagatgatgtt

SEQ ID NO: 335789 - DNA, 33 bp, Homo sapien
atagaacttcaaagtacatgaggcaagtactaa

SEQ ID NO: 335790 - DNA, 33 bp, Homo sapien
atagaacttcaaagtatatgaggcaagtactaa

SEQ ID NO: 335791 - DNA, 33 bp, Homo sapien
acgtggtagggagccacgagctaagaagaaata

SEQ ID NO: 335792 - DNA, 33 bp, Homo sapien
acgtggtagggagccatgagctaagaagaaata

SEQ ID NO: 335793 - DNA, 33 bp, Homo sapien
tggttctgaggatgcaaaacaaaagcttaaaca

SEQ ID NO: 335794 - DNA, 33 bp, Homo sapien
tggttctgaggatgcacaacaaaagcttaaaca

SEQ ID NO: 335795 - DNA, 33 bp, Homo sapien
tcccagccaccttaccaggaaaatcttacatac

SEQ ID NO: 335796 - DNA, 33 bp, Homo sapien
tcccagccaccttaccgggaaaatcttacatac

SEQ ID NO: 335797 - DNA, 33 bp, Homo sapien
actcctaggatggcgaacaatttttagttgaga

SEQ ID NO: 335798 - DNA, 33 bp, Homo sapien
actcctaggatggcgatcaatttttagttgaga

SEQ ID NO: 335799 - DNA, 33 bp, Homo sapien
gactcttgattttatgaatctggaggttagaaa

SEQ ID NO: 335800 - DNA, 33 bp, Homo sapien
gactcttgattttatgtatctggaggttagaaa

SEQ ID NO: 335801 - DNA, 33 bp, Homo sapien
tctgttaagatgaaacacttactctacaaattt

SEQ ID NO: 335802 - DNA, 33 bp, Homo sapien
tctgttaagatgaaacccttactctacaaattt

SEQ ID NO: 335803 - DNA, 33 bp, Homo sapien
aagttggggaaactgtcacaatctagaggagcc

SEQ ID NO: 335804 - DNA, 33 bp, Homo sapien
aagttggggaaactgtgacaatctagaggagcc

SEQ ID NO: 335805 - DNA, 33 bp, Homo sapien
ttatggtttcgatagccctcaagtgtcaacaga

SEQ ID NO: 335806 - DNA, 33 bp, Homo sapien
ttatggtttcgatagctctcaagtgtcaacaga

SEQ ID NO: 335807 - DNA, 33 bp, Homo sapien
ggctcattaccatccaatgatttttctccactt

SEQ ID NO: 335808 - DNA, 33 bp, Homo sapien
ggctcattaccatccagtgatttttctccactt

SEQ ID NO: 335809 - DNA, 33 bp, Homo sapien
tttcaatagagtacaccgtcctttcatctccct

SEQ ID NO: 335810 - DNA, 33 bp, Homo sapien
tttcaatagagtacactgtcctttcatctccct

SEQ ID NO: 335811 - DNA, 33 bp, Homo sapien
cattcctttatagcaacagtcaataaactaaga

SEQ ID NO: 335812 - DNA, 33 bp, Homo sapien
cattcctttatagcaagagtcaataaactaaga

SEQ ID NO: 335813 - DNA, 33 bp, Homo sapien
aattgtgctttgtaaccggtgctccaaatcaga

SEQ ID NO: 335814 - DNA, 33 bp, Homo sapien
aattgtgctttgtaactggtgctccaaatcaga

SEQ ID NO: 335815 - DNA, 33 bp, Homo sapien
caactctaaaaatagaagggccatttagtacat

SEQ ID NO: 335816 - DNA, 33 bp, Homo sapien
caactctaaaaatagaggggccatttagtacat

SEQ ID NO: 335817 - DNA, 33 bp, Homo sapien
gaggaaatgggtaggaaatgagagggtagtctg

SEQ ID NO: 335818 - DNA, 33 bp, Homo sapien
gaggaaatgggtaggagatgagagggtagtctg

SEQ ID NO: 335819 - DNA, 33 bp, Homo sapien
aagaataaaaggagacagcaaatgggcatcagt

SEQ ID NO: 335820 - DNA, 33 bp, Homo sapien
aagaataaaaggagaccgcaaatgggcatcagt

SEQ ID NO: 335821 - DNA, 33 bp, Homo sapien
aaagccagcaaaaatacatgaacttttgtagca

SEQ ID NO: 335822 - DNA, 33 bp, Homo sapien
aaagccagcaaaaatagatgaacttttgtagca

SEQ ID NO: 335823 - DNA, 33 bp, Homo sapien
ggcagctggcttcttacagtttgactaccacac

SEQ ID NO: 335824 - DNA, 33 bp, Homo sapien
ggcagctggcttcttatagtttgactaccacac

SEQ ID NO: 335825 - DNA, 33 bp, Homo sapien
cagatcaaccatgaaactgaatttgacttctgc

SEQ ID NO: 335826 - DNA, 33 bp, Homo sapien
cagatcaaccatgaaattgaatttgacttctgc

SEQ ID NO: 335827 - DNA, 33 bp, Homo sapien
gctatgtgagccttggccagttctctctacctt

SEQ ID NO: 335828 - DNA, 33 bp, Homo sapien
gctatgtgagccttggtcagttctctctacctt

SEQ ID NO: 335829 - DNA, 33 bp, Homo sapien
cagtgctcacatttccccagcaagatcaggctc

SEQ ID NO: 335830 - DNA, 33 bp, Homo sapien
cagtgctcacatttccgcagcaagatcaggctc

SEQ ID NO: 335831 - DNA, 33 bp, Homo sapien
aagacaaatcagtatgaagaaatcagcctagca

SEQ ID NO: 335832 - DNA, 33 bp, Homo sapien
aagacaaatcagtatggagaaatcagcctagca

SEQ ID NO: 335833 - DNA, 33 bp, Homo sapien
cttatttccattgagaactgaaaatcatataat

SEQ ID NO: 335834 - DNA, 33 bp, Homo sapien
cttatttccattgagatctgaaaatcatataat

SEQ ID NO: 335835 - DNA, 33 bp, Homo sapien
tatgaaagtcataatactacagtacctgtaaag

SEQ ID NO: 335836 - DNA, 33 bp, Homo sapien
tatgaaagtcataatagtacagtacctgtaaag

SEQ ID NO: 335837 - DNA, 33 bp, Homo sapien
tatggtctttgtatgaaggaataagaggtaact

SEQ ID NO: 335838 - DNA, 33 bp, Homo sapien
tatggtctttgtatgagggaataagaggtaact

SEQ ID NO: 335839 - DNA, 33 bp, Homo sapien
aagaggtcatctacgaacttaatacaagtgaaa

SEQ ID NO: 335840 - DNA, 33 bp, Homo sapien
aagaggtcatctacgagcttaatacaagtgaaa

SEQ ID NO: 335841 - DNA, 33 bp, Homo sapien
gtacacaggatctcccgagtttcctaattaact

SEQ ID NO: 335842 - DNA, 33 bp, Homo sapien
gtacacaggatctccctagtttcctaattaact

SEQ ID NO: 335843 - DNA, 33 bp, Homo sapien
tacttaaaagctccccaatctccataatgtcct

SEQ ID NO: 335844 - DNA, 33 bp, Homo sapien
tacttaaaagctccccgatctccataatgtcct

SEQ ID NO: 335845 - DNA, 33 bp, Homo sapien
gaacatttctatatcacgggtcaaaaagaatca

SEQ ID NO: 335846 - DNA, 33 bp, Homo sapien
gaacatttctatatcatgggtcaaaaagaatca

SEQ ID NO: 335847 - DNA, 33 bp, Homo sapien
ttgattaaatggagtaagagccttctatctaat

SEQ ID NO: 335848 - DNA, 33 bp, Homo sapien
ttgattaaatggagtaggagccttctatctaat

SEQ ID NO: 335849 - DNA, 33 bp, Homo sapien
tcacacgtgaaaggaaaagtattcacaattcca

SEQ ID NO: 335850 - DNA, 33 bp, Homo sapien
tcacacgtgaaaggaagagtattcacaattcca

SEQ ID NO: 335851 - DNA, 33 bp, Homo sapien
ctaggtatatatccccccaaattgaaagcaagg

SEQ ID NO: 335852 - DNA, 33 bp, Homo sapien
ctaggtatatatcccctcaaattgaaagcaagg

SEQ ID NO: 335853 - DNA, 33 bp, Homo sapien
ttctaggctggtggtacccttgattttactttt

SEQ ID NO: 335854 - DNA, 33 bp, Homo sapien
ttctaggctggtggtagccttgattttactttt

SEQ ID NO: 335855 - DNA, 33 bp, Homo sapien
ggtacccaagttaaaaatctctgcatatcagaa

SEQ ID NO: 335856 - DNA, 33 bp, Homo sapien
ggtacccaagttaaaagtctctgcatatcagaa

SEQ ID NO: 335857 - DNA, 33 bp, Homo sapien
gaactcaaataatctccgacctgctaacagatg

SEQ ID NO: 335858 - DNA, 33 bp, Homo sapien
gaactcaaataatctctgacctgctaacagatg

SEQ ID NO: 335859 - DNA, 33 bp, Homo sapien
caaataggcatcaagcccatggtttcctagtta

SEQ ID NO: 335860 - DNA, 33 bp, Homo sapien
caaataggcatcaagctcatggtttcctagtta

SEQ ID NO: 335861 - DNA, 33 bp, Homo sapien
cctgctaatttcttccacattctgctctaacct

SEQ ID NO: 335862 - DNA, 33 bp, Homo sapien
cctgctaatttcttcctcattctgctctaacct

SEQ ID NO: 335863 - DNA, 33 bp, Homo sapien
acttggcttgaaacagaataaatatattacctt

SEQ ID NO: 335864 - DNA, 33 bp, Homo sapien
acttggcttgaaacagcataaatatattacctt

SEQ ID NO: 335865 - DNA, 33 bp, Homo sapien
tctctaggtgttaaataattgtttgaggctggt

SEQ ID NO: 335866 - DNA, 33 bp, Homo sapien
tctctaggtgttaaatcattgtttgaggctggt

SEQ ID NO: 335867 - DNA, 33 bp, Homo sapien
ctatcacaccatagaactgaatttgtagaaatt

SEQ ID NO: 335868 - DNA, 33 bp, Homo sapien
ctatcacaccatagaattgaatttgtagaaatt

SEQ ID NO: 335869 - DNA, 33 bp, Homo sapien
aaaattaagataggaacgaatgaattctattta

SEQ ID NO: 335870 - DNA, 33 bp, Homo sapien
aaaattaagataggaatgaatgaattctattta

SEQ ID NO: 335871 - DNA, 33 bp, Homo sapien
tctctaccaatgagcaaacaatggaaatgacat

SEQ ID NO: 335872 - DNA, 33 bp, Homo sapien
tctctaccaatgagcacacaatggaaatgacat

SEQ ID NO: 335873 - DNA, 33 bp, Homo sapien
tttattccttggaaaactctagagtgcagacag

SEQ ID NO: 335874 - DNA, 33 bp, Homo sapien
tttattccttggaaaattctagagtgcagacag

SEQ ID NO: 335875 - DNA, 33 bp, Homo sapien
tcatcacctgctttgcactattgaaaatttccc

SEQ ID NO: 335876 - DNA, 33 bp, Homo sapien
tcatcacctgctttgcgctattgaaaatttccc

SEQ ID NO: 335877 - DNA, 33 bp, Homo sapien
aaacctgaccagggccaagatgttttaataagg

SEQ ID NO: 335878 - DNA, 33 bp, Homo sapien
aaacctgaccagggccgagatgttttaataagg

SEQ ID NO: 335879 - DNA, 33 bp, Homo sapien
ttgtgtattgcaagggcaagaatgaaatgtcag

SEQ ID NO: 335880 - DNA, 33 bp, Homo sapien
ttgtgtattgcaagggtaagaatgaaatgtcag

SEQ ID NO: 335881 - DNA, 33 bp, Homo sapien
tcactctatgatttccactgggttacttttttc

SEQ ID NO: 335882 - DNA, 33 bp, Homo sapien
tcactctatgatttccgctgggttacttttttc

SEQ ID NO: 335883 - DNA, 33 bp, Homo sapien
ctttcatcttatcacaaactttgaacatatttt

SEQ ID NO: 335884 - DNA, 33 bp, Homo sapien
ctttcatcttatcacatactttgaacatatttt

SEQ ID NO: 335885 - DNA, 33 bp, Homo sapien
aggacaattaaaaatgaacgtacaaataagccc

SEQ ID NO: 335886 - DNA, 33 bp, Homo sapien
aggacaattaaaaatggacgtacaaataagccc

SEQ ID NO: 335887 - DNA, 33 bp, Homo sapien
gatataatgcctaaataaaaaatctcacattct

SEQ ID NO: 335888 - DNA, 33 bp, Homo sapien
gatataatgcctaaatcaaaaatctcacattct

SEQ ID NO: 335889 - DNA, 33 bp, Homo sapien
aacaacctgtgattcaaacatttgagttctctg

SEQ ID NO: 335890 - DNA, 33 bp, Homo sapien
aacaacctgtgattcagacatttgagttctctg

SEQ ID NO: 335891 - DNA, 33 bp, Homo sapien
gtgaaacaactgacaccgcggaagccaatggct

SEQ ID NO: 335892 - DNA, 33 bp, Homo sapien
gtgaaacaactgacactgcggaagccaatggct

SEQ ID NO: 335893 - DNA, 33 bp, Homo sapien
atgtacagtgcaatggaaaagtaatacttaatt

SEQ ID NO: 335894 - DNA, 33 bp, Homo sapien
atgtacagtgcaatggcaaagtaatacttaatt

SEQ ID NO: 335895 - DNA, 33 bp, Homo sapien
gttttgtttagtgctacatcctcagtacatgga

SEQ ID NO: 335896 - DNA, 33 bp, Homo sapien
gttttgtttagtgctatatcctcagtacatgga

SEQ ID NO: 335897 - DNA, 33 bp, Homo sapien
gtgtctgacatagaggaaacatttataaattgc

SEQ ID NO: 335898 - DNA, 33 bp, Homo sapien
gtgtctgacatagagggaacatttataaattgc

SEQ ID NO: 335899 - DNA, 33 bp, Homo sapien
ggaattctaatggaaccaatccttgagcattct

SEQ ID NO: 335900 - DNA, 33 bp, Homo sapien
ggaattctaatggaactaatccttgagcattct

SEQ ID NO: 335901 - DNA, 33 bp, Homo sapien
atggagccttaaagtgcaatccttttctaagca

SEQ ID NO: 335902 - DNA, 33 bp, Homo sapien
atggagccttaaagtgtaatccttttctaagca

SEQ ID NO: 335903 - DNA, 33 bp, Homo sapien
tgctctatgacggtcccgaagtacacttataag

SEQ ID NO: 335904 - DNA, 33 bp, Homo sapien
tgctctatgacggtcctgaagtacacttataag

SEQ ID NO: 335905 - DNA, 33 bp, Homo sapien
tcctctgctctgtaaacatttttccttattgcc

SEQ ID NO: 335906 - DNA, 33 bp, Homo sapien
tcctctgctctgtaaagatttttccttattgcc

SEQ ID NO: 335907 - DNA, 33 bp, Homo sapien
atacagagagaaaagaacgtgtagaggcataga

SEQ ID NO: 335908 - DNA, 33 bp, Homo sapien
atacagagagaaaagagcgtgtagaggcataga

SEQ ID NO: 335909 - DNA, 33 bp, Homo sapien
gacagaggaggatacacactggattcatgaacg

SEQ ID NO: 335910 - DNA, 33 bp, Homo sapien
gacagaggaggatacagactggattcatgaacg

SEQ ID NO: 335911 - DNA, 33 bp, Homo sapien
agtaaaggctacaagaataaagttttgcccttg

SEQ ID NO: 335912 - DNA, 33 bp, Homo sapien
agtaaaggctacaagagtaaagttttgcccttg

SEQ ID NO: 335913 - DNA, 33 bp, Homo sapien
aaagtggccaattccacgttatcctcacactgt

SEQ ID NO: 335914 - DNA, 33 bp, Homo sapien
aaagtggccaattccatgttatcctcacactgt

SEQ ID NO: 335915 - DNA, 33 bp, Homo sapien
atgctgttttatttcaacttttctgtacctaat

SEQ ID NO: 335916 - DNA, 33 bp, Homo sapien
atgctgttttatttcagcttttctgtacctaat

SEQ ID NO: 335917 - DNA, 33 bp, Homo sapien
gtataaaaggtccatccatttttgtctctcaat

SEQ ID NO: 335918 - DNA, 33 bp, Homo sapien
gtataaaaggtccatcgatttttgtctctcaat

SEQ ID NO: 335919 - DNA, 33 bp, Homo sapien
ttcagagtctgtttgtcaagttcctttaaaagt

SEQ ID NO: 335920 - DNA, 33 bp, Homo sapien
ttcagagtctgtttgttaagttcctttaaaagt

SEQ ID NO: 335921 - DNA, 33 bp, Homo sapien
aactgagaaacctcaactcaaataaaactggtt

SEQ ID NO: 335922 - DNA, 33 bp, Homo sapien
aactgagaaacctcaattcaaataaaactggtt

SEQ ID NO: 335923 - DNA, 33 bp, Homo sapien
taaacccagcatctgggaactattcttcctgat

SEQ ID NO: 335924 - DNA, 33 bp, Homo sapien
taaacccagcatctggtaactattcttcctgat

SEQ ID NO: 335925 - DNA, 33 bp, Homo sapien
gggtgggttgcctcacagatcatcctattaccc

SEQ ID NO: 335926 - DNA, 33 bp, Homo sapien
gggtgggttgcctcacggatcatcctattaccc

SEQ ID NO: 335927 - DNA, 33 bp, Homo sapien
ctttatttcatgctaacctgtgacccaatcgct

SEQ ID NO: 335928 - DNA, 33 bp, Homo sapien
ctttatttcatgctaatctgtgacccaatcgct

SEQ ID NO: 335929 - DNA, 33 bp, Homo sapien
cagcaacagagcatctgaaaatccagaatagat

SEQ ID NO: 335930 - DNA, 33 bp, Homo sapien
cagcaacagagcatcttaaaatccagaatagat

SEQ ID NO: 335931 - DNA, 33 bp, Homo sapien
aattaaaaagtcaaacaaggtgcaaatcaaagg

SEQ ID NO: 335932 - DNA, 33 bp, Homo sapien
aattaaaaagtcaaacgaggtgcaaatcaaagg

SEQ ID NO: 335933 - DNA, 33 bp, Homo sapien
ctcagtggtcatgggaataagtataacatcagt

SEQ ID NO: 335934 - DNA, 33 bp, Homo sapien
ctcagtggtcatgggagtaagtataacatcagt

SEQ ID NO: 335935 - DNA, 33 bp, Homo sapien
atgagctgtgtgagaacgttaggtccctgcaaa

SEQ ID NO: 335936 - DNA, 33 bp, Homo sapien
atgagctgtgtgagaaggttaggtccctgcaaa

SEQ ID NO: 335937 - DNA, 33 bp, Homo sapien
aaacactgactcatctaacatagaacaactgtt

SEQ ID NO: 335938 - DNA, 33 bp, Homo sapien
aaacactgactcatctgacatagaacaactgtt

SEQ ID NO: 335939 - DNA, 33 bp, Homo sapien
tctgcttaataaagagaccaatgtaatactgag

SEQ ID NO: 335940 - DNA, 33 bp, Homo sapien
tctgcttaataaagagcccaatgtaatactgag

SEQ ID NO: 335941 - DNA, 33 bp, Homo sapien
tagaaaggatgagtaaaccatacaaaaaaaggt

SEQ ID NO: 335942 - DNA, 33 bp, Homo sapien
tagaaaggatgagtaacccatacaaaaaaaggt

SEQ ID NO: 335943 - DNA, 33 bp, Homo sapien
atttcttaggaagttgaagataggaagtatggc

SEQ ID NO: 335944 - DNA, 33 bp, Homo sapien
atttcttaggaagttggagataggaagtatggc

SEQ ID NO: 335945 - DNA, 33 bp, Homo sapien
ataactgctcaagggcacgcaactataaagggg

SEQ ID NO: 335946 - DNA, 33 bp, Homo sapien
ataactgctcaagggctcgcaactataaagggg

SEQ ID NO: 335947 - DNA, 33 bp, Homo sapien
tagcgtatttctcaccagatatcaggattggcc

SEQ ID NO: 335948 - DNA, 33 bp, Homo sapien
tagcgtatttctcaccggatatcaggattggcc

SEQ ID NO: 335949 - DNA, 33 bp, Homo sapien
ggattacttggaaatgaacaagatggatactat

SEQ ID NO: 335950 - DNA, 33 bp, Homo sapien
ggattacttggaaatggacaagatggatactat

SEQ ID NO: 335951 - DNA, 33 bp, Homo sapien
aacacaaagttcaggaacaaaactgtagagcat

SEQ ID NO: 335952 - DNA, 33 bp, Homo sapien
aacacaaagttcaggaccaaaactgtagagcat

SEQ ID NO: 335953 - DNA, 33 bp, Homo sapien
cttggatgtagtagtagagtttcttcagctgta

SEQ ID NO: 335954 - DNA, 33 bp, Homo sapien
cttggatgtagtagtatagtttcttcagctgta

SEQ ID NO: 335955 - DNA, 33 bp, Homo sapien
agaaacccaaggaatgaattggacagttaattc

SEQ ID NO: 335956 - DNA, 33 bp, Homo sapien
agaaacccaaggaatggattggacagttaattc

SEQ ID NO: 335957 - DNA, 33 bp, Homo sapien
tatgtgtaaaatactcgctttgccatttgaagg

SEQ ID NO: 335958 - DNA, 33 bp, Homo sapien
tatgtgtaaaatactctctttgccatttgaagg

SEQ ID NO: 335959 - DNA, 33 bp, Homo sapien
atgaatttcaacctaaagcaaatattgataaac

SEQ ID NO: 335960 - DNA, 33 bp, Homo sapien
atgaatttcaacctaaggcaaatattgataaac

SEQ ID NO: 335961 - DNA, 33 bp, Homo sapien
tcatcctggtcaaaacaaacctctaaatactca

SEQ ID NO: 335962 - DNA, 33 bp, Homo sapien
tcatcctggtcaaaacgaacctctaaatactca

SEQ ID NO: 335963 - DNA, 33 bp, Homo sapien
aagcactaggacgtaccagagaggcttaaagat

SEQ ID NO: 335964 - DNA, 33 bp, Homo sapien
aagcactaggacgtactagagaggcttaaagat

SEQ ID NO: 335965 - DNA, 33 bp, Homo sapien
aaaacatcacgcttaaatgaactgttcccagac

SEQ ID NO: 335966 - DNA, 33 bp, Homo sapien
aaaacatcacgcttaagtgaactgttcccagac

SEQ ID NO: 335967 - DNA, 33 bp, Homo sapien; identical to SEQ ID NO: 335965

SEQ ID NO: 335968 - DNA, 33 bp, Homo sapien; identical to SEQ ID NO: 335966

SEQ ID NO: 335969 - DNA, 33 bp, Homo sapien
ttaaattatatgtaccacttttaatagcctgat

SEQ ID NO: 335970 - DNA, 33 bp, Homo sapien
ttaaattatatgtaccgcttttaatagcctgat

SEQ ID NO: 335971 - DNA, 33 bp, Homo sapien
cattttcggcctcttaccttcaatcaaaattct

SEQ ID NO: 335972 - DNA, 33 bp, Homo sapien
cattttcggcctcttagcttcaatcaaaattct

SEQ ID NO: 335973 - DNA, 33 bp, Homo sapien
atttcaaccaaatgaacagaaattctgtagatt

SEQ ID NO: 335974 - DNA, 33 bp, Homo sapien
atttcaaccaaatgaatagaaattctgtagatt

SEQ ID NO: 335975 - DNA, 33 bp, Homo sapien
atggctggctagagacaataccccatctgccgc

SEQ ID NO: 335976 - DNA, 33 bp, Homo sapien
atggctggctagagacgataccccatctgccgc

SEQ ID NO: 335977 - DNA, 33 bp, Homo sapien
taagggagcatccttgaaaactgtttttatcta

SEQ ID NO: 335978 - DNA, 33 bp, Homo sapien
taagggagcatccttggaaactgtttttatcta

SEQ ID NO: 335979 - DNA, 33 bp, Homo sapien
tggagttcctggagtacgggccaaagaagttcc

SEQ ID NO: 335980 - DNA, 33 bp, Homo sapien
tggagttcctggagtatgggccaaagaagttcc

SEQ ID NO: 335981 - DNA, 33 bp, Homo sapien
aaatcttatagtaaaactgatgctctaggaaga

SEQ ID NO: 335982 - DNA, 33 bp, Homo sapien
aaatcttatagtaaaattgatgctctaggaaga

SEQ ID NO: 335983 - DNA, 33 bp, Homo sapien
caaagccaggaagttaaatggagctgattttag

SEQ ID NO: 335984 - DNA, 33 bp, Homo sapien
caaagccaggaagttatatggagctgattttag

SEQ ID NO: 335985 - DNA, 33 bp, Homo sapien
tgactggtattgaatgaagcagtctttgaaagg

SEQ ID NO: 335986 - DNA, 33 bp, Homo sapien
tgactggtattgaatggagcagtctttgaaagg

SEQ ID NO: 335987 - DNA, 33 bp, Homo sapien
acatttcaatgcatgaaaacctgtcaatgttag

SEQ ID NO: 335988 - DNA, 33 bp, Homo sapien
acatttcaatgcatgagaacctgtcaatgttag

SEQ ID NO: 335989 - DNA, 33 bp, Homo sapien
tgagtgaataattacacagaaggagccaaatta

SEQ ID NO: 335990 - DNA, 33 bp, Homo sapien
tgagtgaataattacagagaaggagccaaatta

SEQ ID NO: 335991 - DNA, 33 bp, Homo sapien
ctcttcaacttgctgccctattctatgctctct

SEQ ID NO: 335992 - DNA, 33 bp, Homo sapien
ctcttcaacttgctgctctattctatgctctct

SEQ ID NO: 335993 - DNA, 33 bp, Homo sapien
tgatggagagagggaaatctagaagacagcaag

SEQ ID NO: 335994 - DNA, 33 bp, Homo sapien
tgatggagagagggaactctagaagacagcaag

SEQ ID NO: 335995 - DNA, 33 bp, Homo sapien
cacaaagcagagaagaaagttggggtccaccaa

SEQ ID NO: 335996 - DNA, 33 bp, Homo sapien
cacaaagcagagaagagagttggggtccaccaa

SEQ ID NO: 335997 - DNA, 33 bp, Homo sapien
aaaattaaaatttccacgtgaaacaacaaatga

SEQ ID NO: 335998 - DNA, 33 bp, Homo sapien
aaaattaaaatttccatgtgaaacaacaaatga

SEQ ID NO: 335999 - DNA, 33 bp, Homo sapien
agtgatatgtggtgaacagtagatggattggga

SEQ ID NO: 336000 - DNA, 33 bp, Homo sapien
agtgatatgtggtgaagagtagatggattggga

SEQ ID NO: 336001 - DNA, 33 bp, Homo sapien
acatgaggctcttctgcaaatgatcttatctgt

SEQ ID NO: 336002 - DNA, 33 bp, Homo sapien
acatgaggctcttctgtaaatgatcttatctgt

SEQ ID NO: 336003 - DNA, 33 bp, Homo sapien
aatttgcgtactcagaaatgatggaacaacttt

SEQ ID NO: 336004 - DNA, 33 bp, Homo sapien
aatttgcgtactcagagatgatggaacaacttt

SEQ ID NO: 336005 - DNA, 33 bp, Homo sapien
aatagatgccttctaaggagtttctaatagaaa

SEQ ID NO: 336006 - DNA, 33 bp, Homo sapien
aatagatgccttctaatgagtttctaatagaaa

SEQ ID NO: 336007 - DNA, 33 bp, Homo sapien
aagggatgaatccaacaaaatatgtacatcact

SEQ ID NO: 336008 - DNA, 33 bp, Homo sapien
aagggatgaatccaaccaaatatgtacatcact

SEQ ID NO: 336009 - DNA, 33 bp, Homo sapien
attagctgaattacccaaatatcctcaaaacac

SEQ ID NO: 336010 - DNA, 33 bp, Homo sapien
attagctgaattacccgaatatcctcaaaacac

SEQ ID NO: 336011 - DNA, 33 bp, Homo sapien
gcataacagctgcttgcagaaccgtaatatcct

SEQ ID NO: 336012 - DNA, 33 bp, Homo sapien
gcataacagctgcttgtagaaccgtaatatcct

SEQ ID NO: 336013 - DNA, 33 bp, Homo sapien
tctgtgtgatactgcacggatgagtacatgata

SEQ ID NO: 336014 - DNA, 33 bp, Homo sapien
tctgtgtgatactgcagggatgagtacatgata

SEQ ID NO: 336015 - DNA, 33 bp, Homo sapien
gaagaaatcaatttgcaagaaactatgaccaac

SEQ ID NO: 336016 - DNA, 33 bp, Homo sapien
gaagaaatcaatttgccagaaactatgaccaac

SEQ ID NO: 336017 - DNA, 33 bp, Homo sapien
tggagagatactttaaagccaactatgaacaaa

SEQ ID NO: 336018 - DNA, 33 bp, Homo sapien
tggagagatactttaacgccaactatgaacaaa

SEQ ID NO: 336019 - DNA, 33 bp, Homo sapien
aaaaaaaagctgtacaatgaaaagatgtacaac

SEQ ID NO: 336020 - DNA, 33 bp, Homo sapien
aaaaaaaagctgtacagtgaaaagatgtacaac

SEQ ID NO: 336021 - DNA, 33 bp, Homo sapien
atagcagagagccataggtctattctatgattg

SEQ ID NO: 336022 - DNA, 33 bp, Homo sapien
atagcagagagccatatgtctattctatgattg

SEQ ID NO: 336023 - DNA, 33 bp, Homo sapien
attatttagctggaaacataccactatttttac

SEQ ID NO: 336024 - DNA, 33 bp, Homo sapien
attatttagctggaaatataccactatttttac

SEQ ID NO: 336025 - DNA, 33 bp, Homo sapien
tttacttgtatttgctcggtgaagtgaaatgtt

SEQ ID NO: 336026 - DNA, 33 bp, Homo sapien
tttacttgtatttgcttggtgaagtgaaatgtt

SEQ ID NO: 336027 - DNA, 33 bp, Homo sapien
ggaatcattgggccataagttctgattatttta

SEQ ID NO: 336028 - DNA, 33 bp, Homo sapien
ggaatcattgggccatgagttctgattatttta

SEQ ID NO: 336029 - DNA, 33 bp, Homo sapien
gaattactcaggcgcactagaattggaaatatt

SEQ ID NO: 336030 - DNA, 33 bp, Homo sapien
gaattactcaggcgcattagaattggaaatatt

SEQ ID NO: 336031 - DNA, 33 bp, Homo sapien
ttcatttgaatataccaaaagggttccttcagt

SEQ ID NO: 336032 - DNA, 33 bp, Homo sapien
ttcatttgaatataccgaaagggttccttcagt

SEQ ID NO: 336033 - DNA, 33 bp, Homo sapien
ttaaaaccattttgcaaaaactattgtcacctg

SEQ ID NO: 336034 - DNA, 33 bp, Homo sapien
ttaaaaccattttgcagaaactattgtcacctg

SEQ ID NO: 336035 - DNA, 33 bp, Homo sapien
actgtatagacttaataaacttgtgaatctgtg

SEQ ID NO: 336036 - DNA, 33 bp, Homo sapien
actgtatagacttaatgaacttgtgaatctgtg

SEQ ID NO: 336037 - DNA, 33 bp, Homo sapien
aatgatgttaaacacgcatgtgaaaagtatgaa

SEQ ID NO: 336038 - DNA, 33 bp, Homo sapien
aatgatgttaaacacgtatgtgaaaagtatgaa

SEQ ID NO: 336039 - DNA, 33 bp, Homo sapien
tcaggtctcactttcacgctgaaaacctctcgg

SEQ ID NO: 336040 - DNA, 33 bp, Homo sapien
tcaggtctcactttcatgctgaaaacctctcgg

SEQ ID NO: 336041 - DNA, 33 bp, Homo sapien
aagcccttcctctgcaatacgctggaagtgaac

SEQ ID NO: 336042 - DNA, 33 bp, Homo sapien
aagcccttcctctgcagtacgctggaagtgaac

SEQ ID NO: 336043 - DNA, 33 bp, Homo sapien
ttgaggagacagagaaaaaataaggatagaaaa

SEQ ID NO: 336044 - DNA, 33 bp, Homo sapien
ttgaggagacagagaacaaataaggatagaaaa

SEQ ID NO: 336045 - DNA, 33 bp, Homo sapien
tcatcacagttggaaacgtttaagccaaatcat

SEQ ID NO: 336046 - DNA, 33 bp, Homo sapien
tcatcacagttggaaatgtttaagccaaatcat

SEQ ID NO: 336047 - DNA, 33 bp, Homo sapien
tcgtattatgtaatgcactgaatgaagcaggga

SEQ ID NO: 336048 - DNA, 33 bp, Homo sapien
tcgtattatgtaatgcgctgaatgaagcaggga

SEQ ID NO: 336049 - DNA, 33 bp, Homo sapien
aatgtacagctggtgacagtctatttagaattt

SEQ ID NO: 336050 - DNA, 33 bp, Homo sapien
aatgtacagctggtgatagtctatttagaattt

SEQ ID NO: 336051 - DNA, 33 bp, Homo sapien
ctgttgttaatggaaaattgcaagctcatgcag

SEQ ID NO: 336052 - DNA, 33 bp, Homo sapien
ctgttgttaatggaaagttgcaagctcatgcag

SEQ ID NO: 336053 - DNA, 33 bp, Homo sapien
ctaggactacagaaaaaattgttgttagaggca

SEQ ID NO: 336054 - DNA, 33 bp, Homo sapien
ctaggactacagaaaacattgttgttagaggca

SEQ ID NO: 336055 - DNA, 33 bp, Homo sapien
taaatggcacataagaaaagactttacattaaa

SEQ ID NO: 336056 - DNA, 33 bp, Homo sapien
taaatggcacataagagaagactttacattaaa

SEQ ID NO: 336057 - DNA, 33 bp, Homo sapien
aactttgccatacacaccttccttttccaaatg

SEQ ID NO: 336058 - DNA, 33 bp, Homo sapien
aactttgccatacacatcttccttttccaaatg

SEQ ID NO: 336059 - DNA, 33 bp, Homo sapien
tttttatacaaggcaaatgtaagtaatattatc

SEQ ID NO: 336060 - DNA, 33 bp, Homo sapien
tttttatacaaggcaagtgtaagtaatattatc

SEQ ID NO: 336061 - DNA, 33 bp, Homo sapien
gaactaaatcaagaaaattggctacattttaga

SEQ ID NO: 336062 - DNA, 33 bp, Homo sapien
gaactaaatcaagaaacttggctacattttaga

SEQ ID NO: 336063 - DNA, 33 bp, Homo sapien
gttaaaaagccaactaggggtactatgctcagg

SEQ ID NO: 336064 - DNA, 33 bp, Homo sapien
gttaaaaagccaactatgggtactatgctcagg

SEQ ID NO: 336065 - DNA, 33 bp, Homo sapien
caatgggtactcacggacataacgatggcagca

SEQ ID NO: 336066 - DNA, 33 bp, Homo sapien
caatgggtactcacgggcataacgatggcagca

SEQ ID NO: 336067 - DNA, 33 bp, Homo sapien
aacatttggagaaagaaaactatatatggcttc

SEQ ID NO: 336068 - DNA, 33 bp, Homo sapien
aacatttggagaaagagaactatatatggcttc

SEQ ID NO: 336069 - DNA, 33 bp, Homo sapien
agattcccagacaaaaatgttcgtgttattttg

SEQ ID NO: 336070 - DNA, 33 bp, Homo sapien
agattcccagacaaaactgttcgtgttattttg

SEQ ID NO: 336071 - DNA, 33 bp, Homo sapien
gaggactgatgattaccggtaggaactatagcc

SEQ ID NO: 336072 - DNA, 33 bp, Homo sapien
gaggactgatgattactggtaggaactatagcc

SEQ ID NO: 336073 - DNA, 33 bp, Homo sapien
cttcttccacagttagacaatagagccaggctg

SEQ ID NO: 336074 - DNA, 33 bp, Homo sapien
cttcttccacagttaggcaatagagccaggctg

SEQ ID NO: 336075 - DNA, 33 bp, Homo sapien
taagaaaatgagatttaaaaaacgtgagcagtt

SEQ ID NO: 336076 - DNA, 33 bp, Homo sapien
taagaaaatgagattttaaaaacgtgagcagtt

SEQ ID NO: 336077 - DNA, 33 bp, Homo sapien
attccaccgttcaagacgctgcctcccaatcgt

SEQ ID NO: 336078 - DNA, 33 bp, Homo sapien
attccaccgttcaagatgctgcctcccaatcgt

SEQ ID NO: 336079 - DNA, 33 bp, Homo sapien
gagagaaagctcaaccacttggccatgactcag

SEQ ID NO: 336080 - DNA, 33 bp, Homo sapien
gagagaaagctcaacctcttggccatgactcag

SEQ ID NO: 336081 - DNA, 33 bp, Homo sapien
atcctggctttgtagaccatctttaatgttcct

SEQ ID NO: 336082 - DNA, 33 bp, Homo sapien
atcctggctttgtagagcatctttaatgttcct

SEQ ID NO: 336083 - DNA, 33 bp, Homo sapien
ctaataacttaacgagcaaaacatagagttagc

SEQ ID NO: 336084 - DNA, 33 bp, Homo sapien
ctaataacttaacgagtaaaacatagagttagc

SEQ ID NO: 336085 - DNA, 33 bp, Homo sapien
gacatacaaatgaataataagtacatgaaaaga

SEQ ID NO: 336086 - DNA, 33 bp, Homo sapien
gacatacaaatgaatagtaagtacatgaaaaga

SEQ ID NO: 336087 - DNA, 33 bp, Homo sapien
gtaatcccaaggtggcaaaatgcactgaagttt

SEQ ID NO: 336088 - DNA, 33 bp, Homo sapien
gtaatcccaaggtggcgaaatgcactgaagttt

SEQ ID NO: 336089 - DNA, 33 bp, Homo sapien
ttctgacctttgaagaaatggaaaactcacttt

SEQ ID NO: 336090 - DNA, 33 bp, Homo sapien
ttctgacctttgaagagatggaaaactcacttt

SEQ ID NO: 336091 - DNA, 33 bp, Homo sapien
ataatttatttattacgatatcaacgtacctgt

SEQ ID NO: 336092 - DNA, 33 bp, Homo sapien
ataatttatttattactatatcaacgtacctgt

SEQ ID NO: 336093 - DNA, 33 bp, Homo sapien
cattacctggaatgaaatgagactggaattata

SEQ ID NO: 336094 - DNA, 33 bp, Homo sapien
cattacctggaatgaactgagactggaattata

SEQ ID NO: 336095 - DNA, 33 bp, Homo sapien
tctgtaggtaaacaaaatccttctaccacacaa

SEQ ID NO: 336096 - DNA, 33 bp, Homo sapien
tctgtaggtaaacaaagtccttctaccacacaa

SEQ ID NO: 336097 - DNA, 33 bp, Homo sapien
cttccctgtcactctccccacttctaggtcgcc

SEQ ID NO: 336098 - DNA, 33 bp, Homo sapien
cttccctgtcactctctccacttctaggtcgcc

SEQ ID NO: 336099 - DNA, 33 bp, Homo sapien
aaaagcatcatgggccagaaaaatcgtggtaaa

SEQ ID NO: 336100 - DNA, 33 bp, Homo sapien
aaaagcatcatgggccggaaaaatcgtggtaaa

SEQ ID NO: 336101 - DNA, 33 bp, Homo sapien
cacactttgagcaataagacatctataaggcca

SEQ ID NO: 336102 - DNA, 33 bp, Homo sapien
cacactttgagcaataggacatctataaggcca

SEQ ID NO: 336103 - DNA, 33 bp, Homo sapien
cttcaggggcaataacacacatagagctgtcat

SEQ ID NO: 336104 - DNA, 33 bp, Homo sapien
cttcaggggcaataacgcacatagagctgtcat

SEQ ID NO: 336105 - DNA, 33 bp, Homo sapien
ctataatgcacttagaaagtataaagctataca

SEQ ID NO: 336106 - DNA, 33 bp, Homo sapien
ctataatgcacttagagagtataaagctataca

SEQ ID NO: 336107 - DNA, 33 bp, Homo sapien
taatacagatgcttcaatagctttaattatagc

SEQ ID NO: 336108 - DNA, 33 bp, Homo sapien
taatacagatgcttcagtagctttaattatagc

SEQ ID NO: 336109 - DNA, 33 bp, Homo sapien
gtgtcaagtcttcaacagaattgtgattgatgc

SEQ ID NO: 336110 - DNA, 33 bp, Homo sapien
gtgtcaagtcttcaacggaattgtgattgatgc

SEQ ID NO: 336111 - DNA, 33 bp, Homo sapien
cttaagctaggttctgaagaatattcccatcag

SEQ ID NO: 336112 - DNA, 33 bp, Homo sapien
cttaagctaggttctggagaatattcccatcag

SEQ ID NO: 336113 - DNA, 33 bp, Homo sapien
ttgacaactatgccagaaataaccagtgatgga

SEQ ID NO: 336114 - DNA, 33 bp, Homo sapien
ttgacaactatgccaggaataaccagtgatgga

SEQ ID NO: 336115 - DNA, 33 bp, Homo sapien
ttttcttatacggacactctttggccgagcatg

SEQ ID NO: 336116 - DNA, 33 bp, Homo sapien
ttttcttatacggacattctttggccgagcatg

SEQ ID NO: 336117 - DNA, 33 bp, Homo sapien
aggtaaggggtagatacgatacccaggatgaat

SEQ ID NO: 336118 - DNA, 33 bp, Homo sapien
aggtaaggggtagatatgatacccaggatgaat

SEQ ID NO: 336119 - DNA, 33 bp, Homo sapien
agtcacagactctttacacaatgtggtggccat

SEQ ID NO: 336120 - DNA, 33 bp, Homo sapien
agtcacagactctttatacaatgtggtggccat

SEQ ID NO: 336121 - DNA, 33 bp, Homo sapien
cttgctttattagtagcatcttcaaaaaacaaa

SEQ ID NO: 336122 - DNA, 33 bp, Homo sapien
cttgctttattagtagtatcttcaaaaaacaaa

SEQ ID NO: 336123 - DNA, 33 bp, Homo sapien
taaagatggtaaagccaaaggaatgttgaaata

SEQ ID NO: 336124 - DNA, 33 bp, Homo sapien
taaagatggtaaagccgaaggaatgttgaaata

SEQ ID NO: 336125 - DNA, 33 bp, Homo sapien
ctccaggtaccatctacatgtgtcaatcatcag

SEQ ID NO: 336126 - DNA, 33 bp, Homo sapien
ctccaggtaccatctatatgtgtcaatcatcag

SEQ ID NO: 336127 - DNA, 33 bp, Homo sapien
tatatgctagaagcagaaaatgctaccaaataa

SEQ ID NO: 336128 - DNA, 33 bp, Homo sapien
tatatgctagaagcaggaaatgctaccaaataa

SEQ ID NO: 336129 - DNA, 33 bp, Homo sapien
cacatacctggcttacaatattgactttgtaag

SEQ ID NO: 336130 - DNA, 33 bp, Homo sapien
cacatacctggcttacgatattgactttgtaag

SEQ ID NO: 336131 - DNA, 33 bp, Homo sapien
ggatttcattgaaaagccattgcaaacaaacga

SEQ ID NO: 336132 - DNA, 33 bp, Homo sapien
ggatttcattgaaaagtcattgcaaacaaacga

SEQ ID NO: 336133 - DNA, 33 bp, Homo sapien
catttattctgtgaaacggcctgaaatagctgg

SEQ ID NO: 336134 - DNA, 33 bp, Homo sapien
catttattctgtgaaatggcctgaaatagctgg

SEQ ID NO: 336135 - DNA, 33 bp, Homo sapien
tgagactccatcaaaagaatcagattttacaat

SEQ ID NO: 336136 - DNA, 33 bp, Homo sapien
tgagactccatcaaaataatcagattttacaat

SEQ ID NO: 336137 - DNA, 33 bp, Homo sapien
gcctaataaacaacaccactgtcactgccaatg

SEQ ID NO: 336138 - DNA, 33 bp, Homo sapien
gcctaataaacaacactactgtcactgccaatg

SEQ ID NO: 336139 - DNA, 33 bp, Homo sapien
ggtgcgccgaaggcaactagccgccatgtcagt

SEQ ID NO: 336140 - DNA, 33 bp, Homo sapien
ggtgcgccgaaggcaattagccgccatgtcagt

SEQ ID NO: 336141 - DNA, 33 bp, Homo sapien
ataagtgagaatagctcagaaagagagagaaag

SEQ ID NO: 336142 - DNA, 33 bp, Homo sapien
ataagtgagaatagcttagaaagagagagaaag

SEQ ID NO: 336143 - DNA, 33 bp, Homo sapien
gtaataaaaacaatggaaaattcagtcgacttt

SEQ ID NO: 336144 - DNA, 33 bp, Homo sapien
gtaataaaaacaatggcaaattcagtcgacttt

SEQ ID NO: 336145 - DNA, 33 bp, Homo sapien
tttaaaatgtaactgaaaatcctaaattgagct

SEQ ID NO: 336146 - DNA, 33 bp, Homo sapien
tttaaaatgtaactgagaatcctaaattgagct

SEQ ID NO: 336147 - DNA, 33 bp, Homo sapien
gtcaccatattcagagccattttaaagtgtgtg

SEQ ID NO: 336148 - DNA, 33 bp, Homo sapien
gtcaccatattcagaggcattttaaagtgtgtg

SEQ ID NO: 336149 - DNA, 33 bp, Homo sapien
ttgcagctgtgggaacaattgggccgagcagag

SEQ ID NO: 336150 - DNA, 33 bp, Homo sapien
ttgcagctgtgggaacgattgggccgagcagag

SEQ ID NO: 336151 - DNA, 33 bp, Homo sapien
ttacttgtattgttgcagagtagtattccttta

SEQ ID NO: 336152 - DNA, 33 bp, Homo sapien
ttacttgtattgttgcggagtagtattccttta

SEQ ID NO: 336153 - DNA, 33 bp, Homo sapien
tgatactgggagtaccaggagtctaggatcacc

SEQ ID NO: 336154 - DNA, 33 bp, Homo sapien
tgatactgggagtacccggagtctaggatcacc

SEQ ID NO: 336155 - DNA, 33 bp, Homo sapien
tgaagataaatccaaacggctctataactacct

SEQ ID NO: 336156 - DNA, 33 bp, Homo sapien
tgaagataaatccaaatggctctataactacct

SEQ ID NO: 336157 - DNA, 33 bp, Homo sapien
actcacattttttttacacagaatgaagtaaat

SEQ ID NO: 336158 - DNA, 33 bp, Homo sapien
actcacattttttttatacagaatgaagtaaat

SEQ ID NO: 336159 - DNA, 33 bp, Homo sapien
cacaaaagtacacacacaaaaaaggcaaaaaat

SEQ ID NO: 336160 - DNA, 33 bp, Homo sapien
cacaaaagtacacacataaaaaaggcaaaaaat

SEQ ID NO: 336161 - DNA, 33 bp, Homo sapien
attctaaataaaatgactaccgaaacatgacac

SEQ ID NO: 336162 - DNA, 33 bp, Homo sapien
attctaaataaaatgattaccgaaacatgacac

SEQ ID NO: 336163 - DNA, 33 bp, Homo sapien
gtgtgtaatgagtgcacgttatctttctttgac

SEQ ID NO: 336164 - DNA, 33 bp, Homo sapien
gtgtgtaatgagtgcatgttatctttctttgac

SEQ ID NO: 336165 - DNA, 33 bp, Homo sapien
ctgtgaagcctgcaaccgtgttggcatccagac

SEQ ID NO: 336166 - DNA, 33 bp, Homo sapien
ctgtgaagcctgcaactgtgttggcatccagac

SEQ ID NO: 336167 - DNA, 33 bp, Homo sapien
gattatctgggtagtacaggccataaataaata

SEQ ID NO: 336168 - DNA, 33 bp, Homo sapien
gattatctgggtagtataggccataaataaata

SEQ ID NO: 336169 - DNA, 33 bp, Homo sapien
ttcaccactccattcacgtacctagacaagaca

SEQ ID NO: 336170 - DNA, 33 bp, Homo sapien
ttcaccactccattcaggtacctagacaagaca

SEQ ID NO: 336171 - DNA, 33 bp, Homo sapien
gcagatcagagttaacaaataagttcaataaat

SEQ ID NO: 336172 - DNA, 33 bp, Homo sapien
gcagatcagagttaacgaataagttcaataaat

SEQ ID NO: 336173 - DNA, 33 bp, Homo sapien
catatggcctgctcaacgaagaaactggataat

SEQ ID NO: 336174 - DNA, 33 bp, Homo sapien
catatggcctgctcaaggaagaaactggataat

SEQ ID NO: 336175 - DNA, 33 bp, Homo sapien
aagagaatcttgaaaccgctgcaaaaatatgtt

SEQ ID NO: 336176 - DNA, 33 bp, Homo sapien
aagagaatcttgaaactgctgcaaaaatatgtt

SEQ ID NO: 336177 - DNA, 33 bp, Homo sapien
tagcaaatcaggtctaccaggtattaatcacag

SEQ ID NO: 336178 - DNA, 33 bp, Homo sapien
tagcaaatcaggtctatcaggtattaatcacag

SEQ ID NO: 336179 - DNA, 33 bp, Homo sapien
aggagtaccaaccttacgttgctaacactgaga

SEQ ID NO: 336180 - DNA, 33 bp, Homo sapien
aggagtaccaaccttatgttgctaacactgaga

SEQ ID NO: 336181 - DNA, 33 bp, Homo sapien
tataccagcaggaaaacgctaataccaggtcta

SEQ ID NO: 336182 - DNA, 33 bp, Homo sapien
tataccagcaggaaaatgctaataccaggtcta

SEQ ID NO: 336183 - DNA, 33 bp, Homo sapien
aaatcttcaatgataacaacacttctgtttttc

SEQ ID NO: 336184 - DNA, 33 bp, Homo sapien
aaatcttcaatgataagaacacttctgtttttc

SEQ ID NO: 336185 - DNA, 33 bp, Homo sapien
ctgtaaacttgaactcaaaggcttaagtgatcc

SEQ ID NO: 336186 - DNA, 33 bp, Homo sapien
ctgtaaacttgaactccaaggcttaagtgatcc

SEQ ID NO: 336187 - DNA, 33 bp, Homo sapien
agttcagatgaaatgacggtaccagggtaggaa

SEQ ID NO: 336188 - DNA, 33 bp, Homo sapien
agttcagatgaaatgatggtaccagggtaggaa

SEQ ID NO: 336189 - DNA, 33 bp, Homo sapien
caccagaagggtaaaactagaatgcaacaaagt

SEQ ID NO: 336190 - DNA, 33 bp, Homo sapien
caccagaagggtaaaagtagaatgcaacaaagt

SEQ ID NO: 336191 - DNA, 33 bp, Homo sapien
gaggccaagaaatgcaagttcaaaaaggaacat

SEQ ID NO: 336192 - DNA, 33 bp, Homo sapien
gaggccaagaaatgcaggttcaaaaaggaacat

SEQ ID NO: 336193 - DNA, 33 bp, Homo sapien
tcccactattttcagactaaagattggatttta

SEQ ID NO: 336194 - DNA, 33 bp, Homo sapien
tcccactattttcagattaaagattggatttta

SEQ ID NO: 336195 - DNA, 33 bp, Homo sapien
agaattcaactcgaaggatagtgaggaaaatgc

SEQ ID NO: 336196 - DNA, 33 bp, Homo sapien
agaattcaactcgaagtatagtgaggaaaatgc

SEQ ID NO: 336197 - DNA, 33 bp, Homo sapien
aggaattcttatgcaaatctaaactttcagctc

SEQ ID NO: 336198 - DNA, 33 bp, Homo sapien
aggaattcttatgcaattctaaactttcagctc

SEQ ID NO: 336199 - DNA, 33 bp, Homo sapien
ttcatattttctgccagcattcattggttttaa

SEQ ID NO: 336200 - DNA, 33 bp, Homo sapien
ttcatattttctgccatcattcattggttttaa

SEQ ID NO: 336201 - DNA, 33 bp, Homo sapien
atgctgagtaaaaaagcctagacaaaaagaagt

SEQ ID NO: 336202 - DNA, 33 bp, Homo sapien
atgctgagtaaaaaaggctagacaaaaagaagt

SEQ ID NO: 336203 - DNA, 33 bp, Homo sapien
tttctaccatgagttacgtgggtttagaaagtt

SEQ ID NO: 336204 - DNA, 33 bp, Homo sapien
tttctaccatgagttatgtgggtttagaaagtt

SEQ ID NO: 336205 - DNA, 33 bp, Homo sapien
gttttggttaattcaccggtcaattcagttgaa

SEQ ID NO: 336206 - DNA, 33 bp, Homo sapien
gttttggttaattcactggtcaattcagttgaa

SEQ ID NO: 336207 - DNA, 33 bp, Homo sapien
agctacgtatgtacctcaggacagtgcttcatg

SEQ ID NO: 336208 - DNA, 33 bp, Homo sapien
agctacgtatgtacctgaggacagtgcttcatg

SEQ ID NO: 336209 - DNA, 33 bp, Homo sapien
tgatgtcttggatccaactgaaaataagtatgt

SEQ ID NO: 336210 - DNA, 33 bp, Homo sapien
tgatgtcttggatccagctgaaaataagtatgt

SEQ ID NO: 336211 - DNA, 33 bp, Homo sapien
cagtctaggaaatatgcaaggtaaagttgtttt

SEQ ID NO: 336212 - DNA, 33 bp, Homo sapien
cagtctaggaaatatggaaggtaaagttgtttt

SEQ ID NO: 336213 - DNA, 33 bp, Homo sapien
agtggttagctcaaacaaaataatgtatatgga

SEQ ID NO: 336214 - DNA, 33 bp, Homo sapien
agtggttagctcaaacgaaataatgtatatgga

SEQ ID NO: 336215 - DNA, 33 bp, Homo sapien
attcagtgagttaaaacgggaagatatttttca

SEQ ID NO: 336216 - DNA, 33 bp, Homo sapien
attcagtgagttaaaatgggaagatatttttca

SEQ ID NO: 336217 - DNA, 33 bp, Homo sapien
tatgtccagaattataaggctgttaatgtgtct

SEQ ID NO: 336218 - DNA, 33 bp, Homo sapien
tatgtccagaattatatggctgttaatgtgtct

SEQ ID NO: 336219 - DNA, 33 bp, Homo sapien
aaggcaactggcattacaagatgcctcgctgtc

SEQ ID NO: 336220 - DNA, 33 bp, Homo sapien
aaggcaactggcattagaagatgcctcgctgtc

SEQ ID NO: 336221 - DNA, 33 bp, Homo sapien
cctgtttacttcttgcgccaggaaaaagtctga

SEQ ID NO: 336222 - DNA, 33 bp, Homo sapien
cctgtttacttcttgctccaggaaaaagtctga

SEQ ID NO: 336223 - DNA, 33 bp, Homo sapien
aatgtggcaattctagaatatcagtaggaccaa

SEQ ID NO: 336224 - DNA, 33 bp, Homo sapien
aatgtggcaattctaggatatcagtaggaccaa

SEQ ID NO: 336225 - DNA, 33 bp, Homo sapien
cacaagttcaaaaaatcattccagtaaatcacc

SEQ ID NO: 336226 - DNA, 33 bp, Homo sapien
cacaagttcaaaaaatgattccagtaaatcacc

SEQ ID NO: 336227 - DNA, 33 bp, Homo sapien
tacctaagtaaaaccaaacactgatttaaagaa

SEQ ID NO: 336228 - DNA, 33 bp, Homo sapien
tacctaagtaaaaccagacactgatttaaagaa

SEQ ID NO: 336229 - DNA, 33 bp, Homo sapien
tgggctaaataatccagtgccaacacttgatgc

SEQ ID NO: 336230 - DNA, 33 bp, Homo sapien
tgggctaaataatccattgccaacacttgatgc

SEQ ID NO: 336231 - DNA, 33 bp, Homo sapien
aagagaaagagcttacaagcaagcgcacttgtg

SEQ ID NO: 336232 - DNA, 33 bp, Homo sapien
aagagaaagagcttacgagcaagcgcacttgtg

SEQ ID NO: 336233 - DNA, 33 bp, Homo sapien
actaagagaaaatgaaagtaaagcaaataagga

SEQ ID NO: 336234 - DNA, 33 bp, Homo sapien
actaagagaaaatgaacgtaaagcaaataagga

SEQ ID NO: 336235 - DNA, 33 bp, Homo sapien
gtacctggcactttagcaggggctcagtaaaga

SEQ ID NO: 336236 - DNA, 33 bp, Homo sapien
gtacctggcactttagtaggggctcagtaaaga

SEQ ID NO: 336237 - DNA, 33 bp, Homo sapien
gtccaaacttagcaccacttacacggctaccag

SEQ ID NO: 336238 - DNA, 33 bp, Homo sapien
gtccaaacttagcacctcttacacggctaccag

SEQ ID NO: 336239 - DNA, 33 bp, Homo sapien
aaagcaaatataataacggcaacaggaaaattt

SEQ ID NO: 336240 - DNA, 33 bp, Homo sapien
aaagcaaatataataagggcaacaggaaaattt

SEQ ID NO: 336241 - DNA, 33 bp, Homo sapien
tcctgaaaagaatgcacaatagctgcgtcagat

SEQ ID NO: 336242 - DNA, 33 bp, Homo sapien
tcctgaaaagaatgcagaatagctgcgtcagat

SEQ ID NO: 336243 - DNA, 33 bp, Homo sapien
tttctcataggcatccaagaacagataactccc

SEQ ID NO: 336244 - DNA, 33 bp, Homo sapien
tttctcataggcatccgagaacagataactccc

SEQ ID NO: 336245 - DNA, 33 bp, Homo sapien
tggtttctgtagacaacaaattgtagatgaaat

SEQ ID NO: 336246 - DNA, 33 bp, Homo sapien
tggtttctgtagacaataaattgtagatgaaat

SEQ ID NO: 336247 - DNA, 33 bp, Homo sapien
gaatcctactatagacggaatttgatggtgatg

SEQ ID NO: 336248 - DNA, 33 bp, Homo sapien
gaatcctactatagactgaatttgatggtgatg

SEQ ID NO: 336249 - DNA, 33 bp, Homo sapien
gtctagtctcaacctcacagtgatgtactattg

SEQ ID NO: 336250 - DNA, 33 bp, Homo sapien
gtctagtctcaacctcgcagtgatgtactattg

SEQ ID NO: 336251 - DNA, 33 bp, Homo sapien
actaaaataggaagacagactataaataagcca

SEQ ID NO: 336252 - DNA, 33 bp, Homo sapien
actaaaataggaagacggactataaataagcca

SEQ ID NO: 336253 - DNA, 33 bp, Homo sapien
aataaagtcttcataaagcccctgaagaattcc

SEQ ID NO: 336254 - DNA, 33 bp, Homo sapien
aataaagtcttcataaggcccctgaagaattcc

SEQ ID NO: 336255 - DNA, 33 bp, Homo sapien
tgtagactaacatctaaatttctgtcatgtgct

SEQ ID NO: 336256 - DNA, 33 bp, Homo sapien
tgtagactaacatctacatttctgtcatgtgct

SEQ ID NO: 336257 - DNA, 33 bp, Homo sapien
acctgaattaaggcaacggcaggagaacagaaa

SEQ ID NO: 336258 - DNA, 33 bp, Homo sapien
acctgaattaaggcaatggcaggagaacagaaa

SEQ ID NO: 336259 - DNA, 33 bp, Homo sapien
atgaaggtgaagagaaataagttgaagtcaaga

SEQ ID NO: 336260 - DNA, 33 bp, Homo sapien
atgaaggtgaagagaagtaagttgaagtcaaga

SEQ ID NO: 336261 - DNA, 33 bp, Homo sapien
ccaagacaactgtcaccaggtcgtgttttccca

SEQ ID NO: 336262 - DNA, 33 bp, Homo sapien
ccaagacaactgtcactaggtcgtgttttccca

SEQ ID NO: 336263 - DNA, 33 bp, Homo sapien
atctttatcagtttcacgtatagtatctctgaa

SEQ ID NO: 336264 - DNA, 33 bp, Homo sapien
atctttatcagtttcatgtatagtatctctgaa

SEQ ID NO: 336265 - DNA, 33 bp, Homo sapien
gggttaactgttcatgcaagtgtaataatagtc

SEQ ID NO: 336266 - DNA, 33 bp, Homo sapien
gggttaactgttcatggaagtgtaataatagtc

SEQ ID NO: 336267 - DNA, 33 bp, Homo sapien
acagactgaaaattcgaacttcagggcacttct

SEQ ID NO: 336268 - DNA, 33 bp, Homo sapien
acagactgaaaattcggacttcagggcacttct

SEQ ID NO: 336269 - DNA, 33 bp, Homo sapien
gcaaagaaaagccctacgtgtcttccatttcag

SEQ ID NO: 336270 - DNA, 33 bp, Homo sapien
gcaaagaaaagccctatgtgtcttccatttcag

SEQ ID NO: 336271 - DNA, 33 bp, Homo sapien
gagtagttggtgaaacgcaggtgaaagttattg

SEQ ID NO: 336272 - DNA, 33 bp, Homo sapien
gagtagttggtgaaactcaggtgaaagttattg

SEQ ID NO: 336273 - DNA, 33 bp, Homo sapien
tttttaatgaaaattgcaattccagaactagga

SEQ ID NO: 336274 - DNA, 33 bp, Homo sapien
tttttaatgaaaattgtaattccagaactagga

SEQ ID NO: 336275 - DNA, 33 bp, Homo sapien
aggctatactatttgaacaatgtaatggtggac

SEQ ID NO: 336276 - DNA, 33 bp, Homo sapien
aggctatactatttgagcaatgtaatggtggac

SEQ ID NO: 336277 - DNA, 33 bp, Homo sapien
atcgtcagccaatgaaaggtaactgaagccaaa

SEQ ID NO: 336278 - DNA, 33 bp, Homo sapien
atcgtcagccaatgaagggtaactgaagccaaa

SEQ ID NO: 336279 - DNA, 33 bp, Homo sapien
accatggtccagagaccgcacaaaactttaact

SEQ ID NO: 336280 - DNA, 33 bp, Homo sapien
accatggtccagagactgcacaaaactttaact

SEQ ID NO: 336281 - DNA, 33 bp, Homo sapien
ttatgtatatcctgtcccaatttgtctgttcac

SEQ ID NO: 336282 - DNA, 33 bp, Homo sapien
ttatgtatatcctgtctcaatttgtctgttcac

SEQ ID NO: 336283 - DNA, 33 bp, Homo sapien
atcctgtaaatttaaacaggagtgcctctcact

SEQ ID NO: 336284 - DNA, 33 bp, Homo sapien
atcctgtaaatttaaataggagtgcctctcact

SEQ ID NO: 336285 - DNA, 33 bp, Homo sapien
atagctcaagtatcaacagttcttaaagctaac

SEQ ID NO: 336286 - DNA, 33 bp, Homo sapien
atagctcaagtatcaagagttcttaaagctaac

SEQ ID NO: 336287 - DNA, 33 bp, Homo sapien
aacgagtgtcaatctacaccgcggaacgacttt

SEQ ID NO: 336288 - DNA, 33 bp, Homo sapien
aacgagtgtcaatctataccgcggaacgacttt

SEQ ID NO: 336289 - DNA, 33 bp, Homo sapien
tcatactcttacttaaacccttggtacaccaca

SEQ ID NO: 336290 - DNA, 33 bp, Homo sapien
tcatactcttacttaagcccttggtacaccaca

SEQ ID NO: 336291 - DNA, 33 bp, Homo sapien
ctacaatttttgtccaggtctacaaatgcaaca

SEQ ID NO: 336292 - DNA, 33 bp, Homo sapien
ctacaatttttgtccatgtctacaaatgcaaca

SEQ ID NO: 336293 - DNA, 33 bp, Homo sapien
agcaattcgttttacccgaagagttagcctata

SEQ ID NO: 336294 - DNA, 33 bp, Homo sapien
agcaattcgttttacctgaagagttagcctata

SEQ ID NO: 336295 - DNA, 33 bp, Homo sapien
tctagagcaaggcttcccatacttaaatgtaca

SEQ ID NO: 336296 - DNA, 33 bp, Homo sapien
tctagagcaaggcttctcatacttaaatgtaca

SEQ ID NO: 336297 - DNA, 33 bp, Homo sapien
agcgaattggtcctatcagaaacaaggccttga

SEQ ID NO: 336298 - DNA, 33 bp, Homo sapien
agcgaattggtcctattagaaacaaggccttga

SEQ ID NO: 336299 - DNA, 33 bp, Homo sapien
gaactggacaaaggaacatggagaagcgtaaga

SEQ ID NO: 336300 - DNA, 33 bp, Homo sapien
gaactggacaaaggaagatggagaagcgtaaga

SEQ ID NO: 336301 - DNA, 33 bp, Homo sapien
actctgaaataaaccacgtagttcgaaagttgc

SEQ ID NO: 336302 - DNA, 33 bp, Homo sapien
actctgaaataaaccatgtagttcgaaagttgc

SEQ ID NO: 336303 - DNA, 33 bp, Homo sapien
gtccctctttgtgaaacgtctgattatctgcat

SEQ ID NO: 336304 - DNA, 33 bp, Homo sapien
gtccctctttgtgaaatgtctgattatctgcat

SEQ ID NO: 336305 - DNA, 33 bp, Homo sapien
gccctaaagggtcttaactgagcagcaaaaact

SEQ ID NO: 336306 - DNA, 33 bp, Homo sapien
gccctaaagggtcttatctgagcagcaaaaact

SEQ ID NO: 336307 - DNA, 33 bp, Homo sapien
tgcttcctcttattcaaaattggtatgccatgt

SEQ ID NO: 336308 - DNA, 33 bp, Homo sapien
tgcttcctcttattcacaattggtatgccatgt

SEQ ID NO: 336309 - DNA, 33 bp, Homo sapien
agtctgggcagaagtacatgactgtcattccaa

SEQ ID NO: 336310 - DNA, 33 bp, Homo sapien
agtctgggcagaagtatatgactgtcattccaa

SEQ ID NO: 336311 - DNA, 33 bp, Homo sapien
tgattcttcctacaaagaaatttctaaccagca

SEQ ID NO: 336312 - DNA, 33 bp, Homo sapien
tgattcttcctacaaataaatttctaaccagca

SEQ ID NO: 336313 - DNA, 33 bp, Homo sapien
caagtgtggagcaacacgtaactaaattttaat

SEQ ID NO: 336314 - DNA, 33 bp, Homo sapien
caagtgtggagcaacaggtaactaaattttaat

SEQ ID NO: 336315 - DNA, 33 bp, Homo sapien
tgaattgggagtttaacacaatagaggcacatc

SEQ ID NO: 336316 - DNA, 33 bp, Homo sapien
tgaattgggagtttaatacaatagaggcacatc

SEQ ID NO: 336317 - DNA, 33 bp, Homo sapien
tcatgctctgaaagaccgctatattagttcgtt

SEQ ID NO: 336318 - DNA, 33 bp, Homo sapien
tcatgctctgaaagactgctatattagttcgtt

SEQ ID NO: 336319 - DNA, 33 bp, Homo sapien
tgactagaagtccacacgagtatgcaagggaat

SEQ ID NO: 336320 - DNA, 33 bp, Homo sapien
tgactagaagtccacaggagtatgcaagggaat

SEQ ID NO: 336321 - DNA, 33 bp, Homo sapien
atgcactcttccttcaggccattttcctcacga

SEQ ID NO: 336322 - DNA, 33 bp, Homo sapien
atgcactcttccttcatgccattttcctcacga

SEQ ID NO: 336323 - DNA, 33 bp, Homo sapien
aatacaattagcgatacgaagaggagaaaaaaa

SEQ ID NO: 336324 - DNA, 33 bp, Homo sapien
aatacaattagcgatatgaagaggagaaaaaaa

SEQ ID NO: 336325 - DNA, 33 bp, Homo sapien
atctggtagaagtgaacagattgaaaattcaag

SEQ ID NO: 336326 - DNA, 33 bp, Homo sapien
atctggtagaagtgaagagattgaaaattcaag

SEQ ID NO: 336327 - DNA, 33 bp, Homo sapien
gaggagataagtatgaaaaatagtctggaggaa

SEQ ID NO: 336328 - DNA, 33 bp, Homo sapien
gaggagataagtatgagaaatagtctggaggaa

SEQ ID NO: 336329 - DNA, 33 bp, Homo sapien
gtgggccaagatgtgaaatatacgaagctcctt

SEQ ID NO: 336330 - DNA, 33 bp, Homo sapien
gtgggccaagatgtgacatatacgaagctcctt

SEQ ID NO: 336331 - DNA, 33 bp, Homo sapien
tttgcactatttggaccactgatttttccattt

SEQ ID NO: 336332 - DNA, 33 bp, Homo sapien
tttgcactatttggactactgatttttccattt

SEQ ID NO: 336333 - DNA, 33 bp, Homo sapien
atctgtgtgtcttacactgatagccgaggttgt

SEQ ID NO: 336334 - DNA, 33 bp, Homo sapien
atctgtgtgtcttacattgatagccgaggttgt

SEQ ID NO: 336335 - DNA, 33 bp, Homo sapien
caggccactttattcaagtccaagtggcttctt

SEQ ID NO: 336336 - DNA, 33 bp, Homo sapien
caggccactttattcaggtccaagtggcttctt

SEQ ID NO: 336337 - DNA, 33 bp, Homo sapien
agtctattgctccttacgaagacatgacaggga

SEQ ID NO: 336338 - DNA, 33 bp, Homo sapien
agtctattgctccttatgaagacatgacaggga

SEQ ID NO: 336339 - DNA, 33 bp, Homo sapien
tggtggttttacagtccatagatccctatgtga

SEQ ID NO: 336340 - DNA, 33 bp, Homo sapien
tggtggttttacagtctatagatccctatgtga

SEQ ID NO: 336341 - DNA, 33 bp, Homo sapien
tttattttggtgttaccatgtatgcaattttaa

SEQ ID NO: 336342 - DNA, 33 bp, Homo sapien
tttattttggtgttactatgtatgcaattttaa

SEQ ID NO: 336343 - DNA, 33 bp, Homo sapien
atttttaatggttacacagtagtccataacgct

SEQ ID NO: 336344 - DNA, 33 bp, Homo sapien
atttttaatggttacatagtagtccataacgct

SEQ ID NO: 336345 - DNA, 33 bp, Homo sapien
acttctgtggaagctgaaaatggtggcactata

SEQ ID NO: 336346 - DNA, 33 bp, Homo sapien
acttctgtggaagctggaaatggtggcactata

SEQ ID NO: 336347 - DNA, 33 bp, Homo sapien
taaatttatggcttcacagaaactaacagaaaa

SEQ ID NO: 336348 - DNA, 33 bp, Homo sapien
taaatttatggcttcatagaaactaacagaaaa

SEQ ID NO: 336349 - DNA, 33 bp, Homo sapien
attagcctaaatagaacggcctgaaaacaatat

SEQ ID NO: 336350 - DNA, 33 bp, Homo sapien
attagcctaaatagaatggcctgaaaacaatat

SEQ ID NO: 336351 - DNA, 33 bp, Homo sapien
aattgttttttcctccaatggactgtggaccaa

SEQ ID NO: 336352 - DNA, 33 bp, Homo sapien
aattgttttttcctccgatggactgtggaccaa

SEQ ID NO: 336353 - DNA, 33 bp, Homo sapien
cttgttttttcagtgcccttttgagtgtgaaaa

SEQ ID NO: 336354 - DNA, 33 bp, Homo sapien
cttgttttttcagtgctcttttgagtgtgaaaa

SEQ ID NO: 336355 - DNA, 33 bp, Homo sapien
ggagatttctacaacccggagaaggcaacaaac

SEQ ID NO: 336356 - DNA, 33 bp, Homo sapien
ggagatttctacaacctggagaaggcaacaaac

SEQ ID NO: 336357 - DNA, 33 bp, Homo sapien
atctttttcatctggtcaatacagaaagagaat

SEQ ID NO: 336358 - DNA, 33 bp, Homo sapien
atctttttcatctggtgaatacagaaagagaat

SEQ ID NO: 336359 - DNA, 33 bp, Homo sapien
gtaaagagagtaatcaagaagccgaggcttgta

SEQ ID NO: 336360 - DNA, 33 bp, Homo sapien
gtaaagagagtaatcacgaagccgaggcttgta

SEQ ID NO: 336361 - DNA, 33 bp, Homo sapien
aggtgagaaaacaacaatctttcctcatttgga

SEQ ID NO: 336362 - DNA, 33 bp, Homo sapien
aggtgagaaaacaacagtctttcctcatttgga

SEQ ID NO: 336363 - DNA, 33 bp, Homo sapien
tgtagctcccattaacactgatgggagttacgc

SEQ ID NO: 336364 - DNA, 33 bp, Homo sapien
tgtagctcccattaacgctgatgggagttacgc

SEQ ID NO: 336365 - DNA, 33 bp, Homo sapien
tttcctcaaaaaaagacgttctgtagccaggtt

SEQ ID NO: 336366 - DNA, 33 bp, Homo sapien
tttcctcaaaaaaagatgttctgtagccaggtt

SEQ ID NO: 336367 - DNA, 33 bp, Homo sapien
agcaaatttaattctcacgcaaagagtaattaa

SEQ ID NO: 336368 - DNA, 33 bp, Homo sapien
agcaaatttaattctcgcgcaaagagtaattaa

SEQ ID NO: 336369 - DNA, 33 bp, Homo sapien
gagcaaagtatccaaacgcaattgctgccaaaa

SEQ ID NO: 336370 - DNA, 33 bp, Homo sapien
gagcaaagtatccaaatgcaattgctgccaaaa

SEQ ID NO: 336371 - DNA, 33 bp, Homo sapien
agatgtgaactgcacactctgaggacttcttcc

SEQ ID NO: 336372 - DNA, 33 bp, Homo sapien
agatgtgaactgcacattctgaggacttcttcc

SEQ ID NO: 336373 - DNA, 33 bp, Homo sapien
tagataaattgatatacgagacaggcaggctga

SEQ ID NO: 336374 - DNA, 33 bp, Homo sapien
tagataaattgatatatgagacaggcaggctga

SEQ ID NO: 336375 - DNA, 33 bp, Homo sapien
actgctattgatttaaagatgcatttctttgat

SEQ ID NO: 336376 - DNA, 33 bp, Homo sapien
actgctattgatttaacgatgcatttctttgat

SEQ ID NO: 336377 - DNA, 33 bp, Homo sapien
cttagcactggatttaagtctttcttctgtttt

SEQ ID NO: 336378 - DNA, 33 bp, Homo sapien
cttagcactggatttaggtctttcttctgtttt

SEQ ID NO: 336379 - DNA, 33 bp, Homo sapien
ttataaagtgggatcccaactcatgctgaatta

SEQ ID NO: 336380 - DNA, 33 bp, Homo sapien
ttataaagtgggatcctaactcatgctgaatta

SEQ ID NO: 336381 - DNA, 33 bp, Homo sapien
tataatctcaccaccacgtctaaaagtggggct

SEQ ID NO: 336382 - DNA, 33 bp, Homo sapien
tataatctcaccaccatgtctaaaagtggggct

SEQ ID NO: 336383 - DNA, 33 bp, Homo sapien
tgaagaagtatgcagccaaaatgtggcatttta

SEQ ID NO: 336384 - DNA, 33 bp, Homo sapien
tgaagaagtatgcagctaaaatgtggcatttta

SEQ ID NO: 336385 - DNA, 33 bp, Homo sapien
cctttgcagaacagtggatcagacaatgagctc

SEQ ID NO: 336386 - DNA, 33 bp, Homo sapien
cctttgcagaacagtgtatcagacaatgagctc

SEQ ID NO: 336387 - DNA, 33 bp, Homo sapien
ttactcaacaacataaaaactattcactacaaa

SEQ ID NO: 336388 - DNA, 33 bp, Homo sapien
ttactcaacaacataagaactattcactacaaa

SEQ ID NO: 336389 - DNA, 33 bp, Homo sapien
ctgcctgaagatgggacatttgaatgtacaaac

SEQ ID NO: 336390 - DNA, 33 bp, Homo sapien
ctgcctgaagatgggatatttgaatgtacaaac

SEQ ID NO: 336391 - DNA, 33 bp, Homo sapien
cttttgtccgctcgagacgttgcggcttttgtg

SEQ ID NO: 336392 - DNA, 33 bp, Homo sapien
cttttgtccgctcgaggcgttgcggcttttgtg

SEQ ID NO: 336393 - DNA, 33 bp, Homo sapien
gagagagatgctgaaccgtaaggtagtcaaaac

SEQ ID NO: 336394 - DNA, 33 bp, Homo sapien
gagagagatgctgaactgtaaggtagtcaaaac

SEQ ID NO: 336395 - DNA, 33 bp, Homo sapien
tggataacttgcaacaatagctatccagaaggc

SEQ ID NO: 336396 - DNA, 33 bp, Homo sapien
tggataacttgcaacagtagctatccagaaggc

SEQ ID NO: 336397 - DNA, 33 bp, Homo sapien
actcagattcagtcaactagaaaccactttagt

SEQ ID NO: 336398 - DNA, 33 bp, Homo sapien
actcagattcagtcaagtagaaaccactttagt

SEQ ID NO: 336399 - DNA, 33 bp, Homo sapien
taattaaagtttcagacgtcaatgaacctttcc

SEQ ID NO: 336400 - DNA, 33 bp, Homo sapien
taattaaagtttcagatgtcaatgaacctttcc

SEQ ID NO: 336401 - DNA, 33 bp, Homo sapien
ttcagttcagcctatacgctccacgcttggaag

SEQ ID NO: 336402 - DNA, 33 bp, Homo sapien
ttcagttcagcctatatgctccacgcttggaag

SEQ ID NO: 336403 - DNA, 33 bp, Homo sapien
attaatttgctttatgaaaacagaattttaata

SEQ ID NO: 336404 - DNA, 33 bp, Homo sapien
attaatttgctttatggaaacagaattttaata

SEQ ID NO: 336405 - DNA, 33 bp, Homo sapien
ccgagttgtggacctaaaagcaattattttctc

SEQ ID NO: 336406 - DNA, 33 bp, Homo sapien
ccgagttgtggacctacaagcaattattttctc

SEQ ID NO: 336407 - DNA, 33 bp, Homo sapien
gtgtgatctttgacaaacatttattctctccag

SEQ ID NO: 336408 - DNA, 33 bp, Homo sapien
gtgtgatctttgacaaccatttattctctccag

SEQ ID NO: 336409 - DNA, 33 bp, Homo sapien
tgcagttccttaaaagcatcatgctcttcttgc

SEQ ID NO: 336410 - DNA, 33 bp, Homo sapien
tgcagttccttaaaagtatcatgctcttcttgc

SEQ ID NO: 336411 - DNA, 33 bp, Homo sapien
gaggggcagtgtctaacgggcctttaatggtag

SEQ ID NO: 336412 - DNA, 33 bp, Homo sapien
gaggggcagtgtctaatgggcctttaatggtag

SEQ ID NO: 336413 - DNA, 33 bp, Homo sapien
ttcttatatattggcacaggtatcactcacaac

SEQ ID NO: 336414 - DNA, 33 bp, Homo sapien
ttcttatatattggcataggtatcactcacaac

SEQ ID NO: 336415 - DNA, 33 bp, Homo sapien
ccacattactggcgaccaactaatttacctagc

SEQ ID NO: 336416 - DNA, 33 bp, Homo sapien
ccacattactggcgactaactaatttacctagc

SEQ ID NO: 336417 - DNA, 33 bp, Homo sapien
tatccatgctttagccgctttgaattcgttcag

SEQ ID NO: 336418 - DNA, 33 bp, Homo sapien
tatccatgctttagcctctttgaattcgttcag

SEQ ID NO: 336419 - DNA, 33 bp, Homo sapien
tattctaatcttggaaatagtgaactttagagc

SEQ ID NO: 336420 - DNA, 33 bp, Homo sapien
tattctaatcttggaagtagtgaactttagagc

SEQ ID NO: 336421 - DNA, 33 bp, Homo sapien
ttttatcttttgcaaaataaagatgagagcatt

SEQ ID NO: 336422 - DNA, 33 bp, Homo sapien
ttttatcttttgcaaagtaaagatgagagcatt

SEQ ID NO: 336423 - DNA, 33 bp, Homo sapien
gttagaatcatcataaatctgtttcctctaagt

SEQ ID NO: 336424 - DNA, 33 bp, Homo sapien
gttagaatcatcataagtctgtttcctctaagt

SEQ ID NO: 336425 - DNA, 33 bp, Homo sapien
aaccacctgaatggaaagctgaggcttaatatt

SEQ ID NO: 336426 - DNA, 33 bp, Homo sapien
aaccacctgaatggaatgctgaggcttaatatt

SEQ ID NO: 336427 - DNA, 33 bp, Homo sapien
cccaaagacctactaacgcatttcatagcactc

SEQ ID NO: 336428 - DNA, 33 bp, Homo sapien
cccaaagacctactaatgcatttcatagcactc

SEQ ID NO: 336429 - DNA, 33 bp, Homo sapien
ccccttgaaagtagaaaaggaagacagaagcat

SEQ ID NO: 336430 - DNA, 33 bp, Homo sapien
ccccttgaaagtagaagaggaagacagaagcat

SEQ ID NO: 336431 - DNA, 33 bp, Homo sapien
tcttctacttttacagaagagccatgcaaaaat

SEQ ID NO: 336432 - DNA, 33 bp, Homo sapien
tcttctacttttacaggagagccatgcaaaaat

SEQ ID NO: 336433 - DNA, 33 bp, Homo sapien
ttatgaccaacatacactatggacagctgtcac

SEQ ID NO: 336434 - DNA, 33 bp, Homo sapien
ttatgaccaacatacagtatggacagctgtcac

SEQ ID NO: 336435 - DNA, 33 bp, Homo sapien
ctcaagttttgacaagcagacaaagacatggaa

SEQ ID NO: 336436 - DNA, 33 bp, Homo sapien
ctcaagttttgacaagtagacaaagacatggaa

SEQ ID NO: 336437 - DNA, 33 bp, Homo sapien
ttattctaatatgacaaagttaatcaagaaaat

SEQ ID NO: 336438 - DNA, 33 bp, Homo sapien
ttattctaatatgacacagttaatcaagaaaat

SEQ ID NO: 336439 - DNA, 33 bp, Homo sapien
ggtaatgaaccctcacaaactctttccaagtgc

SEQ ID NO: 336440 - DNA, 33 bp, Homo sapien
ggtaatgaaccctcacgaactctttccaagtgc

SEQ ID NO: 336441 - DNA, 33 bp, Homo sapien
agtatatatctgtatcaatgaggagtattttag

SEQ ID NO: 336442 - DNA, 33 bp, Homo sapien
agtatatatctgtatcgatgaggagtattttag

SEQ ID NO: 336443 - DNA, 33 bp, Homo sapien
agaaatggttgagaccagaaaatgtggccagaa

SEQ ID NO: 336444 - DNA, 33 bp, Homo sapien
agaaatggttgagaccggaaaatgtggccagaa

SEQ ID NO: 336445 - DNA, 33 bp, Homo sapien
aataagtgactgccatcaataccttggcttatt

SEQ ID NO: 336446 - DNA, 33 bp, Homo sapien
aataagtgactgccatgaataccttggcttatt

SEQ ID NO: 336447 - DNA, 33 bp, Homo sapien
tgctttatgtgcactgcaggatatagcaaagtc

SEQ ID NO: 336448 - DNA, 33 bp, Homo sapien
tgctttatgtgcactgtaggatatagcaaagtc

SEQ ID NO: 336449 - DNA, 33 bp, Homo sapien
catgtgcaacaggggaaaagtgtcagaacatat

SEQ ID NO: 336450 - DNA, 33 bp, Homo sapien
catgtgcaacaggggagaagtgtcagaacatat

SEQ ID NO: 336451 - DNA, 33 bp, Homo sapien
gaggaggccttcagtaggagcatccacttgttt

SEQ ID NO: 336452 - DNA, 33 bp, Homo sapien
gaggaggccttcagtatgagcatccacttgttt

SEQ ID NO: 336453 - DNA, 33 bp, Homo sapien
tggcactaatcagacagtatattgtactatagt

SEQ ID NO: 336454 - DNA, 33 bp, Homo sapien
tggcactaatcagacattatattgtactatagt

SEQ ID NO: 336455 - DNA, 33 bp, Homo sapien
tcaagtgagaactggaaaaaaagcatcccgcaa

SEQ ID NO: 336456 - DNA, 33 bp, Homo sapien
tcaagtgagaactggagaaaaagcatcccgcaa

SEQ ID NO: 336457 - DNA, 33 bp, Homo sapien
actgacagcggctcacagatgttaatggttgaa

SEQ ID NO: 336458 - DNA, 33 bp, Homo sapien
actgacagcggctcacggatgttaatggttgaa

SEQ ID NO: 336459 - DNA, 33 bp, Homo sapien
atgttaatggttgaagaaacaaaggacacaata

SEQ ID NO: 336460 - DNA, 33 bp, Homo sapien
atgttaatggttgaagtaacaaaggacacaata

SEQ ID NO: 336461 - DNA, 33 bp, Homo sapien
agagaatagtctagtacgagtgggtaatagagc

SEQ ID NO: 336462 - DNA, 33 bp, Homo sapien
agagaatagtctagtaggagtgggtaatagagc

SEQ ID NO: 336463 - DNA, 33 bp, Homo sapien
ttggtgatttatgttgcagaagttgtaacaggt

SEQ ID NO: 336464 - DNA, 33 bp, Homo sapien
ttggtgatttatgttgtagaagttgtaacaggt

SEQ ID NO: 336465 - DNA, 33 bp, Homo sapien
gaatttggtgaaaccaagatctctctaataaca

SEQ ID NO: 336466 - DNA, 33 bp, Homo sapien
gaatttggtgaaaccaggatctctctaataaca

SEQ ID NO: 336467 - DNA, 33 bp, Homo sapien
aggtgaaaatattagcccattgccctgatttct

SEQ ID NO: 336468 - DNA, 33 bp, Homo sapien
aggtgaaaatattagctcattgccctgatttct

SEQ ID NO: 336469 - DNA, 33 bp, Homo sapien
ataaagtggatattaaatggaagcttgtggcct

SEQ ID NO: 336470 - DNA, 33 bp, Homo sapien
ataaagtggatattaattggaagcttgtggcct

SEQ ID NO: 336471 - DNA, 33 bp, Homo sapien
tgcaatcgttattagaccttcctctagaactag

SEQ ID NO: 336472 - DNA, 33 bp, Homo sapien
tgcaatcgttattagatcttcctctagaactag

SEQ ID NO: 336473 - DNA, 33 bp, Homo sapien
cagctgcttatgtgtcccttgtacctcagtctc

SEQ ID NO: 336474 - DNA, 33 bp, Homo sapien
cagctgcttatgtgtctcttgtacctcagtctc

SEQ ID NO: 336475 - DNA, 33 bp, Homo sapien
caagttttggctctaccatacttttattttttt

SEQ ID NO: 336476 - DNA, 33 bp, Homo sapien
caagttttggctctactatacttttattttttt

SEQ ID NO: 336477 - DNA, 33 bp, Homo sapien
ctataattccatctccacaagaaccagaatgag

SEQ ID NO: 336478 - DNA, 33 bp, Homo sapien
ctataattccatctcctcaagaaccagaatgag

SEQ ID NO: 336479 - DNA, 33 bp, Homo sapien
agccgaatcttttacaactccctgcttcaatcc

SEQ ID NO: 336480 - DNA, 33 bp, Homo sapien
agccgaatcttttacagctccctgcttcaatcc

SEQ ID NO: 336481 - DNA, 33 bp, Homo sapien
atcctttttctacttagaatctggcaaatctag

SEQ ID NO: 336482 - DNA, 33 bp, Homo sapien
atcctttttctacttataatctggcaaatctag

SEQ ID NO: 336483 - DNA, 33 bp, Homo sapien
tttctgttaccttatacggatggtgctaatgac

SEQ ID NO: 336484 - DNA, 33 bp, Homo sapien
tttctgttaccttatatggatggtgctaatgac

SEQ ID NO: 336485 - DNA, 33 bp, Homo sapien
taataataatggcaaactctctggatattaagg

SEQ ID NO: 336486 - DNA, 33 bp, Homo sapien
taataataatggcaaattctctggatattaagg

SEQ ID NO: 336487 - DNA, 33 bp, Homo sapien
ggtagacgtaacaacccaatacattcattccca

SEQ ID NO: 336488 - DNA, 33 bp, Homo sapien
ggtagacgtaacaaccgaatacattcattccca

SEQ ID NO: 336489 - DNA, 33 bp, Homo sapien
aatatgctcgagaaaacaaataagattggagat

SEQ ID NO: 336490 - DNA, 33 bp, Homo sapien
aatatgctcgagaaaataaataagattggagat

SEQ ID NO: 336491 - DNA, 33 bp, Homo sapien
aggttgagaacatcacacagatcctccgcagtt

SEQ ID NO: 336492 - DNA, 33 bp, Homo sapien
aggttgagaacatcacgcagatcctccgcagtt

SEQ ID NO: 336493 - DNA, 33 bp, Homo sapien
tgtgcaggataatgtacgtgagttttctttttt

SEQ ID NO: 336494 - DNA, 33 bp, Homo sapien
tgtgcaggataatgtatgtgagttttctttttt

SEQ ID NO: 336495 - DNA, 33 bp, Homo sapien
tataatcctagtaataacaggggagcgcaatgc

SEQ ID NO: 336496 - DNA, 33 bp, Homo sapien
tataatcctagtaatagcaggggagcgcaatgc

SEQ ID NO: 336497 - DNA, 33 bp, Homo sapien
ttgctggcattcagcaagtagtacaagaagggg

SEQ ID NO: 336498 - DNA, 33 bp, Homo sapien
ttgctggcattcagcaggtagtacaagaagggg

SEQ ID NO: 336499 - DNA, 33 bp, Homo sapien
acacatttgactctccagattctcaaaaatgtt

SEQ ID NO: 336500 - DNA, 33 bp, Homo sapien
acacatttgactctccggattctcaaaaatgtt

SEQ ID NO: 336501 - DNA, 33 bp, Homo sapien
acaatacaagtgggaccactatcctcagcttac

SEQ ID NO: 336502 - DNA, 33 bp, Homo sapien
acaatacaagtgggacgactatcctcagcttac

SEQ ID NO: 336503 - DNA, 33 bp, Homo sapien
tttatcttcagtttctgaaattttataccagca

SEQ ID NO: 336504 - DNA, 33 bp, Homo sapien
tttatcttcagtttcttaaattttataccagca

SEQ ID NO: 336505 - DNA, 33 bp, Homo sapien
caagcactgaggaaaaccaagagcctaaaggca

SEQ ID NO: 336506 - DNA, 33 bp, Homo sapien
caagcactgaggaaaatcaagagcctaaaggca

SEQ ID NO: 336507 - DNA, 33 bp, Homo sapien
ctgatcctcttcacagaaaattactcctcttga

SEQ ID NO: 336508 - DNA, 33 bp, Homo sapien
ctgatcctcttcacagcaaattactcctcttga

SEQ ID NO: 336509 - DNA, 33 bp, Homo sapien
tcctaaagataatacaaacttccacagaacctc

SEQ ID NO: 336510 - DNA, 33 bp, Homo sapien
tcctaaagataatacagacttccacagaacctc

SEQ ID NO: 336511 - DNA, 33 bp, Homo sapien
tttgggtagcacacaaagagactcaggagctac

SEQ ID NO: 336512 - DNA, 33 bp, Homo sapien
tttgggtagcacacaaggagactcaggagctac

SEQ ID NO: 336513 - DNA, 33 bp, Homo sapien
tgctctgtgttaactccgactaagtgcttacgc

SEQ ID NO: 336514 - DNA, 33 bp, Homo sapien
tgctctgtgttaactctgactaagtgcttacgc

SEQ ID NO: 336515 - DNA, 33 bp, Homo sapien
gaattatttgtggtcacgattttggtgttaacc

SEQ ID NO: 336516 - DNA, 33 bp, Homo sapien
gaattatttgtggtcatgattttggtgttaacc

SEQ ID NO: 336517 - DNA, 33 bp, Homo sapien
ctttgtccttataataagaaacacctaaaagct

SEQ ID NO: 336518 - DNA, 33 bp, Homo sapien
ctttgtccttataataggaaacacctaaaagct

SEQ ID NO: 336519 - DNA, 33 bp, Homo sapien
gtgcaggcttctgttacgtagcaaatgtctgag

SEQ ID NO: 336520 - DNA, 33 bp, Homo sapien
gtgcaggcttctgttatgtagcaaatgtctgag

SEQ ID NO: 336521 - DNA, 33 bp, Homo sapien
tggtgatatgtattcacaccaatgtacctttgt

SEQ ID NO: 336522 - DNA, 33 bp, Homo sapien
tggtgatatgtattcataccaatgtacctttgt

SEQ ID NO: 336523 - DNA, 33 bp, Homo sapien
gcttaatcacgaatagcatagtcatttaaatta

SEQ ID NO: 336524 - DNA, 33 bp, Homo sapien
gcttaatcacgaatagtatagtcatttaaatta

SEQ ID NO: 336525 - DNA, 33 bp, Homo sapien
gaagtatccttatcaacgttggctttgacaaag

SEQ ID NO: 336526 - DNA, 33 bp, Homo sapien
gaagtatccttatcaatgttggctttgacaaag

SEQ ID NO: 336527 - DNA, 33 bp, Homo sapien
cttggaggaatactaacggcatattattgaatg

SEQ ID NO: 336528 - DNA, 33 bp, Homo sapien
cttggaggaatactaatggcatattattgaatg

SEQ ID NO: 336529 - DNA, 33 bp, Homo sapien
ccacattcttgattgcactaaggccaattaaat

SEQ ID NO: 336530 - DNA, 33 bp, Homo sapien
ccacattcttgattgctctaaggccaattaaat

SEQ ID NO: 336531 - DNA, 33 bp, Homo sapien
acacacaggcattttgcagtgaatacatcatca

SEQ ID NO: 336532 - DNA, 33 bp, Homo sapien
acacacaggcattttgtagtgaatacatcatca

SEQ ID NO: 336533 - DNA, 33 bp, Homo sapien
acagcaaagctagtaaagtgcaaggtatgggca

SEQ ID NO: 336534 - DNA, 33 bp, Homo sapien
acagcaaagctagtaatgtgcaaggtatgggca

SEQ ID NO: 336535 - DNA, 33 bp, Homo sapien
atttatgtggaagaataaaaggctaaaaattgc

SEQ ID NO: 336536 - DNA, 33 bp, Homo sapien
atttatgtggaagaattaaaggctaaaaattgc

SEQ ID NO: 336537 - DNA, 33 bp, Homo sapien
agcttacaccacgatacagagcactggaattct

SEQ ID NO: 336538 - DNA, 33 bp, Homo sapien
agcttacaccacgatatagagcactggaattct

SEQ ID NO: 336539 - DNA, 33 bp, Homo sapien
ggatccactctttcaacatatgattgcgatttt

SEQ ID NO: 336540 - DNA, 33 bp, Homo sapien
ggatccactctttcaatatatgattgcgatttt

SEQ ID NO: 336541 - DNA, 33 bp, Homo sapien
gagctgcagttgcacaaccttgctagtgacttg

SEQ ID NO: 336542 - DNA, 33 bp, Homo sapien
gagctgcagttgcacagccttgctagtgacttg

SEQ ID NO: 336543 - DNA, 33 bp, Homo sapien
ctttgtgcaatcttggaacttggtgctctacgt

SEQ ID NO: 336544 - DNA, 33 bp, Homo sapien
ctttgtgcaatcttgggacttggtgctctacgt

SEQ ID NO: 336545 - DNA, 33 bp, Homo sapien
agacggcgaagtggataagataaataaaattgg

SEQ ID NO: 336546 - DNA, 33 bp, Homo sapien
agacggcgaagtggatgagataaataaaattgg

SEQ ID NO: 336547 - DNA, 33 bp, Homo sapien
gagtgactttgaagtaagtatttccctgcaatc

SEQ ID NO: 336548 - DNA, 33 bp, Homo sapien
gagtgactttgaagtacgtatttccctgcaatc

SEQ ID NO: 336549 - DNA, 33 bp, Homo sapien
ttgtttgcagttatgacaggaagcctacttgta

SEQ ID NO: 336550 - DNA, 33 bp, Homo sapien
ttgtttgcagttatgataggaagcctacttgta

SEQ ID NO: 336551 - DNA, 33 bp, Homo sapien
tccagatttaaatcaaaatcacaaagctagtaa

SEQ ID NO: 336552 - DNA, 33 bp, Homo sapien
tccagatttaaatcaagatcacaaagctagtaa

SEQ ID NO: 336553 - DNA, 33 bp, Homo sapien
tgtgggtggaaggatacggttattggctcagac

SEQ ID NO: 336554 - DNA, 33 bp, Homo sapien
tgtgggtggaaggatatggttattggctcagac

SEQ ID NO: 336555 - DNA, 33 bp, Homo sapien
catcagggcttgaaaacagtatataggatcttc

SEQ ID NO: 336556 - DNA, 33 bp, Homo sapien
catcagggcttgaaaatagtatataggatcttc

SEQ ID NO: 336557 - DNA, 33 bp, Homo sapien
aatgtctagagcagtcaagagagtgacataatg

SEQ ID NO: 336558 - DNA, 33 bp, Homo sapien
aatgtctagagcagtcgagagagtgacataatg

SEQ ID NO: 336559 - DNA, 33 bp, Homo sapien
ggaagttttctttatagcagcttaatgtgttgg

SEQ ID NO: 336560 - DNA, 33 bp, Homo sapien
ggaagttttctttatatcagcttaatgtgttgg

SEQ ID NO: 336561 - DNA, 33 bp, Homo sapien
aagtgggcataggaaaaaattcttcagatgtct

SEQ ID NO: 336562 - DNA, 33 bp, Homo sapien
aagtgggcataggaaacaattcttcagatgtct

SEQ ID NO: 336563 - DNA, 33 bp, Homo sapien
tagctgccacagaaagacattccttcttagtca

SEQ ID NO: 336564 - DNA, 33 bp, Homo sapien
tagctgccacagaaaggcattccttcttagtca

SEQ ID NO: 336565 - DNA, 33 bp, Homo sapien
tgtggcagctaagtgaagtgacagtctggagca

SEQ ID NO: 336566 - DNA, 33 bp, Homo sapien
tgtggcagctaagtgacgtgacagtctggagca

SEQ ID NO: 336567 - DNA, 33 bp, Homo sapien
tgattatggaccatcaatcaaatgttagaaaag

SEQ ID NO: 336568 - DNA, 33 bp, Homo sapien
tgattatggaccatcagtcaaatgttagaaaag

SEQ ID NO: 336569 - DNA, 33 bp, Homo sapien
tctatctacctgtacacatgaagagaatcaggg

SEQ ID NO: 336570 - DNA, 33 bp, Homo sapien
tctatctacctgtacatatgaagagaatcaggg

SEQ ID NO: 336571 - DNA, 33 bp, Homo sapien
aacccacaacaagtaactaacagaattggcatt

SEQ ID NO: 336572 - DNA, 33 bp, Homo sapien
aacccacaacaagtaattaacagaattggcatt

SEQ ID NO: 336573 - DNA, 33 bp, Homo sapien
agagtgcaaggacctcaagatttagagaaaaaa

SEQ ID NO: 336574 - DNA, 33 bp, Homo sapien
agagtgcaaggacctcgagatttagagaaaaaa

SEQ ID NO: 336575 - DNA, 33 bp, Homo sapien
gctttcttggcatttgcaggcatataaacagtg

SEQ ID NO: 336576 - DNA, 33 bp, Homo sapien
gctttcttggcatttgtaggcatataaacagtg

SEQ ID NO: 336577 - DNA, 33 bp, Homo sapien
actgggttatctgtgacgccttctgactttaca

SEQ ID NO: 336578 - DNA, 33 bp, Homo sapien
actgggttatctgtgatgccttctgactttaca

SEQ ID NO: 336579 - DNA, 33 bp, Homo sapien
caaagtggttctcaaactttcaggaacaaacta

SEQ ID NO: 336580 - DNA, 33 bp, Homo sapien
caaagtggttctcaaagtttcaggaacaaacta

SEQ ID NO: 336581 - DNA, 33 bp, Homo sapien
gtaagggaattcaatgcaccactcggaagttca

SEQ ID NO: 336582 - DNA, 33 bp, Homo sapien
gtaagggaattcaatgtaccactcggaagttca

SEQ ID NO: 336583 - DNA, 33 bp, Homo sapien
atattaacctttaagaaactgtcactcattact

SEQ ID NO: 336584 - DNA, 33 bp, Homo sapien
atattaacctttaagagactgtcactcattact

SEQ ID NO: 336585 - DNA, 33 bp, Homo sapien
ccatcattttgtagaactgaatttttatacaca

SEQ ID NO: 336586 - DNA, 33 bp, Homo sapien
ccatcattttgtagaattgaatttttatacaca

SEQ ID NO: 336587 - DNA, 33 bp, Homo sapien
ggccacacaaaacccaataacttgatttgtact

SEQ ID NO: 336588 - DNA, 33 bp, Homo sapien
ggccacacaaaacccagtaacttgatttgtact

SEQ ID NO: 336589 - DNA, 33 bp, Homo sapien
cacattaattattcaactcagcccatacagaag

SEQ ID NO: 336590 - DNA, 33 bp, Homo sapien
cacattaattattcaattcagcccatacagaag

SEQ ID NO: 336591 - DNA, 33 bp, Homo sapien
attcggaggctaggtacgaaaccaattttatct

SEQ ID NO: 336592 - DNA, 33 bp, Homo sapien
attcggaggctaggtatgaaaccaattttatct

SEQ ID NO: 336593 - DNA, 33 bp, Homo sapien
cctcatacagttcacacatcactgaagcagata

SEQ ID NO: 336594 - DNA, 33 bp, Homo sapien
cctcatacagttcacatatcactgaagcagata

SEQ ID NO: 336595 - DNA, 33 bp, Homo sapien
ctaatttcctggaagactcaaatgctcctactt

SEQ ID NO: 336596 - DNA, 33 bp, Homo sapien
ctaatttcctggaagattcaaatgctcctactt

SEQ ID NO: 336597 - DNA, 33 bp, Homo sapien
gatttctgaactgaccaacttggataatgaaca

SEQ ID NO: 336598 - DNA, 33 bp, Homo sapien
gatttctgaactgaccgacttggataatgaaca

SEQ ID NO: 336599 - DNA, 33 bp, Homo sapien
gtgcactctcttacaacccaacattgcatgttc

SEQ ID NO: 336600 - DNA, 33 bp, Homo sapien
gtgcactctcttacaagccaacattgcatgttc

SEQ ID NO: 336601 - DNA, 33 bp, Homo sapien
ctgaaacatctaacagaatcatcttttctaaca

SEQ ID NO: 336602 - DNA, 33 bp, Homo sapien
ctgaaacatctaacagcatcatcttttctaaca

SEQ ID NO: 336603 - DNA, 33 bp, Homo sapien
gcatatgtatgtttcacaaaattaagggaaaaa

SEQ ID NO: 336604 - DNA, 33 bp, Homo sapien
gcatatgtatgtttcagaaaattaagggaaaaa

SEQ ID NO: 336605 - DNA, 33 bp, Homo sapien
tccctgctccctagacaattttggcccattttc

SEQ ID NO: 336606 - DNA, 33 bp, Homo sapien
tccctgctccctagacgattttggcccattttc

SEQ ID NO: 336607 - DNA, 33 bp, Homo sapien
gagtttgccaactctaagcccagaaagaggaca

SEQ ID NO: 336608 - DNA, 33 bp, Homo sapien
gagtttgccaactctaggcccagaaagaggaca

SEQ ID NO: 336609 - DNA, 33 bp, Homo sapien
catggaaatctctctaaataagggactctattc

SEQ ID NO: 336610 - DNA, 33 bp, Homo sapien
catggaaatctctctacataagggactctattc

SEQ ID NO: 336611 - DNA, 33 bp, Homo sapien
tcagtagagagcccaactggcccccatttcttc

SEQ ID NO: 336612 - DNA, 33 bp, Homo sapien
tcagtagagagcccaagtggcccccatttcttc

SEQ ID NO: 336613 - DNA, 33 bp, Homo sapien
gtgtatttaagccaaaagtgctattcaccttta

SEQ ID NO: 336614 - DNA, 33 bp, Homo sapien
gtgtatttaagccaaaggtgctattcaccttta

SEQ ID NO: 336615 - DNA, 33 bp, Homo sapien
ccaaagtttgaccagaaaatctctagatgatga

SEQ ID NO: 336616 - DNA, 33 bp, Homo sapien
ccaaagtttgaccagagaatctctagatgatga

SEQ ID NO: 336617 - DNA, 33 bp, Homo sapien
attgtagccgtcagaacactgtctagtacatgt

SEQ ID NO: 336618 - DNA, 33 bp, Homo sapien
attgtagccgtcagaatactgtctagtacatgt

SEQ ID NO: 336619 - DNA, 33 bp, Homo sapien
accaacttttagaccccgagtccttccaattag

SEQ ID NO: 336620 - DNA, 33 bp, Homo sapien
accaacttttagaccctgagtccttccaattag

SEQ ID NO: 336621 - DNA, 33 bp, Homo sapien
ggccagtattgggacacagtcgcatgagagaag

SEQ ID NO: 336622 - DNA, 33 bp, Homo sapien
ggccagtattgggacagagtcgcatgagagaag

SEQ ID NO: 336623 - DNA, 33 bp, Homo sapien
actgtagccatcagaagtccctcactatctcca

SEQ ID NO: 336624 - DNA, 33 bp, Homo sapien
actgtagccatcagaattccctcactatctcca

SEQ ID NO: 336625 - DNA, 33 bp, Homo sapien
gttgtcttaatccaaccaatcatggctccactt

SEQ ID NO: 336626 - DNA, 33 bp, Homo sapien
gttgtcttaatccaactaatcatggctccactt

SEQ ID NO: 336627 - DNA, 33 bp, Homo sapien
atgtgtgtgtgatatccatgatttcaataaaat

SEQ ID NO: 336628 - DNA, 33 bp, Homo sapien
atgtgtgtgtgatatctatgatttcaataaaat

SEQ ID NO: 336629 - DNA, 33 bp, Homo sapien
gaatttattggctcatcaaacaaaggattcctg

SEQ ID NO: 336630 - DNA, 33 bp, Homo sapien
gaatttattggctcatgaaacaaaggattcctg

SEQ ID NO: 336631 - DNA, 33 bp, Homo sapien
tcttaggttctctttgcaatgaaaagctatgtt

SEQ ID NO: 336632 - DNA, 33 bp, Homo sapien
tcttaggttctctttgtaatgaaaagctatgtt

SEQ ID NO: 336633 - DNA, 33 bp, Homo sapien
agaaacttggtcaacaatctcttgagatgctca

SEQ ID NO: 336634 - DNA, 33 bp, Homo sapien
agaaacttggtcaacagtctcttgagatgctca

SEQ ID NO: 336635 - DNA, 33 bp, Homo sapien
gagattcttgtttctaaatctgcggttgaatta

SEQ ID NO: 336636 - DNA, 33 bp, Homo sapien
gagattcttgtttctacatctgcggttgaatta

SEQ ID NO: 336637 - DNA, 33 bp, Homo sapien
gacacttgccccatacccacagattctgattca

SEQ ID NO: 336638 - DNA, 33 bp, Homo sapien
gacacttgccccatacgcacagattctgattca

SEQ ID NO: 336639 - DNA, 33 bp, Homo sapien
tgggtaagttttcacacgggctatctagtgtaa

SEQ ID NO: 336640 - DNA, 33 bp, Homo sapien
tgggtaagttttcacatgggctatctagtgtaa

SEQ ID NO: 336641 - DNA, 33 bp, Homo sapien
tccaaatactcccttccccattttatcaccaga

SEQ ID NO: 336642 - DNA, 33 bp, Homo sapien
tccaaatactcccttctccattttatcaccaga

SEQ ID NO: 336643 - DNA, 33 bp, Homo sapien
caactcttcctaaccccgggattttgcttcatt

SEQ ID NO: 336644 - DNA, 33 bp, Homo sapien
caactcttcctaaccctgggattttgcttcatt

SEQ ID NO: 336645 - DNA, 33 bp, Homo sapien
ctggtccttacttcacactttcacagcatccaa

SEQ ID NO: 336646 - DNA, 33 bp, Homo sapien
ctggtccttacttcacgctttcacagcatccaa

SEQ ID NO: 336647 - DNA, 33 bp, Homo sapien
tggcagaaacagtagacctgagacaaaacatat

SEQ ID NO: 336648 - DNA, 33 bp, Homo sapien
tggcagaaacagtagagctgagacaaaacatat

SEQ ID NO: 336649 - DNA, 33 bp, Homo sapien
cagagggcactgggggaaaggagttgatttctt

SEQ ID NO: 336650 - DNA, 33 bp, Homo sapien
cagagggcactggggggaaggagttgatttctt

SEQ ID NO: 336651 - DNA, 33 bp, Homo sapien
tatagtcttgctgagaatccacttagcctttgt

SEQ ID NO: 336652 - DNA, 33 bp, Homo sapien
tatagtcttgctgagagtccacttagcctttgt

SEQ ID NO: 336653 - DNA, 33 bp, Homo sapien
gaaaaacagtctaagcagctggactacaaaatg

SEQ ID NO: 336654 - DNA, 33 bp, Homo sapien
gaaaaacagtctaagctgctggactacaaaatg

SEQ ID NO: 336655 - DNA, 33 bp, Homo sapien
ttaatttctttaagaacttctgagagcactgtc

SEQ ID NO: 336656 - DNA, 33 bp, Homo sapien
ttaatttctttaagaatttctgagagcactgtc

SEQ ID NO: 336657 - DNA, 33 bp, Homo sapien
acagtactttatctggaattactcatcctatgt

SEQ ID NO: 336658 - DNA, 33 bp, Homo sapien
acagtactttatctggcattactcatcctatgt

SEQ ID NO: 336659 - DNA, 33 bp, Homo sapien
cctggttcaacaaagaacttgataacattgctt

SEQ ID NO: 336660 - DNA, 33 bp, Homo sapien
cctggttcaacaaagagcttgataacattgctt

SEQ ID NO: 336661 - DNA, 33 bp, Homo sapien
gtcttggctctttgtaaccgactatgtagccaa

SEQ ID NO: 336662 - DNA, 33 bp, Homo sapien
gtcttggctctttgtagccgactatgtagccaa

SEQ ID NO: 336663 - DNA, 33 bp, Homo sapien
gtccatccgctctagaatatttcctgatcctct

SEQ ID NO: 336664 - DNA, 33 bp, Homo sapien
gtccatccgctctagagtatttcctgatcctct

SEQ ID NO: 336665 - DNA, 33 bp, Homo sapien
cacatcctttctttccaaccagggtttctttct

SEQ ID NO: 336666 - DNA, 33 bp, Homo sapien
cacatcctttctttccgaccagggtttctttct

SEQ ID NO: 336667 - DNA, 33 bp, Homo sapien
tctctcttcagaggaccattggaattttcactt

SEQ ID NO: 336668 - DNA, 33 bp, Homo sapien
tctctcttcagaggacgattggaattttcactt

SEQ ID NO: 336669 - DNA, 33 bp, Homo sapien
gttactatggccagaaaaaaaatgaatataata

SEQ ID NO: 336670 - DNA, 33 bp, Homo sapien
gttactatggccagaacaaaaatgaatataata

SEQ ID NO: 336671 - DNA, 33 bp, Homo sapien
cttttgacctccagaaaaatgacacaataaatt

SEQ ID NO: 336672 - DNA, 33 bp, Homo sapien
cttttgacctccagaacaatgacacaataaatt

SEQ ID NO: 336673 - DNA, 33 bp, Homo sapien
cctgcaaaggactgtcaaggtcttattcatgaa

SEQ ID NO: 336674 - DNA, 33 bp, Homo sapien
cctgcaaaggactgtcgaggtcttattcatgaa

SEQ ID NO: 336675 - DNA, 33 bp, Homo sapien
gatttggcttatatgaaggagttgtgtggccag

SEQ ID NO: 336676 - DNA, 33 bp, Homo sapien
gatttggcttatatgagggagttgtgtggccag

SEQ ID NO: 336677 - DNA, 33 bp, Homo sapien
gacagcattccattcccgcacagcttttacctt

SEQ ID NO: 336678 - DNA, 33 bp, Homo sapien
gacagcattccattcctgcacagcttttacctt

SEQ ID NO: 336679 - DNA, 33 bp, Homo sapien
gaatgtggagtcagagaatccaggttccaggcc

SEQ ID NO: 336680 - DNA, 33 bp, Homo sapien
gaatgtggagtcagagtatccaggttccaggcc

SEQ ID NO: 336681 - DNA, 33 bp, Homo sapien
tccacatagtacttaaatatcgctgctggttat

SEQ ID NO: 336682 - DNA, 33 bp, Homo sapien
tccacatagtacttaagtatcgctgctggttat

SEQ ID NO: 336683 - DNA, 33 bp, Homo sapien
taggcaaggctacagcaagaaacctcaaaacaa

SEQ ID NO: 336684 - DNA, 33 bp, Homo sapien
taggcaaggctacagccagaaacctcaaaacaa

SEQ ID NO: 336685 - DNA, 33 bp, Homo sapien
tcttgagtaaatatctcagagttactggtatta

SEQ ID NO: 336686 - DNA, 33 bp, Homo sapien
tcttgagtaaatatcttagagttactggtatta

SEQ ID NO: 336687 - DNA, 33 bp, Homo sapien
actgcagccacaatgcaagagagcctgagggtt

SEQ ID NO: 336688 - DNA, 33 bp, Homo sapien
actgcagccacaatgcgagagagcctgagggtt

SEQ ID NO: 336689 - DNA, 33 bp, Homo sapien
tcttttctttgcctgacgaatttcttcagcaat

SEQ ID NO: 336690 - DNA, 33 bp, Homo sapien
tcttttctttgcctgaggaatttcttcagcaat

SEQ ID NO: 336691 - DNA, 33 bp, Homo sapien
ctttagaccttcaacaccagagattgggtttgt

SEQ ID NO: 336692 - DNA, 33 bp, Homo sapien
ctttagaccttcaacagcagagattgggtttgt

SEQ ID NO: 336693 - DNA, 33 bp, Homo sapien
acacaaaatttgttagacagggatagaacgatc

SEQ ID NO: 336694 - DNA, 33 bp, Homo sapien
acacaaaatttgttaggcagggatagaacgatc

SEQ ID NO: 336695 - DNA, 33 bp, Homo sapien
ctgtgtaggctctggacgtggatcctgggtacc

SEQ ID NO: 336696 - DNA, 33 bp, Homo sapien
ctgtgtaggctctggatgtggatcctgggtacc

SEQ ID NO: 336697 - DNA, 33 bp, Homo sapien
aagaattctacatccaaacatatgcaagtacat

SEQ ID NO: 336698 - DNA, 33 bp, Homo sapien
aagaattctacatccacacatatgcaagtacat

SEQ ID NO: 336699 - DNA, 33 bp, Homo sapien
tgttaaccccctcaaactttatttgcttgtatt

SEQ ID NO: 336700 - DNA, 33 bp, Homo sapien
tgttaaccccctcaaagtttatttgcttgtatt

SEQ ID NO: 336701 - DNA, 33 bp, Homo sapien
cacttgggagaattacaatacacacttggagtg

SEQ ID NO: 336702 - DNA, 33 bp, Homo sapien
cacttgggagaattaccatacacacttggagtg

SEQ ID NO: 336703 - DNA, 33 bp, Homo sapien
cttcatcctgttagaaagacatagtgagaaatg

SEQ ID NO: 336704 - DNA, 33 bp, Homo sapien
cttcatcctgttagaacgacatagtgagaaatg

SEQ ID NO: 336705 - DNA, 33 bp, Homo sapien
aagagaaatttctcaaatgttagcaacctctgc

SEQ ID NO: 336706 - DNA, 33 bp, Homo sapien
aagagaaatttctcaagtgttagcaacctctgc

SEQ ID NO: 336707 - DNA, 33 bp, Homo sapien
gtcaccacgtcctgccactatctgtacatttta

SEQ ID NO: 336708 - DNA, 33 bp, Homo sapien
gtcaccacgtcctgccgctatctgtacatttta

SEQ ID NO: 336709 - DNA, 33 bp, Homo sapien
taatattaattcaatcagagaagcaaaaccatt

SEQ ID NO: 336710 - DNA, 33 bp, Homo sapien
taatattaattcaatcggagaagcaaaaccatt

SEQ ID NO: 336711 - DNA, 33 bp, Homo sapien
cttaattggcagtacgaaatgaccatccttgtt

SEQ ID NO: 336712 - DNA, 33 bp, Homo sapien
cttaattggcagtacggaatgaccatccttgtt

SEQ ID NO: 336713 - DNA, 33 bp, Homo sapien
acatttgttcattgaccctgtgattctctcagg

SEQ ID NO: 336714 - DNA, 33 bp, Homo sapien
acatttgttcattgactctgtgattctctcagg

SEQ ID NO: 336715 - DNA, 33 bp, Homo sapien
gatattgtatttagccaaaaatgcttgttctaa

SEQ ID NO: 336716 - DNA, 33 bp, Homo sapien
gatattgtatttagccgaaaatgcttgttctaa

SEQ ID NO: 336717 - DNA, 33 bp, Homo sapien
tccttactccctatcacgaagagatccttttcc

SEQ ID NO: 336718 - DNA, 33 bp, Homo sapien
tccttactccctatcatgaagagatccttttcc

SEQ ID NO: 336719 - DNA, 33 bp, Homo sapien
gtaaaattagaggaaagctcaacactaacagaa

SEQ ID NO: 336720 - DNA, 33 bp, Homo sapien
gtaaaattagaggaaatctcaacactaacagaa

SEQ ID NO: 336721 - DNA, 33 bp, Homo sapien
attctgaaggacttcagtcaggcactatgtcct

SEQ ID NO: 336722 - DNA, 33 bp, Homo sapien
attctgaaggacttcattcaggcactatgtcct

SEQ ID NO: 336723 - DNA, 33 bp, Homo sapien
tagcttgccatttgtcacaagttgagggggaaa

SEQ ID NO: 336724 - DNA, 33 bp, Homo sapien
tagcttgccatttgtctcaagttgagggggaaa

SEQ ID NO: 336725 - DNA, 33 bp, Homo sapien
cttatcatattttttcaacccaatgattgttga

SEQ ID NO: 336726 - DNA, 33 bp, Homo sapien
cttatcatattttttctacccaatgattgttga

SEQ ID NO: 336727 - DNA, 33 bp, Homo sapien
aaataaataaataagacgagtgaagcagttgtt

SEQ ID NO: 336728 - DNA, 33 bp, Homo sapien
aaataaataaataagatgagtgaagcagttgtt

SEQ ID NO: 336729 - DNA, 33 bp, Homo sapien
ccactgctcaatacaaactcatgttgatttatg

SEQ ID NO: 336730 - DNA, 33 bp, Homo sapien
ccactgctcaatacaagctcatgttgatttatg

SEQ ID NO: 336731 - DNA, 33 bp, Homo sapien
ttaatcaatggctaaacgctcaggaatccgttg

SEQ ID NO: 336732 - DNA, 33 bp, Homo sapien
ttaatcaatggctaaatgctcaggaatccgttg

SEQ ID NO: 336733 - DNA, 33 bp, Homo sapien
tagtctctgctacaaaataggtgcttaattgtt

SEQ ID NO: 336734 - DNA, 33 bp, Homo sapien
tagtctctgctacaaagtaggtgcttaattgtt

SEQ ID NO: 336735 - DNA, 33 bp, Homo sapien
acattcactcactcgaaaaacaattaagcacct

SEQ ID NO: 336736 - DNA, 33 bp, Homo sapien
acattcactcactcgataaacaattaagcacct

SEQ ID NO: 336737 - DNA, 33 bp, Homo sapien
ctcctagccagaataacatctccaactgtattg

SEQ ID NO: 336738 - DNA, 33 bp, Homo sapien
ctcctagccagaataatatctccaactgtattg

SEQ ID NO: 336739 - DNA, 33 bp, Homo sapien
tctccagcatcacctacactgctgaaggttttg

SEQ ID NO: 336740 - DNA, 33 bp, Homo sapien
tctccagcatcacctatactgctgaaggttttg

SEQ ID NO: 336741 - DNA, 33 bp, Homo sapien
tgcaaagtgacaaaacacagccatgctgcagct

SEQ ID NO: 336742 - DNA, 33 bp, Homo sapien
tgcaaagtgacaaaacgcagccatgctgcagct

SEQ ID NO: 336743 - DNA, 33 bp, Homo sapien
aatactttttgaagaaagcaacaatcccatagg

SEQ ID NO: 336744 - DNA, 33 bp, Homo sapien
aatactttttgaagaatgcaacaatcccatagg

SEQ ID NO: 336745 - DNA, 33 bp, Homo sapien
ttattgaaaacctgggaagttataagttgttac

SEQ ID NO: 336746 - DNA, 33 bp, Homo sapien
ttattgaaaacctgggcagttataagttgttac

SEQ ID NO: 336747 - DNA, 33 bp, Homo sapien
gccactatagtcaagacacaaaagatacaagat

SEQ ID NO: 336748 - DNA, 33 bp, Homo sapien
gccactatagtcaagatacaaaagatacaagat

SEQ ID NO: 336749 - DNA, 33 bp, Homo sapien
attttacagacagttgaaaagaagaccttggag

SEQ ID NO: 336750 - DNA, 33 bp, Homo sapien
attttacagacagttggaaagaagaccttggag

SEQ ID NO: 336751 - DNA, 33 bp, Homo sapien
aatgggaatatttggaagtcaaaacacattttt

SEQ ID NO: 336752 - DNA, 33 bp, Homo sapien
aatgggaatatttggaggtcaaaacacattttt

SEQ ID NO: 336753 - DNA, 33 bp, Homo sapien
ggataagattaattctcaatgaggcccaactct

SEQ ID NO: 336754 - DNA, 33 bp, Homo sapien
ggataagattaattctgaatgaggcccaactct

SEQ ID NO: 336755 - DNA, 33 bp, Homo sapien
aggataggtcaagaacgagattgtttttggaaa

SEQ ID NO: 336756 - DNA, 33 bp, Homo sapien
aggataggtcaagaactagattgtttttggaaa

SEQ ID NO: 336757 - DNA, 33 bp, Homo sapien
catgttccaaaatccacgttaattattttatta

SEQ ID NO: 336758 - DNA, 33 bp, Homo sapien
catgttccaaaatccaggttaattattttatta

SEQ ID NO: 336759 - DNA, 33 bp, Homo sapien
ctgtggccacttctgaagtacgctccacacttc

SEQ ID NO: 336760 - DNA, 33 bp, Homo sapien
ctgtggccacttctgaggtacgctccacacttc

SEQ ID NO: 336761 - DNA, 33 bp, Homo sapien
cttagctcaaatcagagatattggaatttaaag

SEQ ID NO: 336762 - DNA, 33 bp, Homo sapien
cttagctcaaatcagatatattggaatttaaag

SEQ ID NO: 336763 - DNA, 33 bp, Homo sapien
agtaaaaactatattggaatggataagatgaga

SEQ ID NO: 336764 - DNA, 33 bp, Homo sapien
agtaaaaactatattgtaatggataagatgaga

SEQ ID NO: 336765 - DNA, 33 bp, Homo sapien
gttatgtggtgtatctaaagacccgtgttatat

SEQ ID NO: 336766 - DNA, 33 bp, Homo sapien
gttatgtggtgtatctgaagacccgtgttatat

SEQ ID NO: 336767 - DNA, 33 bp, Homo sapien
actgactagggataaagaagtgaaattgatcag

SEQ ID NO: 336768 - DNA, 33 bp, Homo sapien
actgactagggataaataagtgaaattgatcag

SEQ ID NO: 336769 - DNA, 33 bp, Homo sapien
ctgcagtataaaatcacggaatctgctgctgtt

SEQ ID NO: 336770 - DNA, 33 bp, Homo sapien
ctgcagtataaaatcatggaatctgctgctgtt

SEQ ID NO: 336771 - DNA, 33 bp, Homo sapien
ggccatggcaagttaccaaacctttcatgagtc

SEQ ID NO: 336772 - DNA, 33 bp, Homo sapien
ggccatggcaagttactaaacctttcatgagtc

SEQ ID NO: 336773 - DNA, 33 bp, Homo sapien
aaaaaagagtgaacaggatggatgtttggatag

SEQ ID NO: 336774 - DNA, 33 bp, Homo sapien
aaaaaagagtgaacagtatggatgtttggatag

SEQ ID NO: 336775 - DNA, 33 bp, Homo sapien
aagggtttagctgggaagatttgagagtatttg

SEQ ID NO: 336776 - DNA, 33 bp, Homo sapien
aagggtttagctgggatgatttgagagtatttg

SEQ ID NO: 336777 - DNA, 33 bp, Homo sapien
tgcttagagtctacttaaagatcacagtgacag

SEQ ID NO: 336778 - DNA, 33 bp, Homo sapien
tgcttagagtctactttaagatcacagtgacag

SEQ ID NO: 336779 - DNA, 33 bp, Homo sapien
ttaaaatgatacttgaaagcctgaacaaaatac

SEQ ID NO: 336780 - DNA, 33 bp, Homo sapien
ttaaaatgatacttgacagcctgaacaaaatac

SEQ ID NO: 336781 - DNA, 33 bp, Homo sapien
tttgcctgatttatgaaacactgtagtttatcc

SEQ ID NO: 336782 - DNA, 33 bp, Homo sapien
tttgcctgatttatgagacactgtagtttatcc

SEQ ID NO: 336783 - DNA, 33 bp, Homo sapien
gagttttctgttttcaatactgctagtgaataa

SEQ ID NO: 336784 - DNA, 33 bp, Homo sapien
gagttttctgttttcattactgctagtgaataa

SEQ ID NO: 336785 - DNA, 33 bp, Homo sapien
cagtgtagttaggttacaatggttgtgtttgta

SEQ ID NO: 336786 - DNA, 33 bp, Homo sapien
cagtgtagttaggttataatggttgtgtttgta

SEQ ID NO: 336787 - DNA, 33 bp, Homo sapien
ctgtggatgtggtacccacaaatactacaacta

SEQ ID NO: 336788 - DNA, 33 bp, Homo sapien
ctgtggatgtggtacctacaaatactacaacta

SEQ ID NO: 336789 - DNA, 33 bp, Homo sapien
catgcatggagtattacggacagtatatgaact

SEQ ID NO: 336790 - DNA, 33 bp, Homo sapien
catgcatggagtattatggacagtatatgaact

SEQ ID NO: 336791 - DNA, 33 bp, Homo sapien
attatcttttaaggcacatttgatacattttaa

SEQ ID NO: 336792 - DNA, 33 bp, Homo sapien
attatcttttaaggcatatttgatacattttaa

SEQ ID NO: 336793 - DNA, 33 bp, Homo sapien
ctctgaatgatacacaactgagaaaagttctgt

SEQ ID NO: 336794 - DNA, 33 bp, Homo sapien
ctctgaatgatacacagctgagaaaagttctgt

SEQ ID NO: 336795 - DNA, 33 bp, Homo sapien
tgtctgcattatataaacagtttgtggaagact

SEQ ID NO: 336796 - DNA, 33 bp, Homo sapien
tgtctgcattatataagcagtttgtggaagact

SEQ ID NO: 336797 - DNA, 33 bp, Homo sapien
cagtagttccagcacacctgattgccacggaac

SEQ ID NO: 336798 - DNA, 33 bp, Homo sapien
cagtagttccagcacatctgattgccacggaac

SEQ ID NO: 336799 - DNA, 33 bp, Homo sapien
taagactatctggtggccagcctaatttttaac

SEQ ID NO: 336800 - DNA, 33 bp, Homo sapien
taagactatctggtggtcagcctaatttttaac

SEQ ID NO: 336801 - DNA, 33 bp, Homo sapien
tcatattttttttacagctgaatcattgtagta

SEQ ID NO: 336802 - DNA, 33 bp, Homo sapien
tcatattttttttacatctgaatcattgtagta

SEQ ID NO: 336803 - DNA, 33 bp, Homo sapien
tatttgaccatctttagctgatacatggtatgt

SEQ ID NO: 336804 - DNA, 33 bp, Homo sapien
tatttgaccatctttatctgatacatggtatgt

SEQ ID NO: 336805 - DNA, 33 bp, Homo sapien
ctccatttccacattacctttgtcactctaagt

SEQ ID NO: 336806 - DNA, 33 bp, Homo sapien
ctccatttccacattatctttgtcactctaagt

SEQ ID NO: 336807 - DNA, 33 bp, Homo sapien
tataaacaattttatccacaacctaattactta

SEQ ID NO: 336808 - DNA, 33 bp, Homo sapien
tataaacaattttatcgacaacctaattactta

SEQ ID NO: 336809 - DNA, 33 bp, Homo sapien
tcccccatgatagaaacgggtgagtctcatttt

SEQ ID NO: 336810 - DNA, 33 bp, Homo sapien
tcccccatgatagaaaggggtgagtctcatttt

SEQ ID NO: 336811 - DNA, 33 bp, Homo sapien
tccactagaatgtatactacctcaagaactgag

SEQ ID NO: 336812 - DNA, 33 bp, Homo sapien
tccactagaatgtatattacctcaagaactgag

SEQ ID NO: 336813 - DNA, 33 bp, Homo sapien
tacagtttaatggcaactggaagataatggaaa

SEQ ID NO: 336814 - DNA, 33 bp, Homo sapien
tacagtttaatggcaattggaagataatggaaa

SEQ ID NO: 336815 - DNA, 33 bp, Homo sapien
ctcagtggttgattaaacaaaggaatactacag

SEQ ID NO: 336816 - DNA, 33 bp, Homo sapien
ctcagtggttgattaaccaaaggaatactacag

SEQ ID NO: 336817 - DNA, 33 bp, Homo sapien
tgtttattcttgcctaataaaaatgtatggatt

SEQ ID NO: 336818 - DNA, 33 bp, Homo sapien
tgtttattcttgcctagtaaaaatgtatggatt

SEQ ID NO: 336819 - DNA, 33 bp, Homo sapien
cagtatctacagttcccatactccaataaaccc

SEQ ID NO: 336820 - DNA, 33 bp, Homo sapien
cagtatctacagttcctatactccaataaaccc

SEQ ID NO: 336821 - DNA, 33 bp, Homo sapien
ggaagattgatgacaaaaagtttggtcttacgt

SEQ ID NO: 336822 - DNA, 33 bp, Homo sapien
ggaagattgatgacaagaagtttggtcttacgt

SEQ ID NO: 336823 - DNA, 33 bp, Homo sapien
aaattcatatgtggaaatctaattaccaatatg

SEQ ID NO: 336824 - DNA, 33 bp, Homo sapien
aaattcatatgtggaagtctaattaccaatatg

SEQ ID NO: 336825 - DNA, 33 bp, Homo sapien
atatgtgtagaaattgaatgatgtcatagataa

SEQ ID NO: 336826 - DNA, 33 bp, Homo sapien
atatgtgtagaaattggatgatgtcatagataa

SEQ ID NO: 336827 - DNA, 33 bp, Homo sapien
tgttaggatagtgtagcagttttccatttgtat

SEQ ID NO: 336828 - DNA, 33 bp, Homo sapien
tgttaggatagtgtagtagttttccatttgtat

SEQ ID NO: 336829 - DNA, 33 bp, Homo sapien
aaaattatctggaaaaataagaagtaaacaaga

SEQ ID NO: 336830 - DNA, 33 bp, Homo sapien
aaaattatctggaaaactaagaagtaaacaaga

SEQ ID NO: 336831 - DNA, 33 bp, Homo sapien
gaagctagataatagaaccatggtgattcataa

SEQ ID NO: 336832 - DNA, 33 bp, Homo sapien
gaagctagataatagacccatggtgattcataa

SEQ ID NO: 336833 - DNA, 33 bp, Homo sapien
ctttagtgtcctgatacatttacaagtgtttcg

SEQ ID NO: 336834 - DNA, 33 bp, Homo sapien
ctttagtgtcctgatatatttacaagtgtttcg

SEQ ID NO: 336835 - DNA, 33 bp, Homo sapien
agaaagacaccagggaagtacgggcagaggaaa

SEQ ID NO: 336836 - DNA, 33 bp, Homo sapien
agaaagacaccagggatgtacgggcagaggaaa

SEQ ID NO: 336837 - DNA, 33 bp, Homo sapien
atctccagcatctgtaaagaacttaaatacatt

SEQ ID NO: 336838 - DNA, 33 bp, Homo sapien
atctccagcatctgtagagaacttaaatacatt

SEQ ID NO: 336839 - DNA, 33 bp, Homo sapien
actccctcccattatccagtgtacatctgtttc

SEQ ID NO: 336840 - DNA, 33 bp, Homo sapien
actccctcccattatctagtgtacatctgtttc

SEQ ID NO: 336841 - DNA, 33 bp, Homo sapien
gataaaatatagtcaaactattaaacaacaaac

SEQ ID NO: 336842 - DNA, 33 bp, Homo sapien
gataaaatatagtcaagctattaaacaacaaac

SEQ ID NO: 336843 - DNA, 33 bp, Homo sapien
ctcctaaagccagagacgtttccaactgacctg

SEQ ID NO: 336844 - DNA, 33 bp, Homo sapien
ctcctaaagccagagatgtttccaactgacctg

SEQ ID NO: 336845 - DNA, 33 bp, Homo sapien
aatttgaaattttagacgagatgcaaaaattgc

SEQ ID NO: 336846 - DNA, 33 bp, Homo sapien
aatttgaaattttagatgagatgcaaaaattgc

SEQ ID NO: 336847 - DNA, 33 bp, Homo sapien
gaattatgagaaaaaaaggagagtgcttttgta

SEQ ID NO: 336848 - DNA, 33 bp, Homo sapien
gaattatgagaaaaaagggagagtgcttttgta

SEQ ID NO: 336849 - DNA, 33 bp, Homo sapien
tttaaactacatgaacaaaaagtgcttatagca

SEQ ID NO: 336850 - DNA, 33 bp, Homo sapien
tttaaactacatgaacgaaaagtgcttatagca

SEQ ID NO: 336851 - DNA, 33 bp, Homo sapien
tttcagaaatcagtaaatggttgaggatgattt

SEQ ID NO: 336852 - DNA, 33 bp, Homo sapien
tttcagaaatcagtaagtggttgaggatgattt

SEQ ID NO: 336853 - DNA, 33 bp, Homo sapien
ttgcagctataaagaactctggatacaagcttt

SEQ ID NO: 336854 - DNA, 33 bp, Homo sapien
ttgcagctataaagaattctggatacaagcttt

SEQ ID NO: 336855 - DNA, 33 bp, Homo sapien
atcacctgctcccaaactccagaaataagaaag

SEQ ID NO: 336856 - DNA, 33 bp, Homo sapien
atcacctgctcccaaattccagaaataagaaag

SEQ ID NO: 336857 - DNA, 33 bp, Homo sapien
accctcttgaaaaggcaaaggggacgaagggct

SEQ ID NO: 336858 - DNA, 33 bp, Homo sapien
accctcttgaaaaggcgaaggggacgaagggct

SEQ ID NO: 336859 - DNA, 33 bp, Homo sapien
tatttggccataaagacaaacaaagtactggta

SEQ ID NO: 336860 - DNA, 33 bp, Homo sapien
tatttggccataaagagaaacaaagtactggta

SEQ ID NO: 336861 - DNA, 33 bp, Homo sapien
actgtaatctgacccacgttttagttgtagaat

SEQ ID NO: 336862 - DNA, 33 bp, Homo sapien
actgtaatctgacccatgttttagttgtagaat

SEQ ID NO: 336863 - DNA, 33 bp, Homo sapien
atgttaagcttccaagaaaacaaaaatcttgta

SEQ ID NO: 336864 - DNA, 33 bp, Homo sapien
atgttaagcttccaagtaaacaaaaatcttgta

SEQ ID NO: 336865 - DNA, 33 bp, Homo sapien
tggcaggaaagagtgcacaggggaaactaccac

SEQ ID NO: 336866 - DNA, 33 bp, Homo sapien
tggcaggaaagagtgcgcaggggaaactaccac

SEQ ID NO: 336867 - DNA, 33 bp, Homo sapien
tttaaaatttcagccactgaccaggtgtggttg

SEQ ID NO: 336868 - DNA, 33 bp, Homo sapien
tttaaaatttcagccattgaccaggtgtggttg

SEQ ID NO: 336869 - DNA, 33 bp, Homo sapien
gaatattcaaaccaccaaaacctacacgagaca

SEQ ID NO: 336870 - DNA, 33 bp, Homo sapien
gaatattcaaaccaccgaaacctacacgagaca

SEQ ID NO: 336871 - DNA, 33 bp, Homo sapien
tctttacataatctgaataggagtcccttgtca

SEQ ID NO: 336872 - DNA, 33 bp, Homo sapien
tctttacataatctgagtaggagtcccttgtca

SEQ ID NO: 336873 - DNA, 33 bp, Homo sapien
aaatgggcacagttgaagtttcttctgagggtg

SEQ ID NO: 336874 - DNA, 33 bp, Homo sapien
aaatgggcacagttgaggtttcttctgagggtg

SEQ ID NO: 336875 - DNA, 33 bp, Homo sapien
ttaatatctgactaaaccatttcagaaagagaa

SEQ ID NO: 336876 - DNA, 33 bp, Homo sapien
ttaatatctgactaaagcatttcagaaagagaa

SEQ ID NO: 336877 - DNA, 33 bp, Homo sapien
atgctagcttcattagaaatgttaagtgtctta

SEQ ID NO: 336878 - DNA, 33 bp, Homo sapien
atgctagcttcattaggaatgttaagtgtctta

SEQ ID NO: 336879 - DNA, 33 bp, Homo sapien
ccacaacttctcagcagagttcagagtctcatc

SEQ ID NO: 336880 - DNA, 33 bp, Homo sapien
ccacaacttctcagcatagttcagagtctcatc

SEQ ID NO: 336881 - DNA, 33 bp, Homo sapien
acagctggtaaactacagaattgcaggtctgga

SEQ ID NO: 336882 - DNA, 33 bp, Homo sapien
acagctggtaaactacggaattgcaggtctgga

SEQ ID NO: 336883 - DNA, 33 bp, Homo sapien
actatactcaagccccaatccttccaaactagc

SEQ ID NO: 336884 - DNA, 33 bp, Homo sapien
actatactcaagccccgatccttccaaactagc

SEQ ID NO: 336885 - DNA, 33 bp, Homo sapien
cacttcgtaactgtgtgaagttggcccccagta

SEQ ID NO: 336886 - DNA, 33 bp, Homo sapien
cacttcgtaactgtgttaagttggcccccagta

SEQ ID NO: 336887 - DNA, 33 bp, Homo sapien
aaagaaggaactgtgaaatatacttgtagggta

SEQ ID NO: 336888 - DNA, 33 bp, Homo sapien
aaagaaggaactgtgacatatacttgtagggta

SEQ ID NO: 336889 - DNA, 33 bp, Homo sapien
ctatgggaagatgctaaccagccataaaggaaa

SEQ ID NO: 336890 - DNA, 33 bp, Homo sapien
ctatgggaagatgctagccagccataaaggaaa

SEQ ID NO: 336891 - DNA, 33 bp, Homo sapien
catttatagacttcaactgctcatccaaaaaat

SEQ ID NO: 336892 - DNA, 33 bp, Homo sapien
catttatagacttcaattgctcatccaaaaaat

SEQ ID NO: 336893 - DNA, 33 bp, Homo sapien
aaaaatgcttagaaaactgtgaagcactataac

SEQ ID NO: 336894 - DNA, 33 bp, Homo sapien
aaaaatgcttagaaaagtgtgaagcactataac

SEQ ID NO: 336895 - DNA, 33 bp, Homo sapien
acactgccaagcaggacagcacagatatgaatg

SEQ ID NO: 336896 - DNA, 33 bp, Homo sapien
acactgccaagcaggagagcacagatatgaatg

SEQ ID NO: 336897 - DNA, 33 bp, Homo sapien
aatggaccggagaccacggtagtcaataggttc

SEQ ID NO: 336898 - DNA, 33 bp, Homo sapien
aatggaccggagaccatggtagtcaataggttc

SEQ ID NO: 336899 - DNA, 33 bp, Homo sapien
gaatctggtagagaacaatacaggcaggatcct

SEQ ID NO: 336900 - DNA, 33 bp, Homo sapien
gaatctggtagagaaccatacaggcaggatcct

SEQ ID NO: 336901 - DNA, 33 bp, Homo sapien
tgatgatgtggtttaaaatacaatttgcatgac

SEQ ID NO: 336902 - DNA, 33 bp, Homo sapien
tgatgatgtggtttaagatacaatttgcatgac

SEQ ID NO: 336903 - DNA, 33 bp, Homo sapien
aaatgttgttcgtgtagcttgtgtttcagtttt

SEQ ID NO: 336904 - DNA, 33 bp, Homo sapien
aaatgttgttcgtgtatcttgtgtttcagtttt

SEQ ID NO: 336905 - DNA, 33 bp, Homo sapien
aaacctattcaggccagaatcagaaagcaataa

SEQ ID NO: 336906 - DNA, 33 bp, Homo sapien
aaacctattcaggccataatcagaaagcaataa

SEQ ID NO: 336907 - DNA, 33 bp, Homo sapien
caagagtggaccctaaagtaatctgtggactct

SEQ ID NO: 336908 - DNA, 33 bp, Homo sapien
caagagtggaccctaatgtaatctgtggactct

SEQ ID NO: 336909 - DNA, 33 bp, Homo sapien
ccattgaacctaaaacccatacatttcttgaaa

SEQ ID NO: 336910 - DNA, 33 bp, Homo sapien
ccattgaacctaaaactcatacatttcttgaaa

SEQ ID NO: 336911 - DNA, 33 bp, Homo sapien
ttgaagtgtgccccagaaatgaaaatcacttta

SEQ ID NO: 336912 - DNA, 33 bp, Homo sapien
ttgaagtgtgccccagcaatgaaaatcacttta

SEQ ID NO: 336913 - DNA, 33 bp, Homo sapien
gtgctcagtgttagccacattgttctgactaaa

SEQ ID NO: 336914 - DNA, 33 bp, Homo sapien
gtgctcagtgttagccgcattgttctgactaaa

SEQ ID NO: 336915 - DNA, 33 bp, Homo sapien
tctagattaccataccggaggatgaaagaagga

SEQ ID NO: 336916 - DNA, 33 bp, Homo sapien
tctagattaccatacctgaggatgaaagaagga

SEQ ID NO: 336917 - DNA, 33 bp, Homo sapien
ctctacttagctctgacaatgtctcatttatac

SEQ ID NO: 336918 - DNA, 33 bp, Homo sapien
ctctacttagctctgagaatgtctcatttatac

SEQ ID NO: 336919 - DNA, 33 bp, Homo sapien
cggagttacatagcaaagacacagagcacattt

SEQ ID NO: 336920 - DNA, 33 bp, Homo sapien
cggagttacatagcaaggacacagagcacattt

SEQ ID NO: 336921 - DNA, 33 bp, Homo sapien
ttttcacaggagtcaaacctctattgtaaactg

SEQ ID NO: 336922 - DNA, 33 bp, Homo sapien
ttttcacaggagtcaagcctctattgtaaactg

SEQ ID NO: 336923 - DNA, 33 bp, Homo sapien
ggaccatgtttaactacgttggcagagtcaggg

SEQ ID NO: 336924 - DNA, 33 bp, Homo sapien
ggaccatgtttaactatgttggcagagtcaggg

SEQ ID NO: 336925 - DNA, 33 bp, Homo sapien
tcataagtttggctagaaaaattgggatccatc

SEQ ID NO: 336926 - DNA, 33 bp, Homo sapien
tcataagtttggctaggaaaattgggatccatc

SEQ ID NO: 336927 - DNA, 33 bp, Homo sapien
gctgggaggagtcttacgttattgcctaagagt

SEQ ID NO: 336928 - DNA, 33 bp, Homo sapien
gctgggaggagtcttatgttattgcctaagagt

SEQ ID NO: 336929 - DNA, 33 bp, Homo sapien
cctggcccagatttgaactttcatattttgaaa

SEQ ID NO: 336930 - DNA, 33 bp, Homo sapien
cctggcccagatttgacctttcatattttgaaa

SEQ ID NO: 336931 - DNA, 33 bp, Homo sapien
atatgattgaaagtctcaaattccgtttgctga

SEQ ID NO: 336932 - DNA, 33 bp, Homo sapien
atatgattgaaagtctgaaattccgtttgctga

SEQ ID NO: 336933 - DNA, 33 bp, Homo sapien
tgccaaccctgggccgaagaagctgagaccttc

SEQ ID NO: 336934 - DNA, 33 bp, Homo sapien
tgccaaccctgggccggagaagctgagaccttc

SEQ ID NO: 336935 - DNA, 33 bp, Homo sapien
ttgaagtatgcatttaaaaagaaacctaagact

SEQ ID NO: 336936 - DNA, 33 bp, Homo sapien
ttgaagtatgcatttagaaagaaacctaagact

SEQ ID NO: 336937 - DNA, 33 bp, Homo sapien
atcctatagtatcaaactcctgagaactgtttt

SEQ ID NO: 336938 - DNA, 33 bp, Homo sapien
atcctatagtatcaaattcctgagaactgtttt

SEQ ID NO: 336939 - DNA, 33 bp, Homo sapien
ggactcaccatctctacgcacctcaaatccaaa

SEQ ID NO: 336940 - DNA, 33 bp, Homo sapien
ggactcaccatctctatgcacctcaaatccaaa

SEQ ID NO: 336941 - DNA, 33 bp, Homo sapien
catagagaaattgaagcctggatgaagaaaatg

SEQ ID NO: 336942 - DNA, 33 bp, Homo sapien
catagagaaattgaaggctggatgaagaaaatg

SEQ ID NO: 336943 - DNA, 33 bp, Homo sapien
tctgtcaattctctaacgtactgatgggctttc

SEQ ID NO: 336944 - DNA, 33 bp, Homo sapien
tctgtcaattctctaatgtactgatgggctttc

SEQ ID NO: 336945 - DNA, 33 bp, Homo sapien
tagagcatcaaatacactggcacattggctaag

SEQ ID NO: 336946 - DNA, 33 bp, Homo sapien
tagagcatcaaatacattggcacattggctaag

SEQ ID NO: 336947 - DNA, 33 bp, Homo sapien
atgggcatataggtcacctttcagttcagcaaa

SEQ ID NO: 336948 - DNA, 33 bp, Homo sapien
atgggcatataggtcatctttcagttcagcaaa

SEQ ID NO: 336949 - DNA, 33 bp, Homo sapien
taagtgttagatcagaacctttctgtccatact

SEQ ID NO: 336950 - DNA, 33 bp, Homo sapien
taagtgttagatcagaccctttctgtccatact

SEQ ID NO: 336951 - DNA, 33 bp, Homo sapien
gcgtttttaggaagcacgtagaactctctgctc

SEQ ID NO: 336952 - DNA, 33 bp, Homo sapien
gcgtttttaggaagcatgtagaactctctgctc

SEQ ID NO: 336953 - DNA, 33 bp, Homo sapien
ggcctagttacagggacgtcaaactaggaggtt

SEQ ID NO: 336954 - DNA, 33 bp, Homo sapien
ggcctagttacagggatgtcaaactaggaggtt

SEQ ID NO: 336955 - DNA, 33 bp, Homo sapien
ataacctggacattgccaagacagcttcctcag

SEQ ID NO: 336956 - DNA, 33 bp, Homo sapien
ataacctggacattgctaagacagcttcctcag

SEQ ID NO: 336957 - DNA, 33 bp, Homo sapien
gcagtgggagaaaacaaagaggaattggtaact

SEQ ID NO: 336958 - DNA, 33 bp, Homo sapien
gcagtgggagaaaacagagaggaattggtaact

SEQ ID NO: 336959 - DNA, 33 bp, Homo sapien
gaaatcaaaatccagaataaattgaacttgaac

SEQ ID NO: 336960 - DNA, 33 bp, Homo sapien
gaaatcaaaatccagagtaaattgaacttgaac

SEQ ID NO: 336961 - DNA, 33 bp, Homo sapien
ctcttgtaagcagtgaaagactggcaaggattt

SEQ ID NO: 336962 - DNA, 33 bp, Homo sapien
ctcttgtaagcagtgagagactggcaaggattt

SEQ ID NO: 336963 - DNA, 33 bp, Homo sapien
atgttgatttgtaccaagtattagattccacca

SEQ ID NO: 336964 - DNA, 33 bp, Homo sapien
atgttgatttgtaccaggtattagattccacca

SEQ ID NO: 336965 - DNA, 33 bp, Homo sapien
tttatgtgactctttacgacttgtgtcttttaa

SEQ ID NO: 336966 - DNA, 33 bp, Homo sapien
tttatgtgactctttatgacttgtgtcttttaa

SEQ ID NO: 336967 - DNA, 33 bp, Homo sapien
acatctggattgcagcagctaacagggaatacc

SEQ ID NO: 336968 - DNA, 33 bp, Homo sapien
acatctggattgcagcggctaacagggaatacc

SEQ ID NO: 336969 - DNA, 33 bp, Homo sapien
tcaggatctaactcaaatctggcttctatgact

SEQ ID NO: 336970 - DNA, 33 bp, Homo sapien
tcaggatctaactcaagtctggcttctatgact

SEQ ID NO: 336971 - DNA, 33 bp, Homo sapien
ggggaggaaactttctcactatcaatggcagga

SEQ ID NO: 336972 - DNA, 33 bp, Homo sapien
ggggaggaaactttcttactatcaatggcagga

SEQ ID NO: 336973 - DNA, 33 bp, Homo sapien
aagcacagagactgcacggtacaaaggagcaag

SEQ ID NO: 336974 - DNA, 33 bp, Homo sapien
aagcacagagactgcagggtacaaaggagcaag

SEQ ID NO: 336975 - DNA, 33 bp, Homo sapien
aatcataacggatcacagcagatataaaaattc

SEQ ID NO: 336976 - DNA, 33 bp, Homo sapien
aatcataacggatcacggcagatataaaaattc

SEQ ID NO: 336977 - DNA, 33 bp, Homo sapien
gtctgtatgtcctccacgtctagacaacgatat

SEQ ID NO: 336978 - DNA, 33 bp, Homo sapien
gtctgtatgtcctccatgtctagacaacgatat

SEQ ID NO: 336979 - DNA, 33 bp, Homo sapien
aagttattcagccacaaattcctttataaaaca

SEQ ID NO: 336980 - DNA, 33 bp, Homo sapien
aagttattcagccacagattcctttataaaaca

SEQ ID NO: 336981 - DNA, 33 bp, Homo sapien
attttgtgtcacttacaagcacctgaatgaagt

SEQ ID NO: 336982 - DNA, 33 bp, Homo sapien
attttgtgtcacttacgagcacctgaatgaagt

SEQ ID NO: 336983 - DNA, 33 bp, Homo sapien
gccaggcttcccagaaacagcatctccagctgc

SEQ ID NO: 336984 - DNA, 33 bp, Homo sapien
gccaggcttcccagaatcagcatctccagctgc

SEQ ID NO: 336985 - DNA, 33 bp, Homo sapien
ttcaaggtcaaggcaaatcctgctgatggctga

SEQ ID NO: 336986 - DNA, 33 bp, Homo sapien
ttcaaggtcaaggcaactcctgctgatggctga

SEQ ID NO: 336987 - DNA, 33 bp, Homo sapien
taccactttagctgaacgccacaaatattgttc

SEQ ID NO: 336988 - DNA, 33 bp, Homo sapien
taccactttagctgaatgccacaaatattgttc

SEQ ID NO: 336989 - DNA, 33 bp, Homo sapien
ctcctaccacttcaggaatgttacttgtagttg

SEQ ID NO: 336990 - DNA, 33 bp, Homo sapien
ctcctaccacttcagggatgttacttgtagttg

SEQ ID NO: 336991 - DNA, 33 bp, Homo sapien
tctgtttatcacagaacgtgtggcttggcgaat

SEQ ID NO: 336992 - DNA, 33 bp, Homo sapien
tctgtttatcacagaatgtgtggcttggcgaat

SEQ ID NO: 336993 - DNA, 33 bp, Homo sapien
atgaatatgcaacatcacagtaggtcaaaggct

SEQ ID NO: 336994 - DNA, 33 bp, Homo sapien
atgaatatgcaacatcccagtaggtcaaaggct

SEQ ID NO: 336995 - DNA, 33 bp, Homo sapien
tgcagcagctttgaagaccttggtgggatagag

SEQ ID NO: 336996 - DNA, 33 bp, Homo sapien
tgcagcagctttgaagcccttggtgggatagag

SEQ ID NO: 336997 - DNA, 33 bp, Homo sapien
aggggcttccttgcgaaagaaggctgtactcaa

SEQ ID NO: 336998 - DNA, 33 bp, Homo sapien
aggggcttccttgcgagagaaggctgtactcaa

SEQ ID NO: 336999 - DNA, 33 bp, Homo sapien
gtaaattagcttcgtgcagatatggttagggtt

SEQ ID NO: 337000 - DNA, 33 bp, Homo sapien
gtaaattagcttcgtggagatatggttagggtt

SEQ ID NO: 337001 - DNA, 33 bp, Homo sapien
caaaaatagattgaaaggtagaggcttttaaat

SEQ ID NO: 337002 - DNA, 33 bp, Homo sapien
caaaaatagattgaaatgtagaggcttttaaat

SEQ ID NO: 337003 - DNA, 33 bp, Homo sapien
acatctattccatgcaaaaacaactatgaaaga

SEQ ID NO: 337004 - DNA, 33 bp, Homo sapien
acatctattccatgcagaaacaactatgaaaga

SEQ ID NO: 337005 - DNA, 33 bp, Homo sapien
gatgactaagtggctaaaatgtcactcagagtc

SEQ ID NO: 337006 - DNA, 33 bp, Homo sapien
gatgactaagtggctagaatgtcactcagagtc

SEQ ID NO: 337007 - DNA, 33 bp, Homo sapien
gaaagatttaaggtgaaaaggactgagtaagga

SEQ ID NO: 337008 - DNA, 33 bp, Homo sapien
gaaagatttaaggtgagaaggactgagtaagga

SEQ ID NO: 337009 - DNA, 33 bp, Homo sapien
catagtctcacaataaggctgctcaaaaggggc

SEQ ID NO: 337010 - DNA, 33 bp, Homo sapien
catagtctcacaataatgctgctcaaaaggggc

SEQ ID NO: 337011 - DNA, 33 bp, Homo sapien
atgccaggtcaataaccgagatttacaggccca

SEQ ID NO: 337012 - DNA, 33 bp, Homo sapien
atgccaggtcaataactgagatttacaggccca

SEQ ID NO: 337013 - DNA, 33 bp, Homo sapien
tctaagagagactagaagcagtaacaaataaag

SEQ ID NO: 337014 - DNA, 33 bp, Homo sapien
tctaagagagactagatgcagtaacaaataaag

SEQ ID NO: 337015 - DNA, 33 bp, Homo sapien
actagttatgcagaaacgattttaggaaataca

SEQ ID NO: 337016 - DNA, 33 bp, Homo sapien
actagttatgcagaaatgattttaggaaataca

SEQ ID NO: 337017 - DNA, 33 bp, Homo sapien
ggctcatacatacggcgcacagatgagggctgg

SEQ ID NO: 337018 - DNA, 33 bp, Homo sapien
ggctcatacatacggctcacagatgagggctgg

SEQ ID NO: 337019 - DNA, 33 bp, Homo sapien
tgcattccaagtttcaaataagcagcttataaa

SEQ ID NO: 337020 - DNA, 33 bp, Homo sapien
tgcattccaagtttcagataagcagcttataaa

SEQ ID NO: 337021 - DNA, 33 bp, Homo sapien
ttcatcaaaatgctataaagccaagcatatttt

SEQ ID NO: 337022 - DNA, 33 bp, Homo sapien
ttcatcaaaatgctatgaagccaagcatatttt

SEQ ID NO: 337023 - DNA, 33 bp, Homo sapien
tactggctgcttcatccataaggagtccaatat

SEQ ID NO: 337024 - DNA, 33 bp, Homo sapien
tactggctgcttcatctataaggagtccaatat

SEQ ID NO: 337025 - DNA, 33 bp, Homo sapien
tttcaagccaaatgataactcccaacagagaag

SEQ ID NO: 337026 - DNA, 33 bp, Homo sapien
tttcaagccaaatgatgactcccaacagagaag

SEQ ID NO: 337027 - DNA, 33 bp, Homo sapien
aaatagatgttctcaaaaaagttatgtctactc

SEQ ID NO: 337028 - DNA, 33 bp, Homo sapien
aaatagatgttctcaagaaagttatgtctactc

SEQ ID NO: 337029 - DNA, 33 bp, Homo sapien
ggatcctgaagataaccggaggaggacagaact

SEQ ID NO: 337030 - DNA, 33 bp, Homo sapien
ggatcctgaagataacgggaggaggacagaact

SEQ ID NO: 337031 - DNA, 33 bp, Homo sapien
gaaagagtgaatctaccaggtttgtgagtggac

SEQ ID NO: 337032 - DNA, 33 bp, Homo sapien
gaaagagtgaatctactaggtttgtgagtggac

SEQ ID NO: 337033 - DNA, 33 bp, Homo sapien
tctctaggccagctaacgaacaaccttagttcc

SEQ ID NO: 337034 - DNA, 33 bp, Homo sapien
tctctaggccagctaatgaacaaccttagttcc

SEQ ID NO: 337035 - DNA, 33 bp, Homo sapien
attggctagaacaagaaaaaactagaagcaaga

SEQ ID NO: 337036 - DNA, 33 bp, Homo sapien
attggctagaacaagagaaaactagaagcaaga

SEQ ID NO: 337037 - DNA, 33 bp, Homo sapien
cttctccctaacacagaccctaaaacaatcaaa

SEQ ID NO: 337038 - DNA, 33 bp, Homo sapien
cttctccctaacacaggccctaaaacaatcaaa

SEQ ID NO: 337039 - DNA, 33 bp, Homo sapien
cttaaaatcttcaaaggccgcttattgccagag

SEQ ID NO: 337040 - DNA, 33 bp, Homo sapien
cttaaaatcttcaaagtccgcttattgccagag

SEQ ID NO: 337041 - DNA, 33 bp, Homo sapien
cactgagactcctaaacaatgtagccagcgttg

SEQ ID NO: 337042 - DNA, 33 bp, Homo sapien
cactgagactcctaaataatgtagccagcgttg

SEQ ID NO: 337043 - DNA, 33 bp, Homo sapien
tacaggtatttcttaaatgaataaagccaccca

SEQ ID NO: 337044 - DNA, 33 bp, Homo sapien
tacaggtatttcttaagtgaataaagccaccca

SEQ ID NO: 337045 - DNA, 33 bp, Homo sapien
cctgcatgttggttgaccaggctttgaggttaa

SEQ ID NO: 337046 - DNA, 33 bp, Homo sapien
cctgcatgttggttgatcaggctttgaggttaa

SEQ ID NO: 337047 - DNA, 33 bp, Homo sapien
atcctgttggaaaacaatccttccttcagtttg

SEQ ID NO: 337048 - DNA, 33 bp, Homo sapien
atcctgttggaaaacagtccttccttcagtttg

SEQ ID NO: 337049 - DNA, 33 bp, Homo sapien
cttctcaaactaggtaacactccctcatagcag

SEQ ID NO: 337050 - DNA, 33 bp, Homo sapien
cttctcaaactaggtagcactccctcatagcag

SEQ ID NO: 337051 - DNA, 33 bp, Homo sapien
agcactgttcaaagaaatggattctagctataa

SEQ ID NO: 337052 - DNA, 33 bp, Homo sapien
agcactgttcaaagaagtggattctagctataa

SEQ ID NO: 337053 - DNA, 33 bp, Homo sapien
tctcctacactgttcaagggaatgtagattagt

SEQ ID NO: 337054 - DNA, 33 bp, Homo sapien
tctcctacactgttcatgggaatgtagattagt

SEQ ID NO: 337055 - DNA, 33 bp, Homo sapien
ctggatcattgtagcaaaccagaaaaagtatgt

SEQ ID NO: 337056 - DNA, 33 bp, Homo sapien
ctggatcattgtagcagaccagaaaaagtatgt

SEQ ID NO: 337057 - DNA, 33 bp, Homo sapien
gaattggttctgcagacacgagggatttgcccg

SEQ ID NO: 337058 - DNA, 33 bp, Homo sapien
gaattggttctgcagagacgagggatttgcccg

SEQ ID NO: 337059 - DNA, 33 bp, Homo sapien
gacatttatgcggccaaaaaacataagaaaaac

SEQ ID NO: 337060 - DNA, 33 bp, Homo sapien
gacatttatgcggccagaaaacataagaaaaac

SEQ ID NO: 337061 - DNA, 33 bp, Homo sapien
catgtgtcatcaaaacccaattccttttcctcc

SEQ ID NO: 337062 - DNA, 33 bp, Homo sapien
catgtgtcatcaaaactcaattccttttcctcc

SEQ ID NO: 337063 - DNA, 33 bp, Homo sapien
ttctacgtttatctcaataagtgtctttatcct

SEQ ID NO: 337064 - DNA, 33 bp, Homo sapien
ttctacgtttatctcagtaagtgtctttatcct

SEQ ID NO: 337065 - DNA, 33 bp, Homo sapien
aaaagcgaaatggagacaggaagtaatgataca

SEQ ID NO: 337066 - DNA, 33 bp, Homo sapien
aaaagcgaaatggagagaggaagtaatgataca

SEQ ID NO: 337067 - DNA, 33 bp, Homo sapien
tatgacaaatgcacaacgagtaatctaccctga

SEQ ID NO: 337068 - DNA, 33 bp, Homo sapien
tatgacaaatgcacaatgagtaatctaccctga

SEQ ID NO: 337069 - DNA, 33 bp, Homo sapien
aaaaagaccttgcccacggtgttgtccgcatgg

SEQ ID NO: 337070 - DNA, 33 bp, Homo sapien
aaaaagaccttgcccatggtgttgtccgcatgg

SEQ ID NO: 337071 - DNA, 33 bp, Homo sapien
aaaggacagagcatgaagggggtttcaatgaag

SEQ ID NO: 337072 - DNA, 33 bp, Homo sapien
aaaggacagagcatgaggggggtttcaatgaag

SEQ ID NO: 337073 - DNA, 33 bp, Homo sapien
tgtgtgcagaaagatacgcctaggttatatgca

SEQ ID NO: 337074 - DNA, 33 bp, Homo sapien
tgtgtgcagaaagatatgcctaggttatatgca

SEQ ID NO: 337075 - DNA, 33 bp, Homo sapien
ctatatctcagaaaccaaaaataaaattgagac

SEQ ID NO: 337076 - DNA, 33 bp, Homo sapien
ctatatctcagaaaccgaaaataaaattgagac

SEQ ID NO: 337077 - DNA, 33 bp, Homo sapien
tgatgcagttcaccgacgaaaaaattctacaaa

SEQ ID NO: 337078 - DNA, 33 bp, Homo sapien
tgatgcagttcaccgaggaaaaaattctacaaa

SEQ ID NO: 337079 - DNA, 33 bp, Homo sapien
tcaccaggtggacaatcaagtctatgaataaag

SEQ ID NO: 337080 - DNA, 33 bp, Homo sapien
tcaccaggtggacaatgaagtctatgaataaag

SEQ ID NO: 337081 - DNA, 33 bp, Homo sapien
ttaagtattgcagaaaatgtgctctcttgacaa

SEQ ID NO: 337082 - DNA, 33 bp, Homo sapien
ttaagtattgcagaaagtgtgctctcttgacaa

SEQ ID NO: 337083 - DNA, 33 bp, Homo sapien
atcactgagtcagaaactggtgcttgaagactc

SEQ ID NO: 337084 - DNA, 33 bp, Homo sapien
atcactgagtcagaaattggtgcttgaagactc

SEQ ID NO: 337085 - DNA, 33 bp, Homo sapien
ttaatcgacaagcccacggtgcaagtgcaacta

SEQ ID NO: 337086 - DNA, 33 bp, Homo sapien
ttaatcgacaagcccatggtgcaagtgcaacta

SEQ ID NO: 337087 - DNA, 33 bp, Homo sapien
tttctctgccttacaaccttagtttgacttgat

SEQ ID NO: 337088 - DNA, 33 bp, Homo sapien
tttctctgccttacaagcttagtttgacttgat

SEQ ID NO: 337089 - DNA, 33 bp, Homo sapien
tcctcacctctctcaaacttcgtagaattgaat

SEQ ID NO: 337090 - DNA, 33 bp, Homo sapien
tcctcacctctctcaaccttcgtagaattgaat

SEQ ID NO: 337091 - DNA, 33 bp, Homo sapien
aggaagtgtagtagagccaaagtcgaagttggt

SEQ ID NO: 337092 - DNA, 33 bp, Homo sapien
aggaagtgtagtagagtcaaagtcgaagttggt

SEQ ID NO: 337093 - DNA, 33 bp, Homo sapien
tggggttgtgctagcaccgggcagtgagcagag

SEQ ID NO: 337094 - DNA, 33 bp, Homo sapien
tggggttgtgctagcatcgggcagtgagcagag

SEQ ID NO: 337095 - DNA, 33 bp, Homo sapien
aggagggtctgttaccaattgcttaaaagaaaa

SEQ ID NO: 337096 - DNA, 33 bp, Homo sapien
aggagggtctgttacccattgcttaaaagaaaa

SEQ ID NO: 337097 - DNA, 33 bp, Homo sapien
tgctccaatctacttacatttcatgcttttata

SEQ ID NO: 337098 - DNA, 33 bp, Homo sapien
tgctccaatctacttatatttcatgcttttata

SEQ ID NO: 337099 - DNA, 33 bp, Homo sapien
attgcttttcaagtacgagagaaacaaaaggtc

SEQ ID NO: 337100 - DNA, 33 bp, Homo sapien
attgcttttcaagtactagagaaacaaaaggtc

SEQ ID NO: 337101 - DNA, 33 bp, Homo sapien
gttgtagagtaccaaaaagaaccaaataactca

SEQ ID NO: 337102 - DNA, 33 bp, Homo sapien
gttgtagagtaccaaacagaaccaaataactca

SEQ ID NO: 337103 - DNA, 33 bp, Homo sapien
gcaaattgagtggcttaaaacaaaatggtttct

SEQ ID NO: 337104 - DNA, 33 bp, Homo sapien
gcaaattgagtggcttcaaacaaaatggtttct

SEQ ID NO: 337105 - DNA, 33 bp, Homo sapien
ctggagtctttggaggaagagcaattttgccca

SEQ ID NO: 337106 - DNA, 33 bp, Homo sapien
ctggagtctttggagggagagcaattttgccca

SEQ ID NO: 337107 - DNA, 33 bp, Homo sapien
ttaaagactgaccatacgaaattttgatgagac

SEQ ID NO: 337108 - DNA, 33 bp, Homo sapien
ttaaagactgaccatatgaaattttgatgagac

SEQ ID NO: 337109 - DNA, 33 bp, Homo sapien
tctggcacctaatagaacctaatgtattttgtt

SEQ ID NO: 337110 - DNA, 33 bp, Homo sapien
tctggcacctaatagagcctaatgtattttgtt

SEQ ID NO: 337111 - DNA, 33 bp, Homo sapien
gaaggtcagccaagtaaaagacaagaggatgtt

SEQ ID NO: 337112 - DNA, 33 bp, Homo sapien
gaaggtcagccaagtagaagacaagaggatgtt

SEQ ID NO: 337113 - DNA, 33 bp, Homo sapien
caaggagggtcacagaatccaaataatttctgc

SEQ ID NO: 337114 - DNA, 33 bp, Homo sapien
caaggagggtcacagagtccaaataatttctgc

SEQ ID NO: 337115 - DNA, 33 bp, Homo sapien
cttttctgtctcatcaatctattacgtctcctt

SEQ ID NO: 337116 - DNA, 33 bp, Homo sapien
cttttctgtctcatcactctattacgtctcctt

SEQ ID NO: 337117 - DNA, 33 bp, Homo sapien
gtggtgctaaggtttacgcttctattaacctca

SEQ ID NO: 337118 - DNA, 33 bp, Homo sapien
gtggtgctaaggtttaggcttctattaacctca

SEQ ID NO: 337119 - DNA, 33 bp, Homo sapien
ccagataagcaatcagcaagggtatttgtcaca

SEQ ID NO: 337120 - DNA, 33 bp, Homo sapien
ccagataagcaatcaggaagggtatttgtcaca

SEQ ID NO: 337121 - DNA, 33 bp, Homo sapien
ccccattgaaggtgaaaaatgtatgctggggaa

SEQ ID NO: 337122 - DNA, 33 bp, Homo sapien
ccccattgaaggtgaagaatgtatgctggggaa

SEQ ID NO: 337123 - DNA, 33 bp, Homo sapien
ggctgaacagggagctcagaccactgtgcactt

SEQ ID NO: 337124 - DNA, 33 bp, Homo sapien
ggctgaacagggagcttagaccactgtgcactt

SEQ ID NO: 337125 - DNA, 33 bp, Homo sapien
atgtgttctgctttctaaaaaaaatggaaaggt

SEQ ID NO: 337126 - DNA, 33 bp, Homo sapien
atgtgttctgctttctcaaaaaaatggaaaggt

SEQ ID NO: 337127 - DNA, 33 bp, Homo sapien
tgtattgtatatgcacggataaatgttgcttta

SEQ ID NO: 337128 - DNA, 33 bp, Homo sapien
tgtattgtatatgcactgataaatgttgcttta

SEQ ID NO: 337129 - DNA, 33 bp, Homo sapien
attggcctttggttaaagatggagtgttttgtt

SEQ ID NO: 337130 - DNA, 33 bp, Homo sapien
attggcctttggttaaggatggagtgttttgtt

SEQ ID NO: 337131 - DNA, 33 bp, Homo sapien
gccttaaatacgtttcaaacatacttgtgaaac

SEQ ID NO: 337132 - DNA, 33 bp, Homo sapien
gccttaaatacgtttccaacatacttgtgaaac

SEQ ID NO: 337133 - DNA, 33 bp, Homo sapien
acccattcaccagaacacagtatggataagaga

SEQ ID NO: 337134 - DNA, 33 bp, Homo sapien
acccattcaccagaacgcagtatggataagaga

SEQ ID NO: 337135 - DNA, 33 bp, Homo sapien
cataacttcatttttaaagatgggccaacctgg

SEQ ID NO: 337136 - DNA, 33 bp, Homo sapien
cataacttcatttttagagatgggccaacctgg

SEQ ID NO: 337137 - DNA, 33 bp, Homo sapien
gtaatgaaatcaggaaatggagaatgatcacat

SEQ ID NO: 337138 - DNA, 33 bp, Homo sapien
gtaatgaaatcaggaactggagaatgatcacat

SEQ ID NO: 337139 - DNA, 33 bp, Homo sapien
agaacctgactggagaactgggattcattaagc

SEQ ID NO: 337140 - DNA, 33 bp, Homo sapien
agaacctgactggagagctgggattcattaagc

SEQ ID NO: 337141 - DNA, 33 bp, Homo sapien
ccttgtatacaagtgacgtcccagattataatt

SEQ ID NO: 337142 - DNA, 33 bp, Homo sapien
ccttgtatacaagtgatgtcccagattataatt

SEQ ID NO: 337143 - DNA, 33 bp, Homo sapien
gatctgttcagtaacccatgaagcaaacagtgc

SEQ ID NO: 337144 - DNA, 33 bp, Homo sapien
gatctgttcagtaaccgatgaagcaaacagtgc

SEQ ID NO: 337145 - DNA, 33 bp, Homo sapien
aagaaacaaccaaggaaataaagctagcagtgg

SEQ ID NO: 337146 - DNA, 33 bp, Homo sapien
aagaaacaaccaaggatataaagctagcagtgg

SEQ ID NO: 337147 - DNA, 33 bp, Homo sapien
ccattaccaaacctacaatgctttacagattaa

SEQ ID NO: 337148 - DNA, 33 bp, Homo sapien
ccattaccaaacctactatgctttacagattaa

SEQ ID NO: 337149 - DNA, 33 bp, Homo sapien
tttgagatggctcacgcacagtatgatggctcc

SEQ ID NO: 337150 - DNA, 33 bp, Homo sapien
tttgagatggctcacggacagtatgatggctcc

SEQ ID NO: 337151 - DNA, 33 bp, Homo sapien
tctgtgttctatggaaccgatattgagtctggt

SEQ ID NO: 337152 - DNA, 33 bp, Homo sapien
tctgtgttctatggaagcgatattgagtctggt

SEQ ID NO: 337153 - DNA, 33 bp, Homo sapien
taagtaaaaggtcttacaaagcagtggtcccaa

SEQ ID NO: 337154 - DNA, 33 bp, Homo sapien
taagtaaaaggtcttataaagcagtggtcccaa

SEQ ID NO: 337155 - DNA, 33 bp, Homo sapien
aataacatcctttgtccctgaaccaagtttcat

SEQ ID NO: 337156 - DNA, 33 bp, Homo sapien
aataacatcctttgtctctgaaccaagtttcat

SEQ ID NO: 337157 - DNA, 33 bp, Homo sapien
ttttcatcgtcttctccaggaatcacccatcag

SEQ ID NO: 337158 - DNA, 33 bp, Homo sapien
ttttcatcgtcttctctaggaatcacccatcag

SEQ ID NO: 337159 - DNA, 33 bp, Homo sapien
attctcattcagaaaaagcacaaattcttaatc

SEQ ID NO: 337160 - DNA, 33 bp, Homo sapien
attctcattcagaaaaggcacaaattcttaatc

SEQ ID NO: 337161 - DNA, 33 bp, Homo sapien
ggaacactttggcagagcagaacttttttcaga

SEQ ID NO: 337162 - DNA, 33 bp, Homo sapien
ggaacactttggcagatcagaacttttttcaga

SEQ ID NO: 337163 - DNA, 33 bp, Homo sapien
agtgcttttttgagtcactcaatccttcataaa

SEQ ID NO: 337164 - DNA, 33 bp, Homo sapien
agtgcttttttgagtctctcaatccttcataaa

SEQ ID NO: 337165 - DNA, 33 bp, Homo sapien
acaggatttttatggaacaaagggctttgatgt

SEQ ID NO: 337166 - DNA, 33 bp, Homo sapien
acaggatttttatggagcaaagggctttgatgt

SEQ ID NO: 337167 - DNA, 33 bp, Homo sapien
gtctctgaacctctgacggatctgcttagtgca

SEQ ID NO: 337168 - DNA, 33 bp, Homo sapien
gtctctgaacctctgagggatctgcttagtgca

SEQ ID NO: 337169 - DNA, 33 bp, Homo sapien
aatggataacagcatccaatggcactgctgtat

SEQ ID NO: 337170 - DNA, 33 bp, Homo sapien
aatggataacagcatctaatggcactgctgtat

SEQ ID NO: 337171 - DNA, 33 bp, Homo sapien
ttgtaacagtaccatcaagtcaatgctgtcttt

SEQ ID NO: 337172 - DNA, 33 bp, Homo sapien
ttgtaacagtaccatcgagtcaatgctgtcttt

SEQ ID NO: 337173 - DNA, 33 bp, Homo sapien
agtctgtgataacttacggcagccctgggaaac

SEQ ID NO: 337174 - DNA, 33 bp, Homo sapien
agtctgtgataacttatggcagccctgggaaac

SEQ ID NO: 337175 - DNA, 33 bp, Homo sapien
tctgggaagctgaaatgaactctgcctctactg

SEQ ID NO: 337176 - DNA, 33 bp, Homo sapien
tctgggaagctgaaattaactctgcctctactg

SEQ ID NO: 337177 - DNA, 33 bp, Homo sapien
aattttgcccctagtgaaggaatctgttgtacg

SEQ ID NO: 337178 - DNA, 33 bp, Homo sapien
aattttgcccctagtgcaggaatctgttgtacg

SEQ ID NO: 337179 - DNA, 33 bp, Homo sapien
acccatagatgtagaaatgttgaacgtacaaca

SEQ ID NO: 337180 - DNA, 33 bp, Homo sapien
acccatagatgtagaagtgttgaacgtacaaca

SEQ ID NO: 337181 - DNA, 33 bp, Homo sapien
acatgttagggagaaacattctgaaaccataaa

SEQ ID NO: 337182 - DNA, 33 bp, Homo sapien
acatgttagggagaaatattctgaaaccataaa

SEQ ID NO: 337183 - DNA, 33 bp, Homo sapien
taaaatgtgtggtgcaactaatcagtactatgg

SEQ ID NO: 337184 - DNA, 33 bp, Homo sapien
taaaatgtgtggtgcagctaatcagtactatgg

SEQ ID NO: 337185 - DNA, 33 bp, Homo sapien
catcttgagtggtaacacgaaggtttggtgaat

SEQ ID NO: 337186 - DNA, 33 bp, Homo sapien
catcttgagtggtaacccgaaggtttggtgaat

SEQ ID NO: 337187 - DNA, 33 bp, Homo sapien
ggcatgaagatttcaacgtctgtggtttcccaa

SEQ ID NO: 337188 - DNA, 33 bp, Homo sapien
ggcatgaagatttcaatgtctgtggtttcccaa

SEQ ID NO: 337189 - DNA, 33 bp, Homo sapien
tgcccccggttgagaaacattgctgctagaaag

SEQ ID NO: 337190 - DNA, 33 bp, Homo sapien
tgcccccggttgagaaccattgctgctagaaag

SEQ ID NO: 337191 - DNA, 33 bp, Homo sapien
ttcctacatcttcctacgccaggaaaataagtc

SEQ ID NO: 337192 - DNA, 33 bp, Homo sapien
ttcctacatcttcctatgccaggaaaataagtc

SEQ ID NO: 337193 - DNA, 33 bp, Homo sapien
ctgcagcattccagaaattactccccaggctct

SEQ ID NO: 337194 - DNA, 33 bp, Homo sapien
ctgcagcattccagaagttactccccaggctct

SEQ ID NO: 337195 - DNA, 33 bp, Homo sapien
aactccccagctttcagaaccatgagaaataaa

SEQ ID NO: 337196 - DNA, 33 bp, Homo sapien
aactccccagctttcataaccatgagaaataaa

SEQ ID NO: 337197 - DNA, 33 bp, Homo sapien
cttaaatccatgaaaacgcttctgagggagctg

SEQ ID NO: 337198 - DNA, 33 bp, Homo sapien
cttaaatccatgaaaatgcttctgagggagctg

SEQ ID NO: 337199 - DNA, 33 bp, Homo sapien
gactataagctgaaagccagctagtaacaaatg

SEQ ID NO: 337200 - DNA, 33 bp, Homo sapien
gactataagctgaaaggcagctagtaacaaatg

SEQ ID NO: 337201 - DNA, 33 bp, Homo sapien
caattctgcttttcctcagatgcaaacatttta

SEQ ID NO: 337202 - DNA, 33 bp, Homo sapien
caattctgcttttccttagatgcaaacatttta

SEQ ID NO: 337203 - DNA, 33 bp, Homo sapien
ctcgtgctcttcctcacgttcatgctaaagtgg

SEQ ID NO: 337204 - DNA, 33 bp, Homo sapien
ctcgtgctcttcctcatgttcatgctaaagtgg

SEQ ID NO: 337205 - DNA, 33 bp, Homo sapien
aacaccagttggtagaataagtgctggatagag

SEQ ID NO: 337206 - DNA, 33 bp, Homo sapien
aacaccagttggtagagtaagtgctggatagag

SEQ ID NO: 337207 - DNA, 33 bp, Homo sapien
caaggaccttgaacaactgaaaaagcaaaatca

SEQ ID NO: 337208 - DNA, 33 bp, Homo sapien
caaggaccttgaacaattgaaaaagcaaaatca

SEQ ID NO: 337209 - DNA, 33 bp, Homo sapien
tacttgagaaaatggagtacgatgacccaataa

SEQ ID NO: 337210 - DNA, 33 bp, Homo sapien
tacttgagaaaatggattacgatgacccaataa

SEQ ID NO: 337211 - DNA, 33 bp, Homo sapien
cctactgatccccctacctaataacctatctac

SEQ ID NO: 337212 - DNA, 33 bp, Homo sapien
cctactgatccccctagctaataacctatctac

SEQ ID NO: 337213 - DNA, 33 bp, Homo sapien
cagggcataaactgaactgaaggtaggaatgtt

SEQ ID NO: 337214 - DNA, 33 bp, Homo sapien
cagggcataaactgaattgaaggtaggaatgtt

SEQ ID NO: 337215 - DNA, 33 bp, Homo sapien
cgtgttgcataggtaacgtagtggtgaggtatt

SEQ ID NO: 337216 - DNA, 33 bp, Homo sapien
cgtgttgcataggtaatgtagtggtgaggtatt

SEQ ID NO: 337217 - DNA, 33 bp, Homo sapien
tatgtaaccacaaatacggagaagagatgtatt

SEQ ID NO: 337218 - DNA, 33 bp, Homo sapien
tatgtaaccacaaatatggagaagagatgtatt

SEQ ID NO: 337219 - DNA, 33 bp, Homo sapien
tttccaaggcactaaaacttgtgtgactcaaaa

SEQ ID NO: 337220 - DNA, 33 bp, Homo sapien
tttccaaggcactaaatcttgtgtgactcaaaa

SEQ ID NO: 337221 - DNA, 33 bp, Homo sapien
atgtagtaaataaaacaaaaggcactaagaaag

SEQ ID NO: 337222 - DNA, 33 bp, Homo sapien
atgtagtaaataaaacgaaaggcactaagaaag

SEQ ID NO: 337223 - DNA, 33 bp, Homo sapien
gagaaagggaatttacaccactgctagtctatc

SEQ ID NO: 337224 - DNA, 33 bp, Homo sapien
gagaaagggaatttactccactgctagtctatc

SEQ ID NO: 337225 - DNA, 33 bp, Homo sapien
taaaaatagcctgacccaattattgttatatat

SEQ ID NO: 337226 - DNA, 33 bp, Homo sapien
taaaaatagcctgacctaattattgttatatat

SEQ ID NO: 337227 - DNA, 33 bp, Homo sapien
agaaggatctcttttacattgctcaaatcaaaa

SEQ ID NO: 337228 - DNA, 33 bp, Homo sapien
agaaggatctcttttatattgctcaaatcaaaa

SEQ ID NO: 337229 - DNA, 33 bp, Homo sapien
ttttgccctgcctttcacatacatacttcccaa

SEQ ID NO: 337230 - DNA, 33 bp, Homo sapien
ttttgccctgcctttcgcatacatacttcccaa

SEQ ID NO: 337231 - DNA, 33 bp, Homo sapien
gctttagcgtaaaagacactctggatttcaaag

SEQ ID NO: 337232 - DNA, 33 bp, Homo sapien
gctttagcgtaaaagagactctggatttcaaag

SEQ ID NO: 337233 - DNA, 33 bp, Homo sapien
agtttaaagcttagccaagattctttccttttc

SEQ ID NO: 337234 - DNA, 33 bp, Homo sapien
agtttaaagcttagcccagattctttccttttc

SEQ ID NO: 337235 - DNA, 33 bp, Homo sapien
tatatgtcttccaagccatttcatcctagctaa

SEQ ID NO: 337236 - DNA, 33 bp, Homo sapien
tatatgtcttccaagcgatttcatcctagctaa

SEQ ID NO: 337237 - DNA, 33 bp, Homo sapien
tattatcatcttggaacgtgacattattaaacc

SEQ ID NO: 337238 - DNA, 33 bp, Homo sapien
tattatcatcttggaatgtgacattattaaacc

SEQ ID NO: 337239 - DNA, 33 bp, Homo sapien
gaagagagagggtaaccgtcaaagaaaacacat

SEQ ID NO: 337240 - DNA, 33 bp, Homo sapien
gaagagagagggtaacggtcaaagaaaacacat

SEQ ID NO: 337241 - DNA, 33 bp, Homo sapien
caaacattgtgtttaacagatgaccgagagagc

SEQ ID NO: 337242 - DNA, 33 bp, Homo sapien
caaacattgtgtttaagagatgaccgagagagc

SEQ ID NO: 337243 - DNA, 33 bp, Homo sapien
tgaaaagactggccaacgtgagctgaccctgga

SEQ ID NO: 337244 - DNA, 33 bp, Homo sapien
tgaaaagactggccaatgtgagctgaccctgga

SEQ ID NO: 337245 - DNA, 33 bp, Homo sapien
gaagtctctatgcaaaacttatctaatcataaa

SEQ ID NO: 337246 - DNA, 33 bp, Homo sapien
gaagtctctatgcaaatcttatctaatcataaa

SEQ ID NO: 337247 - DNA, 33 bp, Homo sapien
tatctccataaacacaaagaaaagtgcatctca

SEQ ID NO: 337248 - DNA, 33 bp, Homo sapien
tatctccataaacacagagaaaagtgcatctca

SEQ ID NO: 337249 - DNA, 33 bp, Homo sapien
ttaaataacaaacatacgtctttgcctcaactc

SEQ ID NO: 337250 - DNA, 33 bp, Homo sapien
ttaaataacaaacatatgtctttgcctcaactc

SEQ ID NO: 337251 - DNA, 33 bp, Homo sapien
gtcaagtgaccagctgaaaaaaattagttgcat

SEQ ID NO: 337252 - DNA, 33 bp, Homo sapien
gtcaagtgaccagctggaaaaaattagttgcat

SEQ ID NO: 337253 - DNA, 33 bp, Homo sapien
ttggtggagatatcaacggatcaaaagcgcaag

SEQ ID NO: 337254 - DNA, 33 bp, Homo sapien
ttggtggagatatcaatggatcaaaagcgcaag

SEQ ID NO: 337255 - DNA, 33 bp, Homo sapien
attgccatcattaggacaagctgcctcaatcga

SEQ ID NO: 337256 - DNA, 33 bp, Homo sapien
attgccatcattaggataagctgcctcaatcga

SEQ ID NO: 337257 - DNA, 33 bp, Homo sapien
tcacccttttcacaacccttctcagaattttac

SEQ ID NO: 337258 - DNA, 33 bp, Homo sapien
tcacccttttcacaacgcttctcagaattttac

SEQ ID NO: 337259 - DNA, 33 bp, Homo sapien
aagttgataaatcaacactgaaatctcaaccag

SEQ ID NO: 337260 - DNA, 33 bp, Homo sapien
aagttgataaatcaacgctgaaatctcaaccag

SEQ ID NO: 337261 - DNA, 33 bp, Homo sapien
aggaataccctaaccaagacttcagatcaaaac

SEQ ID NO: 337262 - DNA, 33 bp, Homo sapien
aggaataccctaaccaggacttcagatcaaaac

SEQ ID NO: 337263 - DNA, 33 bp, Homo sapien
gcagcatctggatctacgaaagttaaccacaat

SEQ ID NO: 337264 - DNA, 33 bp, Homo sapien
gcagcatctggatctatgaaagttaaccacaat

SEQ ID NO: 337265 - DNA, 33 bp, Homo sapien
attttttctgggataactgctttagaggatgag

SEQ ID NO: 337266 - DNA, 33 bp, Homo sapien
attttttctgggataattgctttagaggatgag

SEQ ID NO: 337267 - DNA, 33 bp, Homo sapien
acccactagaaggccaatataacaatctagaga

SEQ ID NO: 337268 - DNA, 33 bp, Homo sapien
acccactagaaggccagtataacaatctagaga

SEQ ID NO: 337269 - DNA, 33 bp, Homo sapien
acctacacactatggaacagatatctaaaactg

SEQ ID NO: 337270 - DNA, 33 bp, Homo sapien
acctacacactatggaccagatatctaaaactg

SEQ ID NO: 337271 - DNA, 33 bp, Homo sapien
agttgctttaggaagaacaagtgattgggtttc

SEQ ID NO: 337272 - DNA, 33 bp, Homo sapien
agttgctttaggaagaccaagtgattgggtttc

SEQ ID NO: 337273 - DNA, 33 bp, Homo sapien
caactgcttagtttcacacataaagatacagat

SEQ ID NO: 337274 - DNA, 33 bp, Homo sapien
caactgcttagtttcatacataaagatacagat

SEQ ID NO: 337275 - DNA, 33 bp, Homo sapien
acaggagggatattgaaaggatcacatttggga

SEQ ID NO: 337276 - DNA, 33 bp, Homo sapien
acaggagggatattgagaggatcacatttggga

SEQ ID NO: 337277 - DNA, 33 bp, Homo sapien
accccaaacacctttcacattggaacaggaggg

SEQ ID NO: 337278 - DNA, 33 bp, Homo sapien
accccaaacacctttcgcattggaacaggaggg

SEQ ID NO: 337279 - DNA, 33 bp, Homo sapien
tggccttgggtaagacagactccacaaaacaca

SEQ ID NO: 337280 - DNA, 33 bp, Homo sapien
tggccttgggtaagacggactccacaaaacaca

SEQ ID NO: 337281 - DNA, 33 bp, Homo sapien
aactgatatgctaagaatatgagtactaatgtt

SEQ ID NO: 337282 - DNA, 33 bp, Homo sapien
aactgatatgctaagactatgagtactaatgtt

SEQ ID NO: 337283 - DNA, 33 bp, Homo sapien
gtcaaaaatgtcttcacgaacacagaactgaaa

SEQ ID NO: 337284 - DNA, 33 bp, Homo sapien
gtcaaaaatgtcttcatgaacacagaactgaaa

SEQ ID NO: 337285 - DNA, 33 bp, Homo sapien
ctagcatgagagccacaacctaacaaaaccaga

SEQ ID NO: 337286 - DNA, 33 bp, Homo sapien
ctagcatgagagccacgacctaacaaaaccaga

SEQ ID NO: 337287 - DNA, 33 bp, Homo sapien
tgtggacccccagagaagagtttaggtcatttt

SEQ ID NO: 337288 - DNA, 33 bp, Homo sapien
tgtggacccccagagacgagtttaggtcatttt

SEQ ID NO: 337289 - DNA, 33 bp, Homo sapien
agctgtgcatttggaaaaccacataaattggta

SEQ ID NO: 337290 - DNA, 33 bp, Homo sapien
agctgtgcatttggaacaccacataaattggta

SEQ ID NO: 337291 - DNA, 33 bp, Homo sapien
tgtgtccacacttggcagaaaggtgaaggagct

SEQ ID NO: 337292 - DNA, 33 bp, Homo sapien
tgtgtccacacttggcggaaaggtgaaggagct

SEQ ID NO: 337293 - DNA, 33 bp, Homo sapien
taatttattaatctgaacaagtggacatttttt

SEQ ID NO: 337294 - DNA, 33 bp, Homo sapien
taatttattaatctgagcaagtggacatttttt

SEQ ID NO: 337295 - DNA, 33 bp, Homo sapien
ttagatatcctagaaacaaggctctctgtagca

SEQ ID NO: 337296 - DNA, 33 bp, Homo sapien
ttagatatcctagaaagaaggctctctgtagca

SEQ ID NO: 337297 - DNA, 33 bp, Homo sapien
ctctactagactgcaacctcttcgatgacagcc

SEQ ID NO: 337298 - DNA, 33 bp, Homo sapien
ctctactagactgcaatctcttcgatgacagcc

SEQ ID NO: 337299 - DNA, 33 bp, Homo sapien
gataagattaaagtgcaaaaagctagaagcctg

SEQ ID NO: 337300 - DNA, 33 bp, Homo sapien
gataagattaaagtgcgaaaagctagaagcctg

SEQ ID NO: 337301 - DNA, 33 bp, Homo sapien
gatagaagacatatgacatagaaggcagatttt

SEQ ID NO: 337302 - DNA, 33 bp, Homo sapien
gatagaagacatatgatatagaaggcagatttt

SEQ ID NO: 337303 - DNA, 33 bp, Homo sapien
aggcagaactagactagcctaaagaccttactg

SEQ ID NO: 337304 - DNA, 33 bp, Homo sapien
aggcagaactagactatcctaaagaccttactg

SEQ ID NO: 337305 - DNA, 33 bp, Homo sapien
ttccttgcatcccgatcagaacttcttgtttca

SEQ ID NO: 337306 - DNA, 33 bp, Homo sapien
ttccttgcatcccgatgagaacttcttgtttca

SEQ ID NO: 337307 - DNA, 33 bp, Homo sapien
caagtgtgagaggagaaatcattgcccagaaaa

SEQ ID NO: 337308 - DNA, 33 bp, Homo sapien
caagtgtgagaggagacatcattgcccagaaaa

SEQ ID NO: 337309 - DNA, 33 bp, Homo sapien
tttgtatttctgcagactaaactgtaggcccag

SEQ ID NO: 337310 - DNA, 33 bp, Homo sapien
tttgtatttctgcagagtaaactgtaggcccag

SEQ ID NO: 337311 - DNA, 33 bp, Homo sapien
ccacttggtgtttgagccctttgagattcaatt

SEQ ID NO: 337312 - DNA, 33 bp, Homo sapien
ccacttggtgtttgagtcctttgagattcaatt

SEQ ID NO: 337313 - DNA, 33 bp, Homo sapien
tttcttagtaattgaacaaaatatgtaactatt

SEQ ID NO: 337314 - DNA, 33 bp, Homo sapien
tttcttagtaattgaagaaaatatgtaactatt

SEQ ID NO: 337315 - DNA, 33 bp, Homo sapien
tggcaaaataatgatgacaattcaatttaggcc

SEQ ID NO: 337316 - DNA, 33 bp, Homo sapien
tggcaaaataatgatggcaattcaatttaggcc

SEQ ID NO: 337317 - DNA, 33 bp, Homo sapien
tattgctaggccttgcaaagtcaagggtatcag

SEQ ID NO: 337318 - DNA, 33 bp, Homo sapien
tattgctaggccttgcgaagtcaagggtatcag

SEQ ID NO: 337319 - DNA, 33 bp, Homo sapien
taactcagttatgtcacaaggtctaggagcaga

SEQ ID NO: 337320 - DNA, 33 bp, Homo sapien
taactcagttatgtcagaaggtctaggagcaga

SEQ ID NO: 337321 - DNA, 33 bp, Homo sapien
tttatatgccagaccaacagtaatacacagttt

SEQ ID NO: 337322 - DNA, 33 bp, Homo sapien
tttatatgccagaccatcagtaatacacagttt

SEQ ID NO: 337323 - DNA, 33 bp, Homo sapien
ctgaagctatagacacactaatacataatccct

SEQ ID NO: 337324 - DNA, 33 bp, Homo sapien
ctgaagctatagacacgctaatacataatccct

SEQ ID NO: 337325 - DNA, 33 bp, Homo sapien
tctctgtagttttccaagccgttctcctggaag

SEQ ID NO: 337326 - DNA, 33 bp, Homo sapien
tctctgtagttttccacgccgttctcctggaag

SEQ ID NO: 337327 - DNA, 33 bp, Homo sapien
ctgagttgtgcaaagaaagtaataatgtgtgaa

SEQ ID NO: 337328 - DNA, 33 bp, Homo sapien
ctgagttgtgcaaagagagtaataatgtgtgaa

SEQ ID NO: 337329 - DNA, 33 bp, Homo sapien
ggaggggagcagaggacggaagtagaagatctt

SEQ ID NO: 337330 - DNA, 33 bp, Homo sapien
ggaggggagcagaggatggaagtagaagatctt

SEQ ID NO: 337331 - DNA, 33 bp, Homo sapien
tttcaggcaggacaccactcaggcaaggttacc

SEQ ID NO: 337332 - DNA, 33 bp, Homo sapien
tttcaggcaggacaccgctcaggcaaggttacc

SEQ ID NO: 337333 - DNA, 33 bp, Homo sapien
caaatgccaaactaaacaagctgttgatttaga

SEQ ID NO: 337334 - DNA, 33 bp, Homo sapien
caaatgccaaactaaataagctgttgatttaga

SEQ ID NO: 337335 - DNA, 33 bp, Homo sapien
aattcagtgttattcacgtacagattgagccga

SEQ ID NO: 337336 - DNA, 33 bp, Homo sapien
aattcagtgttattcatgtacagattgagccga

SEQ ID NO: 337337 - DNA, 33 bp, Homo sapien
atatccctgtttctgacattgcaaattctgtcc

SEQ ID NO: 337338 - DNA, 33 bp, Homo sapien
atatccctgtttctgagattgcaaattctgtcc

SEQ ID NO: 337339 - DNA, 33 bp, Homo sapien
gaagagaagataaaaaagtgcagaaataacagt

SEQ ID NO: 337340 - DNA, 33 bp, Homo sapien
gaagagaagataaaaatgtgcagaaataacagt

SEQ ID NO: 337341 - DNA, 33 bp, Homo sapien
aaaggaaaaataatgacgttataattcagaaca

SEQ ID NO: 337342 - DNA, 33 bp, Homo sapien
aaaggaaaaataatgatgttataattcagaaca

SEQ ID NO: 337343 - DNA, 33 bp, Homo sapien
gatactgaggatacataagtgagagtgagagtg

SEQ ID NO: 337344 - DNA, 33 bp, Homo sapien
gatactgaggatacatgagtgagagtgagagtg

SEQ ID NO: 337345 - DNA, 33 bp, Homo sapien
gtccctggcccttgccaagctaagtctggtttg

SEQ ID NO: 337346 - DNA, 33 bp, Homo sapien
gtccctggcccttgccgagctaagtctggtttg

SEQ ID NO: 337347 - DNA, 33 bp, Homo sapien
tgtatttcctctgaaaagtaaggtgtgtatgag

SEQ ID NO: 337348 - DNA, 33 bp, Homo sapien
tgtatttcctctgaaaggtaaggtgtgtatgag

SEQ ID NO: 337349 - DNA, 33 bp, Homo sapien
actttcaaacttttagcacactttgcgcattaa

SEQ ID NO: 337350 - DNA, 33 bp, Homo sapien
actttcaaacttttaggacactttgcgcattaa

SEQ ID NO: 337351 - DNA, 33 bp, Homo sapien
agatcaagcacttgagcattaaatgtttattta

SEQ ID NO: 337352 - DNA, 33 bp, Homo sapien
agatcaagcacttgaggattaaatgtttattta

SEQ ID NO: 337353 - DNA, 33 bp, Homo sapien
caaatgccaaacctgcaaatatgaagggccaac

SEQ ID NO: 337354 - DNA, 33 bp, Homo sapien
caaatgccaaacctgcgaatatgaagggccaac

SEQ ID NO: 337355 - DNA, 33 bp, Homo sapien
gatgagctaaacccagcctgaccactctgctta

SEQ ID NO: 337356 - DNA, 33 bp, Homo sapien
gatgagctaaacccagtctgaccactctgctta

SEQ ID NO: 337357 - DNA, 33 bp, Homo sapien
cagacataatggtgcaatattaaatgttaaaat

SEQ ID NO: 337358 - DNA, 33 bp, Homo sapien
cagacataatggtgcagtattaaatgttaaaat

SEQ ID NO: 337359 - DNA, 33 bp, Homo sapien
tgtctggttcttcatgaatggactccacagatt

SEQ ID NO: 337360 - DNA, 33 bp, Homo sapien
tgtctggttcttcatgcatggactccacagatt

SEQ ID NO: 337361 - DNA, 33 bp, Homo sapien
atatctgtgatccacaacctattcatacactcc

SEQ ID NO: 337362 - DNA, 33 bp, Homo sapien
atatctgtgatccacaccctattcatacactcc

SEQ ID NO: 337363 - DNA, 33 bp, Homo sapien
gctgcctacatttacaacagaagagatgagtgt

SEQ ID NO: 337364 - DNA, 33 bp, Homo sapien
gctgcctacatttacagcagaagagatgagtgt

SEQ ID NO: 337365 - DNA, 33 bp, Homo sapien
ttgttactccagctgcaacccacacattgctgt

SEQ ID NO: 337366 - DNA, 33 bp, Homo sapien
ttgttactccagctgcgacccacacattgctgt

SEQ ID NO: 337367 - DNA, 33 bp, Homo sapien
atacagttgtcaaagcgccctatgtatggcctg

SEQ ID NO: 337368 - DNA, 33 bp, Homo sapien
atacagttgtcaaagctccctatgtatggcctg

SEQ ID NO: 337369 - DNA, 33 bp, Homo sapien
atatggttccaccagacgatgccagaatatcta

SEQ ID NO: 337370 - DNA, 33 bp, Homo sapien
atatggttccaccagatgatgccagaatatcta

SEQ ID NO: 337371 - DNA, 33 bp, Homo sapien
atggtgataaatgtcacaagagaggactagcaa

SEQ ID NO: 337372 - DNA, 33 bp, Homo sapien
atggtgataaatgtcataagagaggactagcaa

SEQ ID NO: 337373 - DNA, 33 bp, Homo sapien
aagtgtagcttgagcaaaaaagctgaagcaaat

SEQ ID NO: 337374 - DNA, 33 bp, Homo sapien
aagtgtagcttgagcacaaaagctgaagcaaat

SEQ ID NO: 337375 - DNA, 33 bp, Homo sapien
catttgggcctttaggaaggatagctaggcctg

SEQ ID NO: 337376 - DNA, 33 bp, Homo sapien
catttgggcctttagggaggatagctaggcctg

SEQ ID NO: 337377 - DNA, 33 bp, Homo sapien
ttctcataagctaacacaagcagaaaaatctac

SEQ ID NO: 337378 - DNA, 33 bp, Homo sapien
ttctcataagctaacataagcagaaaaatctac

SEQ ID NO: 337379 - DNA, 33 bp, Homo sapien
aacacattgttggcacaaaaaagatgagttgtg

SEQ ID NO: 337380 - DNA, 33 bp, Homo sapien
aacacattgttggcacgaaaaagatgagttgtg

SEQ ID NO: 337381 - DNA, 33 bp, Homo sapien
ggacaccagaggatacagctttggaaacctgag

SEQ ID NO: 337382 - DNA, 33 bp, Homo sapien
ggacaccagaggatactgctttggaaacctgag

SEQ ID NO: 337383 - DNA, 33 bp, Homo sapien
aacagtaccaggtctacgtatgaggaaggacgg

SEQ ID NO: 337384 - DNA, 33 bp, Homo sapien
aacagtaccaggtctatgtatgaggaaggacgg

SEQ ID NO: 337385 - DNA, 33 bp, Homo sapien
agtacatgacctacaactggaaaagcatatccc

SEQ ID NO: 337386 - DNA, 33 bp, Homo sapien
agtacatgacctacaattggaaaagcatatccc

SEQ ID NO: 337387 - DNA, 33 bp, Homo sapien
agagtggctgtgacgaaaaagatgaaaatgtcc

SEQ ID NO: 337388 - DNA, 33 bp, Homo sapien
agagtggctgtgacgataaagatgaaaatgtcc

SEQ ID NO: 337389 - DNA, 33 bp, Homo sapien
tcattttacagaaaacaaagcagtaagcgtttg

SEQ ID NO: 337390 - DNA, 33 bp, Homo sapien
tcattttacagaaaacgaagcagtaagcgtttg

SEQ ID NO: 337391 - DNA, 33 bp, Homo sapien
tagtgttgtgttgtgcactaaaaatttgctaag

SEQ ID NO: 337392 - DNA, 33 bp, Homo sapien
tagtgttgtgttgtgccctaaaaatttgctaag

SEQ ID NO: 337393 - DNA, 33 bp, Homo sapien
tacttgagtattgagaaataagaaaacgtgcat

SEQ ID NO: 337394 - DNA, 33 bp, Homo sapien
tacttgagtattgagagataagaaaacgtgcat

SEQ ID NO: 337395 - DNA, 33 bp, Homo sapien
actccttcctcaaaagaccttctaagtcgtcac

SEQ ID NO: 337396 - DNA, 33 bp, Homo sapien
actccttcctcaaaaggccttctaagtcgtcac

SEQ ID NO: 337397 - DNA, 33 bp, Homo sapien
caatacttagaaggaacgtcacttggcaacagt

SEQ ID NO: 337398 - DNA, 33 bp, Homo sapien
caatacttagaaggaatgtcacttggcaacagt

SEQ ID NO: 337399 - DNA, 33 bp, Homo sapien
ggagcagttgaaataacagctcagacaaatatt

SEQ ID NO: 337400 - DNA, 33 bp, Homo sapien
ggagcagttgaaataagagctcagacaaatatt

SEQ ID NO: 337401 - DNA, 33 bp, Homo sapien
gggaaatgcctatgtgaaatgacacagcaaggg

SEQ ID NO: 337402 - DNA, 33 bp, Homo sapien
gggaaatgcctatgtggaatgacacagcaaggg

SEQ ID NO: 337403 - DNA, 33 bp, Homo sapien
atactcactttccactaagtgccccatttacat

SEQ ID NO: 337404 - DNA, 33 bp, Homo sapien
atactcactttccactgagtgccccatttacat

SEQ ID NO: 337405 - DNA, 33 bp, Homo sapien
accagccttcagcaagaaaatttgtgacttact

SEQ ID NO: 337406 - DNA, 33 bp, Homo sapien
accagccttcagcaaggaaatttgtgacttact

SEQ ID NO: 337407 - DNA, 33 bp, Homo sapien
tgctagtgaaacaaaaatgtctgctcaggaaaa

SEQ ID NO: 337408 - DNA, 33 bp, Homo sapien
tgctagtgaaacaaaagtgtctgctcaggaaaa

SEQ ID NO: 337409 - DNA, 33 bp, Homo sapien
acttgtatataaaaaactgccccattggttgag

SEQ ID NO: 337410 - DNA, 33 bp, Homo sapien
acttgtatataaaaaattgccccattggttgag

SEQ ID NO: 337411 - DNA, 33 bp, Homo sapien
aatgcagtccaacaaacgaagcacaatctgaaa

SEQ ID NO: 337412 - DNA, 33 bp, Homo sapien
aatgcagtccaacaaatgaagcacaatctgaaa

SEQ ID NO: 337413 - DNA, 33 bp, Homo sapien
acaaactcaacagcgaacttacgtatttgtggt

SEQ ID NO: 337414 - DNA, 33 bp, Homo sapien
acaaactcaacagcgatcttacgtatttgtggt

SEQ ID NO: 337415 - DNA, 33 bp, Homo sapien
agagaaaagggagatccatcaagtttcataaac

SEQ ID NO: 337416 - DNA, 33 bp, Homo sapien
agagaaaagggagatcgatcaagtttcataaac

SEQ ID NO: 337417 - DNA, 33 bp, Homo sapien
caatcacaaaacccaacttcagtaacagggctt

SEQ ID NO: 337418 - DNA, 33 bp, Homo sapien
caatcacaaaacccaatttcagtaacagggctt

SEQ ID NO: 337419 - DNA, 33 bp, Homo sapien
tagctattccttcctcagagaaagtctaagcta

SEQ ID NO: 337420 - DNA, 33 bp, Homo sapien
tagctattccttcctcggagaaagtctaagcta

SEQ ID NO: 337421 - DNA, 33 bp, Homo sapien
atttgtctctcattgtcaatattcttgctttgg

SEQ ID NO: 337422 - DNA, 33 bp, Homo sapien
atttgtctctcattgttaatattcttgctttgg

SEQ ID NO: 337423 - DNA, 33 bp, Homo sapien
ctgtgagtttcaattacagttcatccaagaagt

SEQ ID NO: 337424 - DNA, 33 bp, Homo sapien
ctgtgagtttcaattatagttcatccaagaagt

SEQ ID NO: 337425 - DNA, 33 bp, Homo sapien
aagagcaatcaaagaacgagctatgaatattca

SEQ ID NO: 337426 - DNA, 33 bp, Homo sapien
aagagcaatcaaagaatgagctatgaatattca

SEQ ID NO: 337427 - DNA, 33 bp, Homo sapien
ctcatcgtatccctggcatatagtgacactcag

SEQ ID NO: 337428 - DNA, 33 bp, Homo sapien
ctcatcgtatccctggtatatagtgacactcag

SEQ ID NO: 337429 - DNA, 33 bp, Homo sapien
ggcgtagttctcccaactggttaactatagaat

SEQ ID NO: 337430 - DNA, 33 bp, Homo sapien
ggcgtagttctcccaattggttaactatagaat

SEQ ID NO: 337431 - DNA, 33 bp, Homo sapien
tatttaaaaatacccacatattgcaaacataga

SEQ ID NO: 337432 - DNA, 33 bp, Homo sapien
tatttaaaaatacccatatattgcaaacataga

SEQ ID NO: 337433 - DNA, 33 bp, Homo sapien
gtaattgatttggtagcatgtgttggaaaggct

SEQ ID NO: 337434 - DNA, 33 bp, Homo sapien
gtaattgatttggtagtatgtgttggaaaggct

SEQ ID NO: 337435 - DNA, 33 bp, Homo sapien
ctggtattccagaatagaatattttccccactc

SEQ ID NO: 337436 - DNA, 33 bp, Homo sapien
ctggtattccagaatataatattttccccactc

SEQ ID NO: 337437 - DNA, 33 bp, Homo sapien
gactcaccctctatctaaagcctcattctgata

SEQ ID NO: 337438 - DNA, 33 bp, Homo sapien
gactcaccctctatctgaagcctcattctgata

SEQ ID NO: 337439 - DNA, 33 bp, Homo sapien
caataagaaagaaatgaaacactccatcgggat

SEQ ID NO: 337440 - DNA, 33 bp, Homo sapien
caataagaaagaaatgtaacactccatcgggat

SEQ ID NO: 337441 - DNA, 33 bp, Homo sapien
ttggattttttactcccgataggctttaccttc

SEQ ID NO: 337442 - DNA, 33 bp, Homo sapien
ttggattttttactcctgataggctttaccttc

SEQ ID NO: 337443 - DNA, 33 bp, Homo sapien
cactccctcttttagaacacaagcctaatgcat

SEQ ID NO: 337444 - DNA, 33 bp, Homo sapien
cactccctcttttagagcacaagcctaatgcat

SEQ ID NO: 337445 - DNA, 33 bp, Homo sapien
gagagataagaacaggaacatggagggaggggt

SEQ ID NO: 337446 - DNA, 33 bp, Homo sapien
gagagataagaacaggtacatggagggaggggt

SEQ ID NO: 337447 - DNA, 33 bp, Homo sapien
gtttgcaatatttcaacgttgagctccattcca

SEQ ID NO: 337448 - DNA, 33 bp, Homo sapien
gtttgcaatatttcaatgttgagctccattcca

SEQ ID NO: 337449 - DNA, 33 bp, Homo sapien
accactgctttttatgaagagtaaagtacacgt

SEQ ID NO: 337450 - DNA, 33 bp, Homo sapien
accactgctttttatgcagagtaaagtacacgt

SEQ ID NO: 337451 - DNA, 33 bp, Homo sapien
gtatacagtaggcactcaataaacactagtaga

SEQ ID NO: 337452 - DNA, 33 bp, Homo sapien
gtatacagtaggcacttaataaacactagtaga

SEQ ID NO: 337453 - DNA, 33 bp, Homo sapien
aatgatgagaaattcaaattacaagatctagaa

SEQ ID NO: 337454 - DNA, 33 bp, Homo sapien
aatgatgagaaattcacattacaagatctagaa

SEQ ID NO: 337455 - DNA, 33 bp, Homo sapien
actagatgattgttaaatgaactctaatccaat

SEQ ID NO: 337456 - DNA, 33 bp, Homo sapien
actagatgattgttaagtgaactctaatccaat

SEQ ID NO: 337457 - DNA, 33 bp, Homo sapien
ctgaattcacaaagcaacatctacttattggaa

SEQ ID NO: 337458 - DNA, 33 bp, Homo sapien
ctgaattcacaaagcagcatctacttattggaa

SEQ ID NO: 337459 - DNA, 33 bp, Homo sapien
tataaaaagattaagacaaactggagaactgag

SEQ ID NO: 337460 - DNA, 33 bp, Homo sapien
tataaaaagattaagataaactggagaactgag

SEQ ID NO: 337461 - DNA, 33 bp, Homo sapien
gttgtgggtcgaacaactaaacacctcactctg

SEQ ID NO: 337462 - DNA, 33 bp, Homo sapien
gttgtgggtcgaacaattaaacacctcactctg

SEQ ID NO: 337463 - DNA, 33 bp, Homo sapien
agtggaacatttcttacaagtgtgaagcaatga

SEQ ID NO: 337464 - DNA, 33 bp, Homo sapien
agtggaacatttcttagaagtgtgaagcaatga

SEQ ID NO: 337465 - DNA, 33 bp, Homo sapien
tgaagtatcatgataaaaggaagggctttgtgt

SEQ ID NO: 337466 - DNA, 33 bp, Homo sapien
tgaagtatcatgataagaggaagggctttgtgt

SEQ ID NO: 337467 - DNA, 33 bp, Homo sapien
aaaaaagtaactgtaaaatgatggagatgtgtt

SEQ ID NO: 337468 - DNA, 33 bp, Homo sapien
aaaaaagtaactgtaagatgatggagatgtgtt

SEQ ID NO: 337469 - DNA, 33 bp, Homo sapien
tatgggcttgagaaaacccccaggatcacttct

SEQ ID NO: 337470 - DNA, 33 bp, Homo sapien
tatgggcttgagaaaatccccaggatcacttct

SEQ ID NO: 337471 - DNA, 33 bp, Homo sapien
ttctactctgaaattgaagtatattgtccttct

SEQ ID NO: 337472 - DNA, 33 bp, Homo sapien
ttctactctgaaattgcagtatattgtccttct

SEQ ID NO: 337473 - DNA, 33 bp, Homo sapien
tttcagtctcccaatgccaagagtcttcgacat

SEQ ID NO: 337474 - DNA, 33 bp, Homo sapien
tttcagtctcccaatggcaagagtcttcgacat

SEQ ID NO: 337475 - DNA, 33 bp, Homo sapien
atgcattcatccagaaaacactttaactgttct

SEQ ID NO: 337476 - DNA, 33 bp, Homo sapien
atgcattcatccagaagacactttaactgttct

SEQ ID NO: 337477 - DNA, 33 bp, Homo sapien
aatgttatggtattcaactgaagtcttgtggga

SEQ ID NO: 337478 - DNA, 33 bp, Homo sapien
aatgttatggtattcagctgaagtcttgtggga

SEQ ID NO: 337479 - DNA, 33 bp, Homo sapien
agtttggaaacacttccatcattaatcttgtag

SEQ ID NO: 337480 - DNA, 33 bp, Homo sapien
agtttggaaacacttcgatcattaatcttgtag

SEQ ID NO: 337481 - DNA, 33 bp, Homo sapien
gtgagcattcagactcaatagtgctgttctgta

SEQ ID NO: 337482 - DNA, 33 bp, Homo sapien
gtgagcattcagactcgatagtgctgttctgta

SEQ ID NO: 337483 - DNA, 33 bp, Homo sapien
ccatatcgctgacctacgggcagactgtgcaag

SEQ ID NO: 337484 - DNA, 33 bp, Homo sapien
ccatatcgctgacctatgggcagactgtgcaag

SEQ ID NO: 337485 - DNA, 33 bp, Homo sapien
ctggcatatctgggaccagagcagcagagtact

SEQ ID NO: 337486 - DNA, 33 bp, Homo sapien
ctggcatatctgggacgagagcagcagagtact

SEQ ID NO: 337487 - DNA, 33 bp, Homo sapien
cttaccaacagcagaacttagcagggggaggct

SEQ ID NO: 337488 - DNA, 33 bp, Homo sapien
cttaccaacagcagaagttagcagggggaggct

SEQ ID NO: 337489 - DNA, 33 bp, Homo sapien
acctgcgtgaagctgcaaggaccatgcctgatg

SEQ ID NO: 337490 - DNA, 33 bp, Homo sapien
acctgcgtgaagctgcgaggaccatgcctgatg

SEQ ID NO: 337491 - DNA, 33 bp, Homo sapien
gacgaggcaggagctcaatcaatgctggaacat

SEQ ID NO: 337492 - DNA, 33 bp, Homo sapien
gacgaggcaggagctcgatcaatgctggaacat

SEQ ID NO: 337493 - DNA, 33 bp, Homo sapien
tccccacatgactttggatgacaatggtttaag

SEQ ID NO: 337494 - DNA, 33 bp, Homo sapien
tccccacatgactttgtatgacaatggtttaag

SEQ ID NO: 337495 - DNA, 33 bp, Homo sapien
tattcccacataatcactgagaaggctatggaa

SEQ ID NO: 337496 - DNA, 33 bp, Homo sapien
tattcccacataatcattgagaaggctatggaa

SEQ ID NO: 337497 - DNA, 33 bp, Homo sapien
tgcaactaagaggagaaccaatggagcaacact

SEQ ID NO: 337498 - DNA, 33 bp, Homo sapien
tgcaactaagaggagagccaatggagcaacact

SEQ ID NO: 337499 - DNA, 33 bp, Homo sapien
ctcagtgattttagacactttgccattggtgag

SEQ ID NO: 337500 - DNA, 33 bp, Homo sapien
ctcagtgattttagacgctttgccattggtgag

SEQ ID NO: 337501 - DNA, 33 bp, Homo sapien
catctagaagacaaataacttaacaaaatgtgc

SEQ ID NO: 337502 - DNA, 33 bp, Homo sapien
catctagaagacaaatgacttaacaaaatgtgc

SEQ ID NO: 337503 - DNA, 33 bp, Homo sapien
ataacaaggaggcaaacagggaaccaaagagac

SEQ ID NO: 337504 - DNA, 33 bp, Homo sapien
ataacaaggaggcaaagagggaaccaaagagac

SEQ ID NO: 337505 - DNA, 33 bp, Homo sapien
aattgctgaaatcccacgacaatcttatttggg

SEQ ID NO: 337506 - DNA, 33 bp, Homo sapien
aattgctgaaatcccaggacaatcttatttggg

SEQ ID NO: 337507 - DNA, 33 bp, Homo sapien
tctacttcatgactaaataacttctgcaagtaa

SEQ ID NO: 337508 - DNA, 33 bp, Homo sapien
tctacttcatgactaagtaacttctgcaagtaa

SEQ ID NO: 337509 - DNA, 33 bp, Homo sapien
acctcctgcagagaaacagaggtgttaaaacaa

SEQ ID NO: 337510 - DNA, 33 bp, Homo sapien
acctcctgcagagaaatagaggtgttaaaacaa

SEQ ID NO: 337511 - DNA, 33 bp, Homo sapien
ctgctgtgtatggtcacatgactaagatttggc

SEQ ID NO: 337512 - DNA, 33 bp, Homo sapien
ctgctgtgtatggtcatatgactaagatttggc

SEQ ID NO: 337513 - DNA, 33 bp, Homo sapien
gtgctccttccacgtacatctccctatgcatct

SEQ ID NO: 337514 - DNA, 33 bp, Homo sapien
gtgctccttccacgtatatctccctatgcatct

SEQ ID NO: 337515 - DNA, 33 bp, Homo sapien
tccactccatatcatcggaatcccaacattaaa

SEQ ID NO: 337516 - DNA, 33 bp, Homo sapien
tccactccatatcatctgaatcccaacattaaa

SEQ ID NO: 337517 - DNA, 33 bp, Homo sapien
ccagtcagataaaagcagaagtctcctgataaa

SEQ ID NO: 337518 - DNA, 33 bp, Homo sapien
ccagtcagataaaagcggaagtctcctgataaa

SEQ ID NO: 337519 - DNA, 33 bp, Homo sapien
atcagtaaggaagaacagtaaatggatttgcag

SEQ ID NO: 337520 - DNA, 33 bp, Homo sapien
atcagtaaggaagaacggtaaatggatttgcag

SEQ ID NO: 337521 - DNA, 33 bp, Homo sapien
tattttcccttcatcactctatagcttttttaa

SEQ ID NO: 337522 - DNA, 33 bp, Homo sapien
tattttcccttcatcattctatagcttttttaa

SEQ ID NO: 337523 - DNA, 33 bp, Homo sapien
accttcattaatgtacaaatgccaaagcacact

SEQ ID NO: 337524 - DNA, 33 bp, Homo sapien
accttcattaatgtacgaatgccaaagcacact

SEQ ID NO: 337525 - DNA, 33 bp, Homo sapien
gcctgtgaacatttcaataaatccaacctctct

SEQ ID NO: 337526 - DNA, 33 bp, Homo sapien
gcctgtgaacatttcagtaaatccaacctctct

SEQ ID NO: 337527 - DNA, 33 bp, Homo sapien
gaattcttgaatgtgacagctaaaggggcttgg

SEQ ID NO: 337528 - DNA, 33 bp, Homo sapien
gaattcttgaatgtgagagctaaaggggcttgg

SEQ ID NO: 337529 - DNA, 33 bp, Homo sapien
cgaattcacaatgtaccatcgttaccactacaa

SEQ ID NO: 337530 - DNA, 33 bp, Homo sapien
cgaattcacaatgtactatcgttaccactacaa

SEQ ID NO: 337531 - DNA, 33 bp, Homo sapien
cttataaccttctgagcagagtggctctaagtg

SEQ ID NO: 337532 - DNA, 33 bp, Homo sapien
cttataaccttctgagtagagtggctctaagtg

SEQ ID NO: 337533 - DNA, 33 bp, Homo sapien
ctgcagtcagagatggacaaaatacagcttctc

SEQ ID NO: 337534 - DNA, 33 bp, Homo sapien
ctgcagtcagagatggccaaaatacagcttctc

SEQ ID NO: 337535 - DNA, 33 bp, Homo sapien
gttaattattgttaaacttccttccagtctatt

SEQ ID NO: 337536 - DNA, 33 bp, Homo sapien
gttaattattgttaaatttccttccagtctatt

SEQ ID NO: 337537 - DNA, 33 bp, Homo sapien
gaggacttgcagaaagaactctcagtaaatatt

SEQ ID NO: 337538 - DNA, 33 bp, Homo sapien
gaggacttgcagaaaggactctcagtaaatatt

SEQ ID NO: 337539 - DNA, 33 bp, Homo sapien
gaaaagcaatcagtggccatgtaagctttgcct

SEQ ID NO: 337540 - DNA, 33 bp, Homo sapien
gaaaagcaatcagtggtcatgtaagctttgcct

SEQ ID NO: 337541 - DNA, 33 bp, Homo sapien
cctggggagatgaacacgccagcgcagtgcttg

SEQ ID NO: 337542 - DNA, 33 bp, Homo sapien
cctggggagatgaacatgccagcgcagtgcttg

SEQ ID NO: 337543 - DNA, 33 bp, Homo sapien
aagaaattagaacaaaagaagcagcatagaaaa

SEQ ID NO: 337544 - DNA, 33 bp, Homo sapien
aagaaattagaacaaaggaagcagcatagaaaa

SEQ ID NO: 337545 - DNA, 33 bp, Homo sapien
agactacctatgttcacggagcctgagaatgct

SEQ ID NO: 337546 - DNA, 33 bp, Homo sapien
agactacctatgttcatggagcctgagaatgct

SEQ ID NO: 337547 - DNA, 33 bp, Homo sapien
gttacttcaaaatgcccgctatatagactacct

SEQ ID NO: 337548 - DNA, 33 bp, Homo sapien
gttacttcaaaatgcctgctatatagactacct

SEQ ID NO: 337549 - DNA, 33 bp, Homo sapien
taactatattctcaaaaaaattagtgagaagag

SEQ ID NO: 337550 - DNA, 33 bp, Homo sapien
taactatattctcaaacaaattagtgagaagag

SEQ ID NO: 337551 - DNA, 33 bp, Homo sapien
ctactttatgtaatccaggaggtggttaaacag

SEQ ID NO: 337552 - DNA, 33 bp, Homo sapien
ctactttatgtaatccgggaggtggttaaacag

SEQ ID NO: 337553 - DNA, 33 bp, Homo sapien
ttatattggtataaagcaacttagcagaccttc

SEQ ID NO: 337554 - DNA, 33 bp, Homo sapien
ttatattggtataaaggaacttagcagaccttc

SEQ ID NO: 337555 - DNA, 33 bp, Homo sapien
aatttcaatcaaaaccccaaccggatttttcag

SEQ ID NO: 337556 - DNA, 33 bp, Homo sapien
aatttcaatcaaaacctcaaccggatttttcag

SEQ ID NO: 337557 - DNA, 33 bp, Homo sapien
aaaaaatacatacagaagagcaaaaagccaagg

SEQ ID NO: 337558 - DNA, 33 bp, Homo sapien
aaaaaatacatacagaggagcaaaaagccaagg

SEQ ID NO: 337559 - DNA, 33 bp, Homo sapien
ccctgtcagctgaatgaatgtgacactgcttgc

SEQ ID NO: 337560 - DNA, 33 bp, Homo sapien
ccctgtcagctgaatggatgtgacactgcttgc

SEQ ID NO: 337561 - DNA, 33 bp, Homo sapien
agaaacagtgtaagacaccaaatccctaccttc

SEQ ID NO: 337562 - DNA, 33 bp, Homo sapien
agaaacagtgtaagacgccaaatccctaccttc

SEQ ID NO: 337563 - DNA, 33 bp, Homo sapien
acttagtaccatgaaacgaatagctatgaagga

SEQ ID NO: 337564 - DNA, 33 bp, Homo sapien
acttagtaccatgaaatgaatagctatgaagga

SEQ ID NO: 337565 - DNA, 33 bp, Homo sapien
aaaaatctcaaagtaaagataactggctgatag

SEQ ID NO: 337566 - DNA, 33 bp, Homo sapien
aaaaatctcaaagtaatgataactggctgatag

SEQ ID NO: 337567 - DNA, 33 bp, Homo sapien
tatcctgggaaagatcaattttctactttctca

SEQ ID NO: 337568 - DNA, 33 bp, Homo sapien
tatcctgggaaagatcgattttctactttctca

SEQ ID NO: 337569 - DNA, 33 bp, Homo sapien
gactaatcctcaatataataattgctacaaaca

SEQ ID NO: 337570 - DNA, 33 bp, Homo sapien
gactaatcctcaatatgataattgctacaaaca

SEQ ID NO: 337571 - DNA, 33 bp, Homo sapien
ccacctctgggtattaagggctgaaaaacaact

SEQ ID NO: 337572 - DNA, 33 bp, Homo sapien
ccacctctgggtattatgggctgaaaaacaact

SEQ ID NO: 337573 - DNA, 33 bp, Homo sapien
gtacttgagcaaacaacggaaatttggagttgc

SEQ ID NO: 337574 - DNA, 33 bp, Homo sapien
gtacttgagcaaacaatggaaatttggagttgc

SEQ ID NO: 337575 - DNA, 33 bp, Homo sapien
actctctgaaaatggaaaataattgattggctt

SEQ ID NO: 337576 - DNA, 33 bp, Homo sapien
actctctgaaaatggagaataattgattggctt

SEQ ID NO: 337577 - DNA, 33 bp, Homo sapien
ggatgagcaagccctacaataagcttccaagaa

SEQ ID NO: 337578 - DNA, 33 bp, Homo sapien
ggatgagcaagccctataataagcttccaagaa

SEQ ID NO: 337579 - DNA, 33 bp, Homo sapien
ctacaagtatttctagcacttgcatgggacatt

SEQ ID NO: 337580 - DNA, 33 bp, Homo sapien
ctacaagtatttctaggacttgcatgggacatt

SEQ ID NO: 337581 - DNA, 33 bp, Homo sapien
agaaatcttctttcaaactgttccgaggaccta

SEQ ID NO: 337582 - DNA, 33 bp, Homo sapien
agaaatcttctttcaatctgttccgaggaccta

SEQ ID NO: 337583 - DNA, 33 bp, Homo sapien
ttgctaccttacagagcacacgttctaacaagg

SEQ ID NO: 337584 - DNA, 33 bp, Homo sapien
ttgctaccttacagaggacacgttctaacaagg

SEQ ID NO: 337585 - DNA, 33 bp, Homo sapien
caaggcctcaacagtacaaggctttgaagaatc

SEQ ID NO: 337586 - DNA, 33 bp, Homo sapien
caaggcctcaacagtataaggctttgaagaatc

SEQ ID NO: 337587 - DNA, 33 bp, Homo sapien
ttccctcctgacatccaaccagaaaaggtactg

SEQ ID NO: 337588 - DNA, 33 bp, Homo sapien
ttccctcctgacatccgaccagaaaaggtactg

SEQ ID NO: 337589 - DNA, 33 bp, Homo sapien
gcaacaataacctactaaaatatcctgaaggaa

SEQ ID NO: 337590 - DNA, 33 bp, Homo sapien
gcaacaataacctactgaaatatcctgaaggaa

SEQ ID NO: 337591 - DNA, 33 bp, Homo sapien
tcaaacctcaaacaaactgcctaatctttggaa

SEQ ID NO: 337592 - DNA, 33 bp, Homo sapien
tcaaacctcaaacaaattgcctaatctttggaa

SEQ ID NO: 337593 - DNA, 33 bp, Homo sapien
agactatgtcagggaaaaagatagagtgagcac

SEQ ID NO: 337594 - DNA, 33 bp, Homo sapien
agactatgtcagggaacaagatagagtgagcac

SEQ ID NO: 337595 - DNA, 33 bp, Homo sapien
tgcttttggaaactcaaatgtctcagaaaatgt

SEQ ID NO: 337596 - DNA, 33 bp, Homo sapien
tgcttttggaaactcagatgtctcagaaaatgt

SEQ ID NO: 337597 - DNA, 33 bp, Homo sapien
agaagacaaactcaaaacttcctaaccagccag

SEQ ID NO: 337598 - DNA, 33 bp, Homo sapien
agaagacaaactcaaagcttcctaaccagccag

SEQ ID NO: 337599 - DNA, 33 bp, Homo sapien
gattatattcacacttaaaactattttctacaa

SEQ ID NO: 337600 - DNA, 33 bp, Homo sapien
gattatattcacacttgaaactattttctacaa

SEQ ID NO: 337601 - DNA, 33 bp, Homo sapien
tgttccacacagataacgtcaggaaggagcagt

SEQ ID NO: 337602 - DNA, 33 bp, Homo sapien
tgttccacacagataatgtcaggaaggagcagt

SEQ ID NO: 337603 - DNA, 33 bp, Homo sapien
gtaacagatttatggacggatgtgatcctggac

SEQ ID NO: 337604 - DNA, 33 bp, Homo sapien
gtaacagatttatggatggatgtgatcctggac

SEQ ID NO: 337605 - DNA, 33 bp, Homo sapien
tgtaagactcagcagaaaattttacaggtatac

SEQ ID NO: 337606 - DNA, 33 bp, Homo sapien
tgtaagactcagcagagaattttacaggtatac

SEQ ID NO: 337607 - DNA, 33 bp, Homo sapien
tcgtcactgttgcttccatttgtacacacaaaa

SEQ ID NO: 337608 - DNA, 33 bp, Homo sapien
tcgtcactgttgcttcgatttgtacacacaaaa

SEQ ID NO: 337609 - DNA, 33 bp, Homo sapien
agcagtatctgtattccattccttcatggtggc

SEQ ID NO: 337610 - DNA, 33 bp, Homo sapien
agcagtatctgtattctattccttcatggtggc

SEQ ID NO: 337611 - DNA, 33 bp, Homo sapien
gagaaagggaattcagaatcacactcagttgaa

SEQ ID NO: 337612 - DNA, 33 bp, Homo sapien
gagaaagggaattcagcatcacactcagttgaa

SEQ ID NO: 337613 - DNA, 33 bp, Homo sapien
ggaagtccgcgccgtaaatggcctccagggcct

SEQ ID NO: 337614 - DNA, 33 bp, Homo sapien
ggaagtccgcgccgtagatggcctccagggcct

SEQ ID NO: 337615 - DNA, 33 bp, Homo sapien
ctgtggtatcatccgcaagggctttcagagggg

SEQ ID NO: 337616 - DNA, 33 bp, Homo sapien
ctgtggtatcatccgcgagggctttcagagggg

SEQ ID NO: 337617 - DNA, 33 bp, Homo sapien
cgtggtgctctccttaacaaacgacttggggtg

SEQ ID NO: 337618 - DNA, 33 bp, Homo sapien
cgtggtgctctccttagcaaacgacttggggtg

SEQ ID NO: 337619 - DNA, 33 bp, Homo sapien
aggcagatatcaaacaagaggagctaagacaag

SEQ ID NO: 337620 - DNA, 33 bp, Homo sapien
aggcagatatcaaacaggaggagctaagacaag

SEQ ID NO: 337621 - DNA, 33 bp, Homo sapien
agctaagacaagtgtcagaagaagtgagaagcc

SEQ ID NO: 337622 - DNA, 33 bp, Homo sapien
agctaagacaagtgtcggaagaagtgagaagcc

SEQ ID NO: 337623 - DNA, 33 bp, Homo sapien
agtgttgctgtagtggaaatctcctgcacatag

SEQ ID NO: 337624 - DNA, 33 bp, Homo sapien
agtgttgctgtagtggcaatctcctgcacatag

SEQ ID NO: 337625 - DNA, 33 bp, Homo sapien
acacaatgagtgttgacggctgtaagattaagg

SEQ ID NO: 337626 - DNA, 33 bp, Homo sapien
acacaatgagtgttgatggctgtaagattaagg

SEQ ID NO: 337627 - DNA, 33 bp, Homo sapien
ttcattctttgctctcccaatcctgtcctagtc

SEQ ID NO: 337628 - DNA, 33 bp, Homo sapien
ttcattctttgctctctcaatcctgtcctagtc

SEQ ID NO: 337629 - DNA, 33 bp, Homo sapien
ataagatgaggtattgaattttcctttttccat

SEQ ID NO: 337630 - DNA, 33 bp, Homo sapien
ataagatgaggtattggattttcctttttccat

SEQ ID NO: 337631 - DNA, 33 bp, Homo sapien
cccttatccaaaggaacgtcctatgagaaattc

SEQ ID NO: 337632 - DNA, 33 bp, Homo sapien
cccttatccaaaggaatgtcctatgagaaattc

SEQ ID NO: 337633 - DNA, 33 bp, Homo sapien
ctgttttttttccataacagcagatttgagtag

SEQ ID NO: 337634 - DNA, 33 bp, Homo sapien
ctgttttttttccataccagcagatttgagtag

SEQ ID NO: 337635 - DNA, 33 bp, Homo sapien
tattactgtgattttaccctgggatgctagaac

SEQ ID NO: 337636 - DNA, 33 bp, Homo sapien
tattactgtgattttatcctgggatgctagaac

SEQ ID NO: 337637 - DNA, 33 bp, Homo sapien
tttgctggcatctaacactgtgccatacctgga

SEQ ID NO: 337638 - DNA, 33 bp, Homo sapien
tttgctggcatctaacgctgtgccatacctgga

SEQ ID NO: 337639 - DNA, 33 bp, Homo sapien
aaccgcattaagatgaaagtgaagagtgaggtt

SEQ ID NO: 337640 - DNA, 33 bp, Homo sapien
aaccgcattaagatgatagtgaagagtgaggtt

SEQ ID NO: 337641 - DNA, 33 bp, Homo sapien
cagacagcattaggacaaaagtgaagagtgagg

SEQ ID NO: 337642 - DNA, 33 bp, Homo sapien
cagacagcattaggacgaaagtgaagagtgagg

SEQ ID NO: 337643 - DNA, 33 bp, Homo sapien
actcataagcacaggccagtggaatagttattg

SEQ ID NO: 337644 - DNA, 33 bp, Homo sapien
actcataagcacaggctagtggaatagttattg

SEQ ID NO: 337645 - DNA, 33 bp, Homo sapien
tggttgtaagtgttggccagatgtctatgtcca

SEQ ID NO: 337646 - DNA, 33 bp, Homo sapien
tggttgtaagtgttggtcagatgtctatgtcca

SEQ ID NO: 337647 - DNA, 33 bp, Homo sapien
aggtggcttctgtccacactgtcaaagtagttg

SEQ ID NO: 337648 - DNA, 33 bp, Homo sapien
aggtggcttctgtccatactgtcaaagtagttg

SEQ ID NO: 337649 - DNA, 33 bp, Homo sapien
tattaagaacactcaactatagtcatagctaca

SEQ ID NO: 337650 - DNA, 33 bp, Homo sapien
tattaagaacactcaattatagtcatagctaca

SEQ ID NO: 337651 - DNA, 33 bp, Homo sapien
agggtgtgaatttcaacgctaataccgtcttcc

SEQ ID NO: 337652 - DNA, 33 bp, Homo sapien
agggtgtgaatttcaatgctaataccgtcttcc

SEQ ID NO: 337653 - DNA, 33 bp, Homo sapien
tggctgggaataactacgcttgcaataactatg

SEQ ID NO: 337654 - DNA, 33 bp, Homo sapien
tggctgggaataactatgcttgcaataactatg

SEQ ID NO: 337655 - DNA, 33 bp, Homo sapien
tgtctcttcccctgaccattggaaatgcatatg

SEQ ID NO: 337656 - DNA, 33 bp, Homo sapien
tgtctcttcccctgactattggaaatgcatatg

SEQ ID NO: 337657 - DNA, 33 bp, Homo sapien
gacaaaggcttaagcaagagtagtttatttggg

SEQ ID NO: 337658 - DNA, 33 bp, Homo sapien
gacaaaggcttaagcatgagtagtttatttggg

SEQ ID NO: 337659 - DNA, 33 bp, Homo sapien
atctgtaacaggagtgaaatggaaatacaagtt

SEQ ID NO: 337660 - DNA, 33 bp, Homo sapien
atctgtaacaggagtggaatggaaatacaagtt

SEQ ID NO: 337661 - DNA, 33 bp, Homo sapien
tggcctagactagggaagtgaaatgtccaaaca

SEQ ID NO: 337662 - DNA, 33 bp, Homo sapien
tggcctagactagggatgtgaaatgtccaaaca

SEQ ID NO: 337663 - DNA, 33 bp, Homo sapien
ggacttgagaataaagaagacttgcctgctgtt

SEQ ID NO: 337664 - DNA, 33 bp, Homo sapien
ggacttgagaataaaggagacttgcctgctgtt

SEQ ID NO: 337665 - DNA, 33 bp, Homo sapien
atatgccttttccctaagagaggattgctatct

SEQ ID NO: 337666 - DNA, 33 bp, Homo sapien
atatgccttttccctaggagaggattgctatct

SEQ ID NO: 337667 - DNA, 33 bp, Homo sapien
cagtgccagtgactcactcagtgtacctcacct

SEQ ID NO: 337668 - DNA, 33 bp, Homo sapien
cagtgccagtgactcattcagtgtacctcacct

SEQ ID NO: 337669 - DNA, 33 bp, Homo sapien
ctcacggcagcatctcaccacactgaagataag

SEQ ID NO: 337670 - DNA, 33 bp, Homo sapien
ctcacggcagcatctcgccacactgaagataag

SEQ ID NO: 337671 - DNA, 33 bp, Homo sapien
taatggactcaactacaacccagcaagtgaaat

SEQ ID NO: 337672 - DNA, 33 bp, Homo sapien
taatggactcaactaccacccagcaagtgaaat

SEQ ID NO: 337673 - DNA, 33 bp, Homo sapien
gtcccaggaatctgtacactgaacaagctccct

SEQ ID NO: 337674 - DNA, 33 bp, Homo sapien
gtcccaggaatctgtatactgaacaagctccct

SEQ ID NO: 337675 - DNA, 33 bp, Homo sapien
gccttccacggagcccactagatgagtctaaaa

SEQ ID NO: 337676 - DNA, 33 bp, Homo sapien
gccttccacggagcccgctagatgagtctaaaa

SEQ ID NO: 337677 - DNA, 33 bp, Homo sapien
ttcccttgatttcctcacagtcagacacacaaa

SEQ ID NO: 337678 - DNA, 33 bp, Homo sapien
ttcccttgatttcctcgcagtcagacacacaaa

SEQ ID NO: 337679 - DNA, 33 bp, Homo sapien
caggtactctactcaaaagaaagcatctgggaa

SEQ ID NO: 337680 - DNA, 33 bp, Homo sapien
caggtactctactcaagagaaagcatctgggaa

SEQ ID NO: 337681 - DNA, 33 bp, Homo sapien
tttctccctcaggtcaataagaatctatgccag

SEQ ID NO: 337682 - DNA, 33 bp, Homo sapien
tttctccctcaggtcagtaagaatctatgccag

SEQ ID NO: 337683 - DNA, 33 bp, Homo sapien
tctttttgtttacttcccagaaattgcagttcc

SEQ ID NO: 337684 - DNA, 33 bp, Homo sapien
tctttttgtttacttctcagaaattgcagttcc

SEQ ID NO: 337685 - DNA, 33 bp, Homo sapien
gttatgcaaaaaggcaaaagtatgcaccttggg

SEQ ID NO: 337686 - DNA, 33 bp, Homo sapien
gttatgcaaaaaggcacaagtatgcaccttggg

SEQ ID NO: 337687 - DNA, 33 bp, Homo sapien
aataattaaacacaaagaagcacaaagatgggc

SEQ ID NO: 337688 - DNA, 33 bp, Homo sapien
aataattaaacacaaataagcacaaagatgggc

SEQ ID NO: 337689 - DNA, 33 bp, Homo sapien
ggttactctttacatcaaagtcctccacatcca

SEQ ID NO: 337690 - DNA, 33 bp, Homo sapien
ggttactctttacatcgaagtcctccacatcca

SEQ ID NO: 337691 - DNA, 33 bp, Homo sapien
tctagaaccaccaagtaacattctgattattga

SEQ ID NO: 337692 - DNA, 33 bp, Homo sapien
tctagaaccaccaagttacattctgattattga

SEQ ID NO: 337693 - DNA, 33 bp, Homo sapien
ggaatgcaaaacagtacagctactttgaaaaat

SEQ ID NO: 337694 - DNA, 33 bp, Homo sapien
ggaatgcaaaacagtatagctactttgaaaaat

SEQ ID NO: 337695 - DNA, 33 bp, Homo sapien
ctaattcttttggatactaaaccatgaaaaatg

SEQ ID NO: 337696 - DNA, 33 bp, Homo sapien
ctaattcttttggatagtaaaccatgaaaaatg

SEQ ID NO: 337697 - DNA, 33 bp, Homo sapien
gtaagtaccattgaacgcatgtcctctggttca

SEQ ID NO: 337698 - DNA, 33 bp, Homo sapien
gtaagtaccattgaactcatgtcctctggttca

SEQ ID NO: 337699 - DNA, 33 bp, Homo sapien
ctatcatttccttgaaagagacaatatcactga

SEQ ID NO: 337700 - DNA, 33 bp, Homo sapien
ctatcatttccttgaatgagacaatatcactga

SEQ ID NO: 337701 - DNA, 33 bp, Homo sapien
gatactagcttaatgacagagatacattctgag

SEQ ID NO: 337702 - DNA, 33 bp, Homo sapien
gatactagcttaatgagagagatacattctgag

SEQ ID NO: 337703 - DNA, 33 bp, Homo sapien
gcatgagagacacttacgggttcctcctgactc

SEQ ID NO: 337704 - DNA, 33 bp, Homo sapien
gcatgagagacacttatgggttcctcctgactc

SEQ ID NO: 337705 - DNA, 33 bp, Homo sapien
ttaaatgaatccatcacgtctctaaaatgagtg

SEQ ID NO: 337706 - DNA, 33 bp, Homo sapien
ttaaatgaatccatcatgtctctaaaatgagtg

SEQ ID NO: 337707 - DNA, 33 bp, Homo sapien
tctcttcggttccaaacgtgtcttcggccactg

SEQ ID NO: 337708 - DNA, 33 bp, Homo sapien
tctcttcggttccaaatgtgtcttcggccactg

SEQ ID NO: 337709 - DNA, 33 bp, Homo sapien
agtttgggctgtttgcacatactgagtcccttt

SEQ ID NO: 337710 - DNA, 33 bp, Homo sapien
agtttgggctgtttgcgcatactgagtcccttt

SEQ ID NO: 337711 - DNA, 33 bp, Homo sapien
agctcgagataactaccgcctgctcccacaagt

SEQ ID NO: 337712 - DNA, 33 bp, Homo sapien
agctcgagataactactgcctgctcccacaagt

SEQ ID NO: 337713 - DNA, 33 bp, Homo sapien
gtagcctacggaaccaatcaatcgacacctcta

SEQ ID NO: 337714 - DNA, 33 bp, Homo sapien
gtagcctacggaaccagtcaatcgacacctcta

SEQ ID NO: 337715 - DNA, 33 bp, Homo sapien
gggaggtcttaaaggcactttctgcaatagcct

SEQ ID NO: 337716 - DNA, 33 bp, Homo sapien
gggaggtcttaaaggcgctttctgcaatagcct

SEQ ID NO: 337717 - DNA, 33 bp, Homo sapien; identical to SEQ ID NO: 337715

SEQ ID NO: 337718 - DNA, 33 bp, Homo sapien; identical to SEQ ID NO: 337716

SEQ ID NO: 337719 - DNA, 33 bp, Homo sapien
tacacacatataactgcatggccgccattggcc

SEQ ID NO: 337720 - DNA, 33 bp, Homo sapien
tacacacatataactggatggccgccattggcc

SEQ ID NO: 337721 - DNA, 33 bp, Homo sapien
gaaggggcatatgggaagttaggttgcatctgg

SEQ ID NO: 337722 - DNA, 33 bp, Homo sapien
gaaggggcatatgggaggttaggttgcatctgg

SEQ ID NO: 337723 - DNA, 33 bp, Homo sapien
aatgtgctacagtaaccggggggatgtgagtca

SEQ ID NO: 337724 - DNA, 33 bp, Homo sapien
aatgtgctacagtaactggggggatgtgagtca

SEQ ID NO: 337725 - DNA, 33 bp, Homo sapien
aacaaagcaacctaaactgaattcctcaagtat

SEQ ID NO: 337726 - DNA, 33 bp, Homo sapien
aacaaagcaacctaaattgaattcctcaagtat

SEQ ID NO: 337727 - DNA, 33 bp, Homo sapien
gaatcactggtatagacagagcagtactgttac

SEQ ID NO: 337728 - DNA, 33 bp, Homo sapien
gaatcactggtatagatagagcagtactgttac

SEQ ID NO: 337729 - DNA, 33 bp, Homo sapien
acactccacactaccaatatccttgaaatttct

SEQ ID NO: 337730 - DNA, 33 bp, Homo sapien
acactccacactaccagtatccttgaaatttct

SEQ ID NO: 337731 - DNA, 33 bp, Homo sapien
tcctgtttctgaaatacaagtttatgacgttct

SEQ ID NO: 337732 - DNA, 33 bp, Homo sapien
tcctgtttctgaaatataagtttatgacgttct

SEQ ID NO: 337733 - DNA, 33 bp, Homo sapien
ttatattagaagttaacggtgtgcattcattta

SEQ ID NO: 337734 - DNA, 33 bp, Homo sapien
ttatattagaagttaatggtgtgcattcattta

SEQ ID NO: 337735 - DNA, 33 bp, Homo sapien
agcagagaaaggtatacgtatgtcaaaggaaat

SEQ ID NO: 337736 - DNA, 33 bp, Homo sapien
agcagagaaaggtatatgtatgtcaaaggaaat

SEQ ID NO: 337737 - DNA, 33 bp, Homo sapien
gaaatgagactggacacggctgatccttggcaa

SEQ ID NO: 337738 - DNA, 33 bp, Homo sapien
gaaatgagactggacatggctgatccttggcaa

SEQ ID NO: 337739 - DNA, 33 bp, Homo sapien
tatggctggatttggacaatttctggtcaaacc

SEQ ID NO: 337740 - DNA, 33 bp, Homo sapien
tatggctggatttggagaatttctggtcaaacc

SEQ ID NO: 337741 - DNA, 33 bp, Homo sapien
ttgtgggggcgcatgaataaaggaatttaaaga

SEQ ID NO: 337742 - DNA, 33 bp, Homo sapien
ttgtgggggcgcatgagtaaaggaatttaaaga

SEQ ID NO: 337743 - DNA, 33 bp, Homo sapien
gactctatccacacaactattcaagcccaatta

SEQ ID NO: 337744 - DNA, 33 bp, Homo sapien
gactctatccacacaattattcaagcccaatta

SEQ ID NO: 337745 - DNA, 33 bp, Homo sapien
gatggctggtgtcaagaaagggaaggaaacttg

SEQ ID NO: 337746 - DNA, 33 bp, Homo sapien
gatggctggtgtcaaggaagggaaggaaacttg

SEQ ID NO: 337747 - DNA, 33 bp, Homo sapien
atgggtgtgaaagggcacaagggctgagtgact

SEQ ID NO: 337748 - DNA, 33 bp, Homo sapien
atgggtgtgaaagggcgcaagggctgagtgact

SEQ ID NO: 337749 - DNA, 33 bp, Homo sapien
gattttatttctatgcactggttttaggaattg

SEQ ID NO: 337750 - DNA, 33 bp, Homo sapien
gattttatttctatgcgctggttttaggaattg

SEQ ID NO: 337751 - DNA, 33 bp, Homo sapien
ataaaatctcagaggaagctacttaggacatca

SEQ ID NO: 337752 - DNA, 33 bp, Homo sapien
ataaaatctcagaggaggctacttaggacatca

SEQ ID NO: 337753 - DNA, 33 bp, Homo sapien
caaagagattagaaacgcctcttggcggctggg

SEQ ID NO: 337754 - DNA, 33 bp, Homo sapien
caaagagattagaaactcctcttggcggctggg

SEQ ID NO: 337755 - DNA, 33 bp, Homo sapien
cctctaagaagctggacaagctggggatgaggg

SEQ ID NO: 337756 - DNA, 33 bp, Homo sapien
cctctaagaagctggataagctggggatgaggg

SEQ ID NO: 337757 - DNA, 33 bp, Homo sapien
ggggattgttgggacaagttttggtgactctgt

SEQ ID NO: 337758 - DNA, 33 bp, Homo sapien
ggggattgttgggacaggttttggtgactctgt

SEQ ID NO: 337759 - DNA, 33 bp, Homo sapien
aagcctgctttaggacccagatggtggttgtag

SEQ ID NO: 337760 - DNA, 33 bp, Homo sapien
aagcctgctttaggactcagatggtggttgtag

SEQ ID NO: 337761 - DNA, 33 bp, Homo sapien
aaagggggccctgcgcaaaaccttgcctcctgc

SEQ ID NO: 337762 - DNA, 33 bp, Homo sapien
aaagggggccctgcgcgaaaccttgcctcctgc

SEQ ID NO: 337763 - DNA, 33 bp, Homo sapien
ctcctctgctagctgaagacgagaatgggagct

SEQ ID NO: 337764 - DNA, 33 bp, Homo sapien
ctcctctgctagctgaggacgagaatgggagct

SEQ ID NO: 337765 - DNA, 33 bp, Homo sapien
catgagcactaacccacctacacgcccacctgt

SEQ ID NO: 337766 - DNA, 33 bp, Homo sapien
catgagcactaacccatctacacgcccacctgt

SEQ ID NO: 337767 - DNA, 33 bp, Homo sapien
gtacctgcacatgataagttctcagtaacagct

SEQ ID NO: 337768 - DNA, 33 bp, Homo sapien
gtacctgcacatgataggttctcagtaacagct

SEQ ID NO: 337769 - DNA, 33 bp, Homo sapien
tgtactggggagtctcagagacatggcatccca

SEQ ID NO: 337770 - DNA, 33 bp, Homo sapien
tgtactggggagtctcggagacatggcatccca

SEQ ID NO: 337771 - DNA, 33 bp, Homo sapien
agagccagagtttctccgaatgacaggcagaag

SEQ ID NO: 337772 - DNA, 33 bp, Homo sapien
agagccagagtttctctgaatgacaggcagaag

SEQ ID NO: 337773 - DNA, 33 bp, Homo sapien
aatcacagaaatgctcaccttatatataaaact

SEQ ID NO: 337774 - DNA, 33 bp, Homo sapien
aatcacagaaatgctcgccttatatataaaact

SEQ ID NO: 337775 - DNA, 33 bp, Homo sapien
agaattgtggggtccagcaagccctagtgggac

SEQ ID NO: 337776 - DNA, 33 bp, Homo sapien
agaattgtggggtccatcaagccctagtgggac

SEQ ID NO: 337777 - DNA, 33 bp, Homo sapien
tttacccaacttgctgcaggttttgattatgtg

SEQ ID NO: 337778 - DNA, 33 bp, Homo sapien
tttacccaacttgctgtaggttttgattatgtg

SEQ ID NO: 337779 - DNA, 33 bp, Homo sapien
gaggaagactggatgacatcccggaaagctccg

SEQ ID NO: 337780 - DNA, 33 bp, Homo sapien
gaggaagactggatgatatcccggaaagctccg

SEQ ID NO: 337781 - DNA, 33 bp, Homo sapien
tggctgagccagatgaagattcagggaaaaaag

SEQ ID NO: 337782 - DNA, 33 bp, Homo sapien
tggctgagccagatgaggattcagggaaaaaag

SEQ ID NO: 337783 - DNA, 33 bp, Homo sapien
gaagtgaaaatcttccaagcaggcgataagaaa

SEQ ID NO: 337784 - DNA, 33 bp, Homo sapien
gaagtgaaaatcttccgagcaggcgataagaaa

SEQ ID NO: 337785 - DNA, 33 bp, Homo sapien
gaaacataagctcttacaggtctaaagcctgcc

SEQ ID NO: 337786 - DNA, 33 bp, Homo sapien
gaaacataagctcttataggtctaaagcctgcc

SEQ ID NO: 337787 - DNA, 33 bp, Homo sapien
catcttgtggagcacagaatcactttttccttg

SEQ ID NO: 337788 - DNA, 33 bp, Homo sapien
catcttgtggagcacataatcactttttccttg

SEQ ID NO: 337789 - DNA, 33 bp, Homo sapien
aggagattgggtcatacggaaaacagggtgatg

SEQ ID NO: 337790 - DNA, 33 bp, Homo sapien
aggagattgggtcatagggaaaacagggtgatg

SEQ ID NO: 337791 - DNA, 33 bp, Homo sapien
attaggcacttgagtgcatattcttccagtctt

SEQ ID NO: 337792 - DNA, 33 bp, Homo sapien
attaggcacttgagtgtatattcttccagtctt

SEQ ID NO: 337793 - DNA, 33 bp, Homo sapien
ggccagctaggaggacagaagaagtttcccatt

SEQ ID NO: 337794 - DNA, 33 bp, Homo sapien
ggccagctaggaggacggaagaagtttcccatt

SEQ ID NO: 337795 - DNA, 33 bp, Homo sapien
gggcccactgcaagaacaagtactcaatgagca

SEQ ID NO: 337796 - DNA, 33 bp, Homo sapien
gggcccactgcaagaataagtactcaatgagca

SEQ ID NO: 337797 - DNA, 33 bp, Homo sapien
acaggctgacagaagaagcagccccactcccag

SEQ ID NO: 337798 - DNA, 33 bp, Homo sapien
acaggctgacagaagaggcagccccactcccag

SEQ ID NO: 337799 - DNA, 33 bp, Homo sapien
gactgactcaaccccccagaccaacaggctgac

SEQ ID NO: 337800 - DNA, 33 bp, Homo sapien
gactgactcaacccccgagaccaacaggctgac

SEQ ID NO: 337801 - DNA, 33 bp, Homo sapien
cagaatttaatacttacgctggctacagtaggg

SEQ ID NO: 337802 - DNA, 33 bp, Homo sapien
cagaatttaatacttatgctggctacagtaggg

SEQ ID NO: 337803 - DNA, 33 bp, Homo sapien
tttctatggactcagcgcccctaacacggcctc

SEQ ID NO: 337804 - DNA, 33 bp, Homo sapien
tttctatggactcagctcccctaacacggcctc

SEQ ID NO: 337805 - DNA, 33 bp, Homo sapien
aatgatggaggggggaatagagcctacctcatt

SEQ ID NO: 337806 - DNA, 33 bp, Homo sapien
aatgatggaggggggagtagagcctacctcatt

SEQ ID NO: 337807 - DNA, 33 bp, Homo sapien
aagtaaacaaacgtcccgccagctgtggccgag

SEQ ID NO: 337808 - DNA, 33 bp, Homo sapien
aagtaaacaaacgtcctgccagctgtggccgag

SEQ ID NO: 337809 - DNA, 33 bp, Homo sapien
ataaaacttttctcaacggaatagcagtgtctg

SEQ ID NO: 337810 - DNA, 33 bp, Homo sapien
ataaaacttttctcaatggaatagcagtgtctg

SEQ ID NO: 337811 - DNA, 33 bp, Homo sapien
aggaacaaatgagagaaagaagcccagcctctc

SEQ ID NO: 337812 - DNA, 33 bp, Homo sapien
aggaacaaatgagagagagaagcccagcctctc

SEQ ID NO: 337813 - DNA, 33 bp, Homo sapien
atttcctgagtgtcgaaccccattcctgctcat

SEQ ID NO: 337814 - DNA, 33 bp, Homo sapien
atttcctgagtgtcgagccccattcctgctcat

SEQ ID NO: 337815 - DNA, 33 bp, Homo sapien
gccaccaaagataggacagcaatgcttgcagcc

SEQ ID NO: 337816 - DNA, 33 bp, Homo sapien
gccaccaaagataggatagcaatgcttgcagcc

SEQ ID NO: 337817 - DNA, 33 bp, Homo sapien
tgtcagagagtactgtcacaatgcaagggctgt

SEQ ID NO: 337818 - DNA, 33 bp, Homo sapien
tgtcagagagtactgttacaatgcaagggctgt

SEQ ID NO: 337819 - DNA, 33 bp, Homo sapien
tcaatagataccaagcacctgctgtgttctaag

SEQ ID NO: 337820 - DNA, 33 bp, Homo sapien
tcaatagataccaagctcctgctgtgttctaag

SEQ ID NO: 337821 - DNA, 33 bp, Homo sapien
tcttgggagagagtaactggtgttgatcctgga

SEQ ID NO: 337822 - DNA, 33 bp, Homo sapien
tcttgggagagagtaagtggtgttgatcctgga

SEQ ID NO: 337823 - DNA, 33 bp, Homo sapien
atagaattatggaaagaatattagtgcctcata

SEQ ID NO: 337824 - DNA, 33 bp, Homo sapien
atagaattatggaaagtatattagtgcctcata

SEQ ID NO: 337825 - DNA, 33 bp, Homo sapien
tgcaaatagatcagagcatatatggcgagggtt

SEQ ID NO: 337826 - DNA, 33 bp, Homo sapien
tgcaaatagatcagaggatatatggcgagggtt

SEQ ID NO: 337827 - DNA, 33 bp, Homo sapien
cacatgcttccatcctaagattaaaactgcaaa

SEQ ID NO: 337828 - DNA, 33 bp, Homo sapien
cacatgcttccatcctgagattaaaactgcaaa

SEQ ID NO: 337829 - DNA, 33 bp, Homo sapien
aatcttactgagatacaagtcacatactataat

SEQ ID NO: 337830 - DNA, 33 bp, Homo sapien
aatcttactgagatacgagtcacatactataat

SEQ ID NO: 337831 - DNA, 33 bp, Homo sapien
actttaccctgcgttgcagatctctgtgcaaat

SEQ ID NO: 337832 - DNA, 33 bp, Homo sapien
actttaccctgcgttgtagatctctgtgcaaat

SEQ ID NO: 337833 - DNA, 33 bp, Homo sapien
tgtatgatatattgacacaaatcgattgatcaa

SEQ ID NO: 337834 - DNA, 33 bp, Homo sapien
tgtatgatatattgacgcaaatcgattgatcaa

SEQ ID NO: 337835 - DNA, 33 bp, Homo sapien
tgtctgtatcttttcacggatgacctagacttg

SEQ ID NO: 337836 - DNA, 33 bp, Homo sapien
tgtctgtatcttttcatggatgacctagacttg

SEQ ID NO: 337837 - DNA, 33 bp, Homo sapien
caacccatggtctaggcactttggagtagcacc

SEQ ID NO: 337838 - DNA, 33 bp, Homo sapien
caacccatggtctaggtactttggagtagcacc

SEQ ID NO: 337839 - DNA, 33 bp, Homo sapien
acattacaagacataacagcaggtctaaaaatt

SEQ ID NO: 337840 - DNA, 33 bp, Homo sapien
acattacaagacataatagcaggtctaaaaatt

SEQ ID NO: 337841 - DNA, 33 bp, Homo sapien
gcctcatttataaaacactggtacggccaaact

SEQ ID NO: 337842 - DNA, 33 bp, Homo sapien
gcctcatttataaaacgctggtacggccaaact

SEQ ID NO: 337843 - DNA, 33 bp, Homo sapien
aaactctcctgccaaacgaaatagctattaggc

SEQ ID NO: 337844 - DNA, 33 bp, Homo sapien
aaactctcctgccaaatgaaatagctattaggc

SEQ ID NO: 337845 - DNA, 33 bp, Homo sapien
attataaattagaaaacgacaggctcttagtta

SEQ ID NO: 337846 - DNA, 33 bp, Homo sapien
attataaattagaaaatgacaggctcttagtta

SEQ ID NO: 337847 - DNA, 33 bp, Homo sapien
caaggaacaaatagaacagtggtaaccagagac

SEQ ID NO: 337848 - DNA, 33 bp, Homo sapien
caaggaacaaatagaagagtggtaaccagagac

SEQ ID NO: 337849 - DNA, 33 bp, Homo sapien
atatcatgtcaaatgacggatgtaagagtgaca

SEQ ID NO: 337850 - DNA, 33 bp, Homo sapien
atatcatgtcaaatgatggatgtaagagtgaca

SEQ ID NO: 337851 - DNA, 33 bp, Homo sapien
agggtcatgcctaaagaaagacttggaaccagt

SEQ ID NO: 337852 - DNA, 33 bp, Homo sapien
agggtcatgcctaaaggaagacttggaaccagt

SEQ ID NO: 337853 - DNA, 33 bp, Homo sapien
aagtttaagtgaatgacgctaaagggtaatttc

SEQ ID NO: 337854 - DNA, 33 bp, Homo sapien
aagtttaagtgaatgatgctaaagggtaatttc

SEQ ID NO: 337855 - DNA, 33 bp, Homo sapien
caaagtacactttaagacagacacattggctgg

SEQ ID NO: 337856 - DNA, 33 bp, Homo sapien
caaagtacactttaaggcagacacattggctgg

SEQ ID NO: 337857 - DNA, 33 bp, Homo sapien
cttgcacagcttatcaaaaatataggtttcttc

SEQ ID NO: 337858 - DNA, 33 bp, Homo sapien
cttgcacagcttatcagaaatataggtttcttc

SEQ ID NO: 337859 - DNA, 33 bp, Homo sapien
tgatgactgtaacatactagcttggaaattcaa

SEQ ID NO: 337860 - DNA, 33 bp, Homo sapien
tgatgactgtaacatattagcttggaaattcaa

SEQ ID NO: 337861 - DNA, 33 bp, Homo sapien
tcctctcccggacaaacggaaaccttcgccgcc

SEQ ID NO: 337862 - DNA, 33 bp, Homo sapien
tcctctcccggacaaatggaaaccttcgccgcc

SEQ ID NO: 337863 - DNA, 33 bp, Homo sapien
gtgacttagactgacacatttcattgcatagcg

SEQ ID NO: 337864 - DNA, 33 bp, Homo sapien
gtgacttagactgacatatttcattgcatagcg

SEQ ID NO: 337865 - DNA, 33 bp, Homo sapien
ccagtaccttattcaacccaaatgaaggtttat

SEQ ID NO: 337866 - DNA, 33 bp, Homo sapien
ccagtaccttattcaagccaaatgaaggtttat

SEQ ID NO: 337867 - DNA, 33 bp, Homo sapien
ataaggtactggaaaccgaggaattgctttact

SEQ ID NO: 337868 - DNA, 33 bp, Homo sapien
ataaggtactggaaactgaggaattgctttact

SEQ ID NO: 337869 - DNA, 33 bp, Homo sapien
agcacttattggattacctcgtttactcctcct

SEQ ID NO: 337870 - DNA, 33 bp, Homo sapien
agcacttattggattatctcgtttactcctcct

SEQ ID NO: 337871 - DNA, 33 bp, Homo sapien
ccctggttactggaaacggcactttcttactta

SEQ ID NO: 337872 - DNA, 33 bp, Homo sapien
ccctggttactggaaatggcactttcttactta

SEQ ID NO: 337873 - DNA, 33 bp, Homo sapien
cttatagtctttcttcccttcacatgtagtttt

SEQ ID NO: 337874 - DNA, 33 bp, Homo sapien
cttatagtctttcttctcttcacatgtagtttt

SEQ ID NO: 337875 - DNA, 33 bp, Homo sapien
tgaacaggtgaaagacagatgaaggcagggctg

SEQ ID NO: 337876 - DNA, 33 bp, Homo sapien
tgaacaggtgaaagacggatgaaggcagggctg

SEQ ID NO: 337877 - DNA, 33 bp, Homo sapien
cctatggtggttgttacggcaacaagaacaact

SEQ ID NO: 337878 - DNA, 33 bp, Homo sapien
cctatggtggttgttatggcaacaagaacaact

SEQ ID NO: 337879 - DNA, 33 bp, Homo sapien
caggccaggaggtcaaagttccagagcctcaaa

SEQ ID NO: 337880 - DNA, 33 bp, Homo sapien
caggccaggaggtcaacgttccagagcctcaaa

SEQ ID NO: 337881 - DNA, 33 bp, Homo sapien
tgagcataggtacatacagatgcagacacactg

SEQ ID NO: 337882 - DNA, 33 bp, Homo sapien
tgagcataggtacatagagatgcagacacactg

SEQ ID NO: 337883 - DNA, 33 bp, Homo sapien
cctcctcttctgctaacgtgcatgtaccaggca

SEQ ID NO: 337884 - DNA, 33 bp, Homo sapien
cctcctcttctgctaatgtgcatgtaccaggca

SEQ ID NO: 337885 - DNA, 33 bp, Homo sapien
gagtcaagggagccaacttggacccatcaggag

SEQ ID NO: 337886 - DNA, 33 bp, Homo sapien
gagtcaagggagccaagttggacccatcaggag

SEQ ID NO: 337887 - DNA, 33 bp, Homo sapien
aggccatcaccgggcaagttctgttagaatgac

SEQ ID NO: 337888 - DNA, 33 bp, Homo sapien
aggccatcaccgggcaggttctgttagaatgac

SEQ ID NO: 337889 - DNA, 33 bp, Homo sapien
atctatgcataggagccgccaactcagggacag

SEQ ID NO: 337890 - DNA, 33 bp, Homo sapien
atctatgcataggagctgccaactcagggacag

SEQ ID NO: 337891 - DNA, 33 bp, Homo sapien
gtttctgttgtaagcacgagttggaagggacag

SEQ ID NO: 337892 - DNA, 33 bp, Homo sapien
gtttctgttgtaagcatgagttggaagggacag

SEQ ID NO: 337893 - DNA, 33 bp, Homo sapien
actaaaacacaccgctgaaaacagactggaagc

SEQ ID NO: 337894 - DNA, 33 bp, Homo sapien
actaaaacacaccgcttaaaacagactggaagc

SEQ ID NO: 337895 - DNA, 33 bp, Homo sapien
gaaagatgagctactgcaactggacgagaaaaa

SEQ ID NO: 337896 - DNA, 33 bp, Homo sapien
gaaagatgagctactggaactggacgagaaaaa

SEQ ID NO: 337897 - DNA, 33 bp, Homo sapien
ccaaagtctccttgcaaacattcaggggtagcg

SEQ ID NO: 337898 - DNA, 33 bp, Homo sapien
ccaaagtctccttgcagacattcaggggtagcg

SEQ ID NO: 337899 - DNA, 33 bp, Homo sapien
catggaattgctctctcaccatatgactatttt

SEQ ID NO: 337900 - DNA, 33 bp, Homo sapien
catggaattgctctcttaccatatgactatttt

SEQ ID NO: 337901 - DNA, 33 bp, Homo sapien
gaaacaaaaccaatagcatgtagattatgaagc

SEQ ID NO: 337902 - DNA, 33 bp, Homo sapien
gaaacaaaaccaataggatgtagattatgaagc

SEQ ID NO: 337903 - DNA, 33 bp, Homo sapien
ttgaagattaagctacaatgtttcatttattat

SEQ ID NO: 337904 - DNA, 33 bp, Homo sapien
ttgaagattaagctacgatgtttcatttattat

SEQ ID NO: 337905 - DNA, 33 bp, Homo sapien
ttgggccacatatttacctttgagatttgtgtg

SEQ ID NO: 337906 - DNA, 33 bp, Homo sapien
ttgggccacatatttatctttgagatttgtgtg

SEQ ID NO: 337907 - DNA, 33 bp, Homo sapien
tgttctggtcagagacagtctagaaattctgtc

SEQ ID NO: 337908 - DNA, 33 bp, Homo sapien
tgttctggtcagagaccgtctagaaattctgtc

SEQ ID NO: 337909 - DNA, 33 bp, Homo sapien
aactgaagcactcttacggaaggaccagaaatt

SEQ ID NO: 337910 - DNA, 33 bp, Homo sapien
aactgaagcactcttagggaaggaccagaaatt

SEQ ID NO: 337911 - DNA, 33 bp, Homo sapien
gaagagactggtctgaaatcacagcaaggggct

SEQ ID NO: 337912 - DNA, 33 bp, Homo sapien
gaagagactggtctgagatcacagcaaggggct

SEQ ID NO: 337913 - DNA, 33 bp, Homo sapien
tgtttgttctttaaaaacccattcaggtgtcaa

SEQ ID NO: 337914 - DNA, 33 bp, Homo sapien
tgtttgttctttaaaaccccattcaggtgtcaa

SEQ ID NO: 337915 - DNA, 33 bp, Homo sapien
gagtgtagaggcttgaatagattcacagcagca

SEQ ID NO: 337916 - DNA, 33 bp, Homo sapien
gagtgtagaggcttgagtagattcacagcagca

SEQ ID NO: 337917 - DNA, 33 bp, Homo sapien
gtaccctaaatgtctcaaacagtatcagacaca

SEQ ID NO: 337918 - DNA, 33 bp, Homo sapien
gtaccctaaatgtctcgaacagtatcagacaca

SEQ ID NO: 337919 - DNA, 33 bp, Homo sapien
ccagtagatattaagcagagatggccactcttt

SEQ ID NO: 337920 - DNA, 33 bp, Homo sapien
ccagtagatattaagcggagatggccactcttt

SEQ ID NO: 337921 - DNA, 33 bp, Homo sapien
atcttacagatgttaaagtccctaaagtgacac

SEQ ID NO: 337922 - DNA, 33 bp, Homo sapien
atcttacagatgttaaggtccctaaagtgacac

SEQ ID NO: 337923 - DNA, 33 bp, Homo sapien
acaggtttgacttagcagaatcagctggatttc

SEQ ID NO: 337924 - DNA, 33 bp, Homo sapien
acaggtttgacttagcggaatcagctggatttc

SEQ ID NO: 337925 - DNA, 33 bp, Homo sapien
tactgccttcagatacacagaaagacatcttgg

SEQ ID NO: 337926 - DNA, 33 bp, Homo sapien
tactgccttcagatacgcagaaagacatcttgg

SEQ ID NO: 337927 - DNA, 33 bp, Homo sapien
aaaataactaagtgcaataagatcaatgaatga

SEQ ID NO: 337928 - DNA, 33 bp, Homo sapien
aaaataactaagtgcagtaagatcaatgaatga

SEQ ID NO: 337929 - DNA, 33 bp, Homo sapien
ctccgcaaagctcctaccagtatttaaaaaaat

SEQ ID NO: 337930 - DNA, 33 bp, Homo sapien
ctccgcaaagctcctatcagtatttaaaaaaat

SEQ ID NO: 337931 - DNA, 33 bp, Homo sapien
tgcatctaggcacttacacactaatacacctgc

SEQ ID NO: 337932 - DNA, 33 bp, Homo sapien
tgcatctaggcacttatacactaatacacctgc

SEQ ID NO: 337933 - DNA, 33 bp, Homo sapien
ccaagtctggtctaccactattttaaatcaagt

SEQ ID NO: 337934 - DNA, 33 bp, Homo sapien
ccaagtctggtctaccgctattttaaatcaagt

SEQ ID NO: 337935 - DNA, 33 bp, Homo sapien
atctgtggctaactctcaaatgactttaaattc

SEQ ID NO: 337936 - DNA, 33 bp, Homo sapien
atctgtggctaactctgaaatgactttaaattc

SEQ ID NO: 337937 - DNA, 33 bp, Homo sapien
gcagctgtactgaatacgtacaaactttttttg

SEQ ID NO: 337938 - DNA, 33 bp, Homo sapien
gcagctgtactgaatatgtacaaactttttttg

SEQ ID NO: 337939 - DNA, 33 bp, Homo sapien
gattcccttagatatactagatgttactgatct

SEQ ID NO: 337940 - DNA, 33 bp, Homo sapien
gattcccttagatatagtagatgttactgatct

SEQ ID NO: 337941 - DNA, 33 bp, Homo sapien
aacctgtagaagtggtaaacagagtatctgacc

SEQ ID NO: 337942 - DNA, 33 bp, Homo sapien
aacctgtagaagtggttaacagagtatctgacc

SEQ ID NO: 337943 - DNA, 33 bp, Homo sapien
agaaaactttggccaaccgcagtgactcatgcc

SEQ ID NO: 337944 - DNA, 33 bp, Homo sapien
agaaaactttggccaatcgcagtgactcatgcc

SEQ ID NO: 337945 - DNA, 33 bp, Homo sapien
gcaaacagtgttgctacgaggtttcttatatat

SEQ ID NO: 337946 - DNA, 33 bp, Homo sapien
gcaaacagtgttgctatgaggtttcttatatat

SEQ ID NO: 337947 - DNA, 33 bp, Homo sapien
ttctagaagtttctccccagtgtgtgaacttgt

SEQ ID NO: 337948 - DNA, 33 bp, Homo sapien
ttctagaagtttctcctcagtgtgtgaacttgt

SEQ ID NO: 337949 - DNA, 33 bp, Homo sapien
aaacaaacaaaaacacgattctgccaacctatg

SEQ ID NO: 337950 - DNA, 33 bp, Homo sapien
aaacaaacaaaaacactattctgccaacctatg

SEQ ID NO: 337951 - DNA, 33 bp, Homo sapien
cttctgttaggtaagaaggaataattttcttaa

SEQ ID NO: 337952 - DNA, 33 bp, Homo sapien
cttctgttaggtaagatggaataattttcttaa

SEQ ID NO: 337953 - DNA, 33 bp, Homo sapien
agttggtatttgagaactgatccttcttactgc

SEQ ID NO: 337954 - DNA, 33 bp, Homo sapien
agttggtatttgagaattgatccttcttactgc

SEQ ID NO: 337955 - DNA, 33 bp, Homo sapien
tccactttcctaattcaagcacttctaggtacg

SEQ ID NO: 337956 - DNA, 33 bp, Homo sapien
tccactttcctaattcgagcacttctaggtacg

SEQ ID NO: 337957 - DNA, 33 bp, Homo sapien
agttatggccacaaaacgtaataaaatgcttgt

SEQ ID NO: 337958 - DNA, 33 bp, Homo sapien
agttatggccacaaaatgtaataaaatgcttgt

SEQ ID NO: 337959 - DNA, 33 bp, Homo sapien
aataaatactttgtcaactgttaaataaataat

SEQ ID NO: 337960 - DNA, 33 bp, Homo sapien
aataaatactttgtcacctgttaaataaataat

SEQ ID NO: 337961 - DNA, 33 bp, Homo sapien
aaactttactccacatcacttgattcctcagat

SEQ ID NO: 337962 - DNA, 33 bp, Homo sapien
aaactttactccacattacttgattcctcagat

SEQ ID NO: 337963 - DNA, 33 bp, Homo sapien
attcttacatttctatcagcaaaaaccaaaaca

SEQ ID NO: 337964 - DNA, 33 bp, Homo sapien
attcttacatttctatgagcaaaaaccaaaaca

SEQ ID NO: 337965 - DNA, 33 bp, Homo sapien
gttagagcccatgatcaagctatggtcagaaga

SEQ ID NO: 337966 - DNA, 33 bp, Homo sapien
gttagagcccatgatcgagctatggtcagaaga

SEQ ID NO: 337967 - DNA, 33 bp, Homo sapien
actgcatcttcgcttgcacctcctatcaaaaga

SEQ ID NO: 337968 - DNA, 33 bp, Homo sapien
actgcatcttcgcttgtacctcctatcaaaaga

SEQ ID NO: 337969 - DNA, 33 bp, Homo sapien
aactccttactcagccacaactggaaattgctc

SEQ ID NO: 337970 - DNA, 33 bp, Homo sapien
aactccttactcagcctcaactggaaattgctc

SEQ ID NO: 337971 - DNA, 33 bp, Homo sapien
agatgttaaaaaattactaatcttcagccaaaa

SEQ ID NO: 337972 - DNA, 33 bp, Homo sapien
agatgttaaaaaattattaatcttcagccaaaa

SEQ ID NO: 337973 - DNA, 33 bp, Homo sapien
agagttttctactgtcagaacaaactctgaggt

SEQ ID NO: 337974 - DNA, 33 bp, Homo sapien
agagttttctactgtcggaacaaactctgaggt

SEQ ID NO: 337975 - DNA, 33 bp, Homo sapien
gagaaaataagtaccacgcagcaatttgtgaac

SEQ ID NO: 337976 - DNA, 33 bp, Homo sapien
gagaaaataagtaccatgcagcaatttgtgaac

SEQ ID NO: 337977 - DNA, 33 bp, Homo sapien
aaaaggactatacgccaaaagagctgcaagaac

SEQ ID NO: 337978 - DNA, 33 bp, Homo sapien
aaaaggactatacgcctaaagagctgcaagaac

SEQ ID NO: 337979 - DNA, 33 bp, Homo sapien
ttatttcacttgtaaagtcagttcagagtcact

SEQ ID NO: 337980 - DNA, 33 bp, Homo sapien
ttatttcacttgtaaattcagttcagagtcact

SEQ ID NO: 337981 - DNA, 33 bp, Homo sapien
atgttctaaaaccaacacaatcttatgattact

SEQ ID NO: 337982 - DNA, 33 bp, Homo sapien
atgttctaaaaccaacgcaatcttatgattact

SEQ ID NO: 337983 - DNA, 33 bp, Homo sapien
ccaagtgacttctacaccagggaattgtattga

SEQ ID NO: 337984 - DNA, 33 bp, Homo sapien
ccaagtgacttctacatcagggaattgtattga

SEQ ID NO: 337985 - DNA, 33 bp, Homo sapien
gtggagaggttgcttacctgcaagtgcgtccaa

SEQ ID NO: 337986 - DNA, 33 bp, Homo sapien
gtggagaggttgcttatctgcaagtgcgtccaa

SEQ ID NO: 337987 - DNA, 33 bp, Homo sapien
tcaaagactgagaaaaatgagtcataaaagaac

SEQ ID NO: 337988 - DNA, 33 bp, Homo sapien
tcaaagactgagaaaactgagtcataaaagaac

SEQ ID NO: 337989 - DNA, 33 bp, Homo sapien
attctacatcttgcccacaaagccttagcaatg

SEQ ID NO: 337990 - DNA, 33 bp, Homo sapien
attctacatcttgcccgcaaagccttagcaatg

SEQ ID NO: 337991 - DNA, 33 bp, Homo sapien
atggggccatgcccagaaacaggaatatggacc

SEQ ID NO: 337992 - DNA, 33 bp, Homo sapien
atggggccatgcccaggaacaggaatatggacc

SEQ ID NO: 337993 - DNA, 33 bp, Homo sapien
tcatgatgcctcctgcactgtggccttgcttcc

SEQ ID NO: 337994 - DNA, 33 bp, Homo sapien
tcatgatgcctcctgcgctgtggccttgcttcc

SEQ ID NO: 337995 - DNA, 33 bp, Homo sapien
ctccctgaagactgaaccgagcctgcatcctct

SEQ ID NO: 337996 - DNA, 33 bp, Homo sapien
ctccctgaagactgaatcgagcctgcatcctct

SEQ ID NO: 337997 - DNA, 33 bp, Homo sapien
atttcattagtgattaacaaaataagaaattga

SEQ ID NO: 337998 - DNA, 33 bp, Homo sapien
atttcattagtgattatcaaaataagaaattga

SEQ ID NO: 337999 - DNA, 33 bp, Homo sapien
aaaagacacaatcataaggtcatttttgaagat

SEQ ID NO: 338000 - DNA, 33 bp, Homo sapien
aaaagacacaatcatagggtcatttttgaagat

SEQ ID NO: 338001 - DNA, 33 bp, Homo sapien
tgccctttcagaaaccccaaccttattgctcta

SEQ ID NO: 338002 - DNA, 33 bp, Homo sapien
tgccctttcagaaaccgcaaccttattgctcta

SEQ ID NO: 338003 - DNA, 33 bp, Homo sapien
actcagaaccattaggacaagagatcctgaata

SEQ ID NO: 338004 - DNA, 33 bp, Homo sapien
actcagaaccattagggcaagagatcctgaata

SEQ ID NO: 338005 - DNA, 33 bp, Homo sapien
gctgatagaggaagcactcattcaagcacccat

SEQ ID NO: 338006 - DNA, 33 bp, Homo sapien
gctgatagaggaagcattcattcaagcacccat

SEQ ID NO: 338007 - DNA, 33 bp, Homo sapien
gagagatggaagatggaatgggtatagttatgg

SEQ ID NO: 338008 - DNA, 33 bp, Homo sapien
gagagatggaagatgggatgggtatagttatgg

SEQ ID NO: 338009 - DNA, 33 bp, Homo sapien
gaaaatcactgccggaagaaggcacagcaagtg

SEQ ID NO: 338010 - DNA, 33 bp, Homo sapien
gaaaatcactgccggaggaaggcacagcaagtg

SEQ ID NO: 338011 - DNA, 33 bp, Homo sapien
caaatttattgttgaacaagaagtgatacagag

SEQ ID NO: 338012 - DNA, 33 bp, Homo sapien
caaatttattgttgaataagaagtgatacagag

SEQ ID NO: 338013 - DNA, 33 bp, Homo sapien
aaatgcctacggggcaaaacgaagatgaagagt

SEQ ID NO: 338014 - DNA, 33 bp, Homo sapien
aaatgcctacggggcacaacgaagatgaagagt

SEQ ID NO: 338015 - DNA, 33 bp, Homo sapien
gaatagggcctgaatgaatcgagggaatggtgt

SEQ ID NO: 338016 - DNA, 33 bp, Homo sapien
gaatagggcctgaatggatcgagggaatggtgt

SEQ ID NO: 338017 - DNA, 33 bp, Homo sapien
cattagatgggaacacaatattccctggcaccc

SEQ ID NO: 338018 - DNA, 33 bp, Homo sapien
cattagatgggaacaccatattccctggcaccc

SEQ ID NO: 338019 - DNA, 33 bp, Homo sapien
tctggccttttcactaaaatacaacaaagatta

SEQ ID NO: 338020 - DNA, 33 bp, Homo sapien
tctggccttttcactagaatacaacaaagatta

SEQ ID NO: 338021 - DNA, 33 bp, Homo sapien
gggaggaaaagactcacggagctggaatcaaga

SEQ ID NO: 338022 - DNA, 33 bp, Homo sapien
gggaggaaaagactcatggagctggaatcaaga

SEQ ID NO: 338023 - DNA, 33 bp, Homo sapien
tctaaatgcttgatacaggagcagaaattattt

SEQ ID NO: 338024 - DNA, 33 bp, Homo sapien
tctaaatgcttgatacgggagcagaaattattt

SEQ ID NO: 338025 - DNA, 33 bp, Homo sapien
ggtactctactactaccactgaaaaccagggcc

SEQ ID NO: 338026 - DNA, 33 bp, Homo sapien
ggtactctactactactactgaaaaccagggcc

SEQ ID NO: 338027 - DNA, 33 bp, Homo sapien
tgcttgtgccgcaaagacttcaaatcttctatc

SEQ ID NO: 338028 - DNA, 33 bp, Homo sapien
tgcttgtgccgcaaagtcttcaaatcttctatc

SEQ ID NO: 338029 - DNA, 33 bp, Homo sapien
cttgatgactcagtcactatcaaggacattagg

SEQ ID NO: 338030 - DNA, 33 bp, Homo sapien
cttgatgactcagtcagtatcaaggacattagg

SEQ ID NO: 338031 - DNA, 33 bp, Homo sapien
ataagtggactactcaacaaaggttagtttctt

SEQ ID NO: 338032 - DNA, 33 bp, Homo sapien
ataagtggactactcagcaaaggttagtttctt

SEQ ID NO: 338033 - DNA, 33 bp, Homo sapien
cccttccttccttctcaaaagtaaccattctaa

SEQ ID NO: 338034 - DNA, 33 bp, Homo sapien
cccttccttccttctctaaagtaaccattctaa

SEQ ID NO: 338035 - DNA, 33 bp, Homo sapien
ccagacttgggaaataaatttgaaaatcgtatt

SEQ ID NO: 338036 - DNA, 33 bp, Homo sapien
ccagacttgggaaatacatttgaaaatcgtatt

SEQ ID NO: 338037 - DNA, 33 bp, Homo sapien
ctacagtatacacaagaaaatatgtgctttgcc

SEQ ID NO: 338038 - DNA, 33 bp, Homo sapien
ctacagtatacacaagcaaatatgtgctttgcc

SEQ ID NO: 338039 - DNA, 33 bp, Homo sapien
gtttgaataaacatagacccaatttcaaacctt

SEQ ID NO: 338040 - DNA, 33 bp, Homo sapien
gtttgaataaacatagccccaatttcaaacctt

SEQ ID NO: 338041 - DNA, 33 bp, Homo sapien
tggtctttctgctagacgatgccaagtgagatt

SEQ ID NO: 338042 - DNA, 33 bp, Homo sapien
tggtctttctgctagatgatgccaagtgagatt

SEQ ID NO: 338043 - DNA, 33 bp, Homo sapien
actctaattattattactaagccgcaactccca

SEQ ID NO: 338044 - DNA, 33 bp, Homo sapien
actctaattattattattaagccgcaactccca

SEQ ID NO: 338045 - DNA, 33 bp, Homo sapien
gctgcctctcctcttcacgttttccccacagcg

SEQ ID NO: 338046 - DNA, 33 bp, Homo sapien
gctgcctctcctcttcgcgttttccccacagcg

SEQ ID NO: 338047 - DNA, 33 bp, Homo sapien
aagacgcatggttcagccctcttcatgttacag

SEQ ID NO: 338048 - DNA, 33 bp, Homo sapien
aagacgcatggttcagtcctcttcatgttacag

SEQ ID NO: 338049 - DNA, 33 bp, Homo sapien
taatctgtccccctgccgcaaatctttatatcc

SEQ ID NO: 338050 - DNA, 33 bp, Homo sapien
taatctgtccccctgctgcaaatctttatatcc

SEQ ID NO: 338051 - DNA, 33 bp, Homo sapien
atgattgtgtcatccccgatagccccagattag

SEQ ID NO: 338052 - DNA, 33 bp, Homo sapien
atgattgtgtcatccctgatagccccagattag

SEQ ID NO: 338053 - DNA, 33 bp, Homo sapien
cttgctctgaaaagtccctaagtctgaggcctt

SEQ ID NO: 338054 - DNA, 33 bp, Homo sapien
cttgctctgaaaagtctctaagtctgaggcctt

SEQ ID NO: 338055 - DNA, 33 bp, Homo sapien
cctcaacagccggcagaatagctgagtttttca

SEQ ID NO: 338056 - DNA, 33 bp, Homo sapien
cctcaacagccggcaggatagctgagtttttca

SEQ ID NO: 338057 - DNA, 33 bp, Homo sapien
aatcatctcacgaaacagaaggtcgcagggcac

SEQ ID NO: 338058 - DNA, 33 bp, Homo sapien
aatcatctcacgaaacggaaggtcgcagggcac

SEQ ID NO: 338059 - DNA, 33 bp, Homo sapien
gcactccctggaggaccatgttagtccccagtt

SEQ ID NO: 338060 - DNA, 33 bp, Homo sapien
gcactccctggaggacgatgttagtccccagtt

SEQ ID NO: 338061 - DNA, 33 bp, Homo sapien
ccaagtgacaaagggccacatgtgcctcacccg

SEQ ID NO: 338062 - DNA, 33 bp, Homo sapien
ccaagtgacaaagggctacatgtgcctcacccg

SEQ ID NO: 338063 - DNA, 33 bp, Homo sapien
ggtaatcctgtaggaaaaagagggctattacct

SEQ ID NO: 338064 - DNA, 33 bp, Homo sapien
ggtaatcctgtaggaagaagagggctattacct

SEQ ID NO: 338065 - DNA, 33 bp, Homo sapien
acctaatgcagctccacgcgtccctcccaggat

SEQ ID NO: 338066 - DNA, 33 bp, Homo sapien
acctaatgcagctccatgcgtccctcccaggat

SEQ ID NO: 338067 - DNA, 33 bp, Homo sapien
cgctggccgtactttacgaccacactttggagg

SEQ ID NO: 338068 - DNA, 33 bp, Homo sapien
cgctggccgtactttatgaccacactttggagg

SEQ ID NO: 338069 - DNA, 33 bp, Homo sapien
gggcagactgtccagaagagactcactaaggtg

SEQ ID NO: 338070 - DNA, 33 bp, Homo sapien
gggcagactgtccagaggagactcactaaggtg

SEQ ID NO: 338071 - DNA, 33 bp, Homo sapien
actgctgtcctgagcaagtgcaagagcagaacg

SEQ ID NO: 338072 - DNA, 33 bp, Homo sapien
actgctgtcctgagcaggtgcaagagcagaacg

SEQ ID NO: 338073 - DNA, 33 bp, Homo sapien
tggctcctgtttggccacgactgattgcagccc

SEQ ID NO: 338074 - DNA, 33 bp, Homo sapien
tggctcctgtttggccgcgactgattgcagccc

SEQ ID NO: 338075 - DNA, 33 bp, Homo sapien
aatccttagcatcatgaaatactgaatctggaa

SEQ ID NO: 338076 - DNA, 33 bp, Homo sapien
aatccttagcatcatggaatactgaatctggaa

SEQ ID NO: 338077 - DNA, 33 bp, Homo sapien
catgtatttggagacacctttgacacataattg

SEQ ID NO: 338078 - DNA, 33 bp, Homo sapien
catgtatttggagacatctttgacacataattg

SEQ ID NO: 338079 - DNA, 33 bp, Homo sapien
taccagttattggtaaatgaagacccagtgact

SEQ ID NO: 338080 - DNA, 33 bp, Homo sapien
taccagttattggtaagtgaagacccagtgact

SEQ ID NO: 338081 - DNA, 33 bp, Homo sapien
agctctggaaaggaagacacttggaccaggaag

SEQ ID NO: 338082 - DNA, 33 bp, Homo sapien
agctctggaaaggaagccacttggaccaggaag

SEQ ID NO: 338083 - DNA, 33 bp, Homo sapien
aaccaaccaaacctgaaagaggtggcattggtg

SEQ ID NO: 338084 - DNA, 33 bp, Homo sapien
aaccaaccaaacctgagagaggtggcattggtg

SEQ ID NO: 338085 - DNA, 33 bp, Homo sapien
aaggtctgtattaggtaaaataaaacactcatg

SEQ ID NO: 338086 - DNA, 33 bp, Homo sapien
aaggtctgtattaggtgaaataaaacactcatg

SEQ ID NO: 338087 - DNA, 33 bp, Homo sapien
cccattaatcctgtgaaaaattctccaaaacat

SEQ ID NO: 338088 - DNA, 33 bp, Homo sapien
cccattaatcctgtgacaaattctccaaaacat

SEQ ID NO: 338089 - DNA, 33 bp, Homo sapien
tcctcctaaggctgaacaggtcggcttgattct

SEQ ID NO: 338090 - DNA, 33 bp, Homo sapien
tcctcctaaggctgaataggtcggcttgattct

SEQ ID NO: 338091 - DNA, 33 bp, Homo sapien
gggaactaggagaaagaatttgtcctgcggaag

SEQ ID NO: 338092 - DNA, 33 bp, Homo sapien
gggaactaggagaaaggatttgtcctgcggaag

SEQ ID NO: 338093 - DNA, 33 bp, Homo sapien
acaagaaagaggattacggcaaaaagaattgga

SEQ ID NO: 338094 - DNA, 33 bp, Homo sapien
acaagaaagaggattatggcaaaaagaattgga

SEQ ID NO: 338095 - DNA, 33 bp, Homo sapien
gaaaccttgacttttacatgaaaaacaaaaaat

SEQ ID NO: 338096 - DNA, 33 bp, Homo sapien
gaaaccttgacttttagatgaaaaacaaaaaat

SEQ ID NO: 338097 - DNA, 33 bp, Homo sapien
cttcaggtaacatgacaggcaataacagaaact

SEQ ID NO: 338098 - DNA, 33 bp, Homo sapien
cttcaggtaacatgacgggcaataacagaaact

SEQ ID NO: 338099 - DNA, 33 bp, Homo sapien
gctgtgtggcatatcacgtgcagggcaacatcc

SEQ ID NO: 338100 - DNA, 33 bp, Homo sapien
gctgtgtggcatatcatgtgcagggcaacatcc

SEQ ID NO: 338101 - DNA, 33 bp, Homo sapien
acttcctaaatttgcacagtaaatagaacacaa

SEQ ID NO: 338102 - DNA, 33 bp, Homo sapien
acttcctaaatttgcatagtaaatagaacacaa

SEQ ID NO: 338103 - DNA, 33 bp, Homo sapien
gaaaaagtatgaagtccatttgaaatgaatgca

SEQ ID NO: 338104 - DNA, 33 bp, Homo sapien
gaaaaagtatgaagtctatttgaaatgaatgca

SEQ ID NO: 338105 - DNA, 33 bp, Homo sapien
caggcacactgctggccgaagctagacgggagt

SEQ ID NO: 338106 - DNA, 33 bp, Homo sapien
caggcacactgctggctgaagctagacgggagt

SEQ ID NO: 338107 - DNA, 33 bp, Homo sapien
gtgccagctacatcaccggtctatcaggggcca

SEQ ID NO: 338108 - DNA, 33 bp, Homo sapien
gtgccagctacatcactggtctatcaggggcca

SEQ ID NO: 338109 - DNA, 33 bp, Homo sapien
ctgacccagaagtttcacgggtagtttgaggtg

SEQ ID NO: 338110 - DNA, 33 bp, Homo sapien
ctgacccagaagtttcgcgggtagtttgaggtg

SEQ ID NO: 338111 - DNA, 33 bp, Homo sapien
aagagggtgaggcagcaaaaaggccgacctgcc

SEQ ID NO: 338112 - DNA, 33 bp, Homo sapien
aagagggtgaggcagcgaaaaggccgacctgcc

SEQ ID NO: 338113 - DNA, 33 bp, Homo sapien
cagtgaatactcaagactcagggctgactcctc

SEQ ID NO: 338114 - DNA, 33 bp, Homo sapien
cagtgaatactcaagattcagggctgactcctc

SEQ ID NO: 338115 - DNA, 33 bp, Homo sapien
gctcaccggtaaccacacaggaatgactcaagc

SEQ ID NO: 338116 - DNA, 33 bp, Homo sapien
gctcaccggtaaccacgcaggaatgactcaagc

SEQ ID NO: 338117 - DNA, 33 bp, Homo sapien
aaccccaaagtctgaaatacaacttgagtatag

SEQ ID NO: 338118 - DNA, 33 bp, Homo sapien
aaccccaaagtctgaactacaacttgagtatag

SEQ ID NO: 338119 - DNA, 33 bp, Homo sapien
ggaaagagaggtcatcacagaccagccaagact

SEQ ID NO: 338120 - DNA, 33 bp, Homo sapien
ggaaagagaggtcatcgcagaccagccaagact

SEQ ID NO: 338121 - DNA, 33 bp, Homo sapien
aggcagggagccctaccagcgagcacacagacc

SEQ ID NO: 338122 - DNA, 33 bp, Homo sapien
aggcagggagccctacgagcgagcacacagacc

SEQ ID NO: 338123 - DNA, 33 bp, Homo sapien
ggagaggtcttccacaaaggtgacagagtttac

SEQ ID NO: 338124 - DNA, 33 bp, Homo sapien
ggagaggtcttccacagaggtgacagagtttac

SEQ ID NO: 338125 - DNA, 33 bp, Homo sapien
ctgagagtaccctcaaaattttcaaggcatcat

SEQ ID NO: 338126 - DNA, 33 bp, Homo sapien
ctgagagtaccctcaagattttcaaggcatcat

SEQ ID NO: 338127 - DNA, 33 bp, Homo sapien
gtatttgggtcatgggaatggatttctcatgaa

SEQ ID NO: 338128 - DNA, 33 bp, Homo sapien
gtatttgggtcatggggatggatttctcatgaa

SEQ ID NO: 338129 - DNA, 33 bp, Homo sapien
gtgtggaccatccaaccaagtggccttagaggc

SEQ ID NO: 338130 - DNA, 33 bp, Homo sapien
gtgtggaccatccaactaagtggccttagaggc

SEQ ID NO: 338131 - DNA, 33 bp, Homo sapien
gcatgtatgagtggtacgttgtgtaagtgtgcg

SEQ ID NO: 338132 - DNA, 33 bp, Homo sapien
gcatgtatgagtggtatgttgtgtaagtgtgcg

SEQ ID NO: 338133 - DNA, 33 bp, Homo sapien
tgcacagagggaaatagcagttgagagaggtga

SEQ ID NO: 338134 - DNA, 33 bp, Homo sapien
tgcacagagggaaatatcagttgagagaggtga

SEQ ID NO: 338135 - DNA, 33 bp, Homo sapien
agttgctgagggctacaaggcagatactacagg

SEQ ID NO: 338136 - DNA, 33 bp, Homo sapien
agttgctgagggctacgaggcagatactacagg

SEQ ID NO: 338137 - DNA, 33 bp, Homo sapien
ggtttcctgggactcaagacttttagtgctaaa

SEQ ID NO: 338138 - DNA, 33 bp, Homo sapien
ggtttcctgggactcacgacttttagtgctaaa

SEQ ID NO: 338139 - DNA, 33 bp, Homo sapien
aggagccctcttctccaaatcgtgggggaagag

SEQ ID NO: 338140 - DNA, 33 bp, Homo sapien
aggagccctcttctccgaatcgtgggggaagag

SEQ ID NO: 338141 - DNA, 33 bp, Homo sapien
agtgagaccccctccaccattctacaaaacttt

SEQ ID NO: 338142 - DNA, 33 bp, Homo sapien
agtgagaccccctccatcattctacaaaacttt

SEQ ID NO: 338143 - DNA, 33 bp, Homo sapien
tgttgcctaagaggtaagtggctctgacggtgg

SEQ ID NO: 338144 - DNA, 33 bp, Homo sapien
tgttgcctaagaggtaggtggctctgacggtgg

SEQ ID NO: 338145 - DNA, 33 bp, Homo sapien
aatagtactgatttcacaggattgttgtaaaga

SEQ ID NO: 338146 - DNA, 33 bp, Homo sapien
aatagtactgatttcataggattgttgtaaaga

SEQ ID NO: 338147 - DNA, 33 bp, Homo sapien
tttgttcactgatgacagagacatttgagcacc

SEQ ID NO: 338148 - DNA, 33 bp, Homo sapien
tttgttcactgatgacggagacatttgagcacc

SEQ ID NO: 338149 - DNA, 33 bp, Homo sapien
tacaggacttgggacacactggatatggaagga

SEQ ID NO: 338150 - DNA, 33 bp, Homo sapien
tacaggacttgggacagactggatatggaagga

SEQ ID NO: 338151 - DNA, 33 bp, Homo sapien
aaactgacatttcatcacaaaaatcctaataaa

SEQ ID NO: 338152 - DNA, 33 bp, Homo sapien
aaactgacatttcatctcaaaaatcctaataaa

SEQ ID NO: 338153 - DNA, 33 bp, Homo sapien
tttaggtagcaagatagaaaatattaatgacta

SEQ ID NO: 338154 - DNA, 33 bp, Homo sapien
tttaggtagcaagatataaaatattaatgacta

SEQ ID NO: 338155 - DNA, 33 bp, Homo sapien
atattcctatgaatcagtcctggcattcgccta

SEQ ID NO: 338156 - DNA, 33 bp, Homo sapien
atattcctatgaatcattcctggcattcgccta

SEQ ID NO: 338157 - DNA, 33 bp, Homo sapien
gcagtgaggggtccgcagaaagtcttggagacg

SEQ ID NO: 338158 - DNA, 33 bp, Homo sapien
gcagtgaggggtccgctgaaagtcttggagacg

SEQ ID NO: 338159 - DNA, 33 bp, Homo sapien
taactcacaggtttgaaacaaggaagattctgg

SEQ ID NO: 338160 - DNA, 33 bp, Homo sapien
taactcacaggtttgacacaaggaagattctgg

SEQ ID NO: 338161 - DNA, 33 bp, Homo sapien
agattctgggaagttgaagaagaacagaacctg

SEQ ID NO: 338162 - DNA, 33 bp, Homo sapien
agattctgggaagttggagaagaacagaacctg

SEQ ID NO: 338163 - DNA, 33 bp, Homo sapien
tgctgtttttcaaaccaggcattatagcaagtg

SEQ ID NO: 338164 - DNA, 33 bp, Homo sapien
tgctgtttttcaaaccgggcattatagcaagtg

SEQ ID NO: 338165 - DNA, 33 bp, Homo sapien
tgaacctgctctcttacggaattttggcctttg

SEQ ID NO: 338166 - DNA, 33 bp, Homo sapien
tgaacctgctctcttatggaattttggcctttg

SEQ ID NO: 338167 - DNA, 33 bp, Homo sapien
gtggtggtgtacgtacaagtcagtccttaggta

SEQ ID NO: 338168 - DNA, 33 bp, Homo sapien
gtggtggtgtacgtacgagtcagtccttaggta

SEQ ID NO: 338169 - DNA, 33 bp, Homo sapien
tcacttacaatgtcagaatatataactccattt

SEQ ID NO: 338170 - DNA, 33 bp, Homo sapien
tcacttacaatgtcaggatatataactccattt

SEQ ID NO: 338171 - DNA, 33 bp, Homo sapien
caaaatactatcatacaaaattcagcaacacat

SEQ ID NO: 338172 - DNA, 33 bp, Homo sapien
caaaatactatcatacgaaattcagcaacacat

SEQ ID NO: 338173 - DNA, 33 bp, Homo sapien
tttcctcattcataccccttacagtgcagatag

SEQ ID NO: 338174 - DNA, 33 bp, Homo sapien
tttcctcattcatacctcttacagtgcagatag

SEQ ID NO: 338175 - DNA, 33 bp, Homo sapien
aggtttcttataagcccctttgatgtgaggtta

SEQ ID NO: 338176 - DNA, 33 bp, Homo sapien
aggtttcttataagcctctttgatgtgaggtta

SEQ ID NO: 338177 - DNA, 33 bp, Homo sapien
acagcacagtccagtaggtgactatgtatgcat

SEQ ID NO: 338178 - DNA, 33 bp, Homo sapien
acagcacagtccagtatgtgactatgtatgcat

SEQ ID NO: 338179 - DNA, 33 bp, Homo sapien
tatgtatgcatgtgtgaatgtttccagagaagg

SEQ ID NO: 338180 - DNA, 33 bp, Homo sapien
tatgtatgcatgtgtggatgtttccagagaagg

SEQ ID NO: 338181 - DNA, 33 bp, Homo sapien
tgagacccaagtgaaaagcccaggactggatct

SEQ ID NO: 338182 - DNA, 33 bp, Homo sapien
tgagacccaagtgaaatgcccaggactggatct

SEQ ID NO: 338183 - DNA, 33 bp, Homo sapien
tggggcagatatacaacgcagaacagagtctct

SEQ ID NO: 338184 - DNA, 33 bp, Homo sapien
tggggcagatatacaatgcagaacagagtctct

SEQ ID NO: 338185 - DNA, 33 bp, Homo sapien
aggatacgtctcaccaaaatgaaagaataaacc

SEQ ID NO: 338186 - DNA, 33 bp, Homo sapien
aggatacgtctcaccagaatgaaagaataaacc

SEQ ID NO: 338187 - DNA, 33 bp, Homo sapien
ttgcttttctgcttaaaccatttcgaatttggt

SEQ ID NO: 338188 - DNA, 33 bp, Homo sapien
ttgcttttctgcttaagccatttcgaatttggt

SEQ ID NO: 338189 - DNA, 33 bp, Homo sapien
tgtgggaacatttacaagagaagagttagtgga

SEQ ID NO: 338190 - DNA, 33 bp, Homo sapien
tgtgggaacatttacaggagaagagttagtgga

SEQ ID NO: 338191 - DNA, 33 bp, Homo sapien
cacaacacagatttgggacagatcctctcagga

SEQ ID NO: 338192 - DNA, 33 bp, Homo sapien
cacaacacagatttggtacagatcctctcagga

SEQ ID NO: 338193 - DNA, 33 bp, Homo sapien
ttctactaagtgtgaaacctgcaggtgcatctg

SEQ ID NO: 338194 - DNA, 33 bp, Homo sapien
ttctactaagtgtgaaccctgcaggtgcatctg

SEQ ID NO: 338195 - DNA, 33 bp, Homo sapien
ctgtttccatgtgaagccactcctggaaagtga

SEQ ID NO: 338196 - DNA, 33 bp, Homo sapien
ctgtttccatgtgaaggcactcctggaaagtga

SEQ ID NO: 338197 - DNA, 33 bp, Homo sapien
cctgtcaattttatcaaaactgctgttcatcct

SEQ ID NO: 338198 - DNA, 33 bp, Homo sapien
cctgtcaattttatcacaactgctgttcatcct

SEQ ID NO: 338199 - DNA, 33 bp, Homo sapien
acaacgtcctgaacaacgtggagaccttgaagt

SEQ ID NO: 338200 - DNA, 33 bp, Homo sapien
acaacgtcctgaacaatgtggagaccttgaagt

SEQ ID NO: 338201 - DNA, 33 bp, Homo sapien
acagagtggaacccagaccgtccacaaagggca

SEQ ID NO: 338202 - DNA, 33 bp, Homo sapien
acagagtggaacccaggccgtccacaaagggca

SEQ ID NO: 338203 - DNA, 33 bp, Homo sapien
ggggttttgttacggcagcccacatagacatcc

SEQ ID NO: 338204 - DNA, 33 bp, Homo sapien
ggggttttgttacggcggcccacatagacatcc

SEQ ID NO: 338205 - DNA, 33 bp, Homo sapien
tggctgcaaaggatgaggaatacatggagaata

SEQ ID NO: 338206 - DNA, 33 bp, Homo sapien
tggctgcaaaggatgatgaatacatggagaata

SEQ ID NO: 338207 - DNA, 33 bp, Homo sapien
ggatgtccttgtcataaagggtgagctccagga

SEQ ID NO: 338208 - DNA, 33 bp, Homo sapien
ggatgtccttgtcatagagggtgagctccagga

SEQ ID NO: 338209 - DNA, 33 bp, Homo sapien
aaggtgctgaactcccaatgcctgggacccgcc

SEQ ID NO: 338210 - DNA, 33 bp, Homo sapien
aaggtgctgaactccctatgcctgggacccgcc

SEQ ID NO: 338211 - DNA, 33 bp, Homo sapien
accctagtccctttccacatttcctcttctcat

SEQ ID NO: 338212 - DNA, 33 bp, Homo sapien
accctagtccctttccgcatttcctcttctcat

SEQ ID NO: 338213 - DNA, 33 bp, Homo sapien
tgggattgtttgggaacagcacgaggaactttc

SEQ ID NO: 338214 - DNA, 33 bp, Homo sapien
tgggattgtttgggaatagcacgaggaactttc

SEQ ID NO: 338215 - DNA, 33 bp, Homo sapien
acagggaattttcagagtagtagcaatttcaag

SEQ ID NO: 338216 - DNA, 33 bp, Homo sapien
acagggaattttcagattagtagcaatttcaag

SEQ ID NO: 338217 - DNA, 33 bp, Homo sapien
tgttacatttcatgagaaaaaaaaacaattcag

SEQ ID NO: 338218 - DNA, 33 bp, Homo sapien
tgttacatttcatgaggaaaaaaaacaattcag

SEQ ID NO: 338219 - DNA, 33 bp, Homo sapien
aggattagtgaaataacagatgcgtttagcatt

SEQ ID NO: 338220 - DNA, 33 bp, Homo sapien
aggattagtgaaataagagatgcgtttagcatt

SEQ ID NO: 338221 - DNA, 33 bp, Homo sapien
agctttggaactacataaatgtttcataaaaac

SEQ ID NO: 338222 - DNA, 33 bp, Homo sapien
agctttggaactacatgaatgtttcataaaaac

SEQ ID NO: 338223 - DNA, 33 bp, Homo sapien
aacatgaaaattgctaaacaaatcctgtgttat

SEQ ID NO: 338224 - DNA, 33 bp, Homo sapien
aacatgaaaattgctacacaaatcctgtgttat

SEQ ID NO: 338225 - DNA, 33 bp, Homo sapien
ccattgtgttaagcggaagtgtatagttcaagt

SEQ ID NO: 338226 - DNA, 33 bp, Homo sapien
ccattgtgttaagcgggagtgtatagttcaagt

SEQ ID NO: 338227 - DNA, 33 bp, Homo sapien
atggactgttctggtaactggtattggtttaga

SEQ ID NO: 338228 - DNA, 33 bp, Homo sapien
atggactgttctggtatctggtattggtttaga

SEQ ID NO: 338229 - DNA, 33 bp, Homo sapien
tgcttcccagattttgcagcaaccctatgtcaa

SEQ ID NO: 338230 - DNA, 33 bp, Homo sapien
tgcttcccagattttgtagcaaccctatgtcaa

SEQ ID NO: 338231 - DNA, 33 bp, Homo sapien
ttaagataatgtgtataaatgttgtacttctcc

SEQ ID NO: 338232 - DNA, 33 bp, Homo sapien
ttaagataatgtgtatgaatgttgtacttctcc

SEQ ID NO: 338233 - DNA, 33 bp, Homo sapien
gctgacatatgtaaaaccactataatagcaatg

SEQ ID NO: 338234 - DNA, 33 bp, Homo sapien
gctgacatatgtaaaagcactataatagcaatg

SEQ ID NO: 338235 - DNA, 33 bp, Homo sapien
acctcaagatgaataacaaagtcatcattttat

SEQ ID NO: 338236 - DNA, 33 bp, Homo sapien
acctcaagatgaataagaaagtcatcattttat

SEQ ID NO: 338237 - DNA, 33 bp, Homo sapien
aaggcccaacaaccaccaacctatggtcagttt

SEQ ID NO: 338238 - DNA, 33 bp, Homo sapien
aaggcccaacaaccactaacctatggtcagttt

SEQ ID NO: 338239 - DNA, 33 bp, Homo sapien
aataaagtcatgagacgggatttggtcaccaag

SEQ ID NO: 338240 - DNA, 33 bp, Homo sapien
aataaagtcatgagactggatttggtcaccaag

SEQ ID NO: 338241 - DNA, 33 bp, Homo sapien
ttaatacttacttgacaatgccatatcccagac

SEQ ID NO: 338242 - DNA, 33 bp, Homo sapien
ttaatacttacttgacgatgccatatcccagac

SEQ ID NO: 338243 - DNA, 33 bp, Homo sapien
ggcaacaggccagatgccaatactagactgctg

SEQ ID NO: 338244 - DNA, 33 bp, Homo sapien
ggcaacaggccagatgtcaatactagactgctg

SEQ ID NO: 338245 - DNA, 33 bp, Homo sapien
actcatacaataagacactatacaagcatttaa

SEQ ID NO: 338246 - DNA, 33 bp, Homo sapien
actcatacaataagaccctatacaagcatttaa

SEQ ID NO: 338247 - DNA, 33 bp, Homo sapien
tcacgttactgtagatcagtttctctttttgga

SEQ ID NO: 338248 - DNA, 33 bp, Homo sapien
tcacgttactgtagattagtttctctttttgga

SEQ ID NO: 338249 - DNA, 33 bp, Homo sapien
tcaggcttaaaattaacgaagagactcctctaa

SEQ ID NO: 338250 - DNA, 33 bp, Homo sapien
tcaggcttaaaattaatgaagagactcctctaa

SEQ ID NO: 338251 - DNA, 33 bp, Homo sapien
ccagatttgaagttccagatgtcctcacaagca

SEQ ID NO: 338252 - DNA, 33 bp, Homo sapien
ccagatttgaagttccggatgtcctcacaagca

SEQ ID NO: 338253 - DNA, 33 bp, Homo sapien
tgtctctcactatccactgaacccagacagagt

SEQ ID NO: 338254 - DNA, 33 bp, Homo sapien
tgtctctcactatccattgaacccagacagagt

SEQ ID NO: 338255 - DNA, 33 bp, Homo sapien
ataccttcgtaatttcacttcactcccttgcaa

SEQ ID NO: 338256 - DNA, 33 bp, Homo sapien
ataccttcgtaatttcgcttcactcccttgcaa

SEQ ID NO: 338257 - DNA, 33 bp, Homo sapien
gcttgtaattacttacccaatgtctgtctttcc

SEQ ID NO: 338258 - DNA, 33 bp, Homo sapien
gcttgtaattacttactcaatgtctgtctttcc

SEQ ID NO: 338259 - DNA, 33 bp, Homo sapien
cttgaaatgttgcaacagagtggctctagaact

SEQ ID NO: 338260 - DNA, 33 bp, Homo sapien
cttgaaatgttgcaacggagtggctctagaact

SEQ ID NO: 338261 - DNA, 33 bp, Homo sapien
aagcagtaactccctaacactcacacctctcag

SEQ ID NO: 338262 - DNA, 33 bp, Homo sapien
aagcagtaactccctatcactcacacctctcag

SEQ ID NO: 338263 - DNA, 33 bp, Homo sapien
tagactggataaagtaacagacacccttgagca

SEQ ID NO: 338264 - DNA, 33 bp, Homo sapien
tagactggataaagtatcagacacccttgagca

SEQ ID NO: 338265 - DNA, 33 bp, Homo sapien
ccaggcaaattatcagccaaaggtaaaggtagg

SEQ ID NO: 338266 - DNA, 33 bp, Homo sapien
ccaggcaaattatcagtcaaaggtaaaggtagg

SEQ ID NO: 338267 - DNA, 33 bp, Homo sapien
aatcccttgatggagagcttttgtttgtttgtt

SEQ ID NO: 338268 - DNA, 33 bp, Homo sapien
aatcccttgatggagatcttttgtttgtttgtt

SEQ ID NO: 338269 - DNA, 33 bp, Homo sapien
cccttcagcactaccacagcatcttgaaggttc

SEQ ID NO: 338270 - DNA, 33 bp, Homo sapien
cccttcagcactaccatagcatcttgaaggttc

SEQ ID NO: 338271 - DNA, 33 bp, Homo sapien
agacgctcagataacactgatataagcaaacat

SEQ ID NO: 338272 - DNA, 33 bp, Homo sapien
agacgctcagataacattgatataagcaaacat

SEQ ID NO: 338273 - DNA, 33 bp, Homo sapien
taaaataagattttccaatggactatcttccct

SEQ ID NO: 338274 - DNA, 33 bp, Homo sapien
taaaataagattttccgatggactatcttccct

SEQ ID NO: 338275 - DNA, 33 bp, Homo sapien
gaaagtaatattctaaaagcccattgtcagatc

SEQ ID NO: 338276 - DNA, 33 bp, Homo sapien
gaaagtaatattctaagagcccattgtcagatc

SEQ ID NO: 338277 - DNA, 33 bp, Homo sapien
ttcaaaggaaatgggaacgtgccaaagagccaa

SEQ ID NO: 338278 - DNA, 33 bp, Homo sapien
ttcaaaggaaatgggagcgtgccaaagagccaa

SEQ ID NO: 338279 - DNA, 33 bp, Homo sapien
acactttgactagtaaaagtgagtcctgataaa

SEQ ID NO: 338280 - DNA, 33 bp, Homo sapien
acactttgactagtaagagtgagtcctgataaa

SEQ ID NO: 338281 - DNA, 33 bp, Homo sapien
ctctctgcctgcagaccgctggtattccctcct

SEQ ID NO: 338282 - DNA, 33 bp, Homo sapien
ctctctgcctgcagactgctggtattccctcct

SEQ ID NO: 338283 - DNA, 33 bp, Homo sapien
taatcctgtagaatgacattccagatggcacat

SEQ ID NO: 338284 - DNA, 33 bp, Homo sapien
taatcctgtagaatgatattccagatggcacat

SEQ ID NO: 338285 - DNA, 33 bp, Homo sapien
agtgtggcagtggttgcaattcaggtgtagaaa

SEQ ID NO: 338286 - DNA, 33 bp, Homo sapien
agtgtggcagtggttgtaattcaggtgtagaaa

SEQ ID NO: 338287 - DNA, 33 bp, Homo sapien
acatcgttgtcattcaatgaactttcttggcct

SEQ ID NO: 338288 - DNA, 33 bp, Homo sapien
acatcgttgtcattcagtgaactttcttggcct

SEQ ID NO: 338289 - DNA, 33 bp, Homo sapien
tttgcttttctggtacaagattcttcccaaagg

SEQ ID NO: 338290 - DNA, 33 bp, Homo sapien
tttgcttttctggtacgagattcttcccaaagg

SEQ ID NO: 338291 - DNA, 33 bp, Homo sapien
tgatggctttctacccactggcctgagaagtta

SEQ ID NO: 338292 - DNA, 33 bp, Homo sapien
tgatggctttctaccccctggcctgagaagtta

SEQ ID NO: 338293 - DNA, 33 bp, Homo sapien
agggacctaactgcataaccattcacagaaaaa

SEQ ID NO: 338294 - DNA, 33 bp, Homo sapien
agggacctaactgcatgaccattcacagaaaaa

SEQ ID NO: 338295 - DNA, 33 bp, Homo sapien
gggtcctgtggtgtcacagtgctaatatcttag

SEQ ID NO: 338296 - DNA, 33 bp, Homo sapien
gggtcctgtggtgtcatagtgctaatatcttag

SEQ ID NO: 338297 - DNA, 33 bp, Homo sapien
atgtctgagacaggaacgttgtaagacctgttg

SEQ ID NO: 338298 - DNA, 33 bp, Homo sapien
atgtctgagacaggaatgttgtaagacctgttg

SEQ ID NO: 338299 - DNA, 33 bp, Homo sapien
ctttaaagtatgatgaaaagaaggatcaagccc

SEQ ID NO: 338300 - DNA, 33 bp, Homo sapien
ctttaaagtatgatgagaagaaggatcaagccc

SEQ ID NO: 338301 - DNA, 33 bp, Homo sapien
taacaggtgaagtcagcattttggtagttcaca

SEQ ID NO: 338302 - DNA, 33 bp, Homo sapien
taacaggtgaagtcaggattttggtagttcaca

SEQ ID NO: 338303 - DNA, 33 bp, Homo sapien
ttaataagatagtggacgtctggaacagagaga

SEQ ID NO: 338304 - DNA, 33 bp, Homo sapien
ttaataagatagtggatgtctggaacagagaga

SEQ ID NO: 338305 - DNA, 33 bp, Homo sapien
gtgcaccagagcaaaccgtccacgggcctcctg

SEQ ID NO: 338306 - DNA, 33 bp, Homo sapien
gtgcaccagagcaaactgtccacgggcctcctg

SEQ ID NO: 338307 - DNA, 33 bp, Homo sapien
gaagtaatcggccttaagcaccgggggccattg

SEQ ID NO: 338308 - DNA, 33 bp, Homo sapien
gaagtaatcggccttatgcaccgggggccattg

SEQ ID NO: 338309 - DNA, 33 bp, Homo sapien
ccctcgacactggagccaaatgtcaattgagaa

SEQ ID NO: 338310 - DNA, 33 bp, Homo sapien
ccctcgacactggagcgaaatgtcaattgagaa

SEQ ID NO: 338311 - DNA, 33 bp, Homo sapien
caagaggccatcatacaccatcagatttggtgc

SEQ ID NO: 338312 - DNA, 33 bp, Homo sapien
caagaggccatcatacgccatcagatttggtgc

SEQ ID NO: 338313 - DNA, 33 bp, Homo sapien
atggagtgggtatgaaaagataaagaactgaag

SEQ ID NO: 338314 - DNA, 33 bp, Homo sapien
atggagtgggtatgaagagataaagaactgaag

SEQ ID NO: 338315 - DNA, 33 bp, Homo sapien
cctcaagtcccactaacgtacctgtttggatcc

SEQ ID NO: 338316 - DNA, 33 bp, Homo sapien
cctcaagtcccactaatgtacctgtttggatcc

SEQ ID NO: 338317 - DNA, 33 bp, Homo sapien
ctgcaccctttttcaccgagtctcctcattttc

SEQ ID NO: 338318 - DNA, 33 bp, Homo sapien
ctgcaccctttttcactgagtctcctcattttc

SEQ ID NO: 338319 - DNA, 33 bp, Homo sapien
taaacttgaaataaaccgagcagctgaggcttc

SEQ ID NO: 338320 - DNA, 33 bp, Homo sapien
taaacttgaaataaactgagcagctgaggcttc

SEQ ID NO: 338321 - DNA, 33 bp, Homo sapien
tggagtgggaaatagcagagatggataagttaa

SEQ ID NO: 338322 - DNA, 33 bp, Homo sapien
tggagtgggaaatagcggagatggataagttaa

SEQ ID NO: 338323 - DNA, 33 bp, Homo sapien
ctttcgtgagattatcagaagtagacagaagtg

SEQ ID NO: 338324 - DNA, 33 bp, Homo sapien
ctttcgtgagattatcggaagtagacagaagtg

SEQ ID NO: 338325 - DNA, 33 bp, Homo sapien
cttcttcctttttcacaagacggaatttaaaag

SEQ ID NO: 338326 - DNA, 33 bp, Homo sapien
cttcttcctttttcaccagacggaatttaaaag

SEQ ID NO: 338327 - DNA, 33 bp, Homo sapien
gcatctaaatcaaggaagaattgaataacagga

SEQ ID NO: 338328 - DNA, 33 bp, Homo sapien
gcatctaaatcaaggaggaattgaataacagga

SEQ ID NO: 338329 - DNA, 33 bp, Homo sapien
atgttgttctcctacccaaaatatctcttcctc

SEQ ID NO: 338330 - DNA, 33 bp, Homo sapien
atgttgttctcctacctaaaatatctcttcctc

SEQ ID NO: 338331 - DNA, 33 bp, Homo sapien
ttaaaacatttctggacgtatctttaccaattt

SEQ ID NO: 338332 - DNA, 33 bp, Homo sapien
ttaaaacatttctggatgtatctttaccaattt

SEQ ID NO: 338333 - DNA, 33 bp, Homo sapien
cttccttatcgattgaatactttgctggcagtt

SEQ ID NO: 338334 - DNA, 33 bp, Homo sapien
cttccttatcgattgagtactttgctggcagtt

SEQ ID NO: 338335 - DNA, 33 bp, Homo sapien
gaacagctgctattcaagagtcacccaggtccc

SEQ ID NO: 338336 - DNA, 33 bp, Homo sapien
gaacagctgctattcaggagtcacccaggtccc

SEQ ID NO: 338337 - DNA, 33 bp, Homo sapien
tagaagaccacagtcaaatattggtgagtgcca

SEQ ID NO: 338338 - DNA, 33 bp, Homo sapien
tagaagaccacagtcagatattggtgagtgcca

SEQ ID NO: 338339 - DNA, 33 bp, Homo sapien
tattatcctagttttacgtacaaagaaagggat

SEQ ID NO: 338340 - DNA, 33 bp, Homo sapien
tattatcctagttttaggtacaaagaaagggat

SEQ ID NO: 338341 - DNA, 33 bp, Homo sapien
gaccactattggtccacggcctgttaacagaaa

SEQ ID NO: 338342 - DNA, 33 bp, Homo sapien
gaccactattggtccatggcctgttaacagaaa

SEQ ID NO: 338343 - DNA, 33 bp, Homo sapien
tctttgttctatataaaagtcaggagtgtaggg

SEQ ID NO: 338344 - DNA, 33 bp, Homo sapien
tctttgttctatataagagtcaggagtgtaggg

SEQ ID NO: 338345 - DNA, 33 bp, Homo sapien
atattaactctctggcgcgttacagatcttctt

SEQ ID NO: 338346 - DNA, 33 bp, Homo sapien
atattaactctctggctcgttacagatcttctt

SEQ ID NO: 338347 - DNA, 33 bp, Homo sapien
tgatctctttaaacaaacttttctggttaattc

SEQ ID NO: 338348 - DNA, 33 bp, Homo sapien
tgatctctttaaacaagcttttctggttaattc

SEQ ID NO: 338349 - DNA, 33 bp, Homo sapien
cagctgtctcaccaaacgttgagaatttgaagg

SEQ ID NO: 338350 - DNA, 33 bp, Homo sapien
cagctgtctcaccaaatgttgagaatttgaagg

SEQ ID NO: 338351 - DNA, 33 bp, Homo sapien
aggctaagtttagaccaatatatctttctcatg

SEQ ID NO: 338352 - DNA, 33 bp, Homo sapien
aggctaagtttagacccatatatctttctcatg

SEQ ID NO: 338353 - DNA, 33 bp, Homo sapien
gagagtgatatactaacaactgcctcaggatat

SEQ ID NO: 338354 - DNA, 33 bp, Homo sapien
gagagtgatatactaataactgcctcaggatat

SEQ ID NO: 338355 - DNA, 33 bp, Homo sapien
taattgcaaaatattcaaacagtacagaagact

SEQ ID NO: 338356 - DNA, 33 bp, Homo sapien
taattgcaaaatattcgaacagtacagaagact

SEQ ID NO: 338357 - DNA, 33 bp, Homo sapien
tcatgtcatactccaaatattagaggttagcac

SEQ ID NO: 338358 - DNA, 33 bp, Homo sapien
tcatgtcatactccaagtattagaggttagcac

SEQ ID NO: 338359 - DNA, 33 bp, Homo sapien
gagaggggccaatagaaaggcttgaaaacacat

SEQ ID NO: 338360 - DNA, 33 bp, Homo sapien
gagaggggccaatagagaggcttgaaaacacat

SEQ ID NO: 338361 - DNA, 33 bp, Homo sapien
gtctgttaggatagccacataaggaatttatca

SEQ ID NO: 338362 - DNA, 33 bp, Homo sapien
gtctgttaggatagcctcataaggaatttatca

SEQ ID NO: 338363 - DNA, 33 bp, Homo sapien
ctcattatacagatgaaagatatacataaatgc

SEQ ID NO: 338364 - DNA, 33 bp, Homo sapien
ctcattatacagatgacagatatacataaatgc

SEQ ID NO: 338365 - DNA, 33 bp, Homo sapien
tgaaactatgtattccagccctcatcagacttt

SEQ ID NO: 338366 - DNA, 33 bp, Homo sapien
tgaaactatgtattccggccctcatcagacttt

SEQ ID NO: 338367 - DNA, 33 bp, Homo sapien
actgaagctaccaggcagacttaaaagtaaccc

SEQ ID NO: 338368 - DNA, 33 bp, Homo sapien
actgaagctaccaggccgacttaaaagtaaccc

SEQ ID NO: 338369 - DNA, 33 bp, Homo sapien
cccaaggtgacccaggaaaaaacagcttccgag

SEQ ID NO: 338370 - DNA, 33 bp, Homo sapien
cccaaggtgacccagggaaaaacagcttccgag

SEQ ID NO: 338371 - DNA, 33 bp, Homo sapien
atggctatgcaggaaacaatatcatagctgtca

SEQ ID NO: 338372 - DNA, 33 bp, Homo sapien
atggctatgcaggaaataatatcatagctgtca

SEQ ID NO: 338373 - DNA, 33 bp, Homo sapien
taacaggtttctattccagttgctatcctgagc

SEQ ID NO: 338374 - DNA, 33 bp, Homo sapien
taacaggtttctattctagttgctatcctgagc

SEQ ID NO: 338375 - DNA, 33 bp, Homo sapien
aggtctaaggaacagacgaaaagtgaggccgag

SEQ ID NO: 338376 - DNA, 33 bp, Homo sapien
aggtctaaggaacagatgaaaagtgaggccgag

SEQ ID NO: 338377 - DNA, 33 bp, Homo sapien
agccccaggggctgacactatcaaatgtggccc

SEQ ID NO: 338378 - DNA, 33 bp, Homo sapien
agccccaggggctgacgctatcaaatgtggccc

SEQ ID NO: 338379 - DNA, 33 bp, Homo sapien
tttgctgttatcagcaatactacagtgaataac

SEQ ID NO: 338380 - DNA, 33 bp, Homo sapien
tttgctgttatcagcagtactacagtgaataac

SEQ ID NO: 338381 - DNA, 33 bp, Homo sapien
agataaactgtctaacaagcattacagggacaa

SEQ ID NO: 338382 - DNA, 33 bp, Homo sapien
agataaactgtctaactagcattacagggacaa

SEQ ID NO: 338383 - DNA, 33 bp, Homo sapien
gtgatggatttgcgaacgtcctccaactcattg

SEQ ID NO: 338384 - DNA, 33 bp, Homo sapien
gtgatggatttgcgaatgtcctccaactcattg

SEQ ID NO: 338385 - DNA, 33 bp, Homo sapien
ctagtgggtcagtgaactagattctgtatgtct

SEQ ID NO: 338386 - DNA, 33 bp, Homo sapien
ctagtgggtcagtgaattagattctgtatgtct

SEQ ID NO: 338387 - DNA, 33 bp, Homo sapien
tctccaccagctcccggagcaagaatagcagca

SEQ ID NO: 338388 - DNA, 33 bp, Homo sapien
tctccaccagctcccgtagcaagaatagcagca

SEQ ID NO: 338389 - DNA, 33 bp, Homo sapien
gtcattggtttctgtgaacctcagtttctattc

SEQ ID NO: 338390 - DNA, 33 bp, Homo sapien
gtcattggtttctgtggacctcagtttctattc

SEQ ID NO: 338391 - DNA, 33 bp, Homo sapien
gaagacaatttttccacgatggggggaggaggg

SEQ ID NO: 338392 - DNA, 33 bp, Homo sapien
gaagacaatttttccatgatggggggaggaggg

SEQ ID NO: 338393 - DNA, 33 bp, Homo sapien
cactagatggattcgaaagcagatttgagcagg

SEQ ID NO: 338394 - DNA, 33 bp, Homo sapien
cactagatggattcgagagcagatttgagcagg

SEQ ID NO: 338395 - DNA, 33 bp, Homo sapien
tgtataaggtgtatggaagggatccaatttcaa

SEQ ID NO: 338396 - DNA, 33 bp, Homo sapien
tgtataaggtgtatggtagggatccaatttcaa

SEQ ID NO: 338397 - DNA, 33 bp, Homo sapien
gctttcaagggtcttcaatctagtaaagaaaca

SEQ ID NO: 338398 - DNA, 33 bp, Homo sapien
gctttcaagggtcttcgatctagtaaagaaaca

SEQ ID NO: 338399 - DNA, 33 bp, Homo sapien
tttgagagaattcctccgactgtatttacagga

SEQ ID NO: 338400 - DNA, 33 bp, Homo sapien
tttgagagaattcctctgactgtatttacagga

SEQ ID NO: 338401 - DNA, 33 bp, Homo sapien
tcatggatgaaaaaaaccattacggaaaaatat

SEQ ID NO: 338402 - DNA, 33 bp, Homo sapien
tcatggatgaaaaaaatcattacggaaaaatat

SEQ ID NO: 338403 - DNA, 33 bp, Homo sapien
caaagcacaatctggacgaatagtaatcaggaa

SEQ ID NO: 338404 - DNA, 33 bp, Homo sapien
caaagcacaatctggatgaatagtaatcaggaa

SEQ ID NO: 338405 - DNA, 33 bp, Homo sapien
ttcaaaatgattccaacgcttccctctaaaagg

SEQ ID NO: 338406 - DNA, 33 bp, Homo sapien
ttcaaaatgattccaatgcttccctctaaaagg

SEQ ID NO: 338407 - DNA, 33 bp, Homo sapien
tgcctctgtttcataacactgcttgtcttgtga

SEQ ID NO: 338408 - DNA, 33 bp, Homo sapien
tgcctctgtttcataatactgcttgtcttgtga

SEQ ID NO: 338409 - DNA, 33 bp, Homo sapien
cagcataaagagctaacatggaaaagaagggcc

SEQ ID NO: 338410 - DNA, 33 bp, Homo sapien
cagcataaagagctaagatggaaaagaagggcc

SEQ ID NO: 338411 - DNA, 33 bp, Homo sapien
cacatcctggatgttgaataatgtgataaggag

SEQ ID NO: 338412 - DNA, 33 bp, Homo sapien
cacatcctggatgttggataatgtgataaggag

SEQ ID NO: 338413 - DNA, 33 bp, Homo sapien
gaaggggaaaaagacccagaaatgtttgatgcg

SEQ ID NO: 338414 - DNA, 33 bp, Homo sapien
gaaggggaaaaagacctagaaatgtttgatgcg

SEQ ID NO: 338415 - DNA, 33 bp, Homo sapien
tgctctatctgatgataagtttgacaaatgcat

SEQ ID NO: 338416 - DNA, 33 bp, Homo sapien
tgctctatctgatgatgagtttgacaaatgcat

SEQ ID NO: 338417 - DNA, 33 bp, Homo sapien
gtctctgaaaatgccacgctcacagttccctaa

SEQ ID NO: 338418 - DNA, 33 bp, Homo sapien
gtctctgaaaatgccatgctcacagttccctaa

SEQ ID NO: 338419 - DNA, 33 bp, Homo sapien
tgcccattattttgggaacaaattggaaaatac

SEQ ID NO: 338420 - DNA, 33 bp, Homo sapien
tgcccattattttggggacaaattggaaaatac

SEQ ID NO: 338421 - DNA, 33 bp, Homo sapien
aaaatacaagtgttgccaagtgcaaaaaacaga

SEQ ID NO: 338422 - DNA, 33 bp, Homo sapien
aaaatacaagtgttgctaagtgcaaaaaacaga

SEQ ID NO: 338423 - DNA, 33 bp, Homo sapien
ctgtattttttagatccctgaagacatcaaaaa

SEQ ID NO: 338424 - DNA, 33 bp, Homo sapien
ctgtattttttagatctctgaagacatcaaaaa

SEQ ID NO: 338425 - DNA, 33 bp, Homo sapien
cttctaaattaaaggaaactattggccgggcga

SEQ ID NO: 338426 - DNA, 33 bp, Homo sapien
cttctaaattaaaggagactattggccgggcga

SEQ ID NO: 338427 - DNA, 33 bp, Homo sapien
aaaatgaaagaatttacggatgaaattaacaag

SEQ ID NO: 338428 - DNA, 33 bp, Homo sapien
aaaatgaaagaatttatggatgaaattaacaag

SEQ ID NO: 338429 - DNA, 33 bp, Homo sapien
aaagaatggtctttaacgtctcccttctgtatt

SEQ ID NO: 338430 - DNA, 33 bp, Homo sapien
aaagaatggtctttaatgtctcccttctgtatt

SEQ ID NO: 338431 - DNA, 33 bp, Homo sapien
ttctccactttgactacagaggagagcagtaac

SEQ ID NO: 338432 - DNA, 33 bp, Homo sapien
ttctccactttgactatagaggagagcagtaac

SEQ ID NO: 338433 - DNA, 33 bp, Homo sapien
ccattctgaaggactaaaaaatgttcgctaaat

SEQ ID NO: 338434 - DNA, 33 bp, Homo sapien
ccattctgaaggactacaaaatgttcgctaaat

SEQ ID NO: 338435 - DNA, 33 bp, Homo sapien
tcttcctgttctccaacggaatgtcagtgataa

SEQ ID NO: 338436 - DNA, 33 bp, Homo sapien
tcttcctgttctccaatggaatgtcagtgataa

SEQ ID NO: 338437 - DNA, 33 bp, Homo sapien
aagttaacacagtgaacgctaagtttttcccag

SEQ ID NO: 338438 - DNA, 33 bp, Homo sapien
aagttaacacagtgaatgctaagtttttcccag

SEQ ID NO: 338439 - DNA, 33 bp, Homo sapien
atactacagccttcacacttactaatagcaata

SEQ ID NO: 338440 - DNA, 33 bp, Homo sapien
atactacagccttcacgcttactaatagcaata

SEQ ID NO: 338441 - DNA, 33 bp, Homo sapien
atgtgcaagtaggagcaatatcactaaattctt

SEQ ID NO: 338442 - DNA, 33 bp, Homo sapien
atgtgcaagtaggagcgatatcactaaattctt

SEQ ID NO: 338443 - DNA, 33 bp, Homo sapien
acctgagcttcaaaccagcaagttttttattaa

SEQ ID NO: 338444 - DNA, 33 bp, Homo sapien
acctgagcttcaaaccggcaagttttttattaa

SEQ ID NO: 338445 - DNA, 33 bp, Homo sapien
tttggcttttgccttcaaggaactgatagtgta

SEQ ID NO: 338446 - DNA, 33 bp, Homo sapien
tttggcttttgccttcgaggaactgatagtgta

SEQ ID NO: 338447 - DNA, 33 bp, Homo sapien
tttaaagatctcttcacacctatctttttgcct

SEQ ID NO: 338448 - DNA, 33 bp, Homo sapien
tttaaagatctcttcatacctatctttttgcct

SEQ ID NO: 338449 - DNA, 33 bp, Homo sapien
agacacatatctgttccaggtatagtgtctact

SEQ ID NO: 338450 - DNA, 33 bp, Homo sapien
agacacatatctgttctaggtatagtgtctact

SEQ ID NO: 338451 - DNA, 33 bp, Homo sapien
ttaacctacatgctaacacaaaactcaggtctt

SEQ ID NO: 338452 - DNA, 33 bp, Homo sapien
ttaacctacatgctaatacaaaactcaggtctt

SEQ ID NO: 338453 - DNA, 33 bp, Homo sapien
agatgactgtgctgcaagattaccagaaaatgc

SEQ ID NO: 338454 - DNA, 33 bp, Homo sapien
agatgactgtgctgcaggattaccagaaaatgc

SEQ ID NO: 338455 - DNA, 33 bp, Homo sapien
ccagggaatctgaaaacttctcagtcacctccc

SEQ ID NO: 338456 - DNA, 33 bp, Homo sapien
ccagggaatctgaaaatttctcagtcacctccc

SEQ ID NO: 338457 - DNA, 33 bp, Homo sapien
tcagagagactgggaactgaggaaaatttgaag

SEQ ID NO: 338458 - DNA, 33 bp, Homo sapien
tcagagagactgggaattgaggaaaatttgaag

SEQ ID NO: 338459 - DNA, 33 bp, Homo sapien
catctgcctcctctaagtcttggatcacaatca

SEQ ID NO: 338460 - DNA, 33 bp, Homo sapien
catctgcctcctctaattcttggatcacaatca

SEQ ID NO: 338461 - DNA, 33 bp, Homo sapien
agtcaacaagtaccaaatcccagggaagcaggt

SEQ ID NO: 338462 - DNA, 33 bp, Homo sapien
agtcaacaagtaccaagtcccagggaagcaggt

SEQ ID NO: 338463 - DNA, 33 bp, Homo sapien
aaggagaagcacagtaaataagtaaatacatat

SEQ ID NO: 338464 - DNA, 33 bp, Homo sapien
aaggagaagcacagtacataagtaaatacatat

SEQ ID NO: 338465 - DNA, 33 bp, Homo sapien
tgtagaacaatactgccgatttatcacaccaga

SEQ ID NO: 338466 - DNA, 33 bp, Homo sapien
tgtagaacaatactgctgatttatcacaccaga

SEQ ID NO: 338467 - DNA, 33 bp, Homo sapien
gtctcaacacttatcactgaatgactactaaat

SEQ ID NO: 338468 - DNA, 33 bp, Homo sapien
gtctcaacacttatcattgaatgactactaaat

SEQ ID NO: 338469 - DNA, 33 bp, Homo sapien
ggccctatatgcaaaccaatcataagtgaggat

SEQ ID NO: 338470 - DNA, 33 bp, Homo sapien
ggccctatatgcaaactaatcataagtgaggat

SEQ ID NO: 338471 - DNA, 33 bp, Homo sapien
caggaacacactggacactttcacttttactaa

SEQ ID NO: 338472 - DNA, 33 bp, Homo sapien
caggaacacactggacgctttcacttttactaa

SEQ ID NO: 338473 - DNA, 33 bp, Homo sapien
taggcttttccacacaatggaaggttccctctc

SEQ ID NO: 338474 - DNA, 33 bp, Homo sapien
taggcttttccacacactggaaggttccctctc

SEQ ID NO: 338475 - DNA, 33 bp, Homo sapien
aattcacagtggagcaaaagtcagaagagtcaa

SEQ ID NO: 338476 - DNA, 33 bp, Homo sapien
aattcacagtggagcagaagtcagaagagtcaa

SEQ ID NO: 338477 - DNA, 33 bp, Homo sapien
ggggaagccccgtctacgtcagcagagtggtgt

SEQ ID NO: 338478 - DNA, 33 bp, Homo sapien
ggggaagccccgtctatgtcagcagagtggtgt

SEQ ID NO: 338479 - DNA, 33 bp, Homo sapien
atgggcacagacgtccactttgcagggtcctag

SEQ ID NO: 338480 - DNA, 33 bp, Homo sapien
atgggcacagacgtccgctttgcagggtcctag

SEQ ID NO: 338481 - DNA, 33 bp, Homo sapien
catttcagaaggtctactactgatcttagctaa

SEQ ID NO: 338482 - DNA, 33 bp, Homo sapien
catttcagaaggtctattactgatcttagctaa

SEQ ID NO: 338483 - DNA, 33 bp, Homo sapien
agaaaaacctgagggcaagtgagcaaaccagtt

SEQ ID NO: 338484 - DNA, 33 bp, Homo sapien
agaaaaacctgagggcgagtgagcaaaccagtt

SEQ ID NO: 338485 - DNA, 33 bp, Homo sapien
acctgagaatccaccaactattgactggactta

SEQ ID NO: 338486 - DNA, 33 bp, Homo sapien
acctgagaatccaccagctattgactggactta

SEQ ID NO: 338487 - DNA, 33 bp, Homo sapien; identical to SEQ ID NO: 338485

SEQ ID NO: 338488 - DNA, 33 bp, Homo sapien; identical to SEQ ID NO: 338486

SEQ ID NO: 338489 - DNA, 33 bp, Homo sapien
gcgtgtctggcatcgccgaggttgaagagacag

SEQ ID NO: 338490 - DNA, 33 bp, Homo sapien
gcgtgtctggcatcgcggaggttgaagagacag

SEQ ID NO: 338491 - DNA, 33 bp, Homo sapien
tattaaaaatcatacccagtgtgaatttcagat

SEQ ID NO: 338492 - DNA, 33 bp, Homo sapien
tattaaaaatcatacctagtgtgaatttcagat

SEQ ID NO: 338493 - DNA, 33 bp, Homo sapien
tgtcatctggatagagaagtttgtggtcccgaa

SEQ ID NO: 338494 - DNA, 33 bp, Homo sapien
tgtcatctggatagaggagtttgtggtcccgaa

SEQ ID NO: 338495 - DNA, 33 bp, Homo sapien
ggtagcttagcagcaactcttgacataagttct

SEQ ID NO: 338496 - DNA, 33 bp, Homo sapien
ggtagcttagcagcaagtcttgacataagttct

SEQ ID NO: 338497 - DNA, 33 bp, Homo sapien
ttgacctatagcaaaaaagattatgaatatgaa

SEQ ID NO: 338498 - DNA, 33 bp, Homo sapien
ttgacctatagcaaaagagattatgaatatgaa

SEQ ID NO: 338499 - DNA, 33 bp, Homo sapien
caacaggaaacacttggaggacttcctttacca

SEQ ID NO: 338500 - DNA, 33 bp, Homo sapien
caacaggaaacacttgtaggacttcctttacca

SEQ ID NO: 338501 - DNA, 33 bp, Homo sapien
tagaaacaatcactacagaaaacagctgaagac

SEQ ID NO: 338502 - DNA, 33 bp, Homo sapien
tagaaacaatcactacggaaaacagctgaagac

SEQ ID NO: 338503 - DNA, 33 bp, Homo sapien
gacaaatggaactcacaacattccaaagaaagg

SEQ ID NO: 338504 - DNA, 33 bp, Homo sapien
gacaaatggaactcacgacattccaaagaaagg

SEQ ID NO: 338505 - DNA, 33 bp, Homo sapien
ctggttttagttttgcaccatttctctatttta

SEQ ID NO: 338506 - DNA, 33 bp, Homo sapien
ctggttttagttttgcgccatttctctatttta

SEQ ID NO: 338507 - DNA, 33 bp, Homo sapien
agacaattctgagtacagccagacagagatggc

SEQ ID NO: 338508 - DNA, 33 bp, Homo sapien
agacaattctgagtacggccagacagagatggc

SEQ ID NO: 338509 - DNA, 33 bp, Homo sapien
catccttctttactcagtctgtcattcagctgc

SEQ ID NO: 338510 - DNA, 33 bp, Homo sapien
catccttctttactcattctgtcattcagctgc

SEQ ID NO: 338511 - DNA, 33 bp, Homo sapien
tttttgtgataatcagcccaaactatgacaact

SEQ ID NO: 338512 - DNA, 33 bp, Homo sapien
tttttgtgataatcagtccaaactatgacaact

SEQ ID NO: 338513 - DNA, 33 bp, Homo sapien
atagactttgcaaaaactgcttttctggttgac

SEQ ID NO: 338514 - DNA, 33 bp, Homo sapien
atagactttgcaaaaattgcttttctggttgac

SEQ ID NO: 338515 - DNA, 33 bp, Homo sapien
aaaatcaggtggtcaaaattctaggtttgggtt

SEQ ID NO: 338516 - DNA, 33 bp, Homo sapien
aaaatcaggtggtcaagattctaggtttgggtt

SEQ ID NO: 338517 - DNA, 33 bp, Homo sapien
gagacaaatgttaatacaagccacagaacatat

SEQ ID NO: 338518 - DNA, 33 bp, Homo sapien
gagacaaatgttaatataagccacagaacatat

SEQ ID NO: 338519 - DNA, 33 bp, Homo sapien
aattttgttaagtcctaacttcagtccactgtt

SEQ ID NO: 338520 - DNA, 33 bp, Homo sapien
aattttgttaagtcctcacttcagtccactgtt

SEQ ID NO: 338521 - DNA, 33 bp, Homo sapien
tatacttcccagctccaacatctcgtgtgattt

SEQ ID NO: 338522 - DNA, 33 bp, Homo sapien
tatacttcccagctccgacatctcgtgtgattt

SEQ ID NO: 338523 - DNA, 33 bp, Homo sapien
aggacggagtactaataaggaaaatcctagtaa

SEQ ID NO: 338524 - DNA, 33 bp, Homo sapien
aggacggagtactaatcaggaaaatcctagtaa

SEQ ID NO: 338525 - DNA, 33 bp, Homo sapien
gctcaagctcacaaaacagtagcagtacatctt

SEQ ID NO: 338526 - DNA, 33 bp, Homo sapien
gctcaagctcacaaaatagtagcagtacatctt

SEQ ID NO: 338527 - DNA, 33 bp, Homo sapien
ctttctatgtgacatactatattacgcaaatgc

SEQ ID NO: 338528 - DNA, 33 bp, Homo sapien
ctttctatgtgacatattatattacgcaaatgc

SEQ ID NO: 338529 - DNA, 33 bp, Homo sapien
aacctgtagagcaagactcttcacagccttcct

SEQ ID NO: 338530 - DNA, 33 bp, Homo sapien
aacctgtagagcaagattcttcacagccttcct

SEQ ID NO: 338531 - DNA, 33 bp, Homo sapien
ctgctgggaatgcaaaatgttacacccactttg

SEQ ID NO: 338532 - DNA, 33 bp, Homo sapien
ctgctgggaatgcaaagtgttacacccactttg

SEQ ID NO: 338533 - DNA, 33 bp, Homo sapien
ggcactgttgaaggaactgctctattttcaaca

SEQ ID NO: 338534 - DNA, 33 bp, Homo sapien
ggcactgttgaaggaattgctctattttcaaca

SEQ ID NO: 338535 - DNA, 33 bp, Homo sapien
aaagaaagtggcaaatcagacagaagatgctga

SEQ ID NO: 338536 - DNA, 33 bp, Homo sapien
aaagaaagtggcaaatgagacagaagatgctga

SEQ ID NO: 338537 - DNA, 33 bp, Homo sapien
ctaagcagcactacaccatctgcaatgaacttg

SEQ ID NO: 338538 - DNA, 33 bp, Homo sapien
ctaagcagcactacactatctgcaatgaacttg

SEQ ID NO: 338539 - DNA, 33 bp, Homo sapien
tcaagtactagagggcaatgaagcagtagagga

SEQ ID NO: 338540 - DNA, 33 bp, Homo sapien
tcaagtactagagggcgatgaagcagtagagga

SEQ ID NO: 338541 - DNA, 33 bp, Homo sapien
cctggggacccttcaaccaaaccattttcaatt

SEQ ID NO: 338542 - DNA, 33 bp, Homo sapien
cctggggacccttcaatcaaaccattttcaatt

SEQ ID NO: 338543 - DNA, 33 bp, Homo sapien
ttgcactctctgtcaaaagccttgttcacttcc

SEQ ID NO: 338544 - DNA, 33 bp, Homo sapien
ttgcactctctgtcaacagccttgttcacttcc

SEQ ID NO: 338545 - DNA, 33 bp, Homo sapien
ccttcacaaatgacctaaactcccaactgctga

SEQ ID NO: 338546 - DNA, 33 bp, Homo sapien
ccttcacaaatgacctgaactcccaactgctga

SEQ ID NO: 338547 - DNA, 33 bp, Homo sapien; identical to SEQ ID NO: 338545

SEQ ID NO: 338548 - DNA, 33 bp, Homo sapien; identical to SEQ ID NO: 338546

SEQ ID NO: 338549 - DNA, 33 bp, Homo sapien
tactgctgggttttaaatcttgcctctgccctt

SEQ ID NO: 338550 - DNA, 33 bp, Homo sapien
tactgctgggttttaagtcttgcctctgccctt

SEQ ID NO: 338551 - DNA, 33 bp, Homo sapien
attttgctaaatttgcaagtgatcttctattaa

SEQ ID NO: 338552 - DNA, 33 bp, Homo sapien
attttgctaaatttgcgagtgatcttctattaa

SEQ ID NO: 338553 - DNA, 33 bp, Homo sapien
ttctaattcataaacaagattatccactcaaaa

SEQ ID NO: 338554 - DNA, 33 bp, Homo sapien
ttctaattcataaacaggattatccactcaaaa

SEQ ID NO: 338555 - DNA, 33 bp, Homo sapien; identical to SEQ ID NO: 338553

SEQ ID NO: 338556 - DNA, 33 bp, Homo sapien; identical to SEQ ID NO: 338554

SEQ ID NO: 338557 - DNA, 33 bp, Homo sapien
aaaaccaatggagttacgctatacttatttcta

SEQ ID NO: 338558 - DNA, 33 bp, Homo sapien
aaaaccaatggagttatgctatacttatttcta

SEQ ID NO: 338559 - DNA, 33 bp, Homo sapien
gtgcctatcagtgaacaatctaacatttacatt

SEQ ID NO: 338560 - DNA, 33 bp, Homo sapien
gtgcctatcagtgaacgatctaacatttacatt

SEQ ID NO: 338561 - DNA, 33 bp, Homo sapien
ataggtctgtgggggccgaaatatggcagtgag

SEQ ID NO: 338562 - DNA, 33 bp, Homo sapien
ataggtctgtgggggctgaaatatggcagtgag

SEQ ID NO: 338563 - DNA, 33 bp, Homo sapien
ccaagtttacagttgaacatttggttacatttt

SEQ ID NO: 338564 - DNA, 33 bp, Homo sapien
ccaagtttacagttgaccatttggttacatttt

SEQ ID NO: 338565 - DNA, 33 bp, Homo sapien
tgacaattccatcttaaaagtcaaaataaaagt

SEQ ID NO: 338566 - DNA, 33 bp, Homo sapien
tgacaattccatcttagaagtcaaaataaaagt

SEQ ID NO: 338567 - DNA, 33 bp, Homo sapien
aagcccagaaggattaaattgagacctggtcca

SEQ ID NO: 338568 - DNA, 33 bp, Homo sapien
aagcccagaaggattagattgagacctggtcca

SEQ ID NO: 338569 - DNA, 33 bp, Homo sapien
ataactgatctgaaaacaaaatttgtaagggta

SEQ ID NO: 338570 - DNA, 33 bp, Homo sapien
ataactgatctgaaaagaaaatttgtaagggta

SEQ ID NO: 338571 - DNA, 33 bp, Homo sapien
aactataaaactgtgacggccccagctaggcac

SEQ ID NO: 338572 - DNA, 33 bp, Homo sapien
aactataaaactgtgatggccccagctaggcac

SEQ ID NO: 338573 - DNA, 33 bp, Homo sapien
tgtatttgcccttaacagctttgttggtaatga

SEQ ID NO: 338574 - DNA, 33 bp, Homo sapien
tgtatttgcccttaaccgctttgttggtaatga

SEQ ID NO: 338575 - DNA, 33 bp, Homo sapien; identical to SEQ ID NO: 338573

SEQ ID NO: 338576 - DNA, 33 bp, Homo sapien; identical to SEQ ID NO: 338574

SEQ ID NO: 338577 - DNA, 33 bp, Homo sapien
cttttgaaagttggcaatacctagtctagcaaa

SEQ ID NO: 338578 - DNA, 33 bp, Homo sapien
cttttgaaagttggcagtacctagtctagcaaa

SEQ ID NO: 338579 - DNA, 33 bp, Homo sapien
gcgcagaaaccgactcaacttcctagctgtggg

SEQ ID NO: 338580 - DNA, 33 bp, Homo sapien
gcgcagaaaccgactcgacttcctagctgtggg

SEQ ID NO: 338581 - DNA, 33 bp, Homo sapien
taaactgcagtgtaaacgaacaggaacagaata

SEQ ID NO: 338582 - DNA, 33 bp, Homo sapien
taaactgcagtgtaaatgaacaggaacagaata

SEQ ID NO: 338583 - DNA, 33 bp, Homo sapien
gataagctttctaatgcagtaattgtttaaatc

SEQ ID NO: 338584 - DNA, 33 bp, Homo sapien
gataagctttctaatggagtaattgtttaaatc

SEQ ID NO: 338585 - DNA, 33 bp, Homo sapien
agaccaagacttaatacagccaggcaattctag

SEQ ID NO: 338586 - DNA, 33 bp, Homo sapien
agaccaagacttaatatagccaggcaattctag

SEQ ID NO: 338587 - DNA, 33 bp, Homo sapien
tggatctgggccctctaaagaatatcaaatagc

SEQ ID NO: 338588 - DNA, 33 bp, Homo sapien
tggatctgggccctcttaagaatatcaaatagc

SEQ ID NO: 338589 - DNA, 33 bp, Homo sapien
tactttgaatctggaaatggaactggtggggac

SEQ ID NO: 338590 - DNA, 33 bp, Homo sapien
tactttgaatctggaagtggaactggtggggac

SEQ ID NO: 338591 - DNA, 33 bp, Homo sapien
atactcagaacagtggaaaattatatatgtaga

SEQ ID NO: 338592 - DNA, 33 bp, Homo sapien
atactcagaacagtgggaaattatatatgtaga

SEQ ID NO: 338593 - DNA, 33 bp, Homo sapien
caaagatgtcagagaaatcagggtagagtcagg

SEQ ID NO: 338594 - DNA, 33 bp, Homo sapien
caaagatgtcagagaagtcagggtagagtcagg

SEQ ID NO: 338595 - DNA, 33 bp, Homo sapien
cttcatagcacttataccaatctgtaattatct

SEQ ID NO: 338596 - DNA, 33 bp, Homo sapien
cttcatagcacttatatcaatctgtaattatct

SEQ ID NO: 338597 - DNA, 33 bp, Homo sapien
agctaggccgtttataacccataaccttctact

SEQ ID NO: 338598 - DNA, 33 bp, Homo sapien
agctaggccgtttatagcccataaccttctact

SEQ ID NO: 338599 - DNA, 33 bp, Homo sapien
gaatgacttgcaggaaactgtcaaaacatctgg

SEQ ID NO: 338600 - DNA, 33 bp, Homo sapien
gaatgacttgcaggaacctgtcaaaacatctgg

SEQ ID NO: 338601 - DNA, 33 bp, Homo sapien
actggtaactggtaaacgggaacttgagggaac

SEQ ID NO: 338602 - DNA, 33 bp, Homo sapien
actggtaactggtaaatgggaacttgagggaac

SEQ ID NO: 338603 - DNA, 33 bp, Homo sapien
caaaggctttgagaaccagcactaagtagactt

SEQ ID NO: 338604 - DNA, 33 bp, Homo sapien
caaaggctttgagaacgagcactaagtagactt

SEQ ID NO: 338605 - DNA, 33 bp, Homo sapien
agcctcataaaatgagaatcgttgcaagatctt

SEQ ID NO: 338606 - DNA, 33 bp, Homo sapien
agcctcataaaatgaggatcgttgcaagatctt

SEQ ID NO: 338607 - DNA, 33 bp, Homo sapien
tgcagggcctttcccaatcatccacacaggcca

SEQ ID NO: 338608 - DNA, 33 bp, Homo sapien
tgcagggcctttcccagtcatccacacaggcca

SEQ ID NO: 338609 - DNA, 33 bp, Homo sapien
aaggtggataggtgaacgaaggagtagggtgtg

SEQ ID NO: 338610 - DNA, 33 bp, Homo sapien
aaggtggataggtgaaggaaggagtagggtgtg

SEQ ID NO: 338611 - DNA, 33 bp, Homo sapien
agggattatactcaaccgaaataaaatgaatat

SEQ ID NO: 338612 - DNA, 33 bp, Homo sapien
agggattatactcaactgaaataaaatgaatat

SEQ ID NO: 338613 - DNA, 33 bp, Homo sapien
catcgcccaagggacaatgacaagtgaggtgac

SEQ ID NO: 338614 - DNA, 33 bp, Homo sapien
catcgcccaagggacattgacaagtgaggtgac

SEQ ID NO: 338615 - DNA, 33 bp, Homo sapien
tacttttgaggacaacactatttttggcaatgt

SEQ ID NO: 338616 - DNA, 33 bp, Homo sapien
tacttttgaggacaacgctatttttggcaatgt

SEQ ID NO: 338617 - DNA, 33 bp, Homo sapien
acttgtgaagagagaaaaaacagtgttaacagc

SEQ ID NO: 338618 - DNA, 33 bp, Homo sapien
acttgtgaagagagaagaaacagtgttaacagc

SEQ ID NO: 338619 - DNA, 33 bp, Homo sapien
tggaggctcattcgtcacaggccttctcagtaa

SEQ ID NO: 338620 - DNA, 33 bp, Homo sapien
tggaggctcattcgtcgcaggccttctcagtaa

SEQ ID NO: 338621 - DNA, 33 bp, Homo sapien
tctaagcagttcctaacctttttacattttagt

SEQ ID NO: 338622 - DNA, 33 bp, Homo sapien
tctaagcagttcctaatctttttacattttagt

SEQ ID NO: 338623 - DNA, 33 bp, Homo sapien
tgtattgtggtgtttccaagaatttgcaaacac

SEQ ID NO: 338624 - DNA, 33 bp, Homo sapien
tgtattgtggtgtttcgaagaatttgcaaacac

SEQ ID NO: 338625 - DNA, 33 bp, Homo sapien
aattctattctttggcagacaacccctacgaaa

SEQ ID NO: 338626 - DNA, 33 bp, Homo sapien
aattctattctttggcggacaacccctacgaaa

SEQ ID NO: 338627 - DNA, 33 bp, Homo sapien
taattcctaaggatcacaaagcgctggaactgg

SEQ ID NO: 338628 - DNA, 33 bp, Homo sapien
taattcctaaggatcataaagcgctggaactgg

SEQ ID NO: 338629 - DNA, 33 bp, Homo sapien
tgatctgctatctagaaaaacctggcaaatata

SEQ ID NO: 338630 - DNA, 33 bp, Homo sapien
tgatctgctatctagagaaacctggcaaatata

SEQ ID NO: 338631 - DNA, 33 bp, Homo sapien
gattacttggctctgaatagtataaaatagaac

SEQ ID NO: 338632 - DNA, 33 bp, Homo sapien
gattacttggctctgactagtataaaatagaac

SEQ ID NO: 338633 - DNA, 33 bp, Homo sapien
gttccttgaagaataaaccactttgactgggtc

SEQ ID NO: 338634 - DNA, 33 bp, Homo sapien
gttccttgaagaataagccactttgactgggtc

SEQ ID NO: 338635 - DNA, 33 bp, Homo sapien
atctaacaagcacctccaggggattcacaattt

SEQ ID NO: 338636 - DNA, 33 bp, Homo sapien
atctaacaagcacctcgaggggattcacaattt

SEQ ID NO: 338637 - DNA, 33 bp, Homo sapien
tgcacacattagacaaattactagtctgaatct

SEQ ID NO: 338638 - DNA, 33 bp, Homo sapien
tgcacacattagacaagttactagtctgaatct

SEQ ID NO: 338639 - DNA, 33 bp, Homo sapien
caataaaataaatagcaacagttccctctacca

SEQ ID NO: 338640 - DNA, 33 bp, Homo sapien
caataaaataaatagccacagttccctctacca

SEQ ID NO: 338641 - DNA, 33 bp, Homo sapien
tcccagcatcttttaacagaaggaagaggacac

SEQ ID NO: 338642 - DNA, 33 bp, Homo sapien
tcccagcatcttttaagagaaggaagaggacac

SEQ ID NO: 338643 - DNA, 33 bp, Homo sapien
taggaagctgagtccaatcatttattcacagca

SEQ ID NO: 338644 - DNA, 33 bp, Homo sapien
taggaagctgagtccagtcatttattcacagca

SEQ ID NO: 338645 - DNA, 33 bp, Homo sapien
aaacttgagatcaaaacaatagtggaaaccttt

SEQ ID NO: 338646 - DNA, 33 bp, Homo sapien
aaacttgagatcaaaagaatagtggaaaccttt

SEQ ID NO: 338647 - DNA, 33 bp, Homo sapien
taactaaggtgtcaccaaggggcttaatatatg

SEQ ID NO: 338648 - DNA, 33 bp, Homo sapien
taactaaggtgtcaccgaggggcttaatatatg

SEQ ID NO: 338649 - DNA, 33 bp, Homo sapien
atatggtaagtgctataagtcccccaaggcact

SEQ ID NO: 338650 - DNA, 33 bp, Homo sapien
atatggtaagtgctatgagtcccccaaggcact

SEQ ID NO: 338651 - DNA, 33 bp, Homo sapien
ggatgactgacaatacagacactccactttatt

SEQ ID NO: 338652 - DNA, 33 bp, Homo sapien
ggatgactgacaatacggacactccactttatt

SEQ ID NO: 338653 - DNA, 33 bp, Homo sapien
ttagaggctgagttaaaagcagactacttctaa

SEQ ID NO: 338654 - DNA, 33 bp, Homo sapien
ttagaggctgagttaacagcagactacttctaa

SEQ ID NO: 338655 - DNA, 33 bp, Homo sapien
caggtatcagtgagcaatctactagagccggca

SEQ ID NO: 338656 - DNA, 33 bp, Homo sapien
caggtatcagtgagcagtctactagagccggca

SEQ ID NO: 338657 - DNA, 33 bp, Homo sapien
tgggtatgaataagcacgattaaagaaaacagg

SEQ ID NO: 338658 - DNA, 33 bp, Homo sapien
tgggtatgaataagcatgattaaagaaaacagg

SEQ ID NO: 338659 - DNA, 33 bp, Homo sapien
aatattacacctagacagattttctaacctcac

SEQ ID NO: 338660 - DNA, 33 bp, Homo sapien
aatattacacctagactgattttctaacctcac

SEQ ID NO: 338661 - DNA, 33 bp, Homo sapien
gggtctaagttaccacagtctcttgcctgaata

SEQ ID NO: 338662 - DNA, 33 bp, Homo sapien
gggtctaagttaccactgtctcttgcctgaata

SEQ ID NO: 338663 - DNA, 33 bp, Homo sapien
ctttaataaggattcaaggaaaggaggaagtaa

SEQ ID NO: 338664 - DNA, 33 bp, Homo sapien
ctttaataaggattcagggaaaggaggaagtaa

SEQ ID NO: 338665 - DNA, 33 bp, Homo sapien
tgaactctaaacaccagtgctgtctgcatatag

SEQ ID NO: 338666 - DNA, 33 bp, Homo sapien
tgaactctaaacaccattgctgtctgcatatag

SEQ ID NO: 338667 - DNA, 33 bp, Homo sapien
tgtgaattgtaatgctcaaccatgccaagtagg

SEQ ID NO: 338668 - DNA, 33 bp, Homo sapien
tgtgaattgtaatgcttaaccatgccaagtagg

SEQ ID NO: 338669 - DNA, 33 bp, Homo sapien
ctgtctcctgaagtgacagggagtaccttttga

SEQ ID NO: 338670 - DNA, 33 bp, Homo sapien
ctgtctcctgaagtgatagggagtaccttttga

SEQ ID NO: 338671 - DNA, 33 bp, Homo sapien
agctaccatccatagccgaactagaaatgtatc

SEQ ID NO: 338672 - DNA, 33 bp, Homo sapien
agctaccatccatagctgaactagaaatgtatc

SEQ ID NO: 338673 - DNA, 33 bp, Homo sapien
gccttgagcaaacatacgtggtagccaggtagt

SEQ ID NO: 338674 - DNA, 33 bp, Homo sapien
gccttgagcaaacatatgtggtagccaggtagt

SEQ ID NO: 338675 - DNA, 33 bp, Homo sapien
tctctagtctgaatcccggagaaaaactgaaca

SEQ ID NO: 338676 - DNA, 33 bp, Homo sapien
tctctagtctgaatcctggagaaaaactgaaca

SEQ ID NO: 338677 - DNA, 33 bp, Homo sapien
ttctccgtcacctaagaaaaaaaatcaagacaa

SEQ ID NO: 338678 - DNA, 33 bp, Homo sapien
ttctccgtcacctaaggaaaaaaatcaagacaa

SEQ ID NO: 338679 - DNA, 33 bp, Homo sapien
gtcaaagtggctggacactgtctagaagtccaa

SEQ ID NO: 338680 - DNA, 33 bp, Homo sapien
gtcaaagtggctggacgctgtctagaagtccaa

SEQ ID NO: 338681 - DNA, 33 bp, Homo sapien
ttttggagcatgatgaaagtacgttatatatgt

SEQ ID NO: 338682 - DNA, 33 bp, Homo sapien
ttttggagcatgatgagagtacgttatatatgt

SEQ ID NO: 338683 - DNA, 33 bp, Homo sapien
ttttcaaatgcaatcacgaaaaacacccaaaag

SEQ ID NO: 338684 - DNA, 33 bp, Homo sapien
ttttcaaatgcaatcatgaaaaacacccaaaag

SEQ ID NO: 338685 - DNA, 33 bp, Homo sapien
attttgggataaactcaagttctttaaggcata

SEQ ID NO: 338686 - DNA, 33 bp, Homo sapien
attttgggataaactccagttctttaaggcata

SEQ ID NO: 338687 - DNA, 33 bp, Homo sapien
caaaacaatgagaaacaaacttctttagaaggt

SEQ ID NO: 338688 - DNA, 33 bp, Homo sapien
caaaacaatgagaaacgaacttctttagaaggt

SEQ ID NO: 338689 - DNA, 33 bp, Homo sapien
gttcttggacaagaacagagtatcccttttgta

SEQ ID NO: 338690 - DNA, 33 bp, Homo sapien
gttcttggacaagaacggagtatcccttttgta

SEQ ID NO: 338691 - DNA, 33 bp, Homo sapien
attttatttataatgacgacctgtaatcaccaa

SEQ ID NO: 338692 - DNA, 33 bp, Homo sapien
attttatttataatgatgacctgtaatcaccaa

SEQ ID NO: 338693 - DNA, 33 bp, Homo sapien
caccaggccctttttccctcctgccaggcagag

SEQ ID NO: 338694 - DNA, 33 bp, Homo sapien
caccaggccctttttctctcctgccaggcagag

SEQ ID NO: 338695 - DNA, 33 bp, Homo sapien
tcctagactaagctgaaatctagccctaacctg

SEQ ID NO: 338696 - DNA, 33 bp, Homo sapien
tcctagactaagctgagatctagccctaacctg

SEQ ID NO: 338697 - DNA, 33 bp, Homo sapien
ctgaaaaactaaccacacttcctatatcccagc

SEQ ID NO: 338698 - DNA, 33 bp, Homo sapien
ctgaaaaactaaccacgcttcctatatcccagc

SEQ ID NO: 338699 - DNA, 33 bp, Homo sapien
cttaggtactatgttacactgcctcctagaaga

SEQ ID NO: 338700 - DNA, 33 bp, Homo sapien
cttaggtactatgttatactgcctcctagaaga

SEQ ID NO: 338701 - DNA, 33 bp, Homo sapien
gcctcctagaagaaaccgaaactctagggcact

SEQ ID NO: 338702 - DNA, 33 bp, Homo sapien
gcctcctagaagaaactgaaactctagggcact

SEQ ID NO: 338703 - DNA, 33 bp, Homo sapien
agaaaatcaacgtacaatcatttattttacaaa

SEQ ID NO: 338704 - DNA, 33 bp, Homo sapien
agaaaatcaacgtacagtcatttattttacaaa

SEQ ID NO: 338705 - DNA, 33 bp, Homo sapien
tgcatctgagcttctaataataagaacatatta

SEQ ID NO: 338706 - DNA, 33 bp, Homo sapien
tgcatctgagcttctactaataagaacatatta

SEQ ID NO: 338707 - DNA, 33 bp, Homo sapien
gggtctggcatataaaacctcagcagaaataaa

SEQ ID NO: 338708 - DNA, 33 bp, Homo sapien
gggtctggcatataaaccctcagcagaaataaa

SEQ ID NO: 338709 - DNA, 33 bp, Homo sapien
ctggatacggaaggccagctgtactttgaatga

SEQ ID NO: 338710 - DNA, 33 bp, Homo sapien
ctggatacggaaggcccgctgtactttgaatga

SEQ ID NO: 338711 - DNA, 33 bp, Homo sapien
agacactcctatcactcaaaattcaaaggattt

SEQ ID NO: 338712 - DNA, 33 bp, Homo sapien
agacactcctatcactgaaaattcaaaggattt

SEQ ID NO: 338713 - DNA, 33 bp, Homo sapien
tatttgggttctagataacgcaaaataaataat

SEQ ID NO: 338714 - DNA, 33 bp, Homo sapien
tatttgggttctagatgacgcaaaataaataat

SEQ ID NO: 338715 - DNA, 33 bp, Homo sapien
tactttggagagctacaagaaggcctaacagaa

SEQ ID NO: 338716 - DNA, 33 bp, Homo sapien
tactttggagagctacgagaaggcctaacagaa

SEQ ID NO: 338717 - DNA, 33 bp, Homo sapien
aagcctaagaaactgaagcgttatctatgtctt

SEQ ID NO: 338718 - DNA, 33 bp, Homo sapien
aagcctaagaaactgaggcgttatctatgtctt

SEQ ID NO: 338719 - DNA, 33 bp, Homo sapien
tcgctgactcttcagaggatgaaaatggcatgc

SEQ ID NO: 338720 - DNA, 33 bp, Homo sapien
tcgctgactcttcagatgatgaaaatggcatgc

SEQ ID NO: 338721 - DNA, 33 bp, Homo sapien
ctgagtgtaggacttcggaaatcatgctctcgc

SEQ ID NO: 338722 - DNA, 33 bp, Homo sapien
ctgagtgtaggacttctgaaatcatgctctcgc

SEQ ID NO: 338723 - DNA, 33 bp, Homo sapien
gagggagccggaagtacctcggagttttatgtt

SEQ ID NO: 338724 - DNA, 33 bp, Homo sapien
gagggagccggaagtatctcggagttttatgtt

SEQ ID NO: 338725 - DNA, 33 bp, Homo sapien
cattttagaaaattacaccagaacctgcaatac

SEQ ID NO: 338726 - DNA, 33 bp, Homo sapien
cattttagaaaattacgccagaacctgcaatac

SEQ ID NO: 338727 - DNA, 33 bp, Homo sapien
accaccagagcactgaatagccttagctaagac

SEQ ID NO: 338728 - DNA, 33 bp, Homo sapien
accaccagagcactgagtagccttagctaagac

SEQ ID NO: 338729 - DNA, 33 bp, Homo sapien
ttttcacaattcttgaacgagacaagaactatg

SEQ ID NO: 338730 - DNA, 33 bp, Homo sapien
ttttcacaattcttgagcgagacaagaactatg

SEQ ID NO: 338731 - DNA, 33 bp, Homo sapien
cctcaccttgtgagcaacaatagcttccttctg

SEQ ID NO: 338732 - DNA, 33 bp, Homo sapien
cctcaccttgtgagcagcaatagcttccttctg

SEQ ID NO: 338733 - DNA, 33 bp, Homo sapien
cctaacatatattatcaacacactaaatggtac

SEQ ID NO: 338734 - DNA, 33 bp, Homo sapien
cctaacatatattatctacacactaaatggtac

SEQ ID NO: 338735 - DNA, 33 bp, Homo sapien
aggcaaaagtgacctccagtttcctattgcagt

SEQ ID NO: 338736 - DNA, 33 bp, Homo sapien
aggcaaaagtgacctctagtttcctattgcagt

SEQ ID NO: 338737 - DNA, 33 bp, Homo sapien
aattttcaatcttgccaaccagaatggaaaaat

SEQ ID NO: 338738 - DNA, 33 bp, Homo sapien
aattttcaatcttgccgaccagaatggaaaaat

SEQ ID NO: 338739 - DNA, 33 bp, Homo sapien
atgcatacatttacaactgatttggataaacag

SEQ ID NO: 338740 - DNA, 33 bp, Homo sapien
atgcatacatttacaagtgatttggataaacag

SEQ ID NO: 338741 - DNA, 33 bp, Homo sapien
gtgcagtaaaactagacactaataagaacatat

SEQ ID NO: 338742 - DNA, 33 bp, Homo sapien
gtgcagtaaaactagagactaataagaacatat

SEQ ID NO: 338743 - DNA, 33 bp, Homo sapien
atatacaatggtatctcactgtcattttagttt

SEQ ID NO: 338744 - DNA, 33 bp, Homo sapien
atatacaatggtatcttactgtcattttagttt

SEQ ID NO: 338745 - DNA, 33 bp, Homo sapien
actagctctgttcaaggaattcaatgaccacaa

SEQ ID NO: 338746 - DNA, 33 bp, Homo sapien
actagctctgttcaagtaattcaatgaccacaa

SEQ ID NO: 338747 - DNA, 33 bp, Homo sapien
taagcataaatgtccacggtaagtctatatcta

SEQ ID NO: 338748 - DNA, 33 bp, Homo sapien
taagcataaatgtccatggtaagtctatatcta

SEQ ID NO: 338749 - DNA, 33 bp, Homo sapien; identical to SEQ ID NO: 338747

SEQ ID NO: 338750 - DNA, 33 bp, Homo sapien; identical to SEQ ID NO: 338748

SEQ ID NO: 338751 - DNA, 33 bp, Homo sapien
aagcctgaaaaaaaaactgattgacaggacagt

SEQ ID NO: 338752 - DNA, 33 bp, Homo sapien
aagcctgaaaaaaaaattgattgacaggacagt

SEQ ID NO: 338753 - DNA, 33 bp, Homo sapien; identical to SEQ ID NO: 338751

SEQ ID NO: 338754 - DNA, 33 bp, Homo sapien; identical to SEQ ID NO: 338752

SEQ ID NO: 338755 - DNA, 33 bp, Homo sapien
aaatactttgctagaccgcgttgactggagaaa

SEQ ID NO: 338756 - DNA, 33 bp, Homo sapien
aaatactttgctagactgcgttgactggagaaa

SEQ ID NO: 338757 - DNA, 33 bp, Homo sapien
ttcatcccatctttacgccaatctccaaaaact

SEQ ID NO: 338758 - DNA, 33 bp, Homo sapien
ttcatcccatctttactccaatctccaaaaact

SEQ ID NO: 338759 - DNA, 33 bp, Homo sapien
tgccaatatggtgtgaaatagtattgagattca

SEQ ID NO: 338760 - DNA, 33 bp, Homo sapien
tgccaatatggtgtgagatagtattgagattca

SEQ ID NO: 338761 - DNA, 33 bp, Homo sapien
aacgtgaaaagtatgacggcgttaacttccctg

SEQ ID NO: 338762 - DNA, 33 bp, Homo sapien
aacgtgaaaagtatgatggcgttaacttccctg

SEQ ID NO: 338763 - DNA, 33 bp, Homo sapien
cacagagggagttaatcaaggcatttgtaagcc

SEQ ID NO: 338764 - DNA, 33 bp, Homo sapien
cacagagggagttaatgaaggcatttgtaagcc

SEQ ID NO: 338765 - DNA, 33 bp, Homo sapien; identical to SEQ ID NO: 338763

SEQ ID NO: 338766 - DNA, 33 bp, Homo sapien; identical to SEQ ID NO: 338764

SEQ ID NO: 338767 - DNA, 33 bp, Homo sapien
ctgctaaatctgacccaaagaaacaagatggtg

SEQ ID NO: 338768 - DNA, 33 bp, Homo sapien
ctgctaaatctgaccccaagaaacaagatggtg

SEQ ID NO: 338769 - DNA, 33 bp, Homo sapien
ccctcatctcatttgactaatctgagagactat

SEQ ID NO: 338770 - DNA, 33 bp, Homo sapien
ccctcatctcatttgattaatctgagagactat

SEQ ID NO: 338771 - DNA, 33 bp, Homo sapien; identical to SEQ ID NO: 338769

SEQ ID NO: 338772 - DNA, 33 bp, Homo sapien; identical to SEQ ID NO: 338770

SEQ ID NO: 338773 - DNA, 33 bp, Homo sapien
ttacttgtaaaatgaaggtgttgaactacgagt

SEQ ID NO: 338774 - DNA, 33 bp, Homo sapien
ttacttgtaaaatgaatgtgttgaactacgagt

SEQ ID NO: 338775 - DNA, 33 bp, Homo sapien
aatgataactttgagacaggatcacattagact

SEQ ID NO: 338776 - DNA, 33 bp, Homo sapien
aatgataactttgagagaggatcacattagact

SEQ ID NO: 338777 - DNA, 33 bp, Homo sapien
aactgccagcctgcacacatgtatgaagccttt

SEQ ID NO: 338778 - DNA, 33 bp, Homo sapien
aactgccagcctgcacgcatgtatgaagccttt

SEQ ID NO: 338779 - DNA, 33 bp, Homo sapien
catgacattaagagaactgccaaggttatgaag

SEQ ID NO: 338780 - DNA, 33 bp, Homo sapien
catgacattaagagaattgccaaggttatgaag

SEQ ID NO: 338781 - DNA, 33 bp, Homo sapien
tcaggaaaagtctgacagatagactccactggg

SEQ ID NO: 338782 - DNA, 33 bp, Homo sapien
tcaggaaaagtctgacggatagactccactggg

SEQ ID NO: 338783 - DNA, 33 bp, Homo sapien
aataatgcctatctcacagagttgtttcaagaa

SEQ ID NO: 338784 - DNA, 33 bp, Homo sapien
aataatgcctatctcatagagttgtttcaagaa

SEQ ID NO: 338785 - DNA, 33 bp, Homo sapien
caagataaacttcccacgaggtcatgctgtggg

SEQ ID NO: 338786 - DNA, 33 bp, Homo sapien
caagataaacttcccatgaggtcatgctgtggg

SEQ ID NO: 338787 - DNA, 33 bp, Homo sapien
ctgttctcagcataagaaaagcataggttttta

SEQ ID NO: 338788 - DNA, 33 bp, Homo sapien
ctgttctcagcataaggaaagcataggttttta

SEQ ID NO: 338789 - DNA, 33 bp, Homo sapien
atctcttgataatttacactggctacatcggaa

SEQ ID NO: 338790 - DNA, 33 bp, Homo sapien
atctcttgataatttagactggctacatcggaa

SEQ ID NO: 338791 - DNA, 33 bp, Homo sapien
aatttaacctgcagttcaacatttcacgcagta

SEQ ID NO: 338792 - DNA, 33 bp, Homo sapien
aatttaacctgcagtttaacatttcacgcagta

SEQ ID NO: 338793 - DNA, 33 bp, Homo sapien; identical to SEQ ID NO: 338791

SEQ ID NO: 338794 - DNA, 33 bp, Homo sapien; identical to SEQ ID NO: 338792

SEQ ID NO: 338795 - DNA, 33 bp, Homo sapien
ctgtgctgtgcctataacggaacacgcttgatg

SEQ ID NO: 338796 - DNA, 33 bp, Homo sapien
ctgtgctgtgcctatagcggaacacgcttgatg

SEQ ID NO: 338797 - DNA, 33 bp, Homo sapien
cttccactgctcaggcagactacctctactatg

SEQ ID NO: 338798 - DNA, 33 bp, Homo sapien
cttccactgctcaggcggactacctctactatg

SEQ ID NO: 338799 - DNA, 33 bp, Homo sapien
taactgtgtttctgcaccttaggcgcatgactt

SEQ ID NO: 338800 - DNA, 33 bp, Homo sapien
taactgtgtttctgcatcttaggcgcatgactt

SEQ ID NO: 338801 - DNA, 33 bp, Homo sapien
gaactcctggtgttccccttgcctgtgccagac

SEQ ID NO: 338802 - DNA, 33 bp, Homo sapien
gaactcctggtgttcctcttgcctgtgccagac

SEQ ID NO: 338803 - DNA, 33 bp, Homo sapien
cagttcctattttccaaagatgacagtataccc

SEQ ID NO: 338804 - DNA, 33 bp, Homo sapien
cagttcctattttccagagatgacagtataccc

SEQ ID NO: 338805 - DNA, 33 bp, Homo sapien; identical to SEQ ID NO: 338803

SEQ ID NO: 338806 - DNA, 33 bp, Homo sapien; identical to SEQ ID NO: 338804

SEQ ID NO: 338807 - DNA, 33 bp, Homo sapien
ctttggaagtgctatacgcatcacttgggtcta

SEQ ID NO: 338808 - DNA, 33 bp, Homo sapien
ctttggaagtgctataggcatcacttgggtcta

SEQ ID NO: 338809 - DNA, 33 bp, Homo sapien
aaaacttttgagatcactgagtttggatgacga

SEQ ID NO: 338810 - DNA, 33 bp, Homo sapien
aaaacttttgagatcattgagtttggatgacga

SEQ ID NO: 338811 - DNA, 33 bp, Homo sapien
attcgaggcacagtaacggcttaggaagttact

SEQ ID NO: 338812 - DNA, 33 bp, Homo sapien
attcgaggcacagtaatggcttaggaagttact

SEQ ID NO: 338813 - DNA, 33 bp, Homo sapien
aaagtttggaaatctacagtagatgctgtatta

SEQ ID NO: 338814 - DNA, 33 bp, Homo sapien
aaagtttggaaatctatagtagatgctgtatta

SEQ ID NO: 338815 - DNA, 33 bp, Homo sapien
aatggtgatgcaaatgaaaccacacatagacac

SEQ ID NO: 338816 - DNA, 33 bp, Homo sapien
aatggtgatgcaaatggaaccacacatagacac

SEQ ID NO: 338817 - DNA, 33 bp, Homo sapien
taagaaaagctcaaaaatcccaaagctgacaat

SEQ ID NO: 338818 - DNA, 33 bp, Homo sapien
taagaaaagctcaaaactcccaaagctgacaat

SEQ ID NO: 338819 - DNA, 33 bp, Homo sapien
tgtgatgggttctcacaaaggtaggggcaaaga

SEQ ID NO: 338820 - DNA, 33 bp, Homo sapien
tgtgatgggttctcacgaaggtaggggcaaaga

SEQ ID NO: 338821 - DNA, 33 bp, Homo sapien
tcctgtggttctttgacattatctccactagtg

SEQ ID NO: 338822 - DNA, 33 bp, Homo sapien
tcctgtggttctttgagattatctccactagtg

SEQ ID NO: 338823 - DNA, 33 bp, Homo sapien
agagctaaaattttcccacttactcctgggcac

SEQ ID NO: 338824 - DNA, 33 bp, Homo sapien
agagctaaaattttcctacttactcctgggcac

SEQ ID NO: 338825 - DNA, 33 bp, Homo sapien
cagacactcagtaagactatgcttcaaaatccc

SEQ ID NO: 338826 - DNA, 33 bp, Homo sapien
cagacactcagtaagagtatgcttcaaaatccc

SEQ ID NO: 338827 - DNA, 33 bp, Homo sapien
tgaaaaatgtgcaaacaagggaggctacaaaaa

SEQ ID NO: 338828 - DNA, 33 bp, Homo sapien
tgaaaaatgtgcaaacgagggaggctacaaaaa

SEQ ID NO: 338829 - DNA, 33 bp, Homo sapien
aggaccggggtgcctcagaaaagactaggatgt

SEQ ID NO: 338830 - DNA, 33 bp, Homo sapien
aggaccggggtgcctcggaaaagactaggatgt

SEQ ID NO: 338831 - DNA, 33 bp, Homo sapien
tgaccttgaccaatcaaagaaagcagccctcaa

SEQ ID NO: 338832 - DNA, 33 bp, Homo sapien
tgaccttgaccaatcagagaaagcagccctcaa

SEQ ID NO: 338833 - DNA, 33 bp, Homo sapien
ctttgaccacaccaaacatagatcccaaagatg

SEQ ID NO: 338834 - DNA, 33 bp, Homo sapien
ctttgaccacaccaaatatagatcccaaagatg

SEQ ID NO: 338835 - DNA, 33 bp, Homo sapien
ctggatacccgttaaccagccagggtctggctc

SEQ ID NO: 338836 - DNA, 33 bp, Homo sapien
ctggatacccgttaactagccagggtctggctc

SEQ ID NO: 338837 - DNA, 33 bp, Homo sapien
attgtgagcatgaaataagattgtgtatataaa

SEQ ID NO: 338838 - DNA, 33 bp, Homo sapien
attgtgagcatgaaatgagattgtgtatataaa

SEQ ID NO: 338839 - DNA, 33 bp, Homo sapien
tgcagaatcatgcaagccaaagtatccagactc

SEQ ID NO: 338840 - DNA, 33 bp, Homo sapien
tgcagaatcatgcaagtcaaagtatccagactc

SEQ ID NO: 338841 - DNA, 33 bp, Homo sapien
gagattaagtgacgaaaaaaacaaacagaaatc

SEQ ID NO: 338842 - DNA, 33 bp, Homo sapien
gagattaagtgacgaacaaaacaaacagaaatc

SEQ ID NO: 338843 - DNA, 33 bp, Homo sapien
tggtgattcatccaaaattgcaatagacttgat

SEQ ID NO: 338844 - DNA, 33 bp, Homo sapien
tggtgattcatccaaacttgcaatagacttgat

SEQ ID NO: 338845 - DNA, 33 bp, Homo sapien
gactcgatgagagtacagcctgtcatttccatt

SEQ ID NO: 338846 - DNA, 33 bp, Homo sapien
gactcgatgagagtacggcctgtcatttccatt

SEQ ID NO: 338847 - DNA, 33 bp, Homo sapien
cccaaccctacagcaaatgtggtggttccgaag

SEQ ID NO: 338848 - DNA, 33 bp, Homo sapien
cccaaccctacagcaagtgtggtggttccgaag

SEQ ID NO: 338849 - DNA, 33 bp, Homo sapien
tcaggcacaaatgtacaaacagatgctcatgcc

SEQ ID NO: 338850 - DNA, 33 bp, Homo sapien
tcaggcacaaatgtacgaacagatgctcatgcc

SEQ ID NO: 338851 - DNA, 33 bp, Homo sapien
atctgcttctccaaaacgactattggaaaggca

SEQ ID NO: 338852 - DNA, 33 bp, Homo sapien
atctgcttctccaaaatgactattggaaaggca

SEQ ID NO: 338853 - DNA, 33 bp, Homo sapien
tccagtgcttcaggaaaaagtctgcagttgaag

SEQ ID NO: 338854 - DNA, 33 bp, Homo sapien
tccagtgcttcaggaagaagtctgcagttgaag

SEQ ID NO: 338855 - DNA, 33 bp, Homo sapien
actgatccttaaaacaatcctgtgaggaagatt

SEQ ID NO: 338856 - DNA, 33 bp, Homo sapien
actgatccttaaaacagtcctgtgaggaagatt

SEQ ID NO: 338857 - DNA, 33 bp, Homo sapien
gtttagtgaagcaataaggcagaggaaacaata

SEQ ID NO: 338858 - DNA, 33 bp, Homo sapien
gtttagtgaagcaatagggcagaggaaacaata

SEQ ID NO: 338859 - DNA, 33 bp, Homo sapien
ggctggagacaaaaggcaaggaccagacttgga

SEQ ID NO: 338860 - DNA, 33 bp, Homo sapien
ggctggagacaaaaggtaaggaccagacttgga

SEQ ID NO: 338861 - DNA, 33 bp, Homo sapien
ccagccttgtcttgggcccatctctgtccataa

SEQ ID NO: 338862 - DNA, 33 bp, Homo sapien
ccagccttgtcttgggtccatctctgtccataa

SEQ ID NO: 338863 - DNA, 33 bp, Homo sapien
ccaagatcccaacaaaaaaagtgcatatgtgag

SEQ ID NO: 338864 - DNA, 33 bp, Homo sapien
ccaagatcccaacaaacaaagtgcatatgtgag

SEQ ID NO: 338865 - DNA, 33 bp, Homo sapien
tagctctcctttctaccatctagccatcttggt

SEQ ID NO: 338866 - DNA, 33 bp, Homo sapien
tagctctcctttctactatctagccatcttggt

SEQ ID NO: 338867 - DNA, 33 bp, Homo sapien
ctggacctgatttatacactgtgactctggatt

SEQ ID NO: 338868 - DNA, 33 bp, Homo sapien
ctggacctgatttatatactgtgactctggatt

SEQ ID NO: 338869 - DNA, 33 bp, Homo sapien
agatatccagctagcactccgcacacgtggaga

SEQ ID NO: 338870 - DNA, 33 bp, Homo sapien
agatatccagctagcattccgcacacgtggaga

SEQ ID NO: 338871 - DNA, 33 bp, Homo sapien
gctataaaaatatcaaacagactaggcacagtg

SEQ ID NO: 338872 - DNA, 33 bp, Homo sapien
gctataaaaatatcaagcagactaggcacagtg

SEQ ID NO: 338873 - DNA, 33 bp, Homo sapien
tccagaagatagaaaacgacaatgaaatacttg

SEQ ID NO: 338874 - DNA, 33 bp, Homo sapien
tccagaagatagaaaatgacaatgaaatacttg

SEQ ID NO: 338875 - DNA, 33 bp, Homo sapien
ctcctttatgatgagaacctgagaccaagacag

SEQ ID NO: 338876 - DNA, 33 bp, Homo sapien
ctcctttatgatgagaccctgagaccaagacag

SEQ ID NO: 338877 - DNA, 33 bp, Homo sapien
ccctggaagcagcagacaatcttcttttgtgac

SEQ ID NO: 338878 - DNA, 33 bp, Homo sapien
ccctggaagcagcagagaatcttcttttgtgac

SEQ ID NO: 338879 - DNA, 33 bp, Homo sapien
gaccaagtttcattgcacagaagaatacgtcag

SEQ ID NO: 338880 - DNA, 33 bp, Homo sapien
gaccaagtttcattgcgcagaagaatacgtcag

SEQ ID NO: 338881 - DNA, 33 bp, Homo sapien
tatcttctcgcaggccaccttccagtttttaat

SEQ ID NO: 338882 - DNA, 33 bp, Homo sapien
tatcttctcgcaggccgccttccagtttttaat

SEQ ID NO: 338883 - DNA, 33 bp, Homo sapien
ggactgactcagtcccacagttgcaatgcttct

SEQ ID NO: 338884 - DNA, 33 bp, Homo sapien
ggactgactcagtcccgcagttgcaatgcttct

SEQ ID NO: 338885 - DNA, 33 bp, Homo sapien
tattctctttcttagccgataacaagataattt

SEQ ID NO: 338886 - DNA, 33 bp, Homo sapien
tattctctttcttagctgataacaagataattt

SEQ ID NO: 338887 - DNA, 33 bp, Homo sapien
gaaacttggaattttcaatttgttggttctctc

SEQ ID NO: 338888 - DNA, 33 bp, Homo sapien
gaaacttggaattttccatttgttggttctctc

SEQ ID NO: 338889 - DNA, 33 bp, Homo sapien
agcttgatggagatataaatgaaagacataaaa

SEQ ID NO: 338890 - DNA, 33 bp, Homo sapien
agcttgatggagatatgaatgaaagacataaaa

SEQ ID NO: 338891 - DNA, 33 bp, Homo sapien
aaaagactggaagaaaaagcgagaacaccatat

SEQ ID NO: 338892 - DNA, 33 bp, Homo sapien
aaaagactggaagaaacagcgagaacaccatat

SEQ ID NO: 338893 - DNA, 33 bp, Homo sapien
ttgacatataggacaacagcttgaaaatatctg

SEQ ID NO: 338894 - DNA, 33 bp, Homo sapien
ttgacatataggacaatagcttgaaaatatctg

SEQ ID NO: 338895 - DNA, 33 bp, Homo sapien
ccttcaaattcctgaccataatgtagcataaga

SEQ ID NO: 338896 - DNA, 33 bp, Homo sapien
ccttcaaattcctgactataatgtagcataaga

SEQ ID NO: 338897 - DNA, 33 bp, Homo sapien
acccactgttttccagaccatggaacattgctt

SEQ ID NO: 338898 - DNA, 33 bp, Homo sapien
acccactgttttccaggccatggaacattgctt

SEQ ID NO: 338899 - DNA, 33 bp, Homo sapien
tacttaatactgtaggcaactatagcacaatgg

SEQ ID NO: 338900 - DNA, 33 bp, Homo sapien
tacttaatactgtaggtaactatagcacaatgg

SEQ ID NO: 338901 - DNA, 33 bp, Homo sapien
gaaagtcaactatcaactgttccttatatgtaa

SEQ ID NO: 338902 - DNA, 33 bp, Homo sapien
gaaagtcaactatcaattgttccttatatgtaa

SEQ ID NO: 338903 - DNA, 33 bp, Homo sapien
tgtccatgaaactttccctgatgctgcctctcc

SEQ ID NO: 338904 - DNA, 33 bp, Homo sapien
tgtccatgaaactttctctgatgctgcctctcc

SEQ ID NO: 338905 - DNA, 33 bp, Homo sapien
aatggttcttgggtacagataatgttttggttc

SEQ ID NO: 338906 - DNA, 33 bp, Homo sapien
aatggttcttgggtacggataatgttttggttc

SEQ ID NO: 338907 - DNA, 33 bp, Homo sapien
tggaagaatctccaaaacacaatgtaaagcaaa

SEQ ID NO: 338908 - DNA, 33 bp, Homo sapien
tggaagaatctccaaagcacaatgtaaagcaaa

SEQ ID NO: 338909 - DNA, 33 bp, Homo sapien
agtggccagaaaaagccgaaaagatgcacaagt

SEQ ID NO: 338910 - DNA, 33 bp, Homo sapien
agtggccagaaaaagctgaaaagatgcacaagt

SEQ ID NO: 338911 - DNA, 33 bp, Homo sapien
atacttgtgacagataactagaaagtatgaaag

SEQ ID NO: 338912 - DNA, 33 bp, Homo sapien
atacttgtgacagatagctagaaagtatgaaag

SEQ ID NO: 338913 - DNA, 33 bp, Homo sapien
tgcagctacattaagcgatcaaattgatttggt

SEQ ID NO: 338914 - DNA, 33 bp, Homo sapien
tgcagctacattaagctatcaaattgatttggt

SEQ ID NO: 338915 - DNA, 33 bp, Homo sapien
agcagaactcacattgaaataatattcttattg

SEQ ID NO: 338916 - DNA, 33 bp, Homo sapien
agcagaactcacattggaataatattcttattg

SEQ ID NO: 338917 - DNA, 33 bp, Homo sapien
atccccaaagacaaaactggagccggccacagt

SEQ ID NO: 338918 - DNA, 33 bp, Homo sapien
atccccaaagacaaaagtggagccggccacagt

SEQ ID NO: 338919 - DNA, 33 bp, Homo sapien
atttcagcaaaatgtgcagtgctatggtaaagt

SEQ ID NO: 338920 - DNA, 33 bp, Homo sapien
atttcagcaaaatgtggagtgctatggtaaagt

SEQ ID NO: 338921 - DNA, 33 bp, Homo sapien
aacatattagatgcttaaacagtactcattaaa

SEQ ID NO: 338922 - DNA, 33 bp, Homo sapien
aacatattagatgcttcaacagtactcattaaa

SEQ ID NO: 338923 - DNA, 33 bp, Homo sapien
actcctgggtgaactcaagttgggtttgataga

SEQ ID NO: 338924 - DNA, 33 bp, Homo sapien
actcctgggtgaactcgagttgggtttgataga

SEQ ID NO: 338925 - DNA, 33 bp, Homo sapien
cagcctcatctgcagcacctgagctattatggg

SEQ ID NO: 338926 - DNA, 33 bp, Homo sapien
cagcctcatctgcagcgcctgagctattatggg

SEQ ID NO: 338927 - DNA, 33 bp, Homo sapien
taaatgtgatttagtacgtaatttgcctgggac

SEQ ID NO: 338928 - DNA, 33 bp, Homo sapien
taaatgtgatttagtatgtaatttgcctgggac

SEQ ID NO: 338929 - DNA, 33 bp, Homo sapien
agcagaatactacaacaaagtaatggcctttaa

SEQ ID NO: 338930 - DNA, 33 bp, Homo sapien
agcagaatactacaacgaagtaatggcctttaa

SEQ ID NO: 338931 - DNA, 33 bp, Homo sapien
aacattacgactgtgacattgagtgcctcatta

SEQ ID NO: 338932 - DNA, 33 bp, Homo sapien
aacattacgactgtgagattgagtgcctcatta

SEQ ID NO: 338933 - DNA, 33 bp, Homo sapien
tgaatgtatgccctcaggtaatgaattctctct

SEQ ID NO: 338934 - DNA, 33 bp, Homo sapien
tgaatgtatgccctcatgtaatgaattctctct

SEQ ID NO: 338935 - DNA, 33 bp, Homo sapien
tggcattgtactggagaagggatcaaaagtcat

SEQ ID NO: 338936 - DNA, 33 bp, Homo sapien
tggcattgtactggaggagggatcaaaagtcat

SEQ ID NO: 338937 - DNA, 33 bp, Homo sapien
ccccagaagtttgtaaatagaaagtatttttgt

SEQ ID NO: 338938 - DNA, 33 bp, Homo sapien
ccccagaagtttgtaattagaaagtatttttgt

SEQ ID NO: 338939 - DNA, 33 bp, Homo sapien
caccccacagggtcatcataaaaaatcagtcta

SEQ ID NO: 338940 - DNA, 33 bp, Homo sapien
caccccacagggtcattataaaaaatcagtcta

SEQ ID NO: 338941 - DNA, 33 bp, Homo sapien
ctaaggtctcaacacacgttactttcacttttc

SEQ ID NO: 338942 - DNA, 33 bp, Homo sapien
ctaaggtctcaacacatgttactttcacttttc

SEQ ID NO: 338943 - DNA, 33 bp, Homo sapien
attatctacttcttacggaggaaacaagcgaag

SEQ ID NO: 338944 - DNA, 33 bp, Homo sapien
attatctacttcttactgaggaaacaagcgaag

SEQ ID NO: 338945 - DNA, 33 bp, Homo sapien
attgtacttcaaggtacatactgcaaagaattg

SEQ ID NO: 338946 - DNA, 33 bp, Homo sapien
attgtacttcaaggtatatactgcaaagaattg

SEQ ID NO: 338947 - DNA, 33 bp, Homo sapien
ttttcaacaagggtgacaagaccatttgatggg

SEQ ID NO: 338948 - DNA, 33 bp, Homo sapien
ttttcaacaagggtgagaagaccatttgatggg

SEQ ID NO: 338949 - DNA, 33 bp, Homo sapien
tttatgacttgagaacaattacaaagtgacaag

SEQ ID NO: 338950 - DNA, 33 bp, Homo sapien
tttatgacttgagaacgattacaaagtgacaag

SEQ ID NO: 338951 - DNA, 33 bp, Homo sapien
gaagcttcttgtcctccagactgtgtgctcctt

SEQ ID NO: 338952 - DNA, 33 bp, Homo sapien
gaagcttcttgtcctcgagactgtgtgctcctt

SEQ ID NO: 338953 - DNA, 33 bp, Homo sapien
gaaatttccttgtggacaaaatgtaggggaggc

SEQ ID NO: 338954 - DNA, 33 bp, Homo sapien
gaaatttccttgtggagaaaatgtaggggaggc

SEQ ID NO: 338955 - DNA, 33 bp, Homo sapien
cactgttaaagcctcaatgaaagaaatgagagg

SEQ ID NO: 338956 - DNA, 33 bp, Homo sapien
cactgttaaagcctcagtgaaagaaatgagagg

SEQ ID NO: 338957 - DNA, 33 bp, Homo sapien
aaatctctgagactcaaggacataatcaggtgc

SEQ ID NO: 338958 - DNA, 33 bp, Homo sapien
aaatctctgagactcagggacataatcaggtgc

SEQ ID NO: 338959 - DNA, 33 bp, Homo sapien
tctatctttactttccacattttttctatttgg

SEQ ID NO: 338960 - DNA, 33 bp, Homo sapien
tctatctttactttccgcattttttctatttgg

SEQ ID NO: 338961 - DNA, 33 bp, Homo sapien
ggccagaattctcatcactgtttaaaagttgca

SEQ ID NO: 338962 - DNA, 33 bp, Homo sapien
ggccagaattctcatcgctgtttaaaagttgca

SEQ ID NO: 338963 - DNA, 33 bp, Homo sapien
aattaccttaactaaacagaggaagactcaggg

SEQ ID NO: 338964 - DNA, 33 bp, Homo sapien
aattaccttaactaaatagaggaagactcaggg

SEQ ID NO: 338965 - DNA, 33 bp, Homo sapien
tttcactgaggttctgcagtaggcaatgctgtc

SEQ ID NO: 338966 - DNA, 33 bp, Homo sapien
tttcactgaggttctgtagtaggcaatgctgtc

SEQ ID NO: 338967 - DNA, 33 bp, Homo sapien
cacaggtccacaagggaatcgtcaagttttggt

SEQ ID NO: 338968 - DNA, 33 bp, Homo sapien
cacaggtccacaagggcatcgtcaagttttggt

SEQ ID NO: 338969 - DNA, 33 bp, Homo sapien
ccagctcctgtcttccaccacatgaccaaaact

SEQ ID NO: 338970 - DNA, 33 bp, Homo sapien
ccagctcctgtcttccgccacatgaccaaaact

SEQ ID NO: 338971 - DNA, 33 bp, Homo sapien
tccattcaccaaattacggcctgcagtcaaatc

SEQ ID NO: 338972 - DNA, 33 bp, Homo sapien
tccattcaccaaattatggcctgcagtcaaatc

SEQ ID NO: 338973 - DNA, 33 bp, Homo sapien
catacaagtttctgcggaggcatatgttttcac

SEQ ID NO: 338974 - DNA, 33 bp, Homo sapien
catacaagtttctgcgtaggcatatgttttcac

SEQ ID NO: 338975 - DNA, 33 bp, Homo sapien
ttgtatgtaagtgttcacagcagccttatcata

SEQ ID NO: 338976 - DNA, 33 bp, Homo sapien
ttgtatgtaagtgttcccagcagccttatcata

SEQ ID NO: 338977 - DNA, 33 bp, Homo sapien
tggtcttttgtgatgaacttctatcgcttagca

SEQ ID NO: 338978 - DNA, 33 bp, Homo sapien
tggtcttttgtgatgagcttctatcgcttagca

SEQ ID NO: 338979 - DNA, 33 bp, Homo sapien
acaaaagaccacttaccgaatgattccatttac

SEQ ID NO: 338980 - DNA, 33 bp, Homo sapien
acaaaagaccacttactgaatgattccatttac

SEQ ID NO: 338981 - DNA, 33 bp, Homo sapien
agttccttcagtttacaatcccctatagattta

SEQ ID NO: 338982 - DNA, 33 bp, Homo sapien
agttccttcagtttacgatcccctatagattta

SEQ ID NO: 338983 - DNA, 33 bp, Homo sapien
aatgtgcaccaatccaaacaactggatagattt

SEQ ID NO: 338984 - DNA, 33 bp, Homo sapien
aatgtgcaccaatccacacaactggatagattt

SEQ ID NO: 338985 - DNA, 33 bp, Homo sapien
agatagcaataagtaccagaaaggtgtaaaact

SEQ ID NO: 338986 - DNA, 33 bp, Homo sapien
agatagcaataagtactagaaaggtgtaaaact

SEQ ID NO: 338987 - DNA, 33 bp, Homo sapien
aatatccaggttcacaacagttacgctggaacc

SEQ ID NO: 338988 - DNA, 33 bp, Homo sapien
aatatccaggttcacatcagttacgctggaacc

SEQ ID NO: 338989 - DNA, 33 bp, Homo sapien
cactggctagcttataaacacaaacaaatctat

SEQ ID NO: 338990 - DNA, 33 bp, Homo sapien
cactggctagcttatacacacaaacaaatctat

SEQ ID NO: 338991 - DNA, 33 bp, Homo sapien
cacgtagagagaatgcgcactgtaggaaccaga

SEQ ID NO: 338992 - DNA, 33 bp, Homo sapien
cacgtagagagaatgctcactgtaggaaccaga

SEQ ID NO: 338993 - DNA, 33 bp, Homo sapien
gactaacacatagcatcaactcttacaatcagg

SEQ ID NO: 338994 - DNA, 33 bp, Homo sapien
gactaacacatagcatgaactcttacaatcagg

SEQ ID NO: 338995 - DNA, 33 bp, Homo sapien
taatgttaatctttccagcatttccatttttgt

SEQ ID NO: 338996 - DNA, 33 bp, Homo sapien
taatgttaatctttccggcatttccatttttgt

SEQ ID NO: 338997 - DNA, 33 bp, Homo sapien
agttatcctgtcctcaataagtcttctttccct

SEQ ID NO: 338998 - DNA, 33 bp, Homo sapien
agttatcctgtcctcagtaagtcttctttccct

SEQ ID NO: 338999 - DNA, 33 bp, Homo sapien
tttattattatactaaaacaactcttctctttt

SEQ ID NO: 339000 - DNA, 33 bp, Homo sapien
tttattattatactaagacaactcttctctttt

SEQ ID NO: 339001 - DNA, 33 bp, Homo sapien
atcatacagtgcagaaatctgaaattacagaga

SEQ ID NO: 339002 - DNA, 33 bp, Homo sapien
atcatacagtgcagaagtctgaaattacagaga

SEQ ID NO: 339003 - DNA, 33 bp, Homo sapien
ttttctttgaagtatacaacgtagatccatcca

SEQ ID NO: 339004 - DNA, 33 bp, Homo sapien
ttttctttgaagtatataacgtagatccatcca

SEQ ID NO: 339005 - DNA, 33 bp, Homo sapien
aatgtttgagccacaccatgaaactcccttaga

SEQ ID NO: 339006 - DNA, 33 bp, Homo sapien
aatgtttgagccacactatgaaactcccttaga

SEQ ID NO: 339007 - DNA, 33 bp, Homo sapien
caggaaccatcagtagcaactaaaattgattga

SEQ ID NO: 339008 - DNA, 33 bp, Homo sapien
caggaaccatcagtagtaactaaaattgattga

SEQ ID NO: 339009 - DNA, 33 bp, Homo sapien
tgatcattagcagacaaatgccttagtatgaga

SEQ ID NO: 339010 - DNA, 33 bp, Homo sapien
tgatcattagcagacacatgccttagtatgaga

SEQ ID NO: 339011 - DNA, 33 bp, Homo sapien
cctacttaggagaaccaaaaatatatggccaca

SEQ ID NO: 339012 - DNA, 33 bp, Homo sapien
cctacttaggagaaccgaaaatatatggccaca

SEQ ID NO: 339013 - DNA, 33 bp, Homo sapien
cactgcctaagataaaagacattgtagctgact

SEQ ID NO: 339014 - DNA, 33 bp, Homo sapien
cactgcctaagataaaggacattgtagctgact

SEQ ID NO: 339015 - DNA, 33 bp, Homo sapien
ggctctgtcttggtaaaaatgtgcctctacttc

SEQ ID NO: 339016 - DNA, 33 bp, Homo sapien
ggctctgtcttggtaataatgtgcctctacttc

SEQ ID NO: 339017 - DNA, 33 bp, Homo sapien
atctttggttcacaacaccccagttacaaacct

SEQ ID NO: 339018 - DNA, 33 bp, Homo sapien
atctttggttcacaacgccccagttacaaacct

SEQ ID NO: 339019 - DNA, 33 bp, Homo sapien
ttacaaaccttttagacagagtgcacacacagc

SEQ ID NO: 339020 - DNA, 33 bp, Homo sapien
ttacaaaccttttagagagagtgcacacacagc

SEQ ID NO: 339021 - DNA, 33 bp, Homo sapien
agcggtaggaattttcaacctaaagaaggacac

SEQ ID NO: 339022 - DNA, 33 bp, Homo sapien
agcggtaggaattttcgacctaaagaaggacac

SEQ ID NO: 339023 - DNA, 33 bp, Homo sapien
gagcatatggttttgacggctgcgaggtcagga

SEQ ID NO: 339024 - DNA, 33 bp, Homo sapien
gagcatatggttttgatggctgcgaggtcagga

SEQ ID NO: 339025 - DNA, 33 bp, Homo sapien
gaaggaaagggtcacacgactgtggaagcacag

SEQ ID NO: 339026 - DNA, 33 bp, Homo sapien
gaaggaaagggtcacaggactgtggaagcacag

SEQ ID NO: 339027 - DNA, 33 bp, Homo sapien
ggaaggcgcaaaaacaatgacaacctgtcagtg

SEQ ID NO: 339028 - DNA, 33 bp, Homo sapien
ggaaggcgcaaaaacagtgacaacctgtcagtg

SEQ ID NO: 339029 - DNA, 33 bp, Homo sapien
agctccgccacccacccactctgaaaaggctgc

SEQ ID NO: 339030 - DNA, 33 bp, Homo sapien
agctccgccacccacctactctgaaaaggctgc

SEQ ID NO: 339031 - DNA, 33 bp, Homo sapien
acatggggactcataacattagctgacttcata

SEQ ID NO: 339032 - DNA, 33 bp, Homo sapien
acatggggactcataatattagctgacttcata

SEQ ID NO: 339033 - DNA, 33 bp, Homo sapien
tcaggcctgccagtcactgaattctgacttgta

SEQ ID NO: 339034 - DNA, 33 bp, Homo sapien
tcaggcctgccagtcattgaattctgacttgta

SEQ ID NO: 339035 - DNA, 33 bp, Homo sapien
aacgctttttgtcagaagtcattcagtccttgg

SEQ ID NO: 339036 - DNA, 33 bp, Homo sapien
aacgctttttgtcagacgtcattcagtccttgg

SEQ ID NO: 339037 - DNA, 33 bp, Homo sapien
tttgaaattgtcccaactgtctcagagaactaa

SEQ ID NO: 339038 - DNA, 33 bp, Homo sapien
tttgaaattgtcccaattgtctcagagaactaa

SEQ ID NO: 339039 - DNA, 33 bp, Homo sapien
gcaggagcaccggtgaaaggagcacacggaagt

SEQ ID NO: 339040 - DNA, 33 bp, Homo sapien
gcaggagcaccggtgagaggagcacacggaagt

SEQ ID NO: 339041 - DNA, 33 bp, Homo sapien
gtatgacaaataaccaatgacgtaccggagtca

SEQ ID NO: 339042 - DNA, 33 bp, Homo sapien
gtatgacaaataaccagtgacgtaccggagtca

SEQ ID NO: 339043 - DNA, 33 bp, Homo sapien
ggcaacttatttgaaccagcaactgaaaacaag

SEQ ID NO: 339044 - DNA, 33 bp, Homo sapien
ggcaacttatttgaactagcaactgaaaacaag

SEQ ID NO: 339045 - DNA, 33 bp, Homo sapien
aatcctaatttgcctaaaaagttatagttaaaa

SEQ ID NO: 339046 - DNA, 33 bp, Homo sapien
aatcctaatttgcctacaaagttatagttaaaa

SEQ ID NO: 339047 - DNA, 33 bp, Homo sapien
catctgtcatctattaacagccatgctcagaat

SEQ ID NO: 339048 - DNA, 33 bp, Homo sapien
catctgtcatctattatcagccatgctcagaat

SEQ ID NO: 339049 - DNA, 33 bp, Homo sapien
gtaattgactaagccactgagattccctgcagt

SEQ ID NO: 339050 - DNA, 33 bp, Homo sapien
gtaattgactaagccattgagattccctgcagt

SEQ ID NO: 339051 - DNA, 33 bp, Homo sapien
gatggtcttctaaagtaacaactgaaatggtag

SEQ ID NO: 339052 - DNA, 33 bp, Homo sapien
gatggtcttctaaagttacaactgaaatggtag

SEQ ID NO: 339053 - DNA, 33 bp, Homo sapien
ttgtaaagtgatatcaatacttccggtgtgggc

SEQ ID NO: 339054 - DNA, 33 bp, Homo sapien
ttgtaaagtgatatcagtacttccggtgtgggc

SEQ ID NO: 339055 - DNA, 33 bp, Homo sapien
atatccaccaccggccacgtctttccactcaga

SEQ ID NO: 339056 - DNA, 33 bp, Homo sapien
atatccaccaccggccgcgtctttccactcaga

SEQ ID NO: 339057 - DNA, 33 bp, Homo sapien
ccagccttcctgatgcactatgtaaacatcata

SEQ ID NO: 339058 - DNA, 33 bp, Homo sapien
ccagccttcctgatgcgctatgtaaacatcata

SEQ ID NO: 339059 - DNA, 33 bp, Homo sapien
tattttatggtgtgtacccagtcatcacatcct

SEQ ID NO: 339060 - DNA, 33 bp, Homo sapien
tattttatggtgtgtatccagtcatcacatcct

SEQ ID NO: 339061 - DNA, 33 bp, Homo sapien
ttaacagatggtaaaactaaggcagatagcagt

SEQ ID NO: 339062 - DNA, 33 bp, Homo sapien
ttaacagatggtaaaattaaggcagatagcagt

SEQ ID NO: 339063 - DNA, 33 bp, Homo sapien
cctgagtagtttccttcaaattgcaatcaaaga

SEQ ID NO: 339064 - DNA, 33 bp, Homo sapien
cctgagtagtttccttgaaattgcaatcaaaga

SEQ ID NO: 339065 - DNA, 33 bp, Homo sapien
gaccaagagccatttacatcatcaagaatagca

SEQ ID NO: 339066 - DNA, 33 bp, Homo sapien
gaccaagagccatttatatcatcaagaatagca

SEQ ID NO: 339067 - DNA, 33 bp, Homo sapien
tacaagaaaaacctcactgaagtccgagccgat

SEQ ID NO: 339068 - DNA, 33 bp, Homo sapien
tacaagaaaaacctcattgaagtccgagccgat

SEQ ID NO: 339069 - DNA, 33 bp, Homo sapien
taacatacatagtccaatcagtgtggtggtttt

SEQ ID NO: 339070 - DNA, 33 bp, Homo sapien
taacatacatagtccagtcagtgtggtggtttt

SEQ ID NO: 339071 - DNA, 33 bp, Homo sapien
aaatgatagataatgaacaagctacaactaagt

SEQ ID NO: 339072 - DNA, 33 bp, Homo sapien
aaatgatagataatgagcaagctacaactaagt

SEQ ID NO: 339073 - DNA, 33 bp, Homo sapien
ctcatctgcaggataaccttgggtggagggtgg

SEQ ID NO: 339074 - DNA, 33 bp, Homo sapien
ctcatctgcaggataatcttgggtggagggtgg

SEQ ID NO: 339075 - DNA, 33 bp, Homo sapien
atgaccttcttactaactgaaattctgactacc

SEQ ID NO: 339076 - DNA, 33 bp, Homo sapien
atgaccttcttactaattgaaattctgactacc

SEQ ID NO: 339077 - DNA, 33 bp, Homo sapien
gaagacagtctacttccctaatcaagccaggac

SEQ ID NO: 339078 - DNA, 33 bp, Homo sapien
gaagacagtctacttctctaatcaagccaggac

SEQ ID NO: 339079 - DNA, 33 bp, Homo sapien
gctctagccgcaggcccctaacctggcgacagg

SEQ ID NO: 339080 - DNA, 33 bp, Homo sapien
gctctagccgcaggccgctaacctggcgacagg

SEQ ID NO: 339081 - DNA, 33 bp, Homo sapien
cgggttttcttgaagaccagccgatagaacaga

SEQ ID NO: 339082 - DNA, 33 bp, Homo sapien
cgggttttcttgaagagcagccgatagaacaga

SEQ ID NO: 339083 - DNA, 33 bp, Homo sapien
ggttctctggacccaccacgcaccacatggcct

SEQ ID NO: 339084 - DNA, 33 bp, Homo sapien
ggttctctggacccactacgcaccacatggcct

SEQ ID NO: 339085 - DNA, 33 bp, Homo sapien
gcgtgagatcatagccaaaggttctagaaaaag

SEQ ID NO: 339086 - DNA, 33 bp, Homo sapien
gcgtgagatcatagccgaaggttctagaaaaag

SEQ ID NO: 339087 - DNA, 33 bp, Homo sapien
tgctacatcaggcagacagtatctgacctagac

SEQ ID NO: 339088 - DNA, 33 bp, Homo sapien
tgctacatcaggcagagagtatctgacctagac

SEQ ID NO: 339089 - DNA, 33 bp, Homo sapien
ggaaaggagcaggataaatattacaatcagaga

SEQ ID NO: 339090 - DNA, 33 bp, Homo sapien
ggaaaggagcaggatacatattacaatcagaga

SEQ ID NO: 339091 - DNA, 33 bp, Homo sapien
tgttttatctccaaaacatcaaagcgtaagccc

SEQ ID NO: 339092 - DNA, 33 bp, Homo sapien
tgttttatctccaaaatatcaaagcgtaagccc

SEQ ID NO: 339093 - DNA, 33 bp, Homo sapien
accataacaatacttcaaattagatattatctc

SEQ ID NO: 339094 - DNA, 33 bp, Homo sapien
accataacaatacttcgaattagatattatctc

SEQ ID NO: 339095 - DNA, 33 bp, Homo sapien
aatcatcacacgaagaacttctgaatacatcca

SEQ ID NO: 339096 - DNA, 33 bp, Homo sapien
aatcatcacacgaagatcttctgaatacatcca

SEQ ID NO: 339097 - DNA, 33 bp, Homo sapien
ctaggtctaccactcagtatgcagggtgctgac

SEQ ID NO: 339098 - DNA, 33 bp, Homo sapien
ctaggtctaccactcattatgcagggtgctgac

SEQ ID NO: 339099 - DNA, 33 bp, Homo sapien
ttttgtttcgtgtgaaagaagagcttgccactt

SEQ ID NO: 339100 - DNA, 33 bp, Homo sapien
ttttgtttcgtgtgaatgaagagcttgccactt

SEQ ID NO: 339101 - DNA, 33 bp, Homo sapien
tgccgcgttggtgagacgctgccctttccaaac

SEQ ID NO: 339102 - DNA, 33 bp, Homo sapien
tgccgcgttggtgagatgctgccctttccaaac

SEQ ID NO: 339103 - DNA, 33 bp, Homo sapien
tttttggggtagttcacgtaaaagcaaaatgcc

SEQ ID NO: 339104 - DNA, 33 bp, Homo sapien
tttttggggtagttcaggtaaaagcaaaatgcc

SEQ ID NO: 339105 - DNA, 33 bp, Homo sapien
acagaaaattcgggcaatacagataaggaaagt

SEQ ID NO: 339106 - DNA, 33 bp, Homo sapien
acagaaaattcgggcagtacagataaggaaagt

SEQ ID NO: 339107 - DNA, 33 bp, Homo sapien
ggagttctgcagcagacgcaagctacagtgaaa

SEQ ID NO: 339108 - DNA, 33 bp, Homo sapien
ggagttctgcagcagatgcaagctacagtgaaa

SEQ ID NO: 339109 - DNA, 33 bp, Homo sapien
ttacatcaattgttcacgatccatgtagttttt

SEQ ID NO: 339110 - DNA, 33 bp, Homo sapien
ttacatcaattgttcaggatccatgtagttttt

SEQ ID NO: 339111 - DNA, 33 bp, Homo sapien
cacatgagtgaaactaaacatgaccctctgcag

SEQ ID NO: 339112 - DNA, 33 bp, Homo sapien
cacatgagtgaaactagacatgaccctctgcag

SEQ ID NO: 339113 - DNA, 33 bp, Homo sapien
aagttggattatgcccccatctcctctaaacct

SEQ ID NO: 339114 - DNA, 33 bp, Homo sapien
aagttggattatgccctcatctcctctaaacct

SEQ ID NO: 339115 - DNA, 33 bp, Homo sapien
ccttcggggaaatcacaaaatccaaatgaaagc

SEQ ID NO: 339116 - DNA, 33 bp, Homo sapien
ccttcggggaaatcacgaaatccaaatgaaagc

SEQ ID NO: 339117 - DNA, 33 bp, Homo sapien
ctaataaacttcttcccctatccactcccaaaa

SEQ ID NO: 339118 - DNA, 33 bp, Homo sapien
ctaataaacttcttcctctatccactcccaaaa

SEQ ID NO: 339119 - DNA, 33 bp, Homo sapien
tttccaatggcttttcactgaacatagaatgaa

SEQ ID NO: 339120 - DNA, 33 bp, Homo sapien
tttccaatggcttttcgctgaacatagaatgaa

SEQ ID NO: 339121 - DNA, 33 bp, Homo sapien
ctgctctctgaacttacgcctattattctgtcc

SEQ ID NO: 339122 - DNA, 33 bp, Homo sapien
ctgctctctgaacttatgcctattattctgtcc

SEQ ID NO: 339123 - DNA, 33 bp, Homo sapien
tctctactggcttttacatcctcctgcactcct

SEQ ID NO: 339124 - DNA, 33 bp, Homo sapien
tctctactggcttttatatcctcctgcactcct

SEQ ID NO: 339125 - DNA, 33 bp, Homo sapien
tttttttttaatagccacaattgaggactgatg

SEQ ID NO: 339126 - DNA, 33 bp, Homo sapien
tttttttttaatagccgcaattgaggactgatg

SEQ ID NO: 339127 - DNA, 33 bp, Homo sapien
ggaacactctgaagaaccatgtagaaagcacct

SEQ ID NO: 339128 - DNA, 33 bp, Homo sapien
ggaacactctgaagaatcatgtagaaagcacct

SEQ ID NO: 339129 - DNA, 33 bp, Homo sapien
aagatggcacagattaaactaggttcttattta

SEQ ID NO: 339130 - DNA, 33 bp, Homo sapien
aagatggcacagattacactaggttcttattta

SEQ ID NO: 339131 - DNA, 33 bp, Homo sapien
aaaaatatatttcaagacaaactttggcaatac

SEQ ID NO: 339132 - DNA, 33 bp, Homo sapien
aaaaatatatttcaaggcaaactttggcaatac

SEQ ID NO: 339133 - DNA, 33 bp, Homo sapien
ccacttttggtggacaacatcactgctagccac

SEQ ID NO: 339134 - DNA, 33 bp, Homo sapien
ccacttttggtggacagcatcactgctagccac

SEQ ID NO: 339135 - DNA, 33 bp, Homo sapien
atctctcatggtgtgccgaaagacaagtagtgc

SEQ ID NO: 339136 - DNA, 33 bp, Homo sapien
atctctcatggtgtgctgaaagacaagtagtgc

SEQ ID NO: 339137 - DNA, 33 bp, Homo sapien
catatttagagttccaatgaatccaagatttat

SEQ ID NO: 339138 - DNA, 33 bp, Homo sapien
catatttagagttccagtgaatccaagatttat

SEQ ID NO: 339139 - DNA, 33 bp, Homo sapien
cgtccaccataatgtacctttccaggacatcca

SEQ ID NO: 339140 - DNA, 33 bp, Homo sapien
cgtccaccataatgtatctttccaggacatcca

SEQ ID NO: 339141 - DNA, 33 bp, Homo sapien
agaagtcctctgaagaacaaataaaatattcac

SEQ ID NO: 339142 - DNA, 33 bp, Homo sapien
agaagtcctctgaagagcaaataaaatattcac

SEQ ID NO: 339143 - DNA, 33 bp, Homo sapien
ttttcatttgaggcccaaaagaaaataggtagc

SEQ ID NO: 339144 - DNA, 33 bp, Homo sapien
ttttcatttgaggcccgaaagaaaataggtagc

SEQ ID NO: 339145 - DNA, 33 bp, Homo sapien
ctccaagatgcaccaaacattgtttctattgca

SEQ ID NO: 339146 - DNA, 33 bp, Homo sapien
ctccaagatgcaccaagcattgtttctattgca

SEQ ID NO: 339147 - DNA, 33 bp, Homo sapien
ctctatagacctgctcagaaactgactcaaaat

SEQ ID NO: 339148 - DNA, 33 bp, Homo sapien
ctctatagacctgctccgaaactgactcaaaat

SEQ ID NO: 339149 - DNA, 33 bp, Homo sapien
aggccatttgctggtacatatcattattcccta

SEQ ID NO: 339150 - DNA, 33 bp, Homo sapien
aggccatttgctggtagatatcattattcccta

SEQ ID NO: 339151 - DNA, 33 bp, Homo sapien
gaggttccatagcccacgtggtaagagcaatcc

SEQ ID NO: 339152 - DNA, 33 bp, Homo sapien
gaggttccatagcccatgtggtaagagcaatcc

SEQ ID NO: 339153 - DNA, 33 bp, Homo sapien
tgaagatggaaaactacggaagcattagaaaga

SEQ ID NO: 339154 - DNA, 33 bp, Homo sapien
tgaagatggaaaactatggaagcattagaaaga

SEQ ID NO: 339155 - DNA, 33 bp, Homo sapien
atctgcgtgccctttacgtttctgacagcagga

SEQ ID NO: 339156 - DNA, 33 bp, Homo sapien
atctgcgtgccctttatgtttctgacagcagga

SEQ ID NO: 339157 - DNA, 33 bp, Homo sapien
acccttatctagtccacggtagcatagtcccaa

SEQ ID NO: 339158 - DNA, 33 bp, Homo sapien
acccttatctagtccatggtagcatagtcccaa

SEQ ID NO: 339159 - DNA, 33 bp, Homo sapien
ttcttagagagaaaaactagccctcaataaagt

SEQ ID NO: 339160 - DNA, 33 bp, Homo sapien
ttcttagagagaaaaattagccctcaataaagt

SEQ ID NO: 339161 - DNA, 33 bp, Homo sapien
gtttgggaggagcaaaaatgactacatcctaga

SEQ ID NO: 339162 - DNA, 33 bp, Homo sapien
gtttgggaggagcaaacatgactacatcctaga

SEQ ID NO: 339163 - DNA, 33 bp, Homo sapien
ataaatgcctatcaataacagacagggtaaaga

SEQ ID NO: 339164 - DNA, 33 bp, Homo sapien
ataaatgcctatcaatgacagacagggtaaaga

SEQ ID NO: 339165 - DNA, 33 bp, Homo sapien
ttgattttccttcataacatctgtaatcaaatc

SEQ ID NO: 339166 - DNA, 33 bp, Homo sapien
ttgattttccttcatagcatctgtaatcaaatc

SEQ ID NO: 339167 - DNA, 33 bp, Homo sapien
ggcatggccaggcctacgtgatcaggaaaagcc

SEQ ID NO: 339168 - DNA, 33 bp, Homo sapien
ggcatggccaggcctatgtgatcaggaaaagcc

SEQ ID NO: 339169 - DNA, 33 bp, Homo sapien
tgaaggagaatgagtacgagttaactagctaag

SEQ ID NO: 339170 - DNA, 33 bp, Homo sapien
tgaaggagaatgagtaggagttaactagctaag

SEQ ID NO: 339171 - DNA, 33 bp, Homo sapien
ggttaggaatattttgaaaagtaaacggactct

SEQ ID NO: 339172 - DNA, 33 bp, Homo sapien
ggttaggaatattttgcaaagtaaacggactct

SEQ ID NO: 339173 - DNA, 33 bp, Homo sapien
acaaggacaatacaaacgtaatagagaattggg

SEQ ID NO: 339174 - DNA, 33 bp, Homo sapien
acaaggacaatacaaatgtaatagagaattggg

SEQ ID NO: 339175 - DNA, 33 bp, Homo sapien
cagcgaacttgaacaaaggcagtagagtagtaa

SEQ ID NO: 339176 - DNA, 33 bp, Homo sapien
cagcgaacttgaacaagggcagtagagtagtaa

SEQ ID NO: 339177 - DNA, 33 bp, Homo sapien
caaagcatggtaggaccgatgttgaaactaact

SEQ ID NO: 339178 - DNA, 33 bp, Homo sapien
caaagcatggtaggactgatgttgaaactaact

SEQ ID NO: 339179 - DNA, 33 bp, Homo sapien
ggtgttagagccttaaaggaatgcaaaatactt

SEQ ID NO: 339180 - DNA, 33 bp, Homo sapien
ggtgttagagccttaatggaatgcaaaatactt

SEQ ID NO: 339181 - DNA, 33 bp, Homo sapien
caaatggtttttataactgacaaacatttacat

SEQ ID NO: 339182 - DNA, 33 bp, Homo sapien
caaatggtttttataattgacaaacatttacat

SEQ ID NO: 339183 - DNA, 33 bp, Homo sapien
gtctggttcatagtcccgagggtctttatggct

SEQ ID NO: 339184 - DNA, 33 bp, Homo sapien
gtctggttcatagtcctgagggtctttatggct

SEQ ID NO: 339185 - DNA, 33 bp, Homo sapien
agtacaaaattctggccctttacctaaatcagg

SEQ ID NO: 339186 - DNA, 33 bp, Homo sapien
agtacaaaattctggctctttacctaaatcagg

SEQ ID NO: 339187 - DNA, 33 bp, Homo sapien
ctggggaggaaaagtagcatttgtggctttctt

SEQ ID NO: 339188 - DNA, 33 bp, Homo sapien
ctggggaggaaaagtatcatttgtggctttctt

SEQ ID NO: 339189 - DNA, 33 bp, Homo sapien
accttagaagtagctgaatcacaagaatatttg

SEQ ID NO: 339190 - DNA, 33 bp, Homo sapien
accttagaagtagctggatcacaagaatatttg

SEQ ID NO: 339191 - DNA, 33 bp, Homo sapien
gtgtttggcataaaggaaacagaaataaatgat

SEQ ID NO: 339192 - DNA, 33 bp, Homo sapien
gtgtttggcataaaggtaacagaaataaatgat

SEQ ID NO: 339193 - DNA, 33 bp, Homo sapien
gtcttcaaggaacttacgatttcaaggttgaat

SEQ ID NO: 339194 - DNA, 33 bp, Homo sapien
gtcttcaaggaacttatgatttcaaggttgaat

SEQ ID NO: 339195 - DNA, 33 bp, Homo sapien
aaatctgtttatcttaccaaagccaaaaataag

SEQ ID NO: 339196 - DNA, 33 bp, Homo sapien
aaatctgtttatcttatcaaagccaaaaataag

SEQ ID NO: 339197 - DNA, 33 bp, Homo sapien
gacaaaccatttttcacattggctgtactattt

SEQ ID NO: 339198 - DNA, 33 bp, Homo sapien
gacaaaccatttttcagattggctgtactattt

SEQ ID NO: 339199 - DNA, 33 bp, Homo sapien
gaacacctagcatacaatgtaataagagacatc

SEQ ID NO: 339200 - DNA, 33 bp, Homo sapien
gaacacctagcatacagtgtaataagagacatc

SEQ ID NO: 339201 - DNA, 33 bp, Homo sapien
aagtcatagattgtgaagaaattaggaacccaa

SEQ ID NO: 339202 - DNA, 33 bp, Homo sapien
aagtcatagattgtgacgaaattaggaacccaa

SEQ ID NO: 339203 - DNA, 33 bp, Homo sapien
aactacacgtttacacagctgcttttcaaggac

SEQ ID NO: 339204 - DNA, 33 bp, Homo sapien
aactacacgtttacacggctgcttttcaaggac

SEQ ID NO: 339205 - DNA, 33 bp, Homo sapien
gcttccaccagaggtacgatttcctgaagtcca

SEQ ID NO: 339206 - DNA, 33 bp, Homo sapien
gcttccaccagaggtatgatttcctgaagtcca

SEQ ID NO: 339207 - DNA, 33 bp, Homo sapien
atagcacaaatgctaaaatgttcactggtaata

SEQ ID NO: 339208 - DNA, 33 bp, Homo sapien
atagcacaaatgctaacatgttcactggtaata

SEQ ID NO: 339209 - DNA, 33 bp, Homo sapien
tgcttcccttaaccaacagcttgaatgtgaaaa

SEQ ID NO: 339210 - DNA, 33 bp, Homo sapien
tgcttcccttaaccaatagcttgaatgtgaaaa

SEQ ID NO: 339211 - DNA, 33 bp, Homo sapien
ccttcctcacaaataacgtgaagatcttgccca

SEQ ID NO: 339212 - DNA, 33 bp, Homo sapien
ccttcctcacaaataaggtgaagatcttgccca

SEQ ID NO: 339213 - DNA, 33 bp, Homo sapien
tgccacaaacagtgtacaaaatcaaagcaaatt

SEQ ID NO: 339214 - DNA, 33 bp, Homo sapien
tgccacaaacagtgtataaaatcaaagcaaatt

SEQ ID NO: 339215 - DNA, 33 bp, Homo sapien
tggatctgaggtcatccagtttacttaccctct

SEQ ID NO: 339216 - DNA, 33 bp, Homo sapien
tggatctgaggtcatctagtttacttaccctct

SEQ ID NO: 339217 - DNA, 33 bp, Homo sapien
tacagcctatattctaatacttgtcagacttct

SEQ ID NO: 339218 - DNA, 33 bp, Homo sapien
tacagcctatattctagtacttgtcagacttct

SEQ ID NO: 339219 - DNA, 33 bp, Homo sapien
gtctgacggtcaaaaaagttccagtgattcagg

SEQ ID NO: 339220 - DNA, 33 bp, Homo sapien
gtctgacggtcaaaaatgttccagtgattcagg

SEQ ID NO: 339221 - DNA, 33 bp, Homo sapien
aaataccagaaaaacaagaaccgctaatagaca

SEQ ID NO: 339222 - DNA, 33 bp, Homo sapien
aaataccagaaaaacaggaaccgctaatagaca

SEQ ID NO: 339223 - DNA, 33 bp, Homo sapien
ctgctaattgcagagccctttggccctgaacaa

SEQ ID NO: 339224 - DNA, 33 bp, Homo sapien
ctgctaattgcagagcgctttggccctgaacaa

SEQ ID NO: 339225 - DNA, 33 bp, Homo sapien
cattgaaaaggacacccgagacagacaactgaa

SEQ ID NO: 339226 - DNA, 33 bp, Homo sapien
cattgaaaaggacacctgagacagacaactgaa

SEQ ID NO: 339227 - DNA, 33 bp, Homo sapien
aaagttgagaagcatcaagtaccgatattcagt

SEQ ID NO: 339228 - DNA, 33 bp, Homo sapien
aaagttgagaagcatcgagtaccgatattcagt

SEQ ID NO: 339229 - DNA, 33 bp, Homo sapien
gggccttagtaaataaacactgcagtattttgt

SEQ ID NO: 339230 - DNA, 33 bp, Homo sapien
gggccttagtaaataaccactgcagtattttgt

SEQ ID NO: 339231 - DNA, 33 bp, Homo sapien
ctctttcaggcaattacatgaactagaggcaca

SEQ ID NO: 339232 - DNA, 33 bp, Homo sapien
ctctttcaggcaattatatgaactagaggcaca

SEQ ID NO: 339233 - DNA, 33 bp, Homo sapien
cgaagcaaatgtttgacgcactggttataaggt

SEQ ID NO: 339234 - DNA, 33 bp, Homo sapien
cgaagcaaatgtttgatgcactggttataaggt

SEQ ID NO: 339235 - DNA, 33 bp, Homo sapien
tgggttacagaaatttcaaagtcagaagaggca

SEQ ID NO: 339236 - DNA, 33 bp, Homo sapien
tgggttacagaaatttgaaagtcagaagaggca

SEQ ID NO: 339237 - DNA, 33 bp, Homo sapien
ctctgatattcctctacgcagcttttagtgctc

SEQ ID NO: 339238 - DNA, 33 bp, Homo sapien
ctctgatattcctctatgcagcttttagtgctc

SEQ ID NO: 339239 - DNA, 33 bp, Homo sapien
gtcctcataaactcaaaattagatgtgggcgat

SEQ ID NO: 339240 - DNA, 33 bp, Homo sapien
gtcctcataaactcaacattagatgtgggcgat

SEQ ID NO: 339241 - DNA, 33 bp, Homo sapien
taaatccacataaagcaccttaacttcagcttt

SEQ ID NO: 339242 - DNA, 33 bp, Homo sapien
taaatccacataaagcgccttaacttcagcttt

SEQ ID NO: 339243 - DNA, 33 bp, Homo sapien
tctggctagagaaaaagtaacggtcttccagcc

SEQ ID NO: 339244 - DNA, 33 bp, Homo sapien
tctggctagagaaaaattaacggtcttccagcc

SEQ ID NO: 339245 - DNA, 33 bp, Homo sapien
tctagccagacttacaccattgaaggtctctct

SEQ ID NO: 339246 - DNA, 33 bp, Homo sapien
tctagccagacttacagcattgaaggtctctct

SEQ ID NO: 339247 - DNA, 33 bp, Homo sapien
gctcactaaaagtcaaaatcccgagtctggaag

SEQ ID NO: 339248 - DNA, 33 bp, Homo sapien
gctcactaaaagtcaagatcccgagtctggaag

SEQ ID NO: 339249 - DNA, 33 bp, Homo sapien
tagtgagcaagaggacaataagattccattgat

SEQ ID NO: 339250 - DNA, 33 bp, Homo sapien
tagtgagcaagaggacgataagattccattgat

SEQ ID NO: 339251 - DNA, 33 bp, Homo sapien
agaaggctgatatcaactgatgcaatctaaaaa

SEQ ID NO: 339252 - DNA, 33 bp, Homo sapien
agaaggctgatatcaagtgatgcaatctaaaaa

SEQ ID NO: 339253 - DNA, 33 bp, Homo sapien
aggcttggcccatacaaagaactgtctgaaaaa

SEQ ID NO: 339254 - DNA, 33 bp, Homo sapien
aggcttggcccatacacagaactgtctgaaaaa

SEQ ID NO: 339255 - DNA, 33 bp, Homo sapien
acagactaacagaaaaagtttttacaccacata

SEQ ID NO: 339256 - DNA, 33 bp, Homo sapien
acagactaacagaaaatgtttttacaccacata

SEQ ID NO: 339257 - DNA, 33 bp, Homo sapien
ctatcatctatttttacactagggtctggatca

SEQ ID NO: 339258 - DNA, 33 bp, Homo sapien
ctatcatctatttttatactagggtctggatca

SEQ ID NO: 339259 - DNA, 33 bp, Homo sapien
tcatagatcctgctaaaaagtctgggtcgtatc

SEQ ID NO: 339260 - DNA, 33 bp, Homo sapien
tcatagatcctgctaagaagtctgggtcgtatc

SEQ ID NO: 339261 - DNA, 33 bp, Homo sapien
aatgcatattgatcacagtagatggcaagttga

SEQ ID NO: 339262 - DNA, 33 bp, Homo sapien
aatgcatattgatcacggtagatggcaagttga

SEQ ID NO: 339263 - DNA, 33 bp, Homo sapien
tatgctcagttattggaaaaagagtctgataat

SEQ ID NO: 339264 - DNA, 33 bp, Homo sapien
tatgctcagttattggcaaaagagtctgataat

SEQ ID NO: 339265 - DNA, 33 bp, Homo sapien
ttaagtcttttacgtccattgccccctttaatc

SEQ ID NO: 339266 - DNA, 33 bp, Homo sapien
ttaagtcttttacgtctattgccccctttaatc

SEQ ID NO: 339267 - DNA, 33 bp, Homo sapien
cttaatgcttcctaaccctgaaaacagcttggc

SEQ ID NO: 339268 - DNA, 33 bp, Homo sapien
cttaatgcttcctaactctgaaaacagcttggc

SEQ ID NO: 339269 - DNA, 33 bp, Homo sapien
taagtgttctggcacacatattcctaagaaccc

SEQ ID NO: 339270 - DNA, 33 bp, Homo sapien
taagtgttctggcacagatattcctaagaaccc

SEQ ID NO: 339271 - DNA, 33 bp, Homo sapien
gtcccatcctacttcaaataaaaagtcaaaacc

SEQ ID NO: 339272 - DNA, 33 bp, Homo sapien
gtcccatcctacttcacataaaaagtcaaaacc

SEQ ID NO: 339273 - DNA, 33 bp, Homo sapien
aagcctctgtcatttcacataccctttatttac

SEQ ID NO: 339274 - DNA, 33 bp, Homo sapien
aagcctctgtcatttctcataccctttatttac

SEQ ID NO: 339275 - DNA, 33 bp, Homo sapien
caatgttcccacaggacaatgcatgctcaattt

SEQ ID NO: 339276 - DNA, 33 bp, Homo sapien
caatgttcccacaggagaatgcatgctcaattt

SEQ ID NO: 339277 - DNA, 33 bp, Homo sapien
aaacttctaagaacaaagaaagaaatgccaaaa

SEQ ID NO: 339278 - DNA, 33 bp, Homo sapien
aaacttctaagaacaaggaaagaaatgccaaaa

SEQ ID NO: 339279 - DNA, 33 bp, Homo sapien
tgcacggaccatctggaaccctgataccatcag

SEQ ID NO: 339280 - DNA, 33 bp, Homo sapien
tgcacggaccatctgggaccctgataccatcag

SEQ ID NO: 339281 - DNA, 33 bp, Homo sapien
gttctctaggagttcaaagcaggttttataaat

SEQ ID NO: 339282 - DNA, 33 bp, Homo sapien
gttctctaggagttcatagcaggttttataaat

SEQ ID NO: 339283 - DNA, 33 bp, Homo sapien
ctttgccttcttagaacgcttggatcctgactt

SEQ ID NO: 339284 - DNA, 33 bp, Homo sapien
ctttgccttcttagaatgcttggatcctgactt

SEQ ID NO: 339285 - DNA, 33 bp, Homo sapien
tagagtccctattcataaagtgagtgcagtcta

SEQ ID NO: 339286 - DNA, 33 bp, Homo sapien
tagagtccctattcatcaagtgagtgcagtcta

SEQ ID NO: 339287 - DNA, 33 bp, Homo sapien
ctgcaagggtttgggaatatcacaaggctttgt

SEQ ID NO: 339288 - DNA, 33 bp, Homo sapien
ctgcaagggtttgggactatcacaaggctttgt

SEQ ID NO: 339289 - DNA, 33 bp, Homo sapien
ggctaaaacttccagaatatgatctagcacctt

SEQ ID NO: 339290 - DNA, 33 bp, Homo sapien
ggctaaaacttccagagtatgatctagcacctt

SEQ ID NO: 339291 - DNA, 33 bp, Homo sapien
aaaagtccaggagtcacagaaggaaattaattt

SEQ ID NO: 339292 - DNA, 33 bp, Homo sapien
aaaagtccaggagtcagagaaggaaattaattt

SEQ ID NO: 339293 - DNA, 33 bp, Homo sapien
cttgcagcaggcttagaaaggaagataggcact

SEQ ID NO: 339294 - DNA, 33 bp, Homo sapien
cttgcagcaggcttaggaaggaagataggcact

SEQ ID NO: 339295 - DNA, 33 bp, Homo sapien
acatttccacacctcaacaattttgtcttccac

SEQ ID NO: 339296 - DNA, 33 bp, Homo sapien
acatttccacacctcatcaattttgtcttccac

SEQ ID NO: 339297 - DNA, 33 bp, Homo sapien
agtatatgaagttatcaacatttattgcacaat

SEQ ID NO: 339298 - DNA, 33 bp, Homo sapien
agtatatgaagttatcgacatttattgcacaat

SEQ ID NO: 339299 - DNA, 33 bp, Homo sapien
tatgtagcaagagaacaattgaattggaacaat

SEQ ID NO: 339300 - DNA, 33 bp, Homo sapien
tatgtagcaagagaactattgaattggaacaat

SEQ ID NO: 339301 - DNA, 33 bp, Homo sapien
atcaatccaaaccttcacattatgtctaggggc

SEQ ID NO: 339302 - DNA, 33 bp, Homo sapien
atcaatccaaaccttcgcattatgtctaggggc

SEQ ID NO: 339303 - DNA, 33 bp, Homo sapien
atcagaaccacctgaaaagattttgttgataac

SEQ ID NO: 339304 - DNA, 33 bp, Homo sapien
atcagaaccacctgaagagattttgttgataac

SEQ ID NO: 339305 - DNA, 33 bp, Homo sapien
gccagggagggccttgcaagctatgataaagac

SEQ ID NO: 339306 - DNA, 33 bp, Homo sapien
gccagggagggccttgtaagctatgataaagac

SEQ ID NO: 339307 - DNA, 33 bp, Homo sapien
gactacagtggaaaaacctgaaagtatgacctc

SEQ ID NO: 339308 - DNA, 33 bp, Homo sapien
gactacagtggaaaaatctgaaagtatgacctc

SEQ ID NO: 339309 - DNA, 33 bp, Homo sapien
cttgaccttgcactaaagagttactgcacaagg

SEQ ID NO: 339310 - DNA, 33 bp, Homo sapien
cttgaccttgcactaaggagttactgcacaagg

SEQ ID NO: 339311 - DNA, 33 bp, Homo sapien
tacggcatattgtcccagacctctaagcccaat

SEQ ID NO: 339312 - DNA, 33 bp, Homo sapien
tacggcatattgtcccggacctctaagcccaat

SEQ ID NO: 339313 - DNA, 33 bp, Homo sapien
ggatatagctcaatgagtatgcagccttaaata

SEQ ID NO: 339314 - DNA, 33 bp, Homo sapien
ggatatagctcaatgattatgcagccttaaata

SEQ ID NO: 339315 - DNA, 33 bp, Homo sapien
tataaacttcagatacacttcataactccttca

SEQ ID NO: 339316 - DNA, 33 bp, Homo sapien
tataaacttcagatacccttcataactccttca

SEQ ID NO: 339317 - DNA, 33 bp, Homo sapien
ttgaggggtgacctgaaacaggattaatggcat

SEQ ID NO: 339318 - DNA, 33 bp, Homo sapien
ttgaggggtgacctgagacaggattaatggcat

SEQ ID NO: 339319 - DNA, 33 bp, Homo sapien
atgatagacacaaagacatatttcatgctgttc

SEQ ID NO: 339320 - DNA, 33 bp, Homo sapien
atgatagacacaaagatatatttcatgctgttc

SEQ ID NO: 339321 - DNA, 33 bp, Homo sapien
cttggctctttaagtcacccagtaggaaatcca

SEQ ID NO: 339322 - DNA, 33 bp, Homo sapien
cttggctctttaagtcgcccagtaggaaatcca

SEQ ID NO: 339323 - DNA, 33 bp, Homo sapien
tagcctaaaaatatgaggagacacttaggatta

SEQ ID NO: 339324 - DNA, 33 bp, Homo sapien
tagcctaaaaatatgatgagacacttaggatta

SEQ ID NO: 339325 - DNA, 33 bp, Homo sapien
cagaaactttagaggacgtactagtctggctga

SEQ ID NO: 339326 - DNA, 33 bp, Homo sapien
cagaaactttagaggatgtactagtctggctga

SEQ ID NO: 339327 - DNA, 33 bp, Homo sapien
tttattgacaaaaataactgtgaaagtataagt

SEQ ID NO: 339328 - DNA, 33 bp, Homo sapien
tttattgacaaaaatatctgtgaaagtataagt

SEQ ID NO: 339329 - DNA, 33 bp, Homo sapien
tctagctagtacactccaaatgcactccaaaat

SEQ ID NO: 339330 - DNA, 33 bp, Homo sapien
tctagctagtacactctaaatgcactccaaaat

SEQ ID NO: 339331 - DNA, 33 bp, Homo sapien
gggatgcttcagttaaaccacattgttctacca

SEQ ID NO: 339332 - DNA, 33 bp, Homo sapien
gggatgcttcagttaatccacattgttctacca

SEQ ID NO: 339333 - DNA, 33 bp, Homo sapien
tagactgaaggataacaaacaatagctacacta

SEQ ID NO: 339334 - DNA, 33 bp, Homo sapien
tagactgaaggataacgaacaatagctacacta

SEQ ID NO: 339335 - DNA, 33 bp, Homo sapien
aaggagctagagtggacgaacaacgatgtactg

SEQ ID NO: 339336 - DNA, 33 bp, Homo sapien
aaggagctagagtggatgaacaacgatgtactg

SEQ ID NO: 339337 - DNA, 33 bp, Homo sapien
aaaagagaaagaggtcaccatgctagtaaaact

SEQ ID NO: 339338 - DNA, 33 bp, Homo sapien
aaaagagaaagaggtcgccatgctagtaaaact

SEQ ID NO: 339339 - DNA, 33 bp, Homo sapien
ccagcctccagacttacgaggaagtaaatttct

SEQ ID NO: 339340 - DNA, 33 bp, Homo sapien
ccagcctccagacttatgaggaagtaaatttct

SEQ ID NO: 339341 - DNA, 33 bp, Homo sapien
gattgaggaacacaaaatgctgcttagtcagat

SEQ ID NO: 339342 - DNA, 33 bp, Homo sapien
gattgaggaacacaaagtgctgcttagtcagat

SEQ ID NO: 339343 - DNA, 33 bp, Homo sapien
gtaatcatttccaacactgagaagtattttctt

SEQ ID NO: 339344 - DNA, 33 bp, Homo sapien
gtaatcatttccaacattgagaagtattttctt

SEQ ID NO: 339345 - DNA, 33 bp, Homo sapien
cagccatcatttcctcaagttgttgttgttctg

SEQ ID NO: 339346 - DNA, 33 bp, Homo sapien
cagccatcatttcctcgagttgttgttgttctg

SEQ ID NO: 339347 - DNA, 33 bp, Homo sapien
tctacacaaatacttacagcagaatattcacag

SEQ ID NO: 339348 - DNA, 33 bp, Homo sapien
tctacacaaatacttagagcagaatattcacag

SEQ ID NO: 339349 - DNA, 33 bp, Homo sapien
gcgattgtcttaaggaagaaaaattcacaatgt

SEQ ID NO: 339350 - DNA, 33 bp, Homo sapien
gcgattgtcttaaggatgaaaaattcacaatgt

SEQ ID NO: 339351 - DNA, 33 bp, Homo sapien
gtcttattagagcttacgatattgagatgaaga

SEQ ID NO: 339352 - DNA, 33 bp, Homo sapien
gtcttattagagcttatgatattgagatgaaga

SEQ ID NO: 339353 - DNA, 33 bp, Homo sapien
tttcttcacttctttcccttattctctctctta

SEQ ID NO: 339354 - DNA, 33 bp, Homo sapien
tttcttcacttctttctcttattctctctctta

SEQ ID NO: 339355 - DNA, 33 bp, Homo sapien
ataacacacaagtccaagttcctgaggaaaaaa

SEQ ID NO: 339356 - DNA, 33 bp, Homo sapien
ataacacacaagtccaggttcctgaggaaaaaa

SEQ ID NO: 339357 - DNA, 33 bp, Homo sapien
catcagaaaatctaaacaagctcagaatccaaa

SEQ ID NO: 339358 - DNA, 33 bp, Homo sapien
catcagaaaatctaaataagctcagaatccaaa

SEQ ID NO: 339359 - DNA, 33 bp, Homo sapien
ggagaaatcagatgaaataagtcataggtttca

SEQ ID NO: 339360 - DNA, 33 bp, Homo sapien
ggagaaatcagatgaagtaagtcataggtttca

SEQ ID NO: 339361 - DNA, 33 bp, Homo sapien
accctgttttttaccccgagatgctgacctata

SEQ ID NO: 339362 - DNA, 33 bp, Homo sapien
accctgttttttaccctgagatgctgacctata

SEQ ID NO: 339363 - DNA, 33 bp, Homo sapien
aacccaatctgagataacatggaaccattaaaa

SEQ ID NO: 339364 - DNA, 33 bp, Homo sapien
aacccaatctgagataccatggaaccattaaaa

SEQ ID NO: 339365 - DNA, 33 bp, Homo sapien
tggtagatgatgagggaactcctaggtctttac

SEQ ID NO: 339366 - DNA, 33 bp, Homo sapien
tggtagatgatgaggggactcctaggtctttac

SEQ ID NO: 339367 - DNA, 33 bp, Homo sapien
ctagaaaagaagagaaagagactgatgcatgag

SEQ ID NO: 339368 - DNA, 33 bp, Homo sapien
ctagaaaagaagagaaggagactgatgcatgag

SEQ ID NO: 339369 - DNA, 33 bp, Homo sapien
gggaaagtcatggaaccgaggcatttttcctgg

SEQ ID NO: 339370 - DNA, 33 bp, Homo sapien
gggaaagtcatggaactgaggcatttttcctgg

SEQ ID NO: 339371 - DNA, 33 bp, Homo sapien
gaaggggatacacccagagtctcttggtgccac

SEQ ID NO: 339372 - DNA, 33 bp, Homo sapien
gaaggggatacacccatagtctcttggtgccac

SEQ ID NO: 339373 - DNA, 33 bp, Homo sapien
taaaattacctgttacaccagcctcagctagtg

SEQ ID NO: 339374 - DNA, 33 bp, Homo sapien
taaaattacctgttaccccagcctcagctagtg

SEQ ID NO: 339375 - DNA, 33 bp, Homo sapien
tgttcttctaagctgacgatgccttcccatcat

SEQ ID NO: 339376 - DNA, 33 bp, Homo sapien
tgttcttctaagctgatgatgccttcccatcat

SEQ ID NO: 339377 - DNA, 33 bp, Homo sapien
aggtggagttttgacactgaaatcctattatat

SEQ ID NO: 339378 - DNA, 33 bp, Homo sapien
aggtggagttttgacattgaaatcctattatat

SEQ ID NO: 339379 - DNA, 33 bp, Homo sapien
gtgattggcaaactgaataagtgaaagctgata

SEQ ID NO: 339380 - DNA, 33 bp, Homo sapien
gtgattggcaaactgattaagtgaaagctgata

SEQ ID NO: 339381 - DNA, 33 bp, Homo sapien
cttgtgacatggcagacaataagagggacccta

SEQ ID NO: 339382 - DNA, 33 bp, Homo sapien
cttgtgacatggcagagaataagagggacccta

SEQ ID NO: 339383 - DNA, 33 bp, Homo sapien
gctttattcttgttcaaggtggtccgtaaaata

SEQ ID NO: 339384 - DNA, 33 bp, Homo sapien
gctttattcttgttcagggtggtccgtaaaata

SEQ ID NO: 339385 - DNA, 33 bp, Homo sapien
atagcataaattctaacatggtgctatgccaga

SEQ ID NO: 339386 - DNA, 33 bp, Homo sapien
atagcataaattctaatatggtgctatgccaga

SEQ ID NO: 339387 - DNA, 33 bp, Homo sapien
tcctacagattcaccaaataaacatctatacat

SEQ ID NO: 339388 - DNA, 33 bp, Homo sapien
tcctacagattcaccagataaacatctatacat

SEQ ID NO: 339389 - DNA, 33 bp, Homo sapien
aaaagcagtcagtacaaaacattcctgagagtt

SEQ ID NO: 339390 - DNA, 33 bp, Homo sapien
aaaagcagtcagtacagaacattcctgagagtt

SEQ ID NO: 339391 - DNA, 33 bp, Homo sapien
aatacatcctatctgacaaactaattacagtgt

SEQ ID NO: 339392 - DNA, 33 bp, Homo sapien
aatacatcctatctgataaactaattacagtgt

SEQ ID NO: 339393 - DNA, 33 bp, Homo sapien
tggtagaagaatattacgggcttttggaggaag

SEQ ID NO: 339394 - DNA, 33 bp, Homo sapien
tggtagaagaatattatgggcttttggaggaag

SEQ ID NO: 339395 - DNA, 33 bp, Homo sapien
cagcaagttaggaacaaaattttctcctcagcc

SEQ ID NO: 339396 - DNA, 33 bp, Homo sapien
cagcaagttaggaacacaattttctcctcagcc

SEQ ID NO: 339397 - DNA, 33 bp, Homo sapien
tttcaccataaacagggacaagcttctctccat

SEQ ID NO: 339398 - DNA, 33 bp, Homo sapien
tttcaccataaacaggtacaagcttctctccat

SEQ ID NO: 339399 - DNA, 33 bp, Homo sapien
gcttggactctgaagccaagtcattatgtcatt

SEQ ID NO: 339400 - DNA, 33 bp, Homo sapien
gcttggactctgaagctaagtcattatgtcatt

SEQ ID NO: 339401 - DNA, 33 bp, Homo sapien
ctaaaataaaatggcaagtttgattactccctt

SEQ ID NO: 339402 - DNA, 33 bp, Homo sapien
ctaaaataaaatggcatgtttgattactccctt

SEQ ID NO: 339403 - DNA, 33 bp, Homo sapien
tgacctcagataaataaagcatgtagccaaata

SEQ ID NO: 339404 - DNA, 33 bp, Homo sapien
tgacctcagataaatatagcatgtagccaaata

SEQ ID NO: 339405 - DNA, 33 bp, Homo sapien
tagatcttatgcagttcaaccattcctctgttg

SEQ ID NO: 339406 - DNA, 33 bp, Homo sapien
tagatcttatgcagtttaaccattcctctgttg

SEQ ID NO: 339407 - DNA, 33 bp, Homo sapien
ctcatatactcatttacaattgccttctatttg

SEQ ID NO: 339408 - DNA, 33 bp, Homo sapien
ctcatatactcatttataattgccttctatttg

SEQ ID NO: 339409 - DNA, 33 bp, Homo sapien
ataacttaattgtgaacagtttgagcatatagg

SEQ ID NO: 339410 - DNA, 33 bp, Homo sapien
ataacttaattgtgaatagtttgagcatatagg

SEQ ID NO: 339411 - DNA, 33 bp, Homo sapien
tatttgatcaagtttacggggtatcaaacagaa

SEQ ID NO: 339412 - DNA, 33 bp, Homo sapien
tatttgatcaagtttatggggtatcaaacagaa

SEQ ID NO: 339413 - DNA, 33 bp, Homo sapien
atctcctcgcatctaccaagagggttccagtgg

SEQ ID NO: 339414 - DNA, 33 bp, Homo sapien
atctcctcgcatctactaagagggttccagtgg

SEQ ID NO: 339415 - DNA, 33 bp, Homo sapien
tttcttttaatctttgcaatgttgcattctgaa

SEQ ID NO: 339416 - DNA, 33 bp, Homo sapien
tttcttttaatctttggaatgttgcattctgaa

SEQ ID NO: 339417 - DNA, 33 bp, Homo sapien
aatggaattagataaaataaagcctgtgttgtt

SEQ ID NO: 339418 - DNA, 33 bp, Homo sapien
aatggaattagataaagtaaagcctgtgttgtt

SEQ ID NO: 339419 - DNA, 33 bp, Homo sapien
atagctaaggcaacccaaaaagaacaaagctgg

SEQ ID NO: 339420 - DNA, 33 bp, Homo sapien
atagctaaggcaacccgaaaagaacaaagctgg

SEQ ID NO: 339421 - DNA, 33 bp, Homo sapien
actctgagtcattaaacaaattccagaatcttt

SEQ ID NO: 339422 - DNA, 33 bp, Homo sapien
actctgagtcattaaataaattccagaatcttt

SEQ ID NO: 339423 - DNA, 33 bp, Homo sapien
ccagaatctttctgaaagtgtttactgcattgt

SEQ ID NO: 339424 - DNA, 33 bp, Homo sapien
ccagaatctttctgaatgtgtttactgcattgt

SEQ ID NO: 339425 - DNA, 33 bp, Homo sapien
atcagaattcttaagacggctctaacaatgcag

SEQ ID NO: 339426 - DNA, 33 bp, Homo sapien
atcagaattcttaagatggctctaacaatgcag

SEQ ID NO: 339427 - DNA, 33 bp, Homo sapien
cttatttggtgacaatcagagaagaccatttag

SEQ ID NO: 339428 - DNA, 33 bp, Homo sapien
cttatttggtgacaatgagagaagaccatttag

SEQ ID NO: 339429 - DNA, 33 bp, Homo sapien
gagtaaacagtaaacaacatcatcagtcatcag

SEQ ID NO: 339430 - DNA, 33 bp, Homo sapien
gagtaaacagtaaacatcatcatcagtcatcag

SEQ ID NO: 339431 - DNA, 33 bp, Homo sapien
agtctgattaactacactcattttctcgaaagg

SEQ ID NO: 339432 - DNA, 33 bp, Homo sapien
agtctgattaactacattcattttctcgaaagg

SEQ ID NO: 339433 - DNA, 33 bp, Homo sapien
cactttttctcttcagaaactggaatcttgcct

SEQ ID NO: 339434 - DNA, 33 bp, Homo sapien
cactttttctcttcaggaactggaatcttgcct

SEQ ID NO: 339435 - DNA, 33 bp, Homo sapien
ttatttatttcctacaaaactgctaagagcttt

SEQ ID NO: 339436 - DNA, 33 bp, Homo sapien
ttatttatttcctacagaactgctaagagcttt

SEQ ID NO: 339437 - DNA, 33 bp, Homo sapien
tcatacaacttgtctccgaaaagctttcttcag

SEQ ID NO: 339438 - DNA, 33 bp, Homo sapien
tcatacaacttgtctctgaaaagctttcttcag

SEQ ID NO: 339439 - DNA, 33 bp, Homo sapien
gtgcatctgcatcttacagaaagtgtctgaact

SEQ ID NO: 339440 - DNA, 33 bp, Homo sapien
gtgcatctgcatcttatagaaagtgtctgaact

SEQ ID NO: 339441 - DNA, 33 bp, Homo sapien
caaacaagaaaaaatcaaaatggcttactatgc

SEQ ID NO: 339442 - DNA, 33 bp, Homo sapien
caaacaagaaaaaatccaaatggcttactatgc

SEQ ID NO: 339443 - DNA, 33 bp, Homo sapien
tgaggactcttctcgacacatccagatgaagca

SEQ ID NO: 339444 - DNA, 33 bp, Homo sapien
tgaggactcttctcgatacatccagatgaagca

SEQ ID NO: 339445 - DNA, 33 bp, Homo sapien
acgcaaaaacagctaacggccaggtgctgcatt

SEQ ID NO: 339446 - DNA, 33 bp, Homo sapien
acgcaaaaacagctaatggccaggtgctgcatt

SEQ ID NO: 339447 - DNA, 33 bp, Homo sapien
taggcaagttatgttacgcgttggagtacctga

SEQ ID NO: 339448 - DNA, 33 bp, Homo sapien
taggcaagttatgttatgcgttggagtacctga

SEQ ID NO: 339449 - DNA, 33 bp, Homo sapien
actagagatgaagctcaactagatatgattcct

SEQ ID NO: 339450 - DNA, 33 bp, Homo sapien
actagagatgaagctcgactagatatgattcct

SEQ ID NO: 339451 - DNA, 33 bp, Homo sapien
aaactttaaaactttcacactgtggctatgtca

SEQ ID NO: 339452 - DNA, 33 bp, Homo sapien
aaactttaaaactttcgcactgtggctatgtca

SEQ ID NO: 339453 - DNA, 33 bp, Homo sapien
gctggccttgggatacagagattattccagatt

SEQ ID NO: 339454 - DNA, 33 bp, Homo sapien
gctggccttgggatacggagattattccagatt

SEQ ID NO: 339455 - DNA, 33 bp, Homo sapien
tgtttattgagctctaatacttgattcacagtg

SEQ ID NO: 339456 - DNA, 33 bp, Homo sapien
tgtttattgagctctattacttgattcacagtg

SEQ ID NO: 339457 - DNA, 33 bp, Homo sapien
aaactagacattgataataagaggaactttgga

SEQ ID NO: 339458 - DNA, 33 bp, Homo sapien
aaactagacattgatagtaagaggaactttgga

SEQ ID NO: 339459 - DNA, 33 bp, Homo sapien
ctaacattttcaaagacctaagatgagaaaaaa

SEQ ID NO: 339460 - DNA, 33 bp, Homo sapien
ctaacattttcaaagagctaagatgagaaaaaa

SEQ ID NO: 339461 - DNA, 33 bp, Homo sapien
ttccatcagtggttcaaaaaaccttctcttggg

SEQ ID NO: 339462 - DNA, 33 bp, Homo sapien
ttccatcagtggttcagaaaaccttctcttggg

SEQ ID NO: 339463 - DNA, 33 bp, Homo sapien
ctttgtagctcagcaacgtatagcctatcacta

SEQ ID NO: 339464 - DNA, 33 bp, Homo sapien
ctttgtagctcagcaatgtatagcctatcacta

SEQ ID NO: 339465 - DNA, 33 bp, Homo sapien
ctataacgacaagtacagaacctcaagatcaaa

SEQ ID NO: 339466 - DNA, 33 bp, Homo sapien
ctataacgacaagtacggaacctcaagatcaaa

SEQ ID NO: 339467 - DNA, 33 bp, Homo sapien
agaacgcaaccatcaggaagaatgagaaaaagg

SEQ ID NO: 339468 - DNA, 33 bp, Homo sapien
agaacgcaaccatcagtaagaatgagaaaaagg

SEQ ID NO: 339469 - DNA, 33 bp, Homo sapien
aaaactcaattcattcacaagacttccaaatat

SEQ ID NO: 339470 - DNA, 33 bp, Homo sapien
aaaactcaattcattcgcaagacttccaaatat

SEQ ID NO: 339471 - DNA, 33 bp, Homo sapien
ggctggcatattgggaacccttgttgcatgatt

SEQ ID NO: 339472 - DNA, 33 bp, Homo sapien
ggctggcatattgggagcccttgttgcatgatt

SEQ ID NO: 339473 - DNA, 33 bp, Homo sapien
tgaaaagatccaacaacaaagaagatatatgga

SEQ ID NO: 339474 - DNA, 33 bp, Homo sapien
tgaaaagatccaacaataaagaagatatatgga

SEQ ID NO: 339475 - DNA, 33 bp, Homo sapien
tctttgggagaaaccacctcttgaaccataacg

SEQ ID NO: 339476 - DNA, 33 bp, Homo sapien
tctttgggagaaaccatctcttgaaccataacg

SEQ ID NO: 339477 - DNA, 33 bp, Homo sapien
taaattacaaatgcacagaagtgttgagactag

SEQ ID NO: 339478 - DNA, 33 bp, Homo sapien
taaattacaaatgcacggaagtgttgagactag

SEQ ID NO: 339479 - DNA, 33 bp, Homo sapien
ctatgaagaccgtctacacacactgaaggaact

SEQ ID NO: 339480 - DNA, 33 bp, Homo sapien
ctatgaagaccgtctatacacactgaaggaact

SEQ ID NO: 339481 - DNA, 33 bp, Homo sapien
acataatggtaaaggaccaatgcaaaaataaca

SEQ ID NO: 339482 - DNA, 33 bp, Homo sapien
acataatggtaaaggatcaatgcaaaaataaca

SEQ ID NO: 339483 - DNA, 33 bp, Homo sapien
aagggcaaaggatgcacgttttctttcaagaag

SEQ ID NO: 339484 - DNA, 33 bp, Homo sapien
aagggcaaaggatgcatgttttctttcaagaag

SEQ ID NO: 339485 - DNA, 33 bp, Homo sapien
agagtagcttctaacaagtttcacaaactgaaa

SEQ ID NO: 339486 - DNA, 33 bp, Homo sapien
agagtagcttctaacaggtttcacaaactgaaa

SEQ ID NO: 339487 - DNA, 33 bp, Homo sapien
tctttctagtgagacaaaggggacttcagaaag

SEQ ID NO: 339488 - DNA, 33 bp, Homo sapien
tctttctagtgagacagaggggacttcagaaag

SEQ ID NO: 339489 - DNA, 33 bp, Homo sapien
tctagttaaacatttgaaattagaatgggcaat

SEQ ID NO: 339490 - DNA, 33 bp, Homo sapien
tctagttaaacatttggaattagaatgggcaat

SEQ ID NO: 339491 - DNA, 33 bp, Homo sapien
atgaacattcatgtggaaaaataaggatttcag

SEQ ID NO: 339492 - DNA, 33 bp, Homo sapien
atgaacattcatgtgggaaaataaggatttcag

SEQ ID NO: 339493 - DNA, 33 bp, Homo sapien
gctatggctagagcagaccaataaagtcactca

SEQ ID NO: 339494 - DNA, 33 bp, Homo sapien
gctatggctagagcaggccaataaagtcactca

SEQ ID NO: 339495 - DNA, 33 bp, Homo sapien
ttttggtgtacagacacgactattaactccaga

SEQ ID NO: 339496 - DNA, 33 bp, Homo sapien
ttttggtgtacagacatgactattaactccaga

SEQ ID NO: 339497 - DNA, 33 bp, Homo sapien
gatatggtttatattaagtgccagggtagcagt

SEQ ID NO: 339498 - DNA, 33 bp, Homo sapien
gatatggtttatattatgtgccagggtagcagt

SEQ ID NO: 339499 - DNA, 33 bp, Homo sapien
agagcagcagaccaacaagatatgtttttaatg

SEQ ID NO: 339500 - DNA, 33 bp, Homo sapien
agagcagcagaccaaccagatatgtttttaatg

SEQ ID NO: 339501 - DNA, 33 bp, Homo sapien
agaaattctgggacacgaaggttgcccatccag

SEQ ID NO: 339502 - DNA, 33 bp, Homo sapien
agaaattctgggacactaaggttgcccatccag

SEQ ID NO: 339503 - DNA, 33 bp, Homo sapien
tagtcctctccagttccactctattgtaaagtt

SEQ ID NO: 339504 - DNA, 33 bp, Homo sapien
tagtcctctccagttctactctattgtaaagtt

SEQ ID NO: 339505 - DNA, 33 bp, Homo sapien
taccagagattaagaacagacactgtgttcctt

SEQ ID NO: 339506 - DNA, 33 bp, Homo sapien
taccagagattaagaatagacactgtgttcctt

SEQ ID NO: 339507 - DNA, 33 bp, Homo sapien
attcctgattctattacaggcctggagtttatt

SEQ ID NO: 339508 - DNA, 33 bp, Homo sapien
attcctgattctattataggcctggagtttatt

SEQ ID NO: 339509 - DNA, 33 bp, Homo sapien
taggttctaatcatacagctttgtgttttttat

SEQ ID NO: 339510 - DNA, 33 bp, Homo sapien
taggttctaatcatacggctttgtgttttttat

SEQ ID NO: 339511 - DNA, 33 bp, Homo sapien
tatatgagggaatcatcaaaagggatgcagctg

SEQ ID NO: 339512 - DNA, 33 bp, Homo sapien
tatatgagggaatcatgaaaagggatgcagctg

SEQ ID NO: 339513 - DNA, 33 bp, Homo sapien
tgatctcagatggtaaagaagatggctttacaa

SEQ ID NO: 339514 - DNA, 33 bp, Homo sapien
tgatctcagatggtaatgaagatggctttacaa

SEQ ID NO: 339515 - DNA, 33 bp, Homo sapien
tcagcatctgtgcaaaataaaaaatgatctatt

SEQ ID NO: 339516 - DNA, 33 bp, Homo sapien
tcagcatctgtgcaaactaaaaaatgatctatt

SEQ ID NO: 339517 - DNA, 33 bp, Homo sapien
ccattgtgtttgccaaattcctaacattttttg

SEQ ID NO: 339518 - DNA, 33 bp, Homo sapien
ccattgtgtttgccaagttcctaacattttttg

SEQ ID NO: 339519 - DNA, 33 bp, Homo sapien
tattataaaagcttaactgaggacctaccaacc

SEQ ID NO: 339520 - DNA, 33 bp, Homo sapien
tattataaaagcttaattgaggacctaccaacc

SEQ ID NO: 339521 - DNA, 33 bp, Homo sapien
taatgcaaacagataaatatcatggaaaaataa

SEQ ID NO: 339522 - DNA, 33 bp, Homo sapien
taatgcaaacagataagtatcatggaaaaataa

SEQ ID NO: 339523 - DNA, 33 bp, Homo sapien
gataatttttttatgaggtgaagtcaagaatac

SEQ ID NO: 339524 - DNA, 33 bp, Homo sapien
gataatttttttatgatgtgaagtcaagaatac

SEQ ID NO: 339525 - DNA, 33 bp, Homo sapien
acctaactgctgctacaagttccaataaaatct

SEQ ID NO: 339526 - DNA, 33 bp, Homo sapien
acctaactgctgctacgagttccaataaaatct

SEQ ID NO: 339527 - DNA, 33 bp, Homo sapien
aggcttattaggaagaagaaattctcgcctaat

SEQ ID NO: 339528 - DNA, 33 bp, Homo sapien
aggcttattaggaagaggaaattctcgcctaat

SEQ ID NO: 339529 - DNA, 33 bp, Homo sapien
tgaagaaaagttgaagaaatgatagggaaattg

SEQ ID NO: 339530 - DNA, 33 bp, Homo sapien
tgaagaaaagttgaaggaatgatagggaaattg

SEQ ID NO: 339531 - DNA, 33 bp, Homo sapien
cagtattgcctccataagtatgaaattagaaca

SEQ ID NO: 339532 - DNA, 33 bp, Homo sapien
cagtattgcctccatacgtatgaaattagaaca

SEQ ID NO: 339533 - DNA, 33 bp, Homo sapien
acaatttgaaaggagacatatgctatttggaat

SEQ ID NO: 339534 - DNA, 33 bp, Homo sapien
acaatttgaaaggagagatatgctatttggaat

SEQ ID NO: 339535 - DNA, 33 bp, Homo sapien
gggttgaggaatgtaactgattgttcctgaagg

SEQ ID NO: 339536 - DNA, 33 bp, Homo sapien
gggttgaggaatgtaattgattgttcctgaagg

SEQ ID NO: 339537 - DNA, 33 bp, Homo sapien
aggagtgctggtgaggaaagtcaggattcactt

SEQ ID NO: 339538 - DNA, 33 bp, Homo sapien
aggagtgctggtgagggaagtcaggattcactt

SEQ ID NO: 339539 - DNA, 33 bp, Homo sapien
cataatttagtgtttacattacctagtttattt

SEQ ID NO: 339540 - DNA, 33 bp, Homo sapien
cataatttagtgtttagattacctagtttattt

SEQ ID NO: 339541 - DNA, 33 bp, Homo sapien
tcagttaacaattagaaaagagttcagacttcc

SEQ ID NO: 339542 - DNA, 33 bp, Homo sapien
tcagttaacaattagagaagagttcagacttcc

SEQ ID NO: 339543 - DNA, 33 bp, Homo sapien
tgaggtcaataaaagtaaatgctgaatgattaa

SEQ ID NO: 339544 - DNA, 33 bp, Homo sapien
tgaggtcaataaaagttaatgctgaatgattaa

SEQ ID NO: 339545 - DNA, 33 bp, Homo sapien
aaaaatctttaacataatactagcagacaaaat

SEQ ID NO: 339546 - DNA, 33 bp, Homo sapien
aaaaatctttaacatagtactagcagacaaaat

SEQ ID NO: 339547 - DNA, 33 bp, Homo sapien
ttagtaggtaagtagacagataaattgtgatgt

SEQ ID NO: 339548 - DNA, 33 bp, Homo sapien
ttagtaggtaagtagatagataaattgtgatgt

SEQ ID NO: 339549 - DNA, 33 bp, Homo sapien
aagcagagtactaaaaatatgtcaggtaaatca

SEQ ID NO: 339550 - DNA, 33 bp, Homo sapien
aagcagagtactaaaattatgtcaggtaaatca

SEQ ID NO: 339551 - DNA, 33 bp, Homo sapien
tattacctttgatttcaagaaactgttgctata

SEQ ID NO: 339552 - DNA, 33 bp, Homo sapien
tattacctttgatttccagaaactgttgctata

SEQ ID NO: 339553 - DNA, 33 bp, Homo sapien
gatgctctttcttccacctcgcctacatctggc

SEQ ID NO: 339554 - DNA, 33 bp, Homo sapien
gatgctctttcttccatctcgcctacatctggc

SEQ ID NO: 339555 - DNA, 33 bp, Homo sapien
aatcattccagtcctaagtaatagtcaaaactc

SEQ ID NO: 339556 - DNA, 33 bp, Homo sapien
aatcattccagtcctacgtaatagtcaaaactc

SEQ ID NO: 339557 - DNA, 33 bp, Homo sapien
ataaagcaagaggttcaatcctgaagatatttt

SEQ ID NO: 339558 - DNA, 33 bp, Homo sapien
ataaagcaagaggttccatcctgaagatatttt

SEQ ID NO: 339559 - DNA, 33 bp, Homo sapien
aagaatttctacaaaacgactccatgacatatt

SEQ ID NO: 339560 - DNA, 33 bp, Homo sapien
aagaatttctacaaaatgactccatgacatatt

SEQ ID NO: 339561 - DNA, 33 bp, Homo sapien
acccattgtctgtgtagctccttcccacctctc

SEQ ID NO: 339562 - DNA, 33 bp, Homo sapien
acccattgtctgtgtatctccttcccacctctc

SEQ ID NO: 339563 - DNA, 33 bp, Homo sapien
tgcacgcaaatctgctaaacaatccagagggta

SEQ ID NO: 339564 - DNA, 33 bp, Homo sapien
tgcacgcaaatctgctgaacaatccagagggta

SEQ ID NO: 339565 - DNA, 33 bp, Homo sapien
atggtttcacttcttaggtcatgtaaaatatag

SEQ ID NO: 339566 - DNA, 33 bp, Homo sapien
atggtttcacttcttatgtcatgtaaaatatag

SEQ ID NO: 339567 - DNA, 33 bp, Homo sapien
ttcagaatgatatcccaactacacacttcaatc

SEQ ID NO: 339568 - DNA, 33 bp, Homo sapien
ttcagaatgatatcccgactacacacttcaatc

SEQ ID NO: 339569 - DNA, 33 bp, Homo sapien
gggggggctgcaaatacaggttggttaataggt

SEQ ID NO: 339570 - DNA, 33 bp, Homo sapien
gggggggctgcaaatagaggttggttaataggt

SEQ ID NO: 339571 - DNA, 33 bp, Homo sapien
attaacatgaagctcaatgaaatagaattggga

SEQ ID NO: 339572 - DNA, 33 bp, Homo sapien
attaacatgaagctcagtgaaatagaattggga

SEQ ID NO: 339573 - DNA, 33 bp, Homo sapien
cttctttattgtcaaaacaagaaacttagaaca

SEQ ID NO: 339574 - DNA, 33 bp, Homo sapien
cttctttattgtcaaagcaagaaacttagaaca

SEQ ID NO: 339575 - DNA, 33 bp, Homo sapien
tttggaaatgtatggaacaacacaagctacatt

SEQ ID NO: 339576 - DNA, 33 bp, Homo sapien
tttggaaatgtatggagcaacacaagctacatt

SEQ ID NO: 339577 - DNA, 33 bp, Homo sapien
gacaactgtacctagaggcaaaatatgtctggc

SEQ ID NO: 339578 - DNA, 33 bp, Homo sapien
gacaactgtacctagatgcaaaatatgtctggc

SEQ ID NO: 339579 - DNA, 33 bp, Homo sapien
ttagattttcacttgaagaaagagtgtttacat

SEQ ID NO: 339580 - DNA, 33 bp, Homo sapien
ttagattttcacttgaggaaagagtgtttacat

SEQ ID NO: 339581 - DNA, 33 bp, Homo sapien
gacttctggttgaaaactagtgtgtagactaac

SEQ ID NO: 339582 - DNA, 33 bp, Homo sapien
gacttctggttgaaaattagtgtgtagactaac

SEQ ID NO: 339583 - DNA, 33 bp, Homo sapien
agctttgcctattaacacatacgcactatttct

SEQ ID NO: 339584 - DNA, 33 bp, Homo sapien
agctttgcctattaacgcatacgcactatttct

SEQ ID NO: 339585 - DNA, 33 bp, Homo sapien
agtagtttctcagaataaagataataacacagc

SEQ ID NO: 339586 - DNA, 33 bp, Homo sapien
agtagtttctcagaatgaagataataacacagc

SEQ ID NO: 339587 - DNA, 33 bp, Homo sapien
ccagcttaagaaatcaactactgagttttcatt

SEQ ID NO: 339588 - DNA, 33 bp, Homo sapien
ccagcttaagaaatcagctactgagttttcatt

SEQ ID NO: 339589 - DNA, 33 bp, Homo sapien
acaactccatcacctcagaagaattccaatatt

SEQ ID NO: 339590 - DNA, 33 bp, Homo sapien
acaactccatcacctcggaagaattccaatatt

SEQ ID NO: 339591 - DNA, 33 bp, Homo sapien
tgaaaattgccgtgacactttcttgcttcatgt

SEQ ID NO: 339592 - DNA, 33 bp, Homo sapien
tgaaaattgccgtgacgctttcttgcttcatgt

SEQ ID NO: 339593 - DNA, 33 bp, Homo sapien
aaagtcaaggaaatcacgaagttatttgagact

SEQ ID NO: 339594 - DNA, 33 bp, Homo sapien
aaagtcaaggaaatcatgaagttatttgagact

SEQ ID NO: 339595 - DNA, 33 bp, Homo sapien
tacttaatgctggccagaactattgtactaaat

SEQ ID NO: 339596 - DNA, 33 bp, Homo sapien
tacttaatgctggccataactattgtactaaat

SEQ ID NO: 339597 - DNA, 33 bp, Homo sapien
catttaatcctcaacaaccttgtgagatagagc

SEQ ID NO: 339598 - DNA, 33 bp, Homo sapien
catttaatcctcaacatccttgtgagatagagc

SEQ ID NO: 339599 - DNA, 33 bp, Homo sapien
gggtatgatcaaggcaacttgacttcttgctga

SEQ ID NO: 339600 - DNA, 33 bp, Homo sapien
gggtatgatcaaggcagcttgacttcttgctga

SEQ ID NO: 339601 - DNA, 33 bp, Homo sapien
gctatccttctggtctaagaaaccatcattttg

SEQ ID NO: 339602 - DNA, 33 bp, Homo sapien
gctatccttctggtctgagaaaccatcattttg

SEQ ID NO: 339603 - DNA, 33 bp, Homo sapien
ggtaattgagcctgcaatattttggaggctgca

SEQ ID NO: 339604 - DNA, 33 bp, Homo sapien
ggtaattgagcctgcagtattttggaggctgca

SEQ ID NO: 339605 - DNA, 33 bp, Homo sapien
tttccactgtgaggtacataaatgtcttctgtc

SEQ ID NO: 339606 - DNA, 33 bp, Homo sapien
tttccactgtgaggtatataaatgtcttctgtc

SEQ ID NO: 339607 - DNA, 33 bp, Homo sapien
ctaggataatgcaatacagaatcaaaggggagt

SEQ ID NO: 339608 - DNA, 33 bp, Homo sapien
ctaggataatgcaatatagaatcaaaggggagt

SEQ ID NO: 339609 - DNA, 33 bp, Homo sapien
ggtcgtgttgattttacagatgagagaaccctg

SEQ ID NO: 339610 - DNA, 33 bp, Homo sapien
ggtcgtgttgattttatagatgagagaaccctg

SEQ ID NO: 339611 - DNA, 33 bp, Homo sapien
caataccagttgaaggcagagccaggattagca

SEQ ID NO: 339612 - DNA, 33 bp, Homo sapien
caataccagttgaagggagagccaggattagca

SEQ ID NO: 339613 - DNA, 33 bp, Homo sapien
aatatatgagcattgaaattatatccactactg

SEQ ID NO: 339614 - DNA, 33 bp, Homo sapien
aatatatgagcattgacattatatccactactg

SEQ ID NO: 339615 - DNA, 33 bp, Homo sapien
tcaccttcctctcatcagaaaagagataacaag

SEQ ID NO: 339616 - DNA, 33 bp, Homo sapien
tcaccttcctctcatcggaaaagagataacaag

SEQ ID NO: 339617 - DNA, 33 bp, Homo sapien
ttccctcctttttggaacccgcataagggatcc

SEQ ID NO: 339618 - DNA, 33 bp, Homo sapien
ttccctcctttttggaccccgcataagggatcc

SEQ ID NO: 339619 - DNA, 33 bp, Homo sapien
gagagggaaccaaaacacattacaaatacttgg

SEQ ID NO: 339620 - DNA, 33 bp, Homo sapien
gagagggaaccaaaacgcattacaaatacttgg

SEQ ID NO: 339621 - DNA, 33 bp, Homo sapien
aattactctaccagggacaaaaagatttacttc

SEQ ID NO: 339622 - DNA, 33 bp, Homo sapien
aattactctaccagggtcaaaaagatttacttc

SEQ ID NO: 339623 - DNA, 33 bp, Homo sapien
gcacagagggtggaaaacagatctcaggattag

SEQ ID NO: 339624 - DNA, 33 bp, Homo sapien
gcacagagggtggaaagcagatctcaggattag

SEQ ID NO: 339625 - DNA, 33 bp, Homo sapien
ggtgccaattcacctaaagtagctgggctcctc

SEQ ID NO: 339626 - DNA, 33 bp, Homo sapien
ggtgccaattcacctacagtagctgggctcctc

SEQ ID NO: 339627 - DNA, 33 bp, Homo sapien
gcagtggatgagtcaaggaccaagaagagtttc

SEQ ID NO: 339628 - DNA, 33 bp, Homo sapien
gcagtggatgagtcaatgaccaagaagagtttc

SEQ ID NO: 339629 - DNA, 33 bp, Homo sapien
tgtggaatgagatgaaagattgggttctgggga

SEQ ID NO: 339630 - DNA, 33 bp, Homo sapien
tgtggaatgagatgaaggattgggttctgggga

SEQ ID NO: 339631 - DNA, 33 bp, Homo sapien
gatgtgaaccaaagcacagatgtggaatgagat

SEQ ID NO: 339632 - DNA, 33 bp, Homo sapien
gatgtgaaccaaagcagagatgtggaatgagat

SEQ ID NO: 339633 - DNA, 33 bp, Homo sapien
accactgaagagaatacgctgtaaactcgtcat

SEQ ID NO: 339634 - DNA, 33 bp, Homo sapien
accactgaagagaatatgctgtaaactcgtcat

SEQ ID NO: 339635 - DNA, 33 bp, Homo sapien
tatccagagaaataaccactgtgtgtgaaggag

SEQ ID NO: 339636 - DNA, 33 bp, Homo sapien
tatccagagaaataactactgtgtgtgaaggag

SEQ ID NO: 339637 - DNA, 33 bp, Homo sapien
caaagcaaattttaaacgtaactctgattatgt

SEQ ID NO: 339638 - DNA, 33 bp, Homo sapien
caaagcaaattttaaatgtaactctgattatgt

SEQ ID NO: 339639 - DNA, 33 bp, Homo sapien
ggagctcgcactgggaataggactgtacctgcc

SEQ ID NO: 339640 - DNA, 33 bp, Homo sapien
ggagctcgcactgggagtaggactgtacctgcc

SEQ ID NO: 339641 - DNA, 33 bp, Homo sapien
tgcaagctgtcctaaacgtttttggtatttttg

SEQ ID NO: 339642 - DNA, 33 bp, Homo sapien
tgcaagctgtcctaaatgtttttggtatttttg

SEQ ID NO: 339643 - DNA, 33 bp, Homo sapien
ggagagacaagagaccaaggcttaatacacaac

SEQ ID NO: 339644 - DNA, 33 bp, Homo sapien
ggagagacaagagaccgaggcttaatacacaac

SEQ ID NO: 339645 - DNA, 33 bp, Homo sapien
caatttgtgaagaggacaatgaagataataata

SEQ ID NO: 339646 - DNA, 33 bp, Homo sapien
caatttgtgaagaggataatgaagataataata

SEQ ID NO: 339647 - DNA, 33 bp, Homo sapien
ggggactcttgaactcaccatgcaaattaaatc

SEQ ID NO: 339648 - DNA, 33 bp, Homo sapien
ggggactcttgaactcgccatgcaaattaaatc

SEQ ID NO: 339649 - DNA, 33 bp, Homo sapien
agtagttttaccaatactaaagtgcttgtggtc

SEQ ID NO: 339650 - DNA, 33 bp, Homo sapien
agtagttttaccaatattaaagtgcttgtggtc

SEQ ID NO: 339651 - DNA, 33 bp, Homo sapien
accttgtttaaaagtgcagattctctgggccct

SEQ ID NO: 339652 - DNA, 33 bp, Homo sapien
accttgtttaaaagtgtagattctctgggccct

SEQ ID NO: 339653 - DNA, 33 bp, Homo sapien
atgggaaaaggtgaaaactctcaatttaacatg

SEQ ID NO: 339654 - DNA, 33 bp, Homo sapien
atgggaaaaggtgaaagctctcaatttaacatg

SEQ ID NO: 339655 - DNA, 33 bp, Homo sapien
tacagtcagtcaaggccatcttctgagaagtat

SEQ ID NO: 339656 - DNA, 33 bp, Homo sapien
tacagtcagtcaaggctatcttctgagaagtat

SEQ ID NO: 339657 - DNA, 33 bp, Homo sapien
ttaagaaacggcacaacgaaggaactagaactt

SEQ ID NO: 339658 - DNA, 33 bp, Homo sapien
ttaagaaacggcacaaggaaggaactagaactt

SEQ ID NO: 339659 - DNA, 33 bp, Homo sapien
tgcccatacactcaaactgagaccctttgtgag

SEQ ID NO: 339660 - DNA, 33 bp, Homo sapien
tgcccatacactcaaattgagaccctttgtgag

SEQ ID NO: 339661 - DNA, 33 bp, Homo sapien
gaaatcaatgaccataacagcagatagagaaaa

SEQ ID NO: 339662 - DNA, 33 bp, Homo sapien
gaaatcaatgaccatatcagcagatagagaaaa

SEQ ID NO: 339663 - DNA, 33 bp, Homo sapien
tatgaatttataaacaagacaggtagatggata

SEQ ID NO: 339664 - DNA, 33 bp, Homo sapien
tatgaatttataaacatgacaggtagatggata

SEQ ID NO: 339665 - DNA, 33 bp, Homo sapien
gaagaaaaattgtatgaaccataaatgatgtaa

SEQ ID NO: 339666 - DNA, 33 bp, Homo sapien
gaagaaaaattgtatggaccataaatgatgtaa

SEQ ID NO: 339667 - DNA, 33 bp, Homo sapien
atagctgtgtagttcagatcaaaaggccataca

SEQ ID NO: 339668 - DNA, 33 bp, Homo sapien
atagctgtgtagttcatatcaaaaggccataca

SEQ ID NO: 339669 - DNA, 33 bp, Homo sapien
gtcaaggcaacagaaaatacctcaaagaccttt

SEQ ID NO: 339670 - DNA, 33 bp, Homo sapien
gtcaaggcaacagaaagtacctcaaagaccttt

SEQ ID NO: 339671 - DNA, 33 bp, Homo sapien
acttactaggagacataaacgtaacccatgagt

SEQ ID NO: 339672 - DNA, 33 bp, Homo sapien
acttactaggagacattaacgtaacccatgagt

SEQ ID NO: 339673 - DNA, 33 bp, Homo sapien
tgttaggactccatgagaccagtttttcatgta

SEQ ID NO: 339674 - DNA, 33 bp, Homo sapien
tgttaggactccatgataccagtttttcatgta

SEQ ID NO: 339675 - DNA, 33 bp, Homo sapien
gaacaaatggagacaaaactccggtactgccaa

SEQ ID NO: 339676 - DNA, 33 bp, Homo sapien
gaacaaatggagacaagactccggtactgccaa

SEQ ID NO: 339677 - DNA, 33 bp, Homo sapien
tctcttgtacaccttcaaattcctgttgcctgg

SEQ ID NO: 339678 - DNA, 33 bp, Homo sapien
tctcttgtacaccttcgaattcctgttgcctgg

SEQ ID NO: 339679 - DNA, 33 bp, Homo sapien
tgttgatctggtctggcatagcaggaaaaaatc

SEQ ID NO: 339680 - DNA, 33 bp, Homo sapien
tgttgatctggtctggtatagcaggaaaaaatc

SEQ ID NO: 339681 - DNA, 33 bp, Homo sapien
gaggagtttatctccacgtagtaataaccaaga

SEQ ID NO: 339682 - DNA, 33 bp, Homo sapien
gaggagtttatctccatgtagtaataaccaaga

SEQ ID NO: 339683 - DNA, 33 bp, Homo sapien
cctgggctttccacttaaacacgattttgatgt

SEQ ID NO: 339684 - DNA, 33 bp, Homo sapien
cctgggctttccacttgaacacgattttgatgt

SEQ ID NO: 339685 - DNA, 33 bp, Homo sapien
acgttagtgaaagtacaactgttaaggaaaaca

SEQ ID NO: 339686 - DNA, 33 bp, Homo sapien
acgttagtgaaagtacgactgttaaggaaaaca

SEQ ID NO: 339687 - DNA, 33 bp, Homo sapien
agaccttcttcctaacaaataggctagactgtc

SEQ ID NO: 339688 - DNA, 33 bp, Homo sapien
agaccttcttcctaaccaataggctagactgtc

SEQ ID NO: 339689 - DNA, 33 bp, Homo sapien
tattaaagtaggagaaagtgttgaagataagat

SEQ ID NO: 339690 - DNA, 33 bp, Homo sapien
tattaaagtaggagaaggtgttgaagataagat

SEQ ID NO: 339691 - DNA, 33 bp, Homo sapien
ttttgtctttgtaatgaaggccttagatttctt

SEQ ID NO: 339692 - DNA, 33 bp, Homo sapien
ttttgtctttgtaatggaggccttagatttctt

SEQ ID NO: 339693 - DNA, 33 bp, Homo sapien
acaaggagatgtaacacggtattaaagtttaga

SEQ ID NO: 339694 - DNA, 33 bp, Homo sapien
acaaggagatgtaacatggtattaaagtttaga

SEQ ID NO: 339695 - DNA, 33 bp, Homo sapien
catctcgtctctaagtcaatgctttcaataaaa

SEQ ID NO: 339696 - DNA, 33 bp, Homo sapien
catctcgtctctaagttaatgctttcaataaaa

SEQ ID NO: 339697 - DNA, 33 bp, Homo sapien
tctctagaaagactacaatggtaaaacacatct

SEQ ID NO: 339698 - DNA, 33 bp, Homo sapien
tctctagaaagactacgatggtaaaacacatct

SEQ ID NO: 339699 - DNA, 33 bp, Homo sapien
tcaaatatccactataaccctctgacaaaattt

SEQ ID NO: 339700 - DNA, 33 bp, Homo sapien
tcaaatatccactatatccctctgacaaaattt

SEQ ID NO: 339701 - DNA, 33 bp, Homo sapien
caggttcacactgtacaactccagaaggtgcca

SEQ ID NO: 339702 - DNA, 33 bp, Homo sapien
caggttcacactgtacgactccagaaggtgcca

SEQ ID NO: 339703 - DNA, 33 bp, Homo sapien
tttctcttttccctgaaacatctttatctgctt

SEQ ID NO: 339704 - DNA, 33 bp, Homo sapien
tttctcttttccctgatacatctttatctgctt

SEQ ID NO: 339705 - DNA, 33 bp, Homo sapien
agctccaaacgcctacacgcctcatgcccagaa

SEQ ID NO: 339706 - DNA, 33 bp, Homo sapien
agctccaaacgcctacgcgcctcatgcccagaa

SEQ ID NO: 339707 - DNA, 33 bp, Homo sapien
tctaccagatgttgagccccttgaacctaatgg

SEQ ID NO: 339708 - DNA, 33 bp, Homo sapien
tctaccagatgttgagtcccttgaacctaatgg

SEQ ID NO: 339709 - DNA, 33 bp, Homo sapien
ctaggcactttcaacactattcatttaaacctg

SEQ ID NO: 339710 - DNA, 33 bp, Homo sapien
ctaggcactttcaacattattcatttaaacctg

SEQ ID NO: 339711 - DNA, 33 bp, Homo sapien
gtcctgctaccagtggacaatctagtatatggt

SEQ ID NO: 339712 - DNA, 33 bp, Homo sapien
gtcctgctaccagtgggcaatctagtatatggt

SEQ ID NO: 339713 - DNA, 33 bp, Homo sapien
atttgcaattaataaccgagaagcaggaggatg

SEQ ID NO: 339714 - DNA, 33 bp, Homo sapien
atttgcaattaataacggagaagcaggaggatg

SEQ ID NO: 339715 - DNA, 33 bp, Homo sapien
atgtgtttttataaatcaaagaaggagacagga

SEQ ID NO: 339716 - DNA, 33 bp, Homo sapien
atgtgtttttataaatgaaagaaggagacagga

SEQ ID NO: 339717 - DNA, 33 bp, Homo sapien
ctgttgccataaaaaagtatcacaaagttagtg

SEQ ID NO: 339718 - DNA, 33 bp, Homo sapien
ctgttgccataaaaaattatcacaaagttagtg

SEQ ID NO: 339719 - DNA, 33 bp, Homo sapien
tggtgacaaccttcctcaactggagtttctgca

SEQ ID NO: 339720 - DNA, 33 bp, Homo sapien
tggtgacaaccttccttaactggagtttctgca

SEQ ID NO: 339721 - DNA, 33 bp, Homo sapien
gtcgtggctatctgaacggccaatggcaactgg

SEQ ID NO: 339722 - DNA, 33 bp, Homo sapien
gtcgtggctatctgaatggccaatggcaactgg

SEQ ID NO: 339723 - DNA, 33 bp, Homo sapien
taccagaattttccaacgcccatatatgttttc

SEQ ID NO: 339724 - DNA, 33 bp, Homo sapien
taccagaattttccaatgcccatatatgttttc

SEQ ID NO: 339725 - DNA, 33 bp, Homo sapien
ttctaacataatcacaatcttatccttcaagca

SEQ ID NO: 339726 - DNA, 33 bp, Homo sapien
ttctaacataatcacagtcttatccttcaagca

SEQ ID NO: 339727 - DNA, 33 bp, Homo sapien
aagtaagtatgatgtcaagtatctcctagggta

SEQ ID NO: 339728 - DNA, 33 bp, Homo sapien
aagtaagtatgatgtcgagtatctcctagggta

SEQ ID NO: 339729 - DNA, 33 bp, Homo sapien
atcaaaagagagtggcaaattagttggggagaa

SEQ ID NO: 339730 - DNA, 33 bp, Homo sapien
atcaaaagagagtggcgaattagttggggagaa

SEQ ID NO: 339731 - DNA, 33 bp, Homo sapien
aacttctcatcccgaaacttttatcagcttcct

SEQ ID NO: 339732 - DNA, 33 bp, Homo sapien
aacttctcatcccgaatcttttatcagcttcct

SEQ ID NO: 339733 - DNA, 33 bp, Homo sapien
ctcctcattttatcaaagagagacctgaaattc

SEQ ID NO: 339734 - DNA, 33 bp, Homo sapien
ctcctcattttatcaaggagagacctgaaattc

SEQ ID NO: 339735 - DNA, 33 bp, Homo sapien
aacccacttgaaattacgaggatttgtaactca

SEQ ID NO: 339736 - DNA, 33 bp, Homo sapien
aacccacttgaaattatgaggatttgtaactca

SEQ ID NO: 339737 - DNA, 33 bp, Homo sapien
cttggtcacaaaattcggaaactaatctgggaa

SEQ ID NO: 339738 - DNA, 33 bp, Homo sapien
cttggtcacaaaattctgaaactaatctgggaa

SEQ ID NO: 339739 - DNA, 33 bp, Homo sapien
gtcactgagctctaacaacattttgtcagatgc

SEQ ID NO: 339740 - DNA, 33 bp, Homo sapien
gtcactgagctctaacgacattttgtcagatgc

SEQ ID NO: 339741 - DNA, 33 bp, Homo sapien
aagacaggtgattcaactaatcctaatacttgc

SEQ ID NO: 339742 - DNA, 33 bp, Homo sapien
aagacaggtgattcaattaatcctaatacttgc

SEQ ID NO: 339743 - DNA, 33 bp, Homo sapien
gctttcaagacaaacacgagagagagagcccaa

SEQ ID NO: 339744 - DNA, 33 bp, Homo sapien
gctttcaagacaaacatgagagagagagcccaa

SEQ ID NO: 339745 - DNA, 33 bp, Homo sapien
ctttgccatccgcagacagcttaaagttaacca

SEQ ID NO: 339746 - DNA, 33 bp, Homo sapien
ctttgccatccgcagatagcttaaagttaacca

SEQ ID NO: 339747 - DNA, 33 bp, Homo sapien
aagtatagagttcaaactgatatacaccataat

SEQ ID NO: 339748 - DNA, 33 bp, Homo sapien
aagtatagagttcaaagtgatatacaccataat

SEQ ID NO: 339749 - DNA, 33 bp, Homo sapien
tcaaaaggttgtgttcaaaatgtacgacagctc

SEQ ID NO: 339750 - DNA, 33 bp, Homo sapien
tcaaaaggttgtgttcgaaatgtacgacagctc

SEQ ID NO: 339751 - DNA, 33 bp, Homo sapien
aaatgtatgtttaaacactggtgatcactcact

SEQ ID NO: 339752 - DNA, 33 bp, Homo sapien
aaatgtatgtttaaactctggtgatcactcact

SEQ ID NO: 339753 - DNA, 33 bp, Homo sapien
actcaaagaagagtgacgaaaattaagttctgg

SEQ ID NO: 339754 - DNA, 33 bp, Homo sapien
actcaaagaagagtgatgaaaattaagttctgg

SEQ ID NO: 339755 - DNA, 33 bp, Homo sapien
tccttagagtgaagcaactttttctctgaatgt

SEQ ID NO: 339756 - DNA, 33 bp, Homo sapien
tccttagagtgaagcagctttttctctgaatgt

SEQ ID NO: 339757 - DNA, 33 bp, Homo sapien
aaatgggaagagtataacacactggcgtggtct

SEQ ID NO: 339758 - DNA, 33 bp, Homo sapien
aaatgggaagagtatatcacactggcgtggtct

SEQ ID NO: 339759 - DNA, 33 bp, Homo sapien
acctgcttatcaaaaccctttattttacatatt

SEQ ID NO: 339760 - DNA, 33 bp, Homo sapien
acctgcttatcaaaacgctttattttacatatt

SEQ ID NO: 339761 - DNA, 33 bp, Homo sapien
gagcagcagtctttacaacagattgtgtaggac

SEQ ID NO: 339762 - DNA, 33 bp, Homo sapien
gagcagcagtctttacgacagattgtgtaggac

SEQ ID NO: 339763 - DNA, 33 bp, Homo sapien
gcaaactctgaaaaaccgtgactacactgctcg

SEQ ID NO: 339764 - DNA, 33 bp, Homo sapien
gcaaactctgaaaaactgtgactacactgctcg

SEQ ID NO: 339765 - DNA, 33 bp, Homo sapien
tgattgtctttacgaaaagaatgtattaatgtg

SEQ ID NO: 339766 - DNA, 33 bp, Homo sapien
tgattgtctttacgaagagaatgtattaatgtg

SEQ ID NO: 339767 - DNA, 33 bp, Homo sapien
agggatgagttccactcagagggcatattaagg

SEQ ID NO: 339768 - DNA, 33 bp, Homo sapien
agggatgagttccacttagagggcatattaagg

SEQ ID NO: 339769 - DNA, 33 bp, Homo sapien
gtagcatgacttgaccaggattggacagttggc

SEQ ID NO: 339770 - DNA, 33 bp, Homo sapien
gtagcatgacttgaccgggattggacagttggc

SEQ ID NO: 339771 - DNA, 33 bp, Homo sapien
tgtgcggatgttgactaaaagttcaataaactt

SEQ ID NO: 339772 - DNA, 33 bp, Homo sapien
tgtgcggatgttgactgaaagttcaataaactt

SEQ ID NO: 339773 - DNA, 33 bp, Homo sapien
catgtatttctcccaagaagctcaaagaacttc

SEQ ID NO: 339774 - DNA, 33 bp, Homo sapien
catgtatttctcccaataagctcaaagaacttc

SEQ ID NO: 339775 - DNA, 33 bp, Homo sapien
ctttcctcatgcagccaatcatccaagttcttt

SEQ ID NO: 339776 - DNA, 33 bp, Homo sapien
ctttcctcatgcagccgatcatccaagttcttt

SEQ ID NO: 339777 - DNA, 33 bp, Homo sapien
ggcaggtaagtaagcaacctttcaagagttttt

SEQ ID NO: 339778 - DNA, 33 bp, Homo sapien
ggcaggtaagtaagcatcctttcaagagttttt

SEQ ID NO: 339779 - DNA, 33 bp, Homo sapien
ggcgagggacgtgggagagatataaattatgtg

SEQ ID NO: 339780 - DNA, 33 bp, Homo sapien
ggcgagggacgtgggatagatataaattatgtg

SEQ ID NO: 339781 - DNA, 33 bp, Homo sapien
ctattgccaccgatacaaactggcttcagtgta

SEQ ID NO: 339782 - DNA, 33 bp, Homo sapien
ctattgccaccgatacgaactggcttcagtgta

SEQ ID NO: 339783 - DNA, 33 bp, Homo sapien
attatgtctcctcgccaacaagattgctgcatg

SEQ ID NO: 339784 - DNA, 33 bp, Homo sapien
attatgtctcctcgccgacaagattgctgcatg

SEQ ID NO: 339785 - DNA, 33 bp, Homo sapien
gcagatgagtagtcgacagcaattatattagaa

SEQ ID NO: 339786 - DNA, 33 bp, Homo sapien
gcagatgagtagtcgatagcaattatattagaa

SEQ ID NO: 339787 - DNA, 33 bp, Homo sapien
tgttcagaggaataaccaaattcttatgcattt

SEQ ID NO: 339788 - DNA, 33 bp, Homo sapien
tgttcagaggaataactaaattcttatgcattt

SEQ ID NO: 339789 - DNA, 33 bp, Homo sapien
taaatagttgcttaacacatatgttcatgttat

SEQ ID NO: 339790 - DNA, 33 bp, Homo sapien
taaatagttgcttaacgcatatgttcatgttat

SEQ ID NO: 339791 - DNA, 33 bp, Homo sapien
gaagttctttacaaataaattatccctgaaaaa

SEQ ID NO: 339792 - DNA, 33 bp, Homo sapien
gaagttctttacaaatgaattatccctgaaaaa

SEQ ID NO: 339793 - DNA, 33 bp, Homo sapien
tcaaagcttaatgtaacccaaagcgatagggag

SEQ ID NO: 339794 - DNA, 33 bp, Homo sapien
tcaaagcttaatgtaagccaaagcgatagggag

SEQ ID NO: 339795 - DNA, 33 bp, Homo sapien
cttttgttggcatgtgcataaagagaagtgtat

SEQ ID NO: 339796 - DNA, 33 bp, Homo sapien
cttttgttggcatgtgtataaagagaagtgtat

SEQ ID NO: 339797 - DNA, 33 bp, Homo sapien
tagcatttcaaaattaacaaggcatcctttgcc

SEQ ID NO: 339798 - DNA, 33 bp, Homo sapien
tagcatttcaaaattagcaaggcatcctttgcc

SEQ ID NO: 339799 - DNA, 33 bp, Homo sapien
agctacataccgaatacaagaatgaagagagaa

SEQ ID NO: 339800 - DNA, 33 bp, Homo sapien
agctacataccgaatagaagaatgaagagagaa

SEQ ID NO: 339801 - DNA, 33 bp, Homo sapien
tgtggactcagccaaaactgatgtttctaacag

SEQ ID NO: 339802 - DNA, 33 bp, Homo sapien
tgtggactcagccaaacctgatgtttctaacag

SEQ ID NO: 339803 - DNA, 33 bp, Homo sapien
gccctaagttaattcaactgattgtaatcttgg

SEQ ID NO: 339804 - DNA, 33 bp, Homo sapien
gccctaagttaattcatctgattgtaatcttgg

SEQ ID NO: 339805 - DNA, 33 bp, Homo sapien
tgcttgaagcaaaataatactgtaaacattagg

SEQ ID NO: 339806 - DNA, 33 bp, Homo sapien
tgcttgaagcaaaatagtactgtaaacattagg

SEQ ID NO: 339807 - DNA, 33 bp, Homo sapien
accgccaagatatggaatagcactgtagtcacc

SEQ ID NO: 339808 - DNA, 33 bp, Homo sapien
accgccaagatatggactagcactgtagtcacc

SEQ ID NO: 339809 - DNA, 33 bp, Homo sapien
atatgaaaaggtacaaccgtggtagatcatctg

SEQ ID NO: 339810 - DNA, 33 bp, Homo sapien
atatgaaaaggtacaatcgtggtagatcatctg

SEQ ID NO: 339811 - DNA, 33 bp, Homo sapien
gaccaactcaaggttacgtgctaggaaagtaac

SEQ ID NO: 339812 - DNA, 33 bp, Homo sapien
gaccaactcaaggttatgtgctaggaaagtaac

SEQ ID NO: 339813 - DNA, 33 bp, Homo sapien
aacacctccttgatcacgaggcagtacaggttt

SEQ ID NO: 339814 - DNA, 33 bp, Homo sapien
aacacctccttgatcatgaggcagtacaggttt

SEQ ID NO: 339815 - DNA, 33 bp, Homo sapien
tagcttaatttgtggagacctttatagatagta

SEQ ID NO: 339816 - DNA, 33 bp, Homo sapien
tagcttaatttgtggatacctttatagatagta

SEQ ID NO: 339817 - DNA, 33 bp, Homo sapien
tttgaaaggtcatctcagacaggtgggttatgt

SEQ ID NO: 339818 - DNA, 33 bp, Homo sapien
tttgaaaggtcatctcggacaggtgggttatgt

SEQ ID NO: 339819 - DNA, 33 bp, Homo sapien
atggagaactgaggaaactggtagatccctaag

SEQ ID NO: 339820 - DNA, 33 bp, Homo sapien
atggagaactgaggaagctggtagatccctaag

SEQ ID NO: 339821 - DNA, 33 bp, Homo sapien
ttgcacaatgtaaaccacaggacttatggagaa

SEQ ID NO: 339822 - DNA, 33 bp, Homo sapien
ttgcacaatgtaaaccccaggacttatggagaa

SEQ ID NO: 339823 - DNA, 33 bp, Homo sapien
ccttatggcagaactacatataaacaagcaaac

SEQ ID NO: 339824 - DNA, 33 bp, Homo sapien
ccttatggcagaactatatataaacaagcaaac

SEQ ID NO: 339825 - DNA, 33 bp, Homo sapien
gatttacttttctcaaactacttcccattacat

SEQ ID NO: 339826 - DNA, 33 bp, Homo sapien
gatttacttttctcaatctacttcccattacat

SEQ ID NO: 339827 - DNA, 33 bp, Homo sapien
gaggaccagagcaaagaacagggggttgggaac

SEQ ID NO: 339828 - DNA, 33 bp, Homo sapien
gaggaccagagcaaaggacagggggttgggaac

SEQ ID NO: 339829 - DNA, 33 bp, Homo sapien
gttggcaaaatccagccaattgttactggtttt

SEQ ID NO: 339830 - DNA, 33 bp, Homo sapien
gttggcaaaatccagcgaattgttactggtttt

SEQ ID NO: 339831 - DNA, 33 bp, Homo sapien
tgggttgtaaagaggacagtccattttaaaaga

SEQ ID NO: 339832 - DNA, 33 bp, Homo sapien
tgggttgtaaagaggatagtccattttaaaaga

SEQ ID NO: 339833 - DNA, 33 bp, Homo sapien
gccctctgttttataaatcttgcaaatgcgtaa

SEQ ID NO: 339834 - DNA, 33 bp, Homo sapien
gccctctgttttataagtcttgcaaatgcgtaa

SEQ ID NO: 339835 - DNA, 33 bp, Homo sapien
gggataatcttgcttaaatacgtttcctaggca

SEQ ID NO: 339836 - DNA, 33 bp, Homo sapien
gggataatcttgcttatatacgtttcctaggca

SEQ ID NO: 339837 - DNA, 33 bp, Homo sapien
actttggaaacaatcacgttgggcatttctgca

SEQ ID NO: 339838 - DNA, 33 bp, Homo sapien
actttggaaacaatcatgttgggcatttctgca

SEQ ID NO: 339839 - DNA, 33 bp, Homo sapien
caagccaaaacattaaatgaaaaaccagattat

SEQ ID NO: 339840 - DNA, 33 bp, Homo sapien
caagccaaaacattaagtgaaaaaccagattat

SEQ ID NO: 339841 - DNA, 33 bp, Homo sapien
ggaggaactcagccgacgttgcaggattcaagc

SEQ ID NO: 339842 - DNA, 33 bp, Homo sapien
ggaggaactcagccgatgttgcaggattcaagc

SEQ ID NO: 339843 - DNA, 33 bp, Homo sapien
attaaaaggtcaaggacgctaaagacaaactga

SEQ ID NO: 339844 - DNA, 33 bp, Homo sapien
attaaaaggtcaaggatgctaaagacaaactga

SEQ ID NO: 339845 - DNA, 33 bp, Homo sapien
aaaaacacttaggacacataactaaccatgaga

SEQ ID NO: 339846 - DNA, 33 bp, Homo sapien
aaaaacacttaggacagataactaaccatgaga

SEQ ID NO: 339847 - DNA, 33 bp, Homo sapien
tctccttcaatttttacaatacgttacaggtta

SEQ ID NO: 339848 - DNA, 33 bp, Homo sapien
tctccttcaatttttataatacgttacaggtta

SEQ ID NO: 339849 - DNA, 33 bp, Homo sapien
attactgcagctacataataagtcataaaattg

SEQ ID NO: 339850 - DNA, 33 bp, Homo sapien
attactgcagctacatcataagtcataaaattg

SEQ ID NO: 339851 - DNA, 33 bp, Homo sapien
ccatttagcttctagcaatagttttctagagtc

SEQ ID NO: 339852 - DNA, 33 bp, Homo sapien
ccatttagcttctagcgatagttttctagagtc

SEQ ID NO: 339853 - DNA, 33 bp, Homo sapien
ctaatactggcagtcaactgattctccagatac

SEQ ID NO: 339854 - DNA, 33 bp, Homo sapien
ctaatactggcagtcacctgattctccagatac

SEQ ID NO: 339855 - DNA, 33 bp, Homo sapien
attgtagaacaaattgcacagcatcatcacaca

SEQ ID NO: 339856 - DNA, 33 bp, Homo sapien
attgtagaacaaattggacagcatcatcacaca

SEQ ID NO: 339857 - DNA, 33 bp, Homo sapien
gagcgaggaaagattcccatgcacgagtcctcg

SEQ ID NO: 339858 - DNA, 33 bp, Homo sapien
gagcgaggaaagattcgcatgcacgagtcctcg

SEQ ID NO: 339859 - DNA, 33 bp, Homo sapien
taacagccttattggaagcaaattattcaatga

SEQ ID NO: 339860 - DNA, 33 bp, Homo sapien
taacagccttattggaggcaaattattcaatga

SEQ ID NO: 339861 - DNA, 33 bp, Homo sapien
ttgttcaaaggccaaccgtatatgatacatctt

SEQ ID NO: 339862 - DNA, 33 bp, Homo sapien
ttgttcaaaggccaactgtatatgatacatctt

SEQ ID NO: 339863 - DNA, 33 bp, Homo sapien
ccccagtgaggagggacggtcatttctgtgata

SEQ ID NO: 339864 - DNA, 33 bp, Homo sapien
ccccagtgaggagggatggtcatttctgtgata

SEQ ID NO: 339865 - DNA, 33 bp, Homo sapien
cattttttgactctcaatgactggggacttctg

SEQ ID NO: 339866 - DNA, 33 bp, Homo sapien
cattttttgactctcagtgactggggacttctg

SEQ ID NO: 339867 - DNA, 33 bp, Homo sapien
attgtacttagagataccaatactgtactatac

SEQ ID NO: 339868 - DNA, 33 bp, Homo sapien
attgtacttagagatagcaatactgtactatac

SEQ ID NO: 339869 - DNA, 33 bp, Homo sapien
tttactagaggtggtaagcagtataaatacttt

SEQ ID NO: 339870 - DNA, 33 bp, Homo sapien
tttactagaggtggtaggcagtataaatacttt

SEQ ID NO: 339871 - DNA, 33 bp, Homo sapien
gagtcttaagttctcaaattggggtgcttaaag

SEQ ID NO: 339872 - DNA, 33 bp, Homo sapien
gagtcttaagttctcacattggggtgcttaaag

SEQ ID NO: 339873 - DNA, 33 bp, Homo sapien
gggcacggaaagaatacggcagcttttctcaaa

SEQ ID NO: 339874 - DNA, 33 bp, Homo sapien
gggcacggaaagaatatggcagcttttctcaaa

SEQ ID NO: 339875 - DNA, 33 bp, Homo sapien
ctctttcctatgtagaagttatcagggcttcca

SEQ ID NO: 339876 - DNA, 33 bp, Homo sapien
ctctttcctatgtagaggttatcagggcttcca

SEQ ID NO: 339877 - DNA, 33 bp, Homo sapien
atgattataatgaagacgacaacaaccgcaaga

SEQ ID NO: 339878 - DNA, 33 bp, Homo sapien
atgattataatgaagatgacaacaaccgcaaga

SEQ ID NO: 339879 - DNA, 33 bp, Homo sapien
aaatactaaaatgtgcaattgttggattgtatg

SEQ ID NO: 339880 - DNA, 33 bp, Homo sapien
aaatactaaaatgtgcgattgttggattgtatg

SEQ ID NO: 339881 - DNA, 33 bp, Homo sapien
tagtatttacccagaggagctgaaaacttatgt

SEQ ID NO: 339882 - DNA, 33 bp, Homo sapien
tagtatttacccagagtagctgaaaacttatgt

SEQ ID NO: 339883 - DNA, 33 bp, Homo sapien
ggagcaattacctcccccatctggctccttagg

SEQ ID NO: 339884 - DNA, 33 bp, Homo sapien
ggagcaattacctccctcatctggctccttagg

SEQ ID NO: 339885 - DNA, 33 bp, Homo sapien
tgaagagttcccaacactgaatttgtatatgct

SEQ ID NO: 339886 - DNA, 33 bp, Homo sapien
tgaagagttcccaacattgaatttgtatatgct

SEQ ID NO: 339887 - DNA, 33 bp, Homo sapien
agtccttcaacagtaccgacagtggaagccaga

SEQ ID NO: 339888 - DNA, 33 bp, Homo sapien
agtccttcaacagtactgacagtggaagccaga

SEQ ID NO: 339889 - DNA, 33 bp, Homo sapien
actattttcaaatcaaagatgtttggcaatatg

SEQ ID NO: 339890 - DNA, 33 bp, Homo sapien
actattttcaaatcaaggatgtttggcaatatg

SEQ ID NO: 339891 - DNA, 33 bp, Homo sapien
ttgagcaaaagtgtaaacgatgtcagtacacca

SEQ ID NO: 339892 - DNA, 33 bp, Homo sapien
ttgagcaaaagtgtaagcgatgtcagtacacca

SEQ ID NO: 339893 - DNA, 33 bp, Homo sapien
caggaactgccttttacgtctgcaaataaactc

SEQ ID NO: 339894 - DNA, 33 bp, Homo sapien
caggaactgccttttatgtctgcaaataaactc

SEQ ID NO: 339895 - DNA, 33 bp, Homo sapien
ttgagcagtggcgtacggggtagagaacatggc

SEQ ID NO: 339896 - DNA, 33 bp, Homo sapien
ttgagcagtggcgtactgggtagagaacatggc

SEQ ID NO: 339897 - DNA, 33 bp, Homo sapien
tggttgcatcagacaaatcagtagcatcagaac

SEQ ID NO: 339898 - DNA, 33 bp, Homo sapien
tggttgcatcagacaagtcagtagcatcagaac

SEQ ID NO: 339899 - DNA, 33 bp, Homo sapien
tttcaaggctaactaaagacaagagaaatggaa

SEQ ID NO: 339900 - DNA, 33 bp, Homo sapien
tttcaaggctaactaatgacaagagaaatggaa

SEQ ID NO: 339901 - DNA, 33 bp, Homo sapien
tgtgaaagtataatgcacaaggaaccttctaca

SEQ ID NO: 339902 - DNA, 33 bp, Homo sapien
tgtgaaagtataatgcgcaaggaaccttctaca

SEQ ID NO: 339903 - DNA, 33 bp, Homo sapien
ttaatctcagtggtcactccatcagatcttcaa

SEQ ID NO: 339904 - DNA, 33 bp, Homo sapien
ttaatctcagtggtcattccatcagatcttcaa

SEQ ID NO: 339905 - DNA, 33 bp, Homo sapien
aggcacatgaatgctacataaacctaaacctcc

SEQ ID NO: 339906 - DNA, 33 bp, Homo sapien
aggcacatgaatgctatataaacctaaacctcc

SEQ ID NO: 339907 - DNA, 33 bp, Homo sapien
agttgatgtatttggcaatgggaaaggagaaaa

SEQ ID NO: 339908 - DNA, 33 bp, Homo sapien
agttgatgtatttggcgatgggaaaggagaaaa

SEQ ID NO: 339909 - DNA, 33 bp, Homo sapien
ttgtaagatcatggaggccaaaggtctggaaga

SEQ ID NO: 339910 - DNA, 33 bp, Homo sapien
ttgtaagatcatggagtccaaaggtctggaaga

SEQ ID NO: 339911 - DNA, 33 bp, Homo sapien
cttagctctttgcttacggtgttgccaaattcc

SEQ ID NO: 339912 - DNA, 33 bp, Homo sapien
cttagctctttgcttatggtgttgccaaattcc

SEQ ID NO: 339913 - DNA, 33 bp, Homo sapien
agtgttcgaaaggctaaaatctatgcacaaatt

SEQ ID NO: 339914 - DNA, 33 bp, Homo sapien
agtgttcgaaaggctagaatctatgcacaaatt

SEQ ID NO: 339915 - DNA, 33 bp, Homo sapien
aagcatccgtagctcaagggtacctgtagaaca

SEQ ID NO: 339916 - DNA, 33 bp, Homo sapien
aagcatccgtagctcacgggtacctgtagaaca

SEQ ID NO: 339917 - DNA, 33 bp, Homo sapien
ctgttcttttcctccaatccctcataaatagtt

SEQ ID NO: 339918 - DNA, 33 bp, Homo sapien
ctgttcttttcctccagtccctcataaatagtt

SEQ ID NO: 339919 - DNA, 33 bp, Homo sapien
catccttaggaaagcaagagtggaatgtttatc

SEQ ID NO: 339920 - DNA, 33 bp, Homo sapien
catccttaggaaagcaggagtggaatgtttatc

SEQ ID NO: 339921 - DNA, 33 bp, Homo sapien
ggggaggacatgttgcagaagaccagatcattt

SEQ ID NO: 339922 - DNA, 33 bp, Homo sapien
ggggaggacatgttgcggaagaccagatcattt

SEQ ID NO: 339923 - DNA, 33 bp, Homo sapien
gaagatgagaaagttgaaatctctctgatggca

SEQ ID NO: 339924 - DNA, 33 bp, Homo sapien
gaagatgagaaagttgcaatctctctgatggca

SEQ ID NO: 339925 - DNA, 33 bp, Homo sapien
ttaactacactgggcaaagccatctacaaggcc

SEQ ID NO: 339926 - DNA, 33 bp, Homo sapien
ttaactacactgggcacagccatctacaaggcc

SEQ ID NO: 339927 - DNA, 33 bp, Homo sapien
agccctgatttttgaactgactgtcatttatat

SEQ ID NO: 339928 - DNA, 33 bp, Homo sapien
agccctgatttttgaattgactgtcatttatat

SEQ ID NO: 339929 - DNA, 33 bp, Homo sapien
gggaatatcagtgttcaatcagtaaggatggcc

SEQ ID NO: 339930 - DNA, 33 bp, Homo sapien
gggaatatcagtgttcgatcagtaaggatggcc

SEQ ID NO: 339931 - DNA, 33 bp, Homo sapien
atctttaagatagtccaactcctaaagatctcc

SEQ ID NO: 339932 - DNA, 33 bp, Homo sapien
atctttaagatagtccgactcctaaagatctcc

SEQ ID NO: 339933 - DNA, 33 bp, Homo sapien
cctcctgttgtagctacggactaccttaaggag

SEQ ID NO: 339934 - DNA, 33 bp, Homo sapien
cctcctgttgtagctatggactaccttaaggag

SEQ ID NO: 339935 - DNA, 33 bp, Homo sapien
tccttcaacttttatcaaagagtccagctaagc

SEQ ID NO: 339936 - DNA, 33 bp, Homo sapien
tccttcaacttttatctaagagtccagctaagc

SEQ ID NO: 339937 - DNA, 33 bp, Homo sapien
agtatgtagaaacactgaggtacctagcttact

SEQ ID NO: 339938 - DNA, 33 bp, Homo sapien
agtatgtagaaacacttaggtacctagcttact

SEQ ID NO: 339939 - DNA, 33 bp, Homo sapien
aagaggcttggaaatcacacaaaatcacatctg

SEQ ID NO: 339940 - DNA, 33 bp, Homo sapien
aagaggcttggaaatcgcacaaaatcacatctg

SEQ ID NO: 339941 - DNA, 33 bp, Homo sapien
ctatggaatatacaacaattttaggtgcagtac

SEQ ID NO: 339942 - DNA, 33 bp, Homo sapien
ctatggaatatacaacgattttaggtgcagtac

SEQ ID NO: 339943 - DNA, 33 bp, Homo sapien
tccttattttaacttaccatgttttggaatacc

SEQ ID NO: 339944 - DNA, 33 bp, Homo sapien
tccttattttaacttatcatgttttggaatacc

SEQ ID NO: 339945 - DNA, 33 bp, Homo sapien
tcacagacctgagtagcatcttaaagtatagca

SEQ ID NO: 339946 - DNA, 33 bp, Homo sapien
tcacagacctgagtagtatcttaaagtatagca

SEQ ID NO: 339947 - DNA, 33 bp, Homo sapien
tgagttgctgtgagaccgaaatggagttaaaca

SEQ ID NO: 339948 - DNA, 33 bp, Homo sapien
tgagttgctgtgagactgaaatggagttaaaca

SEQ ID NO: 339949 - DNA, 33 bp, Homo sapien
gcatatttaaggcaaactcatcttcaataccca

SEQ ID NO: 339950 - DNA, 33 bp, Homo sapien
gcatatttaaggcaaagtcatcttcaataccca

SEQ ID NO: 339951 - DNA, 33 bp, Homo sapien
tttatgttggaagtcaaaagatggatcaaattt

SEQ ID NO: 339952 - DNA, 33 bp, Homo sapien
tttatgttggaagtcagaagatggatcaaattt

SEQ ID NO: 339953 - DNA, 33 bp, Homo sapien
gagggggaggtcaccacgcactgttgctcctgc

SEQ ID NO: 339954 - DNA, 33 bp, Homo sapien
gagggggaggtcaccatgcactgttgctcctgc

SEQ ID NO: 339955 - DNA, 33 bp, Homo sapien
aagccaaaaaattcaacgctgaaaatgatgaac

SEQ ID NO: 339956 - DNA, 33 bp, Homo sapien
aagccaaaaaattcaatgctgaaaatgatgaac

SEQ ID NO: 339957 - DNA, 33 bp, Homo sapien
attcaacattaaaccacaaacgccagtgagaag

SEQ ID NO: 339958 - DNA, 33 bp, Homo sapien
attcaacattaaaccagaaacgccagtgagaag

SEQ ID NO: 339959 - DNA, 33 bp, Homo sapien
gggccccctaaatgccagagctacggagataca

SEQ ID NO: 339960 - DNA, 33 bp, Homo sapien
gggccccctaaatgccggagctacggagataca

SEQ ID NO: 339961 - DNA, 33 bp, Homo sapien
aagacttctatcagacaatccctgaagttcctt

SEQ ID NO: 339962 - DNA, 33 bp, Homo sapien
aagacttctatcagacgatccctgaagttcctt

SEQ ID NO: 339963 - DNA, 33 bp, Homo sapien
tacagcagcataggcacattttatttccttgga

SEQ ID NO: 339964 - DNA, 33 bp, Homo sapien
tacagcagcataggcatattttatttccttgga

SEQ ID NO: 339965 - DNA, 33 bp, Homo sapien
tgcctgccaaatctgaagtccctgctatgaagg

SEQ ID NO: 339966 - DNA, 33 bp, Homo sapien
tgcctgccaaatctgaggtccctgctatgaagg

SEQ ID NO: 339967 - DNA, 33 bp, Homo sapien
gaagttttaacatagcacaggaaagaagggcat

SEQ ID NO: 339968 - DNA, 33 bp, Homo sapien
gaagttttaacatagcgcaggaaagaagggcat

SEQ ID NO: 339969 - DNA, 33 bp, Homo sapien
aaaggatatcagggaaatagactggggcatttt

SEQ ID NO: 339970 - DNA, 33 bp, Homo sapien
aaaggatatcagggaagtagactggggcatttt

SEQ ID NO: 339971 - DNA, 33 bp, Homo sapien
gtcattacgcccaaacaagtcaatttcaaggat

SEQ ID NO: 339972 - DNA, 33 bp, Homo sapien
gtcattacgcccaaacgagtcaatttcaaggat

SEQ ID NO: 339973 - DNA, 33 bp, Homo sapien
aagtcattattcacaacgtaagcacctttgtct

SEQ ID NO: 339974 - DNA, 33 bp, Homo sapien
aagtcattattcacaatgtaagcacctttgtct

SEQ ID NO: 339975 - DNA, 33 bp, Homo sapien
cctcagatcgttctgtcaatcttcttggcccca

SEQ ID NO: 339976 - DNA, 33 bp, Homo sapien
cctcagatcgttctgttaatcttcttggcccca

SEQ ID NO: 339977 - DNA, 33 bp, Homo sapien
atctacacatacacacacatctgcggtcactga

SEQ ID NO: 339978 - DNA, 33 bp, Homo sapien
atctacacatacacactcatctgcggtcactga

SEQ ID NO: 339979 - DNA, 33 bp, Homo sapien
ctcagaatctcactccccttccattctgtcacc

SEQ ID NO: 339980 - DNA, 33 bp, Homo sapien
ctcagaatctcactcctcttccattctgtcacc

SEQ ID NO: 339981 - DNA, 33 bp, Homo sapien
ccctaaagcattgatacattcttcaactcataa

SEQ ID NO: 339982 - DNA, 33 bp, Homo sapien
ccctaaagcattgatatattcttcaactcataa

SEQ ID NO: 339983 - DNA, 33 bp, Homo sapien
aacactgccctctgcacgactcagggaattcac

SEQ ID NO: 339984 - DNA, 33 bp, Homo sapien
aacactgccctctgcatgactcagggaattcac

SEQ ID NO: 339985 - DNA, 33 bp, Homo sapien
cctgagttgtcccactcaacactgccctctgca

SEQ ID NO: 339986 - DNA, 33 bp, Homo sapien
cctgagttgtcccacttaacactgccctctgca

SEQ ID NO: 339987 - DNA, 33 bp, Homo sapien
taaaaatctgccactcaaaaactatatctggct

SEQ ID NO: 339988 - DNA, 33 bp, Homo sapien
taaaaatctgccactcgaaaactatatctggct

SEQ ID NO: 339989 - DNA, 33 bp, Homo sapien
atgcatctattaaccacgaaatggacgtgactc

SEQ ID NO: 339990 - DNA, 33 bp, Homo sapien
atgcatctattaaccatgaaatggacgtgactc

SEQ ID NO: 339991 - DNA, 33 bp, Homo sapien
tcccaacactctctgcccatgtttctctgtctc

SEQ ID NO: 339992 - DNA, 33 bp, Homo sapien
tcccaacactctctgctcatgtttctctgtctc

SEQ ID NO: 339993 - DNA, 33 bp, Homo sapien
aggctggtagtgaggacagttaatgctgcatgc

SEQ ID NO: 339994 - DNA, 33 bp, Homo sapien
aggctggtagtgaggagagttaatgctgcatgc

SEQ ID NO: 339995 - DNA, 33 bp, Homo sapien
ctgatctagacatgagaatggtcacgtgtccat

SEQ ID NO: 339996 - DNA, 33 bp, Homo sapien
ctgatctagacatgagcatggtcacgtgtccat

SEQ ID NO: 339997 - DNA, 33 bp, Homo sapien
tcctaacctgtggacaatatttcttaccttaat

SEQ ID NO: 339998 - DNA, 33 bp, Homo sapien
tcctaacctgtggacactatttcttaccttaat

SEQ ID NO: 339999 - DNA, 33 bp, Homo sapien
aaaacatattatcaaacgtttatgacacacaag

SEQ ID NO: 340000 - DNA, 33 bp, Homo sapien
aaaacatattatcaaatgtttatgacacacaag

SEQ ID NO: 340001 - DNA, 33 bp, Homo sapien
ctcattggtctgggtacgatcagtgaatataga

SEQ ID NO: 340002 - DNA, 33 bp, Homo sapien
ctcattggtctgggtatgatcagtgaatataga

SEQ ID NO: 340003 - DNA, 33 bp, Homo sapien
ccactcttattttaaacaactcacaggaagcca

SEQ ID NO: 340004 - DNA, 33 bp, Homo sapien
ccactcttattttaaagaactcacaggaagcca

SEQ ID NO: 340005 - DNA, 33 bp, Homo sapien
gattattttgccctaaacagcattattgtgaca

SEQ ID NO: 340006 - DNA, 33 bp, Homo sapien
gattattttgccctaagcagcattattgtgaca

SEQ ID NO: 340007 - DNA, 33 bp, Homo sapien
actggttgatcataaaatatgagtgttgagaga

SEQ ID NO: 340008 - DNA, 33 bp, Homo sapien
actggttgatcataaattatgagtgttgagaga

SEQ ID NO: 340009 - DNA, 33 bp, Homo sapien
acctctcatagcttacactggagaccgtttata

SEQ ID NO: 340010 - DNA, 33 bp, Homo sapien
acctctcatagcttaccctggagaccgtttata

SEQ ID NO: 340011 - DNA, 33 bp, Homo sapien
ccctcctgcatgacaaacttctgggctctgcaa

SEQ ID NO: 340012 - DNA, 33 bp, Homo sapien
ccctcctgcatgacaaccttctgggctctgcaa

SEQ ID NO: 340013 - DNA, 33 bp, Homo sapien
attctgcttactagccaatgactctagcaagtc

SEQ ID NO: 340014 - DNA, 33 bp, Homo sapien
attctgcttactagccgatgactctagcaagtc

SEQ ID NO: 340015 - DNA, 33 bp, Homo sapien
taataggtgctagcaaggttgtggagaaaaggg

SEQ ID NO: 340016 - DNA, 33 bp, Homo sapien
taataggtgctagcaatgttgtggagaaaaggg

SEQ ID NO: 340017 - DNA, 33 bp, Homo sapien
tttaattcatcttacactgatttttgtatgtag

SEQ ID NO: 340018 - DNA, 33 bp, Homo sapien
tttaattcatcttacattgatttttgtatgtag

SEQ ID NO: 340019 - DNA, 33 bp, Homo sapien
cctttccatctgtggaagtcttggccatgctta

SEQ ID NO: 340020 - DNA, 33 bp, Homo sapien
cctttccatctgtggaggtcttggccatgctta

SEQ ID NO: 340021 - DNA, 33 bp, Homo sapien
tgacttaagctagacaacaagctacttgtgggg

SEQ ID NO: 340022 - DNA, 33 bp, Homo sapien
tgacttaagctagacagcaagctacttgtgggg

SEQ ID NO: 340023 - DNA, 33 bp, Homo sapien
gtggggaataggggtaaaaattaatattgcttt

SEQ ID NO: 340024 - DNA, 33 bp, Homo sapien
gtggggaataggggtagaaattaatattgcttt

SEQ ID NO: 340025 - DNA, 33 bp, Homo sapien
caacaggataatacctcacatttacagagggct

SEQ ID NO: 340026 - DNA, 33 bp, Homo sapien
caacaggataataccttacatttacagagggct

SEQ ID NO: 340027 - DNA, 33 bp, Homo sapien
aacttgctcaggatacacatctaataatgaggg

SEQ ID NO: 340028 - DNA, 33 bp, Homo sapien
aacttgctcaggatacgcatctaataatgaggg

SEQ ID NO: 340029 - DNA, 33 bp, Homo sapien
ggtgctcactcctcaaaagaccctcagcacctg

SEQ ID NO: 340030 - DNA, 33 bp, Homo sapien
ggtgctcactcctcaacagaccctcagcacctg

SEQ ID NO: 340031 - DNA, 33 bp, Homo sapien
gctcatcataaagttacaggcaccagttcagag

SEQ ID NO: 340032 - DNA, 33 bp, Homo sapien
gctcatcataaagttataggcaccagttcagag

SEQ ID NO: 340033 - DNA, 33 bp, Homo sapien
caaacttctttagggacccaggagtgcaggtct

SEQ ID NO: 340034 - DNA, 33 bp, Homo sapien
caaacttctttagggatccaggagtgcaggtct

SEQ ID NO: 340035 - DNA, 33 bp, Homo sapien
ataaaagcctcctgaaatacagtttggatctta

SEQ ID NO: 340036 - DNA, 33 bp, Homo sapien
ataaaagcctcctgaagtacagtttggatctta

SEQ ID NO: 340037 - DNA, 33 bp, Homo sapien
aaaaatagtaacaatgcagcaaatggttaattg

SEQ ID NO: 340038 - DNA, 33 bp, Homo sapien
aaaaatagtaacaatgtagcaaatggttaattg

SEQ ID NO: 340039 - DNA, 33 bp, Homo sapien
aatgtgtgcccaagaagaaagggtaaacactct

SEQ ID NO: 340040 - DNA, 33 bp, Homo sapien
aatgtgtgcccaagaataaagggtaaacactct

SEQ ID NO: 340041 - DNA, 33 bp, Homo sapien
gaccattcctggggataagaagccagtaacaca

SEQ ID NO: 340042 - DNA, 33 bp, Homo sapien
gaccattcctggggatgagaagccagtaacaca

SEQ ID NO: 340043 - DNA, 33 bp, Homo sapien
ttttgtctctcctagacgaatttacctttcctc

SEQ ID NO: 340044 - DNA, 33 bp, Homo sapien
ttttgtctctcctagatgaatttacctttcctc

SEQ ID NO: 340045 - DNA, 33 bp, Homo sapien
tggtcctctaccattacataataaagggtcttt

SEQ ID NO: 340046 - DNA, 33 bp, Homo sapien
tggtcctctaccattagataataaagggtcttt

SEQ ID NO: 340047 - DNA, 33 bp, Homo sapien
aaacagccagaattaaatcactcagaattgggg

SEQ ID NO: 340048 - DNA, 33 bp, Homo sapien
aaacagccagaattaagtcactcagaattgggg

SEQ ID NO: 340049 - DNA, 33 bp, Homo sapien
ttttcatggtccacaacggcccctcacgtcttg

SEQ ID NO: 340050 - DNA, 33 bp, Homo sapien
ttttcatggtccacaatggcccctcacgtcttg

SEQ ID NO: 340051 - DNA, 33 bp, Homo sapien
ctaagcgcattatatccccaggacaaggctgga

SEQ ID NO: 340052 - DNA, 33 bp, Homo sapien
ctaagcgcattatatcgccaggacaaggctgga

SEQ ID NO: 340053 - DNA, 33 bp, Homo sapien
gctccttccaagctgaccaactcacaccccttg

SEQ ID NO: 340054 - DNA, 33 bp, Homo sapien
gctccttccaagctgatcaactcacaccccttg

SEQ ID NO: 340055 - DNA, 33 bp, Homo sapien
ataatataacagtcaacagtcgctaagatttgt

SEQ ID NO: 340056 - DNA, 33 bp, Homo sapien
ataatataacagtcaatagtcgctaagatttgt

SEQ ID NO: 340057 - DNA, 33 bp, Homo sapien
gatagaactctcccctcacttagtatgcatcgg

SEQ ID NO: 340058 - DNA, 33 bp, Homo sapien
gatagaactctccccttacttagtatgcatcgg

SEQ ID NO: 340059 - DNA, 33 bp, Homo sapien
atgtcaaatttcaccaaagtgtcaagatctctt

SEQ ID NO: 340060 - DNA, 33 bp, Homo sapien
atgtcaaatttcaccatagtgtcaagatctctt

SEQ ID NO: 340061 - DNA, 33 bp, Homo sapien
gtcctcaaacctcaataacctcaagtatacaca

SEQ ID NO: 340062 - DNA, 33 bp, Homo sapien
gtcctcaaacctcaatcacctcaagtatacaca

SEQ ID NO: 340063 - DNA, 33 bp, Homo sapien
aagtagcttagattgaagaccagtggaattgaa

SEQ ID NO: 340064 - DNA, 33 bp, Homo sapien
aagtagcttagattgaggaccagtggaattgaa

SEQ ID NO: 340065 - DNA, 33 bp, Homo sapien
taaagatcaggaagataagaagaccatttgggg

SEQ ID NO: 340066 - DNA, 33 bp, Homo sapien
taaagatcaggaagatgagaagaccatttgggg

SEQ ID NO: 340067 - DNA, 33 bp, Homo sapien
agaggttttggtctccactcacgttaatctttt

SEQ ID NO: 340068 - DNA, 33 bp, Homo sapien
agaggttttggtctccgctcacgttaatctttt

SEQ ID NO: 340069 - DNA, 33 bp, Homo sapien
tagctgaggctgatgaaaggcatcacataagtg

SEQ ID NO: 340070 - DNA, 33 bp, Homo sapien
tagctgaggctgatgagaggcatcacataagtg

SEQ ID NO: 340071 - DNA, 33 bp, Homo sapien
aatccttacgcatgacaatctgagagcgcttat

SEQ ID NO: 340072 - DNA, 33 bp, Homo sapien
aatccttacgcatgacgatctgagagcgcttat

SEQ ID NO: 340073 - DNA, 33 bp, Homo sapien
tgttttacattcaaacacagtctttttcaattt

SEQ ID NO: 340074 - DNA, 33 bp, Homo sapien
tgttttacattcaaacgcagtctttttcaattt

SEQ ID NO: 340075 - DNA, 33 bp, Homo sapien
actggggatcccatcactagactgtaaataact

SEQ ID NO: 340076 - DNA, 33 bp, Homo sapien
actggggatcccatcattagactgtaaataact

SEQ ID NO: 340077 - DNA, 33 bp, Homo sapien
gaggagtgagttgagaaatatggagaaagtgag

SEQ ID NO: 340078 - DNA, 33 bp, Homo sapien
gaggagtgagttgagacatatggagaaagtgag

SEQ ID NO: 340079 - DNA, 33 bp, Homo sapien
cacccacagtagaagacgaggctggagcttttg

SEQ ID NO: 340080 - DNA, 33 bp, Homo sapien
cacccacagtagaagatgaggctggagcttttg

SEQ ID NO: 340081 - DNA, 33 bp, Homo sapien
catcagtttttcatcaagcaaaagaaattgaac

SEQ ID NO: 340082 - DNA, 33 bp, Homo sapien
catcagtttttcatcaggcaaaagaaattgaac

SEQ ID NO: 340083 - DNA, 33 bp, Homo sapien
agtgctaactaaagtcagaatcagtattcaaaa

SEQ ID NO: 340084 - DNA, 33 bp, Homo sapien
agtgctaactaaagtccgaatcagtattcaaaa

SEQ ID NO: 340085 - DNA, 33 bp, Homo sapien
ctgtgtcatttagtaagtaaagcagccagagaa

SEQ ID NO: 340086 - DNA, 33 bp, Homo sapien
ctgtgtcatttagtaattaaagcagccagagaa

SEQ ID NO: 340087 - DNA, 33 bp, Homo sapien
aataatccagtggttaagacatgaactttagag

SEQ ID NO: 340088 - DNA, 33 bp, Homo sapien
aataatccagtggttacgacatgaactttagag

SEQ ID NO: 340089 - DNA, 33 bp, Homo sapien
taaggtcacactttaacgggctgaaacttcgga

SEQ ID NO: 340090 - DNA, 33 bp, Homo sapien
taaggtcacactttaatgggctgaaacttcgga

SEQ ID NO: 340091 - DNA, 33 bp, Homo sapien
attgacgcgctgagagacaacataacatcagtt

SEQ ID NO: 340092 - DNA, 33 bp, Homo sapien
attgacgcgctgagaggcaacataacatcagtt

SEQ ID NO: 340093 - DNA, 33 bp, Homo sapien
aagtccatgtgtactcagaggaaacagcaattc

SEQ ID NO: 340094 - DNA, 33 bp, Homo sapien
aagtccatgtgtactcggaggaaacagcaattc

SEQ ID NO: 340095 - DNA, 33 bp, Homo sapien
tttgtccaggtatccacgcggcataggcttcca

SEQ ID NO: 340096 - DNA, 33 bp, Homo sapien
tttgtccaggtatccatgcggcataggcttcca

SEQ ID NO: 340097 - DNA, 33 bp, Homo sapien
gtcattgctgaatggcactctattatgtgaata

SEQ ID NO: 340098 - DNA, 33 bp, Homo sapien
gtcattgctgaatggcgctctattatgtgaata

SEQ ID NO: 340099 - DNA, 33 bp, Homo sapien
attgagctaagcatggaaatgaataaatgaaca

SEQ ID NO: 340100 - DNA, 33 bp, Homo sapien
attgagctaagcatgggaatgaataaatgaaca

SEQ ID NO: 340101 - DNA, 33 bp, Homo sapien
atattttggatatccacgaagagagaggaaggt

SEQ ID NO: 340102 - DNA, 33 bp, Homo sapien
atattttggatatccatgaagagagaggaaggt

SEQ ID NO: 340103 - DNA, 33 bp, Homo sapien
tgatcttgggtcggaaaaaagtctcaaaaacta

SEQ ID NO: 340104 - DNA, 33 bp, Homo sapien
tgatcttgggtcggaagaaagtctcaaaaacta

SEQ ID NO: 340105 - DNA, 33 bp, Homo sapien
ttgctcatatggcacaaaacataactgctatcc

SEQ ID NO: 340106 - DNA, 33 bp, Homo sapien
ttgctcatatggcacagaacataactgctatcc

SEQ ID NO: 340107 - DNA, 33 bp, Homo sapien
taaaggctgattccaccgaaaaagactctccct

SEQ ID NO: 340108 - DNA, 33 bp, Homo sapien
taaaggctgattccactgaaaaagactctccct

SEQ ID NO: 340109 - DNA, 33 bp, Homo sapien
ccaccagatgacttaactatcaccccaaaacta

SEQ ID NO: 340110 - DNA, 33 bp, Homo sapien
ccaccagatgacttaattatcaccccaaaacta

SEQ ID NO: 340111 - DNA, 33 bp, Homo sapien
ctgtagtctgctgggacggcatttgagcttact

SEQ ID NO: 340112 - DNA, 33 bp, Homo sapien
ctgtagtctgctgggatggcatttgagcttact

SEQ ID NO: 340113 - DNA, 33 bp, Homo sapien
ggtgcttatacatccgcagcagaatcatgtaac

SEQ ID NO: 340114 - DNA, 33 bp, Homo sapien
ggtgcttatacatccgtagcagaatcatgtaac

SEQ ID NO: 340115 - DNA, 33 bp, Homo sapien
atggaaagggcagaaacaaatttagggcattat

SEQ ID NO: 340116 - DNA, 33 bp, Homo sapien
atggaaagggcagaaagaaatttagggcattat

SEQ ID NO: 340117 - DNA, 33 bp, Homo sapien
ttaggactgacattccagacagagaaaagtagc

SEQ ID NO: 340118 - DNA, 33 bp, Homo sapien
ttaggactgacattcccgacagagaaaagtagc

SEQ ID NO: 340119 - DNA, 33 bp, Homo sapien
ctgagtaaggttgacaataagtttctagtactc

SEQ ID NO: 340120 - DNA, 33 bp, Homo sapien
ctgagtaaggttgacagtaagtttctagtactc

SEQ ID NO: 340121 - DNA, 33 bp, Homo sapien
taaggtaaaggcaacacaggctctaacagttca

SEQ ID NO: 340122 - DNA, 33 bp, Homo sapien
taaggtaaaggcaacataggctctaacagttca

SEQ ID NO: 340123 - DNA, 33 bp, Homo sapien
caccacttaactttcaagatttacattgtaaac

SEQ ID NO: 340124 - DNA, 33 bp, Homo sapien
caccacttaactttcaggatttacattgtaaac

SEQ ID NO: 340125 - DNA, 33 bp, Homo sapien
ttgaaaatattcctacaagcctgtggatgaagt

SEQ ID NO: 340126 - DNA, 33 bp, Homo sapien
ttgaaaatattcctacgagcctgtggatgaagt

SEQ ID NO: 340127 - DNA, 33 bp, Homo sapien
aattttgctactaatgcatgaatctctttactt

SEQ ID NO: 340128 - DNA, 33 bp, Homo sapien
aattttgctactaatgtatgaatctctttactt

SEQ ID NO: 340129 - DNA, 33 bp, Homo sapien
tgtgatgttaacaataggtaaagtcataaaagc

SEQ ID NO: 340130 - DNA, 33 bp, Homo sapien
tgtgatgttaacaatatgtaaagtcataaaagc

SEQ ID NO: 340131 - DNA, 33 bp, Homo sapien
gaaattggcataaaaaacactgacctttcctct

SEQ ID NO: 340132 - DNA, 33 bp, Homo sapien
gaaattggcataaaaagcactgacctttcctct

SEQ ID NO: 340133 - DNA, 33 bp, Homo sapien
acttgtcttagcattgaagaaaatactggggga

SEQ ID NO: 340134 - DNA, 33 bp, Homo sapien
acttgtcttagcattggagaaaatactggggga

SEQ ID NO: 340135 - DNA, 33 bp, Homo sapien
gtgaaaaaattgaagacgtaggcaaagaaaggg

SEQ ID NO: 340136 - DNA, 33 bp, Homo sapien
gtgaaaaaattgaagatgtaggcaaagaaaggg

SEQ ID NO: 340137 - DNA, 33 bp, Homo sapien
cattaaaaaataaaacagcgaggagagtgcatc

SEQ ID NO: 340138 - DNA, 33 bp, Homo sapien
cattaaaaaataaaactgcgaggagagtgcatc

SEQ ID NO: 340139 - DNA, 33 bp, Homo sapien
tttcagaaattacaaagccctttctacatagta

SEQ ID NO: 340140 - DNA, 33 bp, Homo sapien
tttcagaaattacaaatccctttctacatagta

SEQ ID NO: 340141 - DNA, 33 bp, Homo sapien
gacagcaactgaaaaagtgatggtgaagtcatg

SEQ ID NO: 340142 - DNA, 33 bp, Homo sapien
gacagcaactgaaaaattgatggtgaagtcatg

SEQ ID NO: 340143 - DNA, 33 bp, Homo sapien
atttgtgagcttgtccaaagtaattttgcagaa

SEQ ID NO: 340144 - DNA, 33 bp, Homo sapien
atttgtgagcttgtccgaagtaattttgcagaa

SEQ ID NO: 340145 - DNA, 33 bp, Homo sapien
tcagaagagcagaatacatgaagcacagaggat

SEQ ID NO: 340146 - DNA, 33 bp, Homo sapien
tcagaagagcagaatagatgaagcacagaggat

SEQ ID NO: 340147 - DNA, 33 bp, Homo sapien
aatctttatgaccttgaattatgtaatatatga

SEQ ID NO: 340148 - DNA, 33 bp, Homo sapien
aatctttatgaccttgcattatgtaatatatga

SEQ ID NO: 340149 - DNA, 33 bp, Homo sapien
agtgtgacatatatgacgtgcatgaaaatacaa

SEQ ID NO: 340150 - DNA, 33 bp, Homo sapien
agtgtgacatatatgatgtgcatgaaaatacaa

SEQ ID NO: 340151 - DNA, 33 bp, Homo sapien
cacattgttcaatacacaggatagtaactcttt

SEQ ID NO: 340152 - DNA, 33 bp, Homo sapien
cacattgttcaatacataggatagtaactcttt

SEQ ID NO: 340153 - DNA, 33 bp, Homo sapien
tctgagcaagggacacagaaaagtggatgtgtt

SEQ ID NO: 340154 - DNA, 33 bp, Homo sapien
tctgagcaagggacacggaaaagtggatgtgtt

SEQ ID NO: 340155 - DNA, 33 bp, Homo sapien
agagcagaagatgatcaccaaactcagactttt

SEQ ID NO: 340156 - DNA, 33 bp, Homo sapien
agagcagaagatgatcgccaaactcagactttt

SEQ ID NO: 340157 - DNA, 33 bp, Homo sapien
tctgcagtgcctgaaagtgctgacttctgttcg

SEQ ID NO: 340158 - DNA, 33 bp, Homo sapien
tctgcagtgcctgaaattgctgacttctgttcg

SEQ ID NO: 340159 - DNA, 33 bp, Homo sapien
agggactgaacttcaacaggtcctccggaggtg

SEQ ID NO: 340160 - DNA, 33 bp, Homo sapien
agggactgaacttcaagaggtcctccggaggtg

SEQ ID NO: 340161 - DNA, 33 bp, Homo sapien
acaaaatacctgaaatcaaaactcaacaggttg

SEQ ID NO: 340162 - DNA, 33 bp, Homo sapien
acaaaatacctgaaattaaaactcaacaggttg

SEQ ID NO: 340163 - DNA, 33 bp, Homo sapien
gttaagagccaagcaacgaatggagaaatcaga

SEQ ID NO: 340164 - DNA, 33 bp, Homo sapien
gttaagagccaagcaatgaatggagaaatcaga

SEQ ID NO: 340165 - DNA, 33 bp, Homo sapien
cagccaccaggcaaaaccacattctacaattgc

SEQ ID NO: 340166 - DNA, 33 bp, Homo sapien
cagccaccaggcaaaagcacattctacaattgc

SEQ ID NO: 340167 - DNA, 33 bp, Homo sapien
atgtgttcaaagaccccgaattttaagaagaca

SEQ ID NO: 340168 - DNA, 33 bp, Homo sapien
atgtgttcaaagaccctgaattttaagaagaca

SEQ ID NO: 340169 - DNA, 33 bp, Homo sapien
cacacacaccagttgcaaatgttattaaaatgc

SEQ ID NO: 340170 - DNA, 33 bp, Homo sapien
cacacacaccagttgcgaatgttattaaaatgc

SEQ ID NO: 340171 - DNA, 33 bp, Homo sapien
ccttccagcaaacgtacgggaatgtgctttcaa

SEQ ID NO: 340172 - DNA, 33 bp, Homo sapien
ccttccagcaaacgtatgggaatgtgctttcaa

SEQ ID NO: 340173 - DNA, 33 bp, Homo sapien
atctggaggtctcaaaatgtagtccctgaacaa

SEQ ID NO: 340174 - DNA, 33 bp, Homo sapien
atctggaggtctcaaagtgtagtccctgaacaa

SEQ ID NO: 340175 - DNA, 33 bp, Homo sapien
attcccaaacctaacacggaaagcattttgcag

SEQ ID NO: 340176 - DNA, 33 bp, Homo sapien
attcccaaacctaacatggaaagcattttgcag

SEQ ID NO: 340177 - DNA, 33 bp, Homo sapien
cacacatccacacttacaccaaattattaatgt

SEQ ID NO: 340178 - DNA, 33 bp, Homo sapien
cacacatccacacttataccaaattattaatgt

SEQ ID NO: 340179 - DNA, 33 bp, Homo sapien
gcctggtcaaagcagacggttttattgagatgt

SEQ ID NO: 340180 - DNA, 33 bp, Homo sapien
gcctggtcaaagcagagggttttattgagatgt

SEQ ID NO: 340181 - DNA, 33 bp, Homo sapien
tcctgtgcagcacaaaacctgtataatcctgta

SEQ ID NO: 340182 - DNA, 33 bp, Homo sapien
tcctgtgcagcacaaagcctgtataatcctgta

SEQ ID NO: 340183 - DNA, 33 bp, Homo sapien
atcagcggagacctgacggagaaggctgtgtag

SEQ ID NO: 340184 - DNA, 33 bp, Homo sapien
atcagcggagacctgatggagaaggctgtgtag

SEQ ID NO: 340185 - DNA, 33 bp, Homo sapien
tatgtgcatctgtggacccgggtatcagcggag

SEQ ID NO: 340186 - DNA, 33 bp, Homo sapien
tatgtgcatctgtggatccgggtatcagcggag

SEQ ID NO: 340187 - DNA, 33 bp, Homo sapien
aattcatcatgttttgcacacattcctggtttc

SEQ ID NO: 340188 - DNA, 33 bp, Homo sapien
aattcatcatgttttggacacattcctggtttc

SEQ ID NO: 340189 - DNA, 33 bp, Homo sapien
gcatggtacagaccagccagataaattctaact

SEQ ID NO: 340190 - DNA, 33 bp, Homo sapien
gcatggtacagaccagtcagataaattctaact

SEQ ID NO: 340191 - DNA, 33 bp, Homo sapien
taggttgtcatgacttcaaaagaattagttttg

SEQ ID NO: 340192 - DNA, 33 bp, Homo sapien
taggttgtcatgactttaaaagaattagttttg

SEQ ID NO: 340193 - DNA, 33 bp, Homo sapien
tctttcatcatatagacaataggaaactgtaca

SEQ ID NO: 340194 - DNA, 33 bp, Homo sapien
tctttcatcatatagataataggaaactgtaca

SEQ ID NO: 340195 - DNA, 33 bp, Homo sapien
tctgatcttctattgccgattgaattactccat

SEQ ID NO: 340196 - DNA, 33 bp, Homo sapien
tctgatcttctattgctgattgaattactccat

SEQ ID NO: 340197 - DNA, 33 bp, Homo sapien
tcccagtatttccgaactacattttttaagtgg

SEQ ID NO: 340198 - DNA, 33 bp, Homo sapien
tcccagtatttccgaagtacattttttaagtgg

SEQ ID NO: 340199 - DNA, 33 bp, Homo sapien
ttttgctgtcagggtaacattctgtggatattg

SEQ ID NO: 340200 - DNA, 33 bp, Homo sapien
ttttgctgtcagggtagcattctgtggatattg

SEQ ID NO: 340201 - DNA, 33 bp, Homo sapien
aagcaaagactagaaacaacattagcgttgtcc

SEQ ID NO: 340202 - DNA, 33 bp, Homo sapien
aagcaaagactagaaagaacattagcgttgtcc

SEQ ID NO: 340203 - DNA, 33 bp, Homo sapien
gaagggactgctgatagaatttagttcatcctt

SEQ ID NO: 340204 - DNA, 33 bp, Homo sapien
gaagggactgctgatataatttagttcatcctt

SEQ ID NO: 340205 - DNA, 33 bp, Homo sapien
tggaggaatcacacaactgtttaggaaagagac

SEQ ID NO: 340206 - DNA, 33 bp, Homo sapien
tggaggaatcacacaattgtttaggaaagagac

SEQ ID NO: 340207 - DNA, 33 bp, Homo sapien
ggacctgtgccattcacgtaaaaaatggctttt

SEQ ID NO: 340208 - DNA, 33 bp, Homo sapien
ggacctgtgccattcatgtaaaaaatggctttt

SEQ ID NO: 340209 - DNA, 33 bp, Homo sapien
gtcctgtacatatcaccgtcctggtgcatacca

SEQ ID NO: 340210 - DNA, 33 bp, Homo sapien
gtcctgtacatatcactgtcctggtgcatacca

SEQ ID NO: 340211 - DNA, 33 bp, Homo sapien
ctgttgtgggattatcactaaatatggaaacac

SEQ ID NO: 340212 - DNA, 33 bp, Homo sapien
ctgttgtgggattatcgctaaatatggaaacac

SEQ ID NO: 340213 - DNA, 33 bp, Homo sapien
tgggagaatggaattacgagttctttccactta

SEQ ID NO: 340214 - DNA, 33 bp, Homo sapien
tgggagaatggaattatgagttctttccactta

SEQ ID NO: 340215 - DNA, 33 bp, Homo sapien
tttctcagaagaagacaaagaagttgggcccta

SEQ ID NO: 340216 - DNA, 33 bp, Homo sapien
tttctcagaagaagacgaagaagttgggcccta

SEQ ID NO: 340217 - DNA, 33 bp, Homo sapien
tagctggtttctttcacaagagaaatgtctctg

SEQ ID NO: 340218 - DNA, 33 bp, Homo sapien
tagctggtttctttcataagagaaatgtctctg

SEQ ID NO: 340219 - DNA, 33 bp, Homo sapien
agccttagtgacatggcattcaaaaaacatttt

SEQ ID NO: 340220 - DNA, 33 bp, Homo sapien
agccttagtgacatgggattcaaaaaacatttt

SEQ ID NO: 340221 - DNA, 33 bp, Homo sapien
cctttgacagtctttcaaatagtaagcagcaac

SEQ ID NO: 340222 - DNA, 33 bp, Homo sapien
cctttgacagtctttcgaatagtaagcagcaac

SEQ ID NO: 340223 - DNA, 33 bp, Homo sapien
ttttgctctccaggtacgccatgtgccttcttg

SEQ ID NO: 340224 - DNA, 33 bp, Homo sapien
ttttgctctccaggtatgccatgtgccttcttg

SEQ ID NO: 340225 - DNA, 33 bp, Homo sapien
tcagctttgaacagtcacatctttgtgggctca

SEQ ID NO: 340226 - DNA, 33 bp, Homo sapien
tcagctttgaacagtcgcatctttgtgggctca

SEQ ID NO: 340227 - DNA, 33 bp, Homo sapien
tgtgctctgtgtatcaacaagaagattatgtat

SEQ ID NO: 340228 - DNA, 33 bp, Homo sapien
tgtgctctgtgtatcatcaagaagattatgtat

SEQ ID NO: 340229 - DNA, 33 bp, Homo sapien
tcttctgggaataagccctggaagtgattgtgt

SEQ ID NO: 340230 - DNA, 33 bp, Homo sapien
tcttctgggaataagctctggaagtgattgtgt

SEQ ID NO: 340231 - DNA, 33 bp, Homo sapien
tggcagggtggaaatacgctctgttgtcaccag

SEQ ID NO: 340232 - DNA, 33 bp, Homo sapien
tggcagggtggaaatatgctctgttgtcaccag

SEQ ID NO: 340233 - DNA, 33 bp, Homo sapien
ggagatgatgatgtccagatgggggagtcagtg

SEQ ID NO: 340234 - DNA, 33 bp, Homo sapien
ggagatgatgatgtccggatgggggagtcagtg

SEQ ID NO: 340235 - DNA, 33 bp, Homo sapien
agtgtgaagcttagacaaatcaaggctagacgt

SEQ ID NO: 340236 - DNA, 33 bp, Homo sapien
agtgtgaagcttagacgaatcaaggctagacgt

SEQ ID NO: 340237 - DNA, 33 bp, Homo sapien
cgcagctctgggttaccgaaagagtttgtggca

SEQ ID NO: 340238 - DNA, 33 bp, Homo sapien
cgcagctctgggttacggaaagagtttgtggca

SEQ ID NO: 340239 - DNA, 33 bp, Homo sapien
caagacatctggcgaaaaggaggaggaaatctc

SEQ ID NO: 340240 - DNA, 33 bp, Homo sapien
caagacatctggcgaagaggaggaggaaatctc

SEQ ID NO: 340241 - DNA, 33 bp, Homo sapien
gtcaggctattgaaaacctctccttgaaggaaa

SEQ ID NO: 340242 - DNA, 33 bp, Homo sapien
gtcaggctattgaaaatctctccttgaaggaaa

SEQ ID NO: 340243 - DNA, 33 bp, Homo sapien
tgtcagttttctgaaggcctcagtgtaatgcaa

SEQ ID NO: 340244 - DNA, 33 bp, Homo sapien
tgtcagttttctgaagtcctcagtgtaatgcaa

SEQ ID NO: 340245 - DNA, 33 bp, Homo sapien
cctccctgagttcacacagattaagataaaatg

SEQ ID NO: 340246 - DNA, 33 bp, Homo sapien
cctccctgagttcacatagattaagataaaatg

SEQ ID NO: 340247 - DNA, 33 bp, Homo sapien
ccatgccactgagaaacaaggtggtttaggaaa

SEQ ID NO: 340248 - DNA, 33 bp, Homo sapien
ccatgccactgagaaataaggtggtttaggaaa

SEQ ID NO: 340249 - DNA, 33 bp, Homo sapien
cacaatcttggatggaccttctagatagccaag

SEQ ID NO: 340250 - DNA, 33 bp, Homo sapien
cacaatcttggatggagcttctagatagccaag

SEQ ID NO: 340251 - DNA, 33 bp, Homo sapien
atgttccctagaaagacgatgagtataaccatg

SEQ ID NO: 340252 - DNA, 33 bp, Homo sapien
atgttccctagaaagatgatgagtataaccatg

SEQ ID NO: 340253 - DNA, 33 bp, Homo sapien
tgtattaacaggtctacgttttattcccttgga

SEQ ID NO: 340254 - DNA, 33 bp, Homo sapien
tgtattaacaggtctatgttttattcccttgga

SEQ ID NO: 340255 - DNA, 33 bp, Homo sapien
cgcccgttgtactgacagaatcctggcttgaat

SEQ ID NO: 340256 - DNA, 33 bp, Homo sapien
cgcccgttgtactgacggaatcctggcttgaat

SEQ ID NO: 340257 - DNA, 33 bp, Homo sapien
taatgcaagttctttagcagatattggaaatat

SEQ ID NO: 340258 - DNA, 33 bp, Homo sapien
taatgcaagttctttatcagatattggaaatat

SEQ ID NO: 340259 - DNA, 33 bp, Homo sapien
aaaagaaagacagtaaaatagttgtgagaatat

SEQ ID NO: 340260 - DNA, 33 bp, Homo sapien
aaaagaaagacagtaacatagttgtgagaatat

SEQ ID NO: 340261 - DNA, 33 bp, Homo sapien
cacgaaccagtagcatcactttcaattccctac

SEQ ID NO: 340262 - DNA, 33 bp, Homo sapien
cacgaaccagtagcattactttcaattccctac

SEQ ID NO: 340263 - DNA, 33 bp, Homo sapien
ttcttataggtttccaatgcccttcaaagtcag

SEQ ID NO: 340264 - DNA, 33 bp, Homo sapien
ttcttataggtttccagtgcccttcaaagtcag

SEQ ID NO: 340265 - DNA, 33 bp, Homo sapien
ggggatccaaaaaatacgctgttcaagtaaaat

SEQ ID NO: 340266 - DNA, 33 bp, Homo sapien
ggggatccaaaaaatatgctgttcaagtaaaat

SEQ ID NO: 340267 - DNA, 33 bp, Homo sapien
aaactggctttggaaacaagtatgtaatagaat

SEQ ID NO: 340268 - DNA, 33 bp, Homo sapien
aaactggctttggaaagaagtatgtaatagaat

SEQ ID NO: 340269 - DNA, 33 bp, Homo sapien
ggaatttaacacagaaaaaatgcaccaggattt

SEQ ID NO: 340270 - DNA, 33 bp, Homo sapien
ggaatttaacacagaacaaatgcaccaggattt

SEQ ID NO: 340271 - DNA, 33 bp, Homo sapien
aaaggaaagtagtaaaggcctcccggatctgca

SEQ ID NO: 340272 - DNA, 33 bp, Homo sapien
aaaggaaagtagtaaatgcctcccggatctgca

SEQ ID NO: 340273 - DNA, 33 bp, Homo sapien
ttattacttaatcaggaaagttgtaggagatta

SEQ ID NO: 340274 - DNA, 33 bp, Homo sapien
ttattacttaatcagggaagttgtaggagatta

SEQ ID NO: 340275 - DNA, 33 bp, Homo sapien
gcaatgtttgtcagtccaagtttacctaaattc

SEQ ID NO: 340276 - DNA, 33 bp, Homo sapien
gcaatgtttgtcagtctaagtttacctaaattc

SEQ ID NO: 340277 - DNA, 33 bp, Homo sapien
attaaagtgaatgccaaagaaacaattgcattg

SEQ ID NO: 340278 - DNA, 33 bp, Homo sapien
attaaagtgaatgccagagaaacaattgcattg

SEQ ID NO: 340279 - DNA, 33 bp, Homo sapien
gataaaggtgcttccacaaagggtggagtagaa

SEQ ID NO: 340280 - DNA, 33 bp, Homo sapien
gataaaggtgcttccataaagggtggagtagaa

SEQ ID NO: 340281 - DNA, 33 bp, Homo sapien
tgctaatagaaggacaattctactcagtgaaat

SEQ ID NO: 340282 - DNA, 33 bp, Homo sapien
tgctaatagaaggacagttctactcagtgaaat

SEQ ID NO: 340283 - DNA, 33 bp, Homo sapien
gtcacccttatagagacggagatgtcccgcatg

SEQ ID NO: 340284 - DNA, 33 bp, Homo sapien
gtcacccttatagagatggagatgtcccgcatg

SEQ ID NO: 340285 - DNA, 33 bp, Homo sapien
cagacatgcatcttcccagtaatagcaggttca

SEQ ID NO: 340286 - DNA, 33 bp, Homo sapien
cagacatgcatcttccgagtaatagcaggttca

SEQ ID NO: 340287 - DNA, 33 bp, Homo sapien
tatatatattttcctacggcccatctcacctct

SEQ ID NO: 340288 - DNA, 33 bp, Homo sapien
tatatatattttcctatggcccatctcacctct

SEQ ID NO: 340289 - DNA, 33 bp, Homo sapien
ctcctagtttgtgaaactgattgcaaaacattt

SEQ ID NO: 340290 - DNA, 33 bp, Homo sapien
ctcctagtttgtgaaattgattgcaaaacattt

SEQ ID NO: 340291 - DNA, 33 bp, Homo sapien
gttcgttagaatagtacgggccccttcatcaga

SEQ ID NO: 340292 - DNA, 33 bp, Homo sapien
gttcgttagaatagtatgggccccttcatcaga

SEQ ID NO: 340293 - DNA, 33 bp, Homo sapien
atcatgacaaaattcacagagtgaccttgatag

SEQ ID NO: 340294 - DNA, 33 bp, Homo sapien
atcatgacaaaattcatagagtgaccttgatag

SEQ ID NO: 340295 - DNA, 33 bp, Homo sapien
agtttctataaagtcacaggaagttaggtaaaa

SEQ ID NO: 340296 - DNA, 33 bp, Homo sapien
agtttctataaagtcagaggaagttaggtaaaa

SEQ ID NO: 340297 - DNA, 33 bp, Homo sapien
aattagggatttatgacgtttccattgtgtagc

SEQ ID NO: 340298 - DNA, 33 bp, Homo sapien
aattagggatttatgaggtttccattgtgtagc

SEQ ID NO: 340299 - DNA, 33 bp, Homo sapien
gtttttatgaccaaaccgccaaacattcctagc

SEQ ID NO: 340300 - DNA, 33 bp, Homo sapien
gtttttatgaccaaactgccaaacattcctagc

SEQ ID NO: 340301 - DNA, 33 bp, Homo sapien
ttgaggccactgacctcaagtttgcaaatttta

SEQ ID NO: 340302 - DNA, 33 bp, Homo sapien
ttgaggccactgacctgaagtttgcaaatttta

SEQ ID NO: 340303 - DNA, 33 bp, Homo sapien
gagactgcatgagagacagctttaaaacttgga

SEQ ID NO: 340304 - DNA, 33 bp, Homo sapien
gagactgcatgagagagagctttaaaacttgga

SEQ ID NO: 340305 - DNA, 33 bp, Homo sapien
agagtaagtgaaatgaacagccacatatccaag

SEQ ID NO: 340306 - DNA, 33 bp, Homo sapien
agagtaagtgaaatgatcagccacatatccaag

SEQ ID NO: 340307 - DNA, 33 bp, Homo sapien
tgtccatcatcaccataacaaccctgtgtggtg

SEQ ID NO: 340308 - DNA, 33 bp, Homo sapien
tgtccatcatcaccattacaaccctgtgtggtg

SEQ ID NO: 340309 - DNA, 33 bp, Homo sapien
atttagtgaaaagggcagaaatgtgtctcccct

SEQ ID NO: 340310 - DNA, 33 bp, Homo sapien
atttagtgaaaagggcggaaatgtgtctcccct

SEQ ID NO: 340311 - DNA, 33 bp, Homo sapien
gaccagtcctgtatgaagtgccacttatcaata

SEQ ID NO: 340312 - DNA, 33 bp, Homo sapien
gaccagtcctgtatgatgtgccacttatcaata

SEQ ID NO: 340313 - DNA, 33 bp, Homo sapien
ctccatcccttggccaatctgcacaggttgcta

SEQ ID NO: 340314 - DNA, 33 bp, Homo sapien
ctccatcccttggccattctgcacaggttgcta

SEQ ID NO: 340315 - DNA, 33 bp, Homo sapien
aagttattttcactccagctccagatgatagta

SEQ ID NO: 340316 - DNA, 33 bp, Homo sapien
aagttattttcactccggctccagatgatagta

SEQ ID NO: 340317 - DNA, 33 bp, Homo sapien
ggatggccttgagagaaagtctataaccctgca

SEQ ID NO: 340318 - DNA, 33 bp, Homo sapien
ggatggccttgagagagagtctataaccctgca

SEQ ID NO: 340319 - DNA, 33 bp, Homo sapien
ctgagtaaagccggtacgtgtgtcctggtctac

SEQ ID NO: 340320 - DNA, 33 bp, Homo sapien
ctgagtaaagccggtatgtgtgtcctggtctac

SEQ ID NO: 340321 - DNA, 33 bp, Homo sapien
tctgtttcattcaagacgggggccatagcttgc

SEQ ID NO: 340322 - DNA, 33 bp, Homo sapien
tctgtttcattcaagatgggggccatagcttgc

SEQ ID NO: 340323 - DNA, 33 bp, Homo sapien
gacaaaattacgaggacccaaggcaagggttcg

SEQ ID NO: 340324 - DNA, 33 bp, Homo sapien
gacaaaattacgaggagccaaggcaagggttcg

SEQ ID NO: 340325 - DNA, 33 bp, Homo sapien
tttgcttgttatttgcaatgataaatcccaacg

SEQ ID NO: 340326 - DNA, 33 bp, Homo sapien
tttgcttgttatttgcgatgataaatcccaacg

SEQ ID NO: 340327 - DNA, 33 bp, Homo sapien
ttgtttttctctatcaatagatatttagctgat

SEQ ID NO: 340328 - DNA, 33 bp, Homo sapien
ttgtttttctctatcattagatatttagctgat

SEQ ID NO: 340329 - DNA, 33 bp, Homo sapien
cttacatatatcaaagcacccagaggcttttta

SEQ ID NO: 340330 - DNA, 33 bp, Homo sapien
cttacatatatcaaaggacccagaggcttttta

SEQ ID NO: 340331 - DNA, 33 bp, Homo sapien
tgatatagtacttaaaatcctagccagagcaat

SEQ ID NO: 340332 - DNA, 33 bp, Homo sapien
tgatatagtacttaaagtcctagccagagcaat

SEQ ID NO: 340333 - DNA, 33 bp, Homo sapien
tcaataaaggaacaccacagaagcagcagtgta

SEQ ID NO: 340334 - DNA, 33 bp, Homo sapien
tcaataaaggaacaccgcagaagcagcagtgta

SEQ ID NO: 340335 - DNA, 33 bp, Homo sapien
tctcagcaggatgtagacgagcaatagatcttg

SEQ ID NO: 340336 - DNA, 33 bp, Homo sapien
tctcagcaggatgtagtcgagcaatagatcttg

SEQ ID NO: 340337 - DNA, 33 bp, Homo sapien
aagcttgcttgaaaacgctttatcgaacaatga

SEQ ID NO: 340338 - DNA, 33 bp, Homo sapien
aagcttgcttgaaaactctttatcgaacaatga

SEQ ID NO: 340339 - DNA, 33 bp, Homo sapien; identical to SEQ ID NO: 340337

SEQ ID NO: 340340 - DNA, 33 bp, Homo sapien; identical to SEQ ID NO: 340338

SEQ ID NO: 340341 - DNA, 33 bp, Homo sapien
accaccgggagatgacaattgcaattaggagca

SEQ ID NO: 340342 - DNA, 33 bp, Homo sapien
accaccgggagatgactattgcaattaggagca

SEQ ID NO: 340343 - DNA, 33 bp, Homo sapien
caagaaatccctgagaaaaagaagacagtatag

SEQ ID NO: 340344 - DNA, 33 bp, Homo sapien
caagaaatccctgagagaaagaagacagtatag

SEQ ID NO: 340345 - DNA, 33 bp, Homo sapien
gaggaaactgataagaatccatgtggtatgaag

SEQ ID NO: 340346 - DNA, 33 bp, Homo sapien
gaggaaactgataagagtccatgtggtatgaag

SEQ ID NO: 340347 - DNA, 33 bp, Homo sapien
tttcagtaaaaccaaagtcttgctaccttatga

SEQ ID NO: 340348 - DNA, 33 bp, Homo sapien
tttcagtaaaaccaaattcttgctaccttatga

SEQ ID NO: 340349 - DNA, 33 bp, Homo sapien
tttactgaaactttcaaacaaattaaaagctgg

SEQ ID NO: 340350 - DNA, 33 bp, Homo sapien
tttactgaaactttcatacaaattaaaagctgg

SEQ ID NO: 340351 - DNA, 33 bp, Homo sapien
cttcagagttttatgcaagtgagtcgtatttat

SEQ ID NO: 340352 - DNA, 33 bp, Homo sapien
cttcagagttttatgcgagtgagtcgtatttat

SEQ ID NO: 340353 - DNA, 33 bp, Homo sapien
tacaaaggtattgatacagaaacaagcaaataa

SEQ ID NO: 340354 - DNA, 33 bp, Homo sapien
tacaaaggtattgatatagaaacaagcaaataa

SEQ ID NO: 340355 - DNA, 33 bp, Homo sapien
acacttcctctgcttgcagaaaacgctgaccca

SEQ ID NO: 340356 - DNA, 33 bp, Homo sapien
acacttcctctgcttgtagaaaacgctgaccca

SEQ ID NO: 340357 - DNA, 33 bp, Homo sapien
ttcctcatattttcaacctcactcttccatttc

SEQ ID NO: 340358 - DNA, 33 bp, Homo sapien
ttcctcatattttcaagctcactcttccatttc

SEQ ID NO: 340359 - DNA, 33 bp, Homo sapien
catcccatacaaatgcaacagaggaagtgggaa

SEQ ID NO: 340360 - DNA, 33 bp, Homo sapien
catcccatacaaatgccacagaggaagtgggaa

SEQ ID NO: 340361 - DNA, 33 bp, Homo sapien
ggactgcttggtgccaactgctgtctaatcact

SEQ ID NO: 340362 - DNA, 33 bp, Homo sapien
ggactgcttggtgccagctgctgtctaatcact

SEQ ID NO: 340363 - DNA, 33 bp, Homo sapien
agaaaaatgtggccaaatcttaaaagacaatca

SEQ ID NO: 340364 - DNA, 33 bp, Homo sapien
agaaaaatgtggccaattcttaaaagacaatca

SEQ ID NO: 340365 - DNA, 33 bp, Homo sapien
agaaaaatttgtattacgcagagttcctatata

SEQ ID NO: 340366 - DNA, 33 bp, Homo sapien
agaaaaatttgtattatgcagagttcctatata

SEQ ID NO: 340367 - DNA, 33 bp, Homo sapien
aaagctattatactcagatcaaattcaaaggag

SEQ ID NO: 340368 - DNA, 33 bp, Homo sapien
aaagctattatactcatatcaaattcaaaggag

SEQ ID NO: 340369 - DNA, 33 bp, Homo sapien
taaagagacagtagtaataaagcagaactttac

SEQ ID NO: 340370 - DNA, 33 bp, Homo sapien
taaagagacagtagtagtaaagcagaactttac

SEQ ID NO: 340371 - DNA, 33 bp, Homo sapien
cagtcacatttacagaccttaacattccggaag

SEQ ID NO: 340372 - DNA, 33 bp, Homo sapien
cagtcacatttacagagcttaacattccggaag

SEQ ID NO: 340373 - DNA, 33 bp, Homo sapien
atatgatctggaacacagtgggtattcaataaa

SEQ ID NO: 340374 - DNA, 33 bp, Homo sapien
atatgatctggaacaccgtgggtattcaataaa

SEQ ID NO: 340375 - DNA, 33 bp, Homo sapien
agcagtgcaatcttgaacaaactgtttctgctt

SEQ ID NO: 340376 - DNA, 33 bp, Homo sapien
agcagtgcaatcttgagcaaactgtttctgctt

SEQ ID NO: 340377 - DNA, 33 bp, Homo sapien
gtagctggcagactccgattcatcagtaataat

SEQ ID NO: 340378 - DNA, 33 bp, Homo sapien
gtagctggcagactcctattcatcagtaataat

SEQ ID NO: 340379 - DNA, 33 bp, Homo sapien
tttagggaataaagagaattccgcatatctgag

SEQ ID NO: 340380 - DNA, 33 bp, Homo sapien
tttagggaataaagaggattccgcatatctgag

SEQ ID NO: 340381 - DNA, 33 bp, Homo sapien
ggcttaaatcagactcaagttcatgactacgat

SEQ ID NO: 340382 - DNA, 33 bp, Homo sapien
ggcttaaatcagactcgagttcatgactacgat

SEQ ID NO: 340383 - DNA, 33 bp, Homo sapien
gctttacagattggtaaattctttcacaagcat

SEQ ID NO: 340384 - DNA, 33 bp, Homo sapien
gctttacagattggtatattctttcacaagcat

SEQ ID NO: 340385 - DNA, 33 bp, Homo sapien
tgaaaagtctagaccactgatactccaaatagg

SEQ ID NO: 340386 - DNA, 33 bp, Homo sapien
tgaaaagtctagaccagtgatactccaaatagg

SEQ ID NO: 340387 - DNA, 33 bp, Homo sapien
gaagaagccaaatctagcagtcatttctgattt

SEQ ID NO: 340388 - DNA, 33 bp, Homo sapien
gaagaagccaaatctatcagtcatttctgattt

SEQ ID NO: 340389 - DNA, 33 bp, Homo sapien
caaatgggacagtccaatgaaacagacagccat

SEQ ID NO: 340390 - DNA, 33 bp, Homo sapien
caaatgggacagtccagtgaaacagacagccat

SEQ ID NO: 340391 - DNA, 33 bp, Homo sapien
tggaaggttccagaaaaagcaaatacttagcct

SEQ ID NO: 340392 - DNA, 33 bp, Homo sapien
tggaaggttccagaaacagcaaatacttagcct

SEQ ID NO: 340393 - DNA, 33 bp, Homo sapien
catgatagcattcttcactccacagctgctgct

SEQ ID NO: 340394 - DNA, 33 bp, Homo sapien
catgatagcattcttcgctccacagctgctgct

SEQ ID NO: 340395 - DNA, 33 bp, Homo sapien
atgtgcatacttaaagcagatgttggagaaagt

SEQ ID NO: 340396 - DNA, 33 bp, Homo sapien
atgtgcatacttaaagtagatgttggagaaagt

SEQ ID NO: 340397 - DNA, 33 bp, Homo sapien
tatgaatacaacctccaaagtccatatcatgac

SEQ ID NO: 340398 - DNA, 33 bp, Homo sapien
tatgaatacaacctccgaagtccatatcatgac

SEQ ID NO: 340399 - DNA, 33 bp, Homo sapien
tagccatatgtgctcacggtcatcataaggctg

SEQ ID NO: 340400 - DNA, 33 bp, Homo sapien
tagccatatgtgctcatggtcatcataaggctg

SEQ ID NO: 340401 - DNA, 33 bp, Homo sapien
cttcaaagaagatcaggagtaagctaatgtgaa

SEQ ID NO: 340402 - DNA, 33 bp, Homo sapien
cttcaaagaagatcagtagtaagctaatgtgaa

SEQ ID NO: 340403 - DNA, 33 bp, Homo sapien
gcttctcagataggccaagaatgttgcatatgt

SEQ ID NO: 340404 - DNA, 33 bp, Homo sapien
gcttctcagataggcccagaatgttgcatatgt

SEQ ID NO: 340405 - DNA, 33 bp, Homo sapien
tcacacaattcatgccagagaaacaaaactctt

SEQ ID NO: 340406 - DNA, 33 bp, Homo sapien
tcacacaattcatgccggagaaacaaaactctt

SEQ ID NO: 340407 - DNA, 33 bp, Homo sapien
ttggctaccaatgacccaaagtatttaagcatg

SEQ ID NO: 340408 - DNA, 33 bp, Homo sapien
ttggctaccaatgacctaaagtatttaagcatg

SEQ ID NO: 340409 - DNA, 33 bp, Homo sapien
ttactggcatctaaagcatttaagcaggttctt

SEQ ID NO: 340410 - DNA, 33 bp, Homo sapien
ttactggcatctaaagtatttaagcaggttctt

SEQ ID NO: 340411 - DNA, 33 bp, Homo sapien
aaaactaaatctggcaactgataccatggtagt

SEQ ID NO: 340412 - DNA, 33 bp, Homo sapien
aaaactaaatctggcagctgataccatggtagt

SEQ ID NO: 340413 - DNA, 33 bp, Homo sapien
taaaataatgggcgggccaggaacaaactaaaa

SEQ ID NO: 340414 - DNA, 33 bp, Homo sapien
taaaataatgggcgggtcaggaacaaactaaaa

SEQ ID NO: 340415 - DNA, 33 bp, Homo sapien
ttctatgttctttgcaacttagttcttcattca

SEQ ID NO: 340416 - DNA, 33 bp, Homo sapien
ttctatgttctttgcatcttagttcttcattca

SEQ ID NO: 340417 - DNA, 33 bp, Homo sapien
tggagttagggagttgcactaaatggccagttt

SEQ ID NO: 340418 - DNA, 33 bp, Homo sapien
tggagttagggagttggactaaatggccagttt

SEQ ID NO: 340419 - DNA, 33 bp, Homo sapien
ggaattttgttttcaacgtagtcactctatatt

SEQ ID NO: 340420 - DNA, 33 bp, Homo sapien
ggaattttgttttcaatgtagtcactctatatt

SEQ ID NO: 340421 - DNA, 33 bp, Homo sapien
aatatccagcctgagacgtgctaacaagctgct

SEQ ID NO: 340422 - DNA, 33 bp, Homo sapien
aatatccagcctgagatgtgctaacaagctgct

SEQ ID NO: 340423 - DNA, 33 bp, Homo sapien
cccattccattctgtgaaggaagaaaccctgag

SEQ ID NO: 340424 - DNA, 33 bp, Homo sapien
cccattccattctgtgtaggaagaaaccctgag

SEQ ID NO: 340425 - DNA, 33 bp, Homo sapien
tgaatcatgtatagacacatctacaagaaacaa

SEQ ID NO: 340426 - DNA, 33 bp, Homo sapien
tgaatcatgtatagacgcatctacaagaaacaa

SEQ ID NO: 340427 - DNA, 33 bp, Homo sapien
aacaggaaattgctcaatatgggagacttagta

SEQ ID NO: 340428 - DNA, 33 bp, Homo sapien
aacaggaaattgctcagtatgggagacttagta

SEQ ID NO: 340429 - DNA, 33 bp, Homo sapien
ttctcagcctcaagaaatctaagaaatacattt

SEQ ID NO: 340430 - DNA, 33 bp, Homo sapien
ttctcagcctcaagaagtctaagaaatacattt

SEQ ID NO: 340431 - DNA, 33 bp, Homo sapien
ttccaaacctctctcaatctatccttggtattt

SEQ ID NO: 340432 - DNA, 33 bp, Homo sapien
ttccaaacctctctcagtctatccttggtattt

SEQ ID NO: 340433 - DNA, 33 bp, Homo sapien
ctttctcatgttgaaagtcttacttggtcttat

SEQ ID NO: 340434 - DNA, 33 bp, Homo sapien
ctttctcatgttgaaattcttacttggtcttat

SEQ ID NO: 340435 - DNA, 33 bp, Homo sapien
atcatttccgaggagacaacagatcactttcaa

SEQ ID NO: 340436 - DNA, 33 bp, Homo sapien
atcatttccgaggagataacagatcactttcaa

SEQ ID NO: 340437 - DNA, 33 bp, Homo sapien
tgaagacaaggtgataccaactggcccatccgt

SEQ ID NO: 340438 - DNA, 33 bp, Homo sapien
tgaagacaaggtgatatcaactggcccatccgt

SEQ ID NO: 340439 - DNA, 33 bp, Homo sapien
gtttgtcctgcagaacagtgtaggagagccagg

SEQ ID NO: 340440 - DNA, 33 bp, Homo sapien
gtttgtcctgcagaactgtgtaggagagccagg

SEQ ID NO: 340441 - DNA, 33 bp, Homo sapien
gacaaagggacaaacgaaaacagctggaacaag

SEQ ID NO: 340442 - DNA, 33 bp, Homo sapien
gacaaagggacaaacggaaacagctggaacaag

SEQ ID NO: 340443 - DNA, 33 bp, Homo sapien
gctataaccaccgtaagagtaaagatcacagtc

SEQ ID NO: 340444 - DNA, 33 bp, Homo sapien
gctataaccaccgtaatagtaaagatcacagtc

SEQ ID NO: 340445 - DNA, 33 bp, Homo sapien
aatgactcccacaatacaaaagaaaggagtgag

SEQ ID NO: 340446 - DNA, 33 bp, Homo sapien
aatgactcccacaatataaaagaaaggagtgag

SEQ ID NO: 340447 - DNA, 33 bp, Homo sapien
gaaggaatatggcatacagtctaggagcatggg

SEQ ID NO: 340448 - DNA, 33 bp, Homo sapien
gaaggaatatggcatagagtctaggagcatggg

SEQ ID NO: 340449 - DNA, 33 bp, Homo sapien
aggtactgaaagctgactcagatttgtgtgatt

SEQ ID NO: 340450 - DNA, 33 bp, Homo sapien
aggtactgaaagctgagtcagatttgtgtgatt

SEQ ID NO: 340451 - DNA, 33 bp, Homo sapien
tgacatagagggagaacgacgtcaatgaggttc

SEQ ID NO: 340452 - DNA, 33 bp, Homo sapien
tgacatagagggagaatgacgtcaatgaggttc

SEQ ID NO: 340453 - DNA, 33 bp, Homo sapien
tatactcttctgattcactttgtacatctctga

SEQ ID NO: 340454 - DNA, 33 bp, Homo sapien
tatactcttctgattcgctttgtacatctctga

SEQ ID NO: 340455 - DNA, 33 bp, Homo sapien
cctttgagtccctagaagcattgggtaaataag

SEQ ID NO: 340456 - DNA, 33 bp, Homo sapien
cctttgagtccctagacgcattgggtaaataag

SEQ ID NO: 340457 - DNA, 33 bp, Homo sapien
agaaactttctctaatcatctcaaatggaaggt

SEQ ID NO: 340458 - DNA, 33 bp, Homo sapien
agaaactttctctaattatctcaaatggaaggt

SEQ ID NO: 340459 - DNA, 33 bp, Homo sapien
caacatagattttgtcgcacattacatgaaaaa

SEQ ID NO: 340460 - DNA, 33 bp, Homo sapien
caacatagattttgtctcacattacatgaaaaa

SEQ ID NO: 340461 - DNA, 33 bp, Homo sapien
cctgtcaggagttaggaaaaacttcatgaagga

SEQ ID NO: 340462 - DNA, 33 bp, Homo sapien
cctgtcaggagttaggcaaaacttcatgaagga

SEQ ID NO: 340463 - DNA, 33 bp, Homo sapien
ggaaagagcagaacaaagagattgatctataac

SEQ ID NO: 340464 - DNA, 33 bp, Homo sapien
ggaaagagcagaacaaggagattgatctataac

SEQ ID NO: 340465 - DNA, 33 bp, Homo sapien
tcttaccatctttttccagccacatagaaggtt

SEQ ID NO: 340466 - DNA, 33 bp, Homo sapien
tcttaccatctttttctagccacatagaaggtt

SEQ ID NO: 340467 - DNA, 33 bp, Homo sapien
agaaggccaatctatacgacttttagttatgcc

SEQ ID NO: 340468 - DNA, 33 bp, Homo sapien
agaaggccaatctatatgacttttagttatgcc

SEQ ID NO: 340469 - DNA, 33 bp, Homo sapien
ttactcttaagtgagacattactgccactctgc

SEQ ID NO: 340470 - DNA, 33 bp, Homo sapien
ttactcttaagtgagagattactgccactctgc

SEQ ID NO: 340471 - DNA, 33 bp, Homo sapien
cattcagataatttgaaaaagtgtttaacagac

SEQ ID NO: 340472 - DNA, 33 bp, Homo sapien
cattcagataatttgagaaagtgtttaacagac

SEQ ID NO: 340473 - DNA, 33 bp, Homo sapien
ttgttttaccatggatcaaaataaatctcagat

SEQ ID NO: 340474 - DNA, 33 bp, Homo sapien
ttgttttaccatggatgaaaataaatctcagat

SEQ ID NO: 340475 - DNA, 33 bp, Homo sapien
caattacagtctcaacagaaaatttcagcccgt

SEQ ID NO: 340476 - DNA, 33 bp, Homo sapien
caattacagtctcaacggaaaatttcagcccgt

SEQ ID NO: 340477 - DNA, 33 bp, Homo sapien
tgagggaatgatatgcacagaattcagaataga

SEQ ID NO: 340478 - DNA, 33 bp, Homo sapien
tgagggaatgatatgcgcagaattcagaataga

SEQ ID NO: 340479 - DNA, 33 bp, Homo sapien
tctacaattctgacaaatggttcagaccacaat

SEQ ID NO: 340480 - DNA, 33 bp, Homo sapien
tctacaattctgacaagtggttcagaccacaat

SEQ ID NO: 340481 - DNA, 33 bp, Homo sapien
ttttgattaaaatgccaaaacaaaacacagtac

SEQ ID NO: 340482 - DNA, 33 bp, Homo sapien
ttttgattaaaatgccgaaacaaaacacagtac

SEQ ID NO: 340483 - DNA, 33 bp, Homo sapien
ttttcccttaattatgaatttgacaaactaaac

SEQ ID NO: 340484 - DNA, 33 bp, Homo sapien
ttttcccttaattatggatttgacaaactaaac

SEQ ID NO: 340485 - DNA, 33 bp, Homo sapien
cactccctatctttaaatctgtgactcgccaca

SEQ ID NO: 340486 - DNA, 33 bp, Homo sapien
cactccctatctttaactctgtgactcgccaca

SEQ ID NO: 340487 - DNA, 33 bp, Homo sapien
ctttagaacatataaccggataagtgaataaat

SEQ ID NO: 340488 - DNA, 33 bp, Homo sapien
ctttagaacatataactggataagtgaataaat

SEQ ID NO: 340489 - DNA, 33 bp, Homo sapien
ccaatgggctttaaatgaataatgttcatcatt

SEQ ID NO: 340490 - DNA, 33 bp, Homo sapien
ccaatgggctttaaattaataatgttcatcatt

SEQ ID NO: 340491 - DNA, 33 bp, Homo sapien
ttgctttggaacactacacttgaacagcacaaa

SEQ ID NO: 340492 - DNA, 33 bp, Homo sapien
ttgctttggaacactatacttgaacagcacaaa

SEQ ID NO: 340493 - DNA, 33 bp, Homo sapien
actattaaaacattataacacaccgggctcagt

SEQ ID NO: 340494 - DNA, 33 bp, Homo sapien
actattaaaacattatgacacaccgggctcagt

SEQ ID NO: 340495 - DNA, 33 bp, Homo sapien
tcatcaccagtttatcacagtaattttccagtt

SEQ ID NO: 340496 - DNA, 33 bp, Homo sapien
tcatcaccagtttatcgcagtaattttccagtt

SEQ ID NO: 340497 - DNA, 33 bp, Homo sapien
acagggttttaaggtacacttggcatatacctt

SEQ ID NO: 340498 - DNA, 33 bp, Homo sapien
acagggttttaaggtagacttggcatatacctt

SEQ ID NO: 340499 - DNA, 33 bp, Homo sapien
tgtgatccatccacacaaccaaaatctactctt

SEQ ID NO: 340500 - DNA, 33 bp, Homo sapien
tgtgatccatccacactaccaaaatctactctt

SEQ ID NO: 340501 - DNA, 33 bp, Homo sapien
taggagaaaatcagaaagtttgttaggagggaa

SEQ ID NO: 340502 - DNA, 33 bp, Homo sapien
taggagaaaatcagaaggtttgttaggagggaa

SEQ ID NO: 340503 - DNA, 33 bp, Homo sapien
ctgttttaattccgcaatccaatcgttctaccg

SEQ ID NO: 340504 - DNA, 33 bp, Homo sapien
ctgttttaattccgcagtccaatcgttctaccg

SEQ ID NO: 340505 - DNA, 33 bp, Homo sapien
cttccagatctgtccacgtgactccacaaatgg

SEQ ID NO: 340506 - DNA, 33 bp, Homo sapien
cttccagatctgtccatgtgactccacaaatgg

SEQ ID NO: 340507 - DNA, 33 bp, Homo sapien
gaccacactttgagtacaaaaacttagactaga

SEQ ID NO: 340508 - DNA, 33 bp, Homo sapien
gaccacactttgagtagaaaaacttagactaga

SEQ ID NO: 340509 - DNA, 33 bp, Homo sapien
aatacttcctactgaacatgtacttgatgaccg

SEQ ID NO: 340510 - DNA, 33 bp, Homo sapien
aatacttcctactgaatatgtacttgatgaccg

SEQ ID NO: 340511 - DNA, 33 bp, Homo sapien
atgaaaaacaagaaaacggcagagcttatctac

SEQ ID NO: 340512 - DNA, 33 bp, Homo sapien
atgaaaaacaagaaaatggcagagcttatctac

SEQ ID NO: 340513 - DNA, 33 bp, Homo sapien
gtatgatatggttgaccagtgcctttactcaaa

SEQ ID NO: 340514 - DNA, 33 bp, Homo sapien
gtatgatatggttgactagtgcctttactcaaa

SEQ ID NO: 340515 - DNA, 33 bp, Homo sapien
tcaagatgacaaaatactatgcaccgattttta

SEQ ID NO: 340516 - DNA, 33 bp, Homo sapien
tcaagatgacaaaatattatgcaccgattttta

SEQ ID NO: 340517 - DNA, 33 bp, Homo sapien
tacacaatgaatgctaaaacaaatggacaattc

SEQ ID NO: 340518 - DNA, 33 bp, Homo sapien
tacacaatgaatgctataacaaatggacaattc

SEQ ID NO: 340519 - DNA, 33 bp, Homo sapien
tgatgctaaaattagacaaaggtgtaacaaaaa

SEQ ID NO: 340520 - DNA, 33 bp, Homo sapien
tgatgctaaaattagagaaaggtgtaacaaaaa

SEQ ID NO: 340521 - DNA, 33 bp, Homo sapien
gacaaccgaaaataaccagcctgtttgataagg

SEQ ID NO: 340522 - DNA, 33 bp, Homo sapien
gacaaccgaaaataactagcctgtttgataagg

SEQ ID NO: 340523 - DNA, 33 bp, Homo sapien
atgcagagtactgaaacaccaggtgtcaataca

SEQ ID NO: 340524 - DNA, 33 bp, Homo sapien
atgcagagtactgaaataccaggtgtcaataca

SEQ ID NO: 340525 - DNA, 33 bp, Homo sapien
ttactattccactataagcatttaagttccata

SEQ ID NO: 340526 - DNA, 33 bp, Homo sapien
ttactattccactatatgcatttaagttccata

SEQ ID NO: 340527 - DNA, 33 bp, Homo sapien
tttttaaaagaggcacaggcagacgagaacaaa

SEQ ID NO: 340528 - DNA, 33 bp, Homo sapien
tttttaaaagaggcacgggcagacgagaacaaa

SEQ ID NO: 340529 - DNA, 33 bp, Homo sapien
cattcagttaaaaaaaaatggaactactggggc

SEQ ID NO: 340530 - DNA, 33 bp, Homo sapien
cattcagttaaaaaaacatggaactactggggc

SEQ ID NO: 340531 - DNA, 33 bp, Homo sapien
atcttaaaaactcacaagcgcttttggaatatt

SEQ ID NO: 340532 - DNA, 33 bp, Homo sapien
atcttaaaaactcacaggcgcttttggaatatt

SEQ ID NO: 340533 - DNA, 33 bp, Homo sapien
catttgatctcttgtacagcactttttaaatat

SEQ ID NO: 340534 - DNA, 33 bp, Homo sapien
catttgatctcttgtatagcactttttaaatat

SEQ ID NO: 340535 - DNA, 33 bp, Homo sapien
aaaagatgaaaatgtacgtagaaatgctgaaac

SEQ ID NO: 340536 - DNA, 33 bp, Homo sapien
aaaagatgaaaatgtatgtagaaatgctgaaac

SEQ ID NO: 340537 - DNA, 33 bp, Homo sapien
aacctctatgaatcataatccgagtcaaccaaa

SEQ ID NO: 340538 - DNA, 33 bp, Homo sapien
aacctctatgaatcatcatccgagtcaaccaaa

SEQ ID NO: 340539 - DNA, 33 bp, Homo sapien
tatgctagggaaagaaatagtaactagtcatcg

SEQ ID NO: 340540 - DNA, 33 bp, Homo sapien
tatgctagggaaagaagtagtaactagtcatcg

SEQ ID NO: 340541 - DNA, 33 bp, Homo sapien
taacttcatggatagaacaaaatgaattcagga

SEQ ID NO: 340542 - DNA, 33 bp, Homo sapien
taacttcatggatagatcaaaatgaattcagga

SEQ ID NO: 340543 - DNA, 33 bp, Homo sapien
gagtagctatcaaaagaacattatcaaaagcat

SEQ ID NO: 340544 - DNA, 33 bp, Homo sapien
gagtagctatcaaaagcacattatcaaaagcat

SEQ ID NO: 340545 - DNA, 33 bp, Homo sapien
aagcatgaatagactcactcacatgtctccctc

SEQ ID NO: 340546 - DNA, 33 bp, Homo sapien
aagcatgaatagactcgctcacatgtctccctc

SEQ ID NO: 340547 - DNA, 33 bp, Homo sapien
cacatttggggcttaaatgtttccagaagtgct

SEQ ID NO: 340548 - DNA, 33 bp, Homo sapien
cacatttggggcttaagtgtttccagaagtgct

SEQ ID NO: 340549 - DNA, 33 bp, Homo sapien
gtatgggctcaaaaggaacacaggacagaactt

SEQ ID NO: 340550 - DNA, 33 bp, Homo sapien
gtatgggctcaaaagggacacaggacagaactt

SEQ ID NO: 340551 - DNA, 33 bp, Homo sapien
taaagaagtgtgccgacatgggaggtatggatg

SEQ ID NO: 340552 - DNA, 33 bp, Homo sapien
taaagaagtgtgccgagatgggaggtatggatg

SEQ ID NO: 340553 - DNA, 33 bp, Homo sapien
caaagcgggatatacggcatagtcttcagaaca

SEQ ID NO: 340554 - DNA, 33 bp, Homo sapien
caaagcgggatatacgtcatagtcttcagaaca

SEQ ID NO: 340555 - DNA, 33 bp, Homo sapien
aaagtttaaaccaagtaactccagtgatcacaa

SEQ ID NO: 340556 - DNA, 33 bp, Homo sapien
aaagtttaaaccaagtgactccagtgatcacaa

SEQ ID NO: 340557 - DNA, 33 bp, Homo sapien
tatctgattgggatgacaacaactatataaagg

SEQ ID NO: 340558 - DNA, 33 bp, Homo sapien
tatctgattgggatgataacaactatataaagg

SEQ ID NO: 340559 - DNA, 33 bp, Homo sapien
ggatagaaacttgagacaaggagaaacattagt

SEQ ID NO: 340560 - DNA, 33 bp, Homo sapien
ggatagaaacttgagagaaggagaaacattagt

SEQ ID NO: 340561 - DNA, 33 bp, Homo sapien
cagacacaaagacgtacggaacagaagagacag

SEQ ID NO: 340562 - DNA, 33 bp, Homo sapien
cagacacaaagacgtatggaacagaagagacag

SEQ ID NO: 340563 - DNA, 33 bp, Homo sapien
catctaaacctaattacgaagagctctgaaatc

SEQ ID NO: 340564 - DNA, 33 bp, Homo sapien
catctaaacctaattatgaagagctctgaaatc

SEQ ID NO: 340565 - DNA, 33 bp, Homo sapien
atatggtaagaatgtaataaccagcattgccta

SEQ ID NO: 340566 - DNA, 33 bp, Homo sapien
atatggtaagaatgtagtaaccagcattgccta

SEQ ID NO: 340567 - DNA, 33 bp, Homo sapien
aggagttaagtagctcaagtgtttagcttgagt

SEQ ID NO: 340568 - DNA, 33 bp, Homo sapien
aggagttaagtagctccagtgtttagcttgagt

SEQ ID NO: 340569 - DNA, 33 bp, Homo sapien
gaggagatggtttacaaaattggctttagggtt

SEQ ID NO: 340570 - DNA, 33 bp, Homo sapien
gaggagatggtttacagaattggctttagggtt

SEQ ID NO: 340571 - DNA, 33 bp, Homo sapien
ttctctcacacacataacgttttaactgaatgt

SEQ ID NO: 340572 - DNA, 33 bp, Homo sapien
ttctctcacacacatagcgttttaactgaatgt

SEQ ID NO: 340573 - DNA, 33 bp, Homo sapien
tctaatgaagcctaataaagcagatctaagttg

SEQ ID NO: 340574 - DNA, 33 bp, Homo sapien
tctaatgaagcctaatgaagcagatctaagttg

SEQ ID NO: 340575 - DNA, 33 bp, Homo sapien
tacagagaagtctatgcattgctgacagacata

SEQ ID NO: 340576 - DNA, 33 bp, Homo sapien
tacagagaagtctatgtattgctgacagacata

SEQ ID NO: 340577 - DNA, 33 bp, Homo sapien
ttatgtgttgaaatgacgtattagattaaacag

SEQ ID NO: 340578 - DNA, 33 bp, Homo sapien
ttatgtgttgaaatgatgtattagattaaacag

SEQ ID NO: 340579 - DNA, 33 bp, Homo sapien
tacaaatcacctgagacgccaattaacagcaga

SEQ ID NO: 340580 - DNA, 33 bp, Homo sapien
tacaaatcacctgagatgccaattaacagcaga

SEQ ID NO: 340581 - DNA, 33 bp, Homo sapien
tttgaagtggtcctcaagtaccaatgacaatag

SEQ ID NO: 340582 - DNA, 33 bp, Homo sapien
tttgaagtggtcctcaggtaccaatgacaatag

SEQ ID NO: 340583 - DNA, 33 bp, Homo sapien
gaataaatatacattcaaaatctattgtcattg

SEQ ID NO: 340584 - DNA, 33 bp, Homo sapien
gaataaatatacattcgaaatctattgtcattg

SEQ ID NO: 340585 - DNA, 33 bp, Homo sapien
atcatgcacaatgaatcaaagatacaaagttaa

SEQ ID NO: 340586 - DNA, 33 bp, Homo sapien
atcatgcacaatgaatgaaagatacaaagttaa

SEQ ID NO: 340587 - DNA, 33 bp, Homo sapien
cttttcctggaagttcactgtgtataagttgca

SEQ ID NO: 340588 - DNA, 33 bp, Homo sapien
cttttcctggaagttcgctgtgtataagttgca

SEQ ID NO: 340589 - DNA, 33 bp, Homo sapien
tcaaatcagtttgaagaagtctaaaaaacgata

SEQ ID NO: 340590 - DNA, 33 bp, Homo sapien
tcaaatcagtttgaagtagtctaaaaaacgata

SEQ ID NO: 340591 - DNA, 33 bp, Homo sapien
ataattcccctcaaatcagcatgaaattcaaaa

SEQ ID NO: 340592 - DNA, 33 bp, Homo sapien
ataattcccctcaaattagcatgaaattcaaaa

SEQ ID NO: 340593 - DNA, 33 bp, Homo sapien
ttccagcattaactcaaaggtccaaagtctcat

SEQ ID NO: 340594 - DNA, 33 bp, Homo sapien
ttccagcattaactcagaggtccaaagtctcat

SEQ ID NO: 340595 - DNA, 33 bp, Homo sapien
caggagagcagggtacgattaagatacgcaaaa

SEQ ID NO: 340596 - DNA, 33 bp, Homo sapien
caggagagcagggtactattaagatacgcaaaa

SEQ ID NO: 340597 - DNA, 33 bp, Homo sapien
agtcccagtgaaaggacaggtggaaatatttct

SEQ ID NO: 340598 - DNA, 33 bp, Homo sapien
agtcccagtgaaaggataggtggaaatatttct

SEQ ID NO: 340599 - DNA, 33 bp, Homo sapien
ttcacatcagatgtccccttagtgttcatcctt

SEQ ID NO: 340600 - DNA, 33 bp, Homo sapien
ttcacatcagatgtcctcttagtgttcatcctt

SEQ ID NO: 340601 - DNA, 33 bp, Homo sapien
tatatattttgcaccaatattcagtctatcaca

SEQ ID NO: 340602 - DNA, 33 bp, Homo sapien
tatatattttgcaccagtattcagtctatcaca

SEQ ID NO: 340603 - DNA, 33 bp, Homo sapien
ggtgattttttgagtacgaagccaaatgtacag

SEQ ID NO: 340604 - DNA, 33 bp, Homo sapien
ggtgattttttgagtatgaagccaaatgtacag

SEQ ID NO: 340605 - DNA, 33 bp, Homo sapien
aggaaaagctccatgacgttggtttgtacggtg

SEQ ID NO: 340606 - DNA, 33 bp, Homo sapien
aggaaaagctccatgaggttggtttgtacggtg

SEQ ID NO: 340607 - DNA, 33 bp, Homo sapien
caagttgaagctgttaccagtgtacatcatact

SEQ ID NO: 340608 - DNA, 33 bp, Homo sapien
caagttgaagctgttatcagtgtacatcatact

SEQ ID NO: 340609 - DNA, 33 bp, Homo sapien
ttttgaaattagttagaacttcactatgcaagt

SEQ ID NO: 340610 - DNA, 33 bp, Homo sapien
ttttgaaattagttaggacttcactatgcaagt

SEQ ID NO: 340611 - DNA, 33 bp, Homo sapien
tttttgggctcaccaacactacttttgtatagg

SEQ ID NO: 340612 - DNA, 33 bp, Homo sapien
tttttgggctcaccaagactacttttgtatagg

SEQ ID NO: 340613 - DNA, 33 bp, Homo sapien
tcttcacagtttgctcagaaaaaacaagaactt

SEQ ID NO: 340614 - DNA, 33 bp, Homo sapien
tcttcacagtttgctccgaaaaaacaagaactt

SEQ ID NO: 340615 - DNA, 33 bp, Homo sapien
agtgcatttttacttaaacttgtgcttctgctg

SEQ ID NO: 340616 - DNA, 33 bp, Homo sapien
agtgcatttttacttacacttgtgcttctgctg

SEQ ID NO: 340617 - DNA, 33 bp, Homo sapien
aatgtagggtcagtaaatgtttggttaaagttt

SEQ ID NO: 340618 - DNA, 33 bp, Homo sapien
aatgtagggtcagtaagtgtttggttaaagttt

SEQ ID NO: 340619 - DNA, 33 bp, Homo sapien
gagtgcatactatgtgccaaattattgtctagg

SEQ ID NO: 340620 - DNA, 33 bp, Homo sapien
gagtgcatactatgtgtcaaattattgtctagg

SEQ ID NO: 340621 - DNA, 33 bp, Homo sapien
aaaccatgtccagatacaataaacttcctcagt

SEQ ID NO: 340622 - DNA, 33 bp, Homo sapien
aaaccatgtccagatataataaacttcctcagt

SEQ ID NO: 340623 - DNA, 33 bp, Homo sapien
aaatgaaaaatcagaacaggcatgatttcaaaa

SEQ ID NO: 340624 - DNA, 33 bp, Homo sapien
aaatgaaaaatcagaagaggcatgatttcaaaa

SEQ ID NO: 340625 - DNA, 33 bp, Homo sapien
cttgtctggattaagagagtcatccccatttat

SEQ ID NO: 340626 - DNA, 33 bp, Homo sapien
cttgtctggattaagatagtcatccccatttat

SEQ ID NO: 340627 - DNA, 33 bp, Homo sapien
atgtgacgttgctaagcaaaaagccataactgt

SEQ ID NO: 340628 - DNA, 33 bp, Homo sapien
atgtgacgttgctaaggaaaaagccataactgt

SEQ ID NO: 340629 - DNA, 33 bp, Homo sapien
agaccaagttttttaacctgcatagctaaggct

SEQ ID NO: 340630 - DNA, 33 bp, Homo sapien
agaccaagttttttaatctgcatagctaaggct

SEQ ID NO: 340631 - DNA, 33 bp, Homo sapien
aaaggaaggtcacaaacgcaaactttagcagca

SEQ ID NO: 340632 - DNA, 33 bp, Homo sapien
aaaggaaggtcacaaatgcaaactttagcagca

SEQ ID NO: 340633 - DNA, 33 bp, Homo sapien
cctcaggttccaggtccaccccaacatcaggct

SEQ ID NO: 340634 - DNA, 33 bp, Homo sapien
cctcaggttccaggtctaccccaacatcaggct

SEQ ID NO: 340635 - DNA, 33 bp, Homo sapien
cacagggtcttccacaatgggccattattcaag

SEQ ID NO: 340636 - DNA, 33 bp, Homo sapien
cacagggtcttccacagtgggccattattcaag

SEQ ID NO: 340637 - DNA, 33 bp, Homo sapien
cattctcacaaaacagcccattaggttacatct

SEQ ID NO: 340638 - DNA, 33 bp, Homo sapien
cattctcacaaaacagtccattaggttacatct

SEQ ID NO: 340639 - DNA, 33 bp, Homo sapien
tttcagaaatgtaacaaatctcaaagaacatgg

SEQ ID NO: 340640 - DNA, 33 bp, Homo sapien
tttcagaaatgtaacagatctcaaagaacatgg

SEQ ID NO: 340641 - DNA, 33 bp, Homo sapien
ctttggcgtggttgaacaaattttcatggatga

SEQ ID NO: 340642 - DNA, 33 bp, Homo sapien
ctttggcgtggttgaagaaattttcatggatga

SEQ ID NO: 340643 - DNA, 33 bp, Homo sapien
attttatttgtagctaaggtaaaggagattcct

SEQ ID NO: 340644 - DNA, 33 bp, Homo sapien
attttatttgtagctatggtaaaggagattcct

SEQ ID NO: 340645 - DNA, 33 bp, Homo sapien
aaggatgcctgacctgacacagatccaacacag

SEQ ID NO: 340646 - DNA, 33 bp, Homo sapien
aaggatgcctgacctggcacagatccaacacag

SEQ ID NO: 340647 - DNA, 33 bp, Homo sapien
aatgacagttccacacaatcttgtttactacag

SEQ ID NO: 340648 - DNA, 33 bp, Homo sapien
aatgacagttccacaccatcttgtttactacag

SEQ ID NO: 340649 - DNA, 33 bp, Homo sapien
ttttatatgtggctatgaagatgtctctgcact

SEQ ID NO: 340650 - DNA, 33 bp, Homo sapien
ttttatatgtggctattaagatgtctctgcact

SEQ ID NO: 340651 - DNA, 33 bp, Homo sapien
tcttccaagaattgtacaattttagcttttaca

SEQ ID NO: 340652 - DNA, 33 bp, Homo sapien
tcttccaagaattgtataattttagcttttaca

SEQ ID NO: 340653 - DNA, 33 bp, Homo sapien
cactatcttcagtgccaaatatagcaactaata

SEQ ID NO: 340654 - DNA, 33 bp, Homo sapien
cactatcttcagtgcccaatatagcaactaata

SEQ ID NO: 340655 - DNA, 33 bp, Homo sapien
ctctgggatcctggcccctcaaattctggttgc

SEQ ID NO: 340656 - DNA, 33 bp, Homo sapien
ctctgggatcctggcctctcaaattctggttgc

SEQ ID NO: 340657 - DNA, 33 bp, Homo sapien
cttatagtagtctcaccgacatggaaagacaaa

SEQ ID NO: 340658 - DNA, 33 bp, Homo sapien
cttatagtagtctcactgacatggaaagacaaa

SEQ ID NO: 340659 - DNA, 33 bp, Homo sapien
ttttttcacttacacaagtataggctttttaat

SEQ ID NO: 340660 - DNA, 33 bp, Homo sapien
ttttttcacttacacaggtataggctttttaat

SEQ ID NO: 340661 - DNA, 33 bp, Homo sapien; identical to SEQ ID NO: 340659

SEQ ID NO: 340662 - DNA, 33 bp, Homo sapien; identical to SEQ ID NO: 340660

SEQ ID NO: 340663 - DNA, 33 bp, Homo sapien
cctctcttagcaaaagcacattgctgatcttac

SEQ ID NO: 340664 - DNA, 33 bp, Homo sapien
cctctcttagcaaaaggacattgctgatcttac

SEQ ID NO: 340665 - DNA, 33 bp, Homo sapien
tctttttggtgttttaactatttgtcacctttg

SEQ ID NO: 340666 - DNA, 33 bp, Homo sapien
tctttttggtgttttacctatttgtcacctttg

SEQ ID NO: 340667 - DNA, 33 bp, Homo sapien
atgatgaacatcgactcaggaatttcagcacct

SEQ ID NO: 340668 - DNA, 33 bp, Homo sapien
atgatgaacatcgacttaggaatttcagcacct

SEQ ID NO: 340669 - DNA, 33 bp, Homo sapien
aggctaggaggtatgcacagaagaggcagtgtg

SEQ ID NO: 340670 - DNA, 33 bp, Homo sapien
aggctaggaggtatgcgcagaagaggcagtgtg

SEQ ID NO: 340671 - DNA, 33 bp, Homo sapien
ccctgacgctaagggcaaggactccgtaacaag

SEQ ID NO: 340672 - DNA, 33 bp, Homo sapien
ccctgacgctaagggcgaggactccgtaacaag

SEQ ID NO: 340673 - DNA, 33 bp, Homo sapien
ccgagaaatcttaaacacaattatgcacaaggg

SEQ ID NO: 340674 - DNA, 33 bp, Homo sapien
ccgagaaatcttaaacgcaattatgcacaaggg

SEQ ID NO: 340675 - DNA, 33 bp, Homo sapien
catgagcgcttattaaatgggaactggtatcaa

SEQ ID NO: 340676 - DNA, 33 bp, Homo sapien
catgagcgcttattaagtgggaactggtatcaa

SEQ ID NO: 340677 - DNA, 33 bp, Homo sapien
ccttccagcctctaataacataactgcttggct

SEQ ID NO: 340678 - DNA, 33 bp, Homo sapien
ccttccagcctctaatgacataactgcttggct

SEQ ID NO: 340679 - DNA, 33 bp, Homo sapien
gcaggtcacttctttcacttttgctgtttgctt

SEQ ID NO: 340680 - DNA, 33 bp, Homo sapien
gcaggtcacttctttcgcttttgctgtttgctt

SEQ ID NO: 340681 - DNA, 33 bp, Homo sapien
tctcctgcattcgcccaggagactatgtacata

SEQ ID NO: 340682 - DNA, 33 bp, Homo sapien
tctcctgcattcgcccgggagactatgtacata

SEQ ID NO: 340683 - DNA, 33 bp, Homo sapien
ggagggtgtggagataccttcatgaatcattaa

SEQ ID NO: 340684 - DNA, 33 bp, Homo sapien
ggagggtgtggagatatcttcatgaatcattaa

SEQ ID NO: 340685 - DNA, 33 bp, Homo sapien
aacaaaaatctccccaatgaatttcccataaag

SEQ ID NO: 340686 - DNA, 33 bp, Homo sapien
aacaaaaatctccccagtgaatttcccataaag

SEQ ID NO: 340687 - DNA, 33 bp, Homo sapien
catactacctacctcacgtggttggttgatgat

SEQ ID NO: 340688 - DNA, 33 bp, Homo sapien
catactacctacctcatgtggttggttgatgat

SEQ ID NO: 340689 - DNA, 33 bp, Homo sapien
tcacacaaatatgcccaaatcactttatggaaa

SEQ ID NO: 340690 - DNA, 33 bp, Homo sapien
tcacacaaatatgcccgaatcactttatggaaa

SEQ ID NO: 340691 - DNA, 33 bp, Homo sapien
tgccgcagatttaagtaaagtgaggcaatctgc

SEQ ID NO: 340692 - DNA, 33 bp, Homo sapien
tgccgcagatttaagttaagtgaggcaatctgc

SEQ ID NO: 340693 - DNA, 33 bp, Homo sapien
ccatgcctgagggtaccaagcttcaaggagctc

SEQ ID NO: 340694 - DNA, 33 bp, Homo sapien
ccatgcctgagggtactaagcttcaaggagctc

SEQ ID NO: 340695 - DNA, 33 bp, Homo sapien
ctagactctccttttaagccacattatcaccaa

SEQ ID NO: 340696 - DNA, 33 bp, Homo sapien
ctagactctccttttatgccacattatcaccaa

SEQ ID NO: 340697 - DNA, 33 bp, Homo sapien
ctggaagcatggtcacaagctcttcttccttct

SEQ ID NO: 340698 - DNA, 33 bp, Homo sapien
ctggaagcatggtcacgagctcttcttccttct

SEQ ID NO: 340699 - DNA, 33 bp, Homo sapien
acattcatttctcagcacccatgtttacaagtg

SEQ ID NO: 340700 - DNA, 33 bp, Homo sapien
acattcatttctcagcgcccatgtttacaagtg

SEQ ID NO: 340701 - DNA, 33 bp, Homo sapien
tattctcactactatgaatgatgtttctcactt

SEQ ID NO: 340702 - DNA, 33 bp, Homo sapien
tattctcactactatggatgatgtttctcactt

SEQ ID NO: 340703 - DNA, 33 bp, Homo sapien
agatctccagctactcaaatagttattctagta

SEQ ID NO: 340704 - DNA, 33 bp, Homo sapien
agatctccagctactcgaatagttattctagta

SEQ ID NO: 340705 - DNA, 33 bp, Homo sapien
attctacaaacagttcacctagggacaggcctg

SEQ ID NO: 340706 - DNA, 33 bp, Homo sapien
attctacaaacagttcgcctagggacaggcctg

SEQ ID NO: 340707 - DNA, 33 bp, Homo sapien
tcactgctgtcaggaccggacagagaaagtgat

SEQ ID NO: 340708 - DNA, 33 bp, Homo sapien
tcactgctgtcaggactggacagagaaagtgat

SEQ ID NO: 340709 - DNA, 33 bp, Homo sapien
actagaactgggataaatagtgaggcaatgtca

SEQ ID NO: 340710 - DNA, 33 bp, Homo sapien
actagaactgggataagtagtgaggcaatgtca

SEQ ID NO: 340711 - DNA, 33 bp, Homo sapien
ccaagaagaatatgtacctagctggaattttat

SEQ ID NO: 340712 - DNA, 33 bp, Homo sapien
ccaagaagaatatgtatctagctggaattttat

SEQ ID NO: 340713 - DNA, 33 bp, Homo sapien
atttagtgtcgtgaaaccattttagacactttg

SEQ ID NO: 340714 - DNA, 33 bp, Homo sapien
atttagtgtcgtgaaatcattttagacactttg

SEQ ID NO: 340715 - DNA, 33 bp, Homo sapien
gacactaaatttgaaaaaagccgtatgtatgat

SEQ ID NO: 340716 - DNA, 33 bp, Homo sapien
gacactaaatttgaaacaagccgtatgtatgat

SEQ ID NO: 340717 - DNA, 33 bp, Homo sapien
attaggagtatagagaacaactttgagcaatag

SEQ ID NO: 340718 - DNA, 33 bp, Homo sapien
attaggagtatagagagcaactttgagcaatag

SEQ ID NO: 340719 - DNA, 33 bp, Homo sapien
ggccccaaggctcctgaaatattgagtctagct

SEQ ID NO: 340720 - DNA, 33 bp, Homo sapien
ggccccaaggctcctggaatattgagtctagct

SEQ ID NO: 340721 - DNA, 33 bp, Homo sapien
acgccacagaaatatacaagatcaagactttaa

SEQ ID NO: 340722 - DNA, 33 bp, Homo sapien
acgccacagaaatatataagatcaagactttaa

SEQ ID NO: 340723 - DNA, 33 bp, Homo sapien
ccaatttcagcacttacgtattttctggtactg

SEQ ID NO: 340724 - DNA, 33 bp, Homo sapien
ccaatttcagcacttatgtattttctggtactg

SEQ ID NO: 340725 - DNA, 33 bp, Homo sapien
tctctaactactagaaactagccttgaaagatg

SEQ ID NO: 340726 - DNA, 33 bp, Homo sapien
tctctaactactagaagctagccttgaaagatg

SEQ ID NO: 340727 - DNA, 33 bp, Homo sapien
tgtgagtgtcatggaactaataccacactggtg

SEQ ID NO: 340728 - DNA, 33 bp, Homo sapien
tgtgagtgtcatggaattaataccacactggtg

SEQ ID NO: 340729 - DNA, 33 bp, Homo sapien
taacaatttaccctgacacaaacaagtgtaaga

SEQ ID NO: 340730 - DNA, 33 bp, Homo sapien
taacaatttaccctgagacaaacaagtgtaaga

SEQ ID NO: 340731 - DNA, 33 bp, Homo sapien
tgctggtctgaatctgcaatgctgtatggctgc

SEQ ID NO: 340732 - DNA, 33 bp, Homo sapien
tgctggtctgaatctggaatgctgtatggctgc

SEQ ID NO: 340733 - DNA, 33 bp, Homo sapien
ctttcctgcatttcacaagaggaattacaagct

SEQ ID NO: 340734 - DNA, 33 bp, Homo sapien
ctttcctgcatttcacgagaggaattacaagct

SEQ ID NO: 340735 - DNA, 33 bp, Homo sapien
tacagaaatctcaggaagtaaaggaaatccaag

SEQ ID NO: 340736 - DNA, 33 bp, Homo sapien
tacagaaatctcaggaggtaaaggaaatccaag

SEQ ID NO: 340737 - DNA, 33 bp, Homo sapien
aagaggattcagaagactcacagtggaacattc

SEQ ID NO: 340738 - DNA, 33 bp, Homo sapien
aagaggattcagaagagtcacagtggaacattc

SEQ ID NO: 340739 - DNA, 33 bp, Homo sapien
tttgcctctctgtctacgcacacaaacagaaca

SEQ ID NO: 340740 - DNA, 33 bp, Homo sapien
tttgcctctctgtctatgcacacaaacagaaca

SEQ ID NO: 340741 - DNA, 33 bp, Homo sapien
atttcttggagttagacgcgtaattagatcatg

SEQ ID NO: 340742 - DNA, 33 bp, Homo sapien
atttcttggagttagatgcgtaattagatcatg

SEQ ID NO: 340743 - DNA, 33 bp, Homo sapien
aattatattcatttaaacagtctctaggagtct

SEQ ID NO: 340744 - DNA, 33 bp, Homo sapien
aattatattcatttaatcagtctctaggagtct

SEQ ID NO: 340745 - DNA, 33 bp, Homo sapien
tccatttgttcatctccgacacggacgaagcca

SEQ ID NO: 340746 - DNA, 33 bp, Homo sapien
tccatttgttcatctctgacacggacgaagcca

SEQ ID NO: 340747 - DNA, 33 bp, Homo sapien
caaatgttagcagaaaacttaattagaatgctg

SEQ ID NO: 340748 - DNA, 33 bp, Homo sapien
caaatgttagcagaaagcttaattagaatgctg

SEQ ID NO: 340749 - DNA, 33 bp, Homo sapien
agcaagcattccctcaacaatgagaagataatc

SEQ ID NO: 340750 - DNA, 33 bp, Homo sapien
agcaagcattccctcagcaatgagaagataatc

SEQ ID NO: 340751 - DNA, 33 bp, Homo sapien
atgtggcaaacaaggcccaggtttctttctggt

SEQ ID NO: 340752 - DNA, 33 bp, Homo sapien
atgtggcaaacaaggctcaggtttctttctggt

SEQ ID NO: 340753 - DNA, 33 bp, Homo sapien
agctggaagaaaatcacgtcaataatgaagtgt

SEQ ID NO: 340754 - DNA, 33 bp, Homo sapien
agctggaagaaaatcatgtcaataatgaagtgt

SEQ ID NO: 340755 - DNA, 33 bp, Homo sapien
agtgcccaatagtctacgattttccagagaagc

SEQ ID NO: 340756 - DNA, 33 bp, Homo sapien
agtgcccaatagtctatgattttccagagaagc

SEQ ID NO: 340757 - DNA, 33 bp, Homo sapien
tacagctcttgaaggaagagattattgttagct

SEQ ID NO: 340758 - DNA, 33 bp, Homo sapien
tacagctcttgaaggaggagattattgttagct

SEQ ID NO: 340759 - DNA, 33 bp, Homo sapien
tcttgctcacatatcaacatcatgtttagggcc

SEQ ID NO: 340760 - DNA, 33 bp, Homo sapien
tcttgctcacatatcagcatcatgtttagggcc

SEQ ID NO: 340761 - DNA, 33 bp, Homo sapien
cactatctcagttctaccttcaaatgtgaaaaa

SEQ ID NO: 340762 - DNA, 33 bp, Homo sapien
cactatctcagttctatcttcaaatgtgaaaaa

SEQ ID NO: 340763 - DNA, 33 bp, Homo sapien
aaataagcattctcaccccatcatgggaaccac

SEQ ID NO: 340764 - DNA, 33 bp, Homo sapien
aaataagcattctcacgccatcatgggaaccac

SEQ ID NO: 340765 - DNA, 33 bp, Homo sapien
gagtggtgaacaaaaaaagtgtatgagcaaggg

SEQ ID NO: 340766 - DNA, 33 bp, Homo sapien
gagtggtgaacaaaaatagtgtatgagcaaggg

SEQ ID NO: 340767 - DNA, 33 bp, Homo sapien
cccatgcagttgatacacaataattacatgata

SEQ ID NO: 340768 - DNA, 33 bp, Homo sapien
cccatgcagttgatacgcaataattacatgata

SEQ ID NO: 340769 - DNA, 33 bp, Homo sapien
atggaagaaattgtagaaaaaggtgtcaggaga

SEQ ID NO: 340770 - DNA, 33 bp, Homo sapien
atggaagaaattgtagcaaaaggtgtcaggaga

SEQ ID NO: 340771 - DNA, 33 bp, Homo sapien
ctgtgagatgaggaagactgggaaatataattg

SEQ ID NO: 340772 - DNA, 33 bp, Homo sapien
ctgtgagatgaggaagcctgggaaatataattg

SEQ ID NO: 340773 - DNA, 33 bp, Homo sapien
aaatattttaaaaagccgaggattctctgttca

SEQ ID NO: 340774 - DNA, 33 bp, Homo sapien
aaatattttaaaaagctgaggattctctgttca

SEQ ID NO: 340775 - DNA, 33 bp, Homo sapien
gttttaggttctttgacaaatatccacactgct

SEQ ID NO: 340776 - DNA, 33 bp, Homo sapien
gttttaggttctttgagaaatatccacactgct

SEQ ID NO: 340777 - DNA, 33 bp, Homo sapien
atgcaatgtctataaccgtcaaaaccacggcag

SEQ ID NO: 340778 - DNA, 33 bp, Homo sapien
atgcaatgtctataactgtcaaaaccacggcag

SEQ ID NO: 340779 - DNA, 33 bp, Homo sapien
ctcatattcaccacaacgaaacaacaatccaat

SEQ ID NO: 340780 - DNA, 33 bp, Homo sapien
ctcatattcaccacaatgaaacaacaatccaat

SEQ ID NO: 340781 - DNA, 33 bp, Homo sapien
ccaggcactactaactaaaataagagagaatca

SEQ ID NO: 340782 - DNA, 33 bp, Homo sapien
ccaggcactactaactgaaataagagagaatca

SEQ ID NO: 340783 - DNA, 33 bp, Homo sapien
cattttaacaaaaaccaaaatgattcatataca

SEQ ID NO: 340784 - DNA, 33 bp, Homo sapien
cattttaacaaaaaccgaaatgattcatataca

SEQ ID NO: 340785 - DNA, 33 bp, Homo sapien
gtcacagatgaaacacggaaatgccttactccg

SEQ ID NO: 340786 - DNA, 33 bp, Homo sapien
gtcacagatgaaacactgaaatgccttactccg

SEQ ID NO: 340787 - DNA, 33 bp, Homo sapien
ttcaggaagcctccaaacatagtagaaggtgaa

SEQ ID NO: 340788 - DNA, 33 bp, Homo sapien
ttcaggaagcctccaatcatagtagaaggtgaa

SEQ ID NO: 340789 - DNA, 33 bp, Homo sapien
aaacaaatgggccaatgaaatcagaagctttag

SEQ ID NO: 340790 - DNA, 33 bp, Homo sapien
aaacaaatgggccaattaaatcagaagctttag

SEQ ID NO: 340791 - DNA, 33 bp, Homo sapien
cccatttgtttaactaccaatgacaatacagag

SEQ ID NO: 340792 - DNA, 33 bp, Homo sapien
cccatttgtttaactatcaatgacaatacagag

SEQ ID NO: 340793 - DNA, 33 bp, Homo sapien
cttgttttccaatatgcaacaagtattttcctt

SEQ ID NO: 340794 - DNA, 33 bp, Homo sapien
cttgttttccaatatgtaacaagtattttcctt

SEQ ID NO: 340795 - DNA, 33 bp, Homo sapien
tatcacctacagaaacaactctaccagttttct

SEQ ID NO: 340796 - DNA, 33 bp, Homo sapien
tatcacctacagaaactactctaccagttttct

SEQ ID NO: 340797 - DNA, 33 bp, Homo sapien
ctgagagctgcccttaactggaagtgaccaaag

SEQ ID NO: 340798 - DNA, 33 bp, Homo sapien
ctgagagctgcccttagctggaagtgaccaaag

SEQ ID NO: 340799 - DNA, 33 bp, Homo sapien
aatttgtccagttccaaaaaggagtaaggcaat

SEQ ID NO: 340800 - DNA, 33 bp, Homo sapien
aatttgtccagttccagaaaggagtaaggcaat

SEQ ID NO: 340801 - DNA, 33 bp, Homo sapien
cattaaagacatgaggaaagaacaatgagtggg

SEQ ID NO: 340802 - DNA, 33 bp, Homo sapien
cattaaagacatgaggcaagaacaatgagtggg

SEQ ID NO: 340803 - DNA, 33 bp, Homo sapien
ctgatattagaaggaacagctgagatgagactg

SEQ ID NO: 340804 - DNA, 33 bp, Homo sapien
ctgatattagaaggaagagctgagatgagactg

SEQ ID NO: 340805 - DNA, 33 bp, Homo sapien
gaaaagaaaggtggtaaatgctcagaatcggcc

SEQ ID NO: 340806 - DNA, 33 bp, Homo sapien
gaaaagaaaggtggtagatgctcagaatcggcc

SEQ ID NO: 340807 - DNA, 33 bp, Homo sapien
gacccagctcctgctcaagaccacactggtgca

SEQ ID NO: 340808 - DNA, 33 bp, Homo sapien
gacccagctcctgctcgagaccacactggtgca

SEQ ID NO: 340809 - DNA, 33 bp, Homo sapien
ataatgaaagaaaatcagaacaaagtatttcat

SEQ ID NO: 340810 - DNA, 33 bp, Homo sapien
ataatgaaagaaaatcggaacaaagtatttcat

SEQ ID NO: 340811 - DNA, 33 bp, Homo sapien
gtctaagaatgactaaccttctgggaatgtaag

SEQ ID NO: 340812 - DNA, 33 bp, Homo sapien
gtctaagaatgactaatcttctgggaatgtaag

SEQ ID NO: 340813 - DNA, 33 bp, Homo sapien
aaagctgggagcagtacggaacactggaggaga

SEQ ID NO: 340814 - DNA, 33 bp, Homo sapien
aaagctgggagcagtatggaacactggaggaga

SEQ ID NO: 340815 - DNA, 33 bp, Homo sapien
ggagtcaaattcatatcaagaacgctgtattag

SEQ ID NO: 340816 - DNA, 33 bp, Homo sapien
ggagtcaaattcatattaagaacgctgtattag

SEQ ID NO: 340817 - DNA, 33 bp, Homo sapien
tcatgtctacctggaacgttggaatgtggcctt

SEQ ID NO: 340818 - DNA, 33 bp, Homo sapien
tcatgtctacctggaatgttggaatgtggcctt

SEQ ID NO: 340819 - DNA, 33 bp, Homo sapien
atttagcaaaggaaacaattaggatacaatatc

SEQ ID NO: 340820 - DNA, 33 bp, Homo sapien
atttagcaaaggaaacgattaggatacaatatc

SEQ ID NO: 340821 - DNA, 33 bp, Homo sapien
tcttgaaagacgaatacgagtttttcctaaaat

SEQ ID NO: 340822 - DNA, 33 bp, Homo sapien
tcttgaaagacgaatatgagtttttcctaaaat

SEQ ID NO: 340823 - DNA, 33 bp, Homo sapien
gactcagtaaatgctacgatttttattactaag

SEQ ID NO: 340824 - DNA, 33 bp, Homo sapien
gactcagtaaatgctatgatttttattactaag

SEQ ID NO: 340825 - DNA, 33 bp, Homo sapien
ctttgtgcaaatcacaagtgttctatgaagcat

SEQ ID NO: 340826 - DNA, 33 bp, Homo sapien
ctttgtgcaaatcacaggtgttctatgaagcat

SEQ ID NO: 340827 - DNA, 33 bp, Homo sapien
ggcagtctacaacgtacgcctgtattttctggg

SEQ ID NO: 340828 - DNA, 33 bp, Homo sapien
ggcagtctacaacgtaggcctgtattttctggg

SEQ ID NO: 340829 - DNA, 33 bp, Homo sapien
acctctaacttcgtaacccaacaccaaagagtt

SEQ ID NO: 340830 - DNA, 33 bp, Homo sapien
acctctaacttcgtaagccaacaccaaagagtt

SEQ ID NO: 340831 - DNA, 33 bp, Homo sapien
aaaagcaggatcccacagagaaatggttgattc

SEQ ID NO: 340832 - DNA, 33 bp, Homo sapien
aaaagcaggatcccacggagaaatggttgattc

SEQ ID NO: 340833 - DNA, 33 bp, Homo sapien
ttttaagtccttctctaaaagcatttccaatca

SEQ ID NO: 340834 - DNA, 33 bp, Homo sapien
ttttaagtccttctctgaaagcatttccaatca

SEQ ID NO: 340835 - DNA, 33 bp, Homo sapien
tctttgacagactttcccaggattaaaattgta

SEQ ID NO: 340836 - DNA, 33 bp, Homo sapien
tctttgacagactttcgcaggattaaaattgta

SEQ ID NO: 340837 - DNA, 33 bp, Homo sapien
tttgggtagtatggacactttaacatatttatt

SEQ ID NO: 340838 - DNA, 33 bp, Homo sapien
tttgggtagtatggaccctttaacatatttatt

SEQ ID NO: 340839 - DNA, 33 bp, Homo sapien
acatatttgggctgaaaatttacaattcctcag

SEQ ID NO: 340840 - DNA, 33 bp, Homo sapien
acatatttgggctgaatatttacaattcctcag

SEQ ID NO: 340841 - DNA, 33 bp, Homo sapien
tggtgcttaaccttggccaaagtgtctctcttc

SEQ ID NO: 340842 - DNA, 33 bp, Homo sapien
tggtgcttaaccttgggcaaagtgtctctcttc

SEQ ID NO: 340843 - DNA, 33 bp, Homo sapien
aatgcagtcacaacagaagtctccctcagcaga

SEQ ID NO: 340844 - DNA, 33 bp, Homo sapien
aatgcagtcacaacaggagtctccctcagcaga

SEQ ID NO: 340845 - DNA, 33 bp, Homo sapien
tattattaatttttcaagctaatacctgagtac

SEQ ID NO: 340846 - DNA, 33 bp, Homo sapien
tattattaatttttcatgctaatacctgagtac

SEQ ID NO: 340847 - DNA, 33 bp, Homo sapien
catagcttggagaaacccaaatgggatcacatg

SEQ ID NO: 340848 - DNA, 33 bp, Homo sapien
catagcttggagaaacgcaaatgggatcacatg

SEQ ID NO: 340849 - DNA, 33 bp, Homo sapien
aatagcagcaacttgtcacaaggcagacaaata

SEQ ID NO: 340850 - DNA, 33 bp, Homo sapien
aatagcagcaacttgttacaaggcagacaaata

SEQ ID NO: 340851 - DNA, 33 bp, Homo sapien
gttgtgattatgagctcagctacctgctactgg

SEQ ID NO: 340852 - DNA, 33 bp, Homo sapien
gttgtgattatgagctgagctacctgctactgg

SEQ ID NO: 340853 - DNA, 33 bp, Homo sapien
tagacaaggaaataaacgaagtgggtaggagaa

SEQ ID NO: 340854 - DNA, 33 bp, Homo sapien
tagacaaggaaataaatgaagtgggtaggagaa

SEQ ID NO: 340855 - DNA, 33 bp, Homo sapien
atgccatttatacttgcatgtgataaaacacct

SEQ ID NO: 340856 - DNA, 33 bp, Homo sapien
atgccatttatacttgtatgtgataaaacacct

SEQ ID NO: 340857 - DNA, 33 bp, Homo sapien
agacaacagagacccacgagcaataaaatgact

SEQ ID NO: 340858 - DNA, 33 bp, Homo sapien
agacaacagagacccatgagcaataaaatgact

SEQ ID NO: 340859 - DNA, 33 bp, Homo sapien
ttccagttttaaagaacacagaaatccacagaa

SEQ ID NO: 340860 - DNA, 33 bp, Homo sapien
ttccagttttaaagaatacagaaatccacagaa

SEQ ID NO: 340861 - DNA, 33 bp, Homo sapien
aaggagggatcatttacagacaactctgttttc

SEQ ID NO: 340862 - DNA, 33 bp, Homo sapien
aaggagggatcatttatagacaactctgttttc

SEQ ID NO: 340863 - DNA, 33 bp, Homo sapien
caaacaataatcattccaattactggcaaaatt

SEQ ID NO: 340864 - DNA, 33 bp, Homo sapien
caaacaataatcattctaattactggcaaaatt

SEQ ID NO: 340865 - DNA, 33 bp, Homo sapien
ttgaaatagagcagtaagtatgagaactaactg

SEQ ID NO: 340866 - DNA, 33 bp, Homo sapien
ttgaaatagagcagtaggtatgagaactaactg

SEQ ID NO: 340867 - DNA, 33 bp, Homo sapien
tgactttcccaaggtacaagtgacagtaggtag

SEQ ID NO: 340868 - DNA, 33 bp, Homo sapien
tgactttcccaaggtataagtgacagtaggtag

SEQ ID NO: 340869 - DNA, 33 bp, Homo sapien
acacaaagaaatgataaatggttgagtggtgga

SEQ ID NO: 340870 - DNA, 33 bp, Homo sapien
acacaaagaaatgatagatggttgagtggtgga

SEQ ID NO: 340871 - DNA, 33 bp, Homo sapien
ctagcataggacatggaccacattagtgacaag

SEQ ID NO: 340872 - DNA, 33 bp, Homo sapien
ctagcataggacatgggccacattagtgacaag

SEQ ID NO: 340873 - DNA, 33 bp, Homo sapien
ggtctcagacactgtacagaagagtctctggct

SEQ ID NO: 340874 - DNA, 33 bp, Homo sapien
ggtctcagacactgtatagaagagtctctggct

SEQ ID NO: 340875 - DNA, 33 bp, Homo sapien
cgggagagacgtgtgacgccagacgtgcagcct

SEQ ID NO: 340876 - DNA, 33 bp, Homo sapien
cgggagagacgtgtgatgccagacgtgcagcct

SEQ ID NO: 340877 - DNA, 33 bp, Homo sapien
agaattggcaaattcaagttatcttgtaggctg

SEQ ID NO: 340878 - DNA, 33 bp, Homo sapien
agaattggcaaattcaggttatcttgtaggctg

SEQ ID NO: 340879 - DNA, 33 bp, Homo sapien
attactttaaattgtaaaaagtgtattgtaaat

SEQ ID NO: 340880 - DNA, 33 bp, Homo sapien
attactttaaattgtagaaagtgtattgtaaat

SEQ ID NO: 340881 - DNA, 33 bp, Homo sapien
ttaagactcccaaatacaaaggcttggattcaa

SEQ ID NO: 340882 - DNA, 33 bp, Homo sapien
ttaagactcccaaatataaaggcttggattcaa

SEQ ID NO: 340883 - DNA, 33 bp, Homo sapien
tttactggagggtttgaagcaataaaatttttc

SEQ ID NO: 340884 - DNA, 33 bp, Homo sapien
tttactggagggtttgcagcaataaaatttttc

SEQ ID NO: 340885 - DNA, 33 bp, Homo sapien
cctgtcacactccatagtactgtgcagccacta

SEQ ID NO: 340886 - DNA, 33 bp, Homo sapien
cctgtcacactccatattactgtgcagccacta

SEQ ID NO: 340887 - DNA, 33 bp, Homo sapien
aactagaaatctgtggaatcatactttggctcc

SEQ ID NO: 340888 - DNA, 33 bp, Homo sapien
aactagaaatctgtggcatcatactttggctcc

SEQ ID NO: 340889 - DNA, 33 bp, Homo sapien
tgtgtcttgcataacagcttgatttgacttgta

SEQ ID NO: 340890 - DNA, 33 bp, Homo sapien
tgtgtcttgcataacatcttgatttgacttgta

SEQ ID NO: 340891 - DNA, 33 bp, Homo sapien
aaagtatgagtgtacaatggagtgttccagagg

SEQ ID NO: 340892 - DNA, 33 bp, Homo sapien
aaagtatgagtgtacagtggagtgttccagagg

SEQ ID NO: 340893 - DNA, 33 bp, Homo sapien
agtataaaatacacaccagatttcaaatgctta

SEQ ID NO: 340894 - DNA, 33 bp, Homo sapien
agtataaaatacacacgagatttcaaatgctta

SEQ ID NO: 340895 - DNA, 33 bp, Homo sapien
tggaacgacttgggtacgtgaatctattttttc

SEQ ID NO: 340896 - DNA, 33 bp, Homo sapien
tggaacgacttgggtatgtgaatctattttttc

SEQ ID NO: 340897 - DNA, 33 bp, Homo sapien
atttaaaaatatacacaattcgattaccgtaaa

SEQ ID NO: 340898 - DNA, 33 bp, Homo sapien
atttaaaaatatacacgattcgattaccgtaaa

SEQ ID NO: 340899 - DNA, 33 bp, Homo sapien
aaagccagtctatcaaatgaggctaaaattggc

SEQ ID NO: 340900 - DNA, 33 bp, Homo sapien
aaagccagtctatcaagtgaggctaaaattggc

SEQ ID NO: 340901 - DNA, 33 bp, Homo sapien
gtctctagtttcccacagattcataaaggtcca

SEQ ID NO: 340902 - DNA, 33 bp, Homo sapien
gtctctagtttcccacggattcataaaggtcca

SEQ ID NO: 340903 - DNA, 33 bp, Homo sapien
acctgcaacacctaaacgtcactgtttccaaat

SEQ ID NO: 340904 - DNA, 33 bp, Homo sapien
acctgcaacacctaaaggtcactgtttccaaat

SEQ ID NO: 340905 - DNA, 33 bp, Homo sapien
tacacctattaaaatcaccaaaattcagaacaa

SEQ ID NO: 340906 - DNA, 33 bp, Homo sapien
tacacctattaaaatcgccaaaattcagaacaa

SEQ ID NO: 340907 - DNA, 33 bp, Homo sapien
cttaaaatacttcacaaactttgtttctctcat

SEQ ID NO: 340908 - DNA, 33 bp, Homo sapien
cttaaaatacttcacagactttgtttctctcat

SEQ ID NO: 340909 - DNA, 33 bp, Homo sapien
tgattgagccattcatcaacatggagaccatca

SEQ ID NO: 340910 - DNA, 33 bp, Homo sapien
tgattgagccattcattaacatggagaccatca

SEQ ID NO: 340911 - DNA, 33 bp, Homo sapien
agtctgggtgacacaacaaaaccctgtctcaaa

SEQ ID NO: 340912 - DNA, 33 bp, Homo sapien
agtctgggtgacacaataaaaccctgtctcaaa

SEQ ID NO: 340913 - DNA, 33 bp, Homo sapien
aggtgtccaccatcaacgttaatgattctgtca

SEQ ID NO: 340914 - DNA, 33 bp, Homo sapien
aggtgtccaccatcaatgttaatgattctgtca

SEQ ID NO: 340915 - DNA, 33 bp, Homo sapien
acagttttaggagctacagtaaggcctgggatt

SEQ ID NO: 340916 - DNA, 33 bp, Homo sapien
acagttttaggagctatagtaaggcctgggatt

SEQ ID NO: 340917 - DNA, 33 bp, Homo sapien
gcaacaatttgtttccagctgaaatcagcatct

SEQ ID NO: 340918 - DNA, 33 bp, Homo sapien
gcaacaatttgtttccggctgaaatcagcatct

SEQ ID NO: 340919 - DNA, 33 bp, Homo sapien
tggcattctaagactcccccaattagacagggt

SEQ ID NO: 340920 - DNA, 33 bp, Homo sapien
tggcattctaagactctcccaattagacagggt

SEQ ID NO: 340921 - DNA, 33 bp, Homo sapien
attgccaggtcaagtagaaggattgagtttgct

SEQ ID NO: 340922 - DNA, 33 bp, Homo sapien
attgccaggtcaagtataaggattgagtttgct

SEQ ID NO: 340923 - DNA, 33 bp, Homo sapien
tctctattaatacagactagactacccaaagac

SEQ ID NO: 340924 - DNA, 33 bp, Homo sapien
tctctattaatacagattagactacccaaagac

SEQ ID NO: 340925 - DNA, 33 bp, Homo sapien
cataccttttacttaccggatatgatttcgttt

SEQ ID NO: 340926 - DNA, 33 bp, Homo sapien
cataccttttacttactggatatgatttcgttt

SEQ ID NO: 340927 - DNA, 33 bp, Homo sapien
cttcctctctccaacaaagactagcgcccacat

SEQ ID NO: 340928 - DNA, 33 bp, Homo sapien
cttcctctctccaacagagactagcgcccacat

SEQ ID NO: 340929 - DNA, 33 bp, Homo sapien
tgaaaaggtaggtctacggtgacaaattcccag

SEQ ID NO: 340930 - DNA, 33 bp, Homo sapien
tgaaaaggtaggtctatggtgacaaattcccag

SEQ ID NO: 340931 - DNA, 33 bp, Homo sapien
caagaatgtctcagtcgcggtaatttcccggcc

SEQ ID NO: 340932 - DNA, 33 bp, Homo sapien
caagaatgtctcagtctcggtaatttcccggcc

SEQ ID NO: 340933 - DNA, 33 bp, Homo sapien
ggattcagacaatagactaagatatccttgaaa

SEQ ID NO: 340934 - DNA, 33 bp, Homo sapien
ggattcagacaatagagtaagatatccttgaaa

SEQ ID NO: 340935 - DNA, 33 bp, Homo sapien
tccagagaatgaactaaacatataacctctctt

SEQ ID NO: 340936 - DNA, 33 bp, Homo sapien
tccagagaatgaactacacatataacctctctt

SEQ ID NO: 340937 - DNA, 33 bp, Homo sapien
acccagaacttacaaacttctccaaagatttta

SEQ ID NO: 340938 - DNA, 33 bp, Homo sapien
acccagaacttacaaatttctccaaagatttta

SEQ ID NO: 340939 - DNA, 33 bp, Homo sapien
tatagatacagataggaaaaaaagtactttaac

SEQ ID NO: 340940 - DNA, 33 bp, Homo sapien
tatagatacagatagggaaaaaagtactttaac

SEQ ID NO: 340941 - DNA, 33 bp, Homo sapien
ccacaggtttgtgcttcaactaacaattaaata

SEQ ID NO: 340942 - DNA, 33 bp, Homo sapien
ccacaggtttgtgctttaactaacaattaaata

SEQ ID NO: 340943 - DNA, 33 bp, Homo sapien
gccttttggttgagaaaacgtcaaagctatctc

SEQ ID NO: 340944 - DNA, 33 bp, Homo sapien
gccttttggttgagaagacgtcaaagctatctc

SEQ ID NO: 340945 - DNA, 33 bp, Homo sapien
ttgtttctacttcttacagtccctgcccctaaa

SEQ ID NO: 340946 - DNA, 33 bp, Homo sapien
ttgtttctacttcttatagtccctgcccctaaa

SEQ ID NO: 340947 - DNA, 33 bp, Homo sapien
ggattgtttgagcgcaggagtagtgagccatga

SEQ ID NO: 340948 - DNA, 33 bp, Homo sapien
ggattgtttgagcgcatgagtagtgagccatga

SEQ ID NO: 340949 - DNA, 33 bp, Homo sapien
agttctgtgacagtcaataaatccagcaagaga

SEQ ID NO: 340950 - DNA, 33 bp, Homo sapien
agttctgtgacagtcagtaaatccagcaagaga

SEQ ID NO: 340951 - DNA, 33 bp, Homo sapien
tgttactcccttcctacgtatttatgggtgatt

SEQ ID NO: 340952 - DNA, 33 bp, Homo sapien
tgttactcccttcctatgtatttatgggtgatt

SEQ ID NO: 340953 - DNA, 33 bp, Homo sapien
tatctctgtggtacgtgaagattttcaagaagt

SEQ ID NO: 340954 - DNA, 33 bp, Homo sapien
tatctctgtggtacgttaagattttcaagaagt

SEQ ID NO: 340955 - DNA, 33 bp, Homo sapien
gtctttctccttgtcaactagtcatttgttccg

SEQ ID NO: 340956 - DNA, 33 bp, Homo sapien
gtctttctccttgtcagctagtcatttgttccg

SEQ ID NO: 340957 - DNA, 33 bp, Homo sapien
gtatatatttatttacaagaagtctgaaacaaa

SEQ ID NO: 340958 - DNA, 33 bp, Homo sapien
gtatatatttatttacgagaagtctgaaacaaa

SEQ ID NO: 340959 - DNA, 33 bp, Homo sapien
cagattcagtgtataaaaaaattacacattcaa

SEQ ID NO: 340960 - DNA, 33 bp, Homo sapien
cagattcagtgtataagaaaattacacattcaa

SEQ ID NO: 340961 - DNA, 33 bp, Homo sapien
accagtcctagaataactcacatcctttatttg

SEQ ID NO: 340962 - DNA, 33 bp, Homo sapien
accagtcctagaataagtcacatcctttatttg

SEQ ID NO: 340963 - DNA, 33 bp, Homo sapien
gaaaatgacaattctaagacatatccaaaaacg

SEQ ID NO: 340964 - DNA, 33 bp, Homo sapien
gaaaatgacaattctaggacatatccaaaaacg

SEQ ID NO: 340965 - DNA, 33 bp, Homo sapien
cataagttttcagagagaaaatttttagcaagc

SEQ ID NO: 340966 - DNA, 33 bp, Homo sapien
cataagttttcagagataaaatttttagcaagc

SEQ ID NO: 340967 - DNA, 33 bp, Homo sapien
caaaacacattctaaactggtgaaatacttttg

SEQ ID NO: 340968 - DNA, 33 bp, Homo sapien
caaaacacattctaaattggtgaaatacttttg

SEQ ID NO: 340969 - DNA, 33 bp, Homo sapien
aatagcctgactcatacgttattggaacaaatt

SEQ ID NO: 340970 - DNA, 33 bp, Homo sapien
aatagcctgactcatatgttattggaacaaatt

SEQ ID NO: 340971 - DNA, 33 bp, Homo sapien
acattttgattaatgacgaactgcatacataag

SEQ ID NO: 340972 - DNA, 33 bp, Homo sapien
acattttgattaatgatgaactgcatacataag

SEQ ID NO: 340973 - DNA, 33 bp, Homo sapien
ttcggctattgctgtccagtagcttttaacttt

SEQ ID NO: 340974 - DNA, 33 bp, Homo sapien
ttcggctattgctgtctagtagcttttaacttt

SEQ ID NO: 340975 - DNA, 33 bp, Homo sapien
tcctagtttgctgacaatgcttataatgaacag

SEQ ID NO: 340976 - DNA, 33 bp, Homo sapien
tcctagtttgctgacagtgcttataatgaacag

SEQ ID NO: 340977 - DNA, 33 bp, Homo sapien
atttttccaggcccaaatctctcaaatctccat

SEQ ID NO: 340978 - DNA, 33 bp, Homo sapien
atttttccaggcccaactctctcaaatctccat

SEQ ID NO: 340979 - DNA, 33 bp, Homo sapien
ccatttacagcatacaatctcttccttgaagtg

SEQ ID NO: 340980 - DNA, 33 bp, Homo sapien
ccatttacagcatacagtctcttccttgaagtg

SEQ ID NO: 340981 - DNA, 33 bp, Homo sapien
tgatcatgtgcttgaccataaaataagattcaa

SEQ ID NO: 340982 - DNA, 33 bp, Homo sapien
tgatcatgtgcttgacgataaaataagattcaa

SEQ ID NO: 340983 - DNA, 33 bp, Homo sapien
gagcagaaagatgttaaagcagttttaagaaaa

SEQ ID NO: 340984 - DNA, 33 bp, Homo sapien
gagcagaaagatgttacagcagttttaagaaaa

SEQ ID NO: 340985 - DNA, 33 bp, Homo sapien
tctacttcttttcctccacccatactgactcca

SEQ ID NO: 340986 - DNA, 33 bp, Homo sapien
tctacttcttttcctctacccatactgactcca

SEQ ID NO: 340987 - DNA, 33 bp, Homo sapien
aagtttattctacagacagagcagtgaggaaag

SEQ ID NO: 340988 - DNA, 33 bp, Homo sapien
aagtttattctacagagagagcagtgaggaaag

SEQ ID NO: 340989 - DNA, 33 bp, Homo sapien
tgagcacagtggtggacggaaaaaaatgaacaa

SEQ ID NO: 340990 - DNA, 33 bp, Homo sapien
tgagcacagtggtggatggaaaaaaatgaacaa

SEQ ID NO: 340991 - DNA, 33 bp, Homo sapien
agttatatgcaacctacgacacattattaatac

SEQ ID NO: 340992 - DNA, 33 bp, Homo sapien
agttatatgcaacctatgacacattattaatac

SEQ ID NO: 340993 - DNA, 33 bp, Homo sapien
taatttcaatacttgacagctggaaactttcct

SEQ ID NO: 340994 - DNA, 33 bp, Homo sapien
taatttcaatacttgatagctggaaactttcct

SEQ ID NO: 340995 - DNA, 33 bp, Homo sapien
ctaaaactcactatggacatcttctgtttctag

SEQ ID NO: 340996 - DNA, 33 bp, Homo sapien
ctaaaactcactatggccatcttctgtttctag

SEQ ID NO: 340997 - DNA, 33 bp, Homo sapien
actttccaatccttcacggtgcagttctgttta

SEQ ID NO: 340998 - DNA, 33 bp, Homo sapien
actttccaatccttcatggtgcagttctgttta

SEQ ID NO: 340999 - DNA, 33 bp, Homo sapien
aagggcgatgcctataagatctgtatgaattcc

SEQ ID NO: 341000 - DNA, 33 bp, Homo sapien
aagggcgatgcctataggatctgtatgaattcc

SEQ ID NO: 341001 - DNA, 33 bp, Homo sapien
ctggggtactgctataaagaggaggaatccaac

SEQ ID NO: 341002 - DNA, 33 bp, Homo sapien
ctggggtactgctatacagaggaggaatccaac

SEQ ID NO: 341003 - DNA, 33 bp, Homo sapien
gacctaaaagtcctcacgccctacggaccagca

SEQ ID NO: 341004 - DNA, 33 bp, Homo sapien
gacctaaaagtcctcatgccctacggaccagca

SEQ ID NO: 341005 - DNA, 33 bp, Homo sapien
agatttgagcagtttgaatttgatagggaatgg

SEQ ID NO: 341006 - DNA, 33 bp, Homo sapien
agatttgagcagtttggatttgatagggaatgg

SEQ ID NO: 341007 - DNA, 33 bp, Homo sapien
tgtgaacatttaaaaaggcacgtggtggtcatc

SEQ ID NO: 341008 - DNA, 33 bp, Homo sapien
tgtgaacatttaaaaatgcacgtggtggtcatc

SEQ ID NO: 341009 - DNA, 33 bp, Homo sapien
cgatttgccatatgaccgcaactgtttaaagac

SEQ ID NO: 341010 - DNA, 33 bp, Homo sapien
cgatttgccatatgactgcaactgtttaaagac

SEQ ID NO: 341011 - DNA, 33 bp, Homo sapien
atttagtctctcttccggccaatttatctccat

SEQ ID NO: 341012 - DNA, 33 bp, Homo sapien
atttagtctctcttcctgccaatttatctccat

SEQ ID NO: 341013 - DNA, 33 bp, Homo sapien
tatttgaagactacaaactacttcgaccaccct

SEQ ID NO: 341014 - DNA, 33 bp, Homo sapien
tatttgaagactacaagctacttcgaccaccct

SEQ ID NO: 341015 - DNA, 33 bp, Homo sapien
accttgctcttagcagcatagaaggactactga

SEQ ID NO: 341016 - DNA, 33 bp, Homo sapien
accttgctcttagcagtatagaaggactactga

SEQ ID NO: 341017 - DNA, 33 bp, Homo sapien
catactagtttcttcccctcctttcatgactca

SEQ ID NO: 341018 - DNA, 33 bp, Homo sapien
catactagtttcttcctctcctttcatgactca

SEQ ID NO: 341019 - DNA, 33 bp, Homo sapien
agttaaacaaagagtgaaagaatattccaggca

SEQ ID NO: 341020 - DNA, 33 bp, Homo sapien
agttaaacaaagagtggaagaatattccaggca

SEQ ID NO: 341021 - DNA, 33 bp, Homo sapien
aaagtcaagtaacttacagagcataggaacata

SEQ ID NO: 341022 - DNA, 33 bp, Homo sapien
aaagtcaagtaacttatagagcataggaacata

SEQ ID NO: 341023 - DNA, 33 bp, Homo sapien
ctagaaatcaacttaaggtcagaatccatttgc

SEQ ID NO: 341024 - DNA, 33 bp, Homo sapien
ctagaaatcaacttaatgtcagaatccatttgc

SEQ ID NO: 341025 - DNA, 33 bp, Homo sapien
gaaacctgcagtgaaaacgtaaggtgatggagc

SEQ ID NO: 341026 - DNA, 33 bp, Homo sapien
gaaacctgcagtgaaagcgtaaggtgatggagc

SEQ ID NO: 341027 - DNA, 33 bp, Homo sapien
tcaaatcacttttctcactgcaggtaagggacc

SEQ ID NO: 341028 - DNA, 33 bp, Homo sapien
tcaaatcacttttctcgctgcaggtaagggacc

SEQ ID NO: 341029 - DNA, 33 bp, Homo sapien
agcattagctttccacaggcaaatgttcatttc

SEQ ID NO: 341030 - DNA, 33 bp, Homo sapien
agcattagctttccacgggcaaatgttcatttc

SEQ ID NO: 341031 - DNA, 33 bp, Homo sapien
ttcctgaatctggctgcagatagattttggtag

SEQ ID NO: 341032 - DNA, 33 bp, Homo sapien
ttcctgaatctggctgtagatagattttggtag

SEQ ID NO: 341033 - DNA, 33 bp, Homo sapien; identical to SEQ ID NO: 341031

SEQ ID NO: 341034 - DNA, 33 bp, Homo sapien; identical to SEQ ID NO: 341032

SEQ ID NO: 341035 - DNA, 33 bp, Homo sapien
gtgcatcatgaaagaaactcgtcgaagaaagga

SEQ ID NO: 341036 - DNA, 33 bp, Homo sapien
gtgcatcatgaaagaagctcgtcgaagaaagga

SEQ ID NO: 341037 - DNA, 33 bp, Homo sapien
tcatactaatgtgaaaaggaactccaacattca

SEQ ID NO: 341038 - DNA, 33 bp, Homo sapien
tcatactaatgtgaaacggaactccaacattca

SEQ ID NO: 341039 - DNA, 33 bp, Homo sapien
ttataaatgggattaaacgctcaaactagattc

SEQ ID NO: 341040 - DNA, 33 bp, Homo sapien
ttataaatgggattaagcgctcaaactagattc

SEQ ID NO: 341041 - DNA, 33 bp, Homo sapien
ttatagcaacataaaacggactatgattaagtt

SEQ ID NO: 341042 - DNA, 33 bp, Homo sapien
ttatagcaacataaaatggactatgattaagtt

SEQ ID NO: 341043 - DNA, 33 bp, Homo sapien
ttatatgagaataataaagatgatccttggcta

SEQ ID NO: 341044 - DNA, 33 bp, Homo sapien
ttatatgagaataatagagatgatccttggcta

SEQ ID NO: 341045 - DNA, 33 bp, Homo sapien
gacttctgaatttggaagtaagagacaaaaatc

SEQ ID NO: 341046 - DNA, 33 bp, Homo sapien
gacttctgaatttggaggtaagagacaaaaatc

SEQ ID NO: 341047 - DNA, 33 bp, Homo sapien
acttaaaattgtattacctgaatagtctccatg

SEQ ID NO: 341048 - DNA, 33 bp, Homo sapien
acttaaaattgtattatctgaatagtctccatg

SEQ ID NO: 341049 - DNA, 33 bp, Homo sapien
atgtctgtaaatgaagactggtccaataatagg

SEQ ID NO: 341050 - DNA, 33 bp, Homo sapien
atgtctgtaaatgaaggctggtccaataatagg

SEQ ID NO: 341051 - DNA, 33 bp, Homo sapien
cagtgctaagaggaataaacactcattgtgcag

SEQ ID NO: 341052 - DNA, 33 bp, Homo sapien
cagtgctaagaggaatgaacactcattgtgcag

SEQ ID NO: 341053 - DNA, 33 bp, Homo sapien
ggtcttgctctgaatacgatcctgcaaggaggc

SEQ ID NO: 341054 - DNA, 33 bp, Homo sapien
ggtcttgctctgaatatgatcctgcaaggaggc

SEQ ID NO: 341055 - DNA, 33 bp, Homo sapien
tgtgacttggggaaaaatactggcctatatcca

SEQ ID NO: 341056 - DNA, 33 bp, Homo sapien
tgtgacttggggaaaagtactggcctatatcca

SEQ ID NO: 341057 - DNA, 33 bp, Homo sapien
atcccagtatttcctacaatgcataccagagaa

SEQ ID NO: 341058 - DNA, 33 bp, Homo sapien
atcccagtatttcctataatgcataccagagaa

SEQ ID NO: 341059 - DNA, 33 bp, Homo sapien
tttagtgaaatatgaaccctgaacaatgacatt

SEQ ID NO: 341060 - DNA, 33 bp, Homo sapien
tttagtgaaatatgaatcctgaacaatgacatt

SEQ ID NO: 341061 - DNA, 33 bp, Homo sapien
ctcggaactgccagggaacaaacaattgaagcc

SEQ ID NO: 341062 - DNA, 33 bp, Homo sapien
ctcggaactgccagggtacaaacaattgaagcc

SEQ ID NO: 341063 - DNA, 33 bp, Homo sapien
taaaatgaggataacaatagtaccacaggggtt

SEQ ID NO: 341064 - DNA, 33 bp, Homo sapien
taaaatgaggataacagtagtaccacaggggtt

SEQ ID NO: 341065 - DNA, 33 bp, Homo sapien
tcacagaaacatacagacatgcaaagggctcat

SEQ ID NO: 341066 - DNA, 33 bp, Homo sapien
tcacagaaacatacaggcatgcaaagggctcat

SEQ ID NO: 341067 - DNA, 33 bp, Homo sapien
aattttactaattgcaatcacggttaacatatc

SEQ ID NO: 341068 - DNA, 33 bp, Homo sapien
aattttactaattgcagtcacggttaacatatc

SEQ ID NO: 341069 - DNA, 33 bp, Homo sapien
cttgtttgtaacgtggcatcccttgtgccttgg

SEQ ID NO: 341070 - DNA, 33 bp, Homo sapien
cttgtttgtaacgtggtatcccttgtgccttgg

SEQ ID NO: 341071 - DNA, 33 bp, Homo sapien
tgaacttgttgttctccacttcctacactataa

SEQ ID NO: 341072 - DNA, 33 bp, Homo sapien
tgaacttgttgttctctacttcctacactataa

SEQ ID NO: 341073 - DNA, 33 bp, Homo sapien
acaagtagcttttggcactcagagatgtgagcc

SEQ ID NO: 341074 - DNA, 33 bp, Homo sapien
acaagtagcttttggcgctcagagatgtgagcc

SEQ ID NO: 341075 - DNA, 33 bp, Homo sapien
aatatctgagctgttacatacaatttcaaaaca

SEQ ID NO: 341076 - DNA, 33 bp, Homo sapien
aatatctgagctgttatatacaatttcaaaaca

SEQ ID NO: 341077 - DNA, 33 bp, Homo sapien
gtcattacacaaatgacagttggcggaaacagt

SEQ ID NO: 341078 - DNA, 33 bp, Homo sapien
gtcattacacaaatgatagttggcggaaacagt

SEQ ID NO: 341079 - DNA, 33 bp, Homo sapien
ctgcttcagtctaacacaaagggtgatgatcct

SEQ ID NO: 341080 - DNA, 33 bp, Homo sapien
ctgcttcagtctaacagaaagggtgatgatcct

SEQ ID NO: 341081 - DNA, 33 bp, Homo sapien
tcattaccctcttacaagaagctggtatgatgt

SEQ ID NO: 341082 - DNA, 33 bp, Homo sapien
tcattaccctcttacatgaagctggtatgatgt

SEQ ID NO: 341083 - DNA, 33 bp, Homo sapien
agcagaacttgctagagctccctttcctggcgc

SEQ ID NO: 341084 - DNA, 33 bp, Homo sapien
agcagaacttgctagatctccctttcctggcgc

SEQ ID NO: 341085 - DNA, 33 bp, Homo sapien
ggagagggtttcttaacatgagagagatagtgg

SEQ ID NO: 341086 - DNA, 33 bp, Homo sapien
ggagagggtttcttaatatgagagagatagtgg

SEQ ID NO: 341087 - DNA, 33 bp, Homo sapien
cttctggaagttactcacactctatttcttgac

SEQ ID NO: 341088 - DNA, 33 bp, Homo sapien
cttctggaagttactcgcactctatttcttgac

SEQ ID NO: 341089 - DNA, 33 bp, Homo sapien
tggaaattggcccacactggatttccagggagc

SEQ ID NO: 341090 - DNA, 33 bp, Homo sapien
tggaaattggcccacattggatttccagggagc

SEQ ID NO: 341091 - DNA, 33 bp, Homo sapien
ctactaatatctacctcaagagttggactacat

SEQ ID NO: 341092 - DNA, 33 bp, Homo sapien
ctactaatatctacctgaagagttggactacat

SEQ ID NO: 341093 - DNA, 33 bp, Homo sapien
ggcttcatgaatgaaacggtgaagttgagtagg

SEQ ID NO: 341094 - DNA, 33 bp, Homo sapien
ggcttcatgaatgaaatggtgaagttgagtagg

SEQ ID NO: 341095 - DNA, 33 bp, Homo sapien
cattatcctgtgctcacagatacaaacaggggt

SEQ ID NO: 341096 - DNA, 33 bp, Homo sapien
cattatcctgtgctcagagatacaaacaggggt

SEQ ID NO: 341097 - DNA, 33 bp, Homo sapien
catatattccccttaaccacagtcctgctttgt

SEQ ID NO: 341098 - DNA, 33 bp, Homo sapien
catatattccccttaatcacagtcctgctttgt

SEQ ID NO: 341099 - DNA, 33 bp, Homo sapien
ggtaaaggagtcttcacatgattccagcgttta

SEQ ID NO: 341100 - DNA, 33 bp, Homo sapien
ggtaaaggagtcttcagatgattccagcgttta

SEQ ID NO: 341101 - DNA, 33 bp, Homo sapien
tcccagttctcaggaaactctgtcagcatggct

SEQ ID NO: 341102 - DNA, 33 bp, Homo sapien
tcccagttctcaggaatctctgtcagcatggct

SEQ ID NO: 341103 - DNA, 33 bp, Homo sapien
accattagctctctgactactgatgtgacctac

SEQ ID NO: 341104 - DNA, 33 bp, Homo sapien
accattagctctctgattactgatgtgacctac

SEQ ID NO: 341105 - DNA, 33 bp, Homo sapien
atacaccctgctgccaactttcatttcctttcc

SEQ ID NO: 341106 - DNA, 33 bp, Homo sapien
atacaccctgctgccagctttcatttcctttcc

SEQ ID NO: 341107 - DNA, 33 bp, Homo sapien
tcatttttctaactcaaaataatccagctttga

SEQ ID NO: 341108 - DNA, 33 bp, Homo sapien
tcatttttctaactcagaataatccagctttga

SEQ ID NO: 341109 - DNA, 33 bp, Homo sapien
tggcccgataatttcccactcttaaaactggtc

SEQ ID NO: 341110 - DNA, 33 bp, Homo sapien
tggcccgataatttcctactcttaaaactggtc

SEQ ID NO: 341111 - DNA, 33 bp, Homo sapien
gtaatcaaagaagtcaatccatcctattccact

SEQ ID NO: 341112 - DNA, 33 bp, Homo sapien
gtaatcaaagaagtcagtccatcctattccact

SEQ ID NO: 341113 - DNA, 33 bp, Homo sapien
ggagttcatcagttaaatagacttttacgatag

SEQ ID NO: 341114 - DNA, 33 bp, Homo sapien
ggagttcatcagttaagtagacttttacgatag

SEQ ID NO: 341115 - DNA, 33 bp, Homo sapien
gattcacgtgatagaccgagatcaaaccctgat

SEQ ID NO: 341116 - DNA, 33 bp, Homo sapien
gattcacgtgatagactgagatcaaaccctgat

SEQ ID NO: 341117 - DNA, 33 bp, Homo sapien
cagctgcattatccacaacagcaagacaacaat

SEQ ID NO: 341118 - DNA, 33 bp, Homo sapien
cagctgcattatccacgacagcaagacaacaat

SEQ ID NO: 341119 - DNA, 33 bp, Homo sapien
ccttgaaaatttaggaagctcatctcccagttg

SEQ ID NO: 341120 - DNA, 33 bp, Homo sapien
ccttgaaaatttaggaggctcatctcccagttg

SEQ ID NO: 341121 - DNA, 33 bp, Homo sapien
ctcaactcacatgcaacgaaagccagaagtggg

SEQ ID NO: 341122 - DNA, 33 bp, Homo sapien
ctcaactcacatgcaatgaaagccagaagtggg

SEQ ID NO: 341123 - DNA, 33 bp, Homo sapien
atgctgagtgactcgaaggtggtcctgagcaga

SEQ ID NO: 341124 - DNA, 33 bp, Homo sapien
atgctgagtgactcgagggtggtcctgagcaga

SEQ ID NO: 341125 - DNA, 33 bp, Homo sapien
acctctgccctgaacacgtgataaatggcagct

SEQ ID NO: 341126 - DNA, 33 bp, Homo sapien
acctctgccctgaacatgtgataaatggcagct

SEQ ID NO: 341127 - DNA, 33 bp, Homo sapien
atagtcctagtgatgccgagaaactcaattatt

SEQ ID NO: 341128 - DNA, 33 bp, Homo sapien
atagtcctagtgatgctgagaaactcaattatt

SEQ ID NO: 341129 - DNA, 33 bp, Homo sapien
tgatccctaaatttaacgtagaagttctggtat

SEQ ID NO: 341130 - DNA, 33 bp, Homo sapien
tgatccctaaatttaatgtagaagttctggtat

SEQ ID NO: 341131 - DNA, 33 bp, Homo sapien
tttgaaagacctctagaccagggagaaggagga

SEQ ID NO: 341132 - DNA, 33 bp, Homo sapien
tttgaaagacctctaggccagggagaaggagga

SEQ ID NO: 341133 - DNA, 33 bp, Homo sapien
aacaggagcagatgacaaatagcacctagcttg

SEQ ID NO: 341134 - DNA, 33 bp, Homo sapien
aacaggagcagatgaccaatagcacctagcttg

SEQ ID NO: 341135 - DNA, 33 bp, Homo sapien
tgaatttttataaaacactctgtggcccaagca

SEQ ID NO: 341136 - DNA, 33 bp, Homo sapien
tgaatttttataaaaccctctgtggcccaagca

SEQ ID NO: 341137 - DNA, 33 bp, Homo sapien
aaaacaagctcaatacagtaaagagagaccgaa

SEQ ID NO: 341138 - DNA, 33 bp, Homo sapien
aaaacaagctcaatacggtaaagagagaccgaa

SEQ ID NO: 341139 - DNA, 33 bp, Homo sapien
aggtgacactcaaggaccaacaacctcaacaaa

SEQ ID NO: 341140 - DNA, 33 bp, Homo sapien
aggtgacactcaaggatcaacaacctcaacaaa

SEQ ID NO: 341141 - DNA, 33 bp, Homo sapien
tgcctggcataaaataagcaatcaataaatgtt

SEQ ID NO: 341142 - DNA, 33 bp, Homo sapien
tgcctggcataaaataggcaatcaataaatgtt

SEQ ID NO: 341143 - DNA, 33 bp, Homo sapien
atgcccaaaagaacaactggaaatggttaaata

SEQ ID NO: 341144 - DNA, 33 bp, Homo sapien
atgcccaaaagaacaattggaaatggttaaata

SEQ ID NO: 341145 - DNA, 33 bp, Homo sapien
ttgcttaccagtcttccctcactgaactgagag

SEQ ID NO: 341146 - DNA, 33 bp, Homo sapien
ttgcttaccagtcttctctcactgaactgagag

SEQ ID NO: 341147 - DNA, 33 bp, Homo sapien
caaaactgccgagaaacgtgtccatattgatgg

SEQ ID NO: 341148 - DNA, 33 bp, Homo sapien
caaaactgccgagaaatgtgtccatattgatgg

SEQ ID NO: 341149 - DNA, 33 bp, Homo sapien
aaccaaaggcacagacaaatagatagacatgat

SEQ ID NO: 341150 - DNA, 33 bp, Homo sapien
aaccaaaggcacagacgaatagatagacatgat

SEQ ID NO: 341151 - DNA, 33 bp, Homo sapien
aaatgtacatttctacgggatcttatagcatta

SEQ ID NO: 341152 - DNA, 33 bp, Homo sapien
aaatgtacatttctactggatcttatagcatta

SEQ ID NO: 341153 - DNA, 33 bp, Homo sapien
gaaataaagttccaacaaagttatgattttcac

SEQ ID NO: 341154 - DNA, 33 bp, Homo sapien
gaaataaagttccaacgaagttatgattttcac

SEQ ID NO: 341155 - DNA, 33 bp, Homo sapien
gcatgaattctccatacacccggttgtagtagt

SEQ ID NO: 341156 - DNA, 33 bp, Homo sapien
gcatgaattctccatatacccggttgtagtagt

SEQ ID NO: 341157 - DNA, 33 bp, Homo sapien
aaacaggagtaacacaaaacagttgcaattttt

SEQ ID NO: 341158 - DNA, 33 bp, Homo sapien
aaacaggagtaacacagaacagttgcaattttt

SEQ ID NO: 341159 - DNA, 33 bp, Homo sapien
aggagaaagatttagaaaaactgctacttgtca

SEQ ID NO: 341160 - DNA, 33 bp, Homo sapien
aggagaaagatttagagaaactgctacttgtca

SEQ ID NO: 341161 - DNA, 33 bp, Homo sapien
agtccctagcgatcaactgtatatcagcttaat

SEQ ID NO: 341162 - DNA, 33 bp, Homo sapien
agtccctagcgatcaattgtatatcagcttaat

SEQ ID NO: 341163 - DNA, 33 bp, Homo sapien
gattcaatggcatgttaaaaaacacagcagaac

SEQ ID NO: 341164 - DNA, 33 bp, Homo sapien
gattcaatggcatgttgaaaaacacagcagaac

SEQ ID NO: 341165 - DNA, 33 bp, Homo sapien
gttgaacaaacttgtagagtgaggaaagagtga

SEQ ID NO: 341166 - DNA, 33 bp, Homo sapien
gttgaacaaacttgtatagtgaggaaagagtga

SEQ ID NO: 341167 - DNA, 33 bp, Homo sapien
agagaatctcaaaggaactttccagctgtggca

SEQ ID NO: 341168 - DNA, 33 bp, Homo sapien
agagaatctcaaaggacctttccagctgtggca

SEQ ID NO: 341169 - DNA, 33 bp, Homo sapien
gtagtagtccaagacccatgtcggagagaaaaa

SEQ ID NO: 341170 - DNA, 33 bp, Homo sapien
gtagtagtccaagacctatgtcggagagaaaaa

SEQ ID NO: 341171 - DNA, 33 bp, Homo sapien
gggatggaaatcatatcacagaatgtgcacttg

SEQ ID NO: 341172 - DNA, 33 bp, Homo sapien
gggatggaaatcatattacagaatgtgcacttg

SEQ ID NO: 341173 - DNA, 33 bp, Homo sapien
agacaataggaaccaacaggaaaaatgcagcta

SEQ ID NO: 341174 - DNA, 33 bp, Homo sapien
agacaataggaaccaataggaaaaatgcagcta

SEQ ID NO: 341175 - DNA, 33 bp, Homo sapien
tggggcaggcggggaactcagggagcttttcca

SEQ ID NO: 341176 - DNA, 33 bp, Homo sapien
tggggcaggcggggaagtcagggagcttttcca

SEQ ID NO: 341177 - DNA, 33 bp, Homo sapien
caccacagcagaatcaaaagtgcacattcctgg

SEQ ID NO: 341178 - DNA, 33 bp, Homo sapien
caccacagcagaatcagaagtgcacattcctgg

SEQ ID NO: 341179 - DNA, 33 bp, Homo sapien
ttttattggcctttgcagatcagaatgtttagc

SEQ ID NO: 341180 - DNA, 33 bp, Homo sapien
ttttattggcctttgcggatcagaatgtttagc

SEQ ID NO: 341181 - DNA, 33 bp, Homo sapien
acaacaagtaggaaagcactgagagaattgtga

SEQ ID NO: 341182 - DNA, 33 bp, Homo sapien
acaacaagtaggaaaggactgagagaattgtga

SEQ ID NO: 341183 - DNA, 33 bp, Homo sapien
tgattgtttccgttcaggtagtaaagtgtccaa

SEQ ID NO: 341184 - DNA, 33 bp, Homo sapien
tgattgtttccgttcatgtagtaaagtgtccaa

SEQ ID NO: 341185 - DNA, 33 bp, Homo sapien
acagtttccatcataaccttcatttagcgtcta

SEQ ID NO: 341186 - DNA, 33 bp, Homo sapien
acagtttccatcataatcttcatttagcgtcta

SEQ ID NO: 341187 - DNA, 33 bp, Homo sapien
aggaagcactcaattaaatttctgtcttcaggc

SEQ ID NO: 341188 - DNA, 33 bp, Homo sapien
aggaagcactcaattagatttctgtcttcaggc

SEQ ID NO: 341189 - DNA, 33 bp, Homo sapien
accaacaccgatgagacagccctgccgtctccc

SEQ ID NO: 341190 - DNA, 33 bp, Homo sapien
accaacaccgatgagagagccctgccgtctccc

SEQ ID NO: 341191 - DNA, 33 bp, Homo sapien
gccgcagcaagaccaacgtagagagggaagatg

SEQ ID NO: 341192 - DNA, 33 bp, Homo sapien
gccgcagcaagaccaatgtagagagggaagatg

SEQ ID NO: 341193 - DNA, 33 bp, Homo sapien
aatataatggaaaaaccaagtctaaactcagaa

SEQ ID NO: 341194 - DNA, 33 bp, Homo sapien
aatataatggaaaaactaagtctaaactcagaa

SEQ ID NO: 341195 - DNA, 33 bp, Homo sapien
ggaaggggacagacacaggagtttcattttagc

SEQ ID NO: 341196 - DNA, 33 bp, Homo sapien
ggaaggggacagacacgggagtttcattttagc

SEQ ID NO: 341197 - DNA, 33 bp, Homo sapien
tatcttgtttctagtaaactctacctggtgtgg

SEQ ID NO: 341198 - DNA, 33 bp, Homo sapien
tatcttgtttctagtagactctacctggtgtgg

SEQ ID NO: 341199 - DNA, 33 bp, Homo sapien
agagattcactgtaggcatgacacacacacaca

SEQ ID NO: 341200 - DNA, 33 bp, Homo sapien
agagattcactgtaggtatgacacacacacaca

SEQ ID NO: 341201 - DNA, 33 bp, Homo sapien
gagttctcaacttttagctaattcaaaacagtg

SEQ ID NO: 341202 - DNA, 33 bp, Homo sapien
gagttctcaacttttatctaattcaaaacagtg

SEQ ID NO: 341203 - DNA, 33 bp, Homo sapien
ttcttagtggaaaaaactgtctgagcaaataca

SEQ ID NO: 341204 - DNA, 33 bp, Homo sapien
ttcttagtggaaaaaattgtctgagcaaataca

SEQ ID NO: 341205 - DNA, 33 bp, Homo sapien
atttactgactagctaagggctaaaaagagatg

SEQ ID NO: 341206 - DNA, 33 bp, Homo sapien
atttactgactagctaggggctaaaaagagatg

SEQ ID NO: 341207 - DNA, 33 bp, Homo sapien
ccattataaaactgaaaaatcataagttgaatc

SEQ ID NO: 341208 - DNA, 33 bp, Homo sapien
ccattataaaactgaagaatcataagttgaatc

SEQ ID NO: 341209 - DNA, 33 bp, Homo sapien
tcctgagtcctccccaaatgttcccagtttgat

SEQ ID NO: 341210 - DNA, 33 bp, Homo sapien
tcctgagtcctccccagatgttcccagtttgat

SEQ ID NO: 341211 - DNA, 33 bp, Homo sapien
cccaggtttaggataacgataccatctaacaaa

SEQ ID NO: 341212 - DNA, 33 bp, Homo sapien
cccaggtttaggataatgataccatctaacaaa

SEQ ID NO: 341213 - DNA, 33 bp, Homo sapien
taaatggaatgagttgcagtaaagcagattgcc

SEQ ID NO: 341214 - DNA, 33 bp, Homo sapien
taaatggaatgagttggagtaaagcagattgcc

SEQ ID NO: 341215 - DNA, 33 bp, Homo sapien
ggcagggcaggttttacaagcatttcacagatg

SEQ ID NO: 341216 - DNA, 33 bp, Homo sapien
ggcagggcaggttttataagcatttcacagatg

SEQ ID NO: 341217 - DNA, 33 bp, Homo sapien
aacctcagctttgacactgcattttaagaaaaa

SEQ ID NO: 341218 - DNA, 33 bp, Homo sapien
aacctcagctttgacagtgcattttaagaaaaa

SEQ ID NO: 341219 - DNA, 33 bp, Homo sapien
tatttattacaattgcaacagtcttgtttcact

SEQ ID NO: 341220 - DNA, 33 bp, Homo sapien
tatttattacaattgcgacagtcttgtttcact

SEQ ID NO: 341221 - DNA, 33 bp, Homo sapien
cagaagcttttaaataacttacatgagctgaaa

SEQ ID NO: 341222 - DNA, 33 bp, Homo sapien
cagaagcttttaaataccttacatgagctgaaa

SEQ ID NO: 341223 - DNA, 33 bp, Homo sapien
aaatcctcagcttttacaacatttggaaataac

SEQ ID NO: 341224 - DNA, 33 bp, Homo sapien
aaatcctcagcttttataacatttggaaataac

SEQ ID NO: 341225 - DNA, 33 bp, Homo sapien
ctaacatctaggtgccaaaagattgggtgtctg

SEQ ID NO: 341226 - DNA, 33 bp, Homo sapien
ctaacatctaggtgccgaaagattgggtgtctg

SEQ ID NO: 341227 - DNA, 33 bp, Homo sapien
gttaaatggatctggaccaagtggctccttttg

SEQ ID NO: 341228 - DNA, 33 bp, Homo sapien
gttaaatggatctggatcaagtggctccttttg

SEQ ID NO: 341229 - DNA, 33 bp, Homo sapien
aatgagacttatgggccgaaaacaatataatag

SEQ ID NO: 341230 - DNA, 33 bp, Homo sapien
aatgagacttatgggctgaaaacaatataatag

SEQ ID NO: 341231 - DNA, 33 bp, Homo sapien
atatacttattgttcacgacataggtagctatc

SEQ ID NO: 341232 - DNA, 33 bp, Homo sapien
atatacttattgttcatgacataggtagctatc

SEQ ID NO: 341233 - DNA, 33 bp, Homo sapien
tcacattgttcccttcaaaaacaacttcagata

SEQ ID NO: 341234 - DNA, 33 bp, Homo sapien
tcacattgttcccttccaaaacaacttcagata

SEQ ID NO: 341235 - DNA, 33 bp, Homo sapien
tgtgggtgctgaggaacaacaagaaaggaaccc

SEQ ID NO: 341236 - DNA, 33 bp, Homo sapien
tgtgggtgctgaggaagaacaagaaaggaaccc

SEQ ID NO: 341237 - DNA, 33 bp, Homo sapien
cacctttgaactaccaagactctaatacttttc

SEQ ID NO: 341238 - DNA, 33 bp, Homo sapien
cacctttgaactaccatgactctaatacttttc

SEQ ID NO: 341239 - DNA, 33 bp, Homo sapien
ctgctgggcacagaaacgggcagtcagtaggga

SEQ ID NO: 341240 - DNA, 33 bp, Homo sapien
ctgctgggcacagaaatgggcagtcagtaggga

SEQ ID NO: 341241 - DNA, 33 bp, Homo sapien
agttttctaagagataaggaatttaagttacaa

SEQ ID NO: 341242 - DNA, 33 bp, Homo sapien
agttttctaagagatatggaatttaagttacaa

SEQ ID NO: 341243 - DNA, 33 bp, Homo sapien
ctcattttacagacaaataactaaggtcaaccc

SEQ ID NO: 341244 - DNA, 33 bp, Homo sapien
ctcattttacagacaagtaactaaggtcaaccc

SEQ ID NO: 341245 - DNA, 33 bp, Homo sapien
tttgtgtacttatacaaaaacatctagggatta

SEQ ID NO: 341246 - DNA, 33 bp, Homo sapien
tttgtgtacttatacagaaacatctagggatta

SEQ ID NO: 341247 - DNA, 33 bp, Homo sapien
taacagatactgccaaattatgtcccatctctg

SEQ ID NO: 341248 - DNA, 33 bp, Homo sapien
taacagatactgccaagttatgtcccatctctg

SEQ ID NO: 341249 - DNA, 33 bp, Homo sapien
cgggccttcagcggcacaagtccttgttgtgtg

SEQ ID NO: 341250 - DNA, 33 bp, Homo sapien
cgggccttcagcggcataagtccttgttgtgtg

SEQ ID NO: 341251 - DNA, 33 bp, Homo sapien
tcccaagaagtcacagaattatagtttttctct

SEQ ID NO: 341252 - DNA, 33 bp, Homo sapien
tcccaagaagtcacaggattatagtttttctct

SEQ ID NO: 341253 - DNA, 33 bp, Homo sapien
ctacaagagtttcagaataaaggaccaagctgt

SEQ ID NO: 341254 - DNA, 33 bp, Homo sapien
ctacaagagtttcagagtaaaggaccaagctgt

SEQ ID NO: 341255 - DNA, 33 bp, Homo sapien
cagataaaaactcacaccaaaacaggtcaagac

SEQ ID NO: 341256 - DNA, 33 bp, Homo sapien
cagataaaaactcacagcaaaacaggtcaagac

SEQ ID NO: 341257 - DNA, 33 bp, Homo sapien
gaaacagttttctaaacacccagttggcacaca

SEQ ID NO: 341258 - DNA, 33 bp, Homo sapien
gaaacagttttctaaatacccagttggcacaca

SEQ ID NO: 341259 - DNA, 33 bp, Homo sapien
tgaatatacagcttcaaccgggagctctcacca

SEQ ID NO: 341260 - DNA, 33 bp, Homo sapien
tgaatatacagcttcagccgggagctctcacca

SEQ ID NO: 341261 - DNA, 33 bp, Homo sapien
acagcctgtgtctccacgactttaccaccagat

SEQ ID NO: 341262 - DNA, 33 bp, Homo sapien
acagcctgtgtctccatgactttaccaccagat

SEQ ID NO: 341263 - DNA, 33 bp, Homo sapien
gtggggacttttgggacaaataggtgtttgagg

SEQ ID NO: 341264 - DNA, 33 bp, Homo sapien
gtggggacttttgggagaaataggtgtttgagg

SEQ ID NO: 341265 - DNA, 33 bp, Homo sapien
gagaaaacgggcacacaccgtccaagccagctc

SEQ ID NO: 341266 - DNA, 33 bp, Homo sapien
gagaaaacgggcacacgccgtccaagccagctc

SEQ ID NO: 341267 - DNA, 33 bp, Homo sapien
actaggctaggttagccactcatcccttctgtc

SEQ ID NO: 341268 - DNA, 33 bp, Homo sapien
actaggctaggttagctactcatcccttctgtc

SEQ ID NO: 341269 - DNA, 33 bp, Homo sapien
atggtgtgacctcccaagtggaatcaatcaaaa

SEQ ID NO: 341270 - DNA, 33 bp, Homo sapien
atggtgtgacctcccaggtggaatcaatcaaaa

SEQ ID NO: 341271 - DNA, 33 bp, Homo sapien
tggccgtgggaatgagaactttttcctgtgtga

SEQ ID NO: 341272 - DNA, 33 bp, Homo sapien
tggccgtgggaatgaggactttttcctgtgtga

SEQ ID NO: 341273 - DNA, 33 bp, Homo sapien
acataatagccacaaacggagcctctcttctga

SEQ ID NO: 341274 - DNA, 33 bp, Homo sapien
acataatagccacaaatggagcctctcttctga

SEQ ID NO: 341275 - DNA, 33 bp, Homo sapien
tagaatttgaatatgacccaagctgagtattat

SEQ ID NO: 341276 - DNA, 33 bp, Homo sapien
tagaatttgaatatgatccaagctgagtattat

SEQ ID NO: 341277 - DNA, 33 bp, Homo sapien
tgtgaaggaaaatatgaaaggaggacagtaaat

SEQ ID NO: 341278 - DNA, 33 bp, Homo sapien
tgtgaaggaaaatatggaaggaggacagtaaat

SEQ ID NO: 341279 - DNA, 33 bp, Homo sapien
agtgctccatgctcaaataagtttggttaaatg

SEQ ID NO: 341280 - DNA, 33 bp, Homo sapien
agtgctccatgctcaagtaagtttggttaaatg

SEQ ID NO: 341281 - DNA, 33 bp, Homo sapien
tattggtcaattttctcaatttgccaaatttag

SEQ ID NO: 341282 - DNA, 33 bp, Homo sapien
tattggtcaattttctgaatttgccaaatttag

SEQ ID NO: 341283 - DNA, 33 bp, Homo sapien
ctgcgcctgcaatcaaagcctgagaaatagtcc

SEQ ID NO: 341284 - DNA, 33 bp, Homo sapien
ctgcgcctgcaatcaacgcctgagaaatagtcc

SEQ ID NO: 341285 - DNA, 33 bp, Homo sapien
ttcttcttatttgatacagttacgcagattatt

SEQ ID NO: 341286 - DNA, 33 bp, Homo sapien
ttcttcttatttgatagagttacgcagattatt

SEQ ID NO: 341287 - DNA, 33 bp, Homo sapien
aaaaacacatcgcagaacaaagtttacataatt

SEQ ID NO: 341288 - DNA, 33 bp, Homo sapien
aaaaacacatcgcagagcaaagtttacataatt

SEQ ID NO: 341289 - DNA, 33 bp, Homo sapien
gcctcttctgcattagaactatcagcttcagtg

SEQ ID NO: 341290 - DNA, 33 bp, Homo sapien
gcctcttctgcattaggactatcagcttcagtg

SEQ ID NO: 341291 - DNA, 33 bp, Homo sapien
aggattagtttggtaaagaagctaccaatagtt

SEQ ID NO: 341292 - DNA, 33 bp, Homo sapien
aggattagtttggtaaggaagctaccaatagtt

SEQ ID NO: 341293 - DNA, 33 bp, Homo sapien
agtatatgtccacttgaatctgactttcatctg

SEQ ID NO: 341294 - DNA, 33 bp, Homo sapien
agtatatgtccacttggatctgactttcatctg

SEQ ID NO: 341295 - DNA, 33 bp, Homo sapien
attttcttgtttgttactaaatgcagacaactt

SEQ ID NO: 341296 - DNA, 33 bp, Homo sapien
attttcttgtttgttattaaatgcagacaactt

SEQ ID NO: 341297 - DNA, 33 bp, Homo sapien
ataactgatgagaaaacaaagttgatcagagta

SEQ ID NO: 341298 - DNA, 33 bp, Homo sapien
ataactgatgagaaaagaaagttgatcagagta

SEQ ID NO: 341299 - DNA, 33 bp, Homo sapien
taggtctctgaactccgaaaaattgtatttaaa

SEQ ID NO: 341300 - DNA, 33 bp, Homo sapien
taggtctctgaactcctaaaaattgtatttaaa

SEQ ID NO: 341301 - DNA, 33 bp, Homo sapien
agattctcataggaacgcaagccctattgtaaa

SEQ ID NO: 341302 - DNA, 33 bp, Homo sapien
agattctcataggaactcaagccctattgtaaa

SEQ ID NO: 341303 - DNA, 33 bp, Homo sapien
ctagggatgtaggctgcatgctctttatgagaa

SEQ ID NO: 341304 - DNA, 33 bp, Homo sapien
ctagggatgtaggctgtatgctctttatgagaa

SEQ ID NO: 341305 - DNA, 33 bp, Homo sapien
ctgttgatcacgtggtctgccagggctgctctt

SEQ ID NO: 341306 - DNA, 33 bp, Homo sapien
ctgttgatcacgtggtttgccagggctgctctt

SEQ ID NO: 341307 - DNA, 33 bp, Homo sapien
agaatttccttggtatcaatctgttagtgttgt

SEQ ID NO: 341308 - DNA, 33 bp, Homo sapien
agaatttccttggtatgaatctgttagtgttgt

SEQ ID NO: 341309 - DNA, 33 bp, Homo sapien
ttccctctagtcctaaaactccatattctgttt

SEQ ID NO: 341310 - DNA, 33 bp, Homo sapien
ttccctctagtcctaagactccatattctgttt

SEQ ID NO: 341311 - DNA, 33 bp, Homo sapien
ccacgtaacattctacaacggacccggtctaca

SEQ ID NO: 341312 - DNA, 33 bp, Homo sapien
ccacgtaacattctacgacggacccggtctaca

SEQ ID NO: 341313 - DNA, 33 bp, Homo sapien
atagcattaaaggaagcctcaggaatcatgaaa

SEQ ID NO: 341314 - DNA, 33 bp, Homo sapien
atagcattaaaggaagtctcaggaatcatgaaa

SEQ ID NO: 341315 - DNA, 33 bp, Homo sapien
gaattattctggcaaacgctaggtcaatacagt

SEQ ID NO: 341316 - DNA, 33 bp, Homo sapien
gaattattctggcaaatgctaggtcaatacagt

SEQ ID NO: 341317 - DNA, 33 bp, Homo sapien
attcaacaaacacttacgacctctttactacat

SEQ ID NO: 341318 - DNA, 33 bp, Homo sapien
attcaacaaacacttatgacctctttactacat

SEQ ID NO: 341319 - DNA, 33 bp, Homo sapien
atgtgcaacaacaggaaatacccctaaagtttg

SEQ ID NO: 341320 - DNA, 33 bp, Homo sapien
atgtgcaacaacaggacatacccctaaagtttg

SEQ ID NO: 341321 - DNA, 33 bp, Homo sapien
aatcaacaatgtacaacgcacagtgagtttgtc

SEQ ID NO: 341322 - DNA, 33 bp, Homo sapien
aatcaacaatgtacaatgcacagtgagtttgtc

SEQ ID NO: 341323 - DNA, 33 bp, Homo sapien
gacagactctacttgaactttgcaaatacaaaa

SEQ ID NO: 341324 - DNA, 33 bp, Homo sapien
gacagactctacttgagctttgcaaatacaaaa

SEQ ID NO: 341325 - DNA, 33 bp, Homo sapien
gatcagaaacataacacgatcctagatttagtg

SEQ ID NO: 341326 - DNA, 33 bp, Homo sapien
gatcagaaacataacatgatcctagatttagtg

SEQ ID NO: 341327 - DNA, 33 bp, Homo sapien
tcctcgcacaaggttacctaaatctccttgaca

SEQ ID NO: 341328 - DNA, 33 bp, Homo sapien
tcctcgcacaaggttatctaaatctccttgaca

SEQ ID NO: 341329 - DNA, 33 bp, Homo sapien
tagagtcataatcatcgatcagttttcgattct

SEQ ID NO: 341330 - DNA, 33 bp, Homo sapien
tagagtcataatcatctatcagttttcgattct

SEQ ID NO: 341331 - DNA, 33 bp, Homo sapien
ggttgtgaagtggacaaagattatgagtttaat

SEQ ID NO: 341332 - DNA, 33 bp, Homo sapien
ggttgtgaagtggacacagattatgagtttaat

SEQ ID NO: 341333 - DNA, 33 bp, Homo sapien
gtgttctgaagtgtcacgtgtacctatgaagtg

SEQ ID NO: 341334 - DNA, 33 bp, Homo sapien
gtgttctgaagtgtcatgtgtacctatgaagtg

SEQ ID NO: 341335 - DNA, 33 bp, Homo sapien
ctgtagtttatgtgcccggaatttaaactttta

SEQ ID NO: 341336 - DNA, 33 bp, Homo sapien
ctgtagtttatgtgcctggaatttaaactttta

SEQ ID NO: 341337 - DNA, 33 bp, Homo sapien
aacaataaatggagacgacttttctgttgcctt

SEQ ID NO: 341338 - DNA, 33 bp, Homo sapien
aacaataaatggagactacttttctgttgcctt

SEQ ID NO: 341339 - DNA, 33 bp, Homo sapien
ctcttatggtttttaaacagctggcattttggg

SEQ ID NO: 341340 - DNA, 33 bp, Homo sapien
ctcttatggtttttaagcagctggcattttggg

SEQ ID NO: 341341 - DNA, 33 bp, Homo sapien
ctatgtgttttgtttccactgtggtggttttca

SEQ ID NO: 341342 - DNA, 33 bp, Homo sapien
ctatgtgttttgtttctactgtggtggttttca

SEQ ID NO: 341343 - DNA, 33 bp, Homo sapien
tggcctcaacagtgtaccatgattacaaatgtt

SEQ ID NO: 341344 - DNA, 33 bp, Homo sapien
tggcctcaacagtgtatcatgattacaaatgtt

SEQ ID NO: 341345 - DNA, 33 bp, Homo sapien
caactgtgaaaaaaaacgcatctctctacatac

SEQ ID NO: 341346 - DNA, 33 bp, Homo sapien
caactgtgaaaaaaaatgcatctctctacatac

SEQ ID NO: 341347 - DNA, 33 bp, Homo sapien
gcctcccgatgtgaaaaatggggaatggtaatt

SEQ ID NO: 341348 - DNA, 33 bp, Homo sapien
gcctcccgatgtgaaagatggggaatggtaatt

SEQ ID NO: 341349 - DNA, 33 bp, Homo sapien
gtggtcacaagttcaagtatggtgaaattaggt

SEQ ID NO: 341350 - DNA, 33 bp, Homo sapien
gtggtcacaagttcaattatggtgaaattaggt

SEQ ID NO: 341351 - DNA, 33 bp, Homo sapien
atccaatatatgtgaacctgtttgctggcttac

SEQ ID NO: 341352 - DNA, 33 bp, Homo sapien
atccaatatatgtgaatctgtttgctggcttac

SEQ ID NO: 341353 - DNA, 33 bp, Homo sapien
ctacttgctttttagaagatgaaaatgtaaaat

SEQ ID NO: 341354 - DNA, 33 bp, Homo sapien
ctacttgctttttagacgatgaaaatgtaaaat

SEQ ID NO: 341355 - DNA, 33 bp, Homo sapien
aaagtattagtaattccccatacctaagaaatt

SEQ ID NO: 341356 - DNA, 33 bp, Homo sapien
aaagtattagtaattctccatacctaagaaatt

SEQ ID NO: 341357 - DNA, 33 bp, Homo sapien
ctgttgcttttaaccacgtccttcctcttgcct

SEQ ID NO: 341358 - DNA, 33 bp, Homo sapien
ctgttgcttttaaccatgtccttcctcttgcct

SEQ ID NO: 341359 - DNA, 33 bp, Homo sapien
catttaacatgcaatacgatgctaatgtacatg

SEQ ID NO: 341360 - DNA, 33 bp, Homo sapien
catttaacatgcaatatgatgctaatgtacatg

SEQ ID NO: 341361 - DNA, 33 bp, Homo sapien
gaaggaggaggtcataaggtggacatgaatggg

SEQ ID NO: 341362 - DNA, 33 bp, Homo sapien
gaaggaggaggtcatatggtggacatgaatggg

SEQ ID NO: 341363 - DNA, 33 bp, Homo sapien
tgataaacatgggttcaagtgaatggcatctca

SEQ ID NO: 341364 - DNA, 33 bp, Homo sapien
tgataaacatgggttccagtgaatggcatctca

SEQ ID NO: 341365 - DNA, 33 bp, Homo sapien
acattcagtggatcacacatcattgagaatgtc

SEQ ID NO: 341366 - DNA, 33 bp, Homo sapien
acattcagtggatcacgcatcattgagaatgtc

SEQ ID NO: 341367 - DNA, 33 bp, Homo sapien
tataggccactttctagaccacacttcaggtac

SEQ ID NO: 341368 - DNA, 33 bp, Homo sapien
tataggccactttctataccacacttcaggtac

SEQ ID NO: 341369 - DNA, 33 bp, Homo sapien
aagggcagtactgccaataagaggggtagaagc

SEQ ID NO: 341370 - DNA, 33 bp, Homo sapien
aagggcagtactgccagtaagaggggtagaagc

SEQ ID NO: 341371 - DNA, 33 bp, Homo sapien
gatgcaggtgacttaaactctctgagcaaatgt

SEQ ID NO: 341372 - DNA, 33 bp, Homo sapien
gatgcaggtgacttaacctctctgagcaaatgt

SEQ ID NO: 341373 - DNA, 33 bp, Homo sapien
gagtgttgagaatttaaagaataaaacaacagc

SEQ ID NO: 341374 - DNA, 33 bp, Homo sapien
gagtgttgagaatttagagaataaaacaacagc

SEQ ID NO: 341375 - DNA, 33 bp, Homo sapien
ttgctttggctgcagacgggaacctgagaaatg

SEQ ID NO: 341376 - DNA, 33 bp, Homo sapien
ttgctttggctgcagatgggaacctgagaaatg

SEQ ID NO: 341377 - DNA, 33 bp, Homo sapien
aatgtgccaccaaaacagctttcctagacacag

SEQ ID NO: 341378 - DNA, 33 bp, Homo sapien
aatgtgccaccaaaacggctttcctagacacag

SEQ ID NO: 341379 - DNA, 33 bp, Homo sapien
aaaatgctatgatgaaacttaacactgcgagga

SEQ ID NO: 341380 - DNA, 33 bp, Homo sapien
aaaatgctatgatgaatcttaacactgcgagga

SEQ ID NO: 341381 - DNA, 33 bp, Homo sapien
attttcaggggccaaaggtgttagaatattctg

SEQ ID NO: 341382 - DNA, 33 bp, Homo sapien
attttcaggggccaaatgtgttagaatattctg

SEQ ID NO: 341383 - DNA, 33 bp, Homo sapien
acatatgtttcgcttagcatgttgccgaaggga

SEQ ID NO: 341384 - DNA, 33 bp, Homo sapien
acatatgtttcgcttatcatgttgccgaaggga

SEQ ID NO: 341385 - DNA, 33 bp, Homo sapien
ggctttgcggataaaaatatacctggatagagg

SEQ ID NO: 341386 - DNA, 33 bp, Homo sapien
ggctttgcggataaaagtatacctggatagagg

SEQ ID NO: 341387 - DNA, 33 bp, Homo sapien
ccagggctagttaccacgtatttcctgatggaa

SEQ ID NO: 341388 - DNA, 33 bp, Homo sapien
ccagggctagttaccatgtatttcctgatggaa

SEQ ID NO: 341389 - DNA, 33 bp, Homo sapien
aaataggttagaaaaactgacttggaatttagg

SEQ ID NO: 341390 - DNA, 33 bp, Homo sapien
aaataggttagaaaaattgacttggaatttagg

SEQ ID NO: 341391 - DNA, 33 bp, Homo sapien
aaagcatttattaatacggtcatactactgtta

SEQ ID NO: 341392 - DNA, 33 bp, Homo sapien
aaagcatttattaatatggtcatactactgtta

SEQ ID NO: 341393 - DNA, 33 bp, Homo sapien
tttcccctctactactaaacaacattggctcat

SEQ ID NO: 341394 - DNA, 33 bp, Homo sapien
tttcccctctactacttaacaacattggctcat

SEQ ID NO: 341395 - DNA, 33 bp, Homo sapien
cagtcagggaggaaggaccaagaaaaaatgatg

SEQ ID NO: 341396 - DNA, 33 bp, Homo sapien
cagtcagggaggaagggccaagaaaaaatgatg

SEQ ID NO: 341397 - DNA, 33 bp, Homo sapien
gttcagctcctcaggaaaaaaataggtgtggaa

SEQ ID NO: 341398 - DNA, 33 bp, Homo sapien
gttcagctcctcaggataaaaataggtgtggaa

SEQ ID NO: 341399 - DNA, 33 bp, Homo sapien
atcaggaaggctaactgaaatggttcagaagga

SEQ ID NO: 341400 - DNA, 33 bp, Homo sapien
atcaggaaggctaacttaaatggttcagaagga

SEQ ID NO: 341401 - DNA, 33 bp, Homo sapien
atggttccttgatacaatccacccaaagatcag

SEQ ID NO: 341402 - DNA, 33 bp, Homo sapien
atggttccttgatacagtccacccaaagatcag

SEQ ID NO: 341403 - DNA, 33 bp, Homo sapien
cagcaaagaggaaagacgatgttcaactttggc

SEQ ID NO: 341404 - DNA, 33 bp, Homo sapien
cagcaaagaggaaagatgatgttcaactttggc

SEQ ID NO: 341405 - DNA, 33 bp, Homo sapien
tttgctgaggcacttcagaaaacaccttgtacc

SEQ ID NO: 341406 - DNA, 33 bp, Homo sapien
tttgctgaggcacttcggaaaacaccttgtacc

SEQ ID NO: 341407 - DNA, 33 bp, Homo sapien
cagtacagaatccaggaaagagcccttttcaag

SEQ ID NO: 341408 - DNA, 33 bp, Homo sapien
cagtacagaatccagggaagagcccttttcaag

SEQ ID NO: 341409 - DNA, 33 bp, Homo sapien
gtcatgcagagattaacgctatcattaagaagg

SEQ ID NO: 341410 - DNA, 33 bp, Homo sapien
gtcatgcagagattaaggctatcattaagaagg

SEQ ID NO: 341411 - DNA, 33 bp, Homo sapien
gtctctagagctactactaacctgcttgttgat

SEQ ID NO: 341412 - DNA, 33 bp, Homo sapien
gtctctagagctactattaacctgcttgttgat

SEQ ID NO: 341413 - DNA, 33 bp, Homo sapien
aagtgataaattcatgacaaggttctatgcctt

SEQ ID NO: 341414 - DNA, 33 bp, Homo sapien
aagtgataaattcatggcaaggttctatgcctt

SEQ ID NO: 341415 - DNA, 33 bp, Homo sapien
ttcttgggaaagaacaaaagggcattccattct

SEQ ID NO: 341416 - DNA, 33 bp, Homo sapien
ttcttgggaaagaacacaagggcattccattct

SEQ ID NO: 341417 - DNA, 33 bp, Homo sapien
gatatatggctcaaaaatgtttctcctattcag

SEQ ID NO: 341418 - DNA, 33 bp, Homo sapien
gatatatggctcaaaagtgtttctcctattcag

SEQ ID NO: 341419 - DNA, 33 bp, Homo sapien
tatccacattccttaaaaggcattattcgtacc

SEQ ID NO: 341420 - DNA, 33 bp, Homo sapien
tatccacattccttaagaggcattattcgtacc

SEQ ID NO: 341421 - DNA, 33 bp, Homo sapien
tagttagcaagtaaaaattgtgttgtttatagt

SEQ ID NO: 341422 - DNA, 33 bp, Homo sapien
tagttagcaagtaaaatttgtgttgtttatagt

SEQ ID NO: 341423 - DNA, 33 bp, Homo sapien
atttttttgtggcaagcagcttgtatagttttg

SEQ ID NO: 341424 - DNA, 33 bp, Homo sapien
atttttttgtggcaagtagcttgtatagttttg

SEQ ID NO: 341425 - DNA, 33 bp, Homo sapien
gtgaatggttgttcaacgggcaactatagtgtc

SEQ ID NO: 341426 - DNA, 33 bp, Homo sapien
gtgaatggttgttcaatgggcaactatagtgtc

SEQ ID NO: 341427 - DNA, 33 bp, Homo sapien
ctttattgtgtggggacataatacttggtgcta

SEQ ID NO: 341428 - DNA, 33 bp, Homo sapien
ctttattgtgtggggatataatacttggtgcta

SEQ ID NO: 341429 - DNA, 33 bp, Homo sapien
acagctcttggacgtgaagtactcttattagcc

SEQ ID NO: 341430 - DNA, 33 bp, Homo sapien
acagctcttggacgtggagtactcttattagcc

SEQ ID NO: 341431 - DNA, 33 bp, Homo sapien
ggtaagtgtgctaatcagagtggttttgtattg

SEQ ID NO: 341432 - DNA, 33 bp, Homo sapien
ggtaagtgtgctaatccgagtggttttgtattg

SEQ ID NO: 341433 - DNA, 33 bp, Homo sapien
caagtaaatgagatgaagtccactcatgtgaag

SEQ ID NO: 341434 - DNA, 33 bp, Homo sapien
caagtaaatgagatgaggtccactcatgtgaag

SEQ ID NO: 341435 - DNA, 33 bp, Homo sapien
attcagagataaaacacattggtccctgcctgg

SEQ ID NO: 341436 - DNA, 33 bp, Homo sapien
attcagagataaaacatattggtccctgcctgg

SEQ ID NO: 341437 - DNA, 33 bp, Homo sapien
gtacttattaagcactaagtcaaatgtctaaca

SEQ ID NO: 341438 - DNA, 33 bp, Homo sapien
gtacttattaagcactgagtcaaatgtctaaca

SEQ ID NO: 341439 - DNA, 33 bp, Homo sapien
gtctctgagcaattgaatagccgtgcacagtgg

SEQ ID NO: 341440 - DNA, 33 bp, Homo sapien
gtctctgagcaattgactagccgtgcacagtgg

SEQ ID NO: 341441 - DNA, 33 bp, Homo sapien
cttatctattaaaggccgacaaacagaagtcag

SEQ ID NO: 341442 - DNA, 33 bp, Homo sapien
cttatctattaaaggctgacaaacagaagtcag

SEQ ID NO: 341443 - DNA, 33 bp, Homo sapien
tcccagcctctaggaacgtaagcaataaatttc

SEQ ID NO: 341444 - DNA, 33 bp, Homo sapien
tcccagcctctaggaatgtaagcaataaatttc

SEQ ID NO: 341445 - DNA, 33 bp, Homo sapien
tgttgttgttgttgtagagctgggggtctaatc

SEQ ID NO: 341446 - DNA, 33 bp, Homo sapien
tgttgttgttgttgtatagctgggggtctaatc

SEQ ID NO: 341447 - DNA, 33 bp, Homo sapien
gtcaagatgttggctgacactacattatctaag

SEQ ID NO: 341448 - DNA, 33 bp, Homo sapien
gtcaagatgttggctggcactacattatctaag

SEQ ID NO: 341449 - DNA, 33 bp, Homo sapien
ttgacagcagcctgcaagagactctgagttaga

SEQ ID NO: 341450 - DNA, 33 bp, Homo sapien
ttgacagcagcctgcaggagactctgagttaga

SEQ ID NO: 341451 - DNA, 33 bp, Homo sapien
taatactttgcatatgaagtctgcaaaaatcgt

SEQ ID NO: 341452 - DNA, 33 bp, Homo sapien
taatactttgcatatggagtctgcaaaaatcgt

SEQ ID NO: 341453 - DNA, 33 bp, Homo sapien
ttcttcctggtgctatcagtccaaactgggagt

SEQ ID NO: 341454 - DNA, 33 bp, Homo sapien
ttcttcctggtgctattagtccaaactgggagt

SEQ ID NO: 341455 - DNA, 33 bp, Homo sapien
ttgaatcactaaaagaactagcatggtaattct

SEQ ID NO: 341456 - DNA, 33 bp, Homo sapien
ttgaatcactaaaagagctagcatggtaattct

SEQ ID NO: 341457 - DNA, 33 bp, Homo sapien
agctgaaagaaacatgaagacagtggaaaggag

SEQ ID NO: 341458 - DNA, 33 bp, Homo sapien
agctgaaagaaacatggagacagtggaaaggag

SEQ ID NO: 341459 - DNA, 33 bp, Homo sapien
atgatggagttattcaatcagcacactttatag

SEQ ID NO: 341460 - DNA, 33 bp, Homo sapien
atgatggagttattcagtcagcacactttatag

SEQ ID NO: 341461 - DNA, 33 bp, Homo sapien
atcattgccatttagactattctgctcaagtta

SEQ ID NO: 341462 - DNA, 33 bp, Homo sapien
atcattgccatttagagtattctgctcaagtta

SEQ ID NO: 341463 - DNA, 33 bp, Homo sapien
tatttacttactgctacagagagaaactacaag

SEQ ID NO: 341464 - DNA, 33 bp, Homo sapien
tatttacttactgctatagagagaaactacaag

SEQ ID NO: 341465 - DNA, 33 bp, Homo sapien
ttgaatgagtaaaatagggatggccagaagaat

SEQ ID NO: 341466 - DNA, 33 bp, Homo sapien
ttgaatgagtaaaatatggatggccagaagaat

SEQ ID NO: 341467 - DNA, 33 bp, Homo sapien
gaccctgatgtttaaaatagagaggtggagctg

SEQ ID NO: 341468 - DNA, 33 bp, Homo sapien
gaccctgatgtttaaattagagaggtggagctg

SEQ ID NO: 341469 - DNA, 33 bp, Homo sapien
actgaatatttggccactgactggggtttatta

SEQ ID NO: 341470 - DNA, 33 bp, Homo sapien
actgaatatttggccagtgactggggtttatta

SEQ ID NO: 341471 - DNA, 33 bp, Homo sapien
attgtcagcctctgcaacatcttgcttaattag

SEQ ID NO: 341472 - DNA, 33 bp, Homo sapien
attgtcagcctctgcatcatcttgcttaattag

SEQ ID NO: 341473 - DNA, 33 bp, Homo sapien
aaacaggcttggactgcactttgaaccaggaga

SEQ ID NO: 341474 - DNA, 33 bp, Homo sapien
aaacaggcttggactggactttgaaccaggaga

SEQ ID NO: 341475 - DNA, 33 bp, Homo sapien
taaatcatcatcaactaacagccaatcttgtta

SEQ ID NO: 341476 - DNA, 33 bp, Homo sapien
taaatcatcatcaacttacagccaatcttgtta

SEQ ID NO: 341477 - DNA, 33 bp, Homo sapien
gattatctgctcaagacaagtgatgaactagaa

SEQ ID NO: 341478 - DNA, 33 bp, Homo sapien
gattatctgctcaagataagtgatgaactagaa

SEQ ID NO: 341479 - DNA, 33 bp, Homo sapien
gaagttgacatctgataacgtgaaggagcagat

SEQ ID NO: 341480 - DNA, 33 bp, Homo sapien
gaagttgacatctgatgacgtgaaggagcagat

SEQ ID NO: 341481 - DNA, 33 bp, Homo sapien
gaaggagcagatttacaaagtggccaagaaggg

SEQ ID NO: 341482 - DNA, 33 bp, Homo sapien
gaaggagcagatttactaagtggccaagaaggg

SEQ ID NO: 341483 - DNA, 33 bp, Homo sapien; identical to SEQ ID NO: 341481

SEQ ID NO: 341484 - DNA, 33 bp, Homo sapien; identical to SEQ ID NO: 341482

SEQ ID NO: 341485 - DNA, 33 bp, Homo sapien
tagtgttgcacaagtacgttttgtgacaggcaa

SEQ ID NO: 341486 - DNA, 33 bp, Homo sapien
tagtgttgcacaagtatgttttgtgacaggcaa

SEQ ID NO: 341487 - DNA, 33 bp, Homo sapien
caatagaatttgaaaacagggaggacaagatat

SEQ ID NO: 341488 - DNA, 33 bp, Homo sapien
caatagaatttgaaaagagggaggacaagatat

SEQ ID NO: 341489 - DNA, 33 bp, Homo sapien
atttagttcactgtaacaaatcatttgctttgg

SEQ ID NO: 341490 - DNA, 33 bp, Homo sapien
atttagttcactgtaagaaatcatttgctttgg

SEQ ID NO: 341491 - DNA, 33 bp, Homo sapien
acagtgaactaaataaatgttgttagaatataa

SEQ ID NO: 341492 - DNA, 33 bp, Homo sapien
acagtgaactaaataagtgttgttagaatataa

SEQ ID NO: 341493 - DNA, 33 bp, Homo sapien
tttaagccacttataacctagagaagggtgcaa

SEQ ID NO: 341494 - DNA, 33 bp, Homo sapien
tttaagccacttataatctagagaagggtgcaa

SEQ ID NO: 341495 - DNA, 33 bp, Homo sapien
catggtgccaattaaaacacattcaataaatga

SEQ ID NO: 341496 - DNA, 33 bp, Homo sapien
catggtgccaattaaatcacattcaataaatga

SEQ ID NO: 341497 - DNA, 33 bp, Homo sapien
ttatgtaacacatccaactctatgcatctgcta

SEQ ID NO: 341498 - DNA, 33 bp, Homo sapien
ttatgtaacacatccagctctatgcatctgcta

SEQ ID NO: 341499 - DNA, 33 bp, Homo sapien
gtcaagtgaggggccgaaaccattttgtagagt

SEQ ID NO: 341500 - DNA, 33 bp, Homo sapien
gtcaagtgaggggccggaaccattttgtagagt

SEQ ID NO: 341501 - DNA, 33 bp, Homo sapien
ttttaagatcagtagacggtagagacaatactg

SEQ ID NO: 341502 - DNA, 33 bp, Homo sapien
ttttaagatcagtagagggtagagacaatactg

SEQ ID NO: 341503 - DNA, 33 bp, Homo sapien
gagcccagttttaacagtcagcacaatggattg

SEQ ID NO: 341504 - DNA, 33 bp, Homo sapien
gagcccagttttaacattcagcacaatggattg

SEQ ID NO: 341505 - DNA, 33 bp, Homo sapien
aaccctcctgatctaaaagctgtgtgataggct

SEQ ID NO: 341506 - DNA, 33 bp, Homo sapien
aaccctcctgatctaagagctgtgtgataggct

SEQ ID NO: 341507 - DNA, 33 bp, Homo sapien
gccctactgctgtaggaatattcgagtcaccct

SEQ ID NO: 341508 - DNA, 33 bp, Homo sapien
gccctactgctgtagggatattcgagtcaccct

SEQ ID NO: 341509 - DNA, 33 bp, Homo sapien
gtgggtgggacaatgacagtgtgatagactgtg

SEQ ID NO: 341510 - DNA, 33 bp, Homo sapien
gtgggtgggacaatgatagtgtgatagactgtg

SEQ ID NO: 341511 - DNA, 33 bp, Homo sapien
ttccatgggccttctacgagcttttccatttag

SEQ ID NO: 341512 - DNA, 33 bp, Homo sapien
ttccatgggccttctatgagcttttccatttag

SEQ ID NO: 341513 - DNA, 33 bp, Homo sapien
agggtatatgggcacactgctgtaactgctgtg

SEQ ID NO: 341514 - DNA, 33 bp, Homo sapien
agggtatatgggcacattgctgtaactgctgtg

SEQ ID NO: 341515 - DNA, 33 bp, Homo sapien
cctgcccctagtcacaagttccttaggagaaga

SEQ ID NO: 341516 - DNA, 33 bp, Homo sapien
cctgcccctagtcacaggttccttaggagaaga

SEQ ID NO: 341517 - DNA, 33 bp, Homo sapien
ctgaccgctgactccactgagatcccaggggcc

SEQ ID NO: 341518 - DNA, 33 bp, Homo sapien
ctgaccgctgactccattgagatcccaggggcc

SEQ ID NO: 341519 - DNA, 33 bp, Homo sapien
tcccccctttcagcaacatctgcacacagacag

SEQ ID NO: 341520 - DNA, 33 bp, Homo sapien
tcccccctttcagcaatatctgcacacagacag

SEQ ID NO: 341521 - DNA, 33 bp, Homo sapien
gacaatctctgagttcaaaaaagagatagaact

SEQ ID NO: 341522 - DNA, 33 bp, Homo sapien
gacaatctctgagttcgaaaaagagatagaact

SEQ ID NO: 341523 - DNA, 33 bp, Homo sapien
cctggccagcaatgaccgaaacaaggagaaagg

SEQ ID NO: 341524 - DNA, 33 bp, Homo sapien
cctggccagcaatgactgaaacaaggagaaagg

SEQ ID NO: 341525 - DNA, 33 bp, Homo sapien
ccatcaactgtgtaatcatagcatattcgacat

SEQ ID NO: 341526 - DNA, 33 bp, Homo sapien
ccatcaactgtgtaatgatagcatattcgacat

SEQ ID NO: 341527 - DNA, 33 bp, Homo sapien
ccttttcttctaaggacgccaatcttattggac

SEQ ID NO: 341528 - DNA, 33 bp, Homo sapien
ccttttcttctaaggatgccaatcttattggac

SEQ ID NO: 341529 - DNA, 33 bp, Homo sapien
cctacctgatcttccaactttttctgcaaacgc

SEQ ID NO: 341530 - DNA, 33 bp, Homo sapien
cctacctgatcttccagctttttctgcaaacgc

SEQ ID NO: 341531 - DNA, 33 bp, Homo sapien
tgagcttcaaacgacaaccaggtggaaagaaat

SEQ ID NO: 341532 - DNA, 33 bp, Homo sapien
tgagcttcaaacgacagccaggtggaaagaaat

SEQ ID NO: 341533 - DNA, 33 bp, Homo sapien
acaaagctagagatcaaacatggctctgaaata

SEQ ID NO: 341534 - DNA, 33 bp, Homo sapien
acaaagctagagatcacacatggctctgaaata

SEQ ID NO: 341535 - DNA, 33 bp, Homo sapien
tgtggccagagggagccaacaggtgagtgcaga

SEQ ID NO: 341536 - DNA, 33 bp, Homo sapien
tgtggccagagggagcgaacaggtgagtgcaga

SEQ ID NO: 341537 - DNA, 33 bp, Homo sapien
atggtttgaggcattcaagaagccttcttcatc

SEQ ID NO: 341538 - DNA, 33 bp, Homo sapien
atggtttgaggcattcgagaagccttcttcatc

SEQ ID NO: 341539 - DNA, 33 bp, Homo sapien
tgttcctggatcttaacctacctaccggcaagg

SEQ ID NO: 341540 - DNA, 33 bp, Homo sapien
tgttcctggatcttaatctacctaccggcaagg

SEQ ID NO: 341541 - DNA, 33 bp, Homo sapien
aagaaagaaaaccagccgctagaaaggactgtg

SEQ ID NO: 341542 - DNA, 33 bp, Homo sapien
aagaaagaaaaccagctgctagaaaggactgtg

SEQ ID NO: 341543 - DNA, 33 bp, Homo sapien
gagggcaggaaagacccgggaagcctatttgct

SEQ ID NO: 341544 - DNA, 33 bp, Homo sapien
gagggcaggaaagacctgggaagcctatttgct

SEQ ID NO: 341545 - DNA, 33 bp, Homo sapien
atttttgcttttaaacactgttcttgaatttca

SEQ ID NO: 341546 - DNA, 33 bp, Homo sapien
atttttgcttttaaactctgttcttgaatttca

SEQ ID NO: 341547 - DNA, 33 bp, Homo sapien
agagcatgttggcttacagagcgcatatgttcc

SEQ ID NO: 341548 - DNA, 33 bp, Homo sapien
agagcatgttggcttagagagcgcatatgttcc

SEQ ID NO: 341549 - DNA, 33 bp, Homo sapien
ccacagcttctgcaaccgcctggcacctgtgca

SEQ ID NO: 341550 - DNA, 33 bp, Homo sapien
ccacagcttctgcaactgcctggcacctgtgca

SEQ ID NO: 341551 - DNA, 33 bp, Homo sapien
gtgctaaggattttacacgccattaatcctcat

SEQ ID NO: 341552 - DNA, 33 bp, Homo sapien
gtgctaaggattttactcgccattaatcctcat

SEQ ID NO: 341553 - DNA, 33 bp, Homo sapien
aaagctacaggtgccaagccttagaaatgttca

SEQ ID NO: 341554 - DNA, 33 bp, Homo sapien
aaagctacaggtgccatgccttagaaatgttca

SEQ ID NO: 341555 - DNA, 33 bp, Homo sapien
gaccaaactctcttcaaattcatttagctttct

SEQ ID NO: 341556 - DNA, 33 bp, Homo sapien
gaccaaactctcttcatattcatttagctttct

SEQ ID NO: 341557 - DNA, 33 bp, Homo sapien
aattgggcctagagaaatgaatgccaagaaggt

SEQ ID NO: 341558 - DNA, 33 bp, Homo sapien
aattgggcctagagaagtgaatgccaagaaggt

SEQ ID NO: 341559 - DNA, 33 bp, Homo sapien
taagaatggtttgaaaatcctgagacaattggg

SEQ ID NO: 341560 - DNA, 33 bp, Homo sapien
taagaatggtttgaaagtcctgagacaattggg

SEQ ID NO: 341561 - DNA, 33 bp, Homo sapien
atcttctgaaggaatgcatgcagagaagtaaga

SEQ ID NO: 341562 - DNA, 33 bp, Homo sapien
atcttctgaaggaatgtatgcagagaagtaaga

SEQ ID NO: 341563 - DNA, 33 bp, Homo sapien
cctccagtatcgccgacgagggcacctacacac

SEQ ID NO: 341564 - DNA, 33 bp, Homo sapien
cctccagtatcgccgatgagggcacctacacac

SEQ ID NO: 341565 - DNA, 33 bp, Homo sapien
ttgagagcaaaggccacgtctggttcatcttgc

SEQ ID NO: 341566 - DNA, 33 bp, Homo sapien
ttgagagcaaaggccatgtctggttcatcttgc

SEQ ID NO: 341567 - DNA, 33 bp, Homo sapien
aatcttgaaatagaccaatttctacagagacta

SEQ ID NO: 341568 - DNA, 33 bp, Homo sapien
aatcttgaaatagaccgatttctacagagacta

SEQ ID NO: 341569 - DNA, 33 bp, Homo sapien
acgtagcatcaggcaaacaacgtgttaaactgc

SEQ ID NO: 341570 - DNA, 33 bp, Homo sapien
acgtagcatcaggcaagcaacgtgttaaactgc

SEQ ID NO: 341571 - DNA, 33 bp, Homo sapien
tacttaatgactggtccgaaagtggggactgat

SEQ ID NO: 341572 - DNA, 33 bp, Homo sapien
tacttaatgactggtctgaaagtggggactgat

SEQ ID NO: 341573 - DNA, 33 bp, Homo sapien
ctatatcacaacaaaacccaggttcttagaagc

SEQ ID NO: 341574 - DNA, 33 bp, Homo sapien
ctatatcacaacaaaatccaggttcttagaagc

SEQ ID NO: 341575 - DNA, 33 bp, Homo sapien
atactggaagactagacctgctatttatttact

SEQ ID NO: 341576 - DNA, 33 bp, Homo sapien
atactggaagactagagctgctatttatttact

SEQ ID NO: 341577 - DNA, 33 bp, Homo sapien
ccgagttgctgcctaaagggtgtaaggcatcgt

SEQ ID NO: 341578 - DNA, 33 bp, Homo sapien
ccgagttgctgcctaacgggtgtaaggcatcgt

SEQ ID NO: 341579 - DNA, 33 bp, Homo sapien
tgggtggatccctgaaatctttagtagtctcct

SEQ ID NO: 341580 - DNA, 33 bp, Homo sapien
tgggtggatccctgaagtctttagtagtctcct

SEQ ID NO: 341581 - DNA, 33 bp, Homo sapien
gtagtcttaattatcacctgtgaccattgatga

SEQ ID NO: 341582 - DNA, 33 bp, Homo sapien
gtagtcttaattatcatctgtgaccattgatga

SEQ ID NO: 341583 - DNA, 33 bp, Homo sapien
ctgtatagatgtgaaacttggttaatgctaata

SEQ ID NO: 341584 - DNA, 33 bp, Homo sapien
ctgtatagatgtgaaatttggttaatgctaata

SEQ ID NO: 341585 - DNA, 33 bp, Homo sapien
agtaagactgaagaacaatagtggcagctcgtc

SEQ ID NO: 341586 - DNA, 33 bp, Homo sapien
agtaagactgaagaacgatagtggcagctcgtc

SEQ ID NO: 341587 - DNA, 33 bp, Homo sapien
acagacacagcaagacagcctggattttaattt

SEQ ID NO: 341588 - DNA, 33 bp, Homo sapien
acagacacagcaagacggcctggattttaattt

SEQ ID NO: 341589 - DNA, 33 bp, Homo sapien
actggatgggtcaagaacggtgtaccatttttg

SEQ ID NO: 341590 - DNA, 33 bp, Homo sapien
actggatgggtcaagagcggtgtaccatttttg

SEQ ID NO: 341591 - DNA, 33 bp, Homo sapien
tggaatgaaagcataaaccctacttgtcaccac

SEQ ID NO: 341592 - DNA, 33 bp, Homo sapien
tggaatgaaagcataacccctacttgtcaccac

SEQ ID NO: 341593 - DNA, 33 bp, Homo sapien
tccagctttgagactccgaagcctttcttcttt

SEQ ID NO: 341594 - DNA, 33 bp, Homo sapien
tccagctttgagactctgaagcctttcttcttt

SEQ ID NO: 341595 - DNA, 33 bp, Homo sapien
ttcctcacctgtaaagaagtggtgatctgctcc

SEQ ID NO: 341596 - DNA, 33 bp, Homo sapien
ttcctcacctgtaaagcagtggtgatctgctcc

SEQ ID NO: 341597 - DNA, 33 bp, Homo sapien
atcctcattatatccccggagcagatcaccact

SEQ ID NO: 341598 - DNA, 33 bp, Homo sapien
atcctcattatatccctggagcagatcaccact

SEQ ID NO: 341599 - DNA, 33 bp, Homo sapien
ccctgagaccacataaccaaatgacggaagggg

SEQ ID NO: 341600 - DNA, 33 bp, Homo sapien
ccctgagaccacataatcaaatgacggaagggg

SEQ ID NO: 341601 - DNA, 33 bp, Homo sapien
gaaaagagaaatgtagacataaggccacataat

SEQ ID NO: 341602 - DNA, 33 bp, Homo sapien
gaaaagagaaatgtaggcataaggccacataat

SEQ ID NO: 341603 - DNA, 33 bp, Homo sapien
aattaaaatgtttatgcattagttcccatcaaa

SEQ ID NO: 341604 - DNA, 33 bp, Homo sapien
aattaaaatgtttatgtattagttcccatcaaa

SEQ ID NO: 341605 - DNA, 33 bp, Homo sapien
actttggtctagtgaaaaagacatctgtactag

SEQ ID NO: 341606 - DNA, 33 bp, Homo sapien
actttggtctagtgaagaagacatctgtactag

SEQ ID NO: 341607 - DNA, 33 bp, Homo sapien
ggaagaaatcctgaaacgtcaccagtaccccct

SEQ ID NO: 341608 - DNA, 33 bp, Homo sapien
ggaagaaatcctgaaatgtcaccagtaccccct

SEQ ID NO: 341609 - DNA, 33 bp, Homo sapien
atgtatatttcattaaatctaagagactaccaa

SEQ ID NO: 341610 - DNA, 33 bp, Homo sapien
atgtatatttcattaactctaagagactaccaa

SEQ ID NO: 341611 - DNA, 33 bp, Homo sapien
atcttttctgactacaatggaaccctggaaaat

SEQ ID NO: 341612 - DNA, 33 bp, Homo sapien
atcttttctgactacagtggaaccctggaaaat

SEQ ID NO: 341613 - DNA, 33 bp, Homo sapien
cttaaaagcctgtgataaatccctgtctcatgc

SEQ ID NO: 341614 - DNA, 33 bp, Homo sapien
cttaaaagcctgtgatgaatccctgtctcatgc

SEQ ID NO: 341615 - DNA, 33 bp, Homo sapien
aaatctacagtgctacaaagtgccaaaccatag

SEQ ID NO: 341616 - DNA, 33 bp, Homo sapien
aaatctacagtgctacgaagtgccaaaccatag

SEQ ID NO: 341617 - DNA, 33 bp, Homo sapien
tgtggtcacaagaatacaaaaactgcctagcca

SEQ ID NO: 341618 - DNA, 33 bp, Homo sapien
tgtggtcacaagaatataaaaactgcctagcca

SEQ ID NO: 341619 - DNA, 33 bp, Homo sapien
ttctctttcttaaaacgcaaaactctctgggga

SEQ ID NO: 341620 - DNA, 33 bp, Homo sapien
ttctctttcttaaaactcaaaactctctgggga

SEQ ID NO: 341621 - DNA, 33 bp, Homo sapien
atggcgtgtacatgcaccattagaccaaagtgt

SEQ ID NO: 341622 - DNA, 33 bp, Homo sapien
atggcgtgtacatgcatcattagaccaaagtgt

SEQ ID NO: 341623 - DNA, 33 bp, Homo sapien
ttttctatgcaatgaaatccttcagtaccttag

SEQ ID NO: 341624 - DNA, 33 bp, Homo sapien
ttttctatgcaatgaagtccttcagtaccttag

SEQ ID NO: 341625 - DNA, 33 bp, Homo sapien
aaataacaaacagtaacgtaatatggttaaggg

SEQ ID NO: 341626 - DNA, 33 bp, Homo sapien
aaataacaaacagtaatgtaatatggttaaggg

SEQ ID NO: 341627 - DNA, 33 bp, Homo sapien
ttatctaccaaaaaaaacgtaagccgtatgtta

SEQ ID NO: 341628 - DNA, 33 bp, Homo sapien
ttatctaccaaaaaaaccgtaagccgtatgtta

SEQ ID NO: 341629 - DNA, 33 bp, Homo sapien
actacccctgagtaatcaaaggcactcaagatt

SEQ ID NO: 341630 - DNA, 33 bp, Homo sapien
actacccctgagtaattaaaggcactcaagatt

SEQ ID NO: 341631 - DNA, 33 bp, Homo sapien
ctagatactgagtcaaaaaataaatgtgaacca

SEQ ID NO: 341632 - DNA, 33 bp, Homo sapien
ctagatactgagtcaagaaataaatgtgaacca

SEQ ID NO: 341633 - DNA, 33 bp, Homo sapien
ctatttacatcctgtaactcagctaataccata

SEQ ID NO: 341634 - DNA, 33 bp, Homo sapien
ctatttacatcctgtacctcagctaataccata

SEQ ID NO: 341635 - DNA, 33 bp, Homo sapien
tttggccacagtagtacattaggccacaggagg

SEQ ID NO: 341636 - DNA, 33 bp, Homo sapien
tttggccacagtagtatattaggccacaggagg

SEQ ID NO: 341637 - DNA, 33 bp, Homo sapien
acagaggcagtcaaaagttgtgatgaaacagga

SEQ ID NO: 341638 - DNA, 33 bp, Homo sapien
acagaggcagtcaaaatttgtgatgaaacagga

SEQ ID NO: 341639 - DNA, 33 bp, Homo sapien
aagaagaggataaatccgagagacaggtctctc

SEQ ID NO: 341640 - DNA, 33 bp, Homo sapien
aagaagaggataaatctgagagacaggtctctc

SEQ ID NO: 341641 - DNA, 33 bp, Homo sapien
gcggaactaggagaacagcaagtcgttaacagg

SEQ ID NO: 341642 - DNA, 33 bp, Homo sapien
gcggaactaggagaaccgcaagtcgttaacagg

SEQ ID NO: 341643 - DNA, 33 bp, Homo sapien
taaaagtggatctatcccagaaaaaatctaggc

SEQ ID NO: 341644 - DNA, 33 bp, Homo sapien
taaaagtggatctatctcagaaaaaatctaggc

SEQ ID NO: 341645 - DNA, 33 bp, Homo sapien
tattgtaacagtgcaaagacaatctaaaattcc

SEQ ID NO: 341646 - DNA, 33 bp, Homo sapien
tattgtaacagtgcaacgacaatctaaaattcc

SEQ ID NO: 341647 - DNA, 33 bp, Homo sapien
aaagttctgttgcaaaagctaatgtgaaaaggc

SEQ ID NO: 341648 - DNA, 33 bp, Homo sapien
aaagttctgttgcaaacgctaatgtgaaaaggc

SEQ ID NO: 341649 - DNA, 33 bp, Homo sapien
aggggtggcctccgctaacttccatgtatgcgt

SEQ ID NO: 341650 - DNA, 33 bp, Homo sapien
aggggtggcctccgctcacttccatgtatgcgt

SEQ ID NO: 341651 - DNA, 33 bp, Homo sapien
tttcaacaaatattggaagctatcatatgccag

SEQ ID NO: 341652 - DNA, 33 bp, Homo sapien
tttcaacaaatattgggagctatcatatgccag

SEQ ID NO: 341653 - DNA, 33 bp, Homo sapien
ctagtcagggagaaagacaatgatagagttaga

SEQ ID NO: 341654 - DNA, 33 bp, Homo sapien
ctagtcagggagaaaggcaatgatagagttaga

SEQ ID NO: 341655 - DNA, 33 bp, Homo sapien
ttgatatcagtatagacgtatgggcatttatgt

SEQ ID NO: 341656 - DNA, 33 bp, Homo sapien
ttgatatcagtatagatgtatgggcatttatgt

SEQ ID NO: 341657 - DNA, 33 bp, Homo sapien
tattggaaaggctagaaaaacagctttatgtaa

SEQ ID NO: 341658 - DNA, 33 bp, Homo sapien
tattggaaaggctagagaaacagctttatgtaa

SEQ ID NO: 341659 - DNA, 33 bp, Homo sapien
ttccaccataatagtaactttccttaggcctcc

SEQ ID NO: 341660 - DNA, 33 bp, Homo sapien
ttccaccataatagtatctttccttaggcctcc

SEQ ID NO: 341661 - DNA, 33 bp, Homo sapien; identical to SEQ ID NO: 341659

SEQ ID NO: 341662 - DNA, 33 bp, Homo sapien; identical to SEQ ID NO: 341660

SEQ ID NO: 341663 - DNA, 33 bp, Homo sapien
atttttttaagagaacaaaatgcagcaaatgcc

SEQ ID NO: 341664 - DNA, 33 bp, Homo sapien
atttttttaagagaaccaaatgcagcaaatgcc

SEQ ID NO: 341665 - DNA, 33 bp, Homo sapien
gtactgaaccctttatcaactatgttttttcag

SEQ ID NO: 341666 - DNA, 33 bp, Homo sapien
gtactgaaccctttatgaactatgttttttcag

SEQ ID NO: 341667 - DNA, 33 bp, Homo sapien
gtagtactggttctaacaagtaacaagcaagtt

SEQ ID NO: 341668 - DNA, 33 bp, Homo sapien
gtagtactggttctaagaagtaacaagcaagtt

SEQ ID NO: 341669 - DNA, 33 bp, Homo sapien
tagaaaaaaacaagccaattcttgaactttctt

SEQ ID NO: 341670 - DNA, 33 bp, Homo sapien
tagaaaaaaacaagccgattcttgaactttctt

SEQ ID NO: 341671 - DNA, 33 bp, Homo sapien
attatttgtcaggtaaaagatacaggttggtgc

SEQ ID NO: 341672 - DNA, 33 bp, Homo sapien
attatttgtcaggtaagagatacaggttggtgc

SEQ ID NO: 341673 - DNA, 33 bp, Homo sapien
gtgtcactgtggttcaaattatgaatatcaagc

SEQ ID NO: 341674 - DNA, 33 bp, Homo sapien
gtgtcactgtggttcagattatgaatatcaagc

SEQ ID NO: 341675 - DNA, 33 bp, Homo sapien
tacaggtgaagacactaaaggccggactttact

SEQ ID NO: 341676 - DNA, 33 bp, Homo sapien
tacaggtgaagacactgaaggccggactttact

SEQ ID NO: 341677 - DNA, 33 bp, Homo sapien
caaaaaacaaggtatccctagatggcagtttag

SEQ ID NO: 341678 - DNA, 33 bp, Homo sapien
caaaaaacaaggtatctctagatggcagtttag

SEQ ID NO: 341679 - DNA, 33 bp, Homo sapien
taggccttttgtgacgaagagttagccaagtta

SEQ ID NO: 341680 - DNA, 33 bp, Homo sapien
taggccttttgtgacgcagagttagccaagtta

SEQ ID NO: 341681 - DNA, 33 bp, Homo sapien
tgtaacttttatatgcactggaaataaaaaaaa

SEQ ID NO: 341682 - DNA, 33 bp, Homo sapien
tgtaacttttatatgcgctggaaataaaaaaaa

SEQ ID NO: 341683 - DNA, 33 bp, Homo sapien
ggtataaacttctccaatccttaagaattagcc

SEQ ID NO: 341684 - DNA, 33 bp, Homo sapien
ggtataaacttctccagtccttaagaattagcc

SEQ ID NO: 341685 - DNA, 33 bp, Homo sapien
gtccatttaatactcaagagtctagttcactcc

SEQ ID NO: 341686 - DNA, 33 bp, Homo sapien
gtccatttaatactcaggagtctagttcactcc

SEQ ID NO: 341687 - DNA, 33 bp, Homo sapien
tcattgcaagaattgcccaacatttgattcatt

SEQ ID NO: 341688 - DNA, 33 bp, Homo sapien
tcattgcaagaattgctcaacatttgattcatt

SEQ ID NO: 341689 - DNA, 33 bp, Homo sapien
catgagagtatcatacagaatcctttcatgccc

SEQ ID NO: 341690 - DNA, 33 bp, Homo sapien
catgagagtatcatacggaatcctttcatgccc

SEQ ID NO: 341691 - DNA, 33 bp, Homo sapien
tggttagagctattagaaggtacaatttataag

SEQ ID NO: 341692 - DNA, 33 bp, Homo sapien
tggttagagctattaggaggtacaatttataag

SEQ ID NO: 341693 - DNA, 33 bp, Homo sapien
atttcccctgaacgtcacatcaactaggatggt

SEQ ID NO: 341694 - DNA, 33 bp, Homo sapien
atttcccctgaacgtcgcatcaactaggatggt

SEQ ID NO: 341695 - DNA, 33 bp, Homo sapien
gctaaatacacatacaactgtgtcactctacca

SEQ ID NO: 341696 - DNA, 33 bp, Homo sapien
gctaaatacacatacagctgtgtcactctacca

SEQ ID NO: 341697 - DNA, 33 bp, Homo sapien
tttaaatgttaagctaaaaggagtttgagcctc

SEQ ID NO: 341698 - DNA, 33 bp, Homo sapien
tttaaatgttaagctataaggagtttgagcctc

SEQ ID NO: 341699 - DNA, 33 bp, Homo sapien
agaatatctataagaaagcgaaatcaaatttgg

SEQ ID NO: 341700 - DNA, 33 bp, Homo sapien
agaatatctataagaatgcgaaatcaaatttgg

SEQ ID NO: 341701 - DNA, 33 bp, Homo sapien
ctgtatacctgcaatacagttactgcattcaat

SEQ ID NO: 341702 - DNA, 33 bp, Homo sapien
ctgtatacctgcaatatagttactgcattcaat

SEQ ID NO: 341703 - DNA, 33 bp, Homo sapien
taaagtgccagaattacagccatgagctaccat

SEQ ID NO: 341704 - DNA, 33 bp, Homo sapien
taaagtgccagaattagagccatgagctaccat

SEQ ID NO: 341705 - DNA, 33 bp, Homo sapien
aggccacttgccagccgatagagggttgccttc

SEQ ID NO: 341706 - DNA, 33 bp, Homo sapien
aggccacttgccagcctatagagggttgccttc

SEQ ID NO: 341707 - DNA, 33 bp, Homo sapien
aagttctaacaatgctaacaaggttctcccatc

SEQ ID NO: 341708 - DNA, 33 bp, Homo sapien
aagttctaacaatgctgacaaggttctcccatc

SEQ ID NO: 341709 - DNA, 33 bp, Homo sapien
atctaaaattgtgcataaaaacactttaagtaa

SEQ ID NO: 341710 - DNA, 33 bp, Homo sapien
atctaaaattgtgcattaaaacactttaagtaa

SEQ ID NO: 341711 - DNA, 33 bp, Homo sapien
tctcactcccaagtaaccactattctcatttcc

SEQ ID NO: 341712 - DNA, 33 bp, Homo sapien
tctcactcccaagtaatcactattctcatttcc

SEQ ID NO: 341713 - DNA, 33 bp, Homo sapien
gggaaagttgagcatcaaaataaataaggacaa

SEQ ID NO: 341714 - DNA, 33 bp, Homo sapien
gggaaagttgagcatccaaataaataaggacaa

SEQ ID NO: 341715 - DNA, 33 bp, Homo sapien
atgactgggtgctcaccccctactaacacttct

SEQ ID NO: 341716 - DNA, 33 bp, Homo sapien
atgactgggtgctcactccctactaacacttct

SEQ ID NO: 341717 - DNA, 33 bp, Homo sapien
gtcaccttaagccataaaaatgaacttgattct

SEQ ID NO: 341718 - DNA, 33 bp, Homo sapien
gtcaccttaagccatacaaatgaacttgattct

SEQ ID NO: 341719 - DNA, 33 bp, Homo sapien
tgttggctagctgtcacggctatgttccaacca

SEQ ID NO: 341720 - DNA, 33 bp, Homo sapien
tgttggctagctgtcatggctatgttccaacca

SEQ ID NO: 341721 - DNA, 33 bp, Homo sapien
ttgaaccatactacagacattatcttccataag

SEQ ID NO: 341722 - DNA, 33 bp, Homo sapien
ttgaaccatactacaggcattatcttccataag

SEQ ID NO: 341723 - DNA, 33 bp, Homo sapien
gcaatgcatcctggagcatatggccctggaaaa

SEQ ID NO: 341724 - DNA, 33 bp, Homo sapien
gcaatgcatcctggagtatatggccctggaaaa

SEQ ID NO: 341725 - DNA, 33 bp, Homo sapien
agcacattctctctataagcgttattgtcatgc

SEQ ID NO: 341726 - DNA, 33 bp, Homo sapien
agcacattctctctatgagcgttattgtcatgc

SEQ ID NO: 341727 - DNA, 33 bp, Homo sapien
agccagcaagattatcaaggcaaaaaatatcaa

SEQ ID NO: 341728 - DNA, 33 bp, Homo sapien
agccagcaagattatcgaggcaaaaaatatcaa

SEQ ID NO: 341729 - DNA, 33 bp, Homo sapien
atgaaatttcaagatgccacatagctctggtca

SEQ ID NO: 341730 - DNA, 33 bp, Homo sapien
atgaaatttcaagatgtcacatagctctggtca

SEQ ID NO: 341731 - DNA, 33 bp, Homo sapien
accaaagtaaagccgacccaaaagaagaagcat

SEQ ID NO: 341732 - DNA, 33 bp, Homo sapien
accaaagtaaagccgatccaaaagaagaagcat

SEQ ID NO: 341733 - DNA, 33 bp, Homo sapien
tgaaagtggaacattccatttctagagattagc

SEQ ID NO: 341734 - DNA, 33 bp, Homo sapien
tgaaagtggaacattctatttctagagattagc

SEQ ID NO: 341735 - DNA, 33 bp, Homo sapien
gaaacaaattttctacagaacacaaaaacttca

SEQ ID NO: 341736 - DNA, 33 bp, Homo sapien
gaaacaaattttctacggaacacaaaaacttca

SEQ ID NO: 341737 - DNA, 33 bp, Homo sapien
atttgaaaagcaacaccagtgagctctaattga

SEQ ID NO: 341738 - DNA, 33 bp, Homo sapien
atttgaaaagcaacacgagtgagctctaattga

SEQ ID NO: 341739 - DNA, 33 bp, Homo sapien
ggcagtagtagtaggaagtgacatgggaaatgt

SEQ ID NO: 341740 - DNA, 33 bp, Homo sapien
ggcagtagtagtaggaggtgacatgggaaatgt

SEQ ID NO: 341741 - DNA, 33 bp, Homo sapien
cttggatatacctttaactgcagagtggttatg

SEQ ID NO: 341742 - DNA, 33 bp, Homo sapien
cttggatatacctttagctgcagagtggttatg

SEQ ID NO: 341743 - DNA, 33 bp, Homo sapien
ctcagaatctattgccacttctagctagtccct

SEQ ID NO: 341744 - DNA, 33 bp, Homo sapien
ctcagaatctattgcctcttctagctagtccct

SEQ ID NO: 341745 - DNA, 33 bp, Homo sapien
ggctaaactccttttgcagaagagctcttagat

SEQ ID NO: 341746 - DNA, 33 bp, Homo sapien
ggctaaactccttttgtagaagagctcttagat

SEQ ID NO: 341747 - DNA, 33 bp, Homo sapien
gctctcataggaattacattcagccatttttgg

SEQ ID NO: 341748 - DNA, 33 bp, Homo sapien
gctctcataggaattatattcagccatttttgg

SEQ ID NO: 341749 - DNA, 33 bp, Homo sapien
atggaagtaattcagggcagatggaagagatca

SEQ ID NO: 341750 - DNA, 33 bp, Homo sapien
atggaagtaattcaggtcagatggaagagatca

SEQ ID NO: 341751 - DNA, 33 bp, Homo sapien
taggcctgaaaaagacaccgggtgaggagggag

SEQ ID NO: 341752 - DNA, 33 bp, Homo sapien
taggcctgaaaaagactccgggtgaggagggag

SEQ ID NO: 341753 - DNA, 33 bp, Homo sapien
gaaggaaaacaacaaaagcataagtcattggcc

SEQ ID NO: 341754 - DNA, 33 bp, Homo sapien
gaaggaaaacaacaaaggcataagtcattggcc

SEQ ID NO: 341755 - DNA, 33 bp, Homo sapien
gggcagttttccatagcctaactccaagaggcc

SEQ ID NO: 341756 - DNA, 33 bp, Homo sapien
gggcagttttccatagtctaactccaagaggcc

SEQ ID NO: 341757 - DNA, 33 bp, Homo sapien
actgtttgtaacagtgaatcataaaagcaactc

SEQ ID NO: 341758 - DNA, 33 bp, Homo sapien
actgtttgtaacagtgcatcataaaagcaactc

SEQ ID NO: 341759 - DNA, 33 bp, Homo sapien
ctcttagctacaaataccatgctccaattcttc

SEQ ID NO: 341760 - DNA, 33 bp, Homo sapien
ctcttagctacaaatatcatgctccaattcttc

SEQ ID NO: 341761 - DNA, 33 bp, Homo sapien
caccccacagttgccacgccctgaacagattta

SEQ ID NO: 341762 - DNA, 33 bp, Homo sapien
caccccacagttgccatgccctgaacagattta

SEQ ID NO: 341763 - DNA, 33 bp, Homo sapien
agtgggatttcccttacgatatggagtctcagc

SEQ ID NO: 341764 - DNA, 33 bp, Homo sapien
agtgggatttcccttatgatatggagtctcagc

SEQ ID NO: 341765 - DNA, 33 bp, Homo sapien
gagaaaacgaggccaaagtatttgagatttggt

SEQ ID NO: 341766 - DNA, 33 bp, Homo sapien
gagaaaacgaggccaaggtatttgagatttggt

SEQ ID NO: 341767 - DNA, 33 bp, Homo sapien
tcttattctcgtgtagcatacgcaggtgaaaga

SEQ ID NO: 341768 - DNA, 33 bp, Homo sapien
tcttattctcgtgtagtatacgcaggtgaaaga

SEQ ID NO: 341769 - DNA, 33 bp, Homo sapien
gaaccaaatccagtcaggtttggaagaaggcag

SEQ ID NO: 341770 - DNA, 33 bp, Homo sapien
gaaccaaatccagtcatgtttggaagaaggcag

SEQ ID NO: 341771 - DNA, 33 bp, Homo sapien
gtgggacaggtgtaacaagcattgccatatgct

SEQ ID NO: 341772 - DNA, 33 bp, Homo sapien
gtgggacaggtgtaaccagcattgccatatgct

SEQ ID NO: 341773 - DNA, 33 bp, Homo sapien
ctccatacttaactgacatggattgccacttcc

SEQ ID NO: 341774 - DNA, 33 bp, Homo sapien
ctccatacttaactgagatggattgccacttcc

SEQ ID NO: 341775 - DNA, 33 bp, Homo sapien
aaattccaagagttgacatttgatagaggtgaa

SEQ ID NO: 341776 - DNA, 33 bp, Homo sapien
aaattccaagagttgatatttgatagaggtgaa

SEQ ID NO: 341777 - DNA, 33 bp, Homo sapien
ctaagcatgctctcctaaatattcgtaaattca

SEQ ID NO: 341778 - DNA, 33 bp, Homo sapien
ctaagcatgctctccttaatattcgtaaattca

SEQ ID NO: 341779 - DNA, 33 bp, Homo sapien
ttgtttcttagcttgtaaaggaaagggtaatcc

SEQ ID NO: 341780 - DNA, 33 bp, Homo sapien
ttgtttcttagcttgtgaaggaaagggtaatcc

SEQ ID NO: 341781 - DNA, 33 bp, Homo sapien
gacaacctgcagagacacacagccctgctaact

SEQ ID NO: 341782 - DNA, 33 bp, Homo sapien
gacaacctgcagagacgcacagccctgctaact

SEQ ID NO: 341783 - DNA, 33 bp, Homo sapien
ctccttctcgtcgtgactaaactgaaggctaat

SEQ ID NO: 341784 - DNA, 33 bp, Homo sapien
ctccttctcgtcgtgagtaaactgaaggctaat

SEQ ID NO: 341785 - DNA, 33 bp, Homo sapien
cacggatcttctctgacgctcatcttttcttct

SEQ ID NO: 341786 - DNA, 33 bp, Homo sapien
cacggatcttctctgatgctcatcttttcttct

SEQ ID NO: 341787 - DNA, 33 bp, Homo sapien
ttgttgatggactagacgttgatggaaatttga

SEQ ID NO: 341788 - DNA, 33 bp, Homo sapien
ttgttgatggactagatgttgatggaaatttga

SEQ ID NO: 341789 - DNA, 33 bp, Homo sapien
cactcctggaactttcactaaccagatccaggc

SEQ ID NO: 341790 - DNA, 33 bp, Homo sapien
cactcctggaactttcgctaaccagatccaggc

SEQ ID NO: 341791 - DNA, 33 bp, Homo sapien
tccgtttttccaattacgtgactttgtgggcaa

SEQ ID NO: 341792 - DNA, 33 bp, Homo sapien
tccgtttttccaattatgtgactttgtgggcaa

SEQ ID NO: 341793 - DNA, 33 bp, Homo sapien
ggtcatagatgatagaagaaggaccagtgatta

SEQ ID NO: 341794 - DNA, 33 bp, Homo sapien
ggtcatagatgatagaggaaggaccagtgatta

SEQ ID NO: 341795 - DNA, 33 bp, Homo sapien
agctagtttccctttgcagtgtgacccagaagt

SEQ ID NO: 341796 - DNA, 33 bp, Homo sapien
agctagtttccctttgtagtgtgacccagaagt

SEQ ID NO: 341797 - DNA, 33 bp, Homo sapien
agcaaggttgttgagacaaggaatgaaatgaag

SEQ ID NO: 341798 - DNA, 33 bp, Homo sapien
agcaaggttgttgagagaaggaatgaaatgaag

SEQ ID NO: 341799 - DNA, 33 bp, Homo sapien
ggattttatcaggtaccatgttgaacaaacttt

SEQ ID NO: 341800 - DNA, 33 bp, Homo sapien
ggattttatcaggtactatgttgaacaaacttt

SEQ ID NO: 341801 - DNA, 33 bp, Homo sapien
attcttattaagcaaagaggtagagttgggtag

SEQ ID NO: 341802 - DNA, 33 bp, Homo sapien
attcttattaagcaaataggtagagttgggtag

SEQ ID NO: 341803 - DNA, 33 bp, Homo sapien
tatcaaatggatagataaaatggagttgaattg

SEQ ID NO: 341804 - DNA, 33 bp, Homo sapien
tatcaaatggatagatgaaatggagttgaattg

SEQ ID NO: 341805 - DNA, 33 bp, Homo sapien
atcaagaaaagctaaactatgccatgagagctc

SEQ ID NO: 341806 - DNA, 33 bp, Homo sapien
atcaagaaaagctaaagtatgccatgagagctc

SEQ ID NO: 341807 - DNA, 33 bp, Homo sapien
acatggaaaagtgaaaacgaatcccagcaaatc

SEQ ID NO: 341808 - DNA, 33 bp, Homo sapien
acatggaaaagtgaaagcgaatcccagcaaatc

SEQ ID NO: 341809 - DNA, 33 bp, Homo sapien
acaagtttgattgcttcaagaactggaaaactg

SEQ ID NO: 341810 - DNA, 33 bp, Homo sapien
acaagtttgattgctttaagaactggaaaactg

SEQ ID NO: 341811 - DNA, 33 bp, Homo sapien
tcttgtatttttctgggcattcttctactacag

SEQ ID NO: 341812 - DNA, 33 bp, Homo sapien
tcttgtatttttctggtcattcttctactacag

SEQ ID NO: 341813 - DNA, 33 bp, Homo sapien
tttgatacagaaaatgaatggtgatcagtttaa

SEQ ID NO: 341814 - DNA, 33 bp, Homo sapien
tttgatacagaaaatgtatggtgatcagtttaa

SEQ ID NO: 341815 - DNA, 33 bp, Homo sapien
ctgagaacacatccaaaaagtttgttcattcaa

SEQ ID NO: 341816 - DNA, 33 bp, Homo sapien
ctgagaacacatccaacaagtttgttcattcaa

SEQ ID NO: 341817 - DNA, 33 bp, Homo sapien
attatggtgactttgcaagaaaaataggacatg

SEQ ID NO: 341818 - DNA, 33 bp, Homo sapien
attatggtgactttgcgagaaaaataggacatg

SEQ ID NO: 341819 - DNA, 33 bp, Homo sapien
tacccacaaatcatgaccgtaggacacagcaag

SEQ ID NO: 341820 - DNA, 33 bp, Homo sapien
tacccacaaatcatgatcgtaggacacagcaag

SEQ ID NO: 341821 - DNA, 33 bp, Homo sapien
ttgtccatgaaaactaaaggcaggtctggcgct

SEQ ID NO: 341822 - DNA, 33 bp, Homo sapien
ttgtccatgaaaactagaggcaggtctggcgct

SEQ ID NO: 341823 - DNA, 33 bp, Homo sapien
gttaagcctacaattccagtgaccctttctagt

SEQ ID NO: 341824 - DNA, 33 bp, Homo sapien
gttaagcctacaattctagtgaccctttctagt

SEQ ID NO: 341825 - DNA, 33 bp, Homo sapien
ggagtgcagggaaagaccagaagaagggaatcc

SEQ ID NO: 341826 - DNA, 33 bp, Homo sapien
ggagtgcagggaaagatcagaagaagggaatcc

SEQ ID NO: 341827 - DNA, 33 bp, Homo sapien
atatttgtaaggatgacagtgtggtggtaggac

SEQ ID NO: 341828 - DNA, 33 bp, Homo sapien
atatttgtaaggatgagagtgtggtggtaggac

SEQ ID NO: 341829 - DNA, 33 bp, Homo sapien
ttttacagctacagataaacttgtatgatttgg

SEQ ID NO: 341830 - DNA, 33 bp, Homo sapien
ttttacagctacagatcaacttgtatgatttgg

SEQ ID NO: 341831 - DNA, 33 bp, Homo sapien
atatgactatatttcacgatgggacctttaggg

SEQ ID NO: 341832 - DNA, 33 bp, Homo sapien
atatgactatatttcatgatgggacctttaggg

SEQ ID NO: 341833 - DNA, 33 bp, Homo sapien
tcaacattacaactgaagtaaaatctgtcaaaa

SEQ ID NO: 341834 - DNA, 33 bp, Homo sapien
tcaacattacaactgaggtaaaatctgtcaaaa

SEQ ID NO: 341835 - DNA, 33 bp, Homo sapien
ctattggccaagtggaaactggtgttctcaaac

SEQ ID NO: 341836 - DNA, 33 bp, Homo sapien
ctattggccaagtggagactggtgttctcaaac

SEQ ID NO: 341837 - DNA, 33 bp, Homo sapien
gaaattcacctgtaacgactgcagcgccattgg

SEQ ID NO: 341838 - DNA, 33 bp, Homo sapien
gaaattcacctgtaactactgcagcgccattgg

SEQ ID NO: 341839 - DNA, 33 bp, Homo sapien
ctccaggtcattccgacgcaagctctagtttga

SEQ ID NO: 341840 - DNA, 33 bp, Homo sapien
ctccaggtcattccgatgcaagctctagtttga

SEQ ID NO: 341841 - DNA, 33 bp, Homo sapien
caggaatttttagaagaaaaggacatgaaaacc

SEQ ID NO: 341842 - DNA, 33 bp, Homo sapien
caggaatttttagaaggaaaggacatgaaaacc

SEQ ID NO: 341843 - DNA, 33 bp, Homo sapien
aaacacagcatattgaaggtaaagtttaaaacc

SEQ ID NO: 341844 - DNA, 33 bp, Homo sapien
aaacacagcatattgacggtaaagtttaaaacc

SEQ ID NO: 341845 - DNA, 33 bp, Homo sapien
gtgtgttttgttttgccctgtgcaattctgtag

SEQ ID NO: 341846 - DNA, 33 bp, Homo sapien
gtgtgttttgttttgctctgtgcaattctgtag

SEQ ID NO: 341847 - DNA, 33 bp, Homo sapien
cacttcttaccagccaatagggaagagtcatca

SEQ ID NO: 341848 - DNA, 33 bp, Homo sapien
cacttcttaccagccagtagggaagagtcatca

SEQ ID NO: 341849 - DNA, 33 bp, Homo sapien
ggatagatggacatgaccttattttcagatgag

SEQ ID NO: 341850 - DNA, 33 bp, Homo sapien
ggatagatggacatgatcttattttcagatgag

SEQ ID NO: 341851 - DNA, 33 bp, Homo sapien
tggcctgggctgtgttaaaaagacctggaagtg

SEQ ID NO: 341852 - DNA, 33 bp, Homo sapien
tggcctgggctgtgtttaaaagacctggaagtg

SEQ ID NO: 341853 - DNA, 33 bp, Homo sapien
acagaaaggttcagagaagcccacggtgagaga

SEQ ID NO: 341854 - DNA, 33 bp, Homo sapien
acagaaaggttcagaggagcccacggtgagaga

SEQ ID NO: 341855 - DNA, 33 bp, Homo sapien
gtgggctctcgaatgcactaaagatactcagga

SEQ ID NO: 341856 - DNA, 33 bp, Homo sapien
gtgggctctcgaatgcgctaaagatactcagga

SEQ ID NO: 341857 - DNA, 33 bp, Homo sapien
caatcattcagaaggtcaaactaaagtaagtag

SEQ ID NO: 341858 - DNA, 33 bp, Homo sapien
caatcattcagaaggttaaactaaagtaagtag

SEQ ID NO: 341859 - DNA, 33 bp, Homo sapien
aatgacattttttttaaccttacacacactaca

SEQ ID NO: 341860 - DNA, 33 bp, Homo sapien
aatgacattttttttacccttacacacactaca

SEQ ID NO: 341861 - DNA, 33 bp, Homo sapien
ttaaagtccataaatacagttttgcacataaaa

SEQ ID NO: 341862 - DNA, 33 bp, Homo sapien
ttaaagtccataaatatagttttgcacataaaa

SEQ ID NO: 341863 - DNA, 33 bp, Homo sapien
gctttgctgtactcaaaaaatatttactattat

SEQ ID NO: 341864 - DNA, 33 bp, Homo sapien
gctttgctgtactcaacaaatatttactattat

SEQ ID NO: 341865 - DNA, 33 bp, Homo sapien
ttgttcatggtggctacaccactttatgctccc

SEQ ID NO: 341866 - DNA, 33 bp, Homo sapien
ttgttcatggtggctataccactttatgctccc

SEQ ID NO: 341867 - DNA, 33 bp, Homo sapien
aatgtgttcaggctaacggcttgttgttaatgg

SEQ ID NO: 341868 - DNA, 33 bp, Homo sapien
aatgtgttcaggctaatggcttgttgttaatgg

SEQ ID NO: 341869 - DNA, 33 bp, Homo sapien
tttcgcttgtcctagaaatttagtgattggacg

SEQ ID NO: 341870 - DNA, 33 bp, Homo sapien
tttcgcttgtcctagagatttagtgattggacg

SEQ ID NO: 341871 - DNA, 33 bp, Homo sapien
gctgaactttaagcatcagaattattccttaat

SEQ ID NO: 341872 - DNA, 33 bp, Homo sapien
gctgaactttaagcattagaattattccttaat

SEQ ID NO: 341873 - DNA, 33 bp, Homo sapien
agccagatgccatagaagtggttgtcatggaaa

SEQ ID NO: 341874 - DNA, 33 bp, Homo sapien
agccagatgccatagatgtggttgtcatggaaa

SEQ ID NO: 341875 - DNA, 33 bp, Homo sapien
tgtcttctattccaaaacggcgttcctgcctat

SEQ ID NO: 341876 - DNA, 33 bp, Homo sapien
tgtcttctattccaaagcggcgttcctgcctat

SEQ ID NO: 341877 - DNA, 33 bp, Homo sapien
cttgtgataatgaataagtctccagagatctga

SEQ ID NO: 341878 - DNA, 33 bp, Homo sapien
cttgtgataatgaataggtctccagagatctga

SEQ ID NO: 341879 - DNA, 33 bp, Homo sapien; identical to SEQ ID NO: 341877

SEQ ID NO: 341880 - DNA, 33 bp, Homo sapien; identical to SEQ ID NO: 341878

SEQ ID NO: 341881 - DNA, 33 bp, Homo sapien
gtgtcaccccaccagacgttgatgagatttgat

SEQ ID NO: 341882 - DNA, 33 bp, Homo sapien
gtgtcaccccaccagatgttgatgagatttgat

SEQ ID NO: 341883 - DNA, 33 bp, Homo sapien
tgtatgtcctgaaaataaaaggagaatatgtcc

SEQ ID NO: 341884 - DNA, 33 bp, Homo sapien
tgtatgtcctgaaaatgaaaggagaatatgtcc

SEQ ID NO: 341885 - DNA, 33 bp, Homo sapien
tgaacattctcgtatacgtctcctggtacatat

SEQ ID NO: 341886 - DNA, 33 bp, Homo sapien
tgaacattctcgtatatgtctcctggtacatat

SEQ ID NO: 341887 - DNA, 33 bp, Homo sapien
ctcagtgagatcgaacaggttaaataaaatttc

SEQ ID NO: 341888 - DNA, 33 bp, Homo sapien
ctcagtgagatcgaaccggttaaataaaatttc

SEQ ID NO: 341889 - DNA, 33 bp, Homo sapien
acatgcagactatacacgtgtccagatgatggt

SEQ ID NO: 341890 - DNA, 33 bp, Homo sapien
acatgcagactatacatgtgtccagatgatggt

SEQ ID NO: 341891 - DNA, 33 bp, Homo sapien
aatttttgaagaatcaccttgctattgcatgag

SEQ ID NO: 341892 - DNA, 33 bp, Homo sapien
aatttttgaagaatcagcttgctattgcatgag

SEQ ID NO: 341893 - DNA, 33 bp, Homo sapien
tactcatttcaattaccagtgcttcaacaatca

SEQ ID NO: 341894 - DNA, 33 bp, Homo sapien
tactcatttcaattactagtgcttcaacaatca

SEQ ID NO: 341895 - DNA, 33 bp, Homo sapien
ggatagttaaaaaacagagagatcacacagagg

SEQ ID NO: 341896 - DNA, 33 bp, Homo sapien
ggatagttaaaaaacatagagatcacacagagg

SEQ ID NO: 341897 - DNA, 33 bp, Homo sapien
gtacatagaaccacctaaagagaatccgattta

SEQ ID NO: 341898 - DNA, 33 bp, Homo sapien
gtacatagaaccacctgaagagaatccgattta

SEQ ID NO: 341899 - DNA, 33 bp, Homo sapien
tgctcttgtgatctgacggattgaggacaaatc

SEQ ID NO: 341900 - DNA, 33 bp, Homo sapien
tgctcttgtgatctgatggattgaggacaaatc

SEQ ID NO: 341901 - DNA, 33 bp, Homo sapien
aaatctgatgggtagcagcaacaatagttaggt

SEQ ID NO: 341902 - DNA, 33 bp, Homo sapien
aaatctgatgggtagcggcaacaatagttaggt

SEQ ID NO: 341903 - DNA, 33 bp, Homo sapien
gtacctaaacatctgacccattcaagtccctga

SEQ ID NO: 341904 - DNA, 33 bp, Homo sapien
gtacctaaacatctgatccattcaagtccctga

SEQ ID NO: 341905 - DNA, 33 bp, Homo sapien
cctagagaaaagctcacgtggagagttgagcca

SEQ ID NO: 341906 - DNA, 33 bp, Homo sapien
cctagagaaaagctcatgtggagagttgagcca

SEQ ID NO: 341907 - DNA, 33 bp, Homo sapien
attcagccacttagaaacagcaactagcctact

SEQ ID NO: 341908 - DNA, 33 bp, Homo sapien
attcagccacttagaaccagcaactagcctact

SEQ ID NO: 341909 - DNA, 33 bp, Homo sapien
tgaggtcaagtttatcaattttttatgaacagt

SEQ ID NO: 341910 - DNA, 33 bp, Homo sapien
tgaggtcaagtttatccattttttatgaacagt

SEQ ID NO: 341911 - DNA, 33 bp, Homo sapien
aatttcaaactggaaaaagcctaaatgtctacc

SEQ ID NO: 341912 - DNA, 33 bp, Homo sapien
aatttcaaactggaaatagcctaaatgtctacc

SEQ ID NO: 341913 - DNA, 33 bp, Homo sapien
tgtctgcaaatctagaaggataatataatatga

SEQ ID NO: 341914 - DNA, 33 bp, Homo sapien
tgtctgcaaatctagagggataatataatatga

SEQ ID NO: 341915 - DNA, 33 bp, Homo sapien
acttttagaacttttgcataaattcactgctaa

SEQ ID NO: 341916 - DNA, 33 bp, Homo sapien
acttttagaacttttgtataaattcactgctaa

SEQ ID NO: 341917 - DNA, 33 bp, Homo sapien
tccaaagttcctatgacgtattacgcagaaata

SEQ ID NO: 341918 - DNA, 33 bp, Homo sapien
tccaaagttcctatgatgtattacgcagaaata

SEQ ID NO: 341919 - DNA, 33 bp, Homo sapien
gggcagatatggtggtaaatctaaggcactggt

SEQ ID NO: 341920 - DNA, 33 bp, Homo sapien
gggcagatatggtggtgaatctaaggcactggt

SEQ ID NO: 341921 - DNA, 33 bp, Homo sapien
gtcgatagccattcacaattaagtatttgtact

SEQ ID NO: 341922 - DNA, 33 bp, Homo sapien
gtcgatagccattcacgattaagtatttgtact

SEQ ID NO: 341923 - DNA, 33 bp, Homo sapien
ccctgggctcagaacaaactaaaatacacacac

SEQ ID NO: 341924 - DNA, 33 bp, Homo sapien
ccctgggctcagaacagactaaaatacacacac

SEQ ID NO: 341925 - DNA, 33 bp, Homo sapien
catgtaacataaaccaactaaatataccaagtt

SEQ ID NO: 341926 - DNA, 33 bp, Homo sapien
catgtaacataaaccagctaaatataccaagtt

SEQ ID NO: 341927 - DNA, 33 bp, Homo sapien
agaacttgtgagaaaacattgtgagaatactta

SEQ ID NO: 341928 - DNA, 33 bp, Homo sapien
agaacttgtgagaaaatattgtgagaatactta

SEQ ID NO: 341929 - DNA, 33 bp, Homo sapien
cacaatgtctgagtaacactggaatcagaagac

SEQ ID NO: 341930 - DNA, 33 bp, Homo sapien
cacaatgtctgagtaatactggaatcagaagac

SEQ ID NO: 341931 - DNA, 33 bp, Homo sapien
aagttatcactattacaatccttgtgggttccc

SEQ ID NO: 341932 - DNA, 33 bp, Homo sapien
aagttatcactattacgatccttgtgggttccc

SEQ ID NO: 341933 - DNA, 33 bp, Homo sapien
gggtttttgtggtctagcttaggcatgaactac

SEQ ID NO: 341934 - DNA, 33 bp, Homo sapien
gggtttttgtggtctatcttaggcatgaactac

SEQ ID NO: 341935 - DNA, 33 bp, Homo sapien
cttacccattctgtgaagctaacttaaatgcca

SEQ ID NO: 341936 - DNA, 33 bp, Homo sapien
cttacccattctgtgacgctaacttaaatgcca

SEQ ID NO: 341937 - DNA, 33 bp, Homo sapien
ggcaaaaaattgaatgaagattgacagaatcag

SEQ ID NO: 341938 - DNA, 33 bp, Homo sapien
ggcaaaaaattgaatggagattgacagaatcag

SEQ ID NO: 341939 - DNA, 33 bp, Homo sapien
agtcagtccagagccccggcaaaagagatcttt

SEQ ID NO: 341940 - DNA, 33 bp, Homo sapien
agtcagtccagagccctggcaaaagagatcttt

SEQ ID NO: 341941 - DNA, 33 bp, Homo sapien
taatgaagtaaagtacaaactcgcatacattgc

SEQ ID NO: 341942 - DNA, 33 bp, Homo sapien
taatgaagtaaagtacgaactcgcatacattgc

SEQ ID NO: 341943 - DNA, 33 bp, Homo sapien
acaccatctgtgattgccaaggaaattaaatta

SEQ ID NO: 341944 - DNA, 33 bp, Homo sapien
acaccatctgtgattggcaaggaaattaaatta

SEQ ID NO: 341945 - DNA, 33 bp, Homo sapien
tctctggtgaataaaaatttatctgcaccacca

SEQ ID NO: 341946 - DNA, 33 bp, Homo sapien
tctctggtgaataaaagtttatctgcaccacca

SEQ ID NO: 341947 - DNA, 33 bp, Homo sapien
tcatgacacgtggaaactcaggaaacttctgtg

SEQ ID NO: 341948 - DNA, 33 bp, Homo sapien
tcatgacacgtggaaattcaggaaacttctgtg

SEQ ID NO: 341949 - DNA, 33 bp, Homo sapien
gaataagaaacttgcccagattgataaagctga

SEQ ID NO: 341950 - DNA, 33 bp, Homo sapien
gaataagaaacttgcctagattgataaagctga

SEQ ID NO: 341951 - DNA, 33 bp, Homo sapien
acttgaatgtcatcaaaaaaaggttcagagagg

SEQ ID NO: 341952 - DNA, 33 bp, Homo sapien
acttgaatgtcatcaagaaaaggttcagagagg

SEQ ID NO: 341953 - DNA, 33 bp, Homo sapien
attatagagtacattagaagatggtagatgaca

SEQ ID NO: 341954 - DNA, 33 bp, Homo sapien
attatagagtacattataagatggtagatgaca

SEQ ID NO: 341955 - DNA, 33 bp, Homo sapien
taatcaactgtgttaaatagcagtgataggtca

SEQ ID NO: 341956 - DNA, 33 bp, Homo sapien
taatcaactgtgttaagtagcagtgataggtca

SEQ ID NO: 341957 - DNA, 33 bp, Homo sapien
atttccagaaccatcaacttaatcatctgcatt

SEQ ID NO: 341958 - DNA, 33 bp, Homo sapien
atttccagaaccatcaccttaatcatctgcatt

SEQ ID NO: 341959 - DNA, 33 bp, Homo sapien
gcaacaatagttaacaatgctaccttaataaat

SEQ ID NO: 341960 - DNA, 33 bp, Homo sapien
gcaacaatagttaacagtgctaccttaataaat

SEQ ID NO: 341961 - DNA, 33 bp, Homo sapien
aattgccccatttctcacttaccaagatggtca

SEQ ID NO: 341962 - DNA, 33 bp, Homo sapien
aattgccccatttctctcttaccaagatggtca

SEQ ID NO: 341963 - DNA, 33 bp, Homo sapien
tttattatgattgctaagtattcttgttatatt

SEQ ID NO: 341964 - DNA, 33 bp, Homo sapien
tttattatgattgctatgtattcttgttatatt

SEQ ID NO: 341965 - DNA, 33 bp, Homo sapien
aacatgggacttgaaacgagacaaacttaagct

SEQ ID NO: 341966 - DNA, 33 bp, Homo sapien
aacatgggacttgaaatgagacaaacttaagct

SEQ ID NO: 341967 - DNA, 33 bp, Homo sapien
agatgcatttaatggacggaggtggagtcataa

SEQ ID NO: 341968 - DNA, 33 bp, Homo sapien
agatgcatttaatggatggaggtggagtcataa

SEQ ID NO: 341969 - DNA, 33 bp, Homo sapien
ataacttaacataaaaacatagatacaatgaca

SEQ ID NO: 341970 - DNA, 33 bp, Homo sapien
ataacttaacataaaagcatagatacaatgaca

SEQ ID NO: 341971 - DNA, 33 bp, Homo sapien
gcattgtgatcttcagaaacactttcactctgg

SEQ ID NO: 341972 - DNA, 33 bp, Homo sapien
gcattgtgatcttcaggaacactttcactctgg

SEQ ID NO: 341973 - DNA, 33 bp, Homo sapien
atgtattggataacggccaactcgagacttgaa

SEQ ID NO: 341974 - DNA, 33 bp, Homo sapien
atgtattggataacggtcaactcgagacttgaa

SEQ ID NO: 341975 - DNA, 33 bp, Homo sapien
aatgatattggaccgagtaactaatgcactctg

SEQ ID NO: 341976 - DNA, 33 bp, Homo sapien
aatgatattggaccgattaactaatgcactctg

SEQ ID NO: 341977 - DNA, 33 bp, Homo sapien
tattgtcaattccaaacaccattctgagaacat

SEQ ID NO: 341978 - DNA, 33 bp, Homo sapien
tattgtcaattccaaataccattctgagaacat

SEQ ID NO: 341979 - DNA, 33 bp, Homo sapien
gggtataaagttaaccaccatgattattcctat

SEQ ID NO: 341980 - DNA, 33 bp, Homo sapien
gggtataaagttaaccgccatgattattcctat

SEQ ID NO: 341981 - DNA, 33 bp, Homo sapien
aaggggaagtgacaaactgtggtcaatgtaagg

SEQ ID NO: 341982 - DNA, 33 bp, Homo sapien
aaggggaagtgacaaattgtggtcaatgtaagg

SEQ ID NO: 341983 - DNA, 33 bp, Homo sapien
ctgtgtctttcacatcagacagggattgcacat

SEQ ID NO: 341984 - DNA, 33 bp, Homo sapien
ctgtgtctttcacatcggacagggattgcacat

SEQ ID NO: 341985 - DNA, 33 bp, Homo sapien
actcagtggtagaacaaaaattctggaggtcat

SEQ ID NO: 341986 - DNA, 33 bp, Homo sapien
actcagtggtagaacagaaattctggaggtcat

SEQ ID NO: 341987 - DNA, 33 bp, Homo sapien
ctgtattagctttacacggttgctgtaacaaat

SEQ ID NO: 341988 - DNA, 33 bp, Homo sapien
ctgtattagctttacatggttgctgtaacaaat

SEQ ID NO: 341989 - DNA, 33 bp, Homo sapien
caactatcagaagctaggagagaggtctgggtt

SEQ ID NO: 341990 - DNA, 33 bp, Homo sapien
caactatcagaagctatgagagaggtctgggtt

SEQ ID NO: 341991 - DNA, 33 bp, Homo sapien
tggaaaaaatgatgacccttcactcagttattt

SEQ ID NO: 341992 - DNA, 33 bp, Homo sapien
tggaaaaaatgatgacgcttcactcagttattt

SEQ ID NO: 341993 - DNA, 33 bp, Homo sapien
ttctgttttgtctatccctctatgtatatatgt

SEQ ID NO: 341994 - DNA, 33 bp, Homo sapien
ttctgttttgtctatctctctatgtatatatgt

SEQ ID NO: 341995 - DNA, 33 bp, Homo sapien
gacagtattcattcacggagtttttgagtaacc

SEQ ID NO: 341996 - DNA, 33 bp, Homo sapien
gacagtattcattcactgagtttttgagtaacc

SEQ ID NO: 341997 - DNA, 33 bp, Homo sapien
aggtgatatgactgccaatgttagtgataggtg

SEQ ID NO: 341998 - DNA, 33 bp, Homo sapien
aggtgatatgactgcccatgttagtgataggtg

SEQ ID NO: 341999 - DNA, 33 bp, Homo sapien
tgtcacacatgaaaatcaaccttgtcatttata

SEQ ID NO: 342000 - DNA, 33 bp, Homo sapien
tgtcacacatgaaaattaaccttgtcatttata

SEQ ID NO: 342001 - DNA, 33 bp, Homo sapien
attgatctgaacaggcaaggccagaagagttag

SEQ ID NO: 342002 - DNA, 33 bp, Homo sapien
attgatctgaacaggcgaggccagaagagttag

SEQ ID NO: 342003 - DNA, 33 bp, Homo sapien
agagctctctgataccagcttggtttttgtgag

SEQ ID NO: 342004 - DNA, 33 bp, Homo sapien
agagctctctgataccggcttggtttttgtgag

SEQ ID NO: 342005 - DNA, 33 bp, Homo sapien
tggacagggtaagttacagaagtttgagaaact

SEQ ID NO: 342006 - DNA, 33 bp, Homo sapien
tggacagggtaagttagagaagtttgagaaact

SEQ ID NO: 342007 - DNA, 33 bp, Homo sapien
tttacagatgttgaaactgagcatgaaatctta

SEQ ID NO: 342008 - DNA, 33 bp, Homo sapien
tttacagatgttgaaagtgagcatgaaatctta

SEQ ID NO: 342009 - DNA, 33 bp, Homo sapien
gaagtatcctctccaagacaattttcttctttt

SEQ ID NO: 342010 - DNA, 33 bp, Homo sapien
gaagtatcctctccaatacaattttcttctttt

SEQ ID NO: 342011 - DNA, 33 bp, Homo sapien
ctttgactggacgaaaatgatgggtctgcctca

SEQ ID NO: 342012 - DNA, 33 bp, Homo sapien
ctttgactggacgaaagtgatgggtctgcctca

SEQ ID NO: 342013 - DNA, 33 bp, Homo sapien
tttcctagcatagttaacccagggaattcagat

SEQ ID NO: 342014 - DNA, 33 bp, Homo sapien
tttcctagcatagttatcccagggaattcagat

SEQ ID NO: 342015 - DNA, 33 bp, Homo sapien
atcccaagtgctaccacgtcctcgtgtttctct

SEQ ID NO: 342016 - DNA, 33 bp, Homo sapien
atcccaagtgctaccatgtcctcgtgtttctct

SEQ ID NO: 342017 - DNA, 33 bp, Homo sapien
gtggggcctggactgacgcccagcctcttaact

SEQ ID NO: 342018 - DNA, 33 bp, Homo sapien
gtggggcctggactgatgcccagcctcttaact

SEQ ID NO: 342019 - DNA, 33 bp, Homo sapien
ctcttggggttgttgccactgttaaatgatagc

SEQ ID NO: 342020 - DNA, 33 bp, Homo sapien
ctcttggggttgttgcgactgttaaatgatagc

SEQ ID NO: 342021 - DNA, 33 bp, Homo sapien
tgtagacaggattcataaagtaatatgtaaagt

SEQ ID NO: 342022 - DNA, 33 bp, Homo sapien
tgtagacaggattcatgaagtaatatgtaaagt

SEQ ID NO: 342023 - DNA, 33 bp, Homo sapien
acactagaagcaagaagaagaaaaagcttggag

SEQ ID NO: 342024 - DNA, 33 bp, Homo sapien
acactagaagcaagaataagaaaaagcttggag

SEQ ID NO: 342025 - DNA, 33 bp, Homo sapien
catagcagaatcctccacctaaatttagaaatt

SEQ ID NO: 342026 - DNA, 33 bp, Homo sapien
catagcagaatcctccgcctaaatttagaaatt

SEQ ID NO: 342027 - DNA, 33 bp, Homo sapien
taaatctaatttttcacgtattgtatcgccaag

SEQ ID NO: 342028 - DNA, 33 bp, Homo sapien
taaatctaatttttcatgtattgtatcgccaag

SEQ ID NO: 342029 - DNA, 33 bp, Homo sapien
aactctggttgtgcaaccacaaacacttgtaga

SEQ ID NO: 342030 - DNA, 33 bp, Homo sapien
aactctggttgtgcaatcacaaacacttgtaga

SEQ ID NO: 342031 - DNA, 33 bp, Homo sapien
attcaaacttcttggaatatggataatatcaac

SEQ ID NO: 342032 - DNA, 33 bp, Homo sapien
attcaaacttcttggactatggataatatcaac

SEQ ID NO: 342033 - DNA, 33 bp, Homo sapien
cacttgaacaagaaaacgttggctttattgaga

SEQ ID NO: 342034 - DNA, 33 bp, Homo sapien
cacttgaacaagaaaatgttggctttattgaga

SEQ ID NO: 342035 - DNA, 33 bp, Homo sapien
gtaggacacacatatgaaccaaatcagaatctt

SEQ ID NO: 342036 - DNA, 33 bp, Homo sapien
gtaggacacacatatggaccaaatcagaatctt

SEQ ID NO: 342037 - DNA, 33 bp, Homo sapien
tctgcatcttgggtaccatattgagtgtaaaaa

SEQ ID NO: 342038 - DNA, 33 bp, Homo sapien
tctgcatcttgggtactatattgagtgtaaaaa

SEQ ID NO: 342039 - DNA, 33 bp, Homo sapien
aactgatgcattgcaaagggctggatcttctac

SEQ ID NO: 342040 - DNA, 33 bp, Homo sapien
aactgatgcattgcaaggggctggatcttctac

SEQ ID NO: 342041 - DNA, 33 bp, Homo sapien
tctggcctccaaaaggaaaaattgttcttctca

SEQ ID NO: 342042 - DNA, 33 bp, Homo sapien
tctggcctccaaaagggaaaattgttcttctca

SEQ ID NO: 342043 - DNA, 33 bp, Homo sapien
tttctcagagtcaaccactaatgaaggacatag

SEQ ID NO: 342044 - DNA, 33 bp, Homo sapien
tttctcagagtcaaccgctaatgaaggacatag

SEQ ID NO: 342045 - DNA, 33 bp, Homo sapien
cgtccacttgcacatgaagtattttcgtcctta

SEQ ID NO: 342046 - DNA, 33 bp, Homo sapien
cgtccacttgcacatggagtattttcgtcctta

SEQ ID NO: 342047 - DNA, 33 bp, Homo sapien
gctgctcccaatcacaaagatccagattaatat

SEQ ID NO: 342048 - DNA, 33 bp, Homo sapien
gctgctcccaatcacagagatccagattaatat

SEQ ID NO: 342049 - DNA, 33 bp, Homo sapien
ggcagaacacaatccacatttaaactccaggaa

SEQ ID NO: 342050 - DNA, 33 bp, Homo sapien
ggcagaacacaatccagatttaaactccaggaa

SEQ ID NO: 342051 - DNA, 33 bp, Homo sapien
tgagttcccaggttacccacaacttctgctgga

SEQ ID NO: 342052 - DNA, 33 bp, Homo sapien
tgagttcccaggttacgcacaacttctgctgga

SEQ ID NO: 342053 - DNA, 33 bp, Homo sapien
aatgaagaggaattaactgtaaatctacatttt

SEQ ID NO: 342054 - DNA, 33 bp, Homo sapien
aatgaagaggaattaagtgtaaatctacatttt

SEQ ID NO: 342055 - DNA, 33 bp, Homo sapien
aatgatcacccaagcaacttcttagaataaaca

SEQ ID NO: 342056 - DNA, 33 bp, Homo sapien
aatgatcacccaagcagcttcttagaataaaca

SEQ ID NO: 342057 - DNA, 33 bp, Homo sapien
ttgccattagaaagtgacacaactaaaactaga

SEQ ID NO: 342058 - DNA, 33 bp, Homo sapien
ttgccattagaaagtggcacaactaaaactaga

SEQ ID NO: 342059 - DNA, 33 bp, Homo sapien
ttaacacgtggaaataccatgtatggattagaa

SEQ ID NO: 342060 - DNA, 33 bp, Homo sapien
ttaacacgtggaaatatcatgtatggattagaa

SEQ ID NO: 342061 - DNA, 33 bp, Homo sapien
taatctgtaataaggcaaaaaggacctaaacta

SEQ ID NO: 342062 - DNA, 33 bp, Homo sapien
taatctgtaataaggccaaaaggacctaaacta

SEQ ID NO: 342063 - DNA, 33 bp, Homo sapien
cctcagacaagattctaaaccttcatcagcctc

SEQ ID NO: 342064 - DNA, 33 bp, Homo sapien
cctcagacaagattctgaaccttcatcagcctc

SEQ ID NO: 342065 - DNA, 33 bp, Homo sapien
gcagtactgcagatagcatagtgaagaggaaag

SEQ ID NO: 342066 - DNA, 33 bp, Homo sapien
gcagtactgcagatagtatagtgaagaggaaag

SEQ ID NO: 342067 - DNA, 33 bp, Homo sapien
tagactaatgcagaggaattctggctagtgcgg

SEQ ID NO: 342068 - DNA, 33 bp, Homo sapien
tagactaatgcagagggattctggctagtgcgg

SEQ ID NO: 342069 - DNA, 33 bp, Homo sapien
gcccaggatgacaggacgtacagaatatgagat

SEQ ID NO: 342070 - DNA, 33 bp, Homo sapien
gcccaggatgacaggatgtacagaatatgagat

SEQ ID NO: 342071 - DNA, 33 bp, Homo sapien
tagtctctgtgtctgaaagtgaaaatgtcagat

SEQ ID NO: 342072 - DNA, 33 bp, Homo sapien
tagtctctgtgtctgagagtgaaaatgtcagat

SEQ ID NO: 342073 - DNA, 33 bp, Homo sapien
gtaaccacagacaccaagaagagtgcaaggagt

SEQ ID NO: 342074 - DNA, 33 bp, Homo sapien
gtaaccacagacaccaggaagagtgcaaggagt

SEQ ID NO: 342075 - DNA, 33 bp, Homo sapien
ttatctcttttttatcaaccaatccgtcttaat

SEQ ID NO: 342076 - DNA, 33 bp, Homo sapien
ttatctcttttttatccaccaatccgtcttaat

SEQ ID NO: 342077 - DNA, 33 bp, Homo sapien
caagaggccactgggcaaacttcagatttttaa

SEQ ID NO: 342078 - DNA, 33 bp, Homo sapien
caagaggccactgggcgaacttcagatttttaa

SEQ ID NO: 342079 - DNA, 33 bp, Homo sapien
tttaagaggcagcttcacatccatgaaagaaca

SEQ ID NO: 342080 - DNA, 33 bp, Homo sapien
tttaagaggcagcttcgcatccatgaaagaaca

SEQ ID NO: 342081 - DNA, 33 bp, Homo sapien
aggacaagtttgctcaggtcttctgtttggcaa

SEQ ID NO: 342082 - DNA, 33 bp, Homo sapien
aggacaagtttgctcatgtcttctgtttggcaa

SEQ ID NO: 342083 - DNA, 33 bp, Homo sapien
ctggtggttttaggaaccttttatgaatcacag

SEQ ID NO: 342084 - DNA, 33 bp, Homo sapien
ctggtggttttaggaatcttttatgaatcacag

SEQ ID NO: 342085 - DNA, 33 bp, Homo sapien
tcatatggagtcagaaaaaaagctgaaactgtt

SEQ ID NO: 342086 - DNA, 33 bp, Homo sapien
tcatatggagtcagaagaaaagctgaaactgtt

SEQ ID NO: 342087 - DNA, 33 bp, Homo sapien
tgacgttgcaaccttaccttcctcaattcccac

SEQ ID NO: 342088 - DNA, 33 bp, Homo sapien
tgacgttgcaaccttatcttcctcaattcccac

SEQ ID NO: 342089 - DNA, 33 bp, Homo sapien
cagtgtgtcttaaggccaattcatgaacagtca

SEQ ID NO: 342090 - DNA, 33 bp, Homo sapien
cagtgtgtcttaaggctaattcatgaacagtca

SEQ ID NO: 342091 - DNA, 33 bp, Homo sapien
gaattccaaacaattaagcagtgtgatattttt

SEQ ID NO: 342092 - DNA, 33 bp, Homo sapien
gaattccaaacaattaggcagtgtgatattttt

SEQ ID NO: 342093 - DNA, 33 bp, Homo sapien
ctagtttgtcttacaagcagtggtcctggtggg

SEQ ID NO: 342094 - DNA, 33 bp, Homo sapien
ctagtttgtcttacaatcagtggtcctggtggg

SEQ ID NO: 342095 - DNA, 33 bp, Homo sapien
acaaaaccaattaaaacatacacaggtcatgta

SEQ ID NO: 342096 - DNA, 33 bp, Homo sapien
acaaaaccaattaaaatatacacaggtcatgta

SEQ ID NO: 342097 - DNA, 33 bp, Homo sapien
ttggcaaacatttgtaagtcatctagaccaaga

SEQ ID NO: 342098 - DNA, 33 bp, Homo sapien
ttggcaaacatttgtacgtcatctagaccaaga

SEQ ID NO: 342099 - DNA, 33 bp, Homo sapien
agagcagaattgactgcaggcatcactgattga

SEQ ID NO: 342100 - DNA, 33 bp, Homo sapien
agagcagaattgactgtaggcatcactgattga

SEQ ID NO: 342101 - DNA, 33 bp, Homo sapien
aatcatttggtttctccaggttaaaagaatgca

SEQ ID NO: 342102 - DNA, 33 bp, Homo sapien
aatcatttggtttctcgaggttaaaagaatgca

SEQ ID NO: 342103 - DNA, 33 bp, Homo sapien
ctcatattattttgccagaaagcctaagaacga

SEQ ID NO: 342104 - DNA, 33 bp, Homo sapien
ctcatattattttgccggaaagcctaagaacga

SEQ ID NO: 342105 - DNA, 33 bp, Homo sapien
gatttgaagagcttcacattattctgaccctta

SEQ ID NO: 342106 - DNA, 33 bp, Homo sapien
gatttgaagagcttcatattattctgaccctta

SEQ ID NO: 342107 - DNA, 33 bp, Homo sapien
gattcaatttgggttggacgctctaaccttaga

SEQ ID NO: 342108 - DNA, 33 bp, Homo sapien
gattcaatttgggttgtacgctctaaccttaga

SEQ ID NO: 342109 - DNA, 33 bp, Homo sapien
acctgatttcacactagcttcctagttctgacc

SEQ ID NO: 342110 - DNA, 33 bp, Homo sapien
acctgatttcacactatcttcctagttctgacc

SEQ ID NO: 342111 - DNA, 33 bp, Homo sapien
atgcctttctagtcacaacaaatgacagcattt

SEQ ID NO: 342112 - DNA, 33 bp, Homo sapien
atgcctttctagtcacgacaaatgacagcattt

SEQ ID NO: 342113 - DNA, 33 bp, Homo sapien
gtgctgtgagatatggcccagcagaattagcag

SEQ ID NO: 342114 - DNA, 33 bp, Homo sapien
gtgctgtgagatatggtccagcagaattagcag

SEQ ID NO: 342115 - DNA, 33 bp, Homo sapien
aaaccggctggctctacgttgtaaagctaagac

SEQ ID NO: 342116 - DNA, 33 bp, Homo sapien
aaaccggctggctctatgttgtaaagctaagac

SEQ ID NO: 342117 - DNA, 33 bp, Homo sapien
atgattttaattgaaacgtttagcagcattaaa

SEQ ID NO: 342118 - DNA, 33 bp, Homo sapien
atgattttaattgaaatgtttagcagcattaaa

SEQ ID NO: 342119 - DNA, 33 bp, Homo sapien
taagagaggagaacccaggaatgaaggtcttgt

SEQ ID NO: 342120 - DNA, 33 bp, Homo sapien
taagagaggagaacccgggaatgaaggtcttgt

SEQ ID NO: 342121 - DNA, 33 bp, Homo sapien
tccaaatcaagtgacaaatctaatggtggctat

SEQ ID NO: 342122 - DNA, 33 bp, Homo sapien
tccaaatcaagtgacatatctaatggtggctat

SEQ ID NO: 342123 - DNA, 33 bp, Homo sapien
ttttgctactttgtaaagcacataatttgccag

SEQ ID NO: 342124 - DNA, 33 bp, Homo sapien
ttttgctactttgtaatgcacataatttgccag

SEQ ID NO: 342125 - DNA, 33 bp, Homo sapien
gtgcaaatccaggcaacatttgagagtccaata

SEQ ID NO: 342126 - DNA, 33 bp, Homo sapien
gtgcaaatccaggcaatatttgagagtccaata

SEQ ID NO: 342127 - DNA, 33 bp, Homo sapien
ccaacgctttgatgccacagtttgatttggaga

SEQ ID NO: 342128 - DNA, 33 bp, Homo sapien
ccaacgctttgatgccgcagtttgatttggaga

SEQ ID NO: 342129 - DNA, 33 bp, Homo sapien
gggttgggactttgaacaggaaagtggtgtgtc

SEQ ID NO: 342130 - DNA, 33 bp, Homo sapien
gggttgggactttgaagaggaaagtggtgtgtc

SEQ ID NO: 342131 - DNA, 33 bp, Homo sapien
gtaaatgtctttgctcaatctcaatattacgat

SEQ ID NO: 342132 - DNA, 33 bp, Homo sapien
gtaaatgtctttgctcgatctcaatattacgat

SEQ ID NO: 342133 - DNA, 33 bp, Homo sapien
aaactgcaattatttacctttcacaaattaact

SEQ ID NO: 342134 - DNA, 33 bp, Homo sapien
aaactgcaattatttatctttcacaaattaact

SEQ ID NO: 342135 - DNA, 33 bp, Homo sapien
cattaactgtaaactcaagtggcaggaatggag

SEQ ID NO: 342136 - DNA, 33 bp, Homo sapien
cattaactgtaaactcgagtggcaggaatggag

SEQ ID NO: 342137 - DNA, 33 bp, Homo sapien
ttacagcaatgaagcacatcaatgaagcatatc

SEQ ID NO: 342138 - DNA, 33 bp, Homo sapien
ttacagcaatgaagcatatcaatgaagcatatc

SEQ ID NO: 342139 - DNA, 33 bp, Homo sapien
ggcatggtagtcaagagagagaatggtctttca

SEQ ID NO: 342140 - DNA, 33 bp, Homo sapien
ggcatggtagtcaagatagagaatggtctttca

SEQ ID NO: 342141 - DNA, 33 bp, Homo sapien
ctcactaagaaaagaactgttggtactaaagtc

SEQ ID NO: 342142 - DNA, 33 bp, Homo sapien
ctcactaagaaaagaattgttggtactaaagtc

SEQ ID NO: 342143 - DNA, 33 bp, Homo sapien
gccaatattgtaaccaaattgattgattgactc

SEQ ID NO: 342144 - DNA, 33 bp, Homo sapien
gccaatattgtaaccacattgattgattgactc

SEQ ID NO: 342145 - DNA, 33 bp, Homo sapien
ttaatagatgactcgacggaaacacatatatta

SEQ ID NO: 342146 - DNA, 33 bp, Homo sapien
ttaatagatgactcgatggaaacacatatatta

SEQ ID NO: 342147 - DNA, 33 bp, Homo sapien
aaaagtacagcatttaccatagtttttatcaaa

SEQ ID NO: 342148 - DNA, 33 bp, Homo sapien
aaaagtacagcatttagcatagtttttatcaaa

SEQ ID NO: 342149 - DNA, 33 bp, Homo sapien
attattgaataagatgaaaaagatcaggtagta

SEQ ID NO: 342150 - DNA, 33 bp, Homo sapien
attattgaataagatgcaaaagatcaggtagta

SEQ ID NO: 342151 - DNA, 33 bp, Homo sapien
attgtgaacagtcatgaattttgtgttatctat

SEQ ID NO: 342152 - DNA, 33 bp, Homo sapien
attgtgaacagtcatgcattttgtgttatctat

SEQ ID NO: 342153 - DNA, 33 bp, Homo sapien
tttgtgctatgggaaaggacagtgctagatact

SEQ ID NO: 342154 - DNA, 33 bp, Homo sapien
tttgtgctatgggaaatgacagtgctagatact

SEQ ID NO: 342155 - DNA, 33 bp, Homo sapien
gctttttcaggctcacagaattgaataaaggct

SEQ ID NO: 342156 - DNA, 33 bp, Homo sapien
gctttttcaggctcacggaattgaataaaggct

SEQ ID NO: 342157 - DNA, 33 bp, Homo sapien
cctttgctcaaatccaacccatgacttctattg

SEQ ID NO: 342158 - DNA, 33 bp, Homo sapien
cctttgctcaaatccatcccatgacttctattg

SEQ ID NO: 342159 - DNA, 33 bp, Homo sapien
aattgatttttccaagccatttcagaggaagga

SEQ ID NO: 342160 - DNA, 33 bp, Homo sapien
aattgatttttccaagtcatttcagaggaagga

SEQ ID NO: 342161 - DNA, 33 bp, Homo sapien
ttcatccctactccaacagccaggcacctgatg

SEQ ID NO: 342162 - DNA, 33 bp, Homo sapien
ttcatccctactccaatagccaggcacctgatg

SEQ ID NO: 342163 - DNA, 33 bp, Homo sapien
acctaaatacgtaaaaagtaatatgttgcacta

SEQ ID NO: 342164 - DNA, 33 bp, Homo sapien
acctaaatacgtaaaatgtaatatgttgcacta

SEQ ID NO: 342165 - DNA, 33 bp, Homo sapien
aacagcaagggaggaaattacatgagtgtatca

SEQ ID NO: 342166 - DNA, 33 bp, Homo sapien
aacagcaagggaggaatttacatgagtgtatca

SEQ ID NO: 342167 - DNA, 33 bp, Homo sapien
cttctctgagacccagactaatggagaaatgat

SEQ ID NO: 342168 - DNA, 33 bp, Homo sapien
cttctctgagacccaggctaatggagaaatgat

SEQ ID NO: 342169 - DNA, 33 bp, Homo sapien
cagaatctcaacagggccatcaaaagttccagt

SEQ ID NO: 342170 - DNA, 33 bp, Homo sapien
cagaatctcaacagggtcatcaaaagttccagt

SEQ ID NO: 342171 - DNA, 33 bp, Homo sapien
tctgttctgtacaatacgttagctattagccac

SEQ ID NO: 342172 - DNA, 33 bp, Homo sapien
tctgttctgtacaatatgttagctattagccac

SEQ ID NO: 342173 - DNA, 33 bp, Homo sapien
tcgttatgacagaaaccagtagaatcaatgtca

SEQ ID NO: 342174 - DNA, 33 bp, Homo sapien
tcgttatgacagaaacgagtagaatcaatgtca

SEQ ID NO: 342175 - DNA, 33 bp, Homo sapien
agagaaaaggtttaaaatgtagagacaaatttc

SEQ ID NO: 342176 - DNA, 33 bp, Homo sapien
agagaaaaggtttaaagtgtagagacaaatttc

SEQ ID NO: 342177 - DNA, 33 bp, Homo sapien
actagagctaagagaacgtgaaagaaaatttct

SEQ ID NO: 342178 - DNA, 33 bp, Homo sapien
actagagctaagagaatgtgaaagaaaatttct

SEQ ID NO: 342179 - DNA, 33 bp, Homo sapien
tactatggactaaataaggactaattatcttta

SEQ ID NO: 342180 - DNA, 33 bp, Homo sapien
tactatggactaaatatggactaattatcttta

SEQ ID NO: 342181 - DNA, 33 bp, Homo sapien
acactgcaggtaaatggactgtgacaattgcat

SEQ ID NO: 342182 - DNA, 33 bp, Homo sapien
acactgcaggtaaatgtactgtgacaattgcat

SEQ ID NO: 342183 - DNA, 33 bp, Homo sapien
cttggctcacctaggaaaaaagcagatatcttg

SEQ ID NO: 342184 - DNA, 33 bp, Homo sapien
cttggctcacctaggacaaaagcagatatcttg

SEQ ID NO: 342185 - DNA, 33 bp, Homo sapien
gatatcttgggttatacggtgaaatctaaaaag

SEQ ID NO: 342186 - DNA, 33 bp, Homo sapien
gatatcttgggttatatggtgaaatctaaaaag

SEQ ID NO: 342187 - DNA, 33 bp, Homo sapien
agaaaaataagttcacagcatcagcttaaaagc

SEQ ID NO: 342188 - DNA, 33 bp, Homo sapien
agaaaaataagttcacggcatcagcttaaaagc

SEQ ID NO: 342189 - DNA, 33 bp, Homo sapien
gctgcaataaacacgactactgatttgataaca

SEQ ID NO: 342190 - DNA, 33 bp, Homo sapien
gctgcaataaacacgattactgatttgataaca

SEQ ID NO: 342191 - DNA, 33 bp, Homo sapien
tccacttattttaatgaagtgtgcatagcactg

SEQ ID NO: 342192 - DNA, 33 bp, Homo sapien
tccacttattttaatggagtgtgcatagcactg

SEQ ID NO: 342193 - DNA, 33 bp, Homo sapien
aactagtaggaacaccagagaagacattctaag

SEQ ID NO: 342194 - DNA, 33 bp, Homo sapien
aactagtaggaacaccggagaagacattctaag

SEQ ID NO: 342195 - DNA, 33 bp, Homo sapien
atgtttgctccactaacatgatgagtctaatgc

SEQ ID NO: 342196 - DNA, 33 bp, Homo sapien
atgtttgctccactaatatgatgagtctaatgc

SEQ ID NO: 342197 - DNA, 33 bp, Homo sapien
tctcatggtagcagtaaatgctggacagcaaaa

SEQ ID NO: 342198 - DNA, 33 bp, Homo sapien
tctcatggtagcagtagatgctggacagcaaaa

SEQ ID NO: 342199 - DNA, 33 bp, Homo sapien
aactgtgtatcagcccagcttgacattcatcac

SEQ ID NO: 342200 - DNA, 33 bp, Homo sapien
aactgtgtatcagcccggcttgacattcatcac

SEQ ID NO: 342201 - DNA, 33 bp, Homo sapien
ctcaaaacgaccctgccgaatagatgcgtgttt

SEQ ID NO: 342202 - DNA, 33 bp, Homo sapien
ctcaaaacgaccctgctgaatagatgcgtgttt

SEQ ID NO: 342203 - DNA, 33 bp, Homo sapien
attcagatatggaagacgacttagaatacacag

SEQ ID NO: 342204 - DNA, 33 bp, Homo sapien
attcagatatggaagatgacttagaatacacag

SEQ ID NO: 342205 - DNA, 33 bp, Homo sapien
acccagaatatgctcacgaaatttttatttctc

SEQ ID NO: 342206 - DNA, 33 bp, Homo sapien
acccagaatatgctcatgaaatttttatttctc

SEQ ID NO: 342207 - DNA, 33 bp, Homo sapien
tttcttttttggaaggaaaacaccattaacagc

SEQ ID NO: 342208 - DNA, 33 bp, Homo sapien
tttcttttttggaaggcaaacaccattaacagc

SEQ ID NO: 342209 - DNA, 33 bp, Homo sapien
taaatgcatatgcaacaatgtgccaagacctat

SEQ ID NO: 342210 - DNA, 33 bp, Homo sapien
taaatgcatatgcaaccatgtgccaagacctat

SEQ ID NO: 342211 - DNA, 33 bp, Homo sapien
ttttcgaagagctcatcaaaataagaaaataaa

SEQ ID NO: 342212 - DNA, 33 bp, Homo sapien
ttttcgaagagctcattaaaataagaaaataaa

SEQ ID NO: 342213 - DNA, 33 bp, Homo sapien
cacattttatcatttccgaaatctgagtgcctc

SEQ ID NO: 342214 - DNA, 33 bp, Homo sapien
cacattttatcatttctgaaatctgagtgcctc

SEQ ID NO: 342215 - DNA, 33 bp, Homo sapien
agtcagaaaactctcaggtgtaaatgtagactt

SEQ ID NO: 342216 - DNA, 33 bp, Homo sapien
agtcagaaaactctcatgtgtaaatgtagactt

SEQ ID NO: 342217 - DNA, 33 bp, Homo sapien
agttgctggaataaaacggaaacctacaaagaa

SEQ ID NO: 342218 - DNA, 33 bp, Homo sapien
agttgctggaataaaatggaaacctacaaagaa

SEQ ID NO: 342219 - DNA, 33 bp, Homo sapien
tgagggactgggtttcgcaatgattgtagagac

SEQ ID NO: 342220 - DNA, 33 bp, Homo sapien
tgagggactgggtttctcaatgattgtagagac

SEQ ID NO: 342221 - DNA, 33 bp, Homo sapien
ctactattgtccagtgccaagaaaatccatttt

SEQ ID NO: 342222 - DNA, 33 bp, Homo sapien
ctactattgtccagtgtcaagaaaatccatttt

SEQ ID NO: 342223 - DNA, 33 bp, Homo sapien
gagaataagctacaagaaatgaagacaattcaa

SEQ ID NO: 342224 - DNA, 33 bp, Homo sapien
gagaataagctacaaggaatgaagacaattcaa

SEQ ID NO: 342225 - DNA, 33 bp, Homo sapien
gtttaactgttggctgaagaagagtgatgagaa

SEQ ID NO: 342226 - DNA, 33 bp, Homo sapien
gtttaactgttggctggagaagagtgatgagaa

SEQ ID NO: 342227 - DNA, 33 bp, Homo sapien
ttttcacttataatcccgagttctttctaccac

SEQ ID NO: 342228 - DNA, 33 bp, Homo sapien
ttttcacttataatcctgagttctttctaccac

SEQ ID NO: 342229 - DNA, 33 bp, Homo sapien
gtatttcctattccaccacgacagttaccacaa

SEQ ID NO: 342230 - DNA, 33 bp, Homo sapien
gtatttcctattccactacgacagttaccacaa

SEQ ID NO: 342231 - DNA, 33 bp, Homo sapien
ggtataatatagtctggacacattgtgggtctt

SEQ ID NO: 342232 - DNA, 33 bp, Homo sapien
ggtataatatagtctgtacacattgtgggtctt

SEQ ID NO: 342233 - DNA, 33 bp, Homo sapien
cagtattcacttttaaatgttgtggctctgagt

SEQ ID NO: 342234 - DNA, 33 bp, Homo sapien
cagtattcacttttaactgttgtggctctgagt

SEQ ID NO: 342235 - DNA, 33 bp, Homo sapien
gaagatgcataagaacacctgtgtcctggttgt

SEQ ID NO: 342236 - DNA, 33 bp, Homo sapien
gaagatgcataagaacccctgtgtcctggttgt

SEQ ID NO: 342237 - DNA, 33 bp, Homo sapien
cataaaacatttttcccaacactctgctcatgc

SEQ ID NO: 342238 - DNA, 33 bp, Homo sapien
cataaaacatttttcctaacactctgctcatgc

SEQ ID NO: 342239 - DNA, 33 bp, Homo sapien
ggcctccagctagaaacgttgcttttccaggag

SEQ ID NO: 342240 - DNA, 33 bp, Homo sapien
ggcctccagctagaaatgttgcttttccaggag

SEQ ID NO: 342241 - DNA, 33 bp, Homo sapien
gacctttaaggttctaagattctgtgacggtat

SEQ ID NO: 342242 - DNA, 33 bp, Homo sapien
gacctttaaggttctatgattctgtgacggtat

SEQ ID NO: 342243 - DNA, 33 bp, Homo sapien
ctctacctattgatcaaagtggtatagctgggt

SEQ ID NO: 342244 - DNA, 33 bp, Homo sapien
ctctacctattgatcagagtggtatagctgggt

SEQ ID NO: 342245 - DNA, 33 bp, Homo sapien
catcagaaagccttaactcatcgattgttcatt

SEQ ID NO: 342246 - DNA, 33 bp, Homo sapien
catcagaaagccttaattcatcgattgttcatt

SEQ ID NO: 342247 - DNA, 33 bp, Homo sapien
aacttttccgcttgcacaagcccttaccagtct

SEQ ID NO: 342248 - DNA, 33 bp, Homo sapien
aacttttccgcttgcagaagcccttaccagtct

SEQ ID NO: 342249 - DNA, 33 bp, Homo sapien
tgaatactggttcctaacaacgttttagatgag

SEQ ID NO: 342250 - DNA, 33 bp, Homo sapien
tgaatactggttcctatcaacgttttagatgag

SEQ ID NO: 342251 - DNA, 33 bp, Homo sapien
ataaaaataatactccaaggtgctcatctaaaa

SEQ ID NO: 342252 - DNA, 33 bp, Homo sapien
ataaaaataatactccgaggtgctcatctaaaa

SEQ ID NO: 342253 - DNA, 33 bp, Homo sapien
ctccctgattcagaaaaacaaaatgcttaaaca

SEQ ID NO: 342254 - DNA, 33 bp, Homo sapien
ctccctgattcagaaagacaaaatgcttaaaca

SEQ ID NO: 342255 - DNA, 33 bp, Homo sapien
ttgttgtttatgtccacgttattttaattgtaa

SEQ ID NO: 342256 - DNA, 33 bp, Homo sapien
ttgttgtttatgtccaggttattttaattgtaa

SEQ ID NO: 342257 - DNA, 33 bp, Homo sapien
cactgtcttgcactaccacctttgctgcctgtt

SEQ ID NO: 342258 - DNA, 33 bp, Homo sapien
cactgtcttgcactactacctttgctgcctgtt

SEQ ID NO: 342259 - DNA, 33 bp, Homo sapien
acgtttctctccttccacatcttcatcatctga

SEQ ID NO: 342260 - DNA, 33 bp, Homo sapien
acgtttctctccttccgcatcttcatcatctga

SEQ ID NO: 342261 - DNA, 33 bp, Homo sapien
tgattggaaggaaatgaaagccctgctagattg

SEQ ID NO: 342262 - DNA, 33 bp, Homo sapien
tgattggaaggaaatggaagccctgctagattg

SEQ ID NO: 342263 - DNA, 33 bp, Homo sapien
tattccagggtagcccgctgttttatgattgga

SEQ ID NO: 342264 - DNA, 33 bp, Homo sapien
tattccagggtagccctctgttttatgattgga

SEQ ID NO: 342265 - DNA, 33 bp, Homo sapien
actgcagttaggagataaggcaagaaaagaatt

SEQ ID NO: 342266 - DNA, 33 bp, Homo sapien
actgcagttaggagatgaggcaagaaaagaatt

SEQ ID NO: 342267 - DNA, 33 bp, Homo sapien
tcttttcatgcggaaaatgccctaacacccatc

SEQ ID NO: 342268 - DNA, 33 bp, Homo sapien
tcttttcatgcggaaagtgccctaacacccatc

SEQ ID NO: 342269 - DNA, 33 bp, Homo sapien
atagttctaaggtaaaaataggatgaaataatt

SEQ ID NO: 342270 - DNA, 33 bp, Homo sapien
atagttctaaggtaaagataggatgaaataatt

SEQ ID NO: 342271 - DNA, 33 bp, Homo sapien
tcccatatacgaccggaaatgtgaaataagatt

SEQ ID NO: 342272 - DNA, 33 bp, Homo sapien
tcccatatacgaccggtaatgtgaaataagatt

SEQ ID NO: 342273 - DNA, 33 bp, Homo sapien
tctggttctttcttgcaattcaaacagtataaa

SEQ ID NO: 342274 - DNA, 33 bp, Homo sapien
tctggttctttcttgcgattcaaacagtataaa

SEQ ID NO: 342275 - DNA, 33 bp, Homo sapien
cctctagtgggagctcagaagaaagtaatgaag

SEQ ID NO: 342276 - DNA, 33 bp, Homo sapien
cctctagtgggagctcggaagaaagtaatgaag

SEQ ID NO: 342277 - DNA, 33 bp, Homo sapien
gatcagatctcataaccggtacatcacaaagtg

SEQ ID NO: 342278 - DNA, 33 bp, Homo sapien
gatcagatctcataactggtacatcacaaagtg

SEQ ID NO: 342279 - DNA, 33 bp, Homo sapien
cagaactgtgagacaacaaataggtgttgtttt

SEQ ID NO: 342280 - DNA, 33 bp, Homo sapien
cagaactgtgagacaataaataggtgttgtttt

SEQ ID NO: 342281 - DNA, 33 bp, Homo sapien
tttactcagaacaacagatttagatttcaaata

SEQ ID NO: 342282 - DNA, 33 bp, Homo sapien
tttactcagaacaacatatttagatttcaaata

SEQ ID NO: 342283 - DNA, 33 bp, Homo sapien
catgggaattatgagagctaaaatttgagattt

SEQ ID NO: 342284 - DNA, 33 bp, Homo sapien
catgggaattatgagatctaaaatttgagattt

SEQ ID NO: 342285 - DNA, 33 bp, Homo sapien
agttccaatggaaaaactgtagcaaaagccaga

SEQ ID NO: 342286 - DNA, 33 bp, Homo sapien
agttccaatggaaaaagtgtagcaaaagccaga

SEQ ID NO: 342287 - DNA, 33 bp, Homo sapien
aaaggaagaatacttacacttagtgaaataaat

SEQ ID NO: 342288 - DNA, 33 bp, Homo sapien
aaaggaagaatacttatacttagtgaaataaat

SEQ ID NO: 342289 - DNA, 33 bp, Homo sapien
tcatagagggcatagacaaaacaatccgccaag

SEQ ID NO: 342290 - DNA, 33 bp, Homo sapien
tcatagagggcatagataaaacaatccgccaag

SEQ ID NO: 342291 - DNA, 33 bp, Homo sapien
gaataggtctgtccacacatggaactaagtgtg

SEQ ID NO: 342292 - DNA, 33 bp, Homo sapien
gaataggtctgtccactcatggaactaagtgtg

SEQ ID NO: 342293 - DNA, 33 bp, Homo sapien
ggaactaagtgtgaaccctgtggagagaatagt

SEQ ID NO: 342294 - DNA, 33 bp, Homo sapien
ggaactaagtgtgaactctgtggagagaatagt

SEQ ID NO: 342295 - DNA, 33 bp, Homo sapien
ttaaatgcagcccaaaaaaaggttaaagcaagt

SEQ ID NO: 342296 - DNA, 33 bp, Homo sapien
ttaaatgcagcccaaacaaaggttaaagcaagt

SEQ ID NO: 342297 - DNA, 33 bp, Homo sapien
taagctcaacaacttcacaggaaggtcaaaaga

SEQ ID NO: 342298 - DNA, 33 bp, Homo sapien
taagctcaacaacttctcaggaaggtcaaaaga

SEQ ID NO: 342299 - DNA, 33 bp, Homo sapien
cagcgaggcagacatcagaaataatgcagaata

SEQ ID NO: 342300 - DNA, 33 bp, Homo sapien
cagcgaggcagacatcggaaataatgcagaata

SEQ ID NO: 342301 - DNA, 33 bp, Homo sapien
tataacttacattagacggataatttggctcta

SEQ ID NO: 342302 - DNA, 33 bp, Homo sapien
tataacttacattagatggataatttggctcta

SEQ ID NO: 342303 - DNA, 33 bp, Homo sapien
ctggatgtgtatttctcaagctcagcataccat

SEQ ID NO: 342304 - DNA, 33 bp, Homo sapien
ctggatgtgtatttcttaagctcagcataccat

SEQ ID NO: 342305 - DNA, 33 bp, Homo sapien
gtcatttaagaattacgcagggctgtgtagata

SEQ ID NO: 342306 - DNA, 33 bp, Homo sapien
gtcatttaagaattactcagggctgtgtagata

SEQ ID NO: 342307 - DNA, 33 bp, Homo sapien
tgcttgttacattttaagagtgacaagcaggtt

SEQ ID NO: 342308 - DNA, 33 bp, Homo sapien
tgcttgttacattttacgagtgacaagcaggtt

SEQ ID NO: 342309 - DNA, 33 bp, Homo sapien
aacgcaagttactagaacctagcccagacctac

SEQ ID NO: 342310 - DNA, 33 bp, Homo sapien
aacgcaagttactagaccctagcccagacctac

SEQ ID NO: 342311 - DNA, 33 bp, Homo sapien
cacccattcacacacacgcgattctggtcaaca

SEQ ID NO: 342312 - DNA, 33 bp, Homo sapien
cacccattcacacacatgcgattctggtcaaca

SEQ ID NO: 342313 - DNA, 33 bp, Homo sapien
gagctcttaagcaaacccatccaagctttcata

SEQ ID NO: 342314 - DNA, 33 bp, Homo sapien
gagctcttaagcaaacgcatccaagctttcata

SEQ ID NO: 342315 - DNA, 33 bp, Homo sapien
cctgatatttaccaacactgtgatactgggcaa

SEQ ID NO: 342316 - DNA, 33 bp, Homo sapien
cctgatatttaccaactctgtgatactgggcaa

SEQ ID NO: 342317 - DNA, 33 bp, Homo sapien
aagaatttgctgccacaggatttggagaagctc

SEQ ID NO: 342318 - DNA, 33 bp, Homo sapien
aagaatttgctgccacgggatttggagaagctc

SEQ ID NO: 342319 - DNA, 33 bp, Homo sapien
attgaatacttgggcactctgagacgtgcagaa

SEQ ID NO: 342320 - DNA, 33 bp, Homo sapien
attgaatacttgggcattctgagacgtgcagaa

SEQ ID NO: 342321 - DNA, 33 bp, Homo sapien
ccacccactacatgccaccttgtccttcaattg

SEQ ID NO: 342322 - DNA, 33 bp, Homo sapien
ccacccactacatgcctccttgtccttcaattg

SEQ ID NO: 342323 - DNA, 33 bp, Homo sapien
tggcagtcctgtagtacaactgttcagtgatgg

SEQ ID NO: 342324 - DNA, 33 bp, Homo sapien
tggcagtcctgtagtagaactgttcagtgatgg

SEQ ID NO: 342325 - DNA, 33 bp, Homo sapien
aatatctattctgatacgttaaatgtttatgac

SEQ ID NO: 342326 - DNA, 33 bp, Homo sapien
aatatctattctgatatgttaaatgtttatgac

SEQ ID NO: 342327 - DNA, 33 bp, Homo sapien
ctgcctaatatgtgaaaatcctgcttatccctg

SEQ ID NO: 342328 - DNA, 33 bp, Homo sapien
ctgcctaatatgtgaatatcctgcttatccctg

SEQ ID NO: 342329 - DNA, 33 bp, Homo sapien
gtgggaggtccttcaaacagacttctgtgttcc

SEQ ID NO: 342330 - DNA, 33 bp, Homo sapien
gtgggaggtccttcaagcagacttctgtgttcc

SEQ ID NO: 342331 - DNA, 33 bp, Homo sapien
gtattttggtagaacacgaagagaggaactggg

SEQ ID NO: 342332 - DNA, 33 bp, Homo sapien
gtattttggtagaacatgaagagaggaactggg

SEQ ID NO: 342333 - DNA, 33 bp, Homo sapien
attactgttattaggaaaagaaggctaggtaaa

SEQ ID NO: 342334 - DNA, 33 bp, Homo sapien
attactgttattaggacaagaaggctaggtaaa

SEQ ID NO: 342335 - DNA, 33 bp, Homo sapien
gtttaaaacaataagcaagtacaggatgaggga

SEQ ID NO: 342336 - DNA, 33 bp, Homo sapien
gtttaaaacaataagcgagtacaggatgaggga

SEQ ID NO: 342337 - DNA, 33 bp, Homo sapien
tttaggcgataacatcaatgtttgggtttgaga

SEQ ID NO: 342338 - DNA, 33 bp, Homo sapien
tttaggcgataacatccatgtttgggtttgaga

SEQ ID NO: 342339 - DNA, 33 bp, Homo sapien
atacactggaaacaagaccaaataggcacaata

SEQ ID NO: 342340 - DNA, 33 bp, Homo sapien
atacactggaaacaaggccaaataggcacaata

SEQ ID NO: 342341 - DNA, 33 bp, Homo sapien
agcctatttaaagaaaaatggtgcccctaacac

SEQ ID NO: 342342 - DNA, 33 bp, Homo sapien
agcctatttaaagaaacatggtgcccctaacac

SEQ ID NO: 342343 - DNA, 33 bp, Homo sapien
ctgcagtatgattttcaattttgtcaggattgc

SEQ ID NO: 342344 - DNA, 33 bp, Homo sapien
ctgcagtatgattttcgattttgtcaggattgc

SEQ ID NO: 342345 - DNA, 33 bp, Homo sapien
gaccatgcttttccacactttcttgattttaca

SEQ ID NO: 342346 - DNA, 33 bp, Homo sapien
gaccatgcttttccacgctttcttgattttaca

SEQ ID NO: 342347 - DNA, 33 bp, Homo sapien
tacttcgaaacccagacgttgtgatgattattc

SEQ ID NO: 342348 - DNA, 33 bp, Homo sapien
tacttcgaaacccagatgttgtgatgattattc

SEQ ID NO: 342349 - DNA, 33 bp, Homo sapien
gattactgtagcttgagagtacgctttgatatc

SEQ ID NO: 342350 - DNA, 33 bp, Homo sapien
gattactgtagcttgatagtacgctttgatatc

SEQ ID NO: 342351 - DNA, 33 bp, Homo sapien
attaaagaaatgcacaataagccacaatgagat

SEQ ID NO: 342352 - DNA, 33 bp, Homo sapien
attaaagaaatgcacagtaagccacaatgagat

SEQ ID NO: 342353 - DNA, 33 bp, Homo sapien
taagatgggtacaagacgggcaaaaagaatgtt

SEQ ID NO: 342354 - DNA, 33 bp, Homo sapien
taagatgggtacaagatgggcaaaaagaatgtt

SEQ ID NO: 342355 - DNA, 33 bp, Homo sapien
aagtctcttccatctacgagcctataaaatcaa

SEQ ID NO: 342356 - DNA, 33 bp, Homo sapien
aagtctcttccatctatgagcctataaaatcaa

SEQ ID NO: 342357 - DNA, 33 bp, Homo sapien
ctttcgatatttaaaaacaggacatcttacaca

SEQ ID NO: 342358 - DNA, 33 bp, Homo sapien
ctttcgatatttaaaagcaggacatcttacaca

SEQ ID NO: 342359 - DNA, 33 bp, Homo sapien
tccagtcaacaattaacatggctggactcaaac

SEQ ID NO: 342360 - DNA, 33 bp, Homo sapien
tccagtcaacaattaatatggctggactcaaac

SEQ ID NO: 342361 - DNA, 33 bp, Homo sapien
taaattgaattgtgaaattaactgagagtactt

SEQ ID NO: 342362 - DNA, 33 bp, Homo sapien
taaattgaattgtgaatttaactgagagtactt

SEQ ID NO: 342363 - DNA, 33 bp, Homo sapien
aatctctggtatgaagcagaaaaacattatgta

SEQ ID NO: 342364 - DNA, 33 bp, Homo sapien
aatctctggtatgaagtagaaaaacattatgta

SEQ ID NO: 342365 - DNA, 33 bp, Homo sapien
aaatgcatccaatcaaattgacttcctattcca

SEQ ID NO: 342366 - DNA, 33 bp, Homo sapien
aaatgcatccaatcaagttgacttcctattcca

SEQ ID NO: 342367 - DNA, 33 bp, Homo sapien
gttttaccactgcctacgggcaaagaattgaat

SEQ ID NO: 342368 - DNA, 33 bp, Homo sapien
gttttaccactgcctatgggcaaagaattgaat

SEQ ID NO: 342369 - DNA, 33 bp, Homo sapien
attgactcaccattccacatgtcttggttagcc

SEQ ID NO: 342370 - DNA, 33 bp, Homo sapien
attgactcaccattccgcatgtcttggttagcc

SEQ ID NO: 342371 - DNA, 33 bp, Homo sapien
aaggcaaaagaaaagacctgcagtgcacagaaa

SEQ ID NO: 342372 - DNA, 33 bp, Homo sapien
aaggcaaaagaaaagatctgcagtgcacagaaa

SEQ ID NO: 342373 - DNA, 33 bp, Homo sapien
tggaggcaatctaaataaagtccctgctttcat

SEQ ID NO: 342374 - DNA, 33 bp, Homo sapien
tggaggcaatctaaatgaagtccctgctttcat

SEQ ID NO: 342375 - DNA, 33 bp, Homo sapien
gagattcagactataaacaaacatgataacagt

SEQ ID NO: 342376 - DNA, 33 bp, Homo sapien
gagattcagactataagcaaacatgataacagt

SEQ ID NO: 342377 - DNA, 33 bp, Homo sapien
aaggaacctcaaaggccgaccttaccatgcccc

SEQ ID NO: 342378 - DNA, 33 bp, Homo sapien
aaggaacctcaaaggctgaccttaccatgcccc

SEQ ID NO: 342379 - DNA, 33 bp, Homo sapien
tttctaatttgtcaatgacagttttcccatgac

SEQ ID NO: 342380 - DNA, 33 bp, Homo sapien
tttctaatttgtcaattacagttttcccatgac

SEQ ID NO: 342381 - DNA, 33 bp, Homo sapien
aattttgagagcttcaatatttaaagagaaaaa

SEQ ID NO: 342382 - DNA, 33 bp, Homo sapien
aattttgagagcttcagtatttaaagagaaaaa

SEQ ID NO: 342383 - DNA, 33 bp, Homo sapien
tatcttatgtttgtcaatagtttagatttttta

SEQ ID NO: 342384 - DNA, 33 bp, Homo sapien
tatcttatgtttgtcagtagtttagatttttta

SEQ ID NO: 342385 - DNA, 33 bp, Homo sapien
tggcactgaatcagaacgtttggtggcaaaata

SEQ ID NO: 342386 - DNA, 33 bp, Homo sapien
tggcactgaatcagaatgtttggtggcaaaata

SEQ ID NO: 342387 - DNA, 33 bp, Homo sapien
aaatcagagtgcaagaaaacagatgttatgttc

SEQ ID NO: 342388 - DNA, 33 bp, Homo sapien
aaatcagagtgcaagacaacagatgttatgttc

SEQ ID NO: 342389 - DNA, 33 bp, Homo sapien
tttccaataaccaacccgccttgtgttctgtat

SEQ ID NO: 342390 - DNA, 33 bp, Homo sapien
tttccaataaccaacctgccttgtgttctgtat

SEQ ID NO: 342391 - DNA, 33 bp, Homo sapien
atagtcaaaatgggacacatgatgctaatagaa

SEQ ID NO: 342392 - DNA, 33 bp, Homo sapien
atagtcaaaatgggacgcatgatgctaatagaa

SEQ ID NO: 342393 - DNA, 33 bp, Homo sapien
gaagtgtcaccaaaaaagttaatcagataacat

SEQ ID NO: 342394 - DNA, 33 bp, Homo sapien
gaagtgtcaccaaaaatgttaatcagataacat

SEQ ID NO: 342395 - DNA, 33 bp, Homo sapien
atagttatctaaaaggcaagaatcgaatcaagt

SEQ ID NO: 342396 - DNA, 33 bp, Homo sapien
atagttatctaaaaggtaagaatcgaatcaagt

SEQ ID NO: 342397 - DNA, 33 bp, Homo sapien
ttcaactaatacaaaacaagagacaagagaaag

SEQ ID NO: 342398 - DNA, 33 bp, Homo sapien
ttcaactaatacaaaagaagagacaagagaaag

SEQ ID NO: 342399 - DNA, 33 bp, Homo sapien
ctggttattggaccacaagaacaagcagctgga

SEQ ID NO: 342400 - DNA, 33 bp, Homo sapien
ctggttattggaccacgagaacaagcagctgga

SEQ ID NO: 342401 - DNA, 33 bp, Homo sapien
actgcagaagtgacacacatttctaattgtgta

SEQ ID NO: 342402 - DNA, 33 bp, Homo sapien
actgcagaagtgacactcatttctaattgtgta

SEQ ID NO: 342403 - DNA, 33 bp, Homo sapien
tttattgaaaactgacggaaaatatgtccataa

SEQ ID NO: 342404 - DNA, 33 bp, Homo sapien
tttattgaaaactgactgaaaatatgtccataa

SEQ ID NO: 342405 - DNA, 33 bp, Homo sapien
tgactaaaagtcattacataatcatgcaataag

SEQ ID NO: 342406 - DNA, 33 bp, Homo sapien
tgactaaaagtcattatataatcatgcaataag

SEQ ID NO: 342407 - DNA, 33 bp, Homo sapien
taaccaggggtcagaactcccgaattcttagcc

SEQ ID NO: 342408 - DNA, 33 bp, Homo sapien
taaccaggggtcagaagtcccgaattcttagcc

SEQ ID NO: 342409 - DNA, 33 bp, Homo sapien
actttctttcttgaaaagcctcctttaccatcc

SEQ ID NO: 342410 - DNA, 33 bp, Homo sapien
actttctttcttgaaatgcctcctttaccatcc

SEQ ID NO: 342411 - DNA, 33 bp, Homo sapien
attagccttcaatacacagctcaatacctactt

SEQ ID NO: 342412 - DNA, 33 bp, Homo sapien
attagccttcaatacatagctcaatacctactt

SEQ ID NO: 342413 - DNA, 33 bp, Homo sapien
ctgctcaatgtacttaaaatagatgtgggggaa

SEQ ID NO: 342414 - DNA, 33 bp, Homo sapien
ctgctcaatgtacttacaatagatgtgggggaa

SEQ ID NO: 342415 - DNA, 33 bp, Homo sapien
ggtgtaatgcacaccacaaaactattgcagaat

SEQ ID NO: 342416 - DNA, 33 bp, Homo sapien
ggtgtaatgcacaccataaaactattgcagaat

SEQ ID NO: 342417 - DNA, 33 bp, Homo sapien
ctttggtatgctgcacgctctccaaacagtatg

SEQ ID NO: 342418 - DNA, 33 bp, Homo sapien
ctttggtatgctgcactctctccaaacagtatg

SEQ ID NO: 342419 - DNA, 33 bp, Homo sapien
gccactttgacaatacaggaagcattccacatg

SEQ ID NO: 342420 - DNA, 33 bp, Homo sapien
gccactttgacaatacgggaagcattccacatg

SEQ ID NO: 342421 - DNA, 33 bp, Homo sapien
ttataactcgtatggccatcctaaacacttatg

SEQ ID NO: 342422 - DNA, 33 bp, Homo sapien
ttataactcgtatggctatcctaaacacttatg

SEQ ID NO: 342423 - DNA, 33 bp, Homo sapien
attggctactctgctacccacctgtacactctg

SEQ ID NO: 342424 - DNA, 33 bp, Homo sapien
attggctactctgctatccacctgtacactctg

SEQ ID NO: 342425 - DNA, 33 bp, Homo sapien
aagttttgcagactcacattttcatagtactgc

SEQ ID NO: 342426 - DNA, 33 bp, Homo sapien
aagttttgcagactcatattttcatagtactgc

SEQ ID NO: 342427 - DNA, 33 bp, Homo sapien
gactatatattgcatacgaaaggaagtcaaatt

SEQ ID NO: 342428 - DNA, 33 bp, Homo sapien
gactatatattgcatatgaaaggaagtcaaatt

SEQ ID NO: 342429 - DNA, 33 bp, Homo sapien
tttacaaatgaagaaacggaagccaatgggggc

SEQ ID NO: 342430 - DNA, 33 bp, Homo sapien
tttacaaatgaagaaatggaagccaatgggggc

SEQ ID NO: 342431 - DNA, 33 bp, Homo sapien
atgtatacaagactgacgtagcctcagaatcca

SEQ ID NO: 342432 - DNA, 33 bp, Homo sapien
atgtatacaagactgatgtagcctcagaatcca

SEQ ID NO: 342433 - DNA, 33 bp, Homo sapien
caggtgtctccgaaaactatttttaaagaaaga

SEQ ID NO: 342434 - DNA, 33 bp, Homo sapien
caggtgtctccgaaaagtatttttaaagaaaga

SEQ ID NO: 342435 - DNA, 33 bp, Homo sapien
atgcatttggccaggaacaatactattcttgtt

SEQ ID NO: 342436 - DNA, 33 bp, Homo sapien
atgcatttggccaggagcaatactattcttgtt

SEQ ID NO: 342437 - DNA, 33 bp, Homo sapien
ggcagagctataggcacggaaaactattggcag

SEQ ID NO: 342438 - DNA, 33 bp, Homo sapien
ggcagagctataggcatggaaaactattggcag

SEQ ID NO: 342439 - DNA, 33 bp, Homo sapien
taatattcacaggtaccccattctaaattatag

SEQ ID NO: 342440 - DNA, 33 bp, Homo sapien
taatattcacaggtactccattctaaattatag

SEQ ID NO: 342441 - DNA, 33 bp, Homo sapien
ggctattctagttatcaacatcgaaattgtttt

SEQ ID NO: 342442 - DNA, 33 bp, Homo sapien
ggctattctagttatccacatcgaaattgtttt

SEQ ID NO: 342443 - DNA, 33 bp, Homo sapien
ttgtcctatcagattgaaaaatgtattatgtga

SEQ ID NO: 342444 - DNA, 33 bp, Homo sapien
ttgtcctatcagattgcaaaatgtattatgtga

SEQ ID NO: 342445 - DNA, 33 bp, Homo sapien
attatccttagcaaataaatgcagacacagaaa

SEQ ID NO: 342446 - DNA, 33 bp, Homo sapien
attatccttagcaaattaatgcagacacagaaa

SEQ ID NO: 342447 - DNA, 33 bp, Homo sapien
attttggtttattccacgtatttgctatcgtga

SEQ ID NO: 342448 - DNA, 33 bp, Homo sapien
attttggtttattccatgtatttgctatcgtga

SEQ ID NO: 342449 - DNA, 33 bp, Homo sapien
tagtggctaaaattataaagttacctggcagga

SEQ ID NO: 342450 - DNA, 33 bp, Homo sapien
tagtggctaaaattatgaagttacctggcagga

SEQ ID NO: 342451 - DNA, 33 bp, Homo sapien
tggaggcaatggctcacaggcagaatgaatatt

SEQ ID NO: 342452 - DNA, 33 bp, Homo sapien
tggaggcaatggctcagaggcagaatgaatatt

SEQ ID NO: 342453 - DNA, 33 bp, Homo sapien
tagaatcagaagggataatatgaagagatcaca

SEQ ID NO: 342454 - DNA, 33 bp, Homo sapien
tagaatcagaagggatgatatgaagagatcaca

SEQ ID NO: 342455 - DNA, 33 bp, Homo sapien
ggatttataagtttccacatcacaaaactctcc

SEQ ID NO: 342456 - DNA, 33 bp, Homo sapien
ggatttataagtttccgcatcacaaaactctcc

SEQ ID NO: 342457 - DNA, 33 bp, Homo sapien
ggacaaatagagaaaacattgtgtcactataga

SEQ ID NO: 342458 - DNA, 33 bp, Homo sapien
ggacaaatagagaaaatattgtgtcactataga

SEQ ID NO: 342459 - DNA, 33 bp, Homo sapien
cattaggctttcataacgaagtcaaaatgacca

SEQ ID NO: 342460 - DNA, 33 bp, Homo sapien
cattaggctttcataatgaagtcaaaatgacca

SEQ ID NO: 342461 - DNA, 33 bp, Homo sapien
caagttgaatttcatacgtcctagccagctcat

SEQ ID NO: 342462 - DNA, 33 bp, Homo sapien
caagttgaatttcatatgtcctagccagctcat

SEQ ID NO: 342463 - DNA, 33 bp, Homo sapien
cttgtggctctacttacaacattttcatgacta

SEQ ID NO: 342464 - DNA, 33 bp, Homo sapien
cttgtggctctacttataacattttcatgacta

SEQ ID NO: 342465 - DNA, 33 bp, Homo sapien
aaatgtttttataacaaaagtctcagtataagt

SEQ ID NO: 342466 - DNA, 33 bp, Homo sapien
aaatgtttttataacagaagtctcagtataagt

SEQ ID NO: 342467 - DNA, 33 bp, Homo sapien
ttgctgcacagatcaacgcaacacgtaagtatt

SEQ ID NO: 342468 - DNA, 33 bp, Homo sapien
ttgctgcacagatcaatgcaacacgtaagtatt

SEQ ID NO: 342469 - DNA, 33 bp, Homo sapien
caggaagcttctgtcacggttattttcactgct

SEQ ID NO: 342470 - DNA, 33 bp, Homo sapien
caggaagcttctgtcatggttattttcactgct

SEQ ID NO: 342471 - DNA, 33 bp, Homo sapien
aatctctgttgtggcaatgatttattatacagt

SEQ ID NO: 342472 - DNA, 33 bp, Homo sapien
aatctctgttgtggcactgatttattatacagt

SEQ ID NO: 342473 - DNA, 33 bp, Homo sapien
caaatattctcgtagaagaaatgaatcacacca

SEQ ID NO: 342474 - DNA, 33 bp, Homo sapien
caaatattctcgtagaggaaatgaatcacacca

SEQ ID NO: 342475 - DNA, 33 bp, Homo sapien
catcatccagcgataaagggaagataggctgag

SEQ ID NO: 342476 - DNA, 33 bp, Homo sapien
catcatccagcgataatgggaagataggctgag

SEQ ID NO: 342477 - DNA, 33 bp, Homo sapien
gagatgagaaatgagccgcggaaggtatttggc

SEQ ID NO: 342478 - DNA, 33 bp, Homo sapien
gagatgagaaatgagctgcggaaggtatttggc

SEQ ID NO: 342479 - DNA, 33 bp, Homo sapien
agttcttataactttacgcctggaatactgctt

SEQ ID NO: 342480 - DNA, 33 bp, Homo sapien
agttcttataactttatgcctggaatactgctt

SEQ ID NO: 342481 - DNA, 33 bp, Homo sapien
atctggaaactgtgcacaatctgtctaattggg

SEQ ID NO: 342482 - DNA, 33 bp, Homo sapien
atctggaaactgtgcataatctgtctaattggg

SEQ ID NO: 342483 - DNA, 33 bp, Homo sapien
tgcattagtaaatcaaccagacaaatcatttac

SEQ ID NO: 342484 - DNA, 33 bp, Homo sapien
tgcattagtaaatcaatcagacaaatcatttac

SEQ ID NO: 342485 - DNA, 33 bp, Homo sapien
atcatacactgtcttacgagatttcttctttgg

SEQ ID NO: 342486 - DNA, 33 bp, Homo sapien
atcatacactgtcttatgagatttcttctttgg

SEQ ID NO: 342487 - DNA, 33 bp, Homo sapien
aattgcacttttcttgaagacagcagccagcat

SEQ ID NO: 342488 - DNA, 33 bp, Homo sapien
aattgcacttttcttggagacagcagccagcat

SEQ ID NO: 342489 - DNA, 33 bp, Homo sapien
acaaaggttgagcaccggatacaacagctttca

SEQ ID NO: 342490 - DNA, 33 bp, Homo sapien
acaaaggttgagcacctgatacaacagctttca

SEQ ID NO: 342491 - DNA, 33 bp, Homo sapien
aatgagctactgaggaaccttgaataagctttg

SEQ ID NO: 342492 - DNA, 33 bp, Homo sapien
aatgagctactgaggagccttgaataagctttg

SEQ ID NO: 342493 - DNA, 33 bp, Homo sapien
tttacagggatggagaaaaaggtgtaatcttaa

SEQ ID NO: 342494 - DNA, 33 bp, Homo sapien
tttacagggatggagagaaaggtgtaatcttaa

SEQ ID NO: 342495 - DNA, 33 bp, Homo sapien
gacagaggaaaattagaccaaagacactgattt

SEQ ID NO: 342496 - DNA, 33 bp, Homo sapien
gacagaggaaaattagcccaaagacactgattt

SEQ ID NO: 342497 - DNA, 33 bp, Homo sapien
tgtctctcaatctccactgaacatcggacaaca

SEQ ID NO: 342498 - DNA, 33 bp, Homo sapien
tgtctctcaatctccattgaacatcggacaaca

SEQ ID NO: 342499 - DNA, 33 bp, Homo sapien
cattgctgtagcctcaaaactagtctccgtctc

SEQ ID NO: 342500 - DNA, 33 bp, Homo sapien
cattgctgtagcctcataactagtctccgtctc

SEQ ID NO: 342501 - DNA, 33 bp, Homo sapien
ctcatctcctgcgaggcaagtggtatgcctggt

SEQ ID NO: 342502 - DNA, 33 bp, Homo sapien
ctcatctcctgcgaggtaagtggtatgcctggt

SEQ ID NO: 342503 - DNA, 33 bp, Homo sapien
tacagtgaaacaaactaaactgaactgcaacca

SEQ ID NO: 342504 - DNA, 33 bp, Homo sapien
tacagtgaaacaaactgaactgaactgcaacca

SEQ ID NO: 342505 - DNA, 33 bp, Homo sapien
tcctgcagtgagaacacatattctgaatgcaca

SEQ ID NO: 342506 - DNA, 33 bp, Homo sapien
tcctgcagtgagaacatatattctgaatgcaca

SEQ ID NO: 342507 - DNA, 33 bp, Homo sapien
tgtctataccctgccaagtaaatgagagcccaa

SEQ ID NO: 342508 - DNA, 33 bp, Homo sapien
tgtctataccctgccaggtaaatgagagcccaa

SEQ ID NO: 342509 - DNA, 33 bp, Homo sapien
ttttgcaacctactcacctgatagagggctaat

SEQ ID NO: 342510 - DNA, 33 bp, Homo sapien
ttttgcaacctactcatctgatagagggctaat

SEQ ID NO: 342511 - DNA, 33 bp, Homo sapien
tccttgagggtgatgaagtatttctgaatttct

SEQ ID NO: 342512 - DNA, 33 bp, Homo sapien
tccttgagggtgatgacgtatttctgaatttct

SEQ ID NO: 342513 - DNA, 33 bp, Homo sapien
aaaacaggtctgtagacaaactgtgatgtacag

SEQ ID NO: 342514 - DNA, 33 bp, Homo sapien
aaaacaggtctgtagataaactgtgatgtacag

SEQ ID NO: 342515 - DNA, 33 bp, Homo sapien
actttccttatcttgaccaaatatccacaaggc

SEQ ID NO: 342516 - DNA, 33 bp, Homo sapien
actttccttatcttgatcaaatatccacaaggc

SEQ ID NO: 342517 - DNA, 33 bp, Homo sapien
attttaatagaccacaatatcattcatgggatt

SEQ ID NO: 342518 - DNA, 33 bp, Homo sapien
attttaatagaccacactatcattcatgggatt

SEQ ID NO: 342519 - DNA, 33 bp, Homo sapien
gaaagaggctgtggatcaaaggcagtttgaatt

SEQ ID NO: 342520 - DNA, 33 bp, Homo sapien
gaaagaggctgtggatgaaaggcagtttgaatt

SEQ ID NO: 342521 - DNA, 33 bp, Homo sapien
cttcagccaagtcttgcaatatgaaatcaatgt

SEQ ID NO: 342522 - DNA, 33 bp, Homo sapien
cttcagccaagtcttggaatatgaaatcaatgt

SEQ ID NO: 342523 - DNA, 33 bp, Homo sapien
tctagagttctaggtcacctctttctgctcctt

SEQ ID NO: 342524 - DNA, 33 bp, Homo sapien
tctagagttctaggtcgcctctttctgctcctt

SEQ ID NO: 342525 - DNA, 33 bp, Homo sapien
cgttatcaagtggtaacagagactaactatcac

SEQ ID NO: 342526 - DNA, 33 bp, Homo sapien
cgttatcaagtggtaatagagactaactatcac

SEQ ID NO: 342527 - DNA, 33 bp, Homo sapien
gcctgggcaacatgcaatctatactaaaaatgc

SEQ ID NO: 342528 - DNA, 33 bp, Homo sapien
gcctgggcaacatgcagtctatactaaaaatgc

SEQ ID NO: 342529 - DNA, 33 bp, Homo sapien
tgtagtcagcaattcagtatttggaagaatgtg

SEQ ID NO: 342530 - DNA, 33 bp, Homo sapien
tgtagtcagcaattcattatttggaagaatgtg

SEQ ID NO: 342531 - DNA, 33 bp, Homo sapien
tgaactgagaaaagacaattttgaggataaatc

SEQ ID NO: 342532 - DNA, 33 bp, Homo sapien
tgaactgagaaaagaccattttgaggataaatc

SEQ ID NO: 342533 - DNA, 33 bp, Homo sapien
cctaatagtggtcgataaatttgttgaataata

SEQ ID NO: 342534 - DNA, 33 bp, Homo sapien
cctaatagtggtcgatcaatttgttgaataata

SEQ ID NO: 342535 - DNA, 33 bp, Homo sapien
tccagaacaggctccaaaatactatatccagca

SEQ ID NO: 342536 - DNA, 33 bp, Homo sapien
tccagaacaggctccagaatactatatccagca

SEQ ID NO: 342537 - DNA, 33 bp, Homo sapien
agagagaggatatcgaccttaaatgggaaactt

SEQ ID NO: 342538 - DNA, 33 bp, Homo sapien
agagagaggatatcgagcttaaatgggaaactt

SEQ ID NO: 342539 - DNA, 33 bp, Homo sapien
aagtaaagaactttacaagctcatcaagtgata

SEQ ID NO: 342540 - DNA, 33 bp, Homo sapien
aagtaaagaactttactagctcatcaagtgata

SEQ ID NO: 342541 - DNA, 33 bp, Homo sapien
gcatataaacttctgccagatccttcttaatac

SEQ ID NO: 342542 - DNA, 33 bp, Homo sapien
gcatataaacttctgctagatccttcttaatac

SEQ ID NO: 342543 - DNA, 33 bp, Homo sapien
agaggtccaactgacaggagcgttaaaaagaaa

SEQ ID NO: 342544 - DNA, 33 bp, Homo sapien
agaggtccaactgacatgagcgttaaaaagaaa

SEQ ID NO: 342545 - DNA, 33 bp, Homo sapien
catgatttccctcaagactctcaatctattagg

SEQ ID NO: 342546 - DNA, 33 bp, Homo sapien
catgatttccctcaaggctctcaatctattagg

SEQ ID NO: 342547 - DNA, 33 bp, Homo sapien
gccttttgagttcttacgtggttccatataaat

SEQ ID NO: 342548 - DNA, 33 bp, Homo sapien
gccttttgagttcttatgtggttccatataaat

SEQ ID NO: 342549 - DNA, 33 bp, Homo sapien
ataaaagcatgagataagaattaactacggaag

SEQ ID NO: 342550 - DNA, 33 bp, Homo sapien
ataaaagcatgagatacgaattaactacggaag

SEQ ID NO: 342551 - DNA, 33 bp, Homo sapien
ataacaccattggtcacgcaacttttacagtag

SEQ ID NO: 342552 - DNA, 33 bp, Homo sapien
ataacaccattggtcatgcaacttttacagtag

SEQ ID NO: 342553 - DNA, 33 bp, Homo sapien
atgaagaagcaactcaaaactaatcttcagtgc

SEQ ID NO: 342554 - DNA, 33 bp, Homo sapien
atgaagaagcaactcagaactaatcttcagtgc

SEQ ID NO: 342555 - DNA, 33 bp, Homo sapien
ttctcttgcttgaaaacattgtgtgattccaca

SEQ ID NO: 342556 - DNA, 33 bp, Homo sapien
ttctcttgcttgaaaatattgtgtgattccaca

SEQ ID NO: 342557 - DNA, 33 bp, Homo sapien
tacctatctcagaagggatacaacttaaaactt

SEQ ID NO: 342558 - DNA, 33 bp, Homo sapien
tacctatctcagaaggtatacaacttaaaactt

SEQ ID NO: 342559 - DNA, 33 bp, Homo sapien
aaaggagagtgaataaggttctaacacaaaagt

SEQ ID NO: 342560 - DNA, 33 bp, Homo sapien
aaaggagagtgaataatgttctaacacaaaagt

SEQ ID NO: 342561 - DNA, 33 bp, Homo sapien
aggatttcaaaaggcactgaagcttgaaagagc

SEQ ID NO: 342562 - DNA, 33 bp, Homo sapien
aggatttcaaaaggcattgaagcttgaaagagc

SEQ ID NO: 342563 - DNA, 33 bp, Homo sapien
tgaacctgttgtgagacgatatgtgccttctaa

SEQ ID NO: 342564 - DNA, 33 bp, Homo sapien
tgaacctgttgtgagatgatatgtgccttctaa

SEQ ID NO: 342565 - DNA, 33 bp, Homo sapien
ggctttttcaaaggctaacagagtcaaaggaat

SEQ ID NO: 342566 - DNA, 33 bp, Homo sapien
ggctttttcaaaggcttacagagtcaaaggaat

SEQ ID NO: 342567 - DNA, 33 bp, Homo sapien
agctgcgcttaccttacctatacttgccaacct

SEQ ID NO: 342568 - DNA, 33 bp, Homo sapien
agctgcgcttaccttagctatacttgccaacct

SEQ ID NO: 342569 - DNA, 33 bp, Homo sapien
catgacacagttcttacgtttgcaaaagtatat

SEQ ID NO: 342570 - DNA, 33 bp, Homo sapien
catgacacagttcttaggtttgcaaaagtatat

SEQ ID NO: 342571 - DNA, 33 bp, Homo sapien
accagtggagttctaactacaaatgtcaaggga

SEQ ID NO: 342572 - DNA, 33 bp, Homo sapien
accagtggagttctaattacaaatgtcaaggga

SEQ ID NO: 342573 - DNA, 33 bp, Homo sapien
ggactttggatgaaaactggcttgttcacattt

SEQ ID NO: 342574 - DNA, 33 bp, Homo sapien
ggactttggatgaaaattggcttgttcacattt

SEQ ID NO: 342575 - DNA, 33 bp, Homo sapien
tatcttggtttgctcaaggctttcctggttcta

SEQ ID NO: 342576 - DNA, 33 bp, Homo sapien
tatcttggtttgctcagggctttcctggttcta

SEQ ID NO: 342577 - DNA, 33 bp, Homo sapien
agaactttattccagacatcagagtcttatacc

SEQ ID NO: 342578 - DNA, 33 bp, Homo sapien
agaactttattccagatatcagagtcttatacc

SEQ ID NO: 342579 - DNA, 33 bp, Homo sapien
tcatttttaaactttaccaccagagtgctttgc

SEQ ID NO: 342580 - DNA, 33 bp, Homo sapien
tcatttttaaactttatcaccagagtgctttgc

SEQ ID NO: 342581 - DNA, 33 bp, Homo sapien
aagaaggtaatgaaaaagaagtacagtgggtgt

SEQ ID NO: 342582 - DNA, 33 bp, Homo sapien
aagaaggtaatgaaaaggaagtacagtgggtgt

SEQ ID NO: 342583 - DNA, 33 bp, Homo sapien
aaactttatcagcaggaatctattacacttgtc

SEQ ID NO: 342584 - DNA, 33 bp, Homo sapien
aaactttatcagcagggatctattacacttgtc

SEQ ID NO: 342585 - DNA, 33 bp, Homo sapien
tagcatctctaaatcacattgtggaccagtggc

SEQ ID NO: 342586 - DNA, 33 bp, Homo sapien
tagcatctctaaatcatattgtggaccagtggc

SEQ ID NO: 342587 - DNA, 33 bp, Homo sapien
aataatagcaattttaaagtctgtagatacaga

SEQ ID NO: 342588 - DNA, 33 bp, Homo sapien
aataatagcaattttacagtctgtagatacaga

SEQ ID NO: 342589 - DNA, 33 bp, Homo sapien
aaatatttaatagctcacttacttggggaaagg

SEQ ID NO: 342590 - DNA, 33 bp, Homo sapien
aaatatttaatagctcgcttacttggggaaagg

SEQ ID NO: 342591 - DNA, 33 bp, Homo sapien
aggcaagccaaaatgacgcaagaacccttcctc

SEQ ID NO: 342592 - DNA, 33 bp, Homo sapien
aggcaagccaaaatgatgcaagaacccttcctc

SEQ ID NO: 342593 - DNA, 33 bp, Homo sapien
tttatttgatatttgcaaggagagtataagcaa

SEQ ID NO: 342594 - DNA, 33 bp, Homo sapien
tttatttgatatttgcgaggagagtataagcaa

SEQ ID NO: 342595 - DNA, 33 bp, Homo sapien
tagtactctaaagtaacctgatgatctctttgg

SEQ ID NO: 342596 - DNA, 33 bp, Homo sapien
tagtactctaaagtaatctgatgatctctttgg

SEQ ID NO: 342597 - DNA, 33 bp, Homo sapien
cattaactcctagataccttaactgttgctgta

SEQ ID NO: 342598 - DNA, 33 bp, Homo sapien
cattaactcctagatatcttaactgttgctgta

SEQ ID NO: 342599 - DNA, 33 bp, Homo sapien
atctatctactgcggaaaatgaaaaaaattact

SEQ ID NO: 342600 - DNA, 33 bp, Homo sapien
atctatctactgcggagaatgaaaaaaattact

SEQ ID NO: 342601 - DNA, 33 bp, Homo sapien
tccctctaatgtcaagacctattcacctgaacc

SEQ ID NO: 342602 - DNA, 33 bp, Homo sapien
tccctctaatgtcaaggcctattcacctgaacc

SEQ ID NO: 342603 - DNA, 33 bp, Homo sapien
tgttttgatataggtacgcaatgtgggctgatt

SEQ ID NO: 342604 - DNA, 33 bp, Homo sapien
tgttttgatataggtaggcaatgtgggctgatt

SEQ ID NO: 342605 - DNA, 33 bp, Homo sapien
acgactcatcttcttgaatagttgaaaatttaa

SEQ ID NO: 342606 - DNA, 33 bp, Homo sapien
acgactcatcttcttggatagttgaaaatttaa

SEQ ID NO: 342607 - DNA, 33 bp, Homo sapien
cactgataagaagataaaagtaggctgtaatta

SEQ ID NO: 342608 - DNA, 33 bp, Homo sapien
cactgataagaagatacaagtaggctgtaatta

SEQ ID NO: 342609 - DNA, 33 bp, Homo sapien
tgcgacagctcgtcaacagtgacatttaatatg

SEQ ID NO: 342610 - DNA, 33 bp, Homo sapien
tgcgacagctcgtcaatagtgacatttaatatg

SEQ ID NO: 342611 - DNA, 33 bp, Homo sapien
ccccttactgagaatgaacacttcctagaagcc

SEQ ID NO: 342612 - DNA, 33 bp, Homo sapien
ccccttactgagaatggacacttcctagaagcc

SEQ ID NO: 342613 - DNA, 33 bp, Homo sapien
gaagaaacaagtagtcaaagctagtgagaggtg

SEQ ID NO: 342614 - DNA, 33 bp, Homo sapien
gaagaaacaagtagtccaagctagtgagaggtg

SEQ ID NO: 342615 - DNA, 33 bp, Homo sapien
aaacagaatctgctaaggaaaggaagaaaagta

SEQ ID NO: 342616 - DNA, 33 bp, Homo sapien
aaacagaatctgctaatgaaaggaagaaaagta

SEQ ID NO: 342617 - DNA, 33 bp, Homo sapien
taatccttggcataacagatttttcattagcta

SEQ ID NO: 342618 - DNA, 33 bp, Homo sapien
taatccttggcataaccgatttttcattagcta

SEQ ID NO: 342619 - DNA, 33 bp, Homo sapien
tcatattgatcagaaagaggtcctacaagtatg

SEQ ID NO: 342620 - DNA, 33 bp, Homo sapien
tcatattgatcagaaataggtcctacaagtatg

SEQ ID NO: 342621 - DNA, 33 bp, Homo sapien
cctataaaaaccctaaggctctagccagcaaac

SEQ ID NO: 342622 - DNA, 33 bp, Homo sapien
cctataaaaaccctaatgctctagccagcaaac

SEQ ID NO: 342623 - DNA, 33 bp, Homo sapien
ctctgtgatgactgggaaacctctagaaaatgc

SEQ ID NO: 342624 - DNA, 33 bp, Homo sapien
ctctgtgatgactgggcaacctctagaaaatgc

SEQ ID NO: 342625 - DNA, 33 bp, Homo sapien
atgtgctcgcataacactatgttaaaggtacta

SEQ ID NO: 342626 - DNA, 33 bp, Homo sapien
atgtgctcgcataacagtatgttaaaggtacta

SEQ ID NO: 342627 - DNA, 33 bp, Homo sapien
tccagcatactgcagacaccgtccgcgtgagag

SEQ ID NO: 342628 - DNA, 33 bp, Homo sapien
tccagcatactgcagataccgtccgcgtgagag

SEQ ID NO: 342629 - DNA, 33 bp, Homo sapien
tcttcacatagtagaaagggcaagtgagctccc

SEQ ID NO: 342630 - DNA, 33 bp, Homo sapien
tcttcacatagtagaaggggcaagtgagctccc

SEQ ID NO: 342631 - DNA, 33 bp, Homo sapien
tctggatgagcactgcaaattgtcacatcaagt

SEQ ID NO: 342632 - DNA, 33 bp, Homo sapien
tctggatgagcactgcgaattgtcacatcaagt

SEQ ID NO: 342633 - DNA, 33 bp, Homo sapien
aaaaggcacagcaaaaactaggcaaaatagtca

SEQ ID NO: 342634 - DNA, 33 bp, Homo sapien
aaaaggcacagcaaaagctaggcaaaatagtca

SEQ ID NO: 342635 - DNA, 33 bp, Homo sapien
ttggagttctaaaatcacaagatccatactcat

SEQ ID NO: 342636 - DNA, 33 bp, Homo sapien
ttggagttctaaaatcgcaagatccatactcat

SEQ ID NO: 342637 - DNA, 33 bp, Homo sapien
gctaagatctttcagaaaaggacaaagaaatac

SEQ ID NO: 342638 - DNA, 33 bp, Homo sapien
gctaagatctttcagagaaggacaaagaaatac

SEQ ID NO: 342639 - DNA, 33 bp, Homo sapien
tcttcctagctggggagatgctctacttggagt

SEQ ID NO: 342640 - DNA, 33 bp, Homo sapien
tcttcctagctggggatatgctctacttggagt

SEQ ID NO: 342641 - DNA, 33 bp, Homo sapien
gagacacattggctaaagtccatctctagttgc

SEQ ID NO: 342642 - DNA, 33 bp, Homo sapien
gagacacattggctaacgtccatctctagttgc

SEQ ID NO: 342643 - DNA, 33 bp, Homo sapien
taataagggaaaatcaaatcccattccatccta

SEQ ID NO: 342644 - DNA, 33 bp, Homo sapien
taataagggaaaatcagatcccattccatccta

SEQ ID NO: 342645 - DNA, 33 bp, Homo sapien
ttggcaatcaaaatcaagaaaaacggtgtataa

SEQ ID NO: 342646 - DNA, 33 bp, Homo sapien
ttggcaatcaaaatcatgaaaaacggtgtataa

SEQ ID NO: 342647 - DNA, 33 bp, Homo sapien
tggaatatctgtaagacgcttgataattacaat

SEQ ID NO: 342648 - DNA, 33 bp, Homo sapien
tggaatatctgtaagatgcttgataattacaat

SEQ ID NO: 342649 - DNA, 33 bp, Homo sapien
gtctaaggagtgaaaacaaggcagatagaaata

SEQ ID NO: 342650 - DNA, 33 bp, Homo sapien
gtctaaggagtgaaaataaggcagatagaaata

SEQ ID NO: 342651 - DNA, 33 bp, Homo sapien
aattgtcaatgaatcacaaaacctaaggcattc

SEQ ID NO: 342652 - DNA, 33 bp, Homo sapien
aattgtcaatgaatcataaaacctaaggcattc

SEQ ID NO: 342653 - DNA, 33 bp, Homo sapien
gattcattgacaattacacttcagtgacaataa

SEQ ID NO: 342654 - DNA, 33 bp, Homo sapien
gattcattgacaattatacttcagtgacaataa

SEQ ID NO: 342655 - DNA, 33 bp, Homo sapien
atgattaaaaacaatgcattaacattaaaacat

SEQ ID NO: 342656 - DNA, 33 bp, Homo sapien
atgattaaaaacaatggattaacattaaaacat

SEQ ID NO: 342657 - DNA, 33 bp, Homo sapien
tctgatctctaagatacaaaaccttgaattttt

SEQ ID NO: 342658 - DNA, 33 bp, Homo sapien
tctgatctctaagatataaaaccttgaattttt

SEQ ID NO: 342659 - DNA, 33 bp, Homo sapien
gattcaaatgagtcggcagtggaagcagaaaaa

SEQ ID NO: 342660 - DNA, 33 bp, Homo sapien
gattcaaatgagtcggtagtggaagcagaaaaa

SEQ ID NO: 342661 - DNA, 33 bp, Homo sapien
agcttccactacttccaaaactgcttccattat

SEQ ID NO: 342662 - DNA, 33 bp, Homo sapien
agcttccactacttccgaaactgcttccattat

SEQ ID NO: 342663 - DNA, 33 bp, Homo sapien; identical to SEQ ID NO: 342661

SEQ ID NO: 342664 - DNA, 33 bp, Homo sapien; identical to SEQ ID NO: 342662

SEQ ID NO: 342665 - DNA, 33 bp, Homo sapien
tgccaatcacagagataagataaggcatccaga

SEQ ID NO: 342666 - DNA, 33 bp, Homo sapien
tgccaatcacagagatgagataaggcatccaga

SEQ ID NO: 342667 - DNA, 33 bp, Homo sapien
ttcagctcactccatcaagatcagtgacttcga

SEQ ID NO: 342668 - DNA, 33 bp, Homo sapien
ttcagctcactccatcgagatcagtgacttcga

SEQ ID NO: 342669 - DNA, 33 bp, Homo sapien
gtttcaggcaaggcatcatattatctggagaag

SEQ ID NO: 342670 - DNA, 33 bp, Homo sapien
gtttcaggcaaggcattatattatctggagaag

SEQ ID NO: 342671 - DNA, 33 bp, Homo sapien
tcgatttgatagaaaaatagagacagctgcagt

SEQ ID NO: 342672 - DNA, 33 bp, Homo sapien
tcgatttgatagaaaagtagagacagctgcagt

SEQ ID NO: 342673 - DNA, 33 bp, Homo sapien
atttttcacaattacaaataaggctgcaatgaa

SEQ ID NO: 342674 - DNA, 33 bp, Homo sapien
atttttcacaattacagataaggctgcaatgaa

SEQ ID NO: 342675 - DNA, 33 bp, Homo sapien
agcctagggaaaaccaagacttgcaatctttaa

SEQ ID NO: 342676 - DNA, 33 bp, Homo sapien
agcctagggaaaaccaggacttgcaatctttaa

SEQ ID NO: 342677 - DNA, 33 bp, Homo sapien
atgcctagtttgctcaccgttgttataaaagaa

SEQ ID NO: 342678 - DNA, 33 bp, Homo sapien
atgcctagtttgctcagcgttgttataaaagaa

SEQ ID NO: 342679 - DNA, 33 bp, Homo sapien
tccttgcacgcatagaacatataatgattaagc

SEQ ID NO: 342680 - DNA, 33 bp, Homo sapien
tccttgcacgcatagagcatataatgattaagc

SEQ ID NO: 342681 - DNA, 33 bp, Homo sapien
cctggttgagtttatagatacagacggcaacca

SEQ ID NO: 342682 - DNA, 33 bp, Homo sapien
cctggttgagtttatatatacagacggcaacca

SEQ ID NO: 342683 - DNA, 33 bp, Homo sapien
aaatgagccaacggagcaaagtgaaagcaaagc

SEQ ID NO: 342684 - DNA, 33 bp, Homo sapien
aaatgagccaacggagtaaagtgaaagcaaagc

SEQ ID NO: 342685 - DNA, 33 bp, Homo sapien
ctctactacctccaacgagttctagccacaggc

SEQ ID NO: 342686 - DNA, 33 bp, Homo sapien
ctctactacctccaactagttctagccacaggc

SEQ ID NO: 342687 - DNA, 33 bp, Homo sapien
atttgagtgagaggaaagtgaatgaggtaaagt

SEQ ID NO: 342688 - DNA, 33 bp, Homo sapien
atttgagtgagaggaacgtgaatgaggtaaagt

SEQ ID NO: 342689 - DNA, 33 bp, Homo sapien
tctctgtgctagatctaaagtggatatgagtaa

SEQ ID NO: 342690 - DNA, 33 bp, Homo sapien
tctctgtgctagatctgaagtggatatgagtaa

SEQ ID NO: 342691 - DNA, 33 bp, Homo sapien
acactgaccctgttagcccatagcctgcaaaat

SEQ ID NO: 342692 - DNA, 33 bp, Homo sapien
acactgaccctgttagtccatagcctgcaaaat

SEQ ID NO: 342693 - DNA, 33 bp, Homo sapien
gctcattctctctctccaaagcaatgccattgc

SEQ ID NO: 342694 - DNA, 33 bp, Homo sapien
gctcattctctctctctaaagcaatgccattgc

SEQ ID NO: 342695 - DNA, 33 bp, Homo sapien
cggagataaacagagaaagctgcctggagactg

SEQ ID NO: 342696 - DNA, 33 bp, Homo sapien
cggagataaacagagagagctgcctggagactg

SEQ ID NO: 342697 - DNA, 33 bp, Homo sapien
ctctcttctgtagacacatactttgcctctcct

SEQ ID NO: 342698 - DNA, 33 bp, Homo sapien
ctctcttctgtagacatatactttgcctctcct

SEQ ID NO: 342699 - DNA, 33 bp, Homo sapien
catagttattaaaatcccaacaaatgataacag

SEQ ID NO: 342700 - DNA, 33 bp, Homo sapien
catagttattaaaatcgcaacaaatgataacag

SEQ ID NO: 342701 - DNA, 33 bp, Homo sapien
gccctgtcctcatgtcccctgatggtgcatggg

SEQ ID NO: 342702 - DNA, 33 bp, Homo sapien
gccctgtcctcatgtctcctgatggtgcatggg

SEQ ID NO: 342703 - DNA, 33 bp, Homo sapien
tcctgcacatcaccacggctgcctatacccaca

SEQ ID NO: 342704 - DNA, 33 bp, Homo sapien
tcctgcacatcaccactgctgcctatacccaca

SEQ ID NO: 342705 - DNA, 33 bp, Homo sapien
tacctaaatgtttagaacacttctgacaaatag

SEQ ID NO: 342706 - DNA, 33 bp, Homo sapien
tacctaaatgtttagagcacttctgacaaatag

SEQ ID NO: 342707 - DNA, 33 bp, Homo sapien
aattttacactgaaaaagcataagtgaacacag

SEQ ID NO: 342708 - DNA, 33 bp, Homo sapien
aattttacactgaaaacgcataagtgaacacag

SEQ ID NO: 342709 - DNA, 33 bp, Homo sapien
cccattaggttaaaagcaagcaatgtgactgaa

SEQ ID NO: 342710 - DNA, 33 bp, Homo sapien
cccattaggttaaaagtaagcaatgtgactgaa

SEQ ID NO: 342711 - DNA, 33 bp, Homo sapien
atagcctatcttttcactaggaggtagggtcat

SEQ ID NO: 342712 - DNA, 33 bp, Homo sapien
atagcctatcttttcattaggaggtagggtcat

SEQ ID NO: 342713 - DNA, 33 bp, Homo sapien
attagaaacctgaatgaaaaatttggcctctgt

SEQ ID NO: 342714 - DNA, 33 bp, Homo sapien
attagaaacctgaatgtaaaatttggcctctgt

SEQ ID NO: 342715 - DNA, 33 bp, Homo sapien
ttcatagttaatgcaaagtatcagtccaaggag

SEQ ID NO: 342716 - DNA, 33 bp, Homo sapien
ttcatagttaatgcaaggtatcagtccaaggag

SEQ ID NO: 342717 - DNA, 33 bp, Homo sapien
aaacatggccatgtaacatctgtaacacaatta

SEQ ID NO: 342718 - DNA, 33 bp, Homo sapien
aaacatggccatgtaatatctgtaacacaatta

SEQ ID NO: 342719 - DNA, 33 bp, Homo sapien
tgtccaggaggattgaaaacaatatggtatcca

SEQ ID NO: 342720 - DNA, 33 bp, Homo sapien
tgtccaggaggattgacaacaatatggtatcca

SEQ ID NO: 342721 - DNA, 33 bp, Homo sapien
cactgtccagtgtgtaaaatatggtttgataca

SEQ ID NO: 342722 - DNA, 33 bp, Homo sapien
cactgtccagtgtgtagaatatggtttgataca

SEQ ID NO: 342723 - DNA, 33 bp, Homo sapien
tgagtatcactgtttaagaaatcatgtttctgg

SEQ ID NO: 342724 - DNA, 33 bp, Homo sapien
tgagtatcactgtttacgaaatcatgtttctgg

SEQ ID NO: 342725 - DNA, 33 bp, Homo sapien
acttttcaaagtaggccccagaaatcccaggga

SEQ ID NO: 342726 - DNA, 33 bp, Homo sapien
acttttcaaagtaggctccagaaatcccaggga

SEQ ID NO: 342727 - DNA, 33 bp, Homo sapien
aaacaatgggagaaagacattgcaggcctatag

SEQ ID NO: 342728 - DNA, 33 bp, Homo sapien
aaacaatgggagaaaggcattgcaggcctatag

SEQ ID NO: 342729 - DNA, 33 bp, Homo sapien
attttaaaataagagcacaagtacgtactttcc

SEQ ID NO: 342730 - DNA, 33 bp, Homo sapien
attttaaaataagagcgcaagtacgtactttcc

SEQ ID NO: 342731 - DNA, 33 bp, Homo sapien
aaatggccaagcatagaaactgaagacatttct

SEQ ID NO: 342732 - DNA, 33 bp, Homo sapien
aaatggccaagcataggaactgaagacatttct

SEQ ID NO: 342733 - DNA, 33 bp, Homo sapien
gatctggaatcctatccagcaggtctatgtcac

SEQ ID NO: 342734 - DNA, 33 bp, Homo sapien
gatctggaatcctatctagcaggtctatgtcac

SEQ ID NO: 342735 - DNA, 33 bp, Homo sapien
atcaaaatcccgaatcccactttctcagaatac

SEQ ID NO: 342736 - DNA, 33 bp, Homo sapien
atcaaaatcccgaatctcactttctcagaatac

SEQ ID NO: 342737 - DNA, 33 bp, Homo sapien
agatgactgtcacaaaagggcacccaggagcca

SEQ ID NO: 342738 - DNA, 33 bp, Homo sapien
agatgactgtcacaaacgggcacccaggagcca

SEQ ID NO: 342739 - DNA, 33 bp, Homo sapien
tccttaggccccgagaacataacggcattccac

SEQ ID NO: 342740 - DNA, 33 bp, Homo sapien
tccttaggccccgagagcataacggcattccac

SEQ ID NO: 342741 - DNA, 33 bp, Homo sapien
acttggatagtcttaccggagtgaaagaaatag

SEQ ID NO: 342742 - DNA, 33 bp, Homo sapien
acttggatagtcttactggagtgaaagaaatag

SEQ ID NO: 342743 - DNA, 33 bp, Homo sapien
caagggaggagctagcaagggcaagacaggagg

SEQ ID NO: 342744 - DNA, 33 bp, Homo sapien
caagggaggagctagcgagggcaagacaggagg

SEQ ID NO: 342745 - DNA, 33 bp, Homo sapien
cctttattgtaacatacagcacagaacaaagag

SEQ ID NO: 342746 - DNA, 33 bp, Homo sapien
cctttattgtaacatatagcacagaacaaagag

SEQ ID NO: 342747 - DNA, 33 bp, Homo sapien
acatctgaacaactcaaagtcctccagaacact

SEQ ID NO: 342748 - DNA, 33 bp, Homo sapien
acatctgaacaactcagagtcctccagaacact

SEQ ID NO: 342749 - DNA, 33 bp, Homo sapien
aactactcgagtccaccattgatgatgggaaga

SEQ ID NO: 342750 - DNA, 33 bp, Homo sapien
aactactcgagtccactattgatgatgggaaga

SEQ ID NO: 342751 - DNA, 33 bp, Homo sapien
aggtggaaacaagtaacggtgactggccaaatc

SEQ ID NO: 342752 - DNA, 33 bp, Homo sapien
aggtggaaacaagtaatggtgactggccaaatc

SEQ ID NO: 342753 - DNA, 33 bp, Homo sapien
ttctggactttaaactaactgctgattgattga

SEQ ID NO: 342754 - DNA, 33 bp, Homo sapien
ttctggactttaaacttactgctgattgattga

SEQ ID NO: 342755 - DNA, 33 bp, Homo sapien
ctaattctgtagtccactaatcactgtgtggat

SEQ ID NO: 342756 - DNA, 33 bp, Homo sapien
ctaattctgtagtccagtaatcactgtgtggat

SEQ ID NO: 342757 - DNA, 33 bp, Homo sapien
ttattcctaaatgagacgatattgcataaatga

SEQ ID NO: 342758 - DNA, 33 bp, Homo sapien
ttattcctaaatgagatgatattgcataaatga

SEQ ID NO: 342759 - DNA, 33 bp, Homo sapien
gcagttaggatttgcactgatcactttaaattg

SEQ ID NO: 342760 - DNA, 33 bp, Homo sapien
gcagttaggatttgcattgatcactttaaattg

SEQ ID NO: 342761 - DNA, 33 bp, Homo sapien
tctgctttttactgtaaacatggctggcaaaga

SEQ ID NO: 342762 - DNA, 33 bp, Homo sapien
tctgctttttactgtagacatggctggcaaaga

SEQ ID NO: 342763 - DNA, 33 bp, Homo sapien
cgaaagggcaaatctaagcgttataggccttaa

SEQ ID NO: 342764 - DNA, 33 bp, Homo sapien
cgaaagggcaaatctacgcgttataggccttaa

SEQ ID NO: 342765 - DNA, 33 bp, Homo sapien
atgtttcaggaaacaactgatgtaatacctagc

SEQ ID NO: 342766 - DNA, 33 bp, Homo sapien
atgtttcaggaaacaagtgatgtaatacctagc

SEQ ID NO: 342767 - DNA, 33 bp, Homo sapien
attagaggaattggtgaatctatagtgtcactg

SEQ ID NO: 342768 - DNA, 33 bp, Homo sapien
attagaggaattggtgtatctatagtgtcactg

SEQ ID NO: 342769 - DNA, 33 bp, Homo sapien
aggtgatgggactatgcactccaggaaattaga

SEQ ID NO: 342770 - DNA, 33 bp, Homo sapien
aggtgatgggactatgtactccaggaaattaga

SEQ ID NO: 342771 - DNA, 33 bp, Homo sapien
aaagtctggggggagacaaatgcttttcaaaca

SEQ ID NO: 342772 - DNA, 33 bp, Homo sapien
aaagtctggggggagagaaatgcttttcaaaca

SEQ ID NO: 342773 - DNA, 33 bp, Homo sapien
gctggcacgctcctaccggccttccctttattt

SEQ ID NO: 342774 - DNA, 33 bp, Homo sapien
gctggcacgctcctactggccttccctttattt

SEQ ID NO: 342775 - DNA, 33 bp, Homo sapien
gttgccaatccagaaaacttgctaaaagtgagt

SEQ ID NO: 342776 - DNA, 33 bp, Homo sapien
gttgccaatccagaaagcttgctaaaagtgagt

SEQ ID NO: 342777 - DNA, 33 bp, Homo sapien
agaattttgtgtactacgctgactcaaaattcg

SEQ ID NO: 342778 - DNA, 33 bp, Homo sapien
agaattttgtgtactatgctgactcaaaattcg

SEQ ID NO: 342779 - DNA, 33 bp, Homo sapien
ttttgctggatactctcaattttcctctccaga

SEQ ID NO: 342780 - DNA, 33 bp, Homo sapien
ttttgctggatactcttaattttcctctccaga

SEQ ID NO: 342781 - DNA, 33 bp, Homo sapien
gtctgctataaatgaagaattctcaggaagctg

SEQ ID NO: 342782 - DNA, 33 bp, Homo sapien
gtctgctataaatgaataattctcaggaagctg

SEQ ID NO: 342783 - DNA, 33 bp, Homo sapien
ggcaattgtgcaattagaagaggtttatttaca

SEQ ID NO: 342784 - DNA, 33 bp, Homo sapien
ggcaattgtgcaattataagaggtttatttaca

SEQ ID NO: 342785 - DNA, 33 bp, Homo sapien
taacaaacttacacttgaacttcatgtctataa

SEQ ID NO: 342786 - DNA, 33 bp, Homo sapien
taacaaacttacactttaacttcatgtctataa

SEQ ID NO: 342787 - DNA, 33 bp, Homo sapien
ttgagacaaatcctcaatatacaccaaaacaga

SEQ ID NO: 342788 - DNA, 33 bp, Homo sapien
ttgagacaaatcctcagtatacaccaaaacaga

SEQ ID NO: 342789 - DNA, 33 bp, Homo sapien
ctgactgcaagaaacaaaagtgactccatgtta

SEQ ID NO: 342790 - DNA, 33 bp, Homo sapien
ctgactgcaagaaacataagtgactccatgtta

SEQ ID NO: 342791 - DNA, 33 bp, Homo sapien
taaaaaaatgattacacaatctcttgtacacaa

SEQ ID NO: 342792 - DNA, 33 bp, Homo sapien
taaaaaaatgattacataatctcttgtacacaa

SEQ ID NO: 342793 - DNA, 33 bp, Homo sapien
aagggggaaattagagaagacagattagaccat

SEQ ID NO: 342794 - DNA, 33 bp, Homo sapien
aagggggaaattagaggagacagattagaccat

SEQ ID NO: 342795 - DNA, 33 bp, Homo sapien
aatggggtaagagatgaaagggcaaaaattcaa

SEQ ID NO: 342796 - DNA, 33 bp, Homo sapien
aatggggtaagagatgcaagggcaaaaattcaa

SEQ ID NO: 342797 - DNA, 33 bp, Homo sapien
tcattcttgactcatcaatcagttttgcttttt

SEQ ID NO: 342798 - DNA, 33 bp, Homo sapien
tcattcttgactcatccatcagttttgcttttt

SEQ ID NO: 342799 - DNA, 33 bp, Homo sapien
aatcaagaaggttagagacattaccaaaaagag

SEQ ID NO: 342800 - DNA, 33 bp, Homo sapien
aatcaagaaggttagatacattaccaaaaagag

SEQ ID NO: 342801 - DNA, 33 bp, Homo sapien
ctttacaacaatagtacgaaaatgatgcttttt

SEQ ID NO: 342802 - DNA, 33 bp, Homo sapien
ctttacaacaatagtatgaaaatgatgcttttt

SEQ ID NO: 342803 - DNA, 33 bp, Homo sapien
gactgtctacaagatgaagcaagtcagtagaca

SEQ ID NO: 342804 - DNA, 33 bp, Homo sapien
gactgtctacaagatggagcaagtcagtagaca

SEQ ID NO: 342805 - DNA, 33 bp, Homo sapien
acatttattgctgtgagtagacataggcatttt

SEQ ID NO: 342806 - DNA, 33 bp, Homo sapien
acatttattgctgtgattagacataggcatttt

SEQ ID NO: 342807 - DNA, 33 bp, Homo sapien
accaaagtctatggtacgagtaatgttaatgcc

SEQ ID NO: 342808 - DNA, 33 bp, Homo sapien
accaaagtctatggtatgagtaatgttaatgcc

SEQ ID NO: 342809 - DNA, 33 bp, Homo sapien
ttaataatgagaaataagtggaaacgattcaag

SEQ ID NO: 342810 - DNA, 33 bp, Homo sapien
ttaataatgagaaataggtggaaacgattcaag

SEQ ID NO: 342811 - DNA, 33 bp, Homo sapien
ttagctgttactttcagcacaaattaattaagg

SEQ ID NO: 342812 - DNA, 33 bp, Homo sapien
ttagctgttactttcatcacaaattaattaagg

SEQ ID NO: 342813 - DNA, 33 bp, Homo sapien
cttgaaggagcaaagaaagggagccaggagagg

SEQ ID NO: 342814 - DNA, 33 bp, Homo sapien
cttgaaggagcaaagagagggagccaggagagg

SEQ ID NO: 342815 - DNA, 33 bp, Homo sapien
tgcacagaaaagaaacaaagtgaagacaaccca

SEQ ID NO: 342816 - DNA, 33 bp, Homo sapien
tgcacagaaaagaaaccaagtgaagacaaccca

SEQ ID NO: 342817 - DNA, 33 bp, Homo sapien
taggaaatctttgcccaattcaatgtcctggag

SEQ ID NO: 342818 - DNA, 33 bp, Homo sapien
taggaaatctttgcccgattcaatgtcctggag

SEQ ID NO: 342819 - DNA, 33 bp, Homo sapien
gtagttaaagtctttacgtcagataaggtaagc

SEQ ID NO: 342820 - DNA, 33 bp, Homo sapien
gtagttaaagtctttatgtcagataaggtaagc

SEQ ID NO: 342821 - DNA, 33 bp, Homo sapien
ggccactttgtctatgaattgactttttctgga

SEQ ID NO: 342822 - DNA, 33 bp, Homo sapien
ggccactttgtctatgcattgactttttctgga

SEQ ID NO: 342823 - DNA, 33 bp, Homo sapien
gcactgtgcttaaaccactgatccctggtaaca

SEQ ID NO: 342824 - DNA, 33 bp, Homo sapien
gcactgtgcttaaaccgctgatccctggtaaca

SEQ ID NO: 342825 - DNA, 33 bp, Homo sapien
tctaggcacaaaatttgaaaaggagtagccatc

SEQ ID NO: 342826 - DNA, 33 bp, Homo sapien
tctaggcacaaaattttaaaaggagtagccatc

SEQ ID NO: 342827 - DNA, 33 bp, Homo sapien
gaaaactggcctaaaacaaatgagtctatttgg

SEQ ID NO: 342828 - DNA, 33 bp, Homo sapien
gaaaactggcctaaaagaaatgagtctatttgg

SEQ ID NO: 342829 - DNA, 33 bp, Homo sapien
aattatccaatcttggacagttctttacagcag

SEQ ID NO: 342830 - DNA, 33 bp, Homo sapien
aattatccaatcttgggcagttctttacagcag

SEQ ID NO: 342831 - DNA, 33 bp, Homo sapien
aaacaattaaaattcaagtatagtgtctaaaaa

SEQ ID NO: 342832 - DNA, 33 bp, Homo sapien
aaacaattaaaattcacgtatagtgtctaaaaa

SEQ ID NO: 342833 - DNA, 33 bp, Homo sapien
tgtcctcaacttttcaatctgagtttgctctac

SEQ ID NO: 342834 - DNA, 33 bp, Homo sapien
tgtcctcaacttttcattctgagtttgctctac

SEQ ID NO: 342835 - DNA, 33 bp, Homo sapien
agtataggaaaaaatacgctgacagaaaactat

SEQ ID NO: 342836 - DNA, 33 bp, Homo sapien
agtataggaaaaaatatgctgacagaaaactat

SEQ ID NO: 342837 - DNA, 33 bp, Homo sapien
taaggaaacaagcagacggaaaatgaaatgatg

SEQ ID NO: 342838 - DNA, 33 bp, Homo sapien
taaggaaacaagcagatggaaaatgaaatgatg

SEQ ID NO: 342839 - DNA, 33 bp, Homo sapien
aataattttgatatcactcttgagtaaaggaac

SEQ ID NO: 342840 - DNA, 33 bp, Homo sapien
aataattttgatatcattcttgagtaaaggaac

SEQ ID NO: 342841 - DNA, 33 bp, Homo sapien
gtaattgttacagctacgcaaggtaaaacagca

SEQ ID NO: 342842 - DNA, 33 bp, Homo sapien
gtaattgttacagctatgcaaggtaaaacagca

SEQ ID NO: 342843 - DNA, 33 bp, Homo sapien
acttcagtctactgcaatatcttattctcccac

SEQ ID NO: 342844 - DNA, 33 bp, Homo sapien
acttcagtctactgcagtatcttattctcccac

SEQ ID NO: 342845 - DNA, 33 bp, Homo sapien
attgcctgacttgtgaagaatgcatagacatta

SEQ ID NO: 342846 - DNA, 33 bp, Homo sapien
attgcctgacttgtgacgaatgcatagacatta

SEQ ID NO: 342847 - DNA, 33 bp, Homo sapien
ttacctgggaagcacaataaggtaaagtacaag

SEQ ID NO: 342848 - DNA, 33 bp, Homo sapien
ttacctgggaagcacagtaaggtaaagtacaag

SEQ ID NO: 342849 - DNA, 33 bp, Homo sapien
tatttctatatagcaacgccaaagcagcctaac

SEQ ID NO: 342850 - DNA, 33 bp, Homo sapien
tatttctatatagcaatgccaaagcagcctaac

SEQ ID NO: 342851 - DNA, 33 bp, Homo sapien
atggatggtcctcctgacacattgaagttatta

SEQ ID NO: 342852 - DNA, 33 bp, Homo sapien
atggatggtcctcctgtcacattgaagttatta

SEQ ID NO: 342853 - DNA, 33 bp, Homo sapien
tgagattcaagttaaaagctctctgcatctgga

SEQ ID NO: 342854 - DNA, 33 bp, Homo sapien
tgagattcaagttaaaggctctctgcatctgga

SEQ ID NO: 342855 - DNA, 33 bp, Homo sapien
cagtcccaagtagttaagttcttgaaagcagtg

SEQ ID NO: 342856 - DNA, 33 bp, Homo sapien
cagtcccaagtagttatgttcttgaaagcagtg

SEQ ID NO: 342857 - DNA, 33 bp, Homo sapien
ccttgtagttcttcacaaattgagaaagcttta

SEQ ID NO: 342858 - DNA, 33 bp, Homo sapien
ccttgtagttcttcacgaattgagaaagcttta

SEQ ID NO: 342859 - DNA, 33 bp, Homo sapien
caattaaggtgtattacagttggtgttataatg

SEQ ID NO: 342860 - DNA, 33 bp, Homo sapien
caattaaggtgtattatagttggtgttataatg

SEQ ID NO: 342861 - DNA, 33 bp, Homo sapien
acttaaattgttccataaatgggcctaacagaa

SEQ ID NO: 342862 - DNA, 33 bp, Homo sapien
acttaaattgttccatgaatgggcctaacagaa

SEQ ID NO: 342863 - DNA, 33 bp, Homo sapien
aatgtccacttccagcaataaggaaactctatc

SEQ ID NO: 342864 - DNA, 33 bp, Homo sapien
aatgtccacttccagcgataaggaaactctatc

SEQ ID NO: 342865 - DNA, 33 bp, Homo sapien
ctagttttgtccatcaatctcaccaaaattcaa

SEQ ID NO: 342866 - DNA, 33 bp, Homo sapien
ctagttttgtccatcagtctcaccaaaattcaa

SEQ ID NO: 342867 - DNA, 33 bp, Homo sapien
gcctcctcccaaaagcacctaaacacaggctga

SEQ ID NO: 342868 - DNA, 33 bp, Homo sapien
gcctcctcccaaaagctcctaaacacaggctga

SEQ ID NO: 342869 - DNA, 33 bp, Homo sapien
tgtactaatcaggccccaatctttacaggtgtt

SEQ ID NO: 342870 - DNA, 33 bp, Homo sapien
tgtactaatcaggcccgaatctttacaggtgtt

SEQ ID NO: 342871 - DNA, 33 bp, Homo sapien
aataaagtcacattccaaagtaccaagagttag

SEQ ID NO: 342872 - DNA, 33 bp, Homo sapien
aataaagtcacattccgaagtaccaagagttag

SEQ ID NO: 342873 - DNA, 33 bp, Homo sapien
aacaatacgtgaaataacccatgcaaagtgtct

SEQ ID NO: 342874 - DNA, 33 bp, Homo sapien
aacaatacgtgaaatatcccatgcaaagtgtct

SEQ ID NO: 342875 - DNA, 33 bp, Homo sapien
aacctgtctacctcaacatagggaaaagctgcc

SEQ ID NO: 342876 - DNA, 33 bp, Homo sapien
aacctgtctacctcaatatagggaaaagctgcc

SEQ ID NO: 342877 - DNA, 33 bp, Homo sapien
agctgccattttccctcagacctcttgcctttg

SEQ ID NO: 342878 - DNA, 33 bp, Homo sapien
agctgccattttcccttagacctcttgcctttg

SEQ ID NO: 342879 - DNA, 33 bp, Homo sapien
tgatattggggcaaaaacagggaaatgcaccat

SEQ ID NO: 342880 - DNA, 33 bp, Homo sapien
tgatattggggcaaaagcagggaaatgcaccat

SEQ ID NO: 342881 - DNA, 33 bp, Homo sapien
tcatggtagtaaaacggatatgatattggggca

SEQ ID NO: 342882 - DNA, 33 bp, Homo sapien
tcatggtagtaaaacgtatatgatattggggca

SEQ ID NO: 342883 - DNA, 33 bp, Homo sapien
aaagtggggattgtggaaagcccaacttgtagc

SEQ ID NO: 342884 - DNA, 33 bp, Homo sapien
aaagtggggattgtgggaagcccaacttgtagc

SEQ ID NO: 342885 - DNA, 33 bp, Homo sapien
atagacaataaaatagccacctaagaaagcttc

SEQ ID NO: 342886 - DNA, 33 bp, Homo sapien
atagacaataaaataggcacctaagaaagcttc

SEQ ID NO: 342887 - DNA, 33 bp, Homo sapien
tttaacgtttatacaaaacagagttcttaacac

SEQ ID NO: 342888 - DNA, 33 bp, Homo sapien
tttaacgtttatacaagacagagttcttaacac

SEQ ID NO: 342889 - DNA, 33 bp, Homo sapien
gaagggcacaggtttcgagccacgttgtcttta

SEQ ID NO: 342890 - DNA, 33 bp, Homo sapien
gaagggcacaggtttctagccacgttgtcttta

SEQ ID NO: 342891 - DNA, 33 bp, Homo sapien
atttgcaggtggttcaaactgggaaagaaccta

SEQ ID NO: 342892 - DNA, 33 bp, Homo sapien
atttgcaggtggttcagactgggaaagaaccta

SEQ ID NO: 342893 - DNA, 33 bp, Homo sapien
gaaatggactgaaaaagtaaagtgtagcacttc

SEQ ID NO: 342894 - DNA, 33 bp, Homo sapien
gaaatggactgaaaaattaaagtgtagcacttc

SEQ ID NO: 342895 - DNA, 33 bp, Homo sapien
tataaaactttctaaacgcttactcttgttttg

SEQ ID NO: 342896 - DNA, 33 bp, Homo sapien
tataaaactttctaaatgcttactcttgttttg

SEQ ID NO: 342897 - DNA, 33 bp, Homo sapien
agatgttcctaagataaatgcacaaaacaagag

SEQ ID NO: 342898 - DNA, 33 bp, Homo sapien
agatgttcctaagatagatgcacaaaacaagag

SEQ ID NO: 342899 - DNA, 33 bp, Homo sapien
tttcctagtatagctaaaaggtttgttgacttt

SEQ ID NO: 342900 - DNA, 33 bp, Homo sapien
tttcctagtatagctagaaggtttgttgacttt

SEQ ID NO: 342901 - DNA, 33 bp, Homo sapien
ttcttaaaaatgctgccattattcctttgcttt

SEQ ID NO: 342902 - DNA, 33 bp, Homo sapien
ttcttaaaaatgctgcgattattcctttgcttt

SEQ ID NO: 342903 - DNA, 33 bp, Homo sapien
gtcccccagttacataagtcaataagcagataa

SEQ ID NO: 342904 - DNA, 33 bp, Homo sapien
gtcccccagttacataggtcaataagcagataa

SEQ ID NO: 342905 - DNA, 33 bp, Homo sapien
caacaactcactagcaagaaaataaattacctg

SEQ ID NO: 342906 - DNA, 33 bp, Homo sapien
caacaactcactagcaggaaaataaattacctg

SEQ ID NO: 342907 - DNA, 33 bp, Homo sapien
gcctctctgaattgcacagatgtactcggatgc

SEQ ID NO: 342908 - DNA, 33 bp, Homo sapien
gcctctctgaattgcatagatgtactcggatgc

SEQ ID NO: 342909 - DNA, 33 bp, Homo sapien
actttcttgaaaaaaacctcatgaccaaattag

SEQ ID NO: 342910 - DNA, 33 bp, Homo sapien
actttcttgaaaaaaatctcatgaccaaattag

SEQ ID NO: 342911 - DNA, 33 bp, Homo sapien
catgcatttacattgccattaggatcaggaaag

SEQ ID NO: 342912 - DNA, 33 bp, Homo sapien
catgcatttacattgctattaggatcaggaaag

SEQ ID NO: 342913 - DNA, 33 bp, Homo sapien
ttgatggcaagcctgaccttgaccgcaaggata

SEQ ID NO: 342914 - DNA, 33 bp, Homo sapien
ttgatggcaagcctgatcttgaccgcaaggata

SEQ ID NO: 342915 - DNA, 33 bp, Homo sapien
gagaatggttagtgagcacagaaaattgttaga

SEQ ID NO: 342916 - DNA, 33 bp, Homo sapien
gagaatggttagtgagtacagaaaattgttaga

SEQ ID NO: 342917 - DNA, 33 bp, Homo sapien
agcagtgatgtcataacctgtaggtctgcttga

SEQ ID NO: 342918 - DNA, 33 bp, Homo sapien
agcagtgatgtcataagctgtaggtctgcttga

SEQ ID NO: 342919 - DNA, 33 bp, Homo sapien
cggcaagttgtacctaaatattccagaacttaa

SEQ ID NO: 342920 - DNA, 33 bp, Homo sapien
cggcaagttgtacctatatattccagaacttaa

SEQ ID NO: 342921 - DNA, 33 bp, Homo sapien
atccctaactggaatacatccaccagccttctc

SEQ ID NO: 342922 - DNA, 33 bp, Homo sapien
atccctaactggaatagatccaccagccttctc

SEQ ID NO: 342923 - DNA, 33 bp, Homo sapien
ctcaatccagatttaccaatagtcctgtagtcc

SEQ ID NO: 342924 - DNA, 33 bp, Homo sapien
ctcaatccagatttactaatagtcctgtagtcc

SEQ ID NO: 342925 - DNA, 33 bp, Homo sapien
ctaaatatcacacttaacttgagaaaagttctt

SEQ ID NO: 342926 - DNA, 33 bp, Homo sapien
ctaaatatcacacttaccttgagaaaagttctt

SEQ ID NO: 342927 - DNA, 33 bp, Homo sapien
tccctactgacagccactctggtattcagactg

SEQ ID NO: 342928 - DNA, 33 bp, Homo sapien
tccctactgacagccattctggtattcagactg

SEQ ID NO: 342929 - DNA, 33 bp, Homo sapien
tcttgcacttccaccaatcatctatgagaattg

SEQ ID NO: 342930 - DNA, 33 bp, Homo sapien
tcttgcacttccaccagtcatctatgagaattg

SEQ ID NO: 342931 - DNA, 33 bp, Homo sapien
agagaggaccttacataacctgacggagctgaa

SEQ ID NO: 342932 - DNA, 33 bp, Homo sapien
agagaggaccttacatgacctgacggagctgaa

SEQ ID NO: 342933 - DNA, 33 bp, Homo sapien
caagtttccagtgaataaacaacttcattcatg

SEQ ID NO: 342934 - DNA, 33 bp, Homo sapien
caagtttccagtgaatcaacaacttcattcatg

SEQ ID NO: 342935 - DNA, 33 bp, Homo sapien
agctctttggaccactgagggagtagaggcttt

SEQ ID NO: 342936 - DNA, 33 bp, Homo sapien
agctctttggaccacttagggagtagaggcttt

SEQ ID NO: 342937 - DNA, 33 bp, Homo sapien
ccaaagacaactttgacaatgatgttcatcttg

SEQ ID NO: 342938 - DNA, 33 bp, Homo sapien
ccaaagacaactttgataatgatgttcatcttg

SEQ ID NO: 342939 - DNA, 33 bp, Homo sapien
tttaggtgcaactagcagaaaaaaatacgcatt

SEQ ID NO: 342940 - DNA, 33 bp, Homo sapien
tttaggtgcaactagcggaaaaaaatacgcatt

SEQ ID NO: 342941 - DNA, 33 bp, Homo sapien
aataagcctgacacttaaaaaacttaaaaatcc

SEQ ID NO: 342942 - DNA, 33 bp, Homo sapien
aataagcctgacacttgaaaaacttaaaaatcc

SEQ ID NO: 342943 - DNA, 33 bp, Homo sapien
agttctcacattgtgacctacttgaaggttacg

SEQ ID NO: 342944 - DNA, 33 bp, Homo sapien
agttctcacattgtgatctacttgaaggttacg

SEQ ID NO: 342945 - DNA, 33 bp, Homo sapien
cctaacctgcaatttccctgggttaactcctac

SEQ ID NO: 342946 - DNA, 33 bp, Homo sapien
cctaacctgcaatttcgctgggttaactcctac

SEQ ID NO: 342947 - DNA, 33 bp, Homo sapien
ctggaagatgaggaaaactagtagtgtaattca

SEQ ID NO: 342948 - DNA, 33 bp, Homo sapien
ctggaagatgaggaaagctagtagtgtaattca

SEQ ID NO: 342949 - DNA, 33 bp, Homo sapien
gttttgggaatacagaaagtttatcaaaattgt

SEQ ID NO: 342950 - DNA, 33 bp, Homo sapien
gttttgggaatacagagagtttatcaaaattgt

SEQ ID NO: 342951 - DNA, 33 bp, Homo sapien
ctaaaaagccagagtacaaaaagaatgaaacca

SEQ ID NO: 342952 - DNA, 33 bp, Homo sapien
ctaaaaagccagagtataaaaagaatgaaacca

SEQ ID NO: 342953 - DNA, 33 bp, Homo sapien
aacactattccagccccaattcacttcaacata

SEQ ID NO: 342954 - DNA, 33 bp, Homo sapien
aacactattccagccctaattcacttcaacata

SEQ ID NO: 342955 - DNA, 33 bp, Homo sapien
acctttaaaagaagaaagttgcagacactattg

SEQ ID NO: 342956 - DNA, 33 bp, Homo sapien
acctttaaaagaagaatgttgcagacactattg

SEQ ID NO: 342957 - DNA, 33 bp, Homo sapien
agaaaccttgtaacaaccttatagcaaaagcta

SEQ ID NO: 342958 - DNA, 33 bp, Homo sapien
agaaaccttgtaacaatcttatagcaaaagcta

SEQ ID NO: 342959 - DNA, 33 bp, Homo sapien
gcacggggagagaaacaggtcctatgggtgtca

SEQ ID NO: 342960 - DNA, 33 bp, Homo sapien
gcacggggagagaaacgggtcctatgggtgtca

SEQ ID NO: 342961 - DNA, 33 bp, Homo sapien
cttgcagagaggattacgtaaatttaagatact

SEQ ID NO: 342962 - DNA, 33 bp, Homo sapien
cttgcagagaggattatgtaaatttaagatact

SEQ ID NO: 342963 - DNA, 33 bp, Homo sapien
caacattgtaaataaaaccgaaggacagtatcc

SEQ ID NO: 342964 - DNA, 33 bp, Homo sapien
caacattgtaaataaatccgaaggacagtatcc

SEQ ID NO: 342965 - DNA, 33 bp, Homo sapien
tggatgctcagagataactttagcctcttgaac

SEQ ID NO: 342966 - DNA, 33 bp, Homo sapien
tggatgctcagagatagctttagcctcttgaac

SEQ ID NO: 342967 - DNA, 33 bp, Homo sapien
tgacttctgtaaagaaactgacaacaatctggt

SEQ ID NO: 342968 - DNA, 33 bp, Homo sapien
tgacttctgtaaagaacctgacaacaatctggt

SEQ ID NO: 342969 - DNA, 33 bp, Homo sapien
ggatgcctaaaatttacgtgtgctctaacgttt

SEQ ID NO: 342970 - DNA, 33 bp, Homo sapien
ggatgcctaaaatttatgtgtgctctaacgttt

SEQ ID NO: 342971 - DNA, 33 bp, Homo sapien
ccccatatttctcagcaatcttctctaaagaaa

SEQ ID NO: 342972 - DNA, 33 bp, Homo sapien
ccccatatttctcagccatcttctctaaagaaa

SEQ ID NO: 342973 - DNA, 33 bp, Homo sapien
agtcataggattgttaactctgagactagtgta

SEQ ID NO: 342974 - DNA, 33 bp, Homo sapien
agtcataggattgttagctctgagactagtgta

SEQ ID NO: 342975 - DNA, 33 bp, Homo sapien
agatttggtaatgacaactttaatatgacacca

SEQ ID NO: 342976 - DNA, 33 bp, Homo sapien
agatttggtaatgacatctttaatatgacacca

SEQ ID NO: 342977 - DNA, 33 bp, Homo sapien
ttagaagaaattatagacataggggagaagttt

SEQ ID NO: 342978 - DNA, 33 bp, Homo sapien
ttagaagaaattatagtcataggggagaagttt

SEQ ID NO: 342979 - DNA, 33 bp, Homo sapien
ttagctgtccagggtacagagtaaattcagttc

SEQ ID NO: 342980 - DNA, 33 bp, Homo sapien
ttagctgtccagggtatagagtaaattcagttc

SEQ ID NO: 342981 - DNA, 33 bp, Homo sapien
agcttgttgttgaatcaagatgagggagttcta

SEQ ID NO: 342982 - DNA, 33 bp, Homo sapien
agcttgttgttgaatctagatgagggagttcta

SEQ ID NO: 342983 - DNA, 33 bp, Homo sapien
tttaacattaaaatgaactcatatcatgcataa

SEQ ID NO: 342984 - DNA, 33 bp, Homo sapien
tttaacattaaaatgagctcatatcatgcataa

SEQ ID NO: 342985 - DNA, 33 bp, Homo sapien
agtctccatataaaacagagaaaggacatcacc

SEQ ID NO: 342986 - DNA, 33 bp, Homo sapien
agtctccatataaaacggagaaaggacatcacc

SEQ ID NO: 342987 - DNA, 33 bp, Homo sapien
taatgactcatgtaacaatcaatgacatcttag

SEQ ID NO: 342988 - DNA, 33 bp, Homo sapien
taatgactcatgtaaccatcaatgacatcttag

SEQ ID NO: 342989 - DNA, 33 bp, Homo sapien
aaatctctgaaaaatcacaggtaacagtaacac

SEQ ID NO: 342990 - DNA, 33 bp, Homo sapien
aaatctctgaaaaatcgcaggtaacagtaacac

SEQ ID NO: 342991 - DNA, 33 bp, Homo sapien
gatgttccaaataaacacaacatttgtactgtt

SEQ ID NO: 342992 - DNA, 33 bp, Homo sapien
gatgttccaaataaacgcaacatttgtactgtt

SEQ ID NO: 342993 - DNA, 33 bp, Homo sapien
tctgagaggacagagaaagattgcttggctgat

SEQ ID NO: 342994 - DNA, 33 bp, Homo sapien
tctgagaggacagagatagattgcttggctgat

SEQ ID NO: 342995 - DNA, 33 bp, Homo sapien
tgaaccttaaatggggaaaccttctgccagtta

SEQ ID NO: 342996 - DNA, 33 bp, Homo sapien
tgaaccttaaatgggggaaccttctgccagtta

SEQ ID NO: 342997 - DNA, 33 bp, Homo sapien
agtctggttaagaatacggtttcagcacagcca

SEQ ID NO: 342998 - DNA, 33 bp, Homo sapien
agtctggttaagaatatggtttcagcacagcca

SEQ ID NO: 342999 - DNA, 33 bp, Homo sapien
ggagtatgcctgtgtacacttcaaaacatccag

SEQ ID NO: 343000 - DNA, 33 bp, Homo sapien
ggagtatgcctgtgtatacttcaaaacatccag

SEQ ID NO: 343001 - DNA, 33 bp, Homo sapien
gggaagatgttctaacccttgatggtttaccag

SEQ ID NO: 343002 - DNA, 33 bp, Homo sapien
gggaagatgttctaactcttgatggtttaccag

SEQ ID NO: 343003 - DNA, 33 bp, Homo sapien
ctccagacaacttaaaaccagcacacgtttgaa

SEQ ID NO: 343004 - DNA, 33 bp, Homo sapien
ctccagacaacttaaacccagcacacgtttgaa

SEQ ID NO: 343005 - DNA, 33 bp, Homo sapien
tcagactctgggctaacaaaaatgccaaagtca

SEQ ID NO: 343006 - DNA, 33 bp, Homo sapien
tcagactctgggctaagaaaaatgccaaagtca

SEQ ID NO: 343007 - DNA, 33 bp, Homo sapien
gagagaagttctattgcaggaggcagttagtgg

SEQ ID NO: 343008 - DNA, 33 bp, Homo sapien
gagagaagttctattggaggaggcagttagtgg

SEQ ID NO: 343009 - DNA, 33 bp, Homo sapien
atttttggatgagtgacggaacactggtttccc

SEQ ID NO: 343010 - DNA, 33 bp, Homo sapien
atttttggatgagtgatggaacactggtttccc

SEQ ID NO: 343011 - DNA, 33 bp, Homo sapien
agaaataaaactacctcagaggagctcaattta

SEQ ID NO: 343012 - DNA, 33 bp, Homo sapien
agaaataaaactacctgagaggagctcaattta

SEQ ID NO: 343013 - DNA, 33 bp, Homo sapien
caatttattcaagccactctaattatctctaca

SEQ ID NO: 343014 - DNA, 33 bp, Homo sapien
caatttattcaagccattctaattatctctaca

SEQ ID NO: 343015 - DNA, 33 bp, Homo sapien
caagaggaaagtcgtagatattttcttacatgc

SEQ ID NO: 343016 - DNA, 33 bp, Homo sapien
caagaggaaagtcgtatatattttcttacatgc

SEQ ID NO: 343017 - DNA, 33 bp, Homo sapien
agagtcacaagagtggcccaaagttggcccaag

SEQ ID NO: 343018 - DNA, 33 bp, Homo sapien
agagtcacaagagtggtccaaagttggcccaag

SEQ ID NO: 343019 - DNA, 33 bp, Homo sapien
gatatgataagcaccgcaaggttcactctgaga

SEQ ID NO: 343020 - DNA, 33 bp, Homo sapien
gatatgataagcaccgtaaggttcactctgaga

SEQ ID NO: 343021 - DNA, 33 bp, Homo sapien
gggtttaaagtgactcacataaggctcaccatt

SEQ ID NO: 343022 - DNA, 33 bp, Homo sapien
gggtttaaagtgactcccataaggctcaccatt

SEQ ID NO: 343023 - DNA, 33 bp, Homo sapien
aggacatatgcagggaagacattggggttttta

SEQ ID NO: 343024 - DNA, 33 bp, Homo sapien
aggacatatgcagggaggacattggggttttta

SEQ ID NO: 343025 - DNA, 33 bp, Homo sapien
tacaattttagcgatacgtgaataatcagttcc

SEQ ID NO: 343026 - DNA, 33 bp, Homo sapien
tacaattttagcgatatgtgaataatcagttcc

SEQ ID NO: 343027 - DNA, 33 bp, Homo sapien
gactgactggaggacacaaagggatgccctgcc

SEQ ID NO: 343028 - DNA, 33 bp, Homo sapien
gactgactggaggacagaaagggatgccctgcc

SEQ ID NO: 343029 - DNA, 33 bp, Homo sapien
tagggtgagtgtgggacggttaaaatacacatg

SEQ ID NO: 343030 - DNA, 33 bp, Homo sapien
tagggtgagtgtgggatggttaaaatacacatg

SEQ ID NO: 343031 - DNA, 33 bp, Homo sapien
ggatcttggtaaagaaaattaagttgaattatc

SEQ ID NO: 343032 - DNA, 33 bp, Homo sapien
ggatcttggtaaagaacattaagttgaattatc

SEQ ID NO: 343033 - DNA, 33 bp, Homo sapien
gagccttctcctaagacactagagtgaaagcat

SEQ ID NO: 343034 - DNA, 33 bp, Homo sapien
gagccttctcctaagagactagagtgaaagcat

SEQ ID NO: 343035 - DNA, 33 bp, Homo sapien
aaaattgctggtaaaggccttggagcatcagca

SEQ ID NO: 343036 - DNA, 33 bp, Homo sapien
aaaattgctggtaaagtccttggagcatcagca

SEQ ID NO: 343037 - DNA, 33 bp, Homo sapien
atcttagttcaggcctcaatcatccttgttttg

SEQ ID NO: 343038 - DNA, 33 bp, Homo sapien
atcttagttcaggccttaatcatccttgttttg

SEQ ID NO: 343039 - DNA, 33 bp, Homo sapien
cctgaactactatgtcacttacttgacttctca

SEQ ID NO: 343040 - DNA, 33 bp, Homo sapien
cctgaactactatgtcgcttacttgacttctca

SEQ ID NO: 343041 - DNA, 33 bp, Homo sapien
tcatttgtgtgaagacaacaattacacatcatt

SEQ ID NO: 343042 - DNA, 33 bp, Homo sapien
tcatttgtgtgaagaccacaattacacatcatt

SEQ ID NO: 343043 - DNA, 33 bp, Homo sapien
gttagcacatggataaactaaacaatatagtcc

SEQ ID NO: 343044 - DNA, 33 bp, Homo sapien
gttagcacatggataagctaaacaatatagtcc

SEQ ID NO: 343045 - DNA, 33 bp, Homo sapien
tggggcagaaatataaaaccattcttaagcaca

SEQ ID NO: 343046 - DNA, 33 bp, Homo sapien
tggggcagaaatataagaccattcttaagcaca

SEQ ID NO: 343047 - DNA, 33 bp, Homo sapien
cgcagcttttatttcacctgaaaacctgcaaat

SEQ ID NO: 343048 - DNA, 33 bp, Homo sapien
cgcagcttttatttcatctgaaaacctgcaaat

SEQ ID NO: 343049 - DNA, 33 bp, Homo sapien
taaccatgatgaaaaaataaattaggccataaa

SEQ ID NO: 343050 - DNA, 33 bp, Homo sapien
taaccatgatgaaaaactaaattaggccataaa

SEQ ID NO: 343051 - DNA, 33 bp, Homo sapien
gctcatagcatgacaccgggcatggacctataa

SEQ ID NO: 343052 - DNA, 33 bp, Homo sapien
gctcatagcatgacactgggcatggacctataa

SEQ ID NO: 343053 - DNA, 33 bp, Homo sapien
tctacttcctcatctacgaaatgggaataagag

SEQ ID NO: 343054 - DNA, 33 bp, Homo sapien
tctacttcctcatctatgaaatgggaataagag

SEQ ID NO: 343055 - DNA, 33 bp, Homo sapien
actacatattaagccacacttctctagagtatc

SEQ ID NO: 343056 - DNA, 33 bp, Homo sapien
actacatattaagccagacttctctagagtatc

SEQ ID NO: 343057 - DNA, 33 bp, Homo sapien
ttaggatcccccactaataggcagaatcattct

SEQ ID NO: 343058 - DNA, 33 bp, Homo sapien
ttaggatcccccactattaggcagaatcattct

SEQ ID NO: 343059 - DNA, 33 bp, Homo sapien
ggaaaatttggctttcagaaaatggctgaccta

SEQ ID NO: 343060 - DNA, 33 bp, Homo sapien
ggaaaatttggctttcggaaaatggctgaccta

SEQ ID NO: 343061 - DNA, 33 bp, Homo sapien
tcaggaatcatttcaacgcctcttgtttcctaa

SEQ ID NO: 343062 - DNA, 33 bp, Homo sapien
tcaggaatcatttcaatgcctcttgtttcctaa

SEQ ID NO: 343063 - DNA, 33 bp, Homo sapien
tgctataatttagtataaagtggcttctgatac

SEQ ID NO: 343064 - DNA, 33 bp, Homo sapien
tgctataatttagtatgaagtggcttctgatac

SEQ ID NO: 343065 - DNA, 33 bp, Homo sapien
cttcatgtcaaggcagcacaaaatcaactccaa

SEQ ID NO: 343066 - DNA, 33 bp, Homo sapien
cttcatgtcaaggcaggacaaaatcaactccaa

SEQ ID NO: 343067 - DNA, 33 bp, Homo sapien
tgcctaggtaggaaaacgaaacttagtgaagga

SEQ ID NO: 343068 - DNA, 33 bp, Homo sapien
tgcctaggtaggaaaaggaaacttagtgaagga

SEQ ID NO: 343069 - DNA, 33 bp, Homo sapien
gtgaaagctccaaaaacagggccatgactgtac

SEQ ID NO: 343070 - DNA, 33 bp, Homo sapien
gtgaaagctccaaaaagagggccatgactgtac

SEQ ID NO: 343071 - DNA, 33 bp, Homo sapien
acatgtttaaaagttaacacagtagtgacaaaa

SEQ ID NO: 343072 - DNA, 33 bp, Homo sapien
acatgtttaaaagttatcacagtagtgacaaaa

SEQ ID NO: 343073 - DNA, 33 bp, Homo sapien
aaaaagaccaggtttcaaaccgtcaggagggaa

SEQ ID NO: 343074 - DNA, 33 bp, Homo sapien
aaaaagaccaggtttcgaaccgtcaggagggaa

SEQ ID NO: 343075 - DNA, 33 bp, Homo sapien
gagtaagcaaaaaggaatataacctgggatgca

SEQ ID NO: 343076 - DNA, 33 bp, Homo sapien
gagtaagcaaaaaggattataacctgggatgca

SEQ ID NO: 343077 - DNA, 33 bp, Homo sapien
aattcgattctctcaaactgaacgtgagatatg

SEQ ID NO: 343078 - DNA, 33 bp, Homo sapien
aattcgattctctcaagctgaacgtgagatatg

SEQ ID NO: 343079 - DNA, 33 bp, Homo sapien
ctgaaagaatgcttaactgattgtttttgggga

SEQ ID NO: 343080 - DNA, 33 bp, Homo sapien
ctgaaagaatgcttaagtgattgtttttgggga

SEQ ID NO: 343081 - DNA, 33 bp, Homo sapien
aacagctgaacaatgccagggagagtcaggtga

SEQ ID NO: 343082 - DNA, 33 bp, Homo sapien
aacagctgaacaatgctagggagagtcaggtga

SEQ ID NO: 343083 - DNA, 33 bp, Homo sapien
aaggacagtgctactcaagtacagatttaacca

SEQ ID NO: 343084 - DNA, 33 bp, Homo sapien
aaggacagtgctactccagtacagatttaacca

SEQ ID NO: 343085 - DNA, 33 bp, Homo sapien
gaatgcagtggtctgacctaattctgagagttg

SEQ ID NO: 343086 - DNA, 33 bp, Homo sapien
gaatgcagtggtctgatctaattctgagagttg

SEQ ID NO: 343087 - DNA, 33 bp, Homo sapien
tctgaaggtgtccccaaaaatttctacgctgga

SEQ ID NO: 343088 - DNA, 33 bp, Homo sapien
tctgaaggtgtccccacaaatttctacgctgga

SEQ ID NO: 343089 - DNA, 33 bp, Homo sapien
tttgtagagttataaaatgcctgggccttaatt

SEQ ID NO: 343090 - DNA, 33 bp, Homo sapien
tttgtagagttataaactgcctgggccttaatt

SEQ ID NO: 343091 - DNA, 33 bp, Homo sapien
cccttagagctagcaacaaccaatccccttgat

SEQ ID NO: 343092 - DNA, 33 bp, Homo sapien
cccttagagctagcaataaccaatccccttgat

SEQ ID NO: 343093 - DNA, 33 bp, Homo sapien
cagttgggtgtgcgaaagggacggatgccctgc

SEQ ID NO: 343094 - DNA, 33 bp, Homo sapien
cagttgggtgtgcgaaggggacggatgccctgc

SEQ ID NO: 343095 - DNA, 33 bp, Homo sapien
atctgcacatggcatacactctgaaattgacca

SEQ ID NO: 343096 - DNA, 33 bp, Homo sapien
atctgcacatggcatatactctgaaattgacca

SEQ ID NO: 343097 - DNA, 33 bp, Homo sapien
ttggaggtaagcaaacactatggcttttagagt

SEQ ID NO: 343098 - DNA, 33 bp, Homo sapien
ttggaggtaagcaaacgctatggcttttagagt

SEQ ID NO: 343099 - DNA, 33 bp, Homo sapien
ctaagatacagctctcacaatatttggaaggcc

SEQ ID NO: 343100 - DNA, 33 bp, Homo sapien
ctaagatacagctctcgcaatatttggaaggcc

SEQ ID NO: 343101 - DNA, 33 bp, Homo sapien
ggaggatgtaactgagcagcttaggttcaaaat

SEQ ID NO: 343102 - DNA, 33 bp, Homo sapien
ggaggatgtaactgagtagcttaggttcaaaat

SEQ ID NO: 343103 - DNA, 33 bp, Homo sapien
aaagtctagccaactactactgccacacaaaga

SEQ ID NO: 343104 - DNA, 33 bp, Homo sapien
aaagtctagccaactagtactgccacacaaaga

SEQ ID NO: 343105 - DNA, 33 bp, Homo sapien
tcacagacaaggactcaacctcacatgtcacaa

SEQ ID NO: 343106 - DNA, 33 bp, Homo sapien
tcacagacaaggactcgacctcacatgtcacaa

SEQ ID NO: 343107 - DNA, 33 bp, Homo sapien
tgtgtgctgtttgacaactaatggcaatttata

SEQ ID NO: 343108 - DNA, 33 bp, Homo sapien
tgtgtgctgtttgacagctaatggcaatttata

SEQ ID NO: 343109 - DNA, 33 bp, Homo sapien
attggaacaataatcaacctggttcagttaata

SEQ ID NO: 343110 - DNA, 33 bp, Homo sapien
attggaacaataatcagcctggttcagttaata

SEQ ID NO: 343111 - DNA, 33 bp, Homo sapien
acaggtgctgataaccagaagagccagtttaaa

SEQ ID NO: 343112 - DNA, 33 bp, Homo sapien
acaggtgctgataaccggaagagccagtttaaa

SEQ ID NO: 343113 - DNA, 33 bp, Homo sapien
ttgaaatcctaccaacagtacttttggaccacg

SEQ ID NO: 343114 - DNA, 33 bp, Homo sapien
ttgaaatcctaccaaccgtacttttggaccacg

SEQ ID NO: 343115 - DNA, 33 bp, Homo sapien
tacctcaaactaaaaggcttctgcacagaaaag

SEQ ID NO: 343116 - DNA, 33 bp, Homo sapien
tacctcaaactaaaagtcttctgcacagaaaag

SEQ ID NO: 343117 - DNA, 33 bp, Homo sapien
atgcataaagattaccacaaaagtgtgttaaaa

SEQ ID NO: 343118 - DNA, 33 bp, Homo sapien
atgcataaagattaccccaaaagtgtgttaaaa

SEQ ID NO: 343119 - DNA, 33 bp, Homo sapien
ttataagacagatctacgaggacaggtactatg

SEQ ID NO: 343120 - DNA, 33 bp, Homo sapien
ttataagacagatctatgaggacaggtactatg

SEQ ID NO: 343121 - DNA, 33 bp, Homo sapien
catgagggaggaatccacatggtctaaccacct

SEQ ID NO: 343122 - DNA, 33 bp, Homo sapien
catgagggaggaatccgcatggtctaaccacct

SEQ ID NO: 343123 - DNA, 33 bp, Homo sapien
gttctggaatatactacgtcataaaatggtgcc

SEQ ID NO: 343124 - DNA, 33 bp, Homo sapien
gttctggaatatactatgtcataaaatggtgcc

SEQ ID NO: 343125 - DNA, 33 bp, Homo sapien
aaattttattttcaaaatgacagaagaggtaca

SEQ ID NO: 343126 - DNA, 33 bp, Homo sapien
aaattttattttcaaactgacagaagaggtaca

SEQ ID NO: 343127 - DNA, 33 bp, Homo sapien
attccaataacgtacaatatctaaagttgtaat

SEQ ID NO: 343128 - DNA, 33 bp, Homo sapien
attccaataacgtacagtatctaaagttgtaat

SEQ ID NO: 343129 - DNA, 33 bp, Homo sapien
ttcgttttatggctgaagaaagttgtacagaaa

SEQ ID NO: 343130 - DNA, 33 bp, Homo sapien
ttcgttttatggctgaggaaagttgtacagaaa

SEQ ID NO: 343131 - DNA, 33 bp, Homo sapien
tccactcttacctcctcacaatctacttctcag

SEQ ID NO: 343132 - DNA, 33 bp, Homo sapien
tccactcttacctccttacaatctacttctcag

SEQ ID NO: 343133 - DNA, 33 bp, Homo sapien
agtccaaattgttgacccaaagaattgtgagaa

SEQ ID NO: 343134 - DNA, 33 bp, Homo sapien
agtccaaattgttgactcaaagaattgtgagaa

SEQ ID NO: 343135 - DNA, 33 bp, Homo sapien
tacagcacagaggatagaaattaagccaccaaa

SEQ ID NO: 343136 - DNA, 33 bp, Homo sapien
tacagcacagaggatataaattaagccaccaaa

SEQ ID NO: 343137 - DNA, 33 bp, Homo sapien
ggaatgatcagaataaataggtaggaaatgatc

SEQ ID NO: 343138 - DNA, 33 bp, Homo sapien
ggaatgatcagaataagtaggtaggaaatgatc

SEQ ID NO: 343139 - DNA, 33 bp, Homo sapien
ttctttgtaccattaactaagttctcctgcttt

SEQ ID NO: 343140 - DNA, 33 bp, Homo sapien
ttctttgtaccattaagtaagttctcctgcttt

SEQ ID NO: 343141 - DNA, 33 bp, Homo sapien
taatcaatactgttctcacttagcaaatgtttt

SEQ ID NO: 343142 - DNA, 33 bp, Homo sapien
taatcaatactgttcttacttagcaaatgtttt

SEQ ID NO: 343143 - DNA, 33 bp, Homo sapien
agaggccactttataactcagacaaagtcattg

SEQ ID NO: 343144 - DNA, 33 bp, Homo sapien
agaggccactttataattcagacaaagtcattg

SEQ ID NO: 343145 - DNA, 33 bp, Homo sapien
tttaattgaggttcaaacattcatttatttata

SEQ ID NO: 343146 - DNA, 33 bp, Homo sapien
tttaattgaggttcaatcattcatttatttata

SEQ ID NO: 343147 - DNA, 33 bp, Homo sapien
gtctcccctgaataccgctgagccaaatgatgt

SEQ ID NO: 343148 - DNA, 33 bp, Homo sapien
gtctcccctgaatacctctgagccaaatgatgt

SEQ ID NO: 343149 - DNA, 33 bp, Homo sapien
aaggcacagagcaataagaatacacaacacatg

SEQ ID NO: 343150 - DNA, 33 bp, Homo sapien
aaggcacagagcaatacgaatacacaacacatg

SEQ ID NO: 343151 - DNA, 33 bp, Homo sapien
tgtcttgtttgttttcacttgcttcatttcttc

SEQ ID NO: 343152 - DNA, 33 bp, Homo sapien
tgtcttgtttgttttcgcttgcttcatttcttc

SEQ ID NO: 343153 - DNA, 33 bp, Homo sapien
gtggaactattttagacagtaatttggcaatat

SEQ ID NO: 343154 - DNA, 33 bp, Homo sapien
gtggaactattttagagagtaatttggcaatat

SEQ ID NO: 343155 - DNA, 33 bp, Homo sapien
tgccatcatttggaaaacacaggtgttaaaatt

SEQ ID NO: 343156 - DNA, 33 bp, Homo sapien
tgccatcatttggaaatcacaggtgttaaaatt

SEQ ID NO: 343157 - DNA, 33 bp, Homo sapien
acatcctcaatttgtaacaatctagtttgaatt

SEQ ID NO: 343158 - DNA, 33 bp, Homo sapien
acatcctcaatttgtagcaatctagtttgaatt

SEQ ID NO: 343159 - DNA, 33 bp, Homo sapien
tatagtactgttttaaagatagtgtgcttttta

SEQ ID NO: 343160 - DNA, 33 bp, Homo sapien
tatagtactgttttaacgatagtgtgcttttta

SEQ ID NO: 343161 - DNA, 33 bp, Homo sapien
tttgtaggtatagtgcaaaatctatgctttgtg

SEQ ID NO: 343162 - DNA, 33 bp, Homo sapien
tttgtaggtatagtgcgaaatctatgctttgtg

SEQ ID NO: 343163 - DNA, 33 bp, Homo sapien
ttgccttttaattgtacgagagggcattggtca

SEQ ID NO: 343164 - DNA, 33 bp, Homo sapien
ttgccttttaattgtatgagagggcattggtca

SEQ ID NO: 343165 - DNA, 33 bp, Homo sapien
gcaaaatacagaaataagcaagaaagaagtaga

SEQ ID NO: 343166 - DNA, 33 bp, Homo sapien
gcaaaatacagaaatacgcaagaaagaagtaga

SEQ ID NO: 343167 - DNA, 33 bp, Homo sapien
cgggtgtgttggcacaggcatataatcccagct

SEQ ID NO: 343168 - DNA, 33 bp, Homo sapien
cgggtgtgttggcacatgcatataatcccagct

SEQ ID NO: 343169 - DNA, 33 bp, Homo sapien
tcctctctttgaaaaacctgctgaaatctgggt

SEQ ID NO: 343170 - DNA, 33 bp, Homo sapien
tcctctctttgaaaaatctgctgaaatctgggt

SEQ ID NO: 343171 - DNA, 33 bp, Homo sapien
aaactatcaaaacaagaccctagagccggctca

SEQ ID NO: 343172 - DNA, 33 bp, Homo sapien
aaactatcaaaacaaggccctagagccggctca

SEQ ID NO: 343173 - DNA, 33 bp, Homo sapien
tctctttcgtcaccacgaccttccttgacagca

SEQ ID NO: 343174 - DNA, 33 bp, Homo sapien
tctctttcgtcaccactaccttccttgacagca

SEQ ID NO: 343175 - DNA, 33 bp, Homo sapien
ggtcagtggttgctgacataatgcgggcctgga

SEQ ID NO: 343176 - DNA, 33 bp, Homo sapien
ggtcagtggttgctgatataatgcgggcctgga

SEQ ID NO: 343177 - DNA, 33 bp, Homo sapien
agtgagcacctccaatcatccatttcttcaccc

SEQ ID NO: 343178 - DNA, 33 bp, Homo sapien
agtgagcacctccaatgatccatttcttcaccc

SEQ ID NO: 343179 - DNA, 33 bp, Homo sapien
gatcagagctgtgattaaagcaaacctgtcagc

SEQ ID NO: 343180 - DNA, 33 bp, Homo sapien
gatcagagctgtgattgaagcaaacctgtcagc

SEQ ID NO: 343181 - DNA, 33 bp, Homo sapien
aatcagctatggccaaagtcacctggccacaaa

SEQ ID NO: 343182 - DNA, 33 bp, Homo sapien
aatcagctatggccaacgtcacctggccacaaa

SEQ ID NO: 343183 - DNA, 33 bp, Homo sapien
ccacttgttcctctaactgtctctatcatgact

SEQ ID NO: 343184 - DNA, 33 bp, Homo sapien
ccacttgttcctctaattgtctctatcatgact

SEQ ID NO: 343185 - DNA, 33 bp, Homo sapien
gctcaccatgtgacacacagcatactaagcact

SEQ ID NO: 343186 - DNA, 33 bp, Homo sapien
gctcaccatgtgacacgcagcatactaagcact

SEQ ID NO: 343187 - DNA, 33 bp, Homo sapien
ggagcttatgttcctagagatgagtctgaatgt

SEQ ID NO: 343188 - DNA, 33 bp, Homo sapien
ggagcttatgttcctatagatgagtctgaatgt

SEQ ID NO: 343189 - DNA, 33 bp, Homo sapien
gtctatatcccttggactacatttgagtttacc

SEQ ID NO: 343190 - DNA, 33 bp, Homo sapien
gtctatatcccttggagtacatttgagtttacc

SEQ ID NO: 343191 - DNA, 33 bp, Homo sapien
ttaccactctttcaaaattgcattcccacacaa

SEQ ID NO: 343192 - DNA, 33 bp, Homo sapien
ttaccactctttcaaagttgcattcccacacaa

SEQ ID NO: 343193 - DNA, 33 bp, Homo sapien
aaattgtatctgtgaccctctgtgtggcaatta

SEQ ID NO: 343194 - DNA, 33 bp, Homo sapien
aaattgtatctgtgactctctgtgtggcaatta

SEQ ID NO: 343195 - DNA, 33 bp, Homo sapien
gcaaaaatattgtttacagttgtggatcaggaa

SEQ ID NO: 343196 - DNA, 33 bp, Homo sapien
gcaaaaatattgtttatagttgtggatcaggaa

SEQ ID NO: 343197 - DNA, 33 bp, Homo sapien
accaatattctcagcactgccattttatcttag

SEQ ID NO: 343198 - DNA, 33 bp, Homo sapien
accaatattctcagcattgccattttatcttag

SEQ ID NO: 343199 - DNA, 33 bp, Homo sapien
tctggtgcaaggagaacaacaaaatgcgatcag

SEQ ID NO: 343200 - DNA, 33 bp, Homo sapien
tctggtgcaaggagaataacaaaatgcgatcag

SEQ ID NO: 343201 - DNA, 33 bp, Homo sapien
ttatcagaaagaaacagccggtagctgggcatg

SEQ ID NO: 343202 - DNA, 33 bp, Homo sapien
ttatcagaaagaaacatccggtagctgggcatg

SEQ ID NO: 343203 - DNA, 33 bp, Homo sapien
tgttgcaatgaacatacgctggaatgtatcttt

SEQ ID NO: 343204 - DNA, 33 bp, Homo sapien
tgttgcaatgaacatatgctggaatgtatcttt

SEQ ID NO: 343205 - DNA, 33 bp, Homo sapien
tttgtaattaaaaacactgtcttcatagtaaac

SEQ ID NO: 343206 - DNA, 33 bp, Homo sapien
tttgtaattaaaaacattgtcttcatagtaaac

SEQ ID NO: 343207 - DNA, 33 bp, Homo sapien
ctataccaatggtcaacaggatatgcaggcaag

SEQ ID NO: 343208 - DNA, 33 bp, Homo sapien
ctataccaatggtcaataggatatgcaggcaag

SEQ ID NO: 343209 - DNA, 33 bp, Homo sapien
ccttccttctccctcactgaaattcagagaaaa

SEQ ID NO: 343210 - DNA, 33 bp, Homo sapien
ccttccttctccctcattgaaattcagagaaaa

SEQ ID NO: 343211 - DNA, 33 bp, Homo sapien
ggtcctgttattaagggatgtatgatgtaaaga

SEQ ID NO: 343212 - DNA, 33 bp, Homo sapien
ggtcctgttattaaggtatgtatgatgtaaaga

SEQ ID NO: 343213 - DNA, 33 bp, Homo sapien
aaacttctaagaagaacgcctggtatgcaatga

SEQ ID NO: 343214 - DNA, 33 bp, Homo sapien
aaacttctaagaagaatgcctggtatgcaatga

SEQ ID NO: 343215 - DNA, 33 bp, Homo sapien
gaaagtgttgacaaccaagagtcttccgaggta

SEQ ID NO: 343216 - DNA, 33 bp, Homo sapien
gaaagtgttgacaaccgagagtcttccgaggta

SEQ ID NO: 343217 - DNA, 33 bp, Homo sapien
cagaattccattattcaagatactctggtacac

SEQ ID NO: 343218 - DNA, 33 bp, Homo sapien
cagaattccattattcgagatactctggtacac

SEQ ID NO: 343219 - DNA, 33 bp, Homo sapien
tggccattccttctacagaaatatccttagagg

SEQ ID NO: 343220 - DNA, 33 bp, Homo sapien
tggccattccttctacggaaatatccttagagg

SEQ ID NO: 343221 - DNA, 33 bp, Homo sapien
gacatcacaactcaaacgaaaactagctgagca

SEQ ID NO: 343222 - DNA, 33 bp, Homo sapien
gacatcacaactcaaatgaaaactagctgagca

SEQ ID NO: 343223 - DNA, 33 bp, Homo sapien
aagtagactgctgacaaagagataaaaatcagc

SEQ ID NO: 343224 - DNA, 33 bp, Homo sapien
aagtagactgctgacagagagataaaaatcagc

SEQ ID NO: 343225 - DNA, 33 bp, Homo sapien
ttcctcacttttctacaagagacgccactctta

SEQ ID NO: 343226 - DNA, 33 bp, Homo sapien
ttcctcacttttctacgagagacgccactctta

SEQ ID NO: 343227 - DNA, 33 bp, Homo sapien
atccaagcccagtacgaactaggacttaactag

SEQ ID NO: 343228 - DNA, 33 bp, Homo sapien
atccaagcccagtacggactaggacttaactag

SEQ ID NO: 343229 - DNA, 33 bp, Homo sapien
accccattgacagataagtttgtataatgccac

SEQ ID NO: 343230 - DNA, 33 bp, Homo sapien
accccattgacagataggtttgtataatgccac

SEQ ID NO: 343231 - DNA, 33 bp, Homo sapien
ttgactagcttgctccaaaattatggtatcagt

SEQ ID NO: 343232 - DNA, 33 bp, Homo sapien
ttgactagcttgctccgaaattatggtatcagt

SEQ ID NO: 343233 - DNA, 33 bp, Homo sapien
aatagagttacttcaaaatagagtacattttca

SEQ ID NO: 343234 - DNA, 33 bp, Homo sapien
aatagagttacttcaacatagagtacattttca

SEQ ID NO: 343235 - DNA, 33 bp, Homo sapien
aattataacctcttcaaatccaggaagaatatt

SEQ ID NO: 343236 - DNA, 33 bp, Homo sapien
aattataacctcttcacatccaggaagaatatt

SEQ ID NO: 343237 - DNA, 33 bp, Homo sapien
tagcctacatattccaataactggtaccgtata

SEQ ID NO: 343238 - DNA, 33 bp, Homo sapien
tagcctacatattccactaactggtaccgtata

SEQ ID NO: 343239 - DNA, 33 bp, Homo sapien
accaaaaataagacgaaacaaaatagagcttcc

SEQ ID NO: 343240 - DNA, 33 bp, Homo sapien
accaaaaataagacgagacaaaatagagcttcc

SEQ ID NO: 343241 - DNA, 33 bp, Homo sapien
agattgggagtcaggaatatagtcaaagcctca

SEQ ID NO: 343242 - DNA, 33 bp, Homo sapien
agattgggagtcaggagtatagtcaaagcctca

SEQ ID NO: 343243 - DNA, 33 bp, Homo sapien
caattttcttctgtaacgagcccttcctgtgaa

SEQ ID NO: 343244 - DNA, 33 bp, Homo sapien
caattttcttctgtaatgagcccttcctgtgaa

SEQ ID NO: 343245 - DNA, 33 bp, Homo sapien
cctgttgccactgataccgatgtgaattttgcc

SEQ ID NO: 343246 - DNA, 33 bp, Homo sapien
cctgttgccactgatagcgatgtgaattttgcc

SEQ ID NO: 343247 - DNA, 33 bp, Homo sapien
agaagttgccattttcgaattccgattatttgg

SEQ ID NO: 343248 - DNA, 33 bp, Homo sapien
agaagttgccattttctaattccgattatttgg

SEQ ID NO: 343249 - DNA, 33 bp, Homo sapien
tcagtggtggtttatcaagatgaaattatggct

SEQ ID NO: 343250 - DNA, 33 bp, Homo sapien
tcagtggtggtttatcgagatgaaattatggct

SEQ ID NO: 343251 - DNA, 33 bp, Homo sapien
tgtattttccaatggcccaatgataggatacag

SEQ ID NO: 343252 - DNA, 33 bp, Homo sapien
tgtattttccaatggctcaatgataggatacag

SEQ ID NO: 343253 - DNA, 33 bp, Homo sapien
gaaagacagtcttgaagtgcccacaccacccct

SEQ ID NO: 343254 - DNA, 33 bp, Homo sapien
gaaagacagtcttgaattgcccacaccacccct

SEQ ID NO: 343255 - DNA, 33 bp, Homo sapien
acaaatgaaagtcaaacgtcatatcaacagaat

SEQ ID NO: 343256 - DNA, 33 bp, Homo sapien
acaaatgaaagtcaaatgtcatatcaacagaat

SEQ ID NO: 343257 - DNA, 33 bp, Homo sapien
ttccataaccacgttaactgcagcagttttctt

SEQ ID NO: 343258 - DNA, 33 bp, Homo sapien
ttccataaccacgttagctgcagcagttttctt

SEQ ID NO: 343259 - DNA, 33 bp, Homo sapien
actttttctgcctaaaatatatcacctagaatt

SEQ ID NO: 343260 - DNA, 33 bp, Homo sapien
actttttctgcctaaagtatatcacctagaatt

SEQ ID NO: 343261 - DNA, 33 bp, Homo sapien
ttaagggtgtcattccaataagaagctggacct

SEQ ID NO: 343262 - DNA, 33 bp, Homo sapien
ttaagggtgtcattcccataagaagctggacct

SEQ ID NO: 343263 - DNA, 33 bp, Homo sapien
ttggccatttgatgtacccaataggtattagtg

SEQ ID NO: 343264 - DNA, 33 bp, Homo sapien
ttggccatttgatgtatccaataggtattagtg

SEQ ID NO: 343265 - DNA, 33 bp, Homo sapien
tatatctgtaatgaacacatggtaccagaatta

SEQ ID NO: 343266 - DNA, 33 bp, Homo sapien
tatatctgtaatgaactcatggtaccagaatta

SEQ ID NO: 343267 - DNA, 33 bp, Homo sapien
actttctggaaatatacgttgaaccctgtaaaa

SEQ ID NO: 343268 - DNA, 33 bp, Homo sapien
actttctggaaatatatgttgaaccctgtaaaa

SEQ ID NO: 343269 - DNA, 33 bp, Homo sapien
tcaattgtataacaaactggtgataggaagaag

SEQ ID NO: 343270 - DNA, 33 bp, Homo sapien
tcaattgtataacaaattggtgataggaagaag

SEQ ID NO: 343271 - DNA, 33 bp, Homo sapien
agcttaatttataaacagcttcctgcaaagccc

SEQ ID NO: 343272 - DNA, 33 bp, Homo sapien
agcttaatttataaacggcttcctgcaaagccc

SEQ ID NO: 343273 - DNA, 33 bp, Homo sapien
ctactgcacgtaatgaaaactgactgtattctc

SEQ ID NO: 343274 - DNA, 33 bp, Homo sapien
ctactgcacgtaatgagaactgactgtattctc

SEQ ID NO: 343275 - DNA, 33 bp, Homo sapien
aacagagcatcaaacaatagtcgcttcattcat

SEQ ID NO: 343276 - DNA, 33 bp, Homo sapien
aacagagcatcaaacagtagtcgcttcattcat

SEQ ID NO: 343277 - DNA, 33 bp, Homo sapien
caaaggaaaaaaatgacaatcagaataatgtat

SEQ ID NO: 343278 - DNA, 33 bp, Homo sapien
caaaggaaaaaaatgagaatcagaataatgtat

SEQ ID NO: 343279 - DNA, 33 bp, Homo sapien
catcaagagagtttgaataatgatgctaacaat

SEQ ID NO: 343280 - DNA, 33 bp, Homo sapien
catcaagagagtttgagtaatgatgctaacaat

SEQ ID NO: 343281 - DNA, 33 bp, Homo sapien
ggatgtgacagatcagcaaagagacacgagtcc

SEQ ID NO: 343282 - DNA, 33 bp, Homo sapien
ggatgtgacagatcaggaaagagacacgagtcc

SEQ ID NO: 343283 - DNA, 33 bp, Homo sapien
ctcatctagaaggagggaagactagagtaaatc

SEQ ID NO: 343284 - DNA, 33 bp, Homo sapien
ctcatctagaaggaggtaagactagagtaaatc

SEQ ID NO: 343285 - DNA, 33 bp, Homo sapien
gtggatcctggaattacgagttttttaagtgtt

SEQ ID NO: 343286 - DNA, 33 bp, Homo sapien
gtggatcctggaattatgagttttttaagtgtt

SEQ ID NO: 343287 - DNA, 33 bp, Homo sapien
tggcaaagtgttcagacgacaagccagttacct

SEQ ID NO: 343288 - DNA, 33 bp, Homo sapien
tggcaaagtgttcagatgacaagccagttacct

SEQ ID NO: 343289 - DNA, 33 bp, Homo sapien
agaaagttctgatatgcaggttaaaactggatg

SEQ ID NO: 343290 - DNA, 33 bp, Homo sapien
agaaagttctgatatggaggttaaaactggatg

SEQ ID NO: 343291 - DNA, 33 bp, Homo sapien
atgaaggaaagccaccaatgaagggatgtgaga

SEQ ID NO: 343292 - DNA, 33 bp, Homo sapien
atgaaggaaagccaccgatgaagggatgtgaga

SEQ ID NO: 343293 - DNA, 33 bp, Homo sapien
aatttgacattttacactgcagcagtatacatg

SEQ ID NO: 343294 - DNA, 33 bp, Homo sapien
aatttgacattttacattgcagcagtatacatg

SEQ ID NO: 343295 - DNA, 33 bp, Homo sapien
gaagaatctgtatttcaaagcagaatataaatg

SEQ ID NO: 343296 - DNA, 33 bp, Homo sapien
gaagaatctgtatttcgaagcagaatataaatg

SEQ ID NO: 343297 - DNA, 33 bp, Homo sapien
caaaaaatattcacaacccttctaatgcgcttc

SEQ ID NO: 343298 - DNA, 33 bp, Homo sapien
caaaaaatattcacaatccttctaatgcgcttc

SEQ ID NO: 343299 - DNA, 33 bp, Homo sapien
aatgatttgcgctacaaaaatttgatatgcatc

SEQ ID NO: 343300 - DNA, 33 bp, Homo sapien
aatgatttgcgctacagaaatttgatatgcatc

SEQ ID NO: 343301 - DNA, 33 bp, Homo sapien
tcttcagggctctttacgtagatccaagtgtct

SEQ ID NO: 343302 - DNA, 33 bp, Homo sapien
tcttcagggctctttatgtagatccaagtgtct

SEQ ID NO: 343303 - DNA, 33 bp, Homo sapien
actaagtgtgaaacaaacaggcattgagtaatt

SEQ ID NO: 343304 - DNA, 33 bp, Homo sapien
actaagtgtgaaacaagcaggcattgagtaatt

SEQ ID NO: 343305 - DNA, 33 bp, Homo sapien
ggtatgggacttagaaactcatttgatgttgag

SEQ ID NO: 343306 - DNA, 33 bp, Homo sapien
ggtatgggacttagaagctcatttgatgttgag

SEQ ID NO: 343307 - DNA, 33 bp, Homo sapien
catattgagattctaactgagatttactttgaa

SEQ ID NO: 343308 - DNA, 33 bp, Homo sapien
catattgagattctaattgagatttactttgaa

SEQ ID NO: 343309 - DNA, 33 bp, Homo sapien
tacatttagtatgtggaatgtatgtgtgtgtaa

SEQ ID NO: 343310 - DNA, 33 bp, Homo sapien
tacatttagtatgtgggatgtatgtgtgtgtaa

SEQ ID NO: 343311 - DNA, 33 bp, Homo sapien
aacctgatctctgacaatgataataaaatttgt

SEQ ID NO: 343312 - DNA, 33 bp, Homo sapien
aacctgatctctgacagtgataataaaatttgt

SEQ ID NO: 343313 - DNA, 33 bp, Homo sapien
tctttggtatggagaaaaattagaagactttta

SEQ ID NO: 343314 - DNA, 33 bp, Homo sapien
tctttggtatggagaagaattagaagactttta

SEQ ID NO: 343315 - DNA, 33 bp, Homo sapien
tcatctgtctatgaaacaaaacccaaattgcat

SEQ ID NO: 343316 - DNA, 33 bp, Homo sapien
tcatctgtctatgaaataaaacccaaattgcat

SEQ ID NO: 343317 - DNA, 33 bp, Homo sapien
tccgtttctaattttcaaatatttacaacatgt

SEQ ID NO: 343318 - DNA, 33 bp, Homo sapien
tccgtttctaattttccaatatttacaacatgt

SEQ ID NO: 343319 - DNA, 33 bp, Homo sapien
tgttatagcttcaccagtgcaacacatggcttc

SEQ ID NO: 343320 - DNA, 33 bp, Homo sapien
tgttatagcttcaccattgcaacacatggcttc

SEQ ID NO: 343321 - DNA, 33 bp, Homo sapien
taaaaagtcagctctaataagtttactacacat

SEQ ID NO: 343322 - DNA, 33 bp, Homo sapien
taaaaagtcagctctagtaagtttactacacat

SEQ ID NO: 343323 - DNA, 33 bp, Homo sapien
acaaacttctagatccaagaagttcagcaaatt

SEQ ID NO: 343324 - DNA, 33 bp, Homo sapien
acaaacttctagatcccagaagttcagcaaatt

SEQ ID NO: 343325 - DNA, 33 bp, Homo sapien
agtagtaacagattccaccattaagaactaatt

SEQ ID NO: 343326 - DNA, 33 bp, Homo sapien
agtagtaacagattcctccattaagaactaatt

SEQ ID NO: 343327 - DNA, 33 bp, Homo sapien
ttgatcttcaactttccaattattgccaaattg

SEQ ID NO: 343328 - DNA, 33 bp, Homo sapien
ttgatcttcaactttctaattattgccaaattg

SEQ ID NO: 343329 - DNA, 33 bp, Homo sapien
cacgaacctttcgtcaactcccaggggaacaat

SEQ ID NO: 343330 - DNA, 33 bp, Homo sapien
cacgaacctttcgtcatctcccaggggaacaat

SEQ ID NO: 343331 - DNA, 33 bp, Homo sapien
ttgctgtaatgcttcacctataagagagctcaa

SEQ ID NO: 343332 - DNA, 33 bp, Homo sapien
ttgctgtaatgcttcatctataagagagctcaa

SEQ ID NO: 343333 - DNA, 33 bp, Homo sapien
gttatattgtggctgacgttagtatgtttttgt

SEQ ID NO: 343334 - DNA, 33 bp, Homo sapien
gttatattgtggctgatgttagtatgtttttgt

SEQ ID NO: 343335 - DNA, 33 bp, Homo sapien
tggaagcttacatcaacagagccaggcttggag

SEQ ID NO: 343336 - DNA, 33 bp, Homo sapien
tggaagcttacatcaatagagccaggcttggag

SEQ ID NO: 343337 - DNA, 33 bp, Homo sapien
tgaaatagattttgaaaagtttgaggtgaatac

SEQ ID NO: 343338 - DNA, 33 bp, Homo sapien
tgaaatagattttgaagagtttgaggtgaatac

SEQ ID NO: 343339 - DNA, 33 bp, Homo sapien
tggacataaaaatttaagattgttgtgttttcc

SEQ ID NO: 343340 - DNA, 33 bp, Homo sapien
tggacataaaaatttaggattgttgtgttttcc

SEQ ID NO: 343341 - DNA, 33 bp, Homo sapien
atgaagtatgaacggaataagcacaccagtgaa

SEQ ID NO: 343342 - DNA, 33 bp, Homo sapien
atgaagtatgaacggactaagcacaccagtgaa

SEQ ID NO: 343343 - DNA, 33 bp, Homo sapien
aggacagacataaacaacagtggaaccaaacag

SEQ ID NO: 343344 - DNA, 33 bp, Homo sapien
aggacagacataaacatcagtggaaccaaacag

SEQ ID NO: 343345 - DNA, 33 bp, Homo sapien
ctaaattattgtgcaacggccctttccaagaat

SEQ ID NO: 343346 - DNA, 33 bp, Homo sapien
ctaaattattgtgcaatggccctttccaagaat

SEQ ID NO: 343347 - DNA, 33 bp, Homo sapien
tccagaactgggtataactgtgagctaatatta

SEQ ID NO: 343348 - DNA, 33 bp, Homo sapien
tccagaactgggtatagctgtgagctaatatta

SEQ ID NO: 343349 - DNA, 33 bp, Homo sapien
aatgttctgcctaataaaaattctattctagaa

SEQ ID NO: 343350 - DNA, 33 bp, Homo sapien
aatgttctgcctaatataaattctattctagaa

SEQ ID NO: 343351 - DNA, 33 bp, Homo sapien
ttcaccgccagttcagaccgcattgaaatttgg

SEQ ID NO: 343352 - DNA, 33 bp, Homo sapien
ttcaccgccagttcagtccgcattgaaatttgg

SEQ ID NO: 343353 - DNA, 33 bp, Homo sapien
ccctacagatgacctcagacgaacaccctctca

SEQ ID NO: 343354 - DNA, 33 bp, Homo sapien
ccctacagatgacctcggacgaacaccctctca

SEQ ID NO: 343355 - DNA, 33 bp, Homo sapien
ggataatacagatggacgatacagatttttaaa

SEQ ID NO: 343356 - DNA, 33 bp, Homo sapien
ggataatacagatggatgatacagatttttaaa

SEQ ID NO: 343357 - DNA, 33 bp, Homo sapien
tggtgggaatgatgctaagagtatagtaggaag

SEQ ID NO: 343358 - DNA, 33 bp, Homo sapien
tggtgggaatgatgctgagagtatagtaggaag

SEQ ID NO: 343359 - DNA, 33 bp, Homo sapien
aacggaggcacagctacggcagtacactgagct

SEQ ID NO: 343360 - DNA, 33 bp, Homo sapien
aacggaggcacagctatggcagtacactgagct

SEQ ID NO: 343361 - DNA, 33 bp, Homo sapien
gctccaaaatagccccccttccttctgcttgta

SEQ ID NO: 343362 - DNA, 33 bp, Homo sapien
gctccaaaatagccccgcttccttctgcttgta

SEQ ID NO: 343363 - DNA, 33 bp, Homo sapien
gtgccaagaacatacactaaggagagaacagtc

SEQ ID NO: 343364 - DNA, 33 bp, Homo sapien
gtgccaagaacatacagtaaggagagaacagtc

SEQ ID NO: 343365 - DNA, 33 bp, Homo sapien
gttgttccttgccccaaagctattactagttta

SEQ ID NO: 343366 - DNA, 33 bp, Homo sapien
gttgttccttgccccagagctattactagttta

SEQ ID NO: 343367 - DNA, 33 bp, Homo sapien
ttttggttttatttaactcccagtacataactt

SEQ ID NO: 343368 - DNA, 33 bp, Homo sapien
ttttggttttatttaagtcccagtacataactt

SEQ ID NO: 343369 - DNA, 33 bp, Homo sapien
gaccgactaaatgggacccagctaaatacgaga

SEQ ID NO: 343370 - DNA, 33 bp, Homo sapien
gaccgactaaatgggagccagctaaatacgaga

SEQ ID NO: 343371 - DNA, 33 bp, Homo sapien
ggttactttaacactgccaagcttctaaggaga

SEQ ID NO: 343372 - DNA, 33 bp, Homo sapien
ggttactttaacactgtcaagcttctaaggaga

SEQ ID NO: 343373 - DNA, 33 bp, Homo sapien
attagtaaatttatgaagagcctcctatgctat

SEQ ID NO: 343374 - DNA, 33 bp, Homo sapien
attagtaaatttatgaggagcctcctatgctat

SEQ ID NO: 343375 - DNA, 33 bp, Homo sapien
ttgagtatatatgaacgagttactgctgaacta

SEQ ID NO: 343376 - DNA, 33 bp, Homo sapien
ttgagtatatatgaactagttactgctgaacta

SEQ ID NO: 343377 - DNA, 33 bp, Homo sapien
gattaaagctagggtcaagtggggagcagagtt

SEQ ID NO: 343378 - DNA, 33 bp, Homo sapien
gattaaagctagggtcgagtggggagcagagtt

SEQ ID NO: 343379 - DNA, 33 bp, Homo sapien
ggaaatgagtctaccacagctggcaggttttct

SEQ ID NO: 343380 - DNA, 33 bp, Homo sapien
ggaaatgagtctaccatagctggcaggttttct

SEQ ID NO: 343381 - DNA, 33 bp, Homo sapien
tgacaaaataatgttacaccaaatccccatgac

SEQ ID NO: 343382 - DNA, 33 bp, Homo sapien
tgacaaaataatgttataccaaatccccatgac

SEQ ID NO: 343383 - DNA, 33 bp, Homo sapien
tattaattatgctaacagagatgagaaggagtt

SEQ ID NO: 343384 - DNA, 33 bp, Homo sapien
tattaattatgctaacggagatgagaaggagtt

SEQ ID NO: 343385 - DNA, 33 bp, Homo sapien
tccaaaatcaattaacaggagtcatgatttctg

SEQ ID NO: 343386 - DNA, 33 bp, Homo sapien
tccaaaatcaattaaccggagtcatgatttctg

SEQ ID NO: 343387 - DNA, 33 bp, Homo sapien
cgtgttcagcgcaagcaatttctcagattatta

SEQ ID NO: 343388 - DNA, 33 bp, Homo sapien
cgtgttcagcgcaagccatttctcagattatta

SEQ ID NO: 343389 - DNA, 33 bp, Homo sapien
ggagagccaaagaggccaagcttgctgtgagca

SEQ ID NO: 343390 - DNA, 33 bp, Homo sapien
ggagagccaaagaggctaagcttgctgtgagca

SEQ ID NO: 343391 - DNA, 33 bp, Homo sapien
attccttggcactaccggcttataaaattagta

SEQ ID NO: 343392 - DNA, 33 bp, Homo sapien
attccttggcactacctgcttataaaattagta

SEQ ID NO: 343393 - DNA, 33 bp, Homo sapien
ataatatagatctaacacataaaagcagagagg

SEQ ID NO: 343394 - DNA, 33 bp, Homo sapien
ataatatagatctaactcataaaagcagagagg

SEQ ID NO: 343395 - DNA, 33 bp, Homo sapien
gtcacgacctccttacaacaagtgatctgcctg

SEQ ID NO: 343396 - DNA, 33 bp, Homo sapien
gtcacgacctccttacgacaagtgatctgcctg

SEQ ID NO: 343397 - DNA, 33 bp, Homo sapien
ttttccagagaagacacggtggtcaaaaagcac

SEQ ID NO: 343398 - DNA, 33 bp, Homo sapien
ttttccagagaagacatggtggtcaaaaagcac

SEQ ID NO: 343399 - DNA, 33 bp, Homo sapien
ttttccgtttgccatacgttaccaggactatca

SEQ ID NO: 343400 - DNA, 33 bp, Homo sapien
ttttccgtttgccatatgttaccaggactatca

SEQ ID NO: 343401 - DNA, 33 bp, Homo sapien
aaaaatcaatgaactgcacaaagtcacaacaga

SEQ ID NO: 343402 - DNA, 33 bp, Homo sapien
aaaaatcaatgaactggacaaagtcacaacaga

SEQ ID NO: 343403 - DNA, 33 bp, Homo sapien
acaaaaaaactttagactatgtgctatgtggca

SEQ ID NO: 343404 - DNA, 33 bp, Homo sapien
acaaaaaaactttagagtatgtgctatgtggca

SEQ ID NO: 343405 - DNA, 33 bp, Homo sapien
aaaccagctcacagaaatacacagggctagaga

SEQ ID NO: 343406 - DNA, 33 bp, Homo sapien
aaaccagctcacagaagtacacagggctagaga

SEQ ID NO: 343407 - DNA, 33 bp, Homo sapien
gcattcttaaagaacacaaattccaaccaagaa

SEQ ID NO: 343408 - DNA, 33 bp, Homo sapien
gcattcttaaagaacagaaattccaaccaagaa

SEQ ID NO: 343409 - DNA, 33 bp, Homo sapien
aaaagaaagcaagatccatccatcttctatctt

SEQ ID NO: 343410 - DNA, 33 bp, Homo sapien
aaaagaaagcaagatctatccatcttctatctt

SEQ ID NO: 343411 - DNA, 33 bp, Homo sapien
atttatagattatgagacctgatagaaacctta

SEQ ID NO: 343412 - DNA, 33 bp, Homo sapien
atttatagattatgaggcctgatagaaacctta

SEQ ID NO: 343413 - DNA, 33 bp, Homo sapien
tgtaggcctaagataacgtatgtgtttgtgtct

SEQ ID NO: 343414 - DNA, 33 bp, Homo sapien
tgtaggcctaagataatgtatgtgtttgtgtct

SEQ ID NO: 343415 - DNA, 33 bp, Homo sapien
agtgggacttcgtgaacgaaattttttgttttt

SEQ ID NO: 343416 - DNA, 33 bp, Homo sapien
agtgggacttcgtgaatgaaattttttgttttt

SEQ ID NO: 343417 - DNA, 33 bp, Homo sapien
ttgctgagcatcttgaccacattagtaaactct

SEQ ID NO: 343418 - DNA, 33 bp, Homo sapien
ttgctgagcatcttgagcacattagtaaactct

SEQ ID NO: 343419 - DNA, 33 bp, Homo sapien
tcaggtctgtgaagcacggataatattactgac

SEQ ID NO: 343420 - DNA, 33 bp, Homo sapien
tcaggtctgtgaagcagggataatattactgac

SEQ ID NO: 343421 - DNA, 33 bp, Homo sapien
aaaaacataagatccaactcctaataagcacta

SEQ ID NO: 343422 - DNA, 33 bp, Homo sapien
aaaaacataagatccagctcctaataagcacta

SEQ ID NO: 343423 - DNA, 33 bp, Homo sapien
caagttgatacattcaatcgtctgaacaatatt

SEQ ID NO: 343424 - DNA, 33 bp, Homo sapien
caagttgatacattcattcgtctgaacaatatt

SEQ ID NO: 343425 - DNA, 33 bp, Homo sapien
actagtacaatcaatacggaaaatagtgtggag

SEQ ID NO: 343426 - DNA, 33 bp, Homo sapien
actagtacaatcaatatggaaaatagtgtggag

SEQ ID NO: 343427 - DNA, 33 bp, Homo sapien
aacttccagtagcagaccctaaagaaatagaga

SEQ ID NO: 343428 - DNA, 33 bp, Homo sapien
aacttccagtagcagagcctaaagaaatagaga

SEQ ID NO: 343429 - DNA, 33 bp, Homo sapien
catatctatcaatgggaacagttaacataattt

SEQ ID NO: 343430 - DNA, 33 bp, Homo sapien
catatctatcaatgggtacagttaacataattt

SEQ ID NO: 343431 - DNA, 33 bp, Homo sapien
ttcaataaaagtcacaagagtggctcaatatta

SEQ ID NO: 343432 - DNA, 33 bp, Homo sapien
ttcaataaaagtcacatgagtggctcaatatta

SEQ ID NO: 343433 - DNA, 33 bp, Homo sapien
tgtggtacatacttcaagaagagttgatatggt

SEQ ID NO: 343434 - DNA, 33 bp, Homo sapien
tgtggtacatacttcaggaagagttgatatggt

SEQ ID NO: 343435 - DNA, 33 bp, Homo sapien
acacaaggcttctaaacctacttccagattaca

SEQ ID NO: 343436 - DNA, 33 bp, Homo sapien
acacaaggcttctaaagctacttccagattaca

SEQ ID NO: 343437 - DNA, 33 bp, Homo sapien
actaggcttaaagtcacggcagttcatcttagc

SEQ ID NO: 343438 - DNA, 33 bp, Homo sapien
actaggcttaaagtcatggcagttcatcttagc

SEQ ID NO: 343439 - DNA, 33 bp, Homo sapien
gtggctagaaactccagtctcaaagtggcagct

SEQ ID NO: 343440 - DNA, 33 bp, Homo sapien
gtggctagaaactccattctcaaagtggcagct

SEQ ID NO: 343441 - DNA, 33 bp, Homo sapien
gcataattttggagtacagtcctagacaactag

SEQ ID NO: 343442 - DNA, 33 bp, Homo sapien
gcataattttggagtagagtcctagacaactag

SEQ ID NO: 343443 - DNA, 33 bp, Homo sapien
agtagaacttcacacaatgctgaaatcacaagg

SEQ ID NO: 343444 - DNA, 33 bp, Homo sapien
agtagaacttcacacagtgctgaaatcacaagg

SEQ ID NO: 343445 - DNA, 33 bp, Homo sapien
cagatgtgcatcagtcaaaaaatagttatgcat

SEQ ID NO: 343446 - DNA, 33 bp, Homo sapien
cagatgtgcatcagtccaaaaatagttatgcat

SEQ ID NO: 343447 - DNA, 33 bp, Homo sapien
accactatggtagatcaactcaagcctgtaaaa

SEQ ID NO: 343448 - DNA, 33 bp, Homo sapien
accactatggtagatcgactcaagcctgtaaaa

SEQ ID NO: 343449 - DNA, 33 bp, Homo sapien
gtgacaacaatgtcaaatactctaaagaagtca

SEQ ID NO: 343450 - DNA, 33 bp, Homo sapien
gtgacaacaatgtcaactactctaaagaagtca

SEQ ID NO: 343451 - DNA, 33 bp, Homo sapien
aagtaaacctaatacaatcaaatccaacgcaag

SEQ ID NO: 343452 - DNA, 33 bp, Homo sapien
aagtaaacctaatacagtcaaatccaacgcaag

SEQ ID NO: 343453 - DNA, 33 bp, Homo sapien
atctgagaacttatggaactcaaggcactgtac

SEQ ID NO: 343454 - DNA, 33 bp, Homo sapien
atctgagaacttatggcactcaaggcactgtac

SEQ ID NO: 343455 - DNA, 33 bp, Homo sapien
gattttagagttaataacccagtttgtgtgact

SEQ ID NO: 343456 - DNA, 33 bp, Homo sapien
gattttagagttaatatcccagtttgtgtgact

SEQ ID NO: 343457 - DNA, 33 bp, Homo sapien
ttgttctttcaagcacgcaagaacaggattagt

SEQ ID NO: 343458 - DNA, 33 bp, Homo sapien
ttgttctttcaagcactcaagaacaggattagt

SEQ ID NO: 343459 - DNA, 33 bp, Homo sapien
tgttcaatggagacataaaaggcctcagctcag

SEQ ID NO: 343460 - DNA, 33 bp, Homo sapien
tgttcaatggagacatcaaaggcctcagctcag

SEQ ID NO: 343461 - DNA, 33 bp, Homo sapien
agaatctgccacttacacatgaggattattttg

SEQ ID NO: 343462 - DNA, 33 bp, Homo sapien
agaatctgccacttacgcatgaggattattttg

SEQ ID NO: 343463 - DNA, 33 bp, Homo sapien
ccacagcactgggcgaaattgaccttttgaaga

SEQ ID NO: 343464 - DNA, 33 bp, Homo sapien
ccacagcactgggcgacattgaccttttgaaga

SEQ ID NO: 343465 - DNA, 33 bp, Homo sapien
gaaaagttgtgccccaccaagaattacagagct

SEQ ID NO: 343466 - DNA, 33 bp, Homo sapien
gaaaagttgtgccccagcaagaattacagagct

SEQ ID NO: 343467 - DNA, 33 bp, Homo sapien
aacaagagaaaaactaagtaaatttgagtaaca

SEQ ID NO: 343468 - DNA, 33 bp, Homo sapien
aacaagagaaaaactaggtaaatttgagtaaca

SEQ ID NO: 343469 - DNA, 33 bp, Homo sapien
tgtgaaaaaactttgcacaaatgaactatgtat

SEQ ID NO: 343470 - DNA, 33 bp, Homo sapien
tgtgaaaaaactttgctcaaatgaactatgtat

SEQ ID NO: 343471 - DNA, 33 bp, Homo sapien
ttcttttactgaaaaacaggagaatggacactg

SEQ ID NO: 343472 - DNA, 33 bp, Homo sapien
ttcttttactgaaaaagaggagaatggacactg

SEQ ID NO: 343473 - DNA, 33 bp, Homo sapien
gaacaagagtaagaaacagaatgagagccaata

SEQ ID NO: 343474 - DNA, 33 bp, Homo sapien
gaacaagagtaagaaagagaatgagagccaata

SEQ ID NO: 343475 - DNA, 33 bp, Homo sapien
gaatgtggaagaagagccagacctgattagagc

SEQ ID NO: 343476 - DNA, 33 bp, Homo sapien
gaatgtggaagaagaggcagacctgattagagc

SEQ ID NO: 343477 - DNA, 33 bp, Homo sapien
tcaggggaaggcaggaataccttaagtaaggct

SEQ ID NO: 343478 - DNA, 33 bp, Homo sapien
tcaggggaaggcaggagtaccttaagtaaggct

SEQ ID NO: 343479 - DNA, 33 bp, Homo sapien
gtaataattgacatgcgcaaaagggatggaggc

SEQ ID NO: 343480 - DNA, 33 bp, Homo sapien
gtaataattgacatgctcaaaagggatggaggc

SEQ ID NO: 343481 - DNA, 33 bp, Homo sapien
tgaaaagaaatgtgtaaggaattgtctaatgaa

SEQ ID NO: 343482 - DNA, 33 bp, Homo sapien
tgaaaagaaatgtgtagggaattgtctaatgaa

SEQ ID NO: 343483 - DNA, 33 bp, Homo sapien
tccattctcttggacacgtacttttcagggttg

SEQ ID NO: 343484 - DNA, 33 bp, Homo sapien
tccattctcttggacatgtacttttcagggttg

SEQ ID NO: 343485 - DNA, 33 bp, Homo sapien
aggaagtaggatcaacaagatttgggtgtagga

SEQ ID NO: 343486 - DNA, 33 bp, Homo sapien
aggaagtaggatcaacgagatttgggtgtagga

SEQ ID NO: 343487 - DNA, 33 bp, Homo sapien
ctactcacagaggaacacagtaaggaaaattgc

SEQ ID NO: 343488 - DNA, 33 bp, Homo sapien
ctactcacagaggaacgcagtaaggaaaattgc

SEQ ID NO: 343489 - DNA, 33 bp, Homo sapien
tagtttgcctcaattgcaatttttttgttccag

SEQ ID NO: 343490 - DNA, 33 bp, Homo sapien
tagtttgcctcaattgtaatttttttgttccag

SEQ ID NO: 343491 - DNA, 33 bp, Homo sapien
attgacccttttatcaatacataatcaccttct

SEQ ID NO: 343492 - DNA, 33 bp, Homo sapien
attgacccttttatcagtacataatcaccttct

SEQ ID NO: 343493 - DNA, 33 bp, Homo sapien
agtaccaaaccccatacatgctgcgtttttcct

SEQ ID NO: 343494 - DNA, 33 bp, Homo sapien
agtaccaaaccccatatatgctgcgtttttcct

SEQ ID NO: 343495 - DNA, 33 bp, Homo sapien
ggactgctagtctcccaaactatgaaaaaatta

SEQ ID NO: 343496 - DNA, 33 bp, Homo sapien
ggactgctagtctcccgaactatgaaaaaatta

SEQ ID NO: 343497 - DNA, 33 bp, Homo sapien
tagacctgtcgaaaccgaaagatggcaggacgt

SEQ ID NO: 343498 - DNA, 33 bp, Homo sapien
tagacctgtcgaaacctaaagatggcaggacgt

SEQ ID NO: 343499 - DNA, 33 bp, Homo sapien
agtaatttactacccccgctaaacacctgactt

SEQ ID NO: 343500 - DNA, 33 bp, Homo sapien
agtaatttactacccctgctaaacacctgactt

SEQ ID NO: 343501 - DNA, 33 bp, Homo sapien
gtagcctgaagcagcacgttgcaagtgagtgga

SEQ ID NO: 343502 - DNA, 33 bp, Homo sapien
gtagcctgaagcagcatgttgcaagtgagtgga

SEQ ID NO: 343503 - DNA, 33 bp, Homo sapien
agaggaggttatgaaacgctagagaaactcttg

SEQ ID NO: 343504 - DNA, 33 bp, Homo sapien
agaggaggttatgaaatgctagagaaactcttg

SEQ ID NO: 343505 - DNA, 33 bp, Homo sapien
tgagacagaagccccaaaattttcttgagtcca

SEQ ID NO: 343506 - DNA, 33 bp, Homo sapien
tgagacagaagccccagaattttcttgagtcca

SEQ ID NO: 343507 - DNA, 33 bp, Homo sapien
agaaatctttccttaactggtcacaaatgtttt

SEQ ID NO: 343508 - DNA, 33 bp, Homo sapien
agaaatctttccttaattggtcacaaatgtttt

SEQ ID NO: 343509 - DNA, 33 bp, Homo sapien
ttttgagatgcagatacatcctactgttagaaa

SEQ ID NO: 343510 - DNA, 33 bp, Homo sapien
ttttgagatgcagatatatcctactgttagaaa

SEQ ID NO: 343511 - DNA, 33 bp, Homo sapien
ccagcagtttgaaacacgaggaaagttatctat

SEQ ID NO: 343512 - DNA, 33 bp, Homo sapien
ccagcagtttgaaacatgaggaaagttatctat

SEQ ID NO: 343513 - DNA, 33 bp, Homo sapien
aaagagtttcaacaaacctcatgcattcttctc

SEQ ID NO: 343514 - DNA, 33 bp, Homo sapien
aaagagtttcaacaaagctcatgcattcttctc

SEQ ID NO: 343515 - DNA, 33 bp, Homo sapien
tactttagtatttacaacaatcctgctttaata

SEQ ID NO: 343516 - DNA, 33 bp, Homo sapien
tactttagtatttacagcaatcctgctttaata

SEQ ID NO: 343517 - DNA, 33 bp, Homo sapien
tgttcttctgttttcacctttatgaaccatata

SEQ ID NO: 343518 - DNA, 33 bp, Homo sapien
tgttcttctgttttcatctttatgaaccatata

SEQ ID NO: 343519 - DNA, 33 bp, Homo sapien
tacatactcgcacctgcaaaaccaacagatgat

SEQ ID NO: 343520 - DNA, 33 bp, Homo sapien
tacatactcgcacctggaaaaccaacagatgat

SEQ ID NO: 343521 - DNA, 33 bp, Homo sapien
aagtgggcatctgcagaaaaagttttcagaaat

SEQ ID NO: 343522 - DNA, 33 bp, Homo sapien
aagtgggcatctgcaggaaaagttttcagaaat

SEQ ID NO: 343523 - DNA, 33 bp, Homo sapien
aatgcctctctgggccggatttatttatttatt

SEQ ID NO: 343524 - DNA, 33 bp, Homo sapien
aatgcctctctgggcctgatttatttatttatt

SEQ ID NO: 343525 - DNA, 33 bp, Homo sapien
cttgccaatcataaggaaacagtttgagaatgc

SEQ ID NO: 343526 - DNA, 33 bp, Homo sapien
cttgccaatcataagggaacagtttgagaatgc

SEQ ID NO: 343527 - DNA, 33 bp, Homo sapien
tttccctgatgtttgacgatgttggacattttt

SEQ ID NO: 343528 - DNA, 33 bp, Homo sapien
tttccctgatgtttgatgatgttggacattttt

SEQ ID NO: 343529 - DNA, 33 bp, Homo sapien
tcatcagtaccacaaacgatcaagcaagttaaa

SEQ ID NO: 343530 - DNA, 33 bp, Homo sapien
tcatcagtaccacaaatgatcaagcaagttaaa

SEQ ID NO: 343531 - DNA, 33 bp, Homo sapien
gtgtggtgaaataaaaatgtgaccattagtcaa

SEQ ID NO: 343532 - DNA, 33 bp, Homo sapien
gtgtggtgaaataaaactgtgaccattagtcaa

SEQ ID NO: 343533 - DNA, 33 bp, Homo sapien
ctaatgtgtagcataacaaagcacttgttatta

SEQ ID NO: 343534 - DNA, 33 bp, Homo sapien
ctaatgtgtagcataataaagcacttgttatta

SEQ ID NO: 343535 - DNA, 33 bp, Homo sapien
gcttaccttggtcttacggctgaagctttggaa

SEQ ID NO: 343536 - DNA, 33 bp, Homo sapien
gcttaccttggtcttatggctgaagctttggaa

SEQ ID NO: 343537 - DNA, 33 bp, Homo sapien
cctacttcaagcttcaccttaaatcaactttga

SEQ ID NO: 343538 - DNA, 33 bp, Homo sapien
cctacttcaagcttcatcttaaatcaactttga

SEQ ID NO: 343539 - DNA, 33 bp, Homo sapien
gaagaaagagcaaaaacataaatgactgtttca

SEQ ID NO: 343540 - DNA, 33 bp, Homo sapien
gaagaaagagcaaaaagataaatgactgtttca

SEQ ID NO: 343541 - DNA, 33 bp, Homo sapien
agcactgtgttaagaacatccatgcattgtgtc

SEQ ID NO: 343542 - DNA, 33 bp, Homo sapien
agcactgtgttaagaatatccatgcattgtgtc

SEQ ID NO: 343543 - DNA, 33 bp, Homo sapien
ctaaagctaattgtgacataaactgagttatct

SEQ ID NO: 343544 - DNA, 33 bp, Homo sapien
ctaaagctaattgtgatataaactgagttatct

SEQ ID NO: 343545 - DNA, 33 bp, Homo sapien
gtattgggtgcaaatacagtaaagcagtatcag

SEQ ID NO: 343546 - DNA, 33 bp, Homo sapien
gtattgggtgcaaatatagtaaagcagtatcag

SEQ ID NO: 343547 - DNA, 33 bp, Homo sapien
tgaagagaactgggagaatacaaaattgctctt

SEQ ID NO: 343548 - DNA, 33 bp, Homo sapien
tgaagagaactgggaggatacaaaattgctctt

SEQ ID NO: 343549 - DNA, 33 bp, Homo sapien
ctatgaaaaattctgaaatctcctagagttaca

SEQ ID NO: 343550 - DNA, 33 bp, Homo sapien
ctatgaaaaattctgagatctcctagagttaca

SEQ ID NO: 343551 - DNA, 33 bp, Homo sapien
tttaattgtcactcccgagaaatttcatggaac

SEQ ID NO: 343552 - DNA, 33 bp, Homo sapien
tttaattgtcactccctagaaatttcatggaac

SEQ ID NO: 343553 - DNA, 33 bp, Homo sapien
actagtccacttcacaacaaattaaatcgatta

SEQ ID NO: 343554 - DNA, 33 bp, Homo sapien
actagtccacttcacagcaaattaaatcgatta

SEQ ID NO: 343555 - DNA, 33 bp, Homo sapien
ttattagtttctcttaaatacttttccacactt

SEQ ID NO: 343556 - DNA, 33 bp, Homo sapien
ttattagtttctcttacatacttttccacactt

SEQ ID NO: 343557 - DNA, 33 bp, Homo sapien
tttctcctcttccactaacaaactgtttataaa

SEQ ID NO: 343558 - DNA, 33 bp, Homo sapien
tttctcctcttccacttacaaactgtttataaa

SEQ ID NO: 343559 - DNA, 33 bp, Homo sapien
taccctgtgaggacacagcgtttatctcttgcc

SEQ ID NO: 343560 - DNA, 33 bp, Homo sapien
taccctgtgaggacacggcgtttatctcttgcc

SEQ ID NO: 343561 - DNA, 33 bp, Homo sapien
aaatggcaaacttctcacatagtgttatgaaga

SEQ ID NO: 343562 - DNA, 33 bp, Homo sapien
aaatggcaaacttctctcatagtgttatgaaga

SEQ ID NO: 343563 - DNA, 33 bp, Homo sapien
tcccatcagcaacttacgaaggttccagtttct

SEQ ID NO: 343564 - DNA, 33 bp, Homo sapien
tcccatcagcaacttatgaaggttccagtttct

SEQ ID NO: 343565 - DNA, 33 bp, Homo sapien
gcttagagagaagacacacaagtaattcaccag

SEQ ID NO: 343566 - DNA, 33 bp, Homo sapien
gcttagagagaagacatacaagtaattcaccag

SEQ ID NO: 343567 - DNA, 33 bp, Homo sapien
taaatatctgaaggaccggctgtcacagtttgg

SEQ ID NO: 343568 - DNA, 33 bp, Homo sapien
taaatatctgaaggactggctgtcacagtttgg

SEQ ID NO: 343569 - DNA, 33 bp, Homo sapien
gatgccatctcaaaacagaaaaaagaggtgaca

SEQ ID NO: 343570 - DNA, 33 bp, Homo sapien
gatgccatctcaaaacggaaaaaagaggtgaca

SEQ ID NO: 343571 - DNA, 33 bp, Homo sapien
aataaatattgtctataaagtgtcatgcaagtt

SEQ ID NO: 343572 - DNA, 33 bp, Homo sapien
aataaatattgtctatgaagtgtcatgcaagtt

SEQ ID NO: 343573 - DNA, 33 bp, Homo sapien
ttactcattcaagatccctttgttctcagaatg

SEQ ID NO: 343574 - DNA, 33 bp, Homo sapien
ttactcattcaagatcgctttgttctcagaatg

SEQ ID NO: 343575 - DNA, 33 bp, Homo sapien
gtaatgaatgttattacgattacgaatgtaaga

SEQ ID NO: 343576 - DNA, 33 bp, Homo sapien
gtaatgaatgttattatgattacgaatgtaaga

SEQ ID NO: 343577 - DNA, 33 bp, Homo sapien
caatacagagaactaccacctccaagtaatgaa

SEQ ID NO: 343578 - DNA, 33 bp, Homo sapien
caatacagagaactactacctccaagtaatgaa

SEQ ID NO: 343579 - DNA, 33 bp, Homo sapien
acaataaagctccttacagtggtggagaagagc

SEQ ID NO: 343580 - DNA, 33 bp, Homo sapien
acaataaagctccttatagtggtggagaagagc

SEQ ID NO: 343581 - DNA, 33 bp, Homo sapien
gcatcaaaccaagaaaaagtagagtctaagctg

SEQ ID NO: 343582 - DNA, 33 bp, Homo sapien
gcatcaaaccaagaaagagtagagtctaagctg

SEQ ID NO: 343583 - DNA, 33 bp, Homo sapien
attgttcaaaccttcaatatgttaactggcctt

SEQ ID NO: 343584 - DNA, 33 bp, Homo sapien
attgttcaaaccttcagtatgttaactggcctt

SEQ ID NO: 343585 - DNA, 33 bp, Homo sapien
ttggagcgacaaacttaaaagacttttccatag

SEQ ID NO: 343586 - DNA, 33 bp, Homo sapien
ttggagcgacaaacttgaaagacttttccatag

SEQ ID NO: 343587 - DNA, 33 bp, Homo sapien
tctttctctactgacacatcggctactctcaaa

SEQ ID NO: 343588 - DNA, 33 bp, Homo sapien
tctttctctactgacagatcggctactctcaaa

SEQ ID NO: 343589 - DNA, 33 bp, Homo sapien
agacaaagttaaagcacggtgtgattatccata

SEQ ID NO: 343590 - DNA, 33 bp, Homo sapien
agacaaagttaaagcatggtgtgattatccata

SEQ ID NO: 343591 - DNA, 33 bp, Homo sapien
agaaaggcatggtaaacgcggtaagccttgaag

SEQ ID NO: 343592 - DNA, 33 bp, Homo sapien
agaaaggcatggtaaatgcggtaagccttgaag

SEQ ID NO: 343593 - DNA, 33 bp, Homo sapien
tggtaattatcttacaaggtattgatgagaatg

SEQ ID NO: 343594 - DNA, 33 bp, Homo sapien
tggtaattatcttacagggtattgatgagaatg

SEQ ID NO: 343595 - DNA, 33 bp, Homo sapien
atatgtttagtgcactcaaaacgtactgaaaaa

SEQ ID NO: 343596 - DNA, 33 bp, Homo sapien
atatgtttagtgcacttaaaacgtactgaaaaa

SEQ ID NO: 343597 - DNA, 33 bp, Homo sapien
agagtcatataagagcactatctttaaatgact

SEQ ID NO: 343598 - DNA, 33 bp, Homo sapien
agagtcatataagagcgctatctttaaatgact

SEQ ID NO: 343599 - DNA, 33 bp, Homo sapien
ttctatctggacaggaactcttttcatctcaag

SEQ ID NO: 343600 - DNA, 33 bp, Homo sapien
ttctatctggacaggatctcttttcatctcaag

SEQ ID NO: 343601 - DNA, 33 bp, Homo sapien
taaattgtgacttgtagagttttgttgtatatg

SEQ ID NO: 343602 - DNA, 33 bp, Homo sapien
taaattgtgacttgtatagttttgttgtatatg

SEQ ID NO: 343603 - DNA, 33 bp, Homo sapien
agataagaaccaagacacaggagccaggagaga

SEQ ID NO: 343604 - DNA, 33 bp, Homo sapien
agataagaaccaagacgcaggagccaggagaga

SEQ ID NO: 343605 - DNA, 33 bp, Homo sapien
agtgaacaacagcaatcaaactatgaacccatg

SEQ ID NO: 343606 - DNA, 33 bp, Homo sapien
agtgaacaacagcaatgaaactatgaacccatg

SEQ ID NO: 343607 - DNA, 33 bp, Homo sapien
gcaatataaagttagcaacatcccattgattta

SEQ ID NO: 343608 - DNA, 33 bp, Homo sapien
gcaatataaagttagcgacatcccattgattta

SEQ ID NO: 343609 - DNA, 33 bp, Homo sapien
attatgtgttcttagagacatacaatctgagtc

SEQ ID NO: 343610 - DNA, 33 bp, Homo sapien
attatgtgttcttagatacatacaatctgagtc

SEQ ID NO: 343611 - DNA, 33 bp, Homo sapien
aaacacagcaactttacgggattgtatccagat

SEQ ID NO: 343612 - DNA, 33 bp, Homo sapien
aaacacagcaactttatgggattgtatccagat

SEQ ID NO: 343613 - DNA, 33 bp, Homo sapien
aagcatttaatatcatcaaggttgttgcgaaat

SEQ ID NO: 343614 - DNA, 33 bp, Homo sapien
aagcatttaatatcatgaaggttgttgcgaaat

SEQ ID NO: 343615 - DNA, 33 bp, Homo sapien
cggaaattggaaaggacgagagtgtaaagaacg

SEQ ID NO: 343616 - DNA, 33 bp, Homo sapien
cggaaattggaaaggatgagagtgtaaagaacg

SEQ ID NO: 343617 - DNA, 33 bp, Homo sapien
ctcaggagttctagcacccgtctccactgcttt

SEQ ID NO: 343618 - DNA, 33 bp, Homo sapien
ctcaggagttctagcatccgtctccactgcttt

SEQ ID NO: 343619 - DNA, 33 bp, Homo sapien
tgtgaccacaggggcaatgaagcaattacggca

SEQ ID NO: 343620 - DNA, 33 bp, Homo sapien
tgtgaccacaggggcactgaagcaattacggca

SEQ ID NO: 343621 - DNA, 33 bp, Homo sapien
ctaagtctttccccagcagagaacagcctagtg

SEQ ID NO: 343622 - DNA, 33 bp, Homo sapien
ctaagtctttccccagtagagaacagcctagtg

SEQ ID NO: 343623 - DNA, 33 bp, Homo sapien
acacatgctacagctcaaataagcctcaaaaac

SEQ ID NO: 343624 - DNA, 33 bp, Homo sapien
acacatgctacagctcgaataagcctcaaaaac

SEQ ID NO: 343625 - DNA, 33 bp, Homo sapien
atgcacacggtgagtaaagaagggatttcctgc

SEQ ID NO: 343626 - DNA, 33 bp, Homo sapien
atgcacacggtgagtacagaagggatttcctgc

SEQ ID NO: 343627 - DNA, 33 bp, Homo sapien
ttcaccatccattcaccgcacatttcctcagcc

SEQ ID NO: 343628 - DNA, 33 bp, Homo sapien
ttcaccatccattcacggcacatttcctcagcc

SEQ ID NO: 343629 - DNA, 33 bp, Homo sapien
catagcaaccgttctacgtccttggagccaaga

SEQ ID NO: 343630 - DNA, 33 bp, Homo sapien
catagcaaccgttctatgtccttggagccaaga

SEQ ID NO: 343631 - DNA, 33 bp, Homo sapien
ccttgccaggtaaaaagaattcactaaaatctc

SEQ ID NO: 343632 - DNA, 33 bp, Homo sapien
ccttgccaggtaaaaataattcactaaaatctc

SEQ ID NO: 343633 - DNA, 33 bp, Homo sapien
tcaggaaagaattgggccaaccaaggattatta

SEQ ID NO: 343634 - DNA, 33 bp, Homo sapien
tcaggaaagaattggggcaaccaaggattatta

SEQ ID NO: 343635 - DNA, 33 bp, Homo sapien
tgtgtggccttctagaacctaataatagtgata

SEQ ID NO: 343636 - DNA, 33 bp, Homo sapien
tgtgtggccttctagagcctaataatagtgata

SEQ ID NO: 343637 - DNA, 33 bp, Homo sapien
tctattacgctgtgtaacgaaactcgtcccaat

SEQ ID NO: 343638 - DNA, 33 bp, Homo sapien
tctattacgctgtgtatcgaaactcgtcccaat

SEQ ID NO: 343639 - DNA, 33 bp, Homo sapien
acacaaccatctttacatcctccaggcctctag

SEQ ID NO: 343640 - DNA, 33 bp, Homo sapien
acacaaccatctttacgtcctccaggcctctag

SEQ ID NO: 343641 - DNA, 33 bp, Homo sapien
gtcggactgatccccacgtattcctgcattcca

SEQ ID NO: 343642 - DNA, 33 bp, Homo sapien
gtcggactgatccccatgtattcctgcattcca

SEQ ID NO: 343643 - DNA, 33 bp, Homo sapien
tgcccctgacacaaacggctttagcaaaggggt

SEQ ID NO: 343644 - DNA, 33 bp, Homo sapien
tgcccctgacacaaactgctttagcaaaggggt

SEQ ID NO: 343645 - DNA, 33 bp, Homo sapien
ggaatcacagaagctacagatgcttaatggtgt

SEQ ID NO: 343646 - DNA, 33 bp, Homo sapien
ggaatcacagaagctatagatgcttaatggtgt

SEQ ID NO: 343647 - DNA, 33 bp, Homo sapien
agggattaaatgcagaggggtggttaatatgta

SEQ ID NO: 343648 - DNA, 33 bp, Homo sapien
agggattaaatgcagatgggtggttaatatgta

SEQ ID NO: 343649 - DNA, 33 bp, Homo sapien
caagctctgttctctacgaggccctagaagcaa

SEQ ID NO: 343650 - DNA, 33 bp, Homo sapien
caagctctgttctctatgaggccctagaagcaa

SEQ ID NO: 343651 - DNA, 33 bp, Homo sapien
aatcgtatggcttcaacaatgtgtcattctaga

SEQ ID NO: 343652 - DNA, 33 bp, Homo sapien
aatcgtatggcttcaataatgtgtcattctaga

SEQ ID NO: 343653 - DNA, 33 bp, Homo sapien
cacatgcctatagggccaactctctttttcata

SEQ ID NO: 343654 - DNA, 33 bp, Homo sapien
cacatgcctatagggctaactctctttttcata

SEQ ID NO: 343655 - DNA, 33 bp, Homo sapien
ggttcaaggtaggctccatcctgcttcaataag

SEQ ID NO: 343656 - DNA, 33 bp, Homo sapien
ggttcaaggtaggctctatcctgcttcaataag

SEQ ID NO: 343657 - DNA, 33 bp, Homo sapien
gtgccggtggaatgagcattgacctgttctttc

SEQ ID NO: 343658 - DNA, 33 bp, Homo sapien
gtgccggtggaatgagtattgacctgttctttc

SEQ ID NO: 343659 - DNA, 33 bp, Homo sapien
cagagcctctggcagccacagagagttttcaga

SEQ ID NO: 343660 - DNA, 33 bp, Homo sapien
cagagcctctggcagctacagagagttttcaga

SEQ ID NO: 343661 - DNA, 33 bp, Homo sapien
actgaagaacttagtggaggaatgtcaaagctc

SEQ ID NO: 343662 - DNA, 33 bp, Homo sapien
actgaagaacttagtgtaggaatgtcaaagctc

SEQ ID NO: 343663 - DNA, 33 bp, Homo sapien
aagttttgtttttgtcacgagtaccacataaac

SEQ ID NO: 343664 - DNA, 33 bp, Homo sapien
aagttttgtttttgtcgcgagtaccacataaac

SEQ ID NO: 343665 - DNA, 33 bp, Homo sapien
ctccctgattcactcaatagtctgcaagctggg

SEQ ID NO: 343666 - DNA, 33 bp, Homo sapien
ctccctgattcactcagtagtctgcaagctggg

SEQ ID NO: 343667 - DNA, 33 bp, Homo sapien
tgcccaggtgcagccaatgatcacgaattattt

SEQ ID NO: 343668 - DNA, 33 bp, Homo sapien
tgcccaggtgcagccactgatcacgaattattt

SEQ ID NO: 343669 - DNA, 33 bp, Homo sapien
aagctttggtctataaccagcccactgtcagtt

SEQ ID NO: 343670 - DNA, 33 bp, Homo sapien
aagctttggtctataagcagcccactgtcagtt

SEQ ID NO: 343671 - DNA, 33 bp, Homo sapien
tggccaacacaaattgcattgtcaagccccaca

SEQ ID NO: 343672 - DNA, 33 bp, Homo sapien
tggccaacacaaattgtattgtcaagccccaca

SEQ ID NO: 343673 - DNA, 33 bp, Homo sapien
tcaggtcatgatggctaacccgaagaaaatcag

SEQ ID NO: 343674 - DNA, 33 bp, Homo sapien
tcaggtcatgatggctgacccgaagaaaatcag

SEQ ID NO: 343675 - DNA, 33 bp, Homo sapien
gtgtgcttttgaaatacagaaaacaagtgtacc

SEQ ID NO: 343676 - DNA, 33 bp, Homo sapien
gtgtgcttttgaaatatagaaaacaagtgtacc

SEQ ID NO: 343677 - DNA, 33 bp, Homo sapien
gtttgtatcatatcacaattttcctgttctatt

SEQ ID NO: 343678 - DNA, 33 bp, Homo sapien
gtttgtatcatatcaccattttcctgttctatt

SEQ ID NO: 343679 - DNA, 33 bp, Homo sapien
tttgaatagagaacacagtactttatcatttgg

SEQ ID NO: 343680 - DNA, 33 bp, Homo sapien
tttgaatagagaacaccgtactttatcatttgg

SEQ ID NO: 343681 - DNA, 33 bp, Homo sapien
gttggagacacactgtaaaaccaacagagagca

SEQ ID NO: 343682 - DNA, 33 bp, Homo sapien
gttggagacacactgtgaaaccaacagagagca

SEQ ID NO: 343683 - DNA, 33 bp, Homo sapien
ggtacttgggaatcaaattcatgtggaattggg

SEQ ID NO: 343684 - DNA, 33 bp, Homo sapien
ggtacttgggaatcaagttcatgtggaattggg

SEQ ID NO: 343685 - DNA, 33 bp, Homo sapien
tactgcaccctctcaccgccacatattttgaaa

SEQ ID NO: 343686 - DNA, 33 bp, Homo sapien
tactgcaccctctcactgccacatattttgaaa

SEQ ID NO: 343687 - DNA, 33 bp, Homo sapien
tcttgaatgcctcactaagagacaaatctttcc

SEQ ID NO: 343688 - DNA, 33 bp, Homo sapien
tcttgaatgcctcactcagagacaaatctttcc

SEQ ID NO: 343689 - DNA, 33 bp, Homo sapien
tataaaccatcctccaaatcaactaaggaacta

SEQ ID NO: 343690 - DNA, 33 bp, Homo sapien
tataaaccatcctccatatcaactaaggaacta

SEQ ID NO: 343691 - DNA, 33 bp, Homo sapien
tcttctattccatgtcactggctatgtcagcag

SEQ ID NO: 343692 - DNA, 33 bp, Homo sapien
tcttctattccatgtcgctggctatgtcagcag

SEQ ID NO: 343693 - DNA, 33 bp, Homo sapien
actcaagaactagaagccctcaaaactgtattt

SEQ ID NO: 343694 - DNA, 33 bp, Homo sapien
actcaagaactagaaggcctcaaaactgtattt

SEQ ID NO: 343695 - DNA, 33 bp, Homo sapien
accagatgagttctaaaagcttattttgcagtt

SEQ ID NO: 343696 - DNA, 33 bp, Homo sapien
accagatgagttctaacagcttattttgcagtt

SEQ ID NO: 343697 - DNA, 33 bp, Homo sapien
gcaaccatggtagaccaaccttccccaggaaac

SEQ ID NO: 343698 - DNA, 33 bp, Homo sapien
gcaaccatggtagaccgaccttccccaggaaac

SEQ ID NO: 343699 - DNA, 33 bp, Homo sapien
gatgctgtgtgttcacgggcccagggagatgtt

SEQ ID NO: 343700 - DNA, 33 bp, Homo sapien
gatgctgtgtgttcactggcccagggagatgtt

SEQ ID NO: 343701 - DNA, 33 bp, Homo sapien
ggaatgtgcatcatgagcaaatttagccaaatg

SEQ ID NO: 343702 - DNA, 33 bp, Homo sapien
ggaatgtgcatcatgatcaaatttagccaaatg

SEQ ID NO: 343703 - DNA, 33 bp, Homo sapien
ttactatgttgttagccctaaaactgacaaata

SEQ ID NO: 343704 - DNA, 33 bp, Homo sapien
ttactatgttgttagctctaaaactgacaaata

SEQ ID NO: 343705 - DNA, 33 bp, Homo sapien
gaccacacctagacagccattagcttttcattg

SEQ ID NO: 343706 - DNA, 33 bp, Homo sapien
gaccacacctagacaggcattagcttttcattg

SEQ ID NO: 343707 - DNA, 33 bp, Homo sapien
gacacatcactttcaacagaataacactaagaa

SEQ ID NO: 343708 - DNA, 33 bp, Homo sapien
gacacatcactttcaagagaataacactaagaa

SEQ ID NO: 343709 - DNA, 33 bp, Homo sapien
cttaaagtaagattgacgtagccagaaaacaag

SEQ ID NO: 343710 - DNA, 33 bp, Homo sapien
cttaaagtaagattgatgtagccagaaaacaag

SEQ ID NO: 343711 - DNA, 33 bp, Homo sapien
atttcaaatgaatgccagaatgtccaccaaggt

SEQ ID NO: 343712 - DNA, 33 bp, Homo sapien
atttcaaatgaatgccggaatgtccaccaaggt

SEQ ID NO: 343713 - DNA, 33 bp, Homo sapien
cttggatgatatcctaagctgtatatgagcaga

SEQ ID NO: 343714 - DNA, 33 bp, Homo sapien
cttggatgatatcctacgctgtatatgagcaga

SEQ ID NO: 343715 - DNA, 33 bp, Homo sapien
tatgatttagttcagaggttttatatacattta

SEQ ID NO: 343716 - DNA, 33 bp, Homo sapien
tatgatttagttcagatgttttatatacattta

SEQ ID NO: 343717 - DNA, 33 bp, Homo sapien
aatgtacagtggaggcactttaaaatcacactg

SEQ ID NO: 343718 - DNA, 33 bp, Homo sapien
aatgtacagtggaggctctttaaaatcacactg

SEQ ID NO: 343719 - DNA, 33 bp, Homo sapien
aaaggttttatagcaacggtagctgacaaagaa

SEQ ID NO: 343720 - DNA, 33 bp, Homo sapien
aaaggttttatagcaatggtagctgacaaagaa

SEQ ID NO: 343721 - DNA, 33 bp, Homo sapien
ggtacacgatgtttcaaaaacttcactccatca

SEQ ID NO: 343722 - DNA, 33 bp, Homo sapien
ggtacacgatgtttcataaacttcactccatca

SEQ ID NO: 343723 - DNA, 33 bp, Homo sapien
ttctcaattgtttggacgataagacagttcctc

SEQ ID NO: 343724 - DNA, 33 bp, Homo sapien
ttctcaattgtttggatgataagacagttcctc

SEQ ID NO: 343725 - DNA, 33 bp, Homo sapien
gcattgcacagactaacattttgcccatcaaga

SEQ ID NO: 343726 - DNA, 33 bp, Homo sapien
gcattgcacagactaagattttgcccatcaaga

SEQ ID NO: 343727 - DNA, 33 bp, Homo sapien
tgtccattctctgccaatgatacacgtcttgac

SEQ ID NO: 343728 - DNA, 33 bp, Homo sapien
tgtccattctctgccagtgatacacgtcttgac

SEQ ID NO: 343729 - DNA, 33 bp, Homo sapien
tagggcttttggcgagcagatttagcagctgct

SEQ ID NO: 343730 - DNA, 33 bp, Homo sapien
tagggcttttggcgagtagatttagcagctgct

SEQ ID NO: 343731 - DNA, 33 bp, Homo sapien
agaagcagatagggaacagctcatgcagcctgt

SEQ ID NO: 343732 - DNA, 33 bp, Homo sapien
agaagcagatagggaagagctcatgcagcctgt

SEQ ID NO: 343733 - DNA, 33 bp, Homo sapien
agcagaaaatggaatacgtcataaactctaaat

SEQ ID NO: 343734 - DNA, 33 bp, Homo sapien
agcagaaaatggaatatgtcataaactctaaat

SEQ ID NO: 343735 - DNA, 33 bp, Homo sapien
gaataaacaactgatacaacattttgacaaacc

SEQ ID NO: 343736 - DNA, 33 bp, Homo sapien
gaataaacaactgatagaacattttgacaaacc

SEQ ID NO: 343737 - DNA, 33 bp, Homo sapien
gaagaaagaaatggcacgtggctaaactccttt

SEQ ID NO: 343738 - DNA, 33 bp, Homo sapien
gaagaaagaaatggcaggtggctaaactccttt

SEQ ID NO: 343739 - DNA, 33 bp, Homo sapien
cagagtcttgaatacgccatcaggtatgggcat

SEQ ID NO: 343740 - DNA, 33 bp, Homo sapien
cagagtcttgaatacgtcatcaggtatgggcat

SEQ ID NO: 343741 - DNA, 33 bp, Homo sapien
ataaatccctaagacacgagcaatgagaaagct

SEQ ID NO: 343742 - DNA, 33 bp, Homo sapien
ataaatccctaagacaggagcaatgagaaagct

SEQ ID NO: 343743 - DNA, 33 bp, Homo sapien
ccctacaagtaaggaaataaggctgtttggagg

SEQ ID NO: 343744 - DNA, 33 bp, Homo sapien
ccctacaagtaaggaactaaggctgtttggagg

SEQ ID NO: 343745 - DNA, 33 bp, Homo sapien
ggtcttgctgttgcccaggaaggaaacgttggc

SEQ ID NO: 343746 - DNA, 33 bp, Homo sapien
ggtcttgctgttgcccgggaaggaaacgttggc

SEQ ID NO: 343747 - DNA, 33 bp, Homo sapien
ggctgagaggtggagaaggggtgttggccatag

SEQ ID NO: 343748 - DNA, 33 bp, Homo sapien
ggctgagaggtggagacggggtgttggccatag

SEQ ID NO: 343749 - DNA, 33 bp, Homo sapien
catgtagccaactaaaaacatctttatccctct

SEQ ID NO: 343750 - DNA, 33 bp, Homo sapien
catgtagccaactaaatacatctttatccctct

SEQ ID NO: 343751 - DNA, 33 bp, Homo sapien
attaggatacagttcacagtgtaagctctaggt

SEQ ID NO: 343752 - DNA, 33 bp, Homo sapien
attaggatacagttcatagtgtaagctctaggt

SEQ ID NO: 343753 - DNA, 33 bp, Homo sapien
tatttgttgttttcacagattgacgttttttgg

SEQ ID NO: 343754 - DNA, 33 bp, Homo sapien
tatttgttgttttcacggattgacgttttttgg

SEQ ID NO: 343755 - DNA, 33 bp, Homo sapien
actgctaattcccccccacactgaacttctgat

SEQ ID NO: 343756 - DNA, 33 bp, Homo sapien
actgctaattccccccgacactgaacttctgat

SEQ ID NO: 343757 - DNA, 33 bp, Homo sapien
gacagctttggagaacccgtggaaaagcttgag

SEQ ID NO: 343758 - DNA, 33 bp, Homo sapien
gacagctttggagaactcgtggaaaagcttgag

SEQ ID NO: 343759 - DNA, 33 bp, Homo sapien
gcctagagcctggaaacggtgctagacgaactg

SEQ ID NO: 343760 - DNA, 33 bp, Homo sapien
gcctagagcctggaaatggtgctagacgaactg

SEQ ID NO: 343761 - DNA, 33 bp, Homo sapien
atgtagaaacttctaacgatagaatgtgctttt

SEQ ID NO: 343762 - DNA, 33 bp, Homo sapien
atgtagaaacttctaatgatagaatgtgctttt

SEQ ID NO: 343763 - DNA, 33 bp, Homo sapien
ggggctcatcacaaaacagcttttattccagtg

SEQ ID NO: 343764 - DNA, 33 bp, Homo sapien
ggggctcatcacaaaagagcttttattccagtg

SEQ ID NO: 343765 - DNA, 33 bp, Homo sapien
gaccatctaagtgaaaaggattccaataggcct

SEQ ID NO: 343766 - DNA, 33 bp, Homo sapien
gaccatctaagtgaaagggattccaataggcct

SEQ ID NO: 343767 - DNA, 33 bp, Homo sapien
tcatatgaccgggaaaaacaactctggaaaagg

SEQ ID NO: 343768 - DNA, 33 bp, Homo sapien
tcatatgaccgggaaatacaactctggaaaagg

SEQ ID NO: 343769 - DNA, 33 bp, Homo sapien
atgagtggctcagaaaacttcatcgggtcatta

SEQ ID NO: 343770 - DNA, 33 bp, Homo sapien
atgagtggctcagaaagcttcatcgggtcatta

SEQ ID NO: 343771 - DNA, 33 bp, Homo sapien
tgtgagtcagaacgacggctggaaggctgctca

SEQ ID NO: 343772 - DNA, 33 bp, Homo sapien
tgtgagtcagaacgactgctggaaggctgctca

SEQ ID NO: 343773 - DNA, 33 bp, Homo sapien
gagaccctagagcagaaaaagcaacccacaaag

SEQ ID NO: 343774 - DNA, 33 bp, Homo sapien
gagaccctagagcagagaaagcaacccacaaag

SEQ ID NO: 343775 - DNA, 33 bp, Homo sapien
cacaggctttccgtgccgaaatgggggcggtgg

SEQ ID NO: 343776 - DNA, 33 bp, Homo sapien
cacaggctttccgtgctgaaatgggggcggtgg

SEQ ID NO: 343777 - DNA, 33 bp, Homo sapien
tcatcgtcgtcatccacgtcatccagcacttta

SEQ ID NO: 343778 - DNA, 33 bp, Homo sapien
tcatcgtcgtcatccatgtcatccagcacttta

SEQ ID NO: 343779 - DNA, 33 bp, Homo sapien
gtctgccactgagaccaatcacagcctctttgc

SEQ ID NO: 343780 - DNA, 33 bp, Homo sapien
gtctgccactgagacctatcacagcctctttgc

SEQ ID NO: 343781 - DNA, 33 bp, Homo sapien
agaccctggcgaggaacgtaacactgaggagct

SEQ ID NO: 343782 - DNA, 33 bp, Homo sapien
agaccctggcgaggaatgtaacactgaggagct

SEQ ID NO: 343783 - DNA, 33 bp, Homo sapien
aaaattatgtacctcaacatacatgactttaaa

SEQ ID NO: 343784 - DNA, 33 bp, Homo sapien
aaaattatgtacctcatcatacatgactttaaa

SEQ ID NO: 343785 - DNA, 33 bp, Homo sapien
caaggaaaaacagacaagtttggcatcacataa

SEQ ID NO: 343786 - DNA, 33 bp, Homo sapien
caaggaaaaacagacacgtttggcatcacataa

SEQ ID NO: 343787 - DNA, 33 bp, Homo sapien
ctgactgctgtgctcaagatggaggcaggcagc

SEQ ID NO: 343788 - DNA, 33 bp, Homo sapien
ctgactgctgtgctcaggatggaggcaggcagc

SEQ ID NO: 343789 - DNA, 33 bp, Homo sapien
agttttcgtactgataaccgagttttattggca

SEQ ID NO: 343790 - DNA, 33 bp, Homo sapien
agttttcgtactgatatccgagttttattggca

SEQ ID NO: 343791 - DNA, 33 bp, Homo sapien
cgtctcaaaaagaaaaatcttctggcttggaca

SEQ ID NO: 343792 - DNA, 33 bp, Homo sapien
cgtctcaaaaagaaaagtcttctggcttggaca

SEQ ID NO: 343793 - DNA, 33 bp, Homo sapien
aagatcgtttgtgaaaaagctaagattggtggc

SEQ ID NO: 343794 - DNA, 33 bp, Homo sapien
aagatcgtttgtgaaagagctaagattggtggc

SEQ ID NO: 343795 - DNA, 33 bp, Homo sapien
cactcataaacagcaaatgccctgtggaagaac

SEQ ID NO: 343796 - DNA, 33 bp, Homo sapien
cactcataaacagcaactgccctgtggaagaac

SEQ ID NO: 343797 - DNA, 33 bp, Homo sapien
acattagatgccaaaacccgtgcagcaatgcct

SEQ ID NO: 343798 - DNA, 33 bp, Homo sapien
acattagatgccaaaagccgtgcagcaatgcct

SEQ ID NO: 343799 - DNA, 33 bp, Homo sapien
ctgaagctaacaactaccaccttttctccactt

SEQ ID NO: 343800 - DNA, 33 bp, Homo sapien
ctgaagctaacaactatcaccttttctccactt

SEQ ID NO: 343801 - DNA, 33 bp, Homo sapien
cttctggtatttatcagcatatatttcaattac

SEQ ID NO: 343802 - DNA, 33 bp, Homo sapien
cttctggtatttatcatcatatatttcaattac

SEQ ID NO: 343803 - DNA, 33 bp, Homo sapien
aaggagcatgtgttccaactggggatcagagaa

SEQ ID NO: 343804 - DNA, 33 bp, Homo sapien
aaggagcatgtgttccgactggggatcagagaa

SEQ ID NO: 343805 - DNA, 33 bp, Homo sapien
acactcaggtcatttcaatgtgtactggctaca

SEQ ID NO: 343806 - DNA, 33 bp, Homo sapien
acactcaggtcatttcgatgtgtactggctaca

SEQ ID NO: 343807 - DNA, 33 bp, Homo sapien
ctatcacatccttccaataaggtagatgctctc

SEQ ID NO: 343808 - DNA, 33 bp, Homo sapien
ctatcacatccttccattaaggtagatgctctc

SEQ ID NO: 343809 - DNA, 33 bp, Homo sapien
gtctccgtatgaacgaacttttctttccagata

SEQ ID NO: 343810 - DNA, 33 bp, Homo sapien
gtctccgtatgaacgatcttttctttccagata

SEQ ID NO: 343811 - DNA, 33 bp, Homo sapien
catgtgtctgctctgactaatgagtagcctctg

SEQ ID NO: 343812 - DNA, 33 bp, Homo sapien
catgtgtctgctctgattaatgagtagcctctg

SEQ ID NO: 343813 - DNA, 33 bp, Homo sapien
attaacactggcatggaacactcaatatttttg

SEQ ID NO: 343814 - DNA, 33 bp, Homo sapien
attaacactggcatgggacactcaatatttttg

SEQ ID NO: 343815 - DNA, 33 bp, Homo sapien
gactcctcagcctgaacgtaaatgcgtgttagt

SEQ ID NO: 343816 - DNA, 33 bp, Homo sapien
gactcctcagcctgaatgtaaatgcgtgttagt

SEQ ID NO: 343817 - DNA, 33 bp, Homo sapien
gccagtgactgactagcatagagtacaaatgcc

SEQ ID NO: 343818 - DNA, 33 bp, Homo sapien
gccagtgactgactagtatagagtacaaatgcc

SEQ ID NO: 343819 - DNA, 33 bp, Homo sapien
caaccaaaagctggagaatttttgtaggccacc

SEQ ID NO: 343820 - DNA, 33 bp, Homo sapien
caaccaaaagctggaggatttttgtaggccacc

SEQ ID NO: 343821 - DNA, 33 bp, Homo sapien
tcataatctgctattaagtctcaattttattca

SEQ ID NO: 343822 - DNA, 33 bp, Homo sapien
tcataatctgctattaggtctcaattttattca

SEQ ID NO: 343823 - DNA, 33 bp, Homo sapien
taggagttgttggacacgaagaatgaggaggaa

SEQ ID NO: 343824 - DNA, 33 bp, Homo sapien
taggagttgttggacatgaagaatgaggaggaa

SEQ ID NO: 343825 - DNA, 33 bp, Homo sapien
gggaaaacagtggagaagcagcggaagggagct

SEQ ID NO: 343826 - DNA, 33 bp, Homo sapien
gggaaaacagtggagacgcagcggaagggagct

SEQ ID NO: 343827 - DNA, 33 bp, Homo sapien
tctgttgtttaagccaatggcgttgtggtagtt

SEQ ID NO: 343828 - DNA, 33 bp, Homo sapien
tctgttgtttaagccactggcgttgtggtagtt

SEQ ID NO: 343829 - DNA, 33 bp, Homo sapien
ctcagatatgtgagtagaaagttgtaaatggcc

SEQ ID NO: 343830 - DNA, 33 bp, Homo sapien
ctcagatatgtgagtataaagttgtaaatggcc

SEQ ID NO: 343831 - DNA, 33 bp, Homo sapien
cagttgaattttagggaatctgatctgagttga

SEQ ID NO: 343832 - DNA, 33 bp, Homo sapien
cagttgaattttagggcatctgatctgagttga

SEQ ID NO: 343833 - DNA, 33 bp, Homo sapien
aagtgctgtgagagtgaaccgagaagacctcag

SEQ ID NO: 343834 - DNA, 33 bp, Homo sapien
aagtgctgtgagagtggaccgagaagacctcag

SEQ ID NO: 343835 - DNA, 33 bp, Homo sapien
tctttgattttgcaaactttgaatgaatgggat

SEQ ID NO: 343836 - DNA, 33 bp, Homo sapien
tctttgattttgcaaagtttgaatgaatgggat

SEQ ID NO: 343837 - DNA, 33 bp, Homo sapien
tggacaggcccttatacacattagcaaacggtg

SEQ ID NO: 343838 - DNA, 33 bp, Homo sapien
tggacaggcccttatatacattagcaaacggtg

SEQ ID NO: 343839 - DNA, 33 bp, Homo sapien
acatctgcatgatccaaagagaagggcaagaat

SEQ ID NO: 343840 - DNA, 33 bp, Homo sapien
acatctgcatgatccagagagaagggcaagaat

SEQ ID NO: 343841 - DNA, 33 bp, Homo sapien
aggcttatattgtccaaagtagaggctgaggaa

SEQ ID NO: 343842 - DNA, 33 bp, Homo sapien
aggcttatattgtccatagtagaggctgaggaa

SEQ ID NO: 343843 - DNA, 33 bp, Homo sapien
gtaaccatgatgaagacctaaatgccttaccag

SEQ ID NO: 343844 - DNA, 33 bp, Homo sapien
gtaaccatgatgaagagctaaatgccttaccag

SEQ ID NO: 343845 - DNA, 33 bp, Homo sapien
agcctttaagtgtagcagatgttaaggaccctt

SEQ ID NO: 343846 - DNA, 33 bp, Homo sapien
agcctttaagtgtagcggatgttaaggaccctt

SEQ ID NO: 343847 - DNA, 33 bp, Homo sapien
tttagtgcatcaattacctcatataaaagataa

SEQ ID NO: 343848 - DNA, 33 bp, Homo sapien
tttagtgcatcaattatctcatataaaagataa

SEQ ID NO: 343849 - DNA, 33 bp, Homo sapien
ctcagcttcaaaagacagagactcttgggcgtt

SEQ ID NO: 343850 - DNA, 33 bp, Homo sapien
ctcagcttcaaaagacggagactcttgggcgtt

SEQ ID NO: 343851 - DNA, 33 bp, Homo sapien
cagctgagtttgatgacagtctccaactttgag

SEQ ID NO: 343852 - DNA, 33 bp, Homo sapien
cagctgagtttgatgatagtctccaactttgag

SEQ ID NO: 343853 - DNA, 33 bp, Homo sapien
tctgcttcttgagctacgggttcaggactgcat

SEQ ID NO: 343854 - DNA, 33 bp, Homo sapien
tctgcttcttgagctatgggttcaggactgcat

SEQ ID NO: 343855 - DNA, 33 bp, Homo sapien
ttctgtggtgtcaagacctcctccatagctaat

SEQ ID NO: 343856 - DNA, 33 bp, Homo sapien
ttctgtggtgtcaagatctcctccatagctaat

SEQ ID NO: 343857 - DNA, 33 bp, Homo sapien
tctaggatcctaatacaatttcaacatttcaac

SEQ ID NO: 343858 - DNA, 33 bp, Homo sapien
tctaggatcctaatacgatttcaacatttcaac

SEQ ID NO: 343859 - DNA, 33 bp, Homo sapien
ttaagcatataatccactgagttttgacagtgt

SEQ ID NO: 343860 - DNA, 33 bp, Homo sapien
ttaagcatataatccattgagttttgacagtgt

SEQ ID NO: 343861 - DNA, 33 bp, Homo sapien
aagtcttgccatgatacacgttcatttaccgct

SEQ ID NO: 343862 - DNA, 33 bp, Homo sapien
aagtcttgccatgatatacgttcatttaccgct

SEQ ID NO: 343863 - DNA, 33 bp, Homo sapien
catggtggtggcagtacagataaagtaaaatat

SEQ ID NO: 343864 - DNA, 33 bp, Homo sapien
catggtggtggcagtagagataaagtaaaatat

SEQ ID NO: 343865 - DNA, 33 bp, Homo sapien
gggaaagagagtaagaaaaatcaaaggtgatga

SEQ ID NO: 343866 - DNA, 33 bp, Homo sapien
gggaaagagagtaagagaaatcaaaggtgatga

SEQ ID NO: 343867 - DNA, 33 bp, Homo sapien
tagttatgcaaataaaatgctcattgtaaaatc

SEQ ID NO: 343868 - DNA, 33 bp, Homo sapien
tagttatgcaaataaactgctcattgtaaaatc

SEQ ID NO: 343869 - DNA, 33 bp, Homo sapien
cgaggtgctttagtgacatacaagagggaggat

SEQ ID NO: 343870 - DNA, 33 bp, Homo sapien
cgaggtgctttagtgatatacaagagggaggat

SEQ ID NO: 343871 - DNA, 33 bp, Homo sapien
acacacacaaagaggtaaaacataagcaggaat

SEQ ID NO: 343872 - DNA, 33 bp, Homo sapien
acacacacaaagaggtgaaacataagcaggaat

SEQ ID NO: 343873 - DNA, 33 bp, Homo sapien
gagagactttgaagaaagagatggcgcactcgg

SEQ ID NO: 343874 - DNA, 33 bp, Homo sapien
gagagactttgaagaaggagatggcgcactcgg

SEQ ID NO: 343875 - DNA, 33 bp, Homo sapien
tcacatgatcttccagccagtacaattcataca

SEQ ID NO: 343876 - DNA, 33 bp, Homo sapien
tcacatgatcttccaggcagtacaattcataca

SEQ ID NO: 343877 - DNA, 33 bp, Homo sapien
cctgactcttttgccaacatgaggaatgagaaa

SEQ ID NO: 343878 - DNA, 33 bp, Homo sapien
cctgactcttttgccagcatgaggaatgagaaa

SEQ ID NO: 343879 - DNA, 33 bp, Homo sapien
ctctgcacagaaatcaaaaatataaagctctaa

SEQ ID NO: 343880 - DNA, 33 bp, Homo sapien
ctctgcacagaaatcagaaatataaagctctaa

SEQ ID NO: 343881 - DNA, 33 bp, Homo sapien
aggttccaactttaacaaagccctataattgtg

SEQ ID NO: 343882 - DNA, 33 bp, Homo sapien
aggttccaactttaactaagccctataattgtg

SEQ ID NO: 343883 - DNA, 33 bp, Homo sapien
tcacctgtccttctgaaacctcttagtctttta

SEQ ID NO: 343884 - DNA, 33 bp, Homo sapien
tcacctgtccttctgagacctcttagtctttta

SEQ ID NO: 343885 - DNA, 33 bp, Homo sapien
catggggccagtaagacgccatgaaagagaggg

SEQ ID NO: 343886 - DNA, 33 bp, Homo sapien
catggggccagtaagatgccatgaaagagaggg

SEQ ID NO: 343887 - DNA, 33 bp, Homo sapien
ttttaaaatgctttgaataaagaagccctagtt

SEQ ID NO: 343888 - DNA, 33 bp, Homo sapien
ttttaaaatgctttgattaaagaagccctagtt

SEQ ID NO: 343889 - DNA, 33 bp, Homo sapien
gggccatacgagtactcaccctgaacctgcact

SEQ ID NO: 343890 - DNA, 33 bp, Homo sapien
gggccatacgagtactgaccctgaacctgcact

SEQ ID NO: 343891 - DNA, 33 bp, Homo sapien
aaactcagctactgaaagccaaaagtagttttt

SEQ ID NO: 343892 - DNA, 33 bp, Homo sapien
aaactcagctactgaaggccaaaagtagttttt

SEQ ID NO: 343893 - DNA, 33 bp, Homo sapien
gcatctggatgtggaaatacaaaggaaaatatt

SEQ ID NO: 343894 - DNA, 33 bp, Homo sapien
gcatctggatgtggaactacaaaggaaaatatt

SEQ ID NO: 343895 - DNA, 33 bp, Homo sapien
tatttcaggtactgggaaacattccatgtaagt

SEQ ID NO: 343896 - DNA, 33 bp, Homo sapien
tatttcaggtactggggaacattccatgtaagt

SEQ ID NO: 343897 - DNA, 33 bp, Homo sapien
gaaaaaaatcccagagcattcttggtcatagtt

SEQ ID NO: 343898 - DNA, 33 bp, Homo sapien
gaaaaaaatcccagagtattcttggtcatagtt

SEQ ID NO: 343899 - DNA, 33 bp, Homo sapien
gctcagaatgtgagcaatccagcaagtctatgt

SEQ ID NO: 343900 - DNA, 33 bp, Homo sapien
gctcagaatgtgagcagtccagcaagtctatgt

SEQ ID NO: 343901 - DNA, 33 bp, Homo sapien
ggcaggagaagagacccgagtaggcaattggta

SEQ ID NO: 343902 - DNA, 33 bp, Homo sapien
ggcaggagaagagacctgagtaggcaattggta

SEQ ID NO: 343903 - DNA, 33 bp, Homo sapien
attttgacccagactacctgagctttcatgttg

SEQ ID NO: 343904 - DNA, 33 bp, Homo sapien
attttgacccagactatctgagctttcatgttg

SEQ ID NO: 343905 - DNA, 33 bp, Homo sapien
agatcatctggtctaaagccttgaatttacaaa

SEQ ID NO: 343906 - DNA, 33 bp, Homo sapien
agatcatctggtctaacgccttgaatttacaaa

SEQ ID NO: 343907 - DNA, 33 bp, Homo sapien
ctcaggcattatgacccgctaactgtgtaatcc

SEQ ID NO: 343908 - DNA, 33 bp, Homo sapien
ctcaggcattatgacctgctaactgtgtaatcc

SEQ ID NO: 343909 - DNA, 33 bp, Homo sapien
ctaactctcaattgaaaaggctaggaaacttca

SEQ ID NO: 343910 - DNA, 33 bp, Homo sapien
ctaactctcaattgaagaggctaggaaacttca

SEQ ID NO: 343911 - DNA, 33 bp, Homo sapien
gtaacacaggagagaaaacaattctgggtgtag

SEQ ID NO: 343912 - DNA, 33 bp, Homo sapien
gtaacacaggagagaacacaattctgggtgtag

SEQ ID NO: 343913 - DNA, 33 bp, Homo sapien
tcagaggcagaatcaccggaatgtggccataat

SEQ ID NO: 343914 - DNA, 33 bp, Homo sapien
tcagaggcagaatcactggaatgtggccataat

SEQ ID NO: 343915 - DNA, 33 bp, Homo sapien
taccttctgttgttgaactcttatcacctttct

SEQ ID NO: 343916 - DNA, 33 bp, Homo sapien
taccttctgttgttgatctcttatcacctttct

SEQ ID NO: 343917 - DNA, 33 bp, Homo sapien
agttgctgttttgccacgtctctcttaagattt

SEQ ID NO: 343918 - DNA, 33 bp, Homo sapien
agttgctgttttgccatgtctctcttaagattt

SEQ ID NO: 343919 - DNA, 33 bp, Homo sapien
attcacaatcaacaaacggtagatgcaacttgt

SEQ ID NO: 343920 - DNA, 33 bp, Homo sapien
attcacaatcaacaaatggtagatgcaacttgt

SEQ ID NO: 343921 - DNA, 33 bp, Homo sapien
agatttcagagcgagagcacgagttggtggggg

SEQ ID NO: 343922 - DNA, 33 bp, Homo sapien
agatttcagagcgagatcacgagttggtggggg

SEQ ID NO: 343923 - DNA, 33 bp, Homo sapien
atgtcagtgaagagagaacaaaaaaagaatttt

SEQ ID NO: 343924 - DNA, 33 bp, Homo sapien
atgtcagtgaagagaggacaaaaaaagaatttt

SEQ ID NO: 343925 - DNA, 33 bp, Homo sapien
gtgtctgtgattaccacaggggtcatggcctct

SEQ ID NO: 343926 - DNA, 33 bp, Homo sapien
gtgtctgtgattaccataggggtcatggcctct

SEQ ID NO: 343927 - DNA, 33 bp, Homo sapien
acataccaactttcacggaaaagaacaaagtct

SEQ ID NO: 343928 - DNA, 33 bp, Homo sapien
acataccaactttcactgaaaagaacaaagtct

SEQ ID NO: 343929 - DNA, 33 bp, Homo sapien
gtaaaataaaacttacagaagaactaggagtat

SEQ ID NO: 343930 - DNA, 33 bp, Homo sapien
gtaaaataaaacttacggaagaactaggagtat

SEQ ID NO: 343931 - DNA, 33 bp, Homo sapien
aaactccagagtttaacgcatttgagcaaataa

SEQ ID NO: 343932 - DNA, 33 bp, Homo sapien
aaactccagagtttaaggcatttgagcaaataa

SEQ ID NO: 343933 - DNA, 33 bp, Homo sapien
tacaaaataatgtggaaagaattgtcatttata

SEQ ID NO: 343934 - DNA, 33 bp, Homo sapien
tacaaaataatgtggagagaattgtcatttata

SEQ ID NO: 343935 - DNA, 33 bp, Homo sapien
tccagaacagcttcgaaaagcaaaacctcacat

SEQ ID NO: 343936 - DNA, 33 bp, Homo sapien
tccagaacagcttcgataagcaaaacctcacat

SEQ ID NO: 343937 - DNA, 33 bp, Homo sapien
ttcacaatgtagcagacgcagaaggcagataaa

SEQ ID NO: 343938 - DNA, 33 bp, Homo sapien
ttcacaatgtagcagatgcagaaggcagataaa

SEQ ID NO: 343939 - DNA, 33 bp, Homo sapien
aatcccaatattgtgactaacttgctgtatgac

SEQ ID NO: 343940 - DNA, 33 bp, Homo sapien
aatcccaatattgtgattaacttgctgtatgac

SEQ ID NO: 343941 - DNA, 33 bp, Homo sapien
ttccctccaagttatgcatttgtttcctcctta

SEQ ID NO: 343942 - DNA, 33 bp, Homo sapien
ttccctccaagttatggatttgtttcctcctta

SEQ ID NO: 343943 - DNA, 33 bp, Homo sapien
tccctcatgctacccaatgcctctcttgtccca

SEQ ID NO: 343944 - DNA, 33 bp, Homo sapien
tccctcatgctacccagtgcctctcttgtccca

SEQ ID NO: 343945 - DNA, 33 bp, Homo sapien
ccaatttatctacacactggaatccacatgggg

SEQ ID NO: 343946 - DNA, 33 bp, Homo sapien
ccaatttatctacacattggaatccacatgggg

SEQ ID NO: 343947 - DNA, 33 bp, Homo sapien
caggttcatggactagaagtgagaagatcccat

SEQ ID NO: 343948 - DNA, 33 bp, Homo sapien
caggttcatggactagtagtgagaagatcccat

SEQ ID NO: 343949 - DNA, 33 bp, Homo sapien
gaatagaatggaagtgcaacacccacggagatg

SEQ ID NO: 343950 - DNA, 33 bp, Homo sapien
gaatagaatggaagtgtaacacccacggagatg

SEQ ID NO: 343951 - DNA, 33 bp, Homo sapien
tcttcaactagtgttaccaaacttttggaggtg

SEQ ID NO: 343952 - DNA, 33 bp, Homo sapien
tcttcaactagtgttatcaaacttttggaggtg

SEQ ID NO: 343953 - DNA, 33 bp, Homo sapien
gatacctgggtagaaacgattatgaacattgag

SEQ ID NO: 343954 - DNA, 33 bp, Homo sapien
gatacctgggtagaaatgattatgaacattgag

SEQ ID NO: 343955 - DNA, 33 bp, Homo sapien
tgactgtcacatctgccgcaaaatgagaggctg

SEQ ID NO: 343956 - DNA, 33 bp, Homo sapien
tgactgtcacatctgctgcaaaatgagaggctg

SEQ ID NO: 343957 - DNA, 33 bp, Homo sapien
aaaaaatcaacatgccaaagggttagctggcac

SEQ ID NO: 343958 - DNA, 33 bp, Homo sapien
aaaaaatcaacatgccgaagggttagctggcac

SEQ ID NO: 343959 - DNA, 33 bp, Homo sapien
tagagtgtttggctgaacctttggagaaaaaca

SEQ ID NO: 343960 - DNA, 33 bp, Homo sapien
tagagtgtttggctgagcctttggagaaaaaca

SEQ ID NO: 343961 - DNA, 33 bp, Homo sapien
atattgaccacaatgcactaaaagcagaaatga

SEQ ID NO: 343962 - DNA, 33 bp, Homo sapien
atattgaccacaatgcgctaaaagcagaaatga

SEQ ID NO: 343963 - DNA, 33 bp, Homo sapien
gaccaggtcctggagaagttatgttctgtgatt

SEQ ID NO: 343964 - DNA, 33 bp, Homo sapien
gaccaggtcctggagacgttatgttctgtgatt

SEQ ID NO: 343965 - DNA, 33 bp, Homo sapien
agctacttggcccatgcattccgggctgtggta

SEQ ID NO: 343966 - DNA, 33 bp, Homo sapien
agctacttggcccatggattccgggctgtggta

SEQ ID NO: 343967 - DNA, 33 bp, Homo sapien
tcctaagtggactcaaacatgaggaaggagtat

SEQ ID NO: 343968 - DNA, 33 bp, Homo sapien
tcctaagtggactcaatcatgaggaaggagtat

SEQ ID NO: 343969 - DNA, 33 bp, Homo sapien
gctgggaagctgaaccaaagagtggccattgta

SEQ ID NO: 343970 - DNA, 33 bp, Homo sapien
gctgggaagctgaaccgaagagtggccattgta

SEQ ID NO: 343971 - DNA, 33 bp, Homo sapien
caattttcttttcaaacgccaagagaagtaatg

SEQ ID NO: 343972 - DNA, 33 bp, Homo sapien
caattttcttttcaaatgccaagagaagtaatg

SEQ ID NO: 343973 - DNA, 33 bp, Homo sapien
atataatattgattacaaaaccagataaaggaa

SEQ ID NO: 343974 - DNA, 33 bp, Homo sapien
atataatattgattacgaaaccagataaaggaa

SEQ ID NO: 343975 - DNA, 33 bp, Homo sapien
agggcccagttgaagcccagctattcgtatggt

SEQ ID NO: 343976 - DNA, 33 bp, Homo sapien
agggcccagttgaagctcagctattcgtatggt

SEQ ID NO: 343977 - DNA, 33 bp, Homo sapien
tatttgttatatttcaactgaaaaagtctgaat

SEQ ID NO: 343978 - DNA, 33 bp, Homo sapien
tatttgttatatttcatctgaaaaagtctgaat

SEQ ID NO: 343979 - DNA, 33 bp, Homo sapien
agaaactgggagaaaaaaggtgaaagcttcata

SEQ ID NO: 343980 - DNA, 33 bp, Homo sapien
agaaactgggagaaaagaggtgaaagcttcata

SEQ ID NO: 343981 - DNA, 33 bp, Homo sapien
ataaggtatattgcccactttcaaaacttggct

SEQ ID NO: 343982 - DNA, 33 bp, Homo sapien
ataaggtatattgcccgctttcaaaacttggct

SEQ ID NO: 343983 - DNA, 33 bp, Homo sapien
aagataaattgcttgacaacatgatagggatag

SEQ ID NO: 343984 - DNA, 33 bp, Homo sapien
aagataaattgcttgataacatgatagggatag

SEQ ID NO: 343985 - DNA, 33 bp, Homo sapien
cagtcttcagaattcaagagttgcaatcatctg

SEQ ID NO: 343986 - DNA, 33 bp, Homo sapien
cagtcttcagaattcaggagttgcaatcatctg

SEQ ID NO: 343987 - DNA, 33 bp, Homo sapien
catgaattctgggcaacatctcttggtttactc

SEQ ID NO: 343988 - DNA, 33 bp, Homo sapien
catgaattctgggcaatatctcttggtttactc

SEQ ID NO: 343989 - DNA, 33 bp, Homo sapien
tacgatttcaagattacaatcaaggaaaccacc

SEQ ID NO: 343990 - DNA, 33 bp, Homo sapien
tacgatttcaagattagaatcaaggaaaccacc

SEQ ID NO: 343991 - DNA, 33 bp, Homo sapien
acacaactggattcaaaaaaagtttagattaat

SEQ ID NO: 343992 - DNA, 33 bp, Homo sapien
acacaactggattcaagaaaagtttagattaat

SEQ ID NO: 343993 - DNA, 33 bp, Homo sapien
ggatgtgaacaaacaaaaatattggttctcaac

SEQ ID NO: 343994 - DNA, 33 bp, Homo sapien
ggatgtgaacaaacaacaatattggttctcaac

SEQ ID NO: 343995 - DNA, 33 bp, Homo sapien
agcttccttcatcatacgtccttctctgagatt

SEQ ID NO: 343996 - DNA, 33 bp, Homo sapien
agcttccttcatcatatgtccttctctgagatt

SEQ ID NO: 343997 - DNA, 33 bp, Homo sapien
tcaccatttatccacaagagtccttcacatcat

SEQ ID NO: 343998 - DNA, 33 bp, Homo sapien
tcaccatttatccacaggagtccttcacatcat

SEQ ID NO: 343999 - DNA, 33 bp, Homo sapien
ctagaatgagttcttacgcaagatgttgagaca

SEQ ID NO: 344000 - DNA, 33 bp, Homo sapien
ctagaatgagttcttatgcaagatgttgagaca

SEQ ID NO: 344001 - DNA, 33 bp, Homo sapien
gttccaggttacaggcactaaggccatgtagca

SEQ ID NO: 344002 - DNA, 33 bp, Homo sapien
gttccaggttacaggcgctaaggccatgtagca

SEQ ID NO: 344003 - DNA, 33 bp, Homo sapien
tgtttataatgaacacagtcagaaagtaggcaa

SEQ ID NO: 344004 - DNA, 33 bp, Homo sapien
tgtttataatgaacacggtcagaaagtaggcaa

SEQ ID NO: 344005 - DNA, 33 bp, Homo sapien
tgctgtgctagcaaaaggtctacagatgagtca

SEQ ID NO: 344006 - DNA, 33 bp, Homo sapien
tgctgtgctagcaaaatgtctacagatgagtca

SEQ ID NO: 344007 - DNA, 33 bp, Homo sapien
tgacttgacaaacaacaacttcccacccatgcc

SEQ ID NO: 344008 - DNA, 33 bp, Homo sapien
tgacttgacaaacaaccacttcccacccatgcc

SEQ ID NO: 344009 - DNA, 33 bp, Homo sapien
ggataaagcttacagaataatagcagagataca

SEQ ID NO: 344010 - DNA, 33 bp, Homo sapien
ggataaagcttacagagtaatagcagagataca

SEQ ID NO: 344011 - DNA, 33 bp, Homo sapien
gctcatctgccttctacgtgttaatgagcttgt

SEQ ID NO: 344012 - DNA, 33 bp, Homo sapien
gctcatctgccttctatgtgttaatgagcttgt

SEQ ID NO: 344013 - DNA, 33 bp, Homo sapien
aagctggatcatgcagaaatgtatcaagttatg

SEQ ID NO: 344014 - DNA, 33 bp, Homo sapien
aagctggatcatgcaggaatgtatcaagttatg

SEQ ID NO: 344015 - DNA, 33 bp, Homo sapien
attttcagttactttaccttactgacttaacat

SEQ ID NO: 344016 - DNA, 33 bp, Homo sapien
attttcagttactttatcttactgacttaacat

SEQ ID NO: 344017 - DNA, 33 bp, Homo sapien
ctgctggaatccacaaggagtagtaatggtgac

SEQ ID NO: 344018 - DNA, 33 bp, Homo sapien
ctgctggaatccacaatgagtagtaatggtgac

SEQ ID NO: 344019 - DNA, 33 bp, Homo sapien
ctccccgctggtcccacggatgagcagttgctg

SEQ ID NO: 344020 - DNA, 33 bp, Homo sapien
ctccccgctggtcccatggatgagcagttgctg

SEQ ID NO: 344021 - DNA, 33 bp, Homo sapien
tacggtcaccatttacagatttctttttacagc

SEQ ID NO: 344022 - DNA, 33 bp, Homo sapien
tacggtcaccatttacggatttctttttacagc

SEQ ID NO: 344023 - DNA, 33 bp, Homo sapien
ttgcccatattccacaaactctgggttatgttt

SEQ ID NO: 344024 - DNA, 33 bp, Homo sapien
ttgcccatattccacatactctgggttatgttt

SEQ ID NO: 344025 - DNA, 33 bp, Homo sapien
tccagtctctaacctaaatgcagatcatttatt

SEQ ID NO: 344026 - DNA, 33 bp, Homo sapien
tccagtctctaacctagatgcagatcatttatt

SEQ ID NO: 344027 - DNA, 33 bp, Homo sapien
tctagctatgaaaaacaacccactccttgcctt

SEQ ID NO: 344028 - DNA, 33 bp, Homo sapien
tctagctatgaaaaaccacccactccttgcctt

SEQ ID NO: 344029 - DNA, 33 bp, Homo sapien
agactggaagtcatcacgtgcagttcaccgctt

SEQ ID NO: 344030 - DNA, 33 bp, Homo sapien
agactggaagtcatcatgtgcagttcaccgctt

SEQ ID NO: 344031 - DNA, 33 bp, Homo sapien
gggatattcctgacccaatctggttttctttta

SEQ ID NO: 344032 - DNA, 33 bp, Homo sapien
gggatattcctgaccccatctggttttctttta

SEQ ID NO: 344033 - DNA, 33 bp, Homo sapien
ccaggacttgctgttcccaggtgataaactgca

SEQ ID NO: 344034 - DNA, 33 bp, Homo sapien
ccaggacttgctgttcgcaggtgataaactgca

SEQ ID NO: 344035 - DNA, 33 bp, Homo sapien
ctctggccaaggctgacggtagttctctgagta

SEQ ID NO: 344036 - DNA, 33 bp, Homo sapien
ctctggccaaggctgatggtagttctctgagta

SEQ ID NO: 344037 - DNA, 33 bp, Homo sapien
tttaagcgaaatgaaccatacggacaggagaac

SEQ ID NO: 344038 - DNA, 33 bp, Homo sapien
tttaagcgaaatgaactatacggacaggagaac

SEQ ID NO: 344039 - DNA, 33 bp, Homo sapien
gcatcagaaacctcacaattatggttgctttca

SEQ ID NO: 344040 - DNA, 33 bp, Homo sapien
gcatcagaaacctcacgattatggttgctttca

SEQ ID NO: 344041 - DNA, 33 bp, Homo sapien
cctgaacagggccaaagatctgcaaaaagataa

SEQ ID NO: 344042 - DNA, 33 bp, Homo sapien
cctgaacagggccaaatatctgcaaaaagataa

SEQ ID NO: 344043 - DNA, 33 bp, Homo sapien
tctgtgaaaattgagaagatctggcaacctggg

SEQ ID NO: 344044 - DNA, 33 bp, Homo sapien
tctgtgaaaattgagaggatctggcaacctggg

SEQ ID NO: 344045 - DNA, 33 bp, Homo sapien
atcccagtaaactagtcaaagatgcctgtgtct

SEQ ID NO: 344046 - DNA, 33 bp, Homo sapien
atcccagtaaactagttaaagatgcctgtgtct

SEQ ID NO: 344047 - DNA, 33 bp, Homo sapien
ttaggctttggttccaataagttctcgtgtatg

SEQ ID NO: 344048 - DNA, 33 bp, Homo sapien
ttaggctttggttccagtaagttctcgtgtatg

SEQ ID NO: 344049 - DNA, 33 bp, Homo sapien
ttttccataagcagaacggacataataaccaag

SEQ ID NO: 344050 - DNA, 33 bp, Homo sapien
ttttccataagcagaatggacataataaccaag

SEQ ID NO: 344051 - DNA, 33 bp, Homo sapien
gtatttaaaatgaaaaactatctgctaaaaatg

SEQ ID NO: 344052 - DNA, 33 bp, Homo sapien
gtatttaaaatgaaaagctatctgctaaaaatg

SEQ ID NO: 344053 - DNA, 33 bp, Homo sapien
cacgtgaaaatgcaaactgagattacaaggtct

SEQ ID NO: 344054 - DNA, 33 bp, Homo sapien
cacgtgaaaatgcaaagtgagattacaaggtct

SEQ ID NO: 344055 - DNA, 33 bp, Homo sapien
tttagaagttcagtggaattcatagtagggtct

SEQ ID NO: 344056 - DNA, 33 bp, Homo sapien
tttagaagttcagtgggattcatagtagggtct

SEQ ID NO: 344057 - DNA, 33 bp, Homo sapien
ccagttataaaagccaccttcataatttttgcc

SEQ ID NO: 344058 - DNA, 33 bp, Homo sapien
ccagttataaaagccatcttcataatttttgcc

SEQ ID NO: 344059 - DNA, 33 bp, Homo sapien
caaagtccattataacagtcttacgcctttgca

SEQ ID NO: 344060 - DNA, 33 bp, Homo sapien
caaagtccattataacggtcttacgcctttgca

SEQ ID NO: 344061 - DNA, 33 bp, Homo sapien
cctcctgagaattctgccaacaggcctgatggc

SEQ ID NO: 344062 - DNA, 33 bp, Homo sapien
cctcctgagaattctgtcaacaggcctgatggc

SEQ ID NO: 344063 - DNA, 33 bp, Homo sapien
gaccctcagtgattcacgagcacattaaattgg

SEQ ID NO: 344064 - DNA, 33 bp, Homo sapien
gaccctcagtgattcatgagcacattaaattgg

SEQ ID NO: 344065 - DNA, 33 bp, Homo sapien
ttatgaaagtaattcacggccgttcgagaaata

SEQ ID NO: 344066 - DNA, 33 bp, Homo sapien
ttatgaaagtaattcatggccgttcgagaaata

SEQ ID NO: 344067 - DNA, 33 bp, Homo sapien
gaactagaccaaactgacagtactagaaatctt

SEQ ID NO: 344068 - DNA, 33 bp, Homo sapien
gaactagaccaaactggcagtactagaaatctt

SEQ ID NO: 344069 - DNA, 33 bp, Homo sapien
ggggaatctgcatgaaatgtacacagaaatttt

SEQ ID NO: 344070 - DNA, 33 bp, Homo sapien
ggggaatctgcatgaagtgtacacagaaatttt

SEQ ID NO: 344071 - DNA, 33 bp, Homo sapien
agagaaatatgtatgaataggcctgtatctgtt

SEQ ID NO: 344072 - DNA, 33 bp, Homo sapien
agagaaatatgtatgactaggcctgtatctgtt

SEQ ID NO: 344073 - DNA, 33 bp, Homo sapien
taacagccaagtcctactaaagcactattttaa

SEQ ID NO: 344074 - DNA, 33 bp, Homo sapien
taacagccaagtcctattaaagcactattttaa

SEQ ID NO: 344075 - DNA, 33 bp, Homo sapien
gtggcagaataaagaacgaaccccccatatcct

SEQ ID NO: 344076 - DNA, 33 bp, Homo sapien
gtggcagaataaagaatgaaccccccatatcct

SEQ ID NO: 344077 - DNA, 33 bp, Homo sapien
agatgcagcaaagatcactcggatctggtcagc

SEQ ID NO: 344078 - DNA, 33 bp, Homo sapien
agatgcagcaaagatcgctcggatctggtcagc

SEQ ID NO: 344079 - DNA, 33 bp, Homo sapien
taaaaggactcaaacaaaattccttgtgctgaa

SEQ ID NO: 344080 - DNA, 33 bp, Homo sapien
taaaaggactcaaacagaattccttgtgctgaa

SEQ ID NO: 344081 - DNA, 33 bp, Homo sapien
gaaattgtgggccaaacagcagtgaccatattc

SEQ ID NO: 344082 - DNA, 33 bp, Homo sapien
gaaattgtgggccaaatagcagtgaccatattc

SEQ ID NO: 344083 - DNA, 33 bp, Homo sapien
ctgctctgcaaggtacactgaaaggtttctatt

SEQ ID NO: 344084 - DNA, 33 bp, Homo sapien
ctgctctgcaaggtactctgaaaggtttctatt

SEQ ID NO: 344085 - DNA, 33 bp, Homo sapien
aagagacaaaaactccaatcagtatttgtattt

SEQ ID NO: 344086 - DNA, 33 bp, Homo sapien
aagagacaaaaactcctatcagtatttgtattt

SEQ ID NO: 344087 - DNA, 33 bp, Homo sapien
ttaagcctggctatgaagaagtcagacctcaca

SEQ ID NO: 344088 - DNA, 33 bp, Homo sapien
ttaagcctggctatgaggaagtcagacctcaca

SEQ ID NO: 344089 - DNA, 33 bp, Homo sapien
gtcctctattaacatgcagtttgactgacaatt

SEQ ID NO: 344090 - DNA, 33 bp, Homo sapien
gtcctctattaacatgtagtttgactgacaatt

SEQ ID NO: 344091 - DNA, 33 bp, Homo sapien
agagagagatgggattcaaaaccacgtttcttg

SEQ ID NO: 344092 - DNA, 33 bp, Homo sapien
agagagagatgggattgaaaaccacgtttcttg

SEQ ID NO: 344093 - DNA, 33 bp, Homo sapien
tcttttgtctcaaccaaacggtttgctgtgtga

SEQ ID NO: 344094 - DNA, 33 bp, Homo sapien
tcttttgtctcaaccagacggtttgctgtgtga

SEQ ID NO: 344095 - DNA, 33 bp, Homo sapien
gttattctcttactcaatatgttgaaccactgt

SEQ ID NO: 344096 - DNA, 33 bp, Homo sapien
gttattctcttactcagtatgttgaaccactgt

SEQ ID NO: 344097 - DNA, 33 bp, Homo sapien
atttcataatcttttcaataatctgaacatgat

SEQ ID NO: 344098 - DNA, 33 bp, Homo sapien
atttcataatcttttccataatctgaacatgat

SEQ ID NO: 344099 - DNA, 33 bp, Homo sapien
actgaggctcagtgtggactgcctaagactact

SEQ ID NO: 344100 - DNA, 33 bp, Homo sapien
actgaggctcagtgtgtactgcctaagactact

SEQ ID NO: 344101 - DNA, 33 bp, Homo sapien
tgatcaacagttataaaaaaactgagtgacaac

SEQ ID NO: 344102 - DNA, 33 bp, Homo sapien
tgatcaacagttataacaaaactgagtgacaac

SEQ ID NO: 344103 - DNA, 33 bp, Homo sapien
tttttcccacttaaaagttgctgtttagccttc

SEQ ID NO: 344104 - DNA, 33 bp, Homo sapien
tttttcccacttaaaatttgctgtttagccttc

SEQ ID NO: 344105 - DNA, 33 bp, Homo sapien
ctgaaacaaattctgccgatattccaacctttt

SEQ ID NO: 344106 - DNA, 33 bp, Homo sapien
ctgaaacaaattctgctgatattccaacctttt

SEQ ID NO: 344107 - DNA, 33 bp, Homo sapien
tttagtcattgggatacgtaggcctttcacctt

SEQ ID NO: 344108 - DNA, 33 bp, Homo sapien
tttagtcattgggataggtaggcctttcacctt

SEQ ID NO: 344109 - DNA, 33 bp, Homo sapien
catgtgcacgaaaaaacagagggatggacagat

SEQ ID NO: 344110 - DNA, 33 bp, Homo sapien
catgtgcacgaaaaaagagagggatggacagat

SEQ ID NO: 344111 - DNA, 33 bp, Homo sapien
ttgaaaagaggcgatactagggcaggctcataa

SEQ ID NO: 344112 - DNA, 33 bp, Homo sapien
ttgaaaagaggcgatattagggcaggctcataa

SEQ ID NO: 344113 - DNA, 33 bp, Homo sapien
ttttgagtatgggtaaatgtgataagtagggga

SEQ ID NO: 344114 - DNA, 33 bp, Homo sapien
ttttgagtatgggtaagtgtgataagtagggga

SEQ ID NO: 344115 - DNA, 33 bp, Homo sapien
tgttgtgattagtatacgtagggagtaaagatc

SEQ ID NO: 344116 - DNA, 33 bp, Homo sapien
tgttgtgattagtatatgtagggagtaaagatc

SEQ ID NO: 344117 - DNA, 33 bp, Homo sapien; identical to SEQ ID NO: 344115

SEQ ID NO: 344118 - DNA, 33 bp, Homo sapien; identical to SEQ ID NO: 344116

SEQ ID NO: 344119 - DNA, 33 bp, Homo sapien
gtgtgagactagtggacggaatactatgctttg

SEQ ID NO: 344120 - DNA, 33 bp, Homo sapien
gtgtgagactagtggatggaatactatgctttg

SEQ ID NO: 344121 - DNA, 33 bp, Homo sapien
atagttgagaagtgcacaatggatgctgtttgt

SEQ ID NO: 344122 - DNA, 33 bp, Homo sapien
atagttgagaagtgcataatggatgctgtttgt

SEQ ID NO: 344123 - DNA, 33 bp, Homo sapien
acaaaattggaagacactatgaggagaggagtg

SEQ ID NO: 344124 - DNA, 33 bp, Homo sapien
acaaaattggaagacattatgaggagaggagtg

SEQ ID NO: 344125 - DNA, 33 bp, Homo sapien
taacaacagcgtataaatgttcctctttctcca

SEQ ID NO: 344126 - DNA, 33 bp, Homo sapien
taacaacagcgtataagtgttcctctttctcca

SEQ ID NO: 344127 - DNA, 33 bp, Homo sapien
agttcccaccaattaaagttttgtaggaattct

SEQ ID NO: 344128 - DNA, 33 bp, Homo sapien
agttcccaccaattaatgttttgtaggaattct

SEQ ID NO: 344129 - DNA, 33 bp, Homo sapien
acgtagagcttacccaagtgagactcactggga

SEQ ID NO: 344130 - DNA, 33 bp, Homo sapien
acgtagagcttacccaggtgagactcactggga

SEQ ID NO: 344131 - DNA, 33 bp, Homo sapien
ctgtatttaacattcaacgtagggtacaaagct

SEQ ID NO: 344132 - DNA, 33 bp, Homo sapien
ctgtatttaacattcagcgtagggtacaaagct

SEQ ID NO: 344133 - DNA, 33 bp, Homo sapien
ttaatcacagtccattaaagaaatacttggtga

SEQ ID NO: 344134 - DNA, 33 bp, Homo sapien
ttaatcacagtccattgaagaaatacttggtga

SEQ ID NO: 344135 - DNA, 33 bp, Homo sapien
atgaaaagttctcttccaatctctgtcccagtc

SEQ ID NO: 344136 - DNA, 33 bp, Homo sapien
atgaaaagttctcttctaatctctgtcccagtc

SEQ ID NO: 344137 - DNA, 33 bp, Homo sapien
tactgactggatgtaccatcatatatttattgc

SEQ ID NO: 344138 - DNA, 33 bp, Homo sapien
tactgactggatgtactatcatatatttattgc

SEQ ID NO: 344139 - DNA, 33 bp, Homo sapien
ctgccctaaatatcccaaggcttaactgctccc

SEQ ID NO: 344140 - DNA, 33 bp, Homo sapien
ctgccctaaatatcccgaggcttaactgctccc

SEQ ID NO: 344141 - DNA, 33 bp, Homo sapien
atatcaatggacagaaacagatatggattgcag

SEQ ID NO: 344142 - DNA, 33 bp, Homo sapien
atatcaatggacagaatcagatatggattgcag

SEQ ID NO: 344143 - DNA, 33 bp, Homo sapien
caatacttactggtcacacctttgtcaccagaa

SEQ ID NO: 344144 - DNA, 33 bp, Homo sapien
caatacttactggtcatacctttgtcaccagaa

SEQ ID NO: 344145 - DNA, 33 bp, Homo sapien
cccattattgtgtataaagtcaagtagaaaaag

SEQ ID NO: 344146 - DNA, 33 bp, Homo sapien
cccattattgtgtatatagtcaagtagaaaaag

SEQ ID NO: 344147 - DNA, 33 bp, Homo sapien
gagagagttccaaaaactgccaattatcagtca

SEQ ID NO: 344148 - DNA, 33 bp, Homo sapien
gagagagttccaaaaattgccaattatcagtca

SEQ ID NO: 344149 - DNA, 33 bp, Homo sapien
gagactgttatcttaacaccacactatcctgct

SEQ ID NO: 344150 - DNA, 33 bp, Homo sapien
gagactgttatcttaataccacactatcctgct

SEQ ID NO: 344151 - DNA, 33 bp, Homo sapien
ttgacatggagatccaaggaagttcagatgaca

SEQ ID NO: 344152 - DNA, 33 bp, Homo sapien
ttgacatggagatccagggaagttcagatgaca

SEQ ID NO: 344153 - DNA, 33 bp, Homo sapien
gcccaactttgtcacaaaatgaatctgcagaca

SEQ ID NO: 344154 - DNA, 33 bp, Homo sapien
gcccaactttgtcacacaatgaatctgcagaca

SEQ ID NO: 344155 - DNA, 33 bp, Homo sapien
ttgagaaattctctccaagaatgatcacaacta

SEQ ID NO: 344156 - DNA, 33 bp, Homo sapien
ttgagaaattctctcctagaatgatcacaacta

SEQ ID NO: 344157 - DNA, 33 bp, Homo sapien
gtccaatctgataaaagaaaaagcatccagcca

SEQ ID NO: 344158 - DNA, 33 bp, Homo sapien
gtccaatctgataaaataaaaagcatccagcca

SEQ ID NO: 344159 - DNA, 33 bp, Homo sapien
gtcctagaatccaggaaactaagtctaatctca

SEQ ID NO: 344160 - DNA, 33 bp, Homo sapien
gtcctagaatccaggagactaagtctaatctca

SEQ ID NO: 344161 - DNA, 33 bp, Homo sapien
cctgcaccttgattcaagttcagtcaggagcaa

SEQ ID NO: 344162 - DNA, 33 bp, Homo sapien
cctgcaccttgattcaggttcagtcaggagcaa

SEQ ID NO: 344163 - DNA, 33 bp, Homo sapien
ggatacagataattcaaccatataaacattctc

SEQ ID NO: 344164 - DNA, 33 bp, Homo sapien
ggatacagataattcagccatataaacattctc

SEQ ID NO: 344165 - DNA, 33 bp, Homo sapien
tgaattatctgtatccaaagtcaactagataga

SEQ ID NO: 344166 - DNA, 33 bp, Homo sapien
tgaattatctgtatccgaagtcaactagataga

SEQ ID NO: 344167 - DNA, 33 bp, Homo sapien
tttataaagcactaacaataggccaggcattat

SEQ ID NO: 344168 - DNA, 33 bp, Homo sapien
tttataaagcactaacgataggccaggcattat

SEQ ID NO: 344169 - DNA, 33 bp, Homo sapien
gggtagtgccttctgcaaaagggtagctttaaa

SEQ ID NO: 344170 - DNA, 33 bp, Homo sapien
gggtagtgccttctgcgaaagggtagctttaaa

SEQ ID NO: 344171 - DNA, 33 bp, Homo sapien
ggattaggagttcacactaggggatgtaagtgg

SEQ ID NO: 344172 - DNA, 33 bp, Homo sapien
ggattaggagttcacattaggggatgtaagtgg

SEQ ID NO: 344173 - DNA, 33 bp, Homo sapien
gttattccaacacaaacggaggcttaatgtgac

SEQ ID NO: 344174 - DNA, 33 bp, Homo sapien
gttattccaacacaaatggaggcttaatgtgac

SEQ ID NO: 344175 - DNA, 33 bp, Homo sapien
taagacagcaagttaaaggagtgactgtaatag

SEQ ID NO: 344176 - DNA, 33 bp, Homo sapien
taagacagcaagttaagggagtgactgtaatag

SEQ ID NO: 344177 - DNA, 33 bp, Homo sapien
aaccaccccatgaagtaaacaaggtgagaacag

SEQ ID NO: 344178 - DNA, 33 bp, Homo sapien
aaccaccccatgaagtgaacaaggtgagaacag

SEQ ID NO: 344179 - DNA, 33 bp, Homo sapien
cattctataccctgtacattgctcagcctcttg

SEQ ID NO: 344180 - DNA, 33 bp, Homo sapien
cattctataccctgtagattgctcagcctcttg

SEQ ID NO: 344181 - DNA, 33 bp, Homo sapien
tacaaacaatgacgacaaccgtgaatgtgagtt

SEQ ID NO: 344182 - DNA, 33 bp, Homo sapien
tacaaacaatgacgacgaccgtgaatgtgagtt

SEQ ID NO: 344183 - DNA, 33 bp, Homo sapien
ctcctagtcactaagacataactgacatgaaat

SEQ ID NO: 344184 - DNA, 33 bp, Homo sapien
ctcctagtcactaagatataactgacatgaaat

SEQ ID NO: 344185 - DNA, 33 bp, Homo sapien
ccagggagctttgctacgtgctccctgcagctg

SEQ ID NO: 344186 - DNA, 33 bp, Homo sapien
ccagggagctttgctatgtgctccctgcagctg

SEQ ID NO: 344187 - DNA, 33 bp, Homo sapien
atgagcaagaataatacgttaatttccagatgc

SEQ ID NO: 344188 - DNA, 33 bp, Homo sapien
atgagcaagaataatatgttaatttccagatgc

SEQ ID NO: 344189 - DNA, 33 bp, Homo sapien
ccacaaagcagcacacaatggagttctcacacc

SEQ ID NO: 344190 - DNA, 33 bp, Homo sapien
ccacaaagcagcacacgatggagttctcacacc

SEQ ID NO: 344191 - DNA, 33 bp, Homo sapien
ctgcaactgggacaccacgttttcaggaaataa

SEQ ID NO: 344192 - DNA, 33 bp, Homo sapien
ctgcaactgggacaccgcgttttcaggaaataa

SEQ ID NO: 344193 - DNA, 33 bp, Homo sapien
gtcacaggatctcaataagggtagtgctatttt

SEQ ID NO: 344194 - DNA, 33 bp, Homo sapien
gtcacaggatctcaatgagggtagtgctatttt

SEQ ID NO: 344195 - DNA, 33 bp, Homo sapien
acctggtctgggatcacagtctgaacactgtaa

SEQ ID NO: 344196 - DNA, 33 bp, Homo sapien
acctggtctgggatcatagtctgaacactgtaa

SEQ ID NO: 344197 - DNA, 33 bp, Homo sapien
tagttgttgttttagcacatcaggaagcacatc

SEQ ID NO: 344198 - DNA, 33 bp, Homo sapien
tagttgttgttttagcgcatcaggaagcacatc

SEQ ID NO: 344199 - DNA, 33 bp, Homo sapien
cagctctgcagccctgacaaacgagctggagtc

SEQ ID NO: 344200 - DNA, 33 bp, Homo sapien
cagctctgcagccctgtcaaacgagctggagtc

SEQ ID NO: 344201 - DNA, 33 bp, Homo sapien
actaagtacatgataccaagaataaggaaatat

SEQ ID NO: 344202 - DNA, 33 bp, Homo sapien
actaagtacatgatacgaagaataaggaaatat

SEQ ID NO: 344203 - DNA, 33 bp, Homo sapien
tatgggtgacttgaaaaagaggaggcacaataa

SEQ ID NO: 344204 - DNA, 33 bp, Homo sapien
tatgggtgacttgaaagagaggaggcacaataa

SEQ ID NO: 344205 - DNA, 33 bp, Homo sapien
aatggaaggagatttacgtcacatggccttgca

SEQ ID NO: 344206 - DNA, 33 bp, Homo sapien
aatggaaggagatttaggtcacatggccttgca

SEQ ID NO: 344207 - DNA, 33 bp, Homo sapien
ccaaataatgtttaaaaatcggcaaaatcaaga

SEQ ID NO: 344208 - DNA, 33 bp, Homo sapien
ccaaataatgtttaaagatcggcaaaatcaaga

SEQ ID NO: 344209 - DNA, 33 bp, Homo sapien
ggcaagagagacccaacgagcaaagagggaaga

SEQ ID NO: 344210 - DNA, 33 bp, Homo sapien
ggcaagagagacccaatgagcaaagagggaaga

SEQ ID NO: 344211 - DNA, 33 bp, Homo sapien
tcatgtggacccttgaaaagttgactttctgca

SEQ ID NO: 344212 - DNA, 33 bp, Homo sapien
tcatgtggacccttgagaagttgactttctgca

SEQ ID NO: 344213 - DNA, 33 bp, Homo sapien
gcagtttcttgttctgaaggatttttatcatgt

SEQ ID NO: 344214 - DNA, 33 bp, Homo sapien
gcagtttcttgttctggaggatttttatcatgt

SEQ ID NO: 344215 - DNA, 33 bp, Homo sapien
gatggatggccaattagcctagaaggtgaaaga

SEQ ID NO: 344216 - DNA, 33 bp, Homo sapien
gatggatggccaattatcctagaaggtgaaaga

SEQ ID NO: 344217 - DNA, 33 bp, Homo sapien
gtagacactctgcctagacacatccacaaggcc

SEQ ID NO: 344218 - DNA, 33 bp, Homo sapien
gtagacactctgcctatacacatccacaaggcc

SEQ ID NO: 344219 - DNA, 33 bp, Homo sapien
tggatgtccccattgtaaatcactaagctagga

SEQ ID NO: 344220 - DNA, 33 bp, Homo sapien
tggatgtccccattgtgaatcactaagctagga

SEQ ID NO: 344221 - DNA, 33 bp, Homo sapien
tgaggctctctatataactcctcgatacaagga

SEQ ID NO: 344222 - DNA, 33 bp, Homo sapien
tgaggctctctatatagctcctcgatacaagga

SEQ ID NO: 344223 - DNA, 33 bp, Homo sapien
tccagactctgtataaatgtcagatattattaa

SEQ ID NO: 344224 - DNA, 33 bp, Homo sapien
tccagactctgtataagtgtcagatattattaa

SEQ ID NO: 344225 - DNA, 33 bp, Homo sapien
agcaatcccagttaaaatcccacatggcttttt

SEQ ID NO: 344226 - DNA, 33 bp, Homo sapien
agcaatcccagttaaattcccacatggcttttt

SEQ ID NO: 344227 - DNA, 33 bp, Homo sapien
gttttaaaaatgttaacagagtgaaagaaaaaa

SEQ ID NO: 344228 - DNA, 33 bp, Homo sapien
gttttaaaaatgttaagagagtgaaagaaaaaa

SEQ ID NO: 344229 - DNA, 33 bp, Homo sapien
gcatcaaacgaatggacgaatgaaaatggcaaa

SEQ ID NO: 344230 - DNA, 33 bp, Homo sapien
gcatcaaacgaatggaggaatgaaaatggcaaa

SEQ ID NO: 344231 - DNA, 33 bp, Homo sapien
atctccagacctttctcaccttgcacaactgaa

SEQ ID NO: 344232 - DNA, 33 bp, Homo sapien
atctccagacctttcttaccttgcacaactgaa

SEQ ID NO: 344233 - DNA, 33 bp, Homo sapien
ttaccagacaaaccagcattgagggaattcatt

SEQ ID NO: 344234 - DNA, 33 bp, Homo sapien
ttaccagacaaaccaggattgagggaattcatt

SEQ ID NO: 344235 - DNA, 33 bp, Homo sapien
tattcactcattcatcaagcaaagactctgtac

SEQ ID NO: 344236 - DNA, 33 bp, Homo sapien
tattcactcattcatccagcaaagactctgtac

SEQ ID NO: 344237 - DNA, 33 bp, Homo sapien
ctctcctggccatgtacgccctcagcagaaacc

SEQ ID NO: 344238 - DNA, 33 bp, Homo sapien
ctctcctggccatgtatgccctcagcagaaacc

SEQ ID NO: 344239 - DNA, 33 bp, Homo sapien
aagaaattgagtttctaaaagctaagtaacttg

SEQ ID NO: 344240 - DNA, 33 bp, Homo sapien
aagaaattgagtttctgaaagctaagtaacttg

SEQ ID NO: 344241 - DNA, 33 bp, Homo sapien
cgaggaattagcccatcatgataccatagtcaa

SEQ ID NO: 344242 - DNA, 33 bp, Homo sapien
cgaggaattagcccatgatgataccatagtcaa

SEQ ID NO: 344243 - DNA, 33 bp, Homo sapien
aaagattccaagcctaaagtcagcaaagctccc

SEQ ID NO: 344244 - DNA, 33 bp, Homo sapien
aaagattccaagcctacagtcagcaaagctccc

SEQ ID NO: 344245 - DNA, 33 bp, Homo sapien
gttgtgatatggggtacgtggaagggaagatta

SEQ ID NO: 344246 - DNA, 33 bp, Homo sapien
gttgtgatatggggtaggtggaagggaagatta

SEQ ID NO: 344247 - DNA, 33 bp, Homo sapien
cacacactgcagtaaaagctccctcctcacaca

SEQ ID NO: 344248 - DNA, 33 bp, Homo sapien
cacacactgcagtaaaggctccctcctcacaca

SEQ ID NO: 344249 - DNA, 33 bp, Homo sapien
tagcaaacagcctaaacagcaacgaatgtaagc

SEQ ID NO: 344250 - DNA, 33 bp, Homo sapien
tagcaaacagcctaaagagcaacgaatgtaagc

SEQ ID NO: 344251 - DNA, 33 bp, Homo sapien
cctagtgtggacatcaaaatttgttcagagagg

SEQ ID NO: 344252 - DNA, 33 bp, Homo sapien
cctagtgtggacatcagaatttgttcagagagg

SEQ ID NO: 344253 - DNA, 33 bp, Homo sapien
aatgaagctcgagaaacggttcttctgtcacat

SEQ ID NO: 344254 - DNA, 33 bp, Homo sapien
aatgaagctcgagaaatggttcttctgtcacat

SEQ ID NO: 344255 - DNA, 33 bp, Homo sapien
tatccagtgaaagtgggataaaacaacaagtct

SEQ ID NO: 344256 - DNA, 33 bp, Homo sapien
tatccagtgaaagtggtataaaacaacaagtct

SEQ ID NO: 344257 - DNA, 33 bp, Homo sapien
ttctcttggtgtgtagaaagtgtatgttttatg

SEQ ID NO: 344258 - DNA, 33 bp, Homo sapien
ttctcttggtgtgtaggaagtgtatgttttatg

SEQ ID NO: 344259 - DNA, 33 bp, Homo sapien
acaccaagagaaggaaatattacccccaagtga

SEQ ID NO: 344260 - DNA, 33 bp, Homo sapien
acaccaagagaaggaattattacccccaagtga

SEQ ID NO: 344261 - DNA, 33 bp, Homo sapien
acctggggtggagcaagcgaaagaatctgccca

SEQ ID NO: 344262 - DNA, 33 bp, Homo sapien
acctggggtggagcaatcgaaagaatctgccca

SEQ ID NO: 344263 - DNA, 33 bp, Homo sapien
agagattaggttggaaaaggcttcagaattggg

SEQ ID NO: 344264 - DNA, 33 bp, Homo sapien
agagattaggttggaacaggcttcagaattggg

SEQ ID NO: 344265 - DNA, 33 bp, Homo sapien
ccaggatacatcttcaactgcagatatagggaa

SEQ ID NO: 344266 - DNA, 33 bp, Homo sapien
ccaggatacatcttcacctgcagatatagggaa

SEQ ID NO: 344267 - DNA, 33 bp, Homo sapien
gtccagcaaacaccaacgtcttaggctgtggca

SEQ ID NO: 344268 - DNA, 33 bp, Homo sapien
gtccagcaaacaccaatgtcttaggctgtggca

SEQ ID NO: 344269 - DNA, 33 bp, Homo sapien
tcttataagttaaccacggacagcaatgatcac

SEQ ID NO: 344270 - DNA, 33 bp, Homo sapien
tcttataagttaaccatggacagcaatgatcac

SEQ ID NO: 344271 - DNA, 33 bp, Homo sapien
ttagctgaaaagcatacgagaattttaagttta

SEQ ID NO: 344272 - DNA, 33 bp, Homo sapien
ttagctgaaaagcataggagaattttaagttta

SEQ ID NO: 344273 - DNA, 33 bp, Homo sapien
cttacacaaatttacacgatacagtcaaatata

SEQ ID NO: 344274 - DNA, 33 bp, Homo sapien
cttacacaaatttacatgatacagtcaaatata

SEQ ID NO: 344275 - DNA, 33 bp, Homo sapien
agtggagggacctctgcagttgatggtcagatt

SEQ ID NO: 344276 - DNA, 33 bp, Homo sapien
agtggagggacctctggagttgatggtcagatt

SEQ ID NO: 344277 - DNA, 33 bp, Homo sapien
caaggtctctgaaatacagtcttggagcaagag

SEQ ID NO: 344278 - DNA, 33 bp, Homo sapien
caaggtctctgaaatagagtcttggagcaagag

SEQ ID NO: 344279 - DNA, 33 bp, Homo sapien
cttgtaagtctgtgtaacaacaaaacataaact

SEQ ID NO: 344280 - DNA, 33 bp, Homo sapien
cttgtaagtctgtgtatcaacaaaacataaact

SEQ ID NO: 344281 - DNA, 33 bp, Homo sapien
aaatgcctctttcttcaaacaatggaaccatca

SEQ ID NO: 344282 - DNA, 33 bp, Homo sapien
aaatgcctctttcttcgaacaatggaaccatca

SEQ ID NO: 344283 - DNA, 33 bp, Homo sapien
agtgaaaaggagactgcatttcctccaaagctg

SEQ ID NO: 344284 - DNA, 33 bp, Homo sapien
agtgaaaaggagactggatttcctccaaagctg

SEQ ID NO: 344285 - DNA, 33 bp, Homo sapien
tgtctcatttcctttaactgtaaaatggtgcta

SEQ ID NO: 344286 - DNA, 33 bp, Homo sapien
tgtctcatttcctttatctgtaaaatggtgcta

SEQ ID NO: 344287 - DNA, 33 bp, Homo sapien
atagacaataccgccaatgcatggtagcccatg

SEQ ID NO: 344288 - DNA, 33 bp, Homo sapien
atagacaataccgccagtgcatggtagcccatg

SEQ ID NO: 344289 - DNA, 33 bp, Homo sapien
acttgtgaatattaaactggcttgtaagggtaa

SEQ ID NO: 344290 - DNA, 33 bp, Homo sapien
acttgtgaatattaaattggcttgtaagggtaa

SEQ ID NO: 344291 - DNA, 33 bp, Homo sapien
gattagtgatgctaagaacaaaaggaaagagca

SEQ ID NO: 344292 - DNA, 33 bp, Homo sapien
gattagtgatgctaaggacaaaaggaaagagca

SEQ ID NO: 344293 - DNA, 33 bp, Homo sapien
tgtatccctcactagcacatttgagaactccag

SEQ ID NO: 344294 - DNA, 33 bp, Homo sapien
tgtatccctcactagcgcatttgagaactccag

SEQ ID NO: 344295 - DNA, 33 bp, Homo sapien
taggtctagggagtaacctgacattctgtattt

SEQ ID NO: 344296 - DNA, 33 bp, Homo sapien
taggtctagggagtaagctgacattctgtattt

SEQ ID NO: 344297 - DNA, 33 bp, Homo sapien
attagcttgggcaacaatggagtagactgaggg

SEQ ID NO: 344298 - DNA, 33 bp, Homo sapien
attagcttgggcaacagtggagtagactgaggg

SEQ ID NO: 344299 - DNA, 33 bp, Homo sapien
caaatgtgcacaagtgccaattcctataaaact

SEQ ID NO: 344300 - DNA, 33 bp, Homo sapien
caaatgtgcacaagtgtcaattcctataaaact

SEQ ID NO: 344301 - DNA, 33 bp, Homo sapien
caaaacagctgctgaaaaagtgaatatatgaat

SEQ ID NO: 344302 - DNA, 33 bp, Homo sapien
caaaacagctgctgaataagtgaatatatgaat

SEQ ID NO: 344303 - DNA, 33 bp, Homo sapien
cagaaatttatccataacttcatttataaccat

SEQ ID NO: 344304 - DNA, 33 bp, Homo sapien
cagaaatttatccataccttcatttataaccat

SEQ ID NO: 344305 - DNA, 33 bp, Homo sapien
aacaagattgcagaggacattttagactatttg

SEQ ID NO: 344306 - DNA, 33 bp, Homo sapien
aacaagattgcagagggcattttagactatttg

SEQ ID NO: 344307 - DNA, 33 bp, Homo sapien
aaatcatcctcggattaaaagtcttctaagagt

SEQ ID NO: 344308 - DNA, 33 bp, Homo sapien
aaatcatcctcggattgaaagtcttctaagagt

SEQ ID NO: 344309 - DNA, 33 bp, Homo sapien
ctaaaagttattcagcagcaaatgatatgaaag

SEQ ID NO: 344310 - DNA, 33 bp, Homo sapien
ctaaaagttattcagcggcaaatgatatgaaag

SEQ ID NO: 344311 - DNA, 33 bp, Homo sapien
aattagacaaccccaacccgacagagcatttca

SEQ ID NO: 344312 - DNA, 33 bp, Homo sapien
aattagacaaccccaatccgacagagcatttca

SEQ ID NO: 344313 - DNA, 33 bp, Homo sapien
tgttagcagattttaaagatttctcagttttaa

SEQ ID NO: 344314 - DNA, 33 bp, Homo sapien
tgttagcagattttaaggatttctcagttttaa

SEQ ID NO: 344315 - DNA, 33 bp, Homo sapien
acattatatgtgttaacatgcaagggtttatta

SEQ ID NO: 344316 - DNA, 33 bp, Homo sapien
acattatatgtgttaatatgcaagggtttatta

SEQ ID NO: 344317 - DNA, 33 bp, Homo sapien
tttctgaacttcatcactattgcccccaaaagt

SEQ ID NO: 344318 - DNA, 33 bp, Homo sapien
tttctgaacttcatcattattgcccccaaaagt

SEQ ID NO: 344319 - DNA, 33 bp, Homo sapien
caggagcacataacagaagcttaatatgaatct

SEQ ID NO: 344320 - DNA, 33 bp, Homo sapien
caggagcacataacaggagcttaatatgaatct

SEQ ID NO: 344321 - DNA, 33 bp, Homo sapien
tgcttaaaatggatagaactttgcttccacatt

SEQ ID NO: 344322 - DNA, 33 bp, Homo sapien
tgcttaaaatggataggactttgcttccacatt

SEQ ID NO: 344323 - DNA, 33 bp, Homo sapien
acccacggaagttgagaatatgtcccaggctcc

SEQ ID NO: 344324 - DNA, 33 bp, Homo sapien
acccacggaagttgaggatatgtcccaggctcc

SEQ ID NO: 344325 - DNA, 33 bp, Homo sapien
tcttgatactactaagccaccgaggagccgtgg

SEQ ID NO: 344326 - DNA, 33 bp, Homo sapien
tcttgatactactaagtcaccgaggagccgtgg

SEQ ID NO: 344327 - DNA, 33 bp, Homo sapien
ggctgtgttcccattacaggtcttacagaagtg

SEQ ID NO: 344328 - DNA, 33 bp, Homo sapien
ggctgtgttcccattataggtcttacagaagtg

SEQ ID NO: 344329 - DNA, 33 bp, Homo sapien
ggtgaagtgacacatgcaagaaaacaatgcaaa

SEQ ID NO: 344330 - DNA, 33 bp, Homo sapien
ggtgaagtgacacatggaagaaaacaatgcaaa

SEQ ID NO: 344331 - DNA, 33 bp, Homo sapien
agaaccagtgacctaactgatttagctcctgac

SEQ ID NO: 344332 - DNA, 33 bp, Homo sapien
agaaccagtgacctaattgatttagctcctgac

SEQ ID NO: 344333 - DNA, 33 bp, Homo sapien
taccaatggtccctaagcgattttccctgcagc

SEQ ID NO: 344334 - DNA, 33 bp, Homo sapien
taccaatggtccctaatcgattttccctgcagc

SEQ ID NO: 344335 - DNA, 33 bp, Homo sapien
acttccagagagaccacacttcatcacatacct

SEQ ID NO: 344336 - DNA, 33 bp, Homo sapien
acttccagagagaccatacttcatcacatacct

SEQ ID NO: 344337 - DNA, 33 bp, Homo sapien
ccacctgttgactagaaaattgccatgcactgt

SEQ ID NO: 344338 - DNA, 33 bp, Homo sapien
ccacctgttgactagagaattgccatgcactgt

SEQ ID NO: 344339 - DNA, 33 bp, Homo sapien
aatgattgagtttcaacgtgtccttatttcatt

SEQ ID NO: 344340 - DNA, 33 bp, Homo sapien
aatgattgagtttcaatgtgtccttatttcatt

SEQ ID NO: 344341 - DNA, 33 bp, Homo sapien
catttgcaaagagagaacagacatctacctgag

SEQ ID NO: 344342 - DNA, 33 bp, Homo sapien
catttgcaaagagagaccagacatctacctgag

SEQ ID NO: 344343 - DNA, 33 bp, Homo sapien
tatactttaccatgcgcagaatgggaaaaacag

SEQ ID NO: 344344 - DNA, 33 bp, Homo sapien
tatactttaccatgcgtagaatgggaaaaacag

SEQ ID NO: 344345 - DNA, 33 bp, Homo sapien
gtggcatatcgtaaacagggtgccttgtaggcc

SEQ ID NO: 344346 - DNA, 33 bp, Homo sapien
gtggcatatcgtaaacggggtgccttgtaggcc

SEQ ID NO: 344347 - DNA, 33 bp, Homo sapien
caagagtccacaatgacaggtttcaaagatgaa

SEQ ID NO: 344348 - DNA, 33 bp, Homo sapien
caagagtccacaatgataggtttcaaagatgaa

SEQ ID NO: 344349 - DNA, 33 bp, Homo sapien
ctgcatggttaatccaatcaaagcccaacctgc

SEQ ID NO: 344350 - DNA, 33 bp, Homo sapien
ctgcatggttaatccagtcaaagcccaacctgc

SEQ ID NO: 344351 - DNA, 33 bp, Homo sapien
actctgctcatatctgaattggtatttgctcac

SEQ ID NO: 344352 - DNA, 33 bp, Homo sapien
actctgctcatatctgtattggtatttgctcac

SEQ ID NO: 344353 - DNA, 33 bp, Homo sapien
gagcaagggtctgggaagtggccgtgacctggg

SEQ ID NO: 344354 - DNA, 33 bp, Homo sapien
gagcaagggtctgggaggtggccgtgacctggg

SEQ ID NO: 344355 - DNA, 33 bp, Homo sapien
acacaagtgaggattccattccatcaggaatgg

SEQ ID NO: 344356 - DNA, 33 bp, Homo sapien
acacaagtgaggattctattccatcaggaatgg

SEQ ID NO: 344357 - DNA, 33 bp, Homo sapien
agtgttttcaaagttaacaaaaccatgcccctt

SEQ ID NO: 344358 - DNA, 33 bp, Homo sapien
agtgttttcaaagttaccaaaaccatgcccctt

SEQ ID NO: 344359 - DNA, 33 bp, Homo sapien
tcctgcattcttcacacagcacttgatgaagga

SEQ ID NO: 344360 - DNA, 33 bp, Homo sapien
tcctgcattcttcacatagcacttgatgaagga

SEQ ID NO: 344361 - DNA, 33 bp, Homo sapien
gagccacagtggcccacgtaaagcctttttact

SEQ ID NO: 344362 - DNA, 33 bp, Homo sapien
gagccacagtggcccatgtaaagcctttttact

SEQ ID NO: 344363 - DNA, 33 bp, Homo sapien
aggatatatccatgtacaagaacactatgcagc

SEQ ID NO: 344364 - DNA, 33 bp, Homo sapien
aggatatatccatgtagaagaacactatgcagc

SEQ ID NO: 344365 - DNA, 33 bp, Homo sapien
taaaatgacatgggtagagaacacactaaattc

SEQ ID NO: 344366 - DNA, 33 bp, Homo sapien
taaaatgacatgggtatagaacacactaaattc

SEQ ID NO: 344367 - DNA, 33 bp, Homo sapien
tccgtagttgggttccacaagaatgataggaac

SEQ ID NO: 344368 - DNA, 33 bp, Homo sapien
tccgtagttgggttccgcaagaatgataggaac

SEQ ID NO: 344369 - DNA, 33 bp, Homo sapien
ctgtctcctaaaactcacttgaatccattttta

SEQ ID NO: 344370 - DNA, 33 bp, Homo sapien
ctgtctcctaaaactcgcttgaatccattttta

SEQ ID NO: 344371 - DNA, 33 bp, Homo sapien
ttagtgattaaaccagaactcccaaatcctgtt

SEQ ID NO: 344372 - DNA, 33 bp, Homo sapien
ttagtgattaaaccaggactcccaaatcctgtt

SEQ ID NO: 344373 - DNA, 33 bp, Homo sapien
tctggaaggaccaataagaatcacgtggcaggc

SEQ ID NO: 344374 - DNA, 33 bp, Homo sapien
tctggaaggaccaataggaatcacgtggcaggc

SEQ ID NO: 344375 - DNA, 33 bp, Homo sapien
ggtggcacagagctaaaagaatgggcctgagtg

SEQ ID NO: 344376 - DNA, 33 bp, Homo sapien
ggtggcacagagctaagagaatgggcctgagtg

SEQ ID NO: 344377 - DNA, 33 bp, Homo sapien
ccacttgcctgaggccacatggctggtgagtag

SEQ ID NO: 344378 - DNA, 33 bp, Homo sapien
ccacttgcctgaggccgcatggctggtgagtag

SEQ ID NO: 344379 - DNA, 33 bp, Homo sapien
aagaccttatgcagatcactgatcacattccaa

SEQ ID NO: 344380 - DNA, 33 bp, Homo sapien
aagaccttatgcagatgactgatcacattccaa

SEQ ID NO: 344381 - DNA, 33 bp, Homo sapien
aagctttcccttagcccctacacagtgcctggt

SEQ ID NO: 344382 - DNA, 33 bp, Homo sapien
aagctttcccttagcctctacacagtgcctggt

SEQ ID NO: 344383 - DNA, 33 bp, Homo sapien
gttcagttcaatactaataaagggatggagggg

SEQ ID NO: 344384 - DNA, 33 bp, Homo sapien
gttcagttcaatactagtaaagggatggagggg

SEQ ID NO: 344385 - DNA, 33 bp, Homo sapien
attctattctatctaaaccattcacagtggatt

SEQ ID NO: 344386 - DNA, 33 bp, Homo sapien
attctattctatctaagccattcacagtggatt

SEQ ID NO: 344387 - DNA, 33 bp, Homo sapien
tagtgctttcatcaaacgtagatatttttccac

SEQ ID NO: 344388 - DNA, 33 bp, Homo sapien
tagtgctttcatcaaatgtagatatttttccac

SEQ ID NO: 344389 - DNA, 33 bp, Homo sapien
cagagctatacacttacgattcgtcacctaaaa

SEQ ID NO: 344390 - DNA, 33 bp, Homo sapien
cagagctatacacttaggattcgtcacctaaaa

SEQ ID NO: 344391 - DNA, 33 bp, Homo sapien
ctgtaaatattcagtccattgatgaagagctct

SEQ ID NO: 344392 - DNA, 33 bp, Homo sapien
ctgtaaatattcagtctattgatgaagagctct

SEQ ID NO: 344393 - DNA, 33 bp, Homo sapien
acaagcaagttccggacattctttggaatcatg

SEQ ID NO: 344394 - DNA, 33 bp, Homo sapien
acaagcaagttccggatattctttggaatcatg

SEQ ID NO: 344395 - DNA, 33 bp, Homo sapien
gtgttactagaattcaacatctaccccgaatat

SEQ ID NO: 344396 - DNA, 33 bp, Homo sapien
gtgttactagaattcagcatctaccccgaatat

SEQ ID NO: 344397 - DNA, 33 bp, Homo sapien
gcagctaagatgtgccaagctttttggaagaaa

SEQ ID NO: 344398 - DNA, 33 bp, Homo sapien
gcagctaagatgtgccgagctttttggaagaaa

SEQ ID NO: 344399 - DNA, 33 bp, Homo sapien
ggcacccctgccaaataagcgggcacctctatg

SEQ ID NO: 344400 - DNA, 33 bp, Homo sapien
ggcacccctgccaaatgagcgggcacctctatg

SEQ ID NO: 344401 - DNA, 33 bp, Homo sapien
cccctgacctattaaacagctgaaatcaagggc

SEQ ID NO: 344402 - DNA, 33 bp, Homo sapien
cccctgacctattaaatagctgaaatcaagggc

SEQ ID NO: 344403 - DNA, 33 bp, Homo sapien
ctgtgcagcctatgccgctcaacctggatcaag

SEQ ID NO: 344404 - DNA, 33 bp, Homo sapien
ctgtgcagcctatgcctctcaacctggatcaag

SEQ ID NO: 344405 - DNA, 33 bp, Homo sapien
ttggaatactgcactacagtcaagcaataatgt

SEQ ID NO: 344406 - DNA, 33 bp, Homo sapien
ttggaatactgcactatagtcaagcaataatgt

SEQ ID NO: 344407 - DNA, 33 bp, Homo sapien
ttagaataagtaccaactggagcatctagcatc

SEQ ID NO: 344408 - DNA, 33 bp, Homo sapien
ttagaataagtaccaattggagcatctagcatc

SEQ ID NO: 344409 - DNA, 33 bp, Homo sapien
tcagggtccttattaaatgggctgaattgagtt

SEQ ID NO: 344410 - DNA, 33 bp, Homo sapien
tcagggtccttattaattgggctgaattgagtt

SEQ ID NO: 344411 - DNA, 33 bp, Homo sapien
tgggggagcctcactacgaccatgagccacttt

SEQ ID NO: 344412 - DNA, 33 bp, Homo sapien
tgggggagcctcactatgaccatgagccacttt

SEQ ID NO: 344413 - DNA, 33 bp, Homo sapien
ggcttcgagagagttgaacagattcctggaaga

SEQ ID NO: 344414 - DNA, 33 bp, Homo sapien
ggcttcgagagagttgcacagattcctggaaga

SEQ ID NO: 344415 - DNA, 33 bp, Homo sapien
ggggtgttttaatgataagcctgttggaaaagc

SEQ ID NO: 344416 - DNA, 33 bp, Homo sapien
ggggtgttttaatgatgagcctgttggaaaagc

SEQ ID NO: 344417 - DNA, 33 bp, Homo sapien
gagggagctctgcatcaaaaacttcaccccaaa

SEQ ID NO: 344418 - DNA, 33 bp, Homo sapien
gagggagctctgcatccaaaacttcaccccaaa

SEQ ID NO: 344419 - DNA, 33 bp, Homo sapien
actctggggcttccacaccgagaaaggccttgc

SEQ ID NO: 344420 - DNA, 33 bp, Homo sapien
actctggggcttccactccgagaaaggccttgc

SEQ ID NO: 344421 - DNA, 33 bp, Homo sapien
gttcacatcagcagtgcatggtggtcgggcagt

SEQ ID NO: 344422 - DNA, 33 bp, Homo sapien
gttcacatcagcagtgtatggtggtcgggcagt

SEQ ID NO: 344423 - DNA, 33 bp, Homo sapien
ggtcttaaagatgaaaagcatgaaatagtccat

SEQ ID NO: 344424 - DNA, 33 bp, Homo sapien
ggtcttaaagatgaaaggcatgaaatagtccat

SEQ ID NO: 344425 - DNA, 33 bp, Homo sapien
tcctaaaatcgtggaaccatagcatctcaaatg

SEQ ID NO: 344426 - DNA, 33 bp, Homo sapien
tcctaaaatcgtggaagcatagcatctcaaatg

SEQ ID NO: 344427 - DNA, 33 bp, Homo sapien
catgctgggtacaaggaatggatagtcaagtgg

SEQ ID NO: 344428 - DNA, 33 bp, Homo sapien
catgctgggtacaagggatggatagtcaagtgg

SEQ ID NO: 344429 - DNA, 33 bp, Homo sapien
acaggaaaggcaaatacgcagcaagtattccat

SEQ ID NO: 344430 - DNA, 33 bp, Homo sapien
acaggaaaggcaaatatgcagcaagtattccat

SEQ ID NO: 344431 - DNA, 33 bp, Homo sapien
gaacttgggcctaaaagctttctgttttatcac

SEQ ID NO: 344432 - DNA, 33 bp, Homo sapien
gaacttgggcctaaaatctttctgttttatcac

SEQ ID NO: 344433 - DNA, 33 bp, Homo sapien
ttccaggaactgccccagaatataaacgcttgg

SEQ ID NO: 344434 - DNA, 33 bp, Homo sapien
ttccaggaactgccccggaatataaacgcttgg

SEQ ID NO: 344435 - DNA, 33 bp, Homo sapien
caccccatcagagagcagcaataatgtaaaatg

SEQ ID NO: 344436 - DNA, 33 bp, Homo sapien
caccccatcagagagcggcaataatgtaaaatg

SEQ ID NO: 344437 - DNA, 33 bp, Homo sapien
tgatgaactggatcttgaactggtaatgataaa

SEQ ID NO: 344438 - DNA, 33 bp, Homo sapien
tgatgaactggatctttaactggtaatgataaa

SEQ ID NO: 344439 - DNA, 33 bp, Homo sapien
tcaaccaaactgagacaccaatacaaacaactt

SEQ ID NO: 344440 - DNA, 33 bp, Homo sapien
tcaaccaaactgagacgccaatacaaacaactt

SEQ ID NO: 344441 - DNA, 33 bp, Homo sapien
gagtattattaggccccagtgatggagtacaga

SEQ ID NO: 344442 - DNA, 33 bp, Homo sapien
gagtattattaggccctagtgatggagtacaga

SEQ ID NO: 344443 - DNA, 33 bp, Homo sapien
tcttgctgtagggccaataatttcttctctttc

SEQ ID NO: 344444 - DNA, 33 bp, Homo sapien
tcttgctgtagggccagtaatttcttctctttc

SEQ ID NO: 344445 - DNA, 33 bp, Homo sapien
tttcccattatgtctaaaatactaaggtttaca

SEQ ID NO: 344446 - DNA, 33 bp, Homo sapien
tttcccattatgtctagaatactaaggtttaca

SEQ ID NO: 344447 - DNA, 33 bp, Homo sapien
taaatatataaataaacacaggttcactattac

SEQ ID NO: 344448 - DNA, 33 bp, Homo sapien
taaatatataaataaagacaggttcactattac

SEQ ID NO: 344449 - DNA, 33 bp, Homo sapien
cagagcaagattacaaagagatagtaaaaatcc

SEQ ID NO: 344450 - DNA, 33 bp, Homo sapien
cagagcaagattacaaggagatagtaaaaatcc

SEQ ID NO: 344451 - DNA, 33 bp, Homo sapien
gacatcaagaagttccaagacatgaggaactgg

SEQ ID NO: 344452 - DNA, 33 bp, Homo sapien
gacatcaagaagttccgagacatgaggaactgg

SEQ ID NO: 344453 - DNA, 33 bp, Homo sapien
atttttgcattctaaactgcttaataaacatca

SEQ ID NO: 344454 - DNA, 33 bp, Homo sapien
atttttgcattctaaagtgcttaataaacatca

SEQ ID NO: 344455 - DNA, 33 bp, Homo sapien
taagtatctgctagtaacatctgtaattaagtg

SEQ ID NO: 344456 - DNA, 33 bp, Homo sapien
taagtatctgctagtagcatctgtaattaagtg

SEQ ID NO: 344457 - DNA, 33 bp, Homo sapien
ctgtcaaagcagtacacgaccattttgagtaat

SEQ ID NO: 344458 - DNA, 33 bp, Homo sapien
ctgtcaaagcagtacatgaccattttgagtaat

SEQ ID NO: 344459 - DNA, 33 bp, Homo sapien
gtgccagggtcttataccccagagacaagggtg

SEQ ID NO: 344460 - DNA, 33 bp, Homo sapien
gtgccagggtcttatatcccagagacaagggtg

SEQ ID NO: 344461 - DNA, 33 bp, Homo sapien
agctttagcaactgcacagaatgataaaaatca

SEQ ID NO: 344462 - DNA, 33 bp, Homo sapien
agctttagcaactgcagagaatgataaaaatca

SEQ ID NO: 344463 - DNA, 33 bp, Homo sapien
gactgttttccatgtcaatttggtgtaggagaa

SEQ ID NO: 344464 - DNA, 33 bp, Homo sapien
gactgttttccatgtcgatttggtgtaggagaa

SEQ ID NO: 344465 - DNA, 33 bp, Homo sapien
ctgatgtgagtgcataggtttgtgccaagcttc

SEQ ID NO: 344466 - DNA, 33 bp, Homo sapien
ctgatgtgagtgcatatgtttgtgccaagcttc

SEQ ID NO: 344467 - DNA, 33 bp, Homo sapien
ctatactattcaccaacattatcttgctttatg

SEQ ID NO: 344468 - DNA, 33 bp, Homo sapien
ctatactattcaccaatattatcttgctttatg

SEQ ID NO: 344469 - DNA, 33 bp, Homo sapien
gactccacacttcaaaactttatcagttaaaaa

SEQ ID NO: 344470 - DNA, 33 bp, Homo sapien
gactccacacttcaaatctttatcagttaaaaa

SEQ ID NO: 344471 - DNA, 33 bp, Homo sapien
aagcgataatcataaaaaccaaaagcagttgtt

SEQ ID NO: 344472 - DNA, 33 bp, Homo sapien
aagcgataatcataaagaccaaaagcagttgtt

SEQ ID NO: 344473 - DNA, 33 bp, Homo sapien
tatttgttccttggtaaatcctacaaaatctcc

SEQ ID NO: 344474 - DNA, 33 bp, Homo sapien
tatttgttccttggtatatcctacaaaatctcc

SEQ ID NO: 344475 - DNA, 33 bp, Homo sapien
atgtcatccacctcaagaatgtatttcaatgac

SEQ ID NO: 344476 - DNA, 33 bp, Homo sapien
atgtcatccacctcaataatgtatttcaatgac

SEQ ID NO: 344477 - DNA, 33 bp, Homo sapien
actccatagaatcatacaccaatgtctcttaca

SEQ ID NO: 344478 - DNA, 33 bp, Homo sapien
actccatagaatcatataccaatgtctcttaca

SEQ ID NO: 344479 - DNA, 33 bp, Homo sapien
tctttgaaactatacaatcacatggaaagtaaa

SEQ ID NO: 344480 - DNA, 33 bp, Homo sapien
tctttgaaactatacagtcacatggaaagtaaa

SEQ ID NO: 344481 - DNA, 33 bp, Homo sapien
aggactacagtgaatacgtaactcttcaatgcc

SEQ ID NO: 344482 - DNA, 33 bp, Homo sapien
aggactacagtgaatatgtaactcttcaatgcc

SEQ ID NO: 344483 - DNA, 33 bp, Homo sapien
ccctgccgcattgtgaccagcacctacagctag

SEQ ID NO: 344484 - DNA, 33 bp, Homo sapien
ccctgccgcattgtgagcagcacctacagctag

SEQ ID NO: 344485 - DNA, 33 bp, Homo sapien
actggagttgtttcctcaacgactatggcactg

SEQ ID NO: 344486 - DNA, 33 bp, Homo sapien
actggagttgtttccttaacgactatggcactg

SEQ ID NO: 344487 - DNA, 33 bp, Homo sapien
catagcaaaaagaataactgggtagagaagaga

SEQ ID NO: 344488 - DNA, 33 bp, Homo sapien
catagcaaaaagaatatctgggtagagaagaga

SEQ ID NO: 344489 - DNA, 33 bp, Homo sapien
cttacacgattatacagactgaaaagtcccatg

SEQ ID NO: 344490 - DNA, 33 bp, Homo sapien
cttacacgattatacatactgaaaagtcccatg

SEQ ID NO: 344491 - DNA, 33 bp, Homo sapien
ccctgactaatcttcaacccttgtactgcttac

SEQ ID NO: 344492 - DNA, 33 bp, Homo sapien
ccctgactaatcttcagcccttgtactgcttac

SEQ ID NO: 344493 - DNA, 33 bp, Homo sapien
tccgtttttgagcctactaatgttgcagcaaaa

SEQ ID NO: 344494 - DNA, 33 bp, Homo sapien
tccgtttttgagcctattaatgttgcagcaaaa

SEQ ID NO: 344495 - DNA, 33 bp, Homo sapien
ctgcagacattacatcgcatatcacctgtgctt

SEQ ID NO: 344496 - DNA, 33 bp, Homo sapien
ctgcagacattacatctcatatcacctgtgctt

SEQ ID NO: 344497 - DNA, 33 bp, Homo sapien
ggctagcactctgaaactattccagtgttacaa

SEQ ID NO: 344498 - DNA, 33 bp, Homo sapien
ggctagcactctgaaagtattccagtgttacaa

SEQ ID NO: 344499 - DNA, 33 bp, Homo sapien
cttttaaacactgaacgaatcctatcttctaaa

SEQ ID NO: 344500 - DNA, 33 bp, Homo sapien
cttttaaacactgaactaatcctatcttctaaa

SEQ ID NO: 344501 - DNA, 33 bp, Homo sapien
atatgcaaaaaagtgaagaattggagaaagtaa

SEQ ID NO: 344502 - DNA, 33 bp, Homo sapien
atatgcaaaaaagtgaggaattggagaaagtaa

SEQ ID NO: 344503 - DNA, 33 bp, Homo sapien
cgaatgtgttaagggaactaaaactctaaagaa

SEQ ID NO: 344504 - DNA, 33 bp, Homo sapien
cgaatgtgttaagggagctaaaactctaaagaa

SEQ ID NO: 344505 - DNA, 33 bp, Homo sapien
tgcacagtatctggacacaaaaataactgagta

SEQ ID NO: 344506 - DNA, 33 bp, Homo sapien
tgcacagtatctggacgcaaaaataactgagta

SEQ ID NO: 344507 - DNA, 33 bp, Homo sapien
ctcactttctccaacaaaaatcccataattttt

SEQ ID NO: 344508 - DNA, 33 bp, Homo sapien
ctcactttctccaacacaaatcccataattttt

SEQ ID NO: 344509 - DNA, 33 bp, Homo sapien
taagaattaaaactaacgactacaggagcatat

SEQ ID NO: 344510 - DNA, 33 bp, Homo sapien
taagaattaaaactaatgactacaggagcatat

SEQ ID NO: 344511 - DNA, 33 bp, Homo sapien
tttccaattaagcctacatgactagtccaatcc

SEQ ID NO: 344512 - DNA, 33 bp, Homo sapien
tttccaattaagcctatatgactagtccaatcc

SEQ ID NO: 344513 - DNA, 33 bp, Homo sapien
agacctgtggctccaaaactgcccacttatggc

SEQ ID NO: 344514 - DNA, 33 bp, Homo sapien
agacctgtggctccaagactgcccacttatggc

SEQ ID NO: 344515 - DNA, 33 bp, Homo sapien
ttcactgatttatataaagggatgtgggaagct

SEQ ID NO: 344516 - DNA, 33 bp, Homo sapien
ttcactgatttatatagagggatgtgggaagct

SEQ ID NO: 344517 - DNA, 33 bp, Homo sapien
aggttaagattcattacctagactgagtgcagt

SEQ ID NO: 344518 - DNA, 33 bp, Homo sapien
aggttaagattcattatctagactgagtgcagt

SEQ ID NO: 344519 - DNA, 33 bp, Homo sapien
ggataactctagattcaataagaaacaatcttc

SEQ ID NO: 344520 - DNA, 33 bp, Homo sapien
ggataactctagattcgataagaaacaatcttc

SEQ ID NO: 344521 - DNA, 33 bp, Homo sapien
aaatggtgtactttcaaatagagatatgggttc

SEQ ID NO: 344522 - DNA, 33 bp, Homo sapien
aaatggtgtactttcagatagagatatgggttc

SEQ ID NO: 344523 - DNA, 33 bp, Homo sapien
taacgttaaagttcaaatctatcattttctcaa

SEQ ID NO: 344524 - DNA, 33 bp, Homo sapien
taacgttaaagttcaactctatcattttctcaa

SEQ ID NO: 344525 - DNA, 33 bp, Homo sapien
ctattctatcttctaactggcttttctttgtaa

SEQ ID NO: 344526 - DNA, 33 bp, Homo sapien
ctattctatcttctaattggcttttctttgtaa

SEQ ID NO: 344527 - DNA, 33 bp, Homo sapien
tgagcctttcaatcaacgaacatctctatttat

SEQ ID NO: 344528 - DNA, 33 bp, Homo sapien
tgagcctttcaatcaaggaacatctctatttat

SEQ ID NO: 344529 - DNA, 33 bp, Homo sapien
ctcttcgtgctttaaaagtttgttcattgcttt

SEQ ID NO: 344530 - DNA, 33 bp, Homo sapien
ctcttcgtgctttaaaggtttgttcattgcttt

SEQ ID NO: 344531 - DNA, 33 bp, Homo sapien
taatagcacgtgtttcactctaaaattatcttg

SEQ ID NO: 344532 - DNA, 33 bp, Homo sapien
taatagcacgtgtttcgctctaaaattatcttg

SEQ ID NO: 344533 - DNA, 33 bp, Homo sapien
tttattgaatgagaaccataaatgaataagtga

SEQ ID NO: 344534 - DNA, 33 bp, Homo sapien
tttattgaatgagaactataaatgaataagtga

SEQ ID NO: 344535 - DNA, 33 bp, Homo sapien
tagtaggttttctttacgctttatgtcacaaaa

SEQ ID NO: 344536 - DNA, 33 bp, Homo sapien
tagtaggttttctttatgctttatgtcacaaaa

SEQ ID NO: 344537 - DNA, 33 bp, Homo sapien
ttaaaacatccaatcaagtcatcttctcaaatt

SEQ ID NO: 344538 - DNA, 33 bp, Homo sapien
ttaaaacatccaatcatgtcatcttctcaaatt

SEQ ID NO: 344539 - DNA, 33 bp, Homo sapien
tagaaagcttcagaagaaatgtatacttgtttt

SEQ ID NO: 344540 - DNA, 33 bp, Homo sapien
tagaaagcttcagaaggaatgtatacttgtttt

SEQ ID NO: 344541 - DNA, 33 bp, Homo sapien
tatactacttacaagaggaatgaaaatatttaa

SEQ ID NO: 344542 - DNA, 33 bp, Homo sapien
tatactacttacaagatgaatgaaaatatttaa

SEQ ID NO: 344543 - DNA, 33 bp, Homo sapien
tggaaaggctagtaaactcatttaaacaaggga

SEQ ID NO: 344544 - DNA, 33 bp, Homo sapien
tggaaaggctagtaaagtcatttaaacaaggga

SEQ ID NO: 344545 - DNA, 33 bp, Homo sapien
ctgctcactagccttacagatgtcgtatctcat

SEQ ID NO: 344546 - DNA, 33 bp, Homo sapien
ctgctcactagccttatagatgtcgtatctcat

SEQ ID NO: 344547 - DNA, 33 bp, Homo sapien
tttttggtaagagataaaatattgctatgttac

SEQ ID NO: 344548 - DNA, 33 bp, Homo sapien
tttttggtaagagatagaatattgctatgttac

SEQ ID NO: 344549 - DNA, 33 bp, Homo sapien
gacattgccctattgcagaatcactttgactct

SEQ ID NO: 344550 - DNA, 33 bp, Homo sapien
gacattgccctattgcggaatcactttgactct

SEQ ID NO: 344551 - DNA, 33 bp, Homo sapien
cttcctttggactctacagtcagaaccaataga

SEQ ID NO: 344552 - DNA, 33 bp, Homo sapien
cttcctttggactctatagtcagaaccaataga

SEQ ID NO: 344553 - DNA, 33 bp, Homo sapien
gttttcctatggcacaataaatgatttattacc

SEQ ID NO: 344554 - DNA, 33 bp, Homo sapien
gttttcctatggcacagtaaatgatttattacc

SEQ ID NO: 344555 - DNA, 33 bp, Homo sapien
tttcaggaaaatcccaatgaagaccactgcata

SEQ ID NO: 344556 - DNA, 33 bp, Homo sapien
tttcaggaaaatcccagtgaagaccactgcata

SEQ ID NO: 344557 - DNA, 33 bp, Homo sapien
tacagcaactgtgcaacactggaagctgagggg

SEQ ID NO: 344558 - DNA, 33 bp, Homo sapien
tacagcaactgtgcaatactggaagctgagggg

SEQ ID NO: 344559 - DNA, 33 bp, Homo sapien
agtaaactgggatgcaaaataaagagtatgaat

SEQ ID NO: 344560 - DNA, 33 bp, Homo sapien
agtaaactgggatgcagaataaagagtatgaat

SEQ ID NO: 344561 - DNA, 33 bp, Homo sapien
atgactgcatcagaaccgatctattaccactta

SEQ ID NO: 344562 - DNA, 33 bp, Homo sapien
atgactgcatcagaacggatctattaccactta

SEQ ID NO: 344563 - DNA, 33 bp, Homo sapien
tgaggctcttagtagcgcaaacttgaaaagagt

SEQ ID NO: 344564 - DNA, 33 bp, Homo sapien
tgaggctcttagtagctcaaacttgaaaagagt

SEQ ID NO: 344565 - DNA, 33 bp, Homo sapien
attttatgagcagttgaattgaaaacattgagg

SEQ ID NO: 344566 - DNA, 33 bp, Homo sapien
attttatgagcagttgtattgaaaacattgagg

SEQ ID NO: 344567 - DNA, 33 bp, Homo sapien
aataaggacttgctaacaaaagaattttagttt

SEQ ID NO: 344568 - DNA, 33 bp, Homo sapien
aataaggacttgctaataaaagaattttagttt

SEQ ID NO: 344569 - DNA, 33 bp, Homo sapien
aacgagtaaaaactgaaataatgcacaatttct

SEQ ID NO: 344570 - DNA, 33 bp, Homo sapien
aacgagtaaaaactgacataatgcacaatttct

SEQ ID NO: 344571 - DNA, 33 bp, Homo sapien
atgatggaaaaacgcccaattagcaagcatggt

SEQ ID NO: 344572 - DNA, 33 bp, Homo sapien
atgatggaaaaacgcctaattagcaagcatggt

SEQ ID NO: 344573 - DNA, 33 bp, Homo sapien
ggggcttatgataacaagggaagatggtcctgg

SEQ ID NO: 344574 - DNA, 33 bp, Homo sapien
ggggcttatgataacaggggaagatggtcctgg

SEQ ID NO: 344575 - DNA, 33 bp, Homo sapien
gtaggcaatttaggaacactgtgtcttaaccaa

SEQ ID NO: 344576 - DNA, 33 bp, Homo sapien
gtaggcaatttaggaatactgtgtcttaaccaa

SEQ ID NO: 344577 - DNA, 33 bp, Homo sapien
cagctccttcctctgacggggcagccatccatc

SEQ ID NO: 344578 - DNA, 33 bp, Homo sapien
cagctccttcctctgagggggcagccatccatc

SEQ ID NO: 344579 - DNA, 33 bp, Homo sapien
gctagttccatccctacgactccacaggacatg

SEQ ID NO: 344580 - DNA, 33 bp, Homo sapien
gctagttccatccctatgactccacaggacatg

SEQ ID NO: 344581 - DNA, 33 bp, Homo sapien
ctaaggtttagttttccacctcagtgctatatg

SEQ ID NO: 344582 - DNA, 33 bp, Homo sapien
ctaaggtttagttttctacctcagtgctatatg

SEQ ID NO: 344583 - DNA, 33 bp, Homo sapien
tggatatacaaagaaccgtgtctgtggcacttg

SEQ ID NO: 344584 - DNA, 33 bp, Homo sapien
tggatatacaaagaactgtgtctgtggcacttg

SEQ ID NO: 344585 - DNA, 33 bp, Homo sapien
gggttcatttctaacacgtttcggttacaagag

SEQ ID NO: 344586 - DNA, 33 bp, Homo sapien
gggttcatttctaacatgtttcggttacaagag

SEQ ID NO: 344587 - DNA, 33 bp, Homo sapien
ataatgtcacgctaaaaatattgcatcatttag

SEQ ID NO: 344588 - DNA, 33 bp, Homo sapien
ataatgtcacgctaaacatattgcatcatttag

SEQ ID NO: 344589 - DNA, 33 bp, Homo sapien
tttctgggcaaatgcaagtcctcattaacacac

SEQ ID NO: 344590 - DNA, 33 bp, Homo sapien
tttctgggcaaatgcaggtcctcattaacacac

SEQ ID NO: 344591 - DNA, 33 bp, Homo sapien
tttacagatgagaacactggaactaagactggg

SEQ ID NO: 344592 - DNA, 33 bp, Homo sapien
tttacagatgagaacattggaactaagactggg

SEQ ID NO: 344593 - DNA, 33 bp, Homo sapien
gtgcaacctgttcccacgagtatatcctagaga

SEQ ID NO: 344594 - DNA, 33 bp, Homo sapien
gtgcaacctgttcccatgagtatatcctagaga

SEQ ID NO: 344595 - DNA, 33 bp, Homo sapien
ttgctctctaggtgtccacagaaaggctgccaa

SEQ ID NO: 344596 - DNA, 33 bp, Homo sapien
ttgctctctaggtgtctacagaaaggctgccaa

SEQ ID NO: 344597 - DNA, 33 bp, Homo sapien
tagagagcaattttataaacaaagcctttcctc

SEQ ID NO: 344598 - DNA, 33 bp, Homo sapien
tagagagcaattttatgaacaaagcctttcctc

SEQ ID NO: 344599 - DNA, 33 bp, Homo sapien
tgtctaatttgcctcaaataccatgtttccaag

SEQ ID NO: 344600 - DNA, 33 bp, Homo sapien
tgtctaatttgcctcacataccatgtttccaag

SEQ ID NO: 344601 - DNA, 33 bp, Homo sapien
aggtgtcgagtgaagaactccaggtttagcttc

SEQ ID NO: 344602 - DNA, 33 bp, Homo sapien
aggtgtcgagtgaagagctccaggtttagcttc

SEQ ID NO: 344603 - DNA, 33 bp, Homo sapien
atgttctttgatgatgcagactgcacttgagaa

SEQ ID NO: 344604 - DNA, 33 bp, Homo sapien
atgttctttgatgatgtagactgcacttgagaa

SEQ ID NO: 344605 - DNA, 33 bp, Homo sapien
agacaccagggacactaagatgagtaaggcatt

SEQ ID NO: 344606 - DNA, 33 bp, Homo sapien
agacaccagggacactgagatgagtaaggcatt

SEQ ID NO: 344607 - DNA, 33 bp, Homo sapien
ttcctggaaaattcaaaatgcccaaaaagtcat

SEQ ID NO: 344608 - DNA, 33 bp, Homo sapien
ttcctggaaaattcaagatgcccaaaaagtcat

SEQ ID NO: 344609 - DNA, 33 bp, Homo sapien
gtgacagcttaactaacagagagcaaaagggca

SEQ ID NO: 344610 - DNA, 33 bp, Homo sapien
gtgacagcttaactaatagagagcaaaagggca

SEQ ID NO: 344611 - DNA, 33 bp, Homo sapien
tgtgtacactaaataactaccgaaatgatgcct

SEQ ID NO: 344612 - DNA, 33 bp, Homo sapien
tgtgtacactaaataagtaccgaaatgatgcct

SEQ ID NO: 344613 - DNA, 33 bp, Homo sapien
ctgtgttcttaatcaccgtgagaagaggccaag

SEQ ID NO: 344614 - DNA, 33 bp, Homo sapien
ctgtgttcttaatcactgtgagaagaggccaag

SEQ ID NO: 344615 - DNA, 33 bp, Homo sapien
agtggggaggcaaatccgaatccatccacgtga

SEQ ID NO: 344616 - DNA, 33 bp, Homo sapien
agtggggaggcaaatctgaatccatccacgtga

SEQ ID NO: 344617 - DNA, 33 bp, Homo sapien; identical to SEQ ID NO: 344615

SEQ ID NO: 344618 - DNA, 33 bp, Homo sapien; identical to SEQ ID NO: 344616

SEQ ID NO: 344619 - DNA, 33 bp, Homo sapien
cattggatttctgaacacagaaaaagatggaca

SEQ ID NO: 344620 - DNA, 33 bp, Homo sapien
cattggatttctgaacccagaaaaagatggaca

SEQ ID NO: 344621 - DNA, 33 bp, Homo sapien
catcaaaggatgaagacaggacttggagacttt

SEQ ID NO: 344622 - DNA, 33 bp, Homo sapien
catcaaaggatgaagataggacttggagacttt

SEQ ID NO: 344623 - DNA, 33 bp, Homo sapien
taatgaaaaatctccaagaaatccaataaaagc

SEQ ID NO: 344624 - DNA, 33 bp, Homo sapien
taatgaaaaatctccaggaaatccaataaaagc

SEQ ID NO: 344625 - DNA, 33 bp, Homo sapien
agtttctgaggtccctcaaatgcaataaatacc

SEQ ID NO: 344626 - DNA, 33 bp, Homo sapien
agtttctgaggtcccttaaatgcaataaatacc

SEQ ID NO: 344627 - DNA, 33 bp, Homo sapien
cagtggacaatggaaaatcctcagctcttgcag

SEQ ID NO: 344628 - DNA, 33 bp, Homo sapien
cagtggacaatggaaagtcctcagctcttgcag

SEQ ID NO: 344629 - DNA, 33 bp, Homo sapien
tggattcttgtctccaggtcaaccctctcagga

SEQ ID NO: 344630 - DNA, 33 bp, Homo sapien
tggattcttgtctccatgtcaaccctctcagga

SEQ ID NO: 344631 - DNA, 33 bp, Homo sapien
aagtagaaaaccagcaagcctgggacgaggtgt

SEQ ID NO: 344632 - DNA, 33 bp, Homo sapien
aagtagaaaaccagcaggcctgggacgaggtgt

SEQ ID NO: 344633 - DNA, 33 bp, Homo sapien
agaaacttgctgaaggacacttagctagtgagt

SEQ ID NO: 344634 - DNA, 33 bp, Homo sapien
agaaacttgctgaaggccacttagctagtgagt

SEQ ID NO: 344635 - DNA, 33 bp, Homo sapien
gggtgtgtatcagtaaagactcaggagtagcta

SEQ ID NO: 344636 - DNA, 33 bp, Homo sapien
gggtgtgtatcagtaaggactcaggagtagcta

SEQ ID NO: 344637 - DNA, 33 bp, Homo sapien
aggaggatacaaattaaagccaaacaaaagagg

SEQ ID NO: 344638 - DNA, 33 bp, Homo sapien
aggaggatacaaattagagccaaacaaaagagg

SEQ ID NO: 344639 - DNA, 33 bp, Homo sapien
gggtgtgtgccaaaacaagtgggatgggaatgg

SEQ ID NO: 344640 - DNA, 33 bp, Homo sapien
gggtgtgtgccaaaacgagtgggatgggaatgg

SEQ ID NO: 344641 - DNA, 33 bp, Homo sapien
cattatcaggtatgaaaaagatccttatcagtg

SEQ ID NO: 344642 - DNA, 33 bp, Homo sapien
cattatcaggtatgaagaagatccttatcagtg

SEQ ID NO: 344643 - DNA, 33 bp, Homo sapien
atcatggatatgcctacgggagactgcttccaa

SEQ ID NO: 344644 - DNA, 33 bp, Homo sapien
atcatggatatgcctatgggagactgcttccaa

SEQ ID NO: 344645 - DNA, 33 bp, Homo sapien
ctcttagaaaaaattacgtaagagtttagaatt

SEQ ID NO: 344646 - DNA, 33 bp, Homo sapien
ctcttagaaaaaattatgtaagagtttagaatt

SEQ ID NO: 344647 - DNA, 33 bp, Homo sapien
aaagatggattaagtaagttaagcttcaccttt

SEQ ID NO: 344648 - DNA, 33 bp, Homo sapien
aaagatggattaagtacgttaagcttcaccttt

SEQ ID NO: 344649 - DNA, 33 bp, Homo sapien
taagtcactgcacaataaaatggattaagtaaa

SEQ ID NO: 344650 - DNA, 33 bp, Homo sapien
taagtcactgcacaatgaaatggattaagtaaa

SEQ ID NO: 344651 - DNA, 33 bp, Homo sapien
ccctatgcacaatagacaacactgtaatgtttt

SEQ ID NO: 344652 - DNA, 33 bp, Homo sapien
ccctatgcacaatagagaacactgtaatgtttt

SEQ ID NO: 344653 - DNA, 33 bp, Homo sapien
gaaatctctacccactcaatatatgggaagccc

SEQ ID NO: 344654 - DNA, 33 bp, Homo sapien
gaaatctctacccactgaatatatgggaagccc

SEQ ID NO: 344655 - DNA, 33 bp, Homo sapien
tcaattttagcttgccagatgccattttttatg

SEQ ID NO: 344656 - DNA, 33 bp, Homo sapien
tcaattttagcttgccggatgccattttttatg

SEQ ID NO: 344657 - DNA, 33 bp, Homo sapien
caccttgttatatagacagcagactggaaaatg

SEQ ID NO: 344658 - DNA, 33 bp, Homo sapien
caccttgttatatagatagcagactggaaaatg

SEQ ID NO: 344659 - DNA, 33 bp, Homo sapien
gatctcccgactagtaagtagcaaaagccaaga

SEQ ID NO: 344660 - DNA, 33 bp, Homo sapien
gatctcccgactagtaggtagcaaaagccaaga

SEQ ID NO: 344661 - DNA, 33 bp, Homo sapien
ggatacggagtccaggaaaacaagccaagctca

SEQ ID NO: 344662 - DNA, 33 bp, Homo sapien
ggatacggagtccagggaaacaagccaagctca

SEQ ID NO: 344663 - DNA, 33 bp, Homo sapien
gaaagtgagactaagcagccttaagtgactgca

SEQ ID NO: 344664 - DNA, 33 bp, Homo sapien
gaaagtgagactaagcggccttaagtgactgca

SEQ ID NO: 344665 - DNA, 33 bp, Homo sapien
gaagtgagcactaacacattgcaaagggattta

SEQ ID NO: 344666 - DNA, 33 bp, Homo sapien
gaagtgagcactaacatattgcaaagggattta

SEQ ID NO: 344667 - DNA, 33 bp, Homo sapien
cctcagagtaatgctacaagaatggtgttgctg

SEQ ID NO: 344668 - DNA, 33 bp, Homo sapien
cctcagagtaatgctataagaatggtgttgctg

SEQ ID NO: 344669 - DNA, 33 bp, Homo sapien
acttaagtgggtagagacaaagagaagcttgtc

SEQ ID NO: 344670 - DNA, 33 bp, Homo sapien
acttaagtgggtagagtcaaagagaagcttgtc

SEQ ID NO: 344671 - DNA, 33 bp, Homo sapien
aattcctctgcttcacaaagttgcctttggtag

SEQ ID NO: 344672 - DNA, 33 bp, Homo sapien
aattcctctgcttcaccaagttgcctttggtag

SEQ ID NO: 344673 - DNA, 33 bp, Homo sapien
aggcaggttggggccaaacttgagagggcttac

SEQ ID NO: 344674 - DNA, 33 bp, Homo sapien
aggcaggttggggccagacttgagagggcttac

SEQ ID NO: 344675 - DNA, 33 bp, Homo sapien
ctcaggccaaacctaggatgactatacaaactg

SEQ ID NO: 344676 - DNA, 33 bp, Homo sapien
ctcaggccaaacctagtatgactatacaaactg

SEQ ID NO: 344677 - DNA, 33 bp, Homo sapien
gcttacctggctatttcaaaagcataagtggct

SEQ ID NO: 344678 - DNA, 33 bp, Homo sapien
gcttacctggctattttaaaagcataagtggct

SEQ ID NO: 344679 - DNA, 33 bp, Homo sapien
tctctggaaaagcgcacagtagaattgggtggg

SEQ ID NO: 344680 - DNA, 33 bp, Homo sapien
tctctggaaaagcgcatagtagaattgggtggg

SEQ ID NO: 344681 - DNA, 33 bp, Homo sapien
ctcttcccttagttcaaagatgtttccccagtt

SEQ ID NO: 344682 - DNA, 33 bp, Homo sapien
ctcttcccttagttcagagatgtttccccagtt

SEQ ID NO: 344683 - DNA, 33 bp, Homo sapien
aagatgattgcgctgacgctatttctgtgaatt

SEQ ID NO: 344684 - DNA, 33 bp, Homo sapien
aagatgattgcgctgatgctatttctgtgaatt

SEQ ID NO: 344685 - DNA, 33 bp, Homo sapien
cggactttcagaatgtaaaatttcctgaccaag

SEQ ID NO: 344686 - DNA, 33 bp, Homo sapien
cggactttcagaatgtgaaatttcctgaccaag

SEQ ID NO: 344687 - DNA, 33 bp, Homo sapien
ctgtcctgcacactgaaactatgaatgccaaga

SEQ ID NO: 344688 - DNA, 33 bp, Homo sapien
ctgtcctgcacactgagactatgaatgccaaga

SEQ ID NO: 344689 - DNA, 33 bp, Homo sapien
ctttgggactttgccaaagagactagaagatgt

SEQ ID NO: 344690 - DNA, 33 bp, Homo sapien
ctttgggactttgccatagagactagaagatgt

SEQ ID NO: 344691 - DNA, 33 bp, Homo sapien
acattgtctgttatgaatagtagtgttctgagt

SEQ ID NO: 344692 - DNA, 33 bp, Homo sapien
acattgtctgttatgagtagtagtgttctgagt

SEQ ID NO: 344693 - DNA, 33 bp, Homo sapien
acctagaaatctgatgaatagctgatgataagg

SEQ ID NO: 344694 - DNA, 33 bp, Homo sapien
acctagaaatctgatggatagctgatgataagg

SEQ ID NO: 344695 - DNA, 33 bp, Homo sapien
aaccttgcataaaaatcaatcacaatttctgga

SEQ ID NO: 344696 - DNA, 33 bp, Homo sapien
aaccttgcataaaaatgaatcacaatttctgga

SEQ ID NO: 344697 - DNA, 33 bp, Homo sapien
ggctaatcttgggaaaaaaactatgcctttgtc

SEQ ID NO: 344698 - DNA, 33 bp, Homo sapien
ggctaatcttgggaaacaaactatgcctttgtc

SEQ ID NO: 344699 - DNA, 33 bp, Homo sapien
atatcctccactggcaaagacttatttatttat

SEQ ID NO: 344700 - DNA, 33 bp, Homo sapien
atatcctccactggcagagacttatttatttat

SEQ ID NO: 344701 - DNA, 33 bp, Homo sapien
tgagggaaatatgacgaatgtttacttggttat

SEQ ID NO: 344702 - DNA, 33 bp, Homo sapien
tgagggaaatatgacggatgtttacttggttat

SEQ ID NO: 344703 - DNA, 33 bp, Homo sapien
cttcaaattttgttgaataaacacaaactcctt

SEQ ID NO: 344704 - DNA, 33 bp, Homo sapien
cttcaaattttgttgagtaaacacaaactcctt

SEQ ID NO: 344705 - DNA, 33 bp, Homo sapien
agctcctgttgttacccgaagatcagctttggg

SEQ ID NO: 344706 - DNA, 33 bp, Homo sapien
agctcctgttgttacctgaagatcagctttggg

SEQ ID NO: 344707 - DNA, 33 bp, Homo sapien
agcacagaccagaaaactagtatagggctattg

SEQ ID NO: 344708 - DNA, 33 bp, Homo sapien
agcacagaccagaaaagtagtatagggctattg

SEQ ID NO: 344709 - DNA, 33 bp, Homo sapien
tgccttcaactccagcaaggatctgaaggtcca

SEQ ID NO: 344710 - DNA, 33 bp, Homo sapien
tgccttcaactccagccaggatctgaaggtcca

SEQ ID NO: 344711 - DNA, 33 bp, Homo sapien
aatgcaataacaggtaagactcagttcactgta

SEQ ID NO: 344712 - DNA, 33 bp, Homo sapien
aatgcaataacaggtaggactcagttcactgta

SEQ ID NO: 344713 - DNA, 33 bp, Homo sapien
aggagtgggtatgaaccgaaaatggacatgagg

SEQ ID NO: 344714 - DNA, 33 bp, Homo sapien
aggagtgggtatgaactgaaaatggacatgagg

SEQ ID NO: 344715 - DNA, 33 bp, Homo sapien
ggaaaaggcagggttacagctgatgagtttgat

SEQ ID NO: 344716 - DNA, 33 bp, Homo sapien
ggaaaaggcagggttatagctgatgagtttgat

SEQ ID NO: 344717 - DNA, 33 bp, Homo sapien
actgacattttagacaaaagagcagaaattcgg

SEQ ID NO: 344718 - DNA, 33 bp, Homo sapien
actgacattttagacagaagagcagaaattcgg

SEQ ID NO: 344719 - DNA, 33 bp, Homo sapien
aagcttatagatgaaccagtgatatgtgcataa

SEQ ID NO: 344720 - DNA, 33 bp, Homo sapien
aagcttatagatgaactagtgatatgtgcataa

SEQ ID NO: 344721 - DNA, 33 bp, Homo sapien
ctggatgctgtagaaacgcaagaaaggtgtagg

SEQ ID NO: 344722 - DNA, 33 bp, Homo sapien
ctggatgctgtagaaatgcaagaaaggtgtagg

SEQ ID NO: 344723 - DNA, 33 bp, Homo sapien
catctagttcttcacacgccaaatgagcagctg

SEQ ID NO: 344724 - DNA, 33 bp, Homo sapien
catctagttcttcacatgccaaatgagcagctg

SEQ ID NO: 344725 - DNA, 33 bp, Homo sapien
aagctgaagaaggataagaacactatacaatgt

SEQ ID NO: 344726 - DNA, 33 bp, Homo sapien
aagctgaagaaggatatgaacactatacaatgt

SEQ ID NO: 344727 - DNA, 33 bp, Homo sapien
gaactgatgagaatgaataggctttcccaaaat

SEQ ID NO: 344728 - DNA, 33 bp, Homo sapien
gaactgatgagaatgagtaggctttcccaaaat

SEQ ID NO: 344729 - DNA, 33 bp, Homo sapien
atcaattgccttaaaacaatgaatgcctactaa

SEQ ID NO: 344730 - DNA, 33 bp, Homo sapien
atcaattgccttaaaataatgaatgcctactaa

SEQ ID NO: 344731 - DNA, 33 bp, Homo sapien
actgacaaaactggaaaaagaaacagacaattc

SEQ ID NO: 344732 - DNA, 33 bp, Homo sapien
actgacaaaactggaagaagaaacagacaattc

SEQ ID NO: 344733 - DNA, 33 bp, Homo sapien
ctcggcttccagggaccgataacggcttaaacc

SEQ ID NO: 344734 - DNA, 33 bp, Homo sapien
ctcggcttccagggactgataacggcttaaacc

SEQ ID NO: 344735 - DNA, 33 bp, Homo sapien
ttcaacagtcacctaaggcacacttaaacagag

SEQ ID NO: 344736 - DNA, 33 bp, Homo sapien
ttcaacagtcacctaatgcacacttaaacagag

SEQ ID NO: 344737 - DNA, 33 bp, Homo sapien
aggagcagattcgtgcccgggacaacattagct

SEQ ID NO: 344738 - DNA, 33 bp, Homo sapien
aggagcagattcgtgctcgggacaacattagct

SEQ ID NO: 344739 - DNA, 33 bp, Homo sapien
ctccctgctttggccacaaaatccagtggtagg

SEQ ID NO: 344740 - DNA, 33 bp, Homo sapien
ctccctgctttggccataaaatccagtggtagg

SEQ ID NO: 344741 - DNA, 33 bp, Homo sapien
tacatcaccaatggacacataaaaactataaaa

SEQ ID NO: 344742 - DNA, 33 bp, Homo sapien
tacatcaccaatggacccataaaaactataaaa

SEQ ID NO: 344743 - DNA, 33 bp, Homo sapien
accaaagcatatcagagattactgctcacttgt

SEQ ID NO: 344744 - DNA, 33 bp, Homo sapien
accaaagcatatcagatattactgctcacttgt

SEQ ID NO: 344745 - DNA, 33 bp, Homo sapien
aatgctggaattaagactcagatccaggtctac

SEQ ID NO: 344746 - DNA, 33 bp, Homo sapien
aatgctggaattaagattcagatccaggtctac

SEQ ID NO: 344747 - DNA, 33 bp, Homo sapien
ggtgattggcacaagaccagattgtagtctgtt

SEQ ID NO: 344748 - DNA, 33 bp, Homo sapien
ggtgattggcacaagagcagattgtagtctgtt

SEQ ID NO: 344749 - DNA, 33 bp, Homo sapien
aggatgtgtattaataaaaactccagcacactg

SEQ ID NO: 344750 - DNA, 33 bp, Homo sapien
aggatgtgtattaatagaaactccagcacactg

SEQ ID NO: 344751 - DNA, 33 bp, Homo sapien
acccttgcgatcaaaaaaacaaatgtacctact

SEQ ID NO: 344752 - DNA, 33 bp, Homo sapien
acccttgcgatcaaaataacaaatgtacctact

SEQ ID NO: 344753 - DNA, 33 bp, Homo sapien
gagcataatgccaccactgaaatcctgtaactt

SEQ ID NO: 344754 - DNA, 33 bp, Homo sapien
gagcataatgccaccagtgaaatcctgtaactt

SEQ ID NO: 344755 - DNA, 33 bp, Homo sapien
tacagaaaagataaaaggtcaatgtcagagaaa

SEQ ID NO: 344756 - DNA, 33 bp, Homo sapien
tacagaaaagataaaatgtcaatgtcagagaaa

SEQ ID NO: 344757 - DNA, 33 bp, Homo sapien
agactgtattgagttacgattgtgccactgtcc

SEQ ID NO: 344758 - DNA, 33 bp, Homo sapien
agactgtattgagttatgattgtgccactgtcc

SEQ ID NO: 344759 - DNA, 33 bp, Homo sapien
gaatgtatgcagataactataatgccataaaaa

SEQ ID NO: 344760 - DNA, 33 bp, Homo sapien
gaatgtatgcagataagtataatgccataaaaa

SEQ ID NO: 344761 - DNA, 33 bp, Homo sapien
gacttccctggtttcaatcaacaccttctagat

SEQ ID NO: 344762 - DNA, 33 bp, Homo sapien
gacttccctggtttcagtcaacaccttctagat

SEQ ID NO: 344763 - DNA, 33 bp, Homo sapien
cttccaaaaaatgccaaataccaatagcggaga

SEQ ID NO: 344764 - DNA, 33 bp, Homo sapien
cttccaaaaaatgccacataccaatagcggaga

SEQ ID NO: 344765 - DNA, 33 bp, Homo sapien
aaacttacagaaaaaaacatgtcaacagcagtc

SEQ ID NO: 344766 - DNA, 33 bp, Homo sapien
aaacttacagaaaaaagcatgtcaacagcagtc

SEQ ID NO: 344767 - DNA, 33 bp, Homo sapien
gagactgcccagctccaaaggaggaaggatcac

SEQ ID NO: 344768 - DNA, 33 bp, Homo sapien
gagactgcccagctccgaaggaggaaggatcac

SEQ ID NO: 344769 - DNA, 33 bp, Homo sapien
tcaggaaaatgtccagaaagtaatgcgtcaaaa

SEQ ID NO: 344770 - DNA, 33 bp, Homo sapien
tcaggaaaatgtccaggaagtaatgcgtcaaaa

SEQ ID NO: 344771 - DNA, 33 bp, Homo sapien
tttttagcaaagttcaagccctcccattgtcag

SEQ ID NO: 344772 - DNA, 33 bp, Homo sapien
tttttagcaaagttcaggccctcccattgtcag

SEQ ID NO: 344773 - DNA, 33 bp, Homo sapien
aaaatacctttaaaaacgctatgatatggtttg

SEQ ID NO: 344774 - DNA, 33 bp, Homo sapien
aaaatacctttaaaaatgctatgatatggtttg

SEQ ID NO: 344775 - DNA, 33 bp, Homo sapien
ctgcaggttgtacaaggatggagcccgcatctg

SEQ ID NO: 344776 - DNA, 33 bp, Homo sapien
ctgcaggttgtacaagtatggagcccgcatctg

SEQ ID NO: 344777 - DNA, 33 bp, Homo sapien
gatctacttacccacaatctaatagcagccctc

SEQ ID NO: 344778 - DNA, 33 bp, Homo sapien
gatctacttacccacactctaatagcagccctc

SEQ ID NO: 344779 - DNA, 33 bp, Homo sapien
atgaatcttgtaaacacaatgtagagtttaagg

SEQ ID NO: 344780 - DNA, 33 bp, Homo sapien
atgaatcttgtaaacataatgtagagtttaagg

SEQ ID NO: 344781 - DNA, 33 bp, Homo sapien
caaagataatgatttccaaagactacttgttaa

SEQ ID NO: 344782 - DNA, 33 bp, Homo sapien
caaagataatgatttcgaaagactacttgttaa

SEQ ID NO: 344783 - DNA, 33 bp, Homo sapien
tggtttctgagttgaacattttaggcatttaag

SEQ ID NO: 344784 - DNA, 33 bp, Homo sapien
tggtttctgagttgaagattttaggcatttaag

SEQ ID NO: 344785 - DNA, 33 bp, Homo sapien
agaatgactaaggaaactgatagctatgaatga

SEQ ID NO: 344786 - DNA, 33 bp, Homo sapien
agaatgactaaggaaagtgatagctatgaatga

SEQ ID NO: 344787 - DNA, 33 bp, Homo sapien
caataatgcacctagaagatgactagttaggcc

SEQ ID NO: 344788 - DNA, 33 bp, Homo sapien
caataatgcacctagaggatgactagttaggcc

SEQ ID NO: 344789 - DNA, 33 bp, Homo sapien
gacttgctgggtcaaacagtccaagatatttta

SEQ ID NO: 344790 - DNA, 33 bp, Homo sapien
gacttgctgggtcaaatagtccaagatatttta

SEQ ID NO: 344791 - DNA, 33 bp, Homo sapien
caaacagtattaagaaagatgaacttgtgagtt

SEQ ID NO: 344792 - DNA, 33 bp, Homo sapien
caaacagtattaagaaggatgaacttgtgagtt

SEQ ID NO: 344793 - DNA, 33 bp, Homo sapien
ctaagctaatacaaaacaattacctggcaagca

SEQ ID NO: 344794 - DNA, 33 bp, Homo sapien
ctaagctaatacaaaagaattacctggcaagca

SEQ ID NO: 344795 - DNA, 33 bp, Homo sapien
tgagttgctgcgagaaagagtcaagaacttaga

SEQ ID NO: 344796 - DNA, 33 bp, Homo sapien
tgagttgctgcgagaaggagtcaagaacttaga

SEQ ID NO: 344797 - DNA, 33 bp, Homo sapien
aattcctatgacctataacaagaccagacctat

SEQ ID NO: 344798 - DNA, 33 bp, Homo sapien
aattcctatgacctatgacaagaccagacctat

SEQ ID NO: 344799 - DNA, 33 bp, Homo sapien
cctcagcccattttgaacaagataaagatgtac

SEQ ID NO: 344800 - DNA, 33 bp, Homo sapien
cctcagcccattttgagcaagataaagatgtac

SEQ ID NO: 344801 - DNA, 33 bp, Homo sapien
tttgcttcttcaacaaaaagtgttcctaaaatg

SEQ ID NO: 344802 - DNA, 33 bp, Homo sapien
tttgcttcttcaacaacaagtgttcctaaaatg

SEQ ID NO: 344803 - DNA, 33 bp, Homo sapien
cgattattgcttgctcacattttaggaacactt

SEQ ID NO: 344804 - DNA, 33 bp, Homo sapien
cgattattgcttgctctcattttaggaacactt

SEQ ID NO: 344805 - DNA, 33 bp, Homo sapien
tagtctgcaatgcaaacggactagtctagatgc

SEQ ID NO: 344806 - DNA, 33 bp, Homo sapien
tagtctgcaatgcaaatggactagtctagatgc

SEQ ID NO: 344807 - DNA, 33 bp, Homo sapien
atctcccatggaagacaatgctggccttctgaa

SEQ ID NO: 344808 - DNA, 33 bp, Homo sapien
atctcccatggaagacgatgctggccttctgaa

SEQ ID NO: 344809 - DNA, 33 bp, Homo sapien; identical to SEQ ID NO: 344807

SEQ ID NO: 344810 - DNA, 33 bp, Homo sapien; identical to SEQ ID NO: 344808

SEQ ID NO: 344811 - DNA, 33 bp, Homo sapien
cttttttttttggaaggatatctgtttattaag

SEQ ID NO: 344812 - DNA, 33 bp, Homo sapien
cttttttttttggaagtatatctgtttattaag

SEQ ID NO: 344813 - DNA, 33 bp, Homo sapien
tgtcttctgacaagtacggcacggaagcactat

SEQ ID NO: 344814 - DNA, 33 bp, Homo sapien
tgtcttctgacaagtatggcacggaagcactat

SEQ ID NO: 344815 - DNA, 33 bp, Homo sapien
caattttagagcaaaacttcaaaatttctttat

SEQ ID NO: 344816 - DNA, 33 bp, Homo sapien
caattttagagcaaaagttcaaaatttctttat

SEQ ID NO: 344817 - DNA, 33 bp, Homo sapien
taatatataagattatcacgccttttcagtgga

SEQ ID NO: 344818 - DNA, 33 bp, Homo sapien
taatatataagattattacgccttttcagtgga

SEQ ID NO: 344819 - DNA, 33 bp, Homo sapien
cagcctttagtcatagaatgctttggtctcact

SEQ ID NO: 344820 - DNA, 33 bp, Homo sapien
cagcctttagtcatagcatgctttggtctcact

SEQ ID NO: 344821 - DNA, 33 bp, Homo sapien
atctagaaaagacttaccagttttcagccttta

SEQ ID NO: 344822 - DNA, 33 bp, Homo sapien
atctagaaaagacttagcagttttcagccttta

SEQ ID NO: 344823 - DNA, 33 bp, Homo sapien
ttgtaaataattaaaaccatttcctcacacagt

SEQ ID NO: 344824 - DNA, 33 bp, Homo sapien
ttgtaaataattaaaagcatttcctcacacagt

SEQ ID NO: 344825 - DNA, 33 bp, Homo sapien
gctaatctacagaaaaatgtcacatgggatggc

SEQ ID NO: 344826 - DNA, 33 bp, Homo sapien
gctaatctacagaaaagtgtcacatgggatggc

SEQ ID NO: 344827 - DNA, 33 bp, Homo sapien
ctatactgtgcaaaccggaaaactgtaaatgcc

SEQ ID NO: 344828 - DNA, 33 bp, Homo sapien
ctatactgtgcaaacctgaaaactgtaaatgcc

SEQ ID NO: 344829 - DNA, 33 bp, Homo sapien
tcatcatttatgtttccccactgggcattctat

SEQ ID NO: 344830 - DNA, 33 bp, Homo sapien
tcatcatttatgtttctccactgggcattctat

SEQ ID NO: 344831 - DNA, 33 bp, Homo sapien
agatggtagcaagaaacatagcagaagaaagta

SEQ ID NO: 344832 - DNA, 33 bp, Homo sapien
agatggtagcaagaaagatagcagaagaaagta

SEQ ID NO: 344833 - DNA, 33 bp, Homo sapien
acagtaagaatggaagcaaatcgattcaagagc

SEQ ID NO: 344834 - DNA, 33 bp, Homo sapien
acagtaagaatggaaggaaatcgattcaagagc

SEQ ID NO: 344835 - DNA, 33 bp, Homo sapien
acattgggaacagttaactctcatggatgactt

SEQ ID NO: 344836 - DNA, 33 bp, Homo sapien
acattgggaacagttagctctcatggatgactt

SEQ ID NO: 344837 - DNA, 33 bp, Homo sapien
tccctggaaacaaaaaagaatatgcacaaatca

SEQ ID NO: 344838 - DNA, 33 bp, Homo sapien
tccctggaaacaaaaaggaatatgcacaaatca

SEQ ID NO: 344839 - DNA, 33 bp, Homo sapien
aggaggccttttagaggatgcagcatttgaact

SEQ ID NO: 344840 - DNA, 33 bp, Homo sapien
aggaggccttttagagtatgcagcatttgaact

SEQ ID NO: 344841 - DNA, 33 bp, Homo sapien
ttcaatgaagtagtaacgcatgtattataatct

SEQ ID NO: 344842 - DNA, 33 bp, Homo sapien
ttcaatgaagtagtaatgcatgtattataatct

SEQ ID NO: 344843 - DNA, 33 bp, Homo sapien
ccactgcgggcatgaaacatttcttactctaca

SEQ ID NO: 344844 - DNA, 33 bp, Homo sapien
ccactgcgggcatgaagcatttcttactctaca

SEQ ID NO: 344845 - DNA, 33 bp, Homo sapien
tgtaatgtttaacgaaaggacagtcattaaata

SEQ ID NO: 344846 - DNA, 33 bp, Homo sapien
tgtaatgtttaacgaagggacagtcattaaata

SEQ ID NO: 344847 - DNA, 33 bp, Homo sapien
ctgaatccagagccaaaaggctaatgttcttgt

SEQ ID NO: 344848 - DNA, 33 bp, Homo sapien
ctgaatccagagccaagaggctaatgttcttgt

SEQ ID NO: 344849 - DNA, 33 bp, Homo sapien
taacggatccacaagaaaggaaaaaagatcaga

SEQ ID NO: 344850 - DNA, 33 bp, Homo sapien
taacggatccacaagagaggaaaaaagatcaga

SEQ ID NO: 344851 - DNA, 33 bp, Homo sapien
ggggcttacgcttttacagagaagtggccgttt

SEQ ID NO: 344852 - DNA, 33 bp, Homo sapien
ggggcttacgcttttatagagaagtggccgttt

SEQ ID NO: 344853 - DNA, 33 bp, Homo sapien
aactgaacacacattaagagagtcatatttgaa

SEQ ID NO: 344854 - DNA, 33 bp, Homo sapien
aactgaacacacattaggagagtcatatttgaa

SEQ ID NO: 344855 - DNA, 33 bp, Homo sapien
gaccacttttccactgcaatacccatcattctc

SEQ ID NO: 344856 - DNA, 33 bp, Homo sapien
gaccacttttccactgtaatacccatcattctc

SEQ ID NO: 344857 - DNA, 33 bp, Homo sapien
tcagcatgtgtctacaatgagattccatcctgt

SEQ ID NO: 344858 - DNA, 33 bp, Homo sapien
tcagcatgtgtctacagtgagattccatcctgt

SEQ ID NO: 344859 - DNA, 33 bp, Homo sapien
gacctggggttcaagcagaaagggaagtgaaag

SEQ ID NO: 344860 - DNA, 33 bp, Homo sapien
gacctggggttcaagcggaaagggaagtgaaag

SEQ ID NO: 344861 - DNA, 33 bp, Homo sapien
atatcactaaaaggataactggccaaacggggc

SEQ ID NO: 344862 - DNA, 33 bp, Homo sapien
atatcactaaaaggatgactggccaaacggggc

SEQ ID NO: 344863 - DNA, 33 bp, Homo sapien
taagatgtgggaaaaacatagagagaatcttct

SEQ ID NO: 344864 - DNA, 33 bp, Homo sapien
taagatgtgggaaaaatatagagagaatcttct

SEQ ID NO: 344865 - DNA, 33 bp, Homo sapien
caggataacttagagcacccatccctttcaggg

SEQ ID NO: 344866 - DNA, 33 bp, Homo sapien
caggataacttagagcgcccatccctttcaggg

SEQ ID NO: 344867 - DNA, 33 bp, Homo sapien
catttgcttgatcagaacatatttttataagta

SEQ ID NO: 344868 - DNA, 33 bp, Homo sapien
catttgcttgatcagagcatatttttataagta

SEQ ID NO: 344869 - DNA, 33 bp, Homo sapien
ccttcaatctttctcccgagttctgctagatca

SEQ ID NO: 344870 - DNA, 33 bp, Homo sapien
ccttcaatctttctcctgagttctgctagatca

SEQ ID NO: 344871 - DNA, 33 bp, Homo sapien
aatgcaaatgaaaatcacaatgagataccatct

SEQ ID NO: 344872 - DNA, 33 bp, Homo sapien
aatgcaaatgaaaatcgcaatgagataccatct

SEQ ID NO: 344873 - DNA, 33 bp, Homo sapien
actgtatttaaaaatcaacttgtttgaatcaat

SEQ ID NO: 344874 - DNA, 33 bp, Homo sapien
actgtatttaaaaatcgacttgtttgaatcaat

SEQ ID NO: 344875 - DNA, 33 bp, Homo sapien
ctacagtcatttcaagccttaactggagtagga

SEQ ID NO: 344876 - DNA, 33 bp, Homo sapien
ctacagtcatttcaaggcttaactggagtagga

SEQ ID NO: 344877 - DNA, 33 bp, Homo sapien
gggtgaaacactgatccaagagaccattccact

SEQ ID NO: 344878 - DNA, 33 bp, Homo sapien
gggtgaaacactgatctaagagaccattccact

SEQ ID NO: 344879 - DNA, 33 bp, Homo sapien
ccagggtggaattatccgaaaaggctggaggac

SEQ ID NO: 344880 - DNA, 33 bp, Homo sapien
ccagggtggaattatctgaaaaggctggaggac

SEQ ID NO: 344881 - DNA, 33 bp, Homo sapien
gacctgctgagggggacgaaaagaaagttgcct

SEQ ID NO: 344882 - DNA, 33 bp, Homo sapien
gacctgctgagggggatgaaaagaaagttgcct

SEQ ID NO: 344883 - DNA, 33 bp, Homo sapien
agggatgagtctgcgacgtttgtaggtgttcca

SEQ ID NO: 344884 - DNA, 33 bp, Homo sapien
agggatgagtctgcgaggtttgtaggtgttcca

SEQ ID NO: 344885 - DNA, 33 bp, Homo sapien
tctaaaatagtataaaatgtgaccaaacatggt

SEQ ID NO: 344886 - DNA, 33 bp, Homo sapien
tctaaaatagtataaagtgtgaccaaacatggt

SEQ ID NO: 344887 - DNA, 33 bp, Homo sapien
ttctcaaactcccaaacgaagctctatgaggac

SEQ ID NO: 344888 - DNA, 33 bp, Homo sapien
ttctcaaactcccaaatgaagctctatgaggac

SEQ ID NO: 344889 - DNA, 33 bp, Homo sapien
aggggatcacaggcaactgttgagaggaaaaaa

SEQ ID NO: 344890 - DNA, 33 bp, Homo sapien
aggggatcacaggcaattgttgagaggaaaaaa

SEQ ID NO: 344891 - DNA, 33 bp, Homo sapien
gacccccaatacattaaaagccacgtgaattta

SEQ ID NO: 344892 - DNA, 33 bp, Homo sapien
gacccccaatacattagaagccacgtgaattta

SEQ ID NO: 344893 - DNA, 33 bp, Homo sapien
cttttctagaaaaacaacacctgtaaaagatcc

SEQ ID NO: 344894 - DNA, 33 bp, Homo sapien
cttttctagaaaaacaccacctgtaaaagatcc

SEQ ID NO: 344895 - DNA, 33 bp, Homo sapien
atggctatgaaataacactcccactcactcccc

SEQ ID NO: 344896 - DNA, 33 bp, Homo sapien
atggctatgaaataacgctcccactcactcccc

SEQ ID NO: 344897 - DNA, 33 bp, Homo sapien
agaagaattgaatgaacaccaatcctccacaac

SEQ ID NO: 344898 - DNA, 33 bp, Homo sapien
agaagaattgaatgaagaccaatcctccacaac

SEQ ID NO: 344899 - DNA, 33 bp, Homo sapien
gaagcctcataagggcactaagagacttgaatg

SEQ ID NO: 344900 - DNA, 33 bp, Homo sapien
gaagcctcataagggcgctaagagacttgaatg

SEQ ID NO: 344901 - DNA, 33 bp, Homo sapien
tgcatttcagccacagcatgaattaagttgtat

SEQ ID NO: 344902 - DNA, 33 bp, Homo sapien
tgcatttcagccacagtatgaattaagttgtat

SEQ ID NO: 344903 - DNA, 33 bp, Homo sapien
agcattgatttgggacaaaggaaaactgattta

SEQ ID NO: 344904 - DNA, 33 bp, Homo sapien
agcattgatttgggaccaaggaaaactgattta

SEQ ID NO: 344905 - DNA, 33 bp, Homo sapien
cactccatgctggggagaagcgatgccacatct

SEQ ID NO: 344906 - DNA, 33 bp, Homo sapien
cactccatgctggggataagcgatgccacatct

SEQ ID NO: 344907 - DNA, 33 bp, Homo sapien
tggcaagcaactggacaatctttactgtcagaa

SEQ ID NO: 344908 - DNA, 33 bp, Homo sapien
tggcaagcaactggaccatctttactgtcagaa

SEQ ID NO: 344909 - DNA, 33 bp, Homo sapien
ttcttgtcttcatttccagcttgtttccaacat

SEQ ID NO: 344910 - DNA, 33 bp, Homo sapien
ttcttgtcttcatttctagcttgtttccaacat

SEQ ID NO: 344911 - DNA, 33 bp, Homo sapien
aagaactcagcacataataaatgctttatcata

SEQ ID NO: 344912 - DNA, 33 bp, Homo sapien
aagaactcagcacatagtaaatgctttatcata

SEQ ID NO: 344913 - DNA, 33 bp, Homo sapien
ccaggtgcataagaagaaaacacacttaaaagt

SEQ ID NO: 344914 - DNA, 33 bp, Homo sapien
ccaggtgcataagaagtaaacacacttaaaagt

SEQ ID NO: 344915 - DNA, 33 bp, Homo sapien
aaaaaccctggtctcgaatcactttgctggtaa

SEQ ID NO: 344916 - DNA, 33 bp, Homo sapien
aaaaaccctggtctcggatcactttgctggtaa

SEQ ID NO: 344917 - DNA, 33 bp, Homo sapien
tccttcaagccaataacaagattgagctgggaa

SEQ ID NO: 344918 - DNA, 33 bp, Homo sapien
tccttcaagccaataataagattgagctgggaa

SEQ ID NO: 344919 - DNA, 33 bp, Homo sapien
atatattcatgttaatgatcacatgtaacaaaa

SEQ ID NO: 344920 - DNA, 33 bp, Homo sapien
atatattcatgttaattatcacatgtaacaaaa

SEQ ID NO: 344921 - DNA, 33 bp, Homo sapien
ccccaaatttcaggaaacatgcattctttctgt

SEQ ID NO: 344922 - DNA, 33 bp, Homo sapien
ccccaaatttcaggaaccatgcattctttctgt

SEQ ID NO: 344923 - DNA, 33 bp, Homo sapien
cattccaatgtattgacgtccaaatcaaggaga

SEQ ID NO: 344924 - DNA, 33 bp, Homo sapien
cattccaatgtattgatgtccaaatcaaggaga

SEQ ID NO: 344925 - DNA, 33 bp, Homo sapien
gaactggctagggcctaaaggtcatcaagctca

SEQ ID NO: 344926 - DNA, 33 bp, Homo sapien
gaactggctagggcctgaaggtcatcaagctca

SEQ ID NO: 344927 - DNA, 33 bp, Homo sapien
caaaaataattttaggaaatcatctgcttcgta

SEQ ID NO: 344928 - DNA, 33 bp, Homo sapien
caaaaataattttagggaatcatctgcttcgta

SEQ ID NO: 344929 - DNA, 33 bp, Homo sapien
aatgcaaggctataaacagactcaggtcagctc

SEQ ID NO: 344930 - DNA, 33 bp, Homo sapien
aatgcaaggctataaatagactcaggtcagctc

SEQ ID NO: 344931 - DNA, 33 bp, Homo sapien
tgtccaggatgagatgaacaaagaggaaagaac

SEQ ID NO: 344932 - DNA, 33 bp, Homo sapien
tgtccaggatgagatggacaaagaggaaagaac

SEQ ID NO: 344933 - DNA, 33 bp, Homo sapien
tccctgagtttcagaggagccctgttccactag

SEQ ID NO: 344934 - DNA, 33 bp, Homo sapien
tccctgagtttcagagtagccctgttccactag

SEQ ID NO: 344935 - DNA, 33 bp, Homo sapien
ctctctccagaccccaatgagctgctcaaaaaa

SEQ ID NO: 344936 - DNA, 33 bp, Homo sapien
ctctctccagaccccagtgagctgctcaaaaaa

SEQ ID NO: 344937 - DNA, 33 bp, Homo sapien
gtggggggtaggaaaacggtgaaattgagatgg

SEQ ID NO: 344938 - DNA, 33 bp, Homo sapien
gtggggggtaggaaaatggtgaaattgagatgg

SEQ ID NO: 344939 - DNA, 33 bp, Homo sapien
agatctgtgcactgaaggtgttaaagggcttga

SEQ ID NO: 344940 - DNA, 33 bp, Homo sapien
agatctgtgcactgaatgtgttaaagggcttga

SEQ ID NO: 344941 - DNA, 33 bp, Homo sapien
actaccctctggtgtacatctctcaagcccttt

SEQ ID NO: 344942 - DNA, 33 bp, Homo sapien
actaccctctggtgtagatctctcaagcccttt

SEQ ID NO: 344943 - DNA, 33 bp, Homo sapien
tcttatttcttgtccactctgggtccacccctg

SEQ ID NO: 344944 - DNA, 33 bp, Homo sapien
tcttatttcttgtccagtctgggtccacccctg

SEQ ID NO: 344945 - DNA, 33 bp, Homo sapien
agatatgaattgttaacagaaaaaagtgagtaa

SEQ ID NO: 344946 - DNA, 33 bp, Homo sapien
agatatgaattgttaagagaaaaaagtgagtaa

SEQ ID NO: 344947 - DNA, 33 bp, Homo sapien
ctttgataaaaagctagcgaaaaattctctcct

SEQ ID NO: 344948 - DNA, 33 bp, Homo sapien
ctttgataaaaagctatcgaaaaattctctcct

SEQ ID NO: 344949 - DNA, 33 bp, Homo sapien
tgttagccatgtttagaccccaagaatacacgg

SEQ ID NO: 344950 - DNA, 33 bp, Homo sapien
tgttagccatgtttaggccccaagaatacacgg

SEQ ID NO: 344951 - DNA, 33 bp, Homo sapien
gcctgaatccacacaactcattctcagggcttt

SEQ ID NO: 344952 - DNA, 33 bp, Homo sapien
gcctgaatccacacaagtcattctcagggcttt

SEQ ID NO: 344953 - DNA, 33 bp, Homo sapien
gtggcatcccaagtgacaacagagaggcatttg

SEQ ID NO: 344954 - DNA, 33 bp, Homo sapien
gtggcatcccaagtgataacagagaggcatttg

SEQ ID NO: 344955 - DNA, 33 bp, Homo sapien
ccaaacaaggggcaagcaaagtgatctgctggg

SEQ ID NO: 344956 - DNA, 33 bp, Homo sapien
ccaaacaaggggcaaggaaagtgatctgctggg

SEQ ID NO: 344957 - DNA, 33 bp, Homo sapien
ttttcggctttgcagaccataacatctcatcac

SEQ ID NO: 344958 - DNA, 33 bp, Homo sapien
ttttcggctttgcagatcataacatctcatcac

SEQ ID NO: 344959 - DNA, 33 bp, Homo sapien
tagaatgactctgaaacatcttctggaagcttt

SEQ ID NO: 344960 - DNA, 33 bp, Homo sapien
tagaatgactctgaaatatcttctggaagcttt

SEQ ID NO: 344961 - DNA, 33 bp, Homo sapien
gcagctggaaccatcaccaatggggcctgatga

SEQ ID NO: 344962 - DNA, 33 bp, Homo sapien
gcagctggaaccatcagcaatggggcctgatga

SEQ ID NO: 344963 - DNA, 33 bp, Homo sapien
agcttagaatatgttcaatccatgtgtgtccat

SEQ ID NO: 344964 - DNA, 33 bp, Homo sapien
agcttagaatatgttcgatccatgtgtgtccat

SEQ ID NO: 344965 - DNA, 33 bp, Homo sapien
cattcatttccctgatgaccaggctttctaact

SEQ ID NO: 344966 - DNA, 33 bp, Homo sapien
cattcatttccctgattaccaggctttctaact

SEQ ID NO: 344967 - DNA, 33 bp, Homo sapien
gttagtggctcaaaacaattttattacctcagt

SEQ ID NO: 344968 - DNA, 33 bp, Homo sapien
gttagtggctcaaaaccattttattacctcagt

SEQ ID NO: 344969 - DNA, 33 bp, Homo sapien
ttattttcaacaaatacgccaaagttattcaat

SEQ ID NO: 344970 - DNA, 33 bp, Homo sapien
ttattttcaacaaatatgccaaagttattcaat

SEQ ID NO: 344971 - DNA, 33 bp, Homo sapien
ctatgaaaagcaatacagaggtacctcaaaaaa

SEQ ID NO: 344972 - DNA, 33 bp, Homo sapien
ctatgaaaagcaatacggaggtacctcaaaaaa

SEQ ID NO: 344973 - DNA, 33 bp, Homo sapien
agaatagaaaatggcacgtataactccaagttt

SEQ ID NO: 344974 - DNA, 33 bp, Homo sapien
agaatagaaaatggcatgtataactccaagttt

SEQ ID NO: 344975 - DNA, 33 bp, Homo sapien
ccatgcaaaccaggagacaatgcaacaaaaact

SEQ ID NO: 344976 - DNA, 33 bp, Homo sapien
ccatgcaaaccaggaggcaatgcaacaaaaact

SEQ ID NO: 344977 - DNA, 33 bp, Homo sapien
ttggcattctttgatacgagatagagatataac

SEQ ID NO: 344978 - DNA, 33 bp, Homo sapien
ttggcattctttgatatgagatagagatataac

SEQ ID NO: 344979 - DNA, 33 bp, Homo sapien
accagataatgcaagacaaataaactctcctcc

SEQ ID NO: 344980 - DNA, 33 bp, Homo sapien
accagataatgcaagagaaataaactctcctcc

SEQ ID NO: 344981 - DNA, 33 bp, Homo sapien
gtgtgcaatatgcgtcaaactcctatctccaca

SEQ ID NO: 344982 - DNA, 33 bp, Homo sapien
gtgtgcaatatgcgtccaactcctatctccaca

SEQ ID NO: 344983 - DNA, 33 bp, Homo sapien
gtcaggattcagttggaaaaacagaactaacac

SEQ ID NO: 344984 - DNA, 33 bp, Homo sapien
gtcaggattcagttgggaaaacagaactaacac

SEQ ID NO: 344985 - DNA, 33 bp, Homo sapien
tgcctcagtgaaagaaaaggttctctgaaagtt

SEQ ID NO: 344986 - DNA, 33 bp, Homo sapien
tgcctcagtgaaagaataggttctctgaaagtt

SEQ ID NO: 344987 - DNA, 33 bp, Homo sapien
tggggaacaaactgcaagccatctgaaagagaa

SEQ ID NO: 344988 - DNA, 33 bp, Homo sapien
tggggaacaaactgcaggccatctgaaagagaa

SEQ ID NO: 344989 - DNA, 33 bp, Homo sapien
gtttaactctgattgacatgcttccccaaaacg

SEQ ID NO: 344990 - DNA, 33 bp, Homo sapien
gtttaactctgattgatatgcttccccaaaacg

SEQ ID NO: 344991 - DNA, 33 bp, Homo sapien
gagccctgtggggaaaagaatcatggggaaatg

SEQ ID NO: 344992 - DNA, 33 bp, Homo sapien
gagccctgtggggaaaggaatcatggggaaatg

SEQ ID NO: 344993 - DNA, 33 bp, Homo sapien
gggtgggggtgattggaagcccactggaacgat

SEQ ID NO: 344994 - DNA, 33 bp, Homo sapien
gggtgggggtgattggcagcccactggaacgat

SEQ ID NO: 344995 - DNA, 33 bp, Homo sapien
tctctcaaattcgggagcattcgttgtctttat

SEQ ID NO: 344996 - DNA, 33 bp, Homo sapien
tctctcaaattcgggatcattcgttgtctttat

SEQ ID NO: 344997 - DNA, 33 bp, Homo sapien
tggctctcaaagaaagcatctcaattattcccc

SEQ ID NO: 344998 - DNA, 33 bp, Homo sapien
tggctctcaaagaaaggatctcaattattcccc

SEQ ID NO: 344999 - DNA, 33 bp, Homo sapien
gctatttaaagcaaacacacattgaatttgata

SEQ ID NO: 345000 - DNA, 33 bp, Homo sapien
gctatttaaagcaaacgcacattgaatttgata

SEQ ID NO: 345001 - DNA, 33 bp, Homo sapien
gttccaagactcactaagaagaaaataatgtaa

SEQ ID NO: 345002 - DNA, 33 bp, Homo sapien
gttccaagactcactatgaagaaaataatgtaa

SEQ ID NO: 345003 - DNA, 33 bp, Homo sapien
agacagtgagtctcagaaaagatatctccagtt

SEQ ID NO: 345004 - DNA, 33 bp, Homo sapien
agacagtgagtctcaggaaagatatctccagtt

SEQ ID NO: 345005 - DNA, 33 bp, Homo sapien
ccattaaaaatgatgacgtaaaacaggactgac

SEQ ID NO: 345006 - DNA, 33 bp, Homo sapien
ccattaaaaatgatgatgtaaaacaggactgac

SEQ ID NO: 345007 - DNA, 33 bp, Homo sapien
tttttgcctacatgtaaaatccctgagctgaaa

SEQ ID NO: 345008 - DNA, 33 bp, Homo sapien
tttttgcctacatgtacaatccctgagctgaaa

SEQ ID NO: 345009 - DNA, 33 bp, Homo sapien
acgagaatggcctctcccgactctgacggggct

SEQ ID NO: 345010 - DNA, 33 bp, Homo sapien
acgagaatggcctctctcgactctgacggggct

SEQ ID NO: 345011 - DNA, 33 bp, Homo sapien
gtggaatggggcgacacgctggttgtgacaatg

SEQ ID NO: 345012 - DNA, 33 bp, Homo sapien
gtggaatggggcgacaggctggttgtgacaatg

SEQ ID NO: 345013 - DNA, 33 bp, Homo sapien
ttggaagggtcggcaacgaaccaggtgttcccc

SEQ ID NO: 345014 - DNA, 33 bp, Homo sapien
ttggaagggtcggcaaggaaccaggtgttcccc

SEQ ID NO: 345015 - DNA, 33 bp, Homo sapien
gtccatgtttctatccacagcctgtctaaagca

SEQ ID NO: 345016 - DNA, 33 bp, Homo sapien
gtccatgtttctatccgcagcctgtctaaagca

SEQ ID NO: 345017 - DNA, 33 bp, Homo sapien
tgccttagtaggatggaaatgatattaaaaatt

SEQ ID NO: 345018 - DNA, 33 bp, Homo sapien
tgccttagtaggatgggaatgatattaaaaatt

SEQ ID NO: 345019 - DNA, 33 bp, Homo sapien
tctgccaatttcacacacagggctcattctaca

SEQ ID NO: 345020 - DNA, 33 bp, Homo sapien
tctgccaatttcacacgcagggctcattctaca

SEQ ID NO: 345021 - DNA, 33 bp, Homo sapien
taggtcctgtgttaataatgggtagccagctgg

SEQ ID NO: 345022 - DNA, 33 bp, Homo sapien
taggtcctgtgttaatgatgggtagccagctgg

SEQ ID NO: 345023 - DNA, 33 bp, Homo sapien
cacatccagtatgacacgctacagggagagcag

SEQ ID NO: 345024 - DNA, 33 bp, Homo sapien
cacatccagtatgacatgctacagggagagcag

SEQ ID NO: 345025 - DNA, 33 bp, Homo sapien
tgattctggagagtcaactaaacatattacagg

SEQ ID NO: 345026 - DNA, 33 bp, Homo sapien
tgattctggagagtcagctaaacatattacagg

SEQ ID NO: 345027 - DNA, 33 bp, Homo sapien
gaagcattcaagacccaaactaaaggcttggtc

SEQ ID NO: 345028 - DNA, 33 bp, Homo sapien
gaagcattcaagacccgaactaaaggcttggtc

SEQ ID NO: 345029 - DNA, 33 bp, Homo sapien
tttgatctttcttgtcacatcagtcactggagt

SEQ ID NO: 345030 - DNA, 33 bp, Homo sapien
tttgatctttcttgtctcatcagtcactggagt

SEQ ID NO: 345031 - DNA, 33 bp, Homo sapien
agctctaaagataggacggtttgaaggtactaa

SEQ ID NO: 345032 - DNA, 33 bp, Homo sapien
agctctaaagataggatggtttgaaggtactaa

SEQ ID NO: 345033 - DNA, 33 bp, Homo sapien
gcccttgacaagctaaatgagcaggaaaaggca

SEQ ID NO: 345034 - DNA, 33 bp, Homo sapien
gcccttgacaagctaactgagcaggaaaaggca

SEQ ID NO: 345035 - DNA, 33 bp, Homo sapien
ggggaaaaaacaaaataaatccgcattagacaa

SEQ ID NO: 345036 - DNA, 33 bp, Homo sapien
ggggaaaaaacaaaatgaatccgcattagacaa

SEQ ID NO: 345037 - DNA, 33 bp, Homo sapien
gcagttggattggatcagactttaagaacttag

SEQ ID NO: 345038 - DNA, 33 bp, Homo sapien
gcagttggattggatcggactttaagaacttag

SEQ ID NO: 345039 - DNA, 33 bp, Homo sapien
gttacaacactgttcaagattttgccattaaca

SEQ ID NO: 345040 - DNA, 33 bp, Homo sapien
gttacaacactgttcacgattttgccattaaca

SEQ ID NO: 345041 - DNA, 33 bp, Homo sapien
aaccaccacgccgtgccgcaactaagctttaaa

SEQ ID NO: 345042 - DNA, 33 bp, Homo sapien
aaccaccacgccgtgcggcaactaagctttaaa

SEQ ID NO: 345043 - DNA, 33 bp, Homo sapien
aaacactgggctttaccaagctattgttattct

SEQ ID NO: 345044 - DNA, 33 bp, Homo sapien
aaacactgggctttacgaagctattgttattct

SEQ ID NO: 345045 - DNA, 33 bp, Homo sapien
cagtctctcatcgcaacaagactcctcctccag

SEQ ID NO: 345046 - DNA, 33 bp, Homo sapien
cagtctctcatcgcaataagactcctcctccag

SEQ ID NO: 345047 - DNA, 33 bp, Homo sapien
atgtttttaccatcaccgtcatatcttccttta

SEQ ID NO: 345048 - DNA, 33 bp, Homo sapien
atgtttttaccatcactgtcatatcttccttta

SEQ ID NO: 345049 - DNA, 33 bp, Homo sapien
tatggtctcattcatgaaattgttttgttaagt

SEQ ID NO: 345050 - DNA, 33 bp, Homo sapien
tatggtctcattcatggaattgttttgttaagt

SEQ ID NO: 345051 - DNA, 33 bp, Homo sapien
cccatctcatcatcaaagagagaatttacatac

SEQ ID NO: 345052 - DNA, 33 bp, Homo sapien
cccatctcatcatcaaggagagaatttacatac

SEQ ID NO: 345053 - DNA, 33 bp, Homo sapien
taacaggcacatagaacggctttctctagagca

SEQ ID NO: 345054 - DNA, 33 bp, Homo sapien
taacaggcacatagaatggctttctctagagca

SEQ ID NO: 345055 - DNA, 33 bp, Homo sapien
aacacaatggcaatcagtataagcataggagaa

SEQ ID NO: 345056 - DNA, 33 bp, Homo sapien
aacacaatggcaatcattataagcataggagaa

SEQ ID NO: 345057 - DNA, 33 bp, Homo sapien
tcctcttctttcataaccaaaacgaatcacagt

SEQ ID NO: 345058 - DNA, 33 bp, Homo sapien
tcctcttctttcataatcaaaacgaatcacagt

SEQ ID NO: 345059 - DNA, 33 bp, Homo sapien
gaagctggaaactgagaaactggaaatcttcct

SEQ ID NO: 345060 - DNA, 33 bp, Homo sapien
gaagctggaaactgaggaactggaaatcttcct

SEQ ID NO: 345061 - DNA, 33 bp, Homo sapien
gaaagatgacaggcacaatgtagggaagccaga

SEQ ID NO: 345062 - DNA, 33 bp, Homo sapien
gaaagatgacaggcacgatgtagggaagccaga

SEQ ID NO: 345063 - DNA, 33 bp, Homo sapien
acacttaggagaactcacattcactggctaatt

SEQ ID NO: 345064 - DNA, 33 bp, Homo sapien
acacttaggagaactcgcattcactggctaatt

SEQ ID NO: 345065 - DNA, 33 bp, Homo sapien
gatgaaataaactctcagaaggtgtgagctccc

SEQ ID NO: 345066 - DNA, 33 bp, Homo sapien
gatgaaataaactctcggaaggtgtgagctccc

SEQ ID NO: 345067 - DNA, 33 bp, Homo sapien
atgacaaaaacactgactaaaataaggaatata

SEQ ID NO: 345068 - DNA, 33 bp, Homo sapien
atgacaaaaacactgagtaaaataaggaatata

SEQ ID NO: 345069 - DNA, 33 bp, Homo sapien
ctaaccaggaaagagccgaaatcaaaggctgtc

SEQ ID NO: 345070 - DNA, 33 bp, Homo sapien
ctaaccaggaaagagctgaaatcaaaggctgtc

SEQ ID NO: 345071 - DNA, 33 bp, Homo sapien
ttttttgattactaccaaagttaagcatcattt

SEQ ID NO: 345072 - DNA, 33 bp, Homo sapien
ttttttgattactaccgaagttaagcatcattt

SEQ ID NO: 345073 - DNA, 33 bp, Homo sapien
tgatcccaccatatgtaaatcaacagacaaatc

SEQ ID NO: 345074 - DNA, 33 bp, Homo sapien
tgatcccaccatatgtgaatcaacagacaaatc

SEQ ID NO: 345075 - DNA, 33 bp, Homo sapien
gatggggagcctgatacactaaaaatcttagag

SEQ ID NO: 345076 - DNA, 33 bp, Homo sapien
gatggggagcctgatatactaaaaatcttagag

SEQ ID NO: 345077 - DNA, 33 bp, Homo sapien
agcacagtcataggaaataaaaccatatcaagg

SEQ ID NO: 345078 - DNA, 33 bp, Homo sapien
agcacagtcataggaagtaaaaccatatcaagg

SEQ ID NO: 345079 - DNA, 33 bp, Homo sapien
gtctggatctactccccaagaccgaccaggcag

SEQ ID NO: 345080 - DNA, 33 bp, Homo sapien
gtctggatctactccctaagaccgaccaggcag

SEQ ID NO: 345081 - DNA, 33 bp, Homo sapien
ataaggacaaagagatcatctccaccagccatt

SEQ ID NO: 345082 - DNA, 33 bp, Homo sapien
ataaggacaaagagatgatctccaccagccatt

SEQ ID NO: 345083 - DNA, 33 bp, Homo sapien
ctgaaaaaaattgaccagatttcataaaattga

SEQ ID NO: 345084 - DNA, 33 bp, Homo sapien
ctgaaaaaaattgaccggatttcataaaattga

SEQ ID NO: 345085 - DNA, 33 bp, Homo sapien
cagacttgtgtaggcccgataacccctttgttt

SEQ ID NO: 345086 - DNA, 33 bp, Homo sapien
cagacttgtgtaggcctgataacccctttgttt

SEQ ID NO: 345087 - DNA, 33 bp, Homo sapien
gagatttagtcaacaagaaacccagtattactc

SEQ ID NO: 345088 - DNA, 33 bp, Homo sapien
gagatttagtcaacaataaacccagtattactc

SEQ ID NO: 345089 - DNA, 33 bp, Homo sapien
gtcaagccattgcgaaccagtttcttacatttc

SEQ ID NO: 345090 - DNA, 33 bp, Homo sapien
gtcaagccattgcgaagcagtttcttacatttc

SEQ ID NO: 345091 - DNA, 33 bp, Homo sapien
tttatttagatttcaaccaatactgatggatgc

SEQ ID NO: 345092 - DNA, 33 bp, Homo sapien
tttatttagatttcaagcaatactgatggatgc

SEQ ID NO: 345093 - DNA, 33 bp, Homo sapien
ataataggggtgtgaacacaattttcaggatga

SEQ ID NO: 345094 - DNA, 33 bp, Homo sapien
ataataggggtgtgaagacaattttcaggatga

SEQ ID NO: 345095 - DNA, 33 bp, Homo sapien
tgtatatgtgcagtttaaaaaaccatgacctca

SEQ ID NO: 345096 - DNA, 33 bp, Homo sapien
tgtatatgtgcagtttgaaaaaccatgacctca

SEQ ID NO: 345097 - DNA, 33 bp, Homo sapien
aggcagggttttgaaaagcttgccctgatgcta

SEQ ID NO: 345098 - DNA, 33 bp, Homo sapien
aggcagggttttgaaaggcttgccctgatgcta

SEQ ID NO: 345099 - DNA, 33 bp, Homo sapien
atgagtttttcacttaccagttgatatggtttg

SEQ ID NO: 345100 - DNA, 33 bp, Homo sapien
atgagtttttcacttatcagttgatatggtttg

SEQ ID NO: 345101 - DNA, 33 bp, Homo sapien
gcaagaagctatgtgacggtctctgaagtaaat

SEQ ID NO: 345102 - DNA, 33 bp, Homo sapien
gcaagaagctatgtgatggtctctgaagtaaat

SEQ ID NO: 345103 - DNA, 33 bp, Homo sapien
tgggtgaatatgtccacgtggaagagaaactat

SEQ ID NO: 345104 - DNA, 33 bp, Homo sapien
tgggtgaatatgtccatgtggaagagaaactat

SEQ ID NO: 345105 - DNA, 33 bp, Homo sapien
gtggaaagacgaggacaagagaggaaagttagg

SEQ ID NO: 345106 - DNA, 33 bp, Homo sapien
gtggaaagacgaggacgagagaggaaagttagg

SEQ ID NO: 345107 - DNA, 33 bp, Homo sapien
agatggcagaggcagcacagacaagggagatgt

SEQ ID NO: 345108 - DNA, 33 bp, Homo sapien
agatggcagaggcagcgcagacaagggagatgt

SEQ ID NO: 345109 - DNA, 33 bp, Homo sapien
aatcgctcccttcctcacttgtcttgactctgg

SEQ ID NO: 345110 - DNA, 33 bp, Homo sapien
aatcgctcccttcctcgcttgtcttgactctgg

SEQ ID NO: 345111 - DNA, 33 bp, Homo sapien
aatcacggagaaacctaagcagggatcagacac

SEQ ID NO: 345112 - DNA, 33 bp, Homo sapien
aatcacggagaaacctgagcagggatcagacac

SEQ ID NO: 345113 - DNA, 33 bp, Homo sapien
ttgcagaggatttctacatttcccttagcctgt

SEQ ID NO: 345114 - DNA, 33 bp, Homo sapien
ttgcagaggatttctagatttcccttagcctgt

SEQ ID NO: 345115 - DNA, 33 bp, Homo sapien
aacacatttggattaacaggatggccatctgtc

SEQ ID NO: 345116 - DNA, 33 bp, Homo sapien
aacacatttggattaagaggatggccatctgtc

SEQ ID NO: 345117 - DNA, 33 bp, Homo sapien
tagtcaaagctgtcaacgatcacccacctagtt

SEQ ID NO: 345118 - DNA, 33 bp, Homo sapien
tagtcaaagctgtcaatgatcacccacctagtt

SEQ ID NO: 345119 - DNA, 33 bp, Homo sapien
agcttagaggttaccacggtgaccagagccaac

SEQ ID NO: 345120 - DNA, 33 bp, Homo sapien
agcttagaggttaccatggtgaccagagccaac

SEQ ID NO: 345121 - DNA, 33 bp, Homo sapien
caaataatggcaagacaaaatgatcatcaaaca

SEQ ID NO: 345122 - DNA, 33 bp, Homo sapien
caaataatggcaagaccaaatgatcatcaaaca

SEQ ID NO: 345123 - DNA, 33 bp, Homo sapien
agaatatgccaaaatactaaaactggcaattgc

SEQ ID NO: 345124 - DNA, 33 bp, Homo sapien
agaatatgccaaaatattaaaactggcaattgc

SEQ ID NO: 345125 - DNA, 33 bp, Homo sapien
tgtgaggtacaggatcaactacaattttaggaa

SEQ ID NO: 345126 - DNA, 33 bp, Homo sapien
tgtgaggtacaggatcgactacaattttaggaa

SEQ ID NO: 345127 - DNA, 33 bp, Homo sapien
ccagaaagtctgaacaccctattttgtagaccc

SEQ ID NO: 345128 - DNA, 33 bp, Homo sapien
ccagaaagtctgaacatcctattttgtagaccc

SEQ ID NO: 345129 - DNA, 33 bp, Homo sapien
gaaatacactcattctgacagctcttctaattc

SEQ ID NO: 345130 - DNA, 33 bp, Homo sapien
gaaatacactcattcttacagctcttctaattc

SEQ ID NO: 345131 - DNA, 33 bp, Homo sapien
catatctcctggtaaacgcagtcatacatgata

SEQ ID NO: 345132 - DNA, 33 bp, Homo sapien
catatctcctggtaaatgcagtcatacatgata

SEQ ID NO: 345133 - DNA, 33 bp, Homo sapien
cacagccatatcaaaaataattctgcatctttt

SEQ ID NO: 345134 - DNA, 33 bp, Homo sapien
cacagccatatcaaaactaattctgcatctttt

SEQ ID NO: 345135 - DNA, 33 bp, Homo sapien
tgtacaaggatagagaataatatggttatccag

SEQ ID NO: 345136 - DNA, 33 bp, Homo sapien
tgtacaaggatagagagtaatatggttatccag

SEQ ID NO: 345137 - DNA, 33 bp, Homo sapien
ctctgaagcacagcgactcattatgctaatttc

SEQ ID NO: 345138 - DNA, 33 bp, Homo sapien
ctctgaagcacagcgattcattatgctaatttc

SEQ ID NO: 345139 - DNA, 33 bp, Homo sapien
gtcaagcacttagagaacaatatggacaacagc

SEQ ID NO: 345140 - DNA, 33 bp, Homo sapien
gtcaagcacttagagagcaatatggacaacagc

SEQ ID NO: 345141 - DNA, 33 bp, Homo sapien
tcttttgctacaccacagtagtcatggcagcca

SEQ ID NO: 345142 - DNA, 33 bp, Homo sapien
tcttttgctacaccacggtagtcatggcagcca

SEQ ID NO: 345143 - DNA, 33 bp, Homo sapien
gatcctcctcaaacttcaagggtgaaaagcata

SEQ ID NO: 345144 - DNA, 33 bp, Homo sapien
gatcctcctcaaactttaagggtgaaaagcata

SEQ ID NO: 345145 - DNA, 33 bp, Homo sapien
tatttgttcctggactcaatgcatgaagcacac

SEQ ID NO: 345146 - DNA, 33 bp, Homo sapien
tatttgttcctggactgaatgcatgaagcacac

SEQ ID NO: 345147 - DNA, 33 bp, Homo sapien
tgtgctttagtacaataacacaatttgtagtca

SEQ ID NO: 345148 - DNA, 33 bp, Homo sapien
tgtgctttagtacaattacacaatttgtagtca

SEQ ID NO: 345149 - DNA, 33 bp, Homo sapien
ccaaaatacgtataaccgtcatctaccactaaa

SEQ ID NO: 345150 - DNA, 33 bp, Homo sapien
ccaaaatacgtataactgtcatctaccactaaa

SEQ ID NO: 345151 - DNA, 33 bp, Homo sapien
tctgtaattccatttacgttccattcaaatttc

SEQ ID NO: 345152 - DNA, 33 bp, Homo sapien
tctgtaattccatttatgttccattcaaatttc

SEQ ID NO: 345153 - DNA, 33 bp, Homo sapien
actgtctaaatagaagccttatatttctgattg

SEQ ID NO: 345154 - DNA, 33 bp, Homo sapien
actgtctaaatagaaggcttatatttctgattg

SEQ ID NO: 345155 - DNA, 33 bp, Homo sapien
gcctagagttagtgaaagttaaaaggagaagaa

SEQ ID NO: 345156 - DNA, 33 bp, Homo sapien
gcctagagttagtgaaggttaaaaggagaagaa

SEQ ID NO: 345157 - DNA, 33 bp, Homo sapien
aagtataaattcgtgaaacagcataccatgtga

SEQ ID NO: 345158 - DNA, 33 bp, Homo sapien
aagtataaattcgtgagacagcataccatgtga

SEQ ID NO: 345159 - DNA, 33 bp, Homo sapien
ttgaaacgtcagaacaaacagctgaagctatgc

SEQ ID NO: 345160 - DNA, 33 bp, Homo sapien
ttgaaacgtcagaacatacagctgaagctatgc

SEQ ID NO: 345161 - DNA, 33 bp, Homo sapien
gatgagggtctcttaacggtgaacagtctccat

SEQ ID NO: 345162 - DNA, 33 bp, Homo sapien
gatgagggtctcttaatggtgaacagtctccat

SEQ ID NO: 345163 - DNA, 33 bp, Homo sapien
cttgacaatcttgaaacgagcccatttccttgt

SEQ ID NO: 345164 - DNA, 33 bp, Homo sapien
cttgacaatcttgaaaggagcccatttccttgt

SEQ ID NO: 345165 - DNA, 33 bp, Homo sapien
ctctgtagaacacttacgcgctataaaagacca

SEQ ID NO: 345166 - DNA, 33 bp, Homo sapien
ctctgtagaacacttatgcgctataaaagacca

SEQ ID NO: 345167 - DNA, 33 bp, Homo sapien
caccactgggagtccaggcttgcttcaaaagct

SEQ ID NO: 345168 - DNA, 33 bp, Homo sapien
caccactgggagtccatgcttgcttcaaaagct

SEQ ID NO: 345169 - DNA, 33 bp, Homo sapien
ctacatgtgtagtttaaatctgatgcattacaa

SEQ ID NO: 345170 - DNA, 33 bp, Homo sapien
ctacatgtgtagtttatatctgatgcattacaa

SEQ ID NO: 345171 - DNA, 33 bp, Homo sapien
ttccaaagcaaagttacgccagtgtgttcaaaa

SEQ ID NO: 345172 - DNA, 33 bp, Homo sapien
ttccaaagcaaagttatgccagtgtgttcaaaa

SEQ ID NO: 345173 - DNA, 33 bp, Homo sapien
taaaacagccaataaaaagtgagacaacaaatc

SEQ ID NO: 345174 - DNA, 33 bp, Homo sapien
taaaacagccaataaagagtgagacaacaaatc

SEQ ID NO: 345175 - DNA, 33 bp, Homo sapien
ctctactggtatgtcaggtacactgcatgattt

SEQ ID NO: 345176 - DNA, 33 bp, Homo sapien
ctctactggtatgtcatgtacactgcatgattt

SEQ ID NO: 345177 - DNA, 33 bp, Homo sapien
actatcttaagtgcaccgaataatcaacaccag

SEQ ID NO: 345178 - DNA, 33 bp, Homo sapien
actatcttaagtgcactgaataatcaacaccag

SEQ ID NO: 345179 - DNA, 33 bp, Homo sapien
aagggagtgaaacaacaaagacattttggaact

SEQ ID NO: 345180 - DNA, 33 bp, Homo sapien
aagggagtgaaacaacgaagacattttggaact

SEQ ID NO: 345181 - DNA, 33 bp, Homo sapien
agtccatttgtgtacaatcagaacctttcaacc

SEQ ID NO: 345182 - DNA, 33 bp, Homo sapien
agtccatttgtgtacagtcagaacctttcaacc

SEQ ID NO: 345183 - DNA, 33 bp, Homo sapien
gaatttaataatgatgaatcctgacaaatagga

SEQ ID NO: 345184 - DNA, 33 bp, Homo sapien
gaatttaataatgatgcatcctgacaaatagga

SEQ ID NO: 345185 - DNA, 33 bp, Homo sapien
atgtaataattaggcaacatgaagtccttgaac

SEQ ID NO: 345186 - DNA, 33 bp, Homo sapien
atgtaataattaggcaccatgaagtccttgaac

SEQ ID NO: 345187 - DNA, 33 bp, Homo sapien
ggcagtttagttttgtcaatttgagttttcagt

SEQ ID NO: 345188 - DNA, 33 bp, Homo sapien
ggcagtttagttttgtgaatttgagttttcagt

SEQ ID NO: 345189 - DNA, 33 bp, Homo sapien
gttattaaaatacccaatgacagcctcaggtct

SEQ ID NO: 345190 - DNA, 33 bp, Homo sapien
gttattaaaatacccagtgacagcctcaggtct

SEQ ID NO: 345191 - DNA, 33 bp, Homo sapien
catctagttgcttttaacttcacttatgagaga

SEQ ID NO: 345192 - DNA, 33 bp, Homo sapien
catctagttgcttttaccttcacttatgagaga

SEQ ID NO: 345193 - DNA, 33 bp, Homo sapien
cacgtacaaagctgtaactccgtatcatgaagg

SEQ ID NO: 345194 - DNA, 33 bp, Homo sapien
cacgtacaaagctgtatctccgtatcatgaagg

SEQ ID NO: 345195 - DNA, 33 bp, Homo sapien
aacaggctgcataatacactattccactgaaat

SEQ ID NO: 345196 - DNA, 33 bp, Homo sapien
aacaggctgcataatatactattccactgaaat

SEQ ID NO: 345197 - DNA, 33 bp, Homo sapien
ctaatcattcctgccacgagagataatttacat

SEQ ID NO: 345198 - DNA, 33 bp, Homo sapien
ctaatcattcctgccatgagagataatttacat

SEQ ID NO: 345199 - DNA, 33 bp, Homo sapien
gcaggtcttgtcttggaaaggaaacagaattgg

SEQ ID NO: 345200 - DNA, 33 bp, Homo sapien
gcaggtcttgtcttgggaaggaaacagaattgg

SEQ ID NO: 345201 - DNA, 33 bp, Homo sapien
taagttcttcttaggaacatcttagggcaagga

SEQ ID NO: 345202 - DNA, 33 bp, Homo sapien
taagttcttcttaggatcatcttagggcaagga

SEQ ID NO: 345203 - DNA, 33 bp, Homo sapien
accaaagactaaaacccgctacaatgtggaaaa

SEQ ID NO: 345204 - DNA, 33 bp, Homo sapien
accaaagactaaaacctgctacaatgtggaaaa

SEQ ID NO: 345205 - DNA, 33 bp, Homo sapien
ccagatgggctgcttaagattgggaaaagaaag

SEQ ID NO: 345206 - DNA, 33 bp, Homo sapien
ccagatgggctgcttaggattgggaaaagaaag

SEQ ID NO: 345207 - DNA, 33 bp, Homo sapien
tgggcttccttcacataaacacaaatgacttct

SEQ ID NO: 345208 - DNA, 33 bp, Homo sapien
tgggcttccttcacattaacacaaatgacttct

SEQ ID NO: 345209 - DNA, 33 bp, Homo sapien
cactctatcatgcttcaccaatcttgtccttta

SEQ ID NO: 345210 - DNA, 33 bp, Homo sapien
cactctatcatgcttcgccaatcttgtccttta

SEQ ID NO: 345211 - DNA, 33 bp, Homo sapien
gtctagaatgtaagtacgtttccttagtttagc

SEQ ID NO: 345212 - DNA, 33 bp, Homo sapien
gtctagaatgtaagtatgtttccttagtttagc

SEQ ID NO: 345213 - DNA, 33 bp, Homo sapien
agctgggtgagctaacaaggtttttcacttctc

SEQ ID NO: 345214 - DNA, 33 bp, Homo sapien
agctgggtgagctaacgaggtttttcacttctc

SEQ ID NO: 345215 - DNA, 33 bp, Homo sapien
cctctgaagcttaacaatcaaatttcccttcat

SEQ ID NO: 345216 - DNA, 33 bp, Homo sapien
cctctgaagcttaacagtcaaatttcccttcat

SEQ ID NO: 345217 - DNA, 33 bp, Homo sapien
tctttagcatttgttgaatttttcttgaaaact

SEQ ID NO: 345218 - DNA, 33 bp, Homo sapien
tctttagcatttgttggatttttcttgaaaact

SEQ ID NO: 345219 - DNA, 33 bp, Homo sapien
atgcatagttcttagacacaacagcttagaggt

SEQ ID NO: 345220 - DNA, 33 bp, Homo sapien
atgcatagttcttagatacaacagcttagaggt

SEQ ID NO: 345221 - DNA, 33 bp, Homo sapien
ttaggaagaatgacccaaaattcacagattaag

SEQ ID NO: 345222 - DNA, 33 bp, Homo sapien
ttaggaagaatgaccccaaattcacagattaag

SEQ ID NO: 345223 - DNA, 33 bp, Homo sapien
caaaaagcacggaagacgagcatctgaattctg

SEQ ID NO: 345224 - DNA, 33 bp, Homo sapien
caaaaagcacggaagatgagcatctgaattctg

SEQ ID NO: 345225 - DNA, 33 bp, Homo sapien
ttcttgctctgccccacgttagtcaggcactat

SEQ ID NO: 345226 - DNA, 33 bp, Homo sapien
ttcttgctctgccccatgttagtcaggcactat

SEQ ID NO: 345227 - DNA, 33 bp, Homo sapien
tattgctctggatggtaaatgagcttgcacacg

SEQ ID NO: 345228 - DNA, 33 bp, Homo sapien
tattgctctggatggtgaatgagcttgcacacg

SEQ ID NO: 345229 - DNA, 33 bp, Homo sapien
gtcataatgagaacgacactcttactaggagga

SEQ ID NO: 345230 - DNA, 33 bp, Homo sapien
gtcataatgagaacgatactcttactaggagga

SEQ ID NO: 345231 - DNA, 33 bp, Homo sapien
tggccatcctccagccgggaatatcaccctact

SEQ ID NO: 345232 - DNA, 33 bp, Homo sapien
tggccatcctccagcctggaatatcaccctact

SEQ ID NO: 345233 - DNA, 33 bp, Homo sapien
tgtcatcactcctaaactggtatatttggcatt

SEQ ID NO: 345234 - DNA, 33 bp, Homo sapien
tgtcatcactcctaaattggtatatttggcatt

SEQ ID NO: 345235 - DNA, 33 bp, Homo sapien
aagctgtctttcagaacaatcaagagtcccacc

SEQ ID NO: 345236 - DNA, 33 bp, Homo sapien
aagctgtctttcagaagaatcaagagtcccacc

SEQ ID NO: 345237 - DNA, 33 bp, Homo sapien
tgcagagatctggtaacaagttaaactcaaggg

SEQ ID NO: 345238 - DNA, 33 bp, Homo sapien
tgcagagatctggtaagaagttaaactcaaggg

SEQ ID NO: 345239 - DNA, 33 bp, Homo sapien
ttttcaacctatatgcacatcgaaactaagggt

SEQ ID NO: 345240 - DNA, 33 bp, Homo sapien
ttttcaacctatatgcgcatcgaaactaagggt

SEQ ID NO: 345241 - DNA, 33 bp, Homo sapien
catctttacctcaagcacttagtttctctaaga

SEQ ID NO: 345242 - DNA, 33 bp, Homo sapien
catctttacctcaagcgcttagtttctctaaga

SEQ ID NO: 345243 - DNA, 33 bp, Homo sapien
tggtgcttcagtaaagaccatgaaatttcatca

SEQ ID NO: 345244 - DNA, 33 bp, Homo sapien
tggtgcttcagtaaaggccatgaaatttcatca

SEQ ID NO: 345245 - DNA, 33 bp, Homo sapien
ccccattcatttcttacacttgccagcatgacc

SEQ ID NO: 345246 - DNA, 33 bp, Homo sapien
ccccattcatttcttagacttgccagcatgacc

SEQ ID NO: 345247 - DNA, 33 bp, Homo sapien
cgcaaagcaaagctgacgaactaccttggtttg

SEQ ID NO: 345248 - DNA, 33 bp, Homo sapien
cgcaaagcaaagctgaggaactaccttggtttg

SEQ ID NO: 345249 - DNA, 33 bp, Homo sapien
cccagggtatctggaggcaaagcaactgggacc

SEQ ID NO: 345250 - DNA, 33 bp, Homo sapien
cccagggtatctggagtcaaagcaactgggacc

SEQ ID NO: 345251 - DNA, 33 bp, Homo sapien
gagcacgagaagtacaaggcctccatgaaaatc

SEQ ID NO: 345252 - DNA, 33 bp, Homo sapien
gagcacgagaagtacatggcctccatgaaaatc

SEQ ID NO: 345253 - DNA, 33 bp, Homo sapien
ggactgatagtaacttaaaaaaaactgaagcta

SEQ ID NO: 345254 - DNA, 33 bp, Homo sapien
ggactgatagtaactttaaaaaaactgaagcta

SEQ ID NO: 345255 - DNA, 33 bp, Homo sapien
cattgttaggtacatacgcaggaccaaatgagg

SEQ ID NO: 345256 - DNA, 33 bp, Homo sapien
cattgttaggtacataggcaggaccaaatgagg

SEQ ID NO: 345257 - DNA, 33 bp, Homo sapien
cctaacagactgacccaaaaggttgggcaaacc

SEQ ID NO: 345258 - DNA, 33 bp, Homo sapien
cctaacagactgacccgaaaggttgggcaaacc

SEQ ID NO: 345259 - DNA, 33 bp, Homo sapien
ttcactctaaaccacaccattgccactgcccaa

SEQ ID NO: 345260 - DNA, 33 bp, Homo sapien
ttcactctaaaccacagcattgccactgcccaa

SEQ ID NO: 345261 - DNA, 33 bp, Homo sapien
ctatagcagagtgacaatgggattgaagctcac

SEQ ID NO: 345262 - DNA, 33 bp, Homo sapien
ctatagcagagtgacagtgggattgaagctcac

SEQ ID NO: 345263 - DNA, 33 bp, Homo sapien
attcccaaagaagcacacattggttttcaaaaa

SEQ ID NO: 345264 - DNA, 33 bp, Homo sapien
attcccaaagaagcacgcattggttttcaaaaa

SEQ ID NO: 345265 - DNA, 33 bp, Homo sapien
gacacagctgtttctacctaatttgtatgaaat

SEQ ID NO: 345266 - DNA, 33 bp, Homo sapien
gacacagctgtttctatctaatttgtatgaaat

SEQ ID NO: 345267 - DNA, 33 bp, Homo sapien
ctgccttagttaaacccgaggaactagggactt

SEQ ID NO: 345268 - DNA, 33 bp, Homo sapien
ctgccttagttaaacctgaggaactagggactt

SEQ ID NO: 345269 - DNA, 33 bp, Homo sapien
aattagatccctaaaagagaggcgtagaaacaa

SEQ ID NO: 345270 - DNA, 33 bp, Homo sapien
aattagatccctaaaatagaggcgtagaaacaa

SEQ ID NO: 345271 - DNA, 33 bp, Homo sapien
gctgctatacctggacagaacgctcactgaggt

SEQ ID NO: 345272 - DNA, 33 bp, Homo sapien
gctgctatacctggacggaacgctcactgaggt

SEQ ID NO: 345273 - DNA, 33 bp, Homo sapien
ccacctaggtccataaacacagtcatctgaggg

SEQ ID NO: 345274 - DNA, 33 bp, Homo sapien
ccacctaggtccataatcacagtcatctgaggg

SEQ ID NO: 345275 - DNA, 33 bp, Homo sapien
gcttcttgaagctagcacttcccttcgactcct

SEQ ID NO: 345276 - DNA, 33 bp, Homo sapien
gcttcttgaagctagcccttcccttcgactcct

SEQ ID NO: 345277 - DNA, 33 bp, Homo sapien
agagagatatccattccagactgagcatacaca

SEQ ID NO: 345278 - DNA, 33 bp, Homo sapien
agagagatatccattcgagactgagcatacaca

SEQ ID NO: 345279 - DNA, 33 bp, Homo sapien; identical to SEQ ID NO: 345277

SEQ ID NO: 345280 - DNA, 33 bp, Homo sapien; identical to SEQ ID NO: 345278

SEQ ID NO: 345281 - DNA, 33 bp, Homo sapien
gagcctcccttttatacctagcaagctggtaga

SEQ ID NO: 345282 - DNA, 33 bp, Homo sapien
gagcctcccttttatatctagcaagctggtaga

SEQ ID NO: 345283 - DNA, 33 bp, Homo sapien
ttttaaattcagattactaactaacacagaaaa

SEQ ID NO: 345284 - DNA, 33 bp, Homo sapien
ttttaaattcagattagtaactaacacagaaaa

SEQ ID NO: 345285 - DNA, 33 bp, Homo sapien
gcaggtactctaaatacgtcatctcatttgatc

SEQ ID NO: 345286 - DNA, 33 bp, Homo sapien
gcaggtactctaaatatgtcatctcatttgatc

SEQ ID NO: 345287 - DNA, 33 bp, Homo sapien
tgtgaaacttcggtcaacatcctaatcaggcaa

SEQ ID NO: 345288 - DNA, 33 bp, Homo sapien
tgtgaaacttcggtcatcatcctaatcaggcaa

SEQ ID NO: 345289 - DNA, 33 bp, Homo sapien
acaaggtaggtgtggggacccatacgaggaaaa

SEQ ID NO: 345290 - DNA, 33 bp, Homo sapien
acaaggtaggtgtgggtacccatacgaggaaaa

SEQ ID NO: 345291 - DNA, 33 bp, Homo sapien
aactctgtttttgaaaaggtgtgcttcacattt

SEQ ID NO: 345292 - DNA, 33 bp, Homo sapien
aactctgtttttgaaacggtgtgcttcacattt

SEQ ID NO: 345293 - DNA, 33 bp, Homo sapien
tcagatcaaaggctcaccaatggtccatttaaa

SEQ ID NO: 345294 - DNA, 33 bp, Homo sapien
tcagatcaaaggctcatcaatggtccatttaaa

SEQ ID NO: 345295 - DNA, 33 bp, Homo sapien
cagataggttaacaggacaacacatcttgcagc

SEQ ID NO: 345296 - DNA, 33 bp, Homo sapien
cagataggttaacaggccaacacatcttgcagc

SEQ ID NO: 345297 - DNA, 33 bp, Homo sapien
ttgcagcctttcactacatgaacctgttggcta

SEQ ID NO: 345298 - DNA, 33 bp, Homo sapien
ttgcagcctttcactatatgaacctgttggcta

SEQ ID NO: 345299 - DNA, 33 bp, Homo sapien
acatcaacggcttccacatgctggtcagtaaac

SEQ ID NO: 345300 - DNA, 33 bp, Homo sapien
acatcaacggcttccatatgctggtcagtaaac

SEQ ID NO: 345301 - DNA, 33 bp, Homo sapien
gtttggagtgacccaactggaatgtccagaatc

SEQ ID NO: 345302 - DNA, 33 bp, Homo sapien
gtttggagtgacccaattggaatgtccagaatc

SEQ ID NO: 345303 - DNA, 33 bp, Homo sapien
ctcttgaaattcttaacatagcaaagcagaata

SEQ ID NO: 345304 - DNA, 33 bp, Homo sapien
ctcttgaaattcttaatatagcaaagcagaata

SEQ ID NO: 345305 - DNA, 33 bp, Homo sapien
cacatatatttttgcaaccagccgaggattggg

SEQ ID NO: 345306 - DNA, 33 bp, Homo sapien
cacatatatttttgcagccagccgaggattggg

SEQ ID NO: 345307 - DNA, 33 bp, Homo sapien
ttcaaaatggcaacccaaagtcaatgtttcaaa

SEQ ID NO: 345308 - DNA, 33 bp, Homo sapien
ttcaaaatggcaacccgaagtcaatgtttcaaa

SEQ ID NO: 345309 - DNA, 33 bp, Homo sapien
accctaagcaagaagcaagtattcaccaccaga

SEQ ID NO: 345310 - DNA, 33 bp, Homo sapien
accctaagcaagaagcgagtattcaccaccaga

SEQ ID NO: 345311 - DNA, 33 bp, Homo sapien
cgaatgtgtaagtaccaattctccatattgtgg

SEQ ID NO: 345312 - DNA, 33 bp, Homo sapien
cgaatgtgtaagtaccgattctccatattgtgg

SEQ ID NO: 345313 - DNA, 33 bp, Homo sapien
tatgtatgagattaaacaaccgatttcaagagc

SEQ ID NO: 345314 - DNA, 33 bp, Homo sapien
tatgtatgagattaaataaccgatttcaagagc

SEQ ID NO: 345315 - DNA, 33 bp, Homo sapien
gagcttcctcttctgacggcaggagtttgaagc

SEQ ID NO: 345316 - DNA, 33 bp, Homo sapien
gagcttcctcttctgatggcaggagtttgaagc

SEQ ID NO: 345317 - DNA, 33 bp, Homo sapien
aggaaaatcacagcaccggttgaaaatggcaaa

SEQ ID NO: 345318 - DNA, 33 bp, Homo sapien
aggaaaatcacagcactggttgaaaatggcaaa

SEQ ID NO: 345319 - DNA, 33 bp, Homo sapien
gaacccacaatctctccgacatttgcctgtact

SEQ ID NO: 345320 - DNA, 33 bp, Homo sapien
gaacccacaatctctctgacatttgcctgtact

SEQ ID NO: 345321 - DNA, 33 bp, Homo sapien
tgcaaaagcaagaatccactcttcaaagtgcag

SEQ ID NO: 345322 - DNA, 33 bp, Homo sapien
tgcaaaagcaagaatcgactcttcaaagtgcag

SEQ ID NO: 345323 - DNA, 33 bp, Homo sapien
cagtattcacagaagcacggaattttagaacta

SEQ ID NO: 345324 - DNA, 33 bp, Homo sapien
cagtattcacagaagcccggaattttagaacta

SEQ ID NO: 345325 - DNA, 33 bp, Homo sapien
ttaacctcagtggaaacgctccacactggagct

SEQ ID NO: 345326 - DNA, 33 bp, Homo sapien
ttaacctcagtggaaatgctccacactggagct

SEQ ID NO: 345327 - DNA, 33 bp, Homo sapien
acagcaacaatcgtacaagtgaggaattattat

SEQ ID NO: 345328 - DNA, 33 bp, Homo sapien
acagcaacaatcgtacgagtgaggaattattat

SEQ ID NO: 345329 - DNA, 33 bp, Homo sapien
tatacttttctcctacaaacaatgctctcatca

SEQ ID NO: 345330 - DNA, 33 bp, Homo sapien
tatacttttctcctaccaacaatgctctcatca

SEQ ID NO: 345331 - DNA, 33 bp, Homo sapien
cgagcagaaccagaagaaagtgtagtggagatg

SEQ ID NO: 345332 - DNA, 33 bp, Homo sapien
cgagcagaaccagaaggaagtgtagtggagatg

SEQ ID NO: 345333 - DNA, 33 bp, Homo sapien
aagacagcagccaaatgatgttattctgaagtg

SEQ ID NO: 345334 - DNA, 33 bp, Homo sapien
aagacagcagccaaattatgttattctgaagtg

SEQ ID NO: 345335 - DNA, 33 bp, Homo sapien
tttcattctttttcccccacacaaagcaccgga

SEQ ID NO: 345336 - DNA, 33 bp, Homo sapien
tttcattctttttccctcacacaaagcaccgga

SEQ ID NO: 345337 - DNA, 33 bp, Homo sapien
cttggtccacctcgcaaagcgcttaacaagagt

SEQ ID NO: 345338 - DNA, 33 bp, Homo sapien
cttggtccacctcgcacagcgcttaacaagagt

SEQ ID NO: 345339 - DNA, 33 bp, Homo sapien
catgtttggaggcttacaggagctaacatcata

SEQ ID NO: 345340 - DNA, 33 bp, Homo sapien
catgtttggaggcttataggagctaacatcata

SEQ ID NO: 345341 - DNA, 33 bp, Homo sapien
aaggatgagcacagagaaagccatcgttgcttc

SEQ ID NO: 345342 - DNA, 33 bp, Homo sapien
aaggatgagcacagaggaagccatcgttgcttc

SEQ ID NO: 345343 - DNA, 33 bp, Homo sapien
atgatacttagttggcacctataaggaccttgc

SEQ ID NO: 345344 - DNA, 33 bp, Homo sapien
atgatacttagttggcgcctataaggaccttgc

SEQ ID NO: 345345 - DNA, 33 bp, Homo sapien
tgaaaactgccttatcaatgtaagtggttgggt

SEQ ID NO: 345346 - DNA, 33 bp, Homo sapien
tgaaaactgccttatcgatgtaagtggttgggt

SEQ ID NO: 345347 - DNA, 33 bp, Homo sapien
cagagcttcaaactcaatcaatactagctgctt

SEQ ID NO: 345348 - DNA, 33 bp, Homo sapien
cagagcttcaaactcagtcaatactagctgctt

SEQ ID NO: 345349 - DNA, 33 bp, Homo sapien
gctagttgaagagaaacggaaatgagttctgca

SEQ ID NO: 345350 - DNA, 33 bp, Homo sapien
gctagttgaagagaaatggaaatgagttctgca

SEQ ID NO: 345351 - DNA, 33 bp, Homo sapien
agcaataccaaatgtgaaacaaatcccagtggt

SEQ ID NO: 345352 - DNA, 33 bp, Homo sapien
agcaataccaaatgtggaacaaatcccagtggt

SEQ ID NO: 345353 - DNA, 33 bp, Homo sapien
tagctgagagctataacgaagatcgttgtgtca

SEQ ID NO: 345354 - DNA, 33 bp, Homo sapien
tagctgagagctataatgaagatcgttgtgtca

SEQ ID NO: 345355 - DNA, 33 bp, Homo sapien
aatatatagcctatgaactcccatctgtatacc

SEQ ID NO: 345356 - DNA, 33 bp, Homo sapien
aatatatagcctatgacctcccatctgtatacc

SEQ ID NO: 345357 - DNA, 33 bp, Homo sapien
gacacattacaccttacagagaagcagtttctg

SEQ ID NO: 345358 - DNA, 33 bp, Homo sapien
gacacattacaccttatagagaagcagtttctg

SEQ ID NO: 345359 - DNA, 33 bp, Homo sapien
aagacatttgtgattacgacaactaggagggga

SEQ ID NO: 345360 - DNA, 33 bp, Homo sapien
aagacatttgtgattatgacaactaggagggga

SEQ ID NO: 345361 - DNA, 33 bp, Homo sapien
tcctttgaaacaaccaacctttcatgctagtac

SEQ ID NO: 345362 - DNA, 33 bp, Homo sapien
tcctttgaaacaaccagcctttcatgctagtac

SEQ ID NO: 345363 - DNA, 33 bp, Homo sapien
gctctgactttctctgcagctaatattgttcct

SEQ ID NO: 345364 - DNA, 33 bp, Homo sapien
gctctgactttctctggagctaatattgttcct

SEQ ID NO: 345365 - DNA, 33 bp, Homo sapien
gaaacccttcagagaaactccaagtgaaaatgt

SEQ ID NO: 345366 - DNA, 33 bp, Homo sapien
gaaacccttcagagaatctccaagtgaaaatgt

SEQ ID NO: 345367 - DNA, 33 bp, Homo sapien
gaaaatgagaccaaaaatggaacaaggtaaaaa

SEQ ID NO: 345368 - DNA, 33 bp, Homo sapien
gaaaatgagaccaaaagtggaacaaggtaaaaa

SEQ ID NO: 345369 - DNA, 33 bp, Homo sapien
catcgttggtaccaatcaatggaaagctaacac

SEQ ID NO: 345370 - DNA, 33 bp, Homo sapien
catcgttggtaccaatgaatggaaagctaacac

SEQ ID NO: 345371 - DNA, 33 bp, Homo sapien
cctgatacccacacagcaagtcttagttacagg

SEQ ID NO: 345372 - DNA, 33 bp, Homo sapien
cctgatacccacacaggaagtcttagttacagg

SEQ ID NO: 345373 - DNA, 33 bp, Homo sapien
ctcgattttctacttcaattccattcttcagcc

SEQ ID NO: 345374 - DNA, 33 bp, Homo sapien
ctcgattttctacttcgattccattcttcagcc

SEQ ID NO: 345375 - DNA, 33 bp, Homo sapien
ttgtgtctggcagataccctcaattaggagcta

SEQ ID NO: 345376 - DNA, 33 bp, Homo sapien
ttgtgtctggcagatatcctcaattaggagcta

SEQ ID NO: 345377 - DNA, 33 bp, Homo sapien
gctttgggaagctacaataaatggaaaaaccag

SEQ ID NO: 345378 - DNA, 33 bp, Homo sapien
gctttgggaagctacagtaaatggaaaaaccag

SEQ ID NO: 345379 - DNA, 33 bp, Homo sapien
tggagtgaaaggccaacattgagaacgcctacc

SEQ ID NO: 345380 - DNA, 33 bp, Homo sapien
tggagtgaaaggccaagattgagaacgcctacc

SEQ ID NO: 345381 - DNA, 33 bp, Homo sapien
caaagaacttagagagaaacagacaaggtacaa

SEQ ID NO: 345382 - DNA, 33 bp, Homo sapien
caaagaacttagagagcaacagacaaggtacaa

SEQ ID NO: 345383 - DNA, 33 bp, Homo sapien
tgactttactggcggaaaaaatagatagttgcc

SEQ ID NO: 345384 - DNA, 33 bp, Homo sapien
tgactttactggcggacaaaatagatagttgcc

SEQ ID NO: 345385 - DNA, 33 bp, Homo sapien
tgtgaatgtgataaagaaatggagagcaaatcc

SEQ ID NO: 345386 - DNA, 33 bp, Homo sapien
tgtgaatgtgataaagcaatggagagcaaatcc

SEQ ID NO: 345387 - DNA, 33 bp, Homo sapien
attactcaccttctgaaagaccccagaaatatc

SEQ ID NO: 345388 - DNA, 33 bp, Homo sapien
attactcaccttctgagagaccccagaaatatc

SEQ ID NO: 345389 - DNA, 33 bp, Homo sapien
cagaaatatcagaggacaccgggggtcagtggg

SEQ ID NO: 345390 - DNA, 33 bp, Homo sapien
cagaaatatcagaggataccgggggtcagtggg

SEQ ID NO: 345391 - DNA, 33 bp, Homo sapien
attcgcgccaccatggaaactttgacaatgccg

SEQ ID NO: 345392 - DNA, 33 bp, Homo sapien
attcgcgccaccatgggaactttgacaatgccg

SEQ ID NO: 345393 - DNA, 33 bp, Homo sapien
cctcctggggttgtcgaaaggattagatgaggt

SEQ ID NO: 345394 - DNA, 33 bp, Homo sapien
cctcctggggttgtcgtaaggattagatgaggt

SEQ ID NO: 345395 - DNA, 33 bp, Homo sapien
ggaccaagagaatataaggaaggcagaagcaga

SEQ ID NO: 345396 - DNA, 33 bp, Homo sapien
ggaccaagagaatatatggaaggcagaagcaga

SEQ ID NO: 345397 - DNA, 33 bp, Homo sapien
gaaatacagtctggagaccagttttgtatttgg

SEQ ID NO: 345398 - DNA, 33 bp, Homo sapien
gaaatacagtctggagtccagttttgtatttgg

SEQ ID NO: 345399 - DNA, 33 bp, Homo sapien
ctagtctcaattttgaagcatcaacaactcctc

SEQ ID NO: 345400 - DNA, 33 bp, Homo sapien
ctagtctcaattttgaggcatcaacaactcctc

SEQ ID NO: 345401 - DNA, 33 bp, Homo sapien
ttaaactatcagcaaacggaaaaatgttatgaa

SEQ ID NO: 345402 - DNA, 33 bp, Homo sapien
ttaaactatcagcaaatggaaaaatgttatgaa

SEQ ID NO: 345403 - DNA, 33 bp, Homo sapien
caagaaaagaactccactgaggtgtcctgcatc

SEQ ID NO: 345404 - DNA, 33 bp, Homo sapien
caagaaaagaactccattgaggtgtcctgcatc

SEQ ID NO: 345405 - DNA, 33 bp, Homo sapien
cagccctgttagtgaactgtattatgctggttt

SEQ ID NO: 345406 - DNA, 33 bp, Homo sapien
cagccctgttagtgaattgtattatgctggttt

SEQ ID NO: 345407 - DNA, 33 bp, Homo sapien
gcagaacacaaaaatgaacagaaacgtacaggt

SEQ ID NO: 345408 - DNA, 33 bp, Homo sapien
gcagaacacaaaaatggacagaaacgtacaggt

SEQ ID NO: 345409 - DNA, 33 bp, Homo sapien
ccagaaaagattgcatcagggcctggagatggt

SEQ ID NO: 345410 - DNA, 33 bp, Homo sapien
ccagaaaagattgcatgagggcctggagatggt

SEQ ID NO: 345411 - DNA, 33 bp, Homo sapien
gtaagatttcccaaccaaacattttcaagagaa

SEQ ID NO: 345412 - DNA, 33 bp, Homo sapien
gtaagatttcccaacccaacattttcaagagaa

SEQ ID NO: 345413 - DNA, 33 bp, Homo sapien
cacctgggaaagagaaagtgagtctgcctagag

SEQ ID NO: 345414 - DNA, 33 bp, Homo sapien
cacctgggaaagagaaggtgagtctgcctagag

SEQ ID NO: 345415 - DNA, 33 bp, Homo sapien
cagctcctgcaaatgaatcagtaggtggttccg

SEQ ID NO: 345416 - DNA, 33 bp, Homo sapien
cagctcctgcaaatgactcagtaggtggttccg

SEQ ID NO: 345417 - DNA, 33 bp, Homo sapien
ctctcctgattatcaccaccaaatacaccagtg

SEQ ID NO: 345418 - DNA, 33 bp, Homo sapien
ctctcctgattatcactaccaaatacaccagtg

SEQ ID NO: 345419 - DNA, 33 bp, Homo sapien
tttatagactctcgacaatgacctgattttctg

SEQ ID NO: 345420 - DNA, 33 bp, Homo sapien
tttatagactctcgacgatgacctgattttctg

SEQ ID NO: 345421 - DNA, 33 bp, Homo sapien
gaatgagctctaaggaacaatcatacatttttc

SEQ ID NO: 345422 - DNA, 33 bp, Homo sapien
gaatgagctctaaggaccaatcatacatttttc

SEQ ID NO: 345423 - DNA, 33 bp, Homo sapien
gcctctgaggtaggcaagtttatgtaacattat

SEQ ID NO: 345424 - DNA, 33 bp, Homo sapien
gcctctgaggtaggcatgtttatgtaacattat

SEQ ID NO: 345425 - DNA, 33 bp, Homo sapien
ccagtttagttgccacggtagatgatctagctt

SEQ ID NO: 345426 - DNA, 33 bp, Homo sapien
ccagtttagttgccactgtagatgatctagctt

SEQ ID NO: 345427 - DNA, 33 bp, Homo sapien
tttgtgtgtaaactccaagtaatatctgtgaat

SEQ ID NO: 345428 - DNA, 33 bp, Homo sapien
tttgtgtgtaaactccgagtaatatctgtgaat

SEQ ID NO: 345429 - DNA, 33 bp, Homo sapien
gaaaagacgtgcaaaccggaaactggtgactag

SEQ ID NO: 345430 - DNA, 33 bp, Homo sapien
gaaaagacgtgcaaactggaaactggtgactag

SEQ ID NO: 345431 - DNA, 33 bp, Homo sapien
ttgtcaaattgtcaaaacagaaccaggtttccg

SEQ ID NO: 345432 - DNA, 33 bp, Homo sapien
ttgtcaaattgtcaaaccagaaccaggtttccg

SEQ ID NO: 345433 - DNA, 33 bp, Homo sapien
gccagctgggaaataaaactcatcttccagaaa

SEQ ID NO: 345434 - DNA, 33 bp, Homo sapien
gccagctgggaaataagactcatcttccagaaa

SEQ ID NO: 345435 - DNA, 33 bp, Homo sapien
cttcaaggccccatgactaaatacagccacaat

SEQ ID NO: 345436 - DNA, 33 bp, Homo sapien
cttcaaggccccatgagtaaatacagccacaat

SEQ ID NO: 345437 - DNA, 33 bp, Homo sapien
ccaaagctgagtttccgctaacacatggcatga

SEQ ID NO: 345438 - DNA, 33 bp, Homo sapien
ccaaagctgagtttcctctaacacatggcatga

SEQ ID NO: 345439 - DNA, 33 bp, Homo sapien
gtctttgtctagtaataaactcgttttcacttt

SEQ ID NO: 345440 - DNA, 33 bp, Homo sapien
gtctttgtctagtaatgaactcgttttcacttt

SEQ ID NO: 345441 - DNA, 33 bp, Homo sapien
taaaatctgtattctacgtcatgtgtagccact

SEQ ID NO: 345442 - DNA, 33 bp, Homo sapien
taaaatctgtattctatgtcatgtgtagccact

SEQ ID NO: 345443 - DNA, 33 bp, Homo sapien
attcctggaataagaccaaacttgcctctccat

SEQ ID NO: 345444 - DNA, 33 bp, Homo sapien
attcctggaataagactaaacttgcctctccat

SEQ ID NO: 345445 - DNA, 33 bp, Homo sapien
ttaaatgaaggcagcccagtacttatcacaaag

SEQ ID NO: 345446 - DNA, 33 bp, Homo sapien
ttaaatgaaggcagcctagtacttatcacaaag

SEQ ID NO: 345447 - DNA, 33 bp, Homo sapien
aaaacttcagtgattacacttagaggcttccaa

SEQ ID NO: 345448 - DNA, 33 bp, Homo sapien
aaaacttcagtgattatacttagaggcttccaa

SEQ ID NO: 345449 - DNA, 33 bp, Homo sapien
agtgaaaacatcctcaccgtttgatagaaagat

SEQ ID NO: 345450 - DNA, 33 bp, Homo sapien
agtgaaaacatcctcatcgtttgatagaaagat

SEQ ID NO: 345451 - DNA, 33 bp, Homo sapien
ccctgccgcggccttaccaagacttcctgtaca

SEQ ID NO: 345452 - DNA, 33 bp, Homo sapien
ccctgccgcggccttatcaagacttcctgtaca

SEQ ID NO: 345453 - DNA, 33 bp, Homo sapien
cagtgccgctgggagacgggcatttattatatc

SEQ ID NO: 345454 - DNA, 33 bp, Homo sapien
cagtgccgctgggagatgggcatttattatatc

SEQ ID NO: 345455 - DNA, 33 bp, Homo sapien
aaaggcacagtcatacaaagatccaggcaagag

SEQ ID NO: 345456 - DNA, 33 bp, Homo sapien
aaaggcacagtcatacgaagatccaggcaagag

SEQ ID NO: 345457 - DNA, 33 bp, Homo sapien
ttgccatgtggaagaaatatggctgatgatatc

SEQ ID NO: 345458 - DNA, 33 bp, Homo sapien
ttgccatgtggaagaactatggctgatgatatc

SEQ ID NO: 345459 - DNA, 33 bp, Homo sapien
atatgttagcgtctccaaatgcagcctaccttt

SEQ ID NO: 345460 - DNA, 33 bp, Homo sapien
atatgttagcgtctccgaatgcagcctaccttt

SEQ ID NO: 345461 - DNA, 33 bp, Homo sapien
acttcggataaagtaaaaagtaggctgactagt

SEQ ID NO: 345462 - DNA, 33 bp, Homo sapien
acttcggataaagtaagaagtaggctgactagt

SEQ ID NO: 345463 - DNA, 33 bp, Homo sapien
aaatcatgccgctttacggtttaaactccgcaa

SEQ ID NO: 345464 - DNA, 33 bp, Homo sapien
aaatcatgccgctttagggtttaaactccgcaa

SEQ ID NO: 345465 - DNA, 33 bp, Homo sapien
tgccatgcacaggtaccggatgccttcccacct

SEQ ID NO: 345466 - DNA, 33 bp, Homo sapien
tgccatgcacaggtactggatgccttcccacct

SEQ ID NO: 345467 - DNA, 33 bp, Homo sapien
caaacgaatatcacctaagcctttcttttccaa

SEQ ID NO: 345468 - DNA, 33 bp, Homo sapien
caaacgaatatcacctgagcctttcttttccaa

SEQ ID NO: 345469 - DNA, 33 bp, Homo sapien
ctatttagcacgaagacaaaaccttccactgtc

SEQ ID NO: 345470 - DNA, 33 bp, Homo sapien
ctatttagcacgaagagaaaaccttccactgtc

SEQ ID NO: 345471 - DNA, 33 bp, Homo sapien
ccatcaggagggaagacggtcattaggagagtg

SEQ ID NO: 345472 - DNA, 33 bp, Homo sapien
ccatcaggagggaagatggtcattaggagagtg

SEQ ID NO: 345473 - DNA, 33 bp, Homo sapien
tgtctgctggacatcaccacagaacgtcccttt

SEQ ID NO: 345474 - DNA, 33 bp, Homo sapien
tgtctgctggacatcatcacagaacgtcccttt

SEQ ID NO: 345475 - DNA, 33 bp, Homo sapien
agaacgtccctttgtacagtatcaatgaaacca

SEQ ID NO: 345476 - DNA, 33 bp, Homo sapien
agaacgtccctttgtagagtatcaatgaaacca

SEQ ID NO: 345477 - DNA, 33 bp, Homo sapien
cacatgctaaggtaccacaggaagataagtttg

SEQ ID NO: 345478 - DNA, 33 bp, Homo sapien
cacatgctaaggtaccgcaggaagataagtttg

SEQ ID NO: 345479 - DNA, 33 bp, Homo sapien
gcagtgttccaggtaacagctttggatattttt

SEQ ID NO: 345480 - DNA, 33 bp, Homo sapien
gcagtgttccaggtaagagctttggatattttt

SEQ ID NO: 345481 - DNA, 33 bp, Homo sapien
tcatcccatgtgaaataatgaaaaggaagaagt

SEQ ID NO: 345482 - DNA, 33 bp, Homo sapien
tcatcccatgtgaaatgatgaaaaggaagaagt

SEQ ID NO: 345483 - DNA, 33 bp, Homo sapien
tttaaaaaaattatacaagtagcattcatccta

SEQ ID NO: 345484 - DNA, 33 bp, Homo sapien
tttaaaaaaattatacgagtagcattcatccta

SEQ ID NO: 345485 - DNA, 33 bp, Homo sapien
gtgaaatagaattggtaaaggcacaaagtggct

SEQ ID NO: 345486 - DNA, 33 bp, Homo sapien
gtgaaatagaattggtgaaggcacaaagtggct

SEQ ID NO: 345487 - DNA, 33 bp, Homo sapien
aattacattttctctcaaagtctcagtttacca

SEQ ID NO: 345488 - DNA, 33 bp, Homo sapien
aattacattttctctctaagtctcagtttacca

SEQ ID NO: 345489 - DNA, 33 bp, Homo sapien
agatcccagatgaagacgtgtgaaataaaggca

SEQ ID NO: 345490 - DNA, 33 bp, Homo sapien
agatcccagatgaagatgtgtgaaataaaggca

SEQ ID NO: 345491 - DNA, 33 bp, Homo sapien
tcctgccctggcttcaccaagaattatcttcat

SEQ ID NO: 345492 - DNA, 33 bp, Homo sapien
tcctgccctggcttcagcaagaattatcttcat

SEQ ID NO: 345493 - DNA, 33 bp, Homo sapien
ttgttttgtagccataaactggagcctaaattt

SEQ ID NO: 345494 - DNA, 33 bp, Homo sapien
ttgttttgtagccatagactggagcctaaattt

SEQ ID NO: 345495 - DNA, 33 bp, Homo sapien
aatgcagcttatttaacgtaacatatccaaaat

SEQ ID NO: 345496 - DNA, 33 bp, Homo sapien
aatgcagcttatttaatgtaacatatccaaaat

SEQ ID NO: 345497 - DNA, 33 bp, Homo sapien
cacaattatagtcacacatcagagttacacagg

SEQ ID NO: 345498 - DNA, 33 bp, Homo sapien
cacaattatagtcacagatcagagttacacagg

SEQ ID NO: 345499 - DNA, 33 bp, Homo sapien
caaggtcatctcttcccagactggtgttgaatg

SEQ ID NO: 345500 - DNA, 33 bp, Homo sapien
caaggtcatctcttcctagactggtgttgaatg

SEQ ID NO: 345501 - DNA, 33 bp, Homo sapien
tgtttcttcatgtttaaatgagaggattaaact

SEQ ID NO: 345502 - DNA, 33 bp, Homo sapien
tgtttcttcatgtttatatgagaggattaaact

SEQ ID NO: 345503 - DNA, 33 bp, Homo sapien
tatttttcccccttaaatcagaagcaaatgcta

SEQ ID NO: 345504 - DNA, 33 bp, Homo sapien
tatttttcccccttaagtcagaagcaaatgcta

SEQ ID NO: 345505 - DNA, 33 bp, Homo sapien
tggagggcactgtacaaacaggatggcccttgt

SEQ ID NO: 345506 - DNA, 33 bp, Homo sapien
tggagggcactgtacacacaggatggcccttgt

SEQ ID NO: 345507 - DNA, 33 bp, Homo sapien
cttcccctttgtgagacgcttattggctaatag

SEQ ID NO: 345508 - DNA, 33 bp, Homo sapien
cttcccctttgtgagaggcttattggctaatag

SEQ ID NO: 345509 - DNA, 33 bp, Homo sapien
caggatgattgcgacactcagttccatgtgccc

SEQ ID NO: 345510 - DNA, 33 bp, Homo sapien
caggatgattgcgacagtcagttccatgtgccc

SEQ ID NO: 345511 - DNA, 33 bp, Homo sapien
gtccttatgcccagcacccagggatttgcacta

SEQ ID NO: 345512 - DNA, 33 bp, Homo sapien
gtccttatgcccagcatccagggatttgcacta

SEQ ID NO: 345513 - DNA, 33 bp, Homo sapien
aaaaatggaacaataccgcaaaatgagtgatgc

SEQ ID NO: 345514 - DNA, 33 bp, Homo sapien
aaaaatggaacaatactgcaaaatgagtgatgc

SEQ ID NO: 345515 - DNA, 33 bp, Homo sapien
ctaaatagaaatgctaccgtctgcagtcagaaa

SEQ ID NO: 345516 - DNA, 33 bp, Homo sapien
ctaaatagaaatgctatcgtctgcagtcagaaa

SEQ ID NO: 345517 - DNA, 33 bp, Homo sapien
gattttcagtaacttacgtaccaacctctaagc

SEQ ID NO: 345518 - DNA, 33 bp, Homo sapien
gattttcagtaacttatgtaccaacctctaagc

SEQ ID NO: 345519 - DNA, 33 bp, Homo sapien
agggagcacactggtgaatacgccgggtctgtg

SEQ ID NO: 345520 - DNA, 33 bp, Homo sapien
agggagcacactggtggatacgccgggtctgtg

SEQ ID NO: 345521 - DNA, 33 bp, Homo sapien
cagaagcctcaattcacgtaatgctggtcctgc

SEQ ID NO: 345522 - DNA, 33 bp, Homo sapien
cagaagcctcaattcatgtaatgctggtcctgc

SEQ ID NO: 345523 - DNA, 33 bp, Homo sapien
tggtttaaccagtcaaagtggaaaatagaagca

SEQ ID NO: 345524 - DNA, 33 bp, Homo sapien
tggtttaaccagtcaatgtggaaaatagaagca

SEQ ID NO: 345525 - DNA, 33 bp, Homo sapien
gcaaccaagatcaaacagcaccttaaaggtaga

SEQ ID NO: 345526 - DNA, 33 bp, Homo sapien
gcaaccaagatcaaacggcaccttaaaggtaga

SEQ ID NO: 345527 - DNA, 33 bp, Homo sapien
atcggggttcaaattcgcaaatggcatgaactg

SEQ ID NO: 345528 - DNA, 33 bp, Homo sapien
atcggggttcaaattctcaaatggcatgaactg

SEQ ID NO: 345529 - DNA, 33 bp, Homo sapien
aaaaaacgtttcaacaacttctatcatcagctc

SEQ ID NO: 345530 - DNA, 33 bp, Homo sapien
aaaaaacgtttcaacagcttctatcatcagctc

SEQ ID NO: 345531 - DNA, 33 bp, Homo sapien
tgactgtaattcagcacggagaagcaagggaaa

SEQ ID NO: 345532 - DNA, 33 bp, Homo sapien
tgactgtaattcagcatggagaagcaagggaaa

SEQ ID NO: 345533 - DNA, 33 bp, Homo sapien
tcatgccatcaggggaataaagtcaggcttatg

SEQ ID NO: 345534 - DNA, 33 bp, Homo sapien
tcatgccatcaggggagtaaagtcaggcttatg

SEQ ID NO: 345535 - DNA, 33 bp, Homo sapien
atttaaaaaatgactcactttcctgccttttta

SEQ ID NO: 345536 - DNA, 33 bp, Homo sapien
atttaaaaaatgactctctttcctgccttttta

SEQ ID NO: 345537 - DNA, 33 bp, Homo sapien
acgagtctgttataacaaggtcttcggatgatg

SEQ ID NO: 345538 - DNA, 33 bp, Homo sapien
acgagtctgttataacgaggtcttcggatgatg

SEQ ID NO: 345539 - DNA, 33 bp, Homo sapien
tgttttataactgcaaatggcctcccaggggta

SEQ ID NO: 345540 - DNA, 33 bp, Homo sapien
tgttttataactgcaagtggcctcccaggggta

SEQ ID NO: 345541 - DNA, 33 bp, Homo sapien
cacagccaaacctctaaaatctcccaatcaccc

SEQ ID NO: 345542 - DNA, 33 bp, Homo sapien
cacagccaaacctctacaatctcccaatcaccc

SEQ ID NO: 345543 - DNA, 33 bp, Homo sapien
ctcacataaaactaagacaggctttgaggaagg

SEQ ID NO: 345544 - DNA, 33 bp, Homo sapien
ctcacataaaactaaggcaggctttgaggaagg

SEQ ID NO: 345545 - DNA, 33 bp, Homo sapien
gcaggcacatactgaacgaaaaggaaacaatgt

SEQ ID NO: 345546 - DNA, 33 bp, Homo sapien
gcaggcacatactgaatgaaaaggaaacaatgt

SEQ ID NO: 345547 - DNA, 33 bp, Homo sapien
taggcacaggagagagcctcatgctggtgaacc

SEQ ID NO: 345548 - DNA, 33 bp, Homo sapien
taggcacaggagagaggctcatgctggtgaacc

SEQ ID NO: 345549 - DNA, 33 bp, Homo sapien
tgcttgtgaacttataccagagcacactggata

SEQ ID NO: 345550 - DNA, 33 bp, Homo sapien
tgcttgtgaacttatatcagagcacactggata

SEQ ID NO: 345551 - DNA, 33 bp, Homo sapien
tctacaaggctactgcagaagttaaagcacatg

SEQ ID NO: 345552 - DNA, 33 bp, Homo sapien
tctacaaggctactgcggaagttaaagcacatg

SEQ ID NO: 345553 - DNA, 33 bp, Homo sapien
ctgtgttttcctggcaactaattttgtagatga

SEQ ID NO: 345554 - DNA, 33 bp, Homo sapien
ctgtgttttcctggcagctaattttgtagatga

SEQ ID NO: 345555 - DNA, 33 bp, Homo sapien
caggtttatcttcataagctggcaaggagattc

SEQ ID NO: 345556 - DNA, 33 bp, Homo sapien
caggtttatcttcatatgctggcaaggagattc

SEQ ID NO: 345557 - DNA, 33 bp, Homo sapien
ctgcttgtttctaatacgcccatcaaccaaagc

SEQ ID NO: 345558 - DNA, 33 bp, Homo sapien
ctgcttgtttctaatatgcccatcaaccaaagc

SEQ ID NO: 345559 - DNA, 33 bp, Homo sapien
tattttctctttttaaggtgaaggaacaatagc

SEQ ID NO: 345560 - DNA, 33 bp, Homo sapien
tattttctctttttaatgtgaaggaacaatagc

SEQ ID NO: 345561 - DNA, 33 bp, Homo sapien
gaatgtgtatagcttaccctcaaatctcaaaac

SEQ ID NO: 345562 - DNA, 33 bp, Homo sapien
gaatgtgtatagcttatcctcaaatctcaaaac

SEQ ID NO: 345563 - DNA, 33 bp, Homo sapien
tttcacatgacaagaggaactcagccttaacac

SEQ ID NO: 345564 - DNA, 33 bp, Homo sapien
tttcacatgacaagagtaactcagccttaacac

SEQ ID NO: 345565 - DNA, 33 bp, Homo sapien
cgcctcacctgttgccactagcatttgcacact

SEQ ID NO: 345566 - DNA, 33 bp, Homo sapien
cgcctcacctgttgccgctagcatttgcacact

SEQ ID NO: 345567 - DNA, 33 bp, Homo sapien
acagcttcagagatacaagactgctgaggctca

SEQ ID NO: 345568 - DNA, 33 bp, Homo sapien
acagcttcagagatacgagactgctgaggctca

SEQ ID NO: 345569 - DNA, 33 bp, Homo sapien
ctgacaaaatgtgaaaaggtaactgctgtctta

SEQ ID NO: 345570 - DNA, 33 bp, Homo sapien
ctgacaaaatgtgaaagggtaactgctgtctta

SEQ ID NO: 345571 - DNA, 33 bp, Homo sapien
aactataactcatcaaatatgttcctctaaaaa

SEQ ID NO: 345572 - DNA, 33 bp, Homo sapien
aactataactcatcaagtatgttcctctaaaaa

SEQ ID NO: 345573 - DNA, 33 bp, Homo sapien
gtgactctgtctatagaaacaattcctagaaat

SEQ ID NO: 345574 - DNA, 33 bp, Homo sapien
gtgactctgtctataggaacaattcctagaaat

SEQ ID NO: 345575 - DNA, 33 bp, Homo sapien
aaaggaaatctgaacaggaatttgagataccta

SEQ ID NO: 345576 - DNA, 33 bp, Homo sapien
aaaggaaatctgaacatgaatttgagataccta

SEQ ID NO: 345577 - DNA, 33 bp, Homo sapien
attcccaatttacagacatggacacagaatgca

SEQ ID NO: 345578 - DNA, 33 bp, Homo sapien
attcccaatttacagatatggacacagaatgca

SEQ ID NO: 345579 - DNA, 33 bp, Homo sapien
agaccttcagtaacacaaacaatcacaataggt

SEQ ID NO: 345580 - DNA, 33 bp, Homo sapien
agaccttcagtaacacgaacaatcacaataggt

SEQ ID NO: 345581 - DNA, 33 bp, Homo sapien
tcctgcccagctatcaatgaaaagaagctacta

SEQ ID NO: 345582 - DNA, 33 bp, Homo sapien
tcctgcccagctatcagtgaaaagaagctacta

SEQ ID NO: 345583 - DNA, 33 bp, Homo sapien
atggaaatctgggaagaatgtttctggggcaag

SEQ ID NO: 345584 - DNA, 33 bp, Homo sapien
atggaaatctgggaaggatgtttctggggcaag

SEQ ID NO: 345585 - DNA, 33 bp, Homo sapien
agaaggattgtggatcccatatgaagtctcaac

SEQ ID NO: 345586 - DNA, 33 bp, Homo sapien
agaaggattgtggatctcatatgaagtctcaac

SEQ ID NO: 345587 - DNA, 33 bp, Homo sapien
catttatttctccaaaaagattgttgcctgcat

SEQ ID NO: 345588 - DNA, 33 bp, Homo sapien
catttatttctccaaagagattgttgcctgcat

SEQ ID NO: 345589 - DNA, 33 bp, Homo sapien
tccagtatgtggaagacaaatgtagcaaacgta

SEQ ID NO: 345590 - DNA, 33 bp, Homo sapien
tccagtatgtggaagagaaatgtagcaaacgta

SEQ ID NO: 345591 - DNA, 33 bp, Homo sapien
taatgcttagttaggtaaagcagagccatttgg

SEQ ID NO: 345592 - DNA, 33 bp, Homo sapien
taatgcttagttaggtgaagcagagccatttgg

SEQ ID NO: 345593 - DNA, 33 bp, Homo sapien
gcaaatggaagcgtaactggggctggatagtgc

SEQ ID NO: 345594 - DNA, 33 bp, Homo sapien
gcaaatggaagcgtaattggggctggatagtgc

SEQ ID NO: 345595 - DNA, 33 bp, Homo sapien
aaaatagtttcaggcaacccattcaggtcttca

SEQ ID NO: 345596 - DNA, 33 bp, Homo sapien
aaaatagtttcaggcatcccattcaggtcttca

SEQ ID NO: 345597 - DNA, 33 bp, Homo sapien
atgtttattgcatactcactatgttccagagac

SEQ ID NO: 345598 - DNA, 33 bp, Homo sapien
atgtttattgcatacttactatgttccagagac

SEQ ID NO: 345599 - DNA, 33 bp, Homo sapien
gctctcatgtagaaaacgatggtaataccacct

SEQ ID NO: 345600 - DNA, 33 bp, Homo sapien
gctctcatgtagaaaatgatggtaataccacct

SEQ ID NO: 345601 - DNA, 33 bp, Homo sapien
ttggtgttccttctgcaaaccgccctactgtca

SEQ ID NO: 345602 - DNA, 33 bp, Homo sapien
ttggtgttccttctgcgaaccgccctactgtca

SEQ ID NO: 345603 - DNA, 33 bp, Homo sapien
ctgaccatctgatgtacaggaaatggaaactac

SEQ ID NO: 345604 - DNA, 33 bp, Homo sapien
ctgaccatctgatgtataggaaatggaaactac

SEQ ID NO: 345605 - DNA, 33 bp, Homo sapien
cagaactccttccatcacttcacagaaggtgcg

SEQ ID NO: 345606 - DNA, 33 bp, Homo sapien
cagaactccttccatcgcttcacagaaggtgcg

SEQ ID NO: 345607 - DNA, 33 bp, Homo sapien
tcagtatttctaagcacgcatttctggaaaccc

SEQ ID NO: 345608 - DNA, 33 bp, Homo sapien
tcagtatttctaagcaggcatttctggaaaccc

SEQ ID NO: 345609 - DNA, 33 bp, Homo sapien
gagtgtgcagaccactcaaattacaaacatatt

SEQ ID NO: 345610 - DNA, 33 bp, Homo sapien
gagtgtgcagaccactgaaattacaaacatatt

SEQ ID NO: 345611 - DNA, 33 bp, Homo sapien
attttataaaccatcagattttcagaacagatg

SEQ ID NO: 345612 - DNA, 33 bp, Homo sapien
attttataaaccatcatattttcagaacagatg

SEQ ID NO: 345613 - DNA, 33 bp, Homo sapien
gactctggttgtcagaaagttccagtgagaccc

SEQ ID NO: 345614 - DNA, 33 bp, Homo sapien
gactctggttgtcagagagttccagtgagaccc

SEQ ID NO: 345615 - DNA, 33 bp, Homo sapien
aacgtatttaggctctcaatttccactaccctg

SEQ ID NO: 345616 - DNA, 33 bp, Homo sapien
aacgtatttaggctctgaatttccactaccctg

SEQ ID NO: 345617 - DNA, 33 bp, Homo sapien
atagagacacttgtacaacccaagaaacacagt

SEQ ID NO: 345618 - DNA, 33 bp, Homo sapien
atagagacacttgtacgacccaagaaacacagt

SEQ ID NO: 345619 - DNA, 33 bp, Homo sapien
gcatctttcgtattcacagtacacagcacacgc

SEQ ID NO: 345620 - DNA, 33 bp, Homo sapien
gcatctttcgtattcatagtacacagcacacgc

SEQ ID NO: 345621 - DNA, 33 bp, Homo sapien
tttctgaggttctagactaccagatggtggtgt

SEQ ID NO: 345622 - DNA, 33 bp, Homo sapien
tttctgaggttctagattaccagatggtggtgt

SEQ ID NO: 345623 - DNA, 33 bp, Homo sapien
taattggcattgtgatcaggttgttttatttct

SEQ ID NO: 345624 - DNA, 33 bp, Homo sapien
taattggcattgtgattaggttgttttatttct

SEQ ID NO: 345625 - DNA, 33 bp, Homo sapien
ctcaagactagagtagacctgatcgtgcaattg

SEQ ID NO: 345626 - DNA, 33 bp, Homo sapien
ctcaagactagagtaggcctgatcgtgcaattg

SEQ ID NO: 345627 - DNA, 33 bp, Homo sapien
agactaggctcatacccggaaaataactatcag

SEQ ID NO: 345628 - DNA, 33 bp, Homo sapien
agactaggctcatacctggaaaataactatcag

SEQ ID NO: 345629 - DNA, 33 bp, Homo sapien
ccctcttgaagctcccagactcctgtttgttac

SEQ ID NO: 345630 - DNA, 33 bp, Homo sapien
ccctcttgaagctcccggactcctgtttgttac

SEQ ID NO: 345631 - DNA, 33 bp, Homo sapien
ggaatgtttgtgtgacagggatattatatctga

SEQ ID NO: 345632 - DNA, 33 bp, Homo sapien
ggaatgtttgtgtgacggggatattatatctga

SEQ ID NO: 345633 - DNA, 33 bp, Homo sapien
taaagggaattggcagccgtgtttattgactct

SEQ ID NO: 345634 - DNA, 33 bp, Homo sapien
taaagggaattggcaggcgtgtttattgactct

SEQ ID NO: 345635 - DNA, 33 bp, Homo sapien
agtccagggtaagaagcagccagagaatcagtg

SEQ ID NO: 345636 - DNA, 33 bp, Homo sapien
agtccagggtaagaaggagccagagaatcagtg

SEQ ID NO: 345637 - DNA, 33 bp, Homo sapien
cagaaggatcatctcacctaaccccaacaatgt

SEQ ID NO: 345638 - DNA, 33 bp, Homo sapien
cagaaggatcatctcatctaaccccaacaatgt

SEQ ID NO: 345639 - DNA, 33 bp, Homo sapien
aaagatgattgtttcacaaaatatagtagagag

SEQ ID NO: 345640 - DNA, 33 bp, Homo sapien
aaagatgattgtttcagaaaatatagtagagag

SEQ ID NO: 345641 - DNA, 33 bp, Homo sapien
ttgtcattcaatctctaagaatttgtatacata

SEQ ID NO: 345642 - DNA, 33 bp, Homo sapien
ttgtcattcaatctctcagaatttgtatacata

SEQ ID NO: 345643 - DNA, 33 bp, Homo sapien
cagccccttctgtctccaggatcagtgtcctgc

SEQ ID NO: 345644 - DNA, 33 bp, Homo sapien
cagccccttctgtctctaggatcagtgtcctgc

SEQ ID NO: 345645 - DNA, 33 bp, Homo sapien
cctcatggtaaaataggatagttgtaggataaa

SEQ ID NO: 345646 - DNA, 33 bp, Homo sapien
cctcatggtaaaatagtatagttgtaggataaa

SEQ ID NO: 345647 - DNA, 33 bp, Homo sapien
tatcaatcacttgaaaatgtctgttattcaata

SEQ ID NO: 345648 - DNA, 33 bp, Homo sapien
tatcaatcacttgaaattgtctgttattcaata

SEQ ID NO: 345649 - DNA, 33 bp, Homo sapien
ataaaactgctaaggagctgtactttattttat

SEQ ID NO: 345650 - DNA, 33 bp, Homo sapien
ataaaactgctaaggatctgtactttattttat

SEQ ID NO: 345651 - DNA, 33 bp, Homo sapien
accagagtggggcttaaacaagtggaataaggc

SEQ ID NO: 345652 - DNA, 33 bp, Homo sapien
accagagtggggcttagacaagtggaataaggc

SEQ ID NO: 345653 - DNA, 33 bp, Homo sapien
acagtagattgaataaacgtatgacagaatatt

SEQ ID NO: 345654 - DNA, 33 bp, Homo sapien
acagtagattgaataaccgtatgacagaatatt

SEQ ID NO: 345655 - DNA, 33 bp, Homo sapien
gtcccagatcgtaaaaagatcccaggagatgag

SEQ ID NO: 345656 - DNA, 33 bp, Homo sapien
gtcccagatcgtaaaaggatcccaggagatgag

SEQ ID NO: 345657 - DNA, 33 bp, Homo sapien
ccttatgttagtctcacaatagctggtctagtc

SEQ ID NO: 345658 - DNA, 33 bp, Homo sapien
ccttatgttagtctcataatagctggtctagtc

SEQ ID NO: 345659 - DNA, 33 bp, Homo sapien
cactccaacttggagacagaatggactccattt

SEQ ID NO: 345660 - DNA, 33 bp, Homo sapien
cactccaacttggagagagaatggactccattt

SEQ ID NO: 345661 - DNA, 33 bp, Homo sapien
cacaactcatcatcaaacttactcaagtctcac

SEQ ID NO: 345662 - DNA, 33 bp, Homo sapien
cacaactcatcatcaagcttactcaagtctcac

SEQ ID NO: 345663 - DNA, 33 bp, Homo sapien
ctagcaatggtagtaacagttgaattagcccca

SEQ ID NO: 345664 - DNA, 33 bp, Homo sapien
ctagcaatggtagtaagagttgaattagcccca

SEQ ID NO: 345665 - DNA, 33 bp, Homo sapien
ttattattgggtgtccactattattgggtgtgc

SEQ ID NO: 345666 - DNA, 33 bp, Homo sapien
ttattattgggtgtcctctattattgggtgtgc

SEQ ID NO: 345667 - DNA, 33 bp, Homo sapien
ccaatcatgattgccccaaatggctctcactct

SEQ ID NO: 345668 - DNA, 33 bp, Homo sapien
ccaatcatgattgccctaaatggctctcactct

SEQ ID NO: 345669 - DNA, 33 bp, Homo sapien
catttttctgaaatcaaatcctaagctcctcca

SEQ ID NO: 345670 - DNA, 33 bp, Homo sapien
catttttctgaaatcagatcctaagctcctcca

SEQ ID NO: 345671 - DNA, 33 bp, Homo sapien
aaagtagatgttagcacgagccctattttatga

SEQ ID NO: 345672 - DNA, 33 bp, Homo sapien
aaagtagatgttagcatgagccctattttatga

SEQ ID NO: 345673 - DNA, 33 bp, Homo sapien
aagctggcagaccacacagtcaataggcaatta

SEQ ID NO: 345674 - DNA, 33 bp, Homo sapien
aagctggcagaccacatagtcaataggcaatta

SEQ ID NO: 345675 - DNA, 33 bp, Homo sapien
cttgcttggacagtcagaagcactgagttattc

SEQ ID NO: 345676 - DNA, 33 bp, Homo sapien
cttgcttggacagtcataagcactgagttattc

SEQ ID NO: 345677 - DNA, 33 bp, Homo sapien
agaatcctgttacctacgtttaaaatgatggat

SEQ ID NO: 345678 - DNA, 33 bp, Homo sapien
agaatcctgttacctatgtttaaaatgatggat

SEQ ID NO: 345679 - DNA, 33 bp, Homo sapien
tcctttgttttccaagccctgagcactgagatt

SEQ ID NO: 345680 - DNA, 33 bp, Homo sapien
tcctttgttttccaaggcctgagcactgagatt

SEQ ID NO: 345681 - DNA, 33 bp, Homo sapien
cctcttgtctgacataggcacatgaggagtttc

SEQ ID NO: 345682 - DNA, 33 bp, Homo sapien
cctcttgtctgacatatgcacatgaggagtttc

SEQ ID NO: 345683 - DNA, 33 bp, Homo sapien
attaaagacttgcccaatggaagaagaaggctt

SEQ ID NO: 345684 - DNA, 33 bp, Homo sapien
attaaagacttgcccagtggaagaagaaggctt

SEQ ID NO: 345685 - DNA, 33 bp, Homo sapien
tgggataaactctgtgaacaaatttgaagtctc

SEQ ID NO: 345686 - DNA, 33 bp, Homo sapien
tgggataaactctgtggacaaatttgaagtctc

SEQ ID NO: 345687 - DNA, 33 bp, Homo sapien
taggttcactcagtagccatttgatgggattac

SEQ ID NO: 345688 - DNA, 33 bp, Homo sapien
taggttcactcagtagtcatttgatgggattac

SEQ ID NO: 345689 - DNA, 33 bp, Homo sapien
ggcggaagaatcaagaaggtcaatggggctatg

SEQ ID NO: 345690 - DNA, 33 bp, Homo sapien
ggcggaagaatcaagagggtcaatggggctatg

SEQ ID NO: 345691 - DNA, 33 bp, Homo sapien
ctgattgactctgttaagattgtctgagatgtc

SEQ ID NO: 345692 - DNA, 33 bp, Homo sapien
ctgattgactctgttacgattgtctgagatgtc

SEQ ID NO: 345693 - DNA, 33 bp, Homo sapien
ctcttcggcctgtaataaaaaaggctaaaagtg

SEQ ID NO: 345694 - DNA, 33 bp, Homo sapien
ctcttcggcctgtaatgaaaaaggctaaaagtg

SEQ ID NO: 345695 - DNA, 33 bp, Homo sapien
ctttggttttggacagaaaatctcccctcctag

SEQ ID NO: 345696 - DNA, 33 bp, Homo sapien
ctttggttttggacagcaaatctcccctcctag

SEQ ID NO: 345697 - DNA, 33 bp, Homo sapien
agttcaccataaaataccttccttccaaactgg

SEQ ID NO: 345698 - DNA, 33 bp, Homo sapien
agttcaccataaaatatcttccttccaaactgg

SEQ ID NO: 345699 - DNA, 33 bp, Homo sapien
tttacaatctcttcaccgtatctccaggtaaaa

SEQ ID NO: 345700 - DNA, 33 bp, Homo sapien
tttacaatctcttcactgtatctccaggtaaaa

SEQ ID NO: 345701 - DNA, 33 bp, Homo sapien
gactattgaacactccgcatttgtaggacttga

SEQ ID NO: 345702 - DNA, 33 bp, Homo sapien
gactattgaacactcctcatttgtaggacttga

SEQ ID NO: 345703 - DNA, 33 bp, Homo sapien
aggttgccaaatttcacgcattctagaaaccaa

SEQ ID NO: 345704 - DNA, 33 bp, Homo sapien
aggttgccaaatttcatgcattctagaaaccaa

SEQ ID NO: 345705 - DNA, 33 bp, Homo sapien
agagttattggtgttccatgagttccatacttc

SEQ ID NO: 345706 - DNA, 33 bp, Homo sapien
agagttattggtgttctatgagttccatacttc

SEQ ID NO: 345707 - DNA, 33 bp, Homo sapien
tgggaatgaggggggaaaaacgagactggcatc

SEQ ID NO: 345708 - DNA, 33 bp, Homo sapien
tgggaatgaggggggagaaacgagactggcatc

SEQ ID NO: 345709 - DNA, 33 bp, Homo sapien
cattctggagtcttagacatttaaggctgtatg

SEQ ID NO: 345710 - DNA, 33 bp, Homo sapien
cattctggagtcttaggcatttaaggctgtatg

SEQ ID NO: 345711 - DNA, 33 bp, Homo sapien
actacatatctatttacaccagtttggcccctt

SEQ ID NO: 345712 - DNA, 33 bp, Homo sapien
actacatatctatttataccagtttggcccctt

SEQ ID NO: 345713 - DNA, 33 bp, Homo sapien
cctctgctctaagctaaggcaactttgttagga

SEQ ID NO: 345714 - DNA, 33 bp, Homo sapien
cctctgctctaagctagggcaactttgttagga

SEQ ID NO: 345715 - DNA, 33 bp, Homo sapien
gatgataaagcatctaagagcataccattcttc

SEQ ID NO: 345716 - DNA, 33 bp, Homo sapien
gatgataaagcatctaggagcataccattcttc

SEQ ID NO: 345717 - DNA, 33 bp, Homo sapien
tcaataactttctgaactggttaactcaaagga

SEQ ID NO: 345718 - DNA, 33 bp, Homo sapien
tcaataactttctgaattggttaactcaaagga

SEQ ID NO: 345719 - DNA, 33 bp, Homo sapien
agaggaaatgaacagacatttgattcttataac

SEQ ID NO: 345720 - DNA, 33 bp, Homo sapien
agaggaaatgaacagatatttgattcttataac

SEQ ID NO: 345721 - DNA, 33 bp, Homo sapien
tcctcttgtagcaaagaaagagcaagcaagctc

SEQ ID NO: 345722 - DNA, 33 bp, Homo sapien
tcctcttgtagcaaaggaagagcaagcaagctc

SEQ ID NO: 345723 - DNA, 33 bp, Homo sapien
tagtcttcccagaaacagagtggttaacaacag

SEQ ID NO: 345724 - DNA, 33 bp, Homo sapien
tagtcttcccagaaacggagtggttaacaacag

SEQ ID NO: 345725 - DNA, 33 bp, Homo sapien
tccacatctagggcacaaaacgtgttcttggct

SEQ ID NO: 345726 - DNA, 33 bp, Homo sapien
tccacatctagggcacgaaacgtgttcttggct

SEQ ID NO: 345727 - DNA, 33 bp, Homo sapien
cacaatccaggccagacgtgataatggcctaaa

SEQ ID NO: 345728 - DNA, 33 bp, Homo sapien
cacaatccaggccagaggtgataatggcctaaa

SEQ ID NO: 345729 - DNA, 33 bp, Homo sapien
agttatcttctcttccccagattcattcttgcc

SEQ ID NO: 345730 - DNA, 33 bp, Homo sapien
agttatcttctcttccgcagattcattcttgcc

SEQ ID NO: 345731 - DNA, 33 bp, Homo sapien
aggttgcaaggaaagcagagtctcttctttgca

SEQ ID NO: 345732 - DNA, 33 bp, Homo sapien
aggttgcaaggaaagcggagtctcttctttgca

SEQ ID NO: 345733 - DNA, 33 bp, Homo sapien
catcaggcttagacaacgtagaatgaaacacat

SEQ ID NO: 345734 - DNA, 33 bp, Homo sapien
catcaggcttagacaatgtagaatgaaacacat

SEQ ID NO: 345735 - DNA, 33 bp, Homo sapien
ctggctttccctggtacctctctgttcaggcac

SEQ ID NO: 345736 - DNA, 33 bp, Homo sapien
ctggctttccctggtatctctctgttcaggcac

SEQ ID NO: 345737 - DNA, 33 bp, Homo sapien
agtaaagtaagaaatccgaagatgtagaatcca

SEQ ID NO: 345738 - DNA, 33 bp, Homo sapien
agtaaagtaagaaatcggaagatgtagaatcca

SEQ ID NO: 345739 - DNA, 33 bp, Homo sapien
agagacaagaaagggactcacggtgcctgaaag

SEQ ID NO: 345740 - DNA, 33 bp, Homo sapien
agagacaagaaagggattcacggtgcctgaaag

SEQ ID NO: 345741 - DNA, 33 bp, Homo sapien
gattacattttgcttcaagtgcctcagggctca

SEQ ID NO: 345742 - DNA, 33 bp, Homo sapien
gattacattttgcttcgagtgcctcagggctca

SEQ ID NO: 345743 - DNA, 33 bp, Homo sapien
gtaaatatatttagagaatccaaactccgtgca

SEQ ID NO: 345744 - DNA, 33 bp, Homo sapien
gtaaatatatttagaggatccaaactccgtgca

SEQ ID NO: 345745 - DNA, 33 bp, Homo sapien
ccttttttcattttccagatatttccaaatatt

SEQ ID NO: 345746 - DNA, 33 bp, Homo sapien
ccttttttcattttccggatatttccaaatatt

SEQ ID NO: 345747 - DNA, 33 bp, Homo sapien
atgaatctcttgataccctctcccagaccctaa

SEQ ID NO: 345748 - DNA, 33 bp, Homo sapien
atgaatctcttgatacgctctcccagaccctaa

SEQ ID NO: 345749 - DNA, 33 bp, Homo sapien
catcaaagccttcccaatgagtcttgactatag

SEQ ID NO: 345750 - DNA, 33 bp, Homo sapien
catcaaagccttcccagtgagtcttgactatag

SEQ ID NO: 345751 - DNA, 33 bp, Homo sapien
ggatgcagatacattacaagtcaaagggacaga

SEQ ID NO: 345752 - DNA, 33 bp, Homo sapien
ggatgcagatacattagaagtcaaagggacaga

SEQ ID NO: 345753 - DNA, 33 bp, Homo sapien
ttttaacaagctcctcaatgatttatttgcaca

SEQ ID NO: 345754 - DNA, 33 bp, Homo sapien
ttttaacaagctcctcgatgatttatttgcaca

SEQ ID NO: 345755 - DNA, 33 bp, Homo sapien
aatgtgtcagtctctaccattgttttgtttttt

SEQ ID NO: 345756 - DNA, 33 bp, Homo sapien
aatgtgtcagtctctatcattgttttgtttttt

SEQ ID NO: 345757 - DNA, 33 bp, Homo sapien
cgttaaactctacaaactgtttcttgaaagcat

SEQ ID NO: 345758 - DNA, 33 bp, Homo sapien
cgttaaactctacaaattgtttcttgaaagcat

SEQ ID NO: 345759 - DNA, 33 bp, Homo sapien
gaagaggcaatgtagcaatggatgcatccgcta

SEQ ID NO: 345760 - DNA, 33 bp, Homo sapien
gaagaggcaatgtagccatggatgcatccgcta

SEQ ID NO: 345761 - DNA, 33 bp, Homo sapien
tcttttctttataccaactacttagcttccaag

SEQ ID NO: 345762 - DNA, 33 bp, Homo sapien
tcttttctttataccatctacttagcttccaag

SEQ ID NO: 345763 - DNA, 33 bp, Homo sapien
atcgaaaggttctagaataagacaatgatttag

SEQ ID NO: 345764 - DNA, 33 bp, Homo sapien
atcgaaaggttctagagtaagacaatgatttag

SEQ ID NO: 345765 - DNA, 33 bp, Homo sapien
gggaaaatttgcatataaagattgtccaatgag

SEQ ID NO: 345766 - DNA, 33 bp, Homo sapien
gggaaaatttgcatattaagattgtccaatgag

SEQ ID NO: 345767 - DNA, 33 bp, Homo sapien
tacgaaaaatacaaacaaatcagccaagcatgg

SEQ ID NO: 345768 - DNA, 33 bp, Homo sapien
tacgaaaaatacaaacgaatcagccaagcatgg

SEQ ID NO: 345769 - DNA, 33 bp, Homo sapien; identical to SEQ ID NO: 345767

SEQ ID NO: 345770 - DNA, 33 bp, Homo sapien; identical to SEQ ID NO: 345768

SEQ ID NO: 345771 - DNA, 33 bp, Homo sapien
tctgttagaaggtcaacggaaccactaggtaga

SEQ ID NO: 345772 - DNA, 33 bp, Homo sapien
tctgttagaaggtcaatggaaccactaggtaga

SEQ ID NO: 345773 - DNA, 33 bp, Homo sapien
ctcctggagccaagaacaaaacacaagtgatcc

SEQ ID NO: 345774 - DNA, 33 bp, Homo sapien
ctcctggagccaagaagaaaacacaagtgatcc

SEQ ID NO: 345775 - DNA, 33 bp, Homo sapien
gtaaggtgaaaaaatacagatcctgaggctata

SEQ ID NO: 345776 - DNA, 33 bp, Homo sapien
gtaaggtgaaaaaatatagatcctgaggctata

SEQ ID NO: 345777 - DNA, 33 bp, Homo sapien
gggactagcacctttgaaagggagaaggcatca

SEQ ID NO: 345778 - DNA, 33 bp, Homo sapien
gggactagcacctttggaagggagaaggcatca

SEQ ID NO: 345779 - DNA, 33 bp, Homo sapien
agatgctgatctgtgagtaagtcccagtgaaag

SEQ ID NO: 345780 - DNA, 33 bp, Homo sapien
agatgctgatctgtgattaagtcccagtgaaag

SEQ ID NO: 345781 - DNA, 33 bp, Homo sapien
ctgatgaatggagccaaaatttcagcccatggt

SEQ ID NO: 345782 - DNA, 33 bp, Homo sapien
ctgatgaatggagccacaatttcagcccatggt

SEQ ID NO: 345783 - DNA, 33 bp, Homo sapien
gagaattggttgagtacctactgtgcttggcac

SEQ ID NO: 345784 - DNA, 33 bp, Homo sapien
gagaattggttgagtatctactgtgcttggcac

SEQ ID NO: 345785 - DNA, 33 bp, Homo sapien
atcctgagttgattacaagagcaaccaaacaag

SEQ ID NO: 345786 - DNA, 33 bp, Homo sapien
atcctgagttgattactagagcaaccaaacaag

SEQ ID NO: 345787 - DNA, 33 bp, Homo sapien
tgttcagcaactgccaaaccaacctgggccaaa

SEQ ID NO: 345788 - DNA, 33 bp, Homo sapien
tgttcagcaactgccagaccaacctgggccaaa

SEQ ID NO: 345789 - DNA, 33 bp, Homo sapien
aaggcgatactgggcacatccatgttaggacag

SEQ ID NO: 345790 - DNA, 33 bp, Homo sapien
aaggcgatactgggcagatccatgttaggacag

SEQ ID NO: 345791 - DNA, 33 bp, Homo sapien
tgttgaagtaaaaggaagagtcacatgtctctc

SEQ ID NO: 345792 - DNA, 33 bp, Homo sapien
tgttgaagtaaaaggaggagtcacatgtctctc

SEQ ID NO: 345793 - DNA, 33 bp, Homo sapien
tattgaaaaagtaatacacgcatggtagaaaat

SEQ ID NO: 345794 - DNA, 33 bp, Homo sapien
tattgaaaaagtaatatacgcatggtagaaaat

SEQ ID NO: 345795 - DNA, 33 bp, Homo sapien
agtatctgtgaactagaagaaagaactaaaaaa

SEQ ID NO: 345796 - DNA, 33 bp, Homo sapien
agtatctgtgaactaggagaaagaactaaaaaa

SEQ ID NO: 345797 - DNA, 33 bp, Homo sapien
gcccctggccatcaccaatctattcttcttcca

SEQ ID NO: 345798 - DNA, 33 bp, Homo sapien
gcccctggccatcaccgatctattcttcttcca

SEQ ID NO: 345799 - DNA, 33 bp, Homo sapien
ttggaagaggggtctaagaaattaatgttgaag

SEQ ID NO: 345800 - DNA, 33 bp, Homo sapien
ttggaagaggggtctaggaaattaatgttgaag

SEQ ID NO: 345801 - DNA, 33 bp, Homo sapien
gcttctgaggctttacactgttggctaaagatg

SEQ ID NO: 345802 - DNA, 33 bp, Homo sapien
gcttctgaggctttactctgttggctaaagatg

SEQ ID NO: 345803 - DNA, 33 bp, Homo sapien
cagatgagcgtgaaccggcccggcaaagcccaa

SEQ ID NO: 345804 - DNA, 33 bp, Homo sapien
cagatgagcgtgaacctgcccggcaaagcccaa

SEQ ID NO: 345805 - DNA, 33 bp, Homo sapien
cttcactgggagcggaccagattgctggataca

SEQ ID NO: 345806 - DNA, 33 bp, Homo sapien
cttcactgggagcggatcagattgctggataca

SEQ ID NO: 345807 - DNA, 33 bp, Homo sapien
ttttatttagtatgtacacagaaactctaaatt

SEQ ID NO: 345808 - DNA, 33 bp, Homo sapien
ttttatttagtatgtagacagaaactctaaatt

SEQ ID NO: 345809 - DNA, 33 bp, Homo sapien
tgtgccaggcgttgaaccaggcattgggtgttc

SEQ ID NO: 345810 - DNA, 33 bp, Homo sapien
tgtgccaggcgttgaatcaggcattgggtgttc

SEQ ID NO: 345811 - DNA, 33 bp, Homo sapien
atgaaccagtgtacaaatcaataatccatgtct

SEQ ID NO: 345812 - DNA, 33 bp, Homo sapien
atgaaccagtgtacaagtcaataatccatgtct

SEQ ID NO: 345813 - DNA, 33 bp, Homo sapien
tcaacctagattcccacgggcacctcaaatgca

SEQ ID NO: 345814 - DNA, 33 bp, Homo sapien
tcaacctagattcccatgggcacctcaaatgca

SEQ ID NO: 345815 - DNA, 33 bp, Homo sapien
cctctatcaaagtacaagccataattttgaggg

SEQ ID NO: 345816 - DNA, 33 bp, Homo sapien
cctctatcaaagtacaggccataattttgaggg

SEQ ID NO: 345817 - DNA, 33 bp, Homo sapien
tatattcattgaatacacaggttgataaaatag

SEQ ID NO: 345818 - DNA, 33 bp, Homo sapien
tatattcattgaatacccaggttgataaaatag

SEQ ID NO: 345819 - DNA, 33 bp, Homo sapien
ctaaaagatcagtcaaatccctgctcaaaccca

SEQ ID NO: 345820 - DNA, 33 bp, Homo sapien
ctaaaagatcagtcaactccctgctcaaaccca

SEQ ID NO: 345821 - DNA, 33 bp, Homo sapien
agttttaaactcaaccagctcaactcaatcaac

SEQ ID NO: 345822 - DNA, 33 bp, Homo sapien
agttttaaactcaaccggctcaactcaatcaac

SEQ ID NO: 345823 - DNA, 33 bp, Homo sapien
tgtataaaattacacactgagaaaagaggacat

SEQ ID NO: 345824 - DNA, 33 bp, Homo sapien
tgtataaaattacacattgagaaaagaggacat

SEQ ID NO: 345825 - DNA, 33 bp, Homo sapien
tcactaggcaaagagacggagtagtagctaggt

SEQ ID NO: 345826 - DNA, 33 bp, Homo sapien
tcactaggcaaagagatggagtagtagctaggt

SEQ ID NO: 345827 - DNA, 33 bp, Homo sapien
tgatctgagttcttccaacgtttagtatcaata

SEQ ID NO: 345828 - DNA, 33 bp, Homo sapien
tgatctgagttcttccgacgtttagtatcaata

SEQ ID NO: 345829 - DNA, 33 bp, Homo sapien
cgtgcttcaggcagagcaaacagccaatgcaaa

SEQ ID NO: 345830 - DNA, 33 bp, Homo sapien
cgtgcttcaggcagagtaaacagccaatgcaaa

SEQ ID NO: 345831 - DNA, 33 bp, Homo sapien
cacctgaaagaagaaagtgtgccgactccaata

SEQ ID NO: 345832 - DNA, 33 bp, Homo sapien
cacctgaaagaagaaattgtgccgactccaata

SEQ ID NO: 345833 - DNA, 33 bp, Homo sapien
taagaccaaacaggccaagcaacaagcctggct

SEQ ID NO: 345834 - DNA, 33 bp, Homo sapien
taagaccaaacaggccgagcaacaagcctggct

SEQ ID NO: 345835 - DNA, 33 bp, Homo sapien
aagctatgcagttaggcatacagtcatattaat

SEQ ID NO: 345836 - DNA, 33 bp, Homo sapien
aagctatgcagttaggtatacagtcatattaat

SEQ ID NO: 345837 - DNA, 33 bp, Homo sapien
gaggcagatgctaaccaaaatagcaagagttac

SEQ ID NO: 345838 - DNA, 33 bp, Homo sapien
gaggcagatgctaaccgaaatagcaagagttac

SEQ ID NO: 345839 - DNA, 33 bp, Homo sapien
attggagtccttcagacgaggttgtgctccttg

SEQ ID NO: 345840 - DNA, 33 bp, Homo sapien
attggagtccttcagaggaggttgtgctccttg

SEQ ID NO: 345841 - DNA, 33 bp, Homo sapien
agctcatccttggaacacaatcattttctgtgt

SEQ ID NO: 345842 - DNA, 33 bp, Homo sapien
agctcatccttggaacgcaatcattttctgtgt

SEQ ID NO: 345843 - DNA, 33 bp, Homo sapien
cttcactgatgttctactacttgggcaaatgac

SEQ ID NO: 345844 - DNA, 33 bp, Homo sapien
cttcactgatgttctattacttgggcaaatgac

SEQ ID NO: 345845 - DNA, 33 bp, Homo sapien
gtttaaagaaagagctcaaagccgcaaagcatc

SEQ ID NO: 345846 - DNA, 33 bp, Homo sapien
gtttaaagaaagagctgaaagccgcaaagcatc

SEQ ID NO: 345847 - DNA, 33 bp, Homo sapien
cttctacatatccacactgggtacttttaatga

SEQ ID NO: 345848 - DNA, 33 bp, Homo sapien
cttctacatatccacattgggtacttttaatga

SEQ ID NO: 345849 - DNA, 33 bp, Homo sapien
accaagccatgattgacaaatatggtctaaaca

SEQ ID NO: 345850 - DNA, 33 bp, Homo sapien
accaagccatgattgagaaatatggtctaaaca

SEQ ID NO: 345851 - DNA, 33 bp, Homo sapien
cagctaatgtgtgttacgaatctaaccaagcca

SEQ ID NO: 345852 - DNA, 33 bp, Homo sapien
cagctaatgtgtgttatgaatctaaccaagcca

SEQ ID NO: 345853 - DNA, 33 bp, Homo sapien
acttcaataaatttacaactttgtcctggacat

SEQ ID NO: 345854 - DNA, 33 bp, Homo sapien
acttcaataaatttaccactttgtcctggacat

SEQ ID NO: 345855 - DNA, 33 bp, Homo sapien
gctggtaacaataggaaattagattgctagatt

SEQ ID NO: 345856 - DNA, 33 bp, Homo sapien
gctggtaacaataggagattagattgctagatt

SEQ ID NO: 345857 - DNA, 33 bp, Homo sapien
ggagggctcaagggacgatggtctcaatgctga

SEQ ID NO: 345858 - DNA, 33 bp, Homo sapien
ggagggctcaagggactatggtctcaatgctga

SEQ ID NO: 345859 - DNA, 33 bp, Homo sapien
tttagcattctcagtaccaaaaatttgtgggcc

SEQ ID NO: 345860 - DNA, 33 bp, Homo sapien
tttagcattctcagtatcaaaaatttgtgggcc

SEQ ID NO: 345861 - DNA, 33 bp, Homo sapien
ggtagcacatgcattgaagtacatgtttctaca

SEQ ID NO: 345862 - DNA, 33 bp, Homo sapien
ggtagcacatgcattggagtacatgtttctaca

SEQ ID NO: 345863 - DNA, 33 bp, Homo sapien
acaagccaacctctcaaaatagcttgtctgaac

SEQ ID NO: 345864 - DNA, 33 bp, Homo sapien
acaagccaacctctcagaatagcttgtctgaac

SEQ ID NO: 345865 - DNA, 33 bp, Homo sapien
ctgtactctcttaagaccagatgaaaaggaatt

SEQ ID NO: 345866 - DNA, 33 bp, Homo sapien
ctgtactctcttaagatcagatgaaaaggaatt

SEQ ID NO: 345867 - DNA, 33 bp, Homo sapien
atcaccatttctctgacgtgatcaagctcacag

SEQ ID NO: 345868 - DNA, 33 bp, Homo sapien
atcaccatttctctgatgtgatcaagctcacag

SEQ ID NO: 345869 - DNA, 33 bp, Homo sapien
agatcagagtagctgcagaaggcttatggcaga

SEQ ID NO: 345870 - DNA, 33 bp, Homo sapien
agatcagagtagctgcggaaggcttatggcaga

SEQ ID NO: 345871 - DNA, 33 bp, Homo sapien
tacaggtagacattcacaggaggaccacgtgaa

SEQ ID NO: 345872 - DNA, 33 bp, Homo sapien
tacaggtagacattcataggaggaccacgtgaa

SEQ ID NO: 345873 - DNA, 33 bp, Homo sapien
catctaggtttgtttaagtacattttatggttt

SEQ ID NO: 345874 - DNA, 33 bp, Homo sapien
catctaggtttgtttaggtacattttatggttt

SEQ ID NO: 345875 - DNA, 33 bp, Homo sapien
atgcttatttacatagaagaggtaattaacaga

SEQ ID NO: 345876 - DNA, 33 bp, Homo sapien
atgcttatttacataggagaggtaattaacaga

SEQ ID NO: 345877 - DNA, 33 bp, Homo sapien
ccggaaaagatgctgacacatagtagtgaaaga

SEQ ID NO: 345878 - DNA, 33 bp, Homo sapien
ccggaaaagatgctgatacatagtagtgaaaga

SEQ ID NO: 345879 - DNA, 33 bp, Homo sapien
ttcaaaccttaatgcacatagaaagtagttttt

SEQ ID NO: 345880 - DNA, 33 bp, Homo sapien
ttcaaaccttaatgcagatagaaagtagttttt

SEQ ID NO: 345881 - DNA, 33 bp, Homo sapien
ctaactgtgatgagcccggatacttgacttcag

SEQ ID NO: 345882 - DNA, 33 bp, Homo sapien
ctaactgtgatgagcctggatacttgacttcag

SEQ ID NO: 345883 - DNA, 33 bp, Homo sapien
ttttccttctcccatccagataccagtagaatt

SEQ ID NO: 345884 - DNA, 33 bp, Homo sapien
ttttccttctcccatctagataccagtagaatt

SEQ ID NO: 345885 - DNA, 33 bp, Homo sapien
catggtttcatctataaaatgggtacaatctct

SEQ ID NO: 345886 - DNA, 33 bp, Homo sapien
catggtttcatctatacaatgggtacaatctct

SEQ ID NO: 345887 - DNA, 33 bp, Homo sapien
aaccaggactcaggtacattctggcaactggcc

SEQ ID NO: 345888 - DNA, 33 bp, Homo sapien
aaccaggactcaggtatattctggcaactggcc

SEQ ID NO: 345889 - DNA, 33 bp, Homo sapien
gtgggtcgttagtcagcagctgtggttacatga

SEQ ID NO: 345890 - DNA, 33 bp, Homo sapien
gtgggtcgttagtcagtagctgtggttacatga

SEQ ID NO: 345891 - DNA, 33 bp, Homo sapien
gttgacataagaaaacagagtccagacagcaga

SEQ ID NO: 345892 - DNA, 33 bp, Homo sapien
gttgacataagaaaacggagtccagacagcaga

SEQ ID NO: 345893 - DNA, 33 bp, Homo sapien
caagaccagaatagacacagccaaagagaaaat

SEQ ID NO: 345894 - DNA, 33 bp, Homo sapien
caagaccagaatagacgcagccaaagagaaaat

SEQ ID NO: 345895 - DNA, 33 bp, Homo sapien
ccagacctagtagtccactcaagctttctaatc

SEQ ID NO: 345896 - DNA, 33 bp, Homo sapien
ccagacctagtagtccgctcaagctttctaatc

SEQ ID NO: 345897 - DNA, 33 bp, Homo sapien
tgtatgctcagctccaagtacttccaaacctcc

SEQ ID NO: 345898 - DNA, 33 bp, Homo sapien
tgtatgctcagctccaggtacttccaaacctcc

SEQ ID NO: 345899 - DNA, 33 bp, Homo sapien
aagctataatgaacaacgctagagaaccagagg

SEQ ID NO: 345900 - DNA, 33 bp, Homo sapien
aagctataatgaacaatgctagagaaccagagg

SEQ ID NO: 345901 - DNA, 33 bp, Homo sapien
gcaagtcaattccaaactttacactggttttct

SEQ ID NO: 345902 - DNA, 33 bp, Homo sapien
gcaagtcaattccaaagtttacactggttttct

SEQ ID NO: 345903 - DNA, 33 bp, Homo sapien
agctacacagttccaaacaagtataaaaatgac

SEQ ID NO: 345904 - DNA, 33 bp, Homo sapien
agctacacagttccaagcaagtataaaaatgac

SEQ ID NO: 345905 - DNA, 33 bp, Homo sapien
attagtaccagaaataacaataattttagcaat

SEQ ID NO: 345906 - DNA, 33 bp, Homo sapien
attagtaccagaaatagcaataattttagcaat

SEQ ID NO: 345907 - DNA, 33 bp, Homo sapien
gacatgatggggtcaactgggttagtgcagtaa

SEQ ID NO: 345908 - DNA, 33 bp, Homo sapien
gacatgatggggtcaagtgggttagtgcagtaa

SEQ ID NO: 345909 - DNA, 33 bp, Homo sapien
cttgcctgaagtagggaagagttggacaccttt

SEQ ID NO: 345910 - DNA, 33 bp, Homo sapien
cttgcctgaagtaggggagagttggacaccttt

SEQ ID NO: 345911 - DNA, 33 bp, Homo sapien
actccaaaccccagaacgtgtctctaattttcc

SEQ ID NO: 345912 - DNA, 33 bp, Homo sapien
actccaaaccccagaatgtgtctctaattttcc

SEQ ID NO: 345913 - DNA, 33 bp, Homo sapien
taattgtgacttgccaataacacttatcattcc

SEQ ID NO: 345914 - DNA, 33 bp, Homo sapien
taattgtgacttgccagtaacacttatcattcc

SEQ ID NO: 345915 - DNA, 33 bp, Homo sapien
aaatgacttgtttctaactttggacagtaactg

SEQ ID NO: 345916 - DNA, 33 bp, Homo sapien
aaatgacttgtttctacctttggacagtaactg

SEQ ID NO: 345917 - DNA, 33 bp, Homo sapien
gcaattggaagcataacgaacagtaagttgctt

SEQ ID NO: 345918 - DNA, 33 bp, Homo sapien
gcaattggaagcataatgaacagtaagttgctt

SEQ ID NO: 345919 - DNA, 33 bp, Homo sapien
ctggacactatgtgacaagatctccatgtctca

SEQ ID NO: 345920 - DNA, 33 bp, Homo sapien
ctggacactatgtgactagatctccatgtctca

SEQ ID NO: 345921 - DNA, 33 bp, Homo sapien
gtggcccaggtcaagaggacagtcagtaattag

SEQ ID NO: 345922 - DNA, 33 bp, Homo sapien
gtggcccaggtcaagatgacagtcagtaattag

SEQ ID NO: 345923 - DNA, 33 bp, Homo sapien
actatagaaggcagacaaatgggcagtccttat

SEQ ID NO: 345924 - DNA, 33 bp, Homo sapien
actatagaaggcagacgaatgggcagtccttat

SEQ ID NO: 345925 - DNA, 33 bp, Homo sapien
tgaagcaaggatactgaaatgagtgagaattaa

SEQ ID NO: 345926 - DNA, 33 bp, Homo sapien
tgaagcaaggatactgcaatgagtgagaattaa

SEQ ID NO: 345927 - DNA, 33 bp, Homo sapien
ggagaaaagactggaacggatctgtccctagaa

SEQ ID NO: 345928 - DNA, 33 bp, Homo sapien
ggagaaaagactggaatggatctgtccctagaa

SEQ ID NO: 345929 - DNA, 33 bp, Homo sapien
attactgacttgttaaaactgaatgattacatt

SEQ ID NO: 345930 - DNA, 33 bp, Homo sapien
attactgacttgttaagactgaatgattacatt

SEQ ID NO: 345931 - DNA, 33 bp, Homo sapien
ggtgtccctgtctggacgggtttagtcagcatc

SEQ ID NO: 345932 - DNA, 33 bp, Homo sapien
ggtgtccctgtctggatgggtttagtcagcatc

SEQ ID NO: 345933 - DNA, 33 bp, Homo sapien
gttcaagggctgaaccaaaggacaaaagaaggg

SEQ ID NO: 345934 - DNA, 33 bp, Homo sapien
gttcaagggctgaacctaaggacaaaagaaggg

SEQ ID NO: 345935 - DNA, 33 bp, Homo sapien
tttgttagaacaggtcaatttcctttaaaatgt

SEQ ID NO: 345936 - DNA, 33 bp, Homo sapien
tttgttagaacaggtcgatttcctttaaaatgt

SEQ ID NO: 345937 - DNA, 33 bp, Homo sapien
tatttagcatttattaagaacctcctgtgggct

SEQ ID NO: 345938 - DNA, 33 bp, Homo sapien
tatttagcatttattaggaacctcctgtgggct

SEQ ID NO: 345939 - DNA, 33 bp, Homo sapien
atctacacagaagtaactgacaaagccaggact

SEQ ID NO: 345940 - DNA, 33 bp, Homo sapien
atctacacagaagtaagtgacaaagccaggact

SEQ ID NO: 345941 - DNA, 33 bp, Homo sapien
aaatcagcatttctcacagatgatcactaaacc

SEQ ID NO: 345942 - DNA, 33 bp, Homo sapien
aaatcagcatttctcatagatgatcactaaacc

SEQ ID NO: 345943 - DNA, 33 bp, Homo sapien
tgttacctttcctggacacatgagggtttcttt

SEQ ID NO: 345944 - DNA, 33 bp, Homo sapien
tgttacctttcctggatacatgagggtttcttt

SEQ ID NO: 345945 - DNA, 33 bp, Homo sapien
gcttctgacccaagtactaatgattttcttata

SEQ ID NO: 345946 - DNA, 33 bp, Homo sapien
gcttctgacccaagtagtaatgattttcttata

SEQ ID NO: 345947 - DNA, 33 bp, Homo sapien
ttgtggattttggaaaaaggactaactaagctt

SEQ ID NO: 345948 - DNA, 33 bp, Homo sapien
ttgtggattttggaaagaggactaactaagctt

SEQ ID NO: 345949 - DNA, 33 bp, Homo sapien
atggatagaacttacaagcaatcatgaaaaccc

SEQ ID NO: 345950 - DNA, 33 bp, Homo sapien
atggatagaacttacaggcaatcatgaaaaccc

SEQ ID NO: 345951 - DNA, 33 bp, Homo sapien
ttttaattttagcacaagctgttacttctacaa

SEQ ID NO: 345952 - DNA, 33 bp, Homo sapien
ttttaattttagcacaggctgttacttctacaa

SEQ ID NO: 345953 - DNA, 33 bp, Homo sapien
tatagaacacttttacactcatttacatttaat

SEQ ID NO: 345954 - DNA, 33 bp, Homo sapien
tatagaacacttttactctcatttacatttaat

SEQ ID NO: 345955 - DNA, 33 bp, Homo sapien
aaaactaccagaagagaccatcacttttactct

SEQ ID NO: 345956 - DNA, 33 bp, Homo sapien
aaaactaccagaagaggccatcacttttactct

SEQ ID NO: 345957 - DNA, 33 bp, Homo sapien
ttctagaaagatggccaactaaagacacgctca

SEQ ID NO: 345958 - DNA, 33 bp, Homo sapien
ttctagaaagatggccgactaaagacacgctca

SEQ ID NO: 345959 - DNA, 33 bp, Homo sapien
gacttagagaatttcacaagagtagtagtacaa

SEQ ID NO: 345960 - DNA, 33 bp, Homo sapien
gacttagagaatttcagaagagtagtagtacaa

SEQ ID NO: 345961 - DNA, 33 bp, Homo sapien
actgtgacactagccacacttgtctttcatgtc

SEQ ID NO: 345962 - DNA, 33 bp, Homo sapien
actgtgacactagccatacttgtctttcatgtc

SEQ ID NO: 345963 - DNA, 33 bp, Homo sapien
cttctaatttcacaaacagtttgcccctcaaac

SEQ ID NO: 345964 - DNA, 33 bp, Homo sapien
cttctaatttcacaaagagtttgcccctcaaac

SEQ ID NO: 345965 - DNA, 33 bp, Homo sapien
aatagaacggtggtcacagtaatggcgagatct

SEQ ID NO: 345966 - DNA, 33 bp, Homo sapien
aatagaacggtggtcatagtaatggcgagatct

SEQ ID NO: 345967 - DNA, 33 bp, Homo sapien
aagtgggaaaaactaaccaacgtgcttgaacat

SEQ ID NO: 345968 - DNA, 33 bp, Homo sapien
aagtgggaaaaactaatcaacgtgcttgaacat

SEQ ID NO: 345969 - DNA, 33 bp, Homo sapien
tgctgctggggctaataagcttgtgaacttaaa

SEQ ID NO: 345970 - DNA, 33 bp, Homo sapien
tgctgctggggctaatgagcttgtgaacttaaa

SEQ ID NO: 345971 - DNA, 33 bp, Homo sapien
ttgagaaaccaaaatcacagaccagaaactctg

SEQ ID NO: 345972 - DNA, 33 bp, Homo sapien
ttgagaaaccaaaatcgcagaccagaaactctg

SEQ ID NO: 345973 - DNA, 33 bp, Homo sapien
taacggatgggaaaaaatggtttgtagatggag

SEQ ID NO: 345974 - DNA, 33 bp, Homo sapien
taacggatgggaaaaattggtttgtagatggag

SEQ ID NO: 345975 - DNA, 33 bp, Homo sapien
tgcaaatgggcacgtaaccttcaacaagtgtcc

SEQ ID NO: 345976 - DNA, 33 bp, Homo sapien
tgcaaatgggcacgtagccttcaacaagtgtcc

SEQ ID NO: 345977 - DNA, 33 bp, Homo sapien
atgaatgcctggcaaactgaagttgactgtgta

SEQ ID NO: 345978 - DNA, 33 bp, Homo sapien
atgaatgcctggcaaattgaagttgactgtgta

SEQ ID NO: 345979 - DNA, 33 bp, Homo sapien
gcaaaatctgtgttcaggttgagttaggttatg

SEQ ID NO: 345980 - DNA, 33 bp, Homo sapien
gcaaaatctgtgttcatgttgagttaggttatg

SEQ ID NO: 345981 - DNA, 33 bp, Homo sapien
caatcacatcatacctaacattcaggccgcaca

SEQ ID NO: 345982 - DNA, 33 bp, Homo sapien
caatcacatcatacctgacattcaggccgcaca

SEQ ID NO: 345983 - DNA, 33 bp, Homo sapien
aatctgcatcctctgaactgtttctcaggactt

SEQ ID NO: 345984 - DNA, 33 bp, Homo sapien
aatctgcatcctctgagctgtttctcaggactt

SEQ ID NO: 345985 - DNA, 33 bp, Homo sapien
acatccttgtataatacggttgcaaagctccat

SEQ ID NO: 345986 - DNA, 33 bp, Homo sapien
acatccttgtataatatggttgcaaagctccat

SEQ ID NO: 345987 - DNA, 33 bp, Homo sapien
gtgggctatggtacaacatcagttcatatttcg

SEQ ID NO: 345988 - DNA, 33 bp, Homo sapien
gtgggctatggtacaatatcagttcatatttcg

SEQ ID NO: 345989 - DNA, 33 bp, Homo sapien
tcaaatggttgtaaagcatgttgacatgtaaat

SEQ ID NO: 345990 - DNA, 33 bp, Homo sapien
tcaaatggttgtaaagtatgttgacatgtaaat

SEQ ID NO: 345991 - DNA, 33 bp, Homo sapien
tgtcaatgttatttaacccgaataagaacatta

SEQ ID NO: 345992 - DNA, 33 bp, Homo sapien
tgtcaatgttatttaatccgaataagaacatta

SEQ ID NO: 345993 - DNA, 33 bp, Homo sapien
ttggagatagtcaacaatctatcagaggaatcc

SEQ ID NO: 345994 - DNA, 33 bp, Homo sapien
ttggagatagtcaacagtctatcagaggaatcc

SEQ ID NO: 345995 - DNA, 33 bp, Homo sapien
cctcctaaacaatctgaatactttgaaggatat

SEQ ID NO: 345996 - DNA, 33 bp, Homo sapien
cctcctaaacaatctgcatactttgaaggatat

SEQ ID NO: 345997 - DNA, 33 bp, Homo sapien
tcaccctaggcaaatccacagaatcagggacct

SEQ ID NO: 345998 - DNA, 33 bp, Homo sapien
tcaccctaggcaaatctacagaatcagggacct

SEQ ID NO: 345999 - DNA, 33 bp, Homo sapien
gggatgacaaaaggtaagatagatgcgcactcc

SEQ ID NO: 346000 - DNA, 33 bp, Homo sapien
gggatgacaaaaggtaggatagatgcgcactcc

SEQ ID NO: 346001 - DNA, 33 bp, Homo sapien
caggtgacggggcacactatggtcatctgggga

SEQ ID NO: 346002 - DNA, 33 bp, Homo sapien
caggtgacggggcacagtatggtcatctgggga

SEQ ID NO: 346003 - DNA, 33 bp, Homo sapien
cattactctcaaagtacgccagccctcccagat

SEQ ID NO: 346004 - DNA, 33 bp, Homo sapien
cattactctcaaagtatgccagccctcccagat

SEQ ID NO: 346005 - DNA, 33 bp, Homo sapien
tgctaaggtgatcacccatacccaaggcagaag

SEQ ID NO: 346006 - DNA, 33 bp, Homo sapien
tgctaaggtgatcaccgatacccaaggcagaag

SEQ ID NO: 346007 - DNA, 33 bp, Homo sapien
tgactctgaagtctgcagaagagaggtttcttc

SEQ ID NO: 346008 - DNA, 33 bp, Homo sapien
tgactctgaagtctgcggaagagaggtttcttc

SEQ ID NO: 346009 - DNA, 33 bp, Homo sapien
ccaaatctgtagaaaaaaggcaaacagtattag

SEQ ID NO: 346010 - DNA, 33 bp, Homo sapien
ccaaatctgtagaaaacaggcaaacagtattag

SEQ ID NO: 346011 - DNA, 33 bp, Homo sapien
ctcaaaacagcagaagcaaagtctgttccagat

SEQ ID NO: 346012 - DNA, 33 bp, Homo sapien
ctcaaaacagcagaaggaaagtctgttccagat

SEQ ID NO: 346013 - DNA, 33 bp, Homo sapien
tcttggaggaagggacacgtattgagttctgaa

SEQ ID NO: 346014 - DNA, 33 bp, Homo sapien
tcttggaggaagggacccgtattgagttctgaa

SEQ ID NO: 346015 - DNA, 33 bp, Homo sapien
tttagcaaaattccaaaaagtgctgttagtctt

SEQ ID NO: 346016 - DNA, 33 bp, Homo sapien
tttagcaaaattccaagaagtgctgttagtctt

SEQ ID NO: 346017 - DNA, 33 bp, Homo sapien
tcattgataacactaccgcctagctagtcaagc

SEQ ID NO: 346018 - DNA, 33 bp, Homo sapien
tcattgataacactactgcctagctagtcaagc

SEQ ID NO: 346019 - DNA, 33 bp, Homo sapien
ttatacattgtgtgaaagcaaggactatatagt

SEQ ID NO: 346020 - DNA, 33 bp, Homo sapien
ttatacattgtgtgaaggcaaggactatatagt

SEQ ID NO: 346021 - DNA, 33 bp, Homo sapien
gagttctctccaagaccaagagctttaaaacca

SEQ ID NO: 346022 - DNA, 33 bp, Homo sapien
gagttctctccaagacgaagagctttaaaacca

SEQ ID NO: 346023 - DNA, 33 bp, Homo sapien
catctcattcatctacagcagtggtaaatcacc

SEQ ID NO: 346024 - DNA, 33 bp, Homo sapien
catctcattcatctacggcagtggtaaatcacc

SEQ ID NO: 346025 - DNA, 33 bp, Homo sapien
tgccctcttccaatcaatcttctcctccccaga

SEQ ID NO: 346026 - DNA, 33 bp, Homo sapien
tgccctcttccaatcagtcttctcctccccaga

SEQ ID NO: 346027 - DNA, 33 bp, Homo sapien
tcccagcattagcatcactgagcaaaattgaag

SEQ ID NO: 346028 - DNA, 33 bp, Homo sapien
tcccagcattagcatcgctgagcaaaattgaag

SEQ ID NO: 346029 - DNA, 33 bp, Homo sapien
ccatggagcatgggaaaagaaggggagacagga

SEQ ID NO: 346030 - DNA, 33 bp, Homo sapien
ccatggagcatgggaagagaaggggagacagga

SEQ ID NO: 346031 - DNA, 33 bp, Homo sapien
gaaggctcttaaaaaactagcatagccctgcaa

SEQ ID NO: 346032 - DNA, 33 bp, Homo sapien
gaaggctcttaaaaaagtagcatagccctgcaa

SEQ ID NO: 346033 - DNA, 33 bp, Homo sapien
cctgtaatgtgttggacgacattgagaaagatt

SEQ ID NO: 346034 - DNA, 33 bp, Homo sapien
cctgtaatgtgttggatgacattgagaaagatt

SEQ ID NO: 346035 - DNA, 33 bp, Homo sapien
accaacaatctataaaaggaaattcagatagag

SEQ ID NO: 346036 - DNA, 33 bp, Homo sapien
accaacaatctataaagggaaattcagatagag

SEQ ID NO: 346037 - DNA, 33 bp, Homo sapien
cccaaagctctcccaaatataactatggatgga

SEQ ID NO: 346038 - DNA, 33 bp, Homo sapien
cccaaagctctcccaattataactatggatgga

SEQ ID NO: 346039 - DNA, 33 bp, Homo sapien
attccagtaactagaactagatgagagaataaa

SEQ ID NO: 346040 - DNA, 33 bp, Homo sapien
attccagtaactagaagtagatgagagaataaa

SEQ ID NO: 346041 - DNA, 33 bp, Homo sapien
aagaattgtttgttaccacactgccacatggta

SEQ ID NO: 346042 - DNA, 33 bp, Homo sapien
aagaattgtttgttacgacactgccacatggta

SEQ ID NO: 346043 - DNA, 33 bp, Homo sapien
ctactaaatttcagagaaaacgaatgataaaat

SEQ ID NO: 346044 - DNA, 33 bp, Homo sapien
ctactaaatttcagaggaaacgaatgataaaat

SEQ ID NO: 346045 - DNA, 33 bp, Homo sapien
actcccttagttacaagcaaattttggaagggg

SEQ ID NO: 346046 - DNA, 33 bp, Homo sapien
actcccttagttacaatcaaattttggaagggg

SEQ ID NO: 346047 - DNA, 33 bp, Homo sapien
catcaacagtatagtacctacttcagcgttttc

SEQ ID NO: 346048 - DNA, 33 bp, Homo sapien
catcaacagtatagtatctacttcagcgttttc

SEQ ID NO: 346049 - DNA, 33 bp, Homo sapien
agagaacctggagaaacgaagagcctaagcaag

SEQ ID NO: 346050 - DNA, 33 bp, Homo sapien
agagaacctggagaaaggaagagcctaagcaag

SEQ ID NO: 346051 - DNA, 33 bp, Homo sapien
taaaaaagatctacccaagactttgaaaagtaa

SEQ ID NO: 346052 - DNA, 33 bp, Homo sapien
taaaaaagatctacccgagactttgaaaagtaa

SEQ ID NO: 346053 - DNA, 33 bp, Homo sapien
cgtcatggaaaactcaatcttgtgcaggtcact

SEQ ID NO: 346054 - DNA, 33 bp, Homo sapien
cgtcatggaaaactcagtcttgtgcaggtcact

SEQ ID NO: 346055 - DNA, 33 bp, Homo sapien
gtgactgctgaatagtaaatcctcaataaatgt

SEQ ID NO: 346056 - DNA, 33 bp, Homo sapien
gtgactgctgaatagttaatcctcaataaatgt

SEQ ID NO: 346057 - DNA, 33 bp, Homo sapien
gattcttcaggttttaacattttaacatcctgc

SEQ ID NO: 346058 - DNA, 33 bp, Homo sapien
gattcttcaggttttagcattttaacatcctgc

SEQ ID NO: 346059 - DNA, 33 bp, Homo sapien
ctaggtagaacagtcaaaatttatgagcagggt

SEQ ID NO: 346060 - DNA, 33 bp, Homo sapien
ctaggtagaacagtcacaatttatgagcagggt

SEQ ID NO: 346061 - DNA, 33 bp, Homo sapien
gtgggataaacagcacaggttcagtctggtttg

SEQ ID NO: 346062 - DNA, 33 bp, Homo sapien
gtgggataaacagcacgggttcagtctggtttg

SEQ ID NO: 346063 - DNA, 33 bp, Homo sapien
atctacagtaatagaaagcagaatcagtagggc

SEQ ID NO: 346064 - DNA, 33 bp, Homo sapien
atctacagtaatagaaggcagaatcagtagggc

SEQ ID NO: 346065 - DNA, 33 bp, Homo sapien
gccttaggattatttccatcatagcactccagg

SEQ ID NO: 346066 - DNA, 33 bp, Homo sapien
gccttaggattatttctatcatagcactccagg

SEQ ID NO: 346067 - DNA, 33 bp, Homo sapien
tttcttggagaaaaaaaacacttcagctgagac

SEQ ID NO: 346068 - DNA, 33 bp, Homo sapien
tttcttggagaaaaaagacacttcagctgagac

SEQ ID NO: 346069 - DNA, 33 bp, Homo sapien
aatctcagaataatccaagaggaaggcatcact

SEQ ID NO: 346070 - DNA, 33 bp, Homo sapien
aatctcagaataatccgagaggaaggcatcact

SEQ ID NO: 346071 - DNA, 33 bp, Homo sapien
attaattctgtttgaaatacccagagtggtttc

SEQ ID NO: 346072 - DNA, 33 bp, Homo sapien
attaattctgtttgaactacccagagtggtttc

SEQ ID NO: 346073 - DNA, 33 bp, Homo sapien
tgactgttttctcagaactcacatttcctctcc

SEQ ID NO: 346074 - DNA, 33 bp, Homo sapien
tgactgttttctcagagctcacatttcctctcc

SEQ ID NO: 346075 - DNA, 33 bp, Homo sapien
tgcacacagggagatcaatatagcctgtgtaat

SEQ ID NO: 346076 - DNA, 33 bp, Homo sapien
tgcacacagggagatccatatagcctgtgtaat

SEQ ID NO: 346077 - DNA, 33 bp, Homo sapien
tgggattcaagctgagaaagtctgatcccagag

SEQ ID NO: 346078 - DNA, 33 bp, Homo sapien
tgggattcaagctgaggaagtctgatcccagag

SEQ ID NO: 346079 - DNA, 33 bp, Homo sapien
tgtgtgtgggtgatgacgatacaaatatatata

SEQ ID NO: 346080 - DNA, 33 bp, Homo sapien
tgtgtgtgggtgatgatgatacaaatatatata

SEQ ID NO: 346081 - DNA, 33 bp, Homo sapien
ggttccatcagccaaaaaaattccctcctgctg

SEQ ID NO: 346082 - DNA, 33 bp, Homo sapien
ggttccatcagccaaagaaattccctcctgctg

SEQ ID NO: 346083 - DNA, 33 bp, Homo sapien
atcctagacacttctgaaggaaaataccataat

SEQ ID NO: 346084 - DNA, 33 bp, Homo sapien
atcctagacacttctgcaggaaaataccataat

SEQ ID NO: 346085 - DNA, 33 bp, Homo sapien
ttctgcacgtccttaaaagcgcacttaatcacc

SEQ ID NO: 346086 - DNA, 33 bp, Homo sapien
ttctgcacgtccttaacagcgcacttaatcacc

SEQ ID NO: 346087 - DNA, 33 bp, Homo sapien
gaaaaagatggaaaaacgacaggcaacccttaa

SEQ ID NO: 346088 - DNA, 33 bp, Homo sapien
gaaaaagatggaaaaatgacaggcaacccttaa

SEQ ID NO: 346089 - DNA, 33 bp, Homo sapien
tatttcctttggtgctaactttgacatctgtca

SEQ ID NO: 346090 - DNA, 33 bp, Homo sapien
tatttcctttggtgctgactttgacatctgtca

SEQ ID NO: 346091 - DNA, 33 bp, Homo sapien
aatttcagcaaaagacaaattgagtatcctgga

SEQ ID NO: 346092 - DNA, 33 bp, Homo sapien
aatttcagcaaaagacgaattgagtatcctgga

SEQ ID NO: 346093 - DNA, 33 bp, Homo sapien
tgagcagtggttctcaatagtaggcttaaaata

SEQ ID NO: 346094 - DNA, 33 bp, Homo sapien
tgagcagtggttctcagtagtaggcttaaaata

SEQ ID NO: 346095 - DNA, 33 bp, Homo sapien
acctgaagcttgtgtacgatgagaaggaagctt

SEQ ID NO: 346096 - DNA, 33 bp, Homo sapien
acctgaagcttgtgtatgatgagaaggaagctt

SEQ ID NO: 346097 - DNA, 33 bp, Homo sapien
acaaaactttaaatcgaaagtacacttgggggt

SEQ ID NO: 346098 - DNA, 33 bp, Homo sapien
acaaaactttaaatcggaagtacacttgggggt

SEQ ID NO: 346099 - DNA, 33 bp, Homo sapien
tgacactcatcaaccacgtgtcctcgggcattt

SEQ ID NO: 346100 - DNA, 33 bp, Homo sapien
tgacactcatcaaccatgtgtcctcgggcattt

SEQ ID NO: 346101 - DNA, 33 bp, Homo sapien
agctgtagggacgagacatgcacagtgagcaaa

SEQ ID NO: 346102 - DNA, 33 bp, Homo sapien
agctgtagggacgagatatgcacagtgagcaaa

SEQ ID NO: 346103 - DNA, 33 bp, Homo sapien
tgctttctggctatggcatactaaatcttccaa

SEQ ID NO: 346104 - DNA, 33 bp, Homo sapien
tgctttctggctatgggatactaaatcttccaa

SEQ ID NO: 346105 - DNA, 33 bp, Homo sapien
acatccctgaagccccactagaaatgcagtgat

SEQ ID NO: 346106 - DNA, 33 bp, Homo sapien
acatccctgaagccccgctagaaatgcagtgat

SEQ ID NO: 346107 - DNA, 33 bp, Homo sapien
aagtgaaactccaaagacagccaaggtatttat

SEQ ID NO: 346108 - DNA, 33 bp, Homo sapien
aagtgaaactccaaaggcagccaaggtatttat

SEQ ID NO: 346109 - DNA, 33 bp, Homo sapien
gaccacctatctaaaagaatatctgttagcatc

SEQ ID NO: 346110 - DNA, 33 bp, Homo sapien
gaccacctatctaaaataatatctgttagcatc

SEQ ID NO: 346111 - DNA, 33 bp, Homo sapien
acttcctttcacaaaaccttatctaggtgtaag

SEQ ID NO: 346112 - DNA, 33 bp, Homo sapien
acttcctttcacaaaagcttatctaggtgtaag

SEQ ID NO: 346113 - DNA, 33 bp, Homo sapien
gaaaaatgggctaatactatccctgcctatttc

SEQ ID NO: 346114 - DNA, 33 bp, Homo sapien
gaaaaatgggctaatattatccctgcctatttc

SEQ ID NO: 346115 - DNA, 33 bp, Homo sapien
tattttagcagaagccaaacagaagtggcagca

SEQ ID NO: 346116 - DNA, 33 bp, Homo sapien
tattttagcagaagcccaacagaagtggcagca

SEQ ID NO: 346117 - DNA, 33 bp, Homo sapien
aatccccatcatcgtccaaatgcaccaacttcc

SEQ ID NO: 346118 - DNA, 33 bp, Homo sapien
aatccccatcatcgtctaaatgcaccaacttcc

SEQ ID NO: 346119 - DNA, 33 bp, Homo sapien
aaagtacctgacatcaaacattgtctcacctgt

SEQ ID NO: 346120 - DNA, 33 bp, Homo sapien
aaagtacctgacatcatacattgtctcacctgt

SEQ ID NO: 346121 - DNA, 33 bp, Homo sapien
aagatgatgcacagtaaaaaggggcagatagaa

SEQ ID NO: 346122 - DNA, 33 bp, Homo sapien
aagatgatgcacagtagaaaggggcagatagaa

SEQ ID NO: 346123 - DNA, 33 bp, Homo sapien
tcctatctcctcattgaagttgtggcagcaaca

SEQ ID NO: 346124 - DNA, 33 bp, Homo sapien
tcctatctcctcattggagttgtggcagcaaca

SEQ ID NO: 346125 - DNA, 33 bp, Homo sapien
tgatggaaccaagacccatcaatccatagcata

SEQ ID NO: 346126 - DNA, 33 bp, Homo sapien
tgatggaaccaagacctatcaatccatagcata

SEQ ID NO: 346127 - DNA, 33 bp, Homo sapien
ctgccttgaattgcaaagtaacagtgtgataag

SEQ ID NO: 346128 - DNA, 33 bp, Homo sapien
ctgccttgaattgcaatgtaacagtgtgataag

SEQ ID NO: 346129 - DNA, 33 bp, Homo sapien
ggttggcgggtccatacaagtgtctgctgcctt

SEQ ID NO: 346130 - DNA, 33 bp, Homo sapien
ggttggcgggtccatagaagtgtctgctgcctt

SEQ ID NO: 346131 - DNA, 33 bp, Homo sapien
tctgggtttatctcaacgaaaatcatattatcc

SEQ ID NO: 346132 - DNA, 33 bp, Homo sapien
tctgggtttatctcaatgaaaatcatattatcc

SEQ ID NO: 346133 - DNA, 33 bp, Homo sapien
ttttcttctttaccaacagacgatgacaaatgt

SEQ ID NO: 346134 - DNA, 33 bp, Homo sapien
ttttcttctttaccaatagacgatgacaaatgt

SEQ ID NO: 346135 - DNA, 33 bp, Homo sapien
gagtctctagtggaaacgcttggaacggtgaga

SEQ ID NO: 346136 - DNA, 33 bp, Homo sapien
gagtctctagtggaaaggcttggaacggtgaga

SEQ ID NO: 346137 - DNA, 33 bp, Homo sapien
taacgccattatcttacgcaaaagtctaaaccg

SEQ ID NO: 346138 - DNA, 33 bp, Homo sapien
taacgccattatcttaggcaaaagtctaaaccg

SEQ ID NO: 346139 - DNA, 33 bp, Homo sapien
ttcctccacatgaaacaagacactgaatagtac

SEQ ID NO: 346140 - DNA, 33 bp, Homo sapien
ttcctccacatgaaacgagacactgaatagtac

SEQ ID NO: 346141 - DNA, 33 bp, Homo sapien
ttttctttcagcttcactaatttccctgagcta

SEQ ID NO: 346142 - DNA, 33 bp, Homo sapien
ttttctttcagcttcagtaatttccctgagcta

SEQ ID NO: 346143 - DNA, 33 bp, Homo sapien
aaaaagacctaaattaccatcgaccacagaaga

SEQ ID NO: 346144 - DNA, 33 bp, Homo sapien
aaaaagacctaaattatcatcgaccacagaaga

SEQ ID NO: 346145 - DNA, 33 bp, Homo sapien
aatgtaagatataatggaacaaactcatttacc

SEQ ID NO: 346146 - DNA, 33 bp, Homo sapien
aatgtaagatataatgtaacaaactcatttacc

SEQ ID NO: 346147 - DNA, 33 bp, Homo sapien
tcactcctgctccctgcagcttagcaagttctg

SEQ ID NO: 346148 - DNA, 33 bp, Homo sapien
tcactcctgctccctgtagcttagcaagttctg

SEQ ID NO: 346149 - DNA, 33 bp, Homo sapien
cacaagtcacaagacacaggattcagaaaagac

SEQ ID NO: 346150 - DNA, 33 bp, Homo sapien
cacaagtcacaagacataggattcagaaaagac

SEQ ID NO: 346151 - DNA, 33 bp, Homo sapien
aggctgactctaacaaccacgcacaaaagcagc

SEQ ID NO: 346152 - DNA, 33 bp, Homo sapien
aggctgactctaacaagcacgcacaaaagcagc

SEQ ID NO: 346153 - DNA, 33 bp, Homo sapien; identical to SEQ ID NO: 346151

SEQ ID NO: 346154 - DNA, 33 bp, Homo sapien; identical to SEQ ID NO: 346152

SEQ ID NO: 346155 - DNA, 33 bp, Homo sapien
atatggagatcaacaacgcactttagtctgagc

SEQ ID NO: 346156 - DNA, 33 bp, Homo sapien
atatggagatcaacaatgcactttagtctgagc

SEQ ID NO: 346157 - DNA, 33 bp, Homo sapien
tacgggagaattggaacgaactctctttgctct

SEQ ID NO: 346158 - DNA, 33 bp, Homo sapien
tacgggagaattggaatgaactctctttgctct

SEQ ID NO: 346159 - DNA, 33 bp, Homo sapien
ggaaacagcacaaccaagaaattgtggatcaac

SEQ ID NO: 346160 - DNA, 33 bp, Homo sapien
ggaaacagcacaaccaggaaattgtggatcaac

SEQ ID NO: 346161 - DNA, 33 bp, Homo sapien; identical to SEQ ID NO: 346159

SEQ ID NO: 346162 - DNA, 33 bp, Homo sapien; identical to SEQ ID NO: 346160

SEQ ID NO: 346163 - DNA, 33 bp, Homo sapien
ggaagtcagagcgaaacagccttaggttccctg

SEQ ID NO: 346164 - DNA, 33 bp, Homo sapien
ggaagtcagagcgaaagagccttaggttccctg

SEQ ID NO: 346165 - DNA, 33 bp, Homo sapien
gatgcactgctttctcccaaccctcatatcctc

SEQ ID NO: 346166 - DNA, 33 bp, Homo sapien
gatgcactgctttctctcaaccctcatatcctc

SEQ ID NO: 346167 - DNA, 33 bp, Homo sapien
actccatacttccaaaccctctagccaggcaaa

SEQ ID NO: 346168 - DNA, 33 bp, Homo sapien
actccatacttccaaagcctctagccaggcaaa

SEQ ID NO: 346169 - DNA, 33 bp, Homo sapien; identical to SEQ ID NO: 346167

SEQ ID NO: 346170 - DNA, 33 bp, Homo sapien; identical to SEQ ID NO: 346168

SEQ ID NO: 346171 - DNA, 33 bp, Homo sapien
tcgcacattgctcaagaagcccacgagcaatca

SEQ ID NO: 346172 - DNA, 33 bp, Homo sapien
tcgcacattgctcaaggagcccacgagcaatca

SEQ ID NO: 346173 - DNA, 33 bp, Homo sapien
ggtgcaaagacacagacatatagacatggtgaa

SEQ ID NO: 346174 - DNA, 33 bp, Homo sapien
ggtgcaaagacacagagatatagacatggtgaa

SEQ ID NO: 346175 - DNA, 33 bp, Homo sapien
taggacgtttttaccactactcagcagatatat

SEQ ID NO: 346176 - DNA, 33 bp, Homo sapien
taggacgtttttaccagtactcagcagatatat

SEQ ID NO: 346177 - DNA, 33 bp, Homo sapien
ccagtctccaccatcagtagcaaggtacacaaa

SEQ ID NO: 346178 - DNA, 33 bp, Homo sapien
ccagtctccaccatcattagcaaggtacacaaa

SEQ ID NO: 346179 - DNA, 33 bp, Homo sapien
ggaagttctgaagttggaaatcgacactcatat

SEQ ID NO: 346180 - DNA, 33 bp, Homo sapien
ggaagttctgaagttgtaaatcgacactcatat

SEQ ID NO: 346181 - DNA, 33 bp, Homo sapien; identical to SEQ ID NO: 346179

SEQ ID NO: 346182 - DNA, 33 bp, Homo sapien; identical to SEQ ID NO: 346180

SEQ ID NO: 346183 - DNA, 33 bp, Homo sapien
tatgcaaaaggcttagacgcaagcaaatctata

SEQ ID NO: 346184 - DNA, 33 bp, Homo sapien
tatgcaaaaggcttaggcgcaagcaaatctata

SEQ ID NO: 346185 - DNA, 33 bp, Homo sapien
gtataaatttaatggggcagagaaatggactaa

SEQ ID NO: 346186 - DNA, 33 bp, Homo sapien
gtataaatttaatgggtcagagaaatggactaa

SEQ ID NO: 346187 - DNA, 33 bp, Homo sapien
ggatgaaacttgaagacgttaaatgaaataagc

SEQ ID NO: 346188 - DNA, 33 bp, Homo sapien
ggatgaaacttgaagatgttaaatgaaataagc

SEQ ID NO: 346189 - DNA, 33 bp, Homo sapien
tagatcaaatacacctaaaggaactgtacagct

SEQ ID NO: 346190 - DNA, 33 bp, Homo sapien
tagatcaaatacacctgaaggaactgtacagct

SEQ ID NO: 346191 - DNA, 33 bp, Homo sapien
cacacacaacctattacggttgaaccaggaaga

SEQ ID NO: 346192 - DNA, 33 bp, Homo sapien
cacacacaacctattatggttgaaccaggaaga

SEQ ID NO: 346193 - DNA, 33 bp, Homo sapien; identical to SEQ ID NO: 346191

SEQ ID NO: 346194 - DNA, 33 bp, Homo sapien; identical to SEQ ID NO: 346192

SEQ ID NO: 346195 - DNA, 33 bp, Homo sapien
gacttcaaaccataaaactactacaagaaaaca

SEQ ID NO: 346196 - DNA, 33 bp, Homo sapien
gacttcaaaccataaacctactacaagaaaaca

SEQ ID NO: 346197 - DNA, 33 bp, Homo sapien
tgggaggacaataatacagaacatcgtacccac

SEQ ID NO: 346198 - DNA, 33 bp, Homo sapien
tgggaggacaataatatagaacatcgtacccac

SEQ ID NO: 346199 - DNA, 33 bp, Homo sapien
ttaatgtatttcctgaatagtgtgaataggagt

SEQ ID NO: 346200 - DNA, 33 bp, Homo sapien
ttaatgtatttcctgattagtgtgaataggagt

SEQ ID NO: 346201 - DNA, 33 bp, Homo sapien
ttcatagcacacacaaactctcatttcccagag

SEQ ID NO: 346202 - DNA, 33 bp, Homo sapien
ttcatagcacacacaacctctcatttcccagag

SEQ ID NO: 346203 - DNA, 33 bp, Homo sapien
caacatcgcagccacaaatttattcattagtgg

SEQ ID NO: 346204 - DNA, 33 bp, Homo sapien
caacatcgcagccacacatttattcattagtgg

SEQ ID NO: 346205 - DNA, 33 bp, Homo sapien
gagctccatccacagcaatataggaaacacaag

SEQ ID NO: 346206 - DNA, 33 bp, Homo sapien
gagctccatccacagccatataggaaacacaag

SEQ ID NO: 346207 - DNA, 33 bp, Homo sapien
gagcgatcaggaacccagaacacttcctctact

SEQ ID NO: 346208 - DNA, 33 bp, Homo sapien
gagcgatcaggaacccggaacacttcctctact

SEQ ID NO: 346209 - DNA, 33 bp, Homo sapien
agcttccttcaaggaacttcaatgaacaattca

SEQ ID NO: 346210 - DNA, 33 bp, Homo sapien
agcttccttcaaggaatttcaatgaacaattca

SEQ ID NO: 346211 - DNA, 33 bp, Homo sapien
taaccagcaggaattacgatcacttttctcttt

SEQ ID NO: 346212 - DNA, 33 bp, Homo sapien
taaccagcaggaattatgatcacttttctcttt

SEQ ID NO: 346213 - DNA, 33 bp, Homo sapien
aactaagatcccatgaactttgggggcagccat

SEQ ID NO: 346214 - DNA, 33 bp, Homo sapien
aactaagatcccatgagctttgggggcagccat

SEQ ID NO: 346215 - DNA, 33 bp, Homo sapien
agtgagggcagtgggaaaaccggatggaactag

SEQ ID NO: 346216 - DNA, 33 bp, Homo sapien
agtgagggcagtgggagaaccggatggaactag

SEQ ID NO: 346217 - DNA, 33 bp, Homo sapien
attcaaggtgacaatgaactatgatcacaccac

SEQ ID NO: 346218 - DNA, 33 bp, Homo sapien
attcaaggtgacaatgcactatgatcacaccac

SEQ ID NO: 346219 - DNA, 33 bp, Homo sapien
taagcctgggtttaagcctgctgttaactagac

SEQ ID NO: 346220 - DNA, 33 bp, Homo sapien
taagcctgggtttaagtctgctgttaactagac

SEQ ID NO: 346221 - DNA, 33 bp, Homo sapien
tgaaatcaagaataatcatcaaaaagtggaagc

SEQ ID NO: 346222 - DNA, 33 bp, Homo sapien
tgaaatcaagaataatgatcaaaaagtggaagc

SEQ ID NO: 346223 - DNA, 33 bp, Homo sapien
gcaacgcttcagcagaacagccaggtgcaccct

SEQ ID NO: 346224 - DNA, 33 bp, Homo sapien
gcaacgcttcagcagagcagccaggtgcaccct

SEQ ID NO: 346225 - DNA, 33 bp, Homo sapien
ccgttcatagggcccaatagcttcctatcaagc

SEQ ID NO: 346226 - DNA, 33 bp, Homo sapien
ccgttcatagggcccagtagcttcctatcaagc

SEQ ID NO: 346227 - DNA, 33 bp, Homo sapien
cttgatgagcctcttacgtaaacctggcatttg

SEQ ID NO: 346228 - DNA, 33 bp, Homo sapien
cttgatgagcctcttatgtaaacctggcatttg

SEQ ID NO: 346229 - DNA, 33 bp, Homo sapien
actggcttccatgtcacaatctggttctcctac

SEQ ID NO: 346230 - DNA, 33 bp, Homo sapien
actggcttccatgtcataatctggttctcctac

SEQ ID NO: 346231 - DNA, 33 bp, Homo sapien
ttccacttcaacattacgctcttccttagctca

SEQ ID NO: 346232 - DNA, 33 bp, Homo sapien
ttccacttcaacattatgctcttccttagctca

SEQ ID NO: 346233 - DNA, 33 bp, Homo sapien
cccctcacagtcctcaaaaggaataaatccttg

SEQ ID NO: 346234 - DNA, 33 bp, Homo sapien
cccctcacagtcctcagaaggaataaatccttg

SEQ ID NO: 346235 - DNA, 33 bp, Homo sapien
gacaatttgtgttacacgttgaattgtaccccc

SEQ ID NO: 346236 - DNA, 33 bp, Homo sapien
gacaatttgtgttacaggttgaattgtaccccc

SEQ ID NO: 346237 - DNA, 33 bp, Homo sapien
gtttaaatgtcactgaactagggtttggaaatc

SEQ ID NO: 346238 - DNA, 33 bp, Homo sapien
gtttaaatgtcactgagctagggtttggaaatc

SEQ ID NO: 346239 - DNA, 33 bp, Homo sapien
aagcctccttgaattaactccaaaaatctaaaa

SEQ ID NO: 346240 - DNA, 33 bp, Homo sapien
aagcctccttgaattatctccaaaaatctaaaa

SEQ ID NO: 346241 - DNA, 33 bp, Homo sapien
atgcatatttcaaaaactggtaaatgctttcat

SEQ ID NO: 346242 - DNA, 33 bp, Homo sapien
atgcatatttcaaaaattggtaaatgctttcat

SEQ ID NO: 346243 - DNA, 33 bp, Homo sapien
agagatagcccagaaacgaagctgatgaggaaa

SEQ ID NO: 346244 - DNA, 33 bp, Homo sapien
agagatagcccagaaatgaagctgatgaggaaa

SEQ ID NO: 346245 - DNA, 33 bp, Homo sapien
aggagaaaggaatgagacgcggagtggtgaagg

SEQ ID NO: 346246 - DNA, 33 bp, Homo sapien
aggagaaaggaatgaggcgcggagtggtgaagg

SEQ ID NO: 346247 - DNA, 33 bp, Homo sapien
gctgtttgctgacaccagagccatccttcccta

SEQ ID NO: 346248 - DNA, 33 bp, Homo sapien
gctgtttgctgacaccggagccatccttcccta

SEQ ID NO: 346249 - DNA, 33 bp, Homo sapien
gataaagtcctaaaacagttaagtcagaaagta

SEQ ID NO: 346250 - DNA, 33 bp, Homo sapien
gataaagtcctaaaacggttaagtcagaaagta

SEQ ID NO: 346251 - DNA, 33 bp, Homo sapien
ggtggaattcaaactaacagtccttggcaactg

SEQ ID NO: 346252 - DNA, 33 bp, Homo sapien
ggtggaattcaaactatcagtccttggcaactg

SEQ ID NO: 346253 - DNA, 33 bp, Homo sapien
aaataaagagaaatcaaagaatcatggagcaaa

SEQ ID NO: 346254 - DNA, 33 bp, Homo sapien
aaataaagagaaatcagagaatcatggagcaaa

SEQ ID NO: 346255 - DNA, 33 bp, Homo sapien
caaggtataaaacgaaactgggatagacagcag

SEQ ID NO: 346256 - DNA, 33 bp, Homo sapien
caaggtataaaacgaacctgggatagacagcag

SEQ ID NO: 346257 - DNA, 33 bp, Homo sapien
taccaatgtgactataaccagaacctggctttg

SEQ ID NO: 346258 - DNA, 33 bp, Homo sapien
taccaatgtgactatatccagaacctggctttg

SEQ ID NO: 346259 - DNA, 33 bp, Homo sapien
tggaggtcactgtaaaaccacaggtgattccta

SEQ ID NO: 346260 - DNA, 33 bp, Homo sapien
tggaggtcactgtaaagccacaggtgattccta

SEQ ID NO: 346261 - DNA, 33 bp, Homo sapien
gaaactacctctctcaccttaaactcctaacac

SEQ ID NO: 346262 - DNA, 33 bp, Homo sapien
gaaactacctctctcatcttaaactcctaacac

SEQ ID NO: 346263 - DNA, 33 bp, Homo sapien
gggctcacactgtttgcaaaccctgagaactat

SEQ ID NO: 346264 - DNA, 33 bp, Homo sapien
gggctcacactgtttgtaaaccctgagaactat

SEQ ID NO: 346265 - DNA, 33 bp, Homo sapien
ttttgtatgagtcaacagtagagcctttattgc

SEQ ID NO: 346266 - DNA, 33 bp, Homo sapien
ttttgtatgagtcaacggtagagcctttattgc

SEQ ID NO: 346267 - DNA, 33 bp, Homo sapien
tctccttgcatgtcccggcttacttaatcagca

SEQ ID NO: 346268 - DNA, 33 bp, Homo sapien
tctccttgcatgtccctgcttacttaatcagca

SEQ ID NO: 346269 - DNA, 33 bp, Homo sapien
ttgcagtcctagaaagcataggtcctgataaat

SEQ ID NO: 346270 - DNA, 33 bp, Homo sapien
ttgcagtcctagaaagtataggtcctgataaat

SEQ ID NO: 346271 - DNA, 33 bp, Homo sapien
atagagaaatgaacacaaatcataactggacga

SEQ ID NO: 346272 - DNA, 33 bp, Homo sapien
atagagaaatgaacactaatcataactggacga

SEQ ID NO: 346273 - DNA, 33 bp, Homo sapien
tgtgaaaattcatcaaatcgtccagttatgatt

SEQ ID NO: 346274 - DNA, 33 bp, Homo sapien
tgtgaaaattcatcaactcgtccagttatgatt

SEQ ID NO: 346275 - DNA, 33 bp, Homo sapien
tccacacataacccgacagtttcgagaacgaca

SEQ ID NO: 346276 - DNA, 33 bp, Homo sapien
tccacacataacccgatagtttcgagaacgaca

SEQ ID NO: 346277 - DNA, 33 bp, Homo sapien
caattatgtttggtgacctgaccaaaagacttg

SEQ ID NO: 346278 - DNA, 33 bp, Homo sapien
caattatgtttggtgatctgaccaaaagacttg

SEQ ID NO: 346279 - DNA, 33 bp, Homo sapien
gacttaagggaactcgccattggatgtagtgac

SEQ ID NO: 346280 - DNA, 33 bp, Homo sapien
gacttaagggaactcgtcattggatgtagtgac

SEQ ID NO: 346281 - DNA, 33 bp, Homo sapien
ggcatctttgaaggtccaaaagtttggtgacac

SEQ ID NO: 346282 - DNA, 33 bp, Homo sapien
ggcatctttgaaggtctaaaagtttggtgacac

SEQ ID NO: 346283 - DNA, 33 bp, Homo sapien
ggatcaacttgttgaaaaccatgagtaatcttc

SEQ ID NO: 346284 - DNA, 33 bp, Homo sapien
ggatcaacttgttgaagaccatgagtaatcttc

SEQ ID NO: 346285 - DNA, 33 bp, Homo sapien
tgtttctggtagtctgaagagccagtgccaaga

SEQ ID NO: 346286 - DNA, 33 bp, Homo sapien
tgtttctggtagtctggagagccagtgccaaga

SEQ ID NO: 346287 - DNA, 33 bp, Homo sapien
tcaccgcttcctggctcaatctgtgtgtctgtc

SEQ ID NO: 346288 - DNA, 33 bp, Homo sapien
tcaccgcttcctggctgaatctgtgtgtctgtc

SEQ ID NO: 346289 - DNA, 33 bp, Homo sapien
ttatgcagcacctacaataagtaacagacctta

SEQ ID NO: 346290 - DNA, 33 bp, Homo sapien
ttatgcagcacctacagtaagtaacagacctta

SEQ ID NO: 346291 - DNA, 33 bp, Homo sapien
atttatgtttccaaccaactgtctttgggatgt

SEQ ID NO: 346292 - DNA, 33 bp, Homo sapien
atttatgtttccaacctactgtctttgggatgt

SEQ ID NO: 346293 - DNA, 33 bp, Homo sapien
acatatgtatataccaaaaattgagagaaaaag

SEQ ID NO: 346294 - DNA, 33 bp, Homo sapien
acatatgtatataccagaaattgagagaaaaag

SEQ ID NO: 346295 - DNA, 33 bp, Homo sapien
ttgccttctcagtaacagaagcaaacagtgttc

SEQ ID NO: 346296 - DNA, 33 bp, Homo sapien
ttgccttctcagtaaccgaagcaaacagtgttc

SEQ ID NO: 346297 - DNA, 33 bp, Homo sapien
gagtttccctttcagagaaggattggaatgtgt

SEQ ID NO: 346298 - DNA, 33 bp, Homo sapien
gagtttccctttcagataaggattggaatgtgt

SEQ ID NO: 346299 - DNA, 33 bp, Homo sapien
ccagaatgctatataaaataaaagcagccaaaa

SEQ ID NO: 346300 - DNA, 33 bp, Homo sapien
ccagaatgctatataacataaaagcagccaaaa

SEQ ID NO: 346301 - DNA, 33 bp, Homo sapien
agtctcttcatttgccaagggatattttaaaat

SEQ ID NO: 346302 - DNA, 33 bp, Homo sapien
agtctcttcatttgcctagggatattttaaaat

SEQ ID NO: 346303 - DNA, 33 bp, Homo sapien
cgctccctcaagaaggaatttcacattgtgccc

SEQ ID NO: 346304 - DNA, 33 bp, Homo sapien
cgctccctcaagaagggatttcacattgtgccc

SEQ ID NO: 346305 - DNA, 33 bp, Homo sapien
ccaccacagtccctgcagcaacacagttttgtt

SEQ ID NO: 346306 - DNA, 33 bp, Homo sapien
ccaccacagtccctgcggcaacacagttttgtt

SEQ ID NO: 346307 - DNA, 33 bp, Homo sapien
ttctacttggccaaaagaagtggattgggtcat

SEQ ID NO: 346308 - DNA, 33 bp, Homo sapien
ttctacttggccaaaataagtggattgggtcat

SEQ ID NO: 346309 - DNA, 33 bp, Homo sapien
atgatgggccttatagaagaactagtcacaggt

SEQ ID NO: 346310 - DNA, 33 bp, Homo sapien
atgatgggccttataggagaactagtcacaggt

SEQ ID NO: 346311 - DNA, 33 bp, Homo sapien
aagcacacatgggttaagcggagaaatcagtgc

SEQ ID NO: 346312 - DNA, 33 bp, Homo sapien
aagcacacatgggttaggcggagaaatcagtgc

SEQ ID NO: 346313 - DNA, 33 bp, Homo sapien
gaatgcaatggacctacagatcaatttggtgag

SEQ ID NO: 346314 - DNA, 33 bp, Homo sapien
gaatgcaatggacctatagatcaatttggtgag

SEQ ID NO: 346315 - DNA, 33 bp, Homo sapien
aaaaatttgtttcaaaaatcatctatagggctt

SEQ ID NO: 346316 - DNA, 33 bp, Homo sapien
aaaaatttgtttcaaacatcatctatagggctt

SEQ ID NO: 346317 - DNA, 33 bp, Homo sapien
aatccaaagaggaaagaatgctgtatgtcattt

SEQ ID NO: 346318 - DNA, 33 bp, Homo sapien
aatccaaagaggaaaggatgctgtatgtcattt

SEQ ID NO: 346319 - DNA, 33 bp, Homo sapien
ttgatcacctgccccccagagcttctgtccaat

SEQ ID NO: 346320 - DNA, 33 bp, Homo sapien
ttgatcacctgccccctagagcttctgtccaat

SEQ ID NO: 346321 - DNA, 33 bp, Homo sapien
gctctcaaaatgatacaaggcaaagctactaag

SEQ ID NO: 346322 - DNA, 33 bp, Homo sapien
gctctcaaaatgatacgaggcaaagctactaag

SEQ ID NO: 346323 - DNA, 33 bp, Homo sapien
tcagaaggagtagatgaaaccaccatgaacttt

SEQ ID NO: 346324 - DNA, 33 bp, Homo sapien
tcagaaggagtagatggaaccaccatgaacttt

SEQ ID NO: 346325 - DNA, 33 bp, Homo sapien
agcataatacagctaacggtttcctgatgcaga

SEQ ID NO: 346326 - DNA, 33 bp, Homo sapien
agcataatacagctaatggtttcctgatgcaga

SEQ ID NO: 346327 - DNA, 33 bp, Homo sapien
aatgcttttgtgatgagaaaagtacaagatgac

SEQ ID NO: 346328 - DNA, 33 bp, Homo sapien
aatgcttttgtgatgataaaagtacaagatgac

SEQ ID NO: 346329 - DNA, 33 bp, Homo sapien
taacatttggaagcaccggagtaaccccatccc

SEQ ID NO: 346330 - DNA, 33 bp, Homo sapien
taacatttggaagcactggagtaaccccatccc

SEQ ID NO: 346331 - DNA, 33 bp, Homo sapien
ttattttcaggttgtacagcagaaagttccttt

SEQ ID NO: 346332 - DNA, 33 bp, Homo sapien
ttattttcaggttgtatagcagaaagttccttt

SEQ ID NO: 346333 - DNA, 33 bp, Homo sapien
cctttgcaaatcacaactgaatctcctaaatcc

SEQ ID NO: 346334 - DNA, 33 bp, Homo sapien
cctttgcaaatcacaagtgaatctcctaaatcc

SEQ ID NO: 346335 - DNA, 33 bp, Homo sapien
tatttttggctactccagctgctttgctatatt

SEQ ID NO: 346336 - DNA, 33 bp, Homo sapien
tatttttggctactccggctgctttgctatatt

SEQ ID NO: 346337 - DNA, 33 bp, Homo sapien
atagttaatgaatgaaataatcacacaaatata

SEQ ID NO: 346338 - DNA, 33 bp, Homo sapien
atagttaatgaatgaagtaatcacacaaatata

SEQ ID NO: 346339 - DNA, 33 bp, Homo sapien
catattccaacatcacacaattggccacggccc

SEQ ID NO: 346340 - DNA, 33 bp, Homo sapien
catattccaacatcactcaattggccacggccc

SEQ ID NO: 346341 - DNA, 33 bp, Homo sapien
tgataatgtctagagaaatctgttgattgtcaa

SEQ ID NO: 346342 - DNA, 33 bp, Homo sapien
tgataatgtctagagacatctgttgattgtcaa

SEQ ID NO: 346343 - DNA, 33 bp, Homo sapien
gcaatgcctgaaacataaatttgtaggttacaa

SEQ ID NO: 346344 - DNA, 33 bp, Homo sapien
gcaatgcctgaaacatgaatttgtaggttacaa

SEQ ID NO: 346345 - DNA, 33 bp, Homo sapien
agaatatcacagggaacaaatctcctaattcct

SEQ ID NO: 346346 - DNA, 33 bp, Homo sapien
agaatatcacagggaagaaatctcctaattcct

SEQ ID NO: 346347 - DNA, 33 bp, Homo sapien
tctgcaacattgtgatgactagttcaaggcagt

SEQ ID NO: 346348 - DNA, 33 bp, Homo sapien
tctgcaacattgtgattactagttcaaggcagt

SEQ ID NO: 346349 - DNA, 33 bp, Homo sapien
cagtctgtgttagcaacggagatggataatgac

SEQ ID NO: 346350 - DNA, 33 bp, Homo sapien
cagtctgtgttagcaatggagatggataatgac

SEQ ID NO: 346351 - DNA, 33 bp, Homo sapien
gcccggatggtctcctaacacctcaagtgatcc

SEQ ID NO: 346352 - DNA, 33 bp, Homo sapien
gcccggatggtctcctgacacctcaagtgatcc

SEQ ID NO: 346353 - DNA, 33 bp, Homo sapien
attacgccaagtaaaacgaggaaaaccagtcta

SEQ ID NO: 346354 - DNA, 33 bp, Homo sapien
attacgccaagtaaaatgaggaaaaccagtcta

SEQ ID NO: 346355 - DNA, 33 bp, Homo sapien
atcataataacaatcaacagaatcaagtaatgt

SEQ ID NO: 346356 - DNA, 33 bp, Homo sapien
atcataataacaatcatcagaatcaagtaatgt

SEQ ID NO: 346357 - DNA, 33 bp, Homo sapien
ccaggtcttttagccacattggaccactcagca

SEQ ID NO: 346358 - DNA, 33 bp, Homo sapien
ccaggtcttttagccagattggaccactcagca

SEQ ID NO: 346359 - DNA, 33 bp, Homo sapien
ctctgcgttgattggaatatggtgattcagtcc

SEQ ID NO: 346360 - DNA, 33 bp, Homo sapien
ctctgcgttgattggagtatggtgattcagtcc

SEQ ID NO: 346361 - DNA, 33 bp, Homo sapien
tgggtttcctctacccaggaatgtttattctct

SEQ ID NO: 346362 - DNA, 33 bp, Homo sapien
tgggtttcctctacccgggaatgtttattctct

SEQ ID NO: 346363 - DNA, 33 bp, Homo sapien
acaatgtaaccaatcaatcatgctcttgagtct

SEQ ID NO: 346364 - DNA, 33 bp, Homo sapien
acaatgtaaccaatcagtcatgctcttgagtct

SEQ ID NO: 346365 - DNA, 33 bp, Homo sapien
gaggctagcttcaagacagctgctgcagtataa

SEQ ID NO: 346366 - DNA, 33 bp, Homo sapien
gaggctagcttcaagatagctgctgcagtataa

SEQ ID NO: 346367 - DNA, 33 bp, Homo sapien
ttatacacagacgcaaacctaccatcctgtagc

SEQ ID NO: 346368 - DNA, 33 bp, Homo sapien
ttatacacagacgcaagcctaccatcctgtagc

SEQ ID NO: 346369 - DNA, 33 bp, Homo sapien
atagttcacaggattacgtattgtaaaacaaac

SEQ ID NO: 346370 - DNA, 33 bp, Homo sapien
atagttcacaggattatgtattgtaaaacaaac

SEQ ID NO: 346371 - DNA, 33 bp, Homo sapien
aaatgtccagatgagaaagcaaaggctctctga

SEQ ID NO: 346372 - DNA, 33 bp, Homo sapien
aaatgtccagatgagacagcaaaggctctctga

SEQ ID NO: 346373 - DNA, 33 bp, Homo sapien
ataataattactttctcaaatgagcagtgcaga

SEQ ID NO: 346374 - DNA, 33 bp, Homo sapien
ataataattactttcttaaatgagcagtgcaga

SEQ ID NO: 346375 - DNA, 33 bp, Homo sapien
tgagtcagacctttgacgatttccttcttaaaa

SEQ ID NO: 346376 - DNA, 33 bp, Homo sapien
tgagtcagacctttgatgatttccttcttaaaa

SEQ ID NO: 346377 - DNA, 33 bp, Homo sapien
gaacacaactccagaaaatacaagatagaattg

SEQ ID NO: 346378 - DNA, 33 bp, Homo sapien
gaacacaactccagaagatacaagatagaattg

SEQ ID NO: 346379 - DNA, 33 bp, Homo sapien
ccttccttgcaaccccagcaatatatccacaat

SEQ ID NO: 346380 - DNA, 33 bp, Homo sapien
ccttccttgcaaccccggcaatatatccacaat

SEQ ID NO: 346381 - DNA, 33 bp, Homo sapien
tcactgaaggctaatgcagttctagtagttagg

SEQ ID NO: 346382 - DNA, 33 bp, Homo sapien
tcactgaaggctaatggagttctagtagttagg

SEQ ID NO: 346383 - DNA, 33 bp, Homo sapien
gcctctaggaagcacaaatcaacatttcacaag

SEQ ID NO: 346384 - DNA, 33 bp, Homo sapien
gcctctaggaagcacagatcaacatttcacaag

SEQ ID NO: 346385 - DNA, 33 bp, Homo sapien
gatcctaatgatgtaacggcataataatcaatt

SEQ ID NO: 346386 - DNA, 33 bp, Homo sapien
gatcctaatgatgtaatggcataataatcaatt

SEQ ID NO: 346387 - DNA, 33 bp, Homo sapien
agctgtggtgatgtgcaagcccacaaggatcac

SEQ ID NO: 346388 - DNA, 33 bp, Homo sapien
agctgtggtgatgtgcgagcccacaaggatcac

SEQ ID NO: 346389 - DNA, 33 bp, Homo sapien
caagtgacaggagcaggactctaaccagggcat

SEQ ID NO: 346390 - DNA, 33 bp, Homo sapien
caagtgacaggagcagtactctaaccagggcat

SEQ ID NO: 346391 - DNA, 33 bp, Homo sapien
aaaatcaggttcaagcggcttagcccaaagatt

SEQ ID NO: 346392 - DNA, 33 bp, Homo sapien
aaaatcaggttcaagctgcttagcccaaagatt

SEQ ID NO: 346393 - DNA, 33 bp, Homo sapien
gccaccacagtccccaatatagcagcaataaga

SEQ ID NO: 346394 - DNA, 33 bp, Homo sapien
gccaccacagtccccagtatagcagcaataaga

SEQ ID NO: 346395 - DNA, 33 bp, Homo sapien
aggagcataaaaggaactctgagtaaatgctat

SEQ ID NO: 346396 - DNA, 33 bp, Homo sapien
aggagcataaaaggaagtctgagtaaatgctat

SEQ ID NO: 346397 - DNA, 33 bp, Homo sapien
ttccaatcaactttgacagtctgacccattttt

SEQ ID NO: 346398 - DNA, 33 bp, Homo sapien
ttccaatcaactttgatagtctgacccattttt

SEQ ID NO: 346399 - DNA, 33 bp, Homo sapien
cagaaaaaggatgaccacagtaagttaaagcac

SEQ ID NO: 346400 - DNA, 33 bp, Homo sapien
cagaaaaaggatgaccgcagtaagttaaagcac

SEQ ID NO: 346401 - DNA, 33 bp, Homo sapien
agctctcagttttacacccaaaatcgctggggc

SEQ ID NO: 346402 - DNA, 33 bp, Homo sapien
agctctcagttttacatccaaaatcgctggggc

SEQ ID NO: 346403 - DNA, 33 bp, Homo sapien
aggaaaaaaaagtctaccatgttcttgttttgc

SEQ ID NO: 346404 - DNA, 33 bp, Homo sapien
aggaaaaaaaagtctatcatgttcttgttttgc

SEQ ID NO: 346405 - DNA, 33 bp, Homo sapien
ggtaagtctgcaaaaaattttcaaaggcaaatt

SEQ ID NO: 346406 - DNA, 33 bp, Homo sapien
ggtaagtctgcaaaaagttttcaaaggcaaatt

SEQ ID NO: 346407 - DNA, 33 bp, Homo sapien
gctgtgaaggccaactaaaagaggcacatacag

SEQ ID NO: 346408 - DNA, 33 bp, Homo sapien
gctgtgaaggccaactgaaagaggcacatacag

SEQ ID NO: 346409 - DNA, 33 bp, Homo sapien
tgattttgaggtttcacgctgggagtcattgat

SEQ ID NO: 346410 - DNA, 33 bp, Homo sapien
tgattttgaggtttcatgctgggagtcattgat

SEQ ID NO: 346411 - DNA, 33 bp, Homo sapien
tgggtgcaactgagagacaaagactcaatatcc

SEQ ID NO: 346412 - DNA, 33 bp, Homo sapien
tgggtgcaactgagaggcaaagactcaatatcc

SEQ ID NO: 346413 - DNA, 33 bp, Homo sapien
ggcaagcaatcactcacgttctgatgggacagc

SEQ ID NO: 346414 - DNA, 33 bp, Homo sapien
ggcaagcaatcactcaggttctgatgggacagc

SEQ ID NO: 346415 - DNA, 33 bp, Homo sapien
attcacacacaatgaaaataatctgctaaagca

SEQ ID NO: 346416 - DNA, 33 bp, Homo sapien
attcacacacaatgaagataatctgctaaagca

SEQ ID NO: 346417 - DNA, 33 bp, Homo sapien
gcagtacattaagaaaccaagaaaagctctgag

SEQ ID NO: 346418 - DNA, 33 bp, Homo sapien
gcagtacattaagaaatcaagaaaagctctgag

SEQ ID NO: 346419 - DNA, 33 bp, Homo sapien
ttatttggaacaaacacgtcaaggcttttccct

SEQ ID NO: 346420 - DNA, 33 bp, Homo sapien
ttatttggaacaaacatgtcaaggcttttccct

SEQ ID NO: 346421 - DNA, 33 bp, Homo sapien
aaatgtactgaattaacgagagaaatgtaatgc

SEQ ID NO: 346422 - DNA, 33 bp, Homo sapien
aaatgtactgaattaatgagagaaatgtaatgc

SEQ ID NO: 346423 - DNA, 33 bp, Homo sapien
tcctgaggaaaacggaacatatgccatctccac

SEQ ID NO: 346424 - DNA, 33 bp, Homo sapien
tcctgaggaaaacggatcatatgccatctccac

SEQ ID NO: 346425 - DNA, 33 bp, Homo sapien
acttgctcatgaaagtcactatcacgataaact

SEQ ID NO: 346426 - DNA, 33 bp, Homo sapien
acttgctcatgaaagttactatcacgataaact

SEQ ID NO: 346427 - DNA, 33 bp, Homo sapien
acaacagagtgacactaaagatcattgggaaaa

SEQ ID NO: 346428 - DNA, 33 bp, Homo sapien
acaacagagtgacactgaagatcattgggaaaa

SEQ ID NO: 346429 - DNA, 33 bp, Homo sapien
atataaaactacgatcgaatcaaggtaaatgac

SEQ ID NO: 346430 - DNA, 33 bp, Homo sapien
atataaaactacgatctaatcaaggtaaatgac

SEQ ID NO: 346431 - DNA, 33 bp, Homo sapien
gctcatagttctctaccgcaaagagcactataa

SEQ ID NO: 346432 - DNA, 33 bp, Homo sapien
gctcatagttctctactgcaaagagcactataa

SEQ ID NO: 346433 - DNA, 33 bp, Homo sapien
ggaatgaggtagatccactagggctggccactc

SEQ ID NO: 346434 - DNA, 33 bp, Homo sapien
ggaatgaggtagatccgctagggctggccactc

SEQ ID NO: 346435 - DNA, 33 bp, Homo sapien
agctgctttccagtccacagaggatgctcccta

SEQ ID NO: 346436 - DNA, 33 bp, Homo sapien
agctgctttccagtccgcagaggatgctcccta

SEQ ID NO: 346437 - DNA, 33 bp, Homo sapien
catgcgtggtcaattaacacaacttctcagcag

SEQ ID NO: 346438 - DNA, 33 bp, Homo sapien
catgcgtggtcaattagcacaacttctcagcag

SEQ ID NO: 346439 - DNA, 33 bp, Homo sapien
ctttttaatccaaataaaggagaaaatgtcaaa

SEQ ID NO: 346440 - DNA, 33 bp, Homo sapien
ctttttaatccaaatagaggagaaaatgtcaaa

SEQ ID NO: 346441 - DNA, 33 bp, Homo sapien
agagagagaaaaaaataagatgccatcatgcag

SEQ ID NO: 346442 - DNA, 33 bp, Homo sapien
agagagagaaaaaaattagatgccatcatgcag

SEQ ID NO: 346443 - DNA, 33 bp, Homo sapien
aaccacagagaaacatcactagtttaggggatg

SEQ ID NO: 346444 - DNA, 33 bp, Homo sapien
aaccacagagaaacattactagtttaggggatg

SEQ ID NO: 346445 - DNA, 33 bp, Homo sapien
ccagcttgacataccaaaagtagtttatcacag

SEQ ID NO: 346446 - DNA, 33 bp, Homo sapien
ccagcttgacataccagaagtagtttatcacag

SEQ ID NO: 346447 - DNA, 33 bp, Homo sapien
tatttttaaaagttgacgctccacttaaaacat

SEQ ID NO: 346448 - DNA, 33 bp, Homo sapien
tatttttaaaagttgatgctccacttaaaacat

SEQ ID NO: 346449 - DNA, 33 bp, Homo sapien
tccatgctagactgctaacagagggtcaacact

SEQ ID NO: 346450 - DNA, 33 bp, Homo sapien
tccatgctagactgctcacagagggtcaacact

SEQ ID NO: 346451 - DNA, 33 bp, Homo sapien
agatgttgtggagaatgaaatgtgtagctcaca

SEQ ID NO: 346452 - DNA, 33 bp, Homo sapien
agatgttgtggagaattaaatgtgtagctcaca

SEQ ID NO: 346453 - DNA, 33 bp, Homo sapien
tctcaattgggcagaacctccctgttttctccc

SEQ ID NO: 346454 - DNA, 33 bp, Homo sapien
tctcaattgggcagaatctccctgttttctccc

SEQ ID NO: 346455 - DNA, 33 bp, Homo sapien
ctcatttggtgccacaaaaagttagccaaagac

SEQ ID NO: 346456 - DNA, 33 bp, Homo sapien
ctcatttggtgccacacaaagttagccaaagac

SEQ ID NO: 346457 - DNA, 33 bp, Homo sapien
agagaaatcaaagtcacggtcgaagacatgagt

SEQ ID NO: 346458 - DNA, 33 bp, Homo sapien
agagaaatcaaagtcagggtcgaagacatgagt

SEQ ID NO: 346459 - DNA, 33 bp, Homo sapien
gaggggccaccattcaatccaccgtgtccctag

SEQ ID NO: 346460 - DNA, 33 bp, Homo sapien
gaggggccaccattcagtccaccgtgtccctag

SEQ ID NO: 346461 - DNA, 33 bp, Homo sapien
tagggagcttagcaaggactttaacaccattag

SEQ ID NO: 346462 - DNA, 33 bp, Homo sapien
tagggagcttagcaagtactttaacaccattag

SEQ ID NO: 346463 - DNA, 33 bp, Homo sapien
atattcacttcagacaccagaatctatcccctc

SEQ ID NO: 346464 - DNA, 33 bp, Homo sapien
atattcacttcagacagcagaatctatcccctc

SEQ ID NO: 346465 - DNA, 33 bp, Homo sapien
ggtgctgtggtttgcacctataattccaggtac

SEQ ID NO: 346466 - DNA, 33 bp, Homo sapien
ggtgctgtggtttgcagctataattccaggtac

SEQ ID NO: 346467 - DNA, 33 bp, Homo sapien
agaatgaggctcttaagaactgccaagtacatg

SEQ ID NO: 346468 - DNA, 33 bp, Homo sapien
agaatgaggctcttaataactgccaagtacatg

SEQ ID NO: 346469 - DNA, 33 bp, Homo sapien
gagatatggagttgaaactgtctccagtcatgt

SEQ ID NO: 346470 - DNA, 33 bp, Homo sapien
gagatatggagttgaatctgtctccagtcatgt

SEQ ID NO: 346471 - DNA, 33 bp, Homo sapien
gagacagcataggctacaccactaatggcaggt

SEQ ID NO: 346472 - DNA, 33 bp, Homo sapien
gagacagcataggctataccactaatggcaggt

SEQ ID NO: 346473 - DNA, 33 bp, Homo sapien
acttcaaattaagtgacgtttcaggtcctttgg

SEQ ID NO: 346474 - DNA, 33 bp, Homo sapien
acttcaaattaagtgatgtttcaggtcctttgg

SEQ ID NO: 346475 - DNA, 33 bp, Homo sapien
tgtatacagtgttctaccaggtcccctgtccct

SEQ ID NO: 346476 - DNA, 33 bp, Homo sapien
tgtatacagtgttctatcaggtcccctgtccct

SEQ ID NO: 346477 - DNA, 33 bp, Homo sapien
atgatccatggtgggacacatcctcaacaacac

SEQ ID NO: 346478 - DNA, 33 bp, Homo sapien
atgatccatggtgggatacatcctcaacaacac

SEQ ID NO: 346479 - DNA, 33 bp, Homo sapien
agttcttgaccactgcagacaaggcagatgcag

SEQ ID NO: 346480 - DNA, 33 bp, Homo sapien
agttcttgaccactgcggacaaggcagatgcag

SEQ ID NO: 346481 - DNA, 33 bp, Homo sapien
cttgtggatctcaatacgtcaaacggatagcag

SEQ ID NO: 346482 - DNA, 33 bp, Homo sapien
cttgtggatctcaatatgtcaaacggatagcag

SEQ ID NO: 346483 - DNA, 33 bp, Homo sapien
ctatctgctgctagggacccctgaaacctcacc

SEQ ID NO: 346484 - DNA, 33 bp, Homo sapien
ctatctgctgctagggtcccctgaaacctcacc

SEQ ID NO: 346485 - DNA, 33 bp, Homo sapien
ctgtgaaaagcagctccccaagttctgctatat

SEQ ID NO: 346486 - DNA, 33 bp, Homo sapien
ctgtgaaaagcagctcgccaagttctgctatat

SEQ ID NO: 346487 - DNA, 33 bp, Homo sapien
cgtgtgtgtacaccacaatgcatgcaggccttt

SEQ ID NO: 346488 - DNA, 33 bp, Homo sapien
cgtgtgtgtacaccacgatgcatgcaggccttt

SEQ ID NO: 346489 - DNA, 33 bp, Homo sapien
cccatatgagaaaggcaagagtaattattctgt

SEQ ID NO: 346490 - DNA, 33 bp, Homo sapien
cccatatgagaaaggcgagagtaattattctgt

SEQ ID NO: 346491 - DNA, 33 bp, Homo sapien
cataaaactacaaatacactgctaatcaggaca

SEQ ID NO: 346492 - DNA, 33 bp, Homo sapien
cataaaactacaaatatactgctaatcaggaca

SEQ ID NO: 346493 - DNA, 33 bp, Homo sapien
gtctgaggaaactgcaccccagataacacagtg

SEQ ID NO: 346494 - DNA, 33 bp, Homo sapien
gtctgaggaaactgcatcccagataacacagtg

SEQ ID NO: 346495 - DNA, 33 bp, Homo sapien
aactaccctaaacctccgaatggccttagagaa

SEQ ID NO: 346496 - DNA, 33 bp, Homo sapien
aactaccctaaacctctgaatggccttagagaa

SEQ ID NO: 346497 - DNA, 33 bp, Homo sapien
taaccaaactgtaagaacattctggctgggtac

SEQ ID NO: 346498 - DNA, 33 bp, Homo sapien
taaccaaactgtaagagcattctggctgggtac

SEQ ID NO: 346499 - DNA, 33 bp, Homo sapien
catgaagtactatttgaaggagaataaatatcc

SEQ ID NO: 346500 - DNA, 33 bp, Homo sapien
catgaagtactatttgtaggagaataaatatcc

SEQ ID NO: 346501 - DNA, 33 bp, Homo sapien
cagcttgggaacattactaaaaccttcgagtgc

SEQ ID NO: 346502 - DNA, 33 bp, Homo sapien
cagcttgggaacattattaaaaccttcgagtgc

SEQ ID NO: 346503 - DNA, 33 bp, Homo sapien
cccttgaatgtcgatacagaaagcacagacaaa

SEQ ID NO: 346504 - DNA, 33 bp, Homo sapien
cccttgaatgtcgatatagaaagcacagacaaa

SEQ ID NO: 346505 - DNA, 33 bp, Homo sapien
cacaatggtttagaaaaagaattcaaggtatgt

SEQ ID NO: 346506 - DNA, 33 bp, Homo sapien
cacaatggtttagaaagagaattcaaggtatgt

SEQ ID NO: 346507 - DNA, 33 bp, Homo sapien
aaaccattgtgttgtaggttattcagtattggt

SEQ ID NO: 346508 - DNA, 33 bp, Homo sapien
aaaccattgtgttgtatgttattcagtattggt

SEQ ID NO: 346509 - DNA, 33 bp, Homo sapien
gccaggtggggagacgaacatggaccaatactg

SEQ ID NO: 346510 - DNA, 33 bp, Homo sapien
gccaggtggggagacggacatggaccaatactg

SEQ ID NO: 346511 - DNA, 33 bp, Homo sapien
atgcttaaatgaaaaaaatcacacagccccaac

SEQ ID NO: 346512 - DNA, 33 bp, Homo sapien
atgcttaaatgaaaaacatcacacagccccaac

SEQ ID NO: 346513 - DNA, 33 bp, Homo sapien
gccagctagctttgcacagagaagttaatgaag

SEQ ID NO: 346514 - DNA, 33 bp, Homo sapien
gccagctagctttgcatagagaagttaatgaag

SEQ ID NO: 346515 - DNA, 33 bp, Homo sapien
gtttacatcagtcatgaagcaaatcataaatgg

SEQ ID NO: 346516 - DNA, 33 bp, Homo sapien
gtttacatcagtcatgtagcaaatcataaatgg

SEQ ID NO: 346517 - DNA, 33 bp, Homo sapien
taagccaatacaggcaatagcccttaaggaaga

SEQ ID NO: 346518 - DNA, 33 bp, Homo sapien
taagccaatacaggcagtagcccttaaggaaga

SEQ ID NO: 346519 - DNA, 33 bp, Homo sapien
actgcagcctttaccacgcttgtggctggctgt

SEQ ID NO: 346520 - DNA, 33 bp, Homo sapien
actgcagcctttaccatgcttgtggctggctgt

SEQ ID NO: 346521 - DNA, 33 bp, Homo sapien
atgaaattagcgcatgaagaaacacattctggt

SEQ ID NO: 346522 - DNA, 33 bp, Homo sapien
atgaaattagcgcatggagaaacacattctggt

SEQ ID NO: 346523 - DNA, 33 bp, Homo sapien
atttgataccagaaaaacctccagagacaaacc

SEQ ID NO: 346524 - DNA, 33 bp, Homo sapien
atttgataccagaaaagcctccagagacaaacc

SEQ ID NO: 346525 - DNA, 33 bp, Homo sapien
ctggacactggcaaaacttaaacaagggctgtt

SEQ ID NO: 346526 - DNA, 33 bp, Homo sapien
ctggacactggcaaaatttaaacaagggctgtt

SEQ ID NO: 346527 - DNA, 33 bp, Homo sapien
gaatcagaagaagctcaaagggttttccctgat

SEQ ID NO: 346528 - DNA, 33 bp, Homo sapien
gaatcagaagaagctcgaagggttttccctgat

SEQ ID NO: 346529 - DNA, 33 bp, Homo sapien
cttctgatgagtccagaaagcatttctccaaca

SEQ ID NO: 346530 - DNA, 33 bp, Homo sapien
cttctgatgagtccaggaagcatttctccaaca

SEQ ID NO: 346531 - DNA, 33 bp, Homo sapien
ttaatcagcaattggcaagtttttcctttaaag

SEQ ID NO: 346532 - DNA, 33 bp, Homo sapien
ttaatcagcaattggcgagtttttcctttaaag

SEQ ID NO: 346533 - DNA, 33 bp, Homo sapien
aaattgcatcccaaacaaagagtcgctgcactt

SEQ ID NO: 346534 - DNA, 33 bp, Homo sapien
aaattgcatcccaaaccaagagtcgctgcactt

SEQ ID NO: 346535 - DNA, 33 bp, Homo sapien
ttcccagttgaggcaaatactgtcatagaaatg

SEQ ID NO: 346536 - DNA, 33 bp, Homo sapien
ttcccagttgaggcaagtactgtcatagaaatg

SEQ ID NO: 346537 - DNA, 33 bp, Homo sapien
tcaatgtttagcgaaaagtttttatacaacgtc

SEQ ID NO: 346538 - DNA, 33 bp, Homo sapien
tcaatgtttagcgaaaggtttttatacaacgtc

SEQ ID NO: 346539 - DNA, 33 bp, Homo sapien
gctatgtgttctaggggatcatcactgcttcct

SEQ ID NO: 346540 - DNA, 33 bp, Homo sapien
gctatgtgttctagggtatcatcactgcttcct

SEQ ID NO: 346541 - DNA, 33 bp, Homo sapien
agctcccaacatacaacccagcagttcccagtg

SEQ ID NO: 346542 - DNA, 33 bp, Homo sapien
agctcccaacatacaatccagcagttcccagtg

SEQ ID NO: 346543 - DNA, 33 bp, Homo sapien
ttgatctcacttaatgcacttaacagtgaccta

SEQ ID NO: 346544 - DNA, 33 bp, Homo sapien
ttgatctcacttaatgtacttaacagtgaccta

SEQ ID NO: 346545 - DNA, 33 bp, Homo sapien
ttcctacctggtagagactacaaatccctctct

SEQ ID NO: 346546 - DNA, 33 bp, Homo sapien
ttcctacctggtagagcctacaaatccctctct

SEQ ID NO: 346547 - DNA, 33 bp, Homo sapien
aaaaccttataaatacaggacctcaattccatt

SEQ ID NO: 346548 - DNA, 33 bp, Homo sapien
aaaaccttataaatacgggacctcaattccatt

SEQ ID NO: 346549 - DNA, 33 bp, Homo sapien
ttatggctggtcagggccactctttatagcaag

SEQ ID NO: 346550 - DNA, 33 bp, Homo sapien
ttatggctggtcagggtcactctttatagcaag

SEQ ID NO: 346551 - DNA, 33 bp, Homo sapien
agtgggcaggagctagaaggtggagagtttttg

SEQ ID NO: 346552 - DNA, 33 bp, Homo sapien
agtgggcaggagctaggaggtggagagtttttg

SEQ ID NO: 346553 - DNA, 33 bp, Homo sapien
gcttagtgataaggaacgctttgtgctggggtt

SEQ ID NO: 346554 - DNA, 33 bp, Homo sapien
gcttagtgataaggaatgctttgtgctggggtt

SEQ ID NO: 346555 - DNA, 33 bp, Homo sapien
agctttgcaactgacaacaggtttcattttctc

SEQ ID NO: 346556 - DNA, 33 bp, Homo sapien
agctttgcaactgacatcaggtttcattttctc

SEQ ID NO: 346557 - DNA, 33 bp, Homo sapien
atcagcccaaagatccaagctaggaactcttct

SEQ ID NO: 346558 - DNA, 33 bp, Homo sapien
atcagcccaaagatccgagctaggaactcttct

SEQ ID NO: 346559 - DNA, 33 bp, Homo sapien
ggcacaccattgttcacagtattcttttacaat

SEQ ID NO: 346560 - DNA, 33 bp, Homo sapien
ggcacaccattgttcagagtattcttttacaat

SEQ ID NO: 346561 - DNA, 33 bp, Homo sapien
agtatacaaactaccaaaactgactaaacgaga

SEQ ID NO: 346562 - DNA, 33 bp, Homo sapien
agtatacaaactaccacaactgactaaacgaga

SEQ ID NO: 346563 - DNA, 33 bp, Homo sapien
aaaaggacccccttgccacgccaaagttcagtt

SEQ ID NO: 346564 - DNA, 33 bp, Homo sapien
aaaaggacccccttgcgacgccaaagttcagtt

SEQ ID NO: 346565 - DNA, 33 bp, Homo sapien
ataagttctagtattccatagcattacagggtg

SEQ ID NO: 346566 - DNA, 33 bp, Homo sapien
ataagttctagtattctatagcattacagggtg

SEQ ID NO: 346567 - DNA, 33 bp, Homo sapien
ggaaatgtcaaagggaacactcagaaagcttaa

SEQ ID NO: 346568 - DNA, 33 bp, Homo sapien
ggaaatgtcaaagggaccactcagaaagcttaa

SEQ ID NO: 346569 - DNA, 33 bp, Homo sapien
cttatatacaagacaccactttactcaatcctt

SEQ ID NO: 346570 - DNA, 33 bp, Homo sapien
cttatatacaagacactactttactcaatcctt

SEQ ID NO: 346571 - DNA, 33 bp, Homo sapien
cagacaaggaagttcacattttcaaatgggtct

SEQ ID NO: 346572 - DNA, 33 bp, Homo sapien
cagacaaggaagttcatattttcaaatgggtct

SEQ ID NO: 346573 - DNA, 33 bp, Homo sapien
tggacttctcccaaagaaagttcatgtggcagc

SEQ ID NO: 346574 - DNA, 33 bp, Homo sapien
tggacttctcccaaagcaagttcatgtggcagc

SEQ ID NO: 346575 - DNA, 33 bp, Homo sapien
ttatctgaatgctgtcacagggaaagcacaccc

SEQ ID NO: 346576 - DNA, 33 bp, Homo sapien
ttatctgaatgctgtctcagggaaagcacaccc

SEQ ID NO: 346577 - DNA, 33 bp, Homo sapien
gtatgtgtttactgggacaaaggtagggccaat

SEQ ID NO: 346578 - DNA, 33 bp, Homo sapien
gtatgtgtttactggggcaaaggtagggccaat

SEQ ID NO: 346579 - DNA, 33 bp, Homo sapien
ggaatttgtgaagcagaagcaacaagacttgct

SEQ ID NO: 346580 - DNA, 33 bp, Homo sapien
ggaatttgtgaagcaggagcaacaagacttgct

SEQ ID NO: 346581 - DNA, 33 bp, Homo sapien
ctcctgtgccatcactcaacatgagacagaagc

SEQ ID NO: 346582 - DNA, 33 bp, Homo sapien
ctcctgtgccatcacttaacatgagacagaagc

SEQ ID NO: 346583 - DNA, 33 bp, Homo sapien
ttacaacaatagcacaaaataaatcatgtaatt

SEQ ID NO: 346584 - DNA, 33 bp, Homo sapien
ttacaacaatagcacagaataaatcatgtaatt

SEQ ID NO: 346585 - DNA, 33 bp, Homo sapien
ggcctcacagtcttgaagttgagagccagctaa

SEQ ID NO: 346586 - DNA, 33 bp, Homo sapien
ggcctcacagtcttgacgttgagagccagctaa

SEQ ID NO: 346587 - DNA, 33 bp, Homo sapien
aactttcactaaatgcccaggtctaggtggtct

SEQ ID NO: 346588 - DNA, 33 bp, Homo sapien
aactttcactaaatgcgcaggtctaggtggtct

SEQ ID NO: 346589 - DNA, 33 bp, Homo sapien
tcttgtaccaaacccaaatgagttatcagtcct

SEQ ID NO: 346590 - DNA, 33 bp, Homo sapien
tcttgtaccaaacccagatgagttatcagtcct

SEQ ID NO: 346591 - DNA, 33 bp, Homo sapien
ttcatctcatcacctaaagcatggcctgtcttc

SEQ ID NO: 346592 - DNA, 33 bp, Homo sapien
ttcatctcatcacctacagcatggcctgtcttc

SEQ ID NO: 346593 - DNA, 33 bp, Homo sapien
catggaactaattcagcagaagctggtgctcag

SEQ ID NO: 346594 - DNA, 33 bp, Homo sapien
catggaactaattcagtagaagctggtgctcag

SEQ ID NO: 346595 - DNA, 33 bp, Homo sapien
cacgagtctcacaaaaacaattcctgtctcttg

SEQ ID NO: 346596 - DNA, 33 bp, Homo sapien
cacgagtctcacaaaagcaattcctgtctcttg

SEQ ID NO: 346597 - DNA, 33 bp, Homo sapien
agatgatgagctcaaacaatgccccaggatgag

SEQ ID NO: 346598 - DNA, 33 bp, Homo sapien
agatgatgagctcaaagaatgccccaggatgag

SEQ ID NO: 346599 - DNA, 33 bp, Homo sapien
gcagggaggtttgcccaaagcatcgtggtgatg

SEQ ID NO: 346600 - DNA, 33 bp, Homo sapien
gcagggaggtttgcccgaagcatcgtggtgatg

SEQ ID NO: 346601 - DNA, 33 bp, Homo sapien
ggagtttctaaaggaaaacaggagttaccatct

SEQ ID NO: 346602 - DNA, 33 bp, Homo sapien
ggagtttctaaaggaatacaggagttaccatct

SEQ ID NO: 346603 - DNA, 33 bp, Homo sapien
ctgcaagttccatgaacgcagggaccacaccta

SEQ ID NO: 346604 - DNA, 33 bp, Homo sapien
ctgcaagttccatgaatgcagggaccacaccta

SEQ ID NO: 346605 - DNA, 33 bp, Homo sapien
gggcatggaaccaaggccacagagcagtgcaat

SEQ ID NO: 346606 - DNA, 33 bp, Homo sapien
gggcatggaaccaaggtcacagagcagtgcaat

SEQ ID NO: 346607 - DNA, 33 bp, Homo sapien
aagcctctcttcgttaaataggatgggggagaa

SEQ ID NO: 346608 - DNA, 33 bp, Homo sapien
aagcctctcttcgttagataggatgggggagaa

SEQ ID NO: 346609 - DNA, 33 bp, Homo sapien
taaaagcctgaggccacagagaggtccaagcta

SEQ ID NO: 346610 - DNA, 33 bp, Homo sapien
taaaagcctgaggccagagagaggtccaagcta

SEQ ID NO: 346611 - DNA, 33 bp, Homo sapien
ttaaactcccctcaacaaagtcacatttttaca

SEQ ID NO: 346612 - DNA, 33 bp, Homo sapien
ttaaactcccctcaaccaagtcacatttttaca

SEQ ID NO: 346613 - DNA, 33 bp, Homo sapien
ctaataggaggatgccaggaatctacatttcca

SEQ ID NO: 346614 - DNA, 33 bp, Homo sapien
ctaataggaggatgccgggaatctacatttcca

SEQ ID NO: 346615 - DNA, 33 bp, Homo sapien
tgtgatttgtatcccccgggaagtatggcttga

SEQ ID NO: 346616 - DNA, 33 bp, Homo sapien
tgtgatttgtatcccctgggaagtatggcttga

SEQ ID NO: 346617 - DNA, 33 bp, Homo sapien
agtttctcctctgacccatgggacctggccttt

SEQ ID NO: 346618 - DNA, 33 bp, Homo sapien
agtttctcctctgacctatgggacctggccttt

SEQ ID NO: 346619 - DNA, 33 bp, Homo sapien
taatagtacaaaataacaatgaaagtaacacct

SEQ ID NO: 346620 - DNA, 33 bp, Homo sapien
taatagtacaaaataagaatgaaagtaacacct

SEQ ID NO: 346621 - DNA, 33 bp, Homo sapien
cctagtgctccatgagccacgttactgaattgc

SEQ ID NO: 346622 - DNA, 33 bp, Homo sapien
cctagtgctccatgaggcacgttactgaattgc

SEQ ID NO: 346623 - DNA, 33 bp, Homo sapien
aacacattactgttaacgcatcatttgggattg

SEQ ID NO: 346624 - DNA, 33 bp, Homo sapien
aacacattactgttaaggcatcatttgggattg

SEQ ID NO: 346625 - DNA, 33 bp, Homo sapien
atgtgttagccgtagaagccattgatgaatgaa

SEQ ID NO: 346626 - DNA, 33 bp, Homo sapien
atgtgttagccgtagacgccattgatgaatgaa

SEQ ID NO: 346627 - DNA, 33 bp, Homo sapien
gccgcttcctctccaaaattcacataggcgaaa

SEQ ID NO: 346628 - DNA, 33 bp, Homo sapien
gccgcttcctctccaacattcacataggcgaaa

SEQ ID NO: 346629 - DNA, 33 bp, Homo sapien
gacttctcggtcttcactcaaatttctccaagg

SEQ ID NO: 346630 - DNA, 33 bp, Homo sapien
gacttctcggtcttcattcaaatttctccaagg

SEQ ID NO: 346631 - DNA, 33 bp, Homo sapien
gagaaggcaggggtcaccgcggccttacctctg

SEQ ID NO: 346632 - DNA, 33 bp, Homo sapien
gagaaggcaggggtcagcgcggccttacctctg

SEQ ID NO: 346633 - DNA, 33 bp, Homo sapien
ttatcctttgaaggtacgttggagttttggaaa

SEQ ID NO: 346634 - DNA, 33 bp, Homo sapien
ttatcctttgaaggtaggttggagttttggaaa

SEQ ID NO: 346635 - DNA, 33 bp, Homo sapien
gggctacttaaatgccactgagatgactgagga

SEQ ID NO: 346636 - DNA, 33 bp, Homo sapien
gggctacttaaatgccgctgagatgactgagga

SEQ ID NO: 346637 - DNA, 33 bp, Homo sapien
gagtaggaggaggtaacgaacttgtaagtgctt

SEQ ID NO: 346638 - DNA, 33 bp, Homo sapien
gagtaggaggaggtaatgaacttgtaagtgctt

SEQ ID NO: 346639 - DNA, 33 bp, Homo sapien
tggctgctgaaacaaaaagggattgcagtgtcg

SEQ ID NO: 346640 - DNA, 33 bp, Homo sapien
tggctgctgaaacaaacagggattgcagtgtcg

SEQ ID NO: 346641 - DNA, 33 bp, Homo sapien
tcattgcagtttgaatcaaggaacgtgaaaaat

SEQ ID NO: 346642 - DNA, 33 bp, Homo sapien
tcattgcagtttgaattaaggaacgtgaaaaat

SEQ ID NO: 346643 - DNA, 33 bp, Homo sapien
gaagcttggggctgtaagataaagggccttgaa

SEQ ID NO: 346644 - DNA, 33 bp, Homo sapien
gaagcttggggctgtatgataaagggccttgaa

SEQ ID NO: 346645 - DNA, 33 bp, Homo sapien
tgtataatgagggagaacagacatgaacaaggc

SEQ ID NO: 346646 - DNA, 33 bp, Homo sapien
tgtataatgagggagagcagacatgaacaaggc

SEQ ID NO: 346647 - DNA, 33 bp, Homo sapien
gccggagaacatctcaatctgatctcaggagag

SEQ ID NO: 346648 - DNA, 33 bp, Homo sapien
gccggagaacatctcagtctgatctcaggagag

SEQ ID NO: 346649 - DNA, 33 bp, Homo sapien
gaagtgacatagtggaaagccggcatgctggga

SEQ ID NO: 346650 - DNA, 33 bp, Homo sapien
gaagtgacatagtggagagccggcatgctggga

SEQ ID NO: 346651 - DNA, 33 bp, Homo sapien
cccacttccatgcacaatatttaaacagccacc

SEQ ID NO: 346652 - DNA, 33 bp, Homo sapien
cccacttccatgcacagtatttaaacagccacc

SEQ ID NO: 346653 - DNA, 33 bp, Homo sapien
gacagtcttcctatctaaaatcagcattgcagt

SEQ ID NO: 346654 - DNA, 33 bp, Homo sapien
gacagtcttcctatctgaaatcagcattgcagt

SEQ ID NO: 346655 - DNA, 33 bp, Homo sapien
gacaactgatagtccacagttcctttatttaca

SEQ ID NO: 346656 - DNA, 33 bp, Homo sapien
gacaactgatagtccatagttcctttatttaca

SEQ ID NO: 346657 - DNA, 33 bp, Homo sapien
gtcctcaataagctggccatctgatggggagat

SEQ ID NO: 346658 - DNA, 33 bp, Homo sapien
gtcctcaataagctgggcatctgatggggagat

SEQ ID NO: 346659 - DNA, 33 bp, Homo sapien
ccaaaccccagtcaaacgtccgctacctcctcc

SEQ ID NO: 346660 - DNA, 33 bp, Homo sapien
ccaaaccccagtcaaatgtccgctacctcctcc

SEQ ID NO: 346661 - DNA, 33 bp, Homo sapien
tagtgaggattcctacactgactaagcacactg

SEQ ID NO: 346662 - DNA, 33 bp, Homo sapien
tagtgaggattcctacgctgactaagcacactg

SEQ ID NO: 346663 - DNA, 33 bp, Homo sapien
atcctcactaaagcagaagaagttccattcaaa

SEQ ID NO: 346664 - DNA, 33 bp, Homo sapien
atcctcactaaagcaggagaagttccattcaaa

SEQ ID NO: 346665 - DNA, 33 bp, Homo sapien
gggaccttttgttcaaagtagcaccaatccaca

SEQ ID NO: 346666 - DNA, 33 bp, Homo sapien
gggaccttttgttcaaggtagcaccaatccaca

SEQ ID NO: 346667 - DNA, 33 bp, Homo sapien
aaggaatggaagtctcagaagagcagcgtggct

SEQ ID NO: 346668 - DNA, 33 bp, Homo sapien
aaggaatggaagtctcggaagagcagcgtggct

SEQ ID NO: 346669 - DNA, 33 bp, Homo sapien
acacctcatggttctccaaatggtgaccatctc

SEQ ID NO: 346670 - DNA, 33 bp, Homo sapien
acacctcatggttctctaaatggtgaccatctc

SEQ ID NO: 346671 - DNA, 33 bp, Homo sapien
ccggagcaggaatcaccacatagttaagaaaca

SEQ ID NO: 346672 - DNA, 33 bp, Homo sapien
ccggagcaggaatcactacatagttaagaaaca

SEQ ID NO: 346673 - DNA, 33 bp, Homo sapien
tctttaacacaactataaggcgcaggctcttac

SEQ ID NO: 346674 - DNA, 33 bp, Homo sapien
tctttaacacaactatgaggcgcaggctcttac

SEQ ID NO: 346675 - DNA, 33 bp, Homo sapien
tctggcaaatccgggaaaatctagaattccata

SEQ ID NO: 346676 - DNA, 33 bp, Homo sapien
tctggcaaatccgggagaatctagaattccata

SEQ ID NO: 346677 - DNA, 33 bp, Homo sapien
atgagccttgagtgtcacagcagggtaatgcct

SEQ ID NO: 346678 - DNA, 33 bp, Homo sapien
atgagccttgagtgtcgcagcagggtaatgcct

SEQ ID NO: 346679 - DNA, 33 bp, Homo sapien
caggttcttctgtgtacctacttctccacactt

SEQ ID NO: 346680 - DNA, 33 bp, Homo sapien
caggttcttctgtgtagctacttctccacactt

SEQ ID NO: 346681 - DNA, 33 bp, Homo sapien
gaggtcagagatgaaaggtcaggcattaggttc

SEQ ID NO: 346682 - DNA, 33 bp, Homo sapien
gaggtcagagatgaaatgtcaggcattaggttc

SEQ ID NO: 346683 - DNA, 33 bp, Homo sapien
ccacctgctgttcacacattctccacccaatgg

SEQ ID NO: 346684 - DNA, 33 bp, Homo sapien
ccacctgctgttcacatattctccacccaatgg

SEQ ID NO: 346685 - DNA, 33 bp, Homo sapien
ttgactatcatctaacaactggcatctagactc

SEQ ID NO: 346686 - DNA, 33 bp, Homo sapien
ttgactatcatctaactactggcatctagactc

SEQ ID NO: 346687 - DNA, 33 bp, Homo sapien
gctggctttcactctgaactaaatgctctgttc

SEQ ID NO: 346688 - DNA, 33 bp, Homo sapien
gctggctttcactctggactaaatgctctgttc

SEQ ID NO: 346689 - DNA, 33 bp, Homo sapien
gcagcatagcggcttccagcctgactctgactc

SEQ ID NO: 346690 - DNA, 33 bp, Homo sapien
gcagcatagcggcttctagcctgactctgactc

SEQ ID NO: 346691 - DNA, 33 bp, Homo sapien
aaaactttatatgaatcagtgtaaaactgcact

SEQ ID NO: 346692 - DNA, 33 bp, Homo sapien
aaaactttatatgaatgagtgtaaaactgcact

SEQ ID NO: 346693 - DNA, 33 bp, Homo sapien
acccatttttttctcaataggttatcctaccac

SEQ ID NO: 346694 - DNA, 33 bp, Homo sapien
acccatttttttctcagtaggttatcctaccac

SEQ ID NO: 346695 - DNA, 33 bp, Homo sapien
accgaaggggaaagaaacgacagttacgggcct

SEQ ID NO: 346696 - DNA, 33 bp, Homo sapien
accgaaggggaaagaaccgacagttacgggcct

SEQ ID NO: 346697 - DNA, 33 bp, Homo sapien
agtggatgcctgaaaaagtggatgatattgaac

SEQ ID NO: 346698 - DNA, 33 bp, Homo sapien
agtggatgcctgaaaacgtggatgatattgaac

SEQ ID NO: 346699 - DNA, 33 bp, Homo sapien
ccaggtagaggtgtcaactatttttttcaaaca

SEQ ID NO: 346700 - DNA, 33 bp, Homo sapien
ccaggtagaggtgtcatctatttttttcaaaca

SEQ ID NO: 346701 - DNA, 33 bp, Homo sapien
gctttccagtaaaatacaatgctagatccaaaa

SEQ ID NO: 346702 - DNA, 33 bp, Homo sapien
gctttccagtaaaatataatgctagatccaaaa

SEQ ID NO: 346703 - DNA, 33 bp, Homo sapien
ataactcattttacacaagtgattgttttgcag

SEQ ID NO: 346704 - DNA, 33 bp, Homo sapien
ataactcattttacacgagtgattgttttgcag

SEQ ID NO: 346705 - DNA, 33 bp, Homo sapien
aatcctatttattcaaactctgctttgtgtctt

SEQ ID NO: 346706 - DNA, 33 bp, Homo sapien
aatcctatttattcaatctctgctttgtgtctt

SEQ ID NO: 346707 - DNA, 33 bp, Homo sapien
ttgaaatagagtataactgaatgcagagaatta

SEQ ID NO: 346708 - DNA, 33 bp, Homo sapien
ttgaaatagagtataattgaatgcagagaatta

SEQ ID NO: 346709 - DNA, 33 bp, Homo sapien
ttactatttctcatgagtatatgagttggctgc

SEQ ID NO: 346710 - DNA, 33 bp, Homo sapien
ttactatttctcatgattatatgagttggctgc

SEQ ID NO: 346711 - DNA, 33 bp, Homo sapien
cgctggcacatttaaccatacgtgaaatataca

SEQ ID NO: 346712 - DNA, 33 bp, Homo sapien
cgctggcacatttaacgatacgtgaaatataca

SEQ ID NO: 346713 - DNA, 33 bp, Homo sapien
tttcccatcacccttaccacatttctctagtca

SEQ ID NO: 346714 - DNA, 33 bp, Homo sapien
tttcccatcacccttatcacatttctctagtca

SEQ ID NO: 346715 - DNA, 33 bp, Homo sapien
attagtgctgtgagtgaattattaccattattt

SEQ ID NO: 346716 - DNA, 33 bp, Homo sapien
attagtgctgtgagtgtattattaccattattt

SEQ ID NO: 346717 - DNA, 33 bp, Homo sapien
agaacacacagaccctcaagactatgtttgtag

SEQ ID NO: 346718 - DNA, 33 bp, Homo sapien
agaacacacagaccctgaagactatgtttgtag

SEQ ID NO: 346719 - DNA, 33 bp, Homo sapien
gactctttcgtgaaaaagaaactaattgtatca

SEQ ID NO: 346720 - DNA, 33 bp, Homo sapien
gactctttcgtgaaaaggaaactaattgtatca

SEQ ID NO: 346721 - DNA, 33 bp, Homo sapien
catcggagaggaaaaagtggcagtgtgggacta

SEQ ID NO: 346722 - DNA, 33 bp, Homo sapien
catcggagaggaaaaattggcagtgtgggacta

SEQ ID NO: 346723 - DNA, 33 bp, Homo sapien
tatacttgaagacacacgactgtacttgtactg

SEQ ID NO: 346724 - DNA, 33 bp, Homo sapien
tatacttgaagacacatgactgtacttgtactg

SEQ ID NO: 346725 - DNA, 33 bp, Homo sapien
aagcaaatattagtaaactggaaaacatacatg

SEQ ID NO: 346726 - DNA, 33 bp, Homo sapien
aagcaaatattagtaacctggaaaacatacatg

SEQ ID NO: 346727 - DNA, 33 bp, Homo sapien
agatgcagcaatttacgcagattcacgaagacc

SEQ ID NO: 346728 - DNA, 33 bp, Homo sapien
agatgcagcaatttactcagattcacgaagacc

SEQ ID NO: 346729 - DNA, 33 bp, Homo sapien
actaaatgatctctaaagtacttctcaagtcta

SEQ ID NO: 346730 - DNA, 33 bp, Homo sapien
actaaatgatctctaaggtacttctcaagtcta

SEQ ID NO: 346731 - DNA, 33 bp, Homo sapien
gtcaattcaggaaagcaaaatctgttagagaga

SEQ ID NO: 346732 - DNA, 33 bp, Homo sapien
gtcaattcaggaaagcgaaatctgttagagaga

SEQ ID NO: 346733 - DNA, 33 bp, Homo sapien
atcagtacacagttaacgaattggcttaaacaa

SEQ ID NO: 346734 - DNA, 33 bp, Homo sapien
atcagtacacagttaatgaattggcttaaacaa

SEQ ID NO: 346735 - DNA, 33 bp, Homo sapien
ttcccattcatcccacagccatttcaaaccttc

SEQ ID NO: 346736 - DNA, 33 bp, Homo sapien
ttcccattcatcccacggccatttcaaaccttc

SEQ ID NO: 346737 - DNA, 33 bp, Homo sapien
aaatgattgcaagtgacccttacctgtatgtcc

SEQ ID NO: 346738 - DNA, 33 bp, Homo sapien
aaatgattgcaagtgatccttacctgtatgtcc

SEQ ID NO: 346739 - DNA, 33 bp, Homo sapien
ctgtgcctttctagacccttttctccccttttt

SEQ ID NO: 346740 - DNA, 33 bp, Homo sapien
ctgtgcctttctagactcttttctccccttttt

SEQ ID NO: 346741 - DNA, 33 bp, Homo sapien
tctctctttactcgtgcagaaggctcactggga

SEQ ID NO: 346742 - DNA, 33 bp, Homo sapien
tctctctttactcgtgtagaaggctcactggga

SEQ ID NO: 346743 - DNA, 33 bp, Homo sapien
ttatggtatagacacacggtagaatactataca

SEQ ID NO: 346744 - DNA, 33 bp, Homo sapien
ttatggtatagacacatggtagaatactataca

SEQ ID NO: 346745 - DNA, 33 bp, Homo sapien
gaaatctccattccaactaaatgccaaacaagt

SEQ ID NO: 346746 - DNA, 33 bp, Homo sapien
gaaatctccattccaattaaatgccaaacaagt

SEQ ID NO: 346747 - DNA, 33 bp, Homo sapien
tatagtgaaaattggaagcttttctaaataagg

SEQ ID NO: 346748 - DNA, 33 bp, Homo sapien
tatagtgaaaattggatgcttttctaaataagg

SEQ ID NO: 346749 - DNA, 33 bp, Homo sapien
tatttaccacggactcccctggctgatcagtca

SEQ ID NO: 346750 - DNA, 33 bp, Homo sapien
tatttaccacggactctcctggctgatcagtca

SEQ ID NO: 346751 - DNA, 33 bp, Homo sapien
cctgtagcctgggagacggcctgccaaggaagt

SEQ ID NO: 346752 - DNA, 33 bp, Homo sapien
cctgtagcctgggagatggcctgccaaggaagt

SEQ ID NO: 346753 - DNA, 33 bp, Homo sapien
gtctggaaattacccaaagaggggatctgataa

SEQ ID NO: 346754 - DNA, 33 bp, Homo sapien
gtctggaaattacccagagaggggatctgataa

SEQ ID NO: 346755 - DNA, 33 bp, Homo sapien
aaggagccatttttacactcaagaagagttatc

SEQ ID NO: 346756 - DNA, 33 bp, Homo sapien
aaggagccatttttaccctcaagaagagttatc

SEQ ID NO: 346757 - DNA, 33 bp, Homo sapien
gtacagacacatctaaaaacacaaatacgcaga

SEQ ID NO: 346758 - DNA, 33 bp, Homo sapien
gtacagacacatctaagaacacaaatacgcaga

SEQ ID NO: 346759 - DNA, 33 bp, Homo sapien
ctttcctccaaaataccgagtgaggtctctctc

SEQ ID NO: 346760 - DNA, 33 bp, Homo sapien
ctttcctccaaaatactgagtgaggtctctctc

SEQ ID NO: 346761 - DNA, 33 bp, Homo sapien
ttactttgtttttacagacttgtgagaacgacc

SEQ ID NO: 346762 - DNA, 33 bp, Homo sapien
ttactttgtttttacatacttgtgagaacgacc

SEQ ID NO: 346763 - DNA, 33 bp, Homo sapien
ctatagttcaagatctcacatgattccccatca

SEQ ID NO: 346764 - DNA, 33 bp, Homo sapien
ctatagttcaagatctgacatgattccccatca

SEQ ID NO: 346765 - DNA, 33 bp, Homo sapien
ccagcaggtagcagaagggtcaagtcggagcac

SEQ ID NO: 346766 - DNA, 33 bp, Homo sapien
ccagcaggtagcagaatggtcaagtcggagcac

SEQ ID NO: 346767 - DNA, 33 bp, Homo sapien
aaaagcctccaggatacgcacaaaccccaattc

SEQ ID NO: 346768 - DNA, 33 bp, Homo sapien
aaaagcctccaggatatgcacaaaccccaattc

SEQ ID NO: 346769 - DNA, 33 bp, Homo sapien
cttctgccatcccatcacgtttaagactttgca

SEQ ID NO: 346770 - DNA, 33 bp, Homo sapien
cttctgccatcccatcgcgtttaagactttgca

SEQ ID NO: 346771 - DNA, 33 bp, Homo sapien
ttcatccttactctgacagcttttttagtcctt

SEQ ID NO: 346772 - DNA, 33 bp, Homo sapien
ttcatccttactctgatagcttttttagtcctt

SEQ ID NO: 346773 - DNA, 33 bp, Homo sapien
tttacgaaagctgcacggagaccaaagtttccc

SEQ ID NO: 346774 - DNA, 33 bp, Homo sapien
tttacgaaagctgcactgagaccaaagtttccc

SEQ ID NO: 346775 - DNA, 33 bp, Homo sapien
aaattaacaataatgacgatggcagatatagtt

SEQ ID NO: 346776 - DNA, 33 bp, Homo sapien
aaattaacaataatgatgatggcagatatagtt

SEQ ID NO: 346777 - DNA, 33 bp, Homo sapien
ttagccgtgctgtggacgagacgtgaaaaaggt

SEQ ID NO: 346778 - DNA, 33 bp, Homo sapien
ttagccgtgctgtggatgagacgtgaaaaaggt

SEQ ID NO: 346779 - DNA, 33 bp, Homo sapien
tttcaagggcttaaagaacaaagtgaaagtaac

SEQ ID NO: 346780 - DNA, 33 bp, Homo sapien
tttcaagggcttaaaggacaaagtgaaagtaac

SEQ ID NO: 346781 - DNA, 33 bp, Homo sapien
aacggaaccggggtaaatagagaagtggcatga

SEQ ID NO: 346782 - DNA, 33 bp, Homo sapien
aacggaaccggggtaagtagagaagtggcatga

SEQ ID NO: 346783 - DNA, 33 bp, Homo sapien
tgaagcgtctctaatgacagacagagcccagtg

SEQ ID NO: 346784 - DNA, 33 bp, Homo sapien
tgaagcgtctctaatggcagacagagcccagtg

SEQ ID NO: 346785 - DNA, 33 bp, Homo sapien
agaaaggtgttcacagacctaagatttagtggg

SEQ ID NO: 346786 - DNA, 33 bp, Homo sapien
agaaaggtgttcacaggcctaagatttagtggg

SEQ ID NO: 346787 - DNA, 33 bp, Homo sapien
acaacagtttcctccagtataagacgaaaataa

SEQ ID NO: 346788 - DNA, 33 bp, Homo sapien
acaacagtttcctccattataagacgaaaataa

SEQ ID NO: 346789 - DNA, 33 bp, Homo sapien
ggatgtgaggaagaaacgaatttatctgcagga

SEQ ID NO: 346790 - DNA, 33 bp, Homo sapien
ggatgtgaggaagaaaggaatttatctgcagga

SEQ ID NO: 346791 - DNA, 33 bp, Homo sapien
ctctgaggctctaagaaggacaaaaagagtata

SEQ ID NO: 346792 - DNA, 33 bp, Homo sapien
ctctgaggctctaagagggacaaaaagagtata

SEQ ID NO: 346793 - DNA, 33 bp, Homo sapien
ctctggaatctcttacagggcaaaaagaacttt

SEQ ID NO: 346794 - DNA, 33 bp, Homo sapien
ctctggaatctcttacggggcaaaaagaacttt

SEQ ID NO: 346795 - DNA, 33 bp, Homo sapien
tttaaaacatttaagaggtagtcaaggcctcct

SEQ ID NO: 346796 - DNA, 33 bp, Homo sapien
tttaaaacatttaagatgtagtcaaggcctcct

SEQ ID NO: 346797 - DNA, 33 bp, Homo sapien
aatactacgcagatgaatattctcacactggtg

SEQ ID NO: 346798 - DNA, 33 bp, Homo sapien
aatactacgcagatgagtattctcacactggtg

SEQ ID NO: 346799 - DNA, 33 bp, Homo sapien
aatttacaaaaataccaacttgtgacttgactg

SEQ ID NO: 346800 - DNA, 33 bp, Homo sapien
aatttacaaaaataccgacttgtgacttgactg

SEQ ID NO: 346801 - DNA, 33 bp, Homo sapien
ggagacaaaaatgcgcccccaggaccactcagc

SEQ ID NO: 346802 - DNA, 33 bp, Homo sapien
ggagacaaaaatgcgctcccaggaccactcagc

SEQ ID NO: 346803 - DNA, 33 bp, Homo sapien
ctcaccactaacatgaggtagccttagcaagag

SEQ ID NO: 346804 - DNA, 33 bp, Homo sapien
ctcaccactaacatgatgtagccttagcaagag

SEQ ID NO: 346805 - DNA, 33 bp, Homo sapien
cccctttaagtcaacaaaaggccatgcccctta

SEQ ID NO: 346806 - DNA, 33 bp, Homo sapien
cccctttaagtcaacacaaggccatgcccctta

SEQ ID NO: 346807 - DNA, 33 bp, Homo sapien
ctgtggctctatgaaaaattgtcttggggcaat

SEQ ID NO: 346808 - DNA, 33 bp, Homo sapien
ctgtggctctatgaaagattgtcttggggcaat

SEQ ID NO: 346809 - DNA, 33 bp, Homo sapien
gtctagctgaagtgtacatcttcacattgtaac

SEQ ID NO: 346810 - DNA, 33 bp, Homo sapien
gtctagctgaagtgtatatcttcacattgtaac

SEQ ID NO: 346811 - DNA, 33 bp, Homo sapien
gtgaaaatattctctgaaaacagtctggcactt

SEQ ID NO: 346812 - DNA, 33 bp, Homo sapien
gtgaaaatattctctgcaaacagtctggcactt

SEQ ID NO: 346813 - DNA, 33 bp, Homo sapien
agtcactaggaaacaacgctccaatcgcatacc

SEQ ID NO: 346814 - DNA, 33 bp, Homo sapien
agtcactaggaaacaatgctccaatcgcatacc

SEQ ID NO: 346815 - DNA, 33 bp, Homo sapien
agctcagctgttccagaatctagagtgcaagtc

SEQ ID NO: 346816 - DNA, 33 bp, Homo sapien
agctcagctgttccaggatctagagtgcaagtc

SEQ ID NO: 346817 - DNA, 33 bp, Homo sapien
ttaagaaaagccatcaaacaagggactcattca

SEQ ID NO: 346818 - DNA, 33 bp, Homo sapien
ttaagaaaagccatcagacaagggactcattca

SEQ ID NO: 346819 - DNA, 33 bp, Homo sapien
aactattactaatttccaatgccaccaatattg

SEQ ID NO: 346820 - DNA, 33 bp, Homo sapien
aactattactaatttcgaatgccaccaatattg

SEQ ID NO: 346821 - DNA, 33 bp, Homo sapien
tggaggtaaaagaagacgctgagggcttgaatt

SEQ ID NO: 346822 - DNA, 33 bp, Homo sapien
tggaggtaaaagaagatgctgagggcttgaatt

SEQ ID NO: 346823 - DNA, 33 bp, Homo sapien
gttgtgaggattaagcaaatctggtgggtttgt

SEQ ID NO: 346824 - DNA, 33 bp, Homo sapien
gttgtgaggattaagcgaatctggtgggtttgt

SEQ ID NO: 346825 - DNA, 33 bp, Homo sapien
gagcttcttcattccaagattataaacatattc

SEQ ID NO: 346826 - DNA, 33 bp, Homo sapien
gagcttcttcattccacgattataaacatattc

SEQ ID NO: 346827 - DNA, 33 bp, Homo sapien
ataaatttgagtgtataaaactttagccaggcg

SEQ ID NO: 346828 - DNA, 33 bp, Homo sapien
ataaatttgagtgtatgaaactttagccaggcg

SEQ ID NO: 346829 - DNA, 33 bp, Homo sapien
cctttctccaacagtaagaactggttcccatta

SEQ ID NO: 346830 - DNA, 33 bp, Homo sapien
cctttctccaacagtatgaactggttcccatta

SEQ ID NO: 346831 - DNA, 33 bp, Homo sapien
atcaagctacatgaagcaactgccaaggtgccc

SEQ ID NO: 346832 - DNA, 33 bp, Homo sapien
atcaagctacatgaaggaactgccaaggtgccc

SEQ ID NO: 346833 - DNA, 33 bp, Homo sapien
ttagtccgtgctatacagaagggcagatggccc

SEQ ID NO: 346834 - DNA, 33 bp, Homo sapien
ttagtccgtgctatacggaagggcagatggccc

SEQ ID NO: 346835 - DNA, 33 bp, Homo sapien
actttagttttgaacacgaaagctttgagtggt

SEQ ID NO: 346836 - DNA, 33 bp, Homo sapien
actttagttttgaacatgaaagctttgagtggt

SEQ ID NO: 346837 - DNA, 33 bp, Homo sapien
tgacatgtgattaaatgactagacttaaaaaat

SEQ ID NO: 346838 - DNA, 33 bp, Homo sapien
tgacatgtgattaaattactagacttaaaaaat

SEQ ID NO: 346839 - DNA, 33 bp, Homo sapien
ccacagggccatagacgctgctcaagttgctgc

SEQ ID NO: 346840 - DNA, 33 bp, Homo sapien
ccacagggccatagactctgctcaagttgctgc

SEQ ID NO: 346841 - DNA, 33 bp, Homo sapien
caagaagactccatcaaagtgtatactccccaa

SEQ ID NO: 346842 - DNA, 33 bp, Homo sapien
caagaagactccatcatagtgtatactccccaa

SEQ ID NO: 346843 - DNA, 33 bp, Homo sapien
atcaacgtcaaattcaaaggggcatcatataaa

SEQ ID NO: 346844 - DNA, 33 bp, Homo sapien
atcaacgtcaaattcagaggggcatcatataaa

SEQ ID NO: 346845 - DNA, 33 bp, Homo sapien
cacccactgacgagacacagagaccttggacta

SEQ ID NO: 346846 - DNA, 33 bp, Homo sapien
cacccactgacgagacgcagagaccttggacta

SEQ ID NO: 346847 - DNA, 33 bp, Homo sapien
cagtcaagcaaagaagaaagtagccattgtcag

SEQ ID NO: 346848 - DNA, 33 bp, Homo sapien
cagtcaagcaaagaaggaagtagccattgtcag

SEQ ID NO: 346849 - DNA, 33 bp, Homo sapien
ccccttcctgagtacccgaggcttcacgatatg

SEQ ID NO: 346850 - DNA, 33 bp, Homo sapien
ccccttcctgagtacctgaggcttcacgatatg

SEQ ID NO: 346851 - DNA, 33 bp, Homo sapien
accagcctagcctggaaacaattactctatggc

SEQ ID NO: 346852 - DNA, 33 bp, Homo sapien
accagcctagcctggagacaattactctatggc

SEQ ID NO: 346853 - DNA, 33 bp, Homo sapien
cgagaaacgtggacaacgccgagggctccgaca

SEQ ID NO: 346854 - DNA, 33 bp, Homo sapien
cgagaaacgtggacaatgccgagggctccgaca

SEQ ID NO: 346855 - DNA, 33 bp, Homo sapien
acatctcgggaggtacacatgaatgcttgggtt

SEQ ID NO: 346856 - DNA, 33 bp, Homo sapien
acatctcgggaggtacgcatgaatgcttgggtt

SEQ ID NO: 346857 - DNA, 33 bp, Homo sapien
caactgccacatcttcaatgattactccagcca

SEQ ID NO: 346858 - DNA, 33 bp, Homo sapien
caactgccacatcttctatgattactccagcca

SEQ ID NO: 346859 - DNA, 33 bp, Homo sapien
tgacagacagaaccatcagccaacaaaaagagg

SEQ ID NO: 346860 - DNA, 33 bp, Homo sapien
tgacagacagaaccattagccaacaaaaagagg

SEQ ID NO: 346861 - DNA, 33 bp, Homo sapien
tacagctggctataaaactattaaaaatgcggc

SEQ ID NO: 346862 - DNA, 33 bp, Homo sapien
tacagctggctataaagctattaaaaatgcggc

SEQ ID NO: 346863 - DNA, 33 bp, Homo sapien
cttccactctgtgctcccagttcagtctgaata

SEQ ID NO: 346864 - DNA, 33 bp, Homo sapien
cttccactctgtgctcgcagttcagtctgaata

SEQ ID NO: 346865 - DNA, 33 bp, Homo sapien
aatctagatacaataacccagcctgtatcagtt

SEQ ID NO: 346866 - DNA, 33 bp, Homo sapien
aatctagatacaataagccagcctgtatcagtt

SEQ ID NO: 346867 - DNA, 33 bp, Homo sapien
attggcagagaatatacggagatccgggagaaa

SEQ ID NO: 346868 - DNA, 33 bp, Homo sapien
attggcagagaatatatggagatccgggagaaa

SEQ ID NO: 346869 - DNA, 33 bp, Homo sapien
gtaaacttgtctcttcactgtagctgctcttag

SEQ ID NO: 346870 - DNA, 33 bp, Homo sapien
gtaaacttgtctcttcgctgtagctgctcttag

SEQ ID NO: 346871 - DNA, 33 bp, Homo sapien
ctcctacatccaaagcaactacttttcctattg

SEQ ID NO: 346872 - DNA, 33 bp, Homo sapien
ctcctacatccaaagctactacttttcctattg

SEQ ID NO: 346873 - DNA, 33 bp, Homo sapien
ttagaacctcacagaaataattgctgcaatcaa

SEQ ID NO: 346874 - DNA, 33 bp, Homo sapien
ttagaacctcacagaagtaattgctgcaatcaa

SEQ ID NO: 346875 - DNA, 33 bp, Homo sapien
aagctaagcattttgaaaacagcttctgccttt

SEQ ID NO: 346876 - DNA, 33 bp, Homo sapien
aagctaagcattttgagaacagcttctgccttt

SEQ ID NO: 346877 - DNA, 33 bp, Homo sapien
accatattgtgctgcacgatttaaccatttttc

SEQ ID NO: 346878 - DNA, 33 bp, Homo sapien
accatattgtgctgcaggatttaaccatttttc

SEQ ID NO: 346879 - DNA, 33 bp, Homo sapien
aatcataacctggacaataacctggaaagataa

SEQ ID NO: 346880 - DNA, 33 bp, Homo sapien
aatcataacctggacagtaacctggaaagataa

SEQ ID NO: 346881 - DNA, 33 bp, Homo sapien
ctttttgatagtttgaaggtcattctctagtag

SEQ ID NO: 346882 - DNA, 33 bp, Homo sapien
ctttttgatagtttgagggtcattctctagtag

SEQ ID NO: 346883 - DNA, 33 bp, Homo sapien
aaggatgggataactcaaggtggggggcttcca

SEQ ID NO: 346884 - DNA, 33 bp, Homo sapien
aaggatgggataactcgaggtggggggcttcca

SEQ ID NO: 346885 - DNA, 33 bp, Homo sapien
attgatatattatgtcgccctaaaatgtataaa

SEQ ID NO: 346886 - DNA, 33 bp, Homo sapien
attgatatattatgtctccctaaaatgtataaa

SEQ ID NO: 346887 - DNA, 33 bp, Homo sapien
ttgttcacctagagaacgctaaaagcttcagaa

SEQ ID NO: 346888 - DNA, 33 bp, Homo sapien
ttgttcacctagagaatgctaaaagcttcagaa

SEQ ID NO: 346889 - DNA, 33 bp, Homo sapien
gattaagcagctttccaatcacttactttagag

SEQ ID NO: 346890 - DNA, 33 bp, Homo sapien
gattaagcagctttcccatcacttactttagag

SEQ ID NO: 346891 - DNA, 33 bp, Homo sapien
aaactcctgatttaaaatctctgttaagctggg

SEQ ID NO: 346892 - DNA, 33 bp, Homo sapien
aaactcctgatttaaagtctctgttaagctggg

SEQ ID NO: 346893 - DNA, 33 bp, Homo sapien
aagtaatatgtgaaaacaaaacttgaattttta

SEQ ID NO: 346894 - DNA, 33 bp, Homo sapien
aagtaatatgtgaaaagaaaacttgaattttta

SEQ ID NO: 346895 - DNA, 33 bp, Homo sapien
aagaaattttggagaacgtgttggtgattggac

SEQ ID NO: 346896 - DNA, 33 bp, Homo sapien
aagaaattttggagaatgtgttggtgattggac

SEQ ID NO: 346897 - DNA, 33 bp, Homo sapien
ccttacatcatttaccagaaatacacattttat

SEQ ID NO: 346898 - DNA, 33 bp, Homo sapien
ccttacatcatttaccggaaatacacattttat

SEQ ID NO: 346899 - DNA, 33 bp, Homo sapien
ttcaaggcatgagtacgaccaaaatctgagaaa

SEQ ID NO: 346900 - DNA, 33 bp, Homo sapien
ttcaaggcatgagtactaccaaaatctgagaaa

SEQ ID NO: 346901 - DNA, 33 bp, Homo sapien
taggtaagtccatagcaaacacacatgcctggt

SEQ ID NO: 346902 - DNA, 33 bp, Homo sapien
taggtaagtccatagctaacacacatgcctggt

SEQ ID NO: 346903 - DNA, 33 bp, Homo sapien
tgttttctcagtcttacgagcattgtatgttat

SEQ ID NO: 346904 - DNA, 33 bp, Homo sapien
tgttttctcagtcttatgagcattgtatgttat

SEQ ID NO: 346905 - DNA, 33 bp, Homo sapien
tagtttgataggaataacgttgaatttgtagat

SEQ ID NO: 346906 - DNA, 33 bp, Homo sapien
tagtttgataggaatagcgttgaatttgtagat

SEQ ID NO: 346907 - DNA, 33 bp, Homo sapien
aggccttggaaaagaaacacagaaataatgaag

SEQ ID NO: 346908 - DNA, 33 bp, Homo sapien
aggccttggaaaagaatcacagaaataatgaag

SEQ ID NO: 346909 - DNA, 33 bp, Homo sapien
gaatcagacagcaaaagaatgtgtggacaagat

SEQ ID NO: 346910 - DNA, 33 bp, Homo sapien
gaatcagacagcaaaataatgtgtggacaagat

SEQ ID NO: 346911 - DNA, 33 bp, Homo sapien
gggcactgggccagaccgaagcacagatggaag

SEQ ID NO: 346912 - DNA, 33 bp, Homo sapien
gggcactgggccagacggaagcacagatggaag

SEQ ID NO: 346913 - DNA, 33 bp, Homo sapien
tttcgcacatttcccaaaaaggtcccacagcct

SEQ ID NO: 346914 - DNA, 33 bp, Homo sapien
tttcgcacatttcccagaaaggtcccacagcct

SEQ ID NO: 346915 - DNA, 33 bp, Homo sapien
gagcctctccacctcacagaaggtaacctggcc

SEQ ID NO: 346916 - DNA, 33 bp, Homo sapien
gagcctctccacctcatagaaggtaacctggcc

SEQ ID NO: 346917 - DNA, 33 bp, Homo sapien
aagcttatgctcttaacgggaacagagggtttt

SEQ ID NO: 346918 - DNA, 33 bp, Homo sapien
aagcttatgctcttaatgggaacagagggtttt

SEQ ID NO: 346919 - DNA, 33 bp, Homo sapien
gcctcctctgggtaaacgatgtttcttgagcta

SEQ ID NO: 346920 - DNA, 33 bp, Homo sapien
gcctcctctgggtaaaggatgtttcttgagcta

SEQ ID NO: 346921 - DNA, 33 bp, Homo sapien
attaacactactcagacctaaccactagtaata

SEQ ID NO: 346922 - DNA, 33 bp, Homo sapien
attaacactactcagatctaaccactagtaata

SEQ ID NO: 346923 - DNA, 33 bp, Homo sapien
tgaaagcagcagaaaccgactggggctataact

SEQ ID NO: 346924 - DNA, 33 bp, Homo sapien
tgaaagcagcagaaactgactggggctataact

SEQ ID NO: 346925 - DNA, 33 bp, Homo sapien
cgcctgtacatagtagacctgcactaaaagctg

SEQ ID NO: 346926 - DNA, 33 bp, Homo sapien
cgcctgtacatagtaggcctgcactaaaagctg

SEQ ID NO: 346927 - DNA, 33 bp, Homo sapien
tgcttatctgactatacagaagtcaacatagca

SEQ ID NO: 346928 - DNA, 33 bp, Homo sapien
tgcttatctgactatatagaagtcaacatagca

SEQ ID NO: 346929 - DNA, 33 bp, Homo sapien
ttttaggaatgtttcacagtctgaggcgccagg

SEQ ID NO: 346930 - DNA, 33 bp, Homo sapien
ttttaggaatgtttcatagtctgaggcgccagg

SEQ ID NO: 346931 - DNA, 33 bp, Homo sapien
aaaatgcaactaggagcccatgaatccctcacc

SEQ ID NO: 346932 - DNA, 33 bp, Homo sapien
aaaatgcaactaggagtccatgaatccctcacc

SEQ ID NO: 346933 - DNA, 33 bp, Homo sapien
aggtgatctcagtatcccccagtttccctttgg

SEQ ID NO: 346934 - DNA, 33 bp, Homo sapien
aggtgatctcagtatctcccagtttccctttgg

SEQ ID NO: 346935 - DNA, 33 bp, Homo sapien
cacattccgagtgcaacggaacgggaacttcac

SEQ ID NO: 346936 - DNA, 33 bp, Homo sapien
cacattccgagtgcaatggaacgggaacttcac

SEQ ID NO: 346937 - DNA, 33 bp, Homo sapien
tgtccaaaaggactcacggagaaagcgcctcct

SEQ ID NO: 346938 - DNA, 33 bp, Homo sapien
tgtccaaaaggactcatggagaaagcgcctcct

SEQ ID NO: 346939 - DNA, 33 bp, Homo sapien
tcaaggtcaggcatacaggacagatctgattct

SEQ ID NO: 346940 - DNA, 33 bp, Homo sapien
tcaaggtcaggcatacgggacagatctgattct

SEQ ID NO: 346941 - DNA, 33 bp, Homo sapien
cttcctgttttacatccagcttctgaatacccc

SEQ ID NO: 346942 - DNA, 33 bp, Homo sapien
cttcctgttttacatctagcttctgaatacccc

SEQ ID NO: 346943 - DNA, 33 bp, Homo sapien
tctctataaatacagtcacaattcagaggtact

SEQ ID NO: 346944 - DNA, 33 bp, Homo sapien
tctctataaatacagtgacaattcagaggtact

SEQ ID NO: 346945 - DNA, 33 bp, Homo sapien
cttgccatttccaccgaaggggccaggtcatcc

SEQ ID NO: 346946 - DNA, 33 bp, Homo sapien
cttgccatttccaccggaggggccaggtcatcc

SEQ ID NO: 346947 - DNA, 33 bp, Homo sapien
aattgttattcagggcaatgtcatacactcact

SEQ ID NO: 346948 - DNA, 33 bp, Homo sapien
aattgttattcagggcgatgtcatacactcact

SEQ ID NO: 346949 - DNA, 33 bp, Homo sapien
ctgagcagctctgacacggattcactggtgtcc

SEQ ID NO: 346950 - DNA, 33 bp, Homo sapien
ctgagcagctctgacagggattcactggtgtcc

SEQ ID NO: 346951 - DNA, 33 bp, Homo sapien
ttcaccttaactgttacgtgagaaggccagcaa

SEQ ID NO: 346952 - DNA, 33 bp, Homo sapien
ttcaccttaactgttatgtgagaaggccagcaa

SEQ ID NO: 346953 - DNA, 33 bp, Homo sapien
gactgcacaaggtaatcagccctaaagaaaccc

SEQ ID NO: 346954 - DNA, 33 bp, Homo sapien
gactgcacaaggtaatgagccctaaagaaaccc

SEQ ID NO: 346955 - DNA, 33 bp, Homo sapien
tttagtaaatggaaccaacaaggaagcttttgg

SEQ ID NO: 346956 - DNA, 33 bp, Homo sapien
tttagtaaatggaaccgacaaggaagcttttgg

SEQ ID NO: 346957 - DNA, 33 bp, Homo sapien
cttaagtgtggctgaaatgtaccaagcgtgggg

SEQ ID NO: 346958 - DNA, 33 bp, Homo sapien
cttaagtgtggctgaagtgtaccaagcgtgggg

SEQ ID NO: 346959 - DNA, 33 bp, Homo sapien
tggggagtatggatagaatcggactgccccaga

SEQ ID NO: 346960 - DNA, 33 bp, Homo sapien
tggggagtatggataggatcggactgccccaga

SEQ ID NO: 346961 - DNA, 33 bp, Homo sapien
ccggcgtgccttctgaaatcacccttgcctgct

SEQ ID NO: 346962 - DNA, 33 bp, Homo sapien
ccggcgtgccttctgagatcacccttgcctgct

SEQ ID NO: 346963 - DNA, 33 bp, Homo sapien
ttcaaagcaagcctgcaaggaagtcaaaatcag

SEQ ID NO: 346964 - DNA, 33 bp, Homo sapien
ttcaaagcaagcctgccaggaagtcaaaatcag

SEQ ID NO: 346965 - DNA, 33 bp, Homo sapien
taagatattccaaaaaatccaaattcctctatg

SEQ ID NO: 346966 - DNA, 33 bp, Homo sapien
taagatattccaaaaactccaaattcctctatg

SEQ ID NO: 346967 - DNA, 33 bp, Homo sapien
tttcaatttactgatacgaacatttgttgaagg

SEQ ID NO: 346968 - DNA, 33 bp, Homo sapien
tttcaatttactgatatgaacatttgttgaagg

SEQ ID NO: 346969 - DNA, 33 bp, Homo sapien
catggtacatggtaacccagcctggctaactcc

SEQ ID NO: 346970 - DNA, 33 bp, Homo sapien
catggtacatggtaactcagcctggctaactcc

SEQ ID NO: 346971 - DNA, 33 bp, Homo sapien
gcacagcatttgttccgctttgtcatctgtctt

SEQ ID NO: 346972 - DNA, 33 bp, Homo sapien
gcacagcatttgttcctctttgtcatctgtctt

SEQ ID NO: 346973 - DNA, 33 bp, Homo sapien
tttctatttcacacttaaagaaacaaaggctca

SEQ ID NO: 346974 - DNA, 33 bp, Homo sapien
tttctatttcacactttaagaaacaaaggctca

SEQ ID NO: 346975 - DNA, 33 bp, Homo sapien
agcattatttttttcactcctgtttcacaagaa

SEQ ID NO: 346976 - DNA, 33 bp, Homo sapien
agcattatttttttcagtcctgtttcacaagaa

SEQ ID NO: 346977 - DNA, 33 bp, Homo sapien
aacaagacgacagatacaaagcgcctagcaaat

SEQ ID NO: 346978 - DNA, 33 bp, Homo sapien
aacaagacgacagatagaaagcgcctagcaaat

SEQ ID NO: 346979 - DNA, 33 bp, Homo sapien
attagcatcatcctcaatgagacagtcttcaaa

SEQ ID NO: 346980 - DNA, 33 bp, Homo sapien
attagcatcatcctcagtgagacagtcttcaaa

SEQ ID NO: 346981 - DNA, 33 bp, Homo sapien
acctaagctgaagaaccgggaagtgtgataaag

SEQ ID NO: 346982 - DNA, 33 bp, Homo sapien
acctaagctgaagaactgggaagtgtgataaag

SEQ ID NO: 346983 - DNA, 33 bp, Homo sapien
acaaaaatgcaactaacagctggttggatcagt

SEQ ID NO: 346984 - DNA, 33 bp, Homo sapien
acaaaaatgcaactaatagctggttggatcagt

SEQ ID NO: 346985 - DNA, 33 bp, Homo sapien
gcttagtgcttttgtaggtgtgccctggagcct

SEQ ID NO: 346986 - DNA, 33 bp, Homo sapien
gcttagtgcttttgtatgtgtgccctggagcct

SEQ ID NO: 346987 - DNA, 33 bp, Homo sapien
aatcagtgatgacttacctttcctttgaaacgt

SEQ ID NO: 346988 - DNA, 33 bp, Homo sapien
aatcagtgatgacttatctttcctttgaaacgt

SEQ ID NO: 346989 - DNA, 33 bp, Homo sapien
atgttgcagagttttacgtggtttgaatctggt

SEQ ID NO: 346990 - DNA, 33 bp, Homo sapien
atgttgcagagttttatgtggtttgaatctggt

SEQ ID NO: 346991 - DNA, 33 bp, Homo sapien
agtgcatgaggataacaaatagttgagtgaaac

SEQ ID NO: 346992 - DNA, 33 bp, Homo sapien
agtgcatgaggataacgaatagttgagtgaaac

SEQ ID NO: 346993 - DNA, 33 bp, Homo sapien
ccccaggcaccaactacagtggatacacagtag

SEQ ID NO: 346994 - DNA, 33 bp, Homo sapien
ccccaggcaccaactatagtggatacacagtag

SEQ ID NO: 346995 - DNA, 33 bp, Homo sapien
gtaaaagtctagctcaagaggatggcaggtaat

SEQ ID NO: 346996 - DNA, 33 bp, Homo sapien
gtaaaagtctagctcaggaggatggcaggtaat

SEQ ID NO: 346997 - DNA, 33 bp, Homo sapien
caggcttgatgggaagaagaaaataatcttgag

SEQ ID NO: 346998 - DNA, 33 bp, Homo sapien
caggcttgatgggaaggagaaaataatcttgag

SEQ ID NO: 346999 - DNA, 33 bp, Homo sapien
cctcagtttcctttcccccatctctagcatata

SEQ ID NO: 347000 - DNA, 33 bp, Homo sapien
cctcagtttcctttccgccatctctagcatata

SEQ ID NO: 347001 - DNA, 33 bp, Homo sapien
acacccatttgatagcaaaaagaaatctaggct

SEQ ID NO: 347002 - DNA, 33 bp, Homo sapien
acacccatttgatagcgaaaagaaatctaggct

SEQ ID NO: 347003 - DNA, 33 bp, Homo sapien
tatcccactttggctaccaatacgttaatgcac

SEQ ID NO: 347004 - DNA, 33 bp, Homo sapien
tatcccactttggctagcaatacgttaatgcac

SEQ ID NO: 347005 - DNA, 33 bp, Homo sapien
ttacaggtgtgcacgaccatgcccggctacttt

SEQ ID NO: 347006 - DNA, 33 bp, Homo sapien
ttacaggtgtgcacgatcatgcccggctacttt

SEQ ID NO: 347007 - DNA, 33 bp, Homo sapien
ggttttgtgaacttccacatagacaactactgc

SEQ ID NO: 347008 - DNA, 33 bp, Homo sapien
ggttttgtgaacttccgcatagacaactactgc

SEQ ID NO: 347009 - DNA, 33 bp, Homo sapien
accatcactgggcctacctactagcaccctcct

SEQ ID NO: 347010 - DNA, 33 bp, Homo sapien
accatcactgggcctatctactagcaccctcct

SEQ ID NO: 347011 - DNA, 33 bp, Homo sapien
atgtgctattagacccagaagagacctcatgtt

SEQ ID NO: 347012 - DNA, 33 bp, Homo sapien
atgtgctattagacccggaagagacctcatgtt

SEQ ID NO: 347013 - DNA, 33 bp, Homo sapien
cttgtctctccctgaccccatatatcaaggaca

SEQ ID NO: 347014 - DNA, 33 bp, Homo sapien
cttgtctctccctgactccatatatcaaggaca

SEQ ID NO: 347015 - DNA, 33 bp, Homo sapien
ggcactgaatcaagcaccattggcagggctggc

SEQ ID NO: 347016 - DNA, 33 bp, Homo sapien
ggcactgaatcaagcatcattggcagggctggc

SEQ ID NO: 347017 - DNA, 33 bp, Homo sapien
ctgaggcacagagaaccggcttcccattcagag

SEQ ID NO: 347018 - DNA, 33 bp, Homo sapien
ctgaggcacagagaacgggcttcccattcagag

SEQ ID NO: 347019 - DNA, 33 bp, Homo sapien
ttaaactttcaaagataaaacagagcttcaaag

SEQ ID NO: 347020 - DNA, 33 bp, Homo sapien
ttaaactttcaaagatgaaacagagcttcaaag

SEQ ID NO: 347021 - DNA, 33 bp, Homo sapien
ataatcagaagctcgacgcccctcatccccaac

SEQ ID NO: 347022 - DNA, 33 bp, Homo sapien
ataatcagaagctcgatgcccctcatccccaac

SEQ ID NO: 347023 - DNA, 33 bp, Homo sapien
tggtttctgatgtcaacggacctaagggaatga

SEQ ID NO: 347024 - DNA, 33 bp, Homo sapien
tggtttctgatgtcaatggacctaagggaatga

SEQ ID NO: 347025 - DNA, 33 bp, Homo sapien
gcatctccagatggtaccttcctagatagttgc

SEQ ID NO: 347026 - DNA, 33 bp, Homo sapien
gcatctccagatggtagcttcctagatagttgc

SEQ ID NO: 347027 - DNA, 33 bp, Homo sapien
atctggatacaaaactgagttggttcagcattt

SEQ ID NO: 347028 - DNA, 33 bp, Homo sapien
atctggatacaaaacttagttggttcagcattt

SEQ ID NO: 347029 - DNA, 33 bp, Homo sapien
aagacaaaactttctacaggaagtgtacagatc

SEQ ID NO: 347030 - DNA, 33 bp, Homo sapien
aagacaaaactttctagaggaagtgtacagatc

SEQ ID NO: 347031 - DNA, 33 bp, Homo sapien
ttcgttattatttccactattgtgatttctgtc

SEQ ID NO: 347032 - DNA, 33 bp, Homo sapien
ttcgttattatttccattattgtgatttctgtc

SEQ ID NO: 347033 - DNA, 33 bp, Homo sapien
aagagaaagcgctagaagtttatggtaattaat

SEQ ID NO: 347034 - DNA, 33 bp, Homo sapien
aagagaaagcgctagaggtttatggtaattaat

SEQ ID NO: 347035 - DNA, 33 bp, Homo sapien
caagcaaccagttgaactatgcgtaggatattc

SEQ ID NO: 347036 - DNA, 33 bp, Homo sapien
caagcaaccagttgaagtatgcgtaggatattc

SEQ ID NO: 347037 - DNA, 33 bp, Homo sapien
taggggatggtatcttcaaagtcatcctattga

SEQ ID NO: 347038 - DNA, 33 bp, Homo sapien
taggggatggtatcttgaaagtcatcctattga

SEQ ID NO: 347039 - DNA, 33 bp, Homo sapien
gactcctgaagaccaacagaaaacaaacgaaca

SEQ ID NO: 347040 - DNA, 33 bp, Homo sapien
gactcctgaagaccaatagaaaacaaacgaaca

SEQ ID NO: 347041 - DNA, 33 bp, Homo sapien
catgggtgtctgataggacctgggaggcgcttt

SEQ ID NO: 347042 - DNA, 33 bp, Homo sapien
catgggtgtctgatagtacctgggaggcgcttt

SEQ ID NO: 347043 - DNA, 33 bp, Homo sapien
ctgggcagacaatgaaaccctttgtaacacatg

SEQ ID NO: 347044 - DNA, 33 bp, Homo sapien
ctgggcagacaatgaagccctttgtaacacatg

SEQ ID NO: 347045 - DNA, 33 bp, Homo sapien
ttgtggcgcagcagaacccttgccggtgaaagg

SEQ ID NO: 347046 - DNA, 33 bp, Homo sapien
ttgtggcgcagcagaagccttgccggtgaaagg

SEQ ID NO: 347047 - DNA, 33 bp, Homo sapien
caggccctggcttccactgcagtcacacaaagc

SEQ ID NO: 347048 - DNA, 33 bp, Homo sapien
caggccctggcttccattgcagtcacacaaagc

SEQ ID NO: 347049 - DNA, 33 bp, Homo sapien
aagtgatcaacagcacacaaaactggaggcacc

SEQ ID NO: 347050 - DNA, 33 bp, Homo sapien
aagtgatcaacagcactcaaaactggaggcacc

SEQ ID NO: 347051 - DNA, 33 bp, Homo sapien
gactgacactgtgcatgaggccccaagaaactc

SEQ ID NO: 347052 - DNA, 33 bp, Homo sapien
gactgacactgtgcattaggccccaagaaactc

SEQ ID NO: 347053 - DNA, 33 bp, Homo sapien
ttttcatatgaggtaccactgtgaaggatctgg

SEQ ID NO: 347054 - DNA, 33 bp, Homo sapien
ttttcatatgaggtactactgtgaaggatctgg

SEQ ID NO: 347055 - DNA, 33 bp, Homo sapien
tctggtggtaactaaaaggtaattgtagcccat

SEQ ID NO: 347056 - DNA, 33 bp, Homo sapien
tctggtggtaactaaagggtaattgtagcccat

SEQ ID NO: 347057 - DNA, 33 bp, Homo sapien
actaaatgctctgtaacgtttctgagggatcag

SEQ ID NO: 347058 - DNA, 33 bp, Homo sapien
actaaatgctctgtaatgtttctgagggatcag

SEQ ID NO: 347059 - DNA, 33 bp, Homo sapien
atttgtgaagtttcaactggggtcttgttaagg

SEQ ID NO: 347060 - DNA, 33 bp, Homo sapien
atttgtgaagtttcaattggggtcttgttaagg

SEQ ID NO: 347061 - DNA, 33 bp, Homo sapien
tccaaatattttataaatcactggacagtaatg

SEQ ID NO: 347062 - DNA, 33 bp, Homo sapien
tccaaatattttataattcactggacagtaatg

SEQ ID NO: 347063 - DNA, 33 bp, Homo sapien
cctgactatgagtcaaaagttggcctaaccagt

SEQ ID NO: 347064 - DNA, 33 bp, Homo sapien
cctgactatgagtcaacagttggcctaaccagt

SEQ ID NO: 347065 - DNA, 33 bp, Homo sapien
ctttcagtgtcttctcaaaattgatcgtaggta

SEQ ID NO: 347066 - DNA, 33 bp, Homo sapien
ctttcagtgtcttctcgaaattgatcgtaggta

SEQ ID NO: 347067 - DNA, 33 bp, Homo sapien
caaatgaagtgtcagacccattaaaacttgact

SEQ ID NO: 347068 - DNA, 33 bp, Homo sapien
caaatgaagtgtcagatccattaaaacttgact

SEQ ID NO: 347069 - DNA, 33 bp, Homo sapien
tttacaactgccttgacgtatagaagccttttt

SEQ ID NO: 347070 - DNA, 33 bp, Homo sapien
tttacaactgccttgatgtatagaagccttttt

SEQ ID NO: 347071 - DNA, 33 bp, Homo sapien
gcctaattctaagttcaagcaattcattggaga

SEQ ID NO: 347072 - DNA, 33 bp, Homo sapien
gcctaattctaagttcgagcaattcattggaga

SEQ ID NO: 347073 - DNA, 33 bp, Homo sapien
tttctttcttctgagacaaggactcgctgtctc

SEQ ID NO: 347074 - DNA, 33 bp, Homo sapien
tttctttcttctgagataaggactcgctgtctc

SEQ ID NO: 347075 - DNA, 33 bp, Homo sapien
tcttggcatgtttaatgatcttgttgagcaggt

SEQ ID NO: 347076 - DNA, 33 bp, Homo sapien
tcttggcatgtttaattatcttgttgagcaggt

SEQ ID NO: 347077 - DNA, 33 bp, Homo sapien
ctccaggatgatcaaaaccttagatgtctgttc

SEQ ID NO: 347078 - DNA, 33 bp, Homo sapien
ctccaggatgatcaaacccttagatgtctgttc

SEQ ID NO: 347079 - DNA, 33 bp, Homo sapien
ctaagataagccttctaaagtctaagccactaa

SEQ ID NO: 347080 - DNA, 33 bp, Homo sapien
ctaagataagccttctgaagtctaagccactaa

SEQ ID NO: 347081 - DNA, 33 bp, Homo sapien
atttccttgtgatagaagtctagaaagttggac

SEQ ID NO: 347082 - DNA, 33 bp, Homo sapien
atttccttgtgatagaggtctagaaagttggac

SEQ ID NO: 347083 - DNA, 33 bp, Homo sapien
gacttatggtaaggaaagtcagaccaaagactg

SEQ ID NO: 347084 - DNA, 33 bp, Homo sapien
gacttatggtaaggaaggtcagaccaaagactg

SEQ ID NO: 347085 - DNA, 33 bp, Homo sapien
cttgtgggttagaacaactggcaaaagaggtag

SEQ ID NO: 347086 - DNA, 33 bp, Homo sapien
cttgtgggttagaacagctggcaaaagaggtag

SEQ ID NO: 347087 - DNA, 33 bp, Homo sapien
gttttcttccaaattagaggattcccctacaga

SEQ ID NO: 347088 - DNA, 33 bp, Homo sapien
gttttcttccaaattataggattcccctacaga

SEQ ID NO: 347089 - DNA, 33 bp, Homo sapien
ccggctaccaaagagcaaaggggcacattttga

SEQ ID NO: 347090 - DNA, 33 bp, Homo sapien
ccggctaccaaagagcgaaggggcacattttga

SEQ ID NO: 347091 - DNA, 33 bp, Homo sapien
ccatttcatcaggtgagggatatttgggttttt

SEQ ID NO: 347092 - DNA, 33 bp, Homo sapien
ccatttcatcaggtgatggatatttgggttttt

SEQ ID NO: 347093 - DNA, 33 bp, Homo sapien
cactgtgagccaaaaaattattttaatcacatt

SEQ ID NO: 347094 - DNA, 33 bp, Homo sapien
cactgtgagccaaaaacttattttaatcacatt

SEQ ID NO: 347095 - DNA, 33 bp, Homo sapien
tctgataaccaacacaactacgaagtgcctaac

SEQ ID NO: 347096 - DNA, 33 bp, Homo sapien
tctgataaccaacacagctacgaagtgcctaac

SEQ ID NO: 347097 - DNA, 33 bp, Homo sapien
cagagagagatttaaaaatggtatactacttag

SEQ ID NO: 347098 - DNA, 33 bp, Homo sapien
cagagagagatttaaagatggtatactacttag

SEQ ID NO: 347099 - DNA, 33 bp, Homo sapien
attcacagtgtcaaaggattgacggagcagaga

SEQ ID NO: 347100 - DNA, 33 bp, Homo sapien
attcacagtgtcaaagtattgacggagcagaga

SEQ ID NO: 347101 - DNA, 33 bp, Homo sapien
aagtaatggaaatcagccctgctctcatagtaa

SEQ ID NO: 347102 - DNA, 33 bp, Homo sapien
aagtaatggaaatcagtcctgctctcatagtaa

SEQ ID NO: 347103 - DNA, 33 bp, Homo sapien
caagaggctgagggaaggggcaacattaaaaca

SEQ ID NO: 347104 - DNA, 33 bp, Homo sapien
caagaggctgagggaatgggcaacattaaaaca

SEQ ID NO: 347105 - DNA, 33 bp, Homo sapien
tcagcatagcagttaaatacagcttttagtttc

SEQ ID NO: 347106 - DNA, 33 bp, Homo sapien
tcagcatagcagttaagtacagcttttagtttc

SEQ ID NO: 347107 - DNA, 33 bp, Homo sapien
gaactcctggcacacaataggcatacaataaat

SEQ ID NO: 347108 - DNA, 33 bp, Homo sapien
gaactcctggcacacagtaggcatacaataaat

SEQ ID NO: 347109 - DNA, 33 bp, Homo sapien
tctatttaacctataacgtggctggaccaaact

SEQ ID NO: 347110 - DNA, 33 bp, Homo sapien
tctatttaacctataatgtggctggaccaaact

SEQ ID NO: 347111 - DNA, 33 bp, Homo sapien
ttaaattataaatgcccagttttcaagagagca

SEQ ID NO: 347112 - DNA, 33 bp, Homo sapien
ttaaattataaatgccgagttttcaagagagca

SEQ ID NO: 347113 - DNA, 33 bp, Homo sapien
taacacaatccacaaaagtatataaacacgtca

SEQ ID NO: 347114 - DNA, 33 bp, Homo sapien
taacacaatccacaaaggtatataaacacgtca

SEQ ID NO: 347115 - DNA, 33 bp, Homo sapien
aagtatacctttaccacagcttctgccttgata

SEQ ID NO: 347116 - DNA, 33 bp, Homo sapien
aagtatacctttaccagagcttctgccttgata

SEQ ID NO: 347117 - DNA, 33 bp, Homo sapien
ctcagtgtgattccccaaatttccagcagcatg

SEQ ID NO: 347118 - DNA, 33 bp, Homo sapien
ctcagtgtgattccccgaatttccagcagcatg

SEQ ID NO: 347119 - DNA, 33 bp, Homo sapien
tctttctctgacctaacagtccatggctttacc

SEQ ID NO: 347120 - DNA, 33 bp, Homo sapien
tctttctctgacctaagagtccatggctttacc

SEQ ID NO: 347121 - DNA, 33 bp, Homo sapien
atgattgggcacccccaaggtaagcacttacag

SEQ ID NO: 347122 - DNA, 33 bp, Homo sapien
atgattgggcaccccccaggtaagcacttacag

SEQ ID NO: 347123 - DNA, 33 bp, Homo sapien
gcctcaatttcctgtaggatctctaacatcttt

SEQ ID NO: 347124 - DNA, 33 bp, Homo sapien
gcctcaatttcctgtatgatctctaacatcttt

SEQ ID NO: 347125 - DNA, 33 bp, Homo sapien
tcaaatcaaaggacgccgaacagttggttaaag

SEQ ID NO: 347126 - DNA, 33 bp, Homo sapien
tcaaatcaaaggacgctgaacagttggttaaag

SEQ ID NO: 347127 - DNA, 33 bp, Homo sapien
ggctcgcttagatgacagaccttttttcactga

SEQ ID NO: 347128 - DNA, 33 bp, Homo sapien
ggctcgcttagatgacggaccttttttcactga

SEQ ID NO: 347129 - DNA, 33 bp, Homo sapien
tcctttggccaattcaagctaccaacatgacat

SEQ ID NO: 347130 - DNA, 33 bp, Homo sapien
tcctttggccaattcaggctaccaacatgacat

SEQ ID NO: 347131 - DNA, 33 bp, Homo sapien
gttacaatttcacacactgactacagacaggca

SEQ ID NO: 347132 - DNA, 33 bp, Homo sapien
gttacaatttcacacattgactacagacaggca

SEQ ID NO: 347133 - DNA, 33 bp, Homo sapien
taggccctggggaagcacatatgaatggatact

SEQ ID NO: 347134 - DNA, 33 bp, Homo sapien
taggccctggggaagcgcatatgaatggatact

SEQ ID NO: 347135 - DNA, 33 bp, Homo sapien
cagcttatgcaagaacaaagatggtgtatctcc

SEQ ID NO: 347136 - DNA, 33 bp, Homo sapien
cagcttatgcaagaaccaagatggtgtatctcc

SEQ ID NO: 347137 - DNA, 33 bp, Homo sapien
cacaccatgacaggccaatttaacgtggcttcc

SEQ ID NO: 347138 - DNA, 33 bp, Homo sapien
cacaccatgacaggccgatttaacgtggcttcc

SEQ ID NO: 347139 - DNA, 33 bp, Homo sapien
gactttccatagcttacatccattcaaaacatt

SEQ ID NO: 347140 - DNA, 33 bp, Homo sapien
gactttccatagcttagatccattcaaaacatt

SEQ ID NO: 347141 - DNA, 33 bp, Homo sapien
gggggtctctgcagagccaacgttagggctgcc

SEQ ID NO: 347142 - DNA, 33 bp, Homo sapien
gggggtctctgcagaggcaacgttagggctgcc

SEQ ID NO: 347143 - DNA, 33 bp, Homo sapien
tggtccaagattacccagaactgaactacagtg

SEQ ID NO: 347144 - DNA, 33 bp, Homo sapien
tggtccaagattacccggaactgaactacagtg

SEQ ID NO: 347145 - DNA, 33 bp, Homo sapien
ttcctctacttacggcacttgccagtcccaccc

SEQ ID NO: 347146 - DNA, 33 bp, Homo sapien
ttcctctacttacggcgcttgccagtcccaccc

SEQ ID NO: 347147 - DNA, 33 bp, Homo sapien
ccttttccaagtgcgcggatttggaaccaccat

SEQ ID NO: 347148 - DNA, 33 bp, Homo sapien
ccttttccaagtgcgctgatttggaaccaccat

SEQ ID NO: 347149 - DNA, 33 bp, Homo sapien
ctctgccaggacctgaactgagcttccaagatt

SEQ ID NO: 347150 - DNA, 33 bp, Homo sapien
ctctgccaggacctgagctgagcttccaagatt

SEQ ID NO: 347151 - DNA, 33 bp, Homo sapien
gagctcagggttcagacagaaacctttggcctg

SEQ ID NO: 347152 - DNA, 33 bp, Homo sapien
gagctcagggttcagatagaaacctttggcctg

SEQ ID NO: 347153 - DNA, 33 bp, Homo sapien
gagctcagggatgagagacgcctaactttgtgc

SEQ ID NO: 347154 - DNA, 33 bp, Homo sapien
gagctcagggatgagatacgcctaactttgtgc

SEQ ID NO: 347155 - DNA, 33 bp, Homo sapien
gacagacagacttagaactaccatttatcagct

SEQ ID NO: 347156 - DNA, 33 bp, Homo sapien
gacagacagacttagagctaccatttatcagct

SEQ ID NO: 347157 - DNA, 33 bp, Homo sapien
tggagagttgtaagacaaatggaaggtgggcac

SEQ ID NO: 347158 - DNA, 33 bp, Homo sapien
tggagagttgtaagaccaatggaaggtgggcac

SEQ ID NO: 347159 - DNA, 33 bp, Homo sapien
aacacacgtgaggtacaggtcccggtcagttag

SEQ ID NO: 347160 - DNA, 33 bp, Homo sapien
aacacacgtgaggtacgggtcccggtcagttag

SEQ ID NO: 347161 - DNA, 33 bp, Homo sapien
cgatttccctagccgaatattttccacctcgtc

SEQ ID NO: 347162 - DNA, 33 bp, Homo sapien
cgatttccctagccgagtattttccacctcgtc

SEQ ID NO: 347163 - DNA, 33 bp, Homo sapien
gccacaggccggctacgatctgcttgttcatct

SEQ ID NO: 347164 - DNA, 33 bp, Homo sapien
gccacaggccggctactatctgcttgttcatct

SEQ ID NO: 347165 - DNA, 33 bp, Homo sapien
catgaaaggtataacccggactggaatctcagc

SEQ ID NO: 347166 - DNA, 33 bp, Homo sapien
catgaaaggtataacctggactggaatctcagc

SEQ ID NO: 347167 - DNA, 33 bp, Homo sapien
cccacctcagactgaaagttgccctggggcaga

SEQ ID NO: 347168 - DNA, 33 bp, Homo sapien
cccacctcagactgaaggttgccctggggcaga

SEQ ID NO: 347169 - DNA, 33 bp, Homo sapien
agattccgagacaaaacgagcaaaggtctgacc

SEQ ID NO: 347170 - DNA, 33 bp, Homo sapien
agattccgagacaaaatgagcaaaggtctgacc

SEQ ID NO: 347171 - DNA, 33 bp, Homo sapien
tcctccgcacaaaaatcagacacagctttgcat

SEQ ID NO: 347172 - DNA, 33 bp, Homo sapien
tcctccgcacaaaaattagacacagctttgcat

SEQ ID NO: 347173 - DNA, 33 bp, Homo sapien
cacaccctgctctttaagactccactttagagg

SEQ ID NO: 347174 - DNA, 33 bp, Homo sapien
cacaccctgctctttaggactccactttagagg

SEQ ID NO: 347175 - DNA, 33 bp, Homo sapien
acttggaatccacggcacctaatgtaatgttgg

SEQ ID NO: 347176 - DNA, 33 bp, Homo sapien
acttggaatccacggctcctaatgtaatgttgg

SEQ ID NO: 347177 - DNA, 33 bp, Homo sapien
gtaactgaagagcagaagttaggcgacttgtca

SEQ ID NO: 347178 - DNA, 33 bp, Homo sapien
gtaactgaagagcagaggttaggcgacttgtca

SEQ ID NO: 347179 - DNA, 33 bp, Homo sapien
gtctcagacaccaaaaagctgttttccttctgt

SEQ ID NO: 347180 - DNA, 33 bp, Homo sapien
gtctcagacaccaaaaggctgttttccttctgt

SEQ ID NO: 347181 - DNA, 33 bp, Homo sapien
tcccagctctgaaatgcactagctataaccttg

SEQ ID NO: 347182 - DNA, 33 bp, Homo sapien
tcccagctctgaaatgtactagctataaccttg

SEQ ID NO: 347183 - DNA, 33 bp, Homo sapien
ctgctggaaactccaccactaaaaccattcctt

SEQ ID NO: 347184 - DNA, 33 bp, Homo sapien
ctgctggaaactccactactaaaaccattcctt

SEQ ID NO: 347185 - DNA, 33 bp, Homo sapien
acccagcgtcctataaacctttccatatcatca

SEQ ID NO: 347186 - DNA, 33 bp, Homo sapien
acccagcgtcctataagcctttccatatcatca

SEQ ID NO: 347187 - DNA, 33 bp, Homo sapien
cacctagagagaggcactgagtacccactcaag

SEQ ID NO: 347188 - DNA, 33 bp, Homo sapien
cacctagagagaggcattgagtacccactcaag

SEQ ID NO: 347189 - DNA, 33 bp, Homo sapien
ttttcctactgagcaaataatttgtgtttctcc

SEQ ID NO: 347190 - DNA, 33 bp, Homo sapien
ttttcctactgagcaactaatttgtgtttctcc

SEQ ID NO: 347191 - DNA, 33 bp, Homo sapien
agagcttctataaaaaatgctgtaattgattct

SEQ ID NO: 347192 - DNA, 33 bp, Homo sapien
agagcttctataaaaactgctgtaattgattct

SEQ ID NO: 347193 - DNA, 33 bp, Homo sapien
cggtctctccaacaaggcaccactatgtgaaat

SEQ ID NO: 347194 - DNA, 33 bp, Homo sapien
cggtctctccaacaagtcaccactatgtgaaat

SEQ ID NO: 347195 - DNA, 33 bp, Homo sapien
cctcacagagttgtcaatatgattacatgggat

SEQ ID NO: 347196 - DNA, 33 bp, Homo sapien
cctcacagagttgtcagtatgattacatgggat

SEQ ID NO: 347197 - DNA, 33 bp, Homo sapien
ttcgctgctgtttatgaagctctaccttgccag

SEQ ID NO: 347198 - DNA, 33 bp, Homo sapien
ttcgctgctgtttatgtagctctaccttgccag

SEQ ID NO: 347199 - DNA, 33 bp, Homo sapien
aacacagagatttcaccctgtgattgcatttcc

SEQ ID NO: 347200 - DNA, 33 bp, Homo sapien
aacacagagatttcacgctgtgattgcatttcc

SEQ ID NO: 347201 - DNA, 33 bp, Homo sapien
agtccacaggagacacgactaatgaattgcaac

SEQ ID NO: 347202 - DNA, 33 bp, Homo sapien
agtccacaggagacactactaatgaattgcaac

SEQ ID NO: 347203 - DNA, 33 bp, Homo sapien
attttgagcagccagacaggtgaagtatacaat

SEQ ID NO: 347204 - DNA, 33 bp, Homo sapien
attttgagcagccagagaggtgaagtatacaat

SEQ ID NO: 347205 - DNA, 33 bp, Homo sapien
tgtgcatcatggtaccacaacgatgaaagtcaa

SEQ ID NO: 347206 - DNA, 33 bp, Homo sapien
tgtgcatcatggtaccccaacgatgaaagtcaa

SEQ ID NO: 347207 - DNA, 33 bp, Homo sapien
gtacttccagcatgggcaactgactgagactct

SEQ ID NO: 347208 - DNA, 33 bp, Homo sapien
gtacttccagcatgggtaactgactgagactct

SEQ ID NO: 347209 - DNA, 33 bp, Homo sapien
gctgattcccttgcagaagtgttagaatccagt

SEQ ID NO: 347210 - DNA, 33 bp, Homo sapien
gctgattcccttgcaggagtgttagaatccagt

SEQ ID NO: 347211 - DNA, 33 bp, Homo sapien
agccctgatattccaaggaacaaactaaagctc

SEQ ID NO: 347212 - DNA, 33 bp, Homo sapien
agccctgatattccaatgaacaaactaaagctc

SEQ ID NO: 347213 - DNA, 33 bp, Homo sapien
tgctgtctccccatgcagaagatgtgacgcctg

SEQ ID NO: 347214 - DNA, 33 bp, Homo sapien
tgctgtctccccatgcggaagatgtgacgcctg

SEQ ID NO: 347215 - DNA, 33 bp, Homo sapien
aagcaaaggattttagaaactactatcagaagg

SEQ ID NO: 347216 - DNA, 33 bp, Homo sapien
aagcaaaggattttagcaactactatcagaagg

SEQ ID NO: 347217 - DNA, 33 bp, Homo sapien
gaggcagaggcacaaacgagaaccgcttggacc

SEQ ID NO: 347218 - DNA, 33 bp, Homo sapien
gaggcagaggcacaaatgagaaccgcttggacc

SEQ ID NO: 347219 - DNA, 33 bp, Homo sapien
tttttttcttagcagacacaatgaatgaactgc

SEQ ID NO: 347220 - DNA, 33 bp, Homo sapien
tttttttcttagcagatacaatgaatgaactgc

SEQ ID NO: 347221 - DNA, 33 bp, Homo sapien
ataatcttaaggcaaaccactgagccctctctt

SEQ ID NO: 347222 - DNA, 33 bp, Homo sapien
ataatcttaaggcaaatcactgagccctctctt

SEQ ID NO: 347223 - DNA, 33 bp, Homo sapien
ccctcatctacactgaagctagtactgtgctac

SEQ ID NO: 347224 - DNA, 33 bp, Homo sapien
ccctcatctacactgaggctagtactgtgctac

SEQ ID NO: 347225 - DNA, 33 bp, Homo sapien
accctgtgacagtatcaattggaaggcagggag

SEQ ID NO: 347226 - DNA, 33 bp, Homo sapien
accctgtgacagtatcgattggaaggcagggag

SEQ ID NO: 347227 - DNA, 33 bp, Homo sapien
gggcccccaaagtgcccaaaaagaggtgctagt

SEQ ID NO: 347228 - DNA, 33 bp, Homo sapien
gggcccccaaagtgcctaaaaagaggtgctagt

SEQ ID NO: 347229 - DNA, 33 bp, Homo sapien
gggggcactcatcggcagacagtggggaagctg

SEQ ID NO: 347230 - DNA, 33 bp, Homo sapien
gggggcactcatcggcggacagtggggaagctg

SEQ ID NO: 347231 - DNA, 33 bp, Homo sapien
gatgcttcgtcggaaaaagcccatcactttgga

SEQ ID NO: 347232 - DNA, 33 bp, Homo sapien
gatgcttcgtcggaaagagcccatcactttgga

SEQ ID NO: 347233 - DNA, 33 bp, Homo sapien
cagctaaaataggagacaaggggctgtggactc

SEQ ID NO: 347234 - DNA, 33 bp, Homo sapien
cagctaaaataggagataaggggctgtggactc

SEQ ID NO: 347235 - DNA, 33 bp, Homo sapien
gcccagctgattgtcacaggtaagcctgtctgg

SEQ ID NO: 347236 - DNA, 33 bp, Homo sapien
gcccagctgattgtcataggtaagcctgtctgg

SEQ ID NO: 347237 - DNA, 33 bp, Homo sapien
ggagagcttcctagagcaggtgttttgggctaa

SEQ ID NO: 347238 - DNA, 33 bp, Homo sapien
ggagagcttcctagaggaggtgttttgggctaa

SEQ ID NO: 347239 - DNA, 33 bp, Homo sapien
tcaccagtgtggaaacagccacatgctcctatg

SEQ ID NO: 347240 - DNA, 33 bp, Homo sapien
tcaccagtgtggaaacggccacatgctcctatg

SEQ ID NO: 347241 - DNA, 33 bp, Homo sapien
tagaaatggattatcaaatgctcctgagcagcc

SEQ ID NO: 347242 - DNA, 33 bp, Homo sapien
tagaaatggattatcagatgctcctgagcagcc

SEQ ID NO: 347243 - DNA, 33 bp, Homo sapien
ttgctagttcacggtcgcatatcagaatcagaa

SEQ ID NO: 347244 - DNA, 33 bp, Homo sapien
ttgctagttcacggtctcatatcagaatcagaa

SEQ ID NO: 347245 - DNA, 33 bp, Homo sapien
ggtttcaacaacagcactgatgggtgaagtagc

SEQ ID NO: 347246 - DNA, 33 bp, Homo sapien
ggtttcaacaacagcattgatgggtgaagtagc

SEQ ID NO: 347247 - DNA, 33 bp, Homo sapien
gataggtctggttgaaggaacattgcgtgtgtt

SEQ ID NO: 347248 - DNA, 33 bp, Homo sapien
gataggtctggttgaatgaacattgcgtgtgtt

SEQ ID NO: 347249 - DNA, 33 bp, Homo sapien
atcacctcatcattaactgtataggccttgtgt

SEQ ID NO: 347250 - DNA, 33 bp, Homo sapien
atcacctcatcattaattgtataggccttgtgt

SEQ ID NO: 347251 - DNA, 33 bp, Homo sapien
cacatacatgggcttacacagatgtgaatactt

SEQ ID NO: 347252 - DNA, 33 bp, Homo sapien
cacatacatgggcttatacagatgtgaatactt

SEQ ID NO: 347253 - DNA, 33 bp, Homo sapien
aaaattaaccagtataataaggtgccttgcaat

SEQ ID NO: 347254 - DNA, 33 bp, Homo sapien
aaaattaaccagtatagtaaggtgccttgcaat

SEQ ID NO: 347255 - DNA, 33 bp, Homo sapien
cattagacaatctggcagaagtgttcctagtat

SEQ ID NO: 347256 - DNA, 33 bp, Homo sapien
cattagacaatctggcggaagtgttcctagtat

SEQ ID NO: 347257 - DNA, 33 bp, Homo sapien
aggaattgcagttacccgaaaattgagttacag

SEQ ID NO: 347258 - DNA, 33 bp, Homo sapien
aggaattgcagttacctgaaaattgagttacag

SEQ ID NO: 347259 - DNA, 33 bp, Homo sapien
caagactatcaaaacaaacgtaacgctggctgg

SEQ ID NO: 347260 - DNA, 33 bp, Homo sapien
caagactatcaaaacagacgtaacgctggctgg

SEQ ID NO: 347261 - DNA, 33 bp, Homo sapien
agctagtcctaattgaaatgcgctaaatgcaaa

SEQ ID NO: 347262 - DNA, 33 bp, Homo sapien
agctagtcctaattgagatgcgctaaatgcaaa

SEQ ID NO: 347263 - DNA, 33 bp, Homo sapien
tctttttaccatcacacaccggataggagtctg

SEQ ID NO: 347264 - DNA, 33 bp, Homo sapien
tctttttaccatcacagaccggataggagtctg

SEQ ID NO: 347265 - DNA, 33 bp, Homo sapien
aaaccaaaattctccacgtatcccagggaggtg

SEQ ID NO: 347266 - DNA, 33 bp, Homo sapien
aaaccaaaattctccatgtatcccagggaggtg

SEQ ID NO: 347267 - DNA, 33 bp, Homo sapien
gtcttggccactctgccgaactggcatttgctg

SEQ ID NO: 347268 - DNA, 33 bp, Homo sapien
gtcttggccactctgctgaactggcatttgctg

SEQ ID NO: 347269 - DNA, 33 bp, Homo sapien
catcgaagtagcagcagctgtattggagtcagt

SEQ ID NO: 347270 - DNA, 33 bp, Homo sapien
catcgaagtagcagcatctgtattggagtcagt

SEQ ID NO: 347271 - DNA, 33 bp, Homo sapien
tgcgcacaaagttttacctcaatgtgaaatgaa

SEQ ID NO: 347272 - DNA, 33 bp, Homo sapien
tgcgcacaaagttttatctcaatgtgaaatgaa

SEQ ID NO: 347273 - DNA, 33 bp, Homo sapien
gagcatcaaaaaaacactgggaagcacttacct

SEQ ID NO: 347274 - DNA, 33 bp, Homo sapien
gagcatcaaaaaaacattgggaagcacttacct

SEQ ID NO: 347275 - DNA, 33 bp, Homo sapien
atattgcagggaaacactggaaatactagcaat

SEQ ID NO: 347276 - DNA, 33 bp, Homo sapien
atattgcagggaaacattggaaatactagcaat

SEQ ID NO: 347277 - DNA, 33 bp, Homo sapien
tagagttgggttcagacccagcagttgtgattt

SEQ ID NO: 347278 - DNA, 33 bp, Homo sapien
tagagttgggttcagatccagcagttgtgattt

SEQ ID NO: 347279 - DNA, 33 bp, Homo sapien
gaatacagtatctaagactctcaatctagaact

SEQ ID NO: 347280 - DNA, 33 bp, Homo sapien
gaatacagtatctaaggctctcaatctagaact

SEQ ID NO: 347281 - DNA, 33 bp, Homo sapien
ttgaccttagcgcttcacttcgtattctgagtt

SEQ ID NO: 347282 - DNA, 33 bp, Homo sapien
ttgaccttagcgcttcgcttcgtattctgagtt

SEQ ID NO: 347283 - DNA, 33 bp, Homo sapien
aaaactacgtataggacaggcaaatttttagta

SEQ ID NO: 347284 - DNA, 33 bp, Homo sapien
aaaactacgtataggagaggcaaatttttagta

SEQ ID NO: 347285 - DNA, 33 bp, Homo sapien
tccgttttgacctagcagatgggagtcaggcct

SEQ ID NO: 347286 - DNA, 33 bp, Homo sapien
tccgttttgacctagcggatgggagtcaggcct

SEQ ID NO: 347287 - DNA, 33 bp, Homo sapien
agatcaacactatctgcaggcgagtctgggagc

SEQ ID NO: 347288 - DNA, 33 bp, Homo sapien
agatcaacactatctgtaggcgagtctgggagc

SEQ ID NO: 347289 - DNA, 33 bp, Homo sapien
ttttaaaaaatggagaaaagtacagaggataac

SEQ ID NO: 347290 - DNA, 33 bp, Homo sapien
ttttaaaaaatggagagaagtacagaggataac

SEQ ID NO: 347291 - DNA, 33 bp, Homo sapien
tgaagacatgggcccaaaatgactgctgtagct

SEQ ID NO: 347292 - DNA, 33 bp, Homo sapien
tgaagacatgggcccagaatgactgctgtagct

SEQ ID NO: 347293 - DNA, 33 bp, Homo sapien
gtttatactttttatcaaaatactgttggtaca

SEQ ID NO: 347294 - DNA, 33 bp, Homo sapien
gtttatactttttatctaaatactgttggtaca

SEQ ID NO: 347295 - DNA, 33 bp, Homo sapien
ttctttccaccacaagaagacgcttagatctcc

SEQ ID NO: 347296 - DNA, 33 bp, Homo sapien
ttctttccaccacaaggagacgcttagatctcc

SEQ ID NO: 347297 - DNA, 33 bp, Homo sapien
cagcattctgctaagactcagagatccctggat

SEQ ID NO: 347298 - DNA, 33 bp, Homo sapien
cagcattctgctaagagtcagagatccctggat

SEQ ID NO: 347299 - DNA, 33 bp, Homo sapien
agtaaacagaatgcgaaggaccgtccagagaca

SEQ ID NO: 347300 - DNA, 33 bp, Homo sapien
agtaaacagaatgcgagggaccgtccagagaca

SEQ ID NO: 347301 - DNA, 33 bp, Homo sapien
tggtggcctttgggcactgacacggcttaagtc

SEQ ID NO: 347302 - DNA, 33 bp, Homo sapien
tggtggcctttgggcattgacacggcttaagtc

SEQ ID NO: 347303 - DNA, 33 bp, Homo sapien
aataataaacaatcacaatagtaacatcaaggc

SEQ ID NO: 347304 - DNA, 33 bp, Homo sapien
aataataaacaatcacgatagtaacatcaaggc

SEQ ID NO: 347305 - DNA, 33 bp, Homo sapien
ccccacataccggtaaacatttcattcatttct

SEQ ID NO: 347306 - DNA, 33 bp, Homo sapien
ccccacataccggtaaccatttcattcatttct

SEQ ID NO: 347307 - DNA, 33 bp, Homo sapien
tctccatctttcaggcggacaaccacacttatg

SEQ ID NO: 347308 - DNA, 33 bp, Homo sapien
tctccatctttcaggctgacaaccacacttatg

SEQ ID NO: 347309 - DNA, 33 bp, Homo sapien
atataatgctacatatgagagctcaaaagggcc

SEQ ID NO: 347310 - DNA, 33 bp, Homo sapien
atataatgctacatattagagctcaaaagggcc

SEQ ID NO: 347311 - DNA, 33 bp, Homo sapien
aacacttggcttgttaaaattgttcttcattcc

SEQ ID NO: 347312 - DNA, 33 bp, Homo sapien
aacacttggcttgttacaattgttcttcattcc

SEQ ID NO: 347313 - DNA, 33 bp, Homo sapien
tcagctaagggaggtacggacagcaaatctcca

SEQ ID NO: 347314 - DNA, 33 bp, Homo sapien
tcagctaagggaggtatggacagcaaatctcca

SEQ ID NO: 347315 - DNA, 33 bp, Homo sapien
gttctgaaatttagagaattgctatataaggag

SEQ ID NO: 347316 - DNA, 33 bp, Homo sapien
gttctgaaatttagagtattgctatataaggag

SEQ ID NO: 347317 - DNA, 33 bp, Homo sapien
gttataatgcgttgaacatttagaactttggca

SEQ ID NO: 347318 - DNA, 33 bp, Homo sapien
gttataatgcgttgaatatttagaactttggca

SEQ ID NO: 347319 - DNA, 33 bp, Homo sapien
agtgagtagccaagcaaatgagcctcctaactc

SEQ ID NO: 347320 - DNA, 33 bp, Homo sapien
agtgagtagccaagcagatgagcctcctaactc

SEQ ID NO: 347321 - DNA, 33 bp, Homo sapien
ctaaggtgctgataagaagaaccgatgatcaac

SEQ ID NO: 347322 - DNA, 33 bp, Homo sapien
ctaaggtgctgataagtagaaccgatgatcaac

SEQ ID NO: 347323 - DNA, 33 bp, Homo sapien
gattgatataaaagccagattacctatggcttt

SEQ ID NO: 347324 - DNA, 33 bp, Homo sapien
gattgatataaaagccggattacctatggcttt

SEQ ID NO: 347325 - DNA, 33 bp, Homo sapien
atgacatggttggactcaggaccaagaaatagg

SEQ ID NO: 347326 - DNA, 33 bp, Homo sapien
atgacatggttggacttaggaccaagaaatagg

SEQ ID NO: 347327 - DNA, 33 bp, Homo sapien
gaagagtgatggaggcaaaatggagacatttga

SEQ ID NO: 347328 - DNA, 33 bp, Homo sapien
gaagagtgatggaggcgaaatggagacatttga

SEQ ID NO: 347329 - DNA, 33 bp, Homo sapien
gcacttgactcaactcaaacaagccttcatggg

SEQ ID NO: 347330 - DNA, 33 bp, Homo sapien
gcacttgactcaactccaacaagccttcatggg

SEQ ID NO: 347331 - DNA, 33 bp, Homo sapien
attgcagcaattaagtcacatcctcaaggctcc

SEQ ID NO: 347332 - DNA, 33 bp, Homo sapien
attgcagcaattaagttacatcctcaaggctcc

SEQ ID NO: 347333 - DNA, 33 bp, Homo sapien
gaatggtgcctttaacacattggaagaaaagac

SEQ ID NO: 347334 - DNA, 33 bp, Homo sapien
gaatggtgcctttaacgcattggaagaaaagac

SEQ ID NO: 347335 - DNA, 33 bp, Homo sapien
gtgagcaagttctctacgagtgccaaaataatt

SEQ ID NO: 347336 - DNA, 33 bp, Homo sapien
gtgagcaagttctctatgagtgccaaaataatt

SEQ ID NO: 347337 - DNA, 33 bp, Homo sapien
agctacgaactcattcacaattgtagaaatatt

SEQ ID NO: 347338 - DNA, 33 bp, Homo sapien
agctacgaactcattcgcaattgtagaaatatt

SEQ ID NO: 347339 - DNA, 33 bp, Homo sapien
agttctggagtgcaaccggttttataatacata

SEQ ID NO: 347340 - DNA, 33 bp, Homo sapien
agttctggagtgcaactggttttataatacata

SEQ ID NO: 347341 - DNA, 33 bp, Homo sapien
gaaatgacctgacatacgaataaggagaataat

SEQ ID NO: 347342 - DNA, 33 bp, Homo sapien
gaaatgacctgacataggaataaggagaataat

SEQ ID NO: 347343 - DNA, 33 bp, Homo sapien
gaccaactgtattgtaccaagcactataggtta

SEQ ID NO: 347344 - DNA, 33 bp, Homo sapien
gaccaactgtattgtagcaagcactataggtta

SEQ ID NO: 347345 - DNA, 33 bp, Homo sapien
tggcctgcgcataaacaaatataaaaattacta

SEQ ID NO: 347346 - DNA, 33 bp, Homo sapien
tggcctgcgcataaactaatataaaaattacta

SEQ ID NO: 347347 - DNA, 33 bp, Homo sapien
ttcactcatctgacaaatatttattgaatactg

SEQ ID NO: 347348 - DNA, 33 bp, Homo sapien
ttcactcatctgacaagtatttattgaatactg

SEQ ID NO: 347349 - DNA, 33 bp, Homo sapien
gctccttttctgagaccatgaggaagtgtttca

SEQ ID NO: 347350 - DNA, 33 bp, Homo sapien
gctccttttctgagactatgaggaagtgtttca

SEQ ID NO: 347351 - DNA, 33 bp, Homo sapien
ggataaattaagacaaactaacatgtattgata

SEQ ID NO: 347352 - DNA, 33 bp, Homo sapien
ggataaattaagacaatctaacatgtattgata

SEQ ID NO: 347353 - DNA, 33 bp, Homo sapien
cttgtcctgctacaacgaaagtgaagagggaaa

SEQ ID NO: 347354 - DNA, 33 bp, Homo sapien
cttgtcctgctacaactaaagtgaagagggaaa

SEQ ID NO: 347355 - DNA, 33 bp, Homo sapien
cccgtcctagcaatcactgattaaaatgccagt

SEQ ID NO: 347356 - DNA, 33 bp, Homo sapien
cccgtcctagcaatcattgattaaaatgccagt

SEQ ID NO: 347357 - DNA, 33 bp, Homo sapien
gtctgctataagtctaataatagtcacgccttt

SEQ ID NO: 347358 - DNA, 33 bp, Homo sapien
gtctgctataagtctagtaatagtcacgccttt

SEQ ID NO: 347359 - DNA, 33 bp, Homo sapien
gacatttcttaggacaagcaagaatacaagtct

SEQ ID NO: 347360 - DNA, 33 bp, Homo sapien
gacatttcttaggacaggcaagaatacaagtct

SEQ ID NO: 347361 - DNA, 33 bp, Homo sapien
aacaaggtgccacataccatcatacccctgccc

SEQ ID NO: 347362 - DNA, 33 bp, Homo sapien
aacaaggtgccacatagcatcatacccctgccc

SEQ ID NO: 347363 - DNA, 33 bp, Homo sapien
gtacagcggaaggggacagtacctgacttggga

SEQ ID NO: 347364 - DNA, 33 bp, Homo sapien
gtacagcggaaggggatagtacctgacttggga

SEQ ID NO: 347365 - DNA, 33 bp, Homo sapien
cacagaactgctaatacgatcaatctaatccat

SEQ ID NO: 347366 - DNA, 33 bp, Homo sapien
cacagaactgctaatatgatcaatctaatccat

SEQ ID NO: 347367 - DNA, 33 bp, Homo sapien
aaacctgttctgaaggccccagcctaccttctg

SEQ ID NO: 347368 - DNA, 33 bp, Homo sapien
aaacctgttctgaaggtcccagcctaccttctg

SEQ ID NO: 347369 - DNA, 33 bp, Homo sapien
aagaaagccagggatgacaataggcaatgatgt

SEQ ID NO: 347370 - DNA, 33 bp, Homo sapien
aagaaagccagggatggcaataggcaatgatgt

SEQ ID NO: 347371 - DNA, 33 bp, Homo sapien
tttatcagtgacgcaccaattaggtccagcgag

SEQ ID NO: 347372 - DNA, 33 bp, Homo sapien
tttatcagtgacgcactaattaggtccagcgag

SEQ ID NO: 347373 - DNA, 33 bp, Homo sapien
ttcgagggcatattacaaaggcctgggatttga

SEQ ID NO: 347374 - DNA, 33 bp, Homo sapien
ttcgagggcatattacgaaggcctgggatttga

SEQ ID NO: 347375 - DNA, 33 bp, Homo sapien
gcaattaccggtaagccatgagagtagtggggg

SEQ ID NO: 347376 - DNA, 33 bp, Homo sapien
gcaattaccggtaagctatgagagtagtggggg

SEQ ID NO: 347377 - DNA, 33 bp, Homo sapien
ctcagcccaacattcactgaacacctacaatgt

SEQ ID NO: 347378 - DNA, 33 bp, Homo sapien
ctcagcccaacattcattgaacacctacaatgt

SEQ ID NO: 347379 - DNA, 33 bp, Homo sapien
aaaaagaggctgattaagtaaatgaattaggtt

SEQ ID NO: 347380 - DNA, 33 bp, Homo sapien
aaaaagaggctgattatgtaaatgaattaggtt

SEQ ID NO: 347381 - DNA, 33 bp, Homo sapien
agagagggctgaaacactgagtgcatgttccca

SEQ ID NO: 347382 - DNA, 33 bp, Homo sapien
agagagggctgaaacattgagtgcatgttccca

SEQ ID NO: 347383 - DNA, 33 bp, Homo sapien
ctctcacatgggtacacagtaaagtgctgagaa

SEQ ID NO: 347384 - DNA, 33 bp, Homo sapien
ctctcacatgggtacatagtaaagtgctgagaa

SEQ ID NO: 347385 - DNA, 33 bp, Homo sapien
ggctcactgtaaaacacgaacagatggccaagg

SEQ ID NO: 347386 - DNA, 33 bp, Homo sapien
ggctcactgtaaaacatgaacagatggccaagg

SEQ ID NO: 347387 - DNA, 33 bp, Homo sapien
gaggaaataggaaccacgcctggagcaaggaaa

SEQ ID NO: 347388 - DNA, 33 bp, Homo sapien
gaggaaataggaaccatgcctggagcaaggaaa

SEQ ID NO: 347389 - DNA, 33 bp, Homo sapien
ttcaatgactgtctaaaatggaaaagtcaagaa

SEQ ID NO: 347390 - DNA, 33 bp, Homo sapien
ttcaatgactgtctaagatggaaaagtcaagaa

SEQ ID NO: 347391 - DNA, 33 bp, Homo sapien
gtccctgtgacctctgcattcgcagcctcctaa

SEQ ID NO: 347392 - DNA, 33 bp, Homo sapien
gtccctgtgacctctgtattcgcagcctcctaa

SEQ ID NO: 347393 - DNA, 33 bp, Homo sapien
gaggctttgcaaagccagagaggaaagggctgc

SEQ ID NO: 347394 - DNA, 33 bp, Homo sapien
gaggctttgcaaagccggagaggaaagggctgc

SEQ ID NO: 347395 - DNA, 33 bp, Homo sapien
agggtctgtggcacccagggatagaaatcaagc

SEQ ID NO: 347396 - DNA, 33 bp, Homo sapien
agggtctgtggcacccggggatagaaatcaagc

SEQ ID NO: 347397 - DNA, 33 bp, Homo sapien
tccctgataaagtccccgaagttgataaatttg

SEQ ID NO: 347398 - DNA, 33 bp, Homo sapien
tccctgataaagtccctgaagttgataaatttg

SEQ ID NO: 347399 - DNA, 33 bp, Homo sapien
cttggctgtgacagcaacctctacccggctctg

SEQ ID NO: 347400 - DNA, 33 bp, Homo sapien
cttggctgtgacagcatcctctacccggctctg

SEQ ID NO: 347401 - DNA, 33 bp, Homo sapien
aagaggggaagaattcaaaccaggctaatagaa

SEQ ID NO: 347402 - DNA, 33 bp, Homo sapien
aagaggggaagaattcgaaccaggctaatagaa

SEQ ID NO: 347403 - DNA, 33 bp, Homo sapien
atacaagatatacaaaagtagagatgttgtagt

SEQ ID NO: 347404 - DNA, 33 bp, Homo sapien
atacaagatatacaaaggtagagatgttgtagt

SEQ ID NO: 347405 - DNA, 33 bp, Homo sapien
accagaacttcataaaagcttttcactcttaca

SEQ ID NO: 347406 - DNA, 33 bp, Homo sapien
accagaacttcataaaggcttttcactcttaca

SEQ ID NO: 347407 - DNA, 33 bp, Homo sapien
tcctcaactgagtgccaagactaaagcccttgg

SEQ ID NO: 347408 - DNA, 33 bp, Homo sapien
tcctcaactgagtgccgagactaaagcccttgg

SEQ ID NO: 347409 - DNA, 33 bp, Homo sapien
gcagcaaatttacccaacggccacgactgaatt

SEQ ID NO: 347410 - DNA, 33 bp, Homo sapien
gcagcaaatttacccagcggccacgactgaatt

SEQ ID NO: 347411 - DNA, 33 bp, Homo sapien
tccgtgggaaggatggcataagtgatgcatgtg

SEQ ID NO: 347412 - DNA, 33 bp, Homo sapien
tccgtgggaaggatggtataagtgatgcatgtg

SEQ ID NO: 347413 - DNA, 33 bp, Homo sapien
cttgagcagacatgaaaagacagaggaacttcc

SEQ ID NO: 347414 - DNA, 33 bp, Homo sapien
cttgagcagacatgaagagacagaggaacttcc

SEQ ID NO: 347415 - DNA, 33 bp, Homo sapien
gggcataattacattcactgtgcaaacacacag

SEQ ID NO: 347416 - DNA, 33 bp, Homo sapien
gggcataattacattcgctgtgcaaacacacag

SEQ ID NO: 347417 - DNA, 33 bp, Homo sapien
ggaagtttggatagtccagatggcgatttggga

SEQ ID NO: 347418 - DNA, 33 bp, Homo sapien
ggaagtttggatagtctagatggcgatttggga

SEQ ID NO: 347419 - DNA, 33 bp, Homo sapien
gtacaaaatcaatacacacagatttcagcacat

SEQ ID NO: 347420 - DNA, 33 bp, Homo sapien
gtacaaaatcaatacatacagatttcagcacat

SEQ ID NO: 347421 - DNA, 33 bp, Homo sapien
cagcagattctgaaaaactgggtcgaaagggag

SEQ ID NO: 347422 - DNA, 33 bp, Homo sapien
cagcagattctgaaaagctgggtcgaaagggag

SEQ ID NO: 347423 - DNA, 33 bp, Homo sapien
atggcttcttggcctaaatgccctcccgtgggg

SEQ ID NO: 347424 - DNA, 33 bp, Homo sapien
atggcttcttggcctacatgccctcccgtgggg

SEQ ID NO: 347425 - DNA, 33 bp, Homo sapien
ctcatatctgtcacagaaaaatgcctaagccat

SEQ ID NO: 347426 - DNA, 33 bp, Homo sapien
ctcatatctgtcacaggaaaatgcctaagccat

SEQ ID NO: 347427 - DNA, 33 bp, Homo sapien
atgaggctataagcacaaataacatagaaaggt

SEQ ID NO: 347428 - DNA, 33 bp, Homo sapien
atgaggctataagcaccaataacatagaaaggt

SEQ ID NO: 347429 - DNA, 33 bp, Homo sapien
ggtaagcagcatcccgcaggataccttgtaatc

SEQ ID NO: 347430 - DNA, 33 bp, Homo sapien
ggtaagcagcatcccgtaggataccttgtaatc

SEQ ID NO: 347431 - DNA, 33 bp, Homo sapien
caaagcctcaggtcagaaaatccaaatccaata

SEQ ID NO: 347432 - DNA, 33 bp, Homo sapien
caaagcctcaggtcaggaaatccaaatccaata

SEQ ID NO: 347433 - DNA, 33 bp, Homo sapien
ccccatgttaggagaaggggacagtgaggtggg

SEQ ID NO: 347434 - DNA, 33 bp, Homo sapien
ccccatgttaggagaatgggacagtgaggtggg

SEQ ID NO: 347435 - DNA, 33 bp, Homo sapien
aacgtctggctggtgagtaggggcacagtgcct

SEQ ID NO: 347436 - DNA, 33 bp, Homo sapien
aacgtctggctggtgattaggggcacagtgcct

SEQ ID NO: 347437 - DNA, 33 bp, Homo sapien
tcttttccacttggcaaacatcaagatctcccc

SEQ ID NO: 347438 - DNA, 33 bp, Homo sapien
tcttttccacttggcatacatcaagatctcccc

SEQ ID NO: 347439 - DNA, 33 bp, Homo sapien
ggaacacagccatccccattcatttctggattg

SEQ ID NO: 347440 - DNA, 33 bp, Homo sapien
ggaacacagccatccctattcatttctggattg

SEQ ID NO: 347441 - DNA, 33 bp, Homo sapien
tatcggtgtgtgaaaacgtatgtgctgggacat

SEQ ID NO: 347442 - DNA, 33 bp, Homo sapien
tatcggtgtgtgaaaatgtatgtgctgggacat

SEQ ID NO: 347443 - DNA, 33 bp, Homo sapien
tgaattgccagtaccacgttagggagcagtttg

SEQ ID NO: 347444 - DNA, 33 bp, Homo sapien
tgaattgccagtaccatgttagggagcagtttg

SEQ ID NO: 347445 - DNA, 33 bp, Homo sapien
cgttcaagttgttacaaatttctgctagagaat

SEQ ID NO: 347446 - DNA, 33 bp, Homo sapien
cgttcaagttgttacacatttctgctagagaat

SEQ ID NO: 347447 - DNA, 33 bp, Homo sapien; identical to SEQ ID NO: 347445

SEQ ID NO: 347448 - DNA, 33 bp, Homo sapien; identical to SEQ ID NO: 347446

SEQ ID NO: 347449 - DNA, 33 bp, Homo sapien
attctgggctgttagacggaccactatggggaa

SEQ ID NO: 347450 - DNA, 33 bp, Homo sapien
attctgggctgttagatggaccactatggggaa

SEQ ID NO: 347451 - DNA, 33 bp, Homo sapien
tctcaaaaagccaacgaagttaccgcttctcca

SEQ ID NO: 347452 - DNA, 33 bp, Homo sapien
tctcaaaaagccaacggagttaccgcttctcca

SEQ ID NO: 347453 - DNA, 33 bp, Homo sapien
cttaagtctcttcgagccctgacactcggcagg

SEQ ID NO: 347454 - DNA, 33 bp, Homo sapien
cttaagtctcttcgagtcctgacactcggcagg

SEQ ID NO: 347455 - DNA, 33 bp, Homo sapien
agcttcttatctgtaacgtaagaagacctatca

SEQ ID NO: 347456 - DNA, 33 bp, Homo sapien
agcttcttatctgtaatgtaagaagacctatca

SEQ ID NO: 347457 - DNA, 33 bp, Homo sapien
ctaagactagggtaaaagacactgaatggtaaa

SEQ ID NO: 347458 - DNA, 33 bp, Homo sapien
ctaagactagggtaaaggacactgaatggtaaa

SEQ ID NO: 347459 - DNA, 33 bp, Homo sapien
aagtggacaaggacaaatctttggtagttacat

SEQ ID NO: 347460 - DNA, 33 bp, Homo sapien
aagtggacaaggacaactctttggtagttacat

SEQ ID NO: 347461 - DNA, 33 bp, Homo sapien
gccccagggaatggaaagagatgttgatcatag

SEQ ID NO: 347462 - DNA, 33 bp, Homo sapien
gccccagggaatggaatgagatgttgatcatag

SEQ ID NO: 347463 - DNA, 33 bp, Homo sapien
ctttctgctcaccaaaatcaatactttaacctt

SEQ ID NO: 347464 - DNA, 33 bp, Homo sapien
ctttctgctcaccaaagtcaatactttaacctt

SEQ ID NO: 347465 - DNA, 33 bp, Homo sapien
ctaatcaatcctggcaagctttcccactcagcc

SEQ ID NO: 347466 - DNA, 33 bp, Homo sapien
ctaatcaatcctggcatgctttcccactcagcc

SEQ ID NO: 347467 - DNA, 33 bp, Homo sapien
gatgctaatgtcccagcagatcccctgtgtgtt

SEQ ID NO: 347468 - DNA, 33 bp, Homo sapien
gatgctaatgtcccaggagatcccctgtgtgtt

SEQ ID NO: 347469 - DNA, 33 bp, Homo sapien
taaatttgccgtaatacatacagggactcaata

SEQ ID NO: 347470 - DNA, 33 bp, Homo sapien
taaatttgccgtaatatatacagggactcaata

SEQ ID NO: 347471 - DNA, 33 bp, Homo sapien
atttcaaagcactttcacttgcgttatcttttt

SEQ ID NO: 347472 - DNA, 33 bp, Homo sapien
atttcaaagcactttcgcttgcgttatcttttt

SEQ ID NO: 347473 - DNA, 33 bp, Homo sapien
tgacagattaagaaacccaggcccagagatggg

SEQ ID NO: 347474 - DNA, 33 bp, Homo sapien
tgacagattaagaaactcaggcccagagatggg

SEQ ID NO: 347475 - DNA, 33 bp, Homo sapien
cttctcccaggaagaacaggtcattagctctgg

SEQ ID NO: 347476 - DNA, 33 bp, Homo sapien
cttctcccaggaagaagaggtcattagctctgg

SEQ ID NO: 347477 - DNA, 33 bp, Homo sapien
ccagcctgacttttccacgtcccttttctgtcc

SEQ ID NO: 347478 - DNA, 33 bp, Homo sapien
ccagcctgacttttccgcgtcccttttctgtcc

SEQ ID NO: 347479 - DNA, 33 bp, Homo sapien
gaaataattgagaccaagccagaatgaagtgtc

SEQ ID NO: 347480 - DNA, 33 bp, Homo sapien
gaaataattgagaccaggccagaatgaagtgtc

SEQ ID NO: 347481 - DNA, 33 bp, Homo sapien
ccactgcaaacaggtagtaataggaagagcaag

SEQ ID NO: 347482 - DNA, 33 bp, Homo sapien
ccactgcaaacaggtattaataggaagagcaag

SEQ ID NO: 347483 - DNA, 33 bp, Homo sapien
aagttgtctagctctacggccacaatttaatta

SEQ ID NO: 347484 - DNA, 33 bp, Homo sapien
aagttgtctagctctatggccacaatttaatta

SEQ ID NO: 347485 - DNA, 33 bp, Homo sapien
gctatatgaacacaaaggagtcagcttcagtct

SEQ ID NO: 347486 - DNA, 33 bp, Homo sapien
gctatatgaacacaaatgagtcagcttcagtct

SEQ ID NO: 347487 - DNA, 33 bp, Homo sapien
agttcacagcttgtacagacaccgcttgagcct

SEQ ID NO: 347488 - DNA, 33 bp, Homo sapien
agttcacagcttgtacggacaccgcttgagcct

SEQ ID NO: 347489 - DNA, 33 bp, Homo sapien
gctgtgaactgcaggacgagtaggagttaacca

SEQ ID NO: 347490 - DNA, 33 bp, Homo sapien
gctgtgaactgcaggatgagtaggagttaacca

SEQ ID NO: 347491 - DNA, 33 bp, Homo sapien
cacacttcagagaagtaacaaaagagccgttct

SEQ ID NO: 347492 - DNA, 33 bp, Homo sapien
cacacttcagagaagtcacaaaagagccgttct

SEQ ID NO: 347493 - DNA, 33 bp, Homo sapien
aggacagtatgttcaccctcatctccaggttca

SEQ ID NO: 347494 - DNA, 33 bp, Homo sapien
aggacagtatgttcactctcatctccaggttca

SEQ ID NO: 347495 - DNA, 33 bp, Homo sapien
ggtacttcaccacccacgtgatctcaacgtcat

SEQ ID NO: 347496 - DNA, 33 bp, Homo sapien
ggtacttcaccacccatgtgatctcaacgtcat

SEQ ID NO: 347497 - DNA, 33 bp, Homo sapien
tgttaccaaggagaacagagcccaaccttagca

SEQ ID NO: 347498 - DNA, 33 bp, Homo sapien
tgttaccaaggagaacggagcccaaccttagca

SEQ ID NO: 347499 - DNA, 33 bp, Homo sapien
ttatcatgcccgtaaaaaccacacggtagcctg

SEQ ID NO: 347500 - DNA, 33 bp, Homo sapien
ttatcatgcccgtaaataccacacggtagcctg

SEQ ID NO: 347501 - DNA, 33 bp, Homo sapien
aagttgtcctaaatctaaactctgagtatgtga

SEQ ID NO: 347502 - DNA, 33 bp, Homo sapien
aagttgtcctaaatctcaactctgagtatgtga

SEQ ID NO: 347503 - DNA, 33 bp, Homo sapien
aaactcttcaaaggtcagaaaccaacccaggtt

SEQ ID NO: 347504 - DNA, 33 bp, Homo sapien
aaactcttcaaaggtcggaaaccaacccaggtt

SEQ ID NO: 347505 - DNA, 33 bp, Homo sapien
tttagcttaattcaaccaagtgtcttaaaatgg

SEQ ID NO: 347506 - DNA, 33 bp, Homo sapien
tttagcttaattcaactaagtgtcttaaaatgg

SEQ ID NO: 347507 - DNA, 33 bp, Homo sapien
cacataatttcacaaccgtcagaggacctcgtt

SEQ ID NO: 347508 - DNA, 33 bp, Homo sapien
cacataatttcacaactgtcagaggacctcgtt

SEQ ID NO: 347509 - DNA, 33 bp, Homo sapien
aaaagagctcaacaccactaatcctcagggaaa

SEQ ID NO: 347510 - DNA, 33 bp, Homo sapien
aaaagagctcaacaccgctaatcctcagggaaa

SEQ ID NO: 347511 - DNA, 33 bp, Homo sapien
aggtcaatagaaaataagctggggttctgcggt

SEQ ID NO: 347512 - DNA, 33 bp, Homo sapien
aggtcaatagaaaatacgctggggttctgcggt

SEQ ID NO: 347513 - DNA, 33 bp, Homo sapien
gtgacgacttgggtcacggaagagcaagtaaga

SEQ ID NO: 347514 - DNA, 33 bp, Homo sapien
gtgacgacttgggtcatggaagagcaagtaaga

SEQ ID NO: 347515 - DNA, 33 bp, Homo sapien
agtaagatatgaggaacgcctgccaaaggtctt

SEQ ID NO: 347516 - DNA, 33 bp, Homo sapien
agtaagatatgaggaatgcctgccaaaggtctt

SEQ ID NO: 347517 - DNA, 33 bp, Homo sapien
gaaatgacaatgtccaatggaacaaaggactgc

SEQ ID NO: 347518 - DNA, 33 bp, Homo sapien
gaaatgacaatgtccagtggaacaaaggactgc

SEQ ID NO: 347519 - DNA, 33 bp, Homo sapien
gcccgctgtaacaccccgggaagaacaagactg

SEQ ID NO: 347520 - DNA, 33 bp, Homo sapien
gcccgctgtaacaccctgggaagaacaagactg

SEQ ID NO: 347521 - DNA, 33 bp, Homo sapien
catgtgttgcttctcaaactgcaggttgtgtgc

SEQ ID NO: 347522 - DNA, 33 bp, Homo sapien
catgtgttgcttctcagactgcaggttgtgtgc

SEQ ID NO: 347523 - DNA, 33 bp, Homo sapien
aacttctactcattcaatcaatgtttagtgagc

SEQ ID NO: 347524 - DNA, 33 bp, Homo sapien
aacttctactcattcagtcaatgtttagtgagc

SEQ ID NO: 347525 - DNA, 33 bp, Homo sapien
aaatgctcctagctcaccattgcctatggagtt

SEQ ID NO: 347526 - DNA, 33 bp, Homo sapien
aaatgctcctagctcatcattgcctatggagtt

SEQ ID NO: 347527 - DNA, 33 bp, Homo sapien
gccaaagatgggtatacagacgttgaaacatcc

SEQ ID NO: 347528 - DNA, 33 bp, Homo sapien
gccaaagatgggtatagagacgttgaaacatcc

SEQ ID NO: 347529 - DNA, 33 bp, Homo sapien
gaggctgaaacttaaaaataatcagtgaggctt

SEQ ID NO: 347530 - DNA, 33 bp, Homo sapien
gaggctgaaacttaaagataatcagtgaggctt

SEQ ID NO: 347531 - DNA, 33 bp, Homo sapien
gcaagtccctcccctagaagcttttcctggcac

SEQ ID NO: 347532 - DNA, 33 bp, Homo sapien
gcaagtccctcccctataagcttttcctggcac

SEQ ID NO: 347533 - DNA, 33 bp, Homo sapien
tttgtctgcaaaggtaccagggaatgtttgata

SEQ ID NO: 347534 - DNA, 33 bp, Homo sapien
tttgtctgcaaaggtatcagggaatgtttgata

SEQ ID NO: 347535 - DNA, 33 bp, Homo sapien
cagtgaggataggacaaacgtgtgtgtgtgtgt

SEQ ID NO: 347536 - DNA, 33 bp, Homo sapien
cagtgaggataggacagacgtgtgtgtgtgtgt

SEQ ID NO: 347537 - DNA, 33 bp, Homo sapien
gacctgggactggaaccggattttgtaatttca

SEQ ID NO: 347538 - DNA, 33 bp, Homo sapien
gacctgggactggaactggattttgtaatttca

SEQ ID NO: 347539 - DNA, 33 bp, Homo sapien
tggtggaccatggatgaacccagttacagggtt

SEQ ID NO: 347540 - DNA, 33 bp, Homo sapien
tggtggaccatggatggacccagttacagggtt

SEQ ID NO: 347541 - DNA, 33 bp, Homo sapien
gaggtagagaaggaccaaagtgattacccaggc

SEQ ID NO: 347542 - DNA, 33 bp, Homo sapien
gaggtagagaaggaccgaagtgattacccaggc

SEQ ID NO: 347543 - DNA, 33 bp, Homo sapien
ccaagagcacatctgcaagaagtcatgtcaatg

SEQ ID NO: 347544 - DNA, 33 bp, Homo sapien
ccaagagcacatctgccagaagtcatgtcaatg

SEQ ID NO: 347545 - DNA, 33 bp, Homo sapien
ttactttgattatttaacttacactagggttgt

SEQ ID NO: 347546 - DNA, 33 bp, Homo sapien
ttactttgattatttagcttacactagggttgt

SEQ ID NO: 347547 - DNA, 33 bp, Homo sapien
gtttcatttctatgaagggcagcttttcttaac

SEQ ID NO: 347548 - DNA, 33 bp, Homo sapien
gtttcatttctatgaatggcagcttttcttaac

SEQ ID NO: 347549 - DNA, 33 bp, Homo sapien
cttttcaatttgagaacagagaatgtgctagac

SEQ ID NO: 347550 - DNA, 33 bp, Homo sapien
cttttcaatttgagaagagagaatgtgctagac

SEQ ID NO: 347551 - DNA, 33 bp, Homo sapien
ggtcaagcatttcataccatctggcaatttagt

SEQ ID NO: 347552 - DNA, 33 bp, Homo sapien
ggtcaagcatttcatatcatctggcaatttagt

SEQ ID NO: 347553 - DNA, 33 bp, Homo sapien
catctgtgtatccaaacggacattttgtgcgtg

SEQ ID NO: 347554 - DNA, 33 bp, Homo sapien
catctgtgtatccaaatggacattttgtgcgtg

SEQ ID NO: 347555 - DNA, 33 bp, Homo sapien
cacatggagcactgggcacataggctattccct

SEQ ID NO: 347556 - DNA, 33 bp, Homo sapien
cacatggagcactggggacataggctattccct

SEQ ID NO: 347557 - DNA, 33 bp, Homo sapien
acattctttcgagttaccaacctgaggataatt

SEQ ID NO: 347558 - DNA, 33 bp, Homo sapien
acattctttcgagttatcaacctgaggataatt

SEQ ID NO: 347559 - DNA, 33 bp, Homo sapien
gaccatacagacaagaataagactgaactatat

SEQ ID NO: 347560 - DNA, 33 bp, Homo sapien
gaccatacagacaagattaagactgaactatat

SEQ ID NO: 347561 - DNA, 33 bp, Homo sapien
tttctgcaaaatacacaaaagaaagctattttt

SEQ ID NO: 347562 - DNA, 33 bp, Homo sapien
tttctgcaaaatacacgaaagaaagctattttt

SEQ ID NO: 347563 - DNA, 33 bp, Homo sapien
ttatggctctttctgaaatgtgtaccatgatga

SEQ ID NO: 347564 - DNA, 33 bp, Homo sapien
ttatggctctttctgagatgtgtaccatgatga

SEQ ID NO: 347565 - DNA, 33 bp, Homo sapien
attcctgctagttgtggagagatgacagatgtt

SEQ ID NO: 347566 - DNA, 33 bp, Homo sapien
attcctgctagttgtgtagagatgacagatgtt

SEQ ID NO: 347567 - DNA, 33 bp, Homo sapien
gttttacaggtttgtccgaatccaggttaatta

SEQ ID NO: 347568 - DNA, 33 bp, Homo sapien
gttttacaggtttgtctgaatccaggttaatta

SEQ ID NO: 347569 - DNA, 33 bp, Homo sapien
tatttcatttcacatacacattactggattttt

SEQ ID NO: 347570 - DNA, 33 bp, Homo sapien
tatttcatttcacatatacattactggattttt

SEQ ID NO: 347571 - DNA, 33 bp, Homo sapien
tcctactagagaaccacaaagcttgcccatagt

SEQ ID NO: 347572 - DNA, 33 bp, Homo sapien
tcctactagagaaccagaaagcttgcccatagt

SEQ ID NO: 347573 - DNA, 33 bp, Homo sapien
caagatggttttgtgacgcattttcttctaatc

SEQ ID NO: 347574 - DNA, 33 bp, Homo sapien
caagatggttttgtgatgcattttcttctaatc

SEQ ID NO: 347575 - DNA, 33 bp, Homo sapien
tatggaggtctggtaagcctaaaatctgcaggg

SEQ ID NO: 347576 - DNA, 33 bp, Homo sapien
tatggaggtctggtaatcctaaaatctgcaggg

SEQ ID NO: 347577 - DNA, 33 bp, Homo sapien
tgtgtgtgtgttgacaacttttcgaatctgcat

SEQ ID NO: 347578 - DNA, 33 bp, Homo sapien
tgtgtgtgtgttgacagcttttcgaatctgcat

SEQ ID NO: 347579 - DNA, 33 bp, Homo sapien
tttgccttgattaacacgtaattggattatttc

SEQ ID NO: 347580 - DNA, 33 bp, Homo sapien
tttgccttgattaacaggtaattggattatttc

SEQ ID NO: 347581 - DNA, 33 bp, Homo sapien
ccaagtccttgccttaagctgctgaaattgtgc

SEQ ID NO: 347582 - DNA, 33 bp, Homo sapien
ccaagtccttgccttaggctgctgaaattgtgc

SEQ ID NO: 347583 - DNA, 33 bp, Homo sapien
cagagcactgcaataagatcaaagcagggacgc

SEQ ID NO: 347584 - DNA, 33 bp, Homo sapien
cagagcactgcaataatatcaaagcagggacgc

SEQ ID NO: 347585 - DNA, 33 bp, Homo sapien
ggaaacagtttttctaccagtttagtccttaat

SEQ ID NO: 347586 - DNA, 33 bp, Homo sapien
ggaaacagtttttctagcagtttagtccttaat

SEQ ID NO: 347587 - DNA, 33 bp, Homo sapien
gtgtggggtgctgaggaagatcaagaaatgaat

SEQ ID NO: 347588 - DNA, 33 bp, Homo sapien
gtgtggggtgctgagggagatcaagaaatgaat

SEQ ID NO: 347589 - DNA, 33 bp, Homo sapien
atggtgcatttagaaccattcattcaacaaggg

SEQ ID NO: 347590 - DNA, 33 bp, Homo sapien
atggtgcatttagaactattcattcaacaaggg

SEQ ID NO: 347591 - DNA, 33 bp, Homo sapien
gtagtttggggtggatcatatctgagcatcctg

SEQ ID NO: 347592 - DNA, 33 bp, Homo sapien
gtagtttggggtggattatatctgagcatcctg

SEQ ID NO: 347593 - DNA, 33 bp, Homo sapien
atgacagtaacaatgacataagaaaactctact

SEQ ID NO: 347594 - DNA, 33 bp, Homo sapien
atgacagtaacaatgatataagaaaactctact

SEQ ID NO: 347595 - DNA, 33 bp, Homo sapien
agggcagtatagctaagccttaatgtgtgagag

SEQ ID NO: 347596 - DNA, 33 bp, Homo sapien
agggcagtatagctaatccttaatgtgtgagag

SEQ ID NO: 347597 - DNA, 33 bp, Homo sapien
atacataacatctgaacaagttttgagtaacac

SEQ ID NO: 347598 - DNA, 33 bp, Homo sapien
atacataacatctgaagaagttttgagtaacac

SEQ ID NO: 347599 - DNA, 33 bp, Homo sapien
tccatgccccaagttcgcctatgctcctaatca

SEQ ID NO: 347600 - DNA, 33 bp, Homo sapien
tccatgccccaagttctcctatgctcctaatca

SEQ ID NO: 347601 - DNA, 33 bp, Homo sapien
gatgtgtgatagtacactggcttcagtaggata

SEQ ID NO: 347602 - DNA, 33 bp, Homo sapien
gatgtgtgatagtacattggcttcagtaggata

SEQ ID NO: 347603 - DNA, 33 bp, Homo sapien
tcaggcccacgccaaaacctggcattcttataa

SEQ ID NO: 347604 - DNA, 33 bp, Homo sapien
tcaggcccacgccaaagcctggcattcttataa

SEQ ID NO: 347605 - DNA, 33 bp, Homo sapien
tagtgagctgaagagacgcgattatttatttat

SEQ ID NO: 347606 - DNA, 33 bp, Homo sapien
tagtgagctgaagagatgcgattatttatttat

SEQ ID NO: 347607 - DNA, 33 bp, Homo sapien
tctcaactgggccttacggctttgttgttggtt

SEQ ID NO: 347608 - DNA, 33 bp, Homo sapien
tctcaactgggccttatggctttgttgttggtt

SEQ ID NO: 347609 - DNA, 33 bp, Homo sapien
agaaaggagaggtggcacaatgcaagtttagag

SEQ ID NO: 347610 - DNA, 33 bp, Homo sapien
agaaaggagaggtggcgcaatgcaagtttagag

SEQ ID NO: 347611 - DNA, 33 bp, Homo sapien
tggttttcttcaggacaagcaagacagcaagag

SEQ ID NO: 347612 - DNA, 33 bp, Homo sapien
tggttttcttcaggacgagcaagacagcaagag

SEQ ID NO: 347613 - DNA, 33 bp, Homo sapien
tggtgttcctgccctacgggaactatgagatag

SEQ ID NO: 347614 - DNA, 33 bp, Homo sapien
tggtgttcctgccctatgggaactatgagatag

SEQ ID NO: 347615 - DNA, 33 bp, Homo sapien
gaaaggtaaacagccccgatgtccagccatagg

SEQ ID NO: 347616 - DNA, 33 bp, Homo sapien
gaaaggtaaacagccctgatgtccagccatagg

SEQ ID NO: 347617 - DNA, 33 bp, Homo sapien
gacaagacaatataacaaagggccagctgacac

SEQ ID NO: 347618 - DNA, 33 bp, Homo sapien
gacaagacaatataacgaagggccagctgacac

SEQ ID NO: 347619 - DNA, 33 bp, Homo sapien
ggggcatgaaggaacaaaacttgcagtggggaa

SEQ ID NO: 347620 - DNA, 33 bp, Homo sapien
ggggcatgaaggaacagaacttgcagtggggaa

SEQ ID NO: 347621 - DNA, 33 bp, Homo sapien
aggcattttcagaaaactctctggtacaaatcc

SEQ ID NO: 347622 - DNA, 33 bp, Homo sapien
aggcattttcagaaaagtctctggtacaaatcc

SEQ ID NO: 347623 - DNA, 33 bp, Homo sapien
gacaatcaatagcttaggtcattttatgtaaat

SEQ ID NO: 347624 - DNA, 33 bp, Homo sapien
gacaatcaatagcttatgtcattttatgtaaat

SEQ ID NO: 347625 - DNA, 33 bp, Homo sapien
acacagcacattgctgaacatcaataaatattt

SEQ ID NO: 347626 - DNA, 33 bp, Homo sapien
acacagcacattgctggacatcaataaatattt

SEQ ID NO: 347627 - DNA, 33 bp, Homo sapien
acaatttcaccagcaacgcatgagaacagagcc

SEQ ID NO: 347628 - DNA, 33 bp, Homo sapien
acaatttcaccagcaatgcatgagaacagagcc

SEQ ID NO: 347629 - DNA, 33 bp, Homo sapien
ggataggggacttgtccacaaactatggatcga

SEQ ID NO: 347630 - DNA, 33 bp, Homo sapien
ggataggggacttgtctacaaactatggatcga

SEQ ID NO: 347631 - DNA, 33 bp, Homo sapien
cctcctttattctggaaataggcacccaggcag

SEQ ID NO: 347632 - DNA, 33 bp, Homo sapien
cctcctttattctggatataggcacccaggcag

SEQ ID NO: 347633 - DNA, 33 bp, Homo sapien
aaaggtcttggacttaccagggaacagagccca

SEQ ID NO: 347634 - DNA, 33 bp, Homo sapien
aaaggtcttggacttatcagggaacagagccca

SEQ ID NO: 347635 - DNA, 33 bp, Homo sapien
catctttctgatcccaactcttcgctccagtgg

SEQ ID NO: 347636 - DNA, 33 bp, Homo sapien
catctttctgatcccatctcttcgctccagtgg

SEQ ID NO: 347637 - DNA, 33 bp, Homo sapien
tctgagggcagtaagcagcagttggatgggaag

SEQ ID NO: 347638 - DNA, 33 bp, Homo sapien
tctgagggcagtaagcggcagttggatgggaag

SEQ ID NO: 347639 - DNA, 33 bp, Homo sapien
gaagccacaggttaaccgggttgcctgcccagt

SEQ ID NO: 347640 - DNA, 33 bp, Homo sapien
gaagccacaggttaactgggttgcctgcccagt

SEQ ID NO: 347641 - DNA, 33 bp, Homo sapien
cattacctgaccatttaaaaaatctttatcctg

SEQ ID NO: 347642 - DNA, 33 bp, Homo sapien
cattacctgaccattttaaaaatctttatcctg

SEQ ID NO: 347643 - DNA, 33 bp, Homo sapien
ttaggtaaatctgtccaataatcagtgtcctta

SEQ ID NO: 347644 - DNA, 33 bp, Homo sapien
ttaggtaaatctgtccgataatcagtgtcctta

SEQ ID NO: 347645 - DNA, 33 bp, Homo sapien
ggaaggaagtacatgaagagttaagaagcaagt

SEQ ID NO: 347646 - DNA, 33 bp, Homo sapien
ggaaggaagtacatgatgagttaagaagcaagt

SEQ ID NO: 347647 - DNA, 33 bp, Homo sapien
ggtccagaactcttacaaattacatagaaaaag

SEQ ID NO: 347648 - DNA, 33 bp, Homo sapien
ggtccagaactcttaccaattacatagaaaaag

SEQ ID NO: 347649 - DNA, 33 bp, Homo sapien
atgactccaagttggacagaaggctgtgtgtgc

SEQ ID NO: 347650 - DNA, 33 bp, Homo sapien
atgactccaagttggagagaaggctgtgtgtgc

SEQ ID NO: 347651 - DNA, 33 bp, Homo sapien
acattatgaatacaggaaacacattataaatat

SEQ ID NO: 347652 - DNA, 33 bp, Homo sapien
acattatgaatacaggcaacacattataaatat

SEQ ID NO: 347653 - DNA, 33 bp, Homo sapien
ccttctctccctgcacacacagggcttttcacc

SEQ ID NO: 347654 - DNA, 33 bp, Homo sapien
ccttctctccctgcacgcacagggcttttcacc

SEQ ID NO: 347655 - DNA, 33 bp, Homo sapien
aagagcaagtgtgtgaagtaaagagagctcaga

SEQ ID NO: 347656 - DNA, 33 bp, Homo sapien
aagagcaagtgtgtgaggtaaagagagctcaga

SEQ ID NO: 347657 - DNA, 33 bp, Homo sapien
ataaagaataccatcaaagaacatgtgttgaca

SEQ ID NO: 347658 - DNA, 33 bp, Homo sapien
ataaagaataccatcagagaacatgtgttgaca

SEQ ID NO: 347659 - DNA, 33 bp, Homo sapien
gagccaccgcacctgacgttgatttttaacctc

SEQ ID NO: 347660 - DNA, 33 bp, Homo sapien
gagccaccgcacctgatgttgatttttaacctc

SEQ ID NO: 347661 - DNA, 33 bp, Homo sapien
ggttctctggttccaaactttaggtgctcttcc

SEQ ID NO: 347662 - DNA, 33 bp, Homo sapien
ggttctctggttccaagctttaggtgctcttcc

SEQ ID NO: 347663 - DNA, 33 bp, Homo sapien
gaagacaggtgtcccaagcaaagcctagctctg

SEQ ID NO: 347664 - DNA, 33 bp, Homo sapien
gaagacaggtgtcccaggcaaagcctagctctg

SEQ ID NO: 347665 - DNA, 33 bp, Homo sapien
cagcatcttggtaaaactggccggtagttggta

SEQ ID NO: 347666 - DNA, 33 bp, Homo sapien
cagcatcttggtaaaattggccggtagttggta

SEQ ID NO: 347667 - DNA, 33 bp, Homo sapien
gtcagaagtataagcacaaacgtcagcctagca

SEQ ID NO: 347668 - DNA, 33 bp, Homo sapien
gtcagaagtataagcataaacgtcagcctagca

SEQ ID NO: 347669 - DNA, 33 bp, Homo sapien
ccactgtggaggaaaacgtctggcctaacagac

SEQ ID NO: 347670 - DNA, 33 bp, Homo sapien
ccactgtggaggaaaaggtctggcctaacagac

SEQ ID NO: 347671 - DNA, 33 bp, Homo sapien
cacgtgattaaaaactgaggtaggcctgtgagg

SEQ ID NO: 347672 - DNA, 33 bp, Homo sapien
cacgtgattaaaaacttaggtaggcctgtgagg

SEQ ID NO: 347673 - DNA, 33 bp, Homo sapien
gcccagcctgaactgcactgtaagacctcggaa

SEQ ID NO: 347674 - DNA, 33 bp, Homo sapien
gcccagcctgaactgcgctgtaagacctcggaa

SEQ ID NO: 347675 - DNA, 33 bp, Homo sapien
actctaaaagattagaaggagcagtgcttggag

SEQ ID NO: 347676 - DNA, 33 bp, Homo sapien
actctaaaagattagagggagcagtgcttggag

SEQ ID NO: 347677 - DNA, 33 bp, Homo sapien
aaagttgttagaaagaataaatgagttcataca

SEQ ID NO: 347678 - DNA, 33 bp, Homo sapien
aaagttgttagaaagagtaaatgagttcataca

SEQ ID NO: 347679 - DNA, 33 bp, Homo sapien
catgatgaacttctagaaaatctgtatctggcc

SEQ ID NO: 347680 - DNA, 33 bp, Homo sapien
catgatgaacttctaggaaatctgtatctggcc

SEQ ID NO: 347681 - DNA, 33 bp, Homo sapien
atcacccagttcaagaacgaaagcatataaatg

SEQ ID NO: 347682 - DNA, 33 bp, Homo sapien
atcacccagttcaagagcgaaagcatataaatg

SEQ ID NO: 347683 - DNA, 33 bp, Homo sapien
tctgtcagctgtaaaactgccgaggaagaaaat

SEQ ID NO: 347684 - DNA, 33 bp, Homo sapien
tctgtcagctgtaaaagtgccgaggaagaaaat

SEQ ID NO: 347685 - DNA, 33 bp, Homo sapien
acccatttgtgagaaccgaaggccacttgaggg

SEQ ID NO: 347686 - DNA, 33 bp, Homo sapien
acccatttgtgagaactgaaggccacttgaggg

SEQ ID NO: 347687 - DNA, 33 bp, Homo sapien
taagatgtaaatagaaacatcgtgtgagacttc

SEQ ID NO: 347688 - DNA, 33 bp, Homo sapien
taagatgtaaatagaagcatcgtgtgagacttc

SEQ ID NO: 347689 - DNA, 33 bp, Homo sapien
ttgcagaaaccacccaatgcttcctgggataag

SEQ ID NO: 347690 - DNA, 33 bp, Homo sapien
ttgcagaaaccacccagtgcttcctgggataag

SEQ ID NO: 347691 - DNA, 33 bp, Homo sapien
ttacactaagagaatgccaagcgaatgcacctc

SEQ ID NO: 347692 - DNA, 33 bp, Homo sapien
ttacactaagagaatgtcaagcgaatgcacctc

SEQ ID NO: 347693 - DNA, 33 bp, Homo sapien
caacctggctcagggaaagacacattggctttg

SEQ ID NO: 347694 - DNA, 33 bp, Homo sapien
caacctggctcagggagagacacattggctttg

SEQ ID NO: 347695 - DNA, 33 bp, Homo sapien
gcccggcctgtgttgaactttttatacaggagg

SEQ ID NO: 347696 - DNA, 33 bp, Homo sapien
gcccggcctgtgttgatctttttatacaggagg

SEQ ID NO: 347697 - DNA, 33 bp, Homo sapien
tggagcctaactccccactttcagttatacaat

SEQ ID NO: 347698 - DNA, 33 bp, Homo sapien
tggagcctaactcccccctttcagttatacaat

SEQ ID NO: 347699 - DNA, 33 bp, Homo sapien
agttccaatgttgtgaaatagaaagaaaatcta

SEQ ID NO: 347700 - DNA, 33 bp, Homo sapien
agttccaatgttgtgagatagaaagaaaatcta

SEQ ID NO: 347701 - DNA, 33 bp, Homo sapien
acctgctacccatggccatagctgagttgggag

SEQ ID NO: 347702 - DNA, 33 bp, Homo sapien
acctgctacccatggctatagctgagttgggag

SEQ ID NO: 347703 - DNA, 33 bp, Homo sapien
taaacatgggcctgtcaaagatgaatgggtttt

SEQ ID NO: 347704 - DNA, 33 bp, Homo sapien
taaacatgggcctgtcgaagatgaatgggtttt

SEQ ID NO: 347705 - DNA, 33 bp, Homo sapien
caattgttgtttctgcccaagtgaacatcttgg

SEQ ID NO: 347706 - DNA, 33 bp, Homo sapien
caattgttgtttctgctcaagtgaacatcttgg

SEQ ID NO: 347707 - DNA, 33 bp, Homo sapien
tggtaattttagacaactcccattcagaggcag

SEQ ID NO: 347708 - DNA, 33 bp, Homo sapien
tggtaattttagacaattcccattcagaggcag

SEQ ID NO: 347709 - DNA, 33 bp, Homo sapien
gggccctcagcggggaacattccacgcatggca

SEQ ID NO: 347710 - DNA, 33 bp, Homo sapien
gggccctcagcggggatcattccacgcatggca

SEQ ID NO: 347711 - DNA, 33 bp, Homo sapien
tggaacacggaactctcagagtctgttagatga

SEQ ID NO: 347712 - DNA, 33 bp, Homo sapien
tggaacacggaactcttagagtctgttagatga

SEQ ID NO: 347713 - DNA, 33 bp, Homo sapien
cagggtgtgtggttcagtccattcagtgtgttc

SEQ ID NO: 347714 - DNA, 33 bp, Homo sapien
cagggtgtgtggttcattccattcagtgtgttc

SEQ ID NO: 347715 - DNA, 33 bp, Homo sapien
cctgcttattaaaagtcactcactcattcagag

SEQ ID NO: 347716 - DNA, 33 bp, Homo sapien
cctgcttattaaaagttactcactcattcagag

SEQ ID NO: 347717 - DNA, 33 bp, Homo sapien
ctgctgtcagtcctgaagaaatggtggccagag

SEQ ID NO: 347718 - DNA, 33 bp, Homo sapien
ctgctgtcagtcctgacgaaatggtggccagag

SEQ ID NO: 347719 - DNA, 33 bp, Homo sapien
caagagaatcgattgaaccttgctggcagaggt

SEQ ID NO: 347720 - DNA, 33 bp, Homo sapien
caagagaatcgattgatccttgctggcagaggt

SEQ ID NO: 347721 - DNA, 33 bp, Homo sapien
tgaggtgggcatgccactcttgggttggtaaaa

SEQ ID NO: 347722 - DNA, 33 bp, Homo sapien
tgaggtgggcatgccattcttgggttggtaaaa

SEQ ID NO: 347723 - DNA, 33 bp, Homo sapien
atgctcagattccagacatatagataaagaatc

SEQ ID NO: 347724 - DNA, 33 bp, Homo sapien
atgctcagattccagagatatagataaagaatc

SEQ ID NO: 347725 - DNA, 33 bp, Homo sapien
atgccagttgtttatacagtgctaataggataa

SEQ ID NO: 347726 - DNA, 33 bp, Homo sapien
atgccagttgtttatatagtgctaataggataa

SEQ ID NO: 347727 - DNA, 33 bp, Homo sapien
atgcctggctcaaacacgattatttaaaaaaat

SEQ ID NO: 347728 - DNA, 33 bp, Homo sapien
atgcctggctcaaacatgattatttaaaaaaat

SEQ ID NO: 347729 - DNA, 33 bp, Homo sapien
ttggaaacctcgacccaagttttgaggaggttg

SEQ ID NO: 347730 - DNA, 33 bp, Homo sapien
ttggaaacctcgacccgagttttgaggaggttg

SEQ ID NO: 347731 - DNA, 33 bp, Homo sapien
tcctattgtgcagatagagaaaaatgaggatgg

SEQ ID NO: 347732 - DNA, 33 bp, Homo sapien
tcctattgtgcagatatagaaaaatgaggatgg

SEQ ID NO: 347733 - DNA, 33 bp, Homo sapien
aagtctggaataacgacgggtgtctgggggctg

SEQ ID NO: 347734 - DNA, 33 bp, Homo sapien
aagtctggaataacgatgggtgtctgggggctg

SEQ ID NO: 347735 - DNA, 33 bp, Homo sapien
gatgcagggtcccataaagaactgtttctccaa

SEQ ID NO: 347736 - DNA, 33 bp, Homo sapien
gatgcagggtcccatagagaactgtttctccaa

SEQ ID NO: 347737 - DNA, 33 bp, Homo sapien
caactacatggaaggacactttgaatagatgga

SEQ ID NO: 347738 - DNA, 33 bp, Homo sapien
caactacatggaaggatactttgaatagatgga

SEQ ID NO: 347739 - DNA, 33 bp, Homo sapien
tcactacgggccaggcacttcccacacattatc

SEQ ID NO: 347740 - DNA, 33 bp, Homo sapien
tcactacgggccaggcgcttcccacacattatc

SEQ ID NO: 347741 - DNA, 33 bp, Homo sapien
gccgagttggcttgagaaagaataggaaggagg

SEQ ID NO: 347742 - DNA, 33 bp, Homo sapien
gccgagttggcttgaggaagaataggaaggagg

SEQ ID NO: 347743 - DNA, 33 bp, Homo sapien
aaatgtggggtaagaaactatttgagtgaaggc

SEQ ID NO: 347744 - DNA, 33 bp, Homo sapien
aaatgtggggtaagaatctatttgagtgaaggc

SEQ ID NO: 347745 - DNA, 33 bp, Homo sapien
gggcccaagcctcaaaaatctttcagtcccagg

SEQ ID NO: 347746 - DNA, 33 bp, Homo sapien
gggcccaagcctcaaatatctttcagtcccagg

SEQ ID NO: 347747 - DNA, 33 bp, Homo sapien
cccaagagggcagaacagcaagagggaaggagc

SEQ ID NO: 347748 - DNA, 33 bp, Homo sapien
cccaagagggcagaacggcaagagggaaggagc

SEQ ID NO: 347749 - DNA, 33 bp, Homo sapien
agccagatatggaaacagaagttcagagcgttt

SEQ ID NO: 347750 - DNA, 33 bp, Homo sapien
agccagatatggaaacggaagttcagagcgttt

SEQ ID NO: 347751 - DNA, 33 bp, Homo sapien
cgaacaacttcctagaaaaatgggctaaaaata

SEQ ID NO: 347752 - DNA, 33 bp, Homo sapien
cgaacaacttcctagacaaatgggctaaaaata

SEQ ID NO: 347753 - DNA, 33 bp, Homo sapien
aaagaaagaagacaaacgacaaacggcagaaaa

SEQ ID NO: 347754 - DNA, 33 bp, Homo sapien
aaagaaagaagacaaatgacaaacggcagaaaa

SEQ ID NO: 347755 - DNA, 33 bp, Homo sapien
agacaaacagggcaaactggcctccagctcaca

SEQ ID NO: 347756 - DNA, 33 bp, Homo sapien
agacaaacagggcaaagtggcctccagctcaca

SEQ ID NO: 347757 - DNA, 33 bp, Homo sapien
gtagcagtggtgaaaacgcttgcatgggtgcgc

SEQ ID NO: 347758 - DNA, 33 bp, Homo sapien
gtagcagtggtgaaaatgcttgcatgggtgcgc

SEQ ID NO: 347759 - DNA, 33 bp, Homo sapien
ttcaaaccactgatggcaagcagtccaggctct

SEQ ID NO: 347760 - DNA, 33 bp, Homo sapien
ttcaaaccactgatgggaagcagtccaggctct

SEQ ID NO: 347761 - DNA, 33 bp, Homo sapien
cctgaaatgggttaaccagatctttatggaggc

SEQ ID NO: 347762 - DNA, 33 bp, Homo sapien
cctgaaatgggttaactagatctttatggaggc

SEQ ID NO: 347763 - DNA, 33 bp, Homo sapien
ttggtagagtggtttccaagttgtagctcagtg

SEQ ID NO: 347764 - DNA, 33 bp, Homo sapien
ttggtagagtggtttcgaagttgtagctcagtg

SEQ ID NO: 347765 - DNA, 33 bp, Homo sapien
gcattcttgcgtttccaacacaccagagctttc

SEQ ID NO: 347766 - DNA, 33 bp, Homo sapien
gcattcttgcgtttccgacacaccagagctttc

SEQ ID NO: 347767 - DNA, 33 bp, Homo sapien
aatcactgacaatgccacaagtcccagtacttc

SEQ ID NO: 347768 - DNA, 33 bp, Homo sapien
aatcactgacaatgccgcaagtcccagtacttc

SEQ ID NO: 347769 - DNA, 33 bp, Homo sapien
atcagggtgcattagacgggtcagaggaaactc

SEQ ID NO: 347770 - DNA, 33 bp, Homo sapien
atcagggtgcattagaggggtcagaggaaactc

SEQ ID NO: 347771 - DNA, 33 bp, Homo sapien
attgtacagctgcaccactatccaccttcagaa

SEQ ID NO: 347772 - DNA, 33 bp, Homo sapien
attgtacagctgcaccgctatccaccttcagaa

SEQ ID NO: 347773 - DNA, 33 bp, Homo sapien
gcaggggacagcctggcacagaggaaagtgcag

SEQ ID NO: 347774 - DNA, 33 bp, Homo sapien
gcaggggacagcctggtacagaggaaagtgcag

SEQ ID NO: 347775 - DNA, 33 bp, Homo sapien
tcctacctttgtcatccgaccctgctctctttt

SEQ ID NO: 347776 - DNA, 33 bp, Homo sapien
tcctacctttgtcatctgaccctgctctctttt

SEQ ID NO: 347777 - DNA, 33 bp, Homo sapien
gccaataacagtagctaaaagaatgcttactgt

SEQ ID NO: 347778 - DNA, 33 bp, Homo sapien
gccaataacagtagctcaaagaatgcttactgt

SEQ ID NO: 347779 - DNA, 33 bp, Homo sapien
agcccagcagggcagaacagactctgaggcagt

SEQ ID NO: 347780 - DNA, 33 bp, Homo sapien
agcccagcagggcagaccagactctgaggcagt

SEQ ID NO: 347781 - DNA, 33 bp, Homo sapien
gttcccagttgtgtcacattctcaccacctacc

SEQ ID NO: 347782 - DNA, 33 bp, Homo sapien
gttcccagttgtgtcagattctcaccacctacc

SEQ ID NO: 347783 - DNA, 33 bp, Homo sapien
attacgctaagtgaaacgagccaaacgcaagag

SEQ ID NO: 347784 - DNA, 33 bp, Homo sapien
attacgctaagtgaaatgagccaaacgcaagag

SEQ ID NO: 347785 - DNA, 33 bp, Homo sapien
tccttccattaataacaattccctaaggtcctg

SEQ ID NO: 347786 - DNA, 33 bp, Homo sapien
tccttccattaataacgattccctaaggtcctg

SEQ ID NO: 347787 - DNA, 33 bp, Homo sapien
gtgaaatgggggctaacaccatctttcatgtat

SEQ ID NO: 347788 - DNA, 33 bp, Homo sapien
gtgaaatgggggctaataccatctttcatgtat

SEQ ID NO: 347789 - DNA, 33 bp, Homo sapien
catggaattgccgcccagcctgggtttccatga

SEQ ID NO: 347790 - DNA, 33 bp, Homo sapien
catggaattgccgccccgcctgggtttccatga

SEQ ID NO: 347791 - DNA, 33 bp, Homo sapien
aaccaacacttactgaaaattaaacttacatta

SEQ ID NO: 347792 - DNA, 33 bp, Homo sapien
aaccaacacttactgagaattaaacttacatta

SEQ ID NO: 347793 - DNA, 33 bp, Homo sapien
ttttaaggacatgccaaaagttttacagttatt

SEQ ID NO: 347794 - DNA, 33 bp, Homo sapien
ttttaaggacatgccataagttttacagttatt

SEQ ID NO: 347795 - DNA, 33 bp, Homo sapien
ccacctgtggtcctgacgccaagaggagggatc

SEQ ID NO: 347796 - DNA, 33 bp, Homo sapien
ccacctgtggtcctgaggccaagaggagggatc

SEQ ID NO: 347797 - DNA, 33 bp, Homo sapien
aagaaacaaactcttacgatagaagcacggcag

SEQ ID NO: 347798 - DNA, 33 bp, Homo sapien
aagaaacaaactcttaggatagaagcacggcag

SEQ ID NO: 347799 - DNA, 33 bp, Homo sapien
gcaagcaacagaaaggcagaaagtctagttcta

SEQ ID NO: 347800 - DNA, 33 bp, Homo sapien
gcaagcaacagaaaggtagaaagtctagttcta

SEQ ID NO: 347801 - DNA, 33 bp, Homo sapien
ggactgtctatgtcagaaaaagcagtcatggca

SEQ ID NO: 347802 - DNA, 33 bp, Homo sapien
ggactgtctatgtcaggaaaagcagtcatggca

SEQ ID NO: 347803 - DNA, 33 bp, Homo sapien
gtctcttccttcccaaaccgggtcttctgtgtt

SEQ ID NO: 347804 - DNA, 33 bp, Homo sapien
gtctcttccttcccaacccgggtcttctgtgtt

SEQ ID NO: 347805 - DNA, 33 bp, Homo sapien
gtaggagtgaggaatacggaagtccagctcccc

SEQ ID NO: 347806 - DNA, 33 bp, Homo sapien
gtaggagtgaggaatatggaagtccagctcccc

SEQ ID NO: 347807 - DNA, 33 bp, Homo sapien
aggagtcctggaagaccgcgaccctgtggaggc

SEQ ID NO: 347808 - DNA, 33 bp, Homo sapien
aggagtcctggaagactgcgaccctgtggaggc

SEQ ID NO: 347809 - DNA, 33 bp, Homo sapien
ctcccaaagctagagcaaaggccctttcacttt

SEQ ID NO: 347810 - DNA, 33 bp, Homo sapien
ctcccaaagctagagcgaaggccctttcacttt

SEQ ID NO: 347811 - DNA, 33 bp, Homo sapien
acatgcagaaaagttgcaagtacagtacaagta

SEQ ID NO: 347812 - DNA, 33 bp, Homo sapien
acatgcagaaaagttgtaagtacagtacaagta

SEQ ID NO: 347813 - DNA, 33 bp, Homo sapien
aacctctctatagccaccaaaatcagcaaataa

SEQ ID NO: 347814 - DNA, 33 bp, Homo sapien
aacctctctatagccatcaaaatcagcaaataa

SEQ ID NO: 347815 - DNA, 33 bp, Homo sapien
acaactacgagaagcaagattctgacctgcatt

SEQ ID NO: 347816 - DNA, 33 bp, Homo sapien
acaactacgagaagcatgattctgacctgcatt

SEQ ID NO: 347817 - DNA, 33 bp, Homo sapien
tgttgtaaacagaagccgactggggacttgaca

SEQ ID NO: 347818 - DNA, 33 bp, Homo sapien
tgttgtaaacagaagctgactggggacttgaca

SEQ ID NO: 347819 - DNA, 33 bp, Homo sapien
aggtttctatctaggccctcaggctatcacatg

SEQ ID NO: 347820 - DNA, 33 bp, Homo sapien
aggtttctatctaggctctcaggctatcacatg

SEQ ID NO: 347821 - DNA, 33 bp, Homo sapien
ggcacagagaggcttacgggggcagagacaaca

SEQ ID NO: 347822 - DNA, 33 bp, Homo sapien
ggcacagagaggcttatgggggcagagacaaca

SEQ ID NO: 347823 - DNA, 33 bp, Homo sapien
gtcttcccaatggaaaaacaggaagatggacta

SEQ ID NO: 347824 - DNA, 33 bp, Homo sapien
gtcttcccaatggaaacacaggaagatggacta

SEQ ID NO: 347825 - DNA, 33 bp, Homo sapien
acaatgcactagagcccagaaaggaggccacca

SEQ ID NO: 347826 - DNA, 33 bp, Homo sapien
acaatgcactagagcctagaaaggaggccacca

SEQ ID NO: 347827 - DNA, 33 bp, Homo sapien
cttccctctcctcatacccctcagaagtgcaga

SEQ ID NO: 347828 - DNA, 33 bp, Homo sapien
cttccctctcctcatatccctcagaagtgcaga

SEQ ID NO: 347829 - DNA, 33 bp, Homo sapien
ctataatcagcattacacagttctcttaacagc

SEQ ID NO: 347830 - DNA, 33 bp, Homo sapien
ctataatcagcattacgcagttctcttaacagc

SEQ ID NO: 347831 - DNA, 33 bp, Homo sapien
tgaggggtgctgttgaaccatcctggccctcat

SEQ ID NO: 347832 - DNA, 33 bp, Homo sapien
tgaggggtgctgttgacccatcctggccctcat

SEQ ID NO: 347833 - DNA, 33 bp, Homo sapien
cccagctctgggccgccattaatgacatgttgc

SEQ ID NO: 347834 - DNA, 33 bp, Homo sapien
cccagctctgggccgctattaatgacatgttgc

SEQ ID NO: 347835 - DNA, 33 bp, Homo sapien
tcaacaatcatcatccaccattattgttcattt

SEQ ID NO: 347836 - DNA, 33 bp, Homo sapien
tcaacaatcatcatccgccattattgttcattt

SEQ ID NO: 347837 - DNA, 33 bp, Homo sapien
ctatggtgacatagagactaagcgcaatatggg

SEQ ID NO: 347838 - DNA, 33 bp, Homo sapien
ctatggtgacatagaggctaagcgcaatatggg

SEQ ID NO: 347839 - DNA, 33 bp, Homo sapien
tcttttcgtgttgctacgattgatcaggggttg

SEQ ID NO: 347840 - DNA, 33 bp, Homo sapien
tcttttcgtgttgctatgattgatcaggggttg

SEQ ID NO: 347841 - DNA, 33 bp, Homo sapien
ttatcaacatttctccccatggatttagcagct

SEQ ID NO: 347842 - DNA, 33 bp, Homo sapien
ttatcaacatttctcctcatggatttagcagct

SEQ ID NO: 347843 - DNA, 33 bp, Homo sapien
cttgactgaaagatacaccgtcgatatagtaaa

SEQ ID NO: 347844 - DNA, 33 bp, Homo sapien
cttgactgaaagataccccgtcgatatagtaaa

SEQ ID NO: 347845 - DNA, 33 bp, Homo sapien
atgtccagatctcttaactttgtgtctgggaat

SEQ ID NO: 347846 - DNA, 33 bp, Homo sapien
atgtccagatctcttagctttgtgtctgggaat

SEQ ID NO: 347847 - DNA, 33 bp, Homo sapien
aattttcagtggttaacgttaaatcaacttttt

SEQ ID NO: 347848 - DNA, 33 bp, Homo sapien
aattttcagtggttaatgttaaatcaacttttt

SEQ ID NO: 347849 - DNA, 33 bp, Homo sapien
atgtctccttttatgaagtatctgttcatatcc

SEQ ID NO: 347850 - DNA, 33 bp, Homo sapien
atgtctccttttatgaggtatctgttcatatcc

SEQ ID NO: 347851 - DNA, 33 bp, Homo sapien
aattcaatctcatttacgatagccataccaaaa

SEQ ID NO: 347852 - DNA, 33 bp, Homo sapien
aattcaatctcatttatgatagccataccaaaa

SEQ ID NO: 347853 - DNA, 33 bp, Homo sapien
aatggaaaatcgaagcaacccatgaaaaaaaga

SEQ ID NO: 347854 - DNA, 33 bp, Homo sapien
aatggaaaatcgaagccacccatgaaaaaaaga

SEQ ID NO: 347855 - DNA, 33 bp, Homo sapien
cttctgctgaaagcaaactacacgtaaatatcc

SEQ ID NO: 347856 - DNA, 33 bp, Homo sapien
cttctgctgaaagcaacctacacgtaaatatcc

SEQ ID NO: 347857 - DNA, 33 bp, Homo sapien
gcatttgagtagactggaggacacacaggaaga

SEQ ID NO: 347858 - DNA, 33 bp, Homo sapien
gcatttgagtagactgtaggacacacaggaaga

SEQ ID NO: 347859 - DNA, 33 bp, Homo sapien
gggatatggaatcggacgacctagcttaaaatt

SEQ ID NO: 347860 - DNA, 33 bp, Homo sapien
gggatatggaatcggatgacctagcttaaaatt

SEQ ID NO: 347861 - DNA, 33 bp, Homo sapien
agataaaatactagacactctatgaaacttgaa

SEQ ID NO: 347862 - DNA, 33 bp, Homo sapien
agataaaatactagacgctctatgaaacttgaa

SEQ ID NO: 347863 - DNA, 33 bp, Homo sapien
gtctagtattttatctaacagtcttatcctaag

SEQ ID NO: 347864 - DNA, 33 bp, Homo sapien
gtctagtattttatctgacagtcttatcctaag

SEQ ID NO: 347865 - DNA, 33 bp, Homo sapien
gtctcttcgcctgaaaaaagatgtcatcctctc

SEQ ID NO: 347866 - DNA, 33 bp, Homo sapien
gtctcttcgcctgaaagaagatgtcatcctctc

SEQ ID NO: 347867 - DNA, 33 bp, Homo sapien
gcagggtaaatgtaaaaggagaagtgacagttg

SEQ ID NO: 347868 - DNA, 33 bp, Homo sapien
gcagggtaaatgtaaagggagaagtgacagttg

SEQ ID NO: 347869 - DNA, 33 bp, Homo sapien
tgaaatggaaaattcaaccataatgtactcttt

SEQ ID NO: 347870 - DNA, 33 bp, Homo sapien
tgaaatggaaaattcagccataatgtactcttt

SEQ ID NO: 347871 - DNA, 33 bp, Homo sapien
agtgaatcaattgtaactagctatgttttgatg

SEQ ID NO: 347872 - DNA, 33 bp, Homo sapien
agtgaatcaattgtaattagctatgttttgatg

SEQ ID NO: 347873 - DNA, 33 bp, Homo sapien
gctaataaggttgttcgcaaataacattattta

SEQ ID NO: 347874 - DNA, 33 bp, Homo sapien
gctaataaggttgttctcaaataacattattta

SEQ ID NO: 347875 - DNA, 33 bp, Homo sapien
caagggacaaatgtgagaccaggtcccagaggt

SEQ ID NO: 347876 - DNA, 33 bp, Homo sapien
caagggacaaatgtgataccaggtcccagaggt

SEQ ID NO: 347877 - DNA, 33 bp, Homo sapien
acagagcaagactccaactccgaaacaaacaaa

SEQ ID NO: 347878 - DNA, 33 bp, Homo sapien
acagagcaagactccatctccgaaacaaacaaa

SEQ ID NO: 347879 - DNA, 33 bp, Homo sapien
atggaacgactcgtgcacatcatgcgttgcggt

SEQ ID NO: 347880 - DNA, 33 bp, Homo sapien
atggaacgactcgtgcgcatcatgcgttgcggt

SEQ ID NO: 347881 - DNA, 33 bp, Homo sapien
agaaagtaggctgttcaagtgccaactttagga

SEQ ID NO: 347882 - DNA, 33 bp, Homo sapien
agaaagtaggctgttcgagtgccaactttagga

SEQ ID NO: 347883 - DNA, 33 bp, Homo sapien
tggtttcgtccacccacatctgtcacatctgtc

SEQ ID NO: 347884 - DNA, 33 bp, Homo sapien
tggtttcgtccacccatatctgtcacatctgtc

SEQ ID NO: 347885 - DNA, 33 bp, Homo sapien
tatttctagtcttctacgctggaatgggcatac

SEQ ID NO: 347886 - DNA, 33 bp, Homo sapien
tatttctagtcttctatgctggaatgggcatac

SEQ ID NO: 347887 - DNA, 33 bp, Homo sapien
tgagtaactcttctccacattacaattctctcc

SEQ ID NO: 347888 - DNA, 33 bp, Homo sapien
tgagtaactcttctccgcattacaattctctcc

SEQ ID NO: 347889 - DNA, 33 bp, Homo sapien
catatgtaaatcaaaagaataacatcaccaatt

SEQ ID NO: 347890 - DNA, 33 bp, Homo sapien
catatgtaaatcaaaataataacatcaccaatt

SEQ ID NO: 347891 - DNA, 33 bp, Homo sapien
tttattgttttgtagacgagaaattggggccta

SEQ ID NO: 347892 - DNA, 33 bp, Homo sapien
tttattgttttgtagatgagaaattggggccta

SEQ ID NO: 347893 - DNA, 33 bp, Homo sapien
ttgggaggtctgcaccaatcagaaaagatgcag

SEQ ID NO: 347894 - DNA, 33 bp, Homo sapien
ttgggaggtctgcacccatcagaaaagatgcag

SEQ ID NO: 347895 - DNA, 33 bp, Homo sapien
tcagaggcacagctcaatctagagtgaagtgaa

SEQ ID NO: 347896 - DNA, 33 bp, Homo sapien
tcagaggcacagctcagtctagagtgaagtgaa

SEQ ID NO: 347897 - DNA, 33 bp, Homo sapien
acatgtgcattctaggaacagataacttgcttt

SEQ ID NO: 347898 - DNA, 33 bp, Homo sapien
acatgtgcattctagggacagataacttgcttt

SEQ ID NO: 347899 - DNA, 33 bp, Homo sapien
atccctgtctttgaacgctaaagccttgccctt

SEQ ID NO: 347900 - DNA, 33 bp, Homo sapien
atccctgtctttgaactctaaagccttgccctt

SEQ ID NO: 347901 - DNA, 33 bp, Homo sapien
gattcagcaaggactcaaaagtatggagaagcc

SEQ ID NO: 347902 - DNA, 33 bp, Homo sapien
gattcagcaaggactcgaaagtatggagaagcc

SEQ ID NO: 347903 - DNA, 33 bp, Homo sapien
tcatctttaacactggccatctctagcggggct

SEQ ID NO: 347904 - DNA, 33 bp, Homo sapien
tcatctttaacactggtcatctctagcggggct

SEQ ID NO: 347905 - DNA, 33 bp, Homo sapien
cctcaagtctgattgcaccaacacctggtttgc

SEQ ID NO: 347906 - DNA, 33 bp, Homo sapien
cctcaagtctgattgcgccaacacctggtttgc

SEQ ID NO: 347907 - DNA, 33 bp, Homo sapien
aagaatcctccattagacagaaaatgttattac

SEQ ID NO: 347908 - DNA, 33 bp, Homo sapien
aagaatcctccattagccagaaaatgttattac

SEQ ID NO: 347909 - DNA, 33 bp, Homo sapien
ttttttgggaagaatccgaatgaataggtaaga

SEQ ID NO: 347910 - DNA, 33 bp, Homo sapien
ttttttgggaagaatctgaatgaataggtaaga

SEQ ID NO: 347911 - DNA, 33 bp, Homo sapien
aaacaaagatgttgtacgctcagggaaaggaaa

SEQ ID NO: 347912 - DNA, 33 bp, Homo sapien
aaacaaagatgttgtatgctcagggaaaggaaa

SEQ ID NO: 347913 - DNA, 33 bp, Homo sapien
ttgctgagaaacaaaggcattttctgtctcttt

SEQ ID NO: 347914 - DNA, 33 bp, Homo sapien
ttgctgagaaacaaagtcattttctgtctcttt

SEQ ID NO: 347915 - DNA, 33 bp, Homo sapien
gggaagagcagccccactatctgctagttttct

SEQ ID NO: 347916 - DNA, 33 bp, Homo sapien
gggaagagcagccccagtatctgctagttttct

SEQ ID NO: 347917 - DNA, 33 bp, Homo sapien
agtgcctggcagggaccggctgctttcattacg

SEQ ID NO: 347918 - DNA, 33 bp, Homo sapien
agtgcctggcagggactggctgctttcattacg

SEQ ID NO: 347919 - DNA, 33 bp, Homo sapien
aggtgagggcctctcacagaagttctatgatgt

SEQ ID NO: 347920 - DNA, 33 bp, Homo sapien
aggtgagggcctctcagagaagttctatgatgt

SEQ ID NO: 347921 - DNA, 33 bp, Homo sapien
ccactctggctactcacgtcattgggaacagaa

SEQ ID NO: 347922 - DNA, 33 bp, Homo sapien
ccactctggctactcatgtcattgggaacagaa

SEQ ID NO: 347923 - DNA, 33 bp, Homo sapien
cttcagatagttttcaagcaaagagactctttc

SEQ ID NO: 347924 - DNA, 33 bp, Homo sapien
cttcagatagttttcaggcaaagagactctttc

SEQ ID NO: 347925 - DNA, 33 bp, Homo sapien
ctctattactcatttgaatagtttcagaatcac

SEQ ID NO: 347926 - DNA, 33 bp, Homo sapien
ctctattactcatttgtatagtttcagaatcac

SEQ ID NO: 347927 - DNA, 33 bp, Homo sapien
ggaataatcacccgccaggaaaggaaagccttg

SEQ ID NO: 347928 - DNA, 33 bp, Homo sapien
ggaataatcacccgccgggaaaggaaagccttg

SEQ ID NO: 347929 - DNA, 33 bp, Homo sapien
tctgctgcccagaaaacataagtctttttttaa

SEQ ID NO: 347930 - DNA, 33 bp, Homo sapien
tctgctgcccagaaaatataagtctttttttaa

SEQ ID NO: 347931 - DNA, 33 bp, Homo sapien
tgctaaacggctttcccgatagacttgggatct

SEQ ID NO: 347932 - DNA, 33 bp, Homo sapien
tgctaaacggctttcctgatagacttgggatct

SEQ ID NO: 347933 - DNA, 33 bp, Homo sapien
actgtaaagtgcagtacgcaggaaagtagtggt

SEQ ID NO: 347934 - DNA, 33 bp, Homo sapien
actgtaaagtgcagtatgcaggaaagtagtggt

SEQ ID NO: 347935 - DNA, 33 bp, Homo sapien
tcctcggagctcaagacgcaaccctgcagcagg

SEQ ID NO: 347936 - DNA, 33 bp, Homo sapien
tcctcggagctcaagatgcaaccctgcagcagg

SEQ ID NO: 347937 - DNA, 33 bp, Homo sapien
cagtgtgtcagtcaaacgggaaggaggaactac

SEQ ID NO: 347938 - DNA, 33 bp, Homo sapien
cagtgtgtcagtcaaatgggaaggaggaactac

SEQ ID NO: 347939 - DNA, 33 bp, Homo sapien
tcacttgcctatatgacgcttcttagctccgca

SEQ ID NO: 347940 - DNA, 33 bp, Homo sapien
tcacttgcctatatgatgcttcttagctccgca

SEQ ID NO: 347941 - DNA, 33 bp, Homo sapien
cacaattcaatttgcacaatcaacatttcaaca

SEQ ID NO: 347942 - DNA, 33 bp, Homo sapien
cacaattcaatttgcataatcaacatttcaaca

SEQ ID NO: 347943 - DNA, 33 bp, Homo sapien
tcaaaatgacttacaacaggattcctttaaatg

SEQ ID NO: 347944 - DNA, 33 bp, Homo sapien
tcaaaatgacttacaataggattcctttaaatg

SEQ ID NO: 347945 - DNA, 33 bp, Homo sapien
taatcttgccacatgaaatttaccaaaacagaa

SEQ ID NO: 347946 - DNA, 33 bp, Homo sapien
taatcttgccacatgatatttaccaaaacagaa

SEQ ID NO: 347947 - DNA, 33 bp, Homo sapien
tcgccagaggtccgcacacattggagaactggg

SEQ ID NO: 347948 - DNA, 33 bp, Homo sapien
tcgccagaggtccgcatacattggagaactggg

SEQ ID NO: 347949 - DNA, 33 bp, Homo sapien
tgcagtatccccatagacaaattcacagagaca

SEQ ID NO: 347950 - DNA, 33 bp, Homo sapien
tgcagtatccccataggcaaattcacagagaca

SEQ ID NO: 347951 - DNA, 33 bp, Homo sapien
atattgtacaaccaccacaactattttgttcca

SEQ ID NO: 347952 - DNA, 33 bp, Homo sapien
atattgtacaaccaccgcaactattttgttcca

SEQ ID NO: 347953 - DNA, 33 bp, Homo sapien
gacttagtttctgataggtttgtattgggtagg

SEQ ID NO: 347954 - DNA, 33 bp, Homo sapien
gacttagtttctgatatgtttgtattgggtagg

SEQ ID NO: 347955 - DNA, 33 bp, Homo sapien
tgtcattccttgcctacggatctcacctcagtt

SEQ ID NO: 347956 - DNA, 33 bp, Homo sapien
tgtcattccttgcctatggatctcacctcagtt

SEQ ID NO: 347957 - DNA, 33 bp, Homo sapien
catctttgaatgtgaacgatatttctggcctct

SEQ ID NO: 347958 - DNA, 33 bp, Homo sapien
catctttgaatgtgaatgatatttctggcctct

SEQ ID NO: 347959 - DNA, 33 bp, Homo sapien
ggcaaattcagctgtgccaagtacaactcccaa

SEQ ID NO: 347960 - DNA, 33 bp, Homo sapien
ggcaaattcagctgtgtcaagtacaactcccaa

SEQ ID NO: 347961 - DNA, 33 bp, Homo sapien
aggtgcctcataatccaatttgatggaagaaat

SEQ ID NO: 347962 - DNA, 33 bp, Homo sapien
aggtgcctcataatccgatttgatggaagaaat

SEQ ID NO: 347963 - DNA, 33 bp, Homo sapien
ccaggtcctgccttccagaagttcatggttaaa

SEQ ID NO: 347964 - DNA, 33 bp, Homo sapien
ccaggtcctgccttccggaagttcatggttaaa

SEQ ID NO: 347965 - DNA, 33 bp, Homo sapien
caattatcctcattctcaacaagctcgccttcc

SEQ ID NO: 347966 - DNA, 33 bp, Homo sapien
caattatcctcattctgaacaagctcgccttcc

SEQ ID NO: 347967 - DNA, 33 bp, Homo sapien
cagtacagctccatacaaaggaagttgacaatc

SEQ ID NO: 347968 - DNA, 33 bp, Homo sapien
cagtacagctccatacgaaggaagttgacaatc

SEQ ID NO: 347969 - DNA, 33 bp, Homo sapien
aatacttgtcgaagaacgcatgggatgaatatg

SEQ ID NO: 347970 - DNA, 33 bp, Homo sapien
aatacttgtcgaagaatgcatgggatgaatatg

SEQ ID NO: 347971 - DNA, 33 bp, Homo sapien
tgactttttcctttcaaaagctctcttgggcaa

SEQ ID NO: 347972 - DNA, 33 bp, Homo sapien
tgactttttcctttcagaagctctcttgggcaa

SEQ ID NO: 347973 - DNA, 33 bp, Homo sapien
ctaacaggccgcacaccggtatcagtccacggc

SEQ ID NO: 347974 - DNA, 33 bp, Homo sapien
ctaacaggccgcacacgggtatcagtccacggc

SEQ ID NO: 347975 - DNA, 33 bp, Homo sapien
ggcttttcccgtgttcaccagcagttcagccaa

SEQ ID NO: 347976 - DNA, 33 bp, Homo sapien
ggcttttcccgtgttctccagcagttcagccaa

SEQ ID NO: 347977 - DNA, 33 bp, Homo sapien
caatgataacctattagcgtgcaactctgtgcc

SEQ ID NO: 347978 - DNA, 33 bp, Homo sapien
caatgataacctattatcgtgcaactctgtgcc

SEQ ID NO: 347979 - DNA, 33 bp, Homo sapien
ctcactttggtttcagccaagagaaatggtacc

SEQ ID NO: 347980 - DNA, 33 bp, Homo sapien
ctcactttggtttcaggcaagagaaatggtacc

SEQ ID NO: 347981 - DNA, 33 bp, Homo sapien
aaaaccactgtgctaaataacagtggagatata

SEQ ID NO: 347982 - DNA, 33 bp, Homo sapien
aaaaccactgtgctaagtaacagtggagatata

SEQ ID NO: 347983 - DNA, 33 bp, Homo sapien
tcctttgcaaaaaatcaaagattaatggctcaa

SEQ ID NO: 347984 - DNA, 33 bp, Homo sapien
tcctttgcaaaaaatcgaagattaatggctcaa

SEQ ID NO: 347985 - DNA, 33 bp, Homo sapien
gacgcctcacctggaaccctttgcttgttcctg

SEQ ID NO: 347986 - DNA, 33 bp, Homo sapien
gacgcctcacctggaagcctttgcttgttcctg

SEQ ID NO: 347987 - DNA, 33 bp, Homo sapien
acacttaacaatgtcacggtggcaacagccctc

SEQ ID NO: 347988 - DNA, 33 bp, Homo sapien
acacttaacaatgtcagggtggcaacagccctc

SEQ ID NO: 347989 - DNA, 33 bp, Homo sapien
agtttcctgagtgttcccaacaagttctgtaag

SEQ ID NO: 347990 - DNA, 33 bp, Homo sapien
agtttcctgagtgttctcaacaagttctgtaag

SEQ ID NO: 347991 - DNA, 33 bp, Homo sapien
gagactttcaagccacaagcagaatttttttct

SEQ ID NO: 347992 - DNA, 33 bp, Homo sapien
gagactttcaagccacgagcagaatttttttct

SEQ ID NO: 347993 - DNA, 33 bp, Homo sapien
ttattaaaagtgaccactcatcaatcacagcat

SEQ ID NO: 347994 - DNA, 33 bp, Homo sapien
ttattaaaagtgaccattcatcaatcacagcat

SEQ ID NO: 347995 - DNA, 33 bp, Homo sapien
ttccttactttgccggccactatcatagtaagc

SEQ ID NO: 347996 - DNA, 33 bp, Homo sapien
ttccttactttgccgggcactatcatagtaagc

SEQ ID NO: 347997 - DNA, 33 bp, Homo sapien
tcagcagttaggttgcaagttcaatgacggcaa

SEQ ID NO: 347998 - DNA, 33 bp, Homo sapien
tcagcagttaggttgcgagttcaatgacggcaa

SEQ ID NO: 347999 - DNA, 33 bp, Homo sapien
gaacaacttactcaccaggcagaagccagctca

SEQ ID NO: 348000 - DNA, 33 bp, Homo sapien
gaacaacttactcaccgggcagaagccagctca

SEQ ID NO: 348001 - DNA, 33 bp, Homo sapien
gaatctctgaatcttgcagtgtgaagagaccaa

SEQ ID NO: 348002 - DNA, 33 bp, Homo sapien
gaatctctgaatcttggagtgtgaagagaccaa

SEQ ID NO: 348003 - DNA, 33 bp, Homo sapien
gccccagccaaagtccacttttcacaggacgtg

SEQ ID NO: 348004 - DNA, 33 bp, Homo sapien
gccccagccaaagtccgcttttcacaggacgtg

SEQ ID NO: 348005 - DNA, 33 bp, Homo sapien
gaatgtgatgaaatgacacgtttggctgcattt

SEQ ID NO: 348006 - DNA, 33 bp, Homo sapien
gaatgtgatgaaatgatacgtttggctgcattt

SEQ ID NO: 348007 - DNA, 33 bp, Homo sapien
gcccctttcaggtaaccgtcttcacaatgtatt

SEQ ID NO: 348008 - DNA, 33 bp, Homo sapien
gcccctttcaggtaactgtcttcacaatgtatt

SEQ ID NO: 348009 - DNA, 33 bp, Homo sapien
gaaatgctacttaaaacgttgaccaggaatggc

SEQ ID NO: 348010 - DNA, 33 bp, Homo sapien
gaaatgctacttaaaaggttgaccaggaatggc

SEQ ID NO: 348011 - DNA, 33 bp, Homo sapien
gttctgaaatagactacgattaaattgttgctt

SEQ ID NO: 348012 - DNA, 33 bp, Homo sapien
gttctgaaatagactatgattaaattgttgctt

SEQ ID NO: 348013 - DNA, 33 bp, Homo sapien
ccaaagtagactgctcacatattaacattgctc

SEQ ID NO: 348014 - DNA, 33 bp, Homo sapien
ccaaagtagactgctcgcatattaacattgctc

SEQ ID NO: 348015 - DNA, 33 bp, Homo sapien
atgagttctgaactcaaagatgacatctggtgt

SEQ ID NO: 348016 - DNA, 33 bp, Homo sapien
atgagttctgaactcagagatgacatctggtgt

SEQ ID NO: 348017 - DNA, 33 bp, Homo sapien
caataacaggtgataccctctttagcatgaatt

SEQ ID NO: 348018 - DNA, 33 bp, Homo sapien
caataacaggtgatactctctttagcatgaatt

SEQ ID NO: 348019 - DNA, 33 bp, Homo sapien
tttgtgtctccttcagcagtagggtaattaagt

SEQ ID NO: 348020 - DNA, 33 bp, Homo sapien
tttgtgtctccttcagtagtagggtaattaagt

SEQ ID NO: 348021 - DNA, 33 bp, Homo sapien
agaaataccagtggaaaagtattacacatcagc

SEQ ID NO: 348022 - DNA, 33 bp, Homo sapien
agaaataccagtggaacagtattacacatcagc

SEQ ID NO: 348023 - DNA, 33 bp, Homo sapien
ttacagaagacacttaagtacaaagaagtaaag

SEQ ID NO: 348024 - DNA, 33 bp, Homo sapien
ttacagaagacacttaggtacaaagaagtaaag

SEQ ID NO: 348025 - DNA, 33 bp, Homo sapien
ttgccaaagtgtggataacagtgaaacctattt

SEQ ID NO: 348026 - DNA, 33 bp, Homo sapien
ttgccaaagtgtggattacagtgaaacctattt

SEQ ID NO: 348027 - DNA, 33 bp, Homo sapien
atcaaggttgacaaccagcttccctatcacctt

SEQ ID NO: 348028 - DNA, 33 bp, Homo sapien
atcaaggttgacaaccggcttccctatcacctt

SEQ ID NO: 348029 - DNA, 33 bp, Homo sapien
agctagtccacactgaacctcgagaaatttgtc

SEQ ID NO: 348030 - DNA, 33 bp, Homo sapien
agctagtccacactgagcctcgagaaatttgtc

SEQ ID NO: 348031 - DNA, 33 bp, Homo sapien
catcaataagataccaccagataatgataaaag

SEQ ID NO: 348032 - DNA, 33 bp, Homo sapien
catcaataagataccagcagataatgataaaag

SEQ ID NO: 348033 - DNA, 33 bp, Homo sapien
aacccaaacttaaatcaagcagtgaaacaatct

SEQ ID NO: 348034 - DNA, 33 bp, Homo sapien
aacccaaacttaaatcgagcagtgaaacaatct

SEQ ID NO: 348035 - DNA, 33 bp, Homo sapien
aaaagttcaccttcataaatcttctttaggggg

SEQ ID NO: 348036 - DNA, 33 bp, Homo sapien
aaaagttcaccttcattaatcttctttaggggg

SEQ ID NO: 348037 - DNA, 33 bp, Homo sapien
tccttgcactctatacaaagaaaactccggatg

SEQ ID NO: 348038 - DNA, 33 bp, Homo sapien
tccttgcactctatacgaagaaaactccggatg

SEQ ID NO: 348039 - DNA, 33 bp, Homo sapien
attgaatcaaccaatcccagctttgcttccact

SEQ ID NO: 348040 - DNA, 33 bp, Homo sapien
attgaatcaaccaatctcagctttgcttccact

SEQ ID NO: 348041 - DNA, 33 bp, Homo sapien
ctgtaggacaaagtcaggtggtataatctgcat

SEQ ID NO: 348042 - DNA, 33 bp, Homo sapien
ctgtaggacaaagtcatgtggtataatctgcat

SEQ ID NO: 348043 - DNA, 33 bp, Homo sapien
tctcagaaaatgaaaccgactcttgaaatgaaa

SEQ ID NO: 348044 - DNA, 33 bp, Homo sapien
tctcagaaaatgaaactgactcttgaaatgaaa

SEQ ID NO: 348045 - DNA, 33 bp, Homo sapien
ggcaattcaatggagaaggcataattttttcaa

SEQ ID NO: 348046 - DNA, 33 bp, Homo sapien
ggcaattcaatggagacggcataattttttcaa

SEQ ID NO: 348047 - DNA, 33 bp, Homo sapien
tgcctttggtgtggtacgtaagaaacctttgcc

SEQ ID NO: 348048 - DNA, 33 bp, Homo sapien
tgcctttggtgtggtatgtaagaaacctttgcc

SEQ ID NO: 348049 - DNA, 33 bp, Homo sapien
ctcaacaggctacacaccatatgattctattta

SEQ ID NO: 348050 - DNA, 33 bp, Homo sapien
ctcaacaggctacacagcatatgattctattta

SEQ ID NO: 348051 - DNA, 33 bp, Homo sapien
ttatgcaaactgcctacataaaaaggcaaattt

SEQ ID NO: 348052 - DNA, 33 bp, Homo sapien
ttatgcaaactgcctagataaaaaggcaaattt

SEQ ID NO: 348053 - DNA, 33 bp, Homo sapien
atggaccaatgagttacgataacaagtactttt

SEQ ID NO: 348054 - DNA, 33 bp, Homo sapien
atggaccaatgagttatgataacaagtactttt

SEQ ID NO: 348055 - DNA, 33 bp, Homo sapien
agtacacaaaaagctcactgctgtttaaagtct

SEQ ID NO: 348056 - DNA, 33 bp, Homo sapien
agtacacaaaaagctcgctgctgtttaaagtct

SEQ ID NO: 348057 - DNA, 33 bp, Homo sapien
tccggtcctgggccgcacaataattaattagac

SEQ ID NO: 348058 - DNA, 33 bp, Homo sapien
tccggtcctgggccgcgcaataattaattagac

SEQ ID NO: 348059 - DNA, 33 bp, Homo sapien
agcaatttatccataacgattacgccacagcac

SEQ ID NO: 348060 - DNA, 33 bp, Homo sapien
agcaatttatccataatgattacgccacagcac

SEQ ID NO: 348061 - DNA, 33 bp, Homo sapien
tgctatatcgacttgccctttctgtgttttgac

SEQ ID NO: 348062 - DNA, 33 bp, Homo sapien
tgctatatcgacttgctctttctgtgttttgac

SEQ ID NO: 348063 - DNA, 33 bp, Homo sapien
ataaataacaccaccaccaacgaaatagatgca

SEQ ID NO: 348064 - DNA, 33 bp, Homo sapien
ataaataacaccaccatcaacgaaatagatgca

SEQ ID NO: 348065 - DNA, 33 bp, Homo sapien
gctggttaacatggaaagtttaaattcttgtta

SEQ ID NO: 348066 - DNA, 33 bp, Homo sapien
gctggttaacatggaaggtttaaattcttgtta

SEQ ID NO: 348067 - DNA, 33 bp, Homo sapien
ataaactgctatgcaaatgatgctatttgtaag

SEQ ID NO: 348068 - DNA, 33 bp, Homo sapien
ataaactgctatgcaagtgatgctatttgtaag

SEQ ID NO: 348069 - DNA, 33 bp, Homo sapien
ctgaaagaaaaggatcacaggccctcacataca

SEQ ID NO: 348070 - DNA, 33 bp, Homo sapien
ctgaaagaaaaggatcgcaggccctcacataca

SEQ ID NO: 348071 - DNA, 33 bp, Homo sapien
acaaagcaattttacacaccaaaaacatttgtg

SEQ ID NO: 348072 - DNA, 33 bp, Homo sapien
acaaagcaattttacataccaaaaacatttgtg

SEQ ID NO: 348073 - DNA, 33 bp, Homo sapien
taactactggctctgcccaagactcctggagca

SEQ ID NO: 348074 - DNA, 33 bp, Homo sapien
taactactggctctgctcaagactcctggagca

SEQ ID NO: 348075 - DNA, 33 bp, Homo sapien
ctaaattcaacacctacatggcccatgcgaatc

SEQ ID NO: 348076 - DNA, 33 bp, Homo sapien
ctaaattcaacacctatatggcccatgcgaatc

SEQ ID NO: 348077 - DNA, 33 bp, Homo sapien
tatcctctggtcatccacattgtacatatactt

SEQ ID NO: 348078 - DNA, 33 bp, Homo sapien
tatcctctggtcatccgcattgtacatatactt

SEQ ID NO: 348079 - DNA, 33 bp, Homo sapien
ttgcacgatggtcatcaaaggctgttcatagga

SEQ ID NO: 348080 - DNA, 33 bp, Homo sapien
ttgcacgatggtcatcgaaggctgttcatagga

SEQ ID NO: 348081 - DNA, 33 bp, Homo sapien
ctccatataacctttccactgcagaattctgct

SEQ ID NO: 348082 - DNA, 33 bp, Homo sapien
ctccatataacctttctactgcagaattctgct

SEQ ID NO: 348083 - DNA, 33 bp, Homo sapien
agagagaatgaagaagccagattgaactgattt

SEQ ID NO: 348084 - DNA, 33 bp, Homo sapien
agagagaatgaagaaggcagattgaactgattt

SEQ ID NO: 348085 - DNA, 33 bp, Homo sapien
tgctcttggaaatagagccgatcaactcagaga

SEQ ID NO: 348086 - DNA, 33 bp, Homo sapien
tgctcttggaaatagatccgatcaactcagaga

SEQ ID NO: 348087 - DNA, 33 bp, Homo sapien
taagagagaggcatagaagcaagaaagcaaaga

SEQ ID NO: 348088 - DNA, 33 bp, Homo sapien
taagagagaggcataggagcaagaaagcaaaga

SEQ ID NO: 348089 - DNA, 33 bp, Homo sapien
gcccacccgagaccaaataaatcagcatttctg

SEQ ID NO: 348090 - DNA, 33 bp, Homo sapien
gcccacccgagaccaagtaaatcagcatttctg

SEQ ID NO: 348091 - DNA, 33 bp, Homo sapien
atggcgaaatcgtttcactattgccagcagctt

SEQ ID NO: 348092 - DNA, 33 bp, Homo sapien
atggcgaaatcgtttcgctattgccagcagctt

SEQ ID NO: 348093 - DNA, 33 bp, Homo sapien
tcaaagagtgcagggcaaagccatgagacagaa

SEQ ID NO: 348094 - DNA, 33 bp, Homo sapien
tcaaagagtgcagggcgaagccatgagacagaa

SEQ ID NO: 348095 - DNA, 33 bp, Homo sapien
cagtgaagacagacaccgacagtagttgagata

SEQ ID NO: 348096 - DNA, 33 bp, Homo sapien
cagtgaagacagacactgacagtagttgagata

SEQ ID NO: 348097 - DNA, 33 bp, Homo sapien
acaacaaaaaccaacccgcaactcagatcatat

SEQ ID NO: 348098 - DNA, 33 bp, Homo sapien
acaacaaaaaccaacctgcaactcagatcatat

SEQ ID NO: 348099 - DNA, 33 bp, Homo sapien
ggctgggacacacatacagacacaaccacgcaa

SEQ ID NO: 348100 - DNA, 33 bp, Homo sapien
ggctgggacacacatatagacacaaccacgcaa

SEQ ID NO: 348101 - DNA, 33 bp, Homo sapien
ttctgtgcctcacttacataggttgattttcat

SEQ ID NO: 348102 - DNA, 33 bp, Homo sapien
ttctgtgcctcacttatataggttgattttcat

SEQ ID NO: 348103 - DNA, 33 bp, Homo sapien
atttcttggatgaaagccattctataaatgcaa

SEQ ID NO: 348104 - DNA, 33 bp, Homo sapien
atttcttggatgaaaggcattctataaatgcaa

SEQ ID NO: 348105 - DNA, 33 bp, Homo sapien
ccaattattgtaaagacgcaaataaccaaacaa

SEQ ID NO: 348106 - DNA, 33 bp, Homo sapien
ccaattattgtaaagatgcaaataaccaaacaa

SEQ ID NO: 348107 - DNA, 33 bp, Homo sapien
ggctaattcccttagaacatttctctaagtaat

SEQ ID NO: 348108 - DNA, 33 bp, Homo sapien
ggctaattcccttagatcatttctctaagtaat

SEQ ID NO: 348109 - DNA, 33 bp, Homo sapien
ccgtaaaaggcttagcactatgactgacactta

SEQ ID NO: 348110 - DNA, 33 bp, Homo sapien
ccgtaaaaggcttagcgctatgactgacactta

SEQ ID NO: 348111 - DNA, 33 bp, Homo sapien
ttgactgtagaggccaactaaaacattaaatta

SEQ ID NO: 348112 - DNA, 33 bp, Homo sapien
ttgactgtagaggccacctaaaacattaaatta

SEQ ID NO: 348113 - DNA, 33 bp, Homo sapien
ttacaccctacaacacagaagtgcgctaatgta

SEQ ID NO: 348114 - DNA, 33 bp, Homo sapien
ttacaccctacaacacggaagtgcgctaatgta

SEQ ID NO: 348115 - DNA, 33 bp, Homo sapien
gccatcagttcttcctcagccccccagatctgt

SEQ ID NO: 348116 - DNA, 33 bp, Homo sapien
gccatcagttcttccttagccccccagatctgt

SEQ ID NO: 348117 - DNA, 33 bp, Homo sapien
ggaagcaatggagcaaaccaggtatatattgga

SEQ ID NO: 348118 - DNA, 33 bp, Homo sapien
ggaagcaatggagcaagccaggtatatattgga

SEQ ID NO: 348119 - DNA, 33 bp, Homo sapien
ctttataaggatttcaacatctgggccctggtt

SEQ ID NO: 348120 - DNA, 33 bp, Homo sapien
ctttataaggatttcatcatctgggccctggtt

SEQ ID NO: 348121 - DNA, 33 bp, Homo sapien
ctagaacaggttggagaacataagcgtgtgact

SEQ ID NO: 348122 - DNA, 33 bp, Homo sapien
ctagaacaggttggagcacataagcgtgtgact

SEQ ID NO: 348123 - DNA, 33 bp, Homo sapien
atctaattagtcagtaaaaatttgaacacaggg

SEQ ID NO: 348124 - DNA, 33 bp, Homo sapien
atctaattagtcagtacaaatttgaacacaggg

SEQ ID NO: 348125 - DNA, 33 bp, Homo sapien
ccctaagtatatgggtgacaagtactaccttct

SEQ ID NO: 348126 - DNA, 33 bp, Homo sapien
ccctaagtatatgggttacaagtactaccttct

SEQ ID NO: 348127 - DNA, 33 bp, Homo sapien
agttaacaactactcaatctaaggtaaatttct

SEQ ID NO: 348128 - DNA, 33 bp, Homo sapien
agttaacaactactcagtctaaggtaaatttct

SEQ ID NO: 348129 - DNA, 33 bp, Homo sapien
gcttgttagtctggtaaaagttagtttatttga

SEQ ID NO: 348130 - DNA, 33 bp, Homo sapien
gcttgttagtctggtagaagttagtttatttga

SEQ ID NO: 348131 - DNA, 33 bp, Homo sapien
aattaagaggaagaacaagaacttaaacctggg

SEQ ID NO: 348132 - DNA, 33 bp, Homo sapien
aattaagaggaagaaccagaacttaaacctggg

SEQ ID NO: 348133 - DNA, 33 bp, Homo sapien
cttagaactgatatgcactaggcctgataaacc

SEQ ID NO: 348134 - DNA, 33 bp, Homo sapien
cttagaactgatatgctctaggcctgataaacc

SEQ ID NO: 348135 - DNA, 33 bp, Homo sapien
gaagattattagaaaaatatcagtgagcagaaa

SEQ ID NO: 348136 - DNA, 33 bp, Homo sapien
gaagattattagaaaagtatcagtgagcagaaa

SEQ ID NO: 348137 - DNA, 33 bp, Homo sapien
taaaacccaggtcataagtctcctagcccagat

SEQ ID NO: 348138 - DNA, 33 bp, Homo sapien
taaaacccaggtcatatgtctcctagcccagat

SEQ ID NO: 348139 - DNA, 33 bp, Homo sapien
aatgacatcatctgctcaatccgaaattcaaat

SEQ ID NO: 348140 - DNA, 33 bp, Homo sapien
aatgacatcatctgcttaatccgaaattcaaat

SEQ ID NO: 348141 - DNA, 33 bp, Homo sapien
ataaattaacctctgaagtcttcatatctgttt

SEQ ID NO: 348142 - DNA, 33 bp, Homo sapien
ataaattaacctctgaggtcttcatatctgttt

SEQ ID NO: 348143 - DNA, 33 bp, Homo sapien
ctgttctatgcctcagactcaggagactggtta

SEQ ID NO: 348144 - DNA, 33 bp, Homo sapien
ctgttctatgcctcaggctcaggagactggtta

SEQ ID NO: 348145 - DNA, 33 bp, Homo sapien
tgttacttggatgacaatgacaatgaccttgtg

SEQ ID NO: 348146 - DNA, 33 bp, Homo sapien
tgttacttggatgacagtgacaatgaccttgtg

SEQ ID NO: 348147 - DNA, 33 bp, Homo sapien
ggataataaatgtaacaaaagcatcaaactgtg

SEQ ID NO: 348148 - DNA, 33 bp, Homo sapien
ggataataaatgtaacgaaagcatcaaactgtg

SEQ ID NO: 348149 - DNA, 33 bp, Homo sapien
ctttcaaagcagaatcacaacatcagggacttt

SEQ ID NO: 348150 - DNA, 33 bp, Homo sapien
ctttcaaagcagaatcgcaacatcagggacttt

SEQ ID NO: 348151 - DNA, 33 bp, Homo sapien
ggaagttatgcaacccaaaggcctaaaggaaac

SEQ ID NO: 348152 - DNA, 33 bp, Homo sapien
ggaagttatgcaacccgaaggcctaaaggaaac

SEQ ID NO: 348153 - DNA, 33 bp, Homo sapien
ttgtgggatcagaaaaataattcattttagtcc

SEQ ID NO: 348154 - DNA, 33 bp, Homo sapien
ttgtgggatcagaaaagtaattcattttagtcc

SEQ ID NO: 348155 - DNA, 33 bp, Homo sapien
ttactctctgaaattacggcttgccctgcagct

SEQ ID NO: 348156 - DNA, 33 bp, Homo sapien
ttactctctgaaattatggcttgccctgcagct

SEQ ID NO: 348157 - DNA, 33 bp, Homo sapien
tgcacctcacaacatacgaaatgctgtttataa

SEQ ID NO: 348158 - DNA, 33 bp, Homo sapien
tgcacctcacaacatatgaaatgctgtttataa

SEQ ID NO: 348159 - DNA, 33 bp, Homo sapien
ttggaatctaagataacagaggatattgatgag

SEQ ID NO: 348160 - DNA, 33 bp, Homo sapien
ttggaatctaagataatagaggatattgatgag

SEQ ID NO: 348161 - DNA, 33 bp, Homo sapien
ttcattttgtgaatatcaaggtatttccaaagc

SEQ ID NO: 348162 - DNA, 33 bp, Homo sapien
ttcattttgtgaatatgaaggtatttccaaagc

SEQ ID NO: 348163 - DNA, 33 bp, Homo sapien
ttttatcccaatactgaagaacttccaaaacac

SEQ ID NO: 348164 - DNA, 33 bp, Homo sapien
ttttatcccaatactggagaacttccaaaacac

SEQ ID NO: 348165 - DNA, 33 bp, Homo sapien
acctgcctgctctcaacgtcactaaacgtattt

SEQ ID NO: 348166 - DNA, 33 bp, Homo sapien
acctgcctgctctcaaggtcactaaacgtattt

SEQ ID NO: 348167 - DNA, 33 bp, Homo sapien
gtgcttagaagttcaacggaaaagcatctggaa

SEQ ID NO: 348168 - DNA, 33 bp, Homo sapien
gtgcttagaagttcaatggaaaagcatctggaa

SEQ ID NO: 348169 - DNA, 33 bp, Homo sapien
ttccatagatgtgaccacttaatcttttcacaa

SEQ ID NO: 348170 - DNA, 33 bp, Homo sapien
ttccatagatgtgaccgcttaatcttttcacaa

SEQ ID NO: 348171 - DNA, 33 bp, Homo sapien
aaacaagatactaggaagatgacagtccaataa

SEQ ID NO: 348172 - DNA, 33 bp, Homo sapien
aaacaagatactaggacgatgacagtccaataa

SEQ ID NO: 348173 - DNA, 33 bp, Homo sapien
gccatgactcagctcactagaactttctgttat

SEQ ID NO: 348174 - DNA, 33 bp, Homo sapien
gccatgactcagctcattagaactttctgttat

SEQ ID NO: 348175 - DNA, 33 bp, Homo sapien
gcaagcaactgtaaaggcgaagagtagggaaaa

SEQ ID NO: 348176 - DNA, 33 bp, Homo sapien
gcaagcaactgtaaagtcgaagagtagggaaaa

SEQ ID NO: 348177 - DNA, 33 bp, Homo sapien
agcagctcatcagagtcacctcagaggtttaaa

SEQ ID NO: 348178 - DNA, 33 bp, Homo sapien
agcagctcatcagagttacctcagaggtttaaa

SEQ ID NO: 348179 - DNA, 33 bp, Homo sapien
gccccatgtatgtctcacacttcatagtttaca

SEQ ID NO: 348180 - DNA, 33 bp, Homo sapien
gccccatgtatgtctcgcacttcatagtttaca

SEQ ID NO: 348181 - DNA, 33 bp, Homo sapien
tatttttgtagataagcaactagaggtggagag

SEQ ID NO: 348182 - DNA, 33 bp, Homo sapien
tatttttgtagataaggaactagaggtggagag

SEQ ID NO: 348183 - DNA, 33 bp, Homo sapien
agtggataatttctcccgagtaccttggagata

SEQ ID NO: 348184 - DNA, 33 bp, Homo sapien
agtggataatttctcctgagtaccttggagata

SEQ ID NO: 348185 - DNA, 33 bp, Homo sapien
ccccctttaaacaggccagtggcacaattctgc

SEQ ID NO: 348186 - DNA, 33 bp, Homo sapien
ccccctttaaacaggctagtggcacaattctgc

SEQ ID NO: 348187 - DNA, 33 bp, Homo sapien
gtgccccatccaacacagtacaacactggtcct

SEQ ID NO: 348188 - DNA, 33 bp, Homo sapien
gtgccccatccaacaccgtacaacactggtcct

SEQ ID NO: 348189 - DNA, 33 bp, Homo sapien
aacccaggcaccaatacagatgcttgtcaagag

SEQ ID NO: 348190 - DNA, 33 bp, Homo sapien
aacccaggcaccaatatagatgcttgtcaagag

SEQ ID NO: 348191 - DNA, 33 bp, Homo sapien
gtgggcctcagcacaactgcgaggagctagcag

SEQ ID NO: 348192 - DNA, 33 bp, Homo sapien
gtgggcctcagcacaattgcgaggagctagcag

SEQ ID NO: 348193 - DNA, 33 bp, Homo sapien
tttgttcacaactctacggtttgtggagaccct

SEQ ID NO: 348194 - DNA, 33 bp, Homo sapien
tttgttcacaactctagggtttgtggagaccct

SEQ ID NO: 348195 - DNA, 33 bp, Homo sapien
ggagcttctgagagaccaaaccctcactggagg

SEQ ID NO: 348196 - DNA, 33 bp, Homo sapien
ggagcttctgagagacgaaaccctcactggagg

SEQ ID NO: 348197 - DNA, 33 bp, Homo sapien
aaaacttaagaagtcactcagtctcgggggtcc

SEQ ID NO: 348198 - DNA, 33 bp, Homo sapien
aaaacttaagaagtcattcagtctcgggggtcc

SEQ ID NO: 348199 - DNA, 33 bp, Homo sapien
tgaggagcgctggtctcacctatgatcccaaag

SEQ ID NO: 348200 - DNA, 33 bp, Homo sapien
tgaggagcgctggtcttacctatgatcccaaag

SEQ ID NO: 348201 - DNA, 33 bp, Homo sapien
gtgatctgaggttaaccacgctctcaacgctgc

SEQ ID NO: 348202 - DNA, 33 bp, Homo sapien
gtgatctgaggttaactacgctctcaacgctgc

SEQ ID NO: 348203 - DNA, 33 bp, Homo sapien
agacctcctgaaattgcaggcaaactgttgtat

SEQ ID NO: 348204 - DNA, 33 bp, Homo sapien
agacctcctgaaattgtaggcaaactgttgtat

SEQ ID NO: 348205 - DNA, 33 bp, Homo sapien
tcccaggatgttccgacggctaagaccagagcg

SEQ ID NO: 348206 - DNA, 33 bp, Homo sapien
tcccaggatgttccgagggctaagaccagagcg

SEQ ID NO: 348207 - DNA, 33 bp, Homo sapien
cagttgatgagacataaatatggaccttcttgg

SEQ ID NO: 348208 - DNA, 33 bp, Homo sapien
cagttgatgagacatacatatggaccttcttgg

SEQ ID NO: 348209 - DNA, 33 bp, Homo sapien
ttagcagccaagtgaaagaaagacttcaactta

SEQ ID NO: 348210 - DNA, 33 bp, Homo sapien
ttagcagccaagtgaaggaaagacttcaactta

SEQ ID NO: 348211 - DNA, 33 bp, Homo sapien
ggccctaaaggataaaagagcctggctgtctgc

SEQ ID NO: 348212 - DNA, 33 bp, Homo sapien
ggccctaaaggataaacgagcctggctgtctgc

SEQ ID NO: 348213 - DNA, 33 bp, Homo sapien
atggtattagtaaatacgacttcccttcctcct

SEQ ID NO: 348214 - DNA, 33 bp, Homo sapien
atggtattagtaaatatgacttcccttcctcct

SEQ ID NO: 348215 - DNA, 33 bp, Homo sapien
ccaacccctagtactgcaaagtgtgaccatatt

SEQ ID NO: 348216 - DNA, 33 bp, Homo sapien
ccaacccctagtactgtaaagtgtgaccatatt

SEQ ID NO: 348217 - DNA, 33 bp, Homo sapien
ttccacatttcctgcaggctccacttactatgg

SEQ ID NO: 348218 - DNA, 33 bp, Homo sapien
ttccacatttcctgcatgctccacttactatgg

SEQ ID NO: 348219 - DNA, 33 bp, Homo sapien
ccacttactatggctgcaaaacaaattagcccc

SEQ ID NO: 348220 - DNA, 33 bp, Homo sapien
ccacttactatggctgtaaaacaaattagcccc

SEQ ID NO: 348221 - DNA, 33 bp, Homo sapien
atactgcttgacacaactcctgggacattacaa

SEQ ID NO: 348222 - DNA, 33 bp, Homo sapien
atactgcttgacacaattcctgggacattacaa

SEQ ID NO: 348223 - DNA, 33 bp, Homo sapien
tgtggctgaagcaagagtccaacctgcagacac

SEQ ID NO: 348224 - DNA, 33 bp, Homo sapien
tgtggctgaagcaagattccaacctgcagacac

SEQ ID NO: 348225 - DNA, 33 bp, Homo sapien
cgattgacgcttacaacagcacaattatggtca

SEQ ID NO: 348226 - DNA, 33 bp, Homo sapien
cgattgacgcttacaatagcacaattatggtca

SEQ ID NO: 348227 - DNA, 33 bp, Homo sapien
catcagtctccaaacacaaggtgtcccttctta

SEQ ID NO: 348228 - DNA, 33 bp, Homo sapien
catcagtctccaaacataaggtgtcccttctta

SEQ ID NO: 348229 - DNA, 33 bp, Homo sapien
agggttggaatttgaacgcaggggtctggttct

SEQ ID NO: 348230 - DNA, 33 bp, Homo sapien
agggttggaatttgaatgcaggggtctggttct

SEQ ID NO: 348231 - DNA, 33 bp, Homo sapien
aggctacagcagcatcagagactctcagccaga

SEQ ID NO: 348232 - DNA, 33 bp, Homo sapien
aggctacagcagcatcggagactctcagccaga

SEQ ID NO: 348233 - DNA, 33 bp, Homo sapien
ttctgactacagtgcaacaaaactgaaagtaat

SEQ ID NO: 348234 - DNA, 33 bp, Homo sapien
ttctgactacagtgcaccaaaactgaaagtaat

SEQ ID NO: 348235 - DNA, 33 bp, Homo sapien
tcattcaaaatctcaactatgtttcctctattt

SEQ ID NO: 348236 - DNA, 33 bp, Homo sapien
tcattcaaaatctcaattatgtttcctctattt

SEQ ID NO: 348237 - DNA, 33 bp, Homo sapien
aacagatcacatagaaaccaaagctgagaatac

SEQ ID NO: 348238 - DNA, 33 bp, Homo sapien
aacagatcacatagaagccaaagctgagaatac

SEQ ID NO: 348239 - DNA, 33 bp, Homo sapien
gagaagctatgtcttacgtaatgtctttagagg

SEQ ID NO: 348240 - DNA, 33 bp, Homo sapien
gagaagctatgtcttatgtaatgtctttagagg

SEQ ID NO: 348241 - DNA, 33 bp, Homo sapien
ccaacctgggctctgagaaaatccacattggtc

SEQ ID NO: 348242 - DNA, 33 bp, Homo sapien
ccaacctgggctctgataaaatccacattggtc

SEQ ID NO: 348243 - DNA, 33 bp, Homo sapien
tcttccatggtgcccaaatttaatcagctcctg

SEQ ID NO: 348244 - DNA, 33 bp, Homo sapien
tcttccatggtgcccagatttaatcagctcctg

SEQ ID NO: 348245 - DNA, 33 bp, Homo sapien
aattagagcaggatcacggcttcgttgtcacct

SEQ ID NO: 348246 - DNA, 33 bp, Homo sapien
aattagagcaggatcagggcttcgttgtcacct

SEQ ID NO: 348247 - DNA, 33 bp, Homo sapien
aaataactcctacccaaatttagggcccagaca

SEQ ID NO: 348248 - DNA, 33 bp, Homo sapien
aaataactcctacccagatttagggcccagaca

SEQ ID NO: 348249 - DNA, 33 bp, Homo sapien
gcgcctggcgagatcaagttttctttactgact

SEQ ID NO: 348250 - DNA, 33 bp, Homo sapien
gcgcctggcgagatcaggttttctttactgact

SEQ ID NO: 348251 - DNA, 33 bp, Homo sapien
gggggtgaagaagtcaagcactgagtgggaagt

SEQ ID NO: 348252 - DNA, 33 bp, Homo sapien
gggggtgaagaagtcaggcactgagtgggaagt

SEQ ID NO: 348253 - DNA, 33 bp, Homo sapien
gtggacactgcgcctccaggtgtacttcccact

SEQ ID NO: 348254 - DNA, 33 bp, Homo sapien
gtggacactgcgcctctaggtgtacttcccact

SEQ ID NO: 348255 - DNA, 33 bp, Homo sapien
tctagtgttaataagaaaataagccaggcgtgg

SEQ ID NO: 348256 - DNA, 33 bp, Homo sapien
tctagtgttaataagataataagccaggcgtgg

SEQ ID NO: 348257 - DNA, 33 bp, Homo sapien
atagatacaagattgaccttagaaaaatctaaa

SEQ ID NO: 348258 - DNA, 33 bp, Homo sapien
atagatacaagattgagcttagaaaaatctaaa

SEQ ID NO: 348259 - DNA, 33 bp, Homo sapien
tgagtttctcatcttcgaagtgggcataatact

SEQ ID NO: 348260 - DNA, 33 bp, Homo sapien
tgagtttctcatcttctaagtgggcataatact

SEQ ID NO: 348261 - DNA, 33 bp, Homo sapien
cacatggtaatgttaactgacatggccaaactc

SEQ ID NO: 348262 - DNA, 33 bp, Homo sapien
cacatggtaatgttaattgacatggccaaactc

SEQ ID NO: 348263 - DNA, 33 bp, Homo sapien
cccttgtcaatttccccggagtatcttttgttc

SEQ ID NO: 348264 - DNA, 33 bp, Homo sapien
cccttgtcaatttccctggagtatcttttgttc

SEQ ID NO: 348265 - DNA, 33 bp, Homo sapien
tctcatctaacctaatcatccttcaagggctgc

SEQ ID NO: 348266 - DNA, 33 bp, Homo sapien
tctcatctaacctaattatccttcaagggctgc

SEQ ID NO: 348267 - DNA, 33 bp, Homo sapien
cgctagagcataacaacgaagagttcgaaaata

SEQ ID NO: 348268 - DNA, 33 bp, Homo sapien
cgctagagcataacaatgaagagttcgaaaata

SEQ ID NO: 348269 - DNA, 33 bp, Homo sapien
ccaggtttcaggcctacctagcagggcaatgag

SEQ ID NO: 348270 - DNA, 33 bp, Homo sapien
ccaggtttcaggcctatctagcagggcaatgag

SEQ ID NO: 348271 - DNA, 33 bp, Homo sapien
atggcagggagcagaaagatccggtggacaaga

SEQ ID NO: 348272 - DNA, 33 bp, Homo sapien
atggcagggagcagaaggatccggtggacaaga

SEQ ID NO: 348273 - DNA, 33 bp, Homo sapien
ttattccataacattcaacaaacatttgtgtgc

SEQ ID NO: 348274 - DNA, 33 bp, Homo sapien
ttattccataacattcgacaaacatttgtgtgc

SEQ ID NO: 348275 - DNA, 33 bp, Homo sapien
agctcctagaaggcaacagttcgggaggggctc

SEQ ID NO: 348276 - DNA, 33 bp, Homo sapien
agctcctagaaggcaagagttcgggaggggctc

SEQ ID NO: 348277 - DNA, 33 bp, Homo sapien
tgactacaagcagactcacaaacagtgcctgaa

SEQ ID NO: 348278 - DNA, 33 bp, Homo sapien
tgactacaagcagacttacaaacagtgcctgaa

SEQ ID NO: 348279 - DNA, 33 bp, Homo sapien
gactcccacattgaaccggtctataagtgtcaa

SEQ ID NO: 348280 - DNA, 33 bp, Homo sapien
gactcccacattgaactggtctataagtgtcaa

SEQ ID NO: 348281 - DNA, 33 bp, Homo sapien
atgacttctgtgagaccgtagtgtctggtacct

SEQ ID NO: 348282 - DNA, 33 bp, Homo sapien
atgacttctgtgagactgtagtgtctggtacct

SEQ ID NO: 348283 - DNA, 33 bp, Homo sapien
ctggccacagatgctcactaaacatttgctgac

SEQ ID NO: 348284 - DNA, 33 bp, Homo sapien
ctggccacagatgctcgctaaacatttgctgac

SEQ ID NO: 348285 - DNA, 33 bp, Homo sapien
ttgccttctaggactcaaaaagtttgaatattt

SEQ ID NO: 348286 - DNA, 33 bp, Homo sapien
ttgccttctaggactccaaaagtttgaatattt

SEQ ID NO: 348287 - DNA, 33 bp, Homo sapien
tctgtgctgcctcagcaatggtttctgtcaatt

SEQ ID NO: 348288 - DNA, 33 bp, Homo sapien
tctgtgctgcctcagcgatggtttctgtcaatt

SEQ ID NO: 348289 - DNA, 33 bp, Homo sapien
gtactttaaaattgtcgctactgcctatttcaa

SEQ ID NO: 348290 - DNA, 33 bp, Homo sapien
gtactttaaaattgtctctactgcctatttcaa

SEQ ID NO: 348291 - DNA, 33 bp, Homo sapien
caatagcatatgaaaacggttttacataatgat

SEQ ID NO: 348292 - DNA, 33 bp, Homo sapien
caatagcatatgaaaagggttttacataatgat

SEQ ID NO: 348293 - DNA, 33 bp, Homo sapien
gtaaaccaatggtatacaaaagtgagtagacat

SEQ ID NO: 348294 - DNA, 33 bp, Homo sapien
gtaaaccaatggtatataaaagtgagtagacat

SEQ ID NO: 348295 - DNA, 33 bp, Homo sapien
cacagagacacacaaaattatgagtttactgtt

SEQ ID NO: 348296 - DNA, 33 bp, Homo sapien
cacagagacacacaaagttatgagtttactgtt

SEQ ID NO: 348297 - DNA, 33 bp, Homo sapien
aaaaagatctgagaaaatatatgctagtaatac

SEQ ID NO: 348298 - DNA, 33 bp, Homo sapien
aaaaagatctgagaaagtatatgctagtaatac

SEQ ID NO: 348299 - DNA, 33 bp, Homo sapien
tacatagttatagccaccagtagttgaagaatg

SEQ ID NO: 348300 - DNA, 33 bp, Homo sapien
tacatagttatagccatcagtagttgaagaatg

SEQ ID NO: 348301 - DNA, 33 bp, Homo sapien
atgggtacaaaagacaatccacagggatacaga

SEQ ID NO: 348302 - DNA, 33 bp, Homo sapien
atgggtacaaaagacagtccacagggatacaga

SEQ ID NO: 348303 - DNA, 33 bp, Homo sapien
ctgcactggccttttcccctggcatactctgtt

SEQ ID NO: 348304 - DNA, 33 bp, Homo sapien
ctgcactggccttttctcctggcatactctgtt

SEQ ID NO: 348305 - DNA, 33 bp, Homo sapien
tttgagaaacagtctcacaagcaattctcctgt

SEQ ID NO: 348306 - DNA, 33 bp, Homo sapien
tttgagaaacagtctcgcaagcaattctcctgt

SEQ ID NO: 348307 - DNA, 33 bp, Homo sapien
aaaaagaacatttcacaagatgacaaggttgga

SEQ ID NO: 348308 - DNA, 33 bp, Homo sapien
aaaaagaacatttcacgagatgacaaggttgga

SEQ ID NO: 348309 - DNA, 33 bp, Homo sapien
agatacgctaagaaaacaggtatactcagaacc

SEQ ID NO: 348310 - DNA, 33 bp, Homo sapien
agatacgctaagaaaataggtatactcagaacc

SEQ ID NO: 348311 - DNA, 33 bp, Homo sapien
gaggattttggaacataagtagaaccacttttc

SEQ ID NO: 348312 - DNA, 33 bp, Homo sapien
gaggattttggaacattagtagaaccacttttc

SEQ ID NO: 348313 - DNA, 33 bp, Homo sapien
cacacacagtactgtaaagaaacaaacatatgc

SEQ ID NO: 348314 - DNA, 33 bp, Homo sapien
cacacacagtactgtacagaaacaaacatatgc

SEQ ID NO: 348315 - DNA, 33 bp, Homo sapien
ctgcggtcaaaactcaagagtctgggggagaag

SEQ ID NO: 348316 - DNA, 33 bp, Homo sapien
ctgcggtcaaaactcacgagtctgggggagaag

SEQ ID NO: 348317 - DNA, 33 bp, Homo sapien
ctcctttgtctcctaacgtgtactttgaacctg

SEQ ID NO: 348318 - DNA, 33 bp, Homo sapien
ctcctttgtctcctaatgtgtactttgaacctg

SEQ ID NO: 348319 - DNA, 33 bp, Homo sapien
gggaaggagaagtgtacagttcacggccctgag

SEQ ID NO: 348320 - DNA, 33 bp, Homo sapien
gggaaggagaagtgtatagttcacggccctgag

SEQ ID NO: 348321 - DNA, 33 bp, Homo sapien
gtatatccacaagaaacaacaggaaacaggaaa

SEQ ID NO: 348322 - DNA, 33 bp, Homo sapien
gtatatccacaagaaataacaggaaacaggaaa

SEQ ID NO: 348323 - DNA, 33 bp, Homo sapien
taaatgcatttgcagccaattcattttcaacaa

SEQ ID NO: 348324 - DNA, 33 bp, Homo sapien
taaatgcatttgcagctaattcattttcaacaa

SEQ ID NO: 348325 - DNA, 33 bp, Homo sapien
agctagcaggatcaacagaaaggtatattttaa

SEQ ID NO: 348326 - DNA, 33 bp, Homo sapien
agctagcaggatcaacggaaaggtatattttaa

SEQ ID NO: 348327 - DNA, 33 bp, Homo sapien
gcaacttaggtattcactatcacagatggagaa

SEQ ID NO: 348328 - DNA, 33 bp, Homo sapien
gcaacttaggtattcattatcacagatggagaa

SEQ ID NO: 348329 - DNA, 33 bp, Homo sapien
catttttcaatgttaccaaatattctgctacag

SEQ ID NO: 348330 - DNA, 33 bp, Homo sapien
catttttcaatgttacgaaatattctgctacag

SEQ ID NO: 348331 - DNA, 33 bp, Homo sapien
gccagttttgtgaaaccgggctgatagactgtc

SEQ ID NO: 348332 - DNA, 33 bp, Homo sapien
gccagttttgtgaaactgggctgatagactgtc

SEQ ID NO: 348333 - DNA, 33 bp, Homo sapien
tctattttgcccacgtgacaaaactcttctatt

SEQ ID NO: 348334 - DNA, 33 bp, Homo sapien
tctattttgcccacgttacaaaactcttctatt

SEQ ID NO: 348335 - DNA, 33 bp, Homo sapien
tgttaacaaacctcccaaagtccatctctgtct

SEQ ID NO: 348336 - DNA, 33 bp, Homo sapien
tgttaacaaacctcccgaagtccatctctgtct

SEQ ID NO: 348337 - DNA, 33 bp, Homo sapien
ctgagcttcctctccgcatctgctgttctgccc

SEQ ID NO: 348338 - DNA, 33 bp, Homo sapien
ctgagcttcctctccgtatctgctgttctgccc

SEQ ID NO: 348339 - DNA, 33 bp, Homo sapien
agcacccctctcagccaaatgcagatgtgttag

SEQ ID NO: 348340 - DNA, 33 bp, Homo sapien
agcacccctctcagcccaatgcagatgtgttag

SEQ ID NO: 348341 - DNA, 33 bp, Homo sapien
ccttcatgtgctctgaagaaacatcagtctcca

SEQ ID NO: 348342 - DNA, 33 bp, Homo sapien
ccttcatgtgctctgaggaaacatcagtctcca

SEQ ID NO: 348343 - DNA, 33 bp, Homo sapien
agcctgcgctatgtgacaaagcatagtcctcag

SEQ ID NO: 348344 - DNA, 33 bp, Homo sapien
agcctgcgctatgtgagaaagcatagtcctcag

SEQ ID NO: 348345 - DNA, 33 bp, Homo sapien
ttattaccaaatgccacgattatccttctagac

SEQ ID NO: 348346 - DNA, 33 bp, Homo sapien
ttattaccaaatgccatgattatccttctagac

SEQ ID NO: 348347 - DNA, 33 bp, Homo sapien
cagagagctctccttcaagaaaagttaatgaat

SEQ ID NO: 348348 - DNA, 33 bp, Homo sapien
cagagagctctccttcgagaaaagttaatgaat

SEQ ID NO: 348349 - DNA, 33 bp, Homo sapien
ggtgagttcaagtctcaaagaaaaaacagccag

SEQ ID NO: 348350 - DNA, 33 bp, Homo sapien
ggtgagttcaagtctcgaagaaaaaacagccag

SEQ ID NO: 348351 - DNA, 33 bp, Homo sapien
aacttagctgctctacaaagttttcagctctgt

SEQ ID NO: 348352 - DNA, 33 bp, Homo sapien
aacttagctgctctacgaagttttcagctctgt

SEQ ID NO: 348353 - DNA, 33 bp, Homo sapien
gcacttggaggacgtaaaatcaagcaatcagat

SEQ ID NO: 348354 - DNA, 33 bp, Homo sapien
gcacttggaggacgtacaatcaagcaatcagat

SEQ ID NO: 348355 - DNA, 33 bp, Homo sapien
gccagctcaggtttgacagccactgcctttata

SEQ ID NO: 348356 - DNA, 33 bp, Homo sapien
gccagctcaggtttgagagccactgcctttata

SEQ ID NO: 348357 - DNA, 33 bp, Homo sapien
taacgcctcgctcttcaaagtgtggtccatgga

SEQ ID NO: 348358 - DNA, 33 bp, Homo sapien
taacgcctcgctcttcgaagtgtggtccatgga

SEQ ID NO: 348359 - DNA, 33 bp, Homo sapien
aggctttacccacaccaattaagcagaattctg

SEQ ID NO: 348360 - DNA, 33 bp, Homo sapien
aggctttacccacacccattaagcagaattctg

SEQ ID NO: 348361 - DNA, 33 bp, Homo sapien
cagagggctctcgcccacaatttcatcagtatt

SEQ ID NO: 348362 - DNA, 33 bp, Homo sapien
cagagggctctcgcccgcaatttcatcagtatt

SEQ ID NO: 348363 - DNA, 33 bp, Homo sapien
ctgttttacgccacacgggaaatgctgagacac

SEQ ID NO: 348364 - DNA, 33 bp, Homo sapien
ctgttttacgccacactggaaatgctgagacac

SEQ ID NO: 348365 - DNA, 33 bp, Homo sapien
gggagaataaaggaaaagacaggctcctgttca

SEQ ID NO: 348366 - DNA, 33 bp, Homo sapien
gggagaataaaggaaaggacaggctcctgttca

SEQ ID NO: 348367 - DNA, 33 bp, Homo sapien
agaatccgctcctcaccgagtctaacctaaatc

SEQ ID NO: 348368 - DNA, 33 bp, Homo sapien
agaatccgctcctcactgagtctaacctaaatc

SEQ ID NO: 348369 - DNA, 33 bp, Homo sapien
tctttattaccacaaacgcctgctaagtggctc

SEQ ID NO: 348370 - DNA, 33 bp, Homo sapien
tctttattaccacaaatgcctgctaagtggctc

SEQ ID NO: 348371 - DNA, 33 bp, Homo sapien
tgagtcagagaaacgaagtggttggccatggtc

SEQ ID NO: 348372 - DNA, 33 bp, Homo sapien
tgagtcagagaaacgatgtggttggccatggtc

SEQ ID NO: 348373 - DNA, 33 bp, Homo sapien
gctagaaaattcagaaatgtagatccctagaag

SEQ ID NO: 348374 - DNA, 33 bp, Homo sapien
gctagaaaattcagaagtgtagatccctagaag

SEQ ID NO: 348375 - DNA, 33 bp, Homo sapien
agcccagaatatacacagcaggcccctcactcg

SEQ ID NO: 348376 - DNA, 33 bp, Homo sapien
agcccagaatatacacggcaggcccctcactcg

SEQ ID NO: 348377 - DNA, 33 bp, Homo sapien
ctgtgctaaaggagacaagtgccgggaaggtca

SEQ ID NO: 348378 - DNA, 33 bp, Homo sapien
ctgtgctaaaggagacgagtgccgggaaggtca

SEQ ID NO: 348379 - DNA, 33 bp, Homo sapien
ctaaagtgctgaaaggacccggaaatgattctt

SEQ ID NO: 348380 - DNA, 33 bp, Homo sapien
ctaaagtgctgaaagggcccggaaatgattctt

SEQ ID NO: 348381 - DNA, 33 bp, Homo sapien
tgagagcatccattcacgtgggggccagcagag

SEQ ID NO: 348382 - DNA, 33 bp, Homo sapien
tgagagcatccattcatgtgggggccagcagag

SEQ ID NO: 348383 - DNA, 33 bp, Homo sapien
tgtctgtagtccattcacttctaaagagcaaat

SEQ ID NO: 348384 - DNA, 33 bp, Homo sapien
tgtctgtagtccattcgcttctaaagagcaaat

SEQ ID NO: 348385 - DNA, 33 bp, Homo sapien
caggtgatccttcccacaaataacgtacaatct

SEQ ID NO: 348386 - DNA, 33 bp, Homo sapien
caggtgatccttcccagaaataacgtacaatct

SEQ ID NO: 348387 - DNA, 33 bp, Homo sapien
atgagtttcacctcaacgactacaggtctgtaa

SEQ ID NO: 348388 - DNA, 33 bp, Homo sapien
atgagtttcacctcaatgactacaggtctgtaa

SEQ ID NO: 348389 - DNA, 33 bp, Homo sapien
agaaacagttgcaggagaggacttcagagaaaa

SEQ ID NO: 348390 - DNA, 33 bp, Homo sapien
agaaacagttgcaggataggacttcagagaaaa

SEQ ID NO: 348391 - DNA, 33 bp, Homo sapien
caaggaggctggactcaacaacccttaggatcc

SEQ ID NO: 348392 - DNA, 33 bp, Homo sapien
caaggaggctggactcgacaacccttaggatcc

SEQ ID NO: 348393 - DNA, 33 bp, Homo sapien
accctcttcccttagacgatttcctcactgaag

SEQ ID NO: 348394 - DNA, 33 bp, Homo sapien
accctcttcccttagatgatttcctcactgaag

SEQ ID NO: 348395 - DNA, 33 bp, Homo sapien
ggtcccggaggctcccactgtccacatctgcat

SEQ ID NO: 348396 - DNA, 33 bp, Homo sapien
ggtcccggaggctcccgctgtccacatctgcat

SEQ ID NO: 348397 - DNA, 33 bp, Homo sapien
ctcattcttcatcttacagggaagccttaaagc

SEQ ID NO: 348398 - DNA, 33 bp, Homo sapien
ctcattcttcatcttatagggaagccttaaagc

SEQ ID NO: 348399 - DNA, 33 bp, Homo sapien
taacccttcccagggacagcggtactgtgtgtg

SEQ ID NO: 348400 - DNA, 33 bp, Homo sapien
taacccttcccagggatagcggtactgtgtgtg

SEQ ID NO: 348401 - DNA, 33 bp, Homo sapien
ggaatcatgacactacaacattggccacaccag

SEQ ID NO: 348402 - DNA, 33 bp, Homo sapien
ggaatcatgacactacgacattggccacaccag

SEQ ID NO: 348403 - DNA, 33 bp, Homo sapien
tgaggctcagaatgtaagtatgatgagcctgca

SEQ ID NO: 348404 - DNA, 33 bp, Homo sapien
tgaggctcagaatgtaggtatgatgagcctgca

SEQ ID NO: 348405 - DNA, 33 bp, Homo sapien
tctttaaatgtggccaatgaggtgtacacaccc

SEQ ID NO: 348406 - DNA, 33 bp, Homo sapien
tctttaaatgtggccagtgaggtgtacacaccc

SEQ ID NO: 348407 - DNA, 33 bp, Homo sapien
cagggatacctgtagcacaatccctggtaccta

SEQ ID NO: 348408 - DNA, 33 bp, Homo sapien
cagggatacctgtagcgcaatccctggtaccta

SEQ ID NO: 348409 - DNA, 33 bp, Homo sapien
caatgattttataacccaggaggaggacatttc

SEQ ID NO: 348410 - DNA, 33 bp, Homo sapien
caatgattttataaccgaggaggaggacatttc

SEQ ID NO: 348411 - DNA, 33 bp, Homo sapien
tactttccaagcaatgaaaactcaagcacatca

SEQ ID NO: 348412 - DNA, 33 bp, Homo sapien
tactttccaagcaatggaaactcaagcacatca

SEQ ID NO: 348413 - DNA, 33 bp, Homo sapien
gtgatttcgaagcctagattctccctgtagtga

SEQ ID NO: 348414 - DNA, 33 bp, Homo sapien
gtgatttcgaagcctatattctccctgtagtga

SEQ ID NO: 348415 - DNA, 33 bp, Homo sapien
ctacaaagtcttgagaaatgagatctgcgatgg

SEQ ID NO: 348416 - DNA, 33 bp, Homo sapien
ctacaaagtcttgagacatgagatctgcgatgg

SEQ ID NO: 348417 - DNA, 33 bp, Homo sapien
tagagttctttggctgaaagaaaattatctcaa

SEQ ID NO: 348418 - DNA, 33 bp, Homo sapien
tagagttctttggctgtaagaaaattatctcaa

SEQ ID NO: 348419 - DNA, 33 bp, Homo sapien
aaaatactaattgcaaatagattgtaaagctgt

SEQ ID NO: 348420 - DNA, 33 bp, Homo sapien
aaaatactaattgcaagtagattgtaaagctgt

SEQ ID NO: 348421 - DNA, 33 bp, Homo sapien
agattaggaatcgtgaagatagagtgggcagct

SEQ ID NO: 348422 - DNA, 33 bp, Homo sapien
agattaggaatcgtgacgatagagtgggcagct

SEQ ID NO: 348423 - DNA, 33 bp, Homo sapien
aaatctgtcccaggaacgaacacacacgtatgc

SEQ ID NO: 348424 - DNA, 33 bp, Homo sapien
aaatctgtcccaggaatgaacacacacgtatgc

SEQ ID NO: 348425 - DNA, 33 bp, Homo sapien
ggaaataatgatgagcactgatatattccaggc

SEQ ID NO: 348426 - DNA, 33 bp, Homo sapien
ggaaataatgatgagcgctgatatattccaggc

SEQ ID NO: 348427 - DNA, 33 bp, Homo sapien
gtgttagtcccctctacggcccttcagttcaat

SEQ ID NO: 348428 - DNA, 33 bp, Homo sapien
gtgttagtcccctctatggcccttcagttcaat

SEQ ID NO: 348429 - DNA, 33 bp, Homo sapien
catctgctaaatccaaatgccttagttggcttt

SEQ ID NO: 348430 - DNA, 33 bp, Homo sapien
catctgctaaatccaagtgccttagttggcttt

SEQ ID NO: 348431 - DNA, 33 bp, Homo sapien
gtgctgtgaggaatggcaagaacagaacagtgg

SEQ ID NO: 348432 - DNA, 33 bp, Homo sapien
gtgctgtgaggaatggtaagaacagaacagtgg

SEQ ID NO: 348433 - DNA, 33 bp, Homo sapien
gcaggtgctcagttaaaatgtgttgaatgaacc

SEQ ID NO: 348434 - DNA, 33 bp, Homo sapien
gcaggtgctcagttaagatgtgttgaatgaacc

SEQ ID NO: 348435 - DNA, 33 bp, Homo sapien
tcttgaggcagagaccgcgctttatctaatttg

SEQ ID NO: 348436 - DNA, 33 bp, Homo sapien
tcttgaggcagagacctcgctttatctaatttg

SEQ ID NO: 348437 - DNA, 33 bp, Homo sapien
tgactgacagaaggaacattgggagtgctcttt

SEQ ID NO: 348438 - DNA, 33 bp, Homo sapien
tgactgacagaaggaatattgggagtgctcttt

SEQ ID NO: 348439 - DNA, 33 bp, Homo sapien
ggcatgtggggtgaatgaggcaagttgctatag

SEQ ID NO: 348440 - DNA, 33 bp, Homo sapien
ggcatgtggggtgaattaggcaagttgctatag

SEQ ID NO: 348441 - DNA, 33 bp, Homo sapien
agcccatgcacatgccaattatttctgctgctt

SEQ ID NO: 348442 - DNA, 33 bp, Homo sapien
agcccatgcacatgccgattatttctgctgctt

SEQ ID NO: 348443 - DNA, 33 bp, Homo sapien
gaggatcttgttgaacccctgaatgaagccacc

SEQ ID NO: 348444 - DNA, 33 bp, Homo sapien
gaggatcttgttgaactcctgaatgaagccacc

SEQ ID NO: 348445 - DNA, 33 bp, Homo sapien
ctgtgctctgtaggacacacggaaggagaaccc

SEQ ID NO: 348446 - DNA, 33 bp, Homo sapien
ctgtgctctgtaggacgcacggaaggagaaccc

SEQ ID NO: 348447 - DNA, 33 bp, Homo sapien
tctcagttctgcctcacagatgatgtggaatct

SEQ ID NO: 348448 - DNA, 33 bp, Homo sapien
tctcagttctgcctcatagatgatgtggaatct

SEQ ID NO: 348449 - DNA, 33 bp, Homo sapien
ttcagatgttgcctaaaggttatgagccattgc

SEQ ID NO: 348450 - DNA, 33 bp, Homo sapien
ttcagatgttgcctaagggttatgagccattgc

SEQ ID NO: 348451 - DNA, 33 bp, Homo sapien
acatttttctcactaacgctcagcagagaaaaa

SEQ ID NO: 348452 - DNA, 33 bp, Homo sapien
acatttttctcactaatgctcagcagagaaaaa

SEQ ID NO: 348453 - DNA, 33 bp, Homo sapien
ggctctgcaaagaccacggaaaatgctagctcc

SEQ ID NO: 348454 - DNA, 33 bp, Homo sapien
ggctctgcaaagaccagggaaaatgctagctcc

SEQ ID NO: 348455 - DNA, 33 bp, Homo sapien
gctaaacaaatgtcaggcattgttaagaatctc

SEQ ID NO: 348456 - DNA, 33 bp, Homo sapien
gctaaacaaatgtcagtcattgttaagaatctc

SEQ ID NO: 348457 - DNA, 33 bp, Homo sapien
aaaatgtttgtgtcaacagaatctgagttaaac

SEQ ID NO: 348458 - DNA, 33 bp, Homo sapien
aaaatgtttgtgtcaatagaatctgagttaaac

SEQ ID NO: 348459 - DNA, 33 bp, Homo sapien
ggatctgaagggatgacaacaaaagtggatacc

SEQ ID NO: 348460 - DNA, 33 bp, Homo sapien
ggatctgaagggatgataacaaaagtggatacc

SEQ ID NO: 348461 - DNA, 33 bp, Homo sapien
aattcaaaatctgtacacatctaactacttagc

SEQ ID NO: 348462 - DNA, 33 bp, Homo sapien
aattcaaaatctgtacgcatctaactacttagc

SEQ ID NO: 348463 - DNA, 33 bp, Homo sapien
cttcttagtgattgaaacttatattattacaag

SEQ ID NO: 348464 - DNA, 33 bp, Homo sapien
cttcttagtgattgaaccttatattattacaag

SEQ ID NO: 348465 - DNA, 33 bp, Homo sapien
tgttggaagtaatcaactcatttgctattcttt

SEQ ID NO: 348466 - DNA, 33 bp, Homo sapien
tgttggaagtaatcaattcatttgctattcttt

SEQ ID NO: 348467 - DNA, 33 bp, Homo sapien
tgacagctgggtctgacgactcctctgttacac

SEQ ID NO: 348468 - DNA, 33 bp, Homo sapien
tgacagctgggtctgatgactcctctgttacac

SEQ ID NO: 348469 - DNA, 33 bp, Homo sapien
accatgacaacactcccgaaaacctgcattttc

SEQ ID NO: 348470 - DNA, 33 bp, Homo sapien
accatgacaacactcctgaaaacctgcattttc

SEQ ID NO: 348471 - DNA, 33 bp, Homo sapien
gtcgtcctcctaagaccgtctcctctttggctt

SEQ ID NO: 348472 - DNA, 33 bp, Homo sapien
gtcgtcctcctaagacggtctcctctttggctt

SEQ ID NO: 348473 - DNA, 33 bp, Homo sapien
catgtgtgtgcatcctcaggaagtgtgtgtgct

SEQ ID NO: 348474 - DNA, 33 bp, Homo sapien
catgtgtgtgcatccttaggaagtgtgtgtgct

SEQ ID NO: 348475 - DNA, 33 bp, Homo sapien
ttcatttatgtatgcgccacctttgaacctacc

SEQ ID NO: 348476 - DNA, 33 bp, Homo sapien
ttcatttatgtatgcgtcacctttgaacctacc

SEQ ID NO: 348477 - DNA, 33 bp, Homo sapien
aagtgggtaccagacaaagttgcctggtgcttt

SEQ ID NO: 348478 - DNA, 33 bp, Homo sapien
aagtgggtaccagacagagttgcctggtgcttt

SEQ ID NO: 348479 - DNA, 33 bp, Homo sapien
gtttgaggtattggtgaaattgttgctagacat

SEQ ID NO: 348480 - DNA, 33 bp, Homo sapien
gtttgaggtattggtgcaattgttgctagacat

SEQ ID NO: 348481 - DNA, 33 bp, Homo sapien
gatcttagaaacacaacgaaatctcaagacatt

SEQ ID NO: 348482 - DNA, 33 bp, Homo sapien
gatcttagaaacacaatgaaatctcaagacatt

SEQ ID NO: 348483 - DNA, 33 bp, Homo sapien
ccctgtttttccctaaaatccagctgcccatct

SEQ ID NO: 348484 - DNA, 33 bp, Homo sapien
ccctgtttttccctaacatccagctgcccatct

SEQ ID NO: 348485 - DNA, 33 bp, Homo sapien
tgtatctgtcacacaacggataaccaatatgac

SEQ ID NO: 348486 - DNA, 33 bp, Homo sapien
tgtatctgtcacacaagggataaccaatatgac

SEQ ID NO: 348487 - DNA, 33 bp, Homo sapien
atcaaggttttgagcaacagagtgtcctctgct

SEQ ID NO: 348488 - DNA, 33 bp, Homo sapien
atcaaggttttgagcaccagagtgtcctctgct

SEQ ID NO: 348489 - DNA, 33 bp, Homo sapien
gtctcacttggaagacagccactgacttactgc

SEQ ID NO: 348490 - DNA, 33 bp, Homo sapien
gtctcacttggaagacggccactgacttactgc

SEQ ID NO: 348491 - DNA, 33 bp, Homo sapien
aaagtagtctaattcccctcctcattcagtcca

SEQ ID NO: 348492 - DNA, 33 bp, Homo sapien
aaagtagtctaattcctctcctcattcagtcca

SEQ ID NO: 348493 - DNA, 33 bp, Homo sapien
atttgctctcttcaaacttagttttcttgttta

SEQ ID NO: 348494 - DNA, 33 bp, Homo sapien
atttgctctcttcaaatttagttttcttgttta

SEQ ID NO: 348495 - DNA, 33 bp, Homo sapien
cctgttgttctcatcacacagcacaatgataac

SEQ ID NO: 348496 - DNA, 33 bp, Homo sapien
cctgttgttctcatcatacagcacaatgataac

SEQ ID NO: 348497 - DNA, 33 bp, Homo sapien
cctctacctaattaccagccttagaagaattta

SEQ ID NO: 348498 - DNA, 33 bp, Homo sapien
cctctacctaattaccggccttagaagaattta

SEQ ID NO: 348499 - DNA, 33 bp, Homo sapien
tattcttccctgcaccacaatccagaatgtgcc

SEQ ID NO: 348500 - DNA, 33 bp, Homo sapien
tattcttccctgcaccgcaatccagaatgtgcc

SEQ ID NO: 348501 - DNA, 33 bp, Homo sapien
attaaattcagcacacaagatttccacttctgg

SEQ ID NO: 348502 - DNA, 33 bp, Homo sapien
attaaattcagcacacgagatttccacttctgg

SEQ ID NO: 348503 - DNA, 33 bp, Homo sapien
gtccatttggcaaataaattcctaaagtgaaag

SEQ ID NO: 348504 - DNA, 33 bp, Homo sapien
gtccatttggcaaatatattcctaaagtgaaag

SEQ ID NO: 348505 - DNA, 33 bp, Homo sapien
tccatcatcacatctcactctccaaccctcctg

SEQ ID NO: 348506 - DNA, 33 bp, Homo sapien
tccatcatcacatctcgctctccaaccctcctg

SEQ ID NO: 348507 - DNA, 33 bp, Homo sapien
tgggcacctgtgagtccagtccactcaatttca

SEQ ID NO: 348508 - DNA, 33 bp, Homo sapien
tgggcacctgtgagtctagtccactcaatttca

SEQ ID NO: 348509 - DNA, 33 bp, Homo sapien
aacccttatcttccacaagctctacatctccat

SEQ ID NO: 348510 - DNA, 33 bp, Homo sapien
aacccttatcttccactagctctacatctccat

SEQ ID NO: 348511 - DNA, 33 bp, Homo sapien
atttttgatgatggcacaaagcacttaatcagg

SEQ ID NO: 348512 - DNA, 33 bp, Homo sapien
atttttgatgatggcagaaagcacttaatcagg

SEQ ID NO: 348513 - DNA, 33 bp, Homo sapien
ccagtgctcttctcgccatgctataaccacgtt

SEQ ID NO: 348514 - DNA, 33 bp, Homo sapien
ccagtgctcttctcgctatgctataaccacgtt

SEQ ID NO: 348515 - DNA, 33 bp, Homo sapien
cacaagggcctgagacagatatagggagcttat

SEQ ID NO: 348516 - DNA, 33 bp, Homo sapien
cacaagggcctgagacggatatagggagcttat

SEQ ID NO: 348517 - DNA, 33 bp, Homo sapien
cctgtaggacttagtcagaaagacaaagcggtc

SEQ ID NO: 348518 - DNA, 33 bp, Homo sapien
cctgtaggacttagtcggaaagacaaagcggtc

SEQ ID NO: 348519 - DNA, 33 bp, Homo sapien
aacctcagttcatcaacatgagaaaatgcgccc

SEQ ID NO: 348520 - DNA, 33 bp, Homo sapien
aacctcagttcatcaagatgagaaaatgcgccc

SEQ ID NO: 348521 - DNA, 33 bp, Homo sapien
ctctctatgtggcaaagcttgaaggaccagtct

SEQ ID NO: 348522 - DNA, 33 bp, Homo sapien
ctctctatgtggcaaatcttgaaggaccagtct

SEQ ID NO: 348523 - DNA, 33 bp, Homo sapien
cacacacacgcatgcaagcactcatatatatgt

SEQ ID NO: 348524 - DNA, 33 bp, Homo sapien
cacacacacgcatgcacgcactcatatatatgt

SEQ ID NO: 348525 - DNA, 33 bp, Homo sapien
cacattggaaattctgcagtagttctgaatgag

SEQ ID NO: 348526 - DNA, 33 bp, Homo sapien
cacattggaaattctggagtagttctgaatgag

SEQ ID NO: 348527 - DNA, 33 bp, Homo sapien
ccagggatgggaagctcactacctatcaaggta

SEQ ID NO: 348528 - DNA, 33 bp, Homo sapien
ccagggatgggaagctgactacctatcaaggta

SEQ ID NO: 348529 - DNA, 33 bp, Homo sapien
caaggcgcaagactggaacatattggttttgag

SEQ ID NO: 348530 - DNA, 33 bp, Homo sapien
caaggcgcaagactgggacatattggttttgag

SEQ ID NO: 348531 - DNA, 33 bp, Homo sapien
atttcctacaaaggacagcaatttccttagcac

SEQ ID NO: 348532 - DNA, 33 bp, Homo sapien
atttcctacaaaggacggcaatttccttagcac

SEQ ID NO: 348533 - DNA, 33 bp, Homo sapien
ggggctgctgttgatcaatggctccacaaccct

SEQ ID NO: 348534 - DNA, 33 bp, Homo sapien
ggggctgctgttgatcgatggctccacaaccct

SEQ ID NO: 348535 - DNA, 33 bp, Homo sapien
tacactcttcgtaagacgtaaatgaggcaagtt

SEQ ID NO: 348536 - DNA, 33 bp, Homo sapien
tacactcttcgtaagatgtaaatgaggcaagtt

SEQ ID NO: 348537 - DNA, 33 bp, Homo sapien
gcaagctgtcaatctcaagcctcagacaaatga

SEQ ID NO: 348538 - DNA, 33 bp, Homo sapien
gcaagctgtcaatctcgagcctcagacaaatga

SEQ ID NO: 348539 - DNA, 33 bp, Homo sapien
tatatttcttctattactaaaagatccaggttg

SEQ ID NO: 348540 - DNA, 33 bp, Homo sapien
tatatttcttctattattaaaagatccaggttg

SEQ ID NO: 348541 - DNA, 33 bp, Homo sapien
gttatcaaaatgtataccagaattgtgctgtaa

SEQ ID NO: 348542 - DNA, 33 bp, Homo sapien
gttatcaaaatgtatatcagaattgtgctgtaa

SEQ ID NO: 348543 - DNA, 33 bp, Homo sapien
tctatcaatgcattacaccccatgattgagtgt

SEQ ID NO: 348544 - DNA, 33 bp, Homo sapien
tctatcaatgcattacgccccatgattgagtgt

SEQ ID NO: 348545 - DNA, 33 bp, Homo sapien
tcatttgcagttgagaaaaatgtaaacaaatgt

SEQ ID NO: 348546 - DNA, 33 bp, Homo sapien
tcatttgcagttgagagaaatgtaaacaaatgt

SEQ ID NO: 348547 - DNA, 33 bp, Homo sapien
tcatttactggcataaaatatatacaaatctat

SEQ ID NO: 348548 - DNA, 33 bp, Homo sapien
tcatttactggcataagatatatacaaatctat

SEQ ID NO: 348549 - DNA, 33 bp, Homo sapien
aggctgagaagggggaagtagtgaatagagagg

SEQ ID NO: 348550 - DNA, 33 bp, Homo sapien
aggctgagaagggggaggtagtgaatagagagg

SEQ ID NO: 348551 - DNA, 33 bp, Homo sapien
cagggcttcagtttccacatgagccaataaata

SEQ ID NO: 348552 - DNA, 33 bp, Homo sapien
cagggcttcagtttcctcatgagccaataaata

SEQ ID NO: 348553 - DNA, 33 bp, Homo sapien
gggcttcatagatttaaagggctagagctggga

SEQ ID NO: 348554 - DNA, 33 bp, Homo sapien
gggcttcatagatttacagggctagagctggga

SEQ ID NO: 348555 - DNA, 33 bp, Homo sapien
aagagatcacatggccacagattgacattctct

SEQ ID NO: 348556 - DNA, 33 bp, Homo sapien
aagagatcacatggccgcagattgacattctct

SEQ ID NO: 348557 - DNA, 33 bp, Homo sapien
gtatccctacccatcacatttaaggcctcgaat

SEQ ID NO: 348558 - DNA, 33 bp, Homo sapien
gtatccctacccatcatatttaaggcctcgaat

SEQ ID NO: 348559 - DNA, 33 bp, Homo sapien
ttttaatatcaacttccagtcatagaagagaga

SEQ ID NO: 348560 - DNA, 33 bp, Homo sapien
ttttaatatcaacttcgagtcatagaagagaga

SEQ ID NO: 348561 - DNA, 33 bp, Homo sapien
gcaatgccagaacaaccgtgaagaagacaatag

SEQ ID NO: 348562 - DNA, 33 bp, Homo sapien
gcaatgccagaacaactgtgaagaagacaatag

SEQ ID NO: 348563 - DNA, 33 bp, Homo sapien
ctgccatgggatgtcacagcaggaaggccgttg

SEQ ID NO: 348564 - DNA, 33 bp, Homo sapien
ctgccatgggatgtcatagcaggaaggccgttg

SEQ ID NO: 348565 - DNA, 33 bp, Homo sapien
gacttagctgagagaactgtcctgatttttcca

SEQ ID NO: 348566 - DNA, 33 bp, Homo sapien
gacttagctgagagaagtgtcctgatttttcca

SEQ ID NO: 348567 - DNA, 33 bp, Homo sapien
tgcctgtcccttcatcgatgcctgctcatctca

SEQ ID NO: 348568 - DNA, 33 bp, Homo sapien
tgcctgtcccttcatctatgcctgctcatctca

SEQ ID NO: 348569 - DNA, 33 bp, Homo sapien
tttggaagattaactaatactatctaaatgtgc

SEQ ID NO: 348570 - DNA, 33 bp, Homo sapien
tttggaagattaactagtactatctaaatgtgc

SEQ ID NO: 348571 - DNA, 33 bp, Homo sapien
caaagatctttcttgacggccaggggcaactat

SEQ ID NO: 348572 - DNA, 33 bp, Homo sapien
caaagatctttcttgatggccaggggcaactat

SEQ ID NO: 348573 - DNA, 33 bp, Homo sapien
ccttcctttcaactaacctggtaatgcatatga

SEQ ID NO: 348574 - DNA, 33 bp, Homo sapien
ccttcctttcaactaagctggtaatgcatatga

SEQ ID NO: 348575 - DNA, 33 bp, Homo sapien
gacccgaaatatagaactgctgaatcatatgca

SEQ ID NO: 348576 - DNA, 33 bp, Homo sapien
gacccgaaatatagaattgctgaatcatatgca

SEQ ID NO: 348577 - DNA, 33 bp, Homo sapien
tgcaccagggcaccaacttcattgtcaaaacag

SEQ ID NO: 348578 - DNA, 33 bp, Homo sapien
tgcaccagggcaccaagttcattgtcaaaacag

SEQ ID NO: 348579 - DNA, 33 bp, Homo sapien
tccacccagattaccacaacagcttcctggcca

SEQ ID NO: 348580 - DNA, 33 bp, Homo sapien
tccacccagattaccagaacagcttcctggcca

SEQ ID NO: 348581 - DNA, 33 bp, Homo sapien
taacccaagagttaaaaaagaaattgcactgat

SEQ ID NO: 348582 - DNA, 33 bp, Homo sapien
taacccaagagttaaagaagaaattgcactgat

SEQ ID NO: 348583 - DNA, 33 bp, Homo sapien
tccacaaatacatggaaactctgaacgtcctct

SEQ ID NO: 348584 - DNA, 33 bp, Homo sapien
tccacaaatacatggacactctgaacgtcctct

SEQ ID NO: 348585 - DNA, 33 bp, Homo sapien
atgggccactgtcgcaaacactatttttatttt

SEQ ID NO: 348586 - DNA, 33 bp, Homo sapien
atgggccactgtcgcagacactatttttatttt

SEQ ID NO: 348587 - DNA, 33 bp, Homo sapien
tcaggtgcatttaccaaacacatataatatttg

SEQ ID NO: 348588 - DNA, 33 bp, Homo sapien
tcaggtgcatttaccatacacatataatatttg

SEQ ID NO: 348589 - DNA, 33 bp, Homo sapien
ttcagtctgctgtcttcaaacagagcagaaaac

SEQ ID NO: 348590 - DNA, 33 bp, Homo sapien
ttcagtctgctgtcttgaaacagagcagaaaac

SEQ ID NO: 348591 - DNA, 33 bp, Homo sapien
aaacaaccacagtaaactggctgaactcttctg

SEQ ID NO: 348592 - DNA, 33 bp, Homo sapien
aaacaaccacagtaaattggctgaactcttctg

SEQ ID NO: 348593 - DNA, 33 bp, Homo sapien
ctccccctgacctgaacgacccagtgctctgca

SEQ ID NO: 348594 - DNA, 33 bp, Homo sapien
ctccccctgacctgaatgacccagtgctctgca

SEQ ID NO: 348595 - DNA, 33 bp, Homo sapien
acttcctgaggcaacaaggaaaggtggacagaa

SEQ ID NO: 348596 - DNA, 33 bp, Homo sapien
acttcctgaggcaacatggaaaggtggacagaa

SEQ ID NO: 348597 - DNA, 33 bp, Homo sapien
gcacaagaatggaaacaaagggcaggttagcag

SEQ ID NO: 348598 - DNA, 33 bp, Homo sapien
gcacaagaatggaaacgaagggcaggttagcag

SEQ ID NO: 348599 - DNA, 33 bp, Homo sapien
agcacggaaagaaataccgtttatgccaggtat

SEQ ID NO: 348600 - DNA, 33 bp, Homo sapien
agcacggaaagaaatatcgtttatgccaggtat

SEQ ID NO: 348601 - DNA, 33 bp, Homo sapien
ctgttttctccattctaaaattctaaaatggga

SEQ ID NO: 348602 - DNA, 33 bp, Homo sapien
ctgttttctccattctgaaattctaaaatggga

SEQ ID NO: 348603 - DNA, 33 bp, Homo sapien
tgtcccccagcaccttaaaggccagatccactt

SEQ ID NO: 348604 - DNA, 33 bp, Homo sapien
tgtcccccagcaccttgaaggccagatccactt

SEQ ID NO: 348605 - DNA, 33 bp, Homo sapien
gatattggtgtattgacagactacagatcaatg

SEQ ID NO: 348606 - DNA, 33 bp, Homo sapien
gatattggtgtattgatagactacagatcaatg

SEQ ID NO: 348607 - DNA, 33 bp, Homo sapien
cacagtgtggttgaaaacattctcaatgcattt

SEQ ID NO: 348608 - DNA, 33 bp, Homo sapien
cacagtgtggttgaaagcattctcaatgcattt

SEQ ID NO: 348609 - DNA, 33 bp, Homo sapien
gctgaggctctaactccccaggttgggctacct

SEQ ID NO: 348610 - DNA, 33 bp, Homo sapien
gctgaggctctaactctccaggttgggctacct

SEQ ID NO: 348611 - DNA, 33 bp, Homo sapien
aagcgtaatatatacactggatttcaaagactt

SEQ ID NO: 348612 - DNA, 33 bp, Homo sapien
aagcgtaatatatacattggatttcaaagactt

SEQ ID NO: 348613 - DNA, 33 bp, Homo sapien
agcaaccatccaataacgaggtctgtcaaaagg

SEQ ID NO: 348614 - DNA, 33 bp, Homo sapien
agcaaccatccaataatgaggtctgtcaaaagg

SEQ ID NO: 348615 - DNA, 33 bp, Homo sapien
tagagtctacacccaaagctttctatggccctg

SEQ ID NO: 348616 - DNA, 33 bp, Homo sapien
tagagtctacacccaaggctttctatggccctg

SEQ ID NO: 348617 - DNA, 33 bp, Homo sapien
caagtttgaatcaatcactttgtaagttgaagt

SEQ ID NO: 348618 - DNA, 33 bp, Homo sapien
caagtttgaatcaatcgctttgtaagttgaagt

SEQ ID NO: 348619 - DNA, 33 bp, Homo sapien
ggctccctgaagaagcaacctctggagcctgtt

SEQ ID NO: 348620 - DNA, 33 bp, Homo sapien
ggctccctgaagaagcgacctctggagcctgtt

SEQ ID NO: 348621 - DNA, 33 bp, Homo sapien
ggttaattaatgaagccgccgtaacttttttgt

SEQ ID NO: 348622 - DNA, 33 bp, Homo sapien
ggttaattaatgaagctgccgtaacttttttgt

SEQ ID NO: 348623 - DNA, 33 bp, Homo sapien
aataatacagtgattcaacatacccttttaccc

SEQ ID NO: 348624 - DNA, 33 bp, Homo sapien
aataatacagtgattccacatacccttttaccc

SEQ ID NO: 348625 - DNA, 33 bp, Homo sapien
aaaatctggaagcaaccgagctgtccttcagtg

SEQ ID NO: 348626 - DNA, 33 bp, Homo sapien
aaaatctggaagcaactgagctgtccttcagtg

SEQ ID NO: 348627 - DNA, 33 bp, Homo sapien
aatacacaaacaaataagcaagactcattgggt

SEQ ID NO: 348628 - DNA, 33 bp, Homo sapien
aatacacaaacaaataggcaagactcattgggt

SEQ ID NO: 348629 - DNA, 33 bp, Homo sapien
catctacaagtccatacgttacctcatacaagt

SEQ ID NO: 348630 - DNA, 33 bp, Homo sapien
catctacaagtccatatgttacctcatacaagt

SEQ ID NO: 348631 - DNA, 33 bp, Homo sapien
gaattcaccactatagaacttaaccacattacc

SEQ ID NO: 348632 - DNA, 33 bp, Homo sapien
gaattcaccactataggacttaaccacattacc

SEQ ID NO: 348633 - DNA, 33 bp, Homo sapien
attttgcttgttactaaccttgtgaccttgctt

SEQ ID NO: 348634 - DNA, 33 bp, Homo sapien
attttgcttgttactagccttgtgaccttgctt

SEQ ID NO: 348635 - DNA, 33 bp, Homo sapien
gagacaagacatgtgacagaatgctccaggagg

SEQ ID NO: 348636 - DNA, 33 bp, Homo sapien
gagacaagacatgtgatagaatgctccaggagg

SEQ ID NO: 348637 - DNA, 33 bp, Homo sapien
tcccactgagttgctcaaggtcagaaccacgtg

SEQ ID NO: 348638 - DNA, 33 bp, Homo sapien
tcccactgagttgctcgaggtcagaaccacgtg

SEQ ID NO: 348639 - DNA, 33 bp, Homo sapien
agagcaggtaagattccctaagatcattccaga

SEQ ID NO: 348640 - DNA, 33 bp, Homo sapien
agagcaggtaagattctctaagatcattccaga

SEQ ID NO: 348641 - DNA, 33 bp, Homo sapien
tgattttaatctgggcaagtggattacaccgat

SEQ ID NO: 348642 - DNA, 33 bp, Homo sapien
tgattttaatctgggcgagtggattacaccgat

SEQ ID NO: 348643 - DNA, 33 bp, Homo sapien
tgtcttaatggctcaacgagctaacaaagactt

SEQ ID NO: 348644 - DNA, 33 bp, Homo sapien
tgtcttaatggctcaatgagctaacaaagactt

SEQ ID NO: 348645 - DNA, 33 bp, Homo sapien
tggtcacttgctcatgcattactaacacaactg

SEQ ID NO: 348646 - DNA, 33 bp, Homo sapien
tggtcacttgctcatgtattactaacacaactg

SEQ ID NO: 348647 - DNA, 33 bp, Homo sapien
tgtaggcactaataaacgcttactgagctgaag

SEQ ID NO: 348648 - DNA, 33 bp, Homo sapien
tgtaggcactaataaatgcttactgagctgaag

SEQ ID NO: 348649 - DNA, 33 bp, Homo sapien
ggactagtgtgagtacagagtgagaggctagaa

SEQ ID NO: 348650 - DNA, 33 bp, Homo sapien
ggactagtgtgagtacggagtgagaggctagaa

SEQ ID NO: 348651 - DNA, 33 bp, Homo sapien
actctcaatgactgaaggaaggcaatcaagttc

SEQ ID NO: 348652 - DNA, 33 bp, Homo sapien
actctcaatgactgaatgaaggcaatcaagttc

SEQ ID NO: 348653 - DNA, 33 bp, Homo sapien
tttctgagtgattacaagagtcggtaacttgag

SEQ ID NO: 348654 - DNA, 33 bp, Homo sapien
tttctgagtgattacaggagtcggtaacttgag

SEQ ID NO: 348655 - DNA, 33 bp, Homo sapien
aaataatatttggcccacataagaaattgatat

SEQ ID NO: 348656 - DNA, 33 bp, Homo sapien
aaataatatttggccctcataagaaattgatat

SEQ ID NO: 348657 - DNA, 33 bp, Homo sapien
atattctttgctcattaaaaaatttggcatttg

SEQ ID NO: 348658 - DNA, 33 bp, Homo sapien
atattctttgctcatttaaaaatttggcatttg

SEQ ID NO: 348659 - DNA, 33 bp, Homo sapien
tgggaagcttctctcacacatgttagagtgaaa

SEQ ID NO: 348660 - DNA, 33 bp, Homo sapien
tgggaagcttctctcagacatgttagagtgaaa

SEQ ID NO: 348661 - DNA, 33 bp, Homo sapien
gagcagcaactaggcaagtgtacttactagcat

SEQ ID NO: 348662 - DNA, 33 bp, Homo sapien
gagcagcaactaggcatgtgtacttactagcat

SEQ ID NO: 348663 - DNA, 33 bp, Homo sapien
aactggaactctcctacgcactgcggaaggggt

SEQ ID NO: 348664 - DNA, 33 bp, Homo sapien
aactggaactctcctatgcactgcggaaggggt

SEQ ID NO: 348665 - DNA, 33 bp, Homo sapien
tggctgatgccagacaatcaagggccttatatg

SEQ ID NO: 348666 - DNA, 33 bp, Homo sapien
tggctgatgccagacagtcaagggccttatatg

SEQ ID NO: 348667 - DNA, 33 bp, Homo sapien
tcataggagttacatacaggacatgcccaggtt

SEQ ID NO: 348668 - DNA, 33 bp, Homo sapien
tcataggagttacatataggacatgcccaggtt

SEQ ID NO: 348669 - DNA, 33 bp, Homo sapien
gagaggcgattagagacgataaaatcgtgatgg

SEQ ID NO: 348670 - DNA, 33 bp, Homo sapien
gagaggcgattagagatgataaaatcgtgatgg

SEQ ID NO: 348671 - DNA, 33 bp, Homo sapien
agggtttcctgattccaaagcctagattcttaa

SEQ ID NO: 348672 - DNA, 33 bp, Homo sapien
agggtttcctgattccgaagcctagattcttaa

SEQ ID NO: 348673 - DNA, 33 bp, Homo sapien
tacgtctaaccaaacaagatcctatctgattca

SEQ ID NO: 348674 - DNA, 33 bp, Homo sapien
tacgtctaaccaaacaggatcctatctgattca

SEQ ID NO: 348675 - DNA, 33 bp, Homo sapien
gcagctagctagtaccaaggagaactgagttgg

SEQ ID NO: 348676 - DNA, 33 bp, Homo sapien
gcagctagctagtaccgaggagaactgagttgg

SEQ ID NO: 348677 - DNA, 33 bp, Homo sapien
tcccatgatttaggcaacctgaaggtgggggcc

SEQ ID NO: 348678 - DNA, 33 bp, Homo sapien
tcccatgatttaggcagcctgaaggtgggggcc

SEQ ID NO: 348679 - DNA, 33 bp, Homo sapien
ataaccatgagtataactggaactggagaataa

SEQ ID NO: 348680 - DNA, 33 bp, Homo sapien
ataaccatgagtataattggaactggagaataa

SEQ ID NO: 348681 - DNA, 33 bp, Homo sapien
ttttaaagccttcacacgatgtcttgagccttt

SEQ ID NO: 348682 - DNA, 33 bp, Homo sapien
ttttaaagccttcacatgatgtcttgagccttt

SEQ ID NO: 348683 - DNA, 33 bp, Homo sapien
agcaacaattctgatacccctaatgctctgaga

SEQ ID NO: 348684 - DNA, 33 bp, Homo sapien
agcaacaattctgatagccctaatgctctgaga

SEQ ID NO: 348685 - DNA, 33 bp, Homo sapien
catgcccaccacttgccgagtccaacacctggc

SEQ ID NO: 348686 - DNA, 33 bp, Homo sapien
catgcccaccacttgctgagtccaacacctggc

SEQ ID NO: 348687 - DNA, 33 bp, Homo sapien
ttccttgagctccctccaatccagcccctggtg

SEQ ID NO: 348688 - DNA, 33 bp, Homo sapien
ttccttgagctccctctaatccagcccctggtg

SEQ ID NO: 348689 - DNA, 33 bp, Homo sapien
gcagaatgcaaaaaagcatagtaccacagttcg

SEQ ID NO: 348690 - DNA, 33 bp, Homo sapien
gcagaatgcaaaaaagtatagtaccacagttcg

SEQ ID NO: 348691 - DNA, 33 bp, Homo sapien
ggactgcctcaaccaacagggcatggcagaagc

SEQ ID NO: 348692 - DNA, 33 bp, Homo sapien
ggactgcctcaaccaatagggcatggcagaagc

SEQ ID NO: 348693 - DNA, 33 bp, Homo sapien
ccagttaaggattccaaggtcttagaagatgga

SEQ ID NO: 348694 - DNA, 33 bp, Homo sapien
ccagttaaggattccagggtcttagaagatgga

SEQ ID NO: 348695 - DNA, 33 bp, Homo sapien
taagaatatggcaaaaatatttagttgaaatgt

SEQ ID NO: 348696 - DNA, 33 bp, Homo sapien
taagaatatggcaaaactatttagttgaaatgt

SEQ ID NO: 348697 - DNA, 33 bp, Homo sapien
cttgctattaagatacccgtgcaaaggcagagg

SEQ ID NO: 348698 - DNA, 33 bp, Homo sapien
cttgctattaagatactcgtgcaaaggcagagg

SEQ ID NO: 348699 - DNA, 33 bp, Homo sapien
agttgttatgaaagtacatttgtcaaggtgaaa

SEQ ID NO: 348700 - DNA, 33 bp, Homo sapien
agttgttatgaaagtatatttgtcaaggtgaaa

SEQ ID NO: 348701 - DNA, 33 bp, Homo sapien
cttcagacttgcaacacaaaaactctaagtgtg

SEQ ID NO: 348702 - DNA, 33 bp, Homo sapien
cttcagacttgcaacataaaaactctaagtgtg

SEQ ID NO: 348703 - DNA, 33 bp, Homo sapien
tattatttcattatacaagtgtctatttgcgtc

SEQ ID NO: 348704 - DNA, 33 bp, Homo sapien
tattatttcattatacgagtgtctatttgcgtc

SEQ ID NO: 348705 - DNA, 33 bp, Homo sapien
gagtatactggctggcaaatcttacattgtact

SEQ ID NO: 348706 - DNA, 33 bp, Homo sapien
gagtatactggctggccaatcttacattgtact

SEQ ID NO: 348707 - DNA, 33 bp, Homo sapien
acacctactacaaaggaaatatgtgatctagtt

SEQ ID NO: 348708 - DNA, 33 bp, Homo sapien
acacctactacaaaggcaatatgtgatctagtt

SEQ ID NO: 348709 - DNA, 33 bp, Homo sapien
aataacttgatactcagggattatttcaactgt

SEQ ID NO: 348710 - DNA, 33 bp, Homo sapien
aataacttgatactcatggattatttcaactgt

SEQ ID NO: 348711 - DNA, 33 bp, Homo sapien
tgcttagtggtatcataaaagaactttcattaa

SEQ ID NO: 348712 - DNA, 33 bp, Homo sapien
tgcttagtggtatcattaaagaactttcattaa

SEQ ID NO: 348713 - DNA, 33 bp, Homo sapien
agctcaatagccgaatcaagacgacagaagaaa

SEQ ID NO: 348714 - DNA, 33 bp, Homo sapien
agctcaatagccgaatgaagacgacagaagaaa

SEQ ID NO: 348715 - DNA, 33 bp, Homo sapien
cttgtgtttttctaatgactcataatgttgagc

SEQ ID NO: 348716 - DNA, 33 bp, Homo sapien
cttgtgtttttctaattactcataatgttgagc

SEQ ID NO: 348717 - DNA, 33 bp, Homo sapien
tacaaatcagtacttccatcactttatagctaa

SEQ ID NO: 348718 - DNA, 33 bp, Homo sapien
tacaaatcagtacttctatcactttatagctaa

SEQ ID NO: 348719 - DNA, 33 bp, Homo sapien
atattaatgacatcaaatgtaaatggtttaaat

SEQ ID NO: 348720 - DNA, 33 bp, Homo sapien
atattaatgacatcaagtgtaaatggtttaaat

SEQ ID NO: 348721 - DNA, 33 bp, Homo sapien
ttacttttctctagcactgaaagccataacata

SEQ ID NO: 348722 - DNA, 33 bp, Homo sapien
ttacttttctctagcattgaaagccataacata

SEQ ID NO: 348723 - DNA, 33 bp, Homo sapien
ttggccacgtggttcacatagttgttactctca

SEQ ID NO: 348724 - DNA, 33 bp, Homo sapien
ttggccacgtggttcatatagttgttactctca

SEQ ID NO: 348725 - DNA, 33 bp, Homo sapien
ttcagactgtgaaaaaaacaaatgatattggag

SEQ ID NO: 348726 - DNA, 33 bp, Homo sapien
ttcagactgtgaaaaagacaaatgatattggag

SEQ ID NO: 348727 - DNA, 33 bp, Homo sapien
cattgatgagtccccaatcttcaaagaatttgt

SEQ ID NO: 348728 - DNA, 33 bp, Homo sapien
cattgatgagtccccagtcttcaaagaatttgt

SEQ ID NO: 348729 - DNA, 33 bp, Homo sapien
agtccactagggaagacagcaaatagcaggaga

SEQ ID NO: 348730 - DNA, 33 bp, Homo sapien
agtccactagggaagagagcaaatagcaggaga

SEQ ID NO: 348731 - DNA, 33 bp, Homo sapien
ctttcttctcttcacaatctcccggcctccctc

SEQ ID NO: 348732 - DNA, 33 bp, Homo sapien
ctttcttctcttcacactctcccggcctccctc

SEQ ID NO: 348733 - DNA, 33 bp, Homo sapien
cacacacagtgcagccggactaccgtcttgggg

SEQ ID NO: 348734 - DNA, 33 bp, Homo sapien
cacacacagtgcagcctgactaccgtcttgggg

SEQ ID NO: 348735 - DNA, 33 bp, Homo sapien
tttctgatctccagaacgataagataatacact

SEQ ID NO: 348736 - DNA, 33 bp, Homo sapien
tttctgatctccagaatgataagataatacact

SEQ ID NO: 348737 - DNA, 33 bp, Homo sapien
tggttttagcgcagcgaaactgctttcagattt

SEQ ID NO: 348738 - DNA, 33 bp, Homo sapien
tggttttagcgcagcggaactgctttcagattt

SEQ ID NO: 348739 - DNA, 33 bp, Homo sapien
tagataatggcttccaaagatgttcacgtcctg

SEQ ID NO: 348740 - DNA, 33 bp, Homo sapien
tagataatggcttccagagatgttcacgtcctg

SEQ ID NO: 348741 - DNA, 33 bp, Homo sapien
tggtttgttaggttcaaatgaaatcagggatgt

SEQ ID NO: 348742 - DNA, 33 bp, Homo sapien
tggtttgttaggttcagatgaaatcagggatgt

SEQ ID NO: 348743 - DNA, 33 bp, Homo sapien
agtttcctcttctgtacggcttggattcatcat

SEQ ID NO: 348744 - DNA, 33 bp, Homo sapien
agtttcctcttctgtatggcttggattcatcat

SEQ ID NO: 348745 - DNA, 33 bp, Homo sapien
taaagctcagagaatgaaatctggccaatacct

SEQ ID NO: 348746 - DNA, 33 bp, Homo sapien
taaagctcagagaatggaatctggccaatacct

SEQ ID NO: 348747 - DNA, 33 bp, Homo sapien
gagtttgatttgaaacaccactattgagcactc

SEQ ID NO: 348748 - DNA, 33 bp, Homo sapien
gagtttgatttgaaacgccactattgagcactc

SEQ ID NO: 348749 - DNA, 33 bp, Homo sapien
aatttagattcctgaaagacaggacctggatct

SEQ ID NO: 348750 - DNA, 33 bp, Homo sapien
aatttagattcctgaatgacaggacctggatct

SEQ ID NO: 348751 - DNA, 33 bp, Homo sapien
ggccactcctctgaataagcccagataaacact

SEQ ID NO: 348752 - DNA, 33 bp, Homo sapien
ggccactcctctgaatgagcccagataaacact

SEQ ID NO: 348753 - DNA, 33 bp, Homo sapien
ggacacagttggcaaaactcataacctattgaa

SEQ ID NO: 348754 - DNA, 33 bp, Homo sapien
ggacacagttggcaaacctcataacctattgaa

SEQ ID NO: 348755 - DNA, 33 bp, Homo sapien
agcaaaattactaagacgtgaaatttgcacttg

SEQ ID NO: 348756 - DNA, 33 bp, Homo sapien
agcaaaattactaagaggtgaaatttgcacttg

SEQ ID NO: 348757 - DNA, 33 bp, Homo sapien
tacccctgaggtaggacggtgaaggtgtattgt

SEQ ID NO: 348758 - DNA, 33 bp, Homo sapien
tacccctgaggtaggatggtgaaggtgtattgt

SEQ ID NO: 348759 - DNA, 33 bp, Homo sapien
agaagcatatttacgacggtgaaataaacagat

SEQ ID NO: 348760 - DNA, 33 bp, Homo sapien
agaagcatatttacgatggtgaaataaacagat

SEQ ID NO: 348761 - DNA, 33 bp, Homo sapien
atcatcctctaacttacgaaaaactggacagag

SEQ ID NO: 348762 - DNA, 33 bp, Homo sapien
atcatcctctaacttatgaaaaactggacagag

SEQ ID NO: 348763 - DNA, 33 bp, Homo sapien
atgctggagcccaaggaagattttgaagcaaac

SEQ ID NO: 348764 - DNA, 33 bp, Homo sapien
atgctggagcccaaggcagattttgaagcaaac

SEQ ID NO: 348765 - DNA, 33 bp, Homo sapien
tacatccactgatgacagatcaaggtcctagcc

SEQ ID NO: 348766 - DNA, 33 bp, Homo sapien
tacatccactgatgacggatcaaggtcctagcc

SEQ ID NO: 348767 - DNA, 33 bp, Homo sapien
tacttctaggccagaacagttaaaagcagacgc

SEQ ID NO: 348768 - DNA, 33 bp, Homo sapien
tacttctaggccagaagagttaaaagcagacgc

SEQ ID NO: 348769 - DNA, 33 bp, Homo sapien
cctagaagtaacattaactggaaatagtcacat

SEQ ID NO: 348770 - DNA, 33 bp, Homo sapien
cctagaagtaacattagctggaaatagtcacat

SEQ ID NO: 348771 - DNA, 33 bp, Homo sapien
acctcttggatctgaaaactgatgactcaataa

SEQ ID NO: 348772 - DNA, 33 bp, Homo sapien
acctcttggatctgaagactgatgactcaataa

SEQ ID NO: 348773 - DNA, 33 bp, Homo sapien
gtgggcagagaagagaaagcaggacatcctaga

SEQ ID NO: 348774 - DNA, 33 bp, Homo sapien
gtgggcagagaagagagagcaggacatcctaga

SEQ ID NO: 348775 - DNA, 33 bp, Homo sapien
agtatagtggccatcactgatacttttggatga

SEQ ID NO: 348776 - DNA, 33 bp, Homo sapien
agtatagtggccatcattgatacttttggatga

SEQ ID NO: 348777 - DNA, 33 bp, Homo sapien
gtcttattgtcatccacaacatggaatcccatg

SEQ ID NO: 348778 - DNA, 33 bp, Homo sapien
gtcttattgtcatccagaacatggaatcccatg

SEQ ID NO: 348779 - DNA, 33 bp, Homo sapien
cacactgcacccagtccatgctaccctttttat

SEQ ID NO: 348780 - DNA, 33 bp, Homo sapien
cacactgcacccagtcgatgctaccctttttat

SEQ ID NO: 348781 - DNA, 33 bp, Homo sapien
taaacaccaatgaccaaaaactgctgaagcccc

SEQ ID NO: 348782 - DNA, 33 bp, Homo sapien
taaacaccaatgaccagaaactgctgaagcccc

SEQ ID NO: 348783 - DNA, 33 bp, Homo sapien
gctggaggtggtgcgacgtaactgggtcctcaa

SEQ ID NO: 348784 - DNA, 33 bp, Homo sapien
gctggaggtggtgcgatgtaactgggtcctcaa

SEQ ID NO: 348785 - DNA, 33 bp, Homo sapien
aatcaggcaaaaggtcaaactttcttcttaaag

SEQ ID NO: 348786 - DNA, 33 bp, Homo sapien
aatcaggcaaaaggtcgaactttcttcttaaag

SEQ ID NO: 348787 - DNA, 33 bp, Homo sapien
cactccttcagtgttaccataaaactcccaaac

SEQ ID NO: 348788 - DNA, 33 bp, Homo sapien
cactccttcagtgttatcataaaactcccaaac

SEQ ID NO: 348789 - DNA, 33 bp, Homo sapien
tcaaagaattctccaaagccttctcaatttaac

SEQ ID NO: 348790 - DNA, 33 bp, Homo sapien
tcaaagaattctccaaggccttctcaatttaac

SEQ ID NO: 348791 - DNA, 33 bp, Homo sapien
aaagggccccgttaaaatgcacatatgtttcct

SEQ ID NO: 348792 - DNA, 33 bp, Homo sapien
aaagggccccgttaaagtgcacatatgtttcct

SEQ ID NO: 348793 - DNA, 33 bp, Homo sapien
aattattagaaagatgaataaccataggtgttg

SEQ ID NO: 348794 - DNA, 33 bp, Homo sapien
aattattagaaagatggataaccataggtgttg

SEQ ID NO: 348795 - DNA, 33 bp, Homo sapien
cacttctgggccatgtaaagtgaagagagagag

SEQ ID NO: 348796 - DNA, 33 bp, Homo sapien
cacttctgggccatgtgaagtgaagagagagag

SEQ ID NO: 348797 - DNA, 33 bp, Homo sapien
tccatctgcacccagaaaagttgtcagaggtca

SEQ ID NO: 348798 - DNA, 33 bp, Homo sapien
tccatctgcacccagagaagttgtcagaggtca

SEQ ID NO: 348799 - DNA, 33 bp, Homo sapien
agattgttcagagattaaaattaaggcccagga

SEQ ID NO: 348800 - DNA, 33 bp, Homo sapien
agattgttcagagattgaaattaaggcccagga

SEQ ID NO: 348801 - DNA, 33 bp, Homo sapien
ttttcattcatcaaaacttctatgagattcata

SEQ ID NO: 348802 - DNA, 33 bp, Homo sapien
ttttcattcatcaaaatttctatgagattcata

SEQ ID NO: 348803 - DNA, 33 bp, Homo sapien
ctccctggccttcctaccgattctatgagctcc

SEQ ID NO: 348804 - DNA, 33 bp, Homo sapien
ctccctggccttcctatcgattctatgagctcc

SEQ ID NO: 348805 - DNA, 33 bp, Homo sapien
aagtgagaaagacggaaacagggaagttgaatg

SEQ ID NO: 348806 - DNA, 33 bp, Homo sapien
aagtgagaaagacggagacagggaagttgaatg

SEQ ID NO: 348807 - DNA, 33 bp, Homo sapien
gcaccaatgtcttttacggcctttcctcgaatg

SEQ ID NO: 348808 - DNA, 33 bp, Homo sapien
gcaccaatgtcttttatggcctttcctcgaatg

SEQ ID NO: 348809 - DNA, 33 bp, Homo sapien
cagtgagaatgacccacatggggagctaaggaa

SEQ ID NO: 348810 - DNA, 33 bp, Homo sapien
cagtgagaatgacccatatggggagctaaggaa

SEQ ID NO: 348811 - DNA, 33 bp, Homo sapien
cattaccttccttctaaatcagctcttcttccg

SEQ ID NO: 348812 - DNA, 33 bp, Homo sapien
cattaccttccttctatatcagctcttcttccg

SEQ ID NO: 348813 - DNA, 33 bp, Homo sapien
catcagaggctctgtgaaaggaatccctgcatt

SEQ ID NO: 348814 - DNA, 33 bp, Homo sapien
catcagaggctctgtggaaggaatccctgcatt

SEQ ID NO: 348815 - DNA, 33 bp, Homo sapien
gcctcgacctaactcaatgaaatgtcttatgct

SEQ ID NO: 348816 - DNA, 33 bp, Homo sapien
gcctcgacctaactcagtgaaatgtcttatgct

SEQ ID NO: 348817 - DNA, 33 bp, Homo sapien
agttcagcacaggactcaccagattttaacaga

SEQ ID NO: 348818 - DNA, 33 bp, Homo sapien
agttcagcacaggactgaccagattttaacaga

SEQ ID NO: 348819 - DNA, 33 bp, Homo sapien
taagtgagggttaatgccatagaccggagtcct

SEQ ID NO: 348820 - DNA, 33 bp, Homo sapien
taagtgagggttaatgtcatagaccggagtcct

SEQ ID NO: 348821 - DNA, 33 bp, Homo sapien
ttccctctgacagttccctgaggtccaagacaa

SEQ ID NO: 348822 - DNA, 33 bp, Homo sapien
ttccctctgacagttctctgaggtccaagacaa

SEQ ID NO: 348823 - DNA, 33 bp, Homo sapien
tcctcttctcttcctgaactagtgcaacagcct

SEQ ID NO: 348824 - DNA, 33 bp, Homo sapien
tcctcttctcttcctggactagtgcaacagcct

SEQ ID NO: 348825 - DNA, 33 bp, Homo sapien
agcctctggaatcaacactacaaagcagaaaac

SEQ ID NO: 348826 - DNA, 33 bp, Homo sapien
agcctctggaatcaactctacaaagcagaaaac

SEQ ID NO: 348827 - DNA, 33 bp, Homo sapien
ctctgtgccactcatacgcccctcagttattag

SEQ ID NO: 348828 - DNA, 33 bp, Homo sapien
ctctgtgccactcatatgcccctcagttattag

SEQ ID NO: 348829 - DNA, 33 bp, Homo sapien
cgggttctgcatcaaagaaaatatctgggcttt

SEQ ID NO: 348830 - DNA, 33 bp, Homo sapien
cgggttctgcatcaaataaaatatctgggcttt

SEQ ID NO: 348831 - DNA, 33 bp, Homo sapien
gatccagacaagcagaagggttgggaagaattc

SEQ ID NO: 348832 - DNA, 33 bp, Homo sapien
gatccagacaagcagaggggttgggaagaattc

SEQ ID NO: 348833 - DNA, 33 bp, Homo sapien
tactcgtgcacagctgaagataccatttatgct

SEQ ID NO: 348834 - DNA, 33 bp, Homo sapien
tactcgtgcacagctggagataccatttatgct

SEQ ID NO: 348835 - DNA, 33 bp, Homo sapien
gtctcctgggtctctgcacttagattcttggta

SEQ ID NO: 348836 - DNA, 33 bp, Homo sapien
gtctcctgggtctctggacttagattcttggta

SEQ ID NO: 348837 - DNA, 33 bp, Homo sapien
gtctccaggtcaatatgaaacaagttgccagga

SEQ ID NO: 348838 - DNA, 33 bp, Homo sapien
gtctccaggtcaatattaaacaagttgccagga

SEQ ID NO: 348839 - DNA, 33 bp, Homo sapien
tcaccaggctataagcactctctctatcgccct

SEQ ID NO: 348840 - DNA, 33 bp, Homo sapien
tcaccaggctataagcgctctctctatcgccct

SEQ ID NO: 348841 - DNA, 33 bp, Homo sapien
aatgaaaagaatgacaatgaccataaatgagca

SEQ ID NO: 348842 - DNA, 33 bp, Homo sapien
aatgaaaagaatgacactgaccataaatgagca

SEQ ID NO: 348843 - DNA, 33 bp, Homo sapien
acagaggaggagaagacatttgagaaacctacc

SEQ ID NO: 348844 - DNA, 33 bp, Homo sapien
acagaggaggagaagatatttgagaaacctacc

SEQ ID NO: 348845 - DNA, 33 bp, Homo sapien
cctcaaatacctgtcacgtgtaggtagcctggc

SEQ ID NO: 348846 - DNA, 33 bp, Homo sapien
cctcaaatacctgtcatgtgtaggtagcctggc

SEQ ID NO: 348847 - DNA, 33 bp, Homo sapien
ggagtgatgtgttggccaagtgaagctcaggtg

SEQ ID NO: 348848 - DNA, 33 bp, Homo sapien
ggagtgatgtgttggctaagtgaagctcaggtg

SEQ ID NO: 348849 - DNA, 33 bp, Homo sapien
accacacaaggaacacagataatccagactgag

SEQ ID NO: 348850 - DNA, 33 bp, Homo sapien
accacacaaggaacacggataatccagactgag

SEQ ID NO: 348851 - DNA, 33 bp, Homo sapien
gatgctcactgcgctccctaactttgccctgga

SEQ ID NO: 348852 - DNA, 33 bp, Homo sapien
gatgctcactgcgctctctaactttgccctgga

SEQ ID NO: 348853 - DNA, 33 bp, Homo sapien
agatggtagcaacctcaaacgtgagacgaaagc

SEQ ID NO: 348854 - DNA, 33 bp, Homo sapien
agatggtagcaacctcgaacgtgagacgaaagc

SEQ ID NO: 348855 - DNA, 33 bp, Homo sapien
agtgtcagagatgagacgggacgaagtgtgaac

SEQ ID NO: 348856 - DNA, 33 bp, Homo sapien
agtgtcagagatgagatgggacgaagtgtgaac

SEQ ID NO: 348857 - DNA, 33 bp, Homo sapien
ccctcataagaacaaaaaaggctcccatgaacc

SEQ ID NO: 348858 - DNA, 33 bp, Homo sapien
ccctcataagaacaaagaaggctcccatgaacc

SEQ ID NO: 348859 - DNA, 33 bp, Homo sapien
tcagagttgttggaaaaatgaaaataaacaatg

SEQ ID NO: 348860 - DNA, 33 bp, Homo sapien
tcagagttgttggaaagatgaaaataaacaatg

SEQ ID NO: 348861 - DNA, 33 bp, Homo sapien
tttctattttattgtgaacgggaaggcactaca

SEQ ID NO: 348862 - DNA, 33 bp, Homo sapien
tttctattttattgtgtacgggaaggcactaca

SEQ ID NO: 348863 - DNA, 33 bp, Homo sapien
gcattcaatggtaagaacaaataaaactggatc

SEQ ID NO: 348864 - DNA, 33 bp, Homo sapien
gcattcaatggtaagatcaaataaaactggatc

SEQ ID NO: 348865 - DNA, 33 bp, Homo sapien
tcacagaaagggctccagccgactagcatcagc

SEQ ID NO: 348866 - DNA, 33 bp, Homo sapien
tcacagaaagggctccggccgactagcatcagc

SEQ ID NO: 348867 - DNA, 33 bp, Homo sapien
gcaccccaaagagtccaagaaagttctgcactg

SEQ ID NO: 348868 - DNA, 33 bp, Homo sapien
gcaccccaaagagtccgagaaagttctgcactg

SEQ ID NO: 348869 - DNA, 33 bp, Homo sapien
ctctggtaccactgccgctctactccaagccac

SEQ ID NO: 348870 - DNA, 33 bp, Homo sapien
ctctggtaccactgcctctctactccaagccac

SEQ ID NO: 348871 - DNA, 33 bp, Homo sapien
gagacacagaatgacaatcgcccatgtgtgtca

SEQ ID NO: 348872 - DNA, 33 bp, Homo sapien
gagacacagaatgacagtcgcccatgtgtgtca

SEQ ID NO: 348873 - DNA, 33 bp, Homo sapien
ccaggcattttaccaacgaggaagcaacttcta

SEQ ID NO: 348874 - DNA, 33 bp, Homo sapien
ccaggcattttaccaatgaggaagcaacttcta

SEQ ID NO: 348875 - DNA, 33 bp, Homo sapien
acttctaatcttccaaaaatgttcctctaaatc

SEQ ID NO: 348876 - DNA, 33 bp, Homo sapien
acttctaatcttccaagaatgttcctctaaatc

SEQ ID NO: 348877 - DNA, 33 bp, Homo sapien
gtacaaaagctccaaaagaacaggaacaaggag

SEQ ID NO: 348878 - DNA, 33 bp, Homo sapien
gtacaaaagctccaaaggaacaggaacaaggag

SEQ ID NO: 348879 - DNA, 33 bp, Homo sapien
tcatttcaaaacagcaagtggttcctctcttga

SEQ ID NO: 348880 - DNA, 33 bp, Homo sapien
tcatttcaaaacagcaggtggttcctctcttga

SEQ ID NO: 348881 - DNA, 33 bp, Homo sapien
taattctattgtcgtcaatcacaaccctggtca

SEQ ID NO: 348882 - DNA, 33 bp, Homo sapien
taattctattgtcgtcgatcacaaccctggtca

SEQ ID NO: 348883 - DNA, 33 bp, Homo sapien
caacatctacgaacaaagaagcgggtcctcact

SEQ ID NO: 348884 - DNA, 33 bp, Homo sapien
caacatctacgaacaaggaagcgggtcctcact

SEQ ID NO: 348885 - DNA, 33 bp, Homo sapien
catggcagccttaagaaaatgtagcaaaattac

SEQ ID NO: 348886 - DNA, 33 bp, Homo sapien
catggcagccttaagagaatgtagcaaaattac

SEQ ID NO: 348887 - DNA, 33 bp, Homo sapien
ctcaataaatgttcacccttccctcacctattt

SEQ ID NO: 348888 - DNA, 33 bp, Homo sapien
ctcaataaatgttcactcttccctcacctattt

SEQ ID NO: 348889 - DNA, 33 bp, Homo sapien
tggagtttgtcacgcacgagtggccaggctctt

SEQ ID NO: 348890 - DNA, 33 bp, Homo sapien
tggagtttgtcacgcatgagtggccaggctctt

SEQ ID NO: 348891 - DNA, 33 bp, Homo sapien
accttgagatctactcagaaatggcagactggg

SEQ ID NO: 348892 - DNA, 33 bp, Homo sapien
accttgagatctactcggaaatggcagactggg

SEQ ID NO: 348893 - DNA, 33 bp, Homo sapien
gatgctctttagctgacggaggtaaggtctccc

SEQ ID NO: 348894 - DNA, 33 bp, Homo sapien
gatgctctttagctgatggaggtaaggtctccc

SEQ ID NO: 348895 - DNA, 33 bp, Homo sapien
gcttttccaatttacaatgatcaggaacccacg

SEQ ID NO: 348896 - DNA, 33 bp, Homo sapien
gcttttccaatttacagtgatcaggaacccacg

SEQ ID NO: 348897 - DNA, 33 bp, Homo sapien
gatggagtgtggaaaagtctgaatgacagccaa

SEQ ID NO: 348898 - DNA, 33 bp, Homo sapien
gatggagtgtggaaaattctgaatgacagccaa

SEQ ID NO: 348899 - DNA, 33 bp, Homo sapien
atggtgattttgtttaccattcactgagtgtct

SEQ ID NO: 348900 - DNA, 33 bp, Homo sapien
atggtgattttgtttatcattcactgagtgtct

SEQ ID NO: 348901 - DNA, 33 bp, Homo sapien
ccctcctggctgtgaacgtccatggtctaaaaa

SEQ ID NO: 348902 - DNA, 33 bp, Homo sapien
ccctcctggctgtgaatgtccatggtctaaaaa

SEQ ID NO: 348903 - DNA, 33 bp, Homo sapien
gataaatcacgcccacaaggtagcaccaacaat

SEQ ID NO: 348904 - DNA, 33 bp, Homo sapien
gataaatcacgcccacgaggtagcaccaacaat

SEQ ID NO: 348905 - DNA, 33 bp, Homo sapien
cttatgcagagctggacgggttagatctcaagc

SEQ ID NO: 348906 - DNA, 33 bp, Homo sapien
cttatgcagagctggatgggttagatctcaagc

SEQ ID NO: 348907 - DNA, 33 bp, Homo sapien
gggaaaacatattaaggctcatggatcacagtg

SEQ ID NO: 348908 - DNA, 33 bp, Homo sapien
gggaaaacatattaagtctcatggatcacagtg

SEQ ID NO: 348909 - DNA, 33 bp, Homo sapien
ttgtaggagaaatgtacggcttcatctcatttc

SEQ ID NO: 348910 - DNA, 33 bp, Homo sapien
ttgtaggagaaatgtatggcttcatctcatttc

SEQ ID NO: 348911 - DNA, 33 bp, Homo sapien
aggatatccttcaacacctgtccgctccaacct

SEQ ID NO: 348912 - DNA, 33 bp, Homo sapien
aggatatccttcaacatctgtccgctccaacct

SEQ ID NO: 348913 - DNA, 33 bp, Homo sapien
gaatctcagaattttgcaagtgcttcaggccgg

SEQ ID NO: 348914 - DNA, 33 bp, Homo sapien
gaatctcagaattttggaagtgcttcaggccgg

SEQ ID NO: 348915 - DNA, 33 bp, Homo sapien
ggctggatcaaagggcacctgtgttctatcacc

SEQ ID NO: 348916 - DNA, 33 bp, Homo sapien
ggctggatcaaagggcgcctgtgttctatcacc

SEQ ID NO: 348917 - DNA, 33 bp, Homo sapien
tataagtgagaacatacgatgcaaaaacctcat

SEQ ID NO: 348918 - DNA, 33 bp, Homo sapien
tataagtgagaacatatgatgcaaaaacctcat

SEQ ID NO: 348919 - DNA, 33 bp, Homo sapien
gattgacggatagaaaatatgaatcctgggtgt

SEQ ID NO: 348920 - DNA, 33 bp, Homo sapien
gattgacggatagaaagtatgaatcctgggtgt

SEQ ID NO: 348921 - DNA, 33 bp, Homo sapien
tgtggatgtggttgtaagagaaaatatccttgt

SEQ ID NO: 348922 - DNA, 33 bp, Homo sapien
tgtggatgtggttgtatgagaaaatatccttgt

SEQ ID NO: 348923 - DNA, 33 bp, Homo sapien
taagcttgttacttcacgtccctgagcatcagt

SEQ ID NO: 348924 - DNA, 33 bp, Homo sapien
taagcttgttacttcaggtccctgagcatcagt

SEQ ID NO: 348925 - DNA, 33 bp, Homo sapien
ctctgacatgtaactcaagacaagacctgctat

SEQ ID NO: 348926 - DNA, 33 bp, Homo sapien
ctctgacatgtaactcgagacaagacctgctat

SEQ ID NO: 348927 - DNA, 33 bp, Homo sapien
ccagtatagagtgtgccgaacaccatgaaaaga

SEQ ID NO: 348928 - DNA, 33 bp, Homo sapien
ccagtatagagtgtgctgaacaccatgaaaaga

SEQ ID NO: 348929 - DNA, 33 bp, Homo sapien
cagtccagggctcctacggcagtttcatggttt

SEQ ID NO: 348930 - DNA, 33 bp, Homo sapien
cagtccagggctcctatggcagtttcatggttt

SEQ ID NO: 348931 - DNA, 33 bp, Homo sapien
agggtaagaggttgacggctaggtgactccagg

SEQ ID NO: 348932 - DNA, 33 bp, Homo sapien
agggtaagaggttgactgctaggtgactccagg

SEQ ID NO: 348933 - DNA, 33 bp, Homo sapien
ttaggaacatgtcagcaagaggggaaaatgaga

SEQ ID NO: 348934 - DNA, 33 bp, Homo sapien
ttaggaacatgtcagcgagaggggaaaatgaga

SEQ ID NO: 348935 - DNA, 33 bp, Homo sapien
aacagcacagctgacacctcagaaaaatctcat

SEQ ID NO: 348936 - DNA, 33 bp, Homo sapien
aacagcacagctgacatctcagaaaaatctcat

SEQ ID NO: 348937 - DNA, 33 bp, Homo sapien
atcataccattgctccaattgaaagttcatctg

SEQ ID NO: 348938 - DNA, 33 bp, Homo sapien
atcataccattgctccgattgaaagttcatctg

SEQ ID NO: 348939 - DNA, 33 bp, Homo sapien
ttctcgggaccttggacgtaaacttaggccagc

SEQ ID NO: 348940 - DNA, 33 bp, Homo sapien
ttctcgggaccttggatgtaaacttaggccagc

SEQ ID NO: 348941 - DNA, 33 bp, Homo sapien
atccgtggaggcttaccggtctgtatgaagcca

SEQ ID NO: 348942 - DNA, 33 bp, Homo sapien
atccgtggaggcttactggtctgtatgaagcca

SEQ ID NO: 348943 - DNA, 33 bp, Homo sapien
attccttactcagaaacttagatgcttgtcaga

SEQ ID NO: 348944 - DNA, 33 bp, Homo sapien
attccttactcagaaatttagatgcttgtcaga

SEQ ID NO: 348945 - DNA, 33 bp, Homo sapien
ttgaaaagaaattcccaaagtttcatctgtgtg

SEQ ID NO: 348946 - DNA, 33 bp, Homo sapien
ttgaaaagaaattcccgaagtttcatctgtgtg

SEQ ID NO: 348947 - DNA, 33 bp, Homo sapien
agatgaagcaagtgccacaacacctgtgctccc

SEQ ID NO: 348948 - DNA, 33 bp, Homo sapien
agatgaagcaagtgccgcaacacctgtgctccc

SEQ ID NO: 348949 - DNA, 33 bp, Homo sapien
cttaacaaaccatacactagtcctcctgatttc

SEQ ID NO: 348950 - DNA, 33 bp, Homo sapien
cttaacaaaccatacagtagtcctcctgatttc

SEQ ID NO: 348951 - DNA, 33 bp, Homo sapien
tcatgccagcatttaactctctttccttctaag

SEQ ID NO: 348952 - DNA, 33 bp, Homo sapien
tcatgccagcatttaattctctttccttctaag

SEQ ID NO: 348953 - DNA, 33 bp, Homo sapien
ctgatgtgatgttttccccacctcaactgaatc

SEQ ID NO: 348954 - DNA, 33 bp, Homo sapien
ctgatgtgatgttttcgccacctcaactgaatc

SEQ ID NO: 348955 - DNA, 33 bp, Homo sapien
gccctattttacgggaagtcactgccaacatgc

SEQ ID NO: 348956 - DNA, 33 bp, Homo sapien
gccctattttacgggacgtcactgccaacatgc

SEQ ID NO: 348957 - DNA, 33 bp, Homo sapien
ttggcacattcctcatcactgcttggttccttg

SEQ ID NO: 348958 - DNA, 33 bp, Homo sapien
ttggcacattcctcatgactgcttggttccttg

SEQ ID NO: 348959 - DNA, 33 bp, Homo sapien
acaccaagcctgggaagtgggaattattgtctt

SEQ ID NO: 348960 - DNA, 33 bp, Homo sapien
acaccaagcctgggaattgggaattattgtctt

SEQ ID NO: 348961 - DNA, 33 bp, Homo sapien
agagagagctaatttaaagaggtctgaaaacag

SEQ ID NO: 348962 - DNA, 33 bp, Homo sapien
agagagagctaatttagagaggtctgaaaacag

SEQ ID NO: 348963 - DNA, 33 bp, Homo sapien
tcagctttggcacaacaaggctaaaaatgacta

SEQ ID NO: 348964 - DNA, 33 bp, Homo sapien
tcagctttggcacaacgaggctaaaaatgacta

SEQ ID NO: 348965 - DNA, 33 bp, Homo sapien
ctcagaggggtggaaaggaaagagagcggccag

SEQ ID NO: 348966 - DNA, 33 bp, Homo sapien
ctcagaggggtggaaatgaaagagagcggccag

SEQ ID NO: 348967 - DNA, 33 bp, Homo sapien
agacggagcatctaccagagaaggtagggaaca

SEQ ID NO: 348968 - DNA, 33 bp, Homo sapien
agacggagcatctaccggagaaggtagggaaca

SEQ ID NO: 348969 - DNA, 33 bp, Homo sapien
caatgctacacaggaaaacaaagtgggggggaa

SEQ ID NO: 348970 - DNA, 33 bp, Homo sapien
caatgctacacaggaagacaaagtgggggggaa

SEQ ID NO: 348971 - DNA, 33 bp, Homo sapien
ggtgagcccttttaaccgcagccagaaggactt

SEQ ID NO: 348972 - DNA, 33 bp, Homo sapien
ggtgagcccttttaactgcagccagaaggactt

SEQ ID NO: 348973 - DNA, 33 bp, Homo sapien
gctctggttcttctaccggtgtgctttcaggtg

SEQ ID NO: 348974 - DNA, 33 bp, Homo sapien
gctctggttcttctacgggtgtgctttcaggtg

SEQ ID NO: 348975 - DNA, 33 bp, Homo sapien
cccagggagcaccgggacccaacgtagagtcaa

SEQ ID NO: 348976 - DNA, 33 bp, Homo sapien
cccagggagcaccggggcccaacgtagagtcaa

SEQ ID NO: 348977 - DNA, 33 bp, Homo sapien
ggacagcaagaaggagacatagactacaagtct

SEQ ID NO: 348978 - DNA, 33 bp, Homo sapien
ggacagcaagaaggaggcatagactacaagtct

SEQ ID NO: 348979 - DNA, 33 bp, Homo sapien
ttaagtggttgaagaaaagaaatctatagaaga

SEQ ID NO: 348980 - DNA, 33 bp, Homo sapien
ttaagtggttgaagaagagaaatctatagaaga

SEQ ID NO: 348981 - DNA, 33 bp, Homo sapien
gcagtagattaatctgcaacagtggcattgcta

SEQ ID NO: 348982 - DNA, 33 bp, Homo sapien
gcagtagattaatctggaacagtggcattgcta

SEQ ID NO: 348983 - DNA, 33 bp, Homo sapien
ctgcaaagatgccgagaagtccaaagagatggc

SEQ ID NO: 348984 - DNA, 33 bp, Homo sapien
ctgcaaagatgccgaggagtccaaagagatggc

SEQ ID NO: 348985 - DNA, 33 bp, Homo sapien
aacagttggcctcttacgctggtgtcccattat

SEQ ID NO: 348986 - DNA, 33 bp, Homo sapien
aacagttggcctcttatgctggtgtcccattat

SEQ ID NO: 348987 - DNA, 33 bp, Homo sapien
gttttgaaaatgacctaacttggcaaaggaaac

SEQ ID NO: 348988 - DNA, 33 bp, Homo sapien
gttttgaaaatgaccttacttggcaaaggaaac

SEQ ID NO: 348989 - DNA, 33 bp, Homo sapien
cttgtttctcccctaccaggtttgaatgtaatg

SEQ ID NO: 348990 - DNA, 33 bp, Homo sapien
cttgtttctcccctacgaggtttgaatgtaatg

SEQ ID NO: 348991 - DNA, 33 bp, Homo sapien
ctctgaaggccatcacgcaggtgtcagggaatg

SEQ ID NO: 348992 - DNA, 33 bp, Homo sapien
ctctgaaggccatcactcaggtgtcagggaatg

SEQ ID NO: 348993 - DNA, 33 bp, Homo sapien
agctgttgatgctgagacgattatgaagtgagc

SEQ ID NO: 348994 - DNA, 33 bp, Homo sapien
agctgttgatgctgaggcgattatgaagtgagc

SEQ ID NO: 348995 - DNA, 33 bp, Homo sapien
tagagaattgggagaaagaactgtttgggagcc

SEQ ID NO: 348996 - DNA, 33 bp, Homo sapien
tagagaattgggagaatgaactgtttgggagcc

SEQ ID NO: 348997 - DNA, 33 bp, Homo sapien
cagtcagtgagttaacagagacctactcaagcc

SEQ ID NO: 348998 - DNA, 33 bp, Homo sapien
cagtcagtgagttaacggagacctactcaagcc

SEQ ID NO: 348999 - DNA, 33 bp, Homo sapien
tgtatagagcggagaacggtcaccttgctctgc

SEQ ID NO: 349000 - DNA, 33 bp, Homo sapien
tgtatagagcggagaatggtcaccttgctctgc

SEQ ID NO: 349001 - DNA, 33 bp, Homo sapien
ggggaagaaaggtcaacatcacaaacaagagtt

SEQ ID NO: 349002 - DNA, 33 bp, Homo sapien
ggggaagaaaggtcaatatcacaaacaagagtt

SEQ ID NO: 349003 - DNA, 33 bp, Homo sapien
aggtggattaaatgagaagtaacaaatgcatgt

SEQ ID NO: 349004 - DNA, 33 bp, Homo sapien
aggtggattaaatgagtagtaacaaatgcatgt

SEQ ID NO: 349005 - DNA, 33 bp, Homo sapien
agaatcccatcttaaaaaccccagggccaggtg

SEQ ID NO: 349006 - DNA, 33 bp, Homo sapien
agaatcccatcttaaagaccccagggccaggtg

SEQ ID NO: 349007 - DNA, 33 bp, Homo sapien
actgcttaagaaaccaatggtcttaggtccctg

SEQ ID NO: 349008 - DNA, 33 bp, Homo sapien
actgcttaagaaaccagtggtcttaggtccctg

SEQ ID NO: 349009 - DNA, 33 bp, Homo sapien
tgctccaggagtgaaaagcctagagtcagttgt

SEQ ID NO: 349010 - DNA, 33 bp, Homo sapien
tgctccaggagtgaaaggcctagagtcagttgt

SEQ ID NO: 349011 - DNA, 33 bp, Homo sapien
tagagtgggcctctcaggaaaggagggatgact

SEQ ID NO: 349012 - DNA, 33 bp, Homo sapien
tagagtgggcctctcatgaaaggagggatgact

SEQ ID NO: 349013 - DNA, 33 bp, Homo sapien
ctaatgcttatgattcaagtatatggattcaga

SEQ ID NO: 349014 - DNA, 33 bp, Homo sapien
ctaatgcttatgattcgagtatatggattcaga

SEQ ID NO: 349015 - DNA, 33 bp, Homo sapien
cacctcgggactctgacgttctggtgcagcacc

SEQ ID NO: 349016 - DNA, 33 bp, Homo sapien
cacctcgggactctgatgttctggtgcagcacc

SEQ ID NO: 349017 - DNA, 33 bp, Homo sapien
actcctctgcaaggtacaagccataaacctttg

SEQ ID NO: 349018 - DNA, 33 bp, Homo sapien
actcctctgcaaggtagaagccataaacctttg

SEQ ID NO: 349019 - DNA, 33 bp, Homo sapien
tccacaggagaatgcaccttacttttagactat

SEQ ID NO: 349020 - DNA, 33 bp, Homo sapien
tccacaggagaatgcatcttacttttagactat

SEQ ID NO: 349021 - DNA, 33 bp, Homo sapien
tctagagtaagacacgcagcaaattagggggtg

SEQ ID NO: 349022 - DNA, 33 bp, Homo sapien
tctagagtaagacacgtagcaaattagggggtg

SEQ ID NO: 349023 - DNA, 33 bp, Homo sapien
aagcttcctgatttcaagaacagatcagaacag

SEQ ID NO: 349024 - DNA, 33 bp, Homo sapien
aagcttcctgatttcaggaacagatcagaacag

SEQ ID NO: 349025 - DNA, 33 bp, Homo sapien
ttccagtcacacagcacagacctgacaccaaag

SEQ ID NO: 349026 - DNA, 33 bp, Homo sapien
ttccagtcacacagcatagacctgacaccaaag

SEQ ID NO: 349027 - DNA, 33 bp, Homo sapien
gtccattcctcacacactgaactgtcctgatca

SEQ ID NO: 349028 - DNA, 33 bp, Homo sapien
gtccattcctcacacattgaactgtcctgatca

SEQ ID NO: 349029 - DNA, 33 bp, Homo sapien
cagaagaataggattgaaggccaaagggttctg

SEQ ID NO: 349030 - DNA, 33 bp, Homo sapien
cagaagaataggattggaggccaaagggttctg

SEQ ID NO: 349031 - DNA, 33 bp, Homo sapien
cctcagttgggagtcaccgtgctgtgatggcaa

SEQ ID NO: 349032 - DNA, 33 bp, Homo sapien
cctcagttgggagtcatcgtgctgtgatggcaa

SEQ ID NO: 349033 - DNA, 33 bp, Homo sapien
tgtggctattgagcaccggaattgtagctgggg

SEQ ID NO: 349034 - DNA, 33 bp, Homo sapien
tgtggctattgagcactggaattgtagctgggg

SEQ ID NO: 349035 - DNA, 33 bp, Homo sapien
tgatgctgttggaagaacagaagagcatcccca

SEQ ID NO: 349036 - DNA, 33 bp, Homo sapien
tgatgctgttggaagaccagaagagcatcccca

SEQ ID NO: 349037 - DNA, 33 bp, Homo sapien
atgcagtggtttgcctaaagttccacagagtta

SEQ ID NO: 349038 - DNA, 33 bp, Homo sapien
atgcagtggtttgcctgaagttccacagagtta

SEQ ID NO: 349039 - DNA, 33 bp, Homo sapien
tctgtcggaaaccaaaaagaagtgtcggtggtt

SEQ ID NO: 349040 - DNA, 33 bp, Homo sapien
tctgtcggaaaccaaagagaagtgtcggtggtt

SEQ ID NO: 349041 - DNA, 33 bp, Homo sapien
aagatccaataaggacaagtttcatacaccctg

SEQ ID NO: 349042 - DNA, 33 bp, Homo sapien
aagatccaataaggactagtttcatacaccctg

SEQ ID NO: 349043 - DNA, 33 bp, Homo sapien
atttttccactgacacaaaacataatagcatct

SEQ ID NO: 349044 - DNA, 33 bp, Homo sapien
atttttccactgacacgaaacataatagcatct

SEQ ID NO: 349045 - DNA, 33 bp, Homo sapien
cactgtgttctccagccatcaagagtcttctcc

SEQ ID NO: 349046 - DNA, 33 bp, Homo sapien
cactgtgttctccagctatcaagagtcttctcc

SEQ ID NO: 349047 - DNA, 33 bp, Homo sapien
aggataatggtacaggaaagagtgtgtaatcta

SEQ ID NO: 349048 - DNA, 33 bp, Homo sapien
aggataatggtacagggaagagtgtgtaatcta

SEQ ID NO: 349049 - DNA, 33 bp, Homo sapien
caggctttgcagaaaacgaaaaaccagctaata

SEQ ID NO: 349050 - DNA, 33 bp, Homo sapien
caggctttgcagaaaatgaaaaaccagctaata

SEQ ID NO: 349051 - DNA, 33 bp, Homo sapien
ggggatgctggttggggagagaagccccggttc

SEQ ID NO: 349052 - DNA, 33 bp, Homo sapien
ggggatgctggttgggtagagaagccccggttc

SEQ ID NO: 349053 - DNA, 33 bp, Homo sapien
ggttagacaaatcaaacgttcaaagcaggcttc

SEQ ID NO: 349054 - DNA, 33 bp, Homo sapien
ggttagacaaatcaaatgttcaaagcaggcttc

SEQ ID NO: 349055 - DNA, 33 bp, Homo sapien
ctggagagagacttgaactgagagccaccaaca

SEQ ID NO: 349056 - DNA, 33 bp, Homo sapien
ctggagagagacttgagctgagagccaccaaca

SEQ ID NO: 349057 - DNA, 33 bp, Homo sapien
cctaaaatctgctgtgacaatactctgaatctt

SEQ ID NO: 349058 - DNA, 33 bp, Homo sapien
cctaaaatctgctgtggcaatactctgaatctt

SEQ ID NO: 349059 - DNA, 33 bp, Homo sapien
taattcaatgacttaaccccctacataaaccag

SEQ ID NO: 349060 - DNA, 33 bp, Homo sapien
taattcaatgacttaatcccctacataaaccag

SEQ ID NO: 349061 - DNA, 33 bp, Homo sapien
atggcacgtaaaggggcagcatgtgcaaagtca

SEQ ID NO: 349062 - DNA, 33 bp, Homo sapien
atggcacgtaaaggggtagcatgtgcaaagtca

SEQ ID NO: 349063 - DNA, 33 bp, Homo sapien
ctgggccttacagaaccggcaaaggctaacgtg

SEQ ID NO: 349064 - DNA, 33 bp, Homo sapien
ctgggccttacagaactggcaaaggctaacgtg

SEQ ID NO: 349065 - DNA, 33 bp, Homo sapien
ctgtctccagggactaactaattttgtctctgt

SEQ ID NO: 349066 - DNA, 33 bp, Homo sapien
ctgtctccagggactagctaattttgtctctgt

SEQ ID NO: 349067 - DNA, 33 bp, Homo sapien
aggatgcccgtgtgtaacacagtggtgagagaa

SEQ ID NO: 349068 - DNA, 33 bp, Homo sapien
aggatgcccgtgtgtaccacagtggtgagagaa

SEQ ID NO: 349069 - DNA, 33 bp, Homo sapien
gtctttaggagaattaaatgagtaatgctcaat

SEQ ID NO: 349070 - DNA, 33 bp, Homo sapien
gtctttaggagaattagatgagtaatgctcaat

SEQ ID NO: 349071 - DNA, 33 bp, Homo sapien
ttactataaagatacaaaggagagaagaacaat

SEQ ID NO: 349072 - DNA, 33 bp, Homo sapien
ttactataaagatacacaggagagaagaacaat

SEQ ID NO: 349073 - DNA, 33 bp, Homo sapien
ggagaaagtggtccgaagtgtggatcagagaga

SEQ ID NO: 349074 - DNA, 33 bp, Homo sapien
ggagaaagtggtccgaggtgtggatcagagaga

SEQ ID NO: 349075 - DNA, 33 bp, Homo sapien
ctttatgttgacctatcaggggaaaaacaaatt

SEQ ID NO: 349076 - DNA, 33 bp, Homo sapien
ctttatgttgacctattaggggaaaaacaaatt

SEQ ID NO: 349077 - DNA, 33 bp, Homo sapien
ttcattggtggtaacaagatctgggcttgaaat

SEQ ID NO: 349078 - DNA, 33 bp, Homo sapien
ttcattggtggtaacatgatctgggcttgaaat

SEQ ID NO: 349079 - DNA, 33 bp, Homo sapien
agctgtcagtttacacagtccccacaggctttt

SEQ ID NO: 349080 - DNA, 33 bp, Homo sapien
agctgtcagtttacacggtccccacaggctttt

SEQ ID NO: 349081 - DNA, 33 bp, Homo sapien
caaacacagtccgtgacgataaaaagaagggaa

SEQ ID NO: 349082 - DNA, 33 bp, Homo sapien
caaacacagtccgtgatgataaaaagaagggaa

SEQ ID NO: 349083 - DNA, 33 bp, Homo sapien
gctccctagaggagaaagtacattccaggaggg

SEQ ID NO: 349084 - DNA, 33 bp, Homo sapien
gctccctagaggagaacgtacattccaggaggg

SEQ ID NO: 349085 - DNA, 33 bp, Homo sapien
gttgaaaatctctaaagttggagttgagattcc

SEQ ID NO: 349086 - DNA, 33 bp, Homo sapien
gttgaaaatctctaaatttggagttgagattcc

SEQ ID NO: 349087 - DNA, 33 bp, Homo sapien
agaggctggcctcttacgtgcccattctgtgtc

SEQ ID NO: 349088 - DNA, 33 bp, Homo sapien
agaggctggcctcttatgtgcccattctgtgtc

SEQ ID NO: 349089 - DNA, 33 bp, Homo sapien
gcccatttttttgcaacctgccacacttgggaa

SEQ ID NO: 349090 - DNA, 33 bp, Homo sapien
gcccatttttttgcaagctgccacacttgggaa

SEQ ID NO: 349091 - DNA, 33 bp, Homo sapien
gccgacatgttgggacagatgattcaggggatt

SEQ ID NO: 349092 - DNA, 33 bp, Homo sapien
gccgacatgttgggacggatgattcaggggatt

SEQ ID NO: 349093 - DNA, 33 bp, Homo sapien
ccagacttccctgtaactctgaaagccattgaa

SEQ ID NO: 349094 - DNA, 33 bp, Homo sapien
ccagacttccctgtaattctgaaagccattgaa

SEQ ID NO: 349095 - DNA, 33 bp, Homo sapien
tacatgcatttactcactgaatcctcacagcaa

SEQ ID NO: 349096 - DNA, 33 bp, Homo sapien
tacatgcatttactcattgaatcctcacagcaa

SEQ ID NO: 349097 - DNA, 33 bp, Homo sapien
tttggaataaaggcaacgggaggttcacaaaga

SEQ ID NO: 349098 - DNA, 33 bp, Homo sapien
tttggaataaaggcaatgggaggttcacaaaga

SEQ ID NO: 349099 - DNA, 33 bp, Homo sapien
agcatctaggtatgacccttgatggcttgtgat

SEQ ID NO: 349100 - DNA, 33 bp, Homo sapien
agcatctaggtatgactcttgatggcttgtgat

SEQ ID NO: 349101 - DNA, 33 bp, Homo sapien
caaagactccacttaacgttggtctgttgactg

SEQ ID NO: 349102 - DNA, 33 bp, Homo sapien
caaagactccacttaatgttggtctgttgactg

SEQ ID NO: 349103 - DNA, 33 bp, Homo sapien
ttgaggagagactgaaactctgcaagtctgttc

SEQ ID NO: 349104 - DNA, 33 bp, Homo sapien
ttgaggagagactgaacctctgcaagtctgttc

SEQ ID NO: 349105 - DNA, 33 bp, Homo sapien
ttggccttgctttccaataggacaagcctgggg

SEQ ID NO: 349106 - DNA, 33 bp, Homo sapien
ttggccttgctttccagtaggacaagcctgggg

SEQ ID NO: 349107 - DNA, 33 bp, Homo sapien
cagtcctctaattgtcaacgagaatctagatgc

SEQ ID NO: 349108 - DNA, 33 bp, Homo sapien
cagtcctctaattgtccacgagaatctagatgc

SEQ ID NO: 349109 - DNA, 33 bp, Homo sapien
ccccacttacaggcagccagctaacaaaccttt

SEQ ID NO: 349110 - DNA, 33 bp, Homo sapien
ccccacttacaggcagtcagctaacaaaccttt

SEQ ID NO: 349111 - DNA, 33 bp, Homo sapien
cagtaacaaggactcaactttggcatcccaact

SEQ ID NO: 349112 - DNA, 33 bp, Homo sapien
cagtaacaaggactcagctttggcatcccaact

SEQ ID NO: 349113 - DNA, 33 bp, Homo sapien
caaataggacaacgaacatgtactccacacaag

SEQ ID NO: 349114 - DNA, 33 bp, Homo sapien
caaataggacaacgaatatgtactccacacaag

SEQ ID NO: 349115 - DNA, 33 bp, Homo sapien
tgatatagcaatgtaaaaagagggttccagaaa

SEQ ID NO: 349116 - DNA, 33 bp, Homo sapien
tgatatagcaatgtaacaagagggttccagaaa

SEQ ID NO: 349117 - DNA, 33 bp, Homo sapien
tgttttactgaattctgaaaggtttcatctggt

SEQ ID NO: 349118 - DNA, 33 bp, Homo sapien
tgttttactgaattcttaaaggtttcatctggt

SEQ ID NO: 349119 - DNA, 33 bp, Homo sapien
aaaacaccagtcaaccactaaacaggtcagctg

SEQ ID NO: 349120 - DNA, 33 bp, Homo sapien
aaaacaccagtcaaccgctaaacaggtcagctg

SEQ ID NO: 349121 - DNA, 33 bp, Homo sapien
acttcatttcacaaggcattggccagaactatt

SEQ ID NO: 349122 - DNA, 33 bp, Homo sapien
acttcatttcacaaggtattggccagaactatt

SEQ ID NO: 349123 - DNA, 33 bp, Homo sapien
tcaagctataccccaaaagccaagtcacagggg

SEQ ID NO: 349124 - DNA, 33 bp, Homo sapien
tcaagctataccccaagagccaagtcacagggg

SEQ ID NO: 349125 - DNA, 33 bp, Homo sapien
agggactgaagttcaaatatctggaaaactcac

SEQ ID NO: 349126 - DNA, 33 bp, Homo sapien
agggactgaagttcaattatctggaaaactcac

SEQ ID NO: 349127 - DNA, 33 bp, Homo sapien
aaaagcagggttaaaaacaccagatagtggcag

SEQ ID NO: 349128 - DNA, 33 bp, Homo sapien
aaaagcagggttaaaaccaccagatagtggcag

SEQ ID NO: 349129 - DNA, 33 bp, Homo sapien
gatttatttacacagcaatctcgtgggtcctat

SEQ ID NO: 349130 - DNA, 33 bp, Homo sapien
gatttatttacacagccatctcgtgggtcctat

SEQ ID NO: 349131 - DNA, 33 bp, Homo sapien
caggtaagcacccctaataaggctaaatgagga

SEQ ID NO: 349132 - DNA, 33 bp, Homo sapien
caggtaagcacccctagtaaggctaaatgagga

SEQ ID NO: 349133 - DNA, 33 bp, Homo sapien
gtagtatcgccatcgactcaagtgcttgttggg

SEQ ID NO: 349134 - DNA, 33 bp, Homo sapien
gtagtatcgccatcgagtcaagtgcttgttggg

SEQ ID NO: 349135 - DNA, 33 bp, Homo sapien
aaggaccttcacacaaagaagcttatactaatg

SEQ ID NO: 349136 - DNA, 33 bp, Homo sapien
aaggaccttcacacaaggaagcttatactaatg

SEQ ID NO: 349137 - DNA, 33 bp, Homo sapien
catcactgaacatagaagcctaccacagcagca

SEQ ID NO: 349138 - DNA, 33 bp, Homo sapien
catcactgaacatagacgcctaccacagcagca

SEQ ID NO: 349139 - DNA, 33 bp, Homo sapien
ttcgagctgcgctctaccactcagtagtgacag

SEQ ID NO: 349140 - DNA, 33 bp, Homo sapien
ttcgagctgcgctctatcactcagtagtgacag

SEQ ID NO: 349141 - DNA, 33 bp, Homo sapien
ctttgggttagtcatccaaatacctctgggtcc

SEQ ID NO: 349142 - DNA, 33 bp, Homo sapien
ctttgggttagtcatctaaatacctctgggtcc

SEQ ID NO: 349143 - DNA, 33 bp, Homo sapien
ctccagcagactctaaatgccttgaaggaaaag

SEQ ID NO: 349144 - DNA, 33 bp, Homo sapien
ctccagcagactctaagtgccttgaaggaaaag

SEQ ID NO: 349145 - DNA, 33 bp, Homo sapien
cacattgcagacataacacaggaagggctgttc

SEQ ID NO: 349146 - DNA, 33 bp, Homo sapien
cacattgcagacataagacaggaagggctgttc

SEQ ID NO: 349147 - DNA, 33 bp, Homo sapien
gctgttctagaaagctaaagatccaattctaag

SEQ ID NO: 349148 - DNA, 33 bp, Homo sapien
gctgttctagaaagctgaagatccaattctaag

SEQ ID NO: 349149 - DNA, 33 bp, Homo sapien
ttccctaagcatttcaaacacagtactgggaac

SEQ ID NO: 349150 - DNA, 33 bp, Homo sapien
ttccctaagcatttcacacacagtactgggaac

SEQ ID NO: 349151 - DNA, 33 bp, Homo sapien
gtatgtgtgaaaataactagcaggcttggggga

SEQ ID NO: 349152 - DNA, 33 bp, Homo sapien
gtatgtgtgaaaataagtagcaggcttggggga

SEQ ID NO: 349153 - DNA, 33 bp, Homo sapien
gaaggtgaaagagagccgctaggaaggcctggt

SEQ ID NO: 349154 - DNA, 33 bp, Homo sapien
gaaggtgaaagagagctgctaggaaggcctggt

SEQ ID NO: 349155 - DNA, 33 bp, Homo sapien
caaaattccttcaagcacttttgtcatcctaaa

SEQ ID NO: 349156 - DNA, 33 bp, Homo sapien
caaaattccttcaagcgcttttgtcatcctaaa

SEQ ID NO: 349157 - DNA, 33 bp, Homo sapien
gagtgatatctcaggaaagatgcctgtcaagtg

SEQ ID NO: 349158 - DNA, 33 bp, Homo sapien
gagtgatatctcaggatagatgcctgtcaagtg

SEQ ID NO: 349159 - DNA, 33 bp, Homo sapien
tcctttcctgtagctacattgtaatgcaagccc

SEQ ID NO: 349160 - DNA, 33 bp, Homo sapien
tcctttcctgtagctatattgtaatgcaagccc

SEQ ID NO: 349161 - DNA, 33 bp, Homo sapien
agacacaaaagagatcacttgggaatgccagtt

SEQ ID NO: 349162 - DNA, 33 bp, Homo sapien
agacacaaaagagatcgcttgggaatgccagtt

SEQ ID NO: 349163 - DNA, 33 bp, Homo sapien
tatgaaaaggcagccccccttacgctagggttt

SEQ ID NO: 349164 - DNA, 33 bp, Homo sapien
tatgaaaaggcagccctccttacgctagggttt

SEQ ID NO: 349165 - DNA, 33 bp, Homo sapien
ggaagccaccaaataacacagattcagcactct

SEQ ID NO: 349166 - DNA, 33 bp, Homo sapien
ggaagccaccaaataatacagattcagcactct

SEQ ID NO: 349167 - DNA, 33 bp, Homo sapien
gactctgtgatgtctaaaaatgtgagtgttcct

SEQ ID NO: 349168 - DNA, 33 bp, Homo sapien
gactctgtgatgtctagaaatgtgagtgttcct

SEQ ID NO: 349169 - DNA, 33 bp, Homo sapien
ttcaaagagctgaaagaaaaaaagtgaatacat

SEQ ID NO: 349170 - DNA, 33 bp, Homo sapien
ttcaaagagctgaaagtaaaaaagtgaatacat

SEQ ID NO: 349171 - DNA, 33 bp, Homo sapien
gtgtaatctttataacaacccttcaggatgagt

SEQ ID NO: 349172 - DNA, 33 bp, Homo sapien
gtgtaatctttataaccacccttcaggatgagt

SEQ ID NO: 349173 - DNA, 33 bp, Homo sapien
ggactgggtagtgacacaggacacatgggggca

SEQ ID NO: 349174 - DNA, 33 bp, Homo sapien
ggactgggtagtgacagaggacacatgggggca

SEQ ID NO: 349175 - DNA, 33 bp, Homo sapien
caggaaatgcaggaccaaaagcactcaagcctg

SEQ ID NO: 349176 - DNA, 33 bp, Homo sapien
caggaaatgcaggaccgaaagcactcaagcctg

SEQ ID NO: 349177 - DNA, 33 bp, Homo sapien
gagacttagtttttctcacctgaaatgtagagc

SEQ ID NO: 349178 - DNA, 33 bp, Homo sapien
gagacttagtttttcttacctgaaatgtagagc

SEQ ID NO: 349179 - DNA, 33 bp, Homo sapien
agagaggtgggtgcaaactcaatgcctggccgt

SEQ ID NO: 349180 - DNA, 33 bp, Homo sapien
agagaggtgggtgcaatctcaatgcctggccgt

SEQ ID NO: 349181 - DNA, 33 bp, Homo sapien
cccaggcacacgctccaacctttggaggagtca

SEQ ID NO: 349182 - DNA, 33 bp, Homo sapien
cccaggcacacgctcctacctttggaggagtca

SEQ ID NO: 349183 - DNA, 33 bp, Homo sapien
tgagcagacagtgcacaccctggagatgggggc

SEQ ID NO: 349184 - DNA, 33 bp, Homo sapien
tgagcagacagtgcacgccctggagatgggggc

SEQ ID NO: 349185 - DNA, 33 bp, Homo sapien
taatccacaaactgaacgtgcttctccagcaga

SEQ ID NO: 349186 - DNA, 33 bp, Homo sapien
taatccacaaactgaatgtgcttctccagcaga

SEQ ID NO: 349187 - DNA, 33 bp, Homo sapien
atcactgctagtccacgagaaaactaaagtgac

SEQ ID NO: 349188 - DNA, 33 bp, Homo sapien
atcactgctagtccactagaaaactaaagtgac

SEQ ID NO: 349189 - DNA, 33 bp, Homo sapien
gttttggcgattcttaccctgaatagattttac

SEQ ID NO: 349190 - DNA, 33 bp, Homo sapien
gttttggcgattcttatcctgaatagattttac

SEQ ID NO: 349191 - DNA, 33 bp, Homo sapien
caagagcaattctgtaccaggaaggtgcagagg

SEQ ID NO: 349192 - DNA, 33 bp, Homo sapien
caagagcaattctgtagcaggaaggtgcagagg

SEQ ID NO: 349193 - DNA, 33 bp, Homo sapien
cagctgtgccaggagaaaggctgaagttgggtc

SEQ ID NO: 349194 - DNA, 33 bp, Homo sapien
cagctgtgccaggagagaggctgaagttgggtc

SEQ ID NO: 349195 - DNA, 33 bp, Homo sapien
cctgggtatctgacaacggaggtgactgtgctg

SEQ ID NO: 349196 - DNA, 33 bp, Homo sapien
cctgggtatctgacaatggaggtgactgtgctg

SEQ ID NO: 349197 - DNA, 33 bp, Homo sapien
agagagctacataaacaaaggagttattattat

SEQ ID NO: 349198 - DNA, 33 bp, Homo sapien
agagagctacataaacgaaggagttattattat

SEQ ID NO: 349199 - DNA, 33 bp, Homo sapien
tggtaagaatgccttaggagccctaaagcccca

SEQ ID NO: 349200 - DNA, 33 bp, Homo sapien
tggtaagaatgccttatgagccctaaagcccca

SEQ ID NO: 349201 - DNA, 33 bp, Homo sapien
ggatgtgtaaaagacaaaagctgttcctcagct

SEQ ID NO: 349202 - DNA, 33 bp, Homo sapien
ggatgtgtaaaagacagaagctgttcctcagct

SEQ ID NO: 349203 - DNA, 33 bp, Homo sapien
tttccaaattctgtataagcatgagctgtgcct

SEQ ID NO: 349204 - DNA, 33 bp, Homo sapien
tttccaaattctgtatcagcatgagctgtgcct

SEQ ID NO: 349205 - DNA, 33 bp, Homo sapien
gcatttgaattacatcagacacatcaggactct

SEQ ID NO: 349206 - DNA, 33 bp, Homo sapien
gcatttgaattacatcggacacatcaggactct

SEQ ID NO: 349207 - DNA, 33 bp, Homo sapien
agaatctgcctccccccattccgaagcttatcc

SEQ ID NO: 349208 - DNA, 33 bp, Homo sapien
agaatctgcctcccccgattccgaagcttatcc

SEQ ID NO: 349209 - DNA, 33 bp, Homo sapien
tgggaacttcctcttcaaacacctcaccgtctc

SEQ ID NO: 349210 - DNA, 33 bp, Homo sapien
tgggaacttcctcttctaacacctcaccgtctc

SEQ ID NO: 349211 - DNA, 33 bp, Homo sapien
agagaagcctgccagaagaagggagtcatatcg

SEQ ID NO: 349212 - DNA, 33 bp, Homo sapien
agagaagcctgccagaggaagggagtcatatcg

SEQ ID NO: 349213 - DNA, 33 bp, Homo sapien
ggcaaaccagagtaaaactgctcagtcctcatg

SEQ ID NO: 349214 - DNA, 33 bp, Homo sapien
ggcaaaccagagtaaacctgctcagtcctcatg

SEQ ID NO: 349215 - DNA, 33 bp, Homo sapien
ctgccctcatgcaggaccacagtgaggcctgga

SEQ ID NO: 349216 - DNA, 33 bp, Homo sapien
ctgccctcatgcaggatcacagtgaggcctgga

SEQ ID NO: 349217 - DNA, 33 bp, Homo sapien
agatctacatctcaaaatcaacatgaataaaat

SEQ ID NO: 349218 - DNA, 33 bp, Homo sapien
agatctacatctcaaactcaacatgaataaaat

SEQ ID NO: 349219 - DNA, 33 bp, Homo sapien
aggaaggcatggaccacgatgactttatgtgct

SEQ ID NO: 349220 - DNA, 33 bp, Homo sapien
aggaaggcatggaccatgatgactttatgtgct

SEQ ID NO: 349221 - DNA, 33 bp, Homo sapien
atccagggacaacatacgagcgtctgtagtggg

SEQ ID NO: 349222 - DNA, 33 bp, Homo sapien
atccagggacaacatatgagcgtctgtagtggg

SEQ ID NO: 349223 - DNA, 33 bp, Homo sapien
aggaactgaggaagaacagacaacggaaggcag

SEQ ID NO: 349224 - DNA, 33 bp, Homo sapien
aggaactgaggaagaagagacaacggaaggcag

SEQ ID NO: 349225 - DNA, 33 bp, Homo sapien
tataaacaagtgaaaaattaagcctccatgagt

SEQ ID NO: 349226 - DNA, 33 bp, Homo sapien
tataaacaagtgaaaagttaagcctccatgagt

SEQ ID NO: 349227 - DNA, 33 bp, Homo sapien
tagtcatatgctgtccaccaattagagtcagtc

SEQ ID NO: 349228 - DNA, 33 bp, Homo sapien
tagtcatatgctgtccgccaattagagtcagtc

SEQ ID NO: 349229 - DNA, 33 bp, Homo sapien
gaccactgatttcttacgtgctcttctttctgt

SEQ ID NO: 349230 - DNA, 33 bp, Homo sapien
gaccactgatttcttatgtgctcttctttctgt

SEQ ID NO: 349231 - DNA, 33 bp, Homo sapien
tggcatcatggaaaagcaccagcttggttttgg

SEQ ID NO: 349232 - DNA, 33 bp, Homo sapien
tggcatcatggaaaagtaccagcttggttttgg

SEQ ID NO: 349233 - DNA, 33 bp, Homo sapien
cactcctgtttttcagcctaaagctccgctcac

SEQ ID NO: 349234 - DNA, 33 bp, Homo sapien
cactcctgtttttcagtctaaagctccgctcac

SEQ ID NO: 349235 - DNA, 33 bp, Homo sapien
tttaagttggcaccgaaaccattctttaagaaa

SEQ ID NO: 349236 - DNA, 33 bp, Homo sapien
tttaagttggcaccgagaccattctttaagaaa

SEQ ID NO: 349237 - DNA, 33 bp, Homo sapien
ttagtagttcttcaccactgaacatgatgtatt

SEQ ID NO: 349238 - DNA, 33 bp, Homo sapien
ttagtagttcttcaccgctgaacatgatgtatt

SEQ ID NO: 349239 - DNA, 33 bp, Homo sapien
taaatataagcaagccaaaagaagacggtgata

SEQ ID NO: 349240 - DNA, 33 bp, Homo sapien
taaatataagcaagccgaaagaagacggtgata

SEQ ID NO: 349241 - DNA, 33 bp, Homo sapien
ccacgcctggagtagcaagggtttagacttcct

SEQ ID NO: 349242 - DNA, 33 bp, Homo sapien
ccacgcctggagtagcgagggtttagacttcct

SEQ ID NO: 349243 - DNA, 33 bp, Homo sapien
aaccccaaacacttccaatgtgttctcacctgt

SEQ ID NO: 349244 - DNA, 33 bp, Homo sapien
aaccccaaacacttcctatgtgttctcacctgt

SEQ ID NO: 349245 - DNA, 33 bp, Homo sapien
aaaggacacactgacccgctgatactttagtat

SEQ ID NO: 349246 - DNA, 33 bp, Homo sapien
aaaggacacactgacctgctgatactttagtat

SEQ ID NO: 349247 - DNA, 33 bp, Homo sapien
tactgtatcttatcaactgtaagacacgtttca

SEQ ID NO: 349248 - DNA, 33 bp, Homo sapien
tactgtatcttatcaagtgtaagacacgtttca

SEQ ID NO: 349249 - DNA, 33 bp, Homo sapien
ctctagataggggagcaatatctcctgactgag

SEQ ID NO: 349250 - DNA, 33 bp, Homo sapien
ctctagataggggagcgatatctcctgactgag

SEQ ID NO: 349251 - DNA, 33 bp, Homo sapien
tgaacctgaaaaaataccaaactgcataaataa

SEQ ID NO: 349252 - DNA, 33 bp, Homo sapien
tgaacctgaaaaaatatcaaactgcataaataa

SEQ ID NO: 349253 - DNA, 33 bp, Homo sapien
cttcctctgtaaagtacgttaataacgcctgtc

SEQ ID NO: 349254 - DNA, 33 bp, Homo sapien
cttcctctgtaaagtatgttaataacgcctgtc

SEQ ID NO: 349255 - DNA, 33 bp, Homo sapien
ctactgtgcagtgcaccctttaagctcaggatt

SEQ ID NO: 349256 - DNA, 33 bp, Homo sapien
ctactgtgcagtgcacgctttaagctcaggatt

SEQ ID NO: 349257 - DNA, 33 bp, Homo sapien
gaaccatttgaagacaagttacagaccaaaaaa

SEQ ID NO: 349258 - DNA, 33 bp, Homo sapien
gaaccatttgaagacaggttacagaccaaaaaa

SEQ ID NO: 349259 - DNA, 33 bp, Homo sapien
attatatgaggtacagaaagaaacaaatgtaat

SEQ ID NO: 349260 - DNA, 33 bp, Homo sapien
attatatgaggtacaggaagaaacaaatgtaat

SEQ ID NO: 349261 - DNA, 33 bp, Homo sapien
ctatatacaccaatataaaaggacctataagtg

SEQ ID NO: 349262 - DNA, 33 bp, Homo sapien
ctatatacaccaatatgaaaggacctataagtg

SEQ ID NO: 349263 - DNA, 33 bp, Homo sapien
tggcacctactaacatcatatttctgattttca

SEQ ID NO: 349264 - DNA, 33 bp, Homo sapien
tggcacctactaacattatatttctgattttca

SEQ ID NO: 349265 - DNA, 33 bp, Homo sapien
gtggatgaacccaagtcaagggagcagagcggt

SEQ ID NO: 349266 - DNA, 33 bp, Homo sapien
gtggatgaacccaagttaagggagcagagcggt

SEQ ID NO: 349267 - DNA, 33 bp, Homo sapien
aatttgtgcctcagtcccaatgaggaaccctgg

SEQ ID NO: 349268 - DNA, 33 bp, Homo sapien
aatttgtgcctcagtctcaatgaggaaccctgg

SEQ ID NO: 349269 - DNA, 33 bp, Homo sapien
ggtatcagatggacccagatatgaataccagtg

SEQ ID NO: 349270 - DNA, 33 bp, Homo sapien
ggtatcagatggacccggatatgaataccagtg

SEQ ID NO: 349271 - DNA, 33 bp, Homo sapien
aattaatatcagctcaatgaacatcatctccct

SEQ ID NO: 349272 - DNA, 33 bp, Homo sapien
aattaatatcagctcagtgaacatcatctccct

SEQ ID NO: 349273 - DNA, 33 bp, Homo sapien
atgaatattggtaggaggagtactggaatcaga

SEQ ID NO: 349274 - DNA, 33 bp, Homo sapien
atgaatattggtaggatgagtactggaatcaga

SEQ ID NO: 349275 - DNA, 33 bp, Homo sapien
tatgttggtcaaggaacgaatgatctctctaat

SEQ ID NO: 349276 - DNA, 33 bp, Homo sapien
tatgttggtcaaggaatgaatgatctctctaat

SEQ ID NO: 349277 - DNA, 33 bp, Homo sapien
gccttgggactcctgaaccctgggtccgtatcc

SEQ ID NO: 349278 - DNA, 33 bp, Homo sapien
gccttgggactcctgagccctgggtccgtatcc

SEQ ID NO: 349279 - DNA, 33 bp, Homo sapien
agagttccttttttccaatacaatcaggagaag

SEQ ID NO: 349280 - DNA, 33 bp, Homo sapien
agagttccttttttccgatacaatcaggagaag

SEQ ID NO: 349281 - DNA, 33 bp, Homo sapien
actttcactacccagaatagacaggtggggctg

SEQ ID NO: 349282 - DNA, 33 bp, Homo sapien
actttcactacccagattagacaggtggggctg

SEQ ID NO: 349283 - DNA, 33 bp, Homo sapien
gacatgtttcagcctcagaagaagtgatgcatt

SEQ ID NO: 349284 - DNA, 33 bp, Homo sapien
gacatgtttcagcctcggaagaagtgatgcatt

SEQ ID NO: 349285 - DNA, 33 bp, Homo sapien
tggctgaccctcacgccgatccttacagggagg

SEQ ID NO: 349286 - DNA, 33 bp, Homo sapien
tggctgaccctcacgctgatccttacagggagg

SEQ ID NO: 349287 - DNA, 33 bp, Homo sapien
agagccatgtgcatgacacagggaaagagaaac

SEQ ID NO: 349288 - DNA, 33 bp, Homo sapien
agagccatgtgcatgatacagggaaagagaaac

SEQ ID NO: 349289 - DNA, 33 bp, Homo sapien
acagactacagaatgcagaagacccctgtaaat

SEQ ID NO: 349290 - DNA, 33 bp, Homo sapien
acagactacagaatgcggaagacccctgtaaat

SEQ ID NO: 349291 - DNA, 33 bp, Homo sapien
ggagagggtaggagacacattgcagctttctat

SEQ ID NO: 349292 - DNA, 33 bp, Homo sapien
ggagagggtaggagacgcattgcagctttctat

SEQ ID NO: 349293 - DNA, 33 bp, Homo sapien
tcaagtgcaggaataactgataaagagggaatt

SEQ ID NO: 349294 - DNA, 33 bp, Homo sapien
tcaagtgcaggaataattgataaagagggaatt

SEQ ID NO: 349295 - DNA, 33 bp, Homo sapien
tgtaagtttccagccaactaacatcccttgatg

SEQ ID NO: 349296 - DNA, 33 bp, Homo sapien
tgtaagtttccagccacctaacatcccttgatg

SEQ ID NO: 349297 - DNA, 33 bp, Homo sapien
agcttgtcaagagaatgacacgtatggttttaa

SEQ ID NO: 349298 - DNA, 33 bp, Homo sapien
agcttgtcaagagaattacacgtatggttttaa

SEQ ID NO: 349299 - DNA, 33 bp, Homo sapien
gaatgagcacagtgaagatccaattagtgagtt

SEQ ID NO: 349300 - DNA, 33 bp, Homo sapien
gaatgagcacagtgaatatccaattagtgagtt

SEQ ID NO: 349301 - DNA, 33 bp, Homo sapien
gggggacaaaataatcaagtgtagatcaggaga

SEQ ID NO: 349302 - DNA, 33 bp, Homo sapien
gggggacaaaataatcgagtgtagatcaggaga

SEQ ID NO: 349303 - DNA, 33 bp, Homo sapien
atatataaaacactcacatcagtgcccagcaca

SEQ ID NO: 349304 - DNA, 33 bp, Homo sapien
atatataaaacactcagatcagtgcccagcaca

SEQ ID NO: 349305 - DNA, 33 bp, Homo sapien
gcatggatcaataatacagctctgcttcccctc

SEQ ID NO: 349306 - DNA, 33 bp, Homo sapien
gcatggatcaataatatagctctgcttcccctc

SEQ ID NO: 349307 - DNA, 33 bp, Homo sapien
ggtgagctcttttttaccttaccatgtgccagg

SEQ ID NO: 349308 - DNA, 33 bp, Homo sapien
ggtgagctcttttttatcttaccatgtgccagg

SEQ ID NO: 349309 - DNA, 33 bp, Homo sapien
gaaccagagctcttaaacactggctaaactgta

SEQ ID NO: 349310 - DNA, 33 bp, Homo sapien
gaaccagagctcttaaccactggctaaactgta

SEQ ID NO: 349311 - DNA, 33 bp, Homo sapien
ttttctcacttagtaacatgcactaggctgggg

SEQ ID NO: 349312 - DNA, 33 bp, Homo sapien
ttttctcacttagtaatatgcactaggctgggg

SEQ ID NO: 349313 - DNA, 33 bp, Homo sapien
ggcgaatctgtgcctcactcctttccattccca

SEQ ID NO: 349314 - DNA, 33 bp, Homo sapien
ggcgaatctgtgcctcgctcctttccattccca

SEQ ID NO: 349315 - DNA, 33 bp, Homo sapien
attgttatcacactgaactgctgcaggcaaaca

SEQ ID NO: 349316 - DNA, 33 bp, Homo sapien
attgttatcacactgagctgctgcaggcaaaca

SEQ ID NO: 349317 - DNA, 33 bp, Homo sapien
gatacgaagaagaagacgtcactattgtgatga

SEQ ID NO: 349318 - DNA, 33 bp, Homo sapien
gatacgaagaagaagatgtcactattgtgatga

SEQ ID NO: 349319 - DNA, 33 bp, Homo sapien
tcattagacagtgcagcaaatgttatcagaatt

SEQ ID NO: 349320 - DNA, 33 bp, Homo sapien
tcattagacagtgcagtaaatgttatcagaatt

SEQ ID NO: 349321 - DNA, 33 bp, Homo sapien
acctaatgatccattcacaatgtttttgcttcc

SEQ ID NO: 349322 - DNA, 33 bp, Homo sapien
acctaatgatccattcgcaatgtttttgcttcc

SEQ ID NO: 349323 - DNA, 33 bp, Homo sapien
tactactgaacatcaaagtactgggagaagtcc

SEQ ID NO: 349324 - DNA, 33 bp, Homo sapien
tactactgaacatcaaggtactgggagaagtcc

SEQ ID NO: 349325 - DNA, 33 bp, Homo sapien
aagatgcacggcagcaaagcattatatagtatt

SEQ ID NO: 349326 - DNA, 33 bp, Homo sapien
aagatgcacggcagcacagcattatatagtatt

SEQ ID NO: 349327 - DNA, 33 bp, Homo sapien
tttgtctttctgttaacgcacataagcacatca

SEQ ID NO: 349328 - DNA, 33 bp, Homo sapien
tttgtctttctgttaatgcacataagcacatca

SEQ ID NO: 349329 - DNA, 33 bp, Homo sapien
aggacctcttcatggcaaactacaaaccactgc

SEQ ID NO: 349330 - DNA, 33 bp, Homo sapien
aggacctcttcatggcgaactacaaaccactgc

SEQ ID NO: 349331 - DNA, 33 bp, Homo sapien; identical to SEQ ID NO: 349329

SEQ ID NO: 349332 - DNA, 33 bp, Homo sapien; identical to SEQ ID NO: 349330

SEQ ID NO: 349333 - DNA, 33 bp, Homo sapien
ttcggaatttttgcacacaagttgctaaactgg

SEQ ID NO: 349334 - DNA, 33 bp, Homo sapien
ttcggaatttttgcacgcaagttgctaaactgg

SEQ ID NO: 349335 - DNA, 33 bp, Homo sapien
ttgatttcttttttgaggtacgacaagaatgca

SEQ ID NO: 349336 - DNA, 33 bp, Homo sapien
ttgatttcttttttgatgtacgacaagaatgca

SEQ ID NO: 349337 - DNA, 33 bp, Homo sapien
ttgagtgttttaaaagcacctacatgtcccaaa

SEQ ID NO: 349338 - DNA, 33 bp, Homo sapien
ttgagtgttttaaaagtacctacatgtcccaaa

SEQ ID NO: 349339 - DNA, 33 bp, Homo sapien
gaaataaacactcagaatactaatgaaagggaa

SEQ ID NO: 349340 - DNA, 33 bp, Homo sapien
gaaataaacactcagagtactaatgaaagggaa

SEQ ID NO: 349341 - DNA, 33 bp, Homo sapien
tcccaacattaaattcaaaaatcaattaaaagt

SEQ ID NO: 349342 - DNA, 33 bp, Homo sapien
tcccaacattaaattcgaaaatcaattaaaagt

SEQ ID NO: 349343 - DNA, 33 bp, Homo sapien
tggaggctatcaggtaggtttttgttgttcatt

SEQ ID NO: 349344 - DNA, 33 bp, Homo sapien
tggaggctatcaggtatgtttttgttgttcatt

SEQ ID NO: 349345 - DNA, 33 bp, Homo sapien
tttgtgtgtatcctagaacaaattatctcattt

SEQ ID NO: 349346 - DNA, 33 bp, Homo sapien
tttgtgtgtatcctaggacaaattatctcattt

SEQ ID NO: 349347 - DNA, 33 bp, Homo sapien
agaactccctgcaatacggttctttcattaagg

SEQ ID NO: 349348 - DNA, 33 bp, Homo sapien
agaactccctgcaatatggttctttcattaagg

SEQ ID NO: 349349 - DNA, 33 bp, Homo sapien
atcttcattttaaaggccatacataacataagc

SEQ ID NO: 349350 - DNA, 33 bp, Homo sapien
atcttcattttaaagggcatacataacataagc

SEQ ID NO: 349351 - DNA, 33 bp, Homo sapien
gtagcaaaaataaggacgtataaagctcttaca

SEQ ID NO: 349352 - DNA, 33 bp, Homo sapien
gtagcaaaaataaggatgtataaagctcttaca

SEQ ID NO: 349353 - DNA, 33 bp, Homo sapien
ttacttgacaagtttaaatcactgttcagagag

SEQ ID NO: 349354 - DNA, 33 bp, Homo sapien
ttacttgacaagtttagatcactgttcagagag

SEQ ID NO: 349355 - DNA, 33 bp, Homo sapien
ctctcaaatgggaataagcagacatcagctatc

SEQ ID NO: 349356 - DNA, 33 bp, Homo sapien
ctctcaaatgggaataggcagacatcagctatc

SEQ ID NO: 349357 - DNA, 33 bp, Homo sapien
taatttatagcaatcgccaatttcaatggtata

SEQ ID NO: 349358 - DNA, 33 bp, Homo sapien
taatttatagcaatcgtcaatttcaatggtata

SEQ ID NO: 349359 - DNA, 33 bp, Homo sapien
ccggtatcagtccacacatgaaatattagagaa

SEQ ID NO: 349360 - DNA, 33 bp, Homo sapien
ccggtatcagtccacatatgaaatattagagaa

SEQ ID NO: 349361 - DNA, 33 bp, Homo sapien
agaacgccctggaaaacatccacccgccagcaa

SEQ ID NO: 349362 - DNA, 33 bp, Homo sapien
agaacgccctggaaaatatccacccgccagcaa

SEQ ID NO: 349363 - DNA, 33 bp, Homo sapien
ccagcactttggtcccagctaatcactcactcg

SEQ ID NO: 349364 - DNA, 33 bp, Homo sapien
ccagcactttggtcccggctaatcactcactcg

SEQ ID NO: 349365 - DNA, 33 bp, Homo sapien
tgtgcccggcagtaaaattagcgaagaatgttt

SEQ ID NO: 349366 - DNA, 33 bp, Homo sapien
tgtgcccggcagtaaagttagcgaagaatgttt

SEQ ID NO: 349367 - DNA, 33 bp, Homo sapien
catctggttagagatacggcaaatgcctttgag

SEQ ID NO: 349368 - DNA, 33 bp, Homo sapien
catctggttagagatatggcaaatgcctttgag

SEQ ID NO: 349369 - DNA, 33 bp, Homo sapien
ccccagcatgtcccgcaaagtgcttttcatgtg

SEQ ID NO: 349370 - DNA, 33 bp, Homo sapien
ccccagcatgtcccgcgaagtgcttttcatgtg

SEQ ID NO: 349371 - DNA, 33 bp, Homo sapien
ataggtactgaataaaacgaatttttcctggcc

SEQ ID NO: 349372 - DNA, 33 bp, Homo sapien
ataggtactgaataaagcgaatttttcctggcc

SEQ ID NO: 349373 - DNA, 33 bp, Homo sapien
gctcagacccctggaacgcctacaagagaccag

SEQ ID NO: 349374 - DNA, 33 bp, Homo sapien
gctcagacccctggaatgcctacaagagaccag

SEQ ID NO: 349375 - DNA, 33 bp, Homo sapien
ttagtagaaaagccacaactcgacctcagatct

SEQ ID NO: 349376 - DNA, 33 bp, Homo sapien
ttagtagaaaagccacgactcgacctcagatct

SEQ ID NO: 349377 - DNA, 33 bp, Homo sapien
gtgaattgctttgttacgatgtccatgtctgga

SEQ ID NO: 349378 - DNA, 33 bp, Homo sapien
gtgaattgctttgttatgatgtccatgtctgga

SEQ ID NO: 349379 - DNA, 33 bp, Homo sapien
gttaagacctagacatcaagcatcaggcattat

SEQ ID NO: 349380 - DNA, 33 bp, Homo sapien
gttaagacctagacattaagcatcaggcattat

SEQ ID NO: 349381 - DNA, 33 bp, Homo sapien
agctagggggactgtacatgaaaactgaaaagc

SEQ ID NO: 349382 - DNA, 33 bp, Homo sapien
agctagggggactgtatatgaaaactgaaaagc

SEQ ID NO: 349383 - DNA, 33 bp, Homo sapien
tgcagccacacttggtcaataagtaggttcata

SEQ ID NO: 349384 - DNA, 33 bp, Homo sapien
tgcagccacacttggttaataagtaggttcata

SEQ ID NO: 349385 - DNA, 33 bp, Homo sapien
cacagtaattgctccaaaaatggccattcccgt

SEQ ID NO: 349386 - DNA, 33 bp, Homo sapien
cacagtaattgctccagaaatggccattcccgt

SEQ ID NO: 349387 - DNA, 33 bp, Homo sapien
tctgggtattagctgtcaagttgagagcagagt

SEQ ID NO: 349388 - DNA, 33 bp, Homo sapien
tctgggtattagctgtgaagttgagagcagagt

SEQ ID NO: 349389 - DNA, 33 bp, Homo sapien
agagtgtttttccttccctttggcttgattgtc

SEQ ID NO: 349390 - DNA, 33 bp, Homo sapien
agagtgtttttccttctctttggcttgattgtc

SEQ ID NO: 349391 - DNA, 33 bp, Homo sapien
agcttgagatgatgtcaaagataaagttgtgat

SEQ ID NO: 349392 - DNA, 33 bp, Homo sapien
agcttgagatgatgtcgaagataaagttgtgat

SEQ ID NO: 349393 - DNA, 33 bp, Homo sapien
ctctcctcagtggatacgagagctttctgagat

SEQ ID NO: 349394 - DNA, 33 bp, Homo sapien
ctctcctcagtggatatgagagctttctgagat

SEQ ID NO: 349395 - DNA, 33 bp, Homo sapien
cataaaaagcaaaggaagagtgagaaggagagt

SEQ ID NO: 349396 - DNA, 33 bp, Homo sapien
cataaaaagcaaaggatgagtgagaaggagagt

SEQ ID NO: 349397 - DNA, 33 bp, Homo sapien
taagcttcaagactaagaatttggggtttctct

SEQ ID NO: 349398 - DNA, 33 bp, Homo sapien
taagcttcaagactaataatttggggtttctct

SEQ ID NO: 349399 - DNA, 33 bp, Homo sapien
gaatttctttaagttacgtagcatagtggttaa

SEQ ID NO: 349400 - DNA, 33 bp, Homo sapien
gaatttctttaagttatgtagcatagtggttaa

SEQ ID NO: 349401 - DNA, 33 bp, Homo sapien
taatgactctgaaagcccagctaaatgtagaac

SEQ ID NO: 349402 - DNA, 33 bp, Homo sapien
taatgactctgaaagctcagctaaatgtagaac

SEQ ID NO: 349403 - DNA, 33 bp, Homo sapien
atttacttaattcccaatcacaaatcccaatat

SEQ ID NO: 349404 - DNA, 33 bp, Homo sapien
atttacttaattcccagtcacaaatcccaatat

SEQ ID NO: 349405 - DNA, 33 bp, Homo sapien
atttggaaagaaacaccaatctaacaatcagga

SEQ ID NO: 349406 - DNA, 33 bp, Homo sapien
atttggaaagaaacactaatctaacaatcagga

SEQ ID NO: 349407 - DNA, 33 bp, Homo sapien
aaggtatggaactagaccttgaccccagtttgg

SEQ ID NO: 349408 - DNA, 33 bp, Homo sapien
aaggtatggaactagatcttgaccccagtttgg

SEQ ID NO: 349409 - DNA, 33 bp, Homo sapien
aaatgacaagcccataaagttgaagacatcaaa

SEQ ID NO: 349410 - DNA, 33 bp, Homo sapien
aaatgacaagcccatagagttgaagacatcaaa

SEQ ID NO: 349411 - DNA, 33 bp, Homo sapien
aggcccaggggaaaaaatgagttgcagacattc

SEQ ID NO: 349412 - DNA, 33 bp, Homo sapien
aggcccaggggaaaaagtgagttgcagacattc

SEQ ID NO: 349413 - DNA, 33 bp, Homo sapien
gcaatttctctgaagaacccatgagcagcacgg

SEQ ID NO: 349414 - DNA, 33 bp, Homo sapien
gcaatttctctgaagaccccatgagcagcacgg

SEQ ID NO: 349415 - DNA, 33 bp, Homo sapien
tgttcacctgcacaacagttggcccttcatgca

SEQ ID NO: 349416 - DNA, 33 bp, Homo sapien
tgttcacctgcacaacggttggcccttcatgca

SEQ ID NO: 349417 - DNA, 33 bp, Homo sapien
ggcctcctctgaccacaccagtaggaatgaaga

SEQ ID NO: 349418 - DNA, 33 bp, Homo sapien
ggcctcctctgaccacgccagtaggaatgaaga

SEQ ID NO: 349419 - DNA, 33 bp, Homo sapien
tgttcccttattgttgcaaaatatgatgaacac

SEQ ID NO: 349420 - DNA, 33 bp, Homo sapien
tgttcccttattgttggaaaatatgatgaacac

SEQ ID NO: 349421 - DNA, 33 bp, Homo sapien
gccaaaggccctggtagccttcaatctgtcaaa

SEQ ID NO: 349422 - DNA, 33 bp, Homo sapien
gccaaaggccctggtatccttcaatctgtcaaa

SEQ ID NO: 349423 - DNA, 33 bp, Homo sapien
ctgctaaaattctaacagctcacaggacaatcc

SEQ ID NO: 349424 - DNA, 33 bp, Homo sapien
ctgctaaaattctaacggctcacaggacaatcc

SEQ ID NO: 349425 - DNA, 33 bp, Homo sapien
tgccacctctgcaggcagatttaccagtttaaa

SEQ ID NO: 349426 - DNA, 33 bp, Homo sapien
tgccacctctgcaggcggatttaccagtttaaa

SEQ ID NO: 349427 - DNA, 33 bp, Homo sapien
tcactcattctcttaccgaagacaaggcttgac

SEQ ID NO: 349428 - DNA, 33 bp, Homo sapien
tcactcattctcttactgaagacaaggcttgac

SEQ ID NO: 349429 - DNA, 33 bp, Homo sapien
gggtccagcttcagtaacagatcgtatgttttc

SEQ ID NO: 349430 - DNA, 33 bp, Homo sapien
gggtccagcttcagtagcagatcgtatgttttc

SEQ ID NO: 349431 - DNA, 33 bp, Homo sapien
cttgttctccaagtataagcacactccattatt

SEQ ID NO: 349432 - DNA, 33 bp, Homo sapien
cttgttctccaagtatgagcacactccattatt

SEQ ID NO: 349433 - DNA, 33 bp, Homo sapien
tatttgttagtaatgacaataatgtccctgctg

SEQ ID NO: 349434 - DNA, 33 bp, Homo sapien
tatttgttagtaatgataataatgtccctgctg

SEQ ID NO: 349435 - DNA, 33 bp, Homo sapien
ggccatatgcatttcaaataagggactatgggc

SEQ ID NO: 349436 - DNA, 33 bp, Homo sapien
ggccatatgcatttcagataagggactatgggc

SEQ ID NO: 349437 - DNA, 33 bp, Homo sapien
ttttctctgtagatgcactgacattgtaactct

SEQ ID NO: 349438 - DNA, 33 bp, Homo sapien
ttttctctgtagatgctctgacattgtaactct

SEQ ID NO: 349439 - DNA, 33 bp, Homo sapien
ctattaatagagacaaaacaaaaggactacaca

SEQ ID NO: 349440 - DNA, 33 bp, Homo sapien
ctattaatagagacaagacaaaaggactacaca

SEQ ID NO: 349441 - DNA, 33 bp, Homo sapien
ccaagtacggcttcgagaaagaaaccttaagga

SEQ ID NO: 349442 - DNA, 33 bp, Homo sapien
ccaagtacggcttcgataaagaaaccttaagga

SEQ ID NO: 349443 - DNA, 33 bp, Homo sapien
cttctgcagggctttacggctggattttgcatc

SEQ ID NO: 349444 - DNA, 33 bp, Homo sapien
cttctgcagggctttatggctggattttgcatc

SEQ ID NO: 349445 - DNA, 33 bp, Homo sapien
tgctgttcaccttccacgtgtaagggtgggtgt

SEQ ID NO: 349446 - DNA, 33 bp, Homo sapien
tgctgttcaccttccatgtgtaagggtgggtgt

SEQ ID NO: 349447 - DNA, 33 bp, Homo sapien
gaggagtcagaagcacacaaggggtagatcttg

SEQ ID NO: 349448 - DNA, 33 bp, Homo sapien
gaggagtcagaagcacgcaaggggtagatcttg

SEQ ID NO: 349449 - DNA, 33 bp, Homo sapien
attgtattaaaatatccgaagaggtacactgga

SEQ ID NO: 349450 - DNA, 33 bp, Homo sapien
attgtattaaaatatctgaagaggtacactgga

SEQ ID NO: 349451 - DNA, 33 bp, Homo sapien
atttcacccatcctaaagtcatctcttgaaaaa

SEQ ID NO: 349452 - DNA, 33 bp, Homo sapien
atttcacccatcctaaggtcatctcttgaaaaa

SEQ ID NO: 349453 - DNA, 33 bp, Homo sapien
tatgctgattttaaacagagcagcctattaaaa

SEQ ID NO: 349454 - DNA, 33 bp, Homo sapien
tatgctgattttaaacggagcagcctattaaaa

SEQ ID NO: 349455 - DNA, 33 bp, Homo sapien
tttgaggaaactttgaatacatcagtaactatt

SEQ ID NO: 349456 - DNA, 33 bp, Homo sapien
tttgaggaaactttgagtacatcagtaactatt

SEQ ID NO: 349457 - DNA, 33 bp, Homo sapien
gcaggttagggctctacgcgttatgattctctg

SEQ ID NO: 349458 - DNA, 33 bp, Homo sapien
gcaggttagggctctatgcgttatgattctctg

SEQ ID NO: 349459 - DNA, 33 bp, Homo sapien
ggtaaacttactaaaaatcattgattgtaaaat

SEQ ID NO: 349460 - DNA, 33 bp, Homo sapien
ggtaaacttactaaaactcattgattgtaaaat

SEQ ID NO: 349461 - DNA, 33 bp, Homo sapien
ggggaagaaagcagaaagcattttgatgaacct

SEQ ID NO: 349462 - DNA, 33 bp, Homo sapien
ggggaagaaagcagaaggcattttgatgaacct

SEQ ID NO: 349463 - DNA, 33 bp, Homo sapien
cttatcagaggacttgaaaccatttacagagcc

SEQ ID NO: 349464 - DNA, 33 bp, Homo sapien
cttatcagaggacttgcaaccatttacagagcc

SEQ ID NO: 349465 - DNA, 33 bp, Homo sapien
cacagtacttaaaaacccattcaggccaggcac

SEQ ID NO: 349466 - DNA, 33 bp, Homo sapien
cacagtacttaaaaacgcattcaggccaggcac

SEQ ID NO: 349467 - DNA, 33 bp, Homo sapien
tagggatcccctcccaatggagttgcacaggga

SEQ ID NO: 349468 - DNA, 33 bp, Homo sapien
tagggatcccctcccagtggagttgcacaggga

SEQ ID NO: 349469 - DNA, 33 bp, Homo sapien
tgattctttttcctgccagggtgcttattgaaa

SEQ ID NO: 349470 - DNA, 33 bp, Homo sapien
tgattctttttcctgctagggtgcttattgaaa

SEQ ID NO: 349471 - DNA, 33 bp, Homo sapien
aacatgtgtacataggacccttcagaacgaaga

SEQ ID NO: 349472 - DNA, 33 bp, Homo sapien
aacatgtgtacataggtcccttcagaacgaaga

SEQ ID NO: 349473 - DNA, 33 bp, Homo sapien
aactcagcttgacttcaaattaagtacatctaa

SEQ ID NO: 349474 - DNA, 33 bp, Homo sapien
aactcagcttgacttccaattaagtacatctaa

SEQ ID NO: 349475 - DNA, 33 bp, Homo sapien
cacttctaatgctctccatcacaaatatgtttc

SEQ ID NO: 349476 - DNA, 33 bp, Homo sapien
cacttctaatgctctctatcacaaatatgtttc

SEQ ID NO: 349477 - DNA, 33 bp, Homo sapien
ttaagttcctagcccaacataaaggctcctgga

SEQ ID NO: 349478 - DNA, 33 bp, Homo sapien
ttaagttcctagcccagcataaaggctcctgga

SEQ ID NO: 349479 - DNA, 33 bp, Homo sapien
gctggagtctagttaccataccgtccttttaaa

SEQ ID NO: 349480 - DNA, 33 bp, Homo sapien
gctggagtctagttactataccgtccttttaaa

SEQ ID NO: 349481 - DNA, 33 bp, Homo sapien
tgagttagcatttccccaagcatattttcaaga

SEQ ID NO: 349482 - DNA, 33 bp, Homo sapien
tgagttagcatttccctaagcatattttcaaga

SEQ ID NO: 349483 - DNA, 33 bp, Homo sapien
gaggatgctctcaaatgacactaactctgctaa

SEQ ID NO: 349484 - DNA, 33 bp, Homo sapien
gaggatgctctcaaattacactaactctgctaa

SEQ ID NO: 349485 - DNA, 33 bp, Homo sapien
tgaattcattaactgcaagctgagccctttaaa

SEQ ID NO: 349486 - DNA, 33 bp, Homo sapien
tgaattcattaactgcgagctgagccctttaaa

SEQ ID NO: 349487 - DNA, 33 bp, Homo sapien
gaagttcatttagttacagatggtaaaagcatg

SEQ ID NO: 349488 - DNA, 33 bp, Homo sapien
gaagttcatttagttagagatggtaaaagcatg

SEQ ID NO: 349489 - DNA, 33 bp, Homo sapien
gtatccagaatgtttgaagttatcactggtcat

SEQ ID NO: 349490 - DNA, 33 bp, Homo sapien
gtatccagaatgtttggagttatcactggtcat

SEQ ID NO: 349491 - DNA, 33 bp, Homo sapien
atttgagaggaaaaaccagagtaaaatcaatca

SEQ ID NO: 349492 - DNA, 33 bp, Homo sapien
atttgagaggaaaaacgagagtaaaatcaatca

SEQ ID NO: 349493 - DNA, 33 bp, Homo sapien
cttgttttcatgacaaatgtggacctgtagccc

SEQ ID NO: 349494 - DNA, 33 bp, Homo sapien
cttgttttcatgacaagtgtggacctgtagccc

SEQ ID NO: 349495 - DNA, 33 bp, Homo sapien
aacaacacacaatccaataatactcagggctac

SEQ ID NO: 349496 - DNA, 33 bp, Homo sapien
aacaacacacaatccagtaatactcagggctac

SEQ ID NO: 349497 - DNA, 33 bp, Homo sapien
ggaaaatccatttctcaccacatttaattttct

SEQ ID NO: 349498 - DNA, 33 bp, Homo sapien
ggaaaatccatttctcgccacatttaattttct

SEQ ID NO: 349499 - DNA, 33 bp, Homo sapien
caccttctcaactttccctagaagcctgctcac

SEQ ID NO: 349500 - DNA, 33 bp, Homo sapien
caccttctcaactttctctagaagcctgctcac

SEQ ID NO: 349501 - DNA, 33 bp, Homo sapien
acagtcacagtcgcaagtcagttactaaaagta

SEQ ID NO: 349502 - DNA, 33 bp, Homo sapien
acagtcacagtcgcaattcagttactaaaagta

SEQ ID NO: 349503 - DNA, 33 bp, Homo sapien
ctacattttgaaggaccgctatacaaacatttc

SEQ ID NO: 349504 - DNA, 33 bp, Homo sapien
ctacattttgaaggactgctatacaaacatttc

SEQ ID NO: 349505 - DNA, 33 bp, Homo sapien
gcaggaggaggagtacgcacatcctttgctcac

SEQ ID NO: 349506 - DNA, 33 bp, Homo sapien
gcaggaggaggagtactcacatcctttgctcac

SEQ ID NO: 349507 - DNA, 33 bp, Homo sapien
cccagccagactgatccacttacagacctaatc

SEQ ID NO: 349508 - DNA, 33 bp, Homo sapien
cccagccagactgatctacttacagacctaatc

SEQ ID NO: 349509 - DNA, 33 bp, Homo sapien
taaatggtgctaagtaactgaattggaaaacaa

SEQ ID NO: 349510 - DNA, 33 bp, Homo sapien
taaatggtgctaagtacctgaattggaaaacaa

SEQ ID NO: 349511 - DNA, 33 bp, Homo sapien
catctccatctgctggaaatttaaatgtctgca

SEQ ID NO: 349512 - DNA, 33 bp, Homo sapien
catctccatctgctggcaatttaaatgtctgca

SEQ ID NO: 349513 - DNA, 33 bp, Homo sapien
caaggaaacaactggcaaatgctttcatcattt

SEQ ID NO: 349514 - DNA, 33 bp, Homo sapien
caaggaaacaactggcgaatgctttcatcattt

SEQ ID NO: 349515 - DNA, 33 bp, Homo sapien
gtgataaaagcatccgacccaagtcctaagaag

SEQ ID NO: 349516 - DNA, 33 bp, Homo sapien
gtgataaaagcatccggcccaagtcctaagaag

SEQ ID NO: 349517 - DNA, 33 bp, Homo sapien
tgtgcgctggaaactacctgctaggcataactc

SEQ ID NO: 349518 - DNA, 33 bp, Homo sapien
tgtgcgctggaaactagctgctaggcataactc

SEQ ID NO: 349519 - DNA, 33 bp, Homo sapien
tctgtcttactttcccaaaagctgtaccagtca

SEQ ID NO: 349520 - DNA, 33 bp, Homo sapien
tctgtcttactttcccgaaagctgtaccagtca

SEQ ID NO: 349521 - DNA, 33 bp, Homo sapien
aacaaaggcttagaaggaaatattatggtctgg

SEQ ID NO: 349522 - DNA, 33 bp, Homo sapien
aacaaaggcttagaagtaaatattatggtctgg

SEQ ID NO: 349523 - DNA, 33 bp, Homo sapien
gctcattggatttacacggcaagtatggaaagt

SEQ ID NO: 349524 - DNA, 33 bp, Homo sapien
gctcattggatttacatggcaagtatggaaagt

SEQ ID NO: 349525 - DNA, 33 bp, Homo sapien
taaacgccaaattgtaccaagtgctgtgatggc

SEQ ID NO: 349526 - DNA, 33 bp, Homo sapien
taaacgccaaattgtagcaagtgctgtgatggc

SEQ ID NO: 349527 - DNA, 33 bp, Homo sapien
acaatgaggagaaccactgagtagttacaggcc

SEQ ID NO: 349528 - DNA, 33 bp, Homo sapien
acaatgaggagaaccattgagtagttacaggcc

SEQ ID NO: 349529 - DNA, 33 bp, Homo sapien
tcagaatatccgcatccgactcctaaggcaggt

SEQ ID NO: 349530 - DNA, 33 bp, Homo sapien
tcagaatatccgcatctgactcctaaggcaggt

SEQ ID NO: 349531 - DNA, 33 bp, Homo sapien
tggatgtcctctgtcaacttcacggcatgtccc

SEQ ID NO: 349532 - DNA, 33 bp, Homo sapien
tggatgtcctctgtcaccttcacggcatgtccc

SEQ ID NO: 349533 - DNA, 33 bp, Homo sapien
caaagctgtaaaacaccggccatgacctcccgc

SEQ ID NO: 349534 - DNA, 33 bp, Homo sapien
caaagctgtaaaacactggccatgacctcccgc

SEQ ID NO: 349535 - DNA, 33 bp, Homo sapien
cttactactggcagaacccctttccaacttact

SEQ ID NO: 349536 - DNA, 33 bp, Homo sapien
cttactactggcagaatccctttccaacttact

SEQ ID NO: 349537 - DNA, 33 bp, Homo sapien
gggagatcagctaggaaaatgtgtagcttctaa

SEQ ID NO: 349538 - DNA, 33 bp, Homo sapien
gggagatcagctaggagaatgtgtagcttctaa

SEQ ID NO: 349539 - DNA, 33 bp, Homo sapien
agaactcacaatgaataaatgacatagcttggt

SEQ ID NO: 349540 - DNA, 33 bp, Homo sapien
agaactcacaatgaatgaatgacatagcttggt

SEQ ID NO: 349541 - DNA, 33 bp, Homo sapien
gacactaacattcagacatagcagcagcattat

SEQ ID NO: 349542 - DNA, 33 bp, Homo sapien
gacactaacattcagatatagcagcagcattat

SEQ ID NO: 349543 - DNA, 33 bp, Homo sapien
gactgcctttcaggtacatttaggaccccagag

SEQ ID NO: 349544 - DNA, 33 bp, Homo sapien
gactgcctttcaggtatatttaggaccccagag

SEQ ID NO: 349545 - DNA, 33 bp, Homo sapien
gagactaggcctagttaaaagggcactcatcca

SEQ ID NO: 349546 - DNA, 33 bp, Homo sapien
gagactaggcctagttcaaagggcactcatcca

SEQ ID NO: 349547 - DNA, 33 bp, Homo sapien
gccagtaaaaaagcaacgtagggcaaaagggca

SEQ ID NO: 349548 - DNA, 33 bp, Homo sapien
gccagtaaaaaagcaaggtagggcaaaagggca

SEQ ID NO: 349549 - DNA, 33 bp, Homo sapien
taagttggaatttgggaaaattagaagctatct

SEQ ID NO: 349550 - DNA, 33 bp, Homo sapien
taagttggaatttgggcaaattagaagctatct

SEQ ID NO: 349551 - DNA, 33 bp, Homo sapien
caacagcattcatcataatatttgttgaatgca

SEQ ID NO: 349552 - DNA, 33 bp, Homo sapien
caacagcattcatcatcatatttgttgaatgca

SEQ ID NO: 349553 - DNA, 33 bp, Homo sapien
tccatctctcccaaagaaaaggatgaagctgtt

SEQ ID NO: 349554 - DNA, 33 bp, Homo sapien
tccatctctcccaaaggaaaggatgaagctgtt

SEQ ID NO: 349555 - DNA, 33 bp, Homo sapien
aaactgtgaactcaacaagcagaataagaatta

SEQ ID NO: 349556 - DNA, 33 bp, Homo sapien
aaactgtgaactcaaccagcagaataagaatta

SEQ ID NO: 349557 - DNA, 33 bp, Homo sapien
tgtaccagtatattaactgcagtgctggggctc

SEQ ID NO: 349558 - DNA, 33 bp, Homo sapien
tgtaccagtatattaattgcagtgctggggctc

SEQ ID NO: 349559 - DNA, 33 bp, Homo sapien
ctggcaaatagccaaaaagtggatagcaaacca

SEQ ID NO: 349560 - DNA, 33 bp, Homo sapien
ctggcaaatagccaaatagtggatagcaaacca

SEQ ID NO: 349561 - DNA, 33 bp, Homo sapien
tatgtgccagtaactacgacagatactaaaaga

SEQ ID NO: 349562 - DNA, 33 bp, Homo sapien
tatgtgccagtaactatgacagatactaaaaga

SEQ ID NO: 349563 - DNA, 33 bp, Homo sapien
agttgtgatgtgcaaaagaaggaacaagggaag

SEQ ID NO: 349564 - DNA, 33 bp, Homo sapien
agttgtgatgtgcaaacgaaggaacaagggaag

SEQ ID NO: 349565 - DNA, 33 bp, Homo sapien
atgaagggaagtctggaagttcaaagaaaaaat

SEQ ID NO: 349566 - DNA, 33 bp, Homo sapien
atgaagggaagtctgggagttcaaagaaaaaat

SEQ ID NO: 349567 - DNA, 33 bp, Homo sapien
aattctagagataagcacactaaagtttagaaa

SEQ ID NO: 349568 - DNA, 33 bp, Homo sapien
aattctagagataagcccactaaagtttagaaa

SEQ ID NO: 349569 - DNA, 33 bp, Homo sapien
tttgtctttccaggaccgcaatgaatgattagg

SEQ ID NO: 349570 - DNA, 33 bp, Homo sapien
tttgtctttccaggactgcaatgaatgattagg

SEQ ID NO: 349571 - DNA, 33 bp, Homo sapien
atatgtgttcaacttacgctcaacacatctgca

SEQ ID NO: 349572 - DNA, 33 bp, Homo sapien
atatgtgttcaacttaggctcaacacatctgca

SEQ ID NO: 349573 - DNA, 33 bp, Homo sapien
cagaggagccgatttaggcaaaggtgtaaaggc

SEQ ID NO: 349574 - DNA, 33 bp, Homo sapien
cagaggagccgatttatgcaaaggtgtaaaggc

SEQ ID NO: 349575 - DNA, 33 bp, Homo sapien
gagtgagagcacaattaaaggcttgcagggaca

SEQ ID NO: 349576 - DNA, 33 bp, Homo sapien
gagtgagagcacaattgaaggcttgcagggaca

SEQ ID NO: 349577 - DNA, 33 bp, Homo sapien
tgtttaatgtgaaatcaaatgagaacataaaca

SEQ ID NO: 349578 - DNA, 33 bp, Homo sapien
tgtttaatgtgaaatcgaatgagaacataaaca

SEQ ID NO: 349579 - DNA, 33 bp, Homo sapien
aactcacgagcaagaaagaagtgcttatttcta

SEQ ID NO: 349580 - DNA, 33 bp, Homo sapien
aactcacgagcaagaaggaagtgcttatttcta

SEQ ID NO: 349581 - DNA, 33 bp, Homo sapien
aataccacctcagccacgctgaaaactcacgag

SEQ ID NO: 349582 - DNA, 33 bp, Homo sapien
aataccacctcagccatgctgaaaactcacgag

SEQ ID NO: 349583 - DNA, 33 bp, Homo sapien
ccgctccacctcattacgtaccaataccacctc

SEQ ID NO: 349584 - DNA, 33 bp, Homo sapien
ccgctccacctcattatgtaccaataccacctc

SEQ ID NO: 349585 - DNA, 33 bp, Homo sapien
aactctagctggcaacacgatgagaagatccca

SEQ ID NO: 349586 - DNA, 33 bp, Homo sapien
aactctagctggcaacgcgatgagaagatccca

SEQ ID NO: 349587 - DNA, 33 bp, Homo sapien
ttgcatcttagtcacaaatattccattggccaa

SEQ ID NO: 349588 - DNA, 33 bp, Homo sapien
ttgcatcttagtcacagatattccattggccaa

SEQ ID NO: 349589 - DNA, 33 bp, Homo sapien
tcagagttcagcccccaactttgaaccttccca

SEQ ID NO: 349590 - DNA, 33 bp, Homo sapien
tcagagttcagcccccgactttgaaccttccca

SEQ ID NO: 349591 - DNA, 33 bp, Homo sapien
aactagcaaagggggacaaactacagctgttaa

SEQ ID NO: 349592 - DNA, 33 bp, Homo sapien
aactagcaaagggggagaaactacagctgttaa

SEQ ID NO: 349593 - DNA, 33 bp, Homo sapien
aactgcattaaaatcccagccttgcagggctta

SEQ ID NO: 349594 - DNA, 33 bp, Homo sapien
aactgcattaaaatcctagccttgcagggctta

SEQ ID NO: 349595 - DNA, 33 bp, Homo sapien
gaacacagaaggtgcacgatcaattctttttga

SEQ ID NO: 349596 - DNA, 33 bp, Homo sapien
gaacacagaaggtgcatgatcaattctttttga

SEQ ID NO: 349597 - DNA, 33 bp, Homo sapien
acagtcattaaatgcaaaggacttcttccccag

SEQ ID NO: 349598 - DNA, 33 bp, Homo sapien
acagtcattaaatgcagaggacttcttccccag

SEQ ID NO: 349599 - DNA, 33 bp, Homo sapien
tggttcctactgcctgcaagatacagtatggtg

SEQ ID NO: 349600 - DNA, 33 bp, Homo sapien
tggttcctactgcctggaagatacagtatggtg

SEQ ID NO: 349601 - DNA, 33 bp, Homo sapien
gtgtaaaatggtacaaccactttggacaactga

SEQ ID NO: 349602 - DNA, 33 bp, Homo sapien
gtgtaaaatggtacaagcactttggacaactga

SEQ ID NO: 349603 - DNA, 33 bp, Homo sapien
tttgaagaaattattacaaaaattggtggtgag

SEQ ID NO: 349604 - DNA, 33 bp, Homo sapien
tttgaagaaattattagaaaaattggtggtgag

SEQ ID NO: 349605 - DNA, 33 bp, Homo sapien
cataaacatgccaagacagagtcaacatcgtgt

SEQ ID NO: 349606 - DNA, 33 bp, Homo sapien
cataaacatgccaagagagagtcaacatcgtgt

SEQ ID NO: 349607 - DNA, 33 bp, Homo sapien
gtcaaatcaaagtctcaacatttgcacaagtga

SEQ ID NO: 349608 - DNA, 33 bp, Homo sapien
gtcaaatcaaagtctcgacatttgcacaagtga

SEQ ID NO: 349609 - DNA, 33 bp, Homo sapien
tgaagagggggacacactgatggttttcaagtt

SEQ ID NO: 349610 - DNA, 33 bp, Homo sapien
tgaagagggggacacattgatggttttcaagtt

SEQ ID NO: 349611 - DNA, 33 bp, Homo sapien
aagatacacaaatgcaatatgagactctaatac

SEQ ID NO: 349612 - DNA, 33 bp, Homo sapien
aagatacacaaatgcagtatgagactctaatac

SEQ ID NO: 349613 - DNA, 33 bp, Homo sapien
tcctaaagcctccacaaggcctgcggttttgcc

SEQ ID NO: 349614 - DNA, 33 bp, Homo sapien
tcctaaagcctccacagggcctgcggttttgcc

SEQ ID NO: 349615 - DNA, 33 bp, Homo sapien
gaattattgcagaaaaagtaaaaataggtggta

SEQ ID NO: 349616 - DNA, 33 bp, Homo sapien
gaattattgcagaaaatgtaaaaataggtggta

SEQ ID NO: 349617 - DNA, 33 bp, Homo sapien
acatgagtaactaataagtgaaaagcctacaac

SEQ ID NO: 349618 - DNA, 33 bp, Homo sapien
acatgagtaactaataggtgaaaagcctacaac

SEQ ID NO: 349619 - DNA, 33 bp, Homo sapien
gtataagctcatcaaagacaaagatctggtctt

SEQ ID NO: 349620 - DNA, 33 bp, Homo sapien
gtataagctcatcaaatacaaagatctggtctt

SEQ ID NO: 349621 - DNA, 33 bp, Homo sapien
tcgtgattcagtgactcagcatacattggcaat

SEQ ID NO: 349622 - DNA, 33 bp, Homo sapien
tcgtgattcagtgacttagcatacattggcaat

SEQ ID NO: 349623 - DNA, 33 bp, Homo sapien
agctgctttataacaccggctacacaaaaggag

SEQ ID NO: 349624 - DNA, 33 bp, Homo sapien
agctgctttataacactggctacacaaaaggag

SEQ ID NO: 349625 - DNA, 33 bp, Homo sapien
gccacagctatccgggaactgctctgagtgagg

SEQ ID NO: 349626 - DNA, 33 bp, Homo sapien
gccacagctatccgggcactgctctgagtgagg

SEQ ID NO: 349627 - DNA, 33 bp, Homo sapien
agtactggattatgcaatatgaactgtaaatgt

SEQ ID NO: 349628 - DNA, 33 bp, Homo sapien
agtactggattatgcagtatgaactgtaaatgt

SEQ ID NO: 349629 - DNA, 33 bp, Homo sapien
atgtgattttttaataactccaattagtcacag

SEQ ID NO: 349630 - DNA, 33 bp, Homo sapien
atgtgattttttaatatctccaattagtcacag

SEQ ID NO: 349631 - DNA, 33 bp, Homo sapien
caagagagagttttcaaaaaagaatacatgtaa

SEQ ID NO: 349632 - DNA, 33 bp, Homo sapien
caagagagagttttcagaaaagaatacatgtaa

SEQ ID NO: 349633 - DNA, 33 bp, Homo sapien
tggagtttgctcccacaattaggttatgttaaa

SEQ ID NO: 349634 - DNA, 33 bp, Homo sapien
tggagtttgctcccacgattaggttatgttaaa

SEQ ID NO: 349635 - DNA, 33 bp, Homo sapien
tattcctactgatatgcacagatctagaaatga

SEQ ID NO: 349636 - DNA, 33 bp, Homo sapien
tattcctactgatatgtacagatctagaaatga

SEQ ID NO: 349637 - DNA, 33 bp, Homo sapien
gccaggatttgagctacggtttttctccatagc

SEQ ID NO: 349638 - DNA, 33 bp, Homo sapien
gccaggatttgagctagggtttttctccatagc

SEQ ID NO: 349639 - DNA, 33 bp, Homo sapien
tgccaaaagatccaaacttcctctctgcttctt

SEQ ID NO: 349640 - DNA, 33 bp, Homo sapien
tgccaaaagatccaaatttcctctctgcttctt

SEQ ID NO: 349641 - DNA, 33 bp, Homo sapien
tactcacaagataaaaacacaaacaaggaatac

SEQ ID NO: 349642 - DNA, 33 bp, Homo sapien
tactcacaagataaaagcacaaacaaggaatac

SEQ ID NO: 349643 - DNA, 33 bp, Homo sapien
catggagccagtgttaagttgatactatggaca

SEQ ID NO: 349644 - DNA, 33 bp, Homo sapien
catggagccagtgttaggttgatactatggaca

SEQ ID NO: 349645 - DNA, 33 bp, Homo sapien
gcttagttctgtctccaaagctaaattgtaaat

SEQ ID NO: 349646 - DNA, 33 bp, Homo sapien
gcttagttctgtctccgaagctaaattgtaaat

SEQ ID NO: 349647 - DNA, 33 bp, Homo sapien
ctgttctactaaagaccatcatttaacacttcc

SEQ ID NO: 349648 - DNA, 33 bp, Homo sapien
ctgttctactaaagactatcatttaacacttcc

SEQ ID NO: 349649 - DNA, 33 bp, Homo sapien
gtttgccttctcaccactggctacataagcttg

SEQ ID NO: 349650 - DNA, 33 bp, Homo sapien
gtttgccttctcaccagtggctacataagcttg

SEQ ID NO: 349651 - DNA, 33 bp, Homo sapien
ttaactaccagctgacaccagagaactctttct

SEQ ID NO: 349652 - DNA, 33 bp, Homo sapien
ttaactaccagctgacgccagagaactctttct

SEQ ID NO: 349653 - DNA, 33 bp, Homo sapien
tgactggatgtactttcaaacagtttatttaaa

SEQ ID NO: 349654 - DNA, 33 bp, Homo sapien
tgactggatgtactttgaaacagtttatttaaa

SEQ ID NO: 349655 - DNA, 33 bp, Homo sapien
caacacatatttcctccgaaacatcagtgctga

SEQ ID NO: 349656 - DNA, 33 bp, Homo sapien
caacacatatttcctctgaaacatcagtgctga

SEQ ID NO: 349657 - DNA, 33 bp, Homo sapien
aacaggatggaacttaacaaaggggactgccct

SEQ ID NO: 349658 - DNA, 33 bp, Homo sapien
aacaggatggaacttagcaaaggggactgccct

SEQ ID NO: 349659 - DNA, 33 bp, Homo sapien
tatatggaagtaaattcaagaaatgccgtgtat

SEQ ID NO: 349660 - DNA, 33 bp, Homo sapien
tatatggaagtaaattgaagaaatgccgtgtat

SEQ ID NO: 349661 - DNA, 33 bp, Homo sapien
tccccgatgacctaacagatgttgttttcagaa

SEQ ID NO: 349662 - DNA, 33 bp, Homo sapien
tccccgatgacctaacggatgttgttttcagaa

SEQ ID NO: 349663 - DNA, 33 bp, Homo sapien
gttaagaatgaagtgaactaactaatgaaaaat

SEQ ID NO: 349664 - DNA, 33 bp, Homo sapien
gttaagaatgaagtgagctaactaatgaaaaat

SEQ ID NO: 349665 - DNA, 33 bp, Homo sapien
taggatcatctggtgaacaatccattatactgt

SEQ ID NO: 349666 - DNA, 33 bp, Homo sapien
taggatcatctggtgagcaatccattatactgt

SEQ ID NO: 349667 - DNA, 33 bp, Homo sapien
aggagatgctctgcttgaaaccaccatataatt

SEQ ID NO: 349668 - DNA, 33 bp, Homo sapien
aggagatgctctgctttaaaccaccatataatt

SEQ ID NO: 349669 - DNA, 33 bp, Homo sapien
ttcctctaggatacataagtcccagaccaaaag

SEQ ID NO: 349670 - DNA, 33 bp, Homo sapien
ttcctctaggatacatgagtcccagaccaaaag

SEQ ID NO: 349671 - DNA, 33 bp, Homo sapien
gttcagggaactatcactccgtccaatatccca

SEQ ID NO: 349672 - DNA, 33 bp, Homo sapien
gttcagggaactatcattccgtccaatatccca

SEQ ID NO: 349673 - DNA, 33 bp, Homo sapien
tgtaagtgatttggaaacattgcctggtcctga

SEQ ID NO: 349674 - DNA, 33 bp, Homo sapien
tgtaagtgatttggaatcattgcctggtcctga

SEQ ID NO: 349675 - DNA, 33 bp, Homo sapien
cccacacatggcttccaagagactgcactaaca

SEQ ID NO: 349676 - DNA, 33 bp, Homo sapien
cccacacatggcttccgagagactgcactaaca

SEQ ID NO: 349677 - DNA, 33 bp, Homo sapien
agttataaatatctctcaacttggcaaaccaat

SEQ ID NO: 349678 - DNA, 33 bp, Homo sapien
agttataaatatctcttaacttggcaaaccaat

SEQ ID NO: 349679 - DNA, 33 bp, Homo sapien
caagggccacctatacacttatatctctcaggc

SEQ ID NO: 349680 - DNA, 33 bp, Homo sapien
caagggccacctatacgcttatatctctcaggc

SEQ ID NO: 349681 - DNA, 33 bp, Homo sapien
agcaagggtctgagcacagatcttgatactcat

SEQ ID NO: 349682 - DNA, 33 bp, Homo sapien
agcaagggtctgagcatagatcttgatactcat

SEQ ID NO: 349683 - DNA, 33 bp, Homo sapien
gggcccaccaacatcacgctgaaggaatggcca

SEQ ID NO: 349684 - DNA, 33 bp, Homo sapien
gggcccaccaacatcatgctgaaggaatggcca

SEQ ID NO: 349685 - DNA, 33 bp, Homo sapien
gaaaaatgcaaacaggcacatttggctgtgtgt

SEQ ID NO: 349686 - DNA, 33 bp, Homo sapien
gaaaaatgcaaacaggtacatttggctgtgtgt

SEQ ID NO: 349687 - DNA, 33 bp, Homo sapien
taaaactgggtaagaaccaactgcagctatgtt

SEQ ID NO: 349688 - DNA, 33 bp, Homo sapien
taaaactgggtaagaatcaactgcagctatgtt

SEQ ID NO: 349689 - DNA, 33 bp, Homo sapien
aaaagatcaaagttacaggaccaacctgctctt

SEQ ID NO: 349690 - DNA, 33 bp, Homo sapien
aaaagatcaaagttacgggaccaacctgctctt

SEQ ID NO: 349691 - DNA, 33 bp, Homo sapien
gaagccctcaccttgaagaagaagagcaggcag

SEQ ID NO: 349692 - DNA, 33 bp, Homo sapien
gaagccctcaccttgaggaagaagagcaggcag

SEQ ID NO: 349693 - DNA, 33 bp, Homo sapien
aaagcagtggtgcctcagaaagagtctagacat

SEQ ID NO: 349694 - DNA, 33 bp, Homo sapien
aaagcagtggtgcctcggaaagagtctagacat

SEQ ID NO: 349695 - DNA, 33 bp, Homo sapien
gaggaggatgaggacaatcagaaaggcctgttc

SEQ ID NO: 349696 - DNA, 33 bp, Homo sapien
gaggaggatgaggacagtcagaaaggcctgttc

SEQ ID NO: 349697 - DNA, 33 bp, Homo sapien
tcattctggagttgtccctcttgctttgtgaag

SEQ ID NO: 349698 - DNA, 33 bp, Homo sapien
tcattctggagttgtctctcttgctttgtgaag

SEQ ID NO: 349699 - DNA, 33 bp, Homo sapien
ggaatgcaaatagctcaaaagtccagaaggaag

SEQ ID NO: 349700 - DNA, 33 bp, Homo sapien
ggaatgcaaatagctccaaagtccagaaggaag

SEQ ID NO: 349701 - DNA, 33 bp, Homo sapien
ctatagccagggaaaacgtactaaaagcaacac

SEQ ID NO: 349702 - DNA, 33 bp, Homo sapien
ctatagccagggaaaatgtactaaaagcaacac

SEQ ID NO: 349703 - DNA, 33 bp, Homo sapien
ctcattgttacctagaaaattatggagaaacct

SEQ ID NO: 349704 - DNA, 33 bp, Homo sapien
ctcattgttacctagagaattatggagaaacct

SEQ ID NO: 349705 - DNA, 33 bp, Homo sapien
tttgcttatttcaaaacgctttagacttactaa

SEQ ID NO: 349706 - DNA, 33 bp, Homo sapien
tttgcttatttcaaaatgctttagacttactaa

SEQ ID NO: 349707 - DNA, 33 bp, Homo sapien
cctgctttatctcaagactccaatatgtatcag

SEQ ID NO: 349708 - DNA, 33 bp, Homo sapien
cctgctttatctcaaggctccaatatgtatcag

SEQ ID NO: 349709 - DNA, 33 bp, Homo sapien
taatggtacataaaacagtcattcaaagaaaac

SEQ ID NO: 349710 - DNA, 33 bp, Homo sapien
taatggtacataaaacggtcattcaaagaaaac

SEQ ID NO: 349711 - DNA, 33 bp, Homo sapien
atgcccttttatagccagccctgtggtgtttgg

SEQ ID NO: 349712 - DNA, 33 bp, Homo sapien
atgcccttttatagccggccctgtggtgtttgg

SEQ ID NO: 349713 - DNA, 33 bp, Homo sapien
tcttcaaggattgcacagcctcaccgggaagag

SEQ ID NO: 349714 - DNA, 33 bp, Homo sapien
tcttcaaggattgcacggcctcaccgggaagag

SEQ ID NO: 349715 - DNA, 33 bp, Homo sapien
actcctcccaaatgaacttatagatctaataca

SEQ ID NO: 349716 - DNA, 33 bp, Homo sapien
actcctcccaaatgaatttatagatctaataca

SEQ ID NO: 349717 - DNA, 33 bp, Homo sapien
cagaatttataaaagcacaacgaaattaccaga

SEQ ID NO: 349718 - DNA, 33 bp, Homo sapien
cagaatttataaaagcgcaacgaaattaccaga

SEQ ID NO: 349719 - DNA, 33 bp, Homo sapien
cgatcagctaacacctaaacaggcatggtctcc

SEQ ID NO: 349720 - DNA, 33 bp, Homo sapien
cgatcagctaacacctgaacaggcatggtctcc

SEQ ID NO: 349721 - DNA, 33 bp, Homo sapien
agcatagccaccttctaaagactgtagcaccag

SEQ ID NO: 349722 - DNA, 33 bp, Homo sapien
agcatagccaccttcttaagactgtagcaccag

SEQ ID NO: 349723 - DNA, 33 bp, Homo sapien
gggttaacatgctaccaacgtgacatctgagaa

SEQ ID NO: 349724 - DNA, 33 bp, Homo sapien
gggttaacatgctacctacgtgacatctgagaa

SEQ ID NO: 349725 - DNA, 33 bp, Homo sapien
gctgtttagatgcatacacctttatggctgtta

SEQ ID NO: 349726 - DNA, 33 bp, Homo sapien
gctgtttagatgcatatacctttatggctgtta

SEQ ID NO: 349727 - DNA, 33 bp, Homo sapien
agaatgtcataacaaacggaagcatagggtatg

SEQ ID NO: 349728 - DNA, 33 bp, Homo sapien
agaatgtcataacaaatggaagcatagggtatg

SEQ ID NO: 349729 - DNA, 33 bp, Homo sapien
tacataacccttataactccagagacataagtg

SEQ ID NO: 349730 - DNA, 33 bp, Homo sapien
tacataacccttataattccagagacataagtg

SEQ ID NO: 349731 - DNA, 33 bp, Homo sapien
tattagaactccaagcaataactgaatatcaat

SEQ ID NO: 349732 - DNA, 33 bp, Homo sapien
tattagaactccaagcgataactgaatatcaat

SEQ ID NO: 349733 - DNA, 33 bp, Homo sapien
ccaatgaaaagatgcaagattgtgaggggaatt

SEQ ID NO: 349734 - DNA, 33 bp, Homo sapien
ccaatgaaaagatgcaggattgtgaggggaatt

SEQ ID NO: 349735 - DNA, 33 bp, Homo sapien
ttgcactgtagtactacgctagaatcgcactgg

SEQ ID NO: 349736 - DNA, 33 bp, Homo sapien
ttgcactgtagtactatgctagaatcgcactgg

SEQ ID NO: 349737 - DNA, 33 bp, Homo sapien
gctacaatgagacccactgacaaaattagcctc

SEQ ID NO: 349738 - DNA, 33 bp, Homo sapien
gctacaatgagacccattgacaaaattagcctc

SEQ ID NO: 349739 - DNA, 33 bp, Homo sapien
agctgtccacttgctacgagcagggaaggacta

SEQ ID NO: 349740 - DNA, 33 bp, Homo sapien
agctgtccacttgctatgagcagggaaggacta

SEQ ID NO: 349741 - DNA, 33 bp, Homo sapien
agttcattcatgacacaaacagttctcacgtac

SEQ ID NO: 349742 - DNA, 33 bp, Homo sapien
agttcattcatgacacgaacagttctcacgtac

SEQ ID NO: 349743 - DNA, 33 bp, Homo sapien
attataccataggtggaatcaatttcatacaac

SEQ ID NO: 349744 - DNA, 33 bp, Homo sapien
attataccataggtgggatcaatttcatacaac

SEQ ID NO: 349745 - DNA, 33 bp, Homo sapien
ctgtgactctatcaccaacggaaatcatataga

SEQ ID NO: 349746 - DNA, 33 bp, Homo sapien
ctgtgactctatcaccgacggaaatcatataga

SEQ ID NO: 349747 - DNA, 33 bp, Homo sapien
cctgctttgggcactacattcctttcatgagca

SEQ ID NO: 349748 - DNA, 33 bp, Homo sapien
cctgctttgggcactatattcctttcatgagca

SEQ ID NO: 349749 - DNA, 33 bp, Homo sapien
gtccatataatgtctaccattttctcacttccc

SEQ ID NO: 349750 - DNA, 33 bp, Homo sapien
gtccatataatgtctatcattttctcacttccc

SEQ ID NO: 349751 - DNA, 33 bp, Homo sapien
tgaattgatcttgtaactcagtagtgaaaggtc

SEQ ID NO: 349752 - DNA, 33 bp, Homo sapien
tgaattgatcttgtaattcagtagtgaaaggtc

SEQ ID NO: 349753 - DNA, 33 bp, Homo sapien
atccaatagggagggacgtattctgttgggcca

SEQ ID NO: 349754 - DNA, 33 bp, Homo sapien
atccaatagggagggatgtattctgttgggcca

SEQ ID NO: 349755 - DNA, 33 bp, Homo sapien
tcaattcttgtgcatccaccctctgtctctcgg

SEQ ID NO: 349756 - DNA, 33 bp, Homo sapien
tcaattcttgtgcatctaccctctgtctctcgg

SEQ ID NO: 349757 - DNA, 33 bp, Homo sapien
gataggctgaaagcaaaacatggcagtgttaca

SEQ ID NO: 349758 - DNA, 33 bp, Homo sapien
gataggctgaaagcaagacatggcagtgttaca

SEQ ID NO: 349759 - DNA, 33 bp, Homo sapien
cccacggtctctctaaaggagcaaactcataac

SEQ ID NO: 349760 - DNA, 33 bp, Homo sapien
cccacggtctctctaatggagcaaactcataac

SEQ ID NO: 349761 - DNA, 33 bp, Homo sapien
aggtcccaaggatgaaatgcctacctgttcttt

SEQ ID NO: 349762 - DNA, 33 bp, Homo sapien
aggtcccaaggatgaactgcctacctgttcttt

SEQ ID NO: 349763 - DNA, 33 bp, Homo sapien
atgttttgagttggcaaaaagcagtagaggggc

SEQ ID NO: 349764 - DNA, 33 bp, Homo sapien
atgttttgagttggcagaaagcagtagaggggc

SEQ ID NO: 349765 - DNA, 33 bp, Homo sapien
ccatattatagaaaacccttaatgctagaagtc

SEQ ID NO: 349766 - DNA, 33 bp, Homo sapien
ccatattatagaaaacgcttaatgctagaagtc

SEQ ID NO: 349767 - DNA, 33 bp, Homo sapien
atcaattccacattacagccagttaaagaacaa

SEQ ID NO: 349768 - DNA, 33 bp, Homo sapien
atcaattccacattacggccagttaaagaacaa

SEQ ID NO: 349769 - DNA, 33 bp, Homo sapien
tgggcagatcactcagaagttcgaaagtagcct

SEQ ID NO: 349770 - DNA, 33 bp, Homo sapien
tgggcagatcactcaggagttcgaaagtagcct

SEQ ID NO: 349771 - DNA, 33 bp, Homo sapien
gatgaagtttgtctgacctgtatctttccataa

SEQ ID NO: 349772 - DNA, 33 bp, Homo sapien
gatgaagtttgtctgagctgtatctttccataa

SEQ ID NO: 349773 - DNA, 33 bp, Homo sapien
ttgactatgaggttgcacttcttggcatctttg

SEQ ID NO: 349774 - DNA, 33 bp, Homo sapien
ttgactatgaggttgcgcttcttggcatctttg

SEQ ID NO: 349775 - DNA, 33 bp, Homo sapien
tcatataaaagttgcaccttttgaaccaagtat

SEQ ID NO: 349776 - DNA, 33 bp, Homo sapien
tcatataaaagttgcatcttttgaaccaagtat

SEQ ID NO: 349777 - DNA, 33 bp, Homo sapien
tattccataagggcaaactctttttttcataca

SEQ ID NO: 349778 - DNA, 33 bp, Homo sapien
tattccataagggcaatctctttttttcataca

SEQ ID NO: 349779 - DNA, 33 bp, Homo sapien
gccagagaaaggaagccattaaaatctccagaa

SEQ ID NO: 349780 - DNA, 33 bp, Homo sapien
gccagagaaaggaagctattaaaatctccagaa

SEQ ID NO: 349781 - DNA, 33 bp, Homo sapien
aaaattatatggataaaaggacaaaattcctca

SEQ ID NO: 349782 - DNA, 33 bp, Homo sapien
aaaattatatggataagaggacaaaattcctca

SEQ ID NO: 349783 - DNA, 33 bp, Homo sapien
tttgtttgctaccaaaatatgtatccctgagca

SEQ ID NO: 349784 - DNA, 33 bp, Homo sapien
tttgtttgctaccaaagtatgtatccctgagca

SEQ ID NO: 349785 - DNA, 33 bp, Homo sapien
tcatctaatctgtataaccttagggagtttata

SEQ ID NO: 349786 - DNA, 33 bp, Homo sapien
tcatctaatctgtatatccttagggagtttata

SEQ ID NO: 349787 - DNA, 33 bp, Homo sapien
ttcataagaaacagcactgaacacaggttcttg

SEQ ID NO: 349788 - DNA, 33 bp, Homo sapien
ttcataagaaacagcattgaacacaggttcttg

SEQ ID NO: 349789 - DNA, 33 bp, Homo sapien
gctactgagagacaacagtatactcaaatctta

SEQ ID NO: 349790 - DNA, 33 bp, Homo sapien
gctactgagagacaactgtatactcaaatctta

SEQ ID NO: 349791 - DNA, 33 bp, Homo sapien
gattaggatcctgatacaatttctaatgagcat

SEQ ID NO: 349792 - DNA, 33 bp, Homo sapien
gattaggatcctgatataatttctaatgagcat

SEQ ID NO: 349793 - DNA, 33 bp, Homo sapien
ctctgctattcatgatcagtcaaggattcctag

SEQ ID NO: 349794 - DNA, 33 bp, Homo sapien
ctctgctattcatgattagtcaaggattcctag

SEQ ID NO: 349795 - DNA, 33 bp, Homo sapien
ggttcagacccttcagaatgggaggattgttct

SEQ ID NO: 349796 - DNA, 33 bp, Homo sapien
ggttcagacccttcaggatgggaggattgttct

SEQ ID NO: 349797 - DNA, 33 bp, Homo sapien
tcatttacacaactgaatactccacagctcata

SEQ ID NO: 349798 - DNA, 33 bp, Homo sapien
tcatttacacaactgagtactccacagctcata

SEQ ID NO: 349799 - DNA, 33 bp, Homo sapien
gaatccaatttagaaccgttagaggtaatttca

SEQ ID NO: 349800 - DNA, 33 bp, Homo sapien
gaatccaatttagaactgttagaggtaatttca

SEQ ID NO: 349801 - DNA, 33 bp, Homo sapien
tgatccacatttggtcacagatgtagatccccc

SEQ ID NO: 349802 - DNA, 33 bp, Homo sapien
tgatccacatttggtcgcagatgtagatccccc

SEQ ID NO: 349803 - DNA, 33 bp, Homo sapien
aggtttatccagcttcaaggaccaacacagtac

SEQ ID NO: 349804 - DNA, 33 bp, Homo sapien
aggtttatccagcttcgaggaccaacacagtac

SEQ ID NO: 349805 - DNA, 33 bp, Homo sapien
acagcagtgctgagaaacgctaaatctagacat

SEQ ID NO: 349806 - DNA, 33 bp, Homo sapien
acagcagtgctgagaagcgctaaatctagacat

SEQ ID NO: 349807 - DNA, 33 bp, Homo sapien
gctcaggagttaaagaccaggttggacaacaca

SEQ ID NO: 349808 - DNA, 33 bp, Homo sapien
gctcaggagttaaagatcaggttggacaacaca

SEQ ID NO: 349809 - DNA, 33 bp, Homo sapien
taccagctctaatttgcatttatacatacaggt

SEQ ID NO: 349810 - DNA, 33 bp, Homo sapien
taccagctctaatttggatttatacatacaggt

SEQ ID NO: 349811 - DNA, 33 bp, Homo sapien
aaagtgtgtcaccttacagaaagagcaaggtct

SEQ ID NO: 349812 - DNA, 33 bp, Homo sapien
aaagtgtgtcaccttatagaaagagcaaggtct

SEQ ID NO: 349813 - DNA, 33 bp, Homo sapien
ctgggagactgtataccgtactaccgaacgcat

SEQ ID NO: 349814 - DNA, 33 bp, Homo sapien
ctgggagactgtatactgtactaccgaacgcat

SEQ ID NO: 349815 - DNA, 33 bp, Homo sapien
ggagatcacagaggaacggaggctgtgacaaag

SEQ ID NO: 349816 - DNA, 33 bp, Homo sapien
ggagatcacagaggaatggaggctgtgacaaag

SEQ ID NO: 349817 - DNA, 33 bp, Homo sapien
tctatagtctgttccacaggtctatttttccac

SEQ ID NO: 349818 - DNA, 33 bp, Homo sapien
tctatagtctgttccataggtctatttttccac

SEQ ID NO: 349819 - DNA, 33 bp, Homo sapien
accaacctatgaagacagtctccacagctcaag

SEQ ID NO: 349820 - DNA, 33 bp, Homo sapien
accaacctatgaagactgtctccacagctcaag

SEQ ID NO: 349821 - DNA, 33 bp, Homo sapien
cgttccattatggaagaaggaagcaatatttta

SEQ ID NO: 349822 - DNA, 33 bp, Homo sapien
cgttccattatggaaggaggaagcaatatttta

SEQ ID NO: 349823 - DNA, 33 bp, Homo sapien
ttggctccttaatgaacatgcataatgacaaca

SEQ ID NO: 349824 - DNA, 33 bp, Homo sapien
ttggctccttaatgaatatgcataatgacaaca

SEQ ID NO: 349825 - DNA, 33 bp, Homo sapien
ccagccgcattttacactcaggtatttattgac

SEQ ID NO: 349826 - DNA, 33 bp, Homo sapien
ccagccgcattttacagtcaggtatttattgac

SEQ ID NO: 349827 - DNA, 33 bp, Homo sapien
tggtgaatggaagagacgtcacataaaaccgaa

SEQ ID NO: 349828 - DNA, 33 bp, Homo sapien
tggtgaatggaagagatgtcacataaaaccgaa

SEQ ID NO: 349829 - DNA, 33 bp, Homo sapien
ctattctgtctacctcacttcctcagctactcc

SEQ ID NO: 349830 - DNA, 33 bp, Homo sapien
ctattctgtctacctcgcttcctcagctactcc

SEQ ID NO: 349831 - DNA, 33 bp, Homo sapien
aaaatgctaatccaaacaagggcaggttggaga

SEQ ID NO: 349832 - DNA, 33 bp, Homo sapien
aaaatgctaatccaaataagggcaggttggaga

SEQ ID NO: 349833 - DNA, 33 bp, Homo sapien
tttttctgagggaggacaacgaagtctttactc

SEQ ID NO: 349834 - DNA, 33 bp, Homo sapien
tttttctgagggaggagaacgaagtctttactc

SEQ ID NO: 349835 - DNA, 33 bp, Homo sapien
acccctttcccagtcagagatacacacagacta

SEQ ID NO: 349836 - DNA, 33 bp, Homo sapien
acccctttcccagtcatagatacacacagacta

SEQ ID NO: 349837 - DNA, 33 bp, Homo sapien
ggccacttcctggtataagacggctcctcccct

SEQ ID NO: 349838 - DNA, 33 bp, Homo sapien
ggccacttcctggtatgagacggctcctcccct

SEQ ID NO: 349839 - DNA, 33 bp, Homo sapien
ttatttgatattgaaaatttagtcctctaaaat

SEQ ID NO: 349840 - DNA, 33 bp, Homo sapien
ttatttgatattgaaagtttagtcctctaaaat

SEQ ID NO: 349841 - DNA, 33 bp, Homo sapien
cccaacagctgctacccggctcctgggcaaggc

SEQ ID NO: 349842 - DNA, 33 bp, Homo sapien
cccaacagctgctacctggctcctgggcaaggc

SEQ ID NO: 349843 - DNA, 33 bp, Homo sapien
aataaagagcccagcacaaatacagtcctacta

SEQ ID NO: 349844 - DNA, 33 bp, Homo sapien
aataaagagcccagcataaatacagtcctacta

SEQ ID NO: 349845 - DNA, 33 bp, Homo sapien
gaaatttactcttagcaatgtttttttcttttt

SEQ ID NO: 349846 - DNA, 33 bp, Homo sapien
gaaatttactcttagcgatgtttttttcttttt

SEQ ID NO: 349847 - DNA, 33 bp, Homo sapien
aagcctttggtgttcccctgtaagtagaatact

SEQ ID NO: 349848 - DNA, 33 bp, Homo sapien
aagcctttggtgttccgctgtaagtagaatact

SEQ ID NO: 349849 - DNA, 33 bp, Homo sapien
aatgtgacctccagcaatctttctccagcccag

SEQ ID NO: 349850 - DNA, 33 bp, Homo sapien
aatgtgacctccagcagtctttctccagcccag

SEQ ID NO: 349851 - DNA, 33 bp, Homo sapien
aaagttacattaaaaacctgaccagtcattcaa

SEQ ID NO: 349852 - DNA, 33 bp, Homo sapien
aaagttacattaaaaatctgaccagtcattcaa

SEQ ID NO: 349853 - DNA, 33 bp, Homo sapien
ctaaataagaaaagtccaagttgagtctataaa

SEQ ID NO: 349854 - DNA, 33 bp, Homo sapien
ctaaataagaaaagtctaagttgagtctataaa

SEQ ID NO: 349855 - DNA, 33 bp, Homo sapien
gagccctgtaagacaacggccataacgttatct

SEQ ID NO: 349856 - DNA, 33 bp, Homo sapien
gagccctgtaagacaatggccataacgttatct

SEQ ID NO: 349857 - DNA, 33 bp, Homo sapien
gctacagttaactacactcctactcacaaacta

SEQ ID NO: 349858 - DNA, 33 bp, Homo sapien
gctacagttaactacagtcctactcacaaacta

SEQ ID NO: 349859 - DNA, 33 bp, Homo sapien
gacagtcagatagtcaatattacgccctttggg

SEQ ID NO: 349860 - DNA, 33 bp, Homo sapien
gacagtcagatagtcagtattacgccctttggg

SEQ ID NO: 349861 - DNA, 33 bp, Homo sapien
gctttgtggtcctggaagaggttactccactcc

SEQ ID NO: 349862 - DNA, 33 bp, Homo sapien
gctttgtggtcctggaggaggttactccactcc

SEQ ID NO: 349863 - DNA, 33 bp, Homo sapien
gggaagcattcaggtacagcttgaaggatcagg

SEQ ID NO: 349864 - DNA, 33 bp, Homo sapien
gggaagcattcaggtatagcttgaaggatcagg

SEQ ID NO: 349865 - DNA, 33 bp, Homo sapien
ctcacatgcaggtaatgagaacgttatggaagc

SEQ ID NO: 349866 - DNA, 33 bp, Homo sapien
ctcacatgcaggtaattagaacgttatggaagc

SEQ ID NO: 349867 - DNA, 33 bp, Homo sapien
tattaaaacatgggagcctcatccatttaaggt

SEQ ID NO: 349868 - DNA, 33 bp, Homo sapien
tattaaaacatgggagtctcatccatttaaggt

SEQ ID NO: 349869 - DNA, 33 bp, Homo sapien
agaaatatctgtgtaacacaactgctaaattat

SEQ ID NO: 349870 - DNA, 33 bp, Homo sapien
agaaatatctgtgtaatacaactgctaaattat

SEQ ID NO: 349871 - DNA, 33 bp, Homo sapien
ggtgtcacatcattaaaaaattctgtacatatg

SEQ ID NO: 349872 - DNA, 33 bp, Homo sapien
ggtgtcacatcattaacaaattctgtacatatg

SEQ ID NO: 349873 - DNA, 33 bp, Homo sapien
tcatgtaacccaagaaattctgcctcttgggaa

SEQ ID NO: 349874 - DNA, 33 bp, Homo sapien
tcatgtaacccaagaatttctgcctcttgggaa

SEQ ID NO: 349875 - DNA, 33 bp, Homo sapien
atccattcttaaggcacgaacacaaatagtgag

SEQ ID NO: 349876 - DNA, 33 bp, Homo sapien
atccattcttaaggcatgaacacaaatagtgag

SEQ ID NO: 349877 - DNA, 33 bp, Homo sapien
ttcaatcctggctctaccacttgcttctctaag

SEQ ID NO: 349878 - DNA, 33 bp, Homo sapien
ttcaatcctggctctatcacttgcttctctaag

SEQ ID NO: 349879 - DNA, 33 bp, Homo sapien
gggaatcatgatcttaacttgcagcgttgtgat

SEQ ID NO: 349880 - DNA, 33 bp, Homo sapien
gggaatcatgatcttaccttgcagcgttgtgat

SEQ ID NO: 349881 - DNA, 33 bp, Homo sapien
agacctcagcagattagaaaggcaaatgggaac

SEQ ID NO: 349882 - DNA, 33 bp, Homo sapien
agacctcagcagattataaaggcaaatgggaac

SEQ ID NO: 349883 - DNA, 33 bp, Homo sapien
cctcctttgacccccaactagtgaggaaacaag

SEQ ID NO: 349884 - DNA, 33 bp, Homo sapien
cctcctttgacccccagctagtgaggaaacaag

SEQ ID NO: 349885 - DNA, 33 bp, Homo sapien
tagcctagactagttgaatcagaattgctgggg

SEQ ID NO: 349886 - DNA, 33 bp, Homo sapien
tagcctagactagttgcatcagaattgctgggg

SEQ ID NO: 349887 - DNA, 33 bp, Homo sapien
ctacctcctggaattacaaggaatggactacaa

SEQ ID NO: 349888 - DNA, 33 bp, Homo sapien
ctacctcctggaattataaggaatggactacaa

SEQ ID NO: 349889 - DNA, 33 bp, Homo sapien
agacttcagattcttacaggaacatggtagaaa

SEQ ID NO: 349890 - DNA, 33 bp, Homo sapien
agacttcagattcttataggaacatggtagaaa

SEQ ID NO: 349891 - DNA, 33 bp, Homo sapien
ttgcttacctcagcaactcacagcggaagtgtg

SEQ ID NO: 349892 - DNA, 33 bp, Homo sapien
ttgcttacctcagcaattcacagcggaagtgtg

SEQ ID NO: 349893 - DNA, 33 bp, Homo sapien
tacagacccttgtctacgcagaaaaaatgccaa

SEQ ID NO: 349894 - DNA, 33 bp, Homo sapien
tacagacccttgtctatgcagaaaaaatgccaa

SEQ ID NO: 349895 - DNA, 33 bp, Homo sapien
gaattgacctggcccacagttgcctcagattcc

SEQ ID NO: 349896 - DNA, 33 bp, Homo sapien
gaattgacctggcccagagttgcctcagattcc

SEQ ID NO: 349897 - DNA, 33 bp, Homo sapien
ggattgaaaactaagaaaggcaacccagacttt

SEQ ID NO: 349898 - DNA, 33 bp, Homo sapien
ggattgaaaactaagacaggcaacccagacttt

SEQ ID NO: 349899 - DNA, 33 bp, Homo sapien
agggataaaatgaggcagatatttgcaacaagt

SEQ ID NO: 349900 - DNA, 33 bp, Homo sapien
agggataaaatgaggcggatatttgcaacaagt

SEQ ID NO: 349901 - DNA, 33 bp, Homo sapien
agcaaaagaagcagaaattagatcccacagtca

SEQ ID NO: 349902 - DNA, 33 bp, Homo sapien
agcaaaagaagcagaagttagatcccacagtca

SEQ ID NO: 349903 - DNA, 33 bp, Homo sapien
acatttacacaaagaaatgggtattgtgaaaga

SEQ ID NO: 349904 - DNA, 33 bp, Homo sapien
acatttacacaaagaagtgggtattgtgaaaga

SEQ ID NO: 349905 - DNA, 33 bp, Homo sapien
ggttttggaatggaaacgatcctgggtggagac

SEQ ID NO: 349906 - DNA, 33 bp, Homo sapien
ggttttggaatggaaatgatcctgggtggagac

SEQ ID NO: 349907 - DNA, 33 bp, Homo sapien
gtaattctgccataacaaaactcacctgattgg

SEQ ID NO: 349908 - DNA, 33 bp, Homo sapien
gtaattctgccataacgaaactcacctgattgg

SEQ ID NO: 349909 - DNA, 33 bp, Homo sapien
actgtgttcatcactacagcttcacagtaagtc

SEQ ID NO: 349910 - DNA, 33 bp, Homo sapien
actgtgttcatcactatagcttcacagtaagtc

SEQ ID NO: 349911 - DNA, 33 bp, Homo sapien
aggtggtctccaggcacgtgaaggatgacctta

SEQ ID NO: 349912 - DNA, 33 bp, Homo sapien
aggtggtctccaggcaggtgaaggatgacctta

SEQ ID NO: 349913 - DNA, 33 bp, Homo sapien
aaacaaatttccaaaccaaagagcagaacaaga

SEQ ID NO: 349914 - DNA, 33 bp, Homo sapien
aaacaaatttccaaactaaagagcagaacaaga

SEQ ID NO: 349915 - DNA, 33 bp, Homo sapien
tattaagttcagtatgcaaagaggaagagtaaa

SEQ ID NO: 349916 - DNA, 33 bp, Homo sapien
tattaagttcagtatgtaaagaggaagagtaaa

SEQ ID NO: 349917 - DNA, 33 bp, Homo sapien
agtatatatatgccaagtactacctagagtttt

SEQ ID NO: 349918 - DNA, 33 bp, Homo sapien
agtatatatatgccaattactacctagagtttt

SEQ ID NO: 349919 - DNA, 33 bp, Homo sapien
agagaaaaatgtaaacagataacggccaagaaa

SEQ ID NO: 349920 - DNA, 33 bp, Homo sapien
agagaaaaatgtaaacggataacggccaagaaa

SEQ ID NO: 349921 - DNA, 33 bp, Homo sapien
caggtctatacagaaacgtgtaagaatggccac

SEQ ID NO: 349922 - DNA, 33 bp, Homo sapien
caggtctatacagaaatgtgtaagaatggccac

SEQ ID NO: 349923 - DNA, 33 bp, Homo sapien; identical to SEQ ID NO: 349921

SEQ ID NO: 349924 - DNA, 33 bp, Homo sapien; identical to SEQ ID NO: 349922

SEQ ID NO: 349925 - DNA, 33 bp, Homo sapien
atttagtccctgaaataaattgttgcatctttg

SEQ ID NO: 349926 - DNA, 33 bp, Homo sapien
atttagtccctgaaatgaattgttgcatctttg

SEQ ID NO: 349927 - DNA, 33 bp, Homo sapien
aaatctcccggaagaaagactgaattaaatgca

SEQ ID NO: 349928 - DNA, 33 bp, Homo sapien
aaatctcccggaagaaggactgaattaaatgca

SEQ ID NO: 349929 - DNA, 33 bp, Homo sapien
cagattaatggctgccagcaattgggaatggaa

SEQ ID NO: 349930 - DNA, 33 bp, Homo sapien
cagattaatggctgcccgcaattgggaatggaa

SEQ ID NO: 349931 - DNA, 33 bp, Homo sapien
ggattcactctgaagaacatggattaagtttga

SEQ ID NO: 349932 - DNA, 33 bp, Homo sapien
ggattcactctgaagagcatggattaagtttga

SEQ ID NO: 349933 - DNA, 33 bp, Homo sapien
ctctttcaaccaactgcatagattaagaaatac

SEQ ID NO: 349934 - DNA, 33 bp, Homo sapien
ctctttcaaccaactggatagattaagaaatac

SEQ ID NO: 349935 - DNA, 33 bp, Homo sapien
taaacatccactttgaccacttccctccccaaa

SEQ ID NO: 349936 - DNA, 33 bp, Homo sapien
taaacatccactttgatcacttccctccccaaa

SEQ ID NO: 349937 - DNA, 33 bp, Homo sapien
caaaaagccactggaaaacgactgccaaatgag

SEQ ID NO: 349938 - DNA, 33 bp, Homo sapien
caaaaagccactggaagacgactgccaaatgag

SEQ ID NO: 349939 - DNA, 33 bp, Homo sapien
ataaaagcagattaaactgtatcaggtacattc

SEQ ID NO: 349940 - DNA, 33 bp, Homo sapien
ataaaagcagattaaattgtatcaggtacattc

SEQ ID NO: 349941 - DNA, 33 bp, Homo sapien
tctccagagagcaagacgtggactcaacccttg

SEQ ID NO: 349942 - DNA, 33 bp, Homo sapien
tctccagagagcaagatgtggactcaacccttg

SEQ ID NO: 349943 - DNA, 33 bp, Homo sapien
ctgtattgaaaatacactgatttcttcaggaag

SEQ ID NO: 349944 - DNA, 33 bp, Homo sapien
ctgtattgaaaatacattgatttcttcaggaag

SEQ ID NO: 349945 - DNA, 33 bp, Homo sapien
agtaacacctgagtaaaaagtttctcttgctat

SEQ ID NO: 349946 - DNA, 33 bp, Homo sapien
agtaacacctgagtaagaagtttctcttgctat

SEQ ID NO: 349947 - DNA, 33 bp, Homo sapien
cagacaagagctgcatcagaggtttgttcaggt

SEQ ID NO: 349948 - DNA, 33 bp, Homo sapien
cagacaagagctgcattagaggtttgttcaggt

SEQ ID NO: 349949 - DNA, 33 bp, Homo sapien
gcctctaaggcaaagacgatgtttcctatctcc

SEQ ID NO: 349950 - DNA, 33 bp, Homo sapien
gcctctaaggcaaagaggatgtttcctatctcc

SEQ ID NO: 349951 - DNA, 33 bp, Homo sapien
taattagcgatcttaccgcattttgcaaatagg

SEQ ID NO: 349952 - DNA, 33 bp, Homo sapien
taattagcgatcttactgcattttgcaaatagg

SEQ ID NO: 349953 - DNA, 33 bp, Homo sapien
cgacaaagatattcacacaggaacagatttggg

SEQ ID NO: 349954 - DNA, 33 bp, Homo sapien
cgacaaagatattcacgcaggaacagatttggg

SEQ ID NO: 349955 - DNA, 33 bp, Homo sapien
gatctgtctgttctatcaccttcccacagttca

SEQ ID NO: 349956 - DNA, 33 bp, Homo sapien
gatctgtctgttctatgaccttcccacagttca

SEQ ID NO: 349957 - DNA, 33 bp, Homo sapien
tggcaaatctagaaagaagcagaagaattaggt

SEQ ID NO: 349958 - DNA, 33 bp, Homo sapien
tggcaaatctagaaagcagcagaagaattaggt

SEQ ID NO: 349959 - DNA, 33 bp, Homo sapien
agttaggtttctggggacaattaaaacagctct

SEQ ID NO: 349960 - DNA, 33 bp, Homo sapien
agttaggtttctggggtcaattaaaacagctct

SEQ ID NO: 349961 - DNA, 33 bp, Homo sapien
gacaacatagtggcccagaattttcactttgga

SEQ ID NO: 349962 - DNA, 33 bp, Homo sapien
gacaacatagtggcccggaattttcactttgga

SEQ ID NO: 349963 - DNA, 33 bp, Homo sapien
tgttgtagcccttgtaacatctgctgtagtgat

SEQ ID NO: 349964 - DNA, 33 bp, Homo sapien
tgttgtagcccttgtagcatctgctgtagtgat

SEQ ID NO: 349965 - DNA, 33 bp, Homo sapien
acagtgcctggactagaagcagctaacatccca

SEQ ID NO: 349966 - DNA, 33 bp, Homo sapien
acagtgcctggactaggagcagctaacatccca

SEQ ID NO: 349967 - DNA, 33 bp, Homo sapien
tacattcacctttgcacatatcttctgctggtc

SEQ ID NO: 349968 - DNA, 33 bp, Homo sapien
tacattcacctttgcatatatcttctgctggtc

SEQ ID NO: 349969 - DNA, 33 bp, Homo sapien
aataaaaagagcctggcaagaggaaggagagag

SEQ ID NO: 349970 - DNA, 33 bp, Homo sapien
aataaaaagagcctggtaagaggaaggagagag

SEQ ID NO: 349971 - DNA, 33 bp, Homo sapien
gacatgctgaatttgaagtgcctatgaaacatc

SEQ ID NO: 349972 - DNA, 33 bp, Homo sapien
gacatgctgaatttgaggtgcctatgaaacatc

SEQ ID NO: 349973 - DNA, 33 bp, Homo sapien
tggcttcaagttgttacggcaggtagttagaca

SEQ ID NO: 349974 - DNA, 33 bp, Homo sapien
tggcttcaagttgttatggcaggtagttagaca

SEQ ID NO: 349975 - DNA, 33 bp, Homo sapien
tatgttgatccaaagactcaggaattaaaaagt

SEQ ID NO: 349976 - DNA, 33 bp, Homo sapien
tatgttgatccaaagattcaggaattaaaaagt

SEQ ID NO: 349977 - DNA, 33 bp, Homo sapien
gagagattgtgtgatacgcaatttccattttca

SEQ ID NO: 349978 - DNA, 33 bp, Homo sapien
gagagattgtgtgataggcaatttccattttca

SEQ ID NO: 349979 - DNA, 33 bp, Homo sapien
cagtcacaaagggccacccggcttcaaggagag

SEQ ID NO: 349980 - DNA, 33 bp, Homo sapien
cagtcacaaagggccatccggcttcaaggagag

SEQ ID NO: 349981 - DNA, 33 bp, Homo sapien
aagagagagagaatataaatatgcaagtgggac

SEQ ID NO: 349982 - DNA, 33 bp, Homo sapien
aagagagagagaatatgaatatgcaagtgggac

SEQ ID NO: 349983 - DNA, 33 bp, Homo sapien
tacttcagctacaagtaacagaacgcctcaact

SEQ ID NO: 349984 - DNA, 33 bp, Homo sapien
tacttcagctacaagtgacagaacgcctcaact

SEQ ID NO: 349985 - DNA, 33 bp, Homo sapien
tatagtagtgtgaacacggactaatgcactatc

SEQ ID NO: 349986 - DNA, 33 bp, Homo sapien
tatagtagtgtgaacatggactaatgcactatc

SEQ ID NO: 349987 - DNA, 33 bp, Homo sapien
agttgtgaaattctaaccatttgcaagtgtgct

SEQ ID NO: 349988 - DNA, 33 bp, Homo sapien
agttgtgaaattctaatcatttgcaagtgtgct

SEQ ID NO: 349989 - DNA, 33 bp, Homo sapien
gaaacaaggttttcaaagcactggacatcaagc

SEQ ID NO: 349990 - DNA, 33 bp, Homo sapien
gaaacaaggttttcaaggcactggacatcaagc

SEQ ID NO: 349991 - DNA, 33 bp, Homo sapien
tatgaggaattgggaacatctcactgtaacaga

SEQ ID NO: 349992 - DNA, 33 bp, Homo sapien
tatgaggaattgggaatatctcactgtaacaga

SEQ ID NO: 349993 - DNA, 33 bp, Homo sapien
tgagagtcacccttgacggagccttttttctca

SEQ ID NO: 349994 - DNA, 33 bp, Homo sapien
tgagagtcacccttgatggagccttttttctca

SEQ ID NO: 349995 - DNA, 33 bp, Homo sapien
ccattgtctttctatcactttaaagcagtggtt

SEQ ID NO: 349996 - DNA, 33 bp, Homo sapien
ccattgtctttctatcgctttaaagcagtggtt

SEQ ID NO: 349997 - DNA, 33 bp, Homo sapien
gtgtgaagggagtgaggaaatgttcccgggccc

SEQ ID NO: 349998 - DNA, 33 bp, Homo sapien
gtgtgaagggagtgagtaaatgttcccgggccc

SEQ ID NO: 349999 - DNA, 33 bp, Homo sapien
ttcttagttgcataacactactgatgcacttaa

SEQ ID NO: 350000 - DNA, 33 bp, Homo sapien
ttcttagttgcataacgctactgatgcacttaa

SEQ ID NO: 350001 - DNA, 33 bp, Homo sapien
cacccagcatgttgtacgtccacgtgtttttgt

SEQ ID NO: 350002 - DNA, 33 bp, Homo sapien
cacccagcatgttgtatgtccacgtgtttttgt

SEQ ID NO: 350003 - DNA, 33 bp, Homo sapien
ggagttaaccatgaaacagacctggcttataag

SEQ ID NO: 350004 - DNA, 33 bp, Homo sapien
ggagttaaccatgaaatagacctggcttataag

SEQ ID NO: 350005 - DNA, 33 bp, Homo sapien
tgactgcatttggtaaaggattgaacacgggag

SEQ ID NO: 350006 - DNA, 33 bp, Homo sapien
tgactgcatttggtaagggattgaacacgggag

SEQ ID NO: 350007 - DNA, 33 bp, Homo sapien
cttgtgtagaaaaagcaaacagactgctcacaa

SEQ ID NO: 350008 - DNA, 33 bp, Homo sapien
cttgtgtagaaaaagcgaacagactgctcacaa

SEQ ID NO: 350009 - DNA, 33 bp, Homo sapien
cctgaacccctttcaccgtctatttggatagaa

SEQ ID NO: 350010 - DNA, 33 bp, Homo sapien
cctgaacccctttcactgtctatttggatagaa

SEQ ID NO: 350011 - DNA, 33 bp, Homo sapien
cttaattgacatttaccagagatgtagattggt

SEQ ID NO: 350012 - DNA, 33 bp, Homo sapien
cttaattgacatttactagagatgtagattggt

SEQ ID NO: 350013 - DNA, 33 bp, Homo sapien
gtaaagtcaatctgccacaaagaaaagatcatt

SEQ ID NO: 350014 - DNA, 33 bp, Homo sapien
gtaaagtcaatctgccgcaaagaaaagatcatt

SEQ ID NO: 350015 - DNA, 33 bp, Homo sapien
tgaaattttgtcacgaggtgatttagtctgttt

SEQ ID NO: 350016 - DNA, 33 bp, Homo sapien
tgaaattttgtcacgatgtgatttagtctgttt

SEQ ID NO: 350017 - DNA, 33 bp, Homo sapien
agggaaagctatgcggaaaccaccaccaacacc

SEQ ID NO: 350018 - DNA, 33 bp, Homo sapien
agggaaagctatgcgggaaccaccaccaacacc

SEQ ID NO: 350019 - DNA, 33 bp, Homo sapien
ccaccttcttccaggacgatggaacattgtata

SEQ ID NO: 350020 - DNA, 33 bp, Homo sapien
ccaccttcttccaggatgatggaacattgtata

SEQ ID NO: 350021 - DNA, 33 bp, Homo sapien
agagtggtactctatacggctaggacatctgga

SEQ ID NO: 350022 - DNA, 33 bp, Homo sapien
agagtggtactctatatggctaggacatctgga

SEQ ID NO: 350023 - DNA, 33 bp, Homo sapien
attgagtttgctgttcaaatcacagctctgact

SEQ ID NO: 350024 - DNA, 33 bp, Homo sapien
attgagtttgctgttcgaatcacagctctgact

SEQ ID NO: 350025 - DNA, 33 bp, Homo sapien
gtttggaaacagcaacactcagttagggtgcca

SEQ ID NO: 350026 - DNA, 33 bp, Homo sapien
gtttggaaacagcaacgctcagttagggtgcca

SEQ ID NO: 350027 - DNA, 33 bp, Homo sapien
catttattttataccaatgaatcccaggtggtg

SEQ ID NO: 350028 - DNA, 33 bp, Homo sapien
catttattttataccagtgaatcccaggtggtg

SEQ ID NO: 350029 - DNA, 33 bp, Homo sapien
gagaagcattggaggaaagtgtggtttgtctgt

SEQ ID NO: 350030 - DNA, 33 bp, Homo sapien
gagaagcattggaggagagtgtggtttgtctgt

SEQ ID NO: 350031 - DNA, 33 bp, Homo sapien
catggagtcagaagcccggagatccataaacca

SEQ ID NO: 350032 - DNA, 33 bp, Homo sapien
catggagtcagaagcctggagatccataaacca

SEQ ID NO: 350033 - DNA, 33 bp, Homo sapien
tgacagtgtgaactgcaagaggcctgggtttat

SEQ ID NO: 350034 - DNA, 33 bp, Homo sapien
tgacagtgtgaactgcgagaggcctgggtttat

SEQ ID NO: 350035 - DNA, 33 bp, Homo sapien
ggttaggaaagagtaacaaatgggtcctacgcc

SEQ ID NO: 350036 - DNA, 33 bp, Homo sapien
ggttaggaaagagtaagaaatgggtcctacgcc

SEQ ID NO: 350037 - DNA, 33 bp, Homo sapien
cctgggaaccagttggccagatcttccagctga

SEQ ID NO: 350038 - DNA, 33 bp, Homo sapien
cctgggaaccagttggtcagatcttccagctga

SEQ ID NO: 350039 - DNA, 33 bp, Homo sapien
gttaattttattcagcaacagttttcataggta

SEQ ID NO: 350040 - DNA, 33 bp, Homo sapien
gttaattttattcagcgacagttttcataggta

SEQ ID NO: 350041 - DNA, 33 bp, Homo sapien
cttttacagaagagtgcacgctaataagtgaag

SEQ ID NO: 350042 - DNA, 33 bp, Homo sapien
cttttacagaagagtgtacgctaataagtgaag

SEQ ID NO: 350043 - DNA, 33 bp, Homo sapien
tgtgagtagaagtgacagaagttatttctatgc

SEQ ID NO: 350044 - DNA, 33 bp, Homo sapien
tgtgagtagaagtgacggaagttatttctatgc

SEQ ID NO: 350045 - DNA, 33 bp, Homo sapien
ctgtcaaaacttgcagaactttgtactttttta

SEQ ID NO: 350046 - DNA, 33 bp, Homo sapien
ctgtcaaaacttgcaggactttgtactttttta

SEQ ID NO: 350047 - DNA, 33 bp, Homo sapien
ctatttctgctataacaaactaccacaaacgtg

SEQ ID NO: 350048 - DNA, 33 bp, Homo sapien
ctatttctgctataacgaactaccacaaacgtg

SEQ ID NO: 350049 - DNA, 33 bp, Homo sapien
ccaagatagtcctggacaataccacttggattc

SEQ ID NO: 350050 - DNA, 33 bp, Homo sapien
ccaagatagtcctggataataccacttggattc

SEQ ID NO: 350051 - DNA, 33 bp, Homo sapien
tagaactgaagagattaaaggtatgactcatgg

SEQ ID NO: 350052 - DNA, 33 bp, Homo sapien
tagaactgaagagattcaaggtatgactcatgg

SEQ ID NO: 350053 - DNA, 33 bp, Homo sapien
caaccacatacttgaccctctctccagggcaca

SEQ ID NO: 350054 - DNA, 33 bp, Homo sapien
caaccacatacttgactctctctccagggcaca

SEQ ID NO: 350055 - DNA, 33 bp, Homo sapien
tggtagaatttgaggcacatgatagaaaaaaac

SEQ ID NO: 350056 - DNA, 33 bp, Homo sapien
tggtagaatttgaggcccatgatagaaaaaaac

SEQ ID NO: 350057 - DNA, 33 bp, Homo sapien
gggctcatcaagatagcatagttgcaaaacaca

SEQ ID NO: 350058 - DNA, 33 bp, Homo sapien
gggctcatcaagatagtatagttgcaaaacaca

SEQ ID NO: 350059 - DNA, 33 bp, Homo sapien
cagaaattgtgagaaacggcaaacaatgaaggg

SEQ ID NO: 350060 - DNA, 33 bp, Homo sapien
cagaaattgtgagaaatggcaaacaatgaaggg

SEQ ID NO: 350061 - DNA, 33 bp, Homo sapien
ctcatagctggaagccacattaagcagttactt

SEQ ID NO: 350062 - DNA, 33 bp, Homo sapien
ctcatagctggaagccgcattaagcagttactt

SEQ ID NO: 350063 - DNA, 33 bp, Homo sapien
gccaatagcataaaaactgtgacattgaccttg

SEQ ID NO: 350064 - DNA, 33 bp, Homo sapien
gccaatagcataaaaagtgtgacattgaccttg

SEQ ID NO: 350065 - DNA, 33 bp, Homo sapien
atttcctgacatgggggaggttttaagttacat

SEQ ID NO: 350066 - DNA, 33 bp, Homo sapien
atttcctgacatggggtaggttttaagttacat

SEQ ID NO: 350067 - DNA, 33 bp, Homo sapien
actgaatctaaaactccatcacttgtaagacac

SEQ ID NO: 350068 - DNA, 33 bp, Homo sapien
actgaatctaaaactctatcacttgtaagacac

SEQ ID NO: 350069 - DNA, 33 bp, Homo sapien
aaatggtctgtaaatgcacggtaaagatgacaa

SEQ ID NO: 350070 - DNA, 33 bp, Homo sapien
aaatggtctgtaaatgtacggtaaagatgacaa

SEQ ID NO: 350071 - DNA, 33 bp, Homo sapien
aaagtgtagttgaatggactataggtgcagaga

SEQ ID NO: 350072 - DNA, 33 bp, Homo sapien
aaagtgtagttgaatgtactataggtgcagaga

SEQ ID NO: 350073 - DNA, 33 bp, Homo sapien
catttcctcttatatcactcataggttttactg

SEQ ID NO: 350074 - DNA, 33 bp, Homo sapien
catttcctcttatatcgctcataggttttactg

SEQ ID NO: 350075 - DNA, 33 bp, Homo sapien
atcaagttgtccaatagtaaagaaatgcgtgtt

SEQ ID NO: 350076 - DNA, 33 bp, Homo sapien
atcaagttgtccaatattaaagaaatgcgtgtt

SEQ ID NO: 350077 - DNA, 33 bp, Homo sapien
aaggaggaagcgcagaacattataaaacaagcc

SEQ ID NO: 350078 - DNA, 33 bp, Homo sapien
aaggaggaagcgcagagcattataaaacaagcc

SEQ ID NO: 350079 - DNA, 33 bp, Homo sapien
gagagtgccagatttcaaataaagcaggagata

SEQ ID NO: 350080 - DNA, 33 bp, Homo sapien
gagagtgccagatttcgaataaagcaggagata

SEQ ID NO: 350081 - DNA, 33 bp, Homo sapien
cccaagctgagatcaaaaagacctcctcttccc

SEQ ID NO: 350082 - DNA, 33 bp, Homo sapien
cccaagctgagatcaagaagacctcctcttccc

SEQ ID NO: 350083 - DNA, 33 bp, Homo sapien
gtctctctgtctcacaaattatctaaatatttt

SEQ ID NO: 350084 - DNA, 33 bp, Homo sapien
gtctctctgtctcacagattatctaaatatttt

SEQ ID NO: 350085 - DNA, 33 bp, Homo sapien
agcccaggagttgaaggctaccgttagctatga

SEQ ID NO: 350086 - DNA, 33 bp, Homo sapien
agcccaggagttgaagtctaccgttagctatga

SEQ ID NO: 350087 - DNA, 33 bp, Homo sapien
tttgattgaatagtaccaacagcaaaattgatt

SEQ ID NO: 350088 - DNA, 33 bp, Homo sapien
tttgattgaatagtacgaacagcaaaattgatt

SEQ ID NO: 350089 - DNA, 33 bp, Homo sapien
ctatttaaaatgtgcaactcagtagcttttgat

SEQ ID NO: 350090 - DNA, 33 bp, Homo sapien
ctatttaaaatgtgcatctcagtagcttttgat

SEQ ID NO: 350091 - DNA, 33 bp, Homo sapien
gttctaggatggggcccgagatgttacatttct

SEQ ID NO: 350092 - DNA, 33 bp, Homo sapien
gttctaggatggggcctgagatgttacatttct

SEQ ID NO: 350093 - DNA, 33 bp, Homo sapien
gtgacgatttcatacactaagctaataagtttg

SEQ ID NO: 350094 - DNA, 33 bp, Homo sapien
gtgacgatttcatacattaagctaataagtttg

SEQ ID NO: 350095 - DNA, 33 bp, Homo sapien
tgtcaaaatatgcgtagaagtacagtccatatt

SEQ ID NO: 350096 - DNA, 33 bp, Homo sapien
tgtcaaaatatgcgtataagtacagtccatatt

SEQ ID NO: 350097 - DNA, 33 bp, Homo sapien
gactatcttgcttcaaattctcaactaccttag

SEQ ID NO: 350098 - DNA, 33 bp, Homo sapien
gactatcttgcttcaagttctcaactaccttag

SEQ ID NO: 350099 - DNA, 33 bp, Homo sapien
cgtctgcacaggagagaaacattatgaaaagtc

SEQ ID NO: 350100 - DNA, 33 bp, Homo sapien
cgtctgcacaggagaggaacattatgaaaagtc

SEQ ID NO: 350101 - DNA, 33 bp, Homo sapien
gaccttgtcaaaggtcaaacaggtagtaaatca

SEQ ID NO: 350102 - DNA, 33 bp, Homo sapien
gaccttgtcaaaggtcgaacaggtagtaaatca

SEQ ID NO: 350103 - DNA, 33 bp, Homo sapien
acactatctcaggaacactagtatctactacaa

SEQ ID NO: 350104 - DNA, 33 bp, Homo sapien
acactatctcaggaacgctagtatctactacaa

SEQ ID NO: 350105 - DNA, 33 bp, Homo sapien
cttctgaaaaactctacaggagataaggactta

SEQ ID NO: 350106 - DNA, 33 bp, Homo sapien
cttctgaaaaactctataggagataaggactta

SEQ ID NO: 350107 - DNA, 33 bp, Homo sapien
acagaactcggtggaacactaatagtttaatca

SEQ ID NO: 350108 - DNA, 33 bp, Homo sapien
acagaactcggtggaatactaatagtttaatca

SEQ ID NO: 350109 - DNA, 33 bp, Homo sapien
ccaggtggtttgcaggcacattaaagtttgata

SEQ ID NO: 350110 - DNA, 33 bp, Homo sapien
ccaggtggtttgcaggtacattaaagtttgata

SEQ ID NO: 350111 - DNA, 33 bp, Homo sapien
cagtacaaaaaggagacagaaccccagtcaagc

SEQ ID NO: 350112 - DNA, 33 bp, Homo sapien
cagtacaaaaaggagatagaaccccagtcaagc

SEQ ID NO: 350113 - DNA, 33 bp, Homo sapien
gcctgagtacaattaccaaataaggcactagca

SEQ ID NO: 350114 - DNA, 33 bp, Homo sapien
gcctgagtacaattactaaataaggcactagca

SEQ ID NO: 350115 - DNA, 33 bp, Homo sapien
atgcaagaaggctcaaagtgcatttggagaata

SEQ ID NO: 350116 - DNA, 33 bp, Homo sapien
atgcaagaaggctcaaggtgcatttggagaata

SEQ ID NO: 350117 - DNA, 33 bp, Homo sapien
aaggctagaatagtcccgatcatagaaatagaa

SEQ ID NO: 350118 - DNA, 33 bp, Homo sapien
aaggctagaatagtcctgatcatagaaatagaa

SEQ ID NO: 350119 - DNA, 33 bp, Homo sapien
gaaagtacaaactcccagcaggagggcaaccag

SEQ ID NO: 350120 - DNA, 33 bp, Homo sapien
gaaagtacaaactcccggcaggagggcaaccag

SEQ ID NO: 350121 - DNA, 33 bp, Homo sapien
cagggatgctgatgaacatcctgccatgcacag

SEQ ID NO: 350122 - DNA, 33 bp, Homo sapien
cagggatgctgatgaatatcctgccatgcacag

SEQ ID NO: 350123 - DNA, 33 bp, Homo sapien
ggctaagcaaggggaacgttcttttgcaggaga

SEQ ID NO: 350124 - DNA, 33 bp, Homo sapien
ggctaagcaaggggaaggttcttttgcaggaga

SEQ ID NO: 350125 - DNA, 33 bp, Homo sapien
aggcatcttagatctacctaggtcaataattat

SEQ ID NO: 350126 - DNA, 33 bp, Homo sapien
aggcatcttagatctatctaggtcaataattat

SEQ ID NO: 350127 - DNA, 33 bp, Homo sapien
cccctggtttagtaaacgacactaccaccaacc

SEQ ID NO: 350128 - DNA, 33 bp, Homo sapien
cccctggtttagtaaatgacactaccaccaacc

SEQ ID NO: 350129 - DNA, 33 bp, Homo sapien
attggcagcctccctccgaagccaatggcaaaa

SEQ ID NO: 350130 - DNA, 33 bp, Homo sapien
attggcagcctccctctgaagccaatggcaaaa

SEQ ID NO: 350131 - DNA, 33 bp, Homo sapien
gacagtgctaagaaacactttccatttccttag

SEQ ID NO: 350132 - DNA, 33 bp, Homo sapien
gacagtgctaagaaacgctttccatttccttag

SEQ ID NO: 350133 - DNA, 33 bp, Homo sapien
tttatgtgattatccacgcagacttgatctgcc

SEQ ID NO: 350134 - DNA, 33 bp, Homo sapien
tttatgtgattatccatgcagacttgatctgcc

SEQ ID NO: 350135 - DNA, 33 bp, Homo sapien
gagctggttatcttgaccttaaacgtgccattt

SEQ ID NO: 350136 - DNA, 33 bp, Homo sapien
gagctggttatcttgatcttaaacgtgccattt

SEQ ID NO: 350137 - DNA, 33 bp, Homo sapien
aaagaaattggaaaaaagactgagttaaagtgc

SEQ ID NO: 350138 - DNA, 33 bp, Homo sapien
aaagaaattggaaaaatgactgagttaaagtgc

SEQ ID NO: 350139 - DNA, 33 bp, Homo sapien
tttgcctggcagtcaccgtaacattgggtaggt

SEQ ID NO: 350140 - DNA, 33 bp, Homo sapien
tttgcctggcagtcactgtaacattgggtaggt

SEQ ID NO: 350141 - DNA, 33 bp, Homo sapien
caatggcacactgctacgctaacagaattgcta

SEQ ID NO: 350142 - DNA, 33 bp, Homo sapien
caatggcacactgctatgctaacagaattgcta

SEQ ID NO: 350143 - DNA, 33 bp, Homo sapien
gccattggacttaccaacaaaggtgctgcacat

SEQ ID NO: 350144 - DNA, 33 bp, Homo sapien
gccattggacttaccaccaaaggtgctgcacat

SEQ ID NO: 350145 - DNA, 33 bp, Homo sapien
ctgcccctggcattagacattcagaaaggagtg

SEQ ID NO: 350146 - DNA, 33 bp, Homo sapien
ctgcccctggcattaggcattcagaaaggagtg

SEQ ID NO: 350147 - DNA, 33 bp, Homo sapien
cttggatggatagacaaacagtcacgaggactc

SEQ ID NO: 350148 - DNA, 33 bp, Homo sapien
cttggatggatagacagacagtcacgaggactc

SEQ ID NO: 350149 - DNA, 33 bp, Homo sapien
aggtagagaaggcatcaagctacaaaggtcagg

SEQ ID NO: 350150 - DNA, 33 bp, Homo sapien
aggtagagaaggcatcgagctacaaaggtcagg

SEQ ID NO: 350151 - DNA, 33 bp, Homo sapien
gcaggcagtgaatccacaaatgctgaccctact

SEQ ID NO: 350152 - DNA, 33 bp, Homo sapien
gcaggcagtgaatccataaatgctgaccctact

SEQ ID NO: 350153 - DNA, 33 bp, Homo sapien
tagtgaccgaagatgaatactttttgtccacag

SEQ ID NO: 350154 - DNA, 33 bp, Homo sapien
tagtgaccgaagatgagtactttttgtccacag

SEQ ID NO: 350155 - DNA, 33 bp, Homo sapien
ggttaactgcccctcacaggcgctgccctggca

SEQ ID NO: 350156 - DNA, 33 bp, Homo sapien
ggttaactgcccctcataggcgctgccctggca

SEQ ID NO: 350157 - DNA, 33 bp, Homo sapien
tagaaaaacaagattagccagtacctatgtttt

SEQ ID NO: 350158 - DNA, 33 bp, Homo sapien
tagaaaaacaagattatccagtacctatgtttt

SEQ ID NO: 350159 - DNA, 33 bp, Homo sapien
aggatctcttaattccaccctaccagcacctca

SEQ ID NO: 350160 - DNA, 33 bp, Homo sapien
aggatctcttaattccgccctaccagcacctca

SEQ ID NO: 350161 - DNA, 33 bp, Homo sapien
tttctgccctaagagaccacagaatagctgtaa

SEQ ID NO: 350162 - DNA, 33 bp, Homo sapien
tttctgccctaagagagcacagaatagctgtaa

SEQ ID NO: 350163 - DNA, 33 bp, Homo sapien
aatagaggctaaatcacctaatctacagaatct

SEQ ID NO: 350164 - DNA, 33 bp, Homo sapien
aatagaggctaaatcatctaatctacagaatct

SEQ ID NO: 350165 - DNA, 33 bp, Homo sapien
tatggcacagttatcaatcaatctgagtgggca

SEQ ID NO: 350166 - DNA, 33 bp, Homo sapien
tatggcacagttatcagtcaatctgagtgggca

SEQ ID NO: 350167 - DNA, 33 bp, Homo sapien
cacagttagtaagtggcaaagaatttgaatgca

SEQ ID NO: 350168 - DNA, 33 bp, Homo sapien
cacagttagtaagtggtaaagaatttgaatgca

SEQ ID NO: 350169 - DNA, 33 bp, Homo sapien
caggatgttacggtacaaacgtggtcactacac

SEQ ID NO: 350170 - DNA, 33 bp, Homo sapien
caggatgttacggtaccaacgtggtcactacac

SEQ ID NO: 350171 - DNA, 33 bp, Homo sapien
agttggaatatacataccatttattaagttcac

SEQ ID NO: 350172 - DNA, 33 bp, Homo sapien
agttggaatatacatatcatttattaagttcac

SEQ ID NO: 350173 - DNA, 33 bp, Homo sapien
cactcagcaccttaaaatgtccactcttggaga

SEQ ID NO: 350174 - DNA, 33 bp, Homo sapien
cactcagcaccttaaagtgtccactcttggaga

SEQ ID NO: 350175 - DNA, 33 bp, Homo sapien
gagaatgctcggagtaaaaagatcaatatgaga

SEQ ID NO: 350176 - DNA, 33 bp, Homo sapien
gagaatgctcggagtagaaagatcaatatgaga

SEQ ID NO: 350177 - DNA, 33 bp, Homo sapien
tattttacttcaaataccataacctcatttaca

SEQ ID NO: 350178 - DNA, 33 bp, Homo sapien
tattttacttcaaatatcataacctcatttaca

SEQ ID NO: 350179 - DNA, 33 bp, Homo sapien
ctatctccccataaaaatagacagttcaaacag

SEQ ID NO: 350180 - DNA, 33 bp, Homo sapien
ctatctccccataaaactagacagttcaaacag

SEQ ID NO: 350181 - DNA, 33 bp, Homo sapien
ctgttgtactttccctcaacattccactttctc

SEQ ID NO: 350182 - DNA, 33 bp, Homo sapien
ctgttgtactttcccttaacattccactttctc

SEQ ID NO: 350183 - DNA, 33 bp, Homo sapien
agagagggcatgataaaacagtgtctgaagctg

SEQ ID NO: 350184 - DNA, 33 bp, Homo sapien
agagagggcatgataagacagtgtctgaagctg

SEQ ID NO: 350185 - DNA, 33 bp, Homo sapien
ataactggtatttctccaggaactctctgtaac

SEQ ID NO: 350186 - DNA, 33 bp, Homo sapien
ataactggtatttctctaggaactctctgtaac

SEQ ID NO: 350187 - DNA, 33 bp, Homo sapien
ggatgttgtgaggggagaatttaggctgggctt

SEQ ID NO: 350188 - DNA, 33 bp, Homo sapien
ggatgttgtgaggggataatttaggctgggctt

SEQ ID NO: 350189 - DNA, 33 bp, Homo sapien
aaggggtgctctgcaacgtctagtaaataacgg

SEQ ID NO: 350190 - DNA, 33 bp, Homo sapien
aaggggtgctctgcaatgtctagtaaataacgg

SEQ ID NO: 350191 - DNA, 33 bp, Homo sapien
tgcttttatacttttgaattgttcacttagtgc

SEQ ID NO: 350192 - DNA, 33 bp, Homo sapien
tgcttttatacttttgtattgttcacttagtgc

SEQ ID NO: 350193 - DNA, 33 bp, Homo sapien
tagacattgggaacctaacggtatttgccccag

SEQ ID NO: 350194 - DNA, 33 bp, Homo sapien
tagacattgggaacctgacggtatttgccccag

SEQ ID NO: 350195 - DNA, 33 bp, Homo sapien
atcactgttcttcacaatgatcttcatccccac

SEQ ID NO: 350196 - DNA, 33 bp, Homo sapien
atcactgttcttcacagtgatcttcatccccac

SEQ ID NO: 350197 - DNA, 33 bp, Homo sapien
ctcacagagaggtctcaccacaaatttggctca

SEQ ID NO: 350198 - DNA, 33 bp, Homo sapien
ctcacagagaggtctcgccacaaatttggctca

SEQ ID NO: 350199 - DNA, 33 bp, Homo sapien
gaccagttggcctagacgtgaaagaatgggagt

SEQ ID NO: 350200 - DNA, 33 bp, Homo sapien
gaccagttggcctagatgtgaaagaatgggagt

SEQ ID NO: 350201 - DNA, 33 bp, Homo sapien
aggctagctgctgttacaatgaatttcctttca

SEQ ID NO: 350202 - DNA, 33 bp, Homo sapien
aggctagctgctgttataatgaatttcctttca

SEQ ID NO: 350203 - DNA, 33 bp, Homo sapien
acaatgtttctaaggaataacaatcaaggaact

SEQ ID NO: 350204 - DNA, 33 bp, Homo sapien
acaatgtttctaaggagtaacaatcaaggaact

SEQ ID NO: 350205 - DNA, 33 bp, Homo sapien
gcctgtatgactctcaaggtctcttgaagctcc

SEQ ID NO: 350206 - DNA, 33 bp, Homo sapien
gcctgtatgactctcagggtctcttgaagctcc

SEQ ID NO: 350207 - DNA, 33 bp, Homo sapien
tgtttccttcctgacccctgcagtgatatccaa

SEQ ID NO: 350208 - DNA, 33 bp, Homo sapien
tgtttccttcctgaccgctgcagtgatatccaa

SEQ ID NO: 350209 - DNA, 33 bp, Homo sapien
ctcttgctattcagatgaccaccccactcatct

SEQ ID NO: 350210 - DNA, 33 bp, Homo sapien
ctcttgctattcagattaccaccccactcatct

SEQ ID NO: 350211 - DNA, 33 bp, Homo sapien
cttgaggaccatattaagggtttaagatgttga

SEQ ID NO: 350212 - DNA, 33 bp, Homo sapien
cttgaggaccatattaggggtttaagatgttga

SEQ ID NO: 350213 - DNA, 33 bp, Homo sapien
ctggccatttatgttccgacccaaaggacaaat

SEQ ID NO: 350214 - DNA, 33 bp, Homo sapien
ctggccatttatgttctgacccaaaggacaaat

SEQ ID NO: 350215 - DNA, 33 bp, Homo sapien
tgaatgagtcgaggtcaaatggattctattttg

SEQ ID NO: 350216 - DNA, 33 bp, Homo sapien
tgaatgagtcgaggtccaatggattctattttg

SEQ ID NO: 350217 - DNA, 33 bp, Homo sapien
taaatgaaaagaccagaagttgacaagtacatg

SEQ ID NO: 350218 - DNA, 33 bp, Homo sapien
taaatgaaaagaccagtagttgacaagtacatg

SEQ ID NO: 350219 - DNA, 33 bp, Homo sapien
aaaactgaggaaggaacaggagccacacatgtc

SEQ ID NO: 350220 - DNA, 33 bp, Homo sapien
aaaactgaggaaggaagaggagccacacatgtc

SEQ ID NO: 350221 - DNA, 33 bp, Homo sapien
aaacccagctgaaaacaaataccacaaagagac

SEQ ID NO: 350222 - DNA, 33 bp, Homo sapien
aaacccagctgaaaacgaataccacaaagagac

SEQ ID NO: 350223 - DNA, 33 bp, Homo sapien
gactcacacagaaatcacttggagaggaagaac

SEQ ID NO: 350224 - DNA, 33 bp, Homo sapien
gactcacacagaaatcgcttggagaggaagaac

SEQ ID NO: 350225 - DNA, 33 bp, Homo sapien
gagaacccattatgtgccaagccattgctagaa

SEQ ID NO: 350226 - DNA, 33 bp, Homo sapien
gagaacccattatgtgtcaagccattgctagaa

SEQ ID NO: 350227 - DNA, 33 bp, Homo sapien
agcattttcaccaccaaaccatatgctgttctc

SEQ ID NO: 350228 - DNA, 33 bp, Homo sapien
agcattttcaccaccagaccatatgctgttctc

SEQ ID NO: 350229 - DNA, 33 bp, Homo sapien
tctatttcttcttttcgcctgtgaacagcattt

SEQ ID NO: 350230 - DNA, 33 bp, Homo sapien
tctatttcttcttttctcctgtgaacagcattt

SEQ ID NO: 350231 - DNA, 33 bp, Homo sapien
agaatgtttgacatgacacaaagctgcccgaag

SEQ ID NO: 350232 - DNA, 33 bp, Homo sapien
agaatgtttgacatgatacaaagctgcccgaag

SEQ ID NO: 350233 - DNA, 33 bp, Homo sapien
atcaccccagtgatgaagagaggtgtgcagaaa

SEQ ID NO: 350234 - DNA, 33 bp, Homo sapien
atcaccccagtgatgatgagaggtgtgcagaaa

SEQ ID NO: 350235 - DNA, 33 bp, Homo sapien
acgattacctatgctcacactatcacaggaagg

SEQ ID NO: 350236 - DNA, 33 bp, Homo sapien
acgattacctatgctcccactatcacaggaagg

SEQ ID NO: 350237 - DNA, 33 bp, Homo sapien
atgcaggctacttccactcaagctctagaagga

SEQ ID NO: 350238 - DNA, 33 bp, Homo sapien
atgcaggctacttccattcaagctctagaagga

SEQ ID NO: 350239 - DNA, 33 bp, Homo sapien
acacatcgatatagaaagtaaagaggacaagga

SEQ ID NO: 350240 - DNA, 33 bp, Homo sapien
acacatcgatatagaaggtaaagaggacaagga

SEQ ID NO: 350241 - DNA, 33 bp, Homo sapien
tacaaaagctataagaacaagaagtgcattcat

SEQ ID NO: 350242 - DNA, 33 bp, Homo sapien
tacaaaagctataagagcaagaagtgcattcat

SEQ ID NO: 350243 - DNA, 33 bp, Homo sapien
ttgtaattgcattgaaatccatgtgcttgctga

SEQ ID NO: 350244 - DNA, 33 bp, Homo sapien
ttgtaattgcattgaagtccatgtgcttgctga

SEQ ID NO: 350245 - DNA, 33 bp, Homo sapien
caagctacctattagaagaaaatcattttaaat

SEQ ID NO: 350246 - DNA, 33 bp, Homo sapien
caagctacctattagacgaaaatcattttaaat

SEQ ID NO: 350247 - DNA, 33 bp, Homo sapien
ctggccaacggtgaaacagcctcctaactgctc

SEQ ID NO: 350248 - DNA, 33 bp, Homo sapien
ctggccaacggtgaaatagcctcctaactgctc

SEQ ID NO: 350249 - DNA, 33 bp, Homo sapien
accggacttcctcataaagacagggagctgtgg

SEQ ID NO: 350250 - DNA, 33 bp, Homo sapien
accggacttcctcatagagacagggagctgtgg

SEQ ID NO: 350251 - DNA, 33 bp, Homo sapien
caggtctgacttcctaacaagcaccaatcttat

SEQ ID NO: 350252 - DNA, 33 bp, Homo sapien
caggtctgacttcctaccaagcaccaatcttat

SEQ ID NO: 350253 - DNA, 33 bp, Homo sapien
gtgagagttagaaatgaacaatggagttctgtg

SEQ ID NO: 350254 - DNA, 33 bp, Homo sapien
gtgagagttagaaatggacaatggagttctgtg

SEQ ID NO: 350255 - DNA, 33 bp, Homo sapien
attctagtgaacaaaaactgcctactggagatt

SEQ ID NO: 350256 - DNA, 33 bp, Homo sapien
attctagtgaacaaaatctgcctactggagatt

SEQ ID NO: 350257 - DNA, 33 bp, Homo sapien
gcaatgacgcagtaaccgagctttgtggggtcg

SEQ ID NO: 350258 - DNA, 33 bp, Homo sapien
gcaatgacgcagtaactgagctttgtggggtcg

SEQ ID NO: 350259 - DNA, 33 bp, Homo sapien
gagatataactaatgccactgtaaggcagtgct

SEQ ID NO: 350260 - DNA, 33 bp, Homo sapien
gagatataactaatgctactgtaaggcagtgct

SEQ ID NO: 350261 - DNA, 33 bp, Homo sapien
cagtgtgagactccaccatgatatgacaaagcg

SEQ ID NO: 350262 - DNA, 33 bp, Homo sapien
cagtgtgagactccactatgatatgacaaagcg

SEQ ID NO: 350263 - DNA, 33 bp, Homo sapien
atggggcaaatgctcaccactgttaactgttat

SEQ ID NO: 350264 - DNA, 33 bp, Homo sapien
atggggcaaatgctcatcactgttaactgttat

SEQ ID NO: 350265 - DNA, 33 bp, Homo sapien
tacttctcagcttggtcaatacctactcctcct

SEQ ID NO: 350266 - DNA, 33 bp, Homo sapien
tacttctcagcttggtgaatacctactcctcct

SEQ ID NO: 350267 - DNA, 33 bp, Homo sapien
cactggtggaggcttccctgactctcccaagct

SEQ ID NO: 350268 - DNA, 33 bp, Homo sapien
cactggtggaggcttctctgactctcccaagct

SEQ ID NO: 350269 - DNA, 33 bp, Homo sapien
tcctgctccctcaagacggcaagctatgcagta

SEQ ID NO: 350270 - DNA, 33 bp, Homo sapien
tcctgctccctcaagatggcaagctatgcagta

SEQ ID NO: 350271 - DNA, 33 bp, Homo sapien
gaatgaatgaatcaacacgttcgttaggggtta

SEQ ID NO: 350272 - DNA, 33 bp, Homo sapien
gaatgaatgaatcaacgcgttcgttaggggtta

SEQ ID NO: 350273 - DNA, 33 bp, Homo sapien
tgcatggttgtgaaaacagaatatgaccttgta

SEQ ID NO: 350274 - DNA, 33 bp, Homo sapien
tgcatggttgtgaaaatagaatatgaccttgta

SEQ ID NO: 350275 - DNA, 33 bp, Homo sapien
ctcaactatagtggcaaaagcacatttgcagtt

SEQ ID NO: 350276 - DNA, 33 bp, Homo sapien
ctcaactatagtggcataagcacatttgcagtt

SEQ ID NO: 350277 - DNA, 33 bp, Homo sapien
acctaacagcagagcacgattaacagcaggtga

SEQ ID NO: 350278 - DNA, 33 bp, Homo sapien
acctaacagcagagcatgattaacagcaggtga

SEQ ID NO: 350279 - DNA, 33 bp, Homo sapien
taggataagaagtgaccctgtggatagtgagca

SEQ ID NO: 350280 - DNA, 33 bp, Homo sapien
taggataagaagtgactctgtggatagtgagca

SEQ ID NO: 350281 - DNA, 33 bp, Homo sapien
gctggagctgagcacacggatggatagcacttg

SEQ ID NO: 350282 - DNA, 33 bp, Homo sapien
gctggagctgagcacatggatggatagcacttg

SEQ ID NO: 350283 - DNA, 33 bp, Homo sapien
aaagtgtagggccagaagattccaaacgccaag

SEQ ID NO: 350284 - DNA, 33 bp, Homo sapien
aaagtgtagggccagatgattccaaacgccaag

SEQ ID NO: 350285 - DNA, 33 bp, Homo sapien
ctgagccatgtacaagaactggaacaagtcctg

SEQ ID NO: 350286 - DNA, 33 bp, Homo sapien
ctgagccatgtacaagcactggaacaagtcctg

SEQ ID NO: 350287 - DNA, 33 bp, Homo sapien
tgaagtccttgattccagcccagtactattgat

SEQ ID NO: 350288 - DNA, 33 bp, Homo sapien
tgaagtccttgattccggcccagtactattgat

SEQ ID NO: 350289 - DNA, 33 bp, Homo sapien
cctaaataccatcacaagtatccttacaagaga

SEQ ID NO: 350290 - DNA, 33 bp, Homo sapien
cctaaataccatcacatgtatccttacaagaga

SEQ ID NO: 350291 - DNA, 33 bp, Homo sapien
caataacctgaggataagaatgcgggcagagtt

SEQ ID NO: 350292 - DNA, 33 bp, Homo sapien
caataacctgaggataggaatgcgggcagagtt

SEQ ID NO: 350293 - DNA, 33 bp, Homo sapien
gccggcctggttatgccctttacaggtaaaggg

SEQ ID NO: 350294 - DNA, 33 bp, Homo sapien
gccggcctggttatgctctttacaggtaaaggg

SEQ ID NO: 350295 - DNA, 33 bp, Homo sapien
aaatggtattctgggaaaatattttggcagtgg

SEQ ID NO: 350296 - DNA, 33 bp, Homo sapien
aaatggtattctgggagaatattttggcagtgg

SEQ ID NO: 350297 - DNA, 33 bp, Homo sapien
ttagtgtttctttggtcaaaaggttcagtacgc

SEQ ID NO: 350298 - DNA, 33 bp, Homo sapien
ttagtgtttctttggtgaaaaggttcagtacgc

SEQ ID NO: 350299 - DNA, 33 bp, Homo sapien
cctgtgagatgataaaactccttcttgtttggg

SEQ ID NO: 350300 - DNA, 33 bp, Homo sapien
cctgtgagatgataaagctccttcttgtttggg

SEQ ID NO: 350301 - DNA, 33 bp, Homo sapien
gctccctggacagcaacgttgatttaggaagca

SEQ ID NO: 350302 - DNA, 33 bp, Homo sapien
gctccctggacagcaatgttgatttaggaagca

SEQ ID NO: 350303 - DNA, 33 bp, Homo sapien
atgaggtacaatcataacaattgccatcaattc

SEQ ID NO: 350304 - DNA, 33 bp, Homo sapien
atgaggtacaatcatagcaattgccatcaattc

SEQ ID NO: 350305 - DNA, 33 bp, Homo sapien
attgaattatagtcatcaggttggaagggacgc

SEQ ID NO: 350306 - DNA, 33 bp, Homo sapien
attgaattatagtcattaggttggaagggacgc

SEQ ID NO: 350307 - DNA, 33 bp, Homo sapien
cttggtttggtacccactgatggttgttgtggc

SEQ ID NO: 350308 - DNA, 33 bp, Homo sapien
cttggtttggtacccagtgatggttgttgtggc

SEQ ID NO: 350309 - DNA, 33 bp, Homo sapien
aatattgctttgtctgccaatgagtttttattg

SEQ ID NO: 350310 - DNA, 33 bp, Homo sapien
aatattgctttgtctgtcaatgagtttttattg

SEQ ID NO: 350311 - DNA, 33 bp, Homo sapien
tcctggtggaaggacaatacatggagcacaggt

SEQ ID NO: 350312 - DNA, 33 bp, Homo sapien
tcctggtggaaggacagtacatggagcacaggt

SEQ ID NO: 350313 - DNA, 33 bp, Homo sapien
ggcaaggaaggaccacacgatcagcctcagagc

SEQ ID NO: 350314 - DNA, 33 bp, Homo sapien
ggcaaggaaggaccacgcgatcagcctcagagc

SEQ ID NO: 350315 - DNA, 33 bp, Homo sapien
tctctcccatctctcacataatgctggcctgtt

SEQ ID NO: 350316 - DNA, 33 bp, Homo sapien
tctctcccatctctcagataatgctggcctgtt

SEQ ID NO: 350317 - DNA, 33 bp, Homo sapien
aagcacactatccatccatctgtcatgggccca

SEQ ID NO: 350318 - DNA, 33 bp, Homo sapien
aagcacactatccatctatctgtcatgggccca

SEQ ID NO: 350319 - DNA, 33 bp, Homo sapien
ctgtattcattagtgtaaagttgagctctgaac

SEQ ID NO: 350320 - DNA, 33 bp, Homo sapien
ctgtattcattagtgtgaagttgagctctgaac

SEQ ID NO: 350321 - DNA, 33 bp, Homo sapien
ctgaatcctgtgaataagttaaatgatgtggca

SEQ ID NO: 350322 - DNA, 33 bp, Homo sapien
ctgaatcctgtgaataggttaaatgatgtggca

SEQ ID NO: 350323 - DNA, 33 bp, Homo sapien
cttctcagatcccgagaatacacagctggtgct

SEQ ID NO: 350324 - DNA, 33 bp, Homo sapien
cttctcagatcccgaggatacacagctggtgct

SEQ ID NO: 350325 - DNA, 33 bp, Homo sapien
agcacggcacccatgacaatgctgccagtgggg

SEQ ID NO: 350326 - DNA, 33 bp, Homo sapien
agcacggcacccatgataatgctgccagtgggg

SEQ ID NO: 350327 - DNA, 33 bp, Homo sapien
gtcagaagctgtgggaccagcggtattgggtca

SEQ ID NO: 350328 - DNA, 33 bp, Homo sapien
gtcagaagctgtgggatcagcggtattgggtca

SEQ ID NO: 350329 - DNA, 33 bp, Homo sapien
gcagaggtgctggaaacgaagaagagagagtgg

SEQ ID NO: 350330 - DNA, 33 bp, Homo sapien
gcagaggtgctggaaatgaagaagagagagtgg

SEQ ID NO: 350331 - DNA, 33 bp, Homo sapien
tattatcttcagcatcaccagtattattactaa

SEQ ID NO: 350332 - DNA, 33 bp, Homo sapien
tattatcttcagcatcgccagtattattactaa

SEQ ID NO: 350333 - DNA, 33 bp, Homo sapien
gcactgtgtagaggacagcaaacagcacaacaa

SEQ ID NO: 350334 - DNA, 33 bp, Homo sapien
gcactgtgtagaggacggcaaacagcacaacaa

SEQ ID NO: 350335 - DNA, 33 bp, Homo sapien
aagcaatatatgggaaaccaaggcacttgggca

SEQ ID NO: 350336 - DNA, 33 bp, Homo sapien
aagcaatatatgggaatccaaggcacttgggca

SEQ ID NO: 350337 - DNA, 33 bp, Homo sapien
taataacacccttttccatacactgggtataat

SEQ ID NO: 350338 - DNA, 33 bp, Homo sapien
taataacacccttttctatacactgggtataat

SEQ ID NO: 350339 - DNA, 33 bp, Homo sapien
gaggaatatgggaagacgaaggttgatttgaga

SEQ ID NO: 350340 - DNA, 33 bp, Homo sapien
gaggaatatgggaagatgaaggttgatttgaga

SEQ ID NO: 350341 - DNA, 33 bp, Homo sapien
ccttaagtgatttgtacgccaatttaattttga

SEQ ID NO: 350342 - DNA, 33 bp, Homo sapien
ccttaagtgatttgtatgccaatttaattttga

SEQ ID NO: 350343 - DNA, 33 bp, Homo sapien
ctggaaaacctgcaccagaacttcacagagact

SEQ ID NO: 350344 - DNA, 33 bp, Homo sapien
ctggaaaacctgcaccggaacttcacagagact

SEQ ID NO: 350345 - DNA, 33 bp, Homo sapien
aaacagctgcaatataaacagtcctctggaaaa

SEQ ID NO: 350346 - DNA, 33 bp, Homo sapien
aaacagctgcaatatagacagtcctctggaaaa

SEQ ID NO: 350347 - DNA, 33 bp, Homo sapien
aaccagacccaagctcacctgttcaccagtccc

SEQ ID NO: 350348 - DNA, 33 bp, Homo sapien
aaccagacccaagctcgcctgttcaccagtccc

SEQ ID NO: 350349 - DNA, 33 bp, Homo sapien
actcatctttaaagtaagagtacagagaaaagc

SEQ ID NO: 350350 - DNA, 33 bp, Homo sapien
actcatctttaaagtaggagtacagagaaaagc

SEQ ID NO: 350351 - DNA, 33 bp, Homo sapien
gccctgaggagctacacaatcttcttgagcaga

SEQ ID NO: 350352 - DNA, 33 bp, Homo sapien
gccctgaggagctacagaatcttcttgagcaga

SEQ ID NO: 350353 - DNA, 33 bp, Homo sapien
cgatcttccttacctaactctatttttccacag

SEQ ID NO: 350354 - DNA, 33 bp, Homo sapien
cgatcttccttacctatctctatttttccacag

SEQ ID NO: 350355 - DNA, 33 bp, Homo sapien
aaggtcaaaccacagacggctttagctgccact

SEQ ID NO: 350356 - DNA, 33 bp, Homo sapien
aaggtcaaaccacagatggctttagctgccact

SEQ ID NO: 350357 - DNA, 33 bp, Homo sapien
tcacaacccctacagacgatactttagcagtca

SEQ ID NO: 350358 - DNA, 33 bp, Homo sapien
tcacaacccctacagatgatactttagcagtca

SEQ ID NO: 350359 - DNA, 33 bp, Homo sapien
gaaacttacaaaataacggtaagagtgattcca

SEQ ID NO: 350360 - DNA, 33 bp, Homo sapien
gaaacttacaaaataatggtaagagtgattcca

SEQ ID NO: 350361 - DNA, 33 bp, Homo sapien
aagaggcagctggtaaaccaagaaaacatcatc

SEQ ID NO: 350362 - DNA, 33 bp, Homo sapien
aagaggcagctggtaatccaagaaaacatcatc

SEQ ID NO: 350363 - DNA, 33 bp, Homo sapien
cccgcgtgcccatgaaactttggcctgaagttc

SEQ ID NO: 350364 - DNA, 33 bp, Homo sapien
cccgcgtgcccatgaacctttggcctgaagttc

SEQ ID NO: 350365 - DNA, 33 bp, Homo sapien
agacaccagccctaggaagttttagcatgagtt

SEQ ID NO: 350366 - DNA, 33 bp, Homo sapien
agacaccagccctagggagttttagcatgagtt

SEQ ID NO: 350367 - DNA, 33 bp, Homo sapien
tggggaaaatgctgaactgattttatgcttctg

SEQ ID NO: 350368 - DNA, 33 bp, Homo sapien
tggggaaaatgctgaattgattttatgcttctg

SEQ ID NO: 350369 - DNA, 33 bp, Homo sapien
caccctatttcagatacgtgacatcagaggcca

SEQ ID NO: 350370 - DNA, 33 bp, Homo sapien
caccctatttcagatatgtgacatcagaggcca

SEQ ID NO: 350371 - DNA, 33 bp, Homo sapien
ctgctgttgttgtgcgaaatgtcctataaatgt

SEQ ID NO: 350372 - DNA, 33 bp, Homo sapien
ctgctgttgttgtgcggaatgtcctataaatgt

SEQ ID NO: 350373 - DNA, 33 bp, Homo sapien
ttattacaggaggaaactggaaacttactatcc

SEQ ID NO: 350374 - DNA, 33 bp, Homo sapien
ttattacaggaggaaattggaaacttactatcc

SEQ ID NO: 350375 - DNA, 33 bp, Homo sapien
gctcttatttatggcactgaagttttgtgcaga

SEQ ID NO: 350376 - DNA, 33 bp, Homo sapien
gctcttatttatggcattgaagttttgtgcaga

SEQ ID NO: 350377 - DNA, 33 bp, Homo sapien
tctccccaagtgtccaagatccaaagggggaaa

SEQ ID NO: 350378 - DNA, 33 bp, Homo sapien
tctccccaagtgtccaggatccaaagggggaaa

SEQ ID NO: 350379 - DNA, 33 bp, Homo sapien
accggcagtgataagaataagtcttggtggtgt

SEQ ID NO: 350380 - DNA, 33 bp, Homo sapien
accggcagtgataagagtaagtcttggtggtgt

SEQ ID NO: 350381 - DNA, 33 bp, Homo sapien
cttgaaccctgagacactctgctttgttacatg

SEQ ID NO: 350382 - DNA, 33 bp, Homo sapien
cttgaaccctgagacagtctgctttgttacatg

SEQ ID NO: 350383 - DNA, 33 bp, Homo sapien
ctgtacagggggcaaactctgaattctgggcag

SEQ ID NO: 350384 - DNA, 33 bp, Homo sapien
ctgtacagggggcaaattctgaattctgggcag

SEQ ID NO: 350385 - DNA, 33 bp, Homo sapien
tgagagactgtttgtgcaagaaggagcgagagg

SEQ ID NO: 350386 - DNA, 33 bp, Homo sapien
tgagagactgtttgtgtaagaaggagcgagagg

SEQ ID NO: 350387 - DNA, 33 bp, Homo sapien
aatactgcacatgttaggagtgaactggaccat

SEQ ID NO: 350388 - DNA, 33 bp, Homo sapien
aatactgcacatgttatgagtgaactggaccat

SEQ ID NO: 350389 - DNA, 33 bp, Homo sapien
ccgaggacattgccccaagctttgtggaggcac

SEQ ID NO: 350390 - DNA, 33 bp, Homo sapien
ccgaggacattgccccgagctttgtggaggcac

SEQ ID NO: 350391 - DNA, 33 bp, Homo sapien
atggaagggaatggagatccaggtttctgagaa

SEQ ID NO: 350392 - DNA, 33 bp, Homo sapien
atggaagggaatggaggtccaggtttctgagaa

SEQ ID NO: 350393 - DNA, 33 bp, Homo sapien
gatagaaggaaatggtaaaaatcaattcatccc

SEQ ID NO: 350394 - DNA, 33 bp, Homo sapien
gatagaaggaaatggttaaaatcaattcatccc

SEQ ID NO: 350395 - DNA, 33 bp, Homo sapien
agcgcgaagtagggacagcgcctgtgttgtgta

SEQ ID NO: 350396 - DNA, 33 bp, Homo sapien
agcgcgaagtagggaccgcgcctgtgttgtgta

SEQ ID NO: 350397 - DNA, 33 bp, Homo sapien
aaagtactttcctgaacgtgtgttagacttcaa

SEQ ID NO: 350398 - DNA, 33 bp, Homo sapien
aaagtactttcctgaatgtgtgttagacttcaa

SEQ ID NO: 350399 - DNA, 33 bp, Homo sapien
ccaagaagatataataagcacaaacattcatgc

SEQ ID NO: 350400 - DNA, 33 bp, Homo sapien
ccaagaagatataataggcacaaacattcatgc

SEQ ID NO: 350401 - DNA, 33 bp, Homo sapien
ctgaattccccacttaaagcctctctgacctgc

SEQ ID NO: 350402 - DNA, 33 bp, Homo sapien
ctgaattccccacttagagcctctctgacctgc

SEQ ID NO: 350403 - DNA, 33 bp, Homo sapien
ccagcacacagagtgaacgccaggaaaattctc

SEQ ID NO: 350404 - DNA, 33 bp, Homo sapien
ccagcacacagagtgagcgccaggaaaattctc

SEQ ID NO: 350405 - DNA, 33 bp, Homo sapien
ctggctcctgctccccagaatccttgtcatcaa

SEQ ID NO: 350406 - DNA, 33 bp, Homo sapien
ctggctcctgctccccggaatccttgtcatcaa

SEQ ID NO: 350407 - DNA, 33 bp, Homo sapien
gtccagtgcctggaaaagtccctggtacaaagt

SEQ ID NO: 350408 - DNA, 33 bp, Homo sapien
gtccagtgcctggaaatgtccctggtacaaagt

SEQ ID NO: 350409 - DNA, 33 bp, Homo sapien
gctctgactagtctcaactctgtgatcttgggc

SEQ ID NO: 350410 - DNA, 33 bp, Homo sapien
gctctgactagtctcatctctgtgatcttgggc

SEQ ID NO: 350411 - DNA, 33 bp, Homo sapien
agcctgacaggacccaacgtcagagtgtacctt

SEQ ID NO: 350412 - DNA, 33 bp, Homo sapien
agcctgacaggacccagcgtcagagtgtacctt

SEQ ID NO: 350413 - DNA, 33 bp, Homo sapien
aaaaggacgaagctcaacatttcctcccctctg

SEQ ID NO: 350414 - DNA, 33 bp, Homo sapien
aaaaggacgaagctcaccatttcctcccctctg

SEQ ID NO: 350415 - DNA, 33 bp, Homo sapien
gccttttattgctcgcgattgcatacactattt

SEQ ID NO: 350416 - DNA, 33 bp, Homo sapien
gccttttattgctcgctattgcatacactattt

SEQ ID NO: 350417 - DNA, 33 bp, Homo sapien
gtgcttccctcaccacagaaatggagttggggg

SEQ ID NO: 350418 - DNA, 33 bp, Homo sapien
gtgcttccctcaccacggaaatggagttggggg

SEQ ID NO: 350419 - DNA, 33 bp, Homo sapien
gtacccgctgcttgcacgccctgtgctagacat

SEQ ID NO: 350420 - DNA, 33 bp, Homo sapien
gtacccgctgcttgcaggccctgtgctagacat

SEQ ID NO: 350421 - DNA, 33 bp, Homo sapien
gacctgtctggcactaccaggctcatctgacag

SEQ ID NO: 350422 - DNA, 33 bp, Homo sapien
gacctgtctggcactagcaggctcatctgacag

SEQ ID NO: 350423 - DNA, 33 bp, Homo sapien
gatcaaaacactcagcagctaaatgaattcggc

SEQ ID NO: 350424 - DNA, 33 bp, Homo sapien
gatcaaaacactcagcggctaaatgaattcggc

SEQ ID NO: 350425 - DNA, 33 bp, Homo sapien
gatgcacactcttaacacatatgtacacgctct

SEQ ID NO: 350426 - DNA, 33 bp, Homo sapien
gatgcacactcttaacgcatatgtacacgctct

SEQ ID NO: 350427 - DNA, 33 bp, Homo sapien
gttcatgaattctcaacactttcctgccatccc

SEQ ID NO: 350428 - DNA, 33 bp, Homo sapien
gttcatgaattctcaatactttcctgccatccc

SEQ ID NO: 350429 - DNA, 33 bp, Homo sapien
tcatggtagctgagtacggtgatgagctaagct

SEQ ID NO: 350430 - DNA, 33 bp, Homo sapien
tcatggtagctgagtatggtgatgagctaagct

SEQ ID NO: 350431 - DNA, 33 bp, Homo sapien
ttcatcatggaaggtaactggtattcatctctg

SEQ ID NO: 350432 - DNA, 33 bp, Homo sapien
ttcatcatggaaggtacctggtattcatctctg

SEQ ID NO: 350433 - DNA, 33 bp, Homo sapien
tcagtgctgtcacagaacggaaatgcttcagga

SEQ ID NO: 350434 - DNA, 33 bp, Homo sapien
tcagtgctgtcacagagcggaaatgcttcagga

SEQ ID NO: 350435 - DNA, 33 bp, Homo sapien
tggtttggaatattgcacttgaaggtggttggt

SEQ ID NO: 350436 - DNA, 33 bp, Homo sapien
tggtttggaatattgcccttgaaggtggttggt

SEQ ID NO: 350437 - DNA, 33 bp, Homo sapien
ccaagagggtgaaaaacgaacccatcaccaacc

SEQ ID NO: 350438 - DNA, 33 bp, Homo sapien
ccaagagggtgaaaaatgaacccatcaccaacc

SEQ ID NO: 350439 - DNA, 33 bp, Homo sapien
gcaaggtgatggatcccaaatcttaaatgcaag

SEQ ID NO: 350440 - DNA, 33 bp, Homo sapien
gcaaggtgatggatcctaaatcttaaatgcaag

SEQ ID NO: 350441 - DNA, 33 bp, Homo sapien
gggattaaccctctaacaccacttctggcaaat

SEQ ID NO: 350442 - DNA, 33 bp, Homo sapien
gggattaaccctctaataccacttctggcaaat

SEQ ID NO: 350443 - DNA, 33 bp, Homo sapien
tctactggccacctgaagcatgaagcagtcctg

SEQ ID NO: 350444 - DNA, 33 bp, Homo sapien
tctactggccacctgaggcatgaagcagtcctg

SEQ ID NO: 350445 - DNA, 33 bp, Homo sapien
ctgtaacgagcacttaccgatgtctcgctggat

SEQ ID NO: 350446 - DNA, 33 bp, Homo sapien
ctgtaacgagcacttatcgatgtctcgctggat

SEQ ID NO: 350447 - DNA, 33 bp, Homo sapien
ccctgttcactcttccacaaagaacccttcccc

SEQ ID NO: 350448 - DNA, 33 bp, Homo sapien
ccctgttcactcttcctcaaagaacccttcccc

SEQ ID NO: 350449 - DNA, 33 bp, Homo sapien
tgggtgctgtgggtaaagtctgaggggacagtg

SEQ ID NO: 350450 - DNA, 33 bp, Homo sapien
tgggtgctgtgggtaaggtctgaggggacagtg

SEQ ID NO: 350451 - DNA, 33 bp, Homo sapien
gggcaccgtgacatacacattgctttgcacacg

SEQ ID NO: 350452 - DNA, 33 bp, Homo sapien
gggcaccgtgacatacgcattgctttgcacacg

SEQ ID NO: 350453 - DNA, 33 bp, Homo sapien
taataagaaccattaaaagtgcgacggcaggca

SEQ ID NO: 350454 - DNA, 33 bp, Homo sapien
taataagaaccattaacagtgcgacggcaggca

SEQ ID NO: 350455 - DNA, 33 bp, Homo sapien
ccaatcgagagaaaaaatcatgcctgcccatgt

SEQ ID NO: 350456 - DNA, 33 bp, Homo sapien
ccaatcgagagaaaaattcatgcctgcccatgt

SEQ ID NO: 350457 - DNA, 33 bp, Homo sapien
ggacccactgactttcaagtgtagatgtggatg

SEQ ID NO: 350458 - DNA, 33 bp, Homo sapien
ggacccactgactttccagtgtagatgtggatg

SEQ ID NO: 350459 - DNA, 33 bp, Homo sapien
cgccggtagttgttcacctcctgtggatcccag

SEQ ID NO: 350460 - DNA, 33 bp, Homo sapien
cgccggtagttgttcatctcctgtggatcccag

SEQ ID NO: 350461 - DNA, 33 bp, Homo sapien
gtcacgtatcattgtgaaatactccattaagcc

SEQ ID NO: 350462 - DNA, 33 bp, Homo sapien
gtcacgtatcattgtggaatactccattaagcc

SEQ ID NO: 350463 - DNA, 33 bp, Homo sapien
gtggtaggagactgacaaagaaattgattagtc

SEQ ID NO: 350464 - DNA, 33 bp, Homo sapien
gtggtaggagactgacgaagaaattgattagtc

SEQ ID NO: 350465 - DNA, 33 bp, Homo sapien
gaaaagttttgaagcaaggccagtttaatccac

SEQ ID NO: 350466 - DNA, 33 bp, Homo sapien
gaaaagttttgaagcagggccagtttaatccac

SEQ ID NO: 350467 - DNA, 33 bp, Homo sapien
ccagcaacacggttaacgctccagcagcagctt

SEQ ID NO: 350468 - DNA, 33 bp, Homo sapien
ccagcaacacggttaatgctccagcagcagctt

SEQ ID NO: 350469 - DNA, 33 bp, Homo sapien
tcacataagcaaaaggaacagcaggtacagcca

SEQ ID NO: 350470 - DNA, 33 bp, Homo sapien
tcacataagcaaaaggcacagcaggtacagcca

SEQ ID NO: 350471 - DNA, 33 bp, Homo sapien
ctccctgctcctctaaatcctcatcactcctgt

SEQ ID NO: 350472 - DNA, 33 bp, Homo sapien
ctccctgctcctctaagtcctcatcactcctgt

SEQ ID NO: 350473 - DNA, 33 bp, Homo sapien
ccaggtaggtatccagactccttcctatcctgc

SEQ ID NO: 350474 - DNA, 33 bp, Homo sapien
ccaggtaggtatccaggctccttcctatcctgc

SEQ ID NO: 350475 - DNA, 33 bp, Homo sapien
gagagagaaataggaacaaggagagacagagag

SEQ ID NO: 350476 - DNA, 33 bp, Homo sapien
gagagagaaataggaagaaggagagacagagag

SEQ ID NO: 350477 - DNA, 33 bp, Homo sapien
aaagctctatttttcaatctagcccaaatacga

SEQ ID NO: 350478 - DNA, 33 bp, Homo sapien
aaagctctatttttcagtctagcccaaatacga

SEQ ID NO: 350479 - DNA, 33 bp, Homo sapien
tggcttgcatgcggtgaacggccactttctggt

SEQ ID NO: 350480 - DNA, 33 bp, Homo sapien
tggcttgcatgcggtggacggccactttctggt

SEQ ID NO: 350481 - DNA, 33 bp, Homo sapien
atggggacagcgggccagacggtgacagcacca

SEQ ID NO: 350482 - DNA, 33 bp, Homo sapien
atggggacagcgggccggacggtgacagcacca

SEQ ID NO: 350483 - DNA, 33 bp, Homo sapien
gatatggccaggaagaaggtgtgagaagcctgg

SEQ ID NO: 350484 - DNA, 33 bp, Homo sapien
gatatggccaggaagagggtgtgagaagcctgg

SEQ ID NO: 350485 - DNA, 33 bp, Homo sapien
ggagaccaaagcctacagagggtgaggcccagt

SEQ ID NO: 350486 - DNA, 33 bp, Homo sapien
ggagaccaaagcctaccgagggtgaggcccagt

SEQ ID NO: 350487 - DNA, 33 bp, Homo sapien
ttagaggctacttggccaatgaagtcctgacct

SEQ ID NO: 350488 - DNA, 33 bp, Homo sapien
ttagaggctacttggctaatgaagtcctgacct

SEQ ID NO: 350489 - DNA, 33 bp, Homo sapien
cccatcagacgtgtcaccatccacatgtgttgc

SEQ ID NO: 350490 - DNA, 33 bp, Homo sapien
cccatcagacgtgtcagcatccacatgtgttgc

SEQ ID NO: 350491 - DNA, 33 bp, Homo sapien
tcagccataaaggtagacatttcttttttgtcc

SEQ ID NO: 350492 - DNA, 33 bp, Homo sapien
tcagccataaaggtagtcatttcttttttgtcc

SEQ ID NO: 350493 - DNA, 33 bp, Homo sapien
agaccagattctcaagaaggagatgctgagata

SEQ ID NO: 350494 - DNA, 33 bp, Homo sapien
agaccagattctcaaggaggagatgctgagata

SEQ ID NO: 350495 - DNA, 33 bp, Homo sapien
gtagagaagaggttgcaatttgggatatagcag

SEQ ID NO: 350496 - DNA, 33 bp, Homo sapien
gtagagaagaggttgcgatttgggatatagcag

SEQ ID NO: 350497 - DNA, 33 bp, Homo sapien
tccacagatacctacacaggtgtctcaaaaaaa

SEQ ID NO: 350498 - DNA, 33 bp, Homo sapien
tccacagatacctacataggtgtctcaaaaaaa

SEQ ID NO: 350499 - DNA, 33 bp, Homo sapien
taagtccttataaatacacaatcactgacttga

SEQ ID NO: 350500 - DNA, 33 bp, Homo sapien
taagtccttataaatatacaatcactgacttga

SEQ ID NO: 350501 - DNA, 33 bp, Homo sapien
atttccttgttaacaactgactcaggtaaaatt

SEQ ID NO: 350502 - DNA, 33 bp, Homo sapien
atttccttgttaacaattgactcaggtaaaatt

SEQ ID NO: 350503 - DNA, 33 bp, Homo sapien
cttaataaatgcattcaaggctatagagttttc

SEQ ID NO: 350504 - DNA, 33 bp, Homo sapien
cttaataaatgcattcgaggctatagagttttc

SEQ ID NO: 350505 - DNA, 33 bp, Homo sapien
ttgctgaagtcttataccagatatactatgacc

SEQ ID NO: 350506 - DNA, 33 bp, Homo sapien
ttgctgaagtcttatatcagatatactatgacc

SEQ ID NO: 350507 - DNA, 33 bp, Homo sapien
ccaagaaaaacacacaatgaaaaattccatctt

SEQ ID NO: 350508 - DNA, 33 bp, Homo sapien
ccaagaaaaacacacagtgaaaaattccatctt

SEQ ID NO: 350509 - DNA, 33 bp, Homo sapien
tgccaacaagaaggcccacatgctagattaagt

SEQ ID NO: 350510 - DNA, 33 bp, Homo sapien
tgccaacaagaaggcctacatgctagattaagt

SEQ ID NO: 350511 - DNA, 33 bp, Homo sapien
ttacgtcaggtatttcactgtttgctggcatta

SEQ ID NO: 350512 - DNA, 33 bp, Homo sapien
ttacgtcaggtatttcgctgtttgctggcatta

SEQ ID NO: 350513 - DNA, 33 bp, Homo sapien
gactgaggcaggaagacagtgtagaggttgtta

SEQ ID NO: 350514 - DNA, 33 bp, Homo sapien
gactgaggcaggaagatagtgtagaggttgtta

SEQ ID NO: 350515 - DNA, 33 bp, Homo sapien
tcatcaagggtagctcaatagacacaatcatgg

SEQ ID NO: 350516 - DNA, 33 bp, Homo sapien
tcatcaagggtagctcgatagacacaatcatgg

SEQ ID NO: 350517 - DNA, 33 bp, Homo sapien
ccttgcctgagatggacagataagcacacaaca

SEQ ID NO: 350518 - DNA, 33 bp, Homo sapien
ccttgcctgagatggatagataagcacacaaca

SEQ ID NO: 350519 - DNA, 33 bp, Homo sapien
aactaaaatctcaccaccccaattccagtttct

SEQ ID NO: 350520 - DNA, 33 bp, Homo sapien
aactaaaatctcaccatcccaattccagtttct

SEQ ID NO: 350521 - DNA, 33 bp, Homo sapien
gactactgaatccttgaatggaagacagactga

SEQ ID NO: 350522 - DNA, 33 bp, Homo sapien
gactactgaatccttggatggaagacagactga

SEQ ID NO: 350523 - DNA, 33 bp, Homo sapien
agtcacagtcacaccacgccaaagactacctcc

SEQ ID NO: 350524 - DNA, 33 bp, Homo sapien
agtcacagtcacaccaggccaaagactacctcc

SEQ ID NO: 350525 - DNA, 33 bp, Homo sapien
acaggcatttacatagaaacttggagcaaatgg

SEQ ID NO: 350526 - DNA, 33 bp, Homo sapien
acaggcatttacataggaacttggagcaaatgg

SEQ ID NO: 350527 - DNA, 33 bp, Homo sapien
ggtgggggtgtgaggacctctggcagttgctgg

SEQ ID NO: 350528 - DNA, 33 bp, Homo sapien
ggtgggggtgtgaggagctctggcagttgctgg

SEQ ID NO: 350529 - DNA, 33 bp, Homo sapien
catgtgagattcagaccctttaaggatgtagat

SEQ ID NO: 350530 - DNA, 33 bp, Homo sapien
catgtgagattcagactctttaaggatgtagat

SEQ ID NO: 350531 - DNA, 33 bp, Homo sapien
tgatgtctcccagaataacatccttgtggcacc

SEQ ID NO: 350532 - DNA, 33 bp, Homo sapien
tgatgtctcccagaatgacatccttgtggcacc

SEQ ID NO: 350533 - DNA, 33 bp, Homo sapien
caacttgacaccatcacggggtcttctggagat

SEQ ID NO: 350534 - DNA, 33 bp, Homo sapien
caacttgacaccatcatggggtcttctggagat

SEQ ID NO: 350535 - DNA, 33 bp, Homo sapien
cttcaggcattcagaacaaagcttgaactcctc

SEQ ID NO: 350536 - DNA, 33 bp, Homo sapien
cttcaggcattcagaataaagcttgaactcctc

SEQ ID NO: 350537 - DNA, 33 bp, Homo sapien
ctataaagctaaaacaaggatggttcgtgttaa

SEQ ID NO: 350538 - DNA, 33 bp, Homo sapien
ctataaagctaaaacagggatggttcgtgttaa

SEQ ID NO: 350539 - DNA, 33 bp, Homo sapien
ggggaatccaatagagaaacagagcatgtttga

SEQ ID NO: 350540 - DNA, 33 bp, Homo sapien
ggggaatccaatagaggaacagagcatgtttga

SEQ ID NO: 350541 - DNA, 33 bp, Homo sapien
aagcccggaactcaggacccctacacctagccc

SEQ ID NO: 350542 - DNA, 33 bp, Homo sapien
aagcccggaactcaggccccctacacctagccc

SEQ ID NO: 350543 - DNA, 33 bp, Homo sapien
cctgtgttcacactaaccttttccttctttgaa

SEQ ID NO: 350544 - DNA, 33 bp, Homo sapien
cctgtgttcacactaatcttttccttctttgaa

SEQ ID NO: 350545 - DNA, 33 bp, Homo sapien
agctgagcacagttggacaaatttcagcaacca

SEQ ID NO: 350546 - DNA, 33 bp, Homo sapien
agctgagcacagttgggcaaatttcagcaacca

SEQ ID NO: 350547 - DNA, 33 bp, Homo sapien
gctttgggcaaaaggaaaacaggccaggatggg

SEQ ID NO: 350548 - DNA, 33 bp, Homo sapien
gctttgggcaaaaggagaacaggccaggatggg

SEQ ID NO: 350549 - DNA, 33 bp, Homo sapien
gctcattatagggaaaacatgaatgtactcatt

SEQ ID NO: 350550 - DNA, 33 bp, Homo sapien
gctcattatagggaaaccatgaatgtactcatt

SEQ ID NO: 350551 - DNA, 33 bp, Homo sapien
gagctctcaaatagtcacttgacaaaccacttc

SEQ ID NO: 350552 - DNA, 33 bp, Homo sapien
gagctctcaaatagtcgcttgacaaaccacttc

SEQ ID NO: 350553 - DNA, 33 bp, Homo sapien
ggaagcaggcatgagaacatcttagcccatagg

SEQ ID NO: 350554 - DNA, 33 bp, Homo sapien
ggaagcaggcatgagagcatcttagcccatagg

SEQ ID NO: 350555 - DNA, 33 bp, Homo sapien
aaccggcccacaggacggcgatgaaagaatgca

SEQ ID NO: 350556 - DNA, 33 bp, Homo sapien
aaccggcccacaggactgcgatgaaagaatgca

SEQ ID NO: 350557 - DNA, 33 bp, Homo sapien
caagctttttccaccacgagagagatttgtgtc

SEQ ID NO: 350558 - DNA, 33 bp, Homo sapien
caagctttttccaccatgagagagatttgtgtc

SEQ ID NO: 350559 - DNA, 33 bp, Homo sapien
tgcagctgactcaggacggatgacctggacatg

SEQ ID NO: 350560 - DNA, 33 bp, Homo sapien
tgcagctgactcaggatggatgacctggacatg

SEQ ID NO: 350561 - DNA, 33 bp, Homo sapien
aggatgtaactccaaaatcagactctgaagctc

SEQ ID NO: 350562 - DNA, 33 bp, Homo sapien
aggatgtaactccaaagtcagactctgaagctc

SEQ ID NO: 350563 - DNA, 33 bp, Homo sapien
ttactcccagcggagaagaagaaaccagaagat

SEQ ID NO: 350564 - DNA, 33 bp, Homo sapien
ttactcccagcggagaggaagaaaccagaagat

SEQ ID NO: 350565 - DNA, 33 bp, Homo sapien
actttctgaatgtacaatgccgttggttgggat

SEQ ID NO: 350566 - DNA, 33 bp, Homo sapien
actttctgaatgtacagtgccgttggttgggat

SEQ ID NO: 350567 - DNA, 33 bp, Homo sapien
acattctattctgctcgaagactcagatggggt

SEQ ID NO: 350568 - DNA, 33 bp, Homo sapien
acattctattctgctctaagactcagatggggt

SEQ ID NO: 350569 - DNA, 33 bp, Homo sapien
cttttctctccagtgaaggaatcatccagacca

SEQ ID NO: 350570 - DNA, 33 bp, Homo sapien
cttttctctccagtgagggaatcatccagacca

SEQ ID NO: 350571 - DNA, 33 bp, Homo sapien
ccagctgctgtccctcaatttggtcctcacttc

SEQ ID NO: 350572 - DNA, 33 bp, Homo sapien
ccagctgctgtccctctatttggtcctcacttc

SEQ ID NO: 350573 - DNA, 33 bp, Homo sapien
cgggaaggtagcccaaattgaaaaatggccttg

SEQ ID NO: 350574 - DNA, 33 bp, Homo sapien
cgggaaggtagcccaagttgaaaaatggccttg

SEQ ID NO: 350575 - DNA, 33 bp, Homo sapien
atgtgcaaatcaatacactgaggcaccgggttg

SEQ ID NO: 350576 - DNA, 33 bp, Homo sapien
atgtgcaaatcaatacgctgaggcaccgggttg

SEQ ID NO: 350577 - DNA, 33 bp, Homo sapien
acttaggactaccgaacgtaggtaaaaagaggc

SEQ ID NO: 350578 - DNA, 33 bp, Homo sapien
acttaggactaccgaatgtaggtaaaaagaggc

SEQ ID NO: 350579 - DNA, 33 bp, Homo sapien
gggttctggatggagacgttcttgagctctaca

SEQ ID NO: 350580 - DNA, 33 bp, Homo sapien
gggttctggatggagatgttcttgagctctaca

SEQ ID NO: 350581 - DNA, 33 bp, Homo sapien
ttcaagacagcataaaatgagtccttttgtccc

SEQ ID NO: 350582 - DNA, 33 bp, Homo sapien
ttcaagacagcataaagtgagtccttttgtccc

SEQ ID NO: 350583 - DNA, 33 bp, Homo sapien
cactgcaagggaagaacaggtaggaaaggaaag

SEQ ID NO: 350584 - DNA, 33 bp, Homo sapien
cactgcaagggaagaataggtaggaaaggaaag

SEQ ID NO: 350585 - DNA, 33 bp, Homo sapien
ttttggaaaggtacacaatttgatctatcccca

SEQ ID NO: 350586 - DNA, 33 bp, Homo sapien
ttttggaaaggtacacgatttgatctatcccca

SEQ ID NO: 350587 - DNA, 33 bp, Homo sapien
agataggccaagtcaccggagtcctgagaggaa

SEQ ID NO: 350588 - DNA, 33 bp, Homo sapien
agataggccaagtcactggagtcctgagaggaa

SEQ ID NO: 350589 - DNA, 33 bp, Homo sapien
aaacaaccatcaacaacagaatgaatagagaaa

SEQ ID NO: 350590 - DNA, 33 bp, Homo sapien
aaacaaccatcaacaagagaatgaatagagaaa

SEQ ID NO: 350591 - DNA, 33 bp, Homo sapien
aaaaaacagctccccaacaagatagcaggctac

SEQ ID NO: 350592 - DNA, 33 bp, Homo sapien
aaaaaacagctccccagcaagatagcaggctac

SEQ ID NO: 350593 - DNA, 33 bp, Homo sapien
ttggcagatggggccaactaaatgcagcacctg

SEQ ID NO: 350594 - DNA, 33 bp, Homo sapien
ttggcagatggggccagctaaatgcagcacctg

SEQ ID NO: 350595 - DNA, 33 bp, Homo sapien
tatggtgctaaaagaccggaaacaccctcacta

SEQ ID NO: 350596 - DNA, 33 bp, Homo sapien
tatggtgctaaaagactggaaacaccctcacta

SEQ ID NO: 350597 - DNA, 33 bp, Homo sapien
cctgggtctgaaatgccctggttcatcttcccc

SEQ ID NO: 350598 - DNA, 33 bp, Homo sapien
cctgggtctgaaatgctctggttcatcttcccc

SEQ ID NO: 350599 - DNA, 33 bp, Homo sapien
ggcctgcatcgatcaccgaaatagcagatgtga

SEQ ID NO: 350600 - DNA, 33 bp, Homo sapien
ggcctgcatcgatcactgaaatagcagatgtga

SEQ ID NO: 350601 - DNA, 33 bp, Homo sapien
agcttcttgtgtaagaatcctgttgaagacttt

SEQ ID NO: 350602 - DNA, 33 bp, Homo sapien
agcttcttgtgtaagagtcctgttgaagacttt

SEQ ID NO: 350603 - DNA, 33 bp, Homo sapien
tagcacaaattctccacctggcttcttctactt

SEQ ID NO: 350604 - DNA, 33 bp, Homo sapien
tagcacaaattctccatctggcttcttctactt

SEQ ID NO: 350605 - DNA, 33 bp, Homo sapien
accatggcacaaataaccattgtgttactactt

SEQ ID NO: 350606 - DNA, 33 bp, Homo sapien
accatggcacaaataatcattgtgttactactt

SEQ ID NO: 350607 - DNA, 33 bp, Homo sapien
attttgtaatatccaacgttttaagcctttgat

SEQ ID NO: 350608 - DNA, 33 bp, Homo sapien
attttgtaatatccaatgttttaagcctttgat

SEQ ID NO: 350609 - DNA, 33 bp, Homo sapien
taagagatcaactaaaccaacattgtcacaaaa

SEQ ID NO: 350610 - DNA, 33 bp, Homo sapien
taagagatcaactaaagcaacattgtcacaaaa

SEQ ID NO: 350611 - DNA, 33 bp, Homo sapien
aatacagcctttgttacagaaatttatcatcca

SEQ ID NO: 350612 - DNA, 33 bp, Homo sapien
aatacagcctttgttatagaaatttatcatcca

SEQ ID NO: 350613 - DNA, 33 bp, Homo sapien
caactagagcagagacacaaatatttactaagc

SEQ ID NO: 350614 - DNA, 33 bp, Homo sapien
caactagagcagagacccaaatatttactaagc

SEQ ID NO: 350615 - DNA, 33 bp, Homo sapien
ggggttctgtccaggaaatgaaccagcttgctt

SEQ ID NO: 350616 - DNA, 33 bp, Homo sapien
ggggttctgtccaggagatgaaccagcttgctt

SEQ ID NO: 350617 - DNA, 33 bp, Homo sapien
aagactcagctggctcaactcaacccccttagt

SEQ ID NO: 350618 - DNA, 33 bp, Homo sapien
aagactcagctggctcgactcaacccccttagt

SEQ ID NO: 350619 - DNA, 33 bp, Homo sapien
ctgtttgaatggcaacaagcttgcagaagtcat

SEQ ID NO: 350620 - DNA, 33 bp, Homo sapien
ctgtttgaatggcaacgagcttgcagaagtcat

SEQ ID NO: 350621 - DNA, 33 bp, Homo sapien
aatgtgtaatgatcaaatcgtaattagcatctc

SEQ ID NO: 350622 - DNA, 33 bp, Homo sapien
aatgtgtaatgatcaagtcgtaattagcatctc

SEQ ID NO: 350623 - DNA, 33 bp, Homo sapien
attaactggaaccacaggagtgcatcactaagc

SEQ ID NO: 350624 - DNA, 33 bp, Homo sapien
attaactggaaccacatgagtgcatcactaagc

SEQ ID NO: 350625 - DNA, 33 bp, Homo sapien
acccagctgacaggaccaataatgcccatatag

SEQ ID NO: 350626 - DNA, 33 bp, Homo sapien
acccagctgacaggacgaataatgcccatatag

SEQ ID NO: 350627 - DNA, 33 bp, Homo sapien
ctcttccatcttaataaccctcagagacaggta

SEQ ID NO: 350628 - DNA, 33 bp, Homo sapien
ctcttccatcttaatacccctcagagacaggta

SEQ ID NO: 350629 - DNA, 33 bp, Homo sapien
tttactattaaggccccgaatctcctgaagtct

SEQ ID NO: 350630 - DNA, 33 bp, Homo sapien
tttactattaaggccctgaatctcctgaagtct

SEQ ID NO: 350631 - DNA, 33 bp, Homo sapien
gttggtgacatccaaacgtatctcctctcttgc

SEQ ID NO: 350632 - DNA, 33 bp, Homo sapien
gttggtgacatccaaatgtatctcctctcttgc

SEQ ID NO: 350633 - DNA, 33 bp, Homo sapien
agaagaaaattcattaaaagtcaagaaagagcc

SEQ ID NO: 350634 - DNA, 33 bp, Homo sapien
agaagaaaattcattagaagtcaagaaagagcc

SEQ ID NO: 350635 - DNA, 33 bp, Homo sapien
gataattgaaattctcaaaattaaaactcagtt

SEQ ID NO: 350636 - DNA, 33 bp, Homo sapien
gataattgaaattctcgaaattaaaactcagtt

SEQ ID NO: 350637 - DNA, 33 bp, Homo sapien
gttcactctaaagaataaagtcacctgttgtca

SEQ ID NO: 350638 - DNA, 33 bp, Homo sapien
gttcactctaaagaatgaagtcacctgttgtca

SEQ ID NO: 350639 - DNA, 33 bp, Homo sapien
ttaattacactcgcaaggtagtacaacagtcac

SEQ ID NO: 350640 - DNA, 33 bp, Homo sapien
ttaattacactcgcaatgtagtacaacagtcac

SEQ ID NO: 350641 - DNA, 33 bp, Homo sapien
agcagtgatagagaataagaagggagactacca

SEQ ID NO: 350642 - DNA, 33 bp, Homo sapien
agcagtgatagagaattagaagggagactacca

SEQ ID NO: 350643 - DNA, 33 bp, Homo sapien
aggtagaatagactggaaaagcaaccaataagc

SEQ ID NO: 350644 - DNA, 33 bp, Homo sapien
aggtagaatagactgggaaagcaaccaataagc

SEQ ID NO: 350645 - DNA, 33 bp, Homo sapien
ggggcagaggtaggaaagtaggaaagagccagg

SEQ ID NO: 350646 - DNA, 33 bp, Homo sapien
ggggcagaggtaggaaggtaggaaagagccagg

SEQ ID NO: 350647 - DNA, 33 bp, Homo sapien
ggtagttattcaatggcatgcctgcggctcttc

SEQ ID NO: 350648 - DNA, 33 bp, Homo sapien
ggtagttattcaatggtatgcctgcggctcttc

SEQ ID NO: 350649 - DNA, 33 bp, Homo sapien
gccacctcccattctaccatctgggagcaccgt

SEQ ID NO: 350650 - DNA, 33 bp, Homo sapien
gccacctcccattctatcatctgggagcaccgt

SEQ ID NO: 350651 - DNA, 33 bp, Homo sapien
ctgtcccgtgagctaccgaaatgcggacaacag

SEQ ID NO: 350652 - DNA, 33 bp, Homo sapien
ctgtcccgtgagctactgaaatgcggacaacag

SEQ ID NO: 350653 - DNA, 33 bp, Homo sapien
aaccatgaatcacaggaaatgtgcaggatgaca

SEQ ID NO: 350654 - DNA, 33 bp, Homo sapien
aaccatgaatcacagggaatgtgcaggatgaca

SEQ ID NO: 350655 - DNA, 33 bp, Homo sapien
tgcccaaagtctcctactacatcaaaatagcag

SEQ ID NO: 350656 - DNA, 33 bp, Homo sapien
tgcccaaagtctcctattacatcaaaatagcag

SEQ ID NO: 350657 - DNA, 33 bp, Homo sapien
tctctaaagataccacaccctgggataggattc

SEQ ID NO: 350658 - DNA, 33 bp, Homo sapien
tctctaaagataccacgccctgggataggattc

SEQ ID NO: 350659 - DNA, 33 bp, Homo sapien
taacggaaataatccacgtcggatgcctagtgg

SEQ ID NO: 350660 - DNA, 33 bp, Homo sapien
taacggaaataatccatgtcggatgcctagtgg

SEQ ID NO: 350661 - DNA, 33 bp, Homo sapien
tataacaggttttggtagtttgttcctttcatt

SEQ ID NO: 350662 - DNA, 33 bp, Homo sapien
tataacaggttttggtcgtttgttcctttcatt

SEQ ID NO: 350663 - DNA, 33 bp, Homo sapien
agaatcattggtaagaatccagtagggtcccct

SEQ ID NO: 350664 - DNA, 33 bp, Homo sapien
agaatcattggtaagagtccagtagggtcccct

SEQ ID NO: 350665 - DNA, 33 bp, Homo sapien
aaaactgttagaccaaataagttggctaattaa

SEQ ID NO: 350666 - DNA, 33 bp, Homo sapien
aaaactgttagaccaagtaagttggctaattaa

SEQ ID NO: 350667 - DNA, 33 bp, Homo sapien; identical to SEQ ID NO: 350665

SEQ ID NO: 350668 - DNA, 33 bp, Homo sapien; identical to SEQ ID NO: 350666

SEQ ID NO: 350669 - DNA, 33 bp, Homo sapien
caggcacagtgctaagcatttgggttacaacga

SEQ ID NO: 350670 - DNA, 33 bp, Homo sapien
caggcacagtgctaaggatttgggttacaacga

SEQ ID NO: 350671 - DNA, 33 bp, Homo sapien
tgaataaggttgcacactgggagctggattcag

SEQ ID NO: 350672 - DNA, 33 bp, Homo sapien
tgaataaggttgcacattgggagctggattcag

SEQ ID NO: 350673 - DNA, 33 bp, Homo sapien
atcttttcatgataaaaatattcaacaaattag

SEQ ID NO: 350674 - DNA, 33 bp, Homo sapien
atcttttcatgataaacatattcaacaaattag

SEQ ID NO: 350675 - DNA, 33 bp, Homo sapien
gtcccctgattcctgacacgagaaggagatcat

SEQ ID NO: 350676 - DNA, 33 bp, Homo sapien
gtcccctgattcctgagacgagaaggagatcat

SEQ ID NO: 350677 - DNA, 33 bp, Homo sapien; identical to SEQ ID NO: 350675

SEQ ID NO: 350678 - DNA, 33 bp, Homo sapien; identical to SEQ ID NO: 350676

SEQ ID NO: 350679 - DNA, 33 bp, Homo sapien
gatcgttacgtgaatacagcctactgaaggtga

SEQ ID NO: 350680 - DNA, 33 bp, Homo sapien
gatcgttacgtgaatatagcctactgaaggtga

SEQ ID NO: 350681 - DNA, 33 bp, Homo sapien
tcagtgtgaaaggaaaaatgagagctgccacag

SEQ ID NO: 350682 - DNA, 33 bp, Homo sapien
tcagtgtgaaaggaaatatgagagctgccacag

SEQ ID NO: 350683 - DNA, 33 bp, Homo sapien
tagtaagagacattcaaaaggacaggtcttaga

SEQ ID NO: 350684 - DNA, 33 bp, Homo sapien
tagtaagagacattcagaaggacaggtcttaga

SEQ ID NO: 350685 - DNA, 33 bp, Homo sapien
aagacagggtagtacactctccacgaatttcaa

SEQ ID NO: 350686 - DNA, 33 bp, Homo sapien
aagacagggtagtacattctccacgaatttcaa

SEQ ID NO: 350687 - DNA, 33 bp, Homo sapien
aatcttcatgcttaaaaggaaaccaagctccag

SEQ ID NO: 350688 - DNA, 33 bp, Homo sapien
aatcttcatgcttaaacggaaaccaagctccag

SEQ ID NO: 350689 - DNA, 33 bp, Homo sapien
taggttttggaattatcagatacagaacacaga

SEQ ID NO: 350690 - DNA, 33 bp, Homo sapien
taggttttggaattattagatacagaacacaga

SEQ ID NO: 350691 - DNA, 33 bp, Homo sapien
aaaatgagcaaaatgcaaaggctgtaacttata

SEQ ID NO: 350692 - DNA, 33 bp, Homo sapien
aaaatgagcaaaatgcgaaggctgtaacttata

SEQ ID NO: 350693 - DNA, 33 bp, Homo sapien
acagtttaccagtgacagcatcactacattttt

SEQ ID NO: 350694 - DNA, 33 bp, Homo sapien
acagtttaccagtgacggcatcactacattttt

SEQ ID NO: 350695 - DNA, 33 bp, Homo sapien
gggcccatgtgacacacagtaaagcctgcctag

SEQ ID NO: 350696 - DNA, 33 bp, Homo sapien
gggcccatgtgacacatagtaaagcctgcctag

SEQ ID NO: 350697 - DNA, 33 bp, Homo sapien
gcagacctagcactgccgagcgttggcaagatg

SEQ ID NO: 350698 - DNA, 33 bp, Homo sapien
gcagacctagcactgctgagcgttggcaagatg

SEQ ID NO: 350699 - DNA, 33 bp, Homo sapien
ttgaaaggttcaccaggaggttacactgtttaa

SEQ ID NO: 350700 - DNA, 33 bp, Homo sapien
ttgaaaggttcaccagtaggttacactgtttaa

SEQ ID NO: 350701 - DNA, 33 bp, Homo sapien
agttacttaaggaaacaaagggtatgcagatgc

SEQ ID NO: 350702 - DNA, 33 bp, Homo sapien
agttacttaaggaaacgaagggtatgcagatgc

SEQ ID NO: 350703 - DNA, 33 bp, Homo sapien
tcatctggtctatccacgtgggctctaaatcca

SEQ ID NO: 350704 - DNA, 33 bp, Homo sapien
tcatctggtctatccaggtgggctctaaatcca

SEQ ID NO: 350705 - DNA, 33 bp, Homo sapien
caatcaacacaaataacgaagcagctatgtact

SEQ ID NO: 350706 - DNA, 33 bp, Homo sapien
caatcaacacaaataatgaagcagctatgtact

SEQ ID NO: 350707 - DNA, 33 bp, Homo sapien
tagctgctgtgtaacacgaccttaaatagtctt

SEQ ID NO: 350708 - DNA, 33 bp, Homo sapien
tagctgctgtgtaacatgaccttaaatagtctt

SEQ ID NO: 350709 - DNA, 33 bp, Homo sapien
ctaattctaggtgcaaataactggaaatttagg

SEQ ID NO: 350710 - DNA, 33 bp, Homo sapien
ctaattctaggtgcaagtaactggaaatttagg

SEQ ID NO: 350711 - DNA, 33 bp, Homo sapien
acatcagacaaaaatacgaaaggcctatgtatt

SEQ ID NO: 350712 - DNA, 33 bp, Homo sapien
acatcagacaaaaatatgaaaggcctatgtatt

SEQ ID NO: 350713 - DNA, 33 bp, Homo sapien
aattgtcactgatatacaggaatacaatggact

SEQ ID NO: 350714 - DNA, 33 bp, Homo sapien
aattgtcactgatatataggaatacaatggact

SEQ ID NO: 350715 - DNA, 33 bp, Homo sapien
ccaaatcaaagaataaacaggaaaaaataagtg

SEQ ID NO: 350716 - DNA, 33 bp, Homo sapien
ccaaatcaaagaataagcaggaaaaaataagtg

SEQ ID NO: 350717 - DNA, 33 bp, Homo sapien
ggcaatcattggcttaactagtctattgccatc

SEQ ID NO: 350718 - DNA, 33 bp, Homo sapien
ggcaatcattggcttacctagtctattgccatc

SEQ ID NO: 350719 - DNA, 33 bp, Homo sapien
gactcgattttgttaacatggagaaagaagaca

SEQ ID NO: 350720 - DNA, 33 bp, Homo sapien
gactcgattttgttaatatggagaaagaagaca

SEQ ID NO: 350721 - DNA, 33 bp, Homo sapien
ggcattgggcattagacagtagtgtgagcaagg

SEQ ID NO: 350722 - DNA, 33 bp, Homo sapien
ggcattgggcattagatagtagtgtgagcaagg

SEQ ID NO: 350723 - DNA, 33 bp, Homo sapien
ttttctttctggtagacgactcaacagttgtca

SEQ ID NO: 350724 - DNA, 33 bp, Homo sapien
ttttctttctggtagatgactcaacagttgtca

SEQ ID NO: 350725 - DNA, 33 bp, Homo sapien
tctttcttagacaagcagagaggcagagaaagc

SEQ ID NO: 350726 - DNA, 33 bp, Homo sapien
tctttcttagacaagcggagaggcagagaaagc

SEQ ID NO: 350727 - DNA, 33 bp, Homo sapien
cacctctgagatattgcaggttttggtttcaga

SEQ ID NO: 350728 - DNA, 33 bp, Homo sapien
cacctctgagatattgtaggttttggtttcaga

SEQ ID NO: 350729 - DNA, 33 bp, Homo sapien
aagccttgatctttaaaaactatttttccatcc

SEQ ID NO: 350730 - DNA, 33 bp, Homo sapien
aagccttgatctttaagaactatttttccatcc

SEQ ID NO: 350731 - DNA, 33 bp, Homo sapien
tcattgccttttgcaccctgactgcaagatgaa

SEQ ID NO: 350732 - DNA, 33 bp, Homo sapien
tcattgccttttgcactctgactgcaagatgaa

SEQ ID NO: 350733 - DNA, 33 bp, Homo sapien
agaactatggggcagaaagtgcttcatcttgca

SEQ ID NO: 350734 - DNA, 33 bp, Homo sapien
agaactatggggcagagagtgcttcatcttgca

SEQ ID NO: 350735 - DNA, 33 bp, Homo sapien
tcatgtaagcttgatacgggataattaagtcaa

SEQ ID NO: 350736 - DNA, 33 bp, Homo sapien
tcatgtaagcttgatatgggataattaagtcaa

SEQ ID NO: 350737 - DNA, 33 bp, Homo sapien
tatcccattcgacatcccatgacaggaatcctg

SEQ ID NO: 350738 - DNA, 33 bp, Homo sapien
tatcccattcgacatcgcatgacaggaatcctg

SEQ ID NO: 350739 - DNA, 33 bp, Homo sapien
ggagaaaagtaacacgcagacttgccttcttgt

SEQ ID NO: 350740 - DNA, 33 bp, Homo sapien
ggagaaaagtaacacggagacttgccttcttgt

SEQ ID NO: 350741 - DNA, 33 bp, Homo sapien
ataagaaaggaataccagagtgcatcacaggtt

SEQ ID NO: 350742 - DNA, 33 bp, Homo sapien
ataagaaaggaataccggagtgcatcacaggtt

SEQ ID NO: 350743 - DNA, 33 bp, Homo sapien
cattcgccatctaccaaattttcacaacaacct

SEQ ID NO: 350744 - DNA, 33 bp, Homo sapien
cattcgccatctaccagattttcacaacaacct

SEQ ID NO: 350745 - DNA, 33 bp, Homo sapien
cccactatctctcggccgattactgccatagac

SEQ ID NO: 350746 - DNA, 33 bp, Homo sapien
cccactatctctcggctgattactgccatagac

SEQ ID NO: 350747 - DNA, 33 bp, Homo sapien
agtgtttactagaggcaagcaaagataagcggg

SEQ ID NO: 350748 - DNA, 33 bp, Homo sapien
agtgtttactagaggcgagcaaagataagcggg

SEQ ID NO: 350749 - DNA, 33 bp, Homo sapien
tgtaattactagctcacatggtaagagtatgtt

SEQ ID NO: 350750 - DNA, 33 bp, Homo sapien
tgtaattactagctcatatggtaagagtatgtt

SEQ ID NO: 350751 - DNA, 33 bp, Homo sapien
aggatggccacaaatacgaaaagcgccctgtct

SEQ ID NO: 350752 - DNA, 33 bp, Homo sapien
aggatggccacaaatatgaaaagcgccctgtct

SEQ ID NO: 350753 - DNA, 33 bp, Homo sapien
tgggttcctctacttacgcacgtctccaagctc

SEQ ID NO: 350754 - DNA, 33 bp, Homo sapien
tgggttcctctacttatgcacgtctccaagctc

SEQ ID NO: 350755 - DNA, 33 bp, Homo sapien
ttgcttattaagagagaccaagccggtgtttgg

SEQ ID NO: 350756 - DNA, 33 bp, Homo sapien
ttgcttattaagagagcccaagccggtgtttgg

SEQ ID NO: 350757 - DNA, 33 bp, Homo sapien
ataattaactttgccagtgaatactacatggca

SEQ ID NO: 350758 - DNA, 33 bp, Homo sapien
ataattaactttgccattgaatactacatggca

SEQ ID NO: 350759 - DNA, 33 bp, Homo sapien
cctaacatattttagtgaatagcatgtaaagca

SEQ ID NO: 350760 - DNA, 33 bp, Homo sapien
cctaacatattttagttaatagcatgtaaagca

SEQ ID NO: 350761 - DNA, 33 bp, Homo sapien
cttttggctttctgaaaagagtaactgagtaat

SEQ ID NO: 350762 - DNA, 33 bp, Homo sapien
cttttggctttctgaagagagtaactgagtaat

SEQ ID NO: 350763 - DNA, 33 bp, Homo sapien
ttgcaaatgaagttaaatggttgcaaagctact

SEQ ID NO: 350764 - DNA, 33 bp, Homo sapien
ttgcaaatgaagttaactggttgcaaagctact

SEQ ID NO: 350765 - DNA, 33 bp, Homo sapien
taacactcccgacttagatccagctactttcct

SEQ ID NO: 350766 - DNA, 33 bp, Homo sapien
taacactcccgacttatatccagctactttcct

SEQ ID NO: 350767 - DNA, 33 bp, Homo sapien
ctaaatcatatgatgccgaatttccagactctg

SEQ ID NO: 350768 - DNA, 33 bp, Homo sapien
ctaaatcatatgatgctgaatttccagactctg

SEQ ID NO: 350769 - DNA, 33 bp, Homo sapien
agggatgtccaaggcacgaaggtgaacaaatgc

SEQ ID NO: 350770 - DNA, 33 bp, Homo sapien
agggatgtccaaggcatgaaggtgaacaaatgc

SEQ ID NO: 350771 - DNA, 33 bp, Homo sapien
ggaatgccaaattaacactgggcaataaattct

SEQ ID NO: 350772 - DNA, 33 bp, Homo sapien
ggaatgccaaattaacgctgggcaataaattct

SEQ ID NO: 350773 - DNA, 33 bp, Homo sapien
tgaacttaactcttccagatatttcatgtaaac

SEQ ID NO: 350774 - DNA, 33 bp, Homo sapien
tgaacttaactcttccggatatttcatgtaaac

SEQ ID NO: 350775 - DNA, 33 bp, Homo sapien
atacagaatacactcaaatcccttggaaggata

SEQ ID NO: 350776 - DNA, 33 bp, Homo sapien
atacagaatacactcatatcccttggaaggata

SEQ ID NO: 350777 - DNA, 33 bp, Homo sapien
ggtcagtgctcctttacgcctggggcagctctt

SEQ ID NO: 350778 - DNA, 33 bp, Homo sapien
ggtcagtgctcctttatgcctggggcagctctt

SEQ ID NO: 350779 - DNA, 33 bp, Homo sapien
tcattctgctgttgaacaggaaaacaaatgctc

SEQ ID NO: 350780 - DNA, 33 bp, Homo sapien
tcattctgctgttgaataggaaaacaaatgctc

SEQ ID NO: 350781 - DNA, 33 bp, Homo sapien
ccggaccattaaaggcagagaagcgctgggtgt

SEQ ID NO: 350782 - DNA, 33 bp, Homo sapien
ccggaccattaaaggcggagaagcgctgggtgt

SEQ ID NO: 350783 - DNA, 33 bp, Homo sapien
aaaggaccatgctgaccgcagaatggagaacag

SEQ ID NO: 350784 - DNA, 33 bp, Homo sapien
aaaggaccatgctgactgcagaatggagaacag

SEQ ID NO: 350785 - DNA, 33 bp, Homo sapien
cttggctctcggaggcaacttgttccctgcaat

SEQ ID NO: 350786 - DNA, 33 bp, Homo sapien
cttggctctcggaggcgacttgttccctgcaat

SEQ ID NO: 350787 - DNA, 33 bp, Homo sapien
acatctgggccaacgaagagtttaggtctgaca

SEQ ID NO: 350788 - DNA, 33 bp, Homo sapien
acatctgggccaacgaggagtttaggtctgaca

SEQ ID NO: 350789 - DNA, 33 bp, Homo sapien
ttctgttgtatggctgaagaaaccgagacccag

SEQ ID NO: 350790 - DNA, 33 bp, Homo sapien
ttctgttgtatggctgtagaaaccgagacccag

SEQ ID NO: 350791 - DNA, 33 bp, Homo sapien
agctctgagggctgtaaggcactgcaacactgc

SEQ ID NO: 350792 - DNA, 33 bp, Homo sapien
agctctgagggctgtagggcactgcaacactgc

SEQ ID NO: 350793 - DNA, 33 bp, Homo sapien
aggaagcagctccacaatctcaacagttgccag

SEQ ID NO: 350794 - DNA, 33 bp, Homo sapien
aggaagcagctccacagtctcaacagttgccag

SEQ ID NO: 350795 - DNA, 33 bp, Homo sapien
cactgagaaggattgaacatttagtcatatgca

SEQ ID NO: 350796 - DNA, 33 bp, Homo sapien
cactgagaaggattgagcatttagtcatatgca

SEQ ID NO: 350797 - DNA, 33 bp, Homo sapien
ctcatcccttgtatacagtaggcgctcagtgaa

SEQ ID NO: 350798 - DNA, 33 bp, Homo sapien
ctcatcccttgtatacggtaggcgctcagtgaa

SEQ ID NO: 350799 - DNA, 33 bp, Homo sapien
aggaacgaaggcaacgcaagaggctgagctggc

SEQ ID NO: 350800 - DNA, 33 bp, Homo sapien
aggaacgaaggcaacggaagaggctgagctggc

SEQ ID NO: 350801 - DNA, 33 bp, Homo sapien
tggacaaagaacaggagtacccaggaacatgac

SEQ ID NO: 350802 - DNA, 33 bp, Homo sapien
tggacaaagaacaggattacccaggaacatgac

SEQ ID NO: 350803 - DNA, 33 bp, Homo sapien
tacccttctaatacagcctcctctaaagtgtat

SEQ ID NO: 350804 - DNA, 33 bp, Homo sapien
tacccttctaatacaggctcctctaaagtgtat

SEQ ID NO: 350805 - DNA, 33 bp, Homo sapien
aacaaaatccctgatacgtcccaagacaaaaac

SEQ ID NO: 350806 - DNA, 33 bp, Homo sapien
aacaaaatccctgatatgtcccaagacaaaaac

SEQ ID NO: 350807 - DNA, 33 bp, Homo sapien
cagccacttgtgcaaaatatcaattacccagtc

SEQ ID NO: 350808 - DNA, 33 bp, Homo sapien
cagccacttgtgcaaagtatcaattacccagtc

SEQ ID NO: 350809 - DNA, 33 bp, Homo sapien
ctcacatggtaacaaacaggagtctgccatatg

SEQ ID NO: 350810 - DNA, 33 bp, Homo sapien
ctcacatggtaacaaagaggagtctgccatatg

SEQ ID NO: 350811 - DNA, 33 bp, Homo sapien
ccacggttccctagtgaagtttacaagaaggct

SEQ ID NO: 350812 - DNA, 33 bp, Homo sapien
ccacggttccctagtggagtttacaagaaggct

SEQ ID NO: 350813 - DNA, 33 bp, Homo sapien
tgaacaaaaaatgtgacgtacataatgaagtgt

SEQ ID NO: 350814 - DNA, 33 bp, Homo sapien
tgaacaaaaaatgtgaggtacataatgaagtgt

SEQ ID NO: 350815 - DNA, 33 bp, Homo sapien
taacctgcttcagataacaagcttcttaaatct

SEQ ID NO: 350816 - DNA, 33 bp, Homo sapien
taacctgcttcagatagcaagcttcttaaatct

SEQ ID NO: 350817 - DNA, 33 bp, Homo sapien
taccagtgtacacttacggttttcaacatatac

SEQ ID NO: 350818 - DNA, 33 bp, Homo sapien
taccagtgtacacttatggttttcaacatatac

SEQ ID NO: 350819 - DNA, 33 bp, Homo sapien
cttgaacaaatacttcaaaacaaacttcaggcc

SEQ ID NO: 350820 - DNA, 33 bp, Homo sapien
cttgaacaaatacttcgaaacaaacttcaggcc

SEQ ID NO: 350821 - DNA, 33 bp, Homo sapien
atatcttgaaaacacaataggtcataaagaaca

SEQ ID NO: 350822 - DNA, 33 bp, Homo sapien
atatcttgaaaacacagtaggtcataaagaaca

SEQ ID NO: 350823 - DNA, 33 bp, Homo sapien
aactctagctggtactaaaagatgttcttgggt

SEQ ID NO: 350824 - DNA, 33 bp, Homo sapien
aactctagctggtactgaaagatgttcttgggt

SEQ ID NO: 350825 - DNA, 33 bp, Homo sapien
gccaagtgcaatcttacaggaatgacccatgta

SEQ ID NO: 350826 - DNA, 33 bp, Homo sapien
gccaagtgcaatcttagaggaatgacccatgta

SEQ ID NO: 350827 - DNA, 33 bp, Homo sapien
aaataagtcaaggtcaaagtctttggcaaacca

SEQ ID NO: 350828 - DNA, 33 bp, Homo sapien
aaataagtcaaggtcagagtctttggcaaacca

SEQ ID NO: 350829 - DNA, 33 bp, Homo sapien
acataaacaagtgaaaatcatgaatttggggaa

SEQ ID NO: 350830 - DNA, 33 bp, Homo sapien
acataaacaagtgaaagtcatgaatttggggaa

SEQ ID NO: 350831 - DNA, 33 bp, Homo sapien
tatcctgggtcttagagcactttctccttatca

SEQ ID NO: 350832 - DNA, 33 bp, Homo sapien
tatcctgggtcttagatcactttctccttatca

SEQ ID NO: 350833 - DNA, 33 bp, Homo sapien
gggtgcactgaatacccgcttgctcccatttca

SEQ ID NO: 350834 - DNA, 33 bp, Homo sapien
gggtgcactgaataccggcttgctcccatttca

SEQ ID NO: 350835 - DNA, 33 bp, Homo sapien
gttattgacttagtaacagctccatcagtaagg

SEQ ID NO: 350836 - DNA, 33 bp, Homo sapien
gttattgacttagtaagagctccatcagtaagg

SEQ ID NO: 350837 - DNA, 33 bp, Homo sapien
attttcagtggagggaagaagtttatagattca

SEQ ID NO: 350838 - DNA, 33 bp, Homo sapien
attttcagtggagggaggaagtttatagattca

SEQ ID NO: 350839 - DNA, 33 bp, Homo sapien
aagaatggcagtttctcaaatgtactgtcttgg

SEQ ID NO: 350840 - DNA, 33 bp, Homo sapien
aagaatggcagtttctgaaatgtactgtcttgg

SEQ ID NO: 350841 - DNA, 33 bp, Homo sapien
gtccagtttagtattcaatccttctgggaggca

SEQ ID NO: 350842 - DNA, 33 bp, Homo sapien
gtccagtttagtattccatccttctgggaggca

SEQ ID NO: 350843 - DNA, 33 bp, Homo sapien
tgtttcaggaatgctcactaaaatggctctgtt

SEQ ID NO: 350844 - DNA, 33 bp, Homo sapien
tgtttcaggaatgctcgctaaaatggctctgtt

SEQ ID NO: 350845 - DNA, 33 bp, Homo sapien
tgatcacgtccatctacataaatggtgtctatg

SEQ ID NO: 350846 - DNA, 33 bp, Homo sapien
tgatcacgtccatctatataaatggtgtctatg

SEQ ID NO: 350847 - DNA, 33 bp, Homo sapien
tgatatgactttctacagatggtttagctgatt

SEQ ID NO: 350848 - DNA, 33 bp, Homo sapien
tgatatgactttctacggatggtttagctgatt

SEQ ID NO: 350849 - DNA, 33 bp, Homo sapien
tgtagtttattccttacgccccaattcaggaga

SEQ ID NO: 350850 - DNA, 33 bp, Homo sapien
tgtagtttattccttatgccccaattcaggaga

SEQ ID NO: 350851 - DNA, 33 bp, Homo sapien
tttcacagactctgtcaactttgcccagaccca

SEQ ID NO: 350852 - DNA, 33 bp, Homo sapien
tttcacagactctgtccactttgcccagaccca

SEQ ID NO: 350853 - DNA, 33 bp, Homo sapien
gtttcacaggtatatccccagggcttagaacag

SEQ ID NO: 350854 - DNA, 33 bp, Homo sapien
gtttcacaggtatatctccagggcttagaacag

SEQ ID NO: 350855 - DNA, 33 bp, Homo sapien
gcttcataaatgttggccactattatcaccatt

SEQ ID NO: 350856 - DNA, 33 bp, Homo sapien
gcttcataaatgttggtcactattatcaccatt

SEQ ID NO: 350857 - DNA, 33 bp, Homo sapien
aatctgaggaggtagaaaaaactccctgtattc

SEQ ID NO: 350858 - DNA, 33 bp, Homo sapien
aatctgaggaggtagagaaaactccctgtattc

SEQ ID NO: 350859 - DNA, 33 bp, Homo sapien
ttagaactcttttagaaccttagcttgaaacaa

SEQ ID NO: 350860 - DNA, 33 bp, Homo sapien
ttagaactcttttagagccttagcttgaaacaa

SEQ ID NO: 350861 - DNA, 33 bp, Homo sapien
gtaacctataggagacaatactcagaaaggacc

SEQ ID NO: 350862 - DNA, 33 bp, Homo sapien
gtaacctataggagacgatactcagaaaggacc

SEQ ID NO: 350863 - DNA, 33 bp, Homo sapien
ttatatcatccataaactactcctttaggtata

SEQ ID NO: 350864 - DNA, 33 bp, Homo sapien
ttatatcatccataaattactcctttaggtata

SEQ ID NO: 350865 - DNA, 33 bp, Homo sapien
ttcagagagcaacaaactgcatggatttgggga

SEQ ID NO: 350866 - DNA, 33 bp, Homo sapien
ttcagagagcaacaaattgcatggatttgggga

SEQ ID NO: 350867 - DNA, 33 bp, Homo sapien
aaatgaactcagaaaacagataaaatgacagca

SEQ ID NO: 350868 - DNA, 33 bp, Homo sapien
aaatgaactcagaaaatagataaaatgacagca

SEQ ID NO: 350869 - DNA, 33 bp, Homo sapien
ggaataagtttagagaatcggcaccagtatcta

SEQ ID NO: 350870 - DNA, 33 bp, Homo sapien
ggaataagtttagagactcggcaccagtatcta

SEQ ID NO: 350871 - DNA, 33 bp, Homo sapien
taaacttattccaaaacgaaacccaatgtttat

SEQ ID NO: 350872 - DNA, 33 bp, Homo sapien
taaacttattccaaaatgaaacccaatgtttat

SEQ ID NO: 350873 - DNA, 33 bp, Homo sapien
gcctcatttcctatacaaaacagtcactaaaca

SEQ ID NO: 350874 - DNA, 33 bp, Homo sapien
gcctcatttcctatacgaaacagtcactaaaca

SEQ ID NO: 350875 - DNA, 33 bp, Homo sapien
gcaatagctgcccaaaagacatgtttcatagca

SEQ ID NO: 350876 - DNA, 33 bp, Homo sapien
gcaatagctgcccaaaggacatgtttcatagca

SEQ ID NO: 350877 - DNA, 33 bp, Homo sapien
aacttataaggacagacgtgttatggataatca

SEQ ID NO: 350878 - DNA, 33 bp, Homo sapien
aacttataaggacagatgtgttatggataatca

SEQ ID NO: 350879 - DNA, 33 bp, Homo sapien
caaaacactgacattaacttatagttgggcaga

SEQ ID NO: 350880 - DNA, 33 bp, Homo sapien
caaaacactgacattagcttatagttgggcaga

SEQ ID NO: 350881 - DNA, 33 bp, Homo sapien
caaacatcatggcttaacgtagtccaccttaaa

SEQ ID NO: 350882 - DNA, 33 bp, Homo sapien
caaacatcatggcttagcgtagtccaccttaaa

SEQ ID NO: 350883 - DNA, 33 bp, Homo sapien
ggacagcacttagtgacgtaacacaacaaagct

SEQ ID NO: 350884 - DNA, 33 bp, Homo sapien
ggacagcacttagtgatgtaacacaacaaagct

SEQ ID NO: 350885 - DNA, 33 bp, Homo sapien
attgtggaagagtaagaccaaaactttttctaa

SEQ ID NO: 350886 - DNA, 33 bp, Homo sapien
attgtggaagagtaaggccaaaactttttctaa

SEQ ID NO: 350887 - DNA, 33 bp, Homo sapien
ctaatttctacacataaccccacacctgatcca

SEQ ID NO: 350888 - DNA, 33 bp, Homo sapien
ctaatttctacacatacccccacacctgatcca

SEQ ID NO: 350889 - DNA, 33 bp, Homo sapien
tatatacactttcaaaatattctctctctatat

SEQ ID NO: 350890 - DNA, 33 bp, Homo sapien
tatatacactttcaaagtattctctctctatat

SEQ ID NO: 350891 - DNA, 33 bp, Homo sapien
actctctatctccatacgatcaacttatttatt

SEQ ID NO: 350892 - DNA, 33 bp, Homo sapien
actctctatctccataggatcaacttatttatt

SEQ ID NO: 350893 - DNA, 33 bp, Homo sapien
gaaaatgatcaaggtacccacaagctccaggcc

SEQ ID NO: 350894 - DNA, 33 bp, Homo sapien
gaaaatgatcaaggtatccacaagctccaggcc

SEQ ID NO: 350895 - DNA, 33 bp, Homo sapien
atttgcagaattctcaatcatataagatggctc

SEQ ID NO: 350896 - DNA, 33 bp, Homo sapien
atttgcagaattctcagtcatataagatggctc

SEQ ID NO: 350897 - DNA, 33 bp, Homo sapien
tgtttagctttataaaaaactaccaaactgtct

SEQ ID NO: 350898 - DNA, 33 bp, Homo sapien
tgtttagctttataaagaactaccaaactgtct

SEQ ID NO: 350899 - DNA, 33 bp, Homo sapien
tattatacacttaaaaatatgctgtgggtagat

SEQ ID NO: 350900 - DNA, 33 bp, Homo sapien
tattatacacttaaaattatgctgtgggtagat

SEQ ID NO: 350901 - DNA, 33 bp, Homo sapien
ttctgtgatgtatctacagcagcaacataaaaa

SEQ ID NO: 350902 - DNA, 33 bp, Homo sapien
ttctgtgatgtatctatagcagcaacataaaaa

SEQ ID NO: 350903 - DNA, 33 bp, Homo sapien
tacccacatcaataaaacagtacaaaaacaccc

SEQ ID NO: 350904 - DNA, 33 bp, Homo sapien
tacccacatcaataaaccagtacaaaaacaccc

SEQ ID NO: 350905 - DNA, 33 bp, Homo sapien
gttgctggaagactgaaatattgtttagtcgat

SEQ ID NO: 350906 - DNA, 33 bp, Homo sapien
gttgctggaagactgagatattgtttagtcgat

SEQ ID NO: 350907 - DNA, 33 bp, Homo sapien
caaaaatgagatcaaaatgtaagtctatagagt

SEQ ID NO: 350908 - DNA, 33 bp, Homo sapien
caaaaatgagatcaaattgtaagtctatagagt

SEQ ID NO: 350909 - DNA, 33 bp, Homo sapien
aataaagtgctaagccaaactattctctaaccc

SEQ ID NO: 350910 - DNA, 33 bp, Homo sapien
aataaagtgctaagccgaactattctctaaccc

SEQ ID NO: 350911 - DNA, 33 bp, Homo sapien
tgcgtttgacttttggcacccttatctctaaat

SEQ ID NO: 350912 - DNA, 33 bp, Homo sapien
tgcgtttgacttttgggacccttatctctaaat

SEQ ID NO: 350913 - DNA, 33 bp, Homo sapien
accaaagatacggtcacaatttagttgaggcaa

SEQ ID NO: 350914 - DNA, 33 bp, Homo sapien
accaaagatacggtcataatttagttgaggcaa

SEQ ID NO: 350915 - DNA, 33 bp, Homo sapien
tacccttccccccacacgatggtatagttttgt

SEQ ID NO: 350916 - DNA, 33 bp, Homo sapien
tacccttccccccacatgatggtatagttttgt

SEQ ID NO: 350917 - DNA, 33 bp, Homo sapien
gatgtccatcaccgacagagtaagagactaata

SEQ ID NO: 350918 - DNA, 33 bp, Homo sapien
gatgtccatcaccgacggagtaagagactaata

SEQ ID NO: 350919 - DNA, 33 bp, Homo sapien
aaggacagtggtctcactaagtcgagaagacag

SEQ ID NO: 350920 - DNA, 33 bp, Homo sapien
aaggacagtggtctcagtaagtcgagaagacag

SEQ ID NO: 350921 - DNA, 33 bp, Homo sapien
tactgctgatattaagccatgcttgtgtggatg

SEQ ID NO: 350922 - DNA, 33 bp, Homo sapien
tactgctgatattaagtcatgcttgtgtggatg

SEQ ID NO: 350923 - DNA, 33 bp, Homo sapien
gcaataccctgtttcaaaaagaagaagaagaag

SEQ ID NO: 350924 - DNA, 33 bp, Homo sapien
gcaataccctgtttcagaaagaagaagaagaag

SEQ ID NO: 350925 - DNA, 33 bp, Homo sapien
ctttttgcccaggataggtctaaaaataccatc

SEQ ID NO: 350926 - DNA, 33 bp, Homo sapien
ctttttgcccaggatatgtctaaaaataccatc

SEQ ID NO: 350927 - DNA, 33 bp, Homo sapien
cacaaaaccatttaccggacagatacttctcat

SEQ ID NO: 350928 - DNA, 33 bp, Homo sapien
cacaaaaccatttacctgacagatacttctcat

SEQ ID NO: 350929 - DNA, 33 bp, Homo sapien
agagcatggctaatgaacataagagttgggttt

SEQ ID NO: 350930 - DNA, 33 bp, Homo sapien
agagcatggctaatgagcataagagttgggttt

SEQ ID NO: 350931 - DNA, 33 bp, Homo sapien
ttgtgctcactttccaaattatgaacctaccaa

SEQ ID NO: 350932 - DNA, 33 bp, Homo sapien
ttgtgctcactttccacattatgaacctaccaa

SEQ ID NO: 350933 - DNA, 33 bp, Homo sapien
tctcaaattgaacaatcaaaatgggaattaatt

SEQ ID NO: 350934 - DNA, 33 bp, Homo sapien
tctcaaattgaacaatgaaaatgggaattaatt

SEQ ID NO: 350935 - DNA, 33 bp, Homo sapien
acaaactaccatcagaaaagtagcgtttcagtg

SEQ ID NO: 350936 - DNA, 33 bp, Homo sapien
acaaactaccatcagagaagtagcgtttcagtg

SEQ ID NO: 350937 - DNA, 33 bp, Homo sapien
tacgaagtacactaacaggatccatatactaac

SEQ ID NO: 350938 - DNA, 33 bp, Homo sapien
tacgaagtacactaacgggatccatatactaac

SEQ ID NO: 350939 - DNA, 33 bp, Homo sapien
aagtaagataacatgacaatggagcagacaaac

SEQ ID NO: 350940 - DNA, 33 bp, Homo sapien
aagtaagataacatgataatggagcagacaaac

SEQ ID NO: 350941 - DNA, 33 bp, Homo sapien
actcttgatctttgacacattttgttttaagcc

SEQ ID NO: 350942 - DNA, 33 bp, Homo sapien
actcttgatctttgacgcattttgttttaagcc

SEQ ID NO: 350943 - DNA, 33 bp, Homo sapien
ctagcctgtgcacttgaacctgataccaccatg

SEQ ID NO: 350944 - DNA, 33 bp, Homo sapien
ctagcctgtgcacttggacctgataccaccatg

SEQ ID NO: 350945 - DNA, 33 bp, Homo sapien
aactacagcttcacataaacaatagggatcact

SEQ ID NO: 350946 - DNA, 33 bp, Homo sapien
aactacagcttcacatgaacaatagggatcact

SEQ ID NO: 350947 - DNA, 33 bp, Homo sapien
atttaaacgcatgataaatttctaggactatac

SEQ ID NO: 350948 - DNA, 33 bp, Homo sapien
atttaaacgcatgatagatttctaggactatac

SEQ ID NO: 350949 - DNA, 33 bp, Homo sapien
ttgagtgattaaaaccaatgaatataagaagcc

SEQ ID NO: 350950 - DNA, 33 bp, Homo sapien
ttgagtgattaaaacctatgaatataagaagcc

SEQ ID NO: 350951 - DNA, 33 bp, Homo sapien
tttattgaactgaaaacggtgacaactgagagc

SEQ ID NO: 350952 - DNA, 33 bp, Homo sapien
tttattgaactgaaaatggtgacaactgagagc

SEQ ID NO: 350953 - DNA, 33 bp, Homo sapien
aacatatgctataacactgaagaccttatgcta

SEQ ID NO: 350954 - DNA, 33 bp, Homo sapien
aacatatgctataacattgaagaccttatgcta

SEQ ID NO: 350955 - DNA, 33 bp, Homo sapien
cgcatttttatgaacactcagattatgtggtcc

SEQ ID NO: 350956 - DNA, 33 bp, Homo sapien
cgcatttttatgaacattcagattatgtggtcc

SEQ ID NO: 350957 - DNA, 33 bp, Homo sapien
tgtgtagtacagtgttcaaaagtttgttctcaa

SEQ ID NO: 350958 - DNA, 33 bp, Homo sapien
tgtgtagtacagtgttgaaaagtttgttctcaa

SEQ ID NO: 350959 - DNA, 33 bp, Homo sapien
atttaaagaagcccagaaaatatcactgaataa

SEQ ID NO: 350960 - DNA, 33 bp, Homo sapien
atttaaagaagcccaggaaatatcactgaataa

SEQ ID NO: 350961 - DNA, 33 bp, Homo sapien
tgggcttgctacatagaaatagatattgggagt

SEQ ID NO: 350962 - DNA, 33 bp, Homo sapien
tgggcttgctacataggaatagatattgggagt

SEQ ID NO: 350963 - DNA, 33 bp, Homo sapien
agtattcagttgtgccccctctttttagcacag

SEQ ID NO: 350964 - DNA, 33 bp, Homo sapien
agtattcagttgtgcctcctctttttagcacag

SEQ ID NO: 350965 - DNA, 33 bp, Homo sapien
tgacaatgctttatcccggaataccacctaagg

SEQ ID NO: 350966 - DNA, 33 bp, Homo sapien
tgacaatgctttatcctggaataccacctaagg

SEQ ID NO: 350967 - DNA, 33 bp, Homo sapien
atcacaaataggaaaaaatctttcagtgcatta

SEQ ID NO: 350968 - DNA, 33 bp, Homo sapien
atcacaaataggaaaatatctttcagtgcatta

SEQ ID NO: 350969 - DNA, 33 bp, Homo sapien
atatcacttaccatcactctttaaattctcttc

SEQ ID NO: 350970 - DNA, 33 bp, Homo sapien
atatcacttaccatcattctttaaattctcttc

SEQ ID NO: 350971 - DNA, 33 bp, Homo sapien
agattatttcattaccgaagtattcaacctagt

SEQ ID NO: 350972 - DNA, 33 bp, Homo sapien
agattatttcattacctaagtattcaacctagt

SEQ ID NO: 350973 - DNA, 33 bp, Homo sapien
acattcctgcagctaaatgaagacattaatgac

SEQ ID NO: 350974 - DNA, 33 bp, Homo sapien
acattcctgcagctaagtgaagacattaatgac

SEQ ID NO: 350975 - DNA, 33 bp, Homo sapien
caaaggagctcctgtcagaaaggacttgatatg

SEQ ID NO: 350976 - DNA, 33 bp, Homo sapien
caaaggagctcctgtcggaaaggacttgatatg

SEQ ID NO: 350977 - DNA, 33 bp, Homo sapien
ttatttcaaactcaggaccaatgcaatgtgaag

SEQ ID NO: 350978 - DNA, 33 bp, Homo sapien
ttatttcaaactcagggccaatgcaatgtgaag

SEQ ID NO: 350979 - DNA, 33 bp, Homo sapien
agaggttaaaggatacagaatcacaactagata

SEQ ID NO: 350980 - DNA, 33 bp, Homo sapien
agaggttaaaggatactgaatcacaactagata

SEQ ID NO: 350981 - DNA, 33 bp, Homo sapien
ttgaggagacagttgaagattttttttggtttg

SEQ ID NO: 350982 - DNA, 33 bp, Homo sapien
ttgaggagacagttgaggattttttttggtttg

SEQ ID NO: 350983 - DNA, 33 bp, Homo sapien
tccaggaagcagtatcagaaattgagagaggca

SEQ ID NO: 350984 - DNA, 33 bp, Homo sapien
tccaggaagcagtatcggaaattgagagaggca

SEQ ID NO: 350985 - DNA, 33 bp, Homo sapien
gatcaagcttgtgaaagtgatggaggtcctgta

SEQ ID NO: 350986 - DNA, 33 bp, Homo sapien
gatcaagcttgtgaaattgatggaggtcctgta

SEQ ID NO: 350987 - DNA, 33 bp, Homo sapien
gttacctcttatcttaccccgaagccaaaagat

SEQ ID NO: 350988 - DNA, 33 bp, Homo sapien
gttacctcttatcttatcccgaagccaaaagat

SEQ ID NO: 350989 - DNA, 33 bp, Homo sapien
aacacctgtggccagaatagtgtgccttttctg

SEQ ID NO: 350990 - DNA, 33 bp, Homo sapien
aacacctgtggccagagtagtgtgccttttctg

SEQ ID NO: 350991 - DNA, 33 bp, Homo sapien
ttatcttaagtgatgacgaccctgacatcctgc

SEQ ID NO: 350992 - DNA, 33 bp, Homo sapien
ttatcttaagtgatgatgaccctgacatcctgc

SEQ ID NO: 350993 - DNA, 33 bp, Homo sapien
ggagtgcggctctggggaacccatgaacagcca

SEQ ID NO: 350994 - DNA, 33 bp, Homo sapien
ggagtgcggctctgggtaacccatgaacagcca

SEQ ID NO: 350995 - DNA, 33 bp, Homo sapien
gtgttgtggtcaggaagataacgctatgatacc

SEQ ID NO: 350996 - DNA, 33 bp, Homo sapien
gtgttgtggtcaggaatataacgctatgatacc

SEQ ID NO: 350997 - DNA, 33 bp, Homo sapien
gcagttggggaaggtaactgttactcactcgtt

SEQ ID NO: 350998 - DNA, 33 bp, Homo sapien
gcagttggggaaggtacctgttactcactcgtt

SEQ ID NO: 350999 - DNA, 33 bp, Homo sapien
tagtgggatctatttacgtggcttacagtgtaa

SEQ ID NO: 351000 - DNA, 33 bp, Homo sapien
tagtgggatctatttatgtggcttacagtgtaa

SEQ ID NO: 351001 - DNA, 33 bp, Homo sapien
gtgcataaaacatctaacttcacacacaaaagt

SEQ ID NO: 351002 - DNA, 33 bp, Homo sapien
gtgcataaaacatctatcttcacacacaaaagt

SEQ ID NO: 351003 - DNA, 33 bp, Homo sapien
ggcaagcagtgaattacctttccattctcttaa

SEQ ID NO: 351004 - DNA, 33 bp, Homo sapien
ggcaagcagtgaattatctttccattctcttaa

SEQ ID NO: 351005 - DNA, 33 bp, Homo sapien
tggatctcacccagaaatactggacttggagtt

SEQ ID NO: 351006 - DNA, 33 bp, Homo sapien
tggatctcacccagaactactggacttggagtt

SEQ ID NO: 351007 - DNA, 33 bp, Homo sapien
tatcattgaaaggtcccctctgccagcagtggt

SEQ ID NO: 351008 - DNA, 33 bp, Homo sapien
tatcattgaaaggtcctctctgccagcagtggt

SEQ ID NO: 351009 - DNA, 33 bp, Homo sapien
atgtgattcatgtataacaaagaggatcaggaa

SEQ ID NO: 351010 - DNA, 33 bp, Homo sapien
atgtgattcatgtatatcaaagaggatcaggaa

SEQ ID NO: 351011 - DNA, 33 bp, Homo sapien
ctcactgtgtctggcactcaccccaattattac

SEQ ID NO: 351012 - DNA, 33 bp, Homo sapien
ctcactgtgtctggcattcaccccaattattac

SEQ ID NO: 351013 - DNA, 33 bp, Homo sapien
cctgccttttgctacagattttccaattgctcc

SEQ ID NO: 351014 - DNA, 33 bp, Homo sapien
cctgccttttgctacatattttccaattgctcc

SEQ ID NO: 351015 - DNA, 33 bp, Homo sapien
gctcagaaaattaaagaagaaaattcagagctg

SEQ ID NO: 351016 - DNA, 33 bp, Homo sapien
gctcagaaaattaaagtagaaaattcagagctg

SEQ ID NO: 351017 - DNA, 33 bp, Homo sapien
ttaactgccctacttacctcagatgattgttat

SEQ ID NO: 351018 - DNA, 33 bp, Homo sapien
ttaactgccctacttatctcagatgattgttat

SEQ ID NO: 351019 - DNA, 33 bp, Homo sapien
ggagctgaatgtttaactggctaaagacaaata

SEQ ID NO: 351020 - DNA, 33 bp, Homo sapien
ggagctgaatgtttaattggctaaagacaaata

SEQ ID NO: 351021 - DNA, 33 bp, Homo sapien
cttttattttcacaatcaggttatacataggcc

SEQ ID NO: 351022 - DNA, 33 bp, Homo sapien
cttttattttcacaattaggttatacataggcc

SEQ ID NO: 351023 - DNA, 33 bp, Homo sapien
agtacattctgtcattaaataccttaccatgga

SEQ ID NO: 351024 - DNA, 33 bp, Homo sapien
agtacattctgtcattgaataccttaccatgga

SEQ ID NO: 351025 - DNA, 33 bp, Homo sapien
tgtgttaaaaaattccaatattcttccagtcta

SEQ ID NO: 351026 - DNA, 33 bp, Homo sapien
tgtgttaaaaaattcccatattcttccagtcta

SEQ ID NO: 351027 - DNA, 33 bp, Homo sapien
cttaccgagttgtgaacctggaacagccattgt

SEQ ID NO: 351028 - DNA, 33 bp, Homo sapien
cttaccgagttgtgaatctggaacagccattgt

SEQ ID NO: 351029 - DNA, 33 bp, Homo sapien
atttggaacaatattgaagtctaaaatgaatac

SEQ ID NO: 351030 - DNA, 33 bp, Homo sapien
atttggaacaatattggagtctaaaatgaatac

SEQ ID NO: 351031 - DNA, 33 bp, Homo sapien
ttaggctttttcctgaaagtggaaagaaataaa

SEQ ID NO: 351032 - DNA, 33 bp, Homo sapien
ttaggctttttcctgagagtggaaagaaataaa

SEQ ID NO: 351033 - DNA, 33 bp, Homo sapien
tcctgtctcatatttaccaacatgaaacaggtt

SEQ ID NO: 351034 - DNA, 33 bp, Homo sapien
tcctgtctcatatttatcaacatgaaacaggtt

SEQ ID NO: 351035 - DNA, 33 bp, Homo sapien
agcagctgacttgatacatgctctgaggaagta

SEQ ID NO: 351036 - DNA, 33 bp, Homo sapien
agcagctgacttgatatatgctctgaggaagta

SEQ ID NO: 351037 - DNA, 33 bp, Homo sapien
atgtttatgtaagaatcaggaaatgggtgatga

SEQ ID NO: 351038 - DNA, 33 bp, Homo sapien
atgtttatgtaagaattaggaaatgggtgatga

SEQ ID NO: 351039 - DNA, 33 bp, Homo sapien
acgatgaataatatatcaagcttacatttttgt

SEQ ID NO: 351040 - DNA, 33 bp, Homo sapien
acgatgaataatatatgaagcttacatttttgt

SEQ ID NO: 351041 - DNA, 33 bp, Homo sapien
tacctctcattcattaacaaggatgacctggac

SEQ ID NO: 351042 - DNA, 33 bp, Homo sapien
tacctctcattcattagcaaggatgacctggac

SEQ ID NO: 351043 - DNA, 33 bp, Homo sapien
caatcaccttggatacacaggcatttactacaa

SEQ ID NO: 351044 - DNA, 33 bp, Homo sapien
caatcaccttggatacgcaggcatttactacaa

SEQ ID NO: 351045 - DNA, 33 bp, Homo sapien
acctcctaaatttttacgtccaagctgttcttt

SEQ ID NO: 351046 - DNA, 33 bp, Homo sapien
acctcctaaatttttatgtccaagctgttcttt

SEQ ID NO: 351047 - DNA, 33 bp, Homo sapien
tctttacgctggcaaacgacaggtaagttgtga

SEQ ID NO: 351048 - DNA, 33 bp, Homo sapien
tctttacgctggcaaatgacaggtaagttgtga

SEQ ID NO: 351049 - DNA, 33 bp, Homo sapien
tctctcctcttcatacaaaacaactagcctatc

SEQ ID NO: 351050 - DNA, 33 bp, Homo sapien
tctctcctcttcataccaaacaactagcctatc

SEQ ID NO: 351051 - DNA, 33 bp, Homo sapien
tatttaaaactccataatagcattttgctgttt

SEQ ID NO: 351052 - DNA, 33 bp, Homo sapien
tatttaaaactccatagtagcattttgctgttt

SEQ ID NO: 351053 - DNA, 33 bp, Homo sapien
ttgtattcatcattaaccctcataacaacccta

SEQ ID NO: 351054 - DNA, 33 bp, Homo sapien
ttgtattcatcattaatcctcataacaacccta

SEQ ID NO: 351055 - DNA, 33 bp, Homo sapien
aacagaaacaagcagaaggttttcagtaataga

SEQ ID NO: 351056 - DNA, 33 bp, Homo sapien
aacagaaacaagcagagggttttcagtaataga

SEQ ID NO: 351057 - DNA, 33 bp, Homo sapien
agtgctaataatgtaacgcccttctcctcagcc

SEQ ID NO: 351058 - DNA, 33 bp, Homo sapien
agtgctaataatgtaatgcccttctcctcagcc

SEQ ID NO: 351059 - DNA, 33 bp, Homo sapien
ggaatctggctacatccatactgctaaacctca

SEQ ID NO: 351060 - DNA, 33 bp, Homo sapien
ggaatctggctacatctatactgctaaacctca

SEQ ID NO: 351061 - DNA, 33 bp, Homo sapien
ggttctatggaccttccctctctatttttcaca

SEQ ID NO: 351062 - DNA, 33 bp, Homo sapien
ggttctatggaccttctctctctatttttcaca

SEQ ID NO: 351063 - DNA, 33 bp, Homo sapien
atagccatagaattcaaatttgacacatttaag

SEQ ID NO: 351064 - DNA, 33 bp, Homo sapien
atagccatagaattcacatttgacacatttaag

SEQ ID NO: 351065 - DNA, 33 bp, Homo sapien
aagtggcaaagtaataccatttttgtgaggctt

SEQ ID NO: 351066 - DNA, 33 bp, Homo sapien
aagtggcaaagtaatatcatttttgtgaggctt

SEQ ID NO: 351067 - DNA, 33 bp, Homo sapien
tcaaggtaaacaacacaattccagatagaaaga

SEQ ID NO: 351068 - DNA, 33 bp, Homo sapien
tcaaggtaaacaacacgattccagatagaaaga

SEQ ID NO: 351069 - DNA, 33 bp, Homo sapien
gcagacattgtcagatgagagtaagatggtgtc

SEQ ID NO: 351070 - DNA, 33 bp, Homo sapien
gcagacattgtcagattagagtaagatggtgtc

SEQ ID NO: 351071 - DNA, 33 bp, Homo sapien
tacatctggctcttacacgggacaaagtgttta

SEQ ID NO: 351072 - DNA, 33 bp, Homo sapien
tacatctggctcttacgcgggacaaagtgttta

SEQ ID NO: 351073 - DNA, 33 bp, Homo sapien
agaatttgaaacaacacacacacctaaatccca

SEQ ID NO: 351074 - DNA, 33 bp, Homo sapien
agaatttgaaacaacatacacacctaaatccca

SEQ ID NO: 351075 - DNA, 33 bp, Homo sapien
tttcccaaagtaaaaggctcttgagagaagcac

SEQ ID NO: 351076 - DNA, 33 bp, Homo sapien
tttcccaaagtaaaagtctcttgagagaagcac

SEQ ID NO: 351077 - DNA, 33 bp, Homo sapien
gaatgaccagagagccggaaacattggacgatt

SEQ ID NO: 351078 - DNA, 33 bp, Homo sapien
gaatgaccagagagcctgaaacattggacgatt

SEQ ID NO: 351079 - DNA, 33 bp, Homo sapien
tcatgtggcagactcacgtaagtttaaatattc

SEQ ID NO: 351080 - DNA, 33 bp, Homo sapien
tcatgtggcagactcatgtaagtttaaatattc

SEQ ID NO: 351081 - DNA, 33 bp, Homo sapien
aaaggaaacctctaagccatttgtatttgtaaa

SEQ ID NO: 351082 - DNA, 33 bp, Homo sapien
aaaggaaacctctaaggcatttgtatttgtaaa

SEQ ID NO: 351083 - DNA, 33 bp, Homo sapien
cattccttggctctggacactgagaaggtctgg

SEQ ID NO: 351084 - DNA, 33 bp, Homo sapien
cattccttggctctggccactgagaaggtctgg

SEQ ID NO: 351085 - DNA, 33 bp, Homo sapien
catgcctcgcctgaaaactgctgattaaaaaaa

SEQ ID NO: 351086 - DNA, 33 bp, Homo sapien
catgcctcgcctgaaatctgctgattaaaaaaa

SEQ ID NO: 351087 - DNA, 33 bp, Homo sapien
ccaaatggtggccccacgttcatgcaggtatgt

SEQ ID NO: 351088 - DNA, 33 bp, Homo sapien
ccaaatggtggccccatgttcatgcaggtatgt

SEQ ID NO: 351089 - DNA, 33 bp, Homo sapien
cctacctgggctcagaactttccctggcatctt

SEQ ID NO: 351090 - DNA, 33 bp, Homo sapien
cctacctgggctcagagctttccctggcatctt

SEQ ID NO: 351091 - DNA, 33 bp, Homo sapien
atgtccacgtccacacggaaaggctcttgggat

SEQ ID NO: 351092 - DNA, 33 bp, Homo sapien
atgtccacgtccacactgaaaggctcttgggat

SEQ ID NO: 351093 - DNA, 33 bp, Homo sapien
catagtggggtaggtcgagagaccaaagcagga

SEQ ID NO: 351094 - DNA, 33 bp, Homo sapien
catagtggggtaggtctagagaccaaagcagga

SEQ ID NO: 351095 - DNA, 33 bp, Homo sapien
ttgagcaggtcactctaactcttgccgcctcag

SEQ ID NO: 351096 - DNA, 33 bp, Homo sapien
ttgagcaggtcactctgactcttgccgcctcag

SEQ ID NO: 351097 - DNA, 33 bp, Homo sapien
ctcatttggcagacgaaaaccaaagcttcgggg

SEQ ID NO: 351098 - DNA, 33 bp, Homo sapien
ctcatttggcagacgagaaccaaagcttcgggg

SEQ ID NO: 351099 - DNA, 33 bp, Homo sapien
acctctctcgtggttggaaagtgatctatccca

SEQ ID NO: 351100 - DNA, 33 bp, Homo sapien
acctctctcgtggttgtaaagtgatctatccca

SEQ ID NO: 351101 - DNA, 33 bp, Homo sapien
tacactttagaaaggcaactgttactgtagtgt

SEQ ID NO: 351102 - DNA, 33 bp, Homo sapien
tacactttagaaaggccactgttactgtagtgt

SEQ ID NO: 351103 - DNA, 33 bp, Homo sapien
tcaaataattaagtcacattcgcttgaagatgt

SEQ ID NO: 351104 - DNA, 33 bp, Homo sapien
tcaaataattaagtcatattcgcttgaagatgt

SEQ ID NO: 351105 - DNA, 33 bp, Homo sapien
tggaagtcatgtgcctaaagtctcactgccaca

SEQ ID NO: 351106 - DNA, 33 bp, Homo sapien
tggaagtcatgtgcctgaagtctcactgccaca

SEQ ID NO: 351107 - DNA, 33 bp, Homo sapien
atctcattttacagaacaagagatggctgctca

SEQ ID NO: 351108 - DNA, 33 bp, Homo sapien
atctcattttacagaagaagagatggctgctca

SEQ ID NO: 351109 - DNA, 33 bp, Homo sapien
caaaaggagctctgaaaggacacacaggaaacg

SEQ ID NO: 351110 - DNA, 33 bp, Homo sapien
caaaaggagctctgaagggacacacaggaaacg

SEQ ID NO: 351111 - DNA, 33 bp, Homo sapien
gccccaaatgccaccacgcatgcgtcagctctt

SEQ ID NO: 351112 - DNA, 33 bp, Homo sapien
gccccaaatgccaccatgcatgcgtcagctctt

SEQ ID NO: 351113 - DNA, 33 bp, Homo sapien
ggcatctctggtgtgaatagggtggggacagag

SEQ ID NO: 351114 - DNA, 33 bp, Homo sapien
ggcatctctggtgtgactagggtggggacagag

SEQ ID NO: 351115 - DNA, 33 bp, Homo sapien
ttctgacttctctacccgcattaacccatctga

SEQ ID NO: 351116 - DNA, 33 bp, Homo sapien
ttctgacttctctacctgcattaacccatctga

SEQ ID NO: 351117 - DNA, 33 bp, Homo sapien
aagtattttatacttacggcatatcgtcactgg

SEQ ID NO: 351118 - DNA, 33 bp, Homo sapien
aagtattttatacttatggcatatcgtcactgg

SEQ ID NO: 351119 - DNA, 33 bp, Homo sapien
gaaaaataatgctagccacgtatttaattttaa

SEQ ID NO: 351120 - DNA, 33 bp, Homo sapien
gaaaaataatgctagcgacgtatttaattttaa

SEQ ID NO: 351121 - DNA, 33 bp, Homo sapien
tcagaaataatggtgcaaaacccccaagaggtg

SEQ ID NO: 351122 - DNA, 33 bp, Homo sapien
tcagaaataatggtgcgaaacccccaagaggtg

SEQ ID NO: 351123 - DNA, 33 bp, Homo sapien
actgctcacaaaatcacacagcgtcccacatga

SEQ ID NO: 351124 - DNA, 33 bp, Homo sapien
actgctcacaaaatcatacagcgtcccacatga

SEQ ID NO: 351125 - DNA, 33 bp, Homo sapien
aaacattgacgctttcaatatcatgttaatttc

SEQ ID NO: 351126 - DNA, 33 bp, Homo sapien
aaacattgacgctttcgatatcatgttaatttc

SEQ ID NO: 351127 - DNA, 33 bp, Homo sapien
tacacgcgacactctcacccttgcattcacacg

SEQ ID NO: 351128 - DNA, 33 bp, Homo sapien
tacacgcgacactctcgcccttgcattcacacg

SEQ ID NO: 351129 - DNA, 33 bp, Homo sapien
tgtgaggctgtacatacgtgagctcctccgtgt

SEQ ID NO: 351130 - DNA, 33 bp, Homo sapien
tgtgaggctgtacatatgtgagctcctccgtgt

SEQ ID NO: 351131 - DNA, 33 bp, Homo sapien
ctcaggcagcctgccaacgtcgaccacctgggg

SEQ ID NO: 351132 - DNA, 33 bp, Homo sapien
ctcaggcagcctgccatcgtcgaccacctgggg

SEQ ID NO: 351133 - DNA, 33 bp, Homo sapien
aggctcagagagggaaagtaacctgcctagagt

SEQ ID NO: 351134 - DNA, 33 bp, Homo sapien
aggctcagagagggaaggtaacctgcctagagt

SEQ ID NO: 351135 - DNA, 33 bp, Homo sapien
cactcatcctggactccaacccgctggcctgcg

SEQ ID NO: 351136 - DNA, 33 bp, Homo sapien
cactcatcctggactctaacccgctggcctgcg

SEQ ID NO: 351137 - DNA, 33 bp, Homo sapien
cctcagggacactgaaatggagcccttactgtg

SEQ ID NO: 351138 - DNA, 33 bp, Homo sapien
cctcagggacactgaagtggagcccttactgtg

SEQ ID NO: 351139 - DNA, 33 bp, Homo sapien
ataaagaattatacacaacaaaggacatgacct

SEQ ID NO: 351140 - DNA, 33 bp, Homo sapien
ataaagaattatacacgacaaaggacatgacct

SEQ ID NO: 351141 - DNA, 33 bp, Homo sapien
ctgcctgtccatgttaaacagaactcactggac

SEQ ID NO: 351142 - DNA, 33 bp, Homo sapien
ctgcctgtccatgttatacagaactcactggac

SEQ ID NO: 351143 - DNA, 33 bp, Homo sapien
gagcaccggggctggcagaataattatgcctat

SEQ ID NO: 351144 - DNA, 33 bp, Homo sapien
gagcaccggggctggcggaataattatgcctat

SEQ ID NO: 351145 - DNA, 33 bp, Homo sapien
gagatgcctggttgccacggagggacctctccc

SEQ ID NO: 351146 - DNA, 33 bp, Homo sapien
gagatgcctggttgccgcggagggacctctccc

SEQ ID NO: 351147 - DNA, 33 bp, Homo sapien
aatcttgcagagagacaaagatgtgaagtgtgg

SEQ ID NO: 351148 - DNA, 33 bp, Homo sapien
aatcttgcagagagacgaagatgtgaagtgtgg

SEQ ID NO: 351149 - DNA, 33 bp, Homo sapien
ccaaagagagagacaacaggaacccaggccttg

SEQ ID NO: 351150 - DNA, 33 bp, Homo sapien
ccaaagagagagacaagaggaacccaggccttg

SEQ ID NO: 351151 - DNA, 33 bp, Homo sapien
acttgatacaaatttaagcttttgtcatttgac

SEQ ID NO: 351152 - DNA, 33 bp, Homo sapien
acttgatacaaatttaggcttttgtcatttgac

SEQ ID NO: 351153 - DNA, 33 bp, Homo sapien
agcatgacttaaagaaccctgaacacctagatc

SEQ ID NO: 351154 - DNA, 33 bp, Homo sapien
agcatgacttaaagaatcctgaacacctagatc

SEQ ID NO: 351155 - DNA, 33 bp, Homo sapien
tctacaggcatctcacaatttacgtgtccactg

SEQ ID NO: 351156 - DNA, 33 bp, Homo sapien
tctacaggcatctcaccatttacgtgtccactg

SEQ ID NO: 351157 - DNA, 33 bp, Homo sapien
ttggggcctacgcctaaattcgagggcctgaac

SEQ ID NO: 351158 - DNA, 33 bp, Homo sapien
ttggggcctacgcctacattcgagggcctgaac

SEQ ID NO: 351159 - DNA, 33 bp, Homo sapien
atccagtgagtcaaacagtgcaaccagaacctg

SEQ ID NO: 351160 - DNA, 33 bp, Homo sapien
atccagtgagtcaaacggtgcaaccagaacctg

SEQ ID NO: 351161 - DNA, 33 bp, Homo sapien
ggcagcatgggtatcaagacagcaagacactgc

SEQ ID NO: 351162 - DNA, 33 bp, Homo sapien
ggcagcatgggtatcaggacagcaagacactgc

SEQ ID NO: 351163 - DNA, 33 bp, Homo sapien
gacttccggtccctaacgaacagacttggcatg

SEQ ID NO: 351164 - DNA, 33 bp, Homo sapien
gacttccggtccctaatgaacagacttggcatg

SEQ ID NO: 351165 - DNA, 33 bp, Homo sapien
gctgggtgttctcgaaacaaattgcctcagcag

SEQ ID NO: 351166 - DNA, 33 bp, Homo sapien
gctgggtgttctcgaagcaaattgcctcagcag

SEQ ID NO: 351167 - DNA, 33 bp, Homo sapien
ctagacctcaggtccaaattcctcccatctaca

SEQ ID NO: 351168 - DNA, 33 bp, Homo sapien
ctagacctcaggtccagattcctcccatctaca

SEQ ID NO: 351169 - DNA, 33 bp, Homo sapien
ttcttgggaccataaaacagcaaacttttacca

SEQ ID NO: 351170 - DNA, 33 bp, Homo sapien
ttcttgggaccataaagcagcaaacttttacca

SEQ ID NO: 351171 - DNA, 33 bp, Homo sapien
ttttgctcctgtggacagcacagttctcataac

SEQ ID NO: 351172 - DNA, 33 bp, Homo sapien
ttttgctcctgtggacggcacagttctcataac

SEQ ID NO: 351173 - DNA, 33 bp, Homo sapien
gctatcagtcaacacacctggacgcagcatcag

SEQ ID NO: 351174 - DNA, 33 bp, Homo sapien
gctatcagtcaacacatctggacgcagcatcag

SEQ ID NO: 351175 - DNA, 33 bp, Homo sapien
cttggccttctacacacgacacagtgctcagga

SEQ ID NO: 351176 - DNA, 33 bp, Homo sapien
cttggccttctacacatgacacagtgctcagga

SEQ ID NO: 351177 - DNA, 33 bp, Homo sapien
aaacagtggctttcaaagatatccaggcccgca

SEQ ID NO: 351178 - DNA, 33 bp, Homo sapien
aaacagtggctttcaatgatatccaggcccgca

SEQ ID NO: 351179 - DNA, 33 bp, Homo sapien
gctattgtcacagcccacatggactaagataga

SEQ ID NO: 351180 - DNA, 33 bp, Homo sapien
gctattgtcacagcccgcatggactaagataga

SEQ ID NO: 351181 - DNA, 33 bp, Homo sapien
agacggcctcggctgcaatggcgcctggaaagt

SEQ ID NO: 351182 - DNA, 33 bp, Homo sapien
agacggcctcggctgcgatggcgcctggaaagt

SEQ ID NO: 351183 - DNA, 33 bp, Homo sapien
attgtgcccataagaaagaggcatttggagata

SEQ ID NO: 351184 - DNA, 33 bp, Homo sapien
attgtgcccataagaaggaggcatttggagata

SEQ ID NO: 351185 - DNA, 33 bp, Homo sapien
ctgaaggtgtgcaagtaaaggtcagaggaccac

SEQ ID NO: 351186 - DNA, 33 bp, Homo sapien
ctgaaggtgtgcaagtgaaggtcagaggaccac

SEQ ID NO: 351187 - DNA, 33 bp, Homo sapien
gctgccaatgactgtcacacaaacacacctggg

SEQ ID NO: 351188 - DNA, 33 bp, Homo sapien
gctgccaatgactgtcgcacaaacacacctggg

SEQ ID NO: 351189 - DNA, 33 bp, Homo sapien
aaggtggattaccacaatgctccccaagcacac

SEQ ID NO: 351190 - DNA, 33 bp, Homo sapien
aaggtggattaccacagtgctccccaagcacac

SEQ ID NO: 351191 - DNA, 33 bp, Homo sapien
aaagtgccttgctacccagaagtaactcaaaga

SEQ ID NO: 351192 - DNA, 33 bp, Homo sapien
aaagtgccttgctaccgagaagtaactcaaaga

SEQ ID NO: 351193 - DNA, 33 bp, Homo sapien
gtgagtgagcgacaaccctgagtctcattctca

SEQ ID NO: 351194 - DNA, 33 bp, Homo sapien
gtgagtgagcgacaacgctgagtctcattctca

SEQ ID NO: 351195 - DNA, 33 bp, Homo sapien
catgggcacttccacacagttttgctaagtaga

SEQ ID NO: 351196 - DNA, 33 bp, Homo sapien
catgggcacttccacatagttttgctaagtaga

SEQ ID NO: 351197 - DNA, 33 bp, Homo sapien
gagggcaccatgcttacagtccaggaatcgggt

SEQ ID NO: 351198 - DNA, 33 bp, Homo sapien
gagggcaccatgcttatagtccaggaatcgggt

SEQ ID NO: 351199 - DNA, 33 bp, Homo sapien
ctgcctgccttacaaggctatttttgaggctct

SEQ ID NO: 351200 - DNA, 33 bp, Homo sapien
ctgcctgccttacaagtctatttttgaggctct

SEQ ID NO: 351201 - DNA, 33 bp, Homo sapien
acacgggacaaaatgacctccctgcctgcctta

SEQ ID NO: 351202 - DNA, 33 bp, Homo sapien
acacgggacaaaatgatctccctgcctgcctta

SEQ ID NO: 351203 - DNA, 33 bp, Homo sapien
atatccccaaaccctaagcgctgattctgaaac

SEQ ID NO: 351204 - DNA, 33 bp, Homo sapien
atatccccaaaccctaggcgctgattctgaaac

SEQ ID NO: 351205 - DNA, 33 bp, Homo sapien
agaccctagactttggcatcaggcagatccagt

SEQ ID NO: 351206 - DNA, 33 bp, Homo sapien
agaccctagactttggtatcaggcagatccagt

SEQ ID NO: 351207 - DNA, 33 bp, Homo sapien
gcatgaggagagaggactagagatgggggtgca

SEQ ID NO: 351208 - DNA, 33 bp, Homo sapien
gcatgaggagagaggattagagatgggggtgca

SEQ ID NO: 351209 - DNA, 33 bp, Homo sapien
tctgggcagagagtgacccttgcctgttactga

SEQ ID NO: 351210 - DNA, 33 bp, Homo sapien
tctgggcagagagtgatccttgcctgttactga

SEQ ID NO: 351211 - DNA, 33 bp, Homo sapien
ggacaatgtctattctaaagtcagggtgtgtga

SEQ ID NO: 351212 - DNA, 33 bp, Homo sapien
ggacaatgtctattctgaagtcagggtgtgtga

SEQ ID NO: 351213 - DNA, 33 bp, Homo sapien
aggctaattatgactcaccaaggtcatggcctg

SEQ ID NO: 351214 - DNA, 33 bp, Homo sapien
aggctaattatgactcgccaaggtcatggcctg

SEQ ID NO: 351215 - DNA, 33 bp, Homo sapien
aataacatttttacagaaataagtccatgccaa

SEQ ID NO: 351216 - DNA, 33 bp, Homo sapien
aataacatttttacagcaataagtccatgccaa

SEQ ID NO: 351217 - DNA, 33 bp, Homo sapien
tggggctatatctccccaagcaaaggcaagagc

SEQ ID NO: 351218 - DNA, 33 bp, Homo sapien
tggggctatatctccctaagcaaaggcaagagc

SEQ ID NO: 351219 - DNA, 33 bp, Homo sapien
tctccaggaaaatctaacaccttgaccattacc

SEQ ID NO: 351220 - DNA, 33 bp, Homo sapien
tctccaggaaaatctagcaccttgaccattacc

SEQ ID NO: 351221 - DNA, 33 bp, Homo sapien
ccacccacttgaccacaggccactcacttgact

SEQ ID NO: 351222 - DNA, 33 bp, Homo sapien
ccacccacttgaccacgggccactcacttgact

SEQ ID NO: 351223 - DNA, 33 bp, Homo sapien
aaaagagggtgatcccacgcccacaaataccac

SEQ ID NO: 351224 - DNA, 33 bp, Homo sapien
aaaagagggtgatcccgcgcccacaaataccac

SEQ ID NO: 351225 - DNA, 33 bp, Homo sapien
cagtctgctcatggggcagaactatttgcaatg

SEQ ID NO: 351226 - DNA, 33 bp, Homo sapien
cagtctgctcatgggggagaactatttgcaatg

SEQ ID NO: 351227 - DNA, 33 bp, Homo sapien
agaccagcccctatcaagctccctggcacacag

SEQ ID NO: 351228 - DNA, 33 bp, Homo sapien
agaccagcccctatcatgctccctggcacacag

SEQ ID NO: 351229 - DNA, 33 bp, Homo sapien
gatgactgaggccaacccatctgggaggatgga

SEQ ID NO: 351230 - DNA, 33 bp, Homo sapien
gatgactgaggccaacgcatctgggaggatgga

SEQ ID NO: 351231 - DNA, 33 bp, Homo sapien
tttaaggtaacctgatgaatcttcttggtgtga

SEQ ID NO: 351232 - DNA, 33 bp, Homo sapien
tttaaggtaacctgattaatcttcttggtgtga

SEQ ID NO: 351233 - DNA, 33 bp, Homo sapien
caatagtcgaagacataaaaacagatcatttcc

SEQ ID NO: 351234 - DNA, 33 bp, Homo sapien
caatagtcgaagacatgaaaacagatcatttcc

SEQ ID NO: 351235 - DNA, 33 bp, Homo sapien
acactgaagaatataaaagacagagacaaaaac

SEQ ID NO: 351236 - DNA, 33 bp, Homo sapien
acactgaagaatataacagacagagacaaaaac

SEQ ID NO: 351237 - DNA, 33 bp, Homo sapien
ttacagtgggaccacaaagataaaggacctgcc

SEQ ID NO: 351238 - DNA, 33 bp, Homo sapien
ttacagtgggaccacagagataaaggacctgcc

SEQ ID NO: 351239 - DNA, 33 bp, Homo sapien
cgtggaagaactgaaccagaagcagcacgcaag

SEQ ID NO: 351240 - DNA, 33 bp, Homo sapien
cgtggaagaactgaacgagaagcagcacgcaag

SEQ ID NO: 351241 - DNA, 33 bp, Homo sapien
tcctgggaccacccccaatttctgcttcgagaa

SEQ ID NO: 351242 - DNA, 33 bp, Homo sapien
tcctgggaccaccccccatttctgcttcgagaa

SEQ ID NO: 351243 - DNA, 33 bp, Homo sapien
tggagacaaaaacagacgctattgttctttctt

SEQ ID NO: 351244 - DNA, 33 bp, Homo sapien
tggagacaaaaacagatgctattgttctttctt

SEQ ID NO: 351245 - DNA, 33 bp, Homo sapien
ctgggagaaaggcagaaagtcatcatttgatag

SEQ ID NO: 351246 - DNA, 33 bp, Homo sapien
ctgggagaaaggcagagagtcatcatttgatag

SEQ ID NO: 351247 - DNA, 33 bp, Homo sapien
gacaagcaaaagtctacacattgaagggtaaga

SEQ ID NO: 351248 - DNA, 33 bp, Homo sapien
gacaagcaaaagtctatacattgaagggtaaga

SEQ ID NO: 351249 - DNA, 33 bp, Homo sapien
tgtggcctgggtcacaaatgattgtgatgattg

SEQ ID NO: 351250 - DNA, 33 bp, Homo sapien
tgtggcctgggtcacagatgattgtgatgattg

SEQ ID NO: 351251 - DNA, 33 bp, Homo sapien
agtggagttggttaaacacacgaagccggagct

SEQ ID NO: 351252 - DNA, 33 bp, Homo sapien
agtggagttggttaaagacacgaagccggagct

SEQ ID NO: 351253 - DNA, 33 bp, Homo sapien
gttcccacacataagccctgagaagagctcccg

SEQ ID NO: 351254 - DNA, 33 bp, Homo sapien
gttcccacacataagcgctgagaagagctcccg

SEQ ID NO: 351255 - DNA, 33 bp, Homo sapien
cacttgtcacattgccaactgggtctgacagtc

SEQ ID NO: 351256 - DNA, 33 bp, Homo sapien
cacttgtcacattgccgactgggtctgacagtc

SEQ ID NO: 351257 - DNA, 33 bp, Homo sapien
agcccctggctgacagaatagcgtcttgactcc

SEQ ID NO: 351258 - DNA, 33 bp, Homo sapien
agcccctggctgacaggatagcgtcttgactcc

SEQ ID NO: 351259 - DNA, 33 bp, Homo sapien
agttgaatgtaatgctcagaacattgtaaaaac

SEQ ID NO: 351260 - DNA, 33 bp, Homo sapien
agttgaatgtaatgcttagaacattgtaaaaac

SEQ ID NO: 351261 - DNA, 33 bp, Homo sapien
acagaggagagaaaaacaagacacgcaagcaga

SEQ ID NO: 351262 - DNA, 33 bp, Homo sapien
acagaggagagaaaaataagacacgcaagcaga

SEQ ID NO: 351263 - DNA, 33 bp, Homo sapien
ttgaacagaacttgaaacatcttcccagacctt

SEQ ID NO: 351264 - DNA, 33 bp, Homo sapien
ttgaacagaacttgaagcatcttcccagacctt

SEQ ID NO: 351265 - DNA, 33 bp, Homo sapien
ggttcctaatctcccaatcacagaagaaattat

SEQ ID NO: 351266 - DNA, 33 bp, Homo sapien
ggttcctaatctcccagtcacagaagaaattat

SEQ ID NO: 351267 - DNA, 33 bp, Homo sapien
ctaagtaaataaactacgagaaagtgagtgtca

SEQ ID NO: 351268 - DNA, 33 bp, Homo sapien
ctaagtaaataaactatgagaaagtgagtgtca

SEQ ID NO: 351269 - DNA, 33 bp, Homo sapien
atagtggatactgtacaatccctctaagtcaca

SEQ ID NO: 351270 - DNA, 33 bp, Homo sapien
atagtggatactgtacgatccctctaagtcaca

SEQ ID NO: 351271 - DNA, 33 bp, Homo sapien
atgagcagaagtaaccagagaagacagagccct

SEQ ID NO: 351272 - DNA, 33 bp, Homo sapien
atgagcagaagtaaccggagaagacagagccct

SEQ ID NO: 351273 - DNA, 33 bp, Homo sapien
atctattttagggtcactaaagtctgtctgtgc

SEQ ID NO: 351274 - DNA, 33 bp, Homo sapien
atctattttagggtcattaaagtctgtctgtgc

SEQ ID NO: 351275 - DNA, 33 bp, Homo sapien
atgaaaatctggcaaaccaatagtcccccaaat

SEQ ID NO: 351276 - DNA, 33 bp, Homo sapien
atgaaaatctggcaaatcaatagtcccccaaat

SEQ ID NO: 351277 - DNA, 33 bp, Homo sapien
gtgagtctttagaaagcagcatatgaaattgaa

SEQ ID NO: 351278 - DNA, 33 bp, Homo sapien
gtgagtctttagaaagtagcatatgaaattgaa

SEQ ID NO: 351279 - DNA, 33 bp, Homo sapien
gttcagtaaattcacaagcaaacatactgatgc

SEQ ID NO: 351280 - DNA, 33 bp, Homo sapien
gttcagtaaattcacaggcaaacatactgatgc

SEQ ID NO: 351281 - DNA, 33 bp, Homo sapien
agagaagcacacaatcagagtcagcaagaacag

SEQ ID NO: 351282 - DNA, 33 bp, Homo sapien
agagaagcacacaatcggagtcagcaagaacag

SEQ ID NO: 351283 - DNA, 33 bp, Homo sapien
gagaccagggaggaacacgttggaggaaaattt

SEQ ID NO: 351284 - DNA, 33 bp, Homo sapien
gagaccagggaggaacccgttggaggaaaattt

SEQ ID NO: 351285 - DNA, 33 bp, Homo sapien
atgatctcagaacctgcaatagtcagagcgcta

SEQ ID NO: 351286 - DNA, 33 bp, Homo sapien
atgatctcagaacctggaatagtcagagcgcta

SEQ ID NO: 351287 - DNA, 33 bp, Homo sapien
gcattcaccaaagacacgcccgccggaggagtg

SEQ ID NO: 351288 - DNA, 33 bp, Homo sapien
gcattcaccaaagacatgcccgccggaggagtg

SEQ ID NO: 351289 - DNA, 33 bp, Homo sapien
aggtagttgatacacaatgagtactttgtgcca

SEQ ID NO: 351290 - DNA, 33 bp, Homo sapien
aggtagttgatacacagtgagtactttgtgcca

SEQ ID NO: 351291 - DNA, 33 bp, Homo sapien
aaaatgttaaaactgcccttgccttgtagattg

SEQ ID NO: 351292 - DNA, 33 bp, Homo sapien
aaaatgttaaaactgctcttgccttgtagattg

SEQ ID NO: 351293 - DNA, 33 bp, Homo sapien
agatatggcagagtgcacaaaacctaaaatagt

SEQ ID NO: 351294 - DNA, 33 bp, Homo sapien
agatatggcagagtgcgcaaaacctaaaatagt

SEQ ID NO: 351295 - DNA, 33 bp, Homo sapien
ggaaataggatggagactcccctgcaatgagga

SEQ ID NO: 351296 - DNA, 33 bp, Homo sapien
ggaaataggatggagattcccctgcaatgagga

SEQ ID NO: 351297 - DNA, 33 bp, Homo sapien
atgattaccgcttaaaatagcacctagtattta

SEQ ID NO: 351298 - DNA, 33 bp, Homo sapien
atgattaccgcttaaagtagcacctagtattta

SEQ ID NO: 351299 - DNA, 33 bp, Homo sapien
atcagtgctttatagactaacttatttgaacac

SEQ ID NO: 351300 - DNA, 33 bp, Homo sapien
atcagtgctttatagattaacttatttgaacac

SEQ ID NO: 351301 - DNA, 33 bp, Homo sapien
ccctaatatactaaaaagctcagtgcctgggcc

SEQ ID NO: 351302 - DNA, 33 bp, Homo sapien
ccctaatatactaaaaggctcagtgcctgggcc

SEQ ID NO: 351303 - DNA, 33 bp, Homo sapien
ctataaacattgtccaaactgaagatggaggta

SEQ ID NO: 351304 - DNA, 33 bp, Homo sapien
ctataaacattgtccagactgaagatggaggta

SEQ ID NO: 351305 - DNA, 33 bp, Homo sapien
gtaatgctaccttgtacacctgctataaagatg

SEQ ID NO: 351306 - DNA, 33 bp, Homo sapien
gtaatgctaccttgtatacctgctataaagatg

SEQ ID NO: 351307 - DNA, 33 bp, Homo sapien
ttgaggtaatgatgagcaaaaatgatatcccaa

SEQ ID NO: 351308 - DNA, 33 bp, Homo sapien
ttgaggtaatgatgaggaaaaatgatatcccaa

SEQ ID NO: 351309 - DNA, 33 bp, Homo sapien
gcagaactccctgggcaccgctgttcctccgtc

SEQ ID NO: 351310 - DNA, 33 bp, Homo sapien
gcagaactccctgggcgccgctgttcctccgtc

SEQ ID NO: 351311 - DNA, 33 bp, Homo sapien
agagtcccataggccccagtcagaatccctgct

SEQ ID NO: 351312 - DNA, 33 bp, Homo sapien
agagtcccataggccctagtcagaatccctgct

SEQ ID NO: 351313 - DNA, 33 bp, Homo sapien
cacacaccactgaggcaacggggtgcagtttag

SEQ ID NO: 351314 - DNA, 33 bp, Homo sapien
cacacaccactgaggcgacggggtgcagtttag

SEQ ID NO: 351315 - DNA, 33 bp, Homo sapien
acccaacttggacctgaagagtcaaggtcaaag

SEQ ID NO: 351316 - DNA, 33 bp, Homo sapien
acccaacttggacctgtagagtcaaggtcaaag

SEQ ID NO: 351317 - DNA, 33 bp, Homo sapien
aatgggtcacccataaactctctaactgggggc

SEQ ID NO: 351318 - DNA, 33 bp, Homo sapien
aatgggtcacccataacctctctaactgggggc

SEQ ID NO: 351319 - DNA, 33 bp, Homo sapien
atccttgtaatttcagacccttttataggaatg

SEQ ID NO: 351320 - DNA, 33 bp, Homo sapien
atccttgtaatttcaggcccttttataggaatg

SEQ ID NO: 351321 - DNA, 33 bp, Homo sapien
ctggtactttgacatacccattgtgcttccaac

SEQ ID NO: 351322 - DNA, 33 bp, Homo sapien
ctggtactttgacatatccattgtgcttccaac

SEQ ID NO: 351323 - DNA, 33 bp, Homo sapien
catgaaaagagctacccggagtttgctgcccac

SEQ ID NO: 351324 - DNA, 33 bp, Homo sapien
catgaaaagagctacctggagtttgctgcccac

SEQ ID NO: 351325 - DNA, 33 bp, Homo sapien
gaatgagacctgaagccgctggacatcagggca

SEQ ID NO: 351326 - DNA, 33 bp, Homo sapien
gaatgagacctgaagctgctggacatcagggca

SEQ ID NO: 351327 - DNA, 33 bp, Homo sapien
ctaggctctggcaaagaatcagaacataacact

SEQ ID NO: 351328 - DNA, 33 bp, Homo sapien
ctaggctctggcaaaggatcagaacataacact

SEQ ID NO: 351329 - DNA, 33 bp, Homo sapien
cttcattcctcatgacagtcaagttatattcca

SEQ ID NO: 351330 - DNA, 33 bp, Homo sapien
cttcattcctcatgacggtcaagttatattcca

SEQ ID NO: 351331 - DNA, 33 bp, Homo sapien
gatcaaggaagattgcacaatggagatggcatt

SEQ ID NO: 351332 - DNA, 33 bp, Homo sapien
gatcaaggaagattgcgcaatggagatggcatt

SEQ ID NO: 351333 - DNA, 33 bp, Homo sapien
gttcattttttgttctcacagtgcacttgctag

SEQ ID NO: 351334 - DNA, 33 bp, Homo sapien
gttcattttttgttcttacagtgcacttgctag

SEQ ID NO: 351335 - DNA, 33 bp, Homo sapien
cctatgagaaaactgaagtacagctagtaagtg

SEQ ID NO: 351336 - DNA, 33 bp, Homo sapien
cctatgagaaaactgaggtacagctagtaagtg

SEQ ID NO: 351337 - DNA, 33 bp, Homo sapien
ccatgcctggccacaacctgaaatggaaactca

SEQ ID NO: 351338 - DNA, 33 bp, Homo sapien
ccatgcctggccacaatctgaaatggaaactca

SEQ ID NO: 351339 - DNA, 33 bp, Homo sapien
tctttcaaatgcgcaactaacctaacagatttg

SEQ ID NO: 351340 - DNA, 33 bp, Homo sapien
tctttcaaatgcgcaagtaacctaacagatttg

SEQ ID NO: 351341 - DNA, 33 bp, Homo sapien
ttcctaattggcactcaatctactgggtttagg

SEQ ID NO: 351342 - DNA, 33 bp, Homo sapien
ttcctaattggcactcgatctactgggtttagg

SEQ ID NO: 351343 - DNA, 33 bp, Homo sapien
cagtaaaggtccagaaagttcctggcatgcaag

SEQ ID NO: 351344 - DNA, 33 bp, Homo sapien
cagtaaaggtccagaaggttcctggcatgcaag

SEQ ID NO: 351345 - DNA, 33 bp, Homo sapien
tattaggaatcaaggaacaagctgaagaggaga

SEQ ID NO: 351346 - DNA, 33 bp, Homo sapien
tattaggaatcaaggagcaagctgaagaggaga

SEQ ID NO: 351347 - DNA, 33 bp, Homo sapien
ccacttctaaaacgtaagctatgtggcctctgc

SEQ ID NO: 351348 - DNA, 33 bp, Homo sapien
ccacttctaaaacgtacgctatgtggcctctgc

SEQ ID NO: 351349 - DNA, 33 bp, Homo sapien
atgctacttttcccgacgtgtaggttcatggga

SEQ ID NO: 351350 - DNA, 33 bp, Homo sapien
atgctacttttcccgatgtgtaggttcatggga

SEQ ID NO: 351351 - DNA, 33 bp, Homo sapien
ttgctacaattaaggacggaaaggtaacaggaa

SEQ ID NO: 351352 - DNA, 33 bp, Homo sapien
ttgctacaattaaggatggaaaggtaacaggaa

SEQ ID NO: 351353 - DNA, 33 bp, Homo sapien
aggccagatctaaaaacgtactgtcaagaaaca

SEQ ID NO: 351354 - DNA, 33 bp, Homo sapien
aggccagatctaaaaatgtactgtcaagaaaca

SEQ ID NO: 351355 - DNA, 33 bp, Homo sapien
tataagatgacattccaaagactggaggcaact

SEQ ID NO: 351356 - DNA, 33 bp, Homo sapien
tataagatgacattcccaagactggaggcaact

SEQ ID NO: 351357 - DNA, 33 bp, Homo sapien
tttttatatgcaaacacggatatgatggggaat

SEQ ID NO: 351358 - DNA, 33 bp, Homo sapien
tttttatatgcaaacatggatatgatggggaat

SEQ ID NO: 351359 - DNA, 33 bp, Homo sapien
gtgccatcttaataaaagctcaagaccagcagc

SEQ ID NO: 351360 - DNA, 33 bp, Homo sapien
gtgccatcttaataaaggctcaagaccagcagc

SEQ ID NO: 351361 - DNA, 33 bp, Homo sapien
gcttgtatgcgggctacggcctcagtgagacct

SEQ ID NO: 351362 - DNA, 33 bp, Homo sapien
gcttgtatgcgggctatggcctcagtgagacct

SEQ ID NO: 351363 - DNA, 33 bp, Homo sapien
gggtcagtgacgtaaagctggcttggtttcaat

SEQ ID NO: 351364 - DNA, 33 bp, Homo sapien
gggtcagtgacgtaaatctggcttggtttcaat

SEQ ID NO: 351365 - DNA, 33 bp, Homo sapien
cagtgagggtctgatacgccatgcctgtcccgg

SEQ ID NO: 351366 - DNA, 33 bp, Homo sapien
cagtgagggtctgatatgccatgcctgtcccgg

SEQ ID NO: 351367 - DNA, 33 bp, Homo sapien
tgggaaaggactatcacgcctcccgccaagtcc

SEQ ID NO: 351368 - DNA, 33 bp, Homo sapien
tgggaaaggactatcatgcctcccgccaagtcc

SEQ ID NO: 351369 - DNA, 33 bp, Homo sapien
tttcccagcctcaacacacacctttccttacag

SEQ ID NO: 351370 - DNA, 33 bp, Homo sapien
tttcccagcctcaacatacacctttccttacag

SEQ ID NO: 351371 - DNA, 33 bp, Homo sapien
atgaggatccgtttcccatttatttctgttacc

SEQ ID NO: 351372 - DNA, 33 bp, Homo sapien
atgaggatccgtttcctatttatttctgttacc

SEQ ID NO: 351373 - DNA, 33 bp, Homo sapien
ggagaaggtgatatataagaagtgcttagtacg

SEQ ID NO: 351374 - DNA, 33 bp, Homo sapien
ggagaaggtgatatatgagaagtgcttagtacg

SEQ ID NO: 351375 - DNA, 33 bp, Homo sapien
agtagtcgcattttccaaaagaggtgatagaac

SEQ ID NO: 351376 - DNA, 33 bp, Homo sapien
agtagtcgcattttccgaaagaggtgatagaac

SEQ ID NO: 351377 - DNA, 33 bp, Homo sapien
atctcacaaacatttcaatgagtgcaaggagcc

SEQ ID NO: 351378 - DNA, 33 bp, Homo sapien
atctcacaaacatttcgatgagtgcaaggagcc

SEQ ID NO: 351379 - DNA, 33 bp, Homo sapien
tttctgaataccaaaagtctcccctctaagacc

SEQ ID NO: 351380 - DNA, 33 bp, Homo sapien
tttctgaataccaaaattctcccctctaagacc

SEQ ID NO: 351381 - DNA, 33 bp, Homo sapien
tttttgcatcattctaaaaatatcttggatata

SEQ ID NO: 351382 - DNA, 33 bp, Homo sapien
tttttgcatcattctagaaatatcttggatata

SEQ ID NO: 351383 - DNA, 33 bp, Homo sapien
tggacagccaagcatgaagaacttgctcccctg

SEQ ID NO: 351384 - DNA, 33 bp, Homo sapien
tggacagccaagcatggagaacttgctcccctg

SEQ ID NO: 351385 - DNA, 33 bp, Homo sapien
aatatttagtctttgacccagattcctaacaca

SEQ ID NO: 351386 - DNA, 33 bp, Homo sapien
aatatttagtctttgatccagattcctaacaca

SEQ ID NO: 351387 - DNA, 33 bp, Homo sapien
tgaatctttgtgtgaacgtgtggtttcatttct

SEQ ID NO: 351388 - DNA, 33 bp, Homo sapien
tgaatctttgtgtgaatgtgtggtttcatttct

SEQ ID NO: 351389 - DNA, 33 bp, Homo sapien
tcatgtattattgtctcaattggcatttcttgg

SEQ ID NO: 351390 - DNA, 33 bp, Homo sapien
tcatgtattattgtcttaattggcatttcttgg

SEQ ID NO: 351391 - DNA, 33 bp, Homo sapien
ctagctgccttatatacgatgctgatgtctttt

SEQ ID NO: 351392 - DNA, 33 bp, Homo sapien
ctagctgccttatatatgatgctgatgtctttt

SEQ ID NO: 351393 - DNA, 33 bp, Homo sapien
aatgcagctggctccaaaaaatattcagggaaa

SEQ ID NO: 351394 - DNA, 33 bp, Homo sapien
aatgcagctggctccacaaaatattcagggaaa

SEQ ID NO: 351395 - DNA, 33 bp, Homo sapien
atttatagaggccaacaaaaagactttccacct

SEQ ID NO: 351396 - DNA, 33 bp, Homo sapien
atttatagaggccaacgaaaagactttccacct

SEQ ID NO: 351397 - DNA, 33 bp, Homo sapien
aggatggccaatgacaaaagaggtcccgcttcc

SEQ ID NO: 351398 - DNA, 33 bp, Homo sapien
aggatggccaatgacagaagaggtcccgcttcc

SEQ ID NO: 351399 - DNA, 33 bp, Homo sapien
cctggcattgtgtccaagatgcccttacgtggt

SEQ ID NO: 351400 - DNA, 33 bp, Homo sapien
cctggcattgtgtccaggatgcccttacgtggt

SEQ ID NO: 351401 - DNA, 33 bp, Homo sapien
ggacagtcccaaaaataacaagcgatgattgtg

SEQ ID NO: 351402 - DNA, 33 bp, Homo sapien
ggacagtcccaaaaatgacaagcgatgattgtg

SEQ ID NO: 351403 - DNA, 33 bp, Homo sapien
atctggtatataggagcctacaatggctatcac

SEQ ID NO: 351404 - DNA, 33 bp, Homo sapien
atctggtatataggagtctacaatggctatcac

SEQ ID NO: 351405 - DNA, 33 bp, Homo sapien
cgtgagcctttttctgaactcagaacttgcttt

SEQ ID NO: 351406 - DNA, 33 bp, Homo sapien
cgtgagcctttttctggactcagaacttgcttt

SEQ ID NO: 351407 - DNA, 33 bp, Homo sapien
aacaaacagctcaacaatccacagccacatcta

SEQ ID NO: 351408 - DNA, 33 bp, Homo sapien
aacaaacagctcaacagtccacagccacatcta

SEQ ID NO: 351409 - DNA, 33 bp, Homo sapien
aattaggaactgtggacctgtgagtacgtggac

SEQ ID NO: 351410 - DNA, 33 bp, Homo sapien
aattaggaactgtggatctgtgagtacgtggac

SEQ ID NO: 351411 - DNA, 33 bp, Homo sapien
tgttataccgtccatgcatgcacacgcaactgc

SEQ ID NO: 351412 - DNA, 33 bp, Homo sapien
tgttataccgtccatgtatgcacacgcaactgc

SEQ ID NO: 351413 - DNA, 33 bp, Homo sapien
agctgctcgtatactacagaggttaataaaatc

SEQ ID NO: 351414 - DNA, 33 bp, Homo sapien
agctgctcgtatactatagaggttaataaaatc

SEQ ID NO: 351415 - DNA, 33 bp, Homo sapien
gttgcagtgagtgagactccgtatcaaacaaaa

SEQ ID NO: 351416 - DNA, 33 bp, Homo sapien
gttgcagtgagtgagattccgtatcaaacaaaa

SEQ ID NO: 351417 - DNA, 33 bp, Homo sapien
ggcaaagagcaaattcccacaaggattctgcaa

SEQ ID NO: 351418 - DNA, 33 bp, Homo sapien
ggcaaagagcaaattctcacaaggattctgcaa

SEQ ID NO: 351419 - DNA, 33 bp, Homo sapien
tccttttatcgccattcaaaaaaattgttgctg

SEQ ID NO: 351420 - DNA, 33 bp, Homo sapien
tccttttatcgccatttaaaaaaattgttgctg

SEQ ID NO: 351421 - DNA, 33 bp, Homo sapien
tttggtctcaagagatgaattctgtgtccctgt

SEQ ID NO: 351422 - DNA, 33 bp, Homo sapien
tttggtctcaagagattaattctgtgtccctgt

SEQ ID NO: 351423 - DNA, 33 bp, Homo sapien
atcagactgccccaacgctactacaactctcag

SEQ ID NO: 351424 - DNA, 33 bp, Homo sapien
atcagactgccccaactctactacaactctcag

SEQ ID NO: 351425 - DNA, 33 bp, Homo sapien
agaaaccaaatacaccaatcagctgacccaaga

SEQ ID NO: 351426 - DNA, 33 bp, Homo sapien
agaaaccaaatacacctatcagctgacccaaga

SEQ ID NO: 351427 - DNA, 33 bp, Homo sapien
ctggccaggtgcaatacctcacgcctgtaatcc

SEQ ID NO: 351428 - DNA, 33 bp, Homo sapien
ctggccaggtgcaatagctcacgcctgtaatcc

SEQ ID NO: 351429 - DNA, 33 bp, Homo sapien
ccttccaaaatggcacaggcaatcagcattttt

SEQ ID NO: 351430 - DNA, 33 bp, Homo sapien
ccttccaaaatggcacgggcaatcagcattttt

SEQ ID NO: 351431 - DNA, 33 bp, Homo sapien
gtcctctccctggtaccatctgttagtccactc

SEQ ID NO: 351432 - DNA, 33 bp, Homo sapien
gtcctctccctggtactatctgttagtccactc

SEQ ID NO: 351433 - DNA, 33 bp, Homo sapien
gagctaattaaaccaacgtggacccaagtgcct

SEQ ID NO: 351434 - DNA, 33 bp, Homo sapien
gagctaattaaaccaatgtggacccaagtgcct

SEQ ID NO: 351435 - DNA, 33 bp, Homo sapien
ttcaaggcctttgagaaccatgccgtatgtcat

SEQ ID NO: 351436 - DNA, 33 bp, Homo sapien
ttcaaggcctttgagatccatgccgtatgtcat

SEQ ID NO: 351437 - DNA, 33 bp, Homo sapien
aggttgttgtcatgtcagacacggctgatgcat

SEQ ID NO: 351438 - DNA, 33 bp, Homo sapien
aggttgttgtcatgtccgacacggctgatgcat

SEQ ID NO: 351439 - DNA, 33 bp, Homo sapien
ggactgctttccacacacttgtaatttcatccc

SEQ ID NO: 351440 - DNA, 33 bp, Homo sapien
ggactgctttccacacccttgtaatttcatccc

SEQ ID NO: 351441 - DNA, 33 bp, Homo sapien
ccatgcagctggctaacgtttctgagaaaatac

SEQ ID NO: 351442 - DNA, 33 bp, Homo sapien
ccatgcagctggctaatgtttctgagaaaatac

SEQ ID NO: 351443 - DNA, 33 bp, Homo sapien
ccagaaagtcttgttgaataaatgaattgataa

SEQ ID NO: 351444 - DNA, 33 bp, Homo sapien
ccagaaagtcttgttgtataaatgaattgataa

SEQ ID NO: 351445 - DNA, 33 bp, Homo sapien
agcaacttaccagaaacagtcgctcatactcgg

SEQ ID NO: 351446 - DNA, 33 bp, Homo sapien
agcaacttaccagaaagagtcgctcatactcgg

SEQ ID NO: 351447 - DNA, 33 bp, Homo sapien
tttccaggtattcttaacacatttcaggagtga

SEQ ID NO: 351448 - DNA, 33 bp, Homo sapien
tttccaggtattcttatcacatttcaggagtga

SEQ ID NO: 351449 - DNA, 33 bp, Homo sapien
tgcagtcagttttggaaggagctttaatcttgt

SEQ ID NO: 351450 - DNA, 33 bp, Homo sapien
tgcagtcagttttggatggagctttaatcttgt

SEQ ID NO: 351451 - DNA, 33 bp, Homo sapien
gatggtgagtttgcatcaattttgaaaagaaac

SEQ ID NO: 351452 - DNA, 33 bp, Homo sapien
gatggtgagtttgcattaattttgaaaagaaac

SEQ ID NO: 351453 - DNA, 33 bp, Homo sapien
tgtgatccattgtatccagctcacctgttgttt

SEQ ID NO: 351454 - DNA, 33 bp, Homo sapien
tgtgatccattgtatctagctcacctgttgttt

SEQ ID NO: 351455 - DNA, 33 bp, Homo sapien
cattggcctggggagcactgtatcattacaata

SEQ ID NO: 351456 - DNA, 33 bp, Homo sapien
cattggcctggggagcgctgtatcattacaata

SEQ ID NO: 351457 - DNA, 33 bp, Homo sapien
aaaatgcactggattacgtctgcctcttctaat

SEQ ID NO: 351458 - DNA, 33 bp, Homo sapien
aaaatgcactggattatgtctgcctcttctaat

SEQ ID NO: 351459 - DNA, 33 bp, Homo sapien
cagttccttttctgtaagtaacacaacacctgt

SEQ ID NO: 351460 - DNA, 33 bp, Homo sapien
cagttccttttctgtatgtaacacaacacctgt

SEQ ID NO: 351461 - DNA, 33 bp, Homo sapien
agacgcatcttgaacacggaactgttaaaccac

SEQ ID NO: 351462 - DNA, 33 bp, Homo sapien
agacgcatcttgaacatggaactgttaaaccac

SEQ ID NO: 351463 - DNA, 33 bp, Homo sapien
aagagtgttgtgtcctcaaaccctagttccctg

SEQ ID NO: 351464 - DNA, 33 bp, Homo sapien
aagagtgttgtgtcctgaaaccctagttccctg

SEQ ID NO: 351465 - DNA, 33 bp, Homo sapien
acttcacagagtccaaaaaagttaaagaattta

SEQ ID NO: 351466 - DNA, 33 bp, Homo sapien
acttcacagagtccaacaaagttaaagaattta

SEQ ID NO: 351467 - DNA, 33 bp, Homo sapien
tgaaagctgttttggccgaaagttatgaaaaaa

SEQ ID NO: 351468 - DNA, 33 bp, Homo sapien
tgaaagctgttttggctgaaagttatgaaaaaa

SEQ ID NO: 351469 - DNA, 33 bp, Homo sapien
ttatactcactactcacattcattttacaccaa

SEQ ID NO: 351470 - DNA, 33 bp, Homo sapien
ttatactcactactcatattcattttacaccaa

SEQ ID NO: 351471 - DNA, 33 bp, Homo sapien
ttaattaagaaactaaatctagcaggctaaagg

SEQ ID NO: 351472 - DNA, 33 bp, Homo sapien
ttaattaagaaactaagtctagcaggctaaagg

SEQ ID NO: 351473 - DNA, 33 bp, Homo sapien
atgcatttttcaagtacagaacacaggtttaca

SEQ ID NO: 351474 - DNA, 33 bp, Homo sapien
atgcatttttcaagtatagaacacaggtttaca

SEQ ID NO: 351475 - DNA, 33 bp, Homo sapien
tttttcaaagacaacaatgcattactaggtgct

SEQ ID NO: 351476 - DNA, 33 bp, Homo sapien
tttttcaaagacaacagtgcattactaggtgct

SEQ ID NO: 351477 - DNA, 33 bp, Homo sapien
gagggtggaattaccaagagaaagaaaacagtc

SEQ ID NO: 351478 - DNA, 33 bp, Homo sapien
gagggtggaattaccaggagaaagaaaacagtc

SEQ ID NO: 351479 - DNA, 33 bp, Homo sapien
agatgaccaattcgcccatccattacctatcca

SEQ ID NO: 351480 - DNA, 33 bp, Homo sapien
agatgaccaattcgccgatccattacctatcca

SEQ ID NO: 351481 - DNA, 33 bp, Homo sapien
taaataaacaaaagagaagactccggttcgaga

SEQ ID NO: 351482 - DNA, 33 bp, Homo sapien
taaataaacaaaagaggagactccggttcgaga

SEQ ID NO: 351483 - DNA, 33 bp, Homo sapien
tttacaactttagatacagtggtcaaagtctaa

SEQ ID NO: 351484 - DNA, 33 bp, Homo sapien
tttacaactttagatagagtggtcaaagtctaa

SEQ ID NO: 351485 - DNA, 33 bp, Homo sapien
gtcttctgaagcagcacatctcttgtgacagtg

SEQ ID NO: 351486 - DNA, 33 bp, Homo sapien
gtcttctgaagcagcagatctcttgtgacagtg

SEQ ID NO: 351487 - DNA, 33 bp, Homo sapien
tctttagttggtggctcaaatccgtgcttctta

SEQ ID NO: 351488 - DNA, 33 bp, Homo sapien
tctttagttggtggcttaaatccgtgcttctta

SEQ ID NO: 351489 - DNA, 33 bp, Homo sapien
aacttgaactcgtgtacgctccattcaatgaga

SEQ ID NO: 351490 - DNA, 33 bp, Homo sapien
aacttgaactcgtgtatgctccattcaatgaga

SEQ ID NO: 351491 - DNA, 33 bp, Homo sapien
cgcgggggccatattagcagcggttattcggtg

SEQ ID NO: 351492 - DNA, 33 bp, Homo sapien
cgcgggggccatattatcagcggttattcggtg

SEQ ID NO: 351493 - DNA, 33 bp, Homo sapien
ataatcaacctggtgacgataattgcttcaaag

SEQ ID NO: 351494 - DNA, 33 bp, Homo sapien
ataatcaacctggtgatgataattgcttcaaag

SEQ ID NO: 351495 - DNA, 33 bp, Homo sapien
tatatgataaagcatacgtatgtagttatatat

SEQ ID NO: 351496 - DNA, 33 bp, Homo sapien
tatatgataaagcatatgtatgtagttatatat

SEQ ID NO: 351497 - DNA, 33 bp, Homo sapien
tctcagctgttgtcaaccaaatatgtgctccca

SEQ ID NO: 351498 - DNA, 33 bp, Homo sapien
tctcagctgttgtcaatcaaatatgtgctccca

SEQ ID NO: 351499 - DNA, 33 bp, Homo sapien
ctgcaaatagggcttggaaatactttagcctat

SEQ ID NO: 351500 - DNA, 33 bp, Homo sapien
ctgcaaatagggcttgtaaatactttagcctat

SEQ ID NO: 351501 - DNA, 33 bp, Homo sapien
tcaacctctgggtgtaacaagactggagggtga

SEQ ID NO: 351502 - DNA, 33 bp, Homo sapien
tcaacctctgggtgtagcaagactggagggtga

SEQ ID NO: 351503 - DNA, 33 bp, Homo sapien
tgattatgatgtaaaggacatagtcaaatacac

SEQ ID NO: 351504 - DNA, 33 bp, Homo sapien
tgattatgatgtaaagtacatagtcaaatacac

SEQ ID NO: 351505 - DNA, 33 bp, Homo sapien
gtaaaactgacagtcactatgtgtgtatttctg

SEQ ID NO: 351506 - DNA, 33 bp, Homo sapien
gtaaaactgacagtcagtatgtgtgtatttctg

SEQ ID NO: 351507 - DNA, 33 bp, Homo sapien
tgtatttcctgatacactgcagatatacctgca

SEQ ID NO: 351508 - DNA, 33 bp, Homo sapien
tgtatttcctgatacattgcagatatacctgca

SEQ ID NO: 351509 - DNA, 33 bp, Homo sapien
actatataccagtagacgtccaactatctccag

SEQ ID NO: 351510 - DNA, 33 bp, Homo sapien
actatataccagtagatgtccaactatctccag

SEQ ID NO: 351511 - DNA, 33 bp, Homo sapien
ccacactagagcctaacgtgatatcttgttcaa

SEQ ID NO: 351512 - DNA, 33 bp, Homo sapien
ccacactagagcctaatgtgatatcttgttcaa

SEQ ID NO: 351513 - DNA, 33 bp, Homo sapien
ccatctatgggaagagaagagagatgaactgca

SEQ ID NO: 351514 - DNA, 33 bp, Homo sapien
ccatctatgggaagaggagagagatgaactgca

SEQ ID NO: 351515 - DNA, 33 bp, Homo sapien
tccttgattaaaacaccagagctggctgggcac

SEQ ID NO: 351516 - DNA, 33 bp, Homo sapien
tccttgattaaaacactagagctggctgggcac

SEQ ID NO: 351517 - DNA, 33 bp, Homo sapien
acttttaaaaactccaatgatagctccaaacct

SEQ ID NO: 351518 - DNA, 33 bp, Homo sapien
acttttaaaaactccattgatagctccaaacct

SEQ ID NO: 351519 - DNA, 33 bp, Homo sapien
taactgtcttagtacaccataaactgggtggat

SEQ ID NO: 351520 - DNA, 33 bp, Homo sapien
taactgtcttagtacatcataaactgggtggat

SEQ ID NO: 351521 - DNA, 33 bp, Homo sapien
cttctctactctcccaacagcaaacctgccatc

SEQ ID NO: 351522 - DNA, 33 bp, Homo sapien
cttctctactctcccagcagcaaacctgccatc

SEQ ID NO: 351523 - DNA, 33 bp, Homo sapien
tgtgaaatgtcagggaagggccagatcagggat

SEQ ID NO: 351524 - DNA, 33 bp, Homo sapien
tgtgaaatgtcagggacgggccagatcagggat

SEQ ID NO: 351525 - DNA, 33 bp, Homo sapien
cagccgctcaaatagacggtgctcagcctctga

SEQ ID NO: 351526 - DNA, 33 bp, Homo sapien
cagccgctcaaatagatggtgctcagcctctga

SEQ ID NO: 351527 - DNA, 33 bp, Homo sapien
gaggaaaatgacataaagacccaaatgccactt

SEQ ID NO: 351528 - DNA, 33 bp, Homo sapien
gaggaaaatgacataaggacccaaatgccactt

SEQ ID NO: 351529 - DNA, 33 bp, Homo sapien
tttaggctgggtcttgaatatggctctgagcta

SEQ ID NO: 351530 - DNA, 33 bp, Homo sapien
tttaggctgggtcttgcatatggctctgagcta

SEQ ID NO: 351531 - DNA, 33 bp, Homo sapien
catctcatgagtgtagaacatttttgtttaacc

SEQ ID NO: 351532 - DNA, 33 bp, Homo sapien
catctcatgagtgtagtacatttttgtttaacc

SEQ ID NO: 351533 - DNA, 33 bp, Homo sapien
tgagaccactggactcaatgaacttggctttcc

SEQ ID NO: 351534 - DNA, 33 bp, Homo sapien
tgagaccactggactccatgaacttggctttcc

SEQ ID NO: 351535 - DNA, 33 bp, Homo sapien
aatggatgcaaagtgccgaacacaaacccccag

SEQ ID NO: 351536 - DNA, 33 bp, Homo sapien
aatggatgcaaagtgctgaacacaaacccccag

SEQ ID NO: 351537 - DNA, 33 bp, Homo sapien
attccatttttaatcactgagtccaataaggga

SEQ ID NO: 351538 - DNA, 33 bp, Homo sapien
attccatttttaatcattgagtccaataaggga

SEQ ID NO: 351539 - DNA, 33 bp, Homo sapien
gtgcatacctctgtacaaagacgtggcgtgtta

SEQ ID NO: 351540 - DNA, 33 bp, Homo sapien
gtgcatacctctgtacgaagacgtggcgtgtta

SEQ ID NO: 351541 - DNA, 33 bp, Homo sapien
ggcaggagctttcccaagacgaatcaagtcatt

SEQ ID NO: 351542 - DNA, 33 bp, Homo sapien
ggcaggagctttcccaggacgaatcaagtcatt

SEQ ID NO: 351543 - DNA, 33 bp, Homo sapien
ccccagtgagacaggcaagggtgacaggaggct

SEQ ID NO: 351544 - DNA, 33 bp, Homo sapien
ccccagtgagacaggccagggtgacaggaggct

SEQ ID NO: 351545 - DNA, 33 bp, Homo sapien
accacatctggggagaaaactttagaatattct

SEQ ID NO: 351546 - DNA, 33 bp, Homo sapien
accacatctggggagataactttagaatattct

SEQ ID NO: 351547 - DNA, 33 bp, Homo sapien
tcccttttccctttgcggattctaatctgtatc

SEQ ID NO: 351548 - DNA, 33 bp, Homo sapien
tcccttttccctttgctgattctaatctgtatc

SEQ ID NO: 351549 - DNA, 33 bp, Homo sapien
actctgtgtatctagcactttgattgaaattaa

SEQ ID NO: 351550 - DNA, 33 bp, Homo sapien
actctgtgtatctagcgctttgattgaaattaa

SEQ ID NO: 351551 - DNA, 33 bp, Homo sapien
gagccaagattctgcacgatactgacttcttac

SEQ ID NO: 351552 - DNA, 33 bp, Homo sapien
gagccaagattctgcatgatactgacttcttac

SEQ ID NO: 351553 - DNA, 33 bp, Homo sapien
agggatcttgtcttgccaccctaatggtaaagg

SEQ ID NO: 351554 - DNA, 33 bp, Homo sapien
agggatcttgtcttgctaccctaatggtaaagg

SEQ ID NO: 351555 - DNA, 33 bp, Homo sapien
tcaaagacaatgacaaaacccatttttgatgcc

SEQ ID NO: 351556 - DNA, 33 bp, Homo sapien
tcaaagacaatgacaacacccatttttgatgcc

SEQ ID NO: 351557 - DNA, 33 bp, Homo sapien
atctgtgtgcccgatcacaccggattctgaatc

SEQ ID NO: 351558 - DNA, 33 bp, Homo sapien
atctgtgtgcccgatcgcaccggattctgaatc

SEQ ID NO: 351559 - DNA, 33 bp, Homo sapien
gcaaagtgaggcagacagggatagtaacgtaca

SEQ ID NO: 351560 - DNA, 33 bp, Homo sapien
gcaaagtgaggcagacggggatagtaacgtaca

SEQ ID NO: 351561 - DNA, 33 bp, Homo sapien
tctcccgctcctttaccgctacaggcctttctc

SEQ ID NO: 351562 - DNA, 33 bp, Homo sapien
tctcccgctcctttactgctacaggcctttctc

SEQ ID NO: 351563 - DNA, 33 bp, Homo sapien
ctttgaaatgcaaaccccatcatgacatgcctt

SEQ ID NO: 351564 - DNA, 33 bp, Homo sapien
ctttgaaatgcaaacctcatcatgacatgcctt

SEQ ID NO: 351565 - DNA, 33 bp, Homo sapien
aaacttattcaacagcagcatctttttttcaca

SEQ ID NO: 351566 - DNA, 33 bp, Homo sapien
aaacttattcaacagcggcatctttttttcaca

SEQ ID NO: 351567 - DNA, 33 bp, Homo sapien
aatcccagccaaggcaactaaagatgagctgaa

SEQ ID NO: 351568 - DNA, 33 bp, Homo sapien
aatcccagccaaggcagctaaagatgagctgaa

SEQ ID NO: 351569 - DNA, 33 bp, Homo sapien
ggcatcagtgccccccggaccttcagctcatct

SEQ ID NO: 351570 - DNA, 33 bp, Homo sapien
ggcatcagtgcccccctgaccttcagctcatct

SEQ ID NO: 351571 - DNA, 33 bp, Homo sapien
atgtagggaaggaaacgatactgtactagtagc

SEQ ID NO: 351572 - DNA, 33 bp, Homo sapien
atgtagggaaggaaactatactgtactagtagc

SEQ ID NO: 351573 - DNA, 33 bp, Homo sapien
aatggtttaatgtacccagacttggtttcatgc

SEQ ID NO: 351574 - DNA, 33 bp, Homo sapien
aatggtttaatgtacctagacttggtttcatgc

SEQ ID NO: 351575 - DNA, 33 bp, Homo sapien
tcaggccagtattcccagagtccctggagagcc

SEQ ID NO: 351576 - DNA, 33 bp, Homo sapien
tcaggccagtattcccggagtccctggagagcc

SEQ ID NO: 351577 - DNA, 33 bp, Homo sapien
ccattatgtgccaaccaccttgctaagcacgca

SEQ ID NO: 351578 - DNA, 33 bp, Homo sapien
ccattatgtgccaaccgccttgctaagcacgca

SEQ ID NO: 351579 - DNA, 33 bp, Homo sapien
ggagactaagactgggccagcactcatgctcag

SEQ ID NO: 351580 - DNA, 33 bp, Homo sapien
ggagactaagactgggtcagcactcatgctcag

SEQ ID NO: 351581 - DNA, 33 bp, Homo sapien
gatttgctcaggacaccgcttctcaccctcctc

SEQ ID NO: 351582 - DNA, 33 bp, Homo sapien
gatttgctcaggacactgcttctcaccctcctc

SEQ ID NO: 351583 - DNA, 33 bp, Homo sapien
gtagttgtagatagcacgaaccccaagattgac

SEQ ID NO: 351584 - DNA, 33 bp, Homo sapien
gtagttgtagatagcatgaaccccaagattgac

SEQ ID NO: 351585 - DNA, 33 bp, Homo sapien
gctccctgttagaccaggtggggccactcccat

SEQ ID NO: 351586 - DNA, 33 bp, Homo sapien
gctccctgttagaccatgtggggccactcccat

SEQ ID NO: 351587 - DNA, 33 bp, Homo sapien
gtgatcttgggcctgcacatccagaagtggctg

SEQ ID NO: 351588 - DNA, 33 bp, Homo sapien
gtgatcttgggcctgcgcatccagaagtggctg

SEQ ID NO: 351589 - DNA, 33 bp, Homo sapien
tcacaacttgtgacaaactacaaatgccactta

SEQ ID NO: 351590 - DNA, 33 bp, Homo sapien
tcacaacttgtgacaagctacaaatgccactta

SEQ ID NO: 351591 - DNA, 33 bp, Homo sapien
attttctctaggaaatcatgttcaggattgctt

SEQ ID NO: 351592 - DNA, 33 bp, Homo sapien
attttctctaggaaatgatgttcaggattgctt

SEQ ID NO: 351593 - DNA, 33 bp, Homo sapien
tgtgtctgagtaggacacatatttaccacctga

SEQ ID NO: 351594 - DNA, 33 bp, Homo sapien
tgtgtctgagtaggacgcatatttaccacctga

SEQ ID NO: 351595 - DNA, 33 bp, Homo sapien
gtctcttgacacattaacccttttcattatttc

SEQ ID NO: 351596 - DNA, 33 bp, Homo sapien
gtctcttgacacattatcccttttcattatttc

SEQ ID NO: 351597 - DNA, 33 bp, Homo sapien
actacaaacagcaaaccggagatcttgtgtata

SEQ ID NO: 351598 - DNA, 33 bp, Homo sapien
actacaaacagcaaactggagatcttgtgtata

SEQ ID NO: 351599 - DNA, 33 bp, Homo sapien
cttgccctttgatagaagtcaaaagaccagcat

SEQ ID NO: 351600 - DNA, 33 bp, Homo sapien
cttgccctttgatagaggtcaaaagaccagcat

SEQ ID NO: 351601 - DNA, 33 bp, Homo sapien
atcattacgtttcccacggtagagtgacattag

SEQ ID NO: 351602 - DNA, 33 bp, Homo sapien
atcattacgtttcccatggtagagtgacattag

SEQ ID NO: 351603 - DNA, 33 bp, Homo sapien
tatatgtggaaagtagcccttctggacagaaag

SEQ ID NO: 351604 - DNA, 33 bp, Homo sapien
tatatgtggaaagtagtccttctggacagaaag

SEQ ID NO: 351605 - DNA, 33 bp, Homo sapien
gaaatcctgccctggaagaagttgtggggagat

SEQ ID NO: 351606 - DNA, 33 bp, Homo sapien
gaaatcctgccctggaggaagttgtggggagat

SEQ ID NO: 351607 - DNA, 33 bp, Homo sapien
caggaccgagacagaaacacatggcctgtcacc

SEQ ID NO: 351608 - DNA, 33 bp, Homo sapien
caggaccgagacagaatcacatggcctgtcacc

SEQ ID NO: 351609 - DNA, 33 bp, Homo sapien
gaggtcttaaaaataacgttgagtgaggccagg

SEQ ID NO: 351610 - DNA, 33 bp, Homo sapien
gaggtcttaaaaataatgttgagtgaggccagg

SEQ ID NO: 351611 - DNA, 33 bp, Homo sapien
ccagaataatctctccagaggcaaactggtagt

SEQ ID NO: 351612 - DNA, 33 bp, Homo sapien
ccagaataatctctccggaggcaaactggtagt

SEQ ID NO: 351613 - DNA, 33 bp, Homo sapien
tatcctttttgttatccccagattcagcttaag

SEQ ID NO: 351614 - DNA, 33 bp, Homo sapien
tatcctttttgttatctccagattcagcttaag

SEQ ID NO: 351615 - DNA, 33 bp, Homo sapien
agaaaatgaatgtggcaaaaggcccagcttgtc

SEQ ID NO: 351616 - DNA, 33 bp, Homo sapien
agaaaatgaatgtggcgaaaggcccagcttgtc

SEQ ID NO: 351617 - DNA, 33 bp, Homo sapien
tgggtgtaggttaaacaagactgtgatatctaa

SEQ ID NO: 351618 - DNA, 33 bp, Homo sapien
tgggtgtaggttaaaccagactgtgatatctaa

SEQ ID NO: 351619 - DNA, 33 bp, Homo sapien
tccctatttcttcaaactgggcctgtgttcatc

SEQ ID NO: 351620 - DNA, 33 bp, Homo sapien
tccctatttcttcaaattgggcctgtgttcatc

SEQ ID NO: 351621 - DNA, 33 bp, Homo sapien
tcactgcactgtgctcaatgatgccaccgcatc

SEQ ID NO: 351622 - DNA, 33 bp, Homo sapien
tcactgcactgtgctcgatgatgccaccgcatc

SEQ ID NO: 351623 - DNA, 33 bp, Homo sapien
ctccattctgacaggaagagatctgtgtgtgct

SEQ ID NO: 351624 - DNA, 33 bp, Homo sapien
ctccattctgacaggaggagatctgtgtgtgct

SEQ ID NO: 351625 - DNA, 33 bp, Homo sapien
ttctacttgttgataaagcatggaactgaatgg

SEQ ID NO: 351626 - DNA, 33 bp, Homo sapien
ttctacttgttgataaggcatggaactgaatgg

SEQ ID NO: 351627 - DNA, 33 bp, Homo sapien
cacctccgttccagagactcagcttccctcctg

SEQ ID NO: 351628 - DNA, 33 bp, Homo sapien
cacctccgttccagagtctcagcttccctcctg

SEQ ID NO: 351629 - DNA, 33 bp, Homo sapien
ccatacacagcaagcacggggatgtggaggaag

SEQ ID NO: 351630 - DNA, 33 bp, Homo sapien
ccatacacagcaagcatggggatgtggaggaag

SEQ ID NO: 351631 - DNA, 33 bp, Homo sapien
gcgggtattgttcacccattttatggatgaggc

SEQ ID NO: 351632 - DNA, 33 bp, Homo sapien
gcgggtattgttcacctattttatggatgaggc

SEQ ID NO: 351633 - DNA, 33 bp, Homo sapien
aagggagggagctcaaatgtgccaccctgatgt

SEQ ID NO: 351634 - DNA, 33 bp, Homo sapien
aagggagggagctcaagtgtgccaccctgatgt

SEQ ID NO: 351635 - DNA, 33 bp, Homo sapien
tttcatcatcttgacaactttgcaaaaaggcta

SEQ ID NO: 351636 - DNA, 33 bp, Homo sapien
tttcatcatcttgacagctttgcaaaaaggcta

SEQ ID NO: 351637 - DNA, 33 bp, Homo sapien
ggatccctgaaacccaaacttgagctgatcctc

SEQ ID NO: 351638 - DNA, 33 bp, Homo sapien
ggatccctgaaacccatacttgagctgatcctc

SEQ ID NO: 351639 - DNA, 33 bp, Homo sapien
agttcagggcagagaggcaagatgtaccctgcc

SEQ ID NO: 351640 - DNA, 33 bp, Homo sapien
agttcagggcagagagtcaagatgtaccctgcc

SEQ ID NO: 351641 - DNA, 33 bp, Homo sapien
gcagttcaaaaagagaccattccaaagaaaccg

SEQ ID NO: 351642 - DNA, 33 bp, Homo sapien
gcagttcaaaaagagagcattccaaagaaaccg

SEQ ID NO: 351643 - DNA, 33 bp, Homo sapien
tagtataaatcttctgcacttagcttcatctgt

SEQ ID NO: 351644 - DNA, 33 bp, Homo sapien
tagtataaatcttctgtacttagcttcatctgt

SEQ ID NO: 351645 - DNA, 33 bp, Homo sapien
ggtagtgtacctggagaccacaattgcatcaag

SEQ ID NO: 351646 - DNA, 33 bp, Homo sapien
ggtagtgtacctggaggccacaattgcatcaag

SEQ ID NO: 351647 - DNA, 33 bp, Homo sapien
cccacctgcccatctcacagtcccagaggagta

SEQ ID NO: 351648 - DNA, 33 bp, Homo sapien
cccacctgcccatctcgcagtcccagaggagta

SEQ ID NO: 351649 - DNA, 33 bp, Homo sapien
gggtgaatgaccctaacgcttacagcaggccaa

SEQ ID NO: 351650 - DNA, 33 bp, Homo sapien
gggtgaatgaccctaatgcttacagcaggccaa

SEQ ID NO: 351651 - DNA, 33 bp, Homo sapien
aggaagagactccagcgaaaggccctggtccat

SEQ ID NO: 351652 - DNA, 33 bp, Homo sapien
aggaagagactccagctaaaggccctggtccat

SEQ ID NO: 351653 - DNA, 33 bp, Homo sapien
cttagaatgtgtaaacggcagctgctcaggaaa

SEQ ID NO: 351654 - DNA, 33 bp, Homo sapien
cttagaatgtgtaaactgcagctgctcaggaaa

SEQ ID NO: 351655 - DNA, 33 bp, Homo sapien
tggttatctttgggaaacagaactatgcttgat

SEQ ID NO: 351656 - DNA, 33 bp, Homo sapien
tggttatctttgggaagcagaactatgcttgat

SEQ ID NO: 351657 - DNA, 33 bp, Homo sapien
ggttctcaatttttctgaaatggatgtgtatac

SEQ ID NO: 351658 - DNA, 33 bp, Homo sapien
ggttctcaatttttcttaaatggatgtgtatac

SEQ ID NO: 351659 - DNA, 33 bp, Homo sapien
ggagacgctcagaaaacgctagtttcccaacac

SEQ ID NO: 351660 - DNA, 33 bp, Homo sapien
ggagacgctcagaaaatgctagtttcccaacac

SEQ ID NO: 351661 - DNA, 33 bp, Homo sapien
tgagctccctatcacactaagaattcagaagag

SEQ ID NO: 351662 - DNA, 33 bp, Homo sapien
tgagctccctatcacagtaagaattcagaagag

SEQ ID NO: 351663 - DNA, 33 bp, Homo sapien
caaggccacttgctgaaccacaggatgaatggg

SEQ ID NO: 351664 - DNA, 33 bp, Homo sapien
caaggccacttgctgagccacaggatgaatggg

SEQ ID NO: 351665 - DNA, 33 bp, Homo sapien
ctttatttaaggatcaagctaagtgggcaaagc

SEQ ID NO: 351666 - DNA, 33 bp, Homo sapien
ctttatttaaggatcaggctaagtgggcaaagc

SEQ ID NO: 351667 - DNA, 33 bp, Homo sapien
cagggtgcaaagcaaaatctacttccaggaggc

SEQ ID NO: 351668 - DNA, 33 bp, Homo sapien
cagggtgcaaagcaaactctacttccaggaggc

SEQ ID NO: 351669 - DNA, 33 bp, Homo sapien
cccttttcatccccacacatcctacctggtgac

SEQ ID NO: 351670 - DNA, 33 bp, Homo sapien
cccttttcatccccacgcatcctacctggtgac

SEQ ID NO: 351671 - DNA, 33 bp, Homo sapien
ctgggcactctgtctacgcctttatcaggcctt

SEQ ID NO: 351672 - DNA, 33 bp, Homo sapien
ctgggcactctgtctatgcctttatcaggcctt

SEQ ID NO: 351673 - DNA, 33 bp, Homo sapien
gaggaggagaagcatcgcttggcagggtccacc

SEQ ID NO: 351674 - DNA, 33 bp, Homo sapien
gaggaggagaagcatctcttggcagggtccacc

SEQ ID NO: 351675 - DNA, 33 bp, Homo sapien
tcactccaatagttgccagttcatctgcccgtc

SEQ ID NO: 351676 - DNA, 33 bp, Homo sapien
tcactccaatagttgctagttcatctgcccgtc

SEQ ID NO: 351677 - DNA, 33 bp, Homo sapien
gcctctcctgtccaaccgggctgcaaaatggcc

SEQ ID NO: 351678 - DNA, 33 bp, Homo sapien
gcctctcctgtccaactgggctgcaaaatggcc

SEQ ID NO: 351679 - DNA, 33 bp, Homo sapien
aatattactcacctcacggggttgtttaggaca

SEQ ID NO: 351680 - DNA, 33 bp, Homo sapien
aatattactcacctcatggggttgtttaggaca

SEQ ID NO: 351681 - DNA, 33 bp, Homo sapien
agtacctgtgtcccagaagcttacatacagggg

SEQ ID NO: 351682 - DNA, 33 bp, Homo sapien
agtacctgtgtcccaggagcttacatacagggg

SEQ ID NO: 351683 - DNA, 33 bp, Homo sapien
tctgtgttaaactacacgctgtttggaaagccc

SEQ ID NO: 351684 - DNA, 33 bp, Homo sapien
tctgtgttaaactacatgctgtttggaaagccc

SEQ ID NO: 351685 - DNA, 33 bp, Homo sapien
catcactcctccttcacagtatttgccaaacct

SEQ ID NO: 351686 - DNA, 33 bp, Homo sapien
catcactcctccttcatagtatttgccaaacct

SEQ ID NO: 351687 - DNA, 33 bp, Homo sapien
atctgaatctgccaggccaaccagtaatgtgtc

SEQ ID NO: 351688 - DNA, 33 bp, Homo sapien
atctgaatctgccaggtcaaccagtaatgtgtc

SEQ ID NO: 351689 - DNA, 33 bp, Homo sapien
ccaaaatgtactaggaagccgcatcaccagatt

SEQ ID NO: 351690 - DNA, 33 bp, Homo sapien
ccaaaatgtactaggaggccgcatcaccagatt

SEQ ID NO: 351691 - DNA, 33 bp, Homo sapien
tagtccctttattacaaccgcctctcaaattac

SEQ ID NO: 351692 - DNA, 33 bp, Homo sapien
tagtccctttattacacccgcctctcaaattac

SEQ ID NO: 351693 - DNA, 33 bp, Homo sapien
catcgaacatcagatcaactttaatttacaagt

SEQ ID NO: 351694 - DNA, 33 bp, Homo sapien
catcgaacatcagatcgactttaatttacaagt

SEQ ID NO: 351695 - DNA, 33 bp, Homo sapien
aaagtagtggtggtaacagcacagatgagaatc

SEQ ID NO: 351696 - DNA, 33 bp, Homo sapien
aaagtagtggtggtaatagcacagatgagaatc

SEQ ID NO: 351697 - DNA, 33 bp, Homo sapien
cacacatctggatgaacggacttgatgtctagc

SEQ ID NO: 351698 - DNA, 33 bp, Homo sapien
cacacatctggatgaatggacttgatgtctagc

SEQ ID NO: 351699 - DNA, 33 bp, Homo sapien
ccagcccaggggccataacaataagaagcctcc

SEQ ID NO: 351700 - DNA, 33 bp, Homo sapien
ccagcccaggggccatgacaataagaagcctcc

SEQ ID NO: 351701 - DNA, 33 bp, Homo sapien
ggaaagagagatcatacgaagaaaatacaccgt

SEQ ID NO: 351702 - DNA, 33 bp, Homo sapien
ggaaagagagatcatatgaagaaaatacaccgt

SEQ ID NO: 351703 - DNA, 33 bp, Homo sapien
tcatagtgtaagttcacacgcctttatgtggta

SEQ ID NO: 351704 - DNA, 33 bp, Homo sapien
tcatagtgtaagttcatacgcctttatgtggta

SEQ ID NO: 351705 - DNA, 33 bp, Homo sapien
gcctttatgtggtaccaaaaaatccagtaaaca

SEQ ID NO: 351706 - DNA, 33 bp, Homo sapien
gcctttatgtggtacccaaaaatccagtaaaca

SEQ ID NO: 351707 - DNA, 33 bp, Homo sapien
ttggagaaaaggcataaaaatgaattaacgtgc

SEQ ID NO: 351708 - DNA, 33 bp, Homo sapien
ttggagaaaaggcatacaaatgaattaacgtgc

SEQ ID NO: 351709 - DNA, 33 bp, Homo sapien
caaggtgatggtcagcaacaatatcttcaaaga

SEQ ID NO: 351710 - DNA, 33 bp, Homo sapien
caaggtgatggtcagcgacaatatcttcaaaga

SEQ ID NO: 351711 - DNA, 33 bp, Homo sapien
tttgaaacagcacttacagaagttatcataatg

SEQ ID NO: 351712 - DNA, 33 bp, Homo sapien
tttgaaacagcacttatagaagttatcataatg

SEQ ID NO: 351713 - DNA, 33 bp, Homo sapien
catagcatgttattcacggcctgtctccgcctt

SEQ ID NO: 351714 - DNA, 33 bp, Homo sapien
catagcatgttattcatggcctgtctccgcctt

SEQ ID NO: 351715 - DNA, 33 bp, Homo sapien
ctgttccagagaaaacacgaggactggtctggt

SEQ ID NO: 351716 - DNA, 33 bp, Homo sapien
ctgttccagagaaaacgcgaggactggtctggt

SEQ ID NO: 351717 - DNA, 33 bp, Homo sapien
ttagtggtgagaacacaatgtcatcaggagcct

SEQ ID NO: 351718 - DNA, 33 bp, Homo sapien
ttagtggtgagaacacgatgtcatcaggagcct

SEQ ID NO: 351719 - DNA, 33 bp, Homo sapien
ggtgttcagactgaagcctgactccaaagccac

SEQ ID NO: 351720 - DNA, 33 bp, Homo sapien
ggtgttcagactgaaggctgactccaaagccac

SEQ ID NO: 351721 - DNA, 33 bp, Homo sapien
ttcttggtcttgcttcaagctggtatctggcct

SEQ ID NO: 351722 - DNA, 33 bp, Homo sapien
ttcttggtcttgcttcgagctggtatctggcct

SEQ ID NO: 351723 - DNA, 33 bp, Homo sapien
tgaaatgcagacagccagagagttgttatctaa

SEQ ID NO: 351724 - DNA, 33 bp, Homo sapien
tgaaatgcagacagcccgagagttgttatctaa

SEQ ID NO: 351725 - DNA, 33 bp, Homo sapien
cgaggccaagtcaaccacacccatttgtttggg

SEQ ID NO: 351726 - DNA, 33 bp, Homo sapien
cgaggccaagtcaaccgcacccatttgtttggg

SEQ ID NO: 351727 - DNA, 33 bp, Homo sapien
cctgagagttgagtgaaaatgaataaaaattag

SEQ ID NO: 351728 - DNA, 33 bp, Homo sapien
cctgagagttgagtgagaatgaataaaaattag

SEQ ID NO: 351729 - DNA, 33 bp, Homo sapien
aacaagaatggatatcagactcgtgtgttcaat

SEQ ID NO: 351730 - DNA, 33 bp, Homo sapien
aacaagaatggatatcggactcgtgtgttcaat

SEQ ID NO: 351731 - DNA, 33 bp, Homo sapien
atggtaactctttggacgaggtgcccatgaaag

SEQ ID NO: 351732 - DNA, 33 bp, Homo sapien
atggtaactctttggatgaggtgcccatgaaag

SEQ ID NO: 351733 - DNA, 33 bp, Homo sapien
gatgttcaaacctacagagtgtctgtcctccac

SEQ ID NO: 351734 - DNA, 33 bp, Homo sapien
gatgttcaaacctacatagtgtctgtcctccac

SEQ ID NO: 351735 - DNA, 33 bp, Homo sapien
tggagttcttattcagcaaatattgattgcaag

SEQ ID NO: 351736 - DNA, 33 bp, Homo sapien
tggagttcttattcaggaaatattgattgcaag

SEQ ID NO: 351737 - DNA, 33 bp, Homo sapien
agattcaggtgtcagacatttgcataaaatacc

SEQ ID NO: 351738 - DNA, 33 bp, Homo sapien
agattcaggtgtcagatatttgcataaaatacc

SEQ ID NO: 351739 - DNA, 33 bp, Homo sapien
gggactactgcgaaacaagcaagaagtatgctc

SEQ ID NO: 351740 - DNA, 33 bp, Homo sapien
gggactactgcgaaacgagcaagaagtatgctc

SEQ ID NO: 351741 - DNA, 33 bp, Homo sapien
atacttcatacaaagacgtctcctattcttcga

SEQ ID NO: 351742 - DNA, 33 bp, Homo sapien
atacttcatacaaagatgtctcctattcttcga

SEQ ID NO: 351743 - DNA, 33 bp, Homo sapien
gagtgctttcaaaatgaaaagattagatttggt

SEQ ID NO: 351744 - DNA, 33 bp, Homo sapien
gagtgctttcaaaatgcaaagattagatttggt

SEQ ID NO: 351745 - DNA, 33 bp, Homo sapien
gcaggggcctcttggacgttctgaaggctcctg

SEQ ID NO: 351746 - DNA, 33 bp, Homo sapien
gcaggggcctcttggatgttctgaaggctcctg

SEQ ID NO: 351747 - DNA, 33 bp, Homo sapien
catgcagtggctctttaaaaccggtccagcagc

SEQ ID NO: 351748 - DNA, 33 bp, Homo sapien
catgcagtggctctttcaaaccggtccagcagc

SEQ ID NO: 351749 - DNA, 33 bp, Homo sapien
caattaataaagttgacagaaaacacaaagatt

SEQ ID NO: 351750 - DNA, 33 bp, Homo sapien
caattaataaagttgagagaaaacacaaagatt

SEQ ID NO: 351751 - DNA, 33 bp, Homo sapien; identical to SEQ ID NO: 351749

SEQ ID NO: 351752 - DNA, 33 bp, Homo sapien; identical to SEQ ID NO: 351750

SEQ ID NO: 351753 - DNA, 33 bp, Homo sapien
ccccatggcatcttgcaatactattactattat

SEQ ID NO: 351754 - DNA, 33 bp, Homo sapien
ccccatggcatcttgcgatactattactattat

SEQ ID NO: 351755 - DNA, 33 bp, Homo sapien
ctttgtagacatccaacgaatgctaataggaaa

SEQ ID NO: 351756 - DNA, 33 bp, Homo sapien
ctttgtagacatccaaggaatgctaataggaaa

SEQ ID NO: 351757 - DNA, 33 bp, Homo sapien
gggtggctggaaaaggaagtgatgcttctagag

SEQ ID NO: 351758 - DNA, 33 bp, Homo sapien
gggtggctggaaaaggcagtgatgcttctagag

SEQ ID NO: 351759 - DNA, 33 bp, Homo sapien
tccatctatggctgtacgtggggccaaattttc

SEQ ID NO: 351760 - DNA, 33 bp, Homo sapien
tccatctatggctgtatgtggggccaaattttc

SEQ ID NO: 351761 - DNA, 33 bp, Homo sapien
ggactttagttggcaaaaagacgagagcagggg

SEQ ID NO: 351762 - DNA, 33 bp, Homo sapien
ggactttagttggcaacaagacgagagcagggg

SEQ ID NO: 351763 - DNA, 33 bp, Homo sapien
aggcacacatacaagaaagaaaccctcaccttt

SEQ ID NO: 351764 - DNA, 33 bp, Homo sapien
aggcacacatacaagagagaaaccctcaccttt

SEQ ID NO: 351765 - DNA, 33 bp, Homo sapien
ctggaggcttctcaaaactcagaatactgggcc

SEQ ID NO: 351766 - DNA, 33 bp, Homo sapien
ctggaggcttctcaaacctcagaatactgggcc

SEQ ID NO: 351767 - DNA, 33 bp, Homo sapien
cggggcaagggtatctcaactttggcactactg

SEQ ID NO: 351768 - DNA, 33 bp, Homo sapien
cggggcaagggtatcttaactttggcactactg

SEQ ID NO: 351769 - DNA, 33 bp, Homo sapien
aaagacattacatctaacttaatcatccctgcc

SEQ ID NO: 351770 - DNA, 33 bp, Homo sapien
aaagacattacatctagcttaatcatccctgcc

SEQ ID NO: 351771 - DNA, 33 bp, Homo sapien
ttctcatataagagaccgaaagataagagagct

SEQ ID NO: 351772 - DNA, 33 bp, Homo sapien
ttctcatataagagactgaaagataagagagct

SEQ ID NO: 351773 - DNA, 33 bp, Homo sapien
agtgatccactcaccccgatttgctgggcactt

SEQ ID NO: 351774 - DNA, 33 bp, Homo sapien
agtgatccactcaccctgatttgctgggcactt

SEQ ID NO: 351775 - DNA, 33 bp, Homo sapien
ttactggctgagtgaaacagcataggtaatcca

SEQ ID NO: 351776 - DNA, 33 bp, Homo sapien
ttactggctgagtgaaccagcataggtaatcca

SEQ ID NO: 351777 - DNA, 33 bp, Homo sapien
ggaaggggatggagagacagaaacggagacttg

SEQ ID NO: 351778 - DNA, 33 bp, Homo sapien
ggaaggggatggagagtcagaaacggagacttg

SEQ ID NO: 351779 - DNA, 33 bp, Homo sapien
cagatgtcatctggtcactgccagggcggaaat

SEQ ID NO: 351780 - DNA, 33 bp, Homo sapien
cagatgtcatctggtcgctgccagggcggaaat

SEQ ID NO: 351781 - DNA, 33 bp, Homo sapien
ctttcttggcaactaacacctgcagacgccttc

SEQ ID NO: 351782 - DNA, 33 bp, Homo sapien
ctttcttggcaactaatacctgcagacgccttc

SEQ ID NO: 351783 - DNA, 33 bp, Homo sapien
agaaagggatgtatgcaaaccagtttagaggca

SEQ ID NO: 351784 - DNA, 33 bp, Homo sapien
agaaagggatgtatgcgaaccagtttagaggca

SEQ ID NO: 351785 - DNA, 33 bp, Homo sapien
acactgaatatttttgcaggtaaagaaagttat

SEQ ID NO: 351786 - DNA, 33 bp, Homo sapien
acactgaatatttttggaggtaaagaaagttat

SEQ ID NO: 351787 - DNA, 33 bp, Homo sapien
atagctcaaagaggaaacttagaatcaaatagc

SEQ ID NO: 351788 - DNA, 33 bp, Homo sapien
atagctcaaagaggaagcttagaatcaaatagc

SEQ ID NO: 351789 - DNA, 33 bp, Homo sapien
ttggaactggcaattcaacagcttttatttgct

SEQ ID NO: 351790 - DNA, 33 bp, Homo sapien
ttggaactggcaattcgacagcttttatttgct

SEQ ID NO: 351791 - DNA, 33 bp, Homo sapien
attggggcacattcaaactattattttaccaga

SEQ ID NO: 351792 - DNA, 33 bp, Homo sapien
attggggcacattcaagctattattttaccaga

SEQ ID NO: 351793 - DNA, 33 bp, Homo sapien
gaaggcaacatcttcccgatggcaataaactat

SEQ ID NO: 351794 - DNA, 33 bp, Homo sapien
gaaggcaacatcttcctgatggcaataaactat

SEQ ID NO: 351795 - DNA, 33 bp, Homo sapien
acgttttgtttattcaatcccatccatgtgcat

SEQ ID NO: 351796 - DNA, 33 bp, Homo sapien
acgttttgtttattcattcccatccatgtgcat

SEQ ID NO: 351797 - DNA, 33 bp, Homo sapien
tttatttacttggtgaactacgtaggccgagtg

SEQ ID NO: 351798 - DNA, 33 bp, Homo sapien
tttatttacttggtgacctacgtaggccgagtg

SEQ ID NO: 351799 - DNA, 33 bp, Homo sapien
ttgctaatgaggtttccattgatttgtctccct

SEQ ID NO: 351800 - DNA, 33 bp, Homo sapien
ttgctaatgaggtttctattgatttgtctccct

SEQ ID NO: 351801 - DNA, 33 bp, Homo sapien
gttaggtgaaaaacaaaaggtgcataccataat

SEQ ID NO: 351802 - DNA, 33 bp, Homo sapien
gttaggtgaaaaacaagaggtgcataccataat

SEQ ID NO: 351803 - DNA, 33 bp, Homo sapien
cctctggacccagcatcaatatgtgtccacgtg

SEQ ID NO: 351804 - DNA, 33 bp, Homo sapien
cctctggacccagcattaatatgtgtccacgtg

SEQ ID NO: 351805 - DNA, 33 bp, Homo sapien
aaaaacaactcagggacgtatgttaggatgttg

SEQ ID NO: 351806 - DNA, 33 bp, Homo sapien
aaaaacaactcagggatgtatgttaggatgttg

SEQ ID NO: 351807 - DNA, 33 bp, Homo sapien
gaccaagacaaaaacaagactactccataatta

SEQ ID NO: 351808 - DNA, 33 bp, Homo sapien
gaccaagacaaaaacatgactactccataatta

SEQ ID NO: 351809 - DNA, 33 bp, Homo sapien
tcacagaacatcaatacccaacagggctactca

SEQ ID NO: 351810 - DNA, 33 bp, Homo sapien
tcacagaacatcaatatccaacagggctactca

SEQ ID NO: 351811 - DNA, 33 bp, Homo sapien
agggccactggggaaaatttacattctgaagag

SEQ ID NO: 351812 - DNA, 33 bp, Homo sapien
agggccactggggaaattttacattctgaagag

SEQ ID NO: 351813 - DNA, 33 bp, Homo sapien
gagacattggggatgggagagaatgtacttgca

SEQ ID NO: 351814 - DNA, 33 bp, Homo sapien
gagacattggggatggtagagaatgtacttgca

SEQ ID NO: 351815 - DNA, 33 bp, Homo sapien
gattatttaacctagcaatttactcttctacta

SEQ ID NO: 351816 - DNA, 33 bp, Homo sapien
gattatttaacctagcgatttactcttctacta

SEQ ID NO: 351817 - DNA, 33 bp, Homo sapien
cctgctacctccttaccgctccagaggaccttt

SEQ ID NO: 351818 - DNA, 33 bp, Homo sapien
cctgctacctccttactgctccagaggaccttt

SEQ ID NO: 351819 - DNA, 33 bp, Homo sapien
caagacacccatgaaaatgacaaagtgagagga

SEQ ID NO: 351820 - DNA, 33 bp, Homo sapien
caagacacccatgaaagtgacaaagtgagagga

SEQ ID NO: 351821 - DNA, 33 bp, Homo sapien
caaacactggcgctccaaaatttataaaacaat

SEQ ID NO: 351822 - DNA, 33 bp, Homo sapien
caaacactggcgctccgaaatttataaaacaat

SEQ ID NO: 351823 - DNA, 33 bp, Homo sapien
agaagttgcagtttggaaaacccttcagtcctg

SEQ ID NO: 351824 - DNA, 33 bp, Homo sapien
agaagttgcagtttgggaaacccttcagtcctg

SEQ ID NO: 351825 - DNA, 33 bp, Homo sapien
gatcacttaatgtcaaaggacctttccacgtct

SEQ ID NO: 351826 - DNA, 33 bp, Homo sapien
gatcacttaatgtcaagggacctttccacgtct

SEQ ID NO: 351827 - DNA, 33 bp, Homo sapien
tgtgaatctgactactaatgcagctaaatgttt

SEQ ID NO: 351828 - DNA, 33 bp, Homo sapien
tgtgaatctgactactgatgcagctaaatgttt

SEQ ID NO: 351829 - DNA, 33 bp, Homo sapien
tcctaaggactatacacgctgctttcaaaatcc

SEQ ID NO: 351830 - DNA, 33 bp, Homo sapien
tcctaaggactatacatgctgctttcaaaatcc

SEQ ID NO: 351831 - DNA, 33 bp, Homo sapien
ttgatgagccagaagcagaaagtatttcagata

SEQ ID NO: 351832 - DNA, 33 bp, Homo sapien
ttgatgagccagaagcggaaagtatttcagata

SEQ ID NO: 351833 - DNA, 33 bp, Homo sapien
aaagaatttcaagaacaggctaatatgtaccta

SEQ ID NO: 351834 - DNA, 33 bp, Homo sapien
aaagaatttcaagaactggctaatatgtaccta

SEQ ID NO: 351835 - DNA, 33 bp, Homo sapien
gtcaatcgtttgcaacacagacagctgtatgta

SEQ ID NO: 351836 - DNA, 33 bp, Homo sapien
gtcaatcgtttgcaacgcagacagctgtatgta

SEQ ID NO: 351837 - DNA, 33 bp, Homo sapien
aatttttacctccaaacgagtgaggcttgttgg

SEQ ID NO: 351838 - DNA, 33 bp, Homo sapien
aatttttacctccaaatgagtgaggcttgttgg

SEQ ID NO: 351839 - DNA, 33 bp, Homo sapien
cttctgtttattatccagcttttaatggacaat

SEQ ID NO: 351840 - DNA, 33 bp, Homo sapien
cttctgtttattatccggcttttaatggacaat

SEQ ID NO: 351841 - DNA, 33 bp, Homo sapien
tcatgtgcagcctagacagaggcagtaaatcat

SEQ ID NO: 351842 - DNA, 33 bp, Homo sapien
tcatgtgcagcctagagagaggcagtaaatcat

SEQ ID NO: 351843 - DNA, 33 bp, Homo sapien
agaggcagtaaatcatcagtctactgaaggtcc

SEQ ID NO: 351844 - DNA, 33 bp, Homo sapien
agaggcagtaaatcattagtctactgaaggtcc

SEQ ID NO: 351845 - DNA, 33 bp, Homo sapien
ccactgctacagagcccggaaacagatttttca

SEQ ID NO: 351846 - DNA, 33 bp, Homo sapien
ccactgctacagagcctggaaacagatttttca

SEQ ID NO: 351847 - DNA, 33 bp, Homo sapien
tcctacaatgcaccaacgagaaccagagaggaa

SEQ ID NO: 351848 - DNA, 33 bp, Homo sapien
tcctacaatgcaccaaggagaaccagagaggaa

SEQ ID NO: 351849 - DNA, 33 bp, Homo sapien
agttgctgttcccaaaattacattcactggtcc

SEQ ID NO: 351850 - DNA, 33 bp, Homo sapien
agttgctgttcccaaagttacattcactggtcc

SEQ ID NO: 351851 - DNA, 33 bp, Homo sapien
acactgttgttcgttgcaggctctttcacgtaa

SEQ ID NO: 351852 - DNA, 33 bp, Homo sapien
acactgttgttcgttggaggctctttcacgtaa

SEQ ID NO: 351853 - DNA, 33 bp, Homo sapien
aagtgtatgtgtgcacaatgattctaggactga

SEQ ID NO: 351854 - DNA, 33 bp, Homo sapien
aagtgtatgtgtgcacgatgattctaggactga

SEQ ID NO: 351855 - DNA, 33 bp, Homo sapien
gcctttaaggaactcaaagtttagcagaggagc

SEQ ID NO: 351856 - DNA, 33 bp, Homo sapien
gcctttaaggaactcatagtttagcagaggagc

SEQ ID NO: 351857 - DNA, 33 bp, Homo sapien
cgtgcatactcctcaacggtccaagaaggttgg

SEQ ID NO: 351858 - DNA, 33 bp, Homo sapien
cgtgcatactcctcaatggtccaagaaggttgg

SEQ ID NO: 351859 - DNA, 33 bp, Homo sapien
actgagagactgtaaaaagcaccatgcaaagtt

SEQ ID NO: 351860 - DNA, 33 bp, Homo sapien
actgagagactgtaaagagcaccatgcaaagtt

SEQ ID NO: 351861 - DNA, 33 bp, Homo sapien
ctgaagatggtcatagcaattccggcctcacag

SEQ ID NO: 351862 - DNA, 33 bp, Homo sapien
ctgaagatggtcatagtaattccggcctcacag

SEQ ID NO: 351863 - DNA, 33 bp, Homo sapien
cgtggaataggattcacggaaaatacaagttaa

SEQ ID NO: 351864 - DNA, 33 bp, Homo sapien
cgtggaataggattcatggaaaatacaagttaa

SEQ ID NO: 351865 - DNA, 33 bp, Homo sapien
aagcttttctgagaaaaaagaactgactcagag

SEQ ID NO: 351866 - DNA, 33 bp, Homo sapien
aagcttttctgagaaagaagaactgactcagag

SEQ ID NO: 351867 - DNA, 33 bp, Homo sapien
ctcactgcaaaggaaacaaggaaagtcactgaa

SEQ ID NO: 351868 - DNA, 33 bp, Homo sapien
ctcactgcaaaggaaataaggaaagtcactgaa

SEQ ID NO: 351869 - DNA, 33 bp, Homo sapien
aattactctgagttccaaaatactgacttacaa

SEQ ID NO: 351870 - DNA, 33 bp, Homo sapien
aattactctgagttccgaaatactgacttacaa

SEQ ID NO: 351871 - DNA, 33 bp, Homo sapien
ctttgataaatacacccgcatacgtaaatgagt

SEQ ID NO: 351872 - DNA, 33 bp, Homo sapien
ctttgataaatacacctgcatacgtaaatgagt

SEQ ID NO: 351873 - DNA, 33 bp, Homo sapien
caaggcccagctgaccaggggctcatggggccc

SEQ ID NO: 351874 - DNA, 33 bp, Homo sapien
caaggcccagctgaccgggggctcatggggccc

SEQ ID NO: 351875 - DNA, 33 bp, Homo sapien
ctctatcataagaacaacaagggtgaagtccgt

SEQ ID NO: 351876 - DNA, 33 bp, Homo sapien
ctctatcataagaacaccaagggtgaagtccgt

SEQ ID NO: 351877 - DNA, 33 bp, Homo sapien
tatttttattcttgacaatgaaggtaatgcctt

SEQ ID NO: 351878 - DNA, 33 bp, Homo sapien
tatttttattcttgacgatgaaggtaatgcctt

SEQ ID NO: 351879 - DNA, 33 bp, Homo sapien
aagtcacctctgaacaatcccaccctgagttct

SEQ ID NO: 351880 - DNA, 33 bp, Homo sapien
aagtcacctctgaacagtcccaccctgagttct

SEQ ID NO: 351881 - DNA, 33 bp, Homo sapien
agttgttctctaaaagaagctacatgatcttat

SEQ ID NO: 351882 - DNA, 33 bp, Homo sapien
agttgttctctaaaagtagctacatgatcttat

SEQ ID NO: 351883 - DNA, 33 bp, Homo sapien
tccattgtgaccgccaaagctagtaatatgtaa

SEQ ID NO: 351884 - DNA, 33 bp, Homo sapien
tccattgtgaccgccacagctagtaatatgtaa

SEQ ID NO: 351885 - DNA, 33 bp, Homo sapien
agttgatagcttacaacgtcaccatagaggacc

SEQ ID NO: 351886 - DNA, 33 bp, Homo sapien
agttgatagcttacaatgtcaccatagaggacc

SEQ ID NO: 351887 - DNA, 33 bp, Homo sapien
gaccagctgggaggaacggcataaaggtgctgg

SEQ ID NO: 351888 - DNA, 33 bp, Homo sapien
gaccagctgggaggaatggcataaaggtgctgg

SEQ ID NO: 351889 - DNA, 33 bp, Homo sapien
ctttaccaaagtctaaacttgacttgatcaaac

SEQ ID NO: 351890 - DNA, 33 bp, Homo sapien
ctttaccaaagtctaaccttgacttgatcaaac

SEQ ID NO: 351891 - DNA, 33 bp, Homo sapien
ttgactcctactcttacggtccagagagtgaaa

SEQ ID NO: 351892 - DNA, 33 bp, Homo sapien
ttgactcctactcttatggtccagagagtgaaa

SEQ ID NO: 351893 - DNA, 33 bp, Homo sapien
ggtccagagagtgaaaccttccttcagttctgt

SEQ ID NO: 351894 - DNA, 33 bp, Homo sapien
ggtccagagagtgaaagcttccttcagttctgt

SEQ ID NO: 351895 - DNA, 33 bp, Homo sapien
tacattatttccttacactaataccttaaccaa

SEQ ID NO: 351896 - DNA, 33 bp, Homo sapien
tacattatttccttacgctaataccttaaccaa

SEQ ID NO: 351897 - DNA, 33 bp, Homo sapien
ggtgttggttacttaacgattcccctgttgttg

SEQ ID NO: 351898 - DNA, 33 bp, Homo sapien
ggtgttggttacttaatgattcccctgttgttg

SEQ ID NO: 351899 - DNA, 33 bp, Homo sapien
gccttgttgttcctcaatgaaatgtttgaaatg

SEQ ID NO: 351900 - DNA, 33 bp, Homo sapien
gccttgttgttcctcagtgaaatgtttgaaatg

SEQ ID NO: 351901 - DNA, 33 bp, Homo sapien
gagacaaatgatccaactggcataatgtctgag

SEQ ID NO: 351902 - DNA, 33 bp, Homo sapien
gagacaaatgatccaattggcataatgtctgag

SEQ ID NO: 351903 - DNA, 33 bp, Homo sapien
taatgtgtgaaggcggaagtgtagaaacagtag

SEQ ID NO: 351904 - DNA, 33 bp, Homo sapien
taatgtgtgaaggcgggagtgtagaaacagtag

SEQ ID NO: 351905 - DNA, 33 bp, Homo sapien
tttcctattctctggaatcatctgctactgttt

SEQ ID NO: 351906 - DNA, 33 bp, Homo sapien
tttcctattctctggagtcatctgctactgttt

SEQ ID NO: 351907 - DNA, 33 bp, Homo sapien
aggcctttgacaaagacatgtactatttatgtg

SEQ ID NO: 351908 - DNA, 33 bp, Homo sapien
aggcctttgacaaagagatgtactatttatgtg

SEQ ID NO: 351909 - DNA, 33 bp, Homo sapien
tggaattgaaaaattcacacaaatgagaggacc

SEQ ID NO: 351910 - DNA, 33 bp, Homo sapien
tggaattgaaaaattcgcacaaatgagaggacc

SEQ ID NO: 351911 - DNA, 33 bp, Homo sapien
agaagagagcctgagacggaattttgaactgga

SEQ ID NO: 351912 - DNA, 33 bp, Homo sapien
agaagagagcctgagatggaattttgaactgga

SEQ ID NO: 351913 - DNA, 33 bp, Homo sapien
agacatcttcaggcagacattctcagaatattc

SEQ ID NO: 351914 - DNA, 33 bp, Homo sapien
agacatcttcaggcagccattctcagaatattc

SEQ ID NO: 351915 - DNA, 33 bp, Homo sapien
cctgaatttctgtctccgaccctctagccaccc

SEQ ID NO: 351916 - DNA, 33 bp, Homo sapien
cctgaatttctgtctctgaccctctagccaccc

SEQ ID NO: 351917 - DNA, 33 bp, Homo sapien
acctctggcatttgacccttgactgtctcaact

SEQ ID NO: 351918 - DNA, 33 bp, Homo sapien
acctctggcatttgacgcttgactgtctcaact

SEQ ID NO: 351919 - DNA, 33 bp, Homo sapien
cttcttacagcccttacagtacatgatgagaga

SEQ ID NO: 351920 - DNA, 33 bp, Homo sapien
cttcttacagcccttatagtacatgatgagaga

SEQ ID NO: 351921 - DNA, 33 bp, Homo sapien
aatgtttccaaaagagaagtcatgtgtatacaa

SEQ ID NO: 351922 - DNA, 33 bp, Homo sapien
aatgtttccaaaagaggagtcatgtgtatacaa

SEQ ID NO: 351923 - DNA, 33 bp, Homo sapien
tctctgcattttgaacaaacctttatcacagca

SEQ ID NO: 351924 - DNA, 33 bp, Homo sapien
tctctgcattttgaaccaacctttatcacagca

SEQ ID NO: 351925 - DNA, 33 bp, Homo sapien
atcagatatggggatcaagatgagtaagacacc

SEQ ID NO: 351926 - DNA, 33 bp, Homo sapien
atcagatatggggatcgagatgagtaagacacc

SEQ ID NO: 351927 - DNA, 33 bp, Homo sapien
ggcctggccaagtggacactggagtttgtgctg

SEQ ID NO: 351928 - DNA, 33 bp, Homo sapien
ggcctggccaagtggatactggagtttgtgctg

SEQ ID NO: 351929 - DNA, 33 bp, Homo sapien
ttagttagggcttctagaaggcaggccatttgc

SEQ ID NO: 351930 - DNA, 33 bp, Homo sapien
ttagttagggcttctataaggcaggccatttgc

SEQ ID NO: 351931 - DNA, 33 bp, Homo sapien
tgaggaactttgccacaaagctcacattcattt

SEQ ID NO: 351932 - DNA, 33 bp, Homo sapien
tgaggaactttgccacgaagctcacattcattt

SEQ ID NO: 351933 - DNA, 33 bp, Homo sapien
ctgctgcaggagagaacggtgtttgtgtcctgc

SEQ ID NO: 351934 - DNA, 33 bp, Homo sapien
ctgctgcaggagagaatggtgtttgtgtcctgc

SEQ ID NO: 351935 - DNA, 33 bp, Homo sapien
acaatacaatgtcaaggacatcactgccacaca

SEQ ID NO: 351936 - DNA, 33 bp, Homo sapien
acaatacaatgtcaagtacatcactgccacaca

SEQ ID NO: 351937 - DNA, 33 bp, Homo sapien
aaaagctgaggagacacgggtggggctctgacg

SEQ ID NO: 351938 - DNA, 33 bp, Homo sapien
aaaagctgaggagacatgggtggggctctgacg

SEQ ID NO: 351939 - DNA, 33 bp, Homo sapien
tagagcataaaggatcaagcatgtgccctgttg

SEQ ID NO: 351940 - DNA, 33 bp, Homo sapien
tagagcataaaggatctagcatgtgccctgttg

SEQ ID NO: 351941 - DNA, 33 bp, Homo sapien
agaagatgcaacaaaacgatcaggacaaaggcc

SEQ ID NO: 351942 - DNA, 33 bp, Homo sapien
agaagatgcaacaaaatgatcaggacaaaggcc

SEQ ID NO: 351943 - DNA, 33 bp, Homo sapien
ggacaaaggcccacaacgatcaaagtgttctcc

SEQ ID NO: 351944 - DNA, 33 bp, Homo sapien
ggacaaaggcccacaatgatcaaagtgttctcc

SEQ ID NO: 351945 - DNA, 33 bp, Homo sapien
catcttgagccataagaaataagaggcttgcat

SEQ ID NO: 351946 - DNA, 33 bp, Homo sapien
catcttgagccataaggaataagaggcttgcat

SEQ ID NO: 351947 - DNA, 33 bp, Homo sapien
gatgttcatgattccaatcaggacaatagtaat

SEQ ID NO: 351948 - DNA, 33 bp, Homo sapien
gatgttcatgattccagtcaggacaatagtaat

SEQ ID NO: 351949 - DNA, 33 bp, Homo sapien
agtggaacccgagaagacgcaaccagggacaat

SEQ ID NO: 351950 - DNA, 33 bp, Homo sapien
agtggaacccgagaaggcgcaaccagggacaat

SEQ ID NO: 351951 - DNA, 33 bp, Homo sapien
cactgcccgaactcctcacccttactatgtcct

SEQ ID NO: 351952 - DNA, 33 bp, Homo sapien
cactgcccgaactcctgacccttactatgtcct

SEQ ID NO: 351953 - DNA, 33 bp, Homo sapien
ggcaaaatttttttgacgctgcattacaatttt

SEQ ID NO: 351954 - DNA, 33 bp, Homo sapien
ggcaaaatttttttgaggctgcattacaatttt

SEQ ID NO: 351955 - DNA, 33 bp, Homo sapien
taaggattatgccccacgtcaccaagtccatct

SEQ ID NO: 351956 - DNA, 33 bp, Homo sapien
taaggattatgccccatgtcaccaagtccatct

SEQ ID NO: 351957 - DNA, 33 bp, Homo sapien
ttagtcacagctgacactgatacccagagaccc

SEQ ID NO: 351958 - DNA, 33 bp, Homo sapien
ttagtcacagctgacattgatacccagagaccc

SEQ ID NO: 351959 - DNA, 33 bp, Homo sapien
acctggattccacactcactcctcataccctca

SEQ ID NO: 351960 - DNA, 33 bp, Homo sapien
acctggattccacactgactcctcataccctca

SEQ ID NO: 351961 - DNA, 33 bp, Homo sapien
gttgatttcttggtccactgaattgattgagtc

SEQ ID NO: 351962 - DNA, 33 bp, Homo sapien
gttgatttcttggtccgctgaattgattgagtc

SEQ ID NO: 351963 - DNA, 33 bp, Homo sapien
ctgttcccatgagccacgtgtcaaactggatcc

SEQ ID NO: 351964 - DNA, 33 bp, Homo sapien
ctgttcccatgagccaggtgtcaaactggatcc

SEQ ID NO: 351965 - DNA, 33 bp, Homo sapien
ctcttaagaacactcaatgaggactttccatct

SEQ ID NO: 351966 - DNA, 33 bp, Homo sapien
ctcttaagaacactcagtgaggactttccatct

SEQ ID NO: 351967 - DNA, 33 bp, Homo sapien
tgcacaggtcaaacaacacagacctgtagctta

SEQ ID NO: 351968 - DNA, 33 bp, Homo sapien
tgcacaggtcaaacaatacagacctgtagctta

SEQ ID NO: 351969 - DNA, 33 bp, Homo sapien
cttttgccaaatgcacaaacaaggtcgttggtt

SEQ ID NO: 351970 - DNA, 33 bp, Homo sapien
cttttgccaaatgcacgaacaaggtcgttggtt

SEQ ID NO: 351971 - DNA, 33 bp, Homo sapien
ggggaggtgatgatgaagaaaagaaagcctgtt

SEQ ID NO: 351972 - DNA, 33 bp, Homo sapien
ggggaggtgatgatgaggaaaagaaagcctgtt

SEQ ID NO: 351973 - DNA, 33 bp, Homo sapien
tacacttttcctttccacttagtgctagattct

SEQ ID NO: 351974 - DNA, 33 bp, Homo sapien
tacacttttcctttccgcttagtgctagattct

SEQ ID NO: 351975 - DNA, 33 bp, Homo sapien
atctgtcaggtgggaaatgttatctccttgttt

SEQ ID NO: 351976 - DNA, 33 bp, Homo sapien
atctgtcaggtgggaagtgttatctccttgttt

SEQ ID NO: 351977 - DNA, 33 bp, Homo sapien
gaagctagggggaaacaggtactctcatcctct

SEQ ID NO: 351978 - DNA, 33 bp, Homo sapien
gaagctagggggaaacgggtactctcatcctct

SEQ ID NO: 351979 - DNA, 33 bp, Homo sapien
aagttagcacttaataggttcagagtttcagtt

SEQ ID NO: 351980 - DNA, 33 bp, Homo sapien
aagttagcacttaatatgttcagagtttcagtt

SEQ ID NO: 351981 - DNA, 33 bp, Homo sapien
tgcaaagtaaaagcctaaagtcacagaacaggg

SEQ ID NO: 351982 - DNA, 33 bp, Homo sapien
tgcaaagtaaaagccttaagtcacagaacaggg

SEQ ID NO: 351983 - DNA, 33 bp, Homo sapien
ccccccaatagtcctacgagttaggatttatct

SEQ ID NO: 351984 - DNA, 33 bp, Homo sapien
ccccccaatagtcctatgagttaggatttatct

SEQ ID NO: 351985 - DNA, 33 bp, Homo sapien
tcttcatctatgaagcagagataaatcctaact

SEQ ID NO: 351986 - DNA, 33 bp, Homo sapien
tcttcatctatgaagcggagataaatcctaact

SEQ ID NO: 351987 - DNA, 33 bp, Homo sapien
aatctttgttgaaacacctatcaggccaagcaa

SEQ ID NO: 351988 - DNA, 33 bp, Homo sapien
aatctttgttgaaacatctatcaggccaagcaa

SEQ ID NO: 351989 - DNA, 33 bp, Homo sapien
agtgaaaggaacagaaagggaatcagcatttat

SEQ ID NO: 351990 - DNA, 33 bp, Homo sapien
agtgaaaggaacagaatgggaatcagcatttat

SEQ ID NO: 351991 - DNA, 33 bp, Homo sapien
tattctttatgccacaaaattgtccttcatgca

SEQ ID NO: 351992 - DNA, 33 bp, Homo sapien
tattctttatgccacagaattgtccttcatgca

SEQ ID NO: 351993 - DNA, 33 bp, Homo sapien
ctttctctctctcaacgggtaatagtttgtaac

SEQ ID NO: 351994 - DNA, 33 bp, Homo sapien
ctttctctctctcaactggtaatagtttgtaac

SEQ ID NO: 351995 - DNA, 33 bp, Homo sapien
acagctatgcttgataggctaaggggcttaagc

SEQ ID NO: 351996 - DNA, 33 bp, Homo sapien
acagctatgcttgatatgctaaggggcttaagc

SEQ ID NO: 351997 - DNA, 33 bp, Homo sapien
cctgattgaaaggtaactagtgagcctgattaa

SEQ ID NO: 351998 - DNA, 33 bp, Homo sapien
cctgattgaaaggtaattagtgagcctgattaa

SEQ ID NO: 351999 - DNA, 33 bp, Homo sapien
attccagctgttatgaactactacgtccctctc

SEQ ID NO: 352000 - DNA, 33 bp, Homo sapien
attccagctgttatgatctactacgtccctctc

SEQ ID NO: 352001 - DNA, 33 bp, Homo sapien
cagaaaagaagtcagaaaagcaaagacacaaaa

SEQ ID NO: 352002 - DNA, 33 bp, Homo sapien
cagaaaagaagtcagagaagcaaagacacaaaa

SEQ ID NO: 352003 - DNA, 33 bp, Homo sapien
tcctgacacttgcctgacacagcttttacatta

SEQ ID NO: 352004 - DNA, 33 bp, Homo sapien
tcctgacacttgcctggcacagcttttacatta

SEQ ID NO: 352005 - DNA, 33 bp, Homo sapien
gatgtgtgcatgtcaacttacgttctgctgtaa

SEQ ID NO: 352006 - DNA, 33 bp, Homo sapien
gatgtgtgcatgtcaatttacgttctgctgtaa

SEQ ID NO: 352007 - DNA, 33 bp, Homo sapien
aactcacctacatcacacaaccagtaagtttca

SEQ ID NO: 352008 - DNA, 33 bp, Homo sapien
aactcacctacatcacgcaaccagtaagtttca

SEQ ID NO: 352009 - DNA, 33 bp, Homo sapien
gcaatattggtgagaacgggattgtgagttcca

SEQ ID NO: 352010 - DNA, 33 bp, Homo sapien
gcaatattggtgagaatgggattgtgagttcca

SEQ ID NO: 352011 - DNA, 33 bp, Homo sapien
aatgaaggttgaaaacaactgaccaaggctaga

SEQ ID NO: 352012 - DNA, 33 bp, Homo sapien
aatgaaggttgaaaaccactgaccaaggctaga

SEQ ID NO: 352013 - DNA, 33 bp, Homo sapien
gcaccagattggtctacggctcagtgatttccc

SEQ ID NO: 352014 - DNA, 33 bp, Homo sapien
gcaccagattggtctatggctcagtgatttccc

SEQ ID NO: 352015 - DNA, 33 bp, Homo sapien
tataagtaagccccaacgatggagagatcatgt

SEQ ID NO: 352016 - DNA, 33 bp, Homo sapien
tataagtaagccccaatgatggagagatcatgt

SEQ ID NO: 352017 - DNA, 33 bp, Homo sapien
ctaaaacctaacaaacactcatgcataaggcaa

SEQ ID NO: 352018 - DNA, 33 bp, Homo sapien
ctaaaacctaacaaaccctcatgcataaggcaa

SEQ ID NO: 352019 - DNA, 33 bp, Homo sapien
gctctgagtttcctgacaacctcgctttctcgg

SEQ ID NO: 352020 - DNA, 33 bp, Homo sapien
gctctgagtttcctgataacctcgctttctcgg

SEQ ID NO: 352021 - DNA, 33 bp, Homo sapien
agctgagctctgagaaaacaattaagcaattaa

SEQ ID NO: 352022 - DNA, 33 bp, Homo sapien
agctgagctctgagaagacaattaagcaattaa

SEQ ID NO: 352023 - DNA, 33 bp, Homo sapien
ctgggtataactgtgaacttttctatattgcct

SEQ ID NO: 352024 - DNA, 33 bp, Homo sapien
ctgggtataactgtgagcttttctatattgcct

SEQ ID NO: 352025 - DNA, 33 bp, Homo sapien
gctgtaagcatttccaataaatattcctccaag

SEQ ID NO: 352026 - DNA, 33 bp, Homo sapien
gctgtaagcatttccagtaaatattcctccaag

SEQ ID NO: 352027 - DNA, 33 bp, Homo sapien
tgatgtacaactgtgacaagtagtctatgctcc

SEQ ID NO: 352028 - DNA, 33 bp, Homo sapien
tgatgtacaactgtgagaagtagtctatgctcc

SEQ ID NO: 352029 - DNA, 33 bp, Homo sapien
aagacagggctggagaaaaaagtactggtcctt

SEQ ID NO: 352030 - DNA, 33 bp, Homo sapien
aagacagggctggagagaaaagtactggtcctt

SEQ ID NO: 352031 - DNA, 33 bp, Homo sapien
tgcttccttcacctagaaacatacctgtgtcct

SEQ ID NO: 352032 - DNA, 33 bp, Homo sapien
tgcttccttcacctagtaacatacctgtgtcct

SEQ ID NO: 352033 - DNA, 33 bp, Homo sapien
tgaggtctcataaaaaaagtgtgtatcataagg

SEQ ID NO: 352034 - DNA, 33 bp, Homo sapien
tgaggtctcataaaaagagtgtgtatcataagg

SEQ ID NO: 352035 - DNA, 33 bp, Homo sapien
aaaacttcattgcttccatggagtctttaggga

SEQ ID NO: 352036 - DNA, 33 bp, Homo sapien
aaaacttcattgcttctatggagtctttaggga

SEQ ID NO: 352037 - DNA, 33 bp, Homo sapien
ataggatagcactgctaaatatgctgaaattat

SEQ ID NO: 352038 - DNA, 33 bp, Homo sapien
ataggatagcactgctgaatatgctgaaattat

SEQ ID NO: 352039 - DNA, 33 bp, Homo sapien
aggtctggtgataatgaattttctcagcatttg

SEQ ID NO: 352040 - DNA, 33 bp, Homo sapien
aggtctggtgataatgcattttctcagcatttg

SEQ ID NO: 352041 - DNA, 33 bp, Homo sapien
gccaaaccaatcttcaaaagtgagagagaaata

SEQ ID NO: 352042 - DNA, 33 bp, Homo sapien
gccaaaccaatcttcataagtgagagagaaata

SEQ ID NO: 352043 - DNA, 33 bp, Homo sapien
gtaaggtctatgccgaaggtctctgggatttgt

SEQ ID NO: 352044 - DNA, 33 bp, Homo sapien
gtaaggtctatgccgacggtctctgggatttgt

SEQ ID NO: 352045 - DNA, 33 bp, Homo sapien
taggttttcaaaaagcaaaaaagaatgaggctt

SEQ ID NO: 352046 - DNA, 33 bp, Homo sapien
taggttttcaaaaagcgaaaaagaatgaggctt

SEQ ID NO: 352047 - DNA, 33 bp, Homo sapien
tattcctaagcattagaatttgcaaacaggtgg

SEQ ID NO: 352048 - DNA, 33 bp, Homo sapien
tattcctaagcattaggatttgcaaacaggtgg

SEQ ID NO: 352049 - DNA, 33 bp, Homo sapien
atccatccttcctttagctctccacggctatcc

SEQ ID NO: 352050 - DNA, 33 bp, Homo sapien
atccatccttcctttatctctccacggctatcc

SEQ ID NO: 352051 - DNA, 33 bp, Homo sapien
ttgccctgtgatcaagaattacccttactggac

SEQ ID NO: 352052 - DNA, 33 bp, Homo sapien
ttgccctgtgatcaagcattacccttactggac

SEQ ID NO: 352053 - DNA, 33 bp, Homo sapien
cttgagcatatacacaaagttctaacaaacaca

SEQ ID NO: 352054 - DNA, 33 bp, Homo sapien
cttgagcatatacacagagttctaacaaacaca

SEQ ID NO: 352055 - DNA, 33 bp, Homo sapien
agagagaaagacatagaaggcataccgatgcaa

SEQ ID NO: 352056 - DNA, 33 bp, Homo sapien
agagagaaagacataggaggcataccgatgcaa

SEQ ID NO: 352057 - DNA, 33 bp, Homo sapien
accagagtcatctttcaaaaatacagatcagaa

SEQ ID NO: 352058 - DNA, 33 bp, Homo sapien
accagagtcatctttcgaaaatacagatcagaa

SEQ ID NO: 352059 - DNA, 33 bp, Homo sapien
actctgtgaattcaaacctcatgtatttccaaa

SEQ ID NO: 352060 - DNA, 33 bp, Homo sapien
actctgtgaattcaaatctcatgtatttccaaa

SEQ ID NO: 352061 - DNA, 33 bp, Homo sapien
gccaggatatgcagagaccgataagcctgggaa

SEQ ID NO: 352062 - DNA, 33 bp, Homo sapien
gccaggatatgcagagtccgataagcctgggaa

SEQ ID NO: 352063 - DNA, 33 bp, Homo sapien
agtaaagcatatgtgaacaaaacaacctaactg

SEQ ID NO: 352064 - DNA, 33 bp, Homo sapien
agtaaagcatatgtgagcaaaacaacctaactg

SEQ ID NO: 352065 - DNA, 33 bp, Homo sapien
ttttgtgtaaaatgaacacgcaaaaagtctcaa

SEQ ID NO: 352066 - DNA, 33 bp, Homo sapien
ttttgtgtaaaatgaatacgcaaaaagtctcaa

SEQ ID NO: 352067 - DNA, 33 bp, Homo sapien
tcacttatgccaatcacgaactcaagaatcaat

SEQ ID NO: 352068 - DNA, 33 bp, Homo sapien
tcacttatgccaatcaggaactcaagaatcaat

SEQ ID NO: 352069 - DNA, 33 bp, Homo sapien
atggtaagaacaaaacagtatgtgagagacagc

SEQ ID NO: 352070 - DNA, 33 bp, Homo sapien
atggtaagaacaaaaccgtatgtgagagacagc

SEQ ID NO: 352071 - DNA, 33 bp, Homo sapien
gaacagttgctggagacggtatctttatagaga

SEQ ID NO: 352072 - DNA, 33 bp, Homo sapien
gaacagttgctggagatggtatctttatagaga

SEQ ID NO: 352073 - DNA, 33 bp, Homo sapien
gatacctggacatggacgggctaaaaggaatca

SEQ ID NO: 352074 - DNA, 33 bp, Homo sapien
gatacctggacatggatgggctaaaaggaatca

SEQ ID NO: 352075 - DNA, 33 bp, Homo sapien
agcacgcccatcctcagtctcactacgaggcat

SEQ ID NO: 352076 - DNA, 33 bp, Homo sapien
agcacgcccatcctcattctcactacgaggcat

SEQ ID NO: 352077 - DNA, 33 bp, Homo sapien
cttattccttaatctggaccaagtaacacggtg

SEQ ID NO: 352078 - DNA, 33 bp, Homo sapien
cttattccttaatctgtaccaagtaacacggtg

SEQ ID NO: 352079 - DNA, 33 bp, Homo sapien
ttggctcaggccttgtcaatattctcctctcca

SEQ ID NO: 352080 - DNA, 33 bp, Homo sapien
ttggctcaggccttgtgaatattctcctctcca

SEQ ID NO: 352081 - DNA, 33 bp, Homo sapien
tggtggcttccttcccggatagacagagctgga

SEQ ID NO: 352082 - DNA, 33 bp, Homo sapien
tggtggcttccttccctgatagacagagctgga

SEQ ID NO: 352083 - DNA, 33 bp, Homo sapien
agctcctaaacccataacacgggacactgtgga

SEQ ID NO: 352084 - DNA, 33 bp, Homo sapien
agctcctaaacccataccacgggacactgtgga

SEQ ID NO: 352085 - DNA, 33 bp, Homo sapien
ggagcctggaaagacaataggaacagacagaga

SEQ ID NO: 352086 - DNA, 33 bp, Homo sapien
ggagcctggaaagacagtaggaacagacagaga

SEQ ID NO: 352087 - DNA, 33 bp, Homo sapien
attttggaaactagaaaggaccaaaagttatca

SEQ ID NO: 352088 - DNA, 33 bp, Homo sapien
attttggaaactagaagggaccaaaagttatca

SEQ ID NO: 352089 - DNA, 33 bp, Homo sapien
tcaaaaacacagcaaactactggtggagatgag

SEQ ID NO: 352090 - DNA, 33 bp, Homo sapien
tcaaaaacacagcaaattactggtggagatgag

SEQ ID NO: 352091 - DNA, 33 bp, Homo sapien
agcaaaagagccggtcaaaagagcatttggaga

SEQ ID NO: 352092 - DNA, 33 bp, Homo sapien
agcaaaagagccggtccaaagagcatttggaga

SEQ ID NO: 352093 - DNA, 33 bp, Homo sapien
gggtaaaatatgcaaaatgcctcttcagtatgt

SEQ ID NO: 352094 - DNA, 33 bp, Homo sapien
gggtaaaatatgcaaagtgcctcttcagtatgt

SEQ ID NO: 352095 - DNA, 33 bp, Homo sapien
agtgtatgttgtaggcacccttgtcaaatatca

SEQ ID NO: 352096 - DNA, 33 bp, Homo sapien
agtgtatgttgtaggcgcccttgtcaaatatca

SEQ ID NO: 352097 - DNA, 33 bp, Homo sapien
tcaatcacaatagagcactgagttctgaaaaac

SEQ ID NO: 352098 - DNA, 33 bp, Homo sapien
tcaatcacaatagagcgctgagttctgaaaaac

SEQ ID NO: 352099 - DNA, 33 bp, Homo sapien
taaaagaggttttttgcagtaaatgaggaggtg

SEQ ID NO: 352100 - DNA, 33 bp, Homo sapien
taaaagaggttttttggagtaaatgaggaggtg

SEQ ID NO: 352101 - DNA, 33 bp, Homo sapien
gcactcagaaagaagaaatctgttctctgagaa

SEQ ID NO: 352102 - DNA, 33 bp, Homo sapien
gcactcagaaagaagatatctgttctctgagaa

SEQ ID NO: 352103 - DNA, 33 bp, Homo sapien
aaagctttgggcatcaaaataaataatgataat

SEQ ID NO: 352104 - DNA, 33 bp, Homo sapien
aaagctttgggcatcagaataaataatgataat

SEQ ID NO: 352105 - DNA, 33 bp, Homo sapien
cagtggtgttaaacagcaactctgattgaagca

SEQ ID NO: 352106 - DNA, 33 bp, Homo sapien
cagtggtgttaaacaggaactctgattgaagca

SEQ ID NO: 352107 - DNA, 33 bp, Homo sapien
ggacagggtggacgtacctttccataagacatg

SEQ ID NO: 352108 - DNA, 33 bp, Homo sapien
ggacagggtggacgtatctttccataagacatg

SEQ ID NO: 352109 - DNA, 33 bp, Homo sapien
atgaaaatgcactcgcactcactgtgtatgttc

SEQ ID NO: 352110 - DNA, 33 bp, Homo sapien
atgaaaatgcactcgcgctcactgtgtatgttc

SEQ ID NO: 352111 - DNA, 33 bp, Homo sapien
ctatttgcaaaagctcacacaagtagtctctga

SEQ ID NO: 352112 - DNA, 33 bp, Homo sapien
ctatttgcaaaagctcgcacaagtagtctctga

SEQ ID NO: 352113 - DNA, 33 bp, Homo sapien
ctaagacagtgcataaagttttttcattatttg

SEQ ID NO: 352114 - DNA, 33 bp, Homo sapien
ctaagacagtgcataaggttttttcattatttg

SEQ ID NO: 352115 - DNA, 33 bp, Homo sapien
cctgaactgccactccagatagaccctgtccaa

SEQ ID NO: 352116 - DNA, 33 bp, Homo sapien
cctgaactgccactccggatagaccctgtccaa

SEQ ID NO: 352117 - DNA, 33 bp, Homo sapien
cactggaatccacgctaagatggacacagtgaa

SEQ ID NO: 352118 - DNA, 33 bp, Homo sapien
cactggaatccacgctgagatggacacagtgaa

SEQ ID NO: 352119 - DNA, 33 bp, Homo sapien
agtaaggattcacaggaaagatgatttaactgc

SEQ ID NO: 352120 - DNA, 33 bp, Homo sapien
agtaaggattcacagggaagatgatttaactgc

SEQ ID NO: 352121 - DNA, 33 bp, Homo sapien
cttagtgttttcccccaaaatgtcatgcatgtg

SEQ ID NO: 352122 - DNA, 33 bp, Homo sapien
cttagtgttttcccccgaaatgtcatgcatgtg

SEQ ID NO: 352123 - DNA, 33 bp, Homo sapien
ctatccccaatatagcaaagtgaagacctctta

SEQ ID NO: 352124 - DNA, 33 bp, Homo sapien
ctatccccaatatagcgaagtgaagacctctta

SEQ ID NO: 352125 - DNA, 33 bp, Homo sapien
atgaatgcataagccaagaaataattggataaa

SEQ ID NO: 352126 - DNA, 33 bp, Homo sapien
atgaatgcataagccatgaaataattggataaa

SEQ ID NO: 352127 - DNA, 33 bp, Homo sapien
ggtgtggtaagggatgccaatcagtggtagtca

SEQ ID NO: 352128 - DNA, 33 bp, Homo sapien
ggtgtggtaagggatgtcaatcagtggtagtca

SEQ ID NO: 352129 - DNA, 33 bp, Homo sapien; identical to SEQ ID NO: 352127

SEQ ID NO: 352130 - DNA, 33 bp, Homo sapien; identical to SEQ ID NO: 352128

SEQ ID NO: 352131 - DNA, 33 bp, Homo sapien
tttgtacgtgttgctaaaaggctctggtcccac

SEQ ID NO: 352132 - DNA, 33 bp, Homo sapien
tttgtacgtgttgctacaaggctctggtcccac

SEQ ID NO: 352133 - DNA, 33 bp, Homo sapien
ggactttagtgttcacaactctgacaatttcca

SEQ ID NO: 352134 - DNA, 33 bp, Homo sapien
ggactttagtgttcacgactctgacaatttcca

SEQ ID NO: 352135 - DNA, 33 bp, Homo sapien
gattcaggttcattcccctttgagatgagttgc

SEQ ID NO: 352136 - DNA, 33 bp, Homo sapien
gattcaggttcattccgctttgagatgagttgc

SEQ ID NO: 352137 - DNA, 33 bp, Homo sapien; identical to SEQ ID NO: 352135

SEQ ID NO: 352138 - DNA, 33 bp, Homo sapien; identical to SEQ ID NO: 352136

SEQ ID NO: 352139 - DNA, 33 bp, Homo sapien
tgaggatgagaagaaacaatgtgcctgacatac

SEQ ID NO: 352140 - DNA, 33 bp, Homo sapien
tgaggatgagaagaaagaatgtgcctgacatac

SEQ ID NO: 352141 - DNA, 33 bp, Homo sapien
ttgaagttcaaaattcccagaaacactccactt

SEQ ID NO: 352142 - DNA, 33 bp, Homo sapien
ttgaagttcaaaattctcagaaacactccactt

SEQ ID NO: 352143 - DNA, 33 bp, Homo sapien
gacagtggctcatagacgctgatgggacacgct

SEQ ID NO: 352144 - DNA, 33 bp, Homo sapien
gacagtggctcatagatgctgatgggacacgct

SEQ ID NO: 352145 - DNA, 33 bp, Homo sapien
tccatcgttgttagataaaatatttgttggaag

SEQ ID NO: 352146 - DNA, 33 bp, Homo sapien
tccatcgttgttagattaaatatttgttggaag

SEQ ID NO: 352147 - DNA, 33 bp, Homo sapien
tggtagagcctcgggggaaattggcccttcttc

SEQ ID NO: 352148 - DNA, 33 bp, Homo sapien
tggtagagcctcggggtaaattggcccttcttc

SEQ ID NO: 352149 - DNA, 33 bp, Homo sapien
agtgaaaacagaggccaaaaaaagcaaggactt

SEQ ID NO: 352150 - DNA, 33 bp, Homo sapien
agtgaaaacagaggccgaaaaaagcaaggactt

SEQ ID NO: 352151 - DNA, 33 bp, Homo sapien
tcttaagatccctctaacaccaactttccactg

SEQ ID NO: 352152 - DNA, 33 bp, Homo sapien
tcttaagatccctctagcaccaactttccactg

SEQ ID NO: 352153 - DNA, 33 bp, Homo sapien
tattctccaccccacactctgcgctcatgtatt

SEQ ID NO: 352154 - DNA, 33 bp, Homo sapien
tattctccaccccacattctgcgctcatgtatt

SEQ ID NO: 352155 - DNA, 33 bp, Homo sapien
cacagctgctttaccaaaacgtagccaggctgc

SEQ ID NO: 352156 - DNA, 33 bp, Homo sapien
cacagctgctttaccagaacgtagccaggctgc

SEQ ID NO: 352157 - DNA, 33 bp, Homo sapien
agtaaaggtgttcctacgagaatctagggctga

SEQ ID NO: 352158 - DNA, 33 bp, Homo sapien
agtaaaggtgttcctaggagaatctagggctga

SEQ ID NO: 352159 - DNA, 33 bp, Homo sapien
tttgttcttatgactccatgattctgtgtcaag

SEQ ID NO: 352160 - DNA, 33 bp, Homo sapien
tttgttcttatgactctatgattctgtgtcaag

SEQ ID NO: 352161 - DNA, 33 bp, Homo sapien
gctctgggtagagaaacgatcaggaacataata

SEQ ID NO: 352162 - DNA, 33 bp, Homo sapien
gctctgggtagagaaatgatcaggaacataata

SEQ ID NO: 352163 - DNA, 33 bp, Homo sapien
ctatctgatgtaattgaatatactagctatttt

SEQ ID NO: 352164 - DNA, 33 bp, Homo sapien
ctatctgatgtaattggatatactagctatttt

SEQ ID NO: 352165 - DNA, 33 bp, Homo sapien
tggagagcagagaacccagaagtaggaaagtaa

SEQ ID NO: 352166 - DNA, 33 bp, Homo sapien
tggagagcagagaacctagaagtaggaaagtaa

SEQ ID NO: 352167 - DNA, 33 bp, Homo sapien
gagtgaatagtcctaaatagcctcggtttggag

SEQ ID NO: 352168 - DNA, 33 bp, Homo sapien
gagtgaatagtcctaagtagcctcggtttggag

SEQ ID NO: 352169 - DNA, 33 bp, Homo sapien
agagtcccaggtcccaactaactcccaaggatt

SEQ ID NO: 352170 - DNA, 33 bp, Homo sapien
agagtcccaggtcccatctaactcccaaggatt

SEQ ID NO: 352171 - DNA, 33 bp, Homo sapien
tttattgtgtagtcataataatggaacagtaga

SEQ ID NO: 352172 - DNA, 33 bp, Homo sapien
tttattgtgtagtcatgataatggaacagtaga

SEQ ID NO: 352173 - DNA, 33 bp, Homo sapien
ctttttgctcctagaactctaaatcatgcatca

SEQ ID NO: 352174 - DNA, 33 bp, Homo sapien
ctttttgctcctagaattctaaatcatgcatca

SEQ ID NO: 352175 - DNA, 33 bp, Homo sapien
aaggggtttgaagtaacagtgcgagaaggaagg

SEQ ID NO: 352176 - DNA, 33 bp, Homo sapien
aaggggtttgaagtaatagtgcgagaaggaagg

SEQ ID NO: 352177 - DNA, 33 bp, Homo sapien
acagagccaactataccatcccaatttgcataa

SEQ ID NO: 352178 - DNA, 33 bp, Homo sapien
acagagccaactatactatcccaatttgcataa

SEQ ID NO: 352179 - DNA, 33 bp, Homo sapien
ctgtccatgatagttcaaactcacctcacactt

SEQ ID NO: 352180 - DNA, 33 bp, Homo sapien
ctgtccatgatagttcgaactcacctcacactt

SEQ ID NO: 352181 - DNA, 33 bp, Homo sapien
taaaaccataagcccacgttatgatggaaggaa

SEQ ID NO: 352182 - DNA, 33 bp, Homo sapien
taaaaccataagcccatgttatgatggaaggaa

SEQ ID NO: 352183 - DNA, 33 bp, Homo sapien
tgggtggtgagttacacagaaggagcagagcat

SEQ ID NO: 352184 - DNA, 33 bp, Homo sapien
tgggtggtgagttacatagaaggagcagagcat

SEQ ID NO: 352185 - DNA, 33 bp, Homo sapien
ggagctggagctaggacggcccttcagaggtgt

SEQ ID NO: 352186 - DNA, 33 bp, Homo sapien
ggagctggagctaggatggcccttcagaggtgt

SEQ ID NO: 352187 - DNA, 33 bp, Homo sapien
acctgcatgattttcaaccctggaatgtcacat

SEQ ID NO: 352188 - DNA, 33 bp, Homo sapien
acctgcatgattttcagccctggaatgtcacat

SEQ ID NO: 352189 - DNA, 33 bp, Homo sapien
tcttctagatgaacaaaagaaagagcatttcag

SEQ ID NO: 352190 - DNA, 33 bp, Homo sapien
tcttctagatgaacaacagaaagagcatttcag

SEQ ID NO: 352191 - DNA, 33 bp, Homo sapien
atagcttagttgtggaataaccattcatatagc

SEQ ID NO: 352192 - DNA, 33 bp, Homo sapien
atagcttagttgtggactaaccattcatatagc

SEQ ID NO: 352193 - DNA, 33 bp, Homo sapien
ctgcctctttacagtacggcaaggtgctctgta

SEQ ID NO: 352194 - DNA, 33 bp, Homo sapien
ctgcctctttacagtatggcaaggtgctctgta

SEQ ID NO: 352195 - DNA, 33 bp, Homo sapien
atgtggatgttccaaaattctgccttttctttc

SEQ ID NO: 352196 - DNA, 33 bp, Homo sapien
atgtggatgttccaaacttctgccttttctttc

SEQ ID NO: 352197 - DNA, 33 bp, Homo sapien
gcctctttgagccaaagttatgtacttcggaat

SEQ ID NO: 352198 - DNA, 33 bp, Homo sapien
gcctctttgagccaaatttatgtacttcggaat

SEQ ID NO: 352199 - DNA, 33 bp, Homo sapien
gctctgttttcaaatcaccaaagactcattaat

SEQ ID NO: 352200 - DNA, 33 bp, Homo sapien
gctctgttttcaaatcgccaaagactcattaat

SEQ ID NO: 352201 - DNA, 33 bp, Homo sapien
ggagcctttgttaggagtcatggccatacccac

SEQ ID NO: 352202 - DNA, 33 bp, Homo sapien
ggagcctttgttaggattcatggccatacccac

SEQ ID NO: 352203 - DNA, 33 bp, Homo sapien
ataaacatttagattggtgtaagcctttgacta

SEQ ID NO: 352204 - DNA, 33 bp, Homo sapien
ataaacatttagattgttgtaagcctttgacta

SEQ ID NO: 352205 - DNA, 33 bp, Homo sapien
tggctcaccactaagcgatatggacataggagc

SEQ ID NO: 352206 - DNA, 33 bp, Homo sapien
tggctcaccactaagctatatggacataggagc

SEQ ID NO: 352207 - DNA, 33 bp, Homo sapien
gctgcctacttcatccaacagtaaattagttta

SEQ ID NO: 352208 - DNA, 33 bp, Homo sapien
gctgcctacttcatcccacagtaaattagttta

SEQ ID NO: 352209 - DNA, 33 bp, Homo sapien
atagtctgattcaaccgggcttaagcaaaaatg

SEQ ID NO: 352210 - DNA, 33 bp, Homo sapien
atagtctgattcaacctggcttaagcaaaaatg

SEQ ID NO: 352211 - DNA, 33 bp, Homo sapien
gaggagttgctaaatacagtcttggaaaatata

SEQ ID NO: 352212 - DNA, 33 bp, Homo sapien
gaggagttgctaaatatagtcttggaaaatata

SEQ ID NO: 352213 - DNA, 33 bp, Homo sapien
ccagatatatgataaaagtaaacaccaatgttg

SEQ ID NO: 352214 - DNA, 33 bp, Homo sapien
ccagatatatgataaaggtaaacaccaatgttg

SEQ ID NO: 352215 - DNA, 33 bp, Homo sapien
aggtagctgaatttaacaaactatcactgttcc

SEQ ID NO: 352216 - DNA, 33 bp, Homo sapien
aggtagctgaatttaagaaactatcactgttcc

SEQ ID NO: 352217 - DNA, 33 bp, Homo sapien
ctactagaaattctcacagacaagattccacag

SEQ ID NO: 352218 - DNA, 33 bp, Homo sapien
ctactagaaattctcagagacaagattccacag

SEQ ID NO: 352219 - DNA, 33 bp, Homo sapien
acctgaaatctacacaatgcagctgaaatttcc

SEQ ID NO: 352220 - DNA, 33 bp, Homo sapien
acctgaaatctacacagtgcagctgaaatttcc

SEQ ID NO: 352221 - DNA, 33 bp, Homo sapien
attgagtccacttggaaaagccgattaagtctt

SEQ ID NO: 352222 - DNA, 33 bp, Homo sapien
attgagtccacttggagaagccgattaagtctt

SEQ ID NO: 352223 - DNA, 33 bp, Homo sapien
ttgacagctagaaagaacaactcttttggtgaa

SEQ ID NO: 352224 - DNA, 33 bp, Homo sapien
ttgacagctagaaagagcaactcttttggtgaa

SEQ ID NO: 352225 - DNA, 33 bp, Homo sapien
ctcaaggtggactaaacaccaggccatacctct

SEQ ID NO: 352226 - DNA, 33 bp, Homo sapien
ctcaaggtggactaaataccaggccatacctct

SEQ ID NO: 352227 - DNA, 33 bp, Homo sapien
gcgagttcctgccgtacctatctgtgtgtgtac

SEQ ID NO: 352228 - DNA, 33 bp, Homo sapien
gcgagttcctgccgtatctatctgtgtgtgtac

SEQ ID NO: 352229 - DNA, 33 bp, Homo sapien
tgtcaccaggaagaaaacttgcagcagttccat

SEQ ID NO: 352230 - DNA, 33 bp, Homo sapien
tgtcaccaggaagaaagcttgcagcagttccat

SEQ ID NO: 352231 - DNA, 33 bp, Homo sapien; identical to SEQ ID NO: 352229

SEQ ID NO: 352232 - DNA, 33 bp, Homo sapien; identical to SEQ ID NO: 352230

SEQ ID NO: 352233 - DNA, 33 bp, Homo sapien
agaggcggttagaggccaggtcatgtagggctt

SEQ ID NO: 352234 - DNA, 33 bp, Homo sapien
agaggcggttagaggctaggtcatgtagggctt

SEQ ID NO: 352235 - DNA, 33 bp, Homo sapien
taagtgctgtagagtacctggccatttctagct

SEQ ID NO: 352236 - DNA, 33 bp, Homo sapien
taagtgctgtagagtatctggccatttctagct

SEQ ID NO: 352237 - DNA, 33 bp, Homo sapien
taacactgatctatcacaggtggaaacggcagc

SEQ ID NO: 352238 - DNA, 33 bp, Homo sapien
taacactgatctatcataggtggaaacggcagc

SEQ ID NO: 352239 - DNA, 33 bp, Homo sapien
tgtggatcttagtccaagtacagaggaattaat

SEQ ID NO: 352240 - DNA, 33 bp, Homo sapien
tgtggatcttagtccaggtacagaggaattaat

SEQ ID NO: 352241 - DNA, 33 bp, Homo sapien
agcctctggagtcaatcatggcaaaagtaactg

SEQ ID NO: 352242 - DNA, 33 bp, Homo sapien
agcctctggagtcaatgatggcaaaagtaactg

SEQ ID NO: 352243 - DNA, 33 bp, Homo sapien
agaacctctattcagaacaagttggatatttac

SEQ ID NO: 352244 - DNA, 33 bp, Homo sapien
agaacctctattcagagcaagttggatatttac

SEQ ID NO: 352245 - DNA, 33 bp, Homo sapien
cctcccccactggctcacttgctgttactctag

SEQ ID NO: 352246 - DNA, 33 bp, Homo sapien
cctcccccactggctcgcttgctgttactctag

SEQ ID NO: 352247 - DNA, 33 bp, Homo sapien
aatctctgaaaggacaataggcaacacagcaaa

SEQ ID NO: 352248 - DNA, 33 bp, Homo sapien
aatctctgaaaggacactaggcaacacagcaaa

SEQ ID NO: 352249 - DNA, 33 bp, Homo sapien
tgaggctaagattccacgcagcagttaatgcct

SEQ ID NO: 352250 - DNA, 33 bp, Homo sapien
tgaggctaagattccatgcagcagttaatgcct

SEQ ID NO: 352251 - DNA, 33 bp, Homo sapien
caactcaaaaagatcacagtagagatgtttgaa

SEQ ID NO: 352252 - DNA, 33 bp, Homo sapien
caactcaaaaagatcatagtagagatgtttgaa

SEQ ID NO: 352253 - DNA, 33 bp, Homo sapien
cactttaagttcttgactaagagcaaactcaac

SEQ ID NO: 352254 - DNA, 33 bp, Homo sapien
cactttaagttcttgattaagagcaaactcaac

SEQ ID NO: 352255 - DNA, 33 bp, Homo sapien
aagagcctttaagtcaaggtaaagaatttgtct

SEQ ID NO: 352256 - DNA, 33 bp, Homo sapien
aagagcctttaagtcatggtaaagaatttgtct

SEQ ID NO: 352257 - DNA, 33 bp, Homo sapien
cgcatgatccttcttacacaactactgaaacaa

SEQ ID NO: 352258 - DNA, 33 bp, Homo sapien
cgcatgatccttcttatacaactactgaaacaa

SEQ ID NO: 352259 - DNA, 33 bp, Homo sapien
gacaagatgaaaattactaaatctcacccttct

SEQ ID NO: 352260 - DNA, 33 bp, Homo sapien
gacaagatgaaaattattaaatctcacccttct

SEQ ID NO: 352261 - DNA, 33 bp, Homo sapien
caagagagctgagagacaactttccagatccag

SEQ ID NO: 352262 - DNA, 33 bp, Homo sapien
caagagagctgagagagaactttccagatccag

SEQ ID NO: 352263 - DNA, 33 bp, Homo sapien
ctggaagagagagccccattccgctgtcctctg

SEQ ID NO: 352264 - DNA, 33 bp, Homo sapien
ctggaagagagagccctattccgctgtcctctg

SEQ ID NO: 352265 - DNA, 33 bp, Homo sapien
tggactcttcaatagacaggctttctgagtaaa

SEQ ID NO: 352266 - DNA, 33 bp, Homo sapien
tggactcttcaatagataggctttctgagtaaa

SEQ ID NO: 352267 - DNA, 33 bp, Homo sapien
ttggctaggaggaagacgacaccgtcagcacca

SEQ ID NO: 352268 - DNA, 33 bp, Homo sapien
ttggctaggaggaagatgacaccgtcagcacca

SEQ ID NO: 352269 - DNA, 33 bp, Homo sapien
aaagaaagactttgaacttatgcagacatttgg

SEQ ID NO: 352270 - DNA, 33 bp, Homo sapien
aaagaaagactttgaatttatgcagacatttgg

SEQ ID NO: 352271 - DNA, 33 bp, Homo sapien
cttggcagctcctgagacaaatatgctgctgga

SEQ ID NO: 352272 - DNA, 33 bp, Homo sapien
cttggcagctcctgaggcaaatatgctgctgga

SEQ ID NO: 352273 - DNA, 33 bp, Homo sapien
ggtgggaccgactgtaccaacatcaacatccag

SEQ ID NO: 352274 - DNA, 33 bp, Homo sapien
ggtgggaccgactgtatcaacatcaacatccag

SEQ ID NO: 352275 - DNA, 33 bp, Homo sapien
tttgacctgcaccagaccttcagcttctatgaa

SEQ ID NO: 352276 - DNA, 33 bp, Homo sapien
tttgacctgcaccagatcttcagcttctatgaa

SEQ ID NO: 352277 - DNA, 33 bp, Homo sapien
tgctctgtctgtacacgccaggctttgccatgt

SEQ ID NO: 352278 - DNA, 33 bp, Homo sapien
tgctctgtctgtacactccaggctttgccatgt

SEQ ID NO: 352279 - DNA, 33 bp, Homo sapien
cacccgcaaatccactaaagatagtgtgccatt

SEQ ID NO: 352280 - DNA, 33 bp, Homo sapien
cacccgcaaatccactgaagatagtgtgccatt

SEQ ID NO: 352281 - DNA, 33 bp, Homo sapien
agggttgaatctcacaaatctaacactaaaaca

SEQ ID NO: 352282 - DNA, 33 bp, Homo sapien
agggttgaatctcacagatctaacactaaaaca

SEQ ID NO: 352283 - DNA, 33 bp, Homo sapien
tccatctccttcacaaactccaacctcagctcc

SEQ ID NO: 352284 - DNA, 33 bp, Homo sapien
tccatctccttcacaagctccaacctcagctcc

SEQ ID NO: 352285 - DNA, 33 bp, Homo sapien
taggcctggtccgccactcagtgacaaataaag

SEQ ID NO: 352286 - DNA, 33 bp, Homo sapien
taggcctggtccgccattcagtgacaaataaag

SEQ ID NO: 352287 - DNA, 33 bp, Homo sapien
atgtggatgctattgtaaatgtggttagagaag

SEQ ID NO: 352288 - DNA, 33 bp, Homo sapien
atgtggatgctattgttaatgtggttagagaag

SEQ ID NO: 352289 - DNA, 33 bp, Homo sapien
taaagaacatcaaggaagctggtatttcttcct

SEQ ID NO: 352290 - DNA, 33 bp, Homo sapien
taaagaacatcaaggaggctggtatttcttcct

SEQ ID NO: 352291 - DNA, 33 bp, Homo sapien
acttaattatcattgcacttgaagagagttgat

SEQ ID NO: 352292 - DNA, 33 bp, Homo sapien
acttaattatcattgcccttgaagagagttgat

SEQ ID NO: 352293 - DNA, 33 bp, Homo sapien
ccaaatacagcactaacatcatttgaaagaaga

SEQ ID NO: 352294 - DNA, 33 bp, Homo sapien
ccaaatacagcactaatatcatttgaaagaaga

SEQ ID NO: 352295 - DNA, 33 bp, Homo sapien
aactttgactatttagaagggaggattggaata

SEQ ID NO: 352296 - DNA, 33 bp, Homo sapien
aactttgactatttaggagggaggattggaata

SEQ ID NO: 352297 - DNA, 33 bp, Homo sapien
tctctcaagtctttgaagggggcacaattcaat

SEQ ID NO: 352298 - DNA, 33 bp, Homo sapien
tctctcaagtctttgatgggggcacaattcaat

SEQ ID NO: 352299 - DNA, 33 bp, Homo sapien
atactgtggcaactcaatgaagacacggcacta

SEQ ID NO: 352300 - DNA, 33 bp, Homo sapien
atactgtggcaactcattgaagacacggcacta

SEQ ID NO: 352301 - DNA, 33 bp, Homo sapien
cttgtttgatggcaacaggaaatagtagcattt

SEQ ID NO: 352302 - DNA, 33 bp, Homo sapien
cttgtttgatggcaacgggaaatagtagcattt

SEQ ID NO: 352303 - DNA, 33 bp, Homo sapien
ccttatttgataactccaatatctaggtcatct

SEQ ID NO: 352304 - DNA, 33 bp, Homo sapien
ccttatttgataactcgaatatctaggtcatct

SEQ ID NO: 352305 - DNA, 33 bp, Homo sapien
aacttaagaacattggccattcattaatagcca

SEQ ID NO: 352306 - DNA, 33 bp, Homo sapien
aacttaagaacattgggcattcattaatagcca

SEQ ID NO: 352307 - DNA, 33 bp, Homo sapien
gcactctccactttggacatccacaaaacctct

SEQ ID NO: 352308 - DNA, 33 bp, Homo sapien
gcactctccactttgggcatccacaaaacctct

SEQ ID NO: 352309 - DNA, 33 bp, Homo sapien
tgcagtgtgcattccacgtagtcatttagcggc

SEQ ID NO: 352310 - DNA, 33 bp, Homo sapien
tgcagtgtgcattccatgtagtcatttagcggc

SEQ ID NO: 352311 - DNA, 33 bp, Homo sapien
atgatgagacagtagacgctgtatagtgtgcgg

SEQ ID NO: 352312 - DNA, 33 bp, Homo sapien
atgatgagacagtagatgctgtatagtgtgcgg

SEQ ID NO: 352313 - DNA, 33 bp, Homo sapien
ataacatattttcaaccgagcaaaaagaccctc

SEQ ID NO: 352314 - DNA, 33 bp, Homo sapien
ataacatattttcaactgagcaaaaagaccctc

SEQ ID NO: 352315 - DNA, 33 bp, Homo sapien
aacaataccgtgaatgcaaaaacctcttccaaa

SEQ ID NO: 352316 - DNA, 33 bp, Homo sapien
aacaataccgtgaatggaaaaacctcttccaaa

SEQ ID NO: 352317 - DNA, 33 bp, Homo sapien
atattattctccaaacactgggcttctcaaatg

SEQ ID NO: 352318 - DNA, 33 bp, Homo sapien
atattattctccaaacgctgggcttctcaaatg

SEQ ID NO: 352319 - DNA, 33 bp, Homo sapien
ggaaatctttcaggaccaccttcaagtatcacc

SEQ ID NO: 352320 - DNA, 33 bp, Homo sapien
ggaaatctttcaggacgaccttcaagtatcacc

SEQ ID NO: 352321 - DNA, 33 bp, Homo sapien
gtgaaaaagtgggatacggacatgaaagtgttt

SEQ ID NO: 352322 - DNA, 33 bp, Homo sapien
gtgaaaaagtgggatatggacatgaaagtgttt

SEQ ID NO: 352323 - DNA, 33 bp, Homo sapien
ggtagaaacagaccacgaatgattccacaatta

SEQ ID NO: 352324 - DNA, 33 bp, Homo sapien
ggtagaaacagaccactaatgattccacaatta

SEQ ID NO: 352325 - DNA, 33 bp, Homo sapien
gtggtctgtttctacccgccagattgcataatc

SEQ ID NO: 352326 - DNA, 33 bp, Homo sapien
gtggtctgtttctacctgccagattgcataatc

SEQ ID NO: 352327 - DNA, 33 bp, Homo sapien
tactacctgtcattcagaaaatagaaactaaaa

SEQ ID NO: 352328 - DNA, 33 bp, Homo sapien
tactacctgtcattcataaaatagaaactaaaa

SEQ ID NO: 352329 - DNA, 33 bp, Homo sapien
gagtcaaaagtgaactgagttacgttgctgggg

SEQ ID NO: 352330 - DNA, 33 bp, Homo sapien
gagtcaaaagtgaacttagttacgttgctgggg

SEQ ID NO: 352331 - DNA, 33 bp, Homo sapien
ccaggcccagggaatacgctgcccaaagtgacg

SEQ ID NO: 352332 - DNA, 33 bp, Homo sapien
ccaggcccagggaatatgctgcccaaagtgacg

SEQ ID NO: 352333 - DNA, 33 bp, Homo sapien
aaattaaagactgcaacaatggcagagacaaat

SEQ ID NO: 352334 - DNA, 33 bp, Homo sapien
aaattaaagactgcaagaatggcagagacaaat

SEQ ID NO: 352335 - DNA, 33 bp, Homo sapien
agtggatgttttctgaatactttattggcccct

SEQ ID NO: 352336 - DNA, 33 bp, Homo sapien
agtggatgttttctgagtactttattggcccct

SEQ ID NO: 352337 - DNA, 33 bp, Homo sapien
ttaacataatgtcttcaaggttcttccacattg

SEQ ID NO: 352338 - DNA, 33 bp, Homo sapien
ttaacataatgtcttcgaggttcttccacattg

SEQ ID NO: 352339 - DNA, 33 bp, Homo sapien
tgttaagtgacatacacgaatcacaaaagggca

SEQ ID NO: 352340 - DNA, 33 bp, Homo sapien
tgttaagtgacatacatgaatcacaaaagggca

SEQ ID NO: 352341 - DNA, 33 bp, Homo sapien
attacttggaaaataaactcaactgcatataac

SEQ ID NO: 352342 - DNA, 33 bp, Homo sapien
attacttggaaaataagctcaactgcatataac

SEQ ID NO: 352343 - DNA, 33 bp, Homo sapien
tcagctaagaaagtgaaagaagtgtgatcgtga

SEQ ID NO: 352344 - DNA, 33 bp, Homo sapien
tcagctaagaaagtgagagaagtgtgatcgtga

SEQ ID NO: 352345 - DNA, 33 bp, Homo sapien
ttagagacaaatgctaccaaaggcagaaataca

SEQ ID NO: 352346 - DNA, 33 bp, Homo sapien
ttagagacaaatgctatcaaaggcagaaataca

SEQ ID NO: 352347 - DNA, 33 bp, Homo sapien
aacaggctaagttatcagaaaagaggcagaccc

SEQ ID NO: 352348 - DNA, 33 bp, Homo sapien
aacaggctaagttatccgaaaagaggcagaccc

SEQ ID NO: 352349 - DNA, 33 bp, Homo sapien
acatgagtgaggaaaaagtaaagtgttctaatg

SEQ ID NO: 352350 - DNA, 33 bp, Homo sapien
acatgagtgaggaaaaggtaaagtgttctaatg

SEQ ID NO: 352351 - DNA, 33 bp, Homo sapien
caggccagaaacgaaaatgtcacatggtgaacc

SEQ ID NO: 352352 - DNA, 33 bp, Homo sapien
caggccagaaacgaaagtgtcacatggtgaacc

SEQ ID NO: 352353 - DNA, 33 bp, Homo sapien
agcccaaatgaactgaaacaactcctctgacag

SEQ ID NO: 352354 - DNA, 33 bp, Homo sapien
agcccaaatgaactgagacaactcctctgacag

SEQ ID NO: 352355 - DNA, 33 bp, Homo sapien
tactaatctattctgcaattccataggcttgag

SEQ ID NO: 352356 - DNA, 33 bp, Homo sapien
tactaatctattctgcgattccataggcttgag

SEQ ID NO: 352357 - DNA, 33 bp, Homo sapien
ctgattttactcacacacgtggtatacgtaaat

SEQ ID NO: 352358 - DNA, 33 bp, Homo sapien
ctgattttactcacactcgtggtatacgtaaat

SEQ ID NO: 352359 - DNA, 33 bp, Homo sapien
ttaagctagtagtataaacatcagataaacaga

SEQ ID NO: 352360 - DNA, 33 bp, Homo sapien
ttaagctagtagtatagacatcagataaacaga

SEQ ID NO: 352361 - DNA, 33 bp, Homo sapien
gagggaagaggatacaaggcaagaagactgtgt

SEQ ID NO: 352362 - DNA, 33 bp, Homo sapien
gagggaagaggatacagggcaagaagactgtgt

SEQ ID NO: 352363 - DNA, 33 bp, Homo sapien
cagatagaaaattgtacctggagtaggttcaag

SEQ ID NO: 352364 - DNA, 33 bp, Homo sapien
cagatagaaaattgtatctggagtaggttcaag

SEQ ID NO: 352365 - DNA, 33 bp, Homo sapien
agtgagtgttctcatggatgtgtcctgtagcag

SEQ ID NO: 352366 - DNA, 33 bp, Homo sapien
agtgagtgttctcatgtatgtgtcctgtagcag

SEQ ID NO: 352367 - DNA, 33 bp, Homo sapien
ctgtcccatgcaccagaaatatgttgagaaaca

SEQ ID NO: 352368 - DNA, 33 bp, Homo sapien
ctgtcccatgcaccaggaatatgttgagaaaca

SEQ ID NO: 352369 - DNA, 33 bp, Homo sapien
ccccactcatttgtaaagacatccctattgtag

SEQ ID NO: 352370 - DNA, 33 bp, Homo sapien
ccccactcatttgtaatgacatccctattgtag

SEQ ID NO: 352371 - DNA, 33 bp, Homo sapien
agcctgcctgtccttactaaaatgcagtactgc

SEQ ID NO: 352372 - DNA, 33 bp, Homo sapien
agcctgcctgtccttagtaaaatgcagtactgc

SEQ ID NO: 352373 - DNA, 33 bp, Homo sapien
atattgtggagtttaaatatacatgaaatgaaa

SEQ ID NO: 352374 - DNA, 33 bp, Homo sapien
atattgtggagtttaagtatacatgaaatgaaa

SEQ ID NO: 352375 - DNA, 33 bp, Homo sapien
taatattcgttatctcaccaaagctatatttct

SEQ ID NO: 352376 - DNA, 33 bp, Homo sapien
taatattcgttatctcgccaaagctatatttct

SEQ ID NO: 352377 - DNA, 33 bp, Homo sapien
ggtcagtctatgagtgcacaggagtgtagacag

SEQ ID NO: 352378 - DNA, 33 bp, Homo sapien
ggtcagtctatgagtgtacaggagtgtagacag

SEQ ID NO: 352379 - DNA, 33 bp, Homo sapien
ggtttttcaccatcagcaaattaaactgtggaa

SEQ ID NO: 352380 - DNA, 33 bp, Homo sapien
ggtttttcaccatcaggaaattaaactgtggaa

SEQ ID NO: 352381 - DNA, 33 bp, Homo sapien
taaactgtggaacacaagctgctagaaccaaga

SEQ ID NO: 352382 - DNA, 33 bp, Homo sapien
taaactgtggaacacacgctgctagaaccaaga

SEQ ID NO: 352383 - DNA, 33 bp, Homo sapien
ctaagtcaggtgcaaacccctactctttctctc

SEQ ID NO: 352384 - DNA, 33 bp, Homo sapien
ctaagtcaggtgcaaatccctactctttctctc

SEQ ID NO: 352385 - DNA, 33 bp, Homo sapien
ctaggatagagtaaccagctcagcaagagtggt

SEQ ID NO: 352386 - DNA, 33 bp, Homo sapien
ctaggatagagtaaccggctcagcaagagtggt

SEQ ID NO: 352387 - DNA, 33 bp, Homo sapien
ttaggaccaaatgaaaccaatagcaggcattca

SEQ ID NO: 352388 - DNA, 33 bp, Homo sapien
ttaggaccaaatgaaatcaatagcaggcattca

SEQ ID NO: 352389 - DNA, 33 bp, Homo sapien
gcaaagcttctctatacctatcagggtcatcag

SEQ ID NO: 352390 - DNA, 33 bp, Homo sapien
gcaaagcttctctatagctatcagggtcatcag

SEQ ID NO: 352391 - DNA, 33 bp, Homo sapien
gaaagacacaaaaagcacatcagattggctaca

SEQ ID NO: 352392 - DNA, 33 bp, Homo sapien
gaaagacacaaaaagcgcatcagattggctaca

SEQ ID NO: 352393 - DNA, 33 bp, Homo sapien
tatggttctgtcaagacaaagggtaccttaggt

SEQ ID NO: 352394 - DNA, 33 bp, Homo sapien
tatggttctgtcaagataaagggtaccttaggt

SEQ ID NO: 352395 - DNA, 33 bp, Homo sapien
aaggagaacagtatggaaagatcagcaaatgta

SEQ ID NO: 352396 - DNA, 33 bp, Homo sapien
aaggagaacagtatgggaagatcagcaaatgta

SEQ ID NO: 352397 - DNA, 33 bp, Homo sapien
agtggattgttccccacattgatatcagagaga

SEQ ID NO: 352398 - DNA, 33 bp, Homo sapien
agtggattgttccccatattgatatcagagaga

SEQ ID NO: 352399 - DNA, 33 bp, Homo sapien
tgttaatagttacttcagaaatcatgccaaccg

SEQ ID NO: 352400 - DNA, 33 bp, Homo sapien
tgttaatagttacttccgaaatcatgccaaccg

SEQ ID NO: 352401 - DNA, 33 bp, Homo sapien
gcagtttagaatctaaagtgcaatgctgtcaca

SEQ ID NO: 352402 - DNA, 33 bp, Homo sapien
gcagtttagaatctaaggtgcaatgctgtcaca

SEQ ID NO: 352403 - DNA, 33 bp, Homo sapien
accaggaatgaacgcacgggcttctgcagaagg

SEQ ID NO: 352404 - DNA, 33 bp, Homo sapien
accaggaatgaacgcatgggcttctgcagaagg

SEQ ID NO: 352405 - DNA, 33 bp, Homo sapien
gggctatttatgggccaccagagattgaactgc

SEQ ID NO: 352406 - DNA, 33 bp, Homo sapien
gggctatttatgggcctccagagattgaactgc

SEQ ID NO: 352407 - DNA, 33 bp, Homo sapien
atcccaggagtgattacgttcttaccatctcat

SEQ ID NO: 352408 - DNA, 33 bp, Homo sapien
atcccaggagtgattatgttcttaccatctcat

SEQ ID NO: 352409 - DNA, 33 bp, Homo sapien
ctggtcagtcatagcacggtgttccctggcaac

SEQ ID NO: 352410 - DNA, 33 bp, Homo sapien
ctggtcagtcatagcatggtgttccctggcaac

SEQ ID NO: 352411 - DNA, 33 bp, Homo sapien
attggaaaagatatacaatcgatctgatacaat

SEQ ID NO: 352412 - DNA, 33 bp, Homo sapien
attggaaaagatatacgatcgatctgatacaat

SEQ ID NO: 352413 - DNA, 33 bp, Homo sapien
gctggtgggaaaaaaccctgggacagaatctgg

SEQ ID NO: 352414 - DNA, 33 bp, Homo sapien
gctggtgggaaaaaactctgggacagaatctgg

SEQ ID NO: 352415 - DNA, 33 bp, Homo sapien
cagctgtcagtctgcccatcttcatttatatcc

SEQ ID NO: 352416 - DNA, 33 bp, Homo sapien
cagctgtcagtctgcctatcttcatttatatcc

SEQ ID NO: 352417 - DNA, 33 bp, Homo sapien
acatatttatcagggacccatcaaagttcagct

SEQ ID NO: 352418 - DNA, 33 bp, Homo sapien
acatatttatcagggatccatcaaagttcagct

SEQ ID NO: 352419 - DNA, 33 bp, Homo sapien
tgaaaggtaggggaaaaaaatgaatgaccaaga

SEQ ID NO: 352420 - DNA, 33 bp, Homo sapien
tgaaaggtaggggaaagaaatgaatgaccaaga

SEQ ID NO: 352421 - DNA, 33 bp, Homo sapien
ttataggaattctacacagtacgtctgcatctg

SEQ ID NO: 352422 - DNA, 33 bp, Homo sapien
ttataggaattctacatagtacgtctgcatctg

SEQ ID NO: 352423 - DNA, 33 bp, Homo sapien
gaaacggcatctttcccatcgtacttcgttcct

SEQ ID NO: 352424 - DNA, 33 bp, Homo sapien
gaaacggcatctttcctatcgtacttcgttcct

SEQ ID NO: 352425 - DNA, 33 bp, Homo sapien
atcacacgtacatacacgtataatgtctgcttg

SEQ ID NO: 352426 - DNA, 33 bp, Homo sapien
atcacacgtacatacaggtataatgtctgcttg

SEQ ID NO: 352427 - DNA, 33 bp, Homo sapien
tgttactttcgcctagaacagaacgtcttttcc

SEQ ID NO: 352428 - DNA, 33 bp, Homo sapien
tgttactttcgcctagcacagaacgtcttttcc

SEQ ID NO: 352429 - DNA, 33 bp, Homo sapien
ttggtaatcctagaaaggttgtcatcccttccc

SEQ ID NO: 352430 - DNA, 33 bp, Homo sapien
ttggtaatcctagaaatgttgtcatcccttccc

SEQ ID NO: 352431 - DNA, 33 bp, Homo sapien
aaactttaaaaatggaccacctgctcagctaat

SEQ ID NO: 352432 - DNA, 33 bp, Homo sapien
aaactttaaaaatggatcacctgctcagctaat

SEQ ID NO: 352433 - DNA, 33 bp, Homo sapien
ttctggccctatcagaacaagtacacttggaac

SEQ ID NO: 352434 - DNA, 33 bp, Homo sapien
ttctggccctatcagatcaagtacacttggaac

SEQ ID NO: 352435 - DNA, 33 bp, Homo sapien
ccctagtgttccaaagccaattagaaccaatgt

SEQ ID NO: 352436 - DNA, 33 bp, Homo sapien
ccctagtgttccaaagtcaattagaaccaatgt

SEQ ID NO: 352437 - DNA, 33 bp, Homo sapien
ttatccttcacgtatgcaatgtgtataacccat

SEQ ID NO: 352438 - DNA, 33 bp, Homo sapien
ttatccttcacgtatgtaatgtgtataacccat

SEQ ID NO: 352439 - DNA, 33 bp, Homo sapien
cttgactgtataaaaacggactcacagacacgg

SEQ ID NO: 352440 - DNA, 33 bp, Homo sapien
cttgactgtataaaaatggactcacagacacgg

SEQ ID NO: 352441 - DNA, 33 bp, Homo sapien
aagggattttgagtccaagctcttaggaggctc

SEQ ID NO: 352442 - DNA, 33 bp, Homo sapien
aagggattttgagtccgagctcttaggaggctc

SEQ ID NO: 352443 - DNA, 33 bp, Homo sapien
aaacatggtaagaaacacatcaaggtgcaggtc

SEQ ID NO: 352444 - DNA, 33 bp, Homo sapien
aaacatggtaagaaacgcatcaaggtgcaggtc

SEQ ID NO: 352445 - DNA, 33 bp, Homo sapien
ggtagagtcagaactgcaggaagagaccctttg

SEQ ID NO: 352446 - DNA, 33 bp, Homo sapien
ggtagagtcagaactgtaggaagagaccctttg

SEQ ID NO: 352447 - DNA, 33 bp, Homo sapien
gacagtcatgaccccaatgaatcaatgtgagct

SEQ ID NO: 352448 - DNA, 33 bp, Homo sapien
gacagtcatgaccccagtgaatcaatgtgagct

SEQ ID NO: 352449 - DNA, 33 bp, Homo sapien
gggatccatcagtgaacgcataaacatcaaagg

SEQ ID NO: 352450 - DNA, 33 bp, Homo sapien
gggatccatcagtgaatgcataaacatcaaagg

SEQ ID NO: 352451 - DNA, 33 bp, Homo sapien
acagcccctcagaaaaaaatcgtgtgccatcgg

SEQ ID NO: 352452 - DNA, 33 bp, Homo sapien
acagcccctcagaaaagaatcgtgtgccatcgg

SEQ ID NO: 352453 - DNA, 33 bp, Homo sapien
tccttactgctaaatccaaaacacgtttttcct

SEQ ID NO: 352454 - DNA, 33 bp, Homo sapien
tccttactgctaaatctaaaacacgtttttcct

SEQ ID NO: 352455 - DNA, 33 bp, Homo sapien
actttgccaatcatcactctccatctcatcagc

SEQ ID NO: 352456 - DNA, 33 bp, Homo sapien
actttgccaatcatcattctccatctcatcagc

SEQ ID NO: 352457 - DNA, 33 bp, Homo sapien
gatgtgttcagccccacgtgccaggctaaatgc

SEQ ID NO: 352458 - DNA, 33 bp, Homo sapien
gatgtgttcagccccatgtgccaggctaaatgc

SEQ ID NO: 352459 - DNA, 33 bp, Homo sapien
aaatcatggaaatgaaaaagcatcttcctttgc

SEQ ID NO: 352460 - DNA, 33 bp, Homo sapien
aaatcatggaaatgaacaagcatcttcctttgc

SEQ ID NO: 352461 - DNA, 33 bp, Homo sapien
ttctgccaccagcttcccagccacttggtttgt

SEQ ID NO: 352462 - DNA, 33 bp, Homo sapien
ttctgccaccagcttctcagccacttggtttgt

SEQ ID NO: 352463 - DNA, 33 bp, Homo sapien
aactcctgaacacagaacttagaacacagcagg

SEQ ID NO: 352464 - DNA, 33 bp, Homo sapien
aactcctgaacacagagcttagaacacagcagg

SEQ ID NO: 352465 - DNA, 33 bp, Homo sapien
tgacaaaatgcctctacgacagggcaggactgt

SEQ ID NO: 352466 - DNA, 33 bp, Homo sapien
tgacaaaatgcctctatgacagggcaggactgt

SEQ ID NO: 352467 - DNA, 33 bp, Homo sapien
ctgacaccaacactgacgagcagccacagagat

SEQ ID NO: 352468 - DNA, 33 bp, Homo sapien
ctgacaccaacactgatgagcagccacagagat

SEQ ID NO: 352469 - DNA, 33 bp, Homo sapien
gcattcttacagatgaactcccttatgtgctta

SEQ ID NO: 352470 - DNA, 33 bp, Homo sapien
gcattcttacagatgagctcccttatgtgctta

SEQ ID NO: 352471 - DNA, 33 bp, Homo sapien
actagaacgcccgagacagtgtgaaatttgtta

SEQ ID NO: 352472 - DNA, 33 bp, Homo sapien
actagaacgcccgagatagtgtgaaatttgtta

SEQ ID NO: 352473 - DNA, 33 bp, Homo sapien
catctctatcctcaagacctgcaaggagcaggc

SEQ ID NO: 352474 - DNA, 33 bp, Homo sapien
catctctatcctcaagccctgcaaggagcaggc

SEQ ID NO: 352475 - DNA, 33 bp, Homo sapien
atctggggtctgcacacgcctgtggaggggaga

SEQ ID NO: 352476 - DNA, 33 bp, Homo sapien
atctggggtctgcacatgcctgtggaggggaga

SEQ ID NO: 352477 - DNA, 33 bp, Homo sapien
accgtcaccttccactgaatgtaggactgatgg

SEQ ID NO: 352478 - DNA, 33 bp, Homo sapien
accgtcaccttccacttaatgtaggactgatgg

SEQ ID NO: 352479 - DNA, 33 bp, Homo sapien
caggggagagtggagcaatgatgcgcctgggga

SEQ ID NO: 352480 - DNA, 33 bp, Homo sapien
caggggagagtggagcgatgatgcgcctgggga

SEQ ID NO: 352481 - DNA, 33 bp, Homo sapien
ctccagctggcagaacaagggctgtgcactctg

SEQ ID NO: 352482 - DNA, 33 bp, Homo sapien
ctccagctggcagaacgagggctgtgcactctg

SEQ ID NO: 352483 - DNA, 33 bp, Homo sapien
gaccctgggccgagcaacctctggtcatggccg

SEQ ID NO: 352484 - DNA, 33 bp, Homo sapien
gaccctgggccgagcatcctctggtcatggccg

SEQ ID NO: 352485 - DNA, 33 bp, Homo sapien
tccctgaaaacaggggaatggattcataaactc

SEQ ID NO: 352486 - DNA, 33 bp, Homo sapien
tccctgaaaacagggggatggattcataaactc

SEQ ID NO: 352487 - DNA, 33 bp, Homo sapien
tggtcacaaaaggaagaaaacacaagaggccga

SEQ ID NO: 352488 - DNA, 33 bp, Homo sapien
tggtcacaaaaggaaggaaacacaagaggccga

SEQ ID NO: 352489 - DNA, 33 bp, Homo sapien
ttaggcccttgctctaaaatgtttactgaatct

SEQ ID NO: 352490 - DNA, 33 bp, Homo sapien
ttaggcccttgctctagaatgtttactgaatct

SEQ ID NO: 352491 - DNA, 33 bp, Homo sapien
attttatttcattttacggatggactatcgatt

SEQ ID NO: 352492 - DNA, 33 bp, Homo sapien
attttatttcattttatggatggactatcgatt

SEQ ID NO: 352493 - DNA, 33 bp, Homo sapien
gcatcttttcatataccagatacatcctttttg

SEQ ID NO: 352494 - DNA, 33 bp, Homo sapien
gcatcttttcatatacgagatacatcctttttg

SEQ ID NO: 352495 - DNA, 33 bp, Homo sapien
gagttgagaacctagaaattgggaggctgtagc

SEQ ID NO: 352496 - DNA, 33 bp, Homo sapien
gagttgagaacctagatattgggaggctgtagc

SEQ ID NO: 352497 - DNA, 33 bp, Homo sapien
gctccactaagcagcacgtagagaaaggtgaga

SEQ ID NO: 352498 - DNA, 33 bp, Homo sapien
gctccactaagcagcatgtagagaaaggtgaga

SEQ ID NO: 352499 - DNA, 33 bp, Homo sapien
gatgccgaggccatacacaagccaatgaaatca

SEQ ID NO: 352500 - DNA, 33 bp, Homo sapien
gatgccgaggccatacgcaagccaatgaaatca

SEQ ID NO: 352501 - DNA, 33 bp, Homo sapien
gatcagtgatttgcaaccgtggctatacattgt

SEQ ID NO: 352502 - DNA, 33 bp, Homo sapien
gatcagtgatttgcaatcgtggctatacattgt

SEQ ID NO: 352503 - DNA, 33 bp, Homo sapien
ctaagagatccctcaactccaatgtgaaaattt

SEQ ID NO: 352504 - DNA, 33 bp, Homo sapien
ctaagagatccctcaattccaatgtgaaaattt

SEQ ID NO: 352505 - DNA, 33 bp, Homo sapien
agaagaatgtggagtaacgaacagaagttgtgg

SEQ ID NO: 352506 - DNA, 33 bp, Homo sapien
agaagaatgtggagtagcgaacagaagttgtgg

SEQ ID NO: 352507 - DNA, 33 bp, Homo sapien
tttcactatattcccccctctgtacttcagttc

SEQ ID NO: 352508 - DNA, 33 bp, Homo sapien
tttcactatattcccctctctgtacttcagttc

SEQ ID NO: 352509 - DNA, 33 bp, Homo sapien
tatgatttactgcaaagtcaaggtcaggaagaa

SEQ ID NO: 352510 - DNA, 33 bp, Homo sapien
tatgatttactgcaaattcaaggtcaggaagaa

SEQ ID NO: 352511 - DNA, 33 bp, Homo sapien
tgatgttttccaaatacgtagctaattgaatat

SEQ ID NO: 352512 - DNA, 33 bp, Homo sapien
tgatgttttccaaatatgtagctaattgaatat

SEQ ID NO: 352513 - DNA, 33 bp, Homo sapien
cagtactctgttaacaagtaagcttgaggttag

SEQ ID NO: 352514 - DNA, 33 bp, Homo sapien
cagtactctgttaacatgtaagcttgaggttag

SEQ ID NO: 352515 - DNA, 33 bp, Homo sapien
gggggaaaaatgtaaaagagcctgtgttcagaa

SEQ ID NO: 352516 - DNA, 33 bp, Homo sapien
gggggaaaaatgtaaaggagcctgtgttcagaa

SEQ ID NO: 352517 - DNA, 33 bp, Homo sapien
cagctgtgtacctcaacgttttttgttgctttt

SEQ ID NO: 352518 - DNA, 33 bp, Homo sapien
cagctgtgtacctcaatgttttttgttgctttt

SEQ ID NO: 352519 - DNA, 33 bp, Homo sapien
cccaacacctgacatacatcaagtactcaattt

SEQ ID NO: 352520 - DNA, 33 bp, Homo sapien
cccaacacctgacatatatcaagtactcaattt

SEQ ID NO: 352521 - DNA, 33 bp, Homo sapien
accaccttacgctgcacagaggaaacccaacct

SEQ ID NO: 352522 - DNA, 33 bp, Homo sapien
accaccttacgctgcatagaggaaacccaacct

SEQ ID NO: 352523 - DNA, 33 bp, Homo sapien
cgtcagtttgtttccacacaccttcagttaccg

SEQ ID NO: 352524 - DNA, 33 bp, Homo sapien
cgtcagtttgtttccatacaccttcagttaccg

SEQ ID NO: 352525 - DNA, 33 bp, Homo sapien
tgatgacctgagcccagctgttcacttttcaac

SEQ ID NO: 352526 - DNA, 33 bp, Homo sapien
tgatgacctgagcccatctgttcacttttcaac

SEQ ID NO: 352527 - DNA, 33 bp, Homo sapien
acaatactgcgttgtacacttaaaaattaacca

SEQ ID NO: 352528 - DNA, 33 bp, Homo sapien
acaatactgcgttgtatacttaaaaattaacca

SEQ ID NO: 352529 - DNA, 33 bp, Homo sapien
agtattgttaatcataggctctatactgtacgg

SEQ ID NO: 352530 - DNA, 33 bp, Homo sapien
agtattgttaatcatatgctctatactgtacgg

SEQ ID NO: 352531 - DNA, 33 bp, Homo sapien
ctgagtgaccctagacgattcagatctctcacc

SEQ ID NO: 352532 - DNA, 33 bp, Homo sapien
ctgagtgaccctagactattcagatctctcacc

SEQ ID NO: 352533 - DNA, 33 bp, Homo sapien
agtctaacaatctgataataaatgctatttcta

SEQ ID NO: 352534 - DNA, 33 bp, Homo sapien
agtctaacaatctgatgataaatgctatttcta

SEQ ID NO: 352535 - DNA, 33 bp, Homo sapien
atggaatgttcacattaaaagtgccatttacat

SEQ ID NO: 352536 - DNA, 33 bp, Homo sapien
atggaatgttcacatttaaagtgccatttacat

SEQ ID NO: 352537 - DNA, 33 bp, Homo sapien
tccagggagaatctgacgaaaacacgtgtttag

SEQ ID NO: 352538 - DNA, 33 bp, Homo sapien
tccagggagaatctgatgaaaacacgtgtttag

SEQ ID NO: 352539 - DNA, 33 bp, Homo sapien
aatgctttctgataacagcgttcagtgaaaaga

SEQ ID NO: 352540 - DNA, 33 bp, Homo sapien
aatgctttctgataacggcgttcagtgaaaaga

SEQ ID NO: 352541 - DNA, 33 bp, Homo sapien
gtaagggaaaaggtaccatgctcagttaatctt

SEQ ID NO: 352542 - DNA, 33 bp, Homo sapien
gtaagggaaaaggtacgatgctcagttaatctt

SEQ ID NO: 352543 - DNA, 33 bp, Homo sapien
ttgccattttataaaaaaacctcagcagaaaga

SEQ ID NO: 352544 - DNA, 33 bp, Homo sapien
ttgccattttataaaagaacctcagcagaaaga

SEQ ID NO: 352545 - DNA, 33 bp, Homo sapien
gttgagaaacagatgcaaggctactttatacag

SEQ ID NO: 352546 - DNA, 33 bp, Homo sapien
gttgagaaacagatgcgaggctactttatacag

SEQ ID NO: 352547 - DNA, 33 bp, Homo sapien
aagaaccttcaaccagaagtcgctcacattgta

SEQ ID NO: 352548 - DNA, 33 bp, Homo sapien
aagaaccttcaaccagcagtcgctcacattgta

SEQ ID NO: 352549 - DNA, 33 bp, Homo sapien
ctgtcagctgtttagacgatgcccacccactcc

SEQ ID NO: 352550 - DNA, 33 bp, Homo sapien
ctgtcagctgtttagatgatgcccacccactcc

SEQ ID NO: 352551 - DNA, 33 bp, Homo sapien
ttcactgttcaaaggaaactgaaactgcctcca

SEQ ID NO: 352552 - DNA, 33 bp, Homo sapien
ttcactgttcaaaggatactgaaactgcctcca

SEQ ID NO: 352553 - DNA, 33 bp, Homo sapien
tgattgtgttacaggcactgagtaattcactct

SEQ ID NO: 352554 - DNA, 33 bp, Homo sapien
tgattgtgttacaggcgctgagtaattcactct

SEQ ID NO: 352555 - DNA, 33 bp, Homo sapien
tcagcaagaaggataaatgcgctgtccgaagtg

SEQ ID NO: 352556 - DNA, 33 bp, Homo sapien
tcagcaagaaggataactgcgctgtccgaagtg

SEQ ID NO: 352557 - DNA, 33 bp, Homo sapien
aaaaagagagaaataacgaagtattccaggaag

SEQ ID NO: 352558 - DNA, 33 bp, Homo sapien
aaaaagagagaaataatgaagtattccaggaag

SEQ ID NO: 352559 - DNA, 33 bp, Homo sapien
gctgccacccatgtcaatctcaaaacctgcagc

SEQ ID NO: 352560 - DNA, 33 bp, Homo sapien
gctgccacccatgtcagtctcaaaacctgcagc

SEQ ID NO: 352561 - DNA, 33 bp, Homo sapien
cccccttctgctctctaaaactggaagatgttg

SEQ ID NO: 352562 - DNA, 33 bp, Homo sapien
cccccttctgctctctgaaactggaagatgttg

SEQ ID NO: 352563 - DNA, 33 bp, Homo sapien
agtgcatttcttgggaacatcgcttccttgagc

SEQ ID NO: 352564 - DNA, 33 bp, Homo sapien
agtgcatttcttgggagcatcgcttccttgagc

SEQ ID NO: 352565 - DNA, 33 bp, Homo sapien
agggtattctggatgaaatgctcttattacaag

SEQ ID NO: 352566 - DNA, 33 bp, Homo sapien
agggtattctggatgagatgctcttattacaag

SEQ ID NO: 352567 - DNA, 33 bp, Homo sapien
catgatcatgctcttaaggagtctttacaaacc

SEQ ID NO: 352568 - DNA, 33 bp, Homo sapien
catgatcatgctcttagggagtctttacaaacc

SEQ ID NO: 352569 - DNA, 33 bp, Homo sapien
ctgacctggcttcagccaaaagaaagcagcaga

SEQ ID NO: 352570 - DNA, 33 bp, Homo sapien
ctgacctggcttcagctaaaagaaagcagcaga

SEQ ID NO: 352571 - DNA, 33 bp, Homo sapien
tggtcacccatgatgtaaagtctggtttcttta

SEQ ID NO: 352572 - DNA, 33 bp, Homo sapien
tggtcacccatgatgtgaagtctggtttcttta

SEQ ID NO: 352573 - DNA, 33 bp, Homo sapien
tgaccttgacttggtccaaggtattcactaatg

SEQ ID NO: 352574 - DNA, 33 bp, Homo sapien
tgaccttgacttggtcgaaggtattcactaatg

SEQ ID NO: 352575 - DNA, 33 bp, Homo sapien
cagtggccttcatttaaaaccttttctttccat

SEQ ID NO: 352576 - DNA, 33 bp, Homo sapien
cagtggccttcatttagaaccttttctttccat

SEQ ID NO: 352577 - DNA, 33 bp, Homo sapien
aggagcctgcggacaaatgctccctgtccagga

SEQ ID NO: 352578 - DNA, 33 bp, Homo sapien
aggagcctgcggacaagtgctccctgtccagga

SEQ ID NO: 352579 - DNA, 33 bp, Homo sapien
tctccctattgagcctcagcttcatctataaag

SEQ ID NO: 352580 - DNA, 33 bp, Homo sapien
tctccctattgagccttagcttcatctataaag

SEQ ID NO: 352581 - DNA, 33 bp, Homo sapien
aaggagctaaaatgacaataccttggctgatgt

SEQ ID NO: 352582 - DNA, 33 bp, Homo sapien
aaggagctaaaatgacgataccttggctgatgt

SEQ ID NO: 352583 - DNA, 33 bp, Homo sapien
ggagaaagttgctcaaataattggatattgctt

SEQ ID NO: 352584 - DNA, 33 bp, Homo sapien
ggagaaagttgctcaagtaattggatattgctt

SEQ ID NO: 352585 - DNA, 33 bp, Homo sapien
ctgaggactggtagcacagtgtatcctttatat

SEQ ID NO: 352586 - DNA, 33 bp, Homo sapien
ctgaggactggtagcatagtgtatcctttatat

SEQ ID NO: 352587 - DNA, 33 bp, Homo sapien
gaccctattattttcacctggttgatggaaaaa

SEQ ID NO: 352588 - DNA, 33 bp, Homo sapien
gaccctattattttcagctggttgatggaaaaa

SEQ ID NO: 352589 - DNA, 33 bp, Homo sapien
tgtatccattaagtcactcaacatgtactgaat

SEQ ID NO: 352590 - DNA, 33 bp, Homo sapien
tgtatccattaagtcattcaacatgtactgaat

SEQ ID NO: 352591 - DNA, 33 bp, Homo sapien
gtgtattttgcctatactaatcatgtactgggt

SEQ ID NO: 352592 - DNA, 33 bp, Homo sapien
gtgtattttgcctatattaatcatgtactgggt

SEQ ID NO: 352593 - DNA, 33 bp, Homo sapien
aaaatctggaaaattcacattaaaatccagata

SEQ ID NO: 352594 - DNA, 33 bp, Homo sapien
aaaatctggaaaattcgcattaaaatccagata

SEQ ID NO: 352595 - DNA, 33 bp, Homo sapien
atgacatatctgggaacttcaatccaaccatca

SEQ ID NO: 352596 - DNA, 33 bp, Homo sapien
atgacatatctgggaatttcaatccaaccatca

SEQ ID NO: 352597 - DNA, 33 bp, Homo sapien
catgggggaagcgggcaagggatatgacttcta

SEQ ID NO: 352598 - DNA, 33 bp, Homo sapien
catgggggaagcgggcgagggatatgacttcta

SEQ ID NO: 352599 - DNA, 33 bp, Homo sapien
tggcaatgatgccctacctgtcccatctctcct

SEQ ID NO: 352600 - DNA, 33 bp, Homo sapien
tggcaatgatgccctatctgtcccatctctcct

SEQ ID NO: 352601 - DNA, 33 bp, Homo sapien
gccatatatgttccccacgtggctgggaattca

SEQ ID NO: 352602 - DNA, 33 bp, Homo sapien
gccatatatgttccccgcgtggctgggaattca

SEQ ID NO: 352603 - DNA, 33 bp, Homo sapien
tcttctggacgggaaactcaagcaggaaactta

SEQ ID NO: 352604 - DNA, 33 bp, Homo sapien
tcttctggacgggaaattcaagcaggaaactta

SEQ ID NO: 352605 - DNA, 33 bp, Homo sapien
gtttccttgccttggaatcacaactttttgaat

SEQ ID NO: 352606 - DNA, 33 bp, Homo sapien
gtttccttgccttggagtcacaactttttgaat

SEQ ID NO: 352607 - DNA, 33 bp, Homo sapien
gagtggggaatgtctaaggaatgctgttttcct

SEQ ID NO: 352608 - DNA, 33 bp, Homo sapien
gagtggggaatgtctacggaatgctgttttcct

SEQ ID NO: 352609 - DNA, 33 bp, Homo sapien
atttccccatttttagcaggtgacaaatgcatc

SEQ ID NO: 352610 - DNA, 33 bp, Homo sapien
atttccccatttttagtaggtgacaaatgcatc

SEQ ID NO: 352611 - DNA, 33 bp, Homo sapien
acaaatgcatcagccaaaagttaaatgtcctag

SEQ ID NO: 352612 - DNA, 33 bp, Homo sapien
acaaatgcatcagccagaagttaaatgtcctag

SEQ ID NO: 352613 - DNA, 33 bp, Homo sapien
gtagatcactggtttcaatactgagtactgtag

SEQ ID NO: 352614 - DNA, 33 bp, Homo sapien
gtagatcactggtttcgatactgagtactgtag

SEQ ID NO: 352615 - DNA, 33 bp, Homo sapien
cttggacttgtgtttacggtaagataccctgaa

SEQ ID NO: 352616 - DNA, 33 bp, Homo sapien
cttggacttgtgtttatggtaagataccctgaa

SEQ ID NO: 352617 - DNA, 33 bp, Homo sapien
gttttcttcatgacacaaatgaggaaactgagg

SEQ ID NO: 352618 - DNA, 33 bp, Homo sapien
gttttcttcatgacacgaatgaggaaactgagg

SEQ ID NO: 352619 - DNA, 33 bp, Homo sapien
attgacacacaggttacggactcagacagatgg

SEQ ID NO: 352620 - DNA, 33 bp, Homo sapien
attgacacacaggttatggactcagacagatgg

SEQ ID NO: 352621 - DNA, 33 bp, Homo sapien
gacattcattgccaaaaattccattgggtagga

SEQ ID NO: 352622 - DNA, 33 bp, Homo sapien
gacattcattgccaaatattccattgggtagga

SEQ ID NO: 352623 - DNA, 33 bp, Homo sapien
caggaaggcattgactaaacagaaacccattcg

SEQ ID NO: 352624 - DNA, 33 bp, Homo sapien
caggaaggcattgactgaacagaaacccattcg

SEQ ID NO: 352625 - DNA, 33 bp, Homo sapien
catattggcttcagcccacagtgccaggtgctg

SEQ ID NO: 352626 - DNA, 33 bp, Homo sapien
catattggcttcagcctacagtgccaggtgctg

SEQ ID NO: 352627 - DNA, 33 bp, Homo sapien
tatttgctgtggaagacaatgtgcttgacccag

SEQ ID NO: 352628 - DNA, 33 bp, Homo sapien
tatttgctgtggaagagaatgtgcttgacccag

SEQ ID NO: 352629 - DNA, 33 bp, Homo sapien
tccacactcttggtcaaatttcttcacctctca

SEQ ID NO: 352630 - DNA, 33 bp, Homo sapien
tccacactcttggtcagatttcttcacctctca

SEQ ID NO: 352631 - DNA, 33 bp, Homo sapien
gtcctaggggcagctcaaaggtaggcaggttcc

SEQ ID NO: 352632 - DNA, 33 bp, Homo sapien
gtcctaggggcagctcgaaggtaggcaggttcc

SEQ ID NO: 352633 - DNA, 33 bp, Homo sapien
actggcttgaagtggcaaactcctccttattgg

SEQ ID NO: 352634 - DNA, 33 bp, Homo sapien
actggcttgaagtggccaactcctccttattgg

SEQ ID NO: 352635 - DNA, 33 bp, Homo sapien
catcagattgcacagtcaagggttaatttctat

SEQ ID NO: 352636 - DNA, 33 bp, Homo sapien
catcagattgcacagttaagggttaatttctat

SEQ ID NO: 352637 - DNA, 33 bp, Homo sapien
atgaacttctaagcacaaggacataaataccaa

SEQ ID NO: 352638 - DNA, 33 bp, Homo sapien
atgaacttctaagcacgaggacataaataccaa

SEQ ID NO: 352639 - DNA, 33 bp, Homo sapien
taaaagtgtaactggacactctagaatataaaa

SEQ ID NO: 352640 - DNA, 33 bp, Homo sapien
taaaagtgtaactggatactctagaatataaaa

SEQ ID NO: 352641 - DNA, 33 bp, Homo sapien
gagacagaaggtagataagcgattgcccggggc

SEQ ID NO: 352642 - DNA, 33 bp, Homo sapien
gagacagaaggtagatcagcgattgcccggggc

SEQ ID NO: 352643 - DNA, 33 bp, Homo sapien
ataatacaggtaaaaaatgtttcaagagactta

SEQ ID NO: 352644 - DNA, 33 bp, Homo sapien
ataatacaggtaaaaattgtttcaagagactta

SEQ ID NO: 352645 - DNA, 33 bp, Homo sapien
ctgtttgtctaagtcaatagctacaaagctgag

SEQ ID NO: 352646 - DNA, 33 bp, Homo sapien
ctgtttgtctaagtcagtagctacaaagctgag

SEQ ID NO: 352647 - DNA, 33 bp, Homo sapien
atttactcacatgctaaaagtgcaaaccacatt

SEQ ID NO: 352648 - DNA, 33 bp, Homo sapien
atttactcacatgctagaagtgcaaaccacatt

SEQ ID NO: 352649 - DNA, 33 bp, Homo sapien
acaaccaaatgaaaaacggtctaggacatgaat

SEQ ID NO: 352650 - DNA, 33 bp, Homo sapien
acaaccaaatgaaaaatggtctaggacatgaat

SEQ ID NO: 352651 - DNA, 33 bp, Homo sapien
agacttttacacgttgcatttcatgtcattgta

SEQ ID NO: 352652 - DNA, 33 bp, Homo sapien
agacttttacacgttgtatttcatgtcattgta

SEQ ID NO: 352653 - DNA, 33 bp, Homo sapien
gaattttgaaacctctcacctaaatgatagctg

SEQ ID NO: 352654 - DNA, 33 bp, Homo sapien
gaattttgaaacctcttacctaaatgatagctg

SEQ ID NO: 352655 - DNA, 33 bp, Homo sapien
tgtgtgtggctgagagaagaatgactcacaaac

SEQ ID NO: 352656 - DNA, 33 bp, Homo sapien
tgtgtgtggctgagaggagaatgactcacaaac

SEQ ID NO: 352657 - DNA, 33 bp, Homo sapien
atgctgtcggtactcaataagtagactatgtga

SEQ ID NO: 352658 - DNA, 33 bp, Homo sapien
atgctgtcggtactcagtaagtagactatgtga

SEQ ID NO: 352659 - DNA, 33 bp, Homo sapien
tttcaacttttgtggaccgtagaattggtagag

SEQ ID NO: 352660 - DNA, 33 bp, Homo sapien
tttcaacttttgtggatcgtagaattggtagag

SEQ ID NO: 352661 - DNA, 33 bp, Homo sapien
acttaacattaaaagaccgaatgtgatcactaa

SEQ ID NO: 352662 - DNA, 33 bp, Homo sapien
acttaacattaaaagatcgaatgtgatcactaa

SEQ ID NO: 352663 - DNA, 33 bp, Homo sapien
cacctttttcttcccaaatcatgttaagcagga

SEQ ID NO: 352664 - DNA, 33 bp, Homo sapien
cacctttttcttcccacatcatgttaagcagga

SEQ ID NO: 352665 - DNA, 33 bp, Homo sapien
ccacaaaaaagcttgacacccggtgatgctggc

SEQ ID NO: 352666 - DNA, 33 bp, Homo sapien
ccacaaaaaagcttgatacccggtgatgctggc

SEQ ID NO: 352667 - DNA, 33 bp, Homo sapien
gttttggatactttttccagttgattctcttat

SEQ ID NO: 352668 - DNA, 33 bp, Homo sapien
gttttggatacttttttcagttgattctcttat

SEQ ID NO: 352669 - DNA, 33 bp, Homo sapien
cagaccatagccatacagggagggccaacagac

SEQ ID NO: 352670 - DNA, 33 bp, Homo sapien
cagaccatagccatacggggagggccaacagac

SEQ ID NO: 352671 - DNA, 33 bp, Homo sapien
cagtggtcagggaacccaactatgacaacctaa

SEQ ID NO: 352672 - DNA, 33 bp, Homo sapien
cagtggtcagggaacctaactatgacaacctaa

SEQ ID NO: 352673 - DNA, 33 bp, Homo sapien
tgttacaatagaggaacggtaaaaagatggaat

SEQ ID NO: 352674 - DNA, 33 bp, Homo sapien
tgttacaatagaggaatggtaaaaagatggaat

SEQ ID NO: 352675 - DNA, 33 bp, Homo sapien
agcgctcatcacgaaaatgtggaattggggtga

SEQ ID NO: 352676 - DNA, 33 bp, Homo sapien
agcgctcatcacgaaagtgtggaattggggtga

SEQ ID NO: 352677 - DNA, 33 bp, Homo sapien
ttggggaaggtgaagaagtcaaatgagttaatg

SEQ ID NO: 352678 - DNA, 33 bp, Homo sapien
ttggggaaggtgaagaggtcaaatgagttaatg

SEQ ID NO: 352679 - DNA, 33 bp, Homo sapien
tgtcccagttttaaaacagaaagtctgtatcat

SEQ ID NO: 352680 - DNA, 33 bp, Homo sapien
tgtcccagttttaaaatagaaagtctgtatcat

SEQ ID NO: 352681 - DNA, 33 bp, Homo sapien
agtctctggccaacaaccagaaaggaactgagg

SEQ ID NO: 352682 - DNA, 33 bp, Homo sapien
agtctctggccaacaatcagaaaggaactgagg

SEQ ID NO: 352683 - DNA, 33 bp, Homo sapien
ttcttatggctcacaacttagcaccaaaagcca

SEQ ID NO: 352684 - DNA, 33 bp, Homo sapien
ttcttatggctcacaagttagcaccaaaagcca

SEQ ID NO: 352685 - DNA, 33 bp, Homo sapien
tttccaggaatttcaaactcctagaaaccagag

SEQ ID NO: 352686 - DNA, 33 bp, Homo sapien
tttccaggaatttcaagctcctagaaaccagag

SEQ ID NO: 352687 - DNA, 33 bp, Homo sapien
aaccagaagggaaaggaacttttagtcttgcca

SEQ ID NO: 352688 - DNA, 33 bp, Homo sapien
aaccagaagggaaaggcacttttagtcttgcca

SEQ ID NO: 352689 - DNA, 33 bp, Homo sapien
tggaaatttatgtgatcaggtgccctttgtagg

SEQ ID NO: 352690 - DNA, 33 bp, Homo sapien
tggaaatttatgtgatgaggtgccctttgtagg

SEQ ID NO: 352691 - DNA, 33 bp, Homo sapien
ctaatatgtgtcttggaaggccgtgaaagagtc

SEQ ID NO: 352692 - DNA, 33 bp, Homo sapien
ctaatatgtgtcttggcaggccgtgaaagagtc

SEQ ID NO: 352693 - DNA, 33 bp, Homo sapien
gactggttttcatctacgattcctggctcataa

SEQ ID NO: 352694 - DNA, 33 bp, Homo sapien
gactggttttcatctatgattcctggctcataa

SEQ ID NO: 352695 - DNA, 33 bp, Homo sapien
tggccagtcccatcacaaggctatctaagggct

SEQ ID NO: 352696 - DNA, 33 bp, Homo sapien
tggccagtcccatcacgaggctatctaagggct

SEQ ID NO: 352697 - DNA, 33 bp, Homo sapien
agttgccaaacaaatacactagcaaacaagcaa

SEQ ID NO: 352698 - DNA, 33 bp, Homo sapien
agttgccaaacaaatatactagcaaacaagcaa

SEQ ID NO: 352699 - DNA, 33 bp, Homo sapien
gagctgctacaacataaaggcatacctcagaga

SEQ ID NO: 352700 - DNA, 33 bp, Homo sapien
gagctgctacaacatacaggcatacctcagaga

SEQ ID NO: 352701 - DNA, 33 bp, Homo sapien
ttatttcgtacttctgaagacatttaataaata

SEQ ID NO: 352702 - DNA, 33 bp, Homo sapien
ttatttcgtacttctgcagacatttaataaata

SEQ ID NO: 352703 - DNA, 33 bp, Homo sapien
atggtagaacttcttccgaaattggagtcaatc

SEQ ID NO: 352704 - DNA, 33 bp, Homo sapien
atggtagaacttcttctgaaattggagtcaatc

SEQ ID NO: 352705 - DNA, 33 bp, Homo sapien
taattgcagatgtcacagatataacaagaaaac

SEQ ID NO: 352706 - DNA, 33 bp, Homo sapien
taattgcagatgtcacggatataacaagaaaac

SEQ ID NO: 352707 - DNA, 33 bp, Homo sapien
tggggtttcccttgaccgtatgatgactgacac

SEQ ID NO: 352708 - DNA, 33 bp, Homo sapien
tggggtttcccttgactgtatgatgactgacac

SEQ ID NO: 352709 - DNA, 33 bp, Homo sapien
attggcaacatttgacaggtatcagatggttat

SEQ ID NO: 352710 - DNA, 33 bp, Homo sapien
attggcaacatttgactggtatcagatggttat

SEQ ID NO: 352711 - DNA, 33 bp, Homo sapien
tcatttaatcttcaaacgatgacaattttctct

SEQ ID NO: 352712 - DNA, 33 bp, Homo sapien
tcatttaatcttcaaatgatgacaattttctct

SEQ ID NO: 352713 - DNA, 33 bp, Homo sapien
atcaggataagaaccactgatgtgcgatcatga

SEQ ID NO: 352714 - DNA, 33 bp, Homo sapien
atcaggataagaaccagtgatgtgcgatcatga

SEQ ID NO: 352715 - DNA, 33 bp, Homo sapien
aaagagaataatttgtaaagcctgtttcattgt

SEQ ID NO: 352716 - DNA, 33 bp, Homo sapien
aaagagaataatttgtgaagcctgtttcattgt

SEQ ID NO: 352717 - DNA, 33 bp, Homo sapien
caattctcagaagagcaaagcttagcaaaggac

SEQ ID NO: 352718 - DNA, 33 bp, Homo sapien
caattctcagaagagcgaagcttagcaaaggac

SEQ ID NO: 352719 - DNA, 33 bp, Homo sapien
gttggatctgcccaaaccacccacagaggacac

SEQ ID NO: 352720 - DNA, 33 bp, Homo sapien
gttggatctgcccaaatcacccacagaggacac

SEQ ID NO: 352721 - DNA, 33 bp, Homo sapien
acatcacaggcactcaatgaggaatgaacagat

SEQ ID NO: 352722 - DNA, 33 bp, Homo sapien
acatcacaggcactcagtgaggaatgaacagat

SEQ ID NO: 352723 - DNA, 33 bp, Homo sapien
tgtttacctgtatctacaagacttggaaaccct

SEQ ID NO: 352724 - DNA, 33 bp, Homo sapien
tgtttacctgtatctataagacttggaaaccct

SEQ ID NO: 352725 - DNA, 33 bp, Homo sapien
gagtaggaaggcaacacgagtcattcagcttct

SEQ ID NO: 352726 - DNA, 33 bp, Homo sapien
gagtaggaaggcaacatgagtcattcagcttct

SEQ ID NO: 352727 - DNA, 33 bp, Homo sapien
ctgagatcatactggtaacaactgtcacaaaat

SEQ ID NO: 352728 - DNA, 33 bp, Homo sapien
ctgagatcatactggttacaactgtcacaaaat

SEQ ID NO: 352729 - DNA, 33 bp, Homo sapien
aaatgaccaatttgaccgctgggttaaataaat

SEQ ID NO: 352730 - DNA, 33 bp, Homo sapien
aaatgaccaatttgactgctgggttaaataaat

SEQ ID NO: 352731 - DNA, 33 bp, Homo sapien
tagttgatggggcatcacccggataagctcctc

SEQ ID NO: 352732 - DNA, 33 bp, Homo sapien
tagttgatggggcatcgcccggataagctcctc

SEQ ID NO: 352733 - DNA, 33 bp, Homo sapien
gagctctttgtaaactcaaaactacaaacaaat

SEQ ID NO: 352734 - DNA, 33 bp, Homo sapien
gagctctttgtaaactgaaaactacaaacaaat

SEQ ID NO: 352735 - DNA, 33 bp, Homo sapien
cccagcatcgggtcaccgtccagcattaccagt

SEQ ID NO: 352736 - DNA, 33 bp, Homo sapien
cccagcatcgggtcactgtccagcattaccagt

SEQ ID NO: 352737 - DNA, 33 bp, Homo sapien
atttttttgttttacacatttcgacgctttatg

SEQ ID NO: 352738 - DNA, 33 bp, Homo sapien
atttttttgttttacatatttcgacgctttatg

SEQ ID NO: 352739 - DNA, 33 bp, Homo sapien
tatatgcatctgtgaaaccaaacacaagaattc

SEQ ID NO: 352740 - DNA, 33 bp, Homo sapien
tatatgcatctgtgaacccaaacacaagaattc

SEQ ID NO: 352741 - DNA, 33 bp, Homo sapien
gcattttcatcaagaacgggtggttgtttatta

SEQ ID NO: 352742 - DNA, 33 bp, Homo sapien
gcattttcatcaagaatgggtggttgtttatta

SEQ ID NO: 352743 - DNA, 33 bp, Homo sapien
cccagctgcagatccaatggaatcctattaaag

SEQ ID NO: 352744 - DNA, 33 bp, Homo sapien
cccagctgcagatccagtggaatcctattaaag

SEQ ID NO: 352745 - DNA, 33 bp, Homo sapien
ttttaaaggaagagaacaattgcaaaagagctg

SEQ ID NO: 352746 - DNA, 33 bp, Homo sapien
ttttaaaggaagagaataattgcaaaagagctg

SEQ ID NO: 352747 - DNA, 33 bp, Homo sapien
cctaagttttgtactccatgtccttccatctca

SEQ ID NO: 352748 - DNA, 33 bp, Homo sapien
cctaagttttgtactctatgtccttccatctca

SEQ ID NO: 352749 - DNA, 33 bp, Homo sapien
ttattcacatgcttccacttaatatcataggta

SEQ ID NO: 352750 - DNA, 33 bp, Homo sapien
ttattcacatgcttcctcttaatatcataggta

SEQ ID NO: 352751 - DNA, 33 bp, Homo sapien
aagttgttattatctacatccccaaatcagaat

SEQ ID NO: 352752 - DNA, 33 bp, Homo sapien
aagttgttattatctatatccccaaatcagaat

SEQ ID NO: 352753 - DNA, 33 bp, Homo sapien
gtctgcaaagacaggcaaggagaggtctgaatg

SEQ ID NO: 352754 - DNA, 33 bp, Homo sapien
gtctgcaaagacaggcgaggagaggtctgaatg

SEQ ID NO: 352755 - DNA, 33 bp, Homo sapien
ctcaaaagaaagcaaaatacttaggcataaatc

SEQ ID NO: 352756 - DNA, 33 bp, Homo sapien
ctcaaaagaaagcaaagtacttaggcataaatc

SEQ ID NO: 352757 - DNA, 33 bp, Homo sapien
aatctggaaatgaccccgaatggaaggaggaaa

SEQ ID NO: 352758 - DNA, 33 bp, Homo sapien
aatctggaaatgaccctgaatggaaggaggaaa

SEQ ID NO: 352759 - DNA, 33 bp, Homo sapien
gatgtaaatgtatcaacaaaatagcaaatgggt

SEQ ID NO: 352760 - DNA, 33 bp, Homo sapien
gatgtaaatgtatcaataaaatagcaaatgggt

SEQ ID NO: 352761 - DNA, 33 bp, Homo sapien
caaaaacaagtagaaaggttgcatgggatgtaa

SEQ ID NO: 352762 - DNA, 33 bp, Homo sapien
caaaaacaagtagaaatgttgcatgggatgtaa

SEQ ID NO: 352763 - DNA, 33 bp, Homo sapien
aatagttatatataaacaaatgcgtgtgtgaag

SEQ ID NO: 352764 - DNA, 33 bp, Homo sapien
aatagttatatataaataaatgcgtgtgtgaag

SEQ ID NO: 352765 - DNA, 33 bp, Homo sapien
gtaaaatgaaaaggcacgattgctgttcaaaaa

SEQ ID NO: 352766 - DNA, 33 bp, Homo sapien
gtaaaatgaaaaggcaggattgctgttcaaaaa

SEQ ID NO: 352767 - DNA, 33 bp, Homo sapien
tcctggcgcatcagaaaagacaaacacaagagt

SEQ ID NO: 352768 - DNA, 33 bp, Homo sapien
tcctggcgcatcagaagagacaaacacaagagt

SEQ ID NO: 352769 - DNA, 33 bp, Homo sapien
tgctcaataatccatgaatgactttagggtgga

SEQ ID NO: 352770 - DNA, 33 bp, Homo sapien
tgctcaataatccatgcatgactttagggtgga

SEQ ID NO: 352771 - DNA, 33 bp, Homo sapien
cccagaacacattgaccaggttcgaatggtatg

SEQ ID NO: 352772 - DNA, 33 bp, Homo sapien
cccagaacacattgactaggttcgaatggtatg

SEQ ID NO: 352773 - DNA, 33 bp, Homo sapien
ccttttgttcctatcacaaagagtcagggtctt

SEQ ID NO: 352774 - DNA, 33 bp, Homo sapien
ccttttgttcctatcataaagagtcagggtctt

SEQ ID NO: 352775 - DNA, 33 bp, Homo sapien
tagtttccaagctgaacagcaagaaggattcaa

SEQ ID NO: 352776 - DNA, 33 bp, Homo sapien
tagtttccaagctgaatagcaagaaggattcaa

SEQ ID NO: 352777 - DNA, 33 bp, Homo sapien
aaaggttgttcctaaaataagggcagagtcaca

SEQ ID NO: 352778 - DNA, 33 bp, Homo sapien
aaaggttgttcctaaagtaagggcagagtcaca

SEQ ID NO: 352779 - DNA, 33 bp, Homo sapien
aggatcgcaagagccacgtagaagctgcatctt

SEQ ID NO: 352780 - DNA, 33 bp, Homo sapien
aggatcgcaagagccatgtagaagctgcatctt

SEQ ID NO: 352781 - DNA, 33 bp, Homo sapien
tgcatccaactctcccacgtagaagaattggag

SEQ ID NO: 352782 - DNA, 33 bp, Homo sapien
tgcatccaactctcccgcgtagaagaattggag

SEQ ID NO: 352783 - DNA, 33 bp, Homo sapien
ctaattaactcataagcccatgaaaagatacaa

SEQ ID NO: 352784 - DNA, 33 bp, Homo sapien
ctaattaactcataagtccatgaaaagatacaa

SEQ ID NO: 352785 - DNA, 33 bp, Homo sapien
acaatctcaagataacaagtttgattgatgcgt

SEQ ID NO: 352786 - DNA, 33 bp, Homo sapien
acaatctcaagataacgagtttgattgatgcgt

SEQ ID NO: 352787 - DNA, 33 bp, Homo sapien
ctatttccaaaggccaaatgtttactcatatgc

SEQ ID NO: 352788 - DNA, 33 bp, Homo sapien
ctatttccaaaggccacatgtttactcatatgc

SEQ ID NO: 352789 - DNA, 33 bp, Homo sapien
cacagagtagctggaaaatactaccttaggcta

SEQ ID NO: 352790 - DNA, 33 bp, Homo sapien
cacagagtagctggaagatactaccttaggcta

SEQ ID NO: 352791 - DNA, 33 bp, Homo sapien
tcttccatattttagccctagtctggtcaagtt

SEQ ID NO: 352792 - DNA, 33 bp, Homo sapien
tcttccatattttagctctagtctggtcaagtt

SEQ ID NO: 352793 - DNA, 33 bp, Homo sapien
caaaatgtatcagcaaattctcaagccagtgag

SEQ ID NO: 352794 - DNA, 33 bp, Homo sapien
caaaatgtatcagcaagttctcaagccagtgag

SEQ ID NO: 352795 - DNA, 33 bp, Homo sapien
ccaacctgttcatctaataaacatttgctgagc

SEQ ID NO: 352796 - DNA, 33 bp, Homo sapien
ccaacctgttcatctactaaacatttgctgagc

SEQ ID NO: 352797 - DNA, 33 bp, Homo sapien
ggtgttgggatctggaaagcaagtttgtaagta

SEQ ID NO: 352798 - DNA, 33 bp, Homo sapien
ggtgttgggatctggagagcaagtttgtaagta

SEQ ID NO: 352799 - DNA, 33 bp, Homo sapien
gacagactgaagtcaaaggctcttagagagaag

SEQ ID NO: 352800 - DNA, 33 bp, Homo sapien
gacagactgaagtcaagggctcttagagagaag

SEQ ID NO: 352801 - DNA, 33 bp, Homo sapien
aacaacaacaaaaaaccagagtctctgccctgg

SEQ ID NO: 352802 - DNA, 33 bp, Homo sapien
aacaacaacaaaaaactagagtctctgccctgg

SEQ ID NO: 352803 - DNA, 33 bp, Homo sapien
tgccatgttgcttggcccatgtaacacatccag

SEQ ID NO: 352804 - DNA, 33 bp, Homo sapien
tgccatgttgcttggctcatgtaacacatccag

SEQ ID NO: 352805 - DNA, 33 bp, Homo sapien
attattttagataaaacgttgtatttcattagc

SEQ ID NO: 352806 - DNA, 33 bp, Homo sapien
attattttagataaaaggttgtatttcattagc

SEQ ID NO: 352807 - DNA, 33 bp, Homo sapien
gtctgaagtctttccaactgtcccaagatattt

SEQ ID NO: 352808 - DNA, 33 bp, Homo sapien
gtctgaagtctttccagctgtcccaagatattt

SEQ ID NO: 352809 - DNA, 33 bp, Homo sapien
ttgacttggatcttgacgttcataatgttgagt

SEQ ID NO: 352810 - DNA, 33 bp, Homo sapien
ttgacttggatcttgatgttcataatgttgagt

SEQ ID NO: 352811 - DNA, 33 bp, Homo sapien
gaaactccctgacacaccatcatcttgcatcag

SEQ ID NO: 352812 - DNA, 33 bp, Homo sapien
gaaactccctgacacatcatcatcttgcatcag

SEQ ID NO: 352813 - DNA, 33 bp, Homo sapien
tctcactcaaaaggacaaagatcgtggctgtgc

SEQ ID NO: 352814 - DNA, 33 bp, Homo sapien
tctcactcaaaaggacgaagatcgtggctgtgc

SEQ ID NO: 352815 - DNA, 33 bp, Homo sapien
aaaacaaagattgagcactgagtagaaaaaaaa

SEQ ID NO: 352816 - DNA, 33 bp, Homo sapien
aaaacaaagattgagcgctgagtagaaaaaaaa

SEQ ID NO: 352817 - DNA, 33 bp, Homo sapien
tcttttttgtcactataaagtcatcatgatgta

SEQ ID NO: 352818 - DNA, 33 bp, Homo sapien
tcttttttgtcactatcaagtcatcatgatgta

SEQ ID NO: 352819 - DNA, 33 bp, Homo sapien
agttattaaaccagaacgtgtataaaccagaat

SEQ ID NO: 352820 - DNA, 33 bp, Homo sapien
agttattaaaccagaatgtgtataaaccagaat

SEQ ID NO: 352821 - DNA, 33 bp, Homo sapien
cattaaatgttcaaaacggtgccatctgtgggc

SEQ ID NO: 352822 - DNA, 33 bp, Homo sapien
cattaaatgttcaaaatggtgccatctgtgggc

SEQ ID NO: 352823 - DNA, 33 bp, Homo sapien
tgtttaggattatcaacgtttctacctgataaa

SEQ ID NO: 352824 - DNA, 33 bp, Homo sapien
tgtttaggattatcaatgtttctacctgataaa

SEQ ID NO: 352825 - DNA, 33 bp, Homo sapien
cttttactgagactaaaaatctttgtttatttt

SEQ ID NO: 352826 - DNA, 33 bp, Homo sapien
cttttactgagactaacaatctttgtttatttt

SEQ ID NO: 352827 - DNA, 33 bp, Homo sapien
aagggaaattgcttgacgtgggattgtgagatc

SEQ ID NO: 352828 - DNA, 33 bp, Homo sapien
aagggaaattgcttgatgtgggattgtgagatc

SEQ ID NO: 352829 - DNA, 33 bp, Homo sapien
aacctcaagtttcataccgaccttgctccctcc

SEQ ID NO: 352830 - DNA, 33 bp, Homo sapien
aacctcaagtttcatatcgaccttgctccctcc

SEQ ID NO: 352831 - DNA, 33 bp, Homo sapien
atgatcgggtcattcacggtcttctgtccactg

SEQ ID NO: 352832 - DNA, 33 bp, Homo sapien
atgatcgggtcattcatggtcttctgtccactg

SEQ ID NO: 352833 - DNA, 33 bp, Homo sapien
caaggtaagcaagccacgttgatagctctaagg

SEQ ID NO: 352834 - DNA, 33 bp, Homo sapien
caaggtaagcaagccaggttgatagctctaagg

SEQ ID NO: 352835 - DNA, 33 bp, Homo sapien
gttcaatgagaagtgacaacactagcaggctgt

SEQ ID NO: 352836 - DNA, 33 bp, Homo sapien
gttcaatgagaagtgataacactagcaggctgt

SEQ ID NO: 352837 - DNA, 33 bp, Homo sapien
cttacaataggaaatccatcccactatatcagg

SEQ ID NO: 352838 - DNA, 33 bp, Homo sapien
cttacaataggaaatctatcccactatatcagg

SEQ ID NO: 352839 - DNA, 33 bp, Homo sapien
cacaaaagcagtcaaccgagctataaaggaaaa

SEQ ID NO: 352840 - DNA, 33 bp, Homo sapien
cacaaaagcagtcaactgagctataaaggaaaa

SEQ ID NO: 352841 - DNA, 33 bp, Homo sapien
aaaaagaattctgcacaaaggccatactgaaaa

SEQ ID NO: 352842 - DNA, 33 bp, Homo sapien
aaaaagaattctgcacgaaggccatactgaaaa

SEQ ID NO: 352843 - DNA, 33 bp, Homo sapien
cccatgtcactgcctaacttgactgtagatttt

SEQ ID NO: 352844 - DNA, 33 bp, Homo sapien
cccatgtcactgcctatcttgactgtagatttt

SEQ ID NO: 352845 - DNA, 33 bp, Homo sapien
acagcactgaggactacacaaagaatagggaca

SEQ ID NO: 352846 - DNA, 33 bp, Homo sapien
acagcactgaggactatacaaagaatagggaca

SEQ ID NO: 352847 - DNA, 33 bp, Homo sapien
ctaaacacaacttataacacagtcaagccctca

SEQ ID NO: 352848 - DNA, 33 bp, Homo sapien
ctaaacacaacttatatcacagtcaagccctca

SEQ ID NO: 352849 - DNA, 33 bp, Homo sapien
ctgcagaataagccacgattaatcattccttgt

SEQ ID NO: 352850 - DNA, 33 bp, Homo sapien
ctgcagaataagccactattaatcattccttgt

SEQ ID NO: 352851 - DNA, 33 bp, Homo sapien
ggataataaggccgcacgtaattatatgtcacc

SEQ ID NO: 352852 - DNA, 33 bp, Homo sapien
ggataataaggccgcatgtaattatatgtcacc

SEQ ID NO: 352853 - DNA, 33 bp, Homo sapien
aagtatgcccagaatacaggctgaaggatcttc

SEQ ID NO: 352854 - DNA, 33 bp, Homo sapien
aagtatgcccagaatataggctgaaggatcttc

SEQ ID NO: 352855 - DNA, 33 bp, Homo sapien
gaaagtcatctgattgcaatgcaagtttgaccc

SEQ ID NO: 352856 - DNA, 33 bp, Homo sapien
gaaagtcatctgattgtaatgcaagtttgaccc

SEQ ID NO: 352857 - DNA, 33 bp, Homo sapien
tggaagtgctctaatccctttaccgcatctcaa

SEQ ID NO: 352858 - DNA, 33 bp, Homo sapien
tggaagtgctctaatctctttaccgcatctcaa

SEQ ID NO: 352859 - DNA, 33 bp, Homo sapien
acttttactttataccgacatagaaagtcatcc

SEQ ID NO: 352860 - DNA, 33 bp, Homo sapien
acttttactttatacctacatagaaagtcatcc

SEQ ID NO: 352861 - DNA, 33 bp, Homo sapien
gtacaaatatttgaaaagcctctttgtatgtct

SEQ ID NO: 352862 - DNA, 33 bp, Homo sapien
gtacaaatatttgaaaggcctctttgtatgtct

SEQ ID NO: 352863 - DNA, 33 bp, Homo sapien
ccatacctaaattggcgaaggatgttccaaact

SEQ ID NO: 352864 - DNA, 33 bp, Homo sapien
ccatacctaaattggctaaggatgttccaaact

SEQ ID NO: 352865 - DNA, 33 bp, Homo sapien
ctagaattttactgtacggtacatgccctctaa

SEQ ID NO: 352866 - DNA, 33 bp, Homo sapien
ctagaattttactgtatggtacatgccctctaa

SEQ ID NO: 352867 - DNA, 33 bp, Homo sapien
cttcagtctttgaaaaccagaagctactatgca

SEQ ID NO: 352868 - DNA, 33 bp, Homo sapien
cttcagtctttgaaaagcagaagctactatgca

SEQ ID NO: 352869 - DNA, 33 bp, Homo sapien
ttttacatgtaacttgaaaacacgtgtggtatg

SEQ ID NO: 352870 - DNA, 33 bp, Homo sapien
ttttacatgtaacttgcaaacacgtgtggtatg

SEQ ID NO: 352871 - DNA, 33 bp, Homo sapien
tgccaaaacttggaagccaaaaacatgcgcttc

SEQ ID NO: 352872 - DNA, 33 bp, Homo sapien
tgccaaaacttggaagtcaaaaacatgcgcttc

SEQ ID NO: 352873 - DNA, 33 bp, Homo sapien
aaagcagtgaagggaaatcaacacactcattag

SEQ ID NO: 352874 - DNA, 33 bp, Homo sapien
aaagcagtgaagggaattcaacacactcattag

SEQ ID NO: 352875 - DNA, 33 bp, Homo sapien
gtttccttgcttttcacggagactactgcagca

SEQ ID NO: 352876 - DNA, 33 bp, Homo sapien
gtttccttgcttttcatggagactactgcagca

SEQ ID NO: 352877 - DNA, 33 bp, Homo sapien
attgctgatggaaatgaaaaatgacacagccgt

SEQ ID NO: 352878 - DNA, 33 bp, Homo sapien
attgctgatggaaatgcaaaatgacacagccgt

SEQ ID NO: 352879 - DNA, 33 bp, Homo sapien
attcaaagggaaaacactgttcactgaatatgt

SEQ ID NO: 352880 - DNA, 33 bp, Homo sapien
attcaaagggaaaacattgttcactgaatatgt

SEQ ID NO: 352881 - DNA, 33 bp, Homo sapien
caaactgacgttttgacggtctcaagtgacctt

SEQ ID NO: 352882 - DNA, 33 bp, Homo sapien
caaactgacgttttgatggtctcaagtgacctt

SEQ ID NO: 352883 - DNA, 33 bp, Homo sapien
tagcaatctgtcttgaagagatttttggatgtg

SEQ ID NO: 352884 - DNA, 33 bp, Homo sapien
tagcaatctgtcttgacgagatttttggatgtg

SEQ ID NO: 352885 - DNA, 33 bp, Homo sapien
aatgttctctagcaaagtattgttcttcagagt

SEQ ID NO: 352886 - DNA, 33 bp, Homo sapien
aatgttctctagcaaattattgttcttcagagt

SEQ ID NO: 352887 - DNA, 33 bp, Homo sapien
tacctgcctacagaaaacagcaaaccactcatg

SEQ ID NO: 352888 - DNA, 33 bp, Homo sapien
tacctgcctacagaaagcagcaaaccactcatg

SEQ ID NO: 352889 - DNA, 33 bp, Homo sapien
cttacatatgttagctcaaattttcaaaatacc

SEQ ID NO: 352890 - DNA, 33 bp, Homo sapien
cttacatatgttagctgaaattttcaaaatacc

SEQ ID NO: 352891 - DNA, 33 bp, Homo sapien
ctgtaaaataagtctaatactggtgatcccaac

SEQ ID NO: 352892 - DNA, 33 bp, Homo sapien
ctgtaaaataagtctactactggtgatcccaac

SEQ ID NO: 352893 - DNA, 33 bp, Homo sapien
agccataatcactgcaatacagcatctctgaat

SEQ ID NO: 352894 - DNA, 33 bp, Homo sapien
agccataatcactgcagtacagcatctctgaat

SEQ ID NO: 352895 - DNA, 33 bp, Homo sapien
gcctctttgggtataacagtggatagtgatact

SEQ ID NO: 352896 - DNA, 33 bp, Homo sapien
gcctctttgggtataagagtggatagtgatact

SEQ ID NO: 352897 - DNA, 33 bp, Homo sapien
agtgatactcttgataataatactattcctcat

SEQ ID NO: 352898 - DNA, 33 bp, Homo sapien
agtgatactcttgatactaatactattcctcat

SEQ ID NO: 352899 - DNA, 33 bp, Homo sapien
taataaactctagtcaaccattctcagttatct

SEQ ID NO: 352900 - DNA, 33 bp, Homo sapien
taataaactctagtcacccattctcagttatct

SEQ ID NO: 352901 - DNA, 33 bp, Homo sapien
gaaaagatggtaattcacattatgcagtggtga

SEQ ID NO: 352902 - DNA, 33 bp, Homo sapien
gaaaagatggtaattcgcattatgcagtggtga

SEQ ID NO: 352903 - DNA, 33 bp, Homo sapien
atataggccatattaaaatgtattcaattaacc

SEQ ID NO: 352904 - DNA, 33 bp, Homo sapien
atataggccatattaagatgtattcaattaacc

SEQ ID NO: 352905 - DNA, 33 bp, Homo sapien
catattgaggatgaataagaaaacaacctggtt

SEQ ID NO: 352906 - DNA, 33 bp, Homo sapien
catattgaggatgaatgagaaaacaacctggtt

SEQ ID NO: 352907 - DNA, 33 bp, Homo sapien
tcaggggacgatgtaccgatcactgacaccttg

SEQ ID NO: 352908 - DNA, 33 bp, Homo sapien
tcaggggacgatgtacggatcactgacaccttg

SEQ ID NO: 352909 - DNA, 33 bp, Homo sapien
gagagatatacaactacacaaagatctatattt

SEQ ID NO: 352910 - DNA, 33 bp, Homo sapien
gagagatatacaactatacaaagatctatattt

SEQ ID NO: 352911 - DNA, 33 bp, Homo sapien
tacccaagtgtaaccccatcatgtaaccagaag

SEQ ID NO: 352912 - DNA, 33 bp, Homo sapien
tacccaagtgtaaccctatcatgtaaccagaag

SEQ ID NO: 352913 - DNA, 33 bp, Homo sapien
ggattttaaatgctgacgcaggaaaacctaccc

SEQ ID NO: 352914 - DNA, 33 bp, Homo sapien
ggattttaaatgctgatgcaggaaaacctaccc

SEQ ID NO: 352915 - DNA, 33 bp, Homo sapien
cacacagatcaccacaccttattctgggtcaac

SEQ ID NO: 352916 - DNA, 33 bp, Homo sapien
cacacagatcaccacatcttattctgggtcaac

SEQ ID NO: 352917 - DNA, 33 bp, Homo sapien
caatgctatggatcagccaactggttgcttagc

SEQ ID NO: 352918 - DNA, 33 bp, Homo sapien
caatgctatggatcagtcaactggttgcttagc

SEQ ID NO: 352919 - DNA, 33 bp, Homo sapien
aggcaagcacaacaaacacaacacgaaaaagag

SEQ ID NO: 352920 - DNA, 33 bp, Homo sapien
aggcaagcacaacaaatacaacacgaaaaagag

SEQ ID NO: 352921 - DNA, 33 bp, Homo sapien
ataaatttacacttgagaatggtttaagacctc

SEQ ID NO: 352922 - DNA, 33 bp, Homo sapien
ataaatttacacttgataatggtttaagacctc

SEQ ID NO: 352923 - DNA, 33 bp, Homo sapien
caaggatgaaaaagccaattctctgatttcatt

SEQ ID NO: 352924 - DNA, 33 bp, Homo sapien
caaggatgaaaaagccgattctctgatttcatt

SEQ ID NO: 352925 - DNA, 33 bp, Homo sapien
tttgcttcctttggataaataagatttgctctt

SEQ ID NO: 352926 - DNA, 33 bp, Homo sapien
tttgcttcctttggatgaataagatttgctctt

SEQ ID NO: 352927 - DNA, 33 bp, Homo sapien
ctggtatcatctttaacactttggcctcaattt

SEQ ID NO: 352928 - DNA, 33 bp, Homo sapien
ctggtatcatctttaatactttggcctcaattt

SEQ ID NO: 352929 - DNA, 33 bp, Homo sapien
caacaggttagaaaaactgagttctggttctag

SEQ ID NO: 352930 - DNA, 33 bp, Homo sapien
caacaggttagaaaaattgagttctggttctag

SEQ ID NO: 352931 - DNA, 33 bp, Homo sapien
agatgcttttgacatgaatgaaattagaagatt

SEQ ID NO: 352932 - DNA, 33 bp, Homo sapien
agatgcttttgacatggatgaaattagaagatt

SEQ ID NO: 352933 - DNA, 33 bp, Homo sapien
cttctcagagcaggtactaaggcgcagaaaaat

SEQ ID NO: 352934 - DNA, 33 bp, Homo sapien
cttctcagagcaggtattaaggcgcagaaaaat

SEQ ID NO: 352935 - DNA, 33 bp, Homo sapien
ttcccatctccttgccaagaaaggaaatagaat

SEQ ID NO: 352936 - DNA, 33 bp, Homo sapien
ttcccatctccttgccgagaaaggaaatagaat

SEQ ID NO: 352937 - DNA, 33 bp, Homo sapien
accatgatgtcctttacaggtgaatggataaat

SEQ ID NO: 352938 - DNA, 33 bp, Homo sapien
accatgatgtcctttataggtgaatggataaat

SEQ ID NO: 352939 - DNA, 33 bp, Homo sapien
tcaactatgtcttaaacgctacaggagaccaca

SEQ ID NO: 352940 - DNA, 33 bp, Homo sapien
tcaactatgtcttaaatgctacaggagaccaca

SEQ ID NO: 352941 - DNA, 33 bp, Homo sapien
tgccaaagaacctgaaaatgggaatctgatgct

SEQ ID NO: 352942 - DNA, 33 bp, Homo sapien
tgccaaagaacctgaagatgggaatctgatgct

SEQ ID NO: 352943 - DNA, 33 bp, Homo sapien
cttcatgtggaggagagcttcaagatgtttaac

SEQ ID NO: 352944 - DNA, 33 bp, Homo sapien
cttcatgtggaggagatcttcaagatgtttaac

SEQ ID NO: 352945 - DNA, 33 bp, Homo sapien
gggagagaggcatttacagtggcctttcccctg

SEQ ID NO: 352946 - DNA, 33 bp, Homo sapien
gggagagaggcatttatagtggcctttcccctg

SEQ ID NO: 352947 - DNA, 33 bp, Homo sapien
gaaaggttagggcagccaagaatatataggtca

SEQ ID NO: 352948 - DNA, 33 bp, Homo sapien
gaaaggttagggcagcgaagaatatataggtca

SEQ ID NO: 352949 - DNA, 33 bp, Homo sapien
agcttccaagaggaaactgaagaataggataca

SEQ ID NO: 352950 - DNA, 33 bp, Homo sapien
agcttccaagaggaaattgaagaataggataca

SEQ ID NO: 352951 - DNA, 33 bp, Homo sapien
ataaatcatcttttctaaatcaaccctggaaaa

SEQ ID NO: 352952 - DNA, 33 bp, Homo sapien
ataaatcatcttttctcaatcaaccctggaaaa

SEQ ID NO: 352953 - DNA, 33 bp, Homo sapien
acaggagccagtaaaagaaaaccggaataggtg

SEQ ID NO: 352954 - DNA, 33 bp, Homo sapien
acaggagccagtaaaataaaaccggaataggtg

SEQ ID NO: 352955 - DNA, 33 bp, Homo sapien
actcacttagctttgaccattattctaatagtg

SEQ ID NO: 352956 - DNA, 33 bp, Homo sapien
actcacttagctttgatcattattctaatagtg

SEQ ID NO: 352957 - DNA, 33 bp, Homo sapien
tgtgtctttttggtagaaagatgtgtctttgga

SEQ ID NO: 352958 - DNA, 33 bp, Homo sapien
tgtgtctttttggtaggaagatgtgtctttgga

SEQ ID NO: 352959 - DNA, 33 bp, Homo sapien
ctcttggaaaccatcaaaacacatcatacagct

SEQ ID NO: 352960 - DNA, 33 bp, Homo sapien
ctcttggaaaccatcagaacacatcatacagct

SEQ ID NO: 352961 - DNA, 33 bp, Homo sapien
tgactatccctggaacacatccagaacgtatga

SEQ ID NO: 352962 - DNA, 33 bp, Homo sapien
tgactatccctggaacgcatccagaacgtatga

SEQ ID NO: 352963 - DNA, 33 bp, Homo sapien
aattaacatggacattgaaccaaatacagattc

SEQ ID NO: 352964 - DNA, 33 bp, Homo sapien
aattaacatggacatttaaccaaatacagattc

SEQ ID NO: 352965 - DNA, 33 bp, Homo sapien
gtgattaaataatccaaaaagctttatagccat

SEQ ID NO: 352966 - DNA, 33 bp, Homo sapien
gtgattaaataatccagaaagctttatagccat

SEQ ID NO: 352967 - DNA, 33 bp, Homo sapien
tatttaatcacattagcataagctgtcgttctc

SEQ ID NO: 352968 - DNA, 33 bp, Homo sapien
tatttaatcacattagtataagctgtcgttctc

SEQ ID NO: 352969 - DNA, 33 bp, Homo sapien
catacacattttatgcaatatttttatgtgtac

SEQ ID NO: 352970 - DNA, 33 bp, Homo sapien
catacacattttatgcgatatttttatgtgtac

SEQ ID NO: 352971 - DNA, 33 bp, Homo sapien
tattccagctgaatgacgagatgctaaggaaag

SEQ ID NO: 352972 - DNA, 33 bp, Homo sapien
tattccagctgaatgatgagatgctaaggaaag

SEQ ID NO: 352973 - DNA, 33 bp, Homo sapien
aatatgaatgtcagacaaatttcctgactagac

SEQ ID NO: 352974 - DNA, 33 bp, Homo sapien
aatatgaatgtcagacgaatttcctgactagac

SEQ ID NO: 352975 - DNA, 33 bp, Homo sapien
gagaacccagtccatacgcttgaggccactcat

SEQ ID NO: 352976 - DNA, 33 bp, Homo sapien
gagaacccagtccatatgcttgaggccactcat

SEQ ID NO: 352977 - DNA, 33 bp, Homo sapien
agtttctgacaaaagaagaatgtaactggcttt

SEQ ID NO: 352978 - DNA, 33 bp, Homo sapien
agtttctgacaaaagaggaatgtaactggcttt

SEQ ID NO: 352979 - DNA, 33 bp, Homo sapien
gtggacaaagcactgacgtgtgagaagcaaaaa

SEQ ID NO: 352980 - DNA, 33 bp, Homo sapien
gtggacaaagcactgaggtgtgagaagcaaaaa

SEQ ID NO: 352981 - DNA, 33 bp, Homo sapien
actacataaataacacagaatgaatggacctac

SEQ ID NO: 352982 - DNA, 33 bp, Homo sapien
actacataaataacacggaatgaatggacctac

SEQ ID NO: 352983 - DNA, 33 bp, Homo sapien
gtttataaaatctcccaaaattatgccatcatt

SEQ ID NO: 352984 - DNA, 33 bp, Homo sapien
gtttataaaatctccccaaattatgccatcatt

SEQ ID NO: 352985 - DNA, 33 bp, Homo sapien
ttgttctgagaaaaataagaaacaaatgatgga

SEQ ID NO: 352986 - DNA, 33 bp, Homo sapien
ttgttctgagaaaaatgagaaacaaatgatgga

SEQ ID NO: 352987 - DNA, 33 bp, Homo sapien
gaatgaaattcacacaatagcatgaatggaaca

SEQ ID NO: 352988 - DNA, 33 bp, Homo sapien
gaatgaaattcacacattagcatgaatggaaca

SEQ ID NO: 352989 - DNA, 33 bp, Homo sapien
agctcttattctgtgacggtctaaaaatagttg

SEQ ID NO: 352990 - DNA, 33 bp, Homo sapien
agctcttattctgtgatggtctaaaaatagttg

SEQ ID NO: 352991 - DNA, 33 bp, Homo sapien
ttggaatttgctaggaagtatatgccaaatgta

SEQ ID NO: 352992 - DNA, 33 bp, Homo sapien
ttggaatttgctaggatgtatatgccaaatgta

SEQ ID NO: 352993 - DNA, 33 bp, Homo sapien
aagaattcagtaggcaaatcaaaagatggggta

SEQ ID NO: 352994 - DNA, 33 bp, Homo sapien
aagaattcagtaggcagatcaaaagatggggta

SEQ ID NO: 352995 - DNA, 33 bp, Homo sapien
cacccattgcaagtcccgcagaaattcagagaa

SEQ ID NO: 352996 - DNA, 33 bp, Homo sapien
cacccattgcaagtcctgcagaaattcagagaa

SEQ ID NO: 352997 - DNA, 33 bp, Homo sapien
gaaagagaccagagagaatgatacacagaaaca

SEQ ID NO: 352998 - DNA, 33 bp, Homo sapien
gaaagagaccagagagtatgatacacagaaaca

SEQ ID NO: 352999 - DNA, 33 bp, Homo sapien
gttatatagctggtaaaggcttggtaaatgaaa

SEQ ID NO: 353000 - DNA, 33 bp, Homo sapien
gttatatagctggtaagggcttggtaaatgaaa

SEQ ID NO: 353001 - DNA, 33 bp, Homo sapien
aatttgaactatctcaaataaaaagaccgaaaa

SEQ ID NO: 353002 - DNA, 33 bp, Homo sapien
aatttgaactatctcagataaaaagaccgaaaa

SEQ ID NO: 353003 - DNA, 33 bp, Homo sapien
aacagtggattaggcaacctgtcaggcactgca

SEQ ID NO: 353004 - DNA, 33 bp, Homo sapien
aacagtggattaggcaccctgtcaggcactgca

SEQ ID NO: 353005 - DNA, 33 bp, Homo sapien
ccttggcgacaacaaaatctcctgcttctctct

SEQ ID NO: 353006 - DNA, 33 bp, Homo sapien
ccttggcgacaacaaagtctcctgcttctctct

SEQ ID NO: 353007 - DNA, 33 bp, Homo sapien
agtgcttggtacataacagtttgccccaagaac

SEQ ID NO: 353008 - DNA, 33 bp, Homo sapien
agtgcttggtacataatagtttgccccaagaac

SEQ ID NO: 353009 - DNA, 33 bp, Homo sapien
ttgagccctcatcagaaaaagcttctcatcagc

SEQ ID NO: 353010 - DNA, 33 bp, Homo sapien
ttgagccctcatcagacaaagcttctcatcagc

SEQ ID NO: 353011 - DNA, 33 bp, Homo sapien
agagacacagggtaataaaatgaaagcttagga

SEQ ID NO: 353012 - DNA, 33 bp, Homo sapien
agagacacagggtaatgaaatgaaagcttagga

SEQ ID NO: 353013 - DNA, 33 bp, Homo sapien
ttatatattggaaaaccgtcagattcatggtgg

SEQ ID NO: 353014 - DNA, 33 bp, Homo sapien
ttatatattggaaaactgtcagattcatggtgg

SEQ ID NO: 353015 - DNA, 33 bp, Homo sapien
tgagagactcttgtacacgtatgcctcaagctc

SEQ ID NO: 353016 - DNA, 33 bp, Homo sapien
tgagagactcttgtacgcgtatgcctcaagctc

SEQ ID NO: 353017 - DNA, 33 bp, Homo sapien
atgaccccactcagacacatcattgcaacattt

SEQ ID NO: 353018 - DNA, 33 bp, Homo sapien
atgaccccactcagacgcatcattgcaacattt

SEQ ID NO: 353019 - DNA, 33 bp, Homo sapien
tgtcctgagaagggagaaaaaggtattctgtgc

SEQ ID NO: 353020 - DNA, 33 bp, Homo sapien
tgtcctgagaagggagtaaaaggtattctgtgc

SEQ ID NO: 353021 - DNA, 33 bp, Homo sapien
gagttttaagccactgaaatatgggtgaaggtg

SEQ ID NO: 353022 - DNA, 33 bp, Homo sapien
gagttttaagccactggaatatgggtgaaggtg

SEQ ID NO: 353023 - DNA, 33 bp, Homo sapien
cgctgctaccttgagaacatcgcaaacaatagg

SEQ ID NO: 353024 - DNA, 33 bp, Homo sapien
cgctgctaccttgagaccatcgcaaacaatagg

SEQ ID NO: 353025 - DNA, 33 bp, Homo sapien
gcatcaaccccaactacgcactctagaactggg

SEQ ID NO: 353026 - DNA, 33 bp, Homo sapien
gcatcaaccccaactatgcactctagaactggg

SEQ ID NO: 353027 - DNA, 33 bp, Homo sapien
catcttctaatgcaccagatacctccaacatca

SEQ ID NO: 353028 - DNA, 33 bp, Homo sapien
catcttctaatgcaccggatacctccaacatca

SEQ ID NO: 353029 - DNA, 33 bp, Homo sapien
ggaaccaaaatgaaagcattggaagattagaga

SEQ ID NO: 353030 - DNA, 33 bp, Homo sapien
ggaaccaaaatgaaaggattggaagattagaga

SEQ ID NO: 353031 - DNA, 33 bp, Homo sapien
ccttccagggcaactcaattaatccttccttaa

SEQ ID NO: 353032 - DNA, 33 bp, Homo sapien
ccttccagggcaactccattaatccttccttaa

SEQ ID NO: 353033 - DNA, 33 bp, Homo sapien
aacgtttctaagatcacgtttctaggaagaatt

SEQ ID NO: 353034 - DNA, 33 bp, Homo sapien
aacgtttctaagatcaggtttctaggaagaatt

SEQ ID NO: 353035 - DNA, 33 bp, Homo sapien
aatgtcagcagaccaactgaagaaaactcaaaa

SEQ ID NO: 353036 - DNA, 33 bp, Homo sapien
aatgtcagcagaccaattgaagaaaactcaaaa

SEQ ID NO: 353037 - DNA, 33 bp, Homo sapien
tacctccctcgttgccaatacaggagacatttg

SEQ ID NO: 353038 - DNA, 33 bp, Homo sapien
tacctccctcgttgccgatacaggagacatttg

SEQ ID NO: 353039 - DNA, 33 bp, Homo sapien
ctgcaccatgttcaataaagtcagcctgaaagc

SEQ ID NO: 353040 - DNA, 33 bp, Homo sapien
ctgcaccatgttcaatcaagtcagcctgaaagc

SEQ ID NO: 353041 - DNA, 33 bp, Homo sapien
aaacaaaacgaacaaagaatggatgcgtattct

SEQ ID NO: 353042 - DNA, 33 bp, Homo sapien
aaacaaaacgaacaaataatggatgcgtattct

SEQ ID NO: 353043 - DNA, 33 bp, Homo sapien
aagcagatgttcactacagtcaacttagacatt

SEQ ID NO: 353044 - DNA, 33 bp, Homo sapien
aagcagatgttcactatagtcaacttagacatt

SEQ ID NO: 353045 - DNA, 33 bp, Homo sapien
gggcccttgttgccagaattaagggcagttcta

SEQ ID NO: 353046 - DNA, 33 bp, Homo sapien
gggcccttgttgccaggattaagggcagttcta

SEQ ID NO: 353047 - DNA, 33 bp, Homo sapien
cccctgcataatcaaacagtaagccagatccta

SEQ ID NO: 353048 - DNA, 33 bp, Homo sapien
cccctgcataatcaaatagtaagccagatccta

SEQ ID NO: 353049 - DNA, 33 bp, Homo sapien
ctttatcttcccattagactcgaagctccatga

SEQ ID NO: 353050 - DNA, 33 bp, Homo sapien
ctttatcttcccattatactcgaagctccatga

SEQ ID NO: 353051 - DNA, 33 bp, Homo sapien
ctgccccacagcagccaccagtatgtctgactg

SEQ ID NO: 353052 - DNA, 33 bp, Homo sapien
ctgccccacagcagccgccagtatgtctgactg

SEQ ID NO: 353053 - DNA, 33 bp, Homo sapien
aacttacatgaaattcaagtctccagatctata

SEQ ID NO: 353054 - DNA, 33 bp, Homo sapien
aacttacatgaaattccagtctccagatctata

SEQ ID NO: 353055 - DNA, 33 bp, Homo sapien
tgttccatgctaaaataagctcttccttaccaa

SEQ ID NO: 353056 - DNA, 33 bp, Homo sapien
tgttccatgctaaaatcagctcttccttaccaa

SEQ ID NO: 353057 - DNA, 33 bp, Homo sapien
actactacaaccaggcaccatggatgatgtaga

SEQ ID NO: 353058 - DNA, 33 bp, Homo sapien
actactacaaccaggcgccatggatgatgtaga

SEQ ID NO: 353059 - DNA, 33 bp, Homo sapien
aacgcttcgccttgtaagttgatgttgaacatg

SEQ ID NO: 353060 - DNA, 33 bp, Homo sapien
aacgcttcgccttgtatgttgatgttgaacatg

SEQ ID NO: 353061 - DNA, 33 bp, Homo sapien
tcagtgtttatttccaatctaacggagagctca

SEQ ID NO: 353062 - DNA, 33 bp, Homo sapien
tcagtgtttatttccagtctaacggagagctca

SEQ ID NO: 353063 - DNA, 33 bp, Homo sapien
tccaagatgccatcgacgaactgaaaagtgctg

SEQ ID NO: 353064 - DNA, 33 bp, Homo sapien
tccaagatgccatcgaggaactgaaaagtgctg

SEQ ID NO: 353065 - DNA, 33 bp, Homo sapien
agaataacatgaacccaagcagaatcatgtttt

SEQ ID NO: 353066 - DNA, 33 bp, Homo sapien
agaataacatgaacccgagcagaatcatgtttt

SEQ ID NO: 353067 - DNA, 33 bp, Homo sapien
gtgagaaattgagaacaaaagagaggcactgtt

SEQ ID NO: 353068 - DNA, 33 bp, Homo sapien
gtgagaaattgagaacgaaagagaggcactgtt

SEQ ID NO: 353069 - DNA, 33 bp, Homo sapien
tcatggcctgggtaacacatccaggagagctga

SEQ ID NO: 353070 - DNA, 33 bp, Homo sapien
tcatggcctgggtaacgcatccaggagagctga

SEQ ID NO: 353071 - DNA, 33 bp, Homo sapien
ctagcacatcataagcaccctttattattactg

SEQ ID NO: 353072 - DNA, 33 bp, Homo sapien
ctagcacatcataagcgccctttattattactg

SEQ ID NO: 353073 - DNA, 33 bp, Homo sapien
gcctcctctgtttgtcaatcacagttacctcgg

SEQ ID NO: 353074 - DNA, 33 bp, Homo sapien
gcctcctctgtttgtcgatcacagttacctcgg

SEQ ID NO: 353075 - DNA, 33 bp, Homo sapien
catgtatgtgattctcagaaaccagcaaaggag

SEQ ID NO: 353076 - DNA, 33 bp, Homo sapien
catgtatgtgattctcggaaaccagcaaaggag

SEQ ID NO: 353077 - DNA, 33 bp, Homo sapien
gccaccaggagcagtcaactacttttgggccca

SEQ ID NO: 353078 - DNA, 33 bp, Homo sapien
gccaccaggagcagtcgactacttttgggccca

SEQ ID NO: 353079 - DNA, 33 bp, Homo sapien
atgttccagtgtaaaaattgtcaaagtggaatt

SEQ ID NO: 353080 - DNA, 33 bp, Homo sapien
atgttccagtgtaaaagttgtcaaagtggaatt

SEQ ID NO: 353081 - DNA, 33 bp, Homo sapien
ctctgactctgacaagcagcgttgggaagaggc

SEQ ID NO: 353082 - DNA, 33 bp, Homo sapien
ctctgactctgacaagtagcgttgggaagaggc

SEQ ID NO: 353083 - DNA, 33 bp, Homo sapien
tttgtcccatacagtcaaacagagttctaagtg

SEQ ID NO: 353084 - DNA, 33 bp, Homo sapien
tttgtcccatacagtcgaacagagttctaagtg

SEQ ID NO: 353085 - DNA, 33 bp, Homo sapien
atcccactaagtggccgctgtttattacccagt

SEQ ID NO: 353086 - DNA, 33 bp, Homo sapien
atcccactaagtggcctctgtttattacccagt

SEQ ID NO: 353087 - DNA, 33 bp, Homo sapien
gattgcactttgagaaccctgctttataacttg

SEQ ID NO: 353088 - DNA, 33 bp, Homo sapien
gattgcactttgagaatcctgctttataacttg

SEQ ID NO: 353089 - DNA, 33 bp, Homo sapien
ttaagtttacagcccacggtcccatttttcatt

SEQ ID NO: 353090 - DNA, 33 bp, Homo sapien
ttaagtttacagcccatggtcccatttttcatt

SEQ ID NO: 353091 - DNA, 33 bp, Homo sapien
tgttgtcagtccacaaatagaagtgagagtgtt

SEQ ID NO: 353092 - DNA, 33 bp, Homo sapien
tgttgtcagtccacaagtagaagtgagagtgtt

SEQ ID NO: 353093 - DNA, 33 bp, Homo sapien
ttaatcagtagcttcaaataccacagagaaatc

SEQ ID NO: 353094 - DNA, 33 bp, Homo sapien
ttaatcagtagcttcagataccacagagaaatc

SEQ ID NO: 353095 - DNA, 33 bp, Homo sapien
taaaaaataagtctacaatcgaataactgttca

SEQ ID NO: 353096 - DNA, 33 bp, Homo sapien
taaaaaataagtctaccatcgaataactgttca

SEQ ID NO: 353097 - DNA, 33 bp, Homo sapien
acagcaactctcacaacaggagtggcttcgaag

SEQ ID NO: 353098 - DNA, 33 bp, Homo sapien
acagcaactctcacaataggagtggcttcgaag

SEQ ID NO: 353099 - DNA, 33 bp, Homo sapien
aatggaatcaacatagaaaaaaaatctgtaaaa

SEQ ID NO: 353100 - DNA, 33 bp, Homo sapien
aatggaatcaacataggaaaaaaatctgtaaaa

SEQ ID NO: 353101 - DNA, 33 bp, Homo sapien
tctcctttgtgtcctaccaatttaagacttaga

SEQ ID NO: 353102 - DNA, 33 bp, Homo sapien
tctcctttgtgtcctagcaatttaagacttaga

SEQ ID NO: 353103 - DNA, 33 bp, Homo sapien
ccccctctcctttgtaaatgagcacagagcttt

SEQ ID NO: 353104 - DNA, 33 bp, Homo sapien
ccccctctcctttgtagatgagcacagagcttt

SEQ ID NO: 353105 - DNA, 33 bp, Homo sapien
atgtcctctctcaagacaaccattaacttgtac

SEQ ID NO: 353106 - DNA, 33 bp, Homo sapien
atgtcctctctcaagataaccattaacttgtac

SEQ ID NO: 353107 - DNA, 33 bp, Homo sapien
aggaatttcccctctcactctgaaataaatgga

SEQ ID NO: 353108 - DNA, 33 bp, Homo sapien
aggaatttcccctctcgctctgaaataaatgga

SEQ ID NO: 353109 - DNA, 33 bp, Homo sapien
tacctgtcacagaaatcaataatcgttgttatt

SEQ ID NO: 353110 - DNA, 33 bp, Homo sapien
tacctgtcacagaaattaataatcgttgttatt

SEQ ID NO: 353111 - DNA, 33 bp, Homo sapien
ttggattttttgattcaacaagtcagaaactgt

SEQ ID NO: 353112 - DNA, 33 bp, Homo sapien
ttggattttttgattccacaagtcagaaactgt

SEQ ID NO: 353113 - DNA, 33 bp, Homo sapien
agactggctcaatattaaaaaacatcaatcaat

SEQ ID NO: 353114 - DNA, 33 bp, Homo sapien
agactggctcaatattcaaaaacatcaatcaat

SEQ ID NO: 353115 - DNA, 33 bp, Homo sapien
gcaaagagatttaatcagatgcaaacagactta

SEQ ID NO: 353116 - DNA, 33 bp, Homo sapien
gcaaagagatttaatcggatgcaaacagactta

SEQ ID NO: 353117 - DNA, 33 bp, Homo sapien
gagtggttattaatcaagattttctaatgtgct

SEQ ID NO: 353118 - DNA, 33 bp, Homo sapien
gagtggttattaatcacgattttctaatgtgct

SEQ ID NO: 353119 - DNA, 33 bp, Homo sapien
acctcagagtcttaaacccaagcaagaaattcg

SEQ ID NO: 353120 - DNA, 33 bp, Homo sapien
acctcagagtcttaaagccaagcaagaaattcg

SEQ ID NO: 353121 - DNA, 33 bp, Homo sapien; identical to SEQ ID NO: 353119

SEQ ID NO: 353122 - DNA, 33 bp, Homo sapien; identical to SEQ ID NO: 353120

SEQ ID NO: 353123 - DNA, 33 bp, Homo sapien
atccttaccaaaatcacgtagaggcatggtttg

SEQ ID NO: 353124 - DNA, 33 bp, Homo sapien
atccttaccaaaatcatgtagaggcatggtttg

SEQ ID NO: 353125 - DNA, 33 bp, Homo sapien
cagcctcgccatgtgccagaagaatataaacca

SEQ ID NO: 353126 - DNA, 33 bp, Homo sapien
cagcctcgccatgtgctagaagaatataaacca

SEQ ID NO: 353127 - DNA, 33 bp, Homo sapien
cagacctttgctagtaagtggtattatcaggtt

SEQ ID NO: 353128 - DNA, 33 bp, Homo sapien
cagacctttgctagtacgtggtattatcaggtt

SEQ ID NO: 353129 - DNA, 33 bp, Homo sapien
ccctgcctcttgggaactgtcccaacagcctgc

SEQ ID NO: 353130 - DNA, 33 bp, Homo sapien
ccctgcctcttgggaattgtcccaacagcctgc

SEQ ID NO: 353131 - DNA, 33 bp, Homo sapien
atgagaggaaaaatcgaattaatatcccttagg

SEQ ID NO: 353132 - DNA, 33 bp, Homo sapien
atgagaggaaaaatcgcattaatatcccttagg

SEQ ID NO: 353133 - DNA, 33 bp, Homo sapien
agaccagtgaggaatcagatgcttggtcctcat

SEQ ID NO: 353134 - DNA, 33 bp, Homo sapien
agaccagtgaggaatccgatgcttggtcctcat

SEQ ID NO: 353135 - DNA, 33 bp, Homo sapien
caagggccttgttagaagaagttacaagctgac

SEQ ID NO: 353136 - DNA, 33 bp, Homo sapien
caagggccttgttagaggaagttacaagctgac

SEQ ID NO: 353137 - DNA, 33 bp, Homo sapien
ttcagctaaagcagaaaatggggggagcattca

SEQ ID NO: 353138 - DNA, 33 bp, Homo sapien
ttcagctaaagcagaagatggggggagcattca

SEQ ID NO: 353139 - DNA, 33 bp, Homo sapien
accacctagattgaacagtgaacatcttgtcat

SEQ ID NO: 353140 - DNA, 33 bp, Homo sapien
accacctagattgaacggtgaacatcttgtcat

SEQ ID NO: 353141 - DNA, 33 bp, Homo sapien
tttttttcttcacttacatcctggttgcctagc

SEQ ID NO: 353142 - DNA, 33 bp, Homo sapien
tttttttcttcacttatatcctggttgcctagc

SEQ ID NO: 353143 - DNA, 33 bp, Homo sapien
gaaagagattttcaagaaagataaagatcattc

SEQ ID NO: 353144 - DNA, 33 bp, Homo sapien
gaaagagattttcaaggaagataaagatcattc

SEQ ID NO: 353145 - DNA, 33 bp, Homo sapien
tctgtttatactgtaaatctcttgaagaatgtg

SEQ ID NO: 353146 - DNA, 33 bp, Homo sapien
tctgtttatactgtaagtctcttgaagaatgtg

SEQ ID NO: 353147 - DNA, 33 bp, Homo sapien
aaataactcaaacccaaaacacttcaacattct

SEQ ID NO: 353148 - DNA, 33 bp, Homo sapien
aaataactcaaacccagaacacttcaacattct

SEQ ID NO: 353149 - DNA, 33 bp, Homo sapien
gcactcatctctatcaaattgtcttctgctaat

SEQ ID NO: 353150 - DNA, 33 bp, Homo sapien
gcactcatctctatcagattgtcttctgctaat

SEQ ID NO: 353151 - DNA, 33 bp, Homo sapien
ggaactctggggctgtaaagaaccacagttgat

SEQ ID NO: 353152 - DNA, 33 bp, Homo sapien
ggaactctggggctgtgaagaaccacagttgat

SEQ ID NO: 353153 - DNA, 33 bp, Homo sapien
ttacttcctccactgaagtagtgaacccctcaa

SEQ ID NO: 353154 - DNA, 33 bp, Homo sapien
ttacttcctccactgacgtagtgaacccctcaa

SEQ ID NO: 353155 - DNA, 33 bp, Homo sapien
aacccttactcaaaccaaaagattacttgccaa

SEQ ID NO: 353156 - DNA, 33 bp, Homo sapien
aacccttactcaaaccgaaagattacttgccaa

SEQ ID NO: 353157 - DNA, 33 bp, Homo sapien
ccagacagaacacgcaacttagtcacagggctg

SEQ ID NO: 353158 - DNA, 33 bp, Homo sapien
ccagacagaacacgcaccttagtcacagggctg

SEQ ID NO: 353159 - DNA, 33 bp, Homo sapien
ggaacatttaacttcaatacaaggtcaaaatca

SEQ ID NO: 353160 - DNA, 33 bp, Homo sapien
ggaacatttaacttcagtacaaggtcaaaatca

SEQ ID NO: 353161 - DNA, 33 bp, Homo sapien
acccaagtatcacacacaggatgtagaaggaga

SEQ ID NO: 353162 - DNA, 33 bp, Homo sapien
acccaagtatcacacagaggatgtagaaggaga

SEQ ID NO: 353163 - DNA, 33 bp, Homo sapien
catgttttcaattttaacaaggcaaaaacaagc

SEQ ID NO: 353164 - DNA, 33 bp, Homo sapien
catgttttcaattttagcaaggcaaaaacaagc

SEQ ID NO: 353165 - DNA, 33 bp, Homo sapien
aactagtggaaagccaaatactcatgttgtgct

SEQ ID NO: 353166 - DNA, 33 bp, Homo sapien
aactagtggaaagccagatactcatgttgtgct

SEQ ID NO: 353167 - DNA, 33 bp, Homo sapien
tcaagtggagcagacacaagtcaatgattgcag

SEQ ID NO: 353168 - DNA, 33 bp, Homo sapien
tcaagtggagcagacataagtcaatgattgcag

SEQ ID NO: 353169 - DNA, 33 bp, Homo sapien
ggctttactgggtatacacatcgctcttggtag

SEQ ID NO: 353170 - DNA, 33 bp, Homo sapien
ggctttactgggtatatacatcgctcttggtag

SEQ ID NO: 353171 - DNA, 33 bp, Homo sapien
cagtggctgaagaagacactaatttattcaaca

SEQ ID NO: 353172 - DNA, 33 bp, Homo sapien
cagtggctgaagaagatactaatttattcaaca

SEQ ID NO: 353173 - DNA, 33 bp, Homo sapien
tatgctagtttagatgaaagagagttcaggatg

SEQ ID NO: 353174 - DNA, 33 bp, Homo sapien
tatgctagtttagatgcaagagagttcaggatg

SEQ ID NO: 353175 - DNA, 33 bp, Homo sapien
aagagcagcttttcttcaactaaaaatagctaa

SEQ ID NO: 353176 - DNA, 33 bp, Homo sapien
aagagcagcttttcttgaactaaaaatagctaa

SEQ ID NO: 353177 - DNA, 33 bp, Homo sapien
gtcatccctaacatgacggctacctcaaaggcc

SEQ ID NO: 353178 - DNA, 33 bp, Homo sapien
gtcatccctaacatgatggctacctcaaaggcc

SEQ ID NO: 353179 - DNA, 33 bp, Homo sapien
acattctgaatttgaaacaacaagtggaaatgt

SEQ ID NO: 353180 - DNA, 33 bp, Homo sapien
acattctgaatttgaatcaacaagtggaaatgt

SEQ ID NO: 353181 - DNA, 33 bp, Homo sapien
tggggcaataacaaacgatgcaagcagaggcat

SEQ ID NO: 353182 - DNA, 33 bp, Homo sapien
tggggcaataacaaactatgcaagcagaggcat

SEQ ID NO: 353183 - DNA, 33 bp, Homo sapien
tgtcttctcctgggaacgtggagctgatcacca

SEQ ID NO: 353184 - DNA, 33 bp, Homo sapien
tgtcttctcctgggaatgtggagctgatcacca

SEQ ID NO: 353185 - DNA, 33 bp, Homo sapien
gctgcctcagcagagacaaagaagccttcagca

SEQ ID NO: 353186 - DNA, 33 bp, Homo sapien
gctgcctcagcagagagaaagaagccttcagca

SEQ ID NO: 353187 - DNA, 33 bp, Homo sapien
accaacagactcgggaaattcctgaaaacaaaa

SEQ ID NO: 353188 - DNA, 33 bp, Homo sapien
accaacagactcgggacattcctgaaaacaaaa

SEQ ID NO: 353189 - DNA, 33 bp, Homo sapien
gtcaatctccaaaaaacatggtagatggcagcc

SEQ ID NO: 353190 - DNA, 33 bp, Homo sapien
gtcaatctccaaaaaagatggtagatggcagcc

SEQ ID NO: 353191 - DNA, 33 bp, Homo sapien
cttcgttgattcatataagatcctcctgttggt

SEQ ID NO: 353192 - DNA, 33 bp, Homo sapien
cttcgttgattcatatgagatcctcctgttggt

SEQ ID NO: 353193 - DNA, 33 bp, Homo sapien
gtattaggagaaccaacggaaagtggtcaccag

SEQ ID NO: 353194 - DNA, 33 bp, Homo sapien
gtattaggagaaccaatggaaagtggtcaccag

SEQ ID NO: 353195 - DNA, 33 bp, Homo sapien
ccatgttggatgagtacggggtttaagaagcag

SEQ ID NO: 353196 - DNA, 33 bp, Homo sapien
ccatgttggatgagtatggggtttaagaagcag

SEQ ID NO: 353197 - DNA, 33 bp, Homo sapien
atgctgattctgactccacctcttgaatctcta

SEQ ID NO: 353198 - DNA, 33 bp, Homo sapien
atgctgattctgactctacctcttgaatctcta

SEQ ID NO: 353199 - DNA, 33 bp, Homo sapien
caaaatttaagccacacagactttcctatcacc

SEQ ID NO: 353200 - DNA, 33 bp, Homo sapien
caaaatttaagccacatagactttcctatcacc

SEQ ID NO: 353201 - DNA, 33 bp, Homo sapien
tgagccacctgtgtgacgaaagctcatgggctt

SEQ ID NO: 353202 - DNA, 33 bp, Homo sapien
tgagccacctgtgtgatgaaagctcatgggctt

SEQ ID NO: 353203 - DNA, 33 bp, Homo sapien
acctactgtgcaataaacaagagaaagggcaca

SEQ ID NO: 353204 - DNA, 33 bp, Homo sapien
acctactgtgcaataagcaagagaaagggcaca

SEQ ID NO: 353205 - DNA, 33 bp, Homo sapien
ctgtattacgctccaccctttacttgatgtttt

SEQ ID NO: 353206 - DNA, 33 bp, Homo sapien
ctgtattacgctccactctttacttgatgtttt

SEQ ID NO: 353207 - DNA, 33 bp, Homo sapien
taactgcttcctgtgcacatgttcagaaaggtc

SEQ ID NO: 353208 - DNA, 33 bp, Homo sapien
taactgcttcctgtgcgcatgttcagaaaggtc

SEQ ID NO: 353209 - DNA, 33 bp, Homo sapien
tcactttctccacttacaaaacagaaatcggaa

SEQ ID NO: 353210 - DNA, 33 bp, Homo sapien
tcactttctccacttataaaacagaaatcggaa

SEQ ID NO: 353211 - DNA, 33 bp, Homo sapien
atcatgggtctctagcagcattaatttggcagc

SEQ ID NO: 353212 - DNA, 33 bp, Homo sapien
atcatgggtctctagcggcattaatttggcagc

SEQ ID NO: 353213 - DNA, 33 bp, Homo sapien
atttatcatcaccagaatagatactgtggaccg

SEQ ID NO: 353214 - DNA, 33 bp, Homo sapien
atttatcatcaccagagtagatactgtggaccg

SEQ ID NO: 353215 - DNA, 33 bp, Homo sapien
atagtgcagttcttccaagaatgtgggacatgg

SEQ ID NO: 353216 - DNA, 33 bp, Homo sapien
atagtgcagttcttccgagaatgtgggacatgg

SEQ ID NO: 353217 - DNA, 33 bp, Homo sapien
tgtccaactcaaacaactgaaaatctctataag

SEQ ID NO: 353218 - DNA, 33 bp, Homo sapien
tgtccaactcaaacaattgaaaatctctataag

SEQ ID NO: 353219 - DNA, 33 bp, Homo sapien
atcctgcgtcctcagagaagccttacctcctcc

SEQ ID NO: 353220 - DNA, 33 bp, Homo sapien
atcctgcgtcctcagataagccttacctcctcc

SEQ ID NO: 353221 - DNA, 33 bp, Homo sapien
ccttcaaaaatctaacacttgaccctagggaca

SEQ ID NO: 353222 - DNA, 33 bp, Homo sapien
ccttcaaaaatctaacgcttgaccctagggaca

SEQ ID NO: 353223 - DNA, 33 bp, Homo sapien
tgtgctctgctcagcgacccgcttcagcagaat

SEQ ID NO: 353224 - DNA, 33 bp, Homo sapien
tgtgctctgctcagcgtcccgcttcagcagaat

SEQ ID NO: 353225 - DNA, 33 bp, Homo sapien
ctattcacactgccagaaacacttccctcagac

SEQ ID NO: 353226 - DNA, 33 bp, Homo sapien
ctattcacactgccaggaacacttccctcagac

SEQ ID NO: 353227 - DNA, 33 bp, Homo sapien
ctcctaaatgtaagcaaacttcttcagccctcg

SEQ ID NO: 353228 - DNA, 33 bp, Homo sapien
ctcctaaatgtaagcacacttcttcagccctcg

SEQ ID NO: 353229 - DNA, 33 bp, Homo sapien
tggtacatacttcagcacatacatactatgtct

SEQ ID NO: 353230 - DNA, 33 bp, Homo sapien
tggtacatacttcagcgcatacatactatgtct

SEQ ID NO: 353231 - DNA, 33 bp, Homo sapien
ctcttctgaaatgacacggacccttgtggagtc

SEQ ID NO: 353232 - DNA, 33 bp, Homo sapien
ctcttctgaaatgacatggacccttgtggagtc

SEQ ID NO: 353233 - DNA, 33 bp, Homo sapien
attcctgaagctggagaagagcagtgcaagata

SEQ ID NO: 353234 - DNA, 33 bp, Homo sapien
attcctgaagctggagtagagcagtgcaagata

SEQ ID NO: 353235 - DNA, 33 bp, Homo sapien
ctctgcctgccacttaaaagttggtatccccat

SEQ ID NO: 353236 - DNA, 33 bp, Homo sapien
ctctgcctgccacttagaagttggtatccccat

SEQ ID NO: 353237 - DNA, 33 bp, Homo sapien
gtctgtcaagtaagcaaccaagttaataagtga

SEQ ID NO: 353238 - DNA, 33 bp, Homo sapien
gtctgtcaagtaagcacccaagttaataagtga

SEQ ID NO: 353239 - DNA, 33 bp, Homo sapien
cattagacaaatgttacggaggctgaatatttt

SEQ ID NO: 353240 - DNA, 33 bp, Homo sapien
cattagacaaatgttatggaggctgaatatttt

SEQ ID NO: 353241 - DNA, 33 bp, Homo sapien
tgctaagtgcaccgataagataggcacagaaca

SEQ ID NO: 353242 - DNA, 33 bp, Homo sapien
tgctaagtgcaccgatgagataggcacagaaca

SEQ ID NO: 353243 - DNA, 33 bp, Homo sapien
tgatagagttgtacacaagacaaagtccctgcc

SEQ ID NO: 353244 - DNA, 33 bp, Homo sapien
tgatagagttgtacacgagacaaagtccctgcc

SEQ ID NO: 353245 - DNA, 33 bp, Homo sapien
acacaaagcattttgaataacgcctgacaaaaa

SEQ ID NO: 353246 - DNA, 33 bp, Homo sapien
acacaaagcattttgagtaacgcctgacaaaaa

SEQ ID NO: 353247 - DNA, 33 bp, Homo sapien
aggaaatcttccaaaaagcagagggaaataatg

SEQ ID NO: 353248 - DNA, 33 bp, Homo sapien
aggaaatcttccaaaatgcagagggaaataatg

SEQ ID NO: 353249 - DNA, 33 bp, Homo sapien
agacataaatctaaaaatctgcaaacaaattca

SEQ ID NO: 353250 - DNA, 33 bp, Homo sapien
agacataaatctaaaactctgcaaacaaattca

SEQ ID NO: 353251 - DNA, 33 bp, Homo sapien
tcacagcaactgtgcccagtcttcatagattat

SEQ ID NO: 353252 - DNA, 33 bp, Homo sapien
tcacagcaactgtgcctagtcttcatagattat

SEQ ID NO: 353253 - DNA, 33 bp, Homo sapien
tgtggcttccagtccaaagaaaatgcttggtta

SEQ ID NO: 353254 - DNA, 33 bp, Homo sapien
tgtggcttccagtccagagaaaatgcttggtta

SEQ ID NO: 353255 - DNA, 33 bp, Homo sapien
attatgaaatgccaccccaaaattcaacagttg

SEQ ID NO: 353256 - DNA, 33 bp, Homo sapien
attatgaaatgccacctcaaaattcaacagttg

SEQ ID NO: 353257 - DNA, 33 bp, Homo sapien
ttcttttagcattttgcacttcatttaaacacc

SEQ ID NO: 353258 - DNA, 33 bp, Homo sapien
ttcttttagcattttggacttcatttaaacacc

SEQ ID NO: 353259 - DNA, 33 bp, Homo sapien
ttccattgtatttctgaattaccatatgaaaaa

SEQ ID NO: 353260 - DNA, 33 bp, Homo sapien
ttccattgtatttctggattaccatatgaaaaa

SEQ ID NO: 353261 - DNA, 33 bp, Homo sapien
aacttagtgcttttaactaagttgtatatagca

SEQ ID NO: 353262 - DNA, 33 bp, Homo sapien
aacttagtgcttttaattaagttgtatatagca

SEQ ID NO: 353263 - DNA, 33 bp, Homo sapien
cactgctgattctggaagaagaatatatgtggg

SEQ ID NO: 353264 - DNA, 33 bp, Homo sapien
cactgctgattctggaggaagaatatatgtggg

SEQ ID NO: 353265 - DNA, 33 bp, Homo sapien
caaaggtaaggttaaaattctgcaaataaaggt

SEQ ID NO: 353266 - DNA, 33 bp, Homo sapien
caaaggtaaggttaaagttctgcaaataaaggt

SEQ ID NO: 353267 - DNA, 33 bp, Homo sapien
gtataggatagtgaaacgttacaaatatgaact

SEQ ID NO: 353268 - DNA, 33 bp, Homo sapien
gtataggatagtgaaatgttacaaatatgaact

SEQ ID NO: 353269 - DNA, 33 bp, Homo sapien
acatattgctcaataaatgctgccgaatggagg

SEQ ID NO: 353270 - DNA, 33 bp, Homo sapien
acatattgctcaataagtgctgccgaatggagg

SEQ ID NO: 353271 - DNA, 33 bp, Homo sapien
tcacaccattgcgatacaggtttatgtatgtat

SEQ ID NO: 353272 - DNA, 33 bp, Homo sapien
tcacaccattgcgatataggtttatgtatgtat

SEQ ID NO: 353273 - DNA, 33 bp, Homo sapien
cacatggactcattatgataaaccagcctaaca

SEQ ID NO: 353274 - DNA, 33 bp, Homo sapien
cacatggactcattattataaaccagcctaaca

SEQ ID NO: 353275 - DNA, 33 bp, Homo sapien
cccaccctcttcggctaaaataggcatgtgtcc

SEQ ID NO: 353276 - DNA, 33 bp, Homo sapien
cccaccctcttcggctgaaataggcatgtgtcc

SEQ ID NO: 353277 - DNA, 33 bp, Homo sapien
atacccaatgtggaagaccttctcagcattccc

SEQ ID NO: 353278 - DNA, 33 bp, Homo sapien
atacccaatgtggaagtccttctcagcattccc

SEQ ID NO: 353279 - DNA, 33 bp, Homo sapien
ttgttcttgtttctgaagcccatcagtatcttg

SEQ ID NO: 353280 - DNA, 33 bp, Homo sapien
ttgttcttgtttctgaggcccatcagtatcttg

SEQ ID NO: 353281 - DNA, 33 bp, Homo sapien
tcttataaaatgtgaccgacttttaagggtcaa

SEQ ID NO: 353282 - DNA, 33 bp, Homo sapien
tcttataaaatgtgactgacttttaagggtcaa

SEQ ID NO: 353283 - DNA, 33 bp, Homo sapien
aaggagacattctctccgacccagcaaggagac

SEQ ID NO: 353284 - DNA, 33 bp, Homo sapien
aaggagacattctctctgacccagcaaggagac

SEQ ID NO: 353285 - DNA, 33 bp, Homo sapien
ttaacatagaaacagaagaccaaatatcatatg

SEQ ID NO: 353286 - DNA, 33 bp, Homo sapien
ttaacatagaaacagaggaccaaatatcatatg

SEQ ID NO: 353287 - DNA, 33 bp, Homo sapien
agaggcaatatggggacgtggtatgcaccctgc

SEQ ID NO: 353288 - DNA, 33 bp, Homo sapien
agaggcaatatggggatgtggtatgcaccctgc

SEQ ID NO: 353289 - DNA, 33 bp, Homo sapien
tagactagacagaaccaatttatgtgatatgac

SEQ ID NO: 353290 - DNA, 33 bp, Homo sapien
tagactagacagaacccatttatgtgatatgac

SEQ ID NO: 353291 - DNA, 33 bp, Homo sapien
tatgagcacaccttcagccctctaagctacacc

SEQ ID NO: 353292 - DNA, 33 bp, Homo sapien
tatgagcacaccttcatccctctaagctacacc

SEQ ID NO: 353293 - DNA, 33 bp, Homo sapien
aggaaacagtgactgacatctgagcaaagcgcc

SEQ ID NO: 353294 - DNA, 33 bp, Homo sapien
aggaaacagtgactgagatctgagcaaagcgcc

SEQ ID NO: 353295 - DNA, 33 bp, Homo sapien
ttggcagttagtgtagaaaccgagatctctagg

SEQ ID NO: 353296 - DNA, 33 bp, Homo sapien
ttggcagttagtgtaggaaccgagatctctagg

SEQ ID NO: 353297 - DNA, 33 bp, Homo sapien
catataaattgtcatcgacagtttgttttgttt

SEQ ID NO: 353298 - DNA, 33 bp, Homo sapien
catataaattgtcatctacagtttgttttgttt

SEQ ID NO: 353299 - DNA, 33 bp, Homo sapien
ggaaccaaggtctccacgttttctatccagcct

SEQ ID NO: 353300 - DNA, 33 bp, Homo sapien
ggaaccaaggtctccatgttttctatccagcct

SEQ ID NO: 353301 - DNA, 33 bp, Homo sapien
cctgcagagaacgaagaacaggaaacttgcccc

SEQ ID NO: 353302 - DNA, 33 bp, Homo sapien
cctgcagagaacgaaggacaggaaacttgcccc

SEQ ID NO: 353303 - DNA, 33 bp, Homo sapien
atttagcagtctcaaaagtagctctgtgcagga

SEQ ID NO: 353304 - DNA, 33 bp, Homo sapien
atttagcagtctcaaatgtagctctgtgcagga

SEQ ID NO: 353305 - DNA, 33 bp, Homo sapien
agagagagagaaataacggctccttggagaaag

SEQ ID NO: 353306 - DNA, 33 bp, Homo sapien
agagagagagaaataatggctccttggagaaag

SEQ ID NO: 353307 - DNA, 33 bp, Homo sapien
ctatcaggttccacaacgagaaagtaagtattt

SEQ ID NO: 353308 - DNA, 33 bp, Homo sapien
ctatcaggttccacaatgagaaagtaagtattt

SEQ ID NO: 353309 - DNA, 33 bp, Homo sapien
ccatccaaacctgtaacgtgaccatgtgtgtgc

SEQ ID NO: 353310 - DNA, 33 bp, Homo sapien
ccatccaaacctgtaaggtgaccatgtgtgtgc

SEQ ID NO: 353311 - DNA, 33 bp, Homo sapien
ccactccttttactccaaatacaatcatgacaa

SEQ ID NO: 353312 - DNA, 33 bp, Homo sapien
ccactccttttactccgaatacaatcatgacaa

SEQ ID NO: 353313 - DNA, 33 bp, Homo sapien
tattttaagactaggaatcaatggactcacaga

SEQ ID NO: 353314 - DNA, 33 bp, Homo sapien
tattttaagactaggactcaatggactcacaga

SEQ ID NO: 353315 - DNA, 33 bp, Homo sapien
tgagcccgctgtcaacggcactaaaagcaacca

SEQ ID NO: 353316 - DNA, 33 bp, Homo sapien
tgagcccgctgtcaactgcactaaaagcaacca

SEQ ID NO: 353317 - DNA, 33 bp, Homo sapien
tgtcaagtgaagaaggaaggcattacaaggggt

SEQ ID NO: 353318 - DNA, 33 bp, Homo sapien
tgtcaagtgaagaagggaggcattacaaggggt

SEQ ID NO: 353319 - DNA, 33 bp, Homo sapien
gatggagaaaagcaaacggttgtattttgaaag

SEQ ID NO: 353320 - DNA, 33 bp, Homo sapien
gatggagaaaagcaaatggttgtattttgaaag

SEQ ID NO: 353321 - DNA, 33 bp, Homo sapien
atccaaaaagaacaaacaggcaccaggcaagaa

SEQ ID NO: 353322 - DNA, 33 bp, Homo sapien
atccaaaaagaacaaagaggcaccaggcaagaa

SEQ ID NO: 353323 - DNA, 33 bp, Homo sapien
cagtgcaaatggtttaactgggaggtgacccca

SEQ ID NO: 353324 - DNA, 33 bp, Homo sapien
cagtgcaaatggtttatctgggaggtgacccca

SEQ ID NO: 353325 - DNA, 33 bp, Homo sapien
ataccgagaattgtgccaactgtaaacctgagt

SEQ ID NO: 353326 - DNA, 33 bp, Homo sapien
ataccgagaattgtgctaactgtaaacctgagt

SEQ ID NO: 353327 - DNA, 33 bp, Homo sapien
atcccacttcataatacgggtagcatttacagt

SEQ ID NO: 353328 - DNA, 33 bp, Homo sapien
atcccacttcataatatgggtagcatttacagt

SEQ ID NO: 353329 - DNA, 33 bp, Homo sapien
acattttaagactcaacgaagaagactcttact

SEQ ID NO: 353330 - DNA, 33 bp, Homo sapien
acattttaagactcaatgaagaagactcttact

SEQ ID NO: 353331 - DNA, 33 bp, Homo sapien
aggcttatttttctcacctagcatgaagtccag

SEQ ID NO: 353332 - DNA, 33 bp, Homo sapien
aggcttatttttctcatctagcatgaagtccag

SEQ ID NO: 353333 - DNA, 33 bp, Homo sapien
agtgatcaagagacagaaattggagtcaggact

SEQ ID NO: 353334 - DNA, 33 bp, Homo sapien
agtgatcaagagacaggaattggagtcaggact

SEQ ID NO: 353335 - DNA, 33 bp, Homo sapien
gaagatgactattcaaattcaactccgatgcac

SEQ ID NO: 353336 - DNA, 33 bp, Homo sapien
gaagatgactattcaagttcaactccgatgcac

SEQ ID NO: 353337 - DNA, 33 bp, Homo sapien
ctctgaaatataattaagtggcctaaacagcta

SEQ ID NO: 353338 - DNA, 33 bp, Homo sapien
ctctgaaatataattacgtggcctaaacagcta

SEQ ID NO: 353339 - DNA, 33 bp, Homo sapien
aaaagcagaaacgaatgatcatgactcttaacc

SEQ ID NO: 353340 - DNA, 33 bp, Homo sapien
aaaagcagaaacgaattatcatgactcttaacc

SEQ ID NO: 353341 - DNA, 33 bp, Homo sapien
tcttaaacatttcaacaatcttggcaaatagct

SEQ ID NO: 353342 - DNA, 33 bp, Homo sapien
tcttaaacatttcaacgatcttggcaaatagct

SEQ ID NO: 353343 - DNA, 33 bp, Homo sapien
tccttttagaaacacacgagcaaattgcagtga

SEQ ID NO: 353344 - DNA, 33 bp, Homo sapien
tccttttagaaacacatgagcaaattgcagtga

SEQ ID NO: 353345 - DNA, 33 bp, Homo sapien
aaacacaagctgcctacaaagatttgaaaaaaa

SEQ ID NO: 353346 - DNA, 33 bp, Homo sapien
aaacacaagctgcctataaagatttgaaaaaaa

SEQ ID NO: 353347 - DNA, 33 bp, Homo sapien
ttgtcctgtattaatagcattttaggtcaaacc

SEQ ID NO: 353348 - DNA, 33 bp, Homo sapien
ttgtcctgtattaatatcattttaggtcaaacc

SEQ ID NO: 353349 - DNA, 33 bp, Homo sapien
actgttccgcagccacaatgaaccatagaaatg

SEQ ID NO: 353350 - DNA, 33 bp, Homo sapien
actgttccgcagccacgatgaaccatagaaatg

SEQ ID NO: 353351 - DNA, 33 bp, Homo sapien
tatcagtcaaaagtcaaaaaggatcccttcatt

SEQ ID NO: 353352 - DNA, 33 bp, Homo sapien
tatcagtcaaaagtcagaaaggatcccttcatt

SEQ ID NO: 353353 - DNA, 33 bp, Homo sapien
tgtttatccccaagcaccaggcagtatcggcat

SEQ ID NO: 353354 - DNA, 33 bp, Homo sapien
tgtttatccccaagcatcaggcagtatcggcat

SEQ ID NO: 353355 - DNA, 33 bp, Homo sapien
agagtggtgtgcttggcaaaatctatgctatgc

SEQ ID NO: 353356 - DNA, 33 bp, Homo sapien
agagtggtgtgcttggtaaaatctatgctatgc

SEQ ID NO: 353357 - DNA, 33 bp, Homo sapien
aatttaagtacaggcaactaaagaatgatttgc

SEQ ID NO: 353358 - DNA, 33 bp, Homo sapien
aatttaagtacaggcagctaaagaatgatttgc

SEQ ID NO: 353359 - DNA, 33 bp, Homo sapien
tgtcagtaacaggtaaactatctgcctgcagaa

SEQ ID NO: 353360 - DNA, 33 bp, Homo sapien
tgtcagtaacaggtaagctatctgcctgcagaa

SEQ ID NO: 353361 - DNA, 33 bp, Homo sapien
tttcataattctatcaaaatctataagagtaga

SEQ ID NO: 353362 - DNA, 33 bp, Homo sapien
tttcataattctatcataatctataagagtaga

SEQ ID NO: 353363 - DNA, 33 bp, Homo sapien
gtggtcatgaaagggacgatttttacacactga

SEQ ID NO: 353364 - DNA, 33 bp, Homo sapien
gtggtcatgaaagggatgatttttacacactga

SEQ ID NO: 353365 - DNA, 33 bp, Homo sapien
ccagcattcccgttaccgcatatatacccaaag

SEQ ID NO: 353366 - DNA, 33 bp, Homo sapien
ccagcattcccgttactgcatatatacccaaag

SEQ ID NO: 353367 - DNA, 33 bp, Homo sapien
tggagtacggttatgaagatgaaatgagttatg

SEQ ID NO: 353368 - DNA, 33 bp, Homo sapien
tggagtacggttatgaggatgaaatgagttatg

SEQ ID NO: 353369 - DNA, 33 bp, Homo sapien
catagtaagtagccaacaagtgtagttgctatt

SEQ ID NO: 353370 - DNA, 33 bp, Homo sapien
catagtaagtagccaataagtgtagttgctatt

SEQ ID NO: 353371 - DNA, 33 bp, Homo sapien
cttctctctgggagctcacagtttctttgtggg

SEQ ID NO: 353372 - DNA, 33 bp, Homo sapien
cttctctctgggagcttacagtttctttgtggg

SEQ ID NO: 353373 - DNA, 33 bp, Homo sapien
attctgctctgtgggtcaagccaggggtggtct

SEQ ID NO: 353374 - DNA, 33 bp, Homo sapien
attctgctctgtgggtgaagccaggggtggtct

SEQ ID NO: 353375 - DNA, 33 bp, Homo sapien
ataaataaataaagtaccatagacctagacata

SEQ ID NO: 353376 - DNA, 33 bp, Homo sapien
ataaataaataaagtatcatagacctagacata

SEQ ID NO: 353377 - DNA, 33 bp, Homo sapien
acttgccacaagtccaatcattttacatagagt

SEQ ID NO: 353378 - DNA, 33 bp, Homo sapien
acttgccacaagtccagtcattttacatagagt

SEQ ID NO: 353379 - DNA, 33 bp, Homo sapien
ttatctcatactccacactgccatgtccctagt

SEQ ID NO: 353380 - DNA, 33 bp, Homo sapien
ttatctcatactccacgctgccatgtccctagt

SEQ ID NO: 353381 - DNA, 33 bp, Homo sapien
tggagagtgggaggtccaagatcatggttccag

SEQ ID NO: 353382 - DNA, 33 bp, Homo sapien
tggagagtgggaggtctaagatcatggttccag

SEQ ID NO: 353383 - DNA, 33 bp, Homo sapien
atctaaggtagtgtgaaaagtagagtcccctac

SEQ ID NO: 353384 - DNA, 33 bp, Homo sapien
atctaaggtagtgtgacaagtagagtcccctac

SEQ ID NO: 353385 - DNA, 33 bp, Homo sapien
aaattgcagctttaaacagagtgttcagggcag

SEQ ID NO: 353386 - DNA, 33 bp, Homo sapien
aaattgcagctttaaatagagtgttcagggcag

SEQ ID NO: 353387 - DNA, 33 bp, Homo sapien
attctagaccttgatcgacacattgtaaagggt

SEQ ID NO: 353388 - DNA, 33 bp, Homo sapien
attctagaccttgatctacacattgtaaagggt

SEQ ID NO: 353389 - DNA, 33 bp, Homo sapien
agtggcccgaatcaaactggcagccatggcatt

SEQ ID NO: 353390 - DNA, 33 bp, Homo sapien
agtggcccgaatcaaattggcagccatggcatt

SEQ ID NO: 353391 - DNA, 33 bp, Homo sapien
cctctttgcaatacaaatacaacagacccttga

SEQ ID NO: 353392 - DNA, 33 bp, Homo sapien
cctctttgcaatacaagtacaacagacccttga

SEQ ID NO: 353393 - DNA, 33 bp, Homo sapien
ctaatgcaagctcgaaaccatttagagaactac

SEQ ID NO: 353394 - DNA, 33 bp, Homo sapien
ctaatgcaagctcgaagccatttagagaactac

SEQ ID NO: 353395 - DNA, 33 bp, Homo sapien
tttccaccctatcttccagcttggactttaatg

SEQ ID NO: 353396 - DNA, 33 bp, Homo sapien
tttccaccctatcttctagcttggactttaatg

SEQ ID NO: 353397 - DNA, 33 bp, Homo sapien
ccagagttcatcagcaatcttattaaatatctg

SEQ ID NO: 353398 - DNA, 33 bp, Homo sapien
ccagagttcatcagcagtcttattaaatatctg

SEQ ID NO: 353399 - DNA, 33 bp, Homo sapien
gtccctgaatcatcacactgagtggtctttttc

SEQ ID NO: 353400 - DNA, 33 bp, Homo sapien
gtccctgaatcatcacgctgagtggtctttttc

SEQ ID NO: 353401 - DNA, 33 bp, Homo sapien
gaggactatggtctggaagaatatgttggtaat

SEQ ID NO: 353402 - DNA, 33 bp, Homo sapien
gaggactatggtctggtagaatatgttggtaat

SEQ ID NO: 353403 - DNA, 33 bp, Homo sapien
acagcatcctgcctgacgaccagatgccagtga

SEQ ID NO: 353404 - DNA, 33 bp, Homo sapien
acagcatcctgcctgatgaccagatgccagtga

SEQ ID NO: 353405 - DNA, 33 bp, Homo sapien
ctggtcagccagcttgcaaatttagtccaagac

SEQ ID NO: 353406 - DNA, 33 bp, Homo sapien
ctggtcagccagcttggaaatttagtccaagac

SEQ ID NO: 353407 - DNA, 33 bp, Homo sapien
ccacaagataaccatacaaagctcttaatttca

SEQ ID NO: 353408 - DNA, 33 bp, Homo sapien
ccacaagataaccatagaaagctcttaatttca

SEQ ID NO: 353409 - DNA, 33 bp, Homo sapien
cagctcctattgattccagcacctttgaacttt

SEQ ID NO: 353410 - DNA, 33 bp, Homo sapien
cagctcctattgattctagcacctttgaacttt

SEQ ID NO: 353411 - DNA, 33 bp, Homo sapien
aattaaactgtcccataaagcattaccttgaag

SEQ ID NO: 353412 - DNA, 33 bp, Homo sapien
aattaaactgtcccatgaagcattaccttgaag

SEQ ID NO: 353413 - DNA, 33 bp, Homo sapien
ccacttgaagagttcaatatgtgtcaccaacag

SEQ ID NO: 353414 - DNA, 33 bp, Homo sapien
ccacttgaagagttcagtatgtgtcaccaacag

SEQ ID NO: 353415 - DNA, 33 bp, Homo sapien
ctccagtgaattaaacgaacacatatcctgcct

SEQ ID NO: 353416 - DNA, 33 bp, Homo sapien
ctccagtgaattaaactaacacatatcctgcct

SEQ ID NO: 353417 - DNA, 33 bp, Homo sapien
tcctccaaggctgaaacgagaaaaaatgttaaa

SEQ ID NO: 353418 - DNA, 33 bp, Homo sapien
tcctccaaggctgaaatgagaaaaaatgttaaa

SEQ ID NO: 353419 - DNA, 33 bp, Homo sapien
aaataagcacacaaaaatatgttcaacactact

SEQ ID NO: 353420 - DNA, 33 bp, Homo sapien
aaataagcacacaaaagtatgttcaacactact

SEQ ID NO: 353421 - DNA, 33 bp, Homo sapien
acaaagtagatacacaagaaactttagaaagca

SEQ ID NO: 353422 - DNA, 33 bp, Homo sapien
acaaagtagatacacaggaaactttagaaagca

SEQ ID NO: 353423 - DNA, 33 bp, Homo sapien
gcattcctacttaaagcctacaaataccagtga

SEQ ID NO: 353424 - DNA, 33 bp, Homo sapien
gcattcctacttaaagtctacaaataccagtga

SEQ ID NO: 353425 - DNA, 33 bp, Homo sapien
atatcatatactgacactgtatttgctaaaatg

SEQ ID NO: 353426 - DNA, 33 bp, Homo sapien
atatcatatactgacattgtatttgctaaaatg

SEQ ID NO: 353427 - DNA, 33 bp, Homo sapien
ctacctacacctctccactaaagggtcattttg

SEQ ID NO: 353428 - DNA, 33 bp, Homo sapien
ctacctacacctctccgctaaagggtcattttg

SEQ ID NO: 353429 - DNA, 33 bp, Homo sapien
acatgtgacacctggaccagtgccttttacttt

SEQ ID NO: 353430 - DNA, 33 bp, Homo sapien
acatgtgacacctggatcagtgccttttacttt

SEQ ID NO: 353431 - DNA, 33 bp, Homo sapien
ttcctcgctgagaaggcccacaagaaagacaaa

SEQ ID NO: 353432 - DNA, 33 bp, Homo sapien
ttcctcgctgagaaggtccacaagaaagacaaa

SEQ ID NO: 353433 - DNA, 33 bp, Homo sapien
catgcatgcaaacaaaattgtgttacagtattg

SEQ ID NO: 353434 - DNA, 33 bp, Homo sapien
catgcatgcaaacaaagttgtgttacagtattg

SEQ ID NO: 353435 - DNA, 33 bp, Homo sapien
atttctgttgttcatacattgaagcttttactt

SEQ ID NO: 353436 - DNA, 33 bp, Homo sapien
atttctgttgttcatatattgaagcttttactt

SEQ ID NO: 353437 - DNA, 33 bp, Homo sapien
acatgatacagttgaaaatgctgtcaaagttaa

SEQ ID NO: 353438 - DNA, 33 bp, Homo sapien
acatgatacagttgaatatgctgtcaaagttaa

SEQ ID NO: 353439 - DNA, 33 bp, Homo sapien
atgccctgattattcccacaaaaggtcctggac

SEQ ID NO: 353440 - DNA, 33 bp, Homo sapien
atgccctgattattcctacaaaaggtcctggac

SEQ ID NO: 353441 - DNA, 33 bp, Homo sapien
atggatctggattgtaacagtgccagtggaaat

SEQ ID NO: 353442 - DNA, 33 bp, Homo sapien
atggatctggattgtaccagtgccagtggaaat

SEQ ID NO: 353443 - DNA, 33 bp, Homo sapien
tgggatggggcatagacgtatttttttttctgc

SEQ ID NO: 353444 - DNA, 33 bp, Homo sapien
tgggatggggcatagatgtatttttttttctgc

SEQ ID NO: 353445 - DNA, 33 bp, Homo sapien
tgtgccttctcaaagcaaagtaacccacactgc

SEQ ID NO: 353446 - DNA, 33 bp, Homo sapien
tgtgccttctcaaagcgaagtaacccacactgc

SEQ ID NO: 353447 - DNA, 33 bp, Homo sapien
cagatgaggccgtgtacaataatgctagcagct

SEQ ID NO: 353448 - DNA, 33 bp, Homo sapien
cagatgaggccgtgtagaataatgctagcagct

SEQ ID NO: 353449 - DNA, 33 bp, Homo sapien
ataactggattcttcaagtagagattccaacgc

SEQ ID NO: 353450 - DNA, 33 bp, Homo sapien
ataactggattcttcatgtagagattccaacgc

SEQ ID NO: 353451 - DNA, 33 bp, Homo sapien
gcagttcatgtactacaatctcttttttctaaa

SEQ ID NO: 353452 - DNA, 33 bp, Homo sapien
gcagttcatgtactacgatctcttttttctaaa

SEQ ID NO: 353453 - DNA, 33 bp, Homo sapien
taggtttaggtatgaactgataacagtcttctc

SEQ ID NO: 353454 - DNA, 33 bp, Homo sapien
taggtttaggtatgaattgataacagtcttctc

SEQ ID NO: 353455 - DNA, 33 bp, Homo sapien
agatgtttgtttaagaggcagttccaaagctta

SEQ ID NO: 353456 - DNA, 33 bp, Homo sapien
agatgtttgtttaagatgcagttccaaagctta

SEQ ID NO: 353457 - DNA, 33 bp, Homo sapien
cacggcacttcacctcacggacctgcacacccg

SEQ ID NO: 353458 - DNA, 33 bp, Homo sapien
cacggcacttcacctcgcggacctgcacacccg

SEQ ID NO: 353459 - DNA, 33 bp, Homo sapien
gttcaaatacctcccaagcatgttgctgtgcaa

SEQ ID NO: 353460 - DNA, 33 bp, Homo sapien
gttcaaatacctcccacgcatgttgctgtgcaa

SEQ ID NO: 353461 - DNA, 33 bp, Homo sapien
accaacagcacctaaaagcttgagattacaagg

SEQ ID NO: 353462 - DNA, 33 bp, Homo sapien
accaacagcacctaaaggcttgagattacaagg

SEQ ID NO: 353463 - DNA, 33 bp, Homo sapien
cccttataaggctaaactgctgcttacctgagt

SEQ ID NO: 353464 - DNA, 33 bp, Homo sapien
cccttataaggctaaattgctgcttacctgagt

SEQ ID NO: 353465 - DNA, 33 bp, Homo sapien
ctgtgatctatttcaacgtggttcagtaagttc

SEQ ID NO: 353466 - DNA, 33 bp, Homo sapien
ctgtgatctatttcaatgtggttcagtaagttc

SEQ ID NO: 353467 - DNA, 33 bp, Homo sapien
atgaagaatccagacaccaatctccagcttcca

SEQ ID NO: 353468 - DNA, 33 bp, Homo sapien
atgaagaatccagacatcaatctccagcttcca

SEQ ID NO: 353469 - DNA, 33 bp, Homo sapien
agcttcctatgtgatcactctcacaacatcctt

SEQ ID NO: 353470 - DNA, 33 bp, Homo sapien
agcttcctatgtgatcgctctcacaacatcctt

SEQ ID NO: 353471 - DNA, 33 bp, Homo sapien
aaagacatgaaatcaacgtaaatacgcatcaac

SEQ ID NO: 353472 - DNA, 33 bp, Homo sapien
aaagacatgaaatcaatgtaaatacgcatcaac

SEQ ID NO: 353473 - DNA, 33 bp, Homo sapien
ccacctcttggctgaaatagcctcctttatttt

SEQ ID NO: 353474 - DNA, 33 bp, Homo sapien
ccacctcttggctgaagtagcctcctttatttt

SEQ ID NO: 353475 - DNA, 33 bp, Homo sapien
acatttacaaccatgtaaaaaatgcccaataaa

SEQ ID NO: 353476 - DNA, 33 bp, Homo sapien
acatttacaaccatgttaaaaatgcccaataaa

SEQ ID NO: 353477 - DNA, 33 bp, Homo sapien
attataggcgtgagaaaccacggccggcctttt

SEQ ID NO: 353478 - DNA, 33 bp, Homo sapien
attataggcgtgagaagccacggccggcctttt

SEQ ID NO: 353479 - DNA, 33 bp, Homo sapien
tgattcatggacaacagtaacatttttttcctg

SEQ ID NO: 353480 - DNA, 33 bp, Homo sapien
tgattcatggacaacattaacatttttttcctg

SEQ ID NO: 353481 - DNA, 33 bp, Homo sapien
ctgtcctatagctcccaactctcatcaggcatc

SEQ ID NO: 353482 - DNA, 33 bp, Homo sapien
ctgtcctatagctccctactctcatcaggcatc

SEQ ID NO: 353483 - DNA, 33 bp, Homo sapien
ttcccaactctgcattcaatgacatcacattgg

SEQ ID NO: 353484 - DNA, 33 bp, Homo sapien
ttcccaactctgcattgaatgacatcacattgg

SEQ ID NO: 353485 - DNA, 33 bp, Homo sapien
cctgcctctccctgaaacacaagtcaatgagac

SEQ ID NO: 353486 - DNA, 33 bp, Homo sapien
cctgcctctccctgaatcacaagtcaatgagac

SEQ ID NO: 353487 - DNA, 33 bp, Homo sapien
gcctgaagagaatccaaagtatctgcccaggtt

SEQ ID NO: 353488 - DNA, 33 bp, Homo sapien
gcctgaagagaatccagagtatctgcccaggtt

SEQ ID NO: 353489 - DNA, 33 bp, Homo sapien
gctcttggacagaagcactttcctcagtgatct

SEQ ID NO: 353490 - DNA, 33 bp, Homo sapien
gctcttggacagaagctctttcctcagtgatct

SEQ ID NO: 353491 - DNA, 33 bp, Homo sapien
acctcctctttgaatagaaatttagtctttttt

SEQ ID NO: 353492 - DNA, 33 bp, Homo sapien
acctcctctttgaatataaatttagtctttttt

SEQ ID NO: 353493 - DNA, 33 bp, Homo sapien
aaactcccagggggtacgttgtcacaaggaagt

SEQ ID NO: 353494 - DNA, 33 bp, Homo sapien
aaactcccagggggtaggttgtcacaaggaagt

SEQ ID NO: 353495 - DNA, 33 bp, Homo sapien
gctgggagcaagagaacgggcaatgttccctag

SEQ ID NO: 353496 - DNA, 33 bp, Homo sapien
gctgggagcaagagaatgggcaatgttccctag

SEQ ID NO: 353497 - DNA, 33 bp, Homo sapien
gcctgcaatattgataaccctcctaagaacatg

SEQ ID NO: 353498 - DNA, 33 bp, Homo sapien
gcctgcaatattgatagccctcctaagaacatg

SEQ ID NO: 353499 - DNA, 33 bp, Homo sapien
gtttgtaagcgctcaaaacatactgcggtgtat

SEQ ID NO: 353500 - DNA, 33 bp, Homo sapien
gtttgtaagcgctcaacacatactgcggtgtat

SEQ ID NO: 353501 - DNA, 33 bp, Homo sapien
accggtgagttgtgaaatcctcaaagcgttggt

SEQ ID NO: 353502 - DNA, 33 bp, Homo sapien
accggtgagttgtgaagtcctcaaagcgttggt

SEQ ID NO: 353503 - DNA, 33 bp, Homo sapien
gacgtccatagcaatcactagtggaaaggagat

SEQ ID NO: 353504 - DNA, 33 bp, Homo sapien
gacgtccatagcaatccctagtggaaaggagat

SEQ ID NO: 353505 - DNA, 33 bp, Homo sapien
gtgcacaggatcacaaacttttgactctcttcc

SEQ ID NO: 353506 - DNA, 33 bp, Homo sapien
gtgcacaggatcacaaccttttgactctcttcc

SEQ ID NO: 353507 - DNA, 33 bp, Homo sapien
gaacgactctggcagggaaacaagcataaggcc

SEQ ID NO: 353508 - DNA, 33 bp, Homo sapien
gaacgactctggcaggtaaacaagcataaggcc

SEQ ID NO: 353509 - DNA, 33 bp, Homo sapien; identical to SEQ ID NO: 353507

SEQ ID NO: 353510 - DNA, 33 bp, Homo sapien; identical to SEQ ID NO: 353508

SEQ ID NO: 353511 - DNA, 33 bp, Homo sapien
gaggcacttagctagaataaaatttggcaaaac

SEQ ID NO: 353512 - DNA, 33 bp, Homo sapien
gaggcacttagctagagtaaaatttggcaaaac

SEQ ID NO: 353513 - DNA, 33 bp, Homo sapien
ctgtggagccgaagaacggcaggacccatttac

SEQ ID NO: 353514 - DNA, 33 bp, Homo sapien
ctgtggagccgaagaatggcaggacccatttac

SEQ ID NO: 353515 - DNA, 33 bp, Homo sapien; identical to SEQ ID NO: 353513

SEQ ID NO: 353516 - DNA, 33 bp, Homo sapien; identical to SEQ ID NO: 353514

SEQ ID NO: 353517 - DNA, 33 bp, Homo sapien
gccagagagtgggacccagagaagcccagggcc

SEQ ID NO: 353518 - DNA, 33 bp, Homo sapien
gccagagagtgggacctagagaagcccagggcc

SEQ ID NO: 353519 - DNA, 33 bp, Homo sapien
ctgaaatagaacacagacgggaggttttgttat

SEQ ID NO: 353520 - DNA, 33 bp, Homo sapien
ctgaaatagaacacaggcgggaggttttgttat

SEQ ID NO: 353521 - DNA, 33 bp, Homo sapien
tctttacaacaccttacaagtatgggagaagtg

SEQ ID NO: 353522 - DNA, 33 bp, Homo sapien
tctttacaacaccttagaagtatgggagaagtg

SEQ ID NO: 353523 - DNA, 33 bp, Homo sapien; identical to SEQ ID NO: 353521

SEQ ID NO: 353524 - DNA, 33 bp, Homo sapien; identical to SEQ ID NO: 353522

SEQ ID NO: 353525 - DNA, 33 bp, Homo sapien
tgccaaatagcctgaaaagtgtgaaattatgtt

SEQ ID NO: 353526 - DNA, 33 bp, Homo sapien
tgccaaatagcctgaagagtgtgaaattatgtt

SEQ ID NO: 353527 - DNA, 33 bp, Homo sapien
gggataggagttggacagaatggaggatggagg

SEQ ID NO: 353528 - DNA, 33 bp, Homo sapien
gggataggagttggacggaatggaggatggagg

SEQ ID NO: 353529 - DNA, 33 bp, Homo sapien
gaggcacgtgcacacacgcaacctgggaccacc

SEQ ID NO: 353530 - DNA, 33 bp, Homo sapien
gaggcacgtgcacacaggcaacctgggaccacc

SEQ ID NO: 353531 - DNA, 33 bp, Homo sapien
aatagaactatataaaagaaccattgcaataat

SEQ ID NO: 353532 - DNA, 33 bp, Homo sapien
aatagaactatataaaggaaccattgcaataat

SEQ ID NO: 353533 - DNA, 33 bp, Homo sapien
ctaaaggaaaacagtcacatgtatataattttc

SEQ ID NO: 353534 - DNA, 33 bp, Homo sapien
ctaaaggaaaacagtcgcatgtatataattttc

SEQ ID NO: 353535 - DNA, 33 bp, Homo sapien; identical to SEQ ID NO: 353533

SEQ ID NO: 353536 - DNA, 33 bp, Homo sapien; identical to SEQ ID NO: 353534

SEQ ID NO: 353537 - DNA, 33 bp, Homo sapien
tttttctccttgaacaacttggctagtaataca

SEQ ID NO: 353538 - DNA, 33 bp, Homo sapien
tttttctccttgaacagcttggctagtaataca

SEQ ID NO: 353539 - DNA, 33 bp, Homo sapien; identical to SEQ ID NO: 353537

SEQ ID NO: 353540 - DNA, 33 bp, Homo sapien; identical to SEQ ID NO: 353538

SEQ ID NO: 353541 - DNA, 33 bp, Homo sapien
ggactccacgatagcacagaattcagtatgagt

SEQ ID NO: 353542 - DNA, 33 bp, Homo sapien
ggactccacgatagcatagaattcagtatgagt

SEQ ID NO: 353543 - DNA, 33 bp, Homo sapien; identical to SEQ ID NO: 353541

SEQ ID NO: 353544 - DNA, 33 bp, Homo sapien; identical to SEQ ID NO: 353542

SEQ ID NO: 353545 - DNA, 33 bp, Homo sapien
gtagtctggtctagaaatcggtgaattagctgg

SEQ ID NO: 353546 - DNA, 33 bp, Homo sapien
gtagtctggtctagaagtcggtgaattagctgg

SEQ ID NO: 353547 - DNA, 33 bp, Homo sapien
ttggagggaatacattcaaacagtagcaaattt

SEQ ID NO: 353548 - DNA, 33 bp, Homo sapien
ttggagggaatacattgaaacagtagcaaattt

SEQ ID NO: 353549 - DNA, 33 bp, Homo sapien
actgtcagaaaataaacgactgctcttcataaa

SEQ ID NO: 353550 - DNA, 33 bp, Homo sapien
actgtcagaaaataaatgactgctcttcataaa

SEQ ID NO: 353551 - DNA, 33 bp, Homo sapien
tgaaaaatcattcaaacaaatttgtcttagtct

SEQ ID NO: 353552 - DNA, 33 bp, Homo sapien
tgaaaaatcattcaaagaaatttgtcttagtct

SEQ ID NO: 353553 - DNA, 33 bp, Homo sapien
ttgctaattttcttcaactctctgatgatacat

SEQ ID NO: 353554 - DNA, 33 bp, Homo sapien
ttgctaattttcttcagctctctgatgatacat

SEQ ID NO: 353555 - DNA, 33 bp, Homo sapien
gtgcctggtacttagcacatctccatcactatt

SEQ ID NO: 353556 - DNA, 33 bp, Homo sapien
gtgcctggtacttagcccatctccatcactatt

SEQ ID NO: 353557 - DNA, 33 bp, Homo sapien
gccttaactcttaaaacatcttcaaaccaatgt

SEQ ID NO: 353558 - DNA, 33 bp, Homo sapien
gccttaactcttaaaatatcttcaaaccaatgt

SEQ ID NO: 353559 - DNA, 33 bp, Homo sapien
aaaaattagaacggaacaacattggtttgaaga

SEQ ID NO: 353560 - DNA, 33 bp, Homo sapien
aaaaattagaacggaagaacattggtttgaaga

SEQ ID NO: 353561 - DNA, 33 bp, Homo sapien; identical to SEQ ID NO: 353559

SEQ ID NO: 353562 - DNA, 33 bp, Homo sapien; identical to SEQ ID NO: 353560

SEQ ID NO: 353563 - DNA, 33 bp, Homo sapien
tagagtttgtgctcaaagttaagtttcctgggg

SEQ ID NO: 353564 - DNA, 33 bp, Homo sapien
tagagtttgtgctcaaggttaagtttcctgggg

SEQ ID NO: 353565 - DNA, 33 bp, Homo sapien
aggaagctatcctgaacgcttagagacttttct

SEQ ID NO: 353566 - DNA, 33 bp, Homo sapien
aggaagctatcctgaatgcttagagacttttct

SEQ ID NO: 353567 - DNA, 33 bp, Homo sapien; identical to SEQ ID NO: 353565

SEQ ID NO: 353568 - DNA, 33 bp, Homo sapien; identical to SEQ ID NO: 353566

SEQ ID NO: 353569 - DNA, 33 bp, Homo sapien
gcacgctgtggttcccaaatgaatggctctgag

SEQ ID NO: 353570 - DNA, 33 bp, Homo sapien
gcacgctgtggttcccgaatgaatggctctgag

SEQ ID NO: 353571 - DNA, 33 bp, Homo sapien
agagcttatagtgacaaaatggacagagcagtt

SEQ ID NO: 353572 - DNA, 33 bp, Homo sapien
agagcttatagtgacacaatggacagagcagtt

SEQ ID NO: 353573 - DNA, 33 bp, Homo sapien
cctgaatttggagctaaggtaccagtaggggtc

SEQ ID NO: 353574 - DNA, 33 bp, Homo sapien
cctgaatttggagctacggtaccagtaggggtc

SEQ ID NO: 353575 - DNA, 33 bp, Homo sapien
ggctaagtgacgctggcagacttgcccaaggcc

SEQ ID NO: 353576 - DNA, 33 bp, Homo sapien
ggctaagtgacgctggtagacttgcccaaggcc

SEQ ID NO: 353577 - DNA, 33 bp, Homo sapien
caagccccagccggcccgaagcacagcagaagg

SEQ ID NO: 353578 - DNA, 33 bp, Homo sapien
caagccccagccggcctgaagcacagcagaagg

SEQ ID NO: 353579 - DNA, 33 bp, Homo sapien
atggggcgaggctccgaagtctgcaggtcgttg

SEQ ID NO: 353580 - DNA, 33 bp, Homo sapien
atggggcgaggctccgcagtctgcaggtcgttg

SEQ ID NO: 353581 - DNA, 33 bp, Homo sapien
ccttgctctttacataaaatgcctggtcctctc

SEQ ID NO: 353582 - DNA, 33 bp, Homo sapien
ccttgctctttacatacaatgcctggtcctctc

SEQ ID NO: 353583 - DNA, 33 bp, Homo sapien
caaatactgcagaaataacaccaataatggggc

SEQ ID NO: 353584 - DNA, 33 bp, Homo sapien
caaatactgcagaaatgacaccaataatggggc

SEQ ID NO: 353585 - DNA, 33 bp, Homo sapien
cactagcccagcaccaagcactgtatttggatt

SEQ ID NO: 353586 - DNA, 33 bp, Homo sapien
cactagcccagcaccaggcactgtatttggatt

SEQ ID NO: 353587 - DNA, 33 bp, Homo sapien
ggaggaacagtccaaacaaaggaagctgacctt

SEQ ID NO: 353588 - DNA, 33 bp, Homo sapien
ggaggaacagtccaaagaaaggaagctgacctt

SEQ ID NO: 353589 - DNA, 33 bp, Homo sapien
aaccgaatcttctaaccgctggtgtgtttttgc

SEQ ID NO: 353590 - DNA, 33 bp, Homo sapien
aaccgaatcttctaacggctggtgtgtttttgc

SEQ ID NO: 353591 - DNA, 33 bp, Homo sapien
cctggctttccccccaatctccttgcttctcac

SEQ ID NO: 353592 - DNA, 33 bp, Homo sapien
cctggctttccccccagtctccttgcttctcac

SEQ ID NO: 353593 - DNA, 33 bp, Homo sapien
tagccactttcccagaagtcccactggaatcag

SEQ ID NO: 353594 - DNA, 33 bp, Homo sapien
tagccactttcccagatgtcccactggaatcag

SEQ ID NO: 353595 - DNA, 33 bp, Homo sapien
agatatagacctaataggaataaatgtgaagca

SEQ ID NO: 353596 - DNA, 33 bp, Homo sapien
agatatagacctaatatgaataaatgtgaagca

SEQ ID NO: 353597 - DNA, 33 bp, Homo sapien
aaaagggagaaagaacagtgaggcagtaaacca

SEQ ID NO: 353598 - DNA, 33 bp, Homo sapien
aaaagggagaaagaacggtgaggcagtaaacca

SEQ ID NO: 353599 - DNA, 33 bp, Homo sapien
tgtaacacactgtctcaaagaggggatctagga

SEQ ID NO: 353600 - DNA, 33 bp, Homo sapien
tgtaacacactgtctcgaagaggggatctagga

SEQ ID NO: 353601 - DNA, 33 bp, Homo sapien
agcctacaagcaaggaacccagatggtgctgct

SEQ ID NO: 353602 - DNA, 33 bp, Homo sapien
agcctacaagcaaggagcccagatggtgctgct

SEQ ID NO: 353603 - DNA, 33 bp, Homo sapien
cagttaccagtccttaagtaggagaaggacagc

SEQ ID NO: 353604 - DNA, 33 bp, Homo sapien
cagttaccagtccttatgtaggagaaggacagc

SEQ ID NO: 353605 - DNA, 33 bp, Homo sapien
tgcaattggtacagtcaagagaaaaccgtggca

SEQ ID NO: 353606 - DNA, 33 bp, Homo sapien
tgcaattggtacagtcgagagaaaaccgtggca

SEQ ID NO: 353607 - DNA, 33 bp, Homo sapien
ggttctggagagtccactagaaggagagcagtt

SEQ ID NO: 353608 - DNA, 33 bp, Homo sapien
ggttctggagagtccattagaaggagagcagtt

SEQ ID NO: 353609 - DNA, 33 bp, Homo sapien
cattttgggtactagagaatgttccctagaggt

SEQ ID NO: 353610 - DNA, 33 bp, Homo sapien
cattttgggtactagataatgttccctagaggt

SEQ ID NO: 353611 - DNA, 33 bp, Homo sapien
tgctgacctcttcctacactgctatctgccccc

SEQ ID NO: 353612 - DNA, 33 bp, Homo sapien
tgctgacctcttcctatactgctatctgccccc

SEQ ID NO: 353613 - DNA, 33 bp, Homo sapien
aatccagcatggcaacagatccaatatccaggt

SEQ ID NO: 353614 - DNA, 33 bp, Homo sapien
aatccagcatggcaacggatccaatatccaggt

SEQ ID NO: 353615 - DNA, 33 bp, Homo sapien
tccaacaggttatagacactggtgtatgctgaa

SEQ ID NO: 353616 - DNA, 33 bp, Homo sapien
tccaacaggttatagatactggtgtatgctgaa

SEQ ID NO: 353617 - DNA, 33 bp, Homo sapien
cagagggactaattcacgatgactccatgcgta

SEQ ID NO: 353618 - DNA, 33 bp, Homo sapien
cagagggactaattcatgatgactccatgcgta

SEQ ID NO: 353619 - DNA, 33 bp, Homo sapien
gtcttctgacttcaaccgcagatcactgaaaat

SEQ ID NO: 353620 - DNA, 33 bp, Homo sapien
gtcttctgacttcaactgcagatcactgaaaat

SEQ ID NO: 353621 - DNA, 33 bp, Homo sapien
agaagacagtcattcaaccagcaaacctggacc

SEQ ID NO: 353622 - DNA, 33 bp, Homo sapien
agaagacagtcattcacccagcaaacctggacc

SEQ ID NO: 353623 - DNA, 33 bp, Homo sapien
gaacagcagcctcacacagaggccagtctcagc

SEQ ID NO: 353624 - DNA, 33 bp, Homo sapien
gaacagcagcctcacagagaggccagtctcagc

SEQ ID NO: 353625 - DNA, 33 bp, Homo sapien
cagcattctttaagccacttgtccaaagccaca

SEQ ID NO: 353626 - DNA, 33 bp, Homo sapien
cagcattctttaagccgcttgtccaaagccaca

SEQ ID NO: 353627 - DNA, 33 bp, Homo sapien
tcttgtaggagcagtacgtgcccatccctattt

SEQ ID NO: 353628 - DNA, 33 bp, Homo sapien
tcttgtaggagcagtatgtgcccatccctattt

SEQ ID NO: 353629 - DNA, 33 bp, Homo sapien
ttgtgaccgctaaatacaatttcccattaaagg

SEQ ID NO: 353630 - DNA, 33 bp, Homo sapien
ttgtgaccgctaaatataatttcccattaaagg

SEQ ID NO: 353631 - DNA, 33 bp, Homo sapien
cagagaccactctgtggagagccaggaagactg

SEQ ID NO: 353632 - DNA, 33 bp, Homo sapien
cagagaccactctgtgtagagccaggaagactg

SEQ ID NO: 353633 - DNA, 33 bp, Homo sapien
agcagtccccacctccaagtgcctggcaaccta

SEQ ID NO: 353634 - DNA, 33 bp, Homo sapien
agcagtccccacctccgagtgcctggcaaccta

SEQ ID NO: 353635 - DNA, 33 bp, Homo sapien
ccaactgacctagaagactgccagctttggggt

SEQ ID NO: 353636 - DNA, 33 bp, Homo sapien
ccaactgacctagaaggctgccagctttggggt

SEQ ID NO: 353637 - DNA, 33 bp, Homo sapien
ggggcatcttgttctaacccatttaccaactga

SEQ ID NO: 353638 - DNA, 33 bp, Homo sapien
ggggcatcttgttctaccccatttaccaactga

SEQ ID NO: 353639 - DNA, 33 bp, Homo sapien
gtatgtcgaatccctcaccactaaggcctaatt

SEQ ID NO: 353640 - DNA, 33 bp, Homo sapien
gtatgtcgaatccctcgccactaaggcctaatt

SEQ ID NO: 353641 - DNA, 33 bp, Homo sapien
atgatagaaaagatgaaccctcatacagtggct

SEQ ID NO: 353642 - DNA, 33 bp, Homo sapien
atgatagaaaagatgagccctcatacagtggct

SEQ ID NO: 353643 - DNA, 33 bp, Homo sapien
tccttgagatagtgcaggtaaggctcttatcac

SEQ ID NO: 353644 - DNA, 33 bp, Homo sapien
tccttgagatagtgcatgtaaggctcttatcac

SEQ ID NO: 353645 - DNA, 33 bp, Homo sapien
tcacccctgaacccaacagcataacatgaatta

SEQ ID NO: 353646 - DNA, 33 bp, Homo sapien
tcacccctgaacccaatagcataacatgaatta

SEQ ID NO: 353647 - DNA, 33 bp, Homo sapien
aggcaaagattgtgcacgttgaactggaatgag

SEQ ID NO: 353648 - DNA, 33 bp, Homo sapien
aggcaaagattgtgcatgttgaactggaatgag

SEQ ID NO: 353649 - DNA, 33 bp, Homo sapien
tctctggcagtgatgaacaggagacgaagtgcc

SEQ ID NO: 353650 - DNA, 33 bp, Homo sapien
tctctggcagtgatgaccaggagacgaagtgcc

SEQ ID NO: 353651 - DNA, 33 bp, Homo sapien
gggactgcagagtctacatcagacatcccgaaa

SEQ ID NO: 353652 - DNA, 33 bp, Homo sapien
gggactgcagagtctatatcagacatcccgaaa

SEQ ID NO: 353653 - DNA, 33 bp, Homo sapien
tgcatttctggctgtaacctagctacgcctcct

SEQ ID NO: 353654 - DNA, 33 bp, Homo sapien
tgcatttctggctgtaccctagctacgcctcct

SEQ ID NO: 353655 - DNA, 33 bp, Homo sapien
acctttcctctagcaaagaccacattagacttt

SEQ ID NO: 353656 - DNA, 33 bp, Homo sapien
acctttcctctagcaaggaccacattagacttt

SEQ ID NO: 353657 - DNA, 33 bp, Homo sapien
tggcttatatgtgtggaatcttggtcaagggat

SEQ ID NO: 353658 - DNA, 33 bp, Homo sapien
tggcttatatgtgtgggatcttggtcaagggat

SEQ ID NO: 353659 - DNA, 33 bp, Homo sapien
aaccttttttggtgaaggcctatcagtctattt

SEQ ID NO: 353660 - DNA, 33 bp, Homo sapien
aaccttttttggtgaatgcctatcagtctattt

SEQ ID NO: 353661 - DNA, 33 bp, Homo sapien
gattgtggaaatgggcaagcattcttccagtgt

SEQ ID NO: 353662 - DNA, 33 bp, Homo sapien
gattgtggaaatgggcgagcattcttccagtgt

SEQ ID NO: 353663 - DNA, 33 bp, Homo sapien
gcaaaaatgcgcactccagttctcacatcttaa

SEQ ID NO: 353664 - DNA, 33 bp, Homo sapien
gcaaaaatgcgcactctagttctcacatcttaa

SEQ ID NO: 353665 - DNA, 33 bp, Homo sapien
caagagagagtttacacagtttctgtcgtagca

SEQ ID NO: 353666 - DNA, 33 bp, Homo sapien
caagagagagtttacatagtttctgtcgtagca

SEQ ID NO: 353667 - DNA, 33 bp, Homo sapien
ttatttgcttattgaaatagtgaaccttgtttt

SEQ ID NO: 353668 - DNA, 33 bp, Homo sapien
ttatttgcttattgaagtagtgaaccttgtttt

SEQ ID NO: 353669 - DNA, 33 bp, Homo sapien
tagacaccctcaaaataatgtttaaggtcctgt

SEQ ID NO: 353670 - DNA, 33 bp, Homo sapien
tagacaccctcaaaatgatgtttaaggtcctgt

SEQ ID NO: 353671 - DNA, 33 bp, Homo sapien
gacttatctacaggggcatcctaattgcccacc

SEQ ID NO: 353672 - DNA, 33 bp, Homo sapien
gacttatctacaggggtatcctaattgcccacc

SEQ ID NO: 353673 - DNA, 33 bp, Homo sapien
tgcctttccttgcagaatctctttcctaaatgg

SEQ ID NO: 353674 - DNA, 33 bp, Homo sapien
tgcctttccttgcagagtctctttcctaaatgg

SEQ ID NO: 353675 - DNA, 33 bp, Homo sapien
ccttcttgttaagtgaagtaagaagtcctgctg

SEQ ID NO: 353676 - DNA, 33 bp, Homo sapien
ccttcttgttaagtgatgtaagaagtcctgctg

SEQ ID NO: 353677 - DNA, 33 bp, Homo sapien
cactcactttgaacctcaaaaacctgacctggt

SEQ ID NO: 353678 - DNA, 33 bp, Homo sapien
cactcactttgaacctgaaaaacctgacctggt

SEQ ID NO: 353679 - DNA, 33 bp, Homo sapien
gacgcaaccatggccaatgagatgtatggggtg

SEQ ID NO: 353680 - DNA, 33 bp, Homo sapien
gacgcaaccatggccagtgagatgtatggggtg

SEQ ID NO: 353681 - DNA, 33 bp, Homo sapien
aggactagctgaataacgtgtgggacccattgc

SEQ ID NO: 353682 - DNA, 33 bp, Homo sapien
aggactagctgaataatgtgtgggacccattgc

SEQ ID NO: 353683 - DNA, 33 bp, Homo sapien
ctgtcgtagaaaccaacagtgcagtcatgcggc

SEQ ID NO: 353684 - DNA, 33 bp, Homo sapien
ctgtcgtagaaaccaagagtgcagtcatgcggc

SEQ ID NO: 353685 - DNA, 33 bp, Homo sapien
tcccagctctgccatcaattagaccttgagctc

SEQ ID NO: 353686 - DNA, 33 bp, Homo sapien
tcccagctctgccatctattagaccttgagctc

SEQ ID NO: 353687 - DNA, 33 bp, Homo sapien
aaagctggtcagggacaggtttcaggtaacaga

SEQ ID NO: 353688 - DNA, 33 bp, Homo sapien
aaagctggtcagggacgggtttcaggtaacaga

SEQ ID NO: 353689 - DNA, 33 bp, Homo sapien
tctgtagcttagcagaagaccaaagaatgggaa

SEQ ID NO: 353690 - DNA, 33 bp, Homo sapien
tctgtagcttagcagaggaccaaagaatgggaa

SEQ ID NO: 353691 - DNA, 33 bp, Homo sapien
tcacacactgaatgccgcgagtactcacatttc

SEQ ID NO: 353692 - DNA, 33 bp, Homo sapien
tcacacactgaatgcctcgagtactcacatttc

SEQ ID NO: 353693 - DNA, 33 bp, Homo sapien
gctcttggcaagagaacggacactcaggaggaa

SEQ ID NO: 353694 - DNA, 33 bp, Homo sapien
gctcttggcaagagaatggacactcaggaggaa

SEQ ID NO: 353695 - DNA, 33 bp, Homo sapien
ggagaaactactggaaagagaggtaagtatata

SEQ ID NO: 353696 - DNA, 33 bp, Homo sapien
ggagaaactactggaacgagaggtaagtatata

SEQ ID NO: 353697 - DNA, 33 bp, Homo sapien
aatccgagatcttcttcaaacatgtcactgaga

SEQ ID NO: 353698 - DNA, 33 bp, Homo sapien
aatccgagatcttctttaaacatgtcactgaga

SEQ ID NO: 353699 - DNA, 33 bp, Homo sapien
aaagagtcaggagataccagttcttaggtgtgg

SEQ ID NO: 353700 - DNA, 33 bp, Homo sapien
aaagagtcaggagatagcagttcttaggtgtgg

SEQ ID NO: 353701 - DNA, 33 bp, Homo sapien
cccagcgtgcgcgacacggaagacgggtgattt

SEQ ID NO: 353702 - DNA, 33 bp, Homo sapien
cccagcgtgcgcgacatggaagacgggtgattt

SEQ ID NO: 353703 - DNA, 33 bp, Homo sapien
ttgagttgtgtaactacgggccagtctcatact

SEQ ID NO: 353704 - DNA, 33 bp, Homo sapien
ttgagttgtgtaactatgggccagtctcatact

SEQ ID NO: 353705 - DNA, 33 bp, Homo sapien
gtaaactcaggaccaccagaagatttgaatagc

SEQ ID NO: 353706 - DNA, 33 bp, Homo sapien
gtaaactcaggaccactagaagatttgaatagc

SEQ ID NO: 353707 - DNA, 33 bp, Homo sapien
ctggctgccccaatcacgtcagtcctggcctgg

SEQ ID NO: 353708 - DNA, 33 bp, Homo sapien
ctggctgccccaatcatgtcagtcctggcctgg

SEQ ID NO: 353709 - DNA, 33 bp, Homo sapien
agacctactcctgttgcaccaagaaatactgct

SEQ ID NO: 353710 - DNA, 33 bp, Homo sapien
agacctactcctgttgtaccaagaaatactgct

SEQ ID NO: 353711 - DNA, 33 bp, Homo sapien
agctgttagttcaaggaatagagccacttctga

SEQ ID NO: 353712 - DNA, 33 bp, Homo sapien
agctgttagttcaaggtatagagccacttctga

SEQ ID NO: 353713 - DNA, 33 bp, Homo sapien
actgtgttaactgtaacgattatggagtatgaa

SEQ ID NO: 353714 - DNA, 33 bp, Homo sapien
actgtgttaactgtaatgattatggagtatgaa

SEQ ID NO: 353715 - DNA, 33 bp, Homo sapien
tctggggaggggcctgcatgctggtgttttttc

SEQ ID NO: 353716 - DNA, 33 bp, Homo sapien
tctggggaggggcctgtatgctggtgttttttc

SEQ ID NO: 353717 - DNA, 33 bp, Homo sapien
ataattctaatatgcacctgagagttgagaacc

SEQ ID NO: 353718 - DNA, 33 bp, Homo sapien
ataattctaatatgcagctgagagttgagaacc

SEQ ID NO: 353719 - DNA, 33 bp, Homo sapien
ttaacctcactttctccaaagcatatcacaccc

SEQ ID NO: 353720 - DNA, 33 bp, Homo sapien
ttaacctcactttctctaaagcatatcacaccc

SEQ ID NO: 353721 - DNA, 33 bp, Homo sapien
tgtctcctggagtggcacaagcactatgtcaag

SEQ ID NO: 353722 - DNA, 33 bp, Homo sapien
tgtctcctggagtggcgcaagcactatgtcaag

SEQ ID NO: 353723 - DNA, 33 bp, Homo sapien
caacagtatttggtccgctttaaagtcatgtaa

SEQ ID NO: 353724 - DNA, 33 bp, Homo sapien
caacagtatttggtcctctttaaagtcatgtaa

SEQ ID NO: 353725 - DNA, 33 bp, Homo sapien
ttgtctataaagtacccatcttccctacacgtg

SEQ ID NO: 353726 - DNA, 33 bp, Homo sapien
ttgtctataaagtacctatcttccctacacgtg

SEQ ID NO: 353727 - DNA, 33 bp, Homo sapien
gccttgtacaccttgacgtggcagaacttccac

SEQ ID NO: 353728 - DNA, 33 bp, Homo sapien
gccttgtacaccttgatgtggcagaacttccac

SEQ ID NO: 353729 - DNA, 33 bp, Homo sapien
tacttattgtgagcaaagaataggaaacatcat

SEQ ID NO: 353730 - DNA, 33 bp, Homo sapien
tacttattgtgagcaaggaataggaaacatcat

SEQ ID NO: 353731 - DNA, 33 bp, Homo sapien
tctaaggtagacatgcaagttgtggacatggag

SEQ ID NO: 353732 - DNA, 33 bp, Homo sapien
tctaaggtagacatgctagttgtggacatggag

SEQ ID NO: 353733 - DNA, 33 bp, Homo sapien
tgaagcacagtttttaggggtgccccaggagca

SEQ ID NO: 353734 - DNA, 33 bp, Homo sapien
tgaagcacagtttttatgggtgccccaggagca

SEQ ID NO: 353735 - DNA, 33 bp, Homo sapien
caatatggtgatagaccagttggatttccctag

SEQ ID NO: 353736 - DNA, 33 bp, Homo sapien
caatatggtgatagacgagttggatttccctag

SEQ ID NO: 353737 - DNA, 33 bp, Homo sapien
atgacataatcccagccattccatgagggtaca

SEQ ID NO: 353738 - DNA, 33 bp, Homo sapien
atgacataatcccagctattccatgagggtaca

SEQ ID NO: 353739 - DNA, 33 bp, Homo sapien
aagaagcagtcatctacctctctccctgaagca

SEQ ID NO: 353740 - DNA, 33 bp, Homo sapien
aagaagcagtcatctatctctctccctgaagca

SEQ ID NO: 353741 - DNA, 33 bp, Homo sapien
cacaacagtacaaggaccccaaacacaggttct

SEQ ID NO: 353742 - DNA, 33 bp, Homo sapien
cacaacagtacaaggatcccaaacacaggttct

SEQ ID NO: 353743 - DNA, 33 bp, Homo sapien
tgatgtaatagaaccaatatttgtaggctctct

SEQ ID NO: 353744 - DNA, 33 bp, Homo sapien
tgatgtaatagaaccactatttgtaggctctct

SEQ ID NO: 353745 - DNA, 33 bp, Homo sapien
ctggtatgtttctctcgaaaagctttatggttt

SEQ ID NO: 353746 - DNA, 33 bp, Homo sapien
ctggtatgtttctctctaaaagctttatggttt

SEQ ID NO: 353747 - DNA, 33 bp, Homo sapien
agagcaacaaccataaaaagaaaatttgataaa

SEQ ID NO: 353748 - DNA, 33 bp, Homo sapien
agagcaacaaccataagaagaaaatttgataaa

SEQ ID NO: 353749 - DNA, 33 bp, Homo sapien
aaatggactaatatacgcttaaacaaccaaggg

SEQ ID NO: 353750 - DNA, 33 bp, Homo sapien
aaatggactaatatactcttaaacaaccaaggg

SEQ ID NO: 353751 - DNA, 33 bp, Homo sapien
gagagagatgctgggacgagagaactttctgac

SEQ ID NO: 353752 - DNA, 33 bp, Homo sapien
gagagagatgctgggatgagagaactttctgac

SEQ ID NO: 353753 - DNA, 33 bp, Homo sapien
tttggatctttatgtgcattttgcaaatatttt

SEQ ID NO: 353754 - DNA, 33 bp, Homo sapien
tttggatctttatgtgtattttgcaaatatttt

SEQ ID NO: 353755 - DNA, 33 bp, Homo sapien
catgactaggaaatgcgagagacagaatcggac

SEQ ID NO: 353756 - DNA, 33 bp, Homo sapien
catgactaggaaatgctagagacagaatcggac

SEQ ID NO: 353757 - DNA, 33 bp, Homo sapien
cctgaaagtcctaaataaagaaaggcctaaata

SEQ ID NO: 353758 - DNA, 33 bp, Homo sapien
cctgaaagtcctaaatcaagaaaggcctaaata

SEQ ID NO: 353759 - DNA, 33 bp, Homo sapien
tataaattcctctcaacgttactttactccaaa

SEQ ID NO: 353760 - DNA, 33 bp, Homo sapien
tataaattcctctcaatgttactttactccaaa

SEQ ID NO: 353761 - DNA, 33 bp, Homo sapien
taaactcattttgctacgtcatctggtatttat

SEQ ID NO: 353762 - DNA, 33 bp, Homo sapien
taaactcattttgctatgtcatctggtatttat

SEQ ID NO: 353763 - DNA, 33 bp, Homo sapien
tacaccactcttgatccatctccaggaactttt

SEQ ID NO: 353764 - DNA, 33 bp, Homo sapien
tacaccactcttgatctatctccaggaactttt

SEQ ID NO: 353765 - DNA, 33 bp, Homo sapien
gtattagtagataaccagacacagagcaaggtc

SEQ ID NO: 353766 - DNA, 33 bp, Homo sapien
gtattagtagataaccggacacagagcaaggtc

SEQ ID NO: 353767 - DNA, 33 bp, Homo sapien
atctgggttttgttcactaggttaggtaggtgg

SEQ ID NO: 353768 - DNA, 33 bp, Homo sapien
atctgggttttgttcagtaggttaggtaggtgg

SEQ ID NO: 353769 - DNA, 33 bp, Homo sapien; identical to SEQ ID NO: 353767

SEQ ID NO: 353770 - DNA, 33 bp, Homo sapien; identical to SEQ ID NO: 353768

SEQ ID NO: 353771 - DNA, 33 bp, Homo sapien
actacaaaacactgacaaaaaatctaagaaggt

SEQ ID NO: 353772 - DNA, 33 bp, Homo sapien
actacaaaacactgacgaaaaatctaagaaggt

SEQ ID NO: 353773 - DNA, 33 bp, Homo sapien
atgctgtactaacattaaaaaagcatggcagcc

SEQ ID NO: 353774 - DNA, 33 bp, Homo sapien
atgctgtactaacattcaaaaagcatggcagcc

SEQ ID NO: 353775 - DNA, 33 bp, Homo sapien
ggggctttgccttagaggtcatagagggtaggg

SEQ ID NO: 353776 - DNA, 33 bp, Homo sapien
ggggctttgccttagatgtcatagagggtaggg

SEQ ID NO: 353777 - DNA, 33 bp, Homo sapien
aaatcttgcctttcccacttattatgtgatctt

SEQ ID NO: 353778 - DNA, 33 bp, Homo sapien
aaatcttgcctttcccgcttattatgtgatctt

SEQ ID NO: 353779 - DNA, 33 bp, Homo sapien
taaaagaggaaacagggagcaaagttgtaaaca

SEQ ID NO: 353780 - DNA, 33 bp, Homo sapien
taaaagaggaaacaggtagcaaagttgtaaaca

SEQ ID NO: 353781 - DNA, 33 bp, Homo sapien
gttgtctttggggaaaagcttgaaacctgtagt

SEQ ID NO: 353782 - DNA, 33 bp, Homo sapien
gttgtctttggggaaaggcttgaaacctgtagt

SEQ ID NO: 353783 - DNA, 33 bp, Homo sapien
gagagaaaaggatggcacaatagtttcttagtc

SEQ ID NO: 353784 - DNA, 33 bp, Homo sapien
gagagaaaaggatggcgcaatagtttcttagtc

SEQ ID NO: 353785 - DNA, 33 bp, Homo sapien
aaagttgttgcaaaaaatcaaaggagaatacag

SEQ ID NO: 353786 - DNA, 33 bp, Homo sapien
aaagttgttgcaaaaactcaaaggagaatacag

SEQ ID NO: 353787 - DNA, 33 bp, Homo sapien
cttatccagtccagaaactctgtgaatagtccc

SEQ ID NO: 353788 - DNA, 33 bp, Homo sapien
cttatccagtccagaagctctgtgaatagtccc

SEQ ID NO: 353789 - DNA, 33 bp, Homo sapien
ttattaggttatttgaaattttatgcaggaata

SEQ ID NO: 353790 - DNA, 33 bp, Homo sapien
ttattaggttatttgagattttatgcaggaata

SEQ ID NO: 353791 - DNA, 33 bp, Homo sapien
tcttctatgcagcagaggcagttatgctcctct

SEQ ID NO: 353792 - DNA, 33 bp, Homo sapien
tcttctatgcagcagatgcagttatgctcctct

SEQ ID NO: 353793 - DNA, 33 bp, Homo sapien
tgaggaagccaatacacgaagactttctataac

SEQ ID NO: 353794 - DNA, 33 bp, Homo sapien
tgaggaagccaatacatgaagactttctataac

SEQ ID NO: 353795 - DNA, 33 bp, Homo sapien
ctgttgccacaatgcccgattattgcttttatc

SEQ ID NO: 353796 - DNA, 33 bp, Homo sapien
ctgttgccacaatgcctgattattgcttttatc

SEQ ID NO: 353797 - DNA, 33 bp, Homo sapien
ggttggaagaagagctaaaactttcatccacta

SEQ ID NO: 353798 - DNA, 33 bp, Homo sapien
ggttggaagaagagctgaaactttcatccacta

SEQ ID NO: 353799 - DNA, 33 bp, Homo sapien
gaactaatacattcccccttcttgctgaagtca

SEQ ID NO: 353800 - DNA, 33 bp, Homo sapien
gaactaatacattccctcttcttgctgaagtca

SEQ ID NO: 353801 - DNA, 33 bp, Homo sapien
aaatgataggaaaataagctcaccgtgacttca

SEQ ID NO: 353802 - DNA, 33 bp, Homo sapien
aaatgataggaaaataggctcaccgtgacttca

SEQ ID NO: 353803 - DNA, 33 bp, Homo sapien
tcattaagcatgatgaacataaggtggcagctg

SEQ ID NO: 353804 - DNA, 33 bp, Homo sapien
tcattaagcatgatgagcataaggtggcagctg

SEQ ID NO: 353805 - DNA, 33 bp, Homo sapien
aagctatattgcttaacgaaaaacttatttaag

SEQ ID NO: 353806 - DNA, 33 bp, Homo sapien
aagctatattgcttaaggaaaaacttatttaag

SEQ ID NO: 353807 - DNA, 33 bp, Homo sapien
gtaattacagtcacccaaattccatgccagtga

SEQ ID NO: 353808 - DNA, 33 bp, Homo sapien
gtaattacagtcacccgaattccatgccagtga

SEQ ID NO: 353809 - DNA, 33 bp, Homo sapien
tgatatagtacttgaccacattataaatgcttt

SEQ ID NO: 353810 - DNA, 33 bp, Homo sapien
tgatatagtacttgacgacattataaatgcttt

SEQ ID NO: 353811 - DNA, 33 bp, Homo sapien
tgaccaaactaccaaacttcattctactctagc

SEQ ID NO: 353812 - DNA, 33 bp, Homo sapien
tgaccaaactaccaaagttcattctactctagc

SEQ ID NO: 353813 - DNA, 33 bp, Homo sapien
atcaccaatatccttacagactacaaatggaaa

SEQ ID NO: 353814 - DNA, 33 bp, Homo sapien
atcaccaatatccttagagactacaaatggaaa

SEQ ID NO: 353815 - DNA, 33 bp, Homo sapien
tgaattactgaaaatgccaaatttgtcaaaagc

SEQ ID NO: 353816 - DNA, 33 bp, Homo sapien
tgaattactgaaaatgtcaaatttgtcaaaagc

SEQ ID NO: 353817 - DNA, 33 bp, Homo sapien
ttaaatgtttgtaaaacactttgaagatgtgaa

SEQ ID NO: 353818 - DNA, 33 bp, Homo sapien
ttaaatgtttgtaaaatactttgaagatgtgaa

SEQ ID NO: 353819 - DNA, 33 bp, Homo sapien
gtaacatgaaatacacacaggtttaaacttatc

SEQ ID NO: 353820 - DNA, 33 bp, Homo sapien
gtaacatgaaatacacccaggtttaaacttatc

SEQ ID NO: 353821 - DNA, 33 bp, Homo sapien
tacaatctgtcctatcaaaaagtctcccttttc

SEQ ID NO: 353822 - DNA, 33 bp, Homo sapien
tacaatctgtcctatcgaaaagtctcccttttc

SEQ ID NO: 353823 - DNA, 33 bp, Homo sapien
gtaggatgtactgtcacattgcccactgaatag

SEQ ID NO: 353824 - DNA, 33 bp, Homo sapien
gtaggatgtactgtcagattgcccactgaatag

SEQ ID NO: 353825 - DNA, 33 bp, Homo sapien
agcaaattaaacattgaaactgtgttcttgact

SEQ ID NO: 353826 - DNA, 33 bp, Homo sapien
agcaaattaaacattggaactgtgttcttgact

SEQ ID NO: 353827 - DNA, 33 bp, Homo sapien
tgaaaaatctctccaaccttgagctagattcac

SEQ ID NO: 353828 - DNA, 33 bp, Homo sapien
tgaaaaatctctccaatcttgagctagattcac

SEQ ID NO: 353829 - DNA, 33 bp, Homo sapien
aactagcataagcaacaacaactgaactacagc

SEQ ID NO: 353830 - DNA, 33 bp, Homo sapien
aactagcataagcaacgacaactgaactacagc

SEQ ID NO: 353831 - DNA, 33 bp, Homo sapien
tctatatcatcatctaaatctcactacccctca

SEQ ID NO: 353832 - DNA, 33 bp, Homo sapien
tctatatcatcatctatatctcactacccctca

SEQ ID NO: 353833 - DNA, 33 bp, Homo sapien
ctgacccatctgaaaaccagtatgttcactcca

SEQ ID NO: 353834 - DNA, 33 bp, Homo sapien
ctgacccatctgaaaatcagtatgttcactcca

SEQ ID NO: 353835 - DNA, 33 bp, Homo sapien
gcaagatcaccagaaaaccaaacgtgagtgtaa

SEQ ID NO: 353836 - DNA, 33 bp, Homo sapien
gcaagatcaccagaaagccaaacgtgagtgtaa

SEQ ID NO: 353837 - DNA, 33 bp, Homo sapien
ccaggtccttcactgaaactcccaaatgaactc

SEQ ID NO: 353838 - DNA, 33 bp, Homo sapien
ccaggtccttcactgagactcccaaatgaactc

SEQ ID NO: 353839 - DNA, 33 bp, Homo sapien
gtgattgagggcctaccgtaatatatcattgtg

SEQ ID NO: 353840 - DNA, 33 bp, Homo sapien
gtgattgagggcctactgtaatatatcattgtg

SEQ ID NO: 353841 - DNA, 33 bp, Homo sapien
aactgccattcaaaatcatcaccctaagtttca

SEQ ID NO: 353842 - DNA, 33 bp, Homo sapien
aactgccattcaaaatgatcaccctaagtttca

SEQ ID NO: 353843 - DNA, 33 bp, Homo sapien
tggcaccaagttgtcacggaaaacttaagctgt

SEQ ID NO: 353844 - DNA, 33 bp, Homo sapien
tggcaccaagttgtcatggaaaacttaagctgt

SEQ ID NO: 353845 - DNA, 33 bp, Homo sapien
gtaaaaatagcagtggacaaaaattaaagaaga

SEQ ID NO: 353846 - DNA, 33 bp, Homo sapien
gtaaaaatagcagtgggcaaaaattaaagaaga

SEQ ID NO: 353847 - DNA, 33 bp, Homo sapien
ggaggaagaactgccaatgcctttttaaaacgc

SEQ ID NO: 353848 - DNA, 33 bp, Homo sapien
ggaggaagaactgccagtgcctttttaaaacgc

SEQ ID NO: 353849 - DNA, 33 bp, Homo sapien
tgagttgaaagtgaatcacctttattagcatcg

SEQ ID NO: 353850 - DNA, 33 bp, Homo sapien
tgagttgaaagtgaattacctttattagcatcg

SEQ ID NO: 353851 - DNA, 33 bp, Homo sapien
gcactcaagcctttcaatctttcattttcatcc

SEQ ID NO: 353852 - DNA, 33 bp, Homo sapien
gcactcaagcctttcagtctttcattttcatcc

SEQ ID NO: 353853 - DNA, 33 bp, Homo sapien
ctccctagtaagactgcaagaagtccctgagta

SEQ ID NO: 353854 - DNA, 33 bp, Homo sapien
ctccctagtaagactggaagaagtccctgagta

SEQ ID NO: 353855 - DNA, 33 bp, Homo sapien
aaacaaattgtcctgcaaaacagtactgtagct

SEQ ID NO: 353856 - DNA, 33 bp, Homo sapien
aaacaaattgtcctgccaaacagtactgtagct

SEQ ID NO: 353857 - DNA, 33 bp, Homo sapien
cataaggtaaatcacaatggcagtaggaggatc

SEQ ID NO: 353858 - DNA, 33 bp, Homo sapien
cataaggtaaatcacagtggcagtaggaggatc

SEQ ID NO: 353859 - DNA, 33 bp, Homo sapien
gtagctagtgatgtcacctttgttactgaaggt

SEQ ID NO: 353860 - DNA, 33 bp, Homo sapien
gtagctagtgatgtcatctttgttactgaaggt

SEQ ID NO: 353861 - DNA, 33 bp, Homo sapien
acactctaagccctaccggatctagcaacctag

SEQ ID NO: 353862 - DNA, 33 bp, Homo sapien
acactctaagccctactggatctagcaacctag

SEQ ID NO: 353863 - DNA, 33 bp, Homo sapien
gcaaataattagcttagctggtgtacaggaggc

SEQ ID NO: 353864 - DNA, 33 bp, Homo sapien
gcaaataattagcttatctggtgtacaggaggc

SEQ ID NO: 353865 - DNA, 33 bp, Homo sapien
gaacaggtgaggattagactgtctttatggatt

SEQ ID NO: 353866 - DNA, 33 bp, Homo sapien
gaacaggtgaggattatactgtctttatggatt

SEQ ID NO: 353867 - DNA, 33 bp, Homo sapien
gcaagtccagtggatacgctcttctgatttccc

SEQ ID NO: 353868 - DNA, 33 bp, Homo sapien
gcaagtccagtggatatgctcttctgatttccc

SEQ ID NO: 353869 - DNA, 33 bp, Homo sapien
cttcacggaggctgaaaatgtaagtctggagta

SEQ ID NO: 353870 - DNA, 33 bp, Homo sapien
cttcacggaggctgaacatgtaagtctggagta

SEQ ID NO: 353871 - DNA, 33 bp, Homo sapien
aaaaagtccaacagaaagaaactgaaattcctg

SEQ ID NO: 353872 - DNA, 33 bp, Homo sapien
aaaaagtccaacagaaggaaactgaaattcctg

SEQ ID NO: 353873 - DNA, 33 bp, Homo sapien
gtcttgctgtccaagaaagattaaaatatatca

SEQ ID NO: 353874 - DNA, 33 bp, Homo sapien
gtcttgctgtccaagagagattaaaatatatca

SEQ ID NO: 353875 - DNA, 33 bp, Homo sapien
tatatataatctcatcaccaggtatccttcaat

SEQ ID NO: 353876 - DNA, 33 bp, Homo sapien
tatatataatctcatctccaggtatccttcaat

SEQ ID NO: 353877 - DNA, 33 bp, Homo sapien
tgttggtcagcactgagaaaggaagtatggggt

SEQ ID NO: 353878 - DNA, 33 bp, Homo sapien
tgttggtcagcactgataaaggaagtatggggt

SEQ ID NO: 353879 - DNA, 33 bp, Homo sapien
ggtagaatgactgaaaacctcaaggagccacag

SEQ ID NO: 353880 - DNA, 33 bp, Homo sapien
ggtagaatgactgaaagcctcaaggagccacag

SEQ ID NO: 353881 - DNA, 33 bp, Homo sapien
ctggtgcagagatgaccattgtgcaaacctgat

SEQ ID NO: 353882 - DNA, 33 bp, Homo sapien
ctggtgcagagatgacgattgtgcaaacctgat

SEQ ID NO: 353883 - DNA, 33 bp, Homo sapien
gagactctgtgcttcccagtgtgtggaggccag

SEQ ID NO: 353884 - DNA, 33 bp, Homo sapien
gagactctgtgcttcctagtgtgtggaggccag

SEQ ID NO: 353885 - DNA, 33 bp, Homo sapien
ccatttctgggttcaaagcacaggaatagatag

SEQ ID NO: 353886 - DNA, 33 bp, Homo sapien
ccatttctgggttcaaggcacaggaatagatag

SEQ ID NO: 353887 - DNA, 33 bp, Homo sapien
gaaggcagtaagaagaaatggatccagagaaac

SEQ ID NO: 353888 - DNA, 33 bp, Homo sapien
gaaggcagtaagaagagatggatccagagaaac

SEQ ID NO: 353889 - DNA, 33 bp, Homo sapien
gaattttaatacaccacgtgcttttctgagttt

SEQ ID NO: 353890 - DNA, 33 bp, Homo sapien
gaattttaatacaccatgtgcttttctgagttt

SEQ ID NO: 353891 - DNA, 33 bp, Homo sapien
ctcttgttggctttaactgttgctaaaatcgaa

SEQ ID NO: 353892 - DNA, 33 bp, Homo sapien
ctcttgttggctttaattgttgctaaaatcgaa

SEQ ID NO: 353893 - DNA, 33 bp, Homo sapien
tgtcactctatactcaaaaacatcgaataaaag

SEQ ID NO: 353894 - DNA, 33 bp, Homo sapien
tgtcactctatactcataaacatcgaataaaag

SEQ ID NO: 353895 - DNA, 33 bp, Homo sapien
tcctgctggtattggaacagattgccagttttt

SEQ ID NO: 353896 - DNA, 33 bp, Homo sapien
tcctgctggtattggagcagattgccagttttt

SEQ ID NO: 353897 - DNA, 33 bp, Homo sapien
gtatatctgtggtattaaagtttcatgaagtga

SEQ ID NO: 353898 - DNA, 33 bp, Homo sapien
gtatatctgtggtattgaagtttcatgaagtga

SEQ ID NO: 353899 - DNA, 33 bp, Homo sapien
aacaccatcaaccttacggattgttaaaaacat

SEQ ID NO: 353900 - DNA, 33 bp, Homo sapien
aacaccatcaaccttatggattgttaaaaacat

SEQ ID NO: 353901 - DNA, 33 bp, Homo sapien
gttctgaaaattttacggaacttatgaaggcag

SEQ ID NO: 353902 - DNA, 33 bp, Homo sapien
gttctgaaaattttactgaacttatgaaggcag

SEQ ID NO: 353903 - DNA, 33 bp, Homo sapien
gtttttgtttgggtaacgccactttgtgctctg

SEQ ID NO: 353904 - DNA, 33 bp, Homo sapien
gtttttgtttgggtaatgccactttgtgctctg

SEQ ID NO: 353905 - DNA, 33 bp, Homo sapien
ctgacctgtctgcagccgaactctttggagtgg

SEQ ID NO: 353906 - DNA, 33 bp, Homo sapien
ctgacctgtctgcagctgaactctttggagtgg

SEQ ID NO: 353907 - DNA, 33 bp, Homo sapien
agtgaatacagaagcaaactataatatatccat

SEQ ID NO: 353908 - DNA, 33 bp, Homo sapien
agtgaatacagaagcacactataatatatccat

SEQ ID NO: 353909 - DNA, 33 bp, Homo sapien
tctaaacttcttcactaagcactcggacttttt

SEQ ID NO: 353910 - DNA, 33 bp, Homo sapien
tctaaacttcttcactgagcactcggacttttt

SEQ ID NO: 353911 - DNA, 33 bp, Homo sapien
gtttagacccgtgggaagccatgaagaaagaga

SEQ ID NO: 353912 - DNA, 33 bp, Homo sapien
gtttagacccgtgggaggccatgaagaaagaga

SEQ ID NO: 353913 - DNA, 33 bp, Homo sapien
aagcaaaagatgaaacaaatgtacagacatacc

SEQ ID NO: 353914 - DNA, 33 bp, Homo sapien
aagcaaaagatgaaaccaatgtacagacatacc

SEQ ID NO: 353915 - DNA, 33 bp, Homo sapien
ttaatgaatcaagaacaatctagaagttggtaa

SEQ ID NO: 353916 - DNA, 33 bp, Homo sapien
ttaatgaatcaagaaccatctagaagttggtaa

SEQ ID NO: 353917 - DNA, 33 bp, Homo sapien
catatgcagttcacgacacggtttccactccta

SEQ ID NO: 353918 - DNA, 33 bp, Homo sapien
catatgcagttcacgatacggtttccactccta

SEQ ID NO: 353919 - DNA, 33 bp, Homo sapien
ttattgatgtgatcaaagtatttagttggttcc

SEQ ID NO: 353920 - DNA, 33 bp, Homo sapien
ttattgatgtgatcaaggtatttagttggttcc

SEQ ID NO: 353921 - DNA, 33 bp, Homo sapien
tttcgagatcttgaaaccagtacagtaaggtag

SEQ ID NO: 353922 - DNA, 33 bp, Homo sapien
tttcgagatcttgaaagcagtacagtaaggtag

SEQ ID NO: 353923 - DNA, 33 bp, Homo sapien
aatagtgagcgttgaacagactgacaaaatgtt

SEQ ID NO: 353924 - DNA, 33 bp, Homo sapien
aatagtgagcgttgaagagactgacaaaatgtt

SEQ ID NO: 353925 - DNA, 33 bp, Homo sapien
ttcagggtaatttgaaggcaacaaggagcaaag

SEQ ID NO: 353926 - DNA, 33 bp, Homo sapien
ttcagggtaatttgaatgcaacaaggagcaaag

SEQ ID NO: 353927 - DNA, 33 bp, Homo sapien
tgtgggaatggagaccaatgaggttacaaactg

SEQ ID NO: 353928 - DNA, 33 bp, Homo sapien
tgtgggaatggagaccgatgaggttacaaactg

SEQ ID NO: 353929 - DNA, 33 bp, Homo sapien
tggtaaagacattcataaagtagttggaagtgt

SEQ ID NO: 353930 - DNA, 33 bp, Homo sapien
tggtaaagacattcattaagtagttggaagtgt

SEQ ID NO: 353931 - DNA, 33 bp, Homo sapien
attgcctagaagtccactcagaggaaaatgaaa

SEQ ID NO: 353932 - DNA, 33 bp, Homo sapien
attgcctagaagtccattcagaggaaaatgaaa

SEQ ID NO: 353933 - DNA, 33 bp, Homo sapien
aaagtggccttacccacactttgcagggaagag

SEQ ID NO: 353934 - DNA, 33 bp, Homo sapien
aaagtggccttacccatactttgcagggaagag

SEQ ID NO: 353935 - DNA, 33 bp, Homo sapien
ctgtgaggtgagtggaaatgtgacggtggatgt

SEQ ID NO: 353936 - DNA, 33 bp, Homo sapien
ctgtgaggtgagtggagatgtgacggtggatgt

SEQ ID NO: 353937 - DNA, 33 bp, Homo sapien
ctccataaccctcccccacattcttaatacata

SEQ ID NO: 353938 - DNA, 33 bp, Homo sapien
ctccataaccctccccgacattcttaatacata

SEQ ID NO: 353939 - DNA, 33 bp, Homo sapien
ctgacacttctttaaacgggactcatgattgaa

SEQ ID NO: 353940 - DNA, 33 bp, Homo sapien
ctgacacttctttaaaggggactcatgattgaa

SEQ ID NO: 353941 - DNA, 33 bp, Homo sapien
caagttggtgctacacacagatttgtcataaaa

SEQ ID NO: 353942 - DNA, 33 bp, Homo sapien
caagttggtgctacactcagatttgtcataaaa

SEQ ID NO: 353943 - DNA, 33 bp, Homo sapien
cctagcctttgtaggcacttggaactaagcgag

SEQ ID NO: 353944 - DNA, 33 bp, Homo sapien
cctagcctttgtaggcgcttggaactaagcgag

SEQ ID NO: 353945 - DNA, 33 bp, Homo sapien
tagctgcagcaacataaacacatttatataaca

SEQ ID NO: 353946 - DNA, 33 bp, Homo sapien
tagctgcagcaacatatacacatttatataaca

SEQ ID NO: 353947 - DNA, 33 bp, Homo sapien
tttcattgctgaaaacaatatacttcataattt

SEQ ID NO: 353948 - DNA, 33 bp, Homo sapien
tttcattgctgaaaacgatatacttcataattt

SEQ ID NO: 353949 - DNA, 33 bp, Homo sapien
acatgaagttctggaacgggcagtttacgtact

SEQ ID NO: 353950 - DNA, 33 bp, Homo sapien
acatgaagttctggaatgggcagtttacgtact

SEQ ID NO: 353951 - DNA, 33 bp, Homo sapien
ataatcatagactctaacccttttcagcatgaa

SEQ ID NO: 353952 - DNA, 33 bp, Homo sapien
ataatcatagactctaccccttttcagcatgaa

SEQ ID NO: 353953 - DNA, 33 bp, Homo sapien
tttactttgagcaagaatctgcaacatgggcta

SEQ ID NO: 353954 - DNA, 33 bp, Homo sapien
tttactttgagcaagagtctgcaacatgggcta

SEQ ID NO: 353955 - DNA, 33 bp, Homo sapien
tttctcaaaaaataacaggatgtatgtgtgtgt

SEQ ID NO: 353956 - DNA, 33 bp, Homo sapien
tttctcaaaaaataacgggatgtatgtgtgtgt

SEQ ID NO: 353957 - DNA, 33 bp, Homo sapien
catgaaacttcgtctcaaataatttaccatttt

SEQ ID NO: 353958 - DNA, 33 bp, Homo sapien
catgaaacttcgtctcgaataatttaccatttt

SEQ ID NO: 353959 - DNA, 33 bp, Homo sapien
ttgggaaagtagaattaaaggatggactttgac

SEQ ID NO: 353960 - DNA, 33 bp, Homo sapien
ttgggaaagtagaattgaaggatggactttgac

SEQ ID NO: 353961 - DNA, 33 bp, Homo sapien
caaatttctttacccactcagcaaatatttaag

SEQ ID NO: 353962 - DNA, 33 bp, Homo sapien
caaatttctttacccattcagcaaatatttaag

SEQ ID NO: 353963 - DNA, 33 bp, Homo sapien
cagtaaagtttaatcactaggcaactatttatt

SEQ ID NO: 353964 - DNA, 33 bp, Homo sapien
cagtaaagtttaatcattaggcaactatttatt

SEQ ID NO: 353965 - DNA, 33 bp, Homo sapien
tgaacagtaattctgccaggattttgaaataca

SEQ ID NO: 353966 - DNA, 33 bp, Homo sapien
tgaacagtaattctgctaggattttgaaataca

SEQ ID NO: 353967 - DNA, 33 bp, Homo sapien
aagcttttctaccctaaccctgtccagtgactt

SEQ ID NO: 353968 - DNA, 33 bp, Homo sapien
aagcttttctaccctatccctgtccagtgactt

SEQ ID NO: 353969 - DNA, 33 bp, Homo sapien
gggaattctagctatacgaaaaaagcatgagca

SEQ ID NO: 353970 - DNA, 33 bp, Homo sapien
gggaattctagctatatgaaaaaagcatgagca

SEQ ID NO: 353971 - DNA, 33 bp, Homo sapien
ttacacttctgtggtgcaatctcctaatctatt

SEQ ID NO: 353972 - DNA, 33 bp, Homo sapien
ttacacttctgtggtgtaatctcctaatctatt

SEQ ID NO: 353973 - DNA, 33 bp, Homo sapien
gctactcaattatatgccacaagtggttttctt

SEQ ID NO: 353974 - DNA, 33 bp, Homo sapien
gctactcaattatatgtcacaagtggttttctt

SEQ ID NO: 353975 - DNA, 33 bp, Homo sapien
gtgtttttgctgtaccaaagtagcctgtgacca

SEQ ID NO: 353976 - DNA, 33 bp, Homo sapien
gtgtttttgctgtaccgaagtagcctgtgacca

SEQ ID NO: 353977 - DNA, 33 bp, Homo sapien
ctttaacagcccgtaacgtttgtcgtgaccttt

SEQ ID NO: 353978 - DNA, 33 bp, Homo sapien
ctttaacagcccgtaatgtttgtcgtgaccttt

SEQ ID NO: 353979 - DNA, 33 bp, Homo sapien
atcctaattaagaaaacgacaattgcggctggg

SEQ ID NO: 353980 - DNA, 33 bp, Homo sapien
atcctaattaagaaaatgacaattgcggctggg

SEQ ID NO: 353981 - DNA, 33 bp, Homo sapien
gactagtattttggcaatattaagcatgatttc

SEQ ID NO: 353982 - DNA, 33 bp, Homo sapien
gactagtattttggcagtattaagcatgatttc

SEQ ID NO: 353983 - DNA, 33 bp, Homo sapien
aataaagcaaaatgtacaacaagcctgttctaa

SEQ ID NO: 353984 - DNA, 33 bp, Homo sapien
aataaagcaaaatgtataacaagcctgttctaa

SEQ ID NO: 353985 - DNA, 33 bp, Homo sapien
ctgcctggaatccactcagaagccattggcttg

SEQ ID NO: 353986 - DNA, 33 bp, Homo sapien
ctgcctggaatccactgagaagccattggcttg

SEQ ID NO: 353987 - DNA, 33 bp, Homo sapien
aaagcaagcagacactcagacactaaacaaacc

SEQ ID NO: 353988 - DNA, 33 bp, Homo sapien
aaagcaagcagacactgagacactaaacaaacc

SEQ ID NO: 353989 - DNA, 33 bp, Homo sapien
tggcaggacagtcttaccttaaatgataacagc

SEQ ID NO: 353990 - DNA, 33 bp, Homo sapien
tggcaggacagtcttatcttaaatgataacagc

SEQ ID NO: 353991 - DNA, 33 bp, Homo sapien
caaaaggtgtctaacgaagacttattttcaaag

SEQ ID NO: 353992 - DNA, 33 bp, Homo sapien
caaaaggtgtctaacggagacttattttcaaag

SEQ ID NO: 353993 - DNA, 33 bp, Homo sapien
caccgtgttttgtgaaagaaaaataatgaagtg

SEQ ID NO: 353994 - DNA, 33 bp, Homo sapien
caccgtgttttgtgaaggaaaaataatgaagtg

SEQ ID NO: 353995 - DNA, 33 bp, Homo sapien
gggtattacatttggaggaaaggaataaactct

SEQ ID NO: 353996 - DNA, 33 bp, Homo sapien
gggtattacatttggatgaaaggaataaactct

SEQ ID NO: 353997 - DNA, 33 bp, Homo sapien
gatcccagcttagaaacaatgctacaagtttgt

SEQ ID NO: 353998 - DNA, 33 bp, Homo sapien
gatcccagcttagaaataatgctacaagtttgt

SEQ ID NO: 353999 - DNA, 33 bp, Homo sapien
tctagcctggtgtacgcaaaagagtaggtactc

SEQ ID NO: 354000 - DNA, 33 bp, Homo sapien
tctagcctggtgtacggaaaagagtaggtactc

SEQ ID NO: 354001 - DNA, 33 bp, Homo sapien
gtcattcagttaatccaacacaatggaacccta

SEQ ID NO: 354002 - DNA, 33 bp, Homo sapien
gtcattcagttaatccgacacaatggaacccta

SEQ ID NO: 354003 - DNA, 33 bp, Homo sapien
acctaagggtagaaaacaaccaatgctacttcc

SEQ ID NO: 354004 - DNA, 33 bp, Homo sapien
acctaagggtagaaaataaccaatgctacttcc

SEQ ID NO: 354005 - DNA, 33 bp, Homo sapien
agcaagacctcagtcacagtgataaatgatttt

SEQ ID NO: 354006 - DNA, 33 bp, Homo sapien
agcaagacctcagtcatagtgataaatgatttt

SEQ ID NO: 354007 - DNA, 33 bp, Homo sapien
cactaatttgggatgacacctttggatttcatt

SEQ ID NO: 354008 - DNA, 33 bp, Homo sapien
cactaatttgggatgagacctttggatttcatt

SEQ ID NO: 354009 - DNA, 33 bp, Homo sapien
tatactgtcctcatgaaaaaaattggttgtatt

SEQ ID NO: 354010 - DNA, 33 bp, Homo sapien
tatactgtcctcatgataaaaattggttgtatt

SEQ ID NO: 354011 - DNA, 33 bp, Homo sapien
cttactgaggagcagacagaattgaggcacagt

SEQ ID NO: 354012 - DNA, 33 bp, Homo sapien
cttactgaggagcagagagaattgaggcacagt

SEQ ID NO: 354013 - DNA, 33 bp, Homo sapien
acagggtgtgagaggcaaaaagtttttccccac

SEQ ID NO: 354014 - DNA, 33 bp, Homo sapien
acagggtgtgagaggcgaaaagtttttccccac

SEQ ID NO: 354015 - DNA, 33 bp, Homo sapien
aatttagtgctttaaaaaagtcaggctcttacc

SEQ ID NO: 354016 - DNA, 33 bp, Homo sapien
aatttagtgctttaaagaagtcaggctcttacc

SEQ ID NO: 354017 - DNA, 33 bp, Homo sapien
ctctttctgtgtttaccagaatttagtgcttta

SEQ ID NO: 354018 - DNA, 33 bp, Homo sapien
ctctttctgtgtttactagaatttagtgcttta

SEQ ID NO: 354019 - DNA, 33 bp, Homo sapien
taacttccaatctgtccaaatacacgttttttt

SEQ ID NO: 354020 - DNA, 33 bp, Homo sapien
taacttccaatctgtctaaatacacgttttttt

SEQ ID NO: 354021 - DNA, 33 bp, Homo sapien
ctttcagaaaagaaaacgctttcagaacttctt

SEQ ID NO: 354022 - DNA, 33 bp, Homo sapien
ctttcagaaaagaaaatgctttcagaacttctt

SEQ ID NO: 354023 - DNA, 33 bp, Homo sapien
gtgtcattacctagaacataagtcttaatggag

SEQ ID NO: 354024 - DNA, 33 bp, Homo sapien
gtgtcattacctagaatataagtcttaatggag

SEQ ID NO: 354025 - DNA, 33 bp, Homo sapien
gcaagaaggaaagggaacacattgattccatcc

SEQ ID NO: 354026 - DNA, 33 bp, Homo sapien
gcaagaaggaaagggaccacattgattccatcc

SEQ ID NO: 354027 - DNA, 33 bp, Homo sapien
cttgtgagttttgccacagatcccaattccaac

SEQ ID NO: 354028 - DNA, 33 bp, Homo sapien
cttgtgagttttgccatagatcccaattccaac

SEQ ID NO: 354029 - DNA, 33 bp, Homo sapien
tcacttatacctcagaaatgaaagcagcaccca

SEQ ID NO: 354030 - DNA, 33 bp, Homo sapien
tcacttatacctcagacatgaaagcagcaccca

SEQ ID NO: 354031 - DNA, 33 bp, Homo sapien
ccaactaaaacacataccctgagctgagaccct

SEQ ID NO: 354032 - DNA, 33 bp, Homo sapien
ccaactaaaacacatatcctgagctgagaccct

SEQ ID NO: 354033 - DNA, 33 bp, Homo sapien
ctatgaacttgttttcccctcattgaaagataa

SEQ ID NO: 354034 - DNA, 33 bp, Homo sapien
ctatgaacttgttttctcctcattgaaagataa

SEQ ID NO: 354035 - DNA, 33 bp, Homo sapien
aaggtaaatgatgtgaagtcatgagcttttata

SEQ ID NO: 354036 - DNA, 33 bp, Homo sapien
aaggtaaatgatgtgacgtcatgagcttttata

SEQ ID NO: 354037 - DNA, 33 bp, Homo sapien
tacatcaccgctcccaatcagcaaatttcttag

SEQ ID NO: 354038 - DNA, 33 bp, Homo sapien
tacatcaccgctcccagtcagcaaatttcttag

SEQ ID NO: 354039 - DNA, 33 bp, Homo sapien
aaagagtaataatacacgttcctgcttccattt

SEQ ID NO: 354040 - DNA, 33 bp, Homo sapien
aaagagtaataatacatgttcctgcttccattt

SEQ ID NO: 354041 - DNA, 33 bp, Homo sapien
cagtatgttgtggcaaaattcgagaaaacacac

SEQ ID NO: 354042 - DNA, 33 bp, Homo sapien
cagtatgttgtggcaatattcgagaaaacacac

SEQ ID NO: 354043 - DNA, 33 bp, Homo sapien
gtctttcctttcaccacgaacttggaagtgcac

SEQ ID NO: 354044 - DNA, 33 bp, Homo sapien
gtctttcctttcaccatgaacttggaagtgcac

SEQ ID NO: 354045 - DNA, 33 bp, Homo sapien
gccaagtggctcctacaaaagtggccattttcc

SEQ ID NO: 354046 - DNA, 33 bp, Homo sapien
gccaagtggctcctacgaaagtggccattttcc

SEQ ID NO: 354047 - DNA, 33 bp, Homo sapien
atgagggaccttcaaacggaaaatggccacttt

SEQ ID NO: 354048 - DNA, 33 bp, Homo sapien
atgagggaccttcaaatggaaaatggccacttt

SEQ ID NO: 354049 - DNA, 33 bp, Homo sapien
ttctccatcaccacaaacatttgaagccctggc

SEQ ID NO: 354050 - DNA, 33 bp, Homo sapien
ttctccatcaccacaagcatttgaagccctggc

SEQ ID NO: 354051 - DNA, 33 bp, Homo sapien
caggacaatactgtgcccgttctgggaaattca

SEQ ID NO: 354052 - DNA, 33 bp, Homo sapien
caggacaatactgtgctcgttctgggaaattca

SEQ ID NO: 354053 - DNA, 33 bp, Homo sapien
cacgtcctttgtgctacgtgataagtgtgcttt

SEQ ID NO: 354054 - DNA, 33 bp, Homo sapien
cacgtcctttgtgctatgtgataagtgtgcttt

SEQ ID NO: 354055 - DNA, 33 bp, Homo sapien
gttcacagcaagatcacccttagtgggtaagcg

SEQ ID NO: 354056 - DNA, 33 bp, Homo sapien
gttcacagcaagatcatccttagtgggtaagcg

SEQ ID NO: 354057 - DNA, 33 bp, Homo sapien
ggatgctggttcctccaaaaacaaagagcttca

SEQ ID NO: 354058 - DNA, 33 bp, Homo sapien
ggatgctggttcctccgaaaacaaagagcttca

SEQ ID NO: 354059 - DNA, 33 bp, Homo sapien
accaacacacctagaactaactccactctgggg

SEQ ID NO: 354060 - DNA, 33 bp, Homo sapien
accaacacacctagaattaactccactctgggg

SEQ ID NO: 354061 - DNA, 33 bp, Homo sapien
atttgtgtactgtctcccaaactgcacaggagg

SEQ ID NO: 354062 - DNA, 33 bp, Homo sapien
atttgtgtactgtctctcaaactgcacaggagg

SEQ ID NO: 354063 - DNA, 33 bp, Homo sapien
aacgggaatgatggaactcctggcaaagggaca

SEQ ID NO: 354064 - DNA, 33 bp, Homo sapien
aacgggaatgatggaagtcctggcaaagggaca

SEQ ID NO: 354065 - DNA, 33 bp, Homo sapien
ctccactccagaggaacgggtcaggcggtgcac

SEQ ID NO: 354066 - DNA, 33 bp, Homo sapien
ctccactccagaggaatgggtcaggcggtgcac

SEQ ID NO: 354067 - DNA, 33 bp, Homo sapien
tactcatttctcagggccatcgctctgactggt

SEQ ID NO: 354068 - DNA, 33 bp, Homo sapien
tactcatttctcagggtcatcgctctgactggt

SEQ ID NO: 354069 - DNA, 33 bp, Homo sapien
ttctttcgctctccacagtaaatttttctgctg

SEQ ID NO: 354070 - DNA, 33 bp, Homo sapien
ttctttcgctctccacggtaaatttttctgctg

SEQ ID NO: 354071 - DNA, 33 bp, Homo sapien
gagactaaaaagaacacctgagaaggtagaaag

SEQ ID NO: 354072 - DNA, 33 bp, Homo sapien
gagactaaaaagaacatctgagaaggtagaaag

SEQ ID NO: 354073 - DNA, 33 bp, Homo sapien
tccccaaagatggaacccactcagggcaaggca

SEQ ID NO: 354074 - DNA, 33 bp, Homo sapien
tccccaaagatggaactcactcagggcaaggca

SEQ ID NO: 354075 - DNA, 33 bp, Homo sapien
aggaggaaaaacacaacagggaacaatggttaa

SEQ ID NO: 354076 - DNA, 33 bp, Homo sapien
aggaggaaaaacacaatagggaacaatggttaa

SEQ ID NO: 354077 - DNA, 33 bp, Homo sapien
ctcgagggaatcttaagtcacacacatgcattt

SEQ ID NO: 354078 - DNA, 33 bp, Homo sapien
ctcgagggaatcttaattcacacacatgcattt

SEQ ID NO: 354079 - DNA, 33 bp, Homo sapien
caggaaagaggaaagaaatggcatttggagaaa

SEQ ID NO: 354080 - DNA, 33 bp, Homo sapien
caggaaagaggaaagatatggcatttggagaaa

SEQ ID NO: 354081 - DNA, 33 bp, Homo sapien
cattgtgcctagaacacgttgcgtgcttgatag

SEQ ID NO: 354082 - DNA, 33 bp, Homo sapien
cattgtgcctagaacatgttgcgtgcttgatag

SEQ ID NO: 354083 - DNA, 33 bp, Homo sapien
acatcttgaagactccgattgagtgagaaaagc

SEQ ID NO: 354084 - DNA, 33 bp, Homo sapien
acatcttgaagactcctattgagtgagaaaagc

SEQ ID NO: 354085 - DNA, 33 bp, Homo sapien
atactctctggttttccaatagtactatcagtt

SEQ ID NO: 354086 - DNA, 33 bp, Homo sapien
atactctctggttttctaatagtactatcagtt

SEQ ID NO: 354087 - DNA, 33 bp, Homo sapien
aaatggaagttcttcacgacatcatttgtacga

SEQ ID NO: 354088 - DNA, 33 bp, Homo sapien
aaatggaagttcttcatgacatcatttgtacga

SEQ ID NO: 354089 - DNA, 33 bp, Homo sapien
ttaataattttgatgacactgcataccacgtat

SEQ ID NO: 354090 - DNA, 33 bp, Homo sapien
ttaataattttgatgatactgcataccacgtat

SEQ ID NO: 354091 - DNA, 33 bp, Homo sapien
cagacgaacaatcacacaacctctttttcaaga

SEQ ID NO: 354092 - DNA, 33 bp, Homo sapien
cagacgaacaatcacataacctctttttcaaga

SEQ ID NO: 354093 - DNA, 33 bp, Homo sapien
gaccctggatatatacaagttagatcattttgc

SEQ ID NO: 354094 - DNA, 33 bp, Homo sapien
gaccctggatatatacgagttagatcattttgc

SEQ ID NO: 354095 - DNA, 33 bp, Homo sapien
agaggcagccatttgcaagccaggaggagatac

SEQ ID NO: 354096 - DNA, 33 bp, Homo sapien
agaggcagccatttgcgagccaggaggagatac

SEQ ID NO: 354097 - DNA, 33 bp, Homo sapien
taagctacccagtctggaggtttttggtttttt

SEQ ID NO: 354098 - DNA, 33 bp, Homo sapien
taagctacccagtctgtaggtttttggtttttt

SEQ ID NO: 354099 - DNA, 33 bp, Homo sapien
tttttgacaggctctcactcaattgttcaggct

SEQ ID NO: 354100 - DNA, 33 bp, Homo sapien
tttttgacaggctctcgctcaattgttcaggct

SEQ ID NO: 354101 - DNA, 33 bp, Homo sapien
tataatttgaggtttacggtgccttagagaaac

SEQ ID NO: 354102 - DNA, 33 bp, Homo sapien
tataatttgaggtttatggtgccttagagaaac

SEQ ID NO: 354103 - DNA, 33 bp, Homo sapien
atagctttattccacacggttgttttaaggtag

SEQ ID NO: 354104 - DNA, 33 bp, Homo sapien
atagctttattccacagggttgttttaaggtag

SEQ ID NO: 354105 - DNA, 33 bp, Homo sapien
tgttttatgaagataaatcagacatagaagtgg

SEQ ID NO: 354106 - DNA, 33 bp, Homo sapien
tgttttatgaagataagtcagacatagaagtgg

SEQ ID NO: 354107 - DNA, 33 bp, Homo sapien
aatggtagtcatggtaacagaagtgaaaatagg

SEQ ID NO: 354108 - DNA, 33 bp, Homo sapien
aatggtagtcatggtagcagaagtgaaaatagg

SEQ ID NO: 354109 - DNA, 33 bp, Homo sapien
aatgagtagctctggcagcaaggctatggcact

SEQ ID NO: 354110 - DNA, 33 bp, Homo sapien
aatgagtagctctggcggcaaggctatggcact

SEQ ID NO: 354111 - DNA, 33 bp, Homo sapien
cgattacatcaataaacagtggctgcattcaca

SEQ ID NO: 354112 - DNA, 33 bp, Homo sapien
cgattacatcaataaatagtggctgcattcaca

SEQ ID NO: 354113 - DNA, 33 bp, Homo sapien
tgaacaagtagagcaactgattttgttcacaca

SEQ ID NO: 354114 - DNA, 33 bp, Homo sapien
tgaacaagtagagcaattgattttgttcacaca

SEQ ID NO: 354115 - DNA, 33 bp, Homo sapien
tatatttagttttaaactcctggagagaaggaa

SEQ ID NO: 354116 - DNA, 33 bp, Homo sapien
tatatttagttttaaattcctggagagaaggaa

SEQ ID NO: 354117 - DNA, 33 bp, Homo sapien
atcaaatggagacgtactaacattaatatttac

SEQ ID NO: 354118 - DNA, 33 bp, Homo sapien
atcaaatggagacgtagtaacattaatatttac

SEQ ID NO: 354119 - DNA, 33 bp, Homo sapien
aggcttctcctagagccgcactgtgttcatagc

SEQ ID NO: 354120 - DNA, 33 bp, Homo sapien
aggcttctcctagagcggcactgtgttcatagc

SEQ ID NO: 354121 - DNA, 33 bp, Homo sapien
taaggccaaagaaccacgatcaaaagttcagag

SEQ ID NO: 354122 - DNA, 33 bp, Homo sapien
taaggccaaagaaccatgatcaaaagttcagag

SEQ ID NO: 354123 - DNA, 33 bp, Homo sapien
cagcagaagaacaaaaggttgaaggtggcctgt

SEQ ID NO: 354124 - DNA, 33 bp, Homo sapien
cagcagaagaacaaaatgttgaaggtggcctgt

SEQ ID NO: 354125 - DNA, 33 bp, Homo sapien
acaccacttcggctaacatgatgctttccactg

SEQ ID NO: 354126 - DNA, 33 bp, Homo sapien
acaccacttcggctaagatgatgctttccactg

SEQ ID NO: 354127 - DNA, 33 bp, Homo sapien
ggtctgctgtgtcaggaatttttgctagtgatc

SEQ ID NO: 354128 - DNA, 33 bp, Homo sapien
ggtctgctgtgtcagggatttttgctagtgatc

SEQ ID NO: 354129 - DNA, 33 bp, Homo sapien
gggcttgtgccattcacacccaacacagaagtg

SEQ ID NO: 354130 - DNA, 33 bp, Homo sapien
gggcttgtgccattcatacccaacacagaagtg

SEQ ID NO: 354131 - DNA, 33 bp, Homo sapien
ccctccctgcatcaaaaagcagttcaaggatgt

SEQ ID NO: 354132 - DNA, 33 bp, Homo sapien
ccctccctgcatcaaacagcagttcaaggatgt

SEQ ID NO: 354133 - DNA, 33 bp, Homo sapien
ccagaagctctgcagacggttctagagactggc

SEQ ID NO: 354134 - DNA, 33 bp, Homo sapien
ccagaagctctgcagatggttctagagactggc

SEQ ID NO: 354135 - DNA, 33 bp, Homo sapien
ttctttcacagcaataaccctgatgtttgttat

SEQ ID NO: 354136 - DNA, 33 bp, Homo sapien
ttctttcacagcaatacccctgatgtttgttat

SEQ ID NO: 354137 - DNA, 33 bp, Homo sapien
gccacaaaaaccagacgcagtgactgggcacag

SEQ ID NO: 354138 - DNA, 33 bp, Homo sapien
gccacaaaaaccagactcagtgactgggcacag

SEQ ID NO: 354139 - DNA, 33 bp, Homo sapien
caaagccagatgtgacaataaaaataaactgat

SEQ ID NO: 354140 - DNA, 33 bp, Homo sapien
caaagccagatgtgacgataaaaataaactgat

SEQ ID NO: 354141 - DNA, 33 bp, Homo sapien
taaggttgaaattccacgtttggtttctttaca

SEQ ID NO: 354142 - DNA, 33 bp, Homo sapien
taaggttgaaattccaggtttggtttctttaca

SEQ ID NO: 354143 - DNA, 33 bp, Homo sapien
aacttgagttacttgacaaattaacttctccct

SEQ ID NO: 354144 - DNA, 33 bp, Homo sapien
aacttgagttacttgagaaattaacttctccct

SEQ ID NO: 354145 - DNA, 33 bp, Homo sapien
gcttagaaatcagacacgccttctccaaatccc

SEQ ID NO: 354146 - DNA, 33 bp, Homo sapien
gcttagaaatcagacatgccttctccaaatccc

SEQ ID NO: 354147 - DNA, 33 bp, Homo sapien
gtctgcctaagttcaaagggatgtccattagac

SEQ ID NO: 354148 - DNA, 33 bp, Homo sapien
gtctgcctaagttcaaggggatgtccattagac

SEQ ID NO: 354149 - DNA, 33 bp, Homo sapien
aatgggcccctgtagacgtttgcatggtaatac

SEQ ID NO: 354150 - DNA, 33 bp, Homo sapien
aatgggcccctgtagatgtttgcatggtaatac

SEQ ID NO: 354151 - DNA, 33 bp, Homo sapien
agtattgctcaaatagacccacatcactcttgg

SEQ ID NO: 354152 - DNA, 33 bp, Homo sapien
agtattgctcaaataggcccacatcactcttgg

SEQ ID NO: 354153 - DNA, 33 bp, Homo sapien
tagacctgaaatacacgaaacccgaagcttttt

SEQ ID NO: 354154 - DNA, 33 bp, Homo sapien
tagacctgaaatacactaaacccgaagcttttt

SEQ ID NO: 354155 - DNA, 33 bp, Homo sapien
gactgtcatggaagcacaggaaagaaaggattt

SEQ ID NO: 354156 - DNA, 33 bp, Homo sapien
gactgtcatggaagcataggaaagaaaggattt

SEQ ID NO: 354157 - DNA, 33 bp, Homo sapien
actccactgaagctgacggactgaaactctgac

SEQ ID NO: 354158 - DNA, 33 bp, Homo sapien
actccactgaagctgatggactgaaactctgac

SEQ ID NO: 354159 - DNA, 33 bp, Homo sapien
tcctcatggagtctcaaaaaggctgaatcactt

SEQ ID NO: 354160 - DNA, 33 bp, Homo sapien
tcctcatggagtctcagaaaggctgaatcactt

SEQ ID NO: 354161 - DNA, 33 bp, Homo sapien
tggaacaaaggaggcaacttatgtttgtattaa

SEQ ID NO: 354162 - DNA, 33 bp, Homo sapien
tggaacaaaggaggcagcttatgtttgtattaa

SEQ ID NO: 354163 - DNA, 33 bp, Homo sapien
tacaacaaatggatgaaactggctttgtcatct

SEQ ID NO: 354164 - DNA, 33 bp, Homo sapien
tacaacaaatggatgagactggctttgtcatct

SEQ ID NO: 354165 - DNA, 33 bp, Homo sapien
tgatgagtcactttcactccataacacaatctt

SEQ ID NO: 354166 - DNA, 33 bp, Homo sapien
tgatgagtcactttcattccataacacaatctt

SEQ ID NO: 354167 - DNA, 33 bp, Homo sapien
tggttcgttcataaaacggagatctctttcaca

SEQ ID NO: 354168 - DNA, 33 bp, Homo sapien
tggttcgttcataaaatggagatctctttcaca

SEQ ID NO: 354169 - DNA, 33 bp, Homo sapien
aattgggataaacctacacttaatacatatata

SEQ ID NO: 354170 - DNA, 33 bp, Homo sapien
aattgggataaacctatacttaatacatatata

SEQ ID NO: 354171 - DNA, 33 bp, Homo sapien
cctttttgtaagcacaccagtcctattggatta

SEQ ID NO: 354172 - DNA, 33 bp, Homo sapien
cctttttgtaagcacatcagtcctattggatta

SEQ ID NO: 354173 - DNA, 33 bp, Homo sapien
ttagagacaaatgctaaccacagctggaaatat

SEQ ID NO: 354174 - DNA, 33 bp, Homo sapien
ttagagacaaatgctatccacagctggaaatat

SEQ ID NO: 354175 - DNA, 33 bp, Homo sapien
gcgcgtagcctggcaaagatgttttcatttaga

SEQ ID NO: 354176 - DNA, 33 bp, Homo sapien
gcgcgtagcctggcaaggatgttttcatttaga

SEQ ID NO: 354177 - DNA, 33 bp, Homo sapien
agagatttaaaggtacaaatctcacctctgtca

SEQ ID NO: 354178 - DNA, 33 bp, Homo sapien
agagatttaaaggtactaatctcacctctgtca

SEQ ID NO: 354179 - DNA, 33 bp, Homo sapien
tgtatttgtttgagtacgttttcaattctttgg

SEQ ID NO: 354180 - DNA, 33 bp, Homo sapien
tgtatttgtttgagtatgttttcaattctttgg

SEQ ID NO: 354181 - DNA, 33 bp, Homo sapien
gacgcacaagacaggacaactaggataccctga

SEQ ID NO: 354182 - DNA, 33 bp, Homo sapien
gacgcacaagacaggagaactaggataccctga

SEQ ID NO: 354183 - DNA, 33 bp, Homo sapien
aaaaaagaacttcatgaaggagtccactgagta

SEQ ID NO: 354184 - DNA, 33 bp, Homo sapien
aaaaaagaacttcatggaggagtccactgagta

SEQ ID NO: 354185 - DNA, 33 bp, Homo sapien
atggcgataaaccttgaatgtcagcctctgtaa

SEQ ID NO: 354186 - DNA, 33 bp, Homo sapien
atggcgataaaccttgtatgtcagcctctgtaa

SEQ ID NO: 354187 - DNA, 33 bp, Homo sapien
gcacctctagaatccaatgacattttgggggaa

SEQ ID NO: 354188 - DNA, 33 bp, Homo sapien
gcacctctagaatccagtgacattttgggggaa

SEQ ID NO: 354189 - DNA, 33 bp, Homo sapien
ggcaggcagccacatagaccttcagtttaacta

SEQ ID NO: 354190 - DNA, 33 bp, Homo sapien
ggcaggcagccacatataccttcagtttaacta

SEQ ID NO: 354191 - DNA, 33 bp, Homo sapien
ccataacgatcaccaacaatgggtcctactttc

SEQ ID NO: 354192 - DNA, 33 bp, Homo sapien
ccataacgatcaccaataatgggtcctactttc

SEQ ID NO: 354193 - DNA, 33 bp, Homo sapien
atcacacagtgaaagacaggaacgtgctgcttc

SEQ ID NO: 354194 - DNA, 33 bp, Homo sapien
atcacacagtgaaagataggaacgtgctgcttc

SEQ ID NO: 354195 - DNA, 33 bp, Homo sapien
acaccaacattagatcaataactcctccgaatg

SEQ ID NO: 354196 - DNA, 33 bp, Homo sapien
acaccaacattagatcgataactcctccgaatg

SEQ ID NO: 354197 - DNA, 33 bp, Homo sapien
ttaacagatctggaaaaggacccagacatctgc

SEQ ID NO: 354198 - DNA, 33 bp, Homo sapien
ttaacagatctggaaagggacccagacatctgc

SEQ ID NO: 354199 - DNA, 33 bp, Homo sapien
catgctctccagttgacgaaccatggtgtgggt

SEQ ID NO: 354200 - DNA, 33 bp, Homo sapien
catgctctccagttgatgaaccatggtgtgggt

SEQ ID NO: 354201 - DNA, 33 bp, Homo sapien
ataagctttttgagacacgtggatcaaatccca

SEQ ID NO: 354202 - DNA, 33 bp, Homo sapien
ataagctttttgagactcgtggatcaaatccca

SEQ ID NO: 354203 - DNA, 33 bp, Homo sapien
gctctcctttagaccaaagaaagggttcctgga

SEQ ID NO: 354204 - DNA, 33 bp, Homo sapien
gctctcctttagaccagagaaagggttcctgga

SEQ ID NO: 354205 - DNA, 33 bp, Homo sapien
caacaaccaccgtcaccgtagcaggaaacttca

SEQ ID NO: 354206 - DNA, 33 bp, Homo sapien
caacaaccaccgtcactgtagcaggaaacttca

SEQ ID NO: 354207 - DNA, 33 bp, Homo sapien
agagagactttttcaacggagtcattaacaact

SEQ ID NO: 354208 - DNA, 33 bp, Homo sapien
agagagactttttcaatggagtcattaacaact

SEQ ID NO: 354209 - DNA, 33 bp, Homo sapien
agagagatgcatacaacgctatgacacattctg

SEQ ID NO: 354210 - DNA, 33 bp, Homo sapien
agagagatgcatacaaggctatgacacattctg

SEQ ID NO: 354211 - DNA, 33 bp, Homo sapien
gctcctgtccctttcactcatttgacggaactc

SEQ ID NO: 354212 - DNA, 33 bp, Homo sapien
gctcctgtccctttcagtcatttgacggaactc

SEQ ID NO: 354213 - DNA, 33 bp, Homo sapien
cgagcccagtgtaaaacgcaaacctatagccat

SEQ ID NO: 354214 - DNA, 33 bp, Homo sapien
cgagcccagtgtaaaatgcaaacctatagccat

SEQ ID NO: 354215 - DNA, 33 bp, Homo sapien
agagggaacatcctcacgggtaagggggattct

SEQ ID NO: 354216 - DNA, 33 bp, Homo sapien
agagggaacatcctcatgggtaagggggattct

SEQ ID NO: 354217 - DNA, 33 bp, Homo sapien
ccaagactcaaagcctgaagagttataagcctc

SEQ ID NO: 354218 - DNA, 33 bp, Homo sapien
ccaagactcaaagccttaagagttataagcctc

SEQ ID NO: 354219 - DNA, 33 bp, Homo sapien
cttcagagggtcacaactgaagatgaggcttat

SEQ ID NO: 354220 - DNA, 33 bp, Homo sapien
cttcagagggtcacaattgaagatgaggcttat

SEQ ID NO: 354221 - DNA, 33 bp, Homo sapien
agtttgagaaaagcaactctgggcctgtgttgg

SEQ ID NO: 354222 - DNA, 33 bp, Homo sapien
agtttgagaaaagcaattctgggcctgtgttgg

SEQ ID NO: 354223 - DNA, 33 bp, Homo sapien
ctacaataagaaggccagcttgatttcatttca

SEQ ID NO: 354224 - DNA, 33 bp, Homo sapien
ctacaataagaaggccggcttgatttcatttca

SEQ ID NO: 354225 - DNA, 33 bp, Homo sapien
tacataaaactcatcgcaaccaggattgccctt

SEQ ID NO: 354226 - DNA, 33 bp, Homo sapien
tacataaaactcatcggaaccaggattgccctt

SEQ ID NO: 354227 - DNA, 33 bp, Homo sapien
tcggggcagtccacaccggacttggcaaagttt

SEQ ID NO: 354228 - DNA, 33 bp, Homo sapien
tcggggcagtccacacgggacttggcaaagttt

SEQ ID NO: 354229 - DNA, 33 bp, Homo sapien
tccttccttctctggacgatgccccagatttaa

SEQ ID NO: 354230 - DNA, 33 bp, Homo sapien
tccttccttctctggatgatgccccagatttaa

SEQ ID NO: 354231 - DNA, 33 bp, Homo sapien
gaactctggccaaataaaagttttgttttctat

SEQ ID NO: 354232 - DNA, 33 bp, Homo sapien
gaactctggccaaatataagttttgttttctat

SEQ ID NO: 354233 - DNA, 33 bp, Homo sapien
ggaggaatagagatatcagccatcagggccgcc

SEQ ID NO: 354234 - DNA, 33 bp, Homo sapien
ggaggaatagagatattagccatcagggccgcc

SEQ ID NO: 354235 - DNA, 33 bp, Homo sapien
gctataacaaaaatgccccatggattgtatagc

SEQ ID NO: 354236 - DNA, 33 bp, Homo sapien
gctataacaaaaatgcgccatggattgtatagc

SEQ ID NO: 354237 - DNA, 33 bp, Homo sapien
ccatcatattagggataaagatttcaatgcaaa

SEQ ID NO: 354238 - DNA, 33 bp, Homo sapien
ccatcatattagggattaagatttcaatgcaaa

SEQ ID NO: 354239 - DNA, 33 bp, Homo sapien
gcatctttcaaggcacagctaagactcctggaa

SEQ ID NO: 354240 - DNA, 33 bp, Homo sapien
gcatctttcaaggcacggctaagactcctggaa

SEQ ID NO: 354241 - DNA, 33 bp, Homo sapien
ggcttctttgtgaagcagagagaggacttccta

SEQ ID NO: 354242 - DNA, 33 bp, Homo sapien
ggcttctttgtgaagctgagagaggacttccta

SEQ ID NO: 354243 - DNA, 33 bp, Homo sapien
ccagaactactgtgtccgaaactgcatttaaac

SEQ ID NO: 354244 - DNA, 33 bp, Homo sapien
ccagaactactgtgtctgaaactgcatttaaac

SEQ ID NO: 354245 - DNA, 33 bp, Homo sapien
gcggttccctaggacccgagaaaaggatggccg

SEQ ID NO: 354246 - DNA, 33 bp, Homo sapien
gcggttccctaggacctgagaaaaggatggccg

SEQ ID NO: 354247 - DNA, 33 bp, Homo sapien
aggtcctgctgcacacacttcaggtaggaaagg

SEQ ID NO: 354248 - DNA, 33 bp, Homo sapien
aggtcctgctgcacacgcttcaggtaggaaagg

SEQ ID NO: 354249 - DNA, 33 bp, Homo sapien
catcagcagtcatgtcaaatgttcctagtccaa

SEQ ID NO: 354250 - DNA, 33 bp, Homo sapien
catcagcagtcatgtccaatgttcctagtccaa

SEQ ID NO: 354251 - DNA, 33 bp, Homo sapien
tgtctcagcgaatgaaactcttaaaggtcagaa

SEQ ID NO: 354252 - DNA, 33 bp, Homo sapien
tgtctcagcgaatgaagctcttaaaggtcagaa

SEQ ID NO: 354253 - DNA, 33 bp, Homo sapien
gctatagatcttggagaattttccagtcatctc

SEQ ID NO: 354254 - DNA, 33 bp, Homo sapien
gctatagatcttggagcattttccagtcatctc

SEQ ID NO: 354255 - DNA, 33 bp, Homo sapien
ttgcctagtagtaaaacggtactattgggaagt

SEQ ID NO: 354256 - DNA, 33 bp, Homo sapien
ttgcctagtagtaaaatggtactattgggaagt

SEQ ID NO: 354257 - DNA, 33 bp, Homo sapien
tcccgcaccaatccaaatcaccaaatcacaggt

SEQ ID NO: 354258 - DNA, 33 bp, Homo sapien
tcccgcaccaatccaagtcaccaaatcacaggt

SEQ ID NO: 354259 - DNA, 33 bp, Homo sapien
tggttaaccaagataactgttgcctctatttgg

SEQ ID NO: 354260 - DNA, 33 bp, Homo sapien
tggttaaccaagataattgttgcctctatttgg

SEQ ID NO: 354261 - DNA, 33 bp, Homo sapien
gcagctgcaaaacaagccaaaaaggacacagaa

SEQ ID NO: 354262 - DNA, 33 bp, Homo sapien
gcagctgcaaaacaagtcaaaaaggacacagaa

SEQ ID NO: 354263 - DNA, 33 bp, Homo sapien
ggctgggacactaatacgcagagatccctgcct

SEQ ID NO: 354264 - DNA, 33 bp, Homo sapien
ggctgggacactaatatgcagagatccctgcct

SEQ ID NO: 354265 - DNA, 33 bp, Homo sapien
gcaattagagaagagaagcctgatgtcctcttt

SEQ ID NO: 354266 - DNA, 33 bp, Homo sapien
gcaattagagaagagatgcctgatgtcctcttt

SEQ ID NO: 354267 - DNA, 33 bp, Homo sapien
tggatcaagtcttcaacgatcaaagattacaac

SEQ ID NO: 354268 - DNA, 33 bp, Homo sapien
tggatcaagtcttcaatgatcaaagattacaac

SEQ ID NO: 354269 - DNA, 33 bp, Homo sapien
caattataaccacagcacaacaactaaacagga

SEQ ID NO: 354270 - DNA, 33 bp, Homo sapien
caattataaccacagcgcaacaactaaacagga

SEQ ID NO: 354271 - DNA, 33 bp, Homo sapien
tcacactaaacgctcaataaaatgttgataaat

SEQ ID NO: 354272 - DNA, 33 bp, Homo sapien
tcacactaaacgctcagtaaaatgttgataaat

SEQ ID NO: 354273 - DNA, 33 bp, Homo sapien
ataggactttgcataccagcctcttttgccctg

SEQ ID NO: 354274 - DNA, 33 bp, Homo sapien
ataggactttgcatactagcctcttttgccctg

SEQ ID NO: 354275 - DNA, 33 bp, Homo sapien
tgccgtatgaagacacaattttgggtcctcggt

SEQ ID NO: 354276 - DNA, 33 bp, Homo sapien
tgccgtatgaagacaccattttgggtcctcggt

SEQ ID NO: 354277 - DNA, 33 bp, Homo sapien
ggctgccactgatagcactggacatcaaaggcc

SEQ ID NO: 354278 - DNA, 33 bp, Homo sapien
ggctgccactgatagcgctggacatcaaaggcc

SEQ ID NO: 354279 - DNA, 33 bp, Homo sapien
agcgtggagatccaaacattggaaggaagagtg

SEQ ID NO: 354280 - DNA, 33 bp, Homo sapien
agcgtggagatccaaatattggaaggaagagtg

SEQ ID NO: 354281 - DNA, 33 bp, Homo sapien
ctctaggagcagactcaagagctctacccagct

SEQ ID NO: 354282 - DNA, 33 bp, Homo sapien
ctctaggagcagactccagagctctacccagct

SEQ ID NO: 354283 - DNA, 33 bp, Homo sapien
cagtctttcagatagaaactgaggctgatgtct

SEQ ID NO: 354284 - DNA, 33 bp, Homo sapien
cagtctttcagatagagactgaggctgatgtct

SEQ ID NO: 354285 - DNA, 33 bp, Homo sapien
tcatgtcagaaaataacaggagtccacagacac

SEQ ID NO: 354286 - DNA, 33 bp, Homo sapien
tcatgtcagaaaataagaggagtccacagacac

SEQ ID NO: 354287 - DNA, 33 bp, Homo sapien
ggtgctcccaatcacaaaaggagccttccaggg

SEQ ID NO: 354288 - DNA, 33 bp, Homo sapien
ggtgctcccaatcacacaaggagccttccaggg

SEQ ID NO: 354289 - DNA, 33 bp, Homo sapien
cctgctctacccaccaatgaccttactggagag

SEQ ID NO: 354290 - DNA, 33 bp, Homo sapien
cctgctctacccaccattgaccttactggagag

SEQ ID NO: 354291 - DNA, 33 bp, Homo sapien
atttctaatgtattgcactttttattgggaaat

SEQ ID NO: 354292 - DNA, 33 bp, Homo sapien
atttctaatgtattgcgctttttattgggaaat

SEQ ID NO: 354293 - DNA, 33 bp, Homo sapien
tccatagcacaaaagaacaaacaatctttacac

SEQ ID NO: 354294 - DNA, 33 bp, Homo sapien
tccatagcacaaaagagcaaacaatctttacac

SEQ ID NO: 354295 - DNA, 33 bp, Homo sapien
tcttaatgctgctgagcctcaatttttacacct

SEQ ID NO: 354296 - DNA, 33 bp, Homo sapien
tcttaatgctgctgagtctcaatttttacacct

SEQ ID NO: 354297 - DNA, 33 bp, Homo sapien
acgtctgccaagtctgcagatagatgagcaaag

SEQ ID NO: 354298 - DNA, 33 bp, Homo sapien
acgtctgccaagtctgtagatagatgagcaaag

SEQ ID NO: 354299 - DNA, 33 bp, Homo sapien
agatattacctgctaaatgtcctgcacatcttg

SEQ ID NO: 354300 - DNA, 33 bp, Homo sapien
agatattacctgctaagtgtcctgcacatcttg

SEQ ID NO: 354301 - DNA, 33 bp, Homo sapien
taccactaggtatgcaatcaacactgagtatgg

SEQ ID NO: 354302 - DNA, 33 bp, Homo sapien
taccactaggtatgcagtcaacactgagtatgg

SEQ ID NO: 354303 - DNA, 33 bp, Homo sapien
cacaatattgtagaaccatttccactatctact

SEQ ID NO: 354304 - DNA, 33 bp, Homo sapien
cacaatattgtagaactatttccactatctact

SEQ ID NO: 354305 - DNA, 33 bp, Homo sapien
attttacagatgaagacactaagaaaggtaact

SEQ ID NO: 354306 - DNA, 33 bp, Homo sapien
attttacagatgaagagactaagaaaggtaact

SEQ ID NO: 354307 - DNA, 33 bp, Homo sapien
acttctcataacaatcaccattttacagatgaa

SEQ ID NO: 354308 - DNA, 33 bp, Homo sapien
acttctcataacaatcgccattttacagatgaa

SEQ ID NO: 354309 - DNA, 33 bp, Homo sapien
tatgtgtcaagacaaactgataaaccaaagact

SEQ ID NO: 354310 - DNA, 33 bp, Homo sapien
tatgtgtcaagacaaattgataaaccaaagact

SEQ ID NO: 354311 - DNA, 33 bp, Homo sapien
ggggcagaggtatagaaagcaagagaaagtggt

SEQ ID NO: 354312 - DNA, 33 bp, Homo sapien
ggggcagaggtatagagagcaagagaaagtggt

SEQ ID NO: 354313 - DNA, 33 bp, Homo sapien
tacatgaccacaaagagaaaataaatattatcc

SEQ ID NO: 354314 - DNA, 33 bp, Homo sapien
tacatgaccacaaagataaaataaatattatcc

SEQ ID NO: 354315 - DNA, 33 bp, Homo sapien
ctccacccctgtctaacagagccagcagtccct

SEQ ID NO: 354316 - DNA, 33 bp, Homo sapien
ctccacccctgtctaatagagccagcagtccct

SEQ ID NO: 354317 - DNA, 33 bp, Homo sapien
catgaaattgactcccaacgtaattaggccagg

SEQ ID NO: 354318 - DNA, 33 bp, Homo sapien
catgaaattgactccctacgtaattaggccagg

SEQ ID NO: 354319 - DNA, 33 bp, Homo sapien
ggcttttcatgcagtcactacttgataaaagag

SEQ ID NO: 354320 - DNA, 33 bp, Homo sapien
ggcttttcatgcagtcgctacttgataaaagag

SEQ ID NO: 354321 - DNA, 33 bp, Homo sapien
ctgcctgccagtaaaaacccaactggaagctga

SEQ ID NO: 354322 - DNA, 33 bp, Homo sapien
ctgcctgccagtaaaatcccaactggaagctga

SEQ ID NO: 354323 - DNA, 33 bp, Homo sapien
aagtccattataagaactgaaaacataactcag

SEQ ID NO: 354324 - DNA, 33 bp, Homo sapien
aagtccattataagaattgaaaacataactcag

SEQ ID NO: 354325 - DNA, 33 bp, Homo sapien
ttctgaactgaatttccatcatctgtaaatatt

SEQ ID NO: 354326 - DNA, 33 bp, Homo sapien
ttctgaactgaatttctatcatctgtaaatatt

SEQ ID NO: 354327 - DNA, 33 bp, Homo sapien
acactaagtaagcaaagaatccaatgaggaaga

SEQ ID NO: 354328 - DNA, 33 bp, Homo sapien
acactaagtaagcaaataatccaatgaggaaga

SEQ ID NO: 354329 - DNA, 33 bp, Homo sapien
ttcgtggctttggctacatagaagcagagctgg

SEQ ID NO: 354330 - DNA, 33 bp, Homo sapien
ttcgtggctttggctatatagaagcagagctgg

SEQ ID NO: 354331 - DNA, 33 bp, Homo sapien
aggccacaggttaaagccctggatcagtgctgt

SEQ ID NO: 354332 - DNA, 33 bp, Homo sapien
aggccacaggttaaaggcctggatcagtgctgt

SEQ ID NO: 354333 - DNA, 33 bp, Homo sapien
ctgtttttcttctctcactaaaaggcaaatacc

SEQ ID NO: 354334 - DNA, 33 bp, Homo sapien
ctgtttttcttctctcgctaaaaggcaaatacc

SEQ ID NO: 354335 - DNA, 33 bp, Homo sapien
caccttcaaaaagccaactaggacaacggtccc

SEQ ID NO: 354336 - DNA, 33 bp, Homo sapien
caccttcaaaaagccatctaggacaacggtccc

SEQ ID NO: 354337 - DNA, 33 bp, Homo sapien
cttctgctttctgaagccaaatagaatatatta

SEQ ID NO: 354338 - DNA, 33 bp, Homo sapien
cttctgctttctgaagtcaaatagaatatatta

SEQ ID NO: 354339 - DNA, 33 bp, Homo sapien
gcagaagcttatctatgactttgacaacttctc

SEQ ID NO: 354340 - DNA, 33 bp, Homo sapien
gcagaagcttatctattactttgacaacttctc

SEQ ID NO: 354341 - DNA, 33 bp, Homo sapien
tccaatccagttcataagggaggtgtgagagaa

SEQ ID NO: 354342 - DNA, 33 bp, Homo sapien
tccaatccagttcataggggaggtgtgagagaa

SEQ ID NO: 354343 - DNA, 33 bp, Homo sapien
atagatctttaacctgaattttcatcatgctgt

SEQ ID NO: 354344 - DNA, 33 bp, Homo sapien
atagatctttaacctggattttcatcatgctgt

SEQ ID NO: 354345 - DNA, 33 bp, Homo sapien
atttcggtgtgagagcactttgactgggatgtt

SEQ ID NO: 354346 - DNA, 33 bp, Homo sapien
atttcggtgtgagagcgctttgactgggatgtt

SEQ ID NO: 354347 - DNA, 33 bp, Homo sapien
aatatctcctccaaaacggccacgggtattcag

SEQ ID NO: 354348 - DNA, 33 bp, Homo sapien
aatatctcctccaaaatggccacgggtattcag

SEQ ID NO: 354349 - DNA, 33 bp, Homo sapien
ccctgctgaaaagaaacaatgactttccagcat

SEQ ID NO: 354350 - DNA, 33 bp, Homo sapien
ccctgctgaaaagaaataatgactttccagcat

SEQ ID NO: 354351 - DNA, 33 bp, Homo sapien
agatattctaacaagcaaaaagaacagtgtcct

SEQ ID NO: 354352 - DNA, 33 bp, Homo sapien
agatattctaacaagcgaaaagaacagtgtcct

SEQ ID NO: 354353 - DNA, 33 bp, Homo sapien
ttgctaggtgcctacaaactgattcaaattgtg

SEQ ID NO: 354354 - DNA, 33 bp, Homo sapien
ttgctaggtgcctacacactgattcaaattgtg

SEQ ID NO: 354355 - DNA, 33 bp, Homo sapien
ggaattcataatttgcaagtctcctataatatg

SEQ ID NO: 354356 - DNA, 33 bp, Homo sapien
ggaattcataatttgcgagtctcctataatatg

SEQ ID NO: 354357 - DNA, 33 bp, Homo sapien
tttgaatgctataaaacgaacgattatccaaca

SEQ ID NO: 354358 - DNA, 33 bp, Homo sapien
tttgaatgctataaaatgaacgattatccaaca

SEQ ID NO: 354359 - DNA, 33 bp, Homo sapien
gcaaacaaaaaagctccattttaatcagccgta

SEQ ID NO: 354360 - DNA, 33 bp, Homo sapien
gcaaacaaaaaagctctattttaatcagccgta

SEQ ID NO: 354361 - DNA, 33 bp, Homo sapien
tcggtcttgaataaatcaatggcataaaaataa

SEQ ID NO: 354362 - DNA, 33 bp, Homo sapien
tcggtcttgaataaattaatggcataaaaataa

SEQ ID NO: 354363 - DNA, 33 bp, Homo sapien
aaaaggcacataaaaacatcattacctatctca

SEQ ID NO: 354364 - DNA, 33 bp, Homo sapien
aaaaggcacataaaaatatcattacctatctca

SEQ ID NO: 354365 - DNA, 33 bp, Homo sapien
ataaaaatccagcagacgcccatgtatctaacc

SEQ ID NO: 354366 - DNA, 33 bp, Homo sapien
ataaaaatccagcagaggcccatgtatctaacc

SEQ ID NO: 354367 - DNA, 33 bp, Homo sapien
actcttctctgtttccaaattatgcatgaagag

SEQ ID NO: 354368 - DNA, 33 bp, Homo sapien
actcttctctgtttccgaattatgcatgaagag

SEQ ID NO: 354369 - DNA, 33 bp, Homo sapien
cacccatatgtcagaagaattgtttacactaca

SEQ ID NO: 354370 - DNA, 33 bp, Homo sapien
cacccatatgtcagaataattgtttacactaca

SEQ ID NO: 354371 - DNA, 33 bp, Homo sapien
ggaaacagcagatatacagacccagtggaggtg

SEQ ID NO: 354372 - DNA, 33 bp, Homo sapien
ggaaacagcagatatagagacccagtggaggtg

SEQ ID NO: 354373 - DNA, 33 bp, Homo sapien
aggaataaaaacacaaccaatgtttctctttca

SEQ ID NO: 354374 - DNA, 33 bp, Homo sapien
aggaataaaaacacaatcaatgtttctctttca

SEQ ID NO: 354375 - DNA, 33 bp, Homo sapien
catggccgccagtctaccattatcccctcttgc

SEQ ID NO: 354376 - DNA, 33 bp, Homo sapien
catggccgccagtctagcattatcccctcttgc

SEQ ID NO: 354377 - DNA, 33 bp, Homo sapien
gctaaatgtggtttaaatggtcttagggtttaa

SEQ ID NO: 354378 - DNA, 33 bp, Homo sapien
gctaaatgtggtttaagtggtcttagggtttaa

SEQ ID NO: 354379 - DNA, 33 bp, Homo sapien
tttataataactggaccaattggaagaatttca

SEQ ID NO: 354380 - DNA, 33 bp, Homo sapien
tttataataactggacgaattggaagaatttca

SEQ ID NO: 354381 - DNA, 33 bp, Homo sapien
gagaaatccagaattcaaagaagcagccaaaac

SEQ ID NO: 354382 - DNA, 33 bp, Homo sapien
gagaaatccagaattcgaagaagcagccaaaac

SEQ ID NO: 354383 - DNA, 33 bp, Homo sapien
agtaaaatgtaagtcacagcctggagcagatgt

SEQ ID NO: 354384 - DNA, 33 bp, Homo sapien
agtaaaatgtaagtcatagcctggagcagatgt

SEQ ID NO: 354385 - DNA, 33 bp, Homo sapien
agccctctggataataaaggcaatcaaatgcca

SEQ ID NO: 354386 - DNA, 33 bp, Homo sapien
agccctctggataatacaggcaatcaaatgcca

SEQ ID NO: 354387 - DNA, 33 bp, Homo sapien
ctggaggccagaaatcaaaatcaacgtgctttc

SEQ ID NO: 354388 - DNA, 33 bp, Homo sapien
ctggaggccagaaatcgaaatcaacgtgctttc

SEQ ID NO: 354389 - DNA, 33 bp, Homo sapien
tgcttccttacagttacaggtacttctttgaac

SEQ ID NO: 354390 - DNA, 33 bp, Homo sapien
tgcttccttacagttagaggtacttctttgaac

SEQ ID NO: 354391 - DNA, 33 bp, Homo sapien
atttacacagacatctcaaacttaaggaacatc

SEQ ID NO: 354392 - DNA, 33 bp, Homo sapien
atttacacagacatctgaaacttaaggaacatc

SEQ ID NO: 354393 - DNA, 33 bp, Homo sapien
cttctctacaagctgacgccatttatttctgta

SEQ ID NO: 354394 - DNA, 33 bp, Homo sapien
cttctctacaagctgaggccatttatttctgta

SEQ ID NO: 354395 - DNA, 33 bp, Homo sapien
gtcagaaattcaaaccaatcttcagccttcacc

SEQ ID NO: 354396 - DNA, 33 bp, Homo sapien
gtcagaaattcaaacccatcttcagccttcacc

SEQ ID NO: 354397 - DNA, 33 bp, Homo sapien
cgtcatctgtttggaccacaaggaaagtatcct

SEQ ID NO: 354398 - DNA, 33 bp, Homo sapien
cgtcatctgtttggacgacaaggaaagtatcct

SEQ ID NO: 354399 - DNA, 33 bp, Homo sapien
ataagtgctgattcacaacttcgggatttgttt

SEQ ID NO: 354400 - DNA, 33 bp, Homo sapien
ataagtgctgattcacgacttcgggatttgttt

SEQ ID NO: 354401 - DNA, 33 bp, Homo sapien
atttatatcctatataggcaatgtgataaatat

SEQ ID NO: 354402 - DNA, 33 bp, Homo sapien
atttatatcctatatatgcaatgtgataaatat

SEQ ID NO: 354403 - DNA, 33 bp, Homo sapien
tggttggctgtggtaacgtagtagagagtggct

SEQ ID NO: 354404 - DNA, 33 bp, Homo sapien
tggttggctgtggtaatgtagtagagagtggct

SEQ ID NO: 354405 - DNA, 33 bp, Homo sapien
gatgatcctcaatttacgggttttagatagaca

SEQ ID NO: 354406 - DNA, 33 bp, Homo sapien
gatgatcctcaatttatgggttttagatagaca

SEQ ID NO: 354407 - DNA, 33 bp, Homo sapien
agggcttagttaagaacgtggcacacaggagcc

SEQ ID NO: 354408 - DNA, 33 bp, Homo sapien
agggcttagttaagaatgtggcacacaggagcc

SEQ ID NO: 354409 - DNA, 33 bp, Homo sapien
agcattttgcaaagtacatggcacacatcaatt

SEQ ID NO: 354410 - DNA, 33 bp, Homo sapien
agcattttgcaaagtatatggcacacatcaatt

SEQ ID NO: 354411 - DNA, 33 bp, Homo sapien
ttttagaaaagaacaactgagaaccgctatctt

SEQ ID NO: 354412 - DNA, 33 bp, Homo sapien
ttttagaaaagaacaattgagaaccgctatctt

SEQ ID NO: 354413 - DNA, 33 bp, Homo sapien
tgtggtccatttcaacagagctcaccaggcaca

SEQ ID NO: 354414 - DNA, 33 bp, Homo sapien
tgtggtccatttcaacggagctcaccaggcaca

SEQ ID NO: 354415 - DNA, 33 bp, Homo sapien
taatacccagctcttgacaactgtgcctgtagt

SEQ ID NO: 354416 - DNA, 33 bp, Homo sapien
taatacccagctcttgccaactgtgcctgtagt

SEQ ID NO: 354417 - DNA, 33 bp, Homo sapien
agaaacattggaatgcagacagacatcagaagc

SEQ ID NO: 354418 - DNA, 33 bp, Homo sapien
agaaacattggaatgcggacagacatcagaagc

SEQ ID NO: 354419 - DNA, 33 bp, Homo sapien
cactgacaattatagtcaaaacactgtgtatca

SEQ ID NO: 354420 - DNA, 33 bp, Homo sapien
cactgacaattatagttaaaacactgtgtatca

SEQ ID NO: 354421 - DNA, 33 bp, Homo sapien
agtgtacaaaatggataacagattaaagatcca

SEQ ID NO: 354422 - DNA, 33 bp, Homo sapien
agtgtacaaaatggatgacagattaaagatcca

SEQ ID NO: 354423 - DNA, 33 bp, Homo sapien
agatcaagtcaaaagaaaatggactcttccatt

SEQ ID NO: 354424 - DNA, 33 bp, Homo sapien
agatcaagtcaaaagacaatggactcttccatt

SEQ ID NO: 354425 - DNA, 33 bp, Homo sapien
ccatggaatcttagagaacttaacgtctagttc

SEQ ID NO: 354426 - DNA, 33 bp, Homo sapien
ccatggaatcttagaggacttaacgtctagttc

SEQ ID NO: 354427 - DNA, 33 bp, Homo sapien
ttagtcttacctgtccccagaatagatcattca

SEQ ID NO: 354428 - DNA, 33 bp, Homo sapien
ttagtcttacctgtcctcagaatagatcattca

SEQ ID NO: 354429 - DNA, 33 bp, Homo sapien
ctccaccttagcaacacggacgtatgatgaata

SEQ ID NO: 354430 - DNA, 33 bp, Homo sapien
ctccaccttagcaacatggacgtatgatgaata

SEQ ID NO: 354431 - DNA, 33 bp, Homo sapien
attttaagtttgatagcatggctgacagtctat

SEQ ID NO: 354432 - DNA, 33 bp, Homo sapien
attttaagtttgataggatggctgacagtctat

SEQ ID NO: 354433 - DNA, 33 bp, Homo sapien
acagtttcatctaacacggagtgagcacttcag

SEQ ID NO: 354434 - DNA, 33 bp, Homo sapien
acagtttcatctaacatggagtgagcacttcag

SEQ ID NO: 354435 - DNA, 33 bp, Homo sapien
tctcaaaatccacctaaaacattcaccacttta

SEQ ID NO: 354436 - DNA, 33 bp, Homo sapien
tctcaaaatccacctataacattcaccacttta

SEQ ID NO: 354437 - DNA, 33 bp, Homo sapien
ctttttagatcatcaacaaaggagaagttgaga

SEQ ID NO: 354438 - DNA, 33 bp, Homo sapien
ctttttagatcatcaagaaaggagaagttgaga

SEQ ID NO: 354439 - DNA, 33 bp, Homo sapien
gagaagttgagagtacaatcaagaatctgttat

SEQ ID NO: 354440 - DNA, 33 bp, Homo sapien
gagaagttgagagtacgatcaagaatctgttat

SEQ ID NO: 354441 - DNA, 33 bp, Homo sapien
aatgttaggtctttaccccatctgtcctgaccc

SEQ ID NO: 354442 - DNA, 33 bp, Homo sapien
aatgttaggtctttactccatctgtcctgaccc

SEQ ID NO: 354443 - DNA, 33 bp, Homo sapien
gactgcttttaatgacccattctgtttaataaa

SEQ ID NO: 354444 - DNA, 33 bp, Homo sapien
gactgcttttaatgactcattctgtttaataaa

SEQ ID NO: 354445 - DNA, 33 bp, Homo sapien
tttttaatacgccagcaaaagagaaaggggttt

SEQ ID NO: 354446 - DNA, 33 bp, Homo sapien
tttttaatacgccagcgaaagagaaaggggttt

SEQ ID NO: 354447 - DNA, 33 bp, Homo sapien
aaattgtggcatttcaagcttcccttctgtgtg

SEQ ID NO: 354448 - DNA, 33 bp, Homo sapien
aaattgtggcatttcaggcttcccttctgtgtg

SEQ ID NO: 354449 - DNA, 33 bp, Homo sapien
ttaggtatgaagttggaacatacatatttttat

SEQ ID NO: 354450 - DNA, 33 bp, Homo sapien
ttaggtatgaagttgggacatacatatttttat

SEQ ID NO: 354451 - DNA, 33 bp, Homo sapien
taggtatgattttaccactgactgtacatccga

SEQ ID NO: 354452 - DNA, 33 bp, Homo sapien
taggtatgattttaccgctgactgtacatccga

SEQ ID NO: 354453 - DNA, 33 bp, Homo sapien
gcatgtggccccaaacacttcattctagagcaa

SEQ ID NO: 354454 - DNA, 33 bp, Homo sapien
gcatgtggccccaaacgcttcattctagagcaa

SEQ ID NO: 354455 - DNA, 33 bp, Homo sapien
ttgagtgtcattccacaatctctttccagtgct

SEQ ID NO: 354456 - DNA, 33 bp, Homo sapien
ttgagtgtcattccacgatctctttccagtgct

SEQ ID NO: 354457 - DNA, 33 bp, Homo sapien
tcaatttttccatgaaagagttcctggtgtaat

SEQ ID NO: 354458 - DNA, 33 bp, Homo sapien
tcaatttttccatgaaggagttcctggtgtaat

SEQ ID NO: 354459 - DNA, 33 bp, Homo sapien
ctccaaatctttatcacctgtccttagcacatg

SEQ ID NO: 354460 - DNA, 33 bp, Homo sapien
ctccaaatctttatcatctgtccttagcacatg

SEQ ID NO: 354461 - DNA, 33 bp, Homo sapien
agttccaatcgttctacatttttggcaacaatt

SEQ ID NO: 354462 - DNA, 33 bp, Homo sapien
agttccaatcgttctatatttttggcaacaatt

SEQ ID NO: 354463 - DNA, 33 bp, Homo sapien
caaaatttaagaatgcacttcaaatacgcattc

SEQ ID NO: 354464 - DNA, 33 bp, Homo sapien
caaaatttaagaatgcccttcaaatacgcattc

SEQ ID NO: 354465 - DNA, 33 bp, Homo sapien
tcagtgctttcgatcacaggggtagtctggtat

SEQ ID NO: 354466 - DNA, 33 bp, Homo sapien
tcagtgctttcgatcataggggtagtctggtat

SEQ ID NO: 354467 - DNA, 33 bp, Homo sapien
taggccagaggaaaaccggtagtataaaagtgc

SEQ ID NO: 354468 - DNA, 33 bp, Homo sapien
taggccagaggaaaactggtagtataaaagtgc

SEQ ID NO: 354469 - DNA, 33 bp, Homo sapien
caaataaagctactcagagtttgtaagtaattg

SEQ ID NO: 354470 - DNA, 33 bp, Homo sapien
caaataaagctactcatagtttgtaagtaattg

SEQ ID NO: 354471 - DNA, 33 bp, Homo sapien
tagatgacagatgctaataaggacgtcatcatt

SEQ ID NO: 354472 - DNA, 33 bp, Homo sapien
tagatgacagatgctactaaggacgtcatcatt

SEQ ID NO: 354473 - DNA, 33 bp, Homo sapien
actgataagcatttaaccatttcacaatgaata

SEQ ID NO: 354474 - DNA, 33 bp, Homo sapien
actgataagcatttaagcatttcacaatgaata

SEQ ID NO: 354475 - DNA, 33 bp, Homo sapien
taacagcacattgaaacagtcaaacactgagat

SEQ ID NO: 354476 - DNA, 33 bp, Homo sapien
taacagcacattgaaagagtcaaacactgagat

SEQ ID NO: 354477 - DNA, 33 bp, Homo sapien
tcctctatttttcacactagtgcacattttact

SEQ ID NO: 354478 - DNA, 33 bp, Homo sapien
tcctctatttttcacattagtgcacattttact

SEQ ID NO: 354479 - DNA, 33 bp, Homo sapien
gctaagaatatttaggcaatggtgagcattcta

SEQ ID NO: 354480 - DNA, 33 bp, Homo sapien
gctaagaatatttaggtaatggtgagcattcta

SEQ ID NO: 354481 - DNA, 33 bp, Homo sapien
ggcagatgaaaaagaacggctcttcacggatag

SEQ ID NO: 354482 - DNA, 33 bp, Homo sapien
ggcagatgaaaaagaatggctcttcacggatag

SEQ ID NO: 354483 - DNA, 33 bp, Homo sapien
tctccaaaattgcagggatgtatgaagacttta

SEQ ID NO: 354484 - DNA, 33 bp, Homo sapien
tctccaaaattgcaggtatgtatgaagacttta

SEQ ID NO: 354485 - DNA, 33 bp, Homo sapien
atcggttctgaatttacattttactgggctctg

SEQ ID NO: 354486 - DNA, 33 bp, Homo sapien
atcggttctgaatttatattttactgggctctg

SEQ ID NO: 354487 - DNA, 33 bp, Homo sapien
gcagccaagctactaacgataaagccctctgat

SEQ ID NO: 354488 - DNA, 33 bp, Homo sapien
gcagccaagctactaatgataaagccctctgat

SEQ ID NO: 354489 - DNA, 33 bp, Homo sapien
ctagctccttcaaatacatggcattaacatttt

SEQ ID NO: 354490 - DNA, 33 bp, Homo sapien
ctagctccttcaaatatatggcattaacatttt

SEQ ID NO: 354491 - DNA, 33 bp, Homo sapien
tgtaggttggaaaataaagggtaatgagcaggt

SEQ ID NO: 354492 - DNA, 33 bp, Homo sapien
tgtaggttggaaaatagagggtaatgagcaggt

SEQ ID NO: 354493 - DNA, 33 bp, Homo sapien
tccaggtaaaagaagacagtggcttagacaggg

SEQ ID NO: 354494 - DNA, 33 bp, Homo sapien
tccaggtaaaagaagatagtggcttagacaggg

SEQ ID NO: 354495 - DNA, 33 bp, Homo sapien
cattttggcttgatcaactcatcaggggaattc

SEQ ID NO: 354496 - DNA, 33 bp, Homo sapien
cattttggcttgatcatctcatcaggggaattc

SEQ ID NO: 354497 - DNA, 33 bp, Homo sapien
agcaattcatttaaacacagcaaatgtgcttgg

SEQ ID NO: 354498 - DNA, 33 bp, Homo sapien
agcaattcatttaaacccagcaaatgtgcttgg

SEQ ID NO: 354499 - DNA, 33 bp, Homo sapien
aagggggctcccttaaatgaagctgactagcat

SEQ ID NO: 354500 - DNA, 33 bp, Homo sapien
aagggggctcccttaactgaagctgactagcat

SEQ ID NO: 354501 - DNA, 33 bp, Homo sapien
cccaagttcctaaatgaagttaacatctctttg

SEQ ID NO: 354502 - DNA, 33 bp, Homo sapien
cccaagttcctaaatggagttaacatctctttg

SEQ ID NO: 354503 - DNA, 33 bp, Homo sapien
acttcagctcttctctcatggtaatacaatgac

SEQ ID NO: 354504 - DNA, 33 bp, Homo sapien
acttcagctcttctcttatggtaatacaatgac

SEQ ID NO: 354505 - DNA, 33 bp, Homo sapien
ctttgagcagatatgacgtttgccacgcttcag

SEQ ID NO: 354506 - DNA, 33 bp, Homo sapien
ctttgagcagatatgatgtttgccacgcttcag

SEQ ID NO: 354507 - DNA, 33 bp, Homo sapien
acaatgatactgaatacaaaaggacttcaaata

SEQ ID NO: 354508 - DNA, 33 bp, Homo sapien
acaatgatactgaatagaaaaggacttcaaata

SEQ ID NO: 354509 - DNA, 33 bp, Homo sapien
tatttagggctttaccacatggcaatatggaga

SEQ ID NO: 354510 - DNA, 33 bp, Homo sapien
tatttagggctttaccgcatggcaatatggaga

SEQ ID NO: 354511 - DNA, 33 bp, Homo sapien
ggccatcttggaaccccaatttttcttgagtat

SEQ ID NO: 354512 - DNA, 33 bp, Homo sapien
ggccatcttggaaccctaatttttcttgagtat

SEQ ID NO: 354513 - DNA, 33 bp, Homo sapien
ttaattataagcttcacagaaataccagcagta

SEQ ID NO: 354514 - DNA, 33 bp, Homo sapien
ttaattataagcttcatagaaataccagcagta

SEQ ID NO: 354515 - DNA, 33 bp, Homo sapien
gtttatttgtttggtcgctggtagttttctggc

SEQ ID NO: 354516 - DNA, 33 bp, Homo sapien
gtttatttgtttggtctctggtagttttctggc

SEQ ID NO: 354517 - DNA, 33 bp, Homo sapien
actttttcccctcagacctccaggccaatgaca

SEQ ID NO: 354518 - DNA, 33 bp, Homo sapien
actttttcccctcagatctccaggccaatgaca

SEQ ID NO: 354519 - DNA, 33 bp, Homo sapien
tcacttacattggctcagaataaaacactttat

SEQ ID NO: 354520 - DNA, 33 bp, Homo sapien
tcacttacattggctccgaataaaacactttat

SEQ ID NO: 354521 - DNA, 33 bp, Homo sapien
agtaaatatgaagtaacgatgaagttagaaaat

SEQ ID NO: 354522 - DNA, 33 bp, Homo sapien
agtaaatatgaagtaatgatgaagttagaaaat

SEQ ID NO: 354523 - DNA, 33 bp, Homo sapien
aagagctgattccacaagttggacagagaaagt

SEQ ID NO: 354524 - DNA, 33 bp, Homo sapien
aagagctgattccacaggttggacagagaaagt

SEQ ID NO: 354525 - DNA, 33 bp, Homo sapien
attgatcaaaattcaaattctcttgtctttaca

SEQ ID NO: 354526 - DNA, 33 bp, Homo sapien
attgatcaaaattcaagttctcttgtctttaca

SEQ ID NO: 354527 - DNA, 33 bp, Homo sapien
gtcttgtcaaaaaccacaaatatcttaccttca

SEQ ID NO: 354528 - DNA, 33 bp, Homo sapien
gtcttgtcaaaaaccataaatatcttaccttca

SEQ ID NO: 354529 - DNA, 33 bp, Homo sapien
agccctaactaactgacagcatacctgggtttc

SEQ ID NO: 354530 - DNA, 33 bp, Homo sapien
agccctaactaactgatagcatacctgggtttc

SEQ ID NO: 354531 - DNA, 33 bp, Homo sapien
atcattcatgtattccccactagctgggtattt

SEQ ID NO: 354532 - DNA, 33 bp, Homo sapien
atcattcatgtattcctcactagctgggtattt

SEQ ID NO: 354533 - DNA, 33 bp, Homo sapien
gaaggaaggcttttgacatcgacttcaagagat

SEQ ID NO: 354534 - DNA, 33 bp, Homo sapien
gaaggaaggcttttgatatcgacttcaagagat

SEQ ID NO: 354535 - DNA, 33 bp, Homo sapien
cactgctggaggaacacagatcctagcattcca

SEQ ID NO: 354536 - DNA, 33 bp, Homo sapien
cactgctggaggaacagagatcctagcattcca

SEQ ID NO: 354537 - DNA, 33 bp, Homo sapien
attccttcagcttttagcaacaagcctgttctt

SEQ ID NO: 354538 - DNA, 33 bp, Homo sapien
attccttcagcttttatcaacaagcctgttctt

SEQ ID NO: 354539 - DNA, 33 bp, Homo sapien
ggagaaacagataaacaaaggagttccctagac

SEQ ID NO: 354540 - DNA, 33 bp, Homo sapien
ggagaaacagataaacgaaggagttccctagac

SEQ ID NO: 354541 - DNA, 33 bp, Homo sapien
caaaaactctgcttcacactttgttgagacgtt

SEQ ID NO: 354542 - DNA, 33 bp, Homo sapien
caaaaactctgcttcatactttgttgagacgtt

SEQ ID NO: 354543 - DNA, 33 bp, Homo sapien
tacaatctcccaaaaaatgaagagcactatgga

SEQ ID NO: 354544 - DNA, 33 bp, Homo sapien
tacaatctcccaaaaagtgaagagcactatgga

SEQ ID NO: 354545 - DNA, 33 bp, Homo sapien
agaaagtgacaataagaatgagctaaattcatc

SEQ ID NO: 354546 - DNA, 33 bp, Homo sapien
agaaagtgacaataaggatgagctaaattcatc

SEQ ID NO: 354547 - DNA, 33 bp, Homo sapien
ggtagtttatagagaaagagcaaagttgttcta

SEQ ID NO: 354548 - DNA, 33 bp, Homo sapien
ggtagtttatagagaatgagcaaagttgttcta

SEQ ID NO: 354549 - DNA, 33 bp, Homo sapien
acaccacctgcatcaaacctactcctgaagagc

SEQ ID NO: 354550 - DNA, 33 bp, Homo sapien
acaccacctgcatcaaccctactcctgaagagc

SEQ ID NO: 354551 - DNA, 33 bp, Homo sapien
atggttactgtggcttcaactaaaataggcaac

SEQ ID NO: 354552 - DNA, 33 bp, Homo sapien
atggttactgtggctttaactaaaataggcaac

SEQ ID NO: 354553 - DNA, 33 bp, Homo sapien
acagaagggcctacgaaattttctgaactgaaa

SEQ ID NO: 354554 - DNA, 33 bp, Homo sapien
acagaagggcctacgagattttctgaactgaaa

SEQ ID NO: 354555 - DNA, 33 bp, Homo sapien
catcagcaggaaagaccgggtcctgatagcagc

SEQ ID NO: 354556 - DNA, 33 bp, Homo sapien
catcagcaggaaagactgggtcctgatagcagc

SEQ ID NO: 354557 - DNA, 33 bp, Homo sapien
aactgttcttccagaaatgctgggtgaagacgg

SEQ ID NO: 354558 - DNA, 33 bp, Homo sapien
aactgttcttccagaagtgctgggtgaagacgg

SEQ ID NO: 354559 - DNA, 33 bp, Homo sapien
gaaggtaatcaaaagacaatacagaggagacat

SEQ ID NO: 354560 - DNA, 33 bp, Homo sapien
gaaggtaatcaaaagagaatacagaggagacat

SEQ ID NO: 354561 - DNA, 33 bp, Homo sapien
tcatctcatcatgtctaaaactcagttcccagg

SEQ ID NO: 354562 - DNA, 33 bp, Homo sapien
tcatctcatcatgtctgaaactcagttcccagg

SEQ ID NO: 354563 - DNA, 33 bp, Homo sapien
ctagctggaagaaagaaatgcatgaacagaagt

SEQ ID NO: 354564 - DNA, 33 bp, Homo sapien
ctagctggaagaaagagatgcatgaacagaagt

SEQ ID NO: 354565 - DNA, 33 bp, Homo sapien
ttttaggaaggctctccacaatatgatttcaga

SEQ ID NO: 354566 - DNA, 33 bp, Homo sapien
ttttaggaaggctctctacaatatgatttcaga

SEQ ID NO: 354567 - DNA, 33 bp, Homo sapien
tgtttaatcagaggccaagtcttcacatttgta

SEQ ID NO: 354568 - DNA, 33 bp, Homo sapien
tgtttaatcagaggccgagtcttcacatttgta

SEQ ID NO: 354569 - DNA, 33 bp, Homo sapien
tctgaagtgaagcccccgcatttccattcaaac

SEQ ID NO: 354570 - DNA, 33 bp, Homo sapien
tctgaagtgaagcccctgcatttccattcaaac

SEQ ID NO: 354571 - DNA, 33 bp, Homo sapien
ccctgggatgaccccaatagcctttgctagtac

SEQ ID NO: 354572 - DNA, 33 bp, Homo sapien
ccctgggatgaccccagtagcctttgctagtac

SEQ ID NO: 354573 - DNA, 33 bp, Homo sapien
aagaaggaaaacattaagactcattcaaagtca

SEQ ID NO: 354574 - DNA, 33 bp, Homo sapien
aagaaggaaaacattaggactcattcaaagtca

SEQ ID NO: 354575 - DNA, 33 bp, Homo sapien
gaaataaacactcagaaattctgctacacgcca

SEQ ID NO: 354576 - DNA, 33 bp, Homo sapien
gaaataaacactcagatattctgctacacgcca

SEQ ID NO: 354577 - DNA, 33 bp, Homo sapien
aagtccagacataaatgatactgtgattatcca

SEQ ID NO: 354578 - DNA, 33 bp, Homo sapien
aagtccagacataaattatactgtgattatcca

SEQ ID NO: 354579 - DNA, 33 bp, Homo sapien
attctcaggctaaggacaaaatccctatacgct

SEQ ID NO: 354580 - DNA, 33 bp, Homo sapien
attctcaggctaaggataaaatccctatacgct

SEQ ID NO: 354581 - DNA, 33 bp, Homo sapien
agcaaaactaagcaaaaatgagtggcatttata

SEQ ID NO: 354582 - DNA, 33 bp, Homo sapien
agcaaaactaagcaaagatgagtggcatttata

SEQ ID NO: 354583 - DNA, 33 bp, Homo sapien
atagcaatgagacatccatttccttagtattgt

SEQ ID NO: 354584 - DNA, 33 bp, Homo sapien
atagcaatgagacatctatttccttagtattgt

SEQ ID NO: 354585 - DNA, 33 bp, Homo sapien
tttaatgcttttagccaggaattcttttgtgag

SEQ ID NO: 354586 - DNA, 33 bp, Homo sapien
tttaatgcttttagcctggaattcttttgtgag

SEQ ID NO: 354587 - DNA, 33 bp, Homo sapien
ccaagaagccaaaagcagctaagtcattgccca

SEQ ID NO: 354588 - DNA, 33 bp, Homo sapien
ccaagaagccaaaagcggctaagtcattgccca

SEQ ID NO: 354589 - DNA, 33 bp, Homo sapien
ttccttgttggtaaaaagggaatgttaatggaa

SEQ ID NO: 354590 - DNA, 33 bp, Homo sapien
ttccttgttggtaaaacgggaatgttaatggaa

SEQ ID NO: 354591 - DNA, 33 bp, Homo sapien
caactaaacattttcaataagatttgtacattg

SEQ ID NO: 354592 - DNA, 33 bp, Homo sapien
caactaaacattttcagtaagatttgtacattg

SEQ ID NO: 354593 - DNA, 33 bp, Homo sapien
ccctctcctggaaaacacttttctcatccctcc

SEQ ID NO: 354594 - DNA, 33 bp, Homo sapien
ccctctcctggaaaacgcttttctcatccctcc

SEQ ID NO: 354595 - DNA, 33 bp, Homo sapien
cttcagatgatgagtacaagttttgtgtgtgga

SEQ ID NO: 354596 - DNA, 33 bp, Homo sapien
cttcagatgatgagtagaagttttgtgtgtgga

SEQ ID NO: 354597 - DNA, 33 bp, Homo sapien
ttgttgaatgtctttgcatcattggaattagcc

SEQ ID NO: 354598 - DNA, 33 bp, Homo sapien
ttgttgaatgtctttggatcattggaattagcc

SEQ ID NO: 354599 - DNA, 33 bp, Homo sapien
tgtaatgcatctgaagcattggctgtcacattt

SEQ ID NO: 354600 - DNA, 33 bp, Homo sapien
tgtaatgcatctgaaggattggctgtcacattt

SEQ ID NO: 354601 - DNA, 33 bp, Homo sapien
cccccttcctatgtgaaaatgatgtgcactaca

SEQ ID NO: 354602 - DNA, 33 bp, Homo sapien
cccccttcctatgtgataatgatgtgcactaca

SEQ ID NO: 354603 - DNA, 33 bp, Homo sapien
tgtcttatttacacagacattactggaccctac

SEQ ID NO: 354604 - DNA, 33 bp, Homo sapien
tgtcttatttacacaggcattactggaccctac

SEQ ID NO: 354605 - DNA, 33 bp, Homo sapien
agtaaaactcttctataaacatgctgcctgaat

SEQ ID NO: 354606 - DNA, 33 bp, Homo sapien
agtaaaactcttctatcaacatgctgcctgaat

SEQ ID NO: 354607 - DNA, 33 bp, Homo sapien
taatttattatgctgacctgaaacactttgaag

SEQ ID NO: 354608 - DNA, 33 bp, Homo sapien
taatttattatgctgatctgaaacactttgaag

SEQ ID NO: 354609 - DNA, 33 bp, Homo sapien
ggagctccttcagcccaaaagctaaagtgaaca

SEQ ID NO: 354610 - DNA, 33 bp, Homo sapien
ggagctccttcagccccaaagctaaagtgaaca

SEQ ID NO: 354611 - DNA, 33 bp, Homo sapien
tggtagtcactgcttaaaatttctacagcttgg

SEQ ID NO: 354612 - DNA, 33 bp, Homo sapien
tggtagtcactgcttataatttctacagcttgg

SEQ ID NO: 354613 - DNA, 33 bp, Homo sapien
attgctaagatttggaatagatgcataaaccaa

SEQ ID NO: 354614 - DNA, 33 bp, Homo sapien
attgctaagatttggagtagatgcataaaccaa

SEQ ID NO: 354615 - DNA, 33 bp, Homo sapien
taatggaagaactaaacgtgcttatctttacaa

SEQ ID NO: 354616 - DNA, 33 bp, Homo sapien
taatggaagaactaaatgtgcttatctttacaa

SEQ ID NO: 354617 - DNA, 33 bp, Homo sapien
gactgaatgaatgacccctagtgatctgagaga

SEQ ID NO: 354618 - DNA, 33 bp, Homo sapien
gactgaatgaatgaccgctagtgatctgagaga

SEQ ID NO: 354619 - DNA, 33 bp, Homo sapien
aattcgcacatttagccagtctcctggccaaga

SEQ ID NO: 354620 - DNA, 33 bp, Homo sapien
aattcgcacatttagctagtctcctggccaaga

SEQ ID NO: 354621 - DNA, 33 bp, Homo sapien
atgtttttgtcttctccatcagcaatttgaaga

SEQ ID NO: 354622 - DNA, 33 bp, Homo sapien
atgtttttgtcttctctatcagcaatttgaaga

SEQ ID NO: 354623 - DNA, 33 bp, Homo sapien
tgaacggatgtaatcaaactgtctactaatctt

SEQ ID NO: 354624 - DNA, 33 bp, Homo sapien
tgaacggatgtaatcacactgtctactaatctt

SEQ ID NO: 354625 - DNA, 33 bp, Homo sapien
gacctagatctgaagacgaatagagaaaaactg

SEQ ID NO: 354626 - DNA, 33 bp, Homo sapien
gacctagatctgaagaggaatagagaaaaactg

SEQ ID NO: 354627 - DNA, 33 bp, Homo sapien
gtgggatcttcacttacatacactggggagcgt

SEQ ID NO: 354628 - DNA, 33 bp, Homo sapien
gtgggatcttcacttatatacactggggagcgt

SEQ ID NO: 354629 - DNA, 33 bp, Homo sapien
taaaacatcttgttaacgcagtaagatctattt

SEQ ID NO: 354630 - DNA, 33 bp, Homo sapien
taaaacatcttgttaatgcagtaagatctattt

SEQ ID NO: 354631 - DNA, 33 bp, Homo sapien
atttctaggttcttcccgaggtaatgagtttga

SEQ ID NO: 354632 - DNA, 33 bp, Homo sapien
atttctaggttcttcctgaggtaatgagtttga

SEQ ID NO: 354633 - DNA, 33 bp, Homo sapien
tcacagcatatgatgactaagattctcaacatg

SEQ ID NO: 354634 - DNA, 33 bp, Homo sapien
tcacagcatatgatgagtaagattctcaacatg

SEQ ID NO: 354635 - DNA, 33 bp, Homo sapien
aaaaaagatggctagaagctggaatttccccat

SEQ ID NO: 354636 - DNA, 33 bp, Homo sapien
aaaaaagatggctagaggctggaatttccccat

SEQ ID NO: 354637 - DNA, 33 bp, Homo sapien
aatttgctaacctcaaatgagaaccaaaagaag

SEQ ID NO: 354638 - DNA, 33 bp, Homo sapien
aatttgctaacctcaactgagaaccaaaagaag

SEQ ID NO: 354639 - DNA, 33 bp, Homo sapien
aaaagataagtccccacgaaattccagtagtgc

SEQ ID NO: 354640 - DNA, 33 bp, Homo sapien
aaaagataagtccccatgaaattccagtagtgc

SEQ ID NO: 354641 - DNA, 33 bp, Homo sapien
aagaaaaagactacacagccattttctcagaaa

SEQ ID NO: 354642 - DNA, 33 bp, Homo sapien
aagaaaaagactacacggccattttctcagaaa

SEQ ID NO: 354643 - DNA, 33 bp, Homo sapien
tgtagatcataaacaacgcctttattatacttt

SEQ ID NO: 354644 - DNA, 33 bp, Homo sapien
tgtagatcataaacaatgcctttattatacttt

SEQ ID NO: 354645 - DNA, 33 bp, Homo sapien
aaaaatccattaggtacagtttatgacttgaat

SEQ ID NO: 354646 - DNA, 33 bp, Homo sapien
aaaaatccattaggtatagtttatgacttgaat

SEQ ID NO: 354647 - DNA, 33 bp, Homo sapien
actcagagtccttagtcaatgacatggaaactg

SEQ ID NO: 354648 - DNA, 33 bp, Homo sapien
actcagagtccttagttaatgacatggaaactg

SEQ ID NO: 354649 - DNA, 33 bp, Homo sapien
ttatagttaaaattccaaaaagatctttcatga

SEQ ID NO: 354650 - DNA, 33 bp, Homo sapien
ttatagttaaaattccgaaaagatctttcatga

SEQ ID NO: 354651 - DNA, 33 bp, Homo sapien
taaagataagtgaacaaatcataatagtaagtc

SEQ ID NO: 354652 - DNA, 33 bp, Homo sapien
taaagataagtgaacagatcataatagtaagtc

SEQ ID NO: 354653 - DNA, 33 bp, Homo sapien
ttttaggactcttagacatcgttttaagacaca

SEQ ID NO: 354654 - DNA, 33 bp, Homo sapien
ttttaggactcttagagatcgttttaagacaca

SEQ ID NO: 354655 - DNA, 33 bp, Homo sapien
aacaactggaaagcataagcaacttggaaggag

SEQ ID NO: 354656 - DNA, 33 bp, Homo sapien
aacaactggaaagcattagcaacttggaaggag

SEQ ID NO: 354657 - DNA, 33 bp, Homo sapien
tagctgataacattaactacagaacagatgcat

SEQ ID NO: 354658 - DNA, 33 bp, Homo sapien
tagctgataacattaattacagaacagatgcat

SEQ ID NO: 354659 - DNA, 33 bp, Homo sapien
tgatggaattcaggaaaaatatagccagaaaga

SEQ ID NO: 354660 - DNA, 33 bp, Homo sapien
tgatggaattcaggaataatatagccagaaaga

SEQ ID NO: 354661 - DNA, 33 bp, Homo sapien
tattcacagtaaaatccgaaaaccagtggggca

SEQ ID NO: 354662 - DNA, 33 bp, Homo sapien
tattcacagtaaaatctgaaaaccagtggggca

SEQ ID NO: 354663 - DNA, 33 bp, Homo sapien
acataccttttggctcaacactctccatactgg

SEQ ID NO: 354664 - DNA, 33 bp, Homo sapien
acataccttttggctcgacactctccatactgg

SEQ ID NO: 354665 - DNA, 33 bp, Homo sapien
taactaattgcccttaataaatttctttctgct

SEQ ID NO: 354666 - DNA, 33 bp, Homo sapien
taactaattgcccttagtaaatttctttctgct

SEQ ID NO: 354667 - DNA, 33 bp, Homo sapien
tatccaggaccggcaactagatctgctaggttg

SEQ ID NO: 354668 - DNA, 33 bp, Homo sapien
tatccaggaccggcaattagatctgctaggttg

SEQ ID NO: 354669 - DNA, 33 bp, Homo sapien
ataagttatagagatacacacagatacagacag

SEQ ID NO: 354670 - DNA, 33 bp, Homo sapien
ataagttatagagatagacacagatacagacag

SEQ ID NO: 354671 - DNA, 33 bp, Homo sapien
ttctgtcacttcccatgatccctttgtcttcta

SEQ ID NO: 354672 - DNA, 33 bp, Homo sapien
ttctgtcacttcccattatccctttgtcttcta

SEQ ID NO: 354673 - DNA, 33 bp, Homo sapien
acatatctcaggttaactgtcattagaaaaggc

SEQ ID NO: 354674 - DNA, 33 bp, Homo sapien
acatatctcaggttaattgtcattagaaaaggc

SEQ ID NO: 354675 - DNA, 33 bp, Homo sapien
aaggaatagctttgagccaaacccccaagaagg

SEQ ID NO: 354676 - DNA, 33 bp, Homo sapien
aaggaatagctttgagtcaaacccccaagaagg

SEQ ID NO: 354677 - DNA, 33 bp, Homo sapien
aagttataaggccaggaaagagagctgtatctc

SEQ ID NO: 354678 - DNA, 33 bp, Homo sapien
aagttataaggccagggaagagagctgtatctc

SEQ ID NO: 354679 - DNA, 33 bp, Homo sapien
ttgatagaagtatcacagtcttaaatattcaac

SEQ ID NO: 354680 - DNA, 33 bp, Homo sapien
ttgatagaagtatcaccgtcttaaatattcaac

SEQ ID NO: 354681 - DNA, 33 bp, Homo sapien
tactatgctgagccacaatgttgtactactggc

SEQ ID NO: 354682 - DNA, 33 bp, Homo sapien
tactatgctgagccacgatgttgtactactggc

SEQ ID NO: 354683 - DNA, 33 bp, Homo sapien
catacgacctgagatacggacattggacgaata

SEQ ID NO: 354684 - DNA, 33 bp, Homo sapien
catacgacctgagatatggacattggacgaata

SEQ ID NO: 354685 - DNA, 33 bp, Homo sapien
tttcactgggctaaagacaaggtgtcagaagcg

SEQ ID NO: 354686 - DNA, 33 bp, Homo sapien
tttcactgggctaaaggcaaggtgtcagaagcg

SEQ ID NO: 354687 - DNA, 33 bp, Homo sapien
ttgtcttcagaaatataacagaatacatttgta

SEQ ID NO: 354688 - DNA, 33 bp, Homo sapien
ttgtcttcagaaatatgacagaatacatttgta

SEQ ID NO: 354689 - DNA, 33 bp, Homo sapien
gaaatactccagacacaccgacatcaggcaata

SEQ ID NO: 354690 - DNA, 33 bp, Homo sapien
gaaatactccagacacgccgacatcaggcaata

SEQ ID NO: 354691 - DNA, 33 bp, Homo sapien
ctacatataatcttcaaaagagcaagaactaat

SEQ ID NO: 354692 - DNA, 33 bp, Homo sapien
ctacatataatcttcagaagagcaagaactaat

SEQ ID NO: 354693 - DNA, 33 bp, Homo sapien
cccctatggcagagagcagtaagaataggattt

SEQ ID NO: 354694 - DNA, 33 bp, Homo sapien
cccctatggcagagagtagtaagaataggattt

SEQ ID NO: 354695 - DNA, 33 bp, Homo sapien
tctttctactgcaactcacaaacaacagtcaaa

SEQ ID NO: 354696 - DNA, 33 bp, Homo sapien
tctttctactgcaactgacaaacaacagtcaaa

SEQ ID NO: 354697 - DNA, 33 bp, Homo sapien
ccagagagcatttggagaattgaaagaattaag

SEQ ID NO: 354698 - DNA, 33 bp, Homo sapien
ccagagagcatttggataattgaaagaattaag

SEQ ID NO: 354699 - DNA, 33 bp, Homo sapien
ggaaataaggcaacgcagaatgatttctccttt

SEQ ID NO: 354700 - DNA, 33 bp, Homo sapien
ggaaataaggcaacgccgaatgatttctccttt

SEQ ID NO: 354701 - DNA, 33 bp, Homo sapien
cactcttacctcatacaatacatataaattgac

SEQ ID NO: 354702 - DNA, 33 bp, Homo sapien
cactcttacctcatacgatacatataaattgac

SEQ ID NO: 354703 - DNA, 33 bp, Homo sapien
ttgtttaccgtatgaactgagttgtgaatttta

SEQ ID NO: 354704 - DNA, 33 bp, Homo sapien
ttgtttaccgtatgaattgagttgtgaatttta

SEQ ID NO: 354705 - DNA, 33 bp, Homo sapien
atttaccagatttaccaaacacaatttaccaaa

SEQ ID NO: 354706 - DNA, 33 bp, Homo sapien
atttaccagatttaccgaacacaatttaccaaa

SEQ ID NO: 354707 - DNA, 33 bp, Homo sapien
tcagtccatttcctgaaagtctcctaaatcact

SEQ ID NO: 354708 - DNA, 33 bp, Homo sapien
tcagtccatttcctgagagtctcctaaatcact

SEQ ID NO: 354709 - DNA, 33 bp, Homo sapien
acctggggtaaccagccataggcctgctcagtg

SEQ ID NO: 354710 - DNA, 33 bp, Homo sapien
acctggggtaaccagctataggcctgctcagtg

SEQ ID NO: 354711 - DNA, 33 bp, Homo sapien
acaaacagatgaggtgaactgtggtatttctct

SEQ ID NO: 354712 - DNA, 33 bp, Homo sapien
acaaacagatgaggtggactgtggtatttctct

SEQ ID NO: 354713 - DNA, 33 bp, Homo sapien
ttatgatgttcatctaggtcccaaataaacagt

SEQ ID NO: 354714 - DNA, 33 bp, Homo sapien
ttatgatgttcatctatgtcccaaataaacagt

SEQ ID NO: 354715 - DNA, 33 bp, Homo sapien
atttattctagcaaagcccattgataaatgttc

SEQ ID NO: 354716 - DNA, 33 bp, Homo sapien
atttattctagcaaaggccattgataaatgttc

SEQ ID NO: 354717 - DNA, 33 bp, Homo sapien
taaagttcgtttccacaatgttattgggcagct

SEQ ID NO: 354718 - DNA, 33 bp, Homo sapien
taaagttcgtttccacgatgttattgggcagct

SEQ ID NO: 354719 - DNA, 33 bp, Homo sapien
taatcataaccttatcaaacacagatcccgtca

SEQ ID NO: 354720 - DNA, 33 bp, Homo sapien
taatcataaccttatcgaacacagatcccgtca

SEQ ID NO: 354721 - DNA, 33 bp, Homo sapien
atgcaattgtaaaaacaggaaaactgagtaaca

SEQ ID NO: 354722 - DNA, 33 bp, Homo sapien
atgcaattgtaaaaacgggaaaactgagtaaca

SEQ ID NO: 354723 - DNA, 33 bp, Homo sapien
atagcaatagctcataaacatcaggtcaaatct

SEQ ID NO: 354724 - DNA, 33 bp, Homo sapien
atagcaatagctcatagacatcaggtcaaatct

SEQ ID NO: 354725 - DNA, 33 bp, Homo sapien
taggtgctaaggataccgcaattaagagtctac

SEQ ID NO: 354726 - DNA, 33 bp, Homo sapien
taggtgctaaggatactgcaattaagagtctac

SEQ ID NO: 354727 - DNA, 33 bp, Homo sapien
gcaagtgtgtttatgaaatgacccctcttcttc

SEQ ID NO: 354728 - DNA, 33 bp, Homo sapien
gcaagtgtgtttatgacatgacccctcttcttc

SEQ ID NO: 354729 - DNA, 33 bp, Homo sapien
gacagtgcgaagtcacagaatgaagattttctc

SEQ ID NO: 354730 - DNA, 33 bp, Homo sapien
gacagtgcgaagtcactgaatgaagattttctc

SEQ ID NO: 354731 - DNA, 33 bp, Homo sapien
tattgctaaggaaggaaaccaaagccctgaaaa

SEQ ID NO: 354732 - DNA, 33 bp, Homo sapien
tattgctaaggaaggacaccaaagccctgaaaa

SEQ ID NO: 354733 - DNA, 33 bp, Homo sapien
ccatatctgacagatggatgtctctagggatca

SEQ ID NO: 354734 - DNA, 33 bp, Homo sapien
ccatatctgacagatgtatgtctctagggatca

SEQ ID NO: 354735 - DNA, 33 bp, Homo sapien
tcagtcttgtctggacactttctgatactctgt

SEQ ID NO: 354736 - DNA, 33 bp, Homo sapien
tcagtcttgtctggaccctttctgatactctgt

SEQ ID NO: 354737 - DNA, 33 bp, Homo sapien
cctcctaagtctgagacgagagagaggtcttta

SEQ ID NO: 354738 - DNA, 33 bp, Homo sapien
cctcctaagtctgagaggagagagaggtcttta

SEQ ID NO: 354739 - DNA, 33 bp, Homo sapien
caccaagattcttttaaccgcagatcatacaat

SEQ ID NO: 354740 - DNA, 33 bp, Homo sapien
caccaagattcttttagccgcagatcatacaat

SEQ ID NO: 354741 - DNA, 33 bp, Homo sapien
tcataatgatgtgtataagccccaggaagcttt

SEQ ID NO: 354742 - DNA, 33 bp, Homo sapien
tcataatgatgtgtatgagccccaggaagcttt

SEQ ID NO: 354743 - DNA, 33 bp, Homo sapien
ctctaaaccctctggaaaagaatgagaaaaata

SEQ ID NO: 354744 - DNA, 33 bp, Homo sapien
ctctaaaccctctggagaagaatgagaaaaata

SEQ ID NO: 354745 - DNA, 33 bp, Homo sapien
ggtcttttctatcttacatgcttcaaaacaaca

SEQ ID NO: 354746 - DNA, 33 bp, Homo sapien
ggtcttttctatcttatatgcttcaaaacaaca

SEQ ID NO: 354747 - DNA, 33 bp, Homo sapien
ttagggtggcgataccacttactatagaaagtt

SEQ ID NO: 354748 - DNA, 33 bp, Homo sapien
ttagggtggcgataccgcttactatagaaagtt

SEQ ID NO: 354749 - DNA, 33 bp, Homo sapien
atttattgagatatgacgatcttaattagttct

SEQ ID NO: 354750 - DNA, 33 bp, Homo sapien
atttattgagatatgatgatcttaattagttct

SEQ ID NO: 354751 - DNA, 33 bp, Homo sapien
cccactttgtcaaagaacctagatgaaggtctt

SEQ ID NO: 354752 - DNA, 33 bp, Homo sapien
cccactttgtcaaagatcctagatgaaggtctt

SEQ ID NO: 354753 - DNA, 33 bp, Homo sapien
attgaatactaaatgacaaaacacatggatatt

SEQ ID NO: 354754 - DNA, 33 bp, Homo sapien
attgaatactaaatgagaaaacacatggatatt

SEQ ID NO: 354755 - DNA, 33 bp, Homo sapien
cagagggaagtgttacaaaggggtcagtagttt

SEQ ID NO: 354756 - DNA, 33 bp, Homo sapien
cagagggaagtgttacgaaggggtcagtagttt

SEQ ID NO: 354757 - DNA, 33 bp, Homo sapien
ttgtgtgccagatgcagagctcactgtctggcc

SEQ ID NO: 354758 - DNA, 33 bp, Homo sapien
ttgtgtgccagatgcatagctcactgtctggcc

SEQ ID NO: 354759 - DNA, 33 bp, Homo sapien
aggcaatgccatacaacaaaagctgtgactggg

SEQ ID NO: 354760 - DNA, 33 bp, Homo sapien
aggcaatgccatacaataaaagctgtgactggg

SEQ ID NO: 354761 - DNA, 33 bp, Homo sapien
attattactgagcacactgaatgttccggccac

SEQ ID NO: 354762 - DNA, 33 bp, Homo sapien
attattactgagcacattgaatgttccggccac

SEQ ID NO: 354763 - DNA, 33 bp, Homo sapien
tgctttgaatctctacacttcgcaatgacaagg

SEQ ID NO: 354764 - DNA, 33 bp, Homo sapien
tgctttgaatctctacgcttcgcaatgacaagg

SEQ ID NO: 354765 - DNA, 33 bp, Homo sapien
ctcattatattttgcacagatgaaaggttcagt

SEQ ID NO: 354766 - DNA, 33 bp, Homo sapien
ctcattatattttgcatagatgaaaggttcagt

SEQ ID NO: 354767 - DNA, 33 bp, Homo sapien
gctgtcgaacattatccatttactgtcttaggg

SEQ ID NO: 354768 - DNA, 33 bp, Homo sapien
gctgtcgaacattatctatttactgtcttaggg

SEQ ID NO: 354769 - DNA, 33 bp, Homo sapien
agtccaggctgactgacgcttgggtttcagttt

SEQ ID NO: 354770 - DNA, 33 bp, Homo sapien
agtccaggctgactgatgcttgggtttcagttt

SEQ ID NO: 354771 - DNA, 33 bp, Homo sapien
ctgctccctagaaatcacttcattgcctctttt

SEQ ID NO: 354772 - DNA, 33 bp, Homo sapien
ctgctccctagaaatcgcttcattgcctctttt

SEQ ID NO: 354773 - DNA, 33 bp, Homo sapien
atttagcatcttccaaattcagtttgtttatgg

SEQ ID NO: 354774 - DNA, 33 bp, Homo sapien
atttagcatcttccaatttcagtttgtttatgg

SEQ ID NO: 354775 - DNA, 33 bp, Homo sapien
tctccataaatacgtgccaattattttacttca

SEQ ID NO: 354776 - DNA, 33 bp, Homo sapien
tctccataaatacgtgtcaattattttacttca

SEQ ID NO: 354777 - DNA, 33 bp, Homo sapien
catcactgagcctcaaagaaaatcgggttcatt

SEQ ID NO: 354778 - DNA, 33 bp, Homo sapien
catcactgagcctcaaggaaaatcgggttcatt

SEQ ID NO: 354779 - DNA, 33 bp, Homo sapien
gacttattcttggccaatagggagctgttagac

SEQ ID NO: 354780 - DNA, 33 bp, Homo sapien
gacttattcttggccagtagggagctgttagac

SEQ ID NO: 354781 - DNA, 33 bp, Homo sapien
tatatttataagttacagggtcaataggatgtc

SEQ ID NO: 354782 - DNA, 33 bp, Homo sapien
tatatttataagttacggggtcaataggatgtc

SEQ ID NO: 354783 - DNA, 33 bp, Homo sapien
cagctgaacgtatttccaactaatatggaagaa

SEQ ID NO: 354784 - DNA, 33 bp, Homo sapien
cagctgaacgtatttctaactaatatggaagaa

SEQ ID NO: 354785 - DNA, 33 bp, Homo sapien
agtctcaattttgttaggtatcctggactaggt

SEQ ID NO: 354786 - DNA, 33 bp, Homo sapien
agtctcaattttgttatgtatcctggactaggt

SEQ ID NO: 354787 - DNA, 33 bp, Homo sapien
caggcatgtgtcaacaaactcagctaattttgg

SEQ ID NO: 354788 - DNA, 33 bp, Homo sapien
caggcatgtgtcaacacactcagctaattttgg

SEQ ID NO: 354789 - DNA, 33 bp, Homo sapien
tttcattttatcttagacatacttttttgacac

SEQ ID NO: 354790 - DNA, 33 bp, Homo sapien
tttcattttatcttaggcatacttttttgacac

SEQ ID NO: 354791 - DNA, 33 bp, Homo sapien
ggtagtgtgataggaacagtgttaaatctataa

SEQ ID NO: 354792 - DNA, 33 bp, Homo sapien
ggtagtgtgataggaatagtgttaaatctataa

SEQ ID NO: 354793 - DNA, 33 bp, Homo sapien
gtagcaatacaaaaacgaactaatacactgatg

SEQ ID NO: 354794 - DNA, 33 bp, Homo sapien
gtagcaatacaaaaactaactaatacactgatg

SEQ ID NO: 354795 - DNA, 33 bp, Homo sapien
gggcattactgtcaagcctatctttatgttaca

SEQ ID NO: 354796 - DNA, 33 bp, Homo sapien
gggcattactgtcaaggctatctttatgttaca

SEQ ID NO: 354797 - DNA, 33 bp, Homo sapien
taggctgatgacaagacatagtaagaggctcca

SEQ ID NO: 354798 - DNA, 33 bp, Homo sapien
taggctgatgacaagatatagtaagaggctcca

SEQ ID NO: 354799 - DNA, 33 bp, Homo sapien
tgatgctttcatctaaactgtcattaaaactga

SEQ ID NO: 354800 - DNA, 33 bp, Homo sapien
tgatgctttcatctaacctgtcattaaaactga

SEQ ID NO: 354801 - DNA, 33 bp, Homo sapien
agtgagttcttacacactagcaatatacagtta

SEQ ID NO: 354802 - DNA, 33 bp, Homo sapien
agtgagttcttacacagtagcaatatacagtta

SEQ ID NO: 354803 - DNA, 33 bp, Homo sapien
atgttttgaataaaaacggaacaagatagagat

SEQ ID NO: 354804 - DNA, 33 bp, Homo sapien
atgttttgaataaaaatggaacaagatagagat

SEQ ID NO: 354805 - DNA, 33 bp, Homo sapien
ttttgttcattccaaagcctactgaaatgacag

SEQ ID NO: 354806 - DNA, 33 bp, Homo sapien
ttttgttcattccaaatcctactgaaatgacag

SEQ ID NO: 354807 - DNA, 33 bp, Homo sapien
ttttatgattgattgacgtgctaggtttctttt

SEQ ID NO: 354808 - DNA, 33 bp, Homo sapien
ttttatgattgattgatgtgctaggtttctttt

SEQ ID NO: 354809 - DNA, 33 bp, Homo sapien
ttgccagcagacacatcaattgggagtggatac

SEQ ID NO: 354810 - DNA, 33 bp, Homo sapien
ttgccagcagacacatgaattgggagtggatac

SEQ ID NO: 354811 - DNA, 33 bp, Homo sapien
gggcagctgatatacacaatctcatttggttgt

SEQ ID NO: 354812 - DNA, 33 bp, Homo sapien
gggcagctgatatacagaatctcatttggttgt

SEQ ID NO: 354813 - DNA, 33 bp, Homo sapien
gtacagaagagtacccagatatttcaatgcatt

SEQ ID NO: 354814 - DNA, 33 bp, Homo sapien
gtacagaagagtacccggatatttcaatgcatt

SEQ ID NO: 354815 - DNA, 33 bp, Homo sapien
gaattgggatttttaaaaactgtcccaggtgat

SEQ ID NO: 354816 - DNA, 33 bp, Homo sapien
gaattgggatttttaataactgtcccaggtgat

SEQ ID NO: 354817 - DNA, 33 bp, Homo sapien
tacaaagcttaaatgtaaataggcaaaatgccc

SEQ ID NO: 354818 - DNA, 33 bp, Homo sapien
tacaaagcttaaatgttaataggcaaaatgccc

SEQ ID NO: 354819 - DNA, 33 bp, Homo sapien
taatgcttgagtagaaaactatctatgtgaagt

SEQ ID NO: 354820 - DNA, 33 bp, Homo sapien
taatgcttgagtagaagactatctatgtgaagt

SEQ ID NO: 354821 - DNA, 33 bp, Homo sapien
ggctcaatatcctttacgtaatactgaaacaac

SEQ ID NO: 354822 - DNA, 33 bp, Homo sapien
ggctcaatatcctttatgtaatactgaaacaac

SEQ ID NO: 354823 - DNA, 33 bp, Homo sapien
ccaacctaatacttgcacatgaatctttatctc

SEQ ID NO: 354824 - DNA, 33 bp, Homo sapien
ccaacctaatacttgcccatgaatctttatctc

SEQ ID NO: 354825 - DNA, 33 bp, Homo sapien
ttattttgggcatttaccaagtggtacagttag

SEQ ID NO: 354826 - DNA, 33 bp, Homo sapien
ttattttgggcatttagcaagtggtacagttag

SEQ ID NO: 354827 - DNA, 33 bp, Homo sapien
tccagcatgggcaagactcattgtccttttcct

SEQ ID NO: 354828 - DNA, 33 bp, Homo sapien
tccagcatgggcaagattcattgtccttttcct

SEQ ID NO: 354829 - DNA, 33 bp, Homo sapien
tttgtttggatcctcacataattaattttggca

SEQ ID NO: 354830 - DNA, 33 bp, Homo sapien
tttgtttggatcctcagataattaattttggca

SEQ ID NO: 354831 - DNA, 33 bp, Homo sapien
aaacgggctaaataaaggctgctggtaaaaggc

SEQ ID NO: 354832 - DNA, 33 bp, Homo sapien
aaacgggctaaataaatgctgctggtaaaaggc

SEQ ID NO: 354833 - DNA, 33 bp, Homo sapien
tacaagtggaatgcaacctctataaggacagag

SEQ ID NO: 354834 - DNA, 33 bp, Homo sapien
tacaagtggaatgcaagctctataaggacagag

SEQ ID NO: 354835 - DNA, 33 bp, Homo sapien
catcttacaggtacaaagtcagtgcatgacatt

SEQ ID NO: 354836 - DNA, 33 bp, Homo sapien
catcttacaggtacaacgtcagtgcatgacatt

SEQ ID NO: 354837 - DNA, 33 bp, Homo sapien
tgggacagatttaaaacaatactcctatacatt

SEQ ID NO: 354838 - DNA, 33 bp, Homo sapien
tgggacagatttaaaagaatactcctatacatt

SEQ ID NO: 354839 - DNA, 33 bp, Homo sapien
atataaaggaatgtgacgctatttcaacaaaag

SEQ ID NO: 354840 - DNA, 33 bp, Homo sapien
atataaaggaatgtgaggctatttcaacaaaag

SEQ ID NO: 354841 - DNA, 33 bp, Homo sapien
atccagtctttgatcacctctgtagccccaacc

SEQ ID NO: 354842 - DNA, 33 bp, Homo sapien
atccagtctttgatcagctctgtagccccaacc

SEQ ID NO: 354843 - DNA, 33 bp, Homo sapien
agtgctgttaaagctacggtctgagacaggaaa

SEQ ID NO: 354844 - DNA, 33 bp, Homo sapien
agtgctgttaaagctatggtctgagacaggaaa

SEQ ID NO: 354845 - DNA, 33 bp, Homo sapien
ggtgaaatcatccagacgtaagacagtggtttt

SEQ ID NO: 354846 - DNA, 33 bp, Homo sapien
ggtgaaatcatccagaggtaagacagtggtttt

SEQ ID NO: 354847 - DNA, 33 bp, Homo sapien
tcaagatttgaccttaagtttgcttctcttcat

SEQ ID NO: 354848 - DNA, 33 bp, Homo sapien
tcaagatttgaccttaggtttgcttctcttcat

SEQ ID NO: 354849 - DNA, 33 bp, Homo sapien
tcctcatactccattacccagagaaaaacaata

SEQ ID NO: 354850 - DNA, 33 bp, Homo sapien
tcctcatactccattatccagagaaaaacaata

SEQ ID NO: 354851 - DNA, 33 bp, Homo sapien
taaggagaatgaaagacgagaaagatttatggt

SEQ ID NO: 354852 - DNA, 33 bp, Homo sapien
taaggagaatgaaagatgagaaagatttatggt

SEQ ID NO: 354853 - DNA, 33 bp, Homo sapien
atcagaccagtggaaaagtgaaaggttcagtca

SEQ ID NO: 354854 - DNA, 33 bp, Homo sapien
atcagaccagtggaaaggtgaaaggttcagtca

SEQ ID NO: 354855 - DNA, 33 bp, Homo sapien
tgtccttatttgcatccctaaaatttggaaaag

SEQ ID NO: 354856 - DNA, 33 bp, Homo sapien
tgtccttatttgcatctctaaaatttggaaaag

SEQ ID NO: 354857 - DNA, 33 bp, Homo sapien
aagatcctgaattgccaatatatacagggaacc

SEQ ID NO: 354858 - DNA, 33 bp, Homo sapien
aagatcctgaattgccgatatatacagggaacc

SEQ ID NO: 354859 - DNA, 33 bp, Homo sapien
caattttttatgggcacctgtaatgtcaccaag

SEQ ID NO: 354860 - DNA, 33 bp, Homo sapien
caattttttatgggcagctgtaatgtcaccaag

SEQ ID NO: 354861 - DNA, 33 bp, Homo sapien
cccagccaggtgattacggttagcatcaacaat

SEQ ID NO: 354862 - DNA, 33 bp, Homo sapien
cccagccaggtgattatggttagcatcaacaat

SEQ ID NO: 354863 - DNA, 33 bp, Homo sapien
tttttttcaggctcgacatttgcaatcagtgct

SEQ ID NO: 354864 - DNA, 33 bp, Homo sapien
tttttttcaggctcgatatttgcaatcagtgct

SEQ ID NO: 354865 - DNA, 33 bp, Homo sapien
ccattccttgaagaccagaagcatcacatgact

SEQ ID NO: 354866 - DNA, 33 bp, Homo sapien
ccattccttgaagaccggaagcatcacatgact

SEQ ID NO: 354867 - DNA, 33 bp, Homo sapien
aaggccgattgtagaacttaacacagatgtcac

SEQ ID NO: 354868 - DNA, 33 bp, Homo sapien
aaggccgattgtagaagttaacacagatgtcac

SEQ ID NO: 354869 - DNA, 33 bp, Homo sapien
cttcaatgtcctcatcacaaaggggaatattat

SEQ ID NO: 354870 - DNA, 33 bp, Homo sapien
cttcaatgtcctcatcgcaaaggggaatattat

SEQ ID NO: 354871 - DNA, 33 bp, Homo sapien
tcctgtgcttacgacccattctggtgcctggta

SEQ ID NO: 354872 - DNA, 33 bp, Homo sapien
tcctgtgcttacgacctattctggtgcctggta

SEQ ID NO: 354873 - DNA, 33 bp, Homo sapien
ctctaatttgctacaccgaatccttattctcgc

SEQ ID NO: 354874 - DNA, 33 bp, Homo sapien
ctctaatttgctacactgaatccttattctcgc

SEQ ID NO: 354875 - DNA, 33 bp, Homo sapien
ccaatctggtaaataacgtgtcttagggaaatt

SEQ ID NO: 354876 - DNA, 33 bp, Homo sapien
ccaatctggtaaataatgtgtcttagggaaatt

SEQ ID NO: 354877 - DNA, 33 bp, Homo sapien
ctaaatggaagtcaaacgcaccactaaatatct

SEQ ID NO: 354878 - DNA, 33 bp, Homo sapien
ctaaatggaagtcaaatgcaccactaaatatct

SEQ ID NO: 354879 - DNA, 33 bp, Homo sapien
cttgtaagtatagagacgctcaccttactcata

SEQ ID NO: 354880 - DNA, 33 bp, Homo sapien
cttgtaagtatagagatgctcaccttactcata

SEQ ID NO: 354881 - DNA, 33 bp, Homo sapien
aagttgagtgaacagacggctgcaggtcaaaca

SEQ ID NO: 354882 - DNA, 33 bp, Homo sapien
aagttgagtgaacagatggctgcaggtcaaaca

SEQ ID NO: 354883 - DNA, 33 bp, Homo sapien
tacagatcctactaaactgactatccggcacag

SEQ ID NO: 354884 - DNA, 33 bp, Homo sapien
tacagatcctactaaagtgactatccggcacag

SEQ ID NO: 354885 - DNA, 33 bp, Homo sapien
aaaactagactaagccagagatctgcagccttt

SEQ ID NO: 354886 - DNA, 33 bp, Homo sapien
aaaactagactaagcctgagatctgcagccttt

SEQ ID NO: 354887 - DNA, 33 bp, Homo sapien
tctgtacatgattccacagtgtttaatttcttg

SEQ ID NO: 354888 - DNA, 33 bp, Homo sapien
tctgtacatgattccatagtgtttaatttcttg

SEQ ID NO: 354889 - DNA, 33 bp, Homo sapien
tatcctgaaattccaacgcccaatatgatgatg

SEQ ID NO: 354890 - DNA, 33 bp, Homo sapien
tatcctgaaattccaatgcccaatatgatgatg

SEQ ID NO: 354891 - DNA, 33 bp, Homo sapien
atgaaactgatctagcaagactactaattattt

SEQ ID NO: 354892 - DNA, 33 bp, Homo sapien
atgaaactgatctagcgagactactaattattt

SEQ ID NO: 354893 - DNA, 33 bp, Homo sapien
gtccctaagaacacaagccagggtctggaagga

SEQ ID NO: 354894 - DNA, 33 bp, Homo sapien
gtccctaagaacacaatccagggtctggaagga

SEQ ID NO: 354895 - DNA, 33 bp, Homo sapien
cattttatagaataccaagctgctttaaagcct

SEQ ID NO: 354896 - DNA, 33 bp, Homo sapien
cattttatagaatacccagctgctttaaagcct

SEQ ID NO: 354897 - DNA, 33 bp, Homo sapien
attttaaaagcaggacaaggagcaggaaagcta

SEQ ID NO: 354898 - DNA, 33 bp, Homo sapien
attttaaaagcaggacgaggagcaggaaagcta

SEQ ID NO: 354899 - DNA, 33 bp, Homo sapien
agctgttggtcaagcaaggctcttatctagagg

SEQ ID NO: 354900 - DNA, 33 bp, Homo sapien
agctgttggtcaagcagggctcttatctagagg

SEQ ID NO: 354901 - DNA, 33 bp, Homo sapien
tcagaaagttccagaaatacaattggtcagaag

SEQ ID NO: 354902 - DNA, 33 bp, Homo sapien
tcagaaagttccagaactacaattggtcagaag

SEQ ID NO: 354903 - DNA, 33 bp, Homo sapien
aggatctgaacgtgcaactaagtctgcaagatc

SEQ ID NO: 354904 - DNA, 33 bp, Homo sapien
aggatctgaacgtgcacctaagtctgcaagatc

SEQ ID NO: 354905 - DNA, 33 bp, Homo sapien
aaacccaaatcaatctaaagccagaaggtgtaa

SEQ ID NO: 354906 - DNA, 33 bp, Homo sapien
aaacccaaatcaatctgaagccagaaggtgtaa

SEQ ID NO: 354907 - DNA, 33 bp, Homo sapien
ctacaaataatcatcacgtgaaacaaagaacaa

SEQ ID NO: 354908 - DNA, 33 bp, Homo sapien
ctacaaataatcatcatgtgaaacaaagaacaa

SEQ ID NO: 354909 - DNA, 33 bp, Homo sapien
aactgtgagataataaatgagtcttgctttaag

SEQ ID NO: 354910 - DNA, 33 bp, Homo sapien
aactgtgagataataagtgagtcttgctttaag

SEQ ID NO: 354911 - DNA, 33 bp, Homo sapien
aacttctgtttcctcacgtatccaccaattttt

SEQ ID NO: 354912 - DNA, 33 bp, Homo sapien
aacttctgtttcctcatgtatccaccaattttt

SEQ ID NO: 354913 - DNA, 33 bp, Homo sapien
atgcattggggaaaatcaagtgaattcttttta

SEQ ID NO: 354914 - DNA, 33 bp, Homo sapien
atgcattggggaaaatgaagtgaattcttttta

SEQ ID NO: 354915 - DNA, 33 bp, Homo sapien
gtttcctgatttgaacaagtcattttaacctct

SEQ ID NO: 354916 - DNA, 33 bp, Homo sapien
gtttcctgatttgaacgagtcattttaacctct

SEQ ID NO: 354917 - DNA, 33 bp, Homo sapien
ttgatcacacaggccagcatggaaggtgtagca

SEQ ID NO: 354918 - DNA, 33 bp, Homo sapien
ttgatcacacaggccatcatggaaggtgtagca

SEQ ID NO: 354919 - DNA, 33 bp, Homo sapien
cagctgctcttagccacattacatactttgtgt

SEQ ID NO: 354920 - DNA, 33 bp, Homo sapien
cagctgctcttagccatattacatactttgtgt

SEQ ID NO: 354921 - DNA, 33 bp, Homo sapien
ctgtgtctttactctgcagatttctttttaatg

SEQ ID NO: 354922 - DNA, 33 bp, Homo sapien
ctgtgtctttactctggagatttctttttaatg

SEQ ID NO: 354923 - DNA, 33 bp, Homo sapien
ttcatcagtaaaattggaatcctcagtgaattt

SEQ ID NO: 354924 - DNA, 33 bp, Homo sapien
ttcatcagtaaaattgtaatcctcagtgaattt

SEQ ID NO: 354925 - DNA, 33 bp, Homo sapien
ttctgcactgtaagaacgcttaggcaatagaat

SEQ ID NO: 354926 - DNA, 33 bp, Homo sapien
ttctgcactgtaagaatgcttaggcaatagaat

SEQ ID NO: 354927 - DNA, 33 bp, Homo sapien
ataggcttgatgcttacattcctaaaccagacc

SEQ ID NO: 354928 - DNA, 33 bp, Homo sapien
ataggcttgatgcttagattcctaaaccagacc

SEQ ID NO: 354929 - DNA, 33 bp, Homo sapien
attgcataatgtgtcacataaaagcatgggaat

SEQ ID NO: 354930 - DNA, 33 bp, Homo sapien
attgcataatgtgtcatataaaagcatgggaat

SEQ ID NO: 354931 - DNA, 33 bp, Homo sapien
tcagtgaaaaagaaataaaaagcttcattagtc

SEQ ID NO: 354932 - DNA, 33 bp, Homo sapien
tcagtgaaaaagaaattaaaagcttcattagtc

SEQ ID NO: 354933 - DNA, 33 bp, Homo sapien
tgtttgcaagacattcgaacctactgatatgag

SEQ ID NO: 354934 - DNA, 33 bp, Homo sapien
tgtttgcaagacattctaacctactgatatgag

SEQ ID NO: 354935 - DNA, 33 bp, Homo sapien
cactcatggttacatacggtttcacagtgaaag

SEQ ID NO: 354936 - DNA, 33 bp, Homo sapien
cactcatggttacatatggtttcacagtgaaag

SEQ ID NO: 354937 - DNA, 33 bp, Homo sapien
catcataaatgagacaaaccaaagacttagttg

SEQ ID NO: 354938 - DNA, 33 bp, Homo sapien
catcataaatgagacagaccaaagacttagttg

SEQ ID NO: 354939 - DNA, 33 bp, Homo sapien
acctaacacaaatggaaggaaaaaggagacaaa

SEQ ID NO: 354940 - DNA, 33 bp, Homo sapien
acctaacacaaatggagggaaaaaggagacaaa

SEQ ID NO: 354941 - DNA, 33 bp, Homo sapien
cacaccctgagctttcccatgtatctttctgga

SEQ ID NO: 354942 - DNA, 33 bp, Homo sapien
cacaccctgagctttctcatgtatctttctgga

SEQ ID NO: 354943 - DNA, 33 bp, Homo sapien
aaatagatttaacacacgaaaattaacatactt

SEQ ID NO: 354944 - DNA, 33 bp, Homo sapien
aaatagatttaacacaggaaaattaacatactt

SEQ ID NO: 354945 - DNA, 33 bp, Homo sapien
agctctgccgttaccagggatgactctagagac

SEQ ID NO: 354946 - DNA, 33 bp, Homo sapien
agctctgccgttaccatggatgactctagagac

SEQ ID NO: 354947 - DNA, 33 bp, Homo sapien
taatttaaggcttaagaaaatgctaagataagt

SEQ ID NO: 354948 - DNA, 33 bp, Homo sapien
taatttaaggcttaaggaaatgctaagataagt

SEQ ID NO: 354949 - DNA, 33 bp, Homo sapien
aaaacagacatgaagaatctacaattgattggg

SEQ ID NO: 354950 - DNA, 33 bp, Homo sapien
aaaacagacatgaagagtctacaattgattggg

SEQ ID NO: 354951 - DNA, 33 bp, Homo sapien
atattcagacactgcgaaactatgtagggtgaa

SEQ ID NO: 354952 - DNA, 33 bp, Homo sapien
atattcagacactgcggaactatgtagggtgaa

SEQ ID NO: 354953 - DNA, 33 bp, Homo sapien
aaaaattttggttgagaaaactaatgatacatc

SEQ ID NO: 354954 - DNA, 33 bp, Homo sapien
aaaaattttggttgaggaaactaatgatacatc

SEQ ID NO: 354955 - DNA, 33 bp, Homo sapien
cacaaggaggtctgaacgctttctggtttcaat

SEQ ID NO: 354956 - DNA, 33 bp, Homo sapien
cacaaggaggtctgaaggctttctggtttcaat

SEQ ID NO: 354957 - DNA, 33 bp, Homo sapien
agagctaaaattagaaatccctgtttgtttgtt

SEQ ID NO: 354958 - DNA, 33 bp, Homo sapien
agagctaaaattagaagtccctgtttgtttgtt

SEQ ID NO: 354959 - DNA, 33 bp, Homo sapien
agagagatggaaactccgagaataaaatgaaag

SEQ ID NO: 354960 - DNA, 33 bp, Homo sapien
agagagatggaaactctgagaataaaatgaaag

SEQ ID NO: 354961 - DNA, 33 bp, Homo sapien
gaaaaaacaactatcaaactagatttcaatatc

SEQ ID NO: 354962 - DNA, 33 bp, Homo sapien
gaaaaaacaactatcagactagatttcaatatc

SEQ ID NO: 354963 - DNA, 33 bp, Homo sapien
ttttcaactaatagaaatgaagatacaacttat

SEQ ID NO: 354964 - DNA, 33 bp, Homo sapien
ttttcaactaatagaagtgaagatacaacttat

SEQ ID NO: 354965 - DNA, 33 bp, Homo sapien
gaataaaatagtaaaagagaggtccagaaaaag

SEQ ID NO: 354966 - DNA, 33 bp, Homo sapien
gaataaaatagtaaaatagaggtccagaaaaag

SEQ ID NO: 354967 - DNA, 33 bp, Homo sapien
attaaaaaatttaagaaaacgatgcaggctcca

SEQ ID NO: 354968 - DNA, 33 bp, Homo sapien
attaaaaaatttaagacaacgatgcaggctcca

SEQ ID NO: 354969 - DNA, 33 bp, Homo sapien
gttcagaatccaagcacagaaagaataattata

SEQ ID NO: 354970 - DNA, 33 bp, Homo sapien
gttcagaatccaagcagagaaagaataattata

SEQ ID NO: 354971 - DNA, 33 bp, Homo sapien
ggtaggtcaaaatgaccaattgcccatttcaca

SEQ ID NO: 354972 - DNA, 33 bp, Homo sapien
ggtaggtcaaaatgactaattgcccatttcaca

SEQ ID NO: 354973 - DNA, 33 bp, Homo sapien
taggcattattttccccatgtgatcaacaggaa

SEQ ID NO: 354974 - DNA, 33 bp, Homo sapien
taggcattattttccctatgtgatcaacaggaa

SEQ ID NO: 354975 - DNA, 33 bp, Homo sapien
tacactgctcataggaatatcaatttacacagc

SEQ ID NO: 354976 - DNA, 33 bp, Homo sapien
tacactgctcataggagtatcaatttacacagc

SEQ ID NO: 354977 - DNA, 33 bp, Homo sapien
atctttactgaatttaccagctcgaagagtttt

SEQ ID NO: 354978 - DNA, 33 bp, Homo sapien
atctttactgaatttatcagctcgaagagtttt

SEQ ID NO: 354979 - DNA, 33 bp, Homo sapien
agcactctctgcaatacacaagtcctccacaga

SEQ ID NO: 354980 - DNA, 33 bp, Homo sapien
agcactctctgcaatatacaagtcctccacaga

SEQ ID NO: 354981 - DNA, 33 bp, Homo sapien
gtgtcttgttttaggccgagcttctcatgcgtg

SEQ ID NO: 354982 - DNA, 33 bp, Homo sapien
gtgtcttgttttaggctgagcttctcatgcgtg

SEQ ID NO: 354983 - DNA, 33 bp, Homo sapien
ctgttccagagcctaaagtaatcaacacatagc

SEQ ID NO: 354984 - DNA, 33 bp, Homo sapien
ctgttccagagcctaacgtaatcaacacatagc

SEQ ID NO: 354985 - DNA, 33 bp, Homo sapien
caataaggatgtgagaataaatcagtcaaaatg

SEQ ID NO: 354986 - DNA, 33 bp, Homo sapien
caataaggatgtgagagtaaatcagtcaaaatg

SEQ ID NO: 354987 - DNA, 33 bp, Homo sapien
aacaaaacaactagaaagagaaataggcaagct

SEQ ID NO: 354988 - DNA, 33 bp, Homo sapien
aacaaaacaactagaaggagaaataggcaagct

SEQ ID NO: 354989 - DNA, 33 bp, Homo sapien
cctactcctagggaacggaaacttacacttttg

SEQ ID NO: 354990 - DNA, 33 bp, Homo sapien
cctactcctagggaactgaaacttacacttttg

SEQ ID NO: 354991 - DNA, 33 bp, Homo sapien
agattctattccagaaggtacaccaagggacaa

SEQ ID NO: 354992 - DNA, 33 bp, Homo sapien
agattctattccagaatgtacaccaagggacaa

SEQ ID NO: 354993 - DNA, 33 bp, Homo sapien
tgaaacaactctgcaacgagaggattaaaaggc

SEQ ID NO: 354994 - DNA, 33 bp, Homo sapien
tgaaacaactctgcaatgagaggattaaaaggc

SEQ ID NO: 354995 - DNA, 33 bp, Homo sapien
cagtgggaacatttgacctatcattcagccatc

SEQ ID NO: 354996 - DNA, 33 bp, Homo sapien
cagtgggaacatttgagctatcattcagccatc

SEQ ID NO: 354997 - DNA, 33 bp, Homo sapien
gtgaatcctatgcaaaagaattatggtttcctc

SEQ ID NO: 354998 - DNA, 33 bp, Homo sapien
gtgaatcctatgcaaaggaattatggtttcctc

SEQ ID NO: 354999 - DNA, 33 bp, Homo sapien
tggctaatgttcttaaatatgttttcatgtgct

SEQ ID NO: 355000 - DNA, 33 bp, Homo sapien
tggctaatgttcttaagtatgttttcatgtgct

SEQ ID NO: 355001 - DNA, 33 bp, Homo sapien
tctccagtagtaacaccggtactaagctgtaaa

SEQ ID NO: 355002 - DNA, 33 bp, Homo sapien
tctccagtagtaacactggtactaagctgtaaa

SEQ ID NO: 355003 - DNA, 33 bp, Homo sapien
agatgactttgaacctaacatattaatagaatt

SEQ ID NO: 355004 - DNA, 33 bp, Homo sapien
agatgactttgaacctgacatattaatagaatt

SEQ ID NO: 355005 - DNA, 33 bp, Homo sapien
ctccacacatactgtaataacaaaacgaaagag

SEQ ID NO: 355006 - DNA, 33 bp, Homo sapien
ctccacacatactgtagtaacaaaacgaaagag

SEQ ID NO: 355007 - DNA, 33 bp, Homo sapien
accttttaaggacaatgagcaaaagatggataa

SEQ ID NO: 355008 - DNA, 33 bp, Homo sapien
accttttaaggacaattagcaaaagatggataa

SEQ ID NO: 355009 - DNA, 33 bp, Homo sapien
cattgcacttaatgcaataggggatctgtcaaa

SEQ ID NO: 355010 - DNA, 33 bp, Homo sapien
cattgcacttaatgcagtaggggatctgtcaaa

SEQ ID NO: 355011 - DNA, 33 bp, Homo sapien
cattcacagaagtgtacagagtcacagtgattc

SEQ ID NO: 355012 - DNA, 33 bp, Homo sapien
cattcacagaagtgtatagagtcacagtgattc

SEQ ID NO: 355013 - DNA, 33 bp, Homo sapien
cgttaaaacagagtccagagctggggctggaga

SEQ ID NO: 355014 - DNA, 33 bp, Homo sapien
cgttaaaacagagtccggagctggggctggaga

SEQ ID NO: 355015 - DNA, 33 bp, Homo sapien
gattactatgcaaaaactgtgtcttaaataagt

SEQ ID NO: 355016 - DNA, 33 bp, Homo sapien
gattactatgcaaaaagtgtgtcttaaataagt

SEQ ID NO: 355017 - DNA, 33 bp, Homo sapien
gaatttgaacctgtgacataagaattttttttt

SEQ ID NO: 355018 - DNA, 33 bp, Homo sapien
gaatttgaacctgtgagataagaattttttttt

SEQ ID NO: 355019 - DNA, 33 bp, Homo sapien
aatgtgtcatattcataagcctggagaatttga

SEQ ID NO: 355020 - DNA, 33 bp, Homo sapien
aatgtgtcatattcatgagcctggagaatttga

SEQ ID NO: 355021 - DNA, 33 bp, Homo sapien
aaagtgggactcctaactggaaaatgtgatgga

SEQ ID NO: 355022 - DNA, 33 bp, Homo sapien
aaagtgggactcctaattggaaaatgtgatgga

SEQ ID NO: 355023 - DNA, 33 bp, Homo sapien
aggctcttgataaatagatgctgaatgcaacta

SEQ ID NO: 355024 - DNA, 33 bp, Homo sapien
aggctcttgataaatatatgctgaatgcaacta

SEQ ID NO: 355025 - DNA, 33 bp, Homo sapien
aaatcatggcactagtcaaatgagcagaatggg

SEQ ID NO: 355026 - DNA, 33 bp, Homo sapien
aaatcatggcactagtgaaatgagcagaatggg

SEQ ID NO: 355027 - DNA, 33 bp, Homo sapien
attatgtcaagcgaaacaagcaagacgtggaga

SEQ ID NO: 355028 - DNA, 33 bp, Homo sapien
attatgtcaagcgaaagaagcaagacgtggaga

SEQ ID NO: 355029 - DNA, 33 bp, Homo sapien
tatgctctgatatgggcagaaagctggtttagt

SEQ ID NO: 355030 - DNA, 33 bp, Homo sapien
tatgctctgatatgggtagaaagctggtttagt

SEQ ID NO: 355031 - DNA, 33 bp, Homo sapien
tgctttactgttcacactgtagatcactataat

SEQ ID NO: 355032 - DNA, 33 bp, Homo sapien
tgctttactgttcacattgtagatcactataat

SEQ ID NO: 355033 - DNA, 33 bp, Homo sapien
gtacgtggactgaaaccagggcacttccaacat

SEQ ID NO: 355034 - DNA, 33 bp, Homo sapien
gtacgtggactgaaactagggcacttccaacat

SEQ ID NO: 355035 - DNA, 33 bp, Homo sapien
atagaagcatgagctacatgttggaagtgccct

SEQ ID NO: 355036 - DNA, 33 bp, Homo sapien
atagaagcatgagctatatgttggaagtgccct

SEQ ID NO: 355037 - DNA, 33 bp, Homo sapien
gtctcatgtctcttaccagactgagccatccat

SEQ ID NO: 355038 - DNA, 33 bp, Homo sapien
gtctcatgtctcttactagactgagccatccat

SEQ ID NO: 355039 - DNA, 33 bp, Homo sapien
gtgattcctggtaagcacagaagaatgaataaa

SEQ ID NO: 355040 - DNA, 33 bp, Homo sapien
gtgattcctggtaagcgcagaagaatgaataaa

SEQ ID NO: 355041 - DNA, 33 bp, Homo sapien
tttcctggaatttgtacgtcactaatccaactt

SEQ ID NO: 355042 - DNA, 33 bp, Homo sapien
tttcctggaatttgtaggtcactaatccaactt

SEQ ID NO: 355043 - DNA, 33 bp, Homo sapien
atgccttaggagaaacggtggtgggattcgagg

SEQ ID NO: 355044 - DNA, 33 bp, Homo sapien
atgccttaggagaaactgtggtgggattcgagg

SEQ ID NO: 355045 - DNA, 33 bp, Homo sapien
cttattgtttcattcaatcctcgcaataacatt

SEQ ID NO: 355046 - DNA, 33 bp, Homo sapien
cttattgtttcattcagtcctcgcaataacatt

SEQ ID NO: 355047 - DNA, 33 bp, Homo sapien
tactaagtcaatgagtaaagtgccgtttttttg

SEQ ID NO: 355048 - DNA, 33 bp, Homo sapien
tactaagtcaatgagtcaagtgccgtttttttg

SEQ ID NO: 355049 - DNA, 33 bp, Homo sapien
ctctctttagtatttacgctttcagaggtattt

SEQ ID NO: 355050 - DNA, 33 bp, Homo sapien
ctctctttagtatttatgctttcagaggtattt

SEQ ID NO: 355051 - DNA, 33 bp, Homo sapien
cagctttctcttgaaacaataatttggcttttt

SEQ ID NO: 355052 - DNA, 33 bp, Homo sapien
cagctttctcttgaaataataatttggcttttt

SEQ ID NO: 355053 - DNA, 33 bp, Homo sapien
tttcaagagttggtcaaaacatgctgctccaag

SEQ ID NO: 355054 - DNA, 33 bp, Homo sapien
tttcaagagttggtcagaacatgctgctccaag

SEQ ID NO: 355055 - DNA, 33 bp, Homo sapien
tagagatgatcattcacggtgcactttaagtct

SEQ ID NO: 355056 - DNA, 33 bp, Homo sapien
tagagatgatcattcagggtgcactttaagtct

SEQ ID NO: 355057 - DNA, 33 bp, Homo sapien
actttaaagattcaggaagattcaattggattt

SEQ ID NO: 355058 - DNA, 33 bp, Homo sapien
actttaaagattcaggcagattcaattggattt

SEQ ID NO: 355059 - DNA, 33 bp, Homo sapien
gggtagtgaagataaacagccctggtgtacatt

SEQ ID NO: 355060 - DNA, 33 bp, Homo sapien
gggtagtgaagataaatagccctggtgtacatt

SEQ ID NO: 355061 - DNA, 33 bp, Homo sapien
caaagataatacactcacaaagtccttcaaaag

SEQ ID NO: 355062 - DNA, 33 bp, Homo sapien
caaagataatacactcgcaaagtccttcaaaag

SEQ ID NO: 355063 - DNA, 33 bp, Homo sapien
ccacatttttctgcaaatatctggggctgctat

SEQ ID NO: 355064 - DNA, 33 bp, Homo sapien
ccacatttttctgcaagtatctggggctgctat

SEQ ID NO: 355065 - DNA, 33 bp, Homo sapien
atggagctcatgaagtaaagtaaacagattgca

SEQ ID NO: 355066 - DNA, 33 bp, Homo sapien
atggagctcatgaagttaagtaaacagattgca

SEQ ID NO: 355067 - DNA, 33 bp, Homo sapien
gcaggggtaatttccacgatgacagggaggata

SEQ ID NO: 355068 - DNA, 33 bp, Homo sapien
gcaggggtaatttccaggatgacagggaggata

SEQ ID NO: 355069 - DNA, 33 bp, Homo sapien
gatttgtagttcctctaaagtcaactagaggcc

SEQ ID NO: 355070 - DNA, 33 bp, Homo sapien
gatttgtagttcctctgaagtcaactagaggcc

SEQ ID NO: 355071 - DNA, 33 bp, Homo sapien
gtttaaaagtttagaacacacatgtttctgggt

SEQ ID NO: 355072 - DNA, 33 bp, Homo sapien
gtttaaaagtttagaagacacatgtttctgggt

SEQ ID NO: 355073 - DNA, 33 bp, Homo sapien
ggtgagaaaatgcaaccgcttattccctagggg

SEQ ID NO: 355074 - DNA, 33 bp, Homo sapien
ggtgagaaaatgcaactgcttattccctagggg

SEQ ID NO: 355075 - DNA, 33 bp, Homo sapien
ggctctcagtgcccaacaggtctagctgaatat

SEQ ID NO: 355076 - DNA, 33 bp, Homo sapien
ggctctcagtgcccaataggtctagctgaatat

SEQ ID NO: 355077 - DNA, 33 bp, Homo sapien
cataccataaaatagcaaaagtgttcaagagat

SEQ ID NO: 355078 - DNA, 33 bp, Homo sapien
cataccataaaatagcgaaagtgttcaagagat

SEQ ID NO: 355079 - DNA, 33 bp, Homo sapien
ttataatgaagagaaacgtaggagaattataga

SEQ ID NO: 355080 - DNA, 33 bp, Homo sapien
ttataatgaagagaaatgtaggagaattataga

SEQ ID NO: 355081 - DNA, 33 bp, Homo sapien
gccaaaatgtctgtcacattgtgttgatgggac

SEQ ID NO: 355082 - DNA, 33 bp, Homo sapien
gccaaaatgtctgtcatattgtgttgatgggac

SEQ ID NO: 355083 - DNA, 33 bp, Homo sapien
aaattggaaagtgatacgagaatgacttcagtt

SEQ ID NO: 355084 - DNA, 33 bp, Homo sapien
aaattggaaagtgatatgagaatgacttcagtt

SEQ ID NO: 355085 - DNA, 33 bp, Homo sapien
ggttatatatgccaaactgtgaggaatattgtt

SEQ ID NO: 355086 - DNA, 33 bp, Homo sapien
ggttatatatgccaaattgtgaggaatattgtt

SEQ ID NO: 355087 - DNA, 33 bp, Homo sapien
gtattatgctgtaacacaggattgaatatcagt

SEQ ID NO: 355088 - DNA, 33 bp, Homo sapien
gtattatgctgtaacataggattgaatatcagt

SEQ ID NO: 355089 - DNA, 33 bp, Homo sapien
gcttaaatcacaggaactggaatcagaagacag

SEQ ID NO: 355090 - DNA, 33 bp, Homo sapien
gcttaaatcacaggaattggaatcagaagacag

SEQ ID NO: 355091 - DNA, 33 bp, Homo sapien
gagaaaaaagcttggaaatcatccaagttctcc

SEQ ID NO: 355092 - DNA, 33 bp, Homo sapien
gagaaaaaagcttggacatcatccaagttctcc

SEQ ID NO: 355093 - DNA, 33 bp, Homo sapien
atgttgctaaaattgaaaagaaagcacttatcc

SEQ ID NO: 355094 - DNA, 33 bp, Homo sapien
atgttgctaaaattgacaagaaagcacttatcc

SEQ ID NO: 355095 - DNA, 33 bp, Homo sapien
acagaagccagtgaaaatgtcttccttcctgac

SEQ ID NO: 355096 - DNA, 33 bp, Homo sapien
acagaagccagtgaaagtgtcttccttcctgac

SEQ ID NO: 355097 - DNA, 33 bp, Homo sapien
tagcttggttgttaataaggtgagcaggaaaag

SEQ ID NO: 355098 - DNA, 33 bp, Homo sapien
tagcttggttgttaatgaggtgagcaggaaaag

SEQ ID NO: 355099 - DNA, 33 bp, Homo sapien
tgtgccacaaagtcggaatccgttggacagatg

SEQ ID NO: 355100 - DNA, 33 bp, Homo sapien
tgtgccacaaagtcggcatccgttggacagatg

SEQ ID NO: 355101 - DNA, 33 bp, Homo sapien
cacacaaagatggcaacggcagaatgcacaaga

SEQ ID NO: 355102 - DNA, 33 bp, Homo sapien
cacacaaagatggcaatggcagaatgcacaaga

SEQ ID NO: 355103 - DNA, 33 bp, Homo sapien
attgagaagccagaaaatgaatgtgcctttgct

SEQ ID NO: 355104 - DNA, 33 bp, Homo sapien
attgagaagccagaaagtgaatgtgcctttgct

SEQ ID NO: 355105 - DNA, 33 bp, Homo sapien
agagtattccttcatccgagcgtggcattgccc

SEQ ID NO: 355106 - DNA, 33 bp, Homo sapien
agagtattccttcatctgagcgtggcattgccc

SEQ ID NO: 355107 - DNA, 33 bp, Homo sapien
ggttggtgactttctaagaagaggaagagagat

SEQ ID NO: 355108 - DNA, 33 bp, Homo sapien
ggttggtgactttctaggaagaggaagagagat

SEQ ID NO: 355109 - DNA, 33 bp, Homo sapien
atttttaaatggcacaacttcaagttcttgccc

SEQ ID NO: 355110 - DNA, 33 bp, Homo sapien
atttttaaatggcacatcttcaagttcttgccc

SEQ ID NO: 355111 - DNA, 33 bp, Homo sapien
tacttaagagattcagacatacctgaggacaga

SEQ ID NO: 355112 - DNA, 33 bp, Homo sapien
tacttaagagattcaggcatacctgaggacaga

SEQ ID NO: 355113 - DNA, 33 bp, Homo sapien
atagtatttaaccaaagaagcaatcattttttt

SEQ ID NO: 355114 - DNA, 33 bp, Homo sapien
atagtatttaaccaaataagcaatcattttttt

SEQ ID NO: 355115 - DNA, 33 bp, Homo sapien
agtccctctgtcaccacgatggcatttcaggtg

SEQ ID NO: 355116 - DNA, 33 bp, Homo sapien
agtccctctgtcaccatgatggcatttcaggtg

SEQ ID NO: 355117 - DNA, 33 bp, Homo sapien
tgttgaatacttataaatgagtaaaacctagga

SEQ ID NO: 355118 - DNA, 33 bp, Homo sapien
tgttgaatacttataagtgagtaaaacctagga

SEQ ID NO: 355119 - DNA, 33 bp, Homo sapien
aatgaagttcctatgaaaagagctggattgaat

SEQ ID NO: 355120 - DNA, 33 bp, Homo sapien
aatgaagttcctatgagaagagctggattgaat

SEQ ID NO: 355121 - DNA, 33 bp, Homo sapien
gaatatctttctctccaggaaacaagcacctcc

SEQ ID NO: 355122 - DNA, 33 bp, Homo sapien
gaatatctttctctccgggaaacaagcacctcc

SEQ ID NO: 355123 - DNA, 33 bp, Homo sapien
atttgtttttattacacctgactagtgtcccac

SEQ ID NO: 355124 - DNA, 33 bp, Homo sapien
atttgtttttattacatctgactagtgtcccac

SEQ ID NO: 355125 - DNA, 33 bp, Homo sapien
gcaggcgcaagagtgacaacttgagacccttcc

SEQ ID NO: 355126 - DNA, 33 bp, Homo sapien
gcaggcgcaagagtgagaacttgagacccttcc

SEQ ID NO: 355127 - DNA, 33 bp, Homo sapien
cagggtttcacagcccaaagaatcaggcaggca

SEQ ID NO: 355128 - DNA, 33 bp, Homo sapien
cagggtttcacagccctaagaatcaggcaggca

SEQ ID NO: 355129 - DNA, 33 bp, Homo sapien
ccttaggggtatttccgcatggcacagaagaaa

SEQ ID NO: 355130 - DNA, 33 bp, Homo sapien
ccttaggggtatttcctcatggcacagaagaaa

SEQ ID NO: 355131 - DNA, 33 bp, Homo sapien
gtattctaatccattccattggtcaagtaaatc

SEQ ID NO: 355132 - DNA, 33 bp, Homo sapien
gtattctaatccattctattggtcaagtaaatc

SEQ ID NO: 355133 - DNA, 33 bp, Homo sapien
ctgttcaaccttaacaaaaaggagaataaatca

SEQ ID NO: 355134 - DNA, 33 bp, Homo sapien
ctgttcaaccttaacataaaggagaataaatca

SEQ ID NO: 355135 - DNA, 33 bp, Homo sapien
tgctggacagccaaaaattaaatgacaaaatgt

SEQ ID NO: 355136 - DNA, 33 bp, Homo sapien
tgctggacagccaaaagttaaatgacaaaatgt

SEQ ID NO: 355137 - DNA, 33 bp, Homo sapien
tgaatggtgattgctacagatgaggcctgagag

SEQ ID NO: 355138 - DNA, 33 bp, Homo sapien
tgaatggtgattgctatagatgaggcctgagag

SEQ ID NO: 355139 - DNA, 33 bp, Homo sapien
tgcatcagagttcataaaaactaatttgagcct

SEQ ID NO: 355140 - DNA, 33 bp, Homo sapien
tgcatcagagttcatagaaactaatttgagcct

SEQ ID NO: 355141 - DNA, 33 bp, Homo sapien
ggcagtgtaacaggtaaataagcttcaaatttg

SEQ ID NO: 355142 - DNA, 33 bp, Homo sapien
ggcagtgtaacaggtagataagcttcaaatttg

SEQ ID NO: 355143 - DNA, 33 bp, Homo sapien
cgcagcatggacttaaaagctttaacctactct

SEQ ID NO: 355144 - DNA, 33 bp, Homo sapien
cgcagcatggacttaatagctttaacctactct

SEQ ID NO: 355145 - DNA, 33 bp, Homo sapien
ctagctagctgccagaagctttgccagatgttc

SEQ ID NO: 355146 - DNA, 33 bp, Homo sapien
ctagctagctgccagatgctttgccagatgttc

SEQ ID NO: 355147 - DNA, 33 bp, Homo sapien
gctagagtctcttactcaataagctcagattgg

SEQ ID NO: 355148 - DNA, 33 bp, Homo sapien
gctagagtctcttactgaataagctcagattgg

SEQ ID NO: 355149 - DNA, 33 bp, Homo sapien
gtactgtggaaggaatcaactggagaggaattt

SEQ ID NO: 355150 - DNA, 33 bp, Homo sapien
gtactgtggaaggaattaactggagaggaattt

SEQ ID NO: 355151 - DNA, 33 bp, Homo sapien
cacaggaaacaagtgacggcctcgaggttccaa

SEQ ID NO: 355152 - DNA, 33 bp, Homo sapien
cacaggaaacaagtgatggcctcgaggttccaa

SEQ ID NO: 355153 - DNA, 33 bp, Homo sapien
gaccaatcattggaacagactctagaggattgc

SEQ ID NO: 355154 - DNA, 33 bp, Homo sapien
gaccaatcattggaacggactctagaggattgc

SEQ ID NO: 355155 - DNA, 33 bp, Homo sapien
tgctgttctaatggcaatgaaaagcagcagttc

SEQ ID NO: 355156 - DNA, 33 bp, Homo sapien
tgctgttctaatggcagtgaaaagcagcagttc

SEQ ID NO: 355157 - DNA, 33 bp, Homo sapien
tttagggcatctggcactgaaggcctgttcacc

SEQ ID NO: 355158 - DNA, 33 bp, Homo sapien
tttagggcatctggcagtgaaggcctgttcacc

SEQ ID NO: 355159 - DNA, 33 bp, Homo sapien
taagaatgagtatgccacagaagaggtaaattt

SEQ ID NO: 355160 - DNA, 33 bp, Homo sapien
taagaatgagtatgccgcagaagaggtaaattt

SEQ ID NO: 355161 - DNA, 33 bp, Homo sapien
ggctctcttagataaacgaaagcatctttttaa

SEQ ID NO: 355162 - DNA, 33 bp, Homo sapien
ggctctcttagataaatgaaagcatctttttaa

SEQ ID NO: 355163 - DNA, 33 bp, Homo sapien
aataattcagccatcaactaatctggagtatta

SEQ ID NO: 355164 - DNA, 33 bp, Homo sapien
aataattcagccatcagctaatctggagtatta

SEQ ID NO: 355165 - DNA, 33 bp, Homo sapien
agttcttcagtatatacagattttgcttcactc

SEQ ID NO: 355166 - DNA, 33 bp, Homo sapien
agttcttcagtatatatagattttgcttcactc

SEQ ID NO: 355167 - DNA, 33 bp, Homo sapien
ctaagaatgaacgctacgtaactatatagatca

SEQ ID NO: 355168 - DNA, 33 bp, Homo sapien
ctaagaatgaacgctatgtaactatatagatca

SEQ ID NO: 355169 - DNA, 33 bp, Homo sapien
aaatgaacgaaggccactgctaggtcagtccag

SEQ ID NO: 355170 - DNA, 33 bp, Homo sapien
aaatgaacgaaggccattgctaggtcagtccag

SEQ ID NO: 355171 - DNA, 33 bp, Homo sapien
gggggataatgatagcaaaaatgatgatgatga

SEQ ID NO: 355172 - DNA, 33 bp, Homo sapien
gggggataatgatagcgaaaatgatgatgatga

SEQ ID NO: 355173 - DNA, 33 bp, Homo sapien
gagttcattatggaaaccttcagccaatcagtc

SEQ ID NO: 355174 - DNA, 33 bp, Homo sapien
gagttcattatggaaatcttcagccaatcagtc

SEQ ID NO: 355175 - DNA, 33 bp, Homo sapien
agagagagctgggaaggagctgaattggatgga

SEQ ID NO: 355176 - DNA, 33 bp, Homo sapien
agagagagctgggaagtagctgaattggatgga

SEQ ID NO: 355177 - DNA, 33 bp, Homo sapien
gtgaaggctaagaacaatgcccaaagacagaat

SEQ ID NO: 355178 - DNA, 33 bp, Homo sapien
gtgaaggctaagaacagtgcccaaagacagaat

SEQ ID NO: 355179 - DNA, 33 bp, Homo sapien
gcaattattttaagaaaaagatgcattcagcca

SEQ ID NO: 355180 - DNA, 33 bp, Homo sapien
gcaattattttaagaacaagatgcattcagcca

SEQ ID NO: 355181 - DNA, 33 bp, Homo sapien
catgatacagcattcacacctatgttataaggg

SEQ ID NO: 355182 - DNA, 33 bp, Homo sapien
catgatacagcattcatacctatgttataaggg

SEQ ID NO: 355183 - DNA, 33 bp, Homo sapien
tcagaggtgttcaaaccgaggctgaatattttg

SEQ ID NO: 355184 - DNA, 33 bp, Homo sapien
tcagaggtgttcaaactgaggctgaatattttg

SEQ ID NO: 355185 - DNA, 33 bp, Homo sapien
aataaataaaagccaactggaggcaggcactct

SEQ ID NO: 355186 - DNA, 33 bp, Homo sapien
aataaataaaagccaattggaggcaggcactct

SEQ ID NO: 355187 - DNA, 33 bp, Homo sapien
caggttcttgattgcaggagtcagtggggaata

SEQ ID NO: 355188 - DNA, 33 bp, Homo sapien
caggttcttgattgcatgagtcagtggggaata

SEQ ID NO: 355189 - DNA, 33 bp, Homo sapien
cgcagggacctggcacaagagtcagagcctagt

SEQ ID NO: 355190 - DNA, 33 bp, Homo sapien
cgcagggacctggcacgagagtcagagcctagt

SEQ ID NO: 355191 - DNA, 33 bp, Homo sapien
catctccactgtttagcagagcttagtgagagt

SEQ ID NO: 355192 - DNA, 33 bp, Homo sapien
catctccactgtttagtagagcttagtgagagt

SEQ ID NO: 355193 - DNA, 33 bp, Homo sapien
catccttgttaacagcagccctacataaccata

SEQ ID NO: 355194 - DNA, 33 bp, Homo sapien
catccttgttaacagcggccctacataaccata

SEQ ID NO: 355195 - DNA, 33 bp, Homo sapien
tttggatgatttgaacccccgtgtcgaaggggt

SEQ ID NO: 355196 - DNA, 33 bp, Homo sapien
tttggatgatttgaactcccgtgtcgaaggggt

SEQ ID NO: 355197 - DNA, 33 bp, Homo sapien
ggagattttctgaatacataagtgctgggccct

SEQ ID NO: 355198 - DNA, 33 bp, Homo sapien
ggagattttctgaatatataagtgctgggccct

SEQ ID NO: 355199 - DNA, 33 bp, Homo sapien
ctattcagtatgattccaggagtaaaaagttgg

SEQ ID NO: 355200 - DNA, 33 bp, Homo sapien
ctattcagtatgattctaggagtaaaaagttgg

SEQ ID NO: 355201 - DNA, 33 bp, Homo sapien
gataatgggatctgtcacatacactctagaggg

SEQ ID NO: 355202 - DNA, 33 bp, Homo sapien
gataatgggatctgtcgcatacactctagaggg

SEQ ID NO: 355203 - DNA, 33 bp, Homo sapien
taccgaaaatatacaaacaactacaaatcaata

SEQ ID NO: 355204 - DNA, 33 bp, Homo sapien
taccgaaaatatacaagcaactacaaatcaata

SEQ ID NO: 355205 - DNA, 33 bp, Homo sapien
ggccaaatatttgaaacccccaaattccagtag

SEQ ID NO: 355206 - DNA, 33 bp, Homo sapien
ggccaaatatttgaaatccccaaattccagtag

SEQ ID NO: 355207 - DNA, 33 bp, Homo sapien
gttttgagaatggtacgacggttatataagaga

SEQ ID NO: 355208 - DNA, 33 bp, Homo sapien
gttttgagaatggtactacggttatataagaga

SEQ ID NO: 355209 - DNA, 33 bp, Homo sapien
ttgatgagaaaaaaacaatcgcttcccagtggg

SEQ ID NO: 355210 - DNA, 33 bp, Homo sapien
ttgatgagaaaaaaacgatcgcttcccagtggg

SEQ ID NO: 355211 - DNA, 33 bp, Homo sapien
gttacaaatatggaaacggagaaggctagaata

SEQ ID NO: 355212 - DNA, 33 bp, Homo sapien
gttacaaatatggaaatggagaaggctagaata

SEQ ID NO: 355213 - DNA, 33 bp, Homo sapien
tttcttgaaagctaaaagtgtagaaggactcac

SEQ ID NO: 355214 - DNA, 33 bp, Homo sapien
tttcttgaaagctaaatgtgtagaaggactcac

SEQ ID NO: 355215 - DNA, 33 bp, Homo sapien
caatttttcctcttaaggcttaaatgatttgta

SEQ ID NO: 355216 - DNA, 33 bp, Homo sapien
caatttttcctcttaatgcttaaatgatttgta

SEQ ID NO: 355217 - DNA, 33 bp, Homo sapien
ggtcgtggtcatctaccatggctggatatgact

SEQ ID NO: 355218 - DNA, 33 bp, Homo sapien
ggtcgtggtcatctacgatggctggatatgact

SEQ ID NO: 355219 - DNA, 33 bp, Homo sapien
taaccttcataacagccatgcaaggcgaatgtt

SEQ ID NO: 355220 - DNA, 33 bp, Homo sapien
taaccttcataacagctatgcaaggcgaatgtt

SEQ ID NO: 355221 - DNA, 33 bp, Homo sapien
ccttccaaattcccaaaaggactccatgcctgg

SEQ ID NO: 355222 - DNA, 33 bp, Homo sapien
ccttccaaattcccaagaggactccatgcctgg

SEQ ID NO: 355223 - DNA, 33 bp, Homo sapien
ggtattgagcagaagacgtttttattattggac

SEQ ID NO: 355224 - DNA, 33 bp, Homo sapien
ggtattgagcagaagatgtttttattattggac

SEQ ID NO: 355225 - DNA, 33 bp, Homo sapien
atctcactaactaattaaagaaacagatgtgtt

SEQ ID NO: 355226 - DNA, 33 bp, Homo sapien
atctcactaactaattgaagaaacagatgtgtt

SEQ ID NO: 355227 - DNA, 33 bp, Homo sapien
atggaagtcatttggacgaacagaccaaagaaa

SEQ ID NO: 355228 - DNA, 33 bp, Homo sapien
atggaagtcatttggatgaacagaccaaagaaa

SEQ ID NO: 355229 - DNA, 33 bp, Homo sapien
tgaccttcctgcagaaaattgattcctttcaca

SEQ ID NO: 355230 - DNA, 33 bp, Homo sapien
tgaccttcctgcagaagattgattcctttcaca

SEQ ID NO: 355231 - DNA, 33 bp, Homo sapien
tccatgcatccaagacacttttattaaacaggt

SEQ ID NO: 355232 - DNA, 33 bp, Homo sapien
tccatgcatccaagacgcttttattaaacaggt

SEQ ID NO: 355233 - DNA, 33 bp, Homo sapien
tgttttcgtgtattcacataggaaacatggaaa

SEQ ID NO: 355234 - DNA, 33 bp, Homo sapien
tgttttcgtgtattcatataggaaacatggaaa

SEQ ID NO: 355235 - DNA, 33 bp, Homo sapien
cactcaccacttttgacacattatacaagtgtc

SEQ ID NO: 355236 - DNA, 33 bp, Homo sapien
cactcaccacttttgagacattatacaagtgtc

SEQ ID NO: 355237 - DNA, 33 bp, Homo sapien
catgtgtcgttgtatacgtatctgtaagtcctt

SEQ ID NO: 355238 - DNA, 33 bp, Homo sapien
catgtgtcgttgtatatgtatctgtaagtcctt

SEQ ID NO: 355239 - DNA, 33 bp, Homo sapien
aagactcgccaggatgcaaataaaatcagcata

SEQ ID NO: 355240 - DNA, 33 bp, Homo sapien
aagactcgccaggatgtaaataaaatcagcata

SEQ ID NO: 355241 - DNA, 33 bp, Homo sapien
ggaggagatacgattaataaaacccagttctac

SEQ ID NO: 355242 - DNA, 33 bp, Homo sapien
ggaggagatacgattagtaaaacccagttctac

SEQ ID NO: 355243 - DNA, 33 bp, Homo sapien
atccctatgaaacatcacaattctttttatggt

SEQ ID NO: 355244 - DNA, 33 bp, Homo sapien
atccctatgaaacatcgcaattctttttatggt

SEQ ID NO: 355245 - DNA, 33 bp, Homo sapien
gaacaccttctgcaccacttatttctggccctg

SEQ ID NO: 355246 - DNA, 33 bp, Homo sapien
gaacaccttctgcaccgcttatttctggccctg

SEQ ID NO: 355247 - DNA, 33 bp, Homo sapien
ggtgcagaaggtgttccaagtctagtggctaca

SEQ ID NO: 355248 - DNA, 33 bp, Homo sapien
ggtgcagaaggtgttcgaagtctagtggctaca

SEQ ID NO: 355249 - DNA, 33 bp, Homo sapien
tgaggcatacaggacacgaagtaacccatattc

SEQ ID NO: 355250 - DNA, 33 bp, Homo sapien
tgaggcatacaggacaggaagtaacccatattc

SEQ ID NO: 355251 - DNA, 33 bp, Homo sapien
ggttccagaaatattacgccctgtgaatccacg

SEQ ID NO: 355252 - DNA, 33 bp, Homo sapien
ggttccagaaatattatgccctgtgaatccacg

SEQ ID NO: 355253 - DNA, 33 bp, Homo sapien
ataagtgaaagtggagaatcctatggaggaaga

SEQ ID NO: 355254 - DNA, 33 bp, Homo sapien
ataagtgaaagtggagtatcctatggaggaaga

SEQ ID NO: 355255 - DNA, 33 bp, Homo sapien
agggctgtgtgcaagaaacaagagacacagtct

SEQ ID NO: 355256 - DNA, 33 bp, Homo sapien
agggctgtgtgcaagagacaagagacacagtct

SEQ ID NO: 355257 - DNA, 33 bp, Homo sapien
cctccaggtcattccaatgctgcttctctgcct

SEQ ID NO: 355258 - DNA, 33 bp, Homo sapien
cctccaggtcattccagtgctgcttctctgcct

SEQ ID NO: 355259 - DNA, 33 bp, Homo sapien
ccaagagagttttcacagatgctaacggttgct

SEQ ID NO: 355260 - DNA, 33 bp, Homo sapien
ccaagagagttttcacggatgctaacggttgct

SEQ ID NO: 355261 - DNA, 33 bp, Homo sapien
tgcatctttcaaatacacatactcagagtcccc

SEQ ID NO: 355262 - DNA, 33 bp, Homo sapien
tgcatctttcaaatacgcatactcagagtcccc

SEQ ID NO: 355263 - DNA, 33 bp, Homo sapien
caaaggagctcacccacgtttagcacagtgatt

SEQ ID NO: 355264 - DNA, 33 bp, Homo sapien
caaaggagctcacccatgtttagcacagtgatt

SEQ ID NO: 355265 - DNA, 33 bp, Homo sapien
ttggcagccagtgacaaatgtgggaactagaat

SEQ ID NO: 355266 - DNA, 33 bp, Homo sapien
ttggcagccagtgacagatgtgggaactagaat

SEQ ID NO: 355267 - DNA, 33 bp, Homo sapien
ctgcgataccaaaccaatcttacttaagggcag

SEQ ID NO: 355268 - DNA, 33 bp, Homo sapien
ctgcgataccaaaccagtcttacttaagggcag

SEQ ID NO: 355269 - DNA, 33 bp, Homo sapien
tcctagagctaagtccacatttgggtgatttgt

SEQ ID NO: 355270 - DNA, 33 bp, Homo sapien
tcctagagctaagtccgcatttgggtgatttgt

SEQ ID NO: 355271 - DNA, 33 bp, Homo sapien
tcttagttgcaaattgaagcaagttattaaatc

SEQ ID NO: 355272 - DNA, 33 bp, Homo sapien
tcttagttgcaaattggagcaagttattaaatc

SEQ ID NO: 355273 - DNA, 33 bp, Homo sapien
acatgcacaacttacactctacctgggtatatt

SEQ ID NO: 355274 - DNA, 33 bp, Homo sapien
acatgcacaacttacagtctacctgggtatatt

SEQ ID NO: 355275 - DNA, 33 bp, Homo sapien
gaaggcaaatggggccaaacattgagttgtttc

SEQ ID NO: 355276 - DNA, 33 bp, Homo sapien
gaaggcaaatggggcccaacattgagttgtttc

SEQ ID NO: 355277 - DNA, 33 bp, Homo sapien
tcctccttaatcagcccgctctacaacagctca

SEQ ID NO: 355278 - DNA, 33 bp, Homo sapien
tcctccttaatcagcctgctctacaacagctca

SEQ ID NO: 355279 - DNA, 33 bp, Homo sapien
gacctcaagactttcagcatggagctgcatctc

SEQ ID NO: 355280 - DNA, 33 bp, Homo sapien
gacctcaagactttcatcatggagctgcatctc

SEQ ID NO: 355281 - DNA, 33 bp, Homo sapien
ggccaaagaattgtgcaacttgtgcatgagaaa

SEQ ID NO: 355282 - DNA, 33 bp, Homo sapien
ggccaaagaattgtgctacttgtgcatgagaaa

SEQ ID NO: 355283 - DNA, 33 bp, Homo sapien
gacgagtataaattcaaaggtcctccctccttt

SEQ ID NO: 355284 - DNA, 33 bp, Homo sapien
gacgagtataaattcagaggtcctccctccttt

SEQ ID NO: 355285 - DNA, 33 bp, Homo sapien
tcctcttctctataccaatgagctccaggagga

SEQ ID NO: 355286 - DNA, 33 bp, Homo sapien
tcctcttctctataccgatgagctccaggagga

SEQ ID NO: 355287 - DNA, 33 bp, Homo sapien
gcatgttcagttgctacgaatgtggaaaatata

SEQ ID NO: 355288 - DNA, 33 bp, Homo sapien
gcatgttcagttgctaggaatgtggaaaatata

SEQ ID NO: 355289 - DNA, 33 bp, Homo sapien
gtcagttctgggaaagcatagccttctcctccc

SEQ ID NO: 355290 - DNA, 33 bp, Homo sapien
gtcagttctgggaaaggatagccttctcctccc

SEQ ID NO: 355291 - DNA, 33 bp, Homo sapien
ttctcagaattcactaaataaggaacaatttgt

SEQ ID NO: 355292 - DNA, 33 bp, Homo sapien
ttctcagaattcactatataaggaacaatttgt

SEQ ID NO: 355293 - DNA, 33 bp, Homo sapien
tttgaagtacaaggaaagcaatgaagatagatt

SEQ ID NO: 355294 - DNA, 33 bp, Homo sapien
tttgaagtacaaggaaggcaatgaagatagatt

SEQ ID NO: 355295 - DNA, 33 bp, Homo sapien
ttccctccaggccctgccaatttagtggaataa

SEQ ID NO: 355296 - DNA, 33 bp, Homo sapien
ttccctccaggccctgtcaatttagtggaataa

SEQ ID NO: 355297 - DNA, 33 bp, Homo sapien
aatctatcttcacatcaatatggtaaatccaag

SEQ ID NO: 355298 - DNA, 33 bp, Homo sapien
aatctatcttcacatcgatatggtaaatccaag

SEQ ID NO: 355299 - DNA, 33 bp, Homo sapien
gataaccagagcataacaggtttctgtaggaag

SEQ ID NO: 355300 - DNA, 33 bp, Homo sapien
gataaccagagcataagaggtttctgtaggaag

SEQ ID NO: 355301 - DNA, 33 bp, Homo sapien
ctgtaaataaggataacagaatgcccatatagg

SEQ ID NO: 355302 - DNA, 33 bp, Homo sapien
ctgtaaataaggataatagaatgcccatatagg

SEQ ID NO: 355303 - DNA, 33 bp, Homo sapien
tgctttaagaaatcaaaatagacaggatttaag

SEQ ID NO: 355304 - DNA, 33 bp, Homo sapien
tgctttaagaaatcaagatagacaggatttaag

SEQ ID NO: 355305 - DNA, 33 bp, Homo sapien
ttctaggccactgagcaaaacagaaaggaccca

SEQ ID NO: 355306 - DNA, 33 bp, Homo sapien
ttctaggccactgagcgaaacagaaaggaccca

SEQ ID NO: 355307 - DNA, 33 bp, Homo sapien
gtatttttcacaaacaaagagtgcttggtgtga

SEQ ID NO: 355308 - DNA, 33 bp, Homo sapien
gtatttttcacaaacagagagtgcttggtgtga

SEQ ID NO: 355309 - DNA, 33 bp, Homo sapien
tttcttcacaattttacaccttcttccatctca

SEQ ID NO: 355310 - DNA, 33 bp, Homo sapien
tttcttcacaattttataccttcttccatctca

SEQ ID NO: 355311 - DNA, 33 bp, Homo sapien
tccccaccactcccttcaagcatttcttgaacc

SEQ ID NO: 355312 - DNA, 33 bp, Homo sapien
tccccaccactcccttgaagcatttcttgaacc

SEQ ID NO: 355313 - DNA, 33 bp, Homo sapien
ctgccaggaaaaagaacacgcataactccggat

SEQ ID NO: 355314 - DNA, 33 bp, Homo sapien
ctgccaggaaaaagaatacgcataactccggat

SEQ ID NO: 355315 - DNA, 33 bp, Homo sapien
tggatgactcaagctccgagagaagtggagaca

SEQ ID NO: 355316 - DNA, 33 bp, Homo sapien
tggatgactcaagctctgagagaagtggagaca

SEQ ID NO: 355317 - DNA, 33 bp, Homo sapien
acgatttaaggaccggcgttgctttctgactag

SEQ ID NO: 355318 - DNA, 33 bp, Homo sapien
acgatttaaggaccggtgttgctttctgactag

SEQ ID NO: 355319 - DNA, 33 bp, Homo sapien
agcaggctaggagataaaacgtcgtcgttgttc

SEQ ID NO: 355320 - DNA, 33 bp, Homo sapien
agcaggctaggagatataacgtcgtcgttgttc

SEQ ID NO: 355321 - DNA, 33 bp, Homo sapien
aggccattcgatcagaacccattcaggtgcact

SEQ ID NO: 355322 - DNA, 33 bp, Homo sapien
aggccattcgatcagagcccattcaggtgcact

SEQ ID NO: 355323 - DNA, 33 bp, Homo sapien
gttcacacaatctgcacgtgctgcacagctggg

SEQ ID NO: 355324 - DNA, 33 bp, Homo sapien
gttcacacaatctgcatgtgctgcacagctggg

SEQ ID NO: 355325 - DNA, 33 bp, Homo sapien
ctggagccaaactcagccaagcacatcaggaat

SEQ ID NO: 355326 - DNA, 33 bp, Homo sapien
ctggagccaaactcagtcaagcacatcaggaat

SEQ ID NO: 355327 - DNA, 33 bp, Homo sapien
ctcattaatctctgtaaccctattggccagcat

SEQ ID NO: 355328 - DNA, 33 bp, Homo sapien
ctcattaatctctgtatccctattggccagcat

SEQ ID NO: 355329 - DNA, 33 bp, Homo sapien
ttgtgtgtgtgttccactgctggaaacctctct

SEQ ID NO: 355330 - DNA, 33 bp, Homo sapien
ttgtgtgtgtgttccattgctggaaacctctct

SEQ ID NO: 355331 - DNA, 33 bp, Homo sapien
ttctgtggctaaggaccggaattcatgaggctg

SEQ ID NO: 355332 - DNA, 33 bp, Homo sapien
ttctgtggctaaggactggaattcatgaggctg

SEQ ID NO: 355333 - DNA, 33 bp, Homo sapien
aaagatgctccccttgcatggacacagcctcct

SEQ ID NO: 355334 - DNA, 33 bp, Homo sapien
aaagatgctccccttggatggacacagcctcct

SEQ ID NO: 355335 - DNA, 33 bp, Homo sapien
gccctgctcaagagtacagagtcaaggctggaa

SEQ ID NO: 355336 - DNA, 33 bp, Homo sapien
gccctgctcaagagtagagagtcaaggctggaa

SEQ ID NO: 355337 - DNA, 33 bp, Homo sapien
gggaatgcaacctaccagagatttaaccaagct

SEQ ID NO: 355338 - DNA, 33 bp, Homo sapien
gggaatgcaacctaccggagatttaaccaagct

SEQ ID NO: 355339 - DNA, 33 bp, Homo sapien
taaatcaagtgtttaaagagggacattcacgtc

SEQ ID NO: 355340 - DNA, 33 bp, Homo sapien
taaatcaagtgtttaaggagggacattcacgtc

SEQ ID NO: 355341 - DNA, 33 bp, Homo sapien
ggtgatcctaaaaagaatagcccatatatgcaa

SEQ ID NO: 355342 - DNA, 33 bp, Homo sapien
ggtgatcctaaaaagagtagcccatatatgcaa

SEQ ID NO: 355343 - DNA, 33 bp, Homo sapien
gctccctgtgatctaccctctccaactgacaga

SEQ ID NO: 355344 - DNA, 33 bp, Homo sapien
gctccctgtgatctactctctccaactgacaga

SEQ ID NO: 355345 - DNA, 33 bp, Homo sapien
ttaggtcacaaagacaagactgggctgtgcaag

SEQ ID NO: 355346 - DNA, 33 bp, Homo sapien
ttaggtcacaaagacaggactgggctgtgcaag

SEQ ID NO: 355347 - DNA, 33 bp, Homo sapien
gcccagtttgccttgacatgttggtttattaca

SEQ ID NO: 355348 - DNA, 33 bp, Homo sapien
gcccagtttgccttgagatgttggtttattaca

SEQ ID NO: 355349 - DNA, 33 bp, Homo sapien
ctattaggttttcttaccatttgcatatgtatc

SEQ ID NO: 355350 - DNA, 33 bp, Homo sapien
ctattaggttttcttatcatttgcatatgtatc

SEQ ID NO: 355351 - DNA, 33 bp, Homo sapien
ctagctcctttgtctaccctgaatggtgatgaa

SEQ ID NO: 355352 - DNA, 33 bp, Homo sapien
ctagctcctttgtctatcctgaatggtgatgaa

SEQ ID NO: 355353 - DNA, 33 bp, Homo sapien
ttatcctacagtatcacggtacaggatggaaaa

SEQ ID NO: 355354 - DNA, 33 bp, Homo sapien
ttatcctacagtatcatggtacaggatggaaaa

SEQ ID NO: 355355 - DNA, 33 bp, Homo sapien
taaagagtgatgacaccggtaccagaagttccc

SEQ ID NO: 355356 - DNA, 33 bp, Homo sapien
taaagagtgatgacacgggtaccagaagttccc

SEQ ID NO: 355357 - DNA, 33 bp, Homo sapien
gttttgaggactggcactattattgcctgtgca

SEQ ID NO: 355358 - DNA, 33 bp, Homo sapien
gttttgaggactggcagtattattgcctgtgca

SEQ ID NO: 355359 - DNA, 33 bp, Homo sapien
gaactcctgattcctacggattgaagaccaaag

SEQ ID NO: 355360 - DNA, 33 bp, Homo sapien
gaactcctgattcctagggattgaagaccaaag

SEQ ID NO: 355361 - DNA, 33 bp, Homo sapien
tactgtctctgctttcgctactatcatacagtg

SEQ ID NO: 355362 - DNA, 33 bp, Homo sapien
tactgtctctgctttctctactatcatacagtg

SEQ ID NO: 355363 - DNA, 33 bp, Homo sapien
gaatcctctcttgtccagatataaagacgattg

SEQ ID NO: 355364 - DNA, 33 bp, Homo sapien
gaatcctctcttgtccggatataaagacgattg

SEQ ID NO: 355365 - DNA, 33 bp, Homo sapien
cattagatgctcaagacgtgcctcttccttctc

SEQ ID NO: 355366 - DNA, 33 bp, Homo sapien
cattagatgctcaagatgtgcctcttccttctc

SEQ ID NO: 355367 - DNA, 33 bp, Homo sapien
ccctcttacttggtgacgcagatccaaattcac

SEQ ID NO: 355368 - DNA, 33 bp, Homo sapien
ccctcttacttggtgatgcagatccaaattcac

SEQ ID NO: 355369 - DNA, 33 bp, Homo sapien
ctggcaaagtaataaccgtgggcgtgtttcttc

SEQ ID NO: 355370 - DNA, 33 bp, Homo sapien
ctggcaaagtaataactgtgggcgtgtttcttc

SEQ ID NO: 355371 - DNA, 33 bp, Homo sapien
cattctgggcaaataaagactaagaaatagcat

SEQ ID NO: 355372 - DNA, 33 bp, Homo sapien
cattctgggcaaataacgactaagaaatagcat

SEQ ID NO: 355373 - DNA, 33 bp, Homo sapien
atccctctgccctaaaaaagtagacaatcgtat

SEQ ID NO: 355374 - DNA, 33 bp, Homo sapien
atccctctgccctaaagaagtagacaatcgtat

SEQ ID NO: 355375 - DNA, 33 bp, Homo sapien
tgaatgagcccaagcacaaatggaggtaatgtg

SEQ ID NO: 355376 - DNA, 33 bp, Homo sapien
tgaatgagcccaagcataaatggaggtaatgtg

SEQ ID NO: 355377 - DNA, 33 bp, Homo sapien
gccaagtgtcatgacaagggtgtggattttgga

SEQ ID NO: 355378 - DNA, 33 bp, Homo sapien
gccaagtgtcatgacaggggtgtggattttgga

SEQ ID NO: 355379 - DNA, 33 bp, Homo sapien
caaggcagtggcattcacttaaggacataggtc

SEQ ID NO: 355380 - DNA, 33 bp, Homo sapien
caaggcagtggcattcgcttaaggacataggtc

SEQ ID NO: 355381 - DNA, 33 bp, Homo sapien
ggcctgaactacatgacaatagaaagtaggctg

SEQ ID NO: 355382 - DNA, 33 bp, Homo sapien
ggcctgaactacatgagaatagaaagtaggctg

SEQ ID NO: 355383 - DNA, 33 bp, Homo sapien
agatgcctggcagtgaaagagaaagcctggtat

SEQ ID NO: 355384 - DNA, 33 bp, Homo sapien
agatgcctggcagtgagagagaaagcctggtat

SEQ ID NO: 355385 - DNA, 33 bp, Homo sapien
atgaagatcttgtgaaaaatgttgctgatgcaa

SEQ ID NO: 355386 - DNA, 33 bp, Homo sapien
atgaagatcttgtgaagaatgttgctgatgcaa

SEQ ID NO: 355387 - DNA, 33 bp, Homo sapien
acatagaacctgagtacccaacagggtgctgtg

SEQ ID NO: 355388 - DNA, 33 bp, Homo sapien
acatagaacctgagtatccaacagggtgctgtg

SEQ ID NO: 355389 - DNA, 33 bp, Homo sapien
ctcttggtaatggcaacacactgatgagctggc

SEQ ID NO: 355390 - DNA, 33 bp, Homo sapien
ctcttggtaatggcaatacactgatgagctggc

SEQ ID NO: 355391 - DNA, 33 bp, Homo sapien
gacacaccactgcatacagtcctgactcaagcc

SEQ ID NO: 355392 - DNA, 33 bp, Homo sapien
gacacaccactgcatatagtcctgactcaagcc

SEQ ID NO: 355393 - DNA, 33 bp, Homo sapien
agggtctcagaacacaaatgagagagatgttat

SEQ ID NO: 355394 - DNA, 33 bp, Homo sapien
agggtctcagaacacagatgagagagatgttat

SEQ ID NO: 355395 - DNA, 33 bp, Homo sapien
ataaaccaggaatgacagaggctgtaatcagtg

SEQ ID NO: 355396 - DNA, 33 bp, Homo sapien
ataaaccaggaatgacggaggctgtaatcagtg

SEQ ID NO: 355397 - DNA, 33 bp, Homo sapien
acatgctctggtacaacccacttcagagccacc

SEQ ID NO: 355398 - DNA, 33 bp, Homo sapien
acatgctctggtacaatccacttcagagccacc

SEQ ID NO: 355399 - DNA, 33 bp, Homo sapien
ccaattgtttaaatcactgaaatcatttttcac

SEQ ID NO: 355400 - DNA, 33 bp, Homo sapien
ccaattgtttaaatcagtgaaatcatttttcac

SEQ ID NO: 355401 - DNA, 33 bp, Homo sapien
taagcgtacgacactaccattatgttcagaata

SEQ ID NO: 355402 - DNA, 33 bp, Homo sapien
taagcgtacgacactatcattatgttcagaata

SEQ ID NO: 355403 - DNA, 33 bp, Homo sapien
gtgaactacttccataataaagggtaaatattt

SEQ ID NO: 355404 - DNA, 33 bp, Homo sapien
gtgaactacttccatagtaaagggtaaatattt

SEQ ID NO: 355405 - DNA, 33 bp, Homo sapien
cccttaactccagcaccggggaaagtgtctggg

SEQ ID NO: 355406 - DNA, 33 bp, Homo sapien
cccttaactccagcactggggaaagtgtctggg

SEQ ID NO: 355407 - DNA, 33 bp, Homo sapien
cccctgcattcaccacaaagaaggactcaatgg

SEQ ID NO: 355408 - DNA, 33 bp, Homo sapien
cccctgcattcaccacgaagaaggactcaatgg

SEQ ID NO: 355409 - DNA, 33 bp, Homo sapien
gttccctgtacttaaaactgtgaggtgctagcc

SEQ ID NO: 355410 - DNA, 33 bp, Homo sapien
gttccctgtacttaaacctgtgaggtgctagcc

SEQ ID NO: 355411 - DNA, 33 bp, Homo sapien
ttcaccttagctgccaagaaacctgtggccaca

SEQ ID NO: 355412 - DNA, 33 bp, Homo sapien
ttcaccttagctgccaggaaacctgtggccaca

SEQ ID NO: 355413 - DNA, 33 bp, Homo sapien
ggtggaagcatccattaaaagtctctaacaggc

SEQ ID NO: 355414 - DNA, 33 bp, Homo sapien
ggtggaagcatccatttaaagtctctaacaggc

SEQ ID NO: 355415 - DNA, 33 bp, Homo sapien
ttggggtcgtgcagaaccgcctccctgccatga

SEQ ID NO: 355416 - DNA, 33 bp, Homo sapien
ttggggtcgtgcagaatcgcctccctgccatga

SEQ ID NO: 355417 - DNA, 33 bp, Homo sapien
tctctggatccaagtgcagcagctggaacttcc

SEQ ID NO: 355418 - DNA, 33 bp, Homo sapien
tctctggatccaagtggagcagctggaacttcc

SEQ ID NO: 355419 - DNA, 33 bp, Homo sapien
tttgaagctctgttaacgtcaaacttcaaacca

SEQ ID NO: 355420 - DNA, 33 bp, Homo sapien
tttgaagctctgttaatgtcaaacttcaaacca

SEQ ID NO: 355421 - DNA, 33 bp, Homo sapien
tgccacctcataaccactagggtggacactaaa

SEQ ID NO: 355422 - DNA, 33 bp, Homo sapien
tgccacctcataaccattagggtggacactaaa

SEQ ID NO: 355423 - DNA, 33 bp, Homo sapien
ccatcctgcacatgtacgtctgcctcaggcctt

SEQ ID NO: 355424 - DNA, 33 bp, Homo sapien
ccatcctgcacatgtaggtctgcctcaggcctt

SEQ ID NO: 355425 - DNA, 33 bp, Homo sapien
cacacagctctcactgaagaacttgcatccaaa

SEQ ID NO: 355426 - DNA, 33 bp, Homo sapien
cacacagctctcactggagaacttgcatccaaa

SEQ ID NO: 355427 - DNA, 33 bp, Homo sapien
gactgtttgccaactaactggaatgcacgtggg

SEQ ID NO: 355428 - DNA, 33 bp, Homo sapien
gactgtttgccaactagctggaatgcacgtggg

SEQ ID NO: 355429 - DNA, 33 bp, Homo sapien
aaagacctgtggactggaacaggctcatttcct

SEQ ID NO: 355430 - DNA, 33 bp, Homo sapien
aaagacctgtggactgtaacaggctcatttcct

SEQ ID NO: 355431 - DNA, 33 bp, Homo sapien
cgtgctcttcccaggcaaccgttcattcgtttc

SEQ ID NO: 355432 - DNA, 33 bp, Homo sapien
cgtgctcttcccaggcgaccgttcattcgtttc

SEQ ID NO: 355433 - DNA, 33 bp, Homo sapien
tggggcacagccttgacaaaataaaagaccgtg

SEQ ID NO: 355434 - DNA, 33 bp, Homo sapien
tggggcacagccttgagaaaataaaagaccgtg

SEQ ID NO: 355435 - DNA, 33 bp, Homo sapien
tgtggccactgactcaagagtatgggtcctttg

SEQ ID NO: 355436 - DNA, 33 bp, Homo sapien
tgtggccactgactcaggagtatgggtcctttg

SEQ ID NO: 355437 - DNA, 33 bp, Homo sapien
acaggtaggagtaacacaggaacgcgactttct

SEQ ID NO: 355438 - DNA, 33 bp, Homo sapien
acaggtaggagtaacataggaacgcgactttct

SEQ ID NO: 355439 - DNA, 33 bp, Homo sapien
ggactctgtgtaaatacatggccctggcttcaa

SEQ ID NO: 355440 - DNA, 33 bp, Homo sapien
ggactctgtgtaaatatatggccctggcttcaa

SEQ ID NO: 355441 - DNA, 33 bp, Homo sapien
agcgacgaagccgtcaaggtcttggtttttgtt

SEQ ID NO: 355442 - DNA, 33 bp, Homo sapien
agcgacgaagccgtcacggtcttggtttttgtt

SEQ ID NO: 355443 - DNA, 33 bp, Homo sapien
agtgacaagactcctcgcagcgatctctttact

SEQ ID NO: 355444 - DNA, 33 bp, Homo sapien
agtgacaagactcctctcagcgatctctttact

SEQ ID NO: 355445 - DNA, 33 bp, Homo sapien
tttcaaacgtgcattcaaaaactctacctaatt

SEQ ID NO: 355446 - DNA, 33 bp, Homo sapien
tttcaaacgtgcattccaaaactctacctaatt

SEQ ID NO: 355447 - DNA, 33 bp, Homo sapien
agggtcttcaaaatacaggacctggagcaaggg

SEQ ID NO: 355448 - DNA, 33 bp, Homo sapien
agggtcttcaaaatacgggacctggagcaaggg

SEQ ID NO: 355449 - DNA, 33 bp, Homo sapien
aggagcatgaccatcaatgaaccacaaagcctt

SEQ ID NO: 355450 - DNA, 33 bp, Homo sapien
aggagcatgaccatcagtgaaccacaaagcctt

SEQ ID NO: 355451 - DNA, 33 bp, Homo sapien
gtatctccctacaagactcccccgggctgggag

SEQ ID NO: 355452 - DNA, 33 bp, Homo sapien
gtatctccctacaagattcccccgggctgggag

SEQ ID NO: 355453 - DNA, 33 bp, Homo sapien
ggaaacggcagcttcaaatatgtgcacctggag

SEQ ID NO: 355454 - DNA, 33 bp, Homo sapien
ggaaacggcagcttcagatatgtgcacctggag

SEQ ID NO: 355455 - DNA, 33 bp, Homo sapien
gaataaaaaggttgaccctcccaagaataagag

SEQ ID NO: 355456 - DNA, 33 bp, Homo sapien
gaataaaaaggttgactctcccaagaataagag

SEQ ID NO: 355457 - DNA, 33 bp, Homo sapien
tcagggataggaaacaaatagtcaaagaaaagg

SEQ ID NO: 355458 - DNA, 33 bp, Homo sapien
tcagggataggaaacagatagtcaaagaaaagg

SEQ ID NO: 355459 - DNA, 33 bp, Homo sapien
ttcagacgcaaggagaccaaaatgacttggcaa

SEQ ID NO: 355460 - DNA, 33 bp, Homo sapien
ttcagacgcaaggagatcaaaatgacttggcaa

SEQ ID NO: 355461 - DNA, 33 bp, Homo sapien
agcctcttcctataccaataatggacctggcaa

SEQ ID NO: 355462 - DNA, 33 bp, Homo sapien
agcctcttcctataccgataatggacctggcaa

SEQ ID NO: 355463 - DNA, 33 bp, Homo sapien
caaccatctcatctgaacttaggagacccctgc

SEQ ID NO: 355464 - DNA, 33 bp, Homo sapien
caaccatctcatctgaccttaggagacccctgc

SEQ ID NO: 355465 - DNA, 33 bp, Homo sapien
cacatgttatggaatacagaagagatctgccag

SEQ ID NO: 355466 - DNA, 33 bp, Homo sapien
cacatgttatggaatatagaagagatctgccag

SEQ ID NO: 355467 - DNA, 33 bp, Homo sapien
aacacaggtcatgtacaacatgtgcataaaatg

SEQ ID NO: 355468 - DNA, 33 bp, Homo sapien
aacacaggtcatgtactacatgtgcataaaatg

SEQ ID NO: 355469 - DNA, 33 bp, Homo sapien
attgcttggtaacatacaaatgactagagtttt

SEQ ID NO: 355470 - DNA, 33 bp, Homo sapien
attgcttggtaacatagaaatgactagagtttt

SEQ ID NO: 355471 - DNA, 33 bp, Homo sapien
ttgtccactacacgaaaaactatccaagggggc

SEQ ID NO: 355472 - DNA, 33 bp, Homo sapien
ttgtccactacacgaagaactatccaagggggc

SEQ ID NO: 355473 - DNA, 33 bp, Homo sapien
cagaccgtgatgggaaaaaggccactgctaacc

SEQ ID NO: 355474 - DNA, 33 bp, Homo sapien
cagaccgtgatgggaacaaggccactgctaacc

SEQ ID NO: 355475 - DNA, 33 bp, Homo sapien
cacccatgaggtaaaacgaaaggctatgggtag

SEQ ID NO: 355476 - DNA, 33 bp, Homo sapien
cacccatgaggtaaaatgaaaggctatgggtag

SEQ ID NO: 355477 - DNA, 33 bp, Homo sapien
gttaatttttatgaaacagccatattatgacat

SEQ ID NO: 355478 - DNA, 33 bp, Homo sapien
gttaatttttatgaaagagccatattatgacat

SEQ ID NO: 355479 - DNA, 33 bp, Homo sapien
attcagaaagagtgcaatcgacatggtttatct

SEQ ID NO: 355480 - DNA, 33 bp, Homo sapien
attcagaaagagtgcagtcgacatggtttatct

SEQ ID NO: 355481 - DNA, 33 bp, Homo sapien
gggcccttggattccaaaagcaactcaactcag

SEQ ID NO: 355482 - DNA, 33 bp, Homo sapien
gggcccttggattccacaagcaactcaactcag

SEQ ID NO: 355483 - DNA, 33 bp, Homo sapien
tgctgaaataggagacactagaaatggaccaac

SEQ ID NO: 355484 - DNA, 33 bp, Homo sapien
tgctgaaataggagactctagaaatggaccaac

SEQ ID NO: 355485 - DNA, 33 bp, Homo sapien
aaaaagtgaagatgggaaaagattttgacatcc

SEQ ID NO: 355486 - DNA, 33 bp, Homo sapien
aaaaagtgaagatgggtaaagattttgacatcc

SEQ ID NO: 355487 - DNA, 33 bp, Homo sapien
tctacctctcttgccacgtagcccactgccctg

SEQ ID NO: 355488 - DNA, 33 bp, Homo sapien
tctacctctcttgccaggtagcccactgccctg

SEQ ID NO: 355489 - DNA, 33 bp, Homo sapien
atctttcttcaactgcccttagatttccaggaa

SEQ ID NO: 355490 - DNA, 33 bp, Homo sapien
atctttcttcaactgctcttagatttccaggaa

SEQ ID NO: 355491 - DNA, 33 bp, Homo sapien
atgagacttatagctgaaaccctgttgctgctt

SEQ ID NO: 355492 - DNA, 33 bp, Homo sapien
atgagacttatagctgtaaccctgttgctgctt

SEQ ID NO: 355493 - DNA, 33 bp, Homo sapien
aaagacatctgcctcacaagtcactggtcggat

SEQ ID NO: 355494 - DNA, 33 bp, Homo sapien
aaagacatctgcctcataagtcactggtcggat

SEQ ID NO: 355495 - DNA, 33 bp, Homo sapien
cccctgagtcccgcatcataagccgcatcactg

SEQ ID NO: 355496 - DNA, 33 bp, Homo sapien
cccctgagtcccgcattataagccgcatcactg

SEQ ID NO: 355497 - DNA, 33 bp, Homo sapien
aaggagatgaacagacagagcagggagtgatca

SEQ ID NO: 355498 - DNA, 33 bp, Homo sapien
aaggagatgaacagactgagcagggagtgatca

SEQ ID NO: 355499 - DNA, 33 bp, Homo sapien
aagaataaggttgtgacgaaacttttctttttt

SEQ ID NO: 355500 - DNA, 33 bp, Homo sapien
aagaataaggttgtgatgaaacttttctttttt

SEQ ID NO: 355501 - DNA, 33 bp, Homo sapien
gtaaacaccccagaaacacccaccagtggctca

SEQ ID NO: 355502 - DNA, 33 bp, Homo sapien
gtaaacaccccagaaatacccaccagtggctca

SEQ ID NO: 355503 - DNA, 33 bp, Homo sapien
gtgcgtgaggtgggacaataagacacataaagt

SEQ ID NO: 355504 - DNA, 33 bp, Homo sapien
gtgcgtgaggtgggacgataagacacataaagt

SEQ ID NO: 355505 - DNA, 33 bp, Homo sapien
actcacctaagaattacgttggtcttgtgtggc

SEQ ID NO: 355506 - DNA, 33 bp, Homo sapien
actcacctaagaattatgttggtcttgtgtggc

SEQ ID NO: 355507 - DNA, 33 bp, Homo sapien
ttcaacacgttcaacaaaggaatatcttaaggt

SEQ ID NO: 355508 - DNA, 33 bp, Homo sapien
ttcaacacgttcaacagaggaatatcttaaggt

SEQ ID NO: 355509 - DNA, 33 bp, Homo sapien
cttacactacatttacgagacaccgataatttt

SEQ ID NO: 355510 - DNA, 33 bp, Homo sapien
cttacactacatttactagacaccgataatttt

SEQ ID NO: 355511 - DNA, 33 bp, Homo sapien
tactgagggtctctgaagattcaagataatgaa

SEQ ID NO: 355512 - DNA, 33 bp, Homo sapien
tactgagggtctctgaggattcaagataatgaa

SEQ ID NO: 355513 - DNA, 33 bp, Homo sapien
taatgatcatcaggaaagattatccctgctagg

SEQ ID NO: 355514 - DNA, 33 bp, Homo sapien
taatgatcatcaggaaggattatccctgctagg

SEQ ID NO: 355515 - DNA, 33 bp, Homo sapien
gatgtcacctctttgaagaagctaaagattatc

SEQ ID NO: 355516 - DNA, 33 bp, Homo sapien
gatgtcacctctttgaggaagctaaagattatc

SEQ ID NO: 355517 - DNA, 33 bp, Homo sapien
tataagtcattaataacaaaagttactaggatt

SEQ ID NO: 355518 - DNA, 33 bp, Homo sapien
tataagtcattaataagaaaagttactaggatt

SEQ ID NO: 355519 - DNA, 33 bp, Homo sapien
ctgacaccgagatgtacggtcactgccaaaata

SEQ ID NO: 355520 - DNA, 33 bp, Homo sapien
ctgacaccgagatgtatggtcactgccaaaata

SEQ ID NO: 355521 - DNA, 33 bp, Homo sapien
ggagaaagcatttaccaactctatttgcctgta

SEQ ID NO: 355522 - DNA, 33 bp, Homo sapien
ggagaaagcatttacccactctatttgcctgta

SEQ ID NO: 355523 - DNA, 33 bp, Homo sapien
agggcactatggaaacagatcgccctgctctct

SEQ ID NO: 355524 - DNA, 33 bp, Homo sapien
agggcactatggaaacggatcgccctgctctct

SEQ ID NO: 355525 - DNA, 33 bp, Homo sapien
agcctcagctactcccactttcacaggactggc

SEQ ID NO: 355526 - DNA, 33 bp, Homo sapien
agcctcagctactcccgctttcacaggactggc

SEQ ID NO: 355527 - DNA, 33 bp, Homo sapien
tttcctgtaattttaaccagaaaagtcctgtgg

SEQ ID NO: 355528 - DNA, 33 bp, Homo sapien
tttcctgtaattttaatcagaaaagtcctgtgg

SEQ ID NO: 355529 - DNA, 33 bp, Homo sapien
ccttcctcagaaaataaaaaagagtggctgggc

SEQ ID NO: 355530 - DNA, 33 bp, Homo sapien
ccttcctcagaaaatacaaaagagtggctgggc

SEQ ID NO: 355531 - DNA, 33 bp, Homo sapien
ccctaaataacacacacggtggatgtaaaatca

SEQ ID NO: 355532 - DNA, 33 bp, Homo sapien
ccctaaataacacacatggtggatgtaaaatca

SEQ ID NO: 355533 - DNA, 33 bp, Homo sapien
tgttacttttagcaaactgcttgatctctctaa

SEQ ID NO: 355534 - DNA, 33 bp, Homo sapien
tgttacttttagcaaattgcttgatctctctaa

SEQ ID NO: 355535 - DNA, 33 bp, Homo sapien
gtatgtgttggctatacattgctacacaacaaa

SEQ ID NO: 355536 - DNA, 33 bp, Homo sapien
gtatgtgttggctatatattgctacacaacaaa

SEQ ID NO: 355537 - DNA, 33 bp, Homo sapien
aggttgctgtcatctacaggcttgaatgaagcg

SEQ ID NO: 355538 - DNA, 33 bp, Homo sapien
aggttgctgtcatctataggcttgaatgaagcg

SEQ ID NO: 355539 - DNA, 33 bp, Homo sapien
aactgaggcttcctgccgatagccatgtgaatg

SEQ ID NO: 355540 - DNA, 33 bp, Homo sapien
aactgaggcttcctgctgatagccatgtgaatg

SEQ ID NO: 355541 - DNA, 33 bp, Homo sapien
tcatgacagtcatttcccgtgtgccttcccata

SEQ ID NO: 355542 - DNA, 33 bp, Homo sapien
tcatgacagtcatttcgcgtgtgccttcccata

SEQ ID NO: 355543 - DNA, 33 bp, Homo sapien
aactagaggttaagtcaaataagaaacaaaatc

SEQ ID NO: 355544 - DNA, 33 bp, Homo sapien
aactagaggttaagtcgaataagaaacaaaatc

SEQ ID NO: 355545 - DNA, 33 bp, Homo sapien
cacttaatatgctcaaatgctttcaaagcatgc

SEQ ID NO: 355546 - DNA, 33 bp, Homo sapien
cacttaatatgctcaattgctttcaaagcatgc

SEQ ID NO: 355547 - DNA, 33 bp, Homo sapien
caagacttctcatataacttcaatatctatcca

SEQ ID NO: 355548 - DNA, 33 bp, Homo sapien
caagacttctcatatagcttcaatatctatcca

SEQ ID NO: 355549 - DNA, 33 bp, Homo sapien
tgccactgcattaagagatatgtttttcccagt

SEQ ID NO: 355550 - DNA, 33 bp, Homo sapien
tgccactgcattaagatatatgtttttcccagt

SEQ ID NO: 355551 - DNA, 33 bp, Homo sapien
caagatcagggtgttacaacttttgatattttc

SEQ ID NO: 355552 - DNA, 33 bp, Homo sapien
caagatcagggtgttagaacttttgatattttc

SEQ ID NO: 355553 - DNA, 33 bp, Homo sapien
attaatggagcaacaactggtatgagccttgaa

SEQ ID NO: 355554 - DNA, 33 bp, Homo sapien
attaatggagcaacaattggtatgagccttgaa

SEQ ID NO: 355555 - DNA, 33 bp, Homo sapien
agtcaaacgaggctgaatcaacaactctgatat

SEQ ID NO: 355556 - DNA, 33 bp, Homo sapien
agtcaaacgaggctgattcaacaactctgatat

SEQ ID NO: 355557 - DNA, 33 bp, Homo sapien
aaccactacactcctcaagggaaggctcccctg

SEQ ID NO: 355558 - DNA, 33 bp, Homo sapien
aaccactacactcctccagggaaggctcccctg

SEQ ID NO: 355559 - DNA, 33 bp, Homo sapien
tttgctgttattatggaaagtttcaaatgtata

SEQ ID NO: 355560 - DNA, 33 bp, Homo sapien
tttgctgttattatgggaagtttcaaatgtata

SEQ ID NO: 355561 - DNA, 33 bp, Homo sapien
aggaagcacaaggccacgtggacgcatacagca

SEQ ID NO: 355562 - DNA, 33 bp, Homo sapien
aggaagcacaaggccatgtggacgcatacagca

SEQ ID NO: 355563 - DNA, 33 bp, Homo sapien
tagctcagaaactccaagaaggccctcagggga

SEQ ID NO: 355564 - DNA, 33 bp, Homo sapien
tagctcagaaactccacgaaggccctcagggga

SEQ ID NO: 355565 - DNA, 33 bp, Homo sapien
gatgttcacataaagaccttactgagctggatt

SEQ ID NO: 355566 - DNA, 33 bp, Homo sapien
gatgttcacataaagagcttactgagctggatt

SEQ ID NO: 355567 - DNA, 33 bp, Homo sapien
attcagagcccaataaaaagagtgaccagctgc

SEQ ID NO: 355568 - DNA, 33 bp, Homo sapien
attcagagcccaataagaagagtgaccagctgc

SEQ ID NO: 355569 - DNA, 33 bp, Homo sapien
tttattgcacttttaccatatgccagcagtgtt

SEQ ID NO: 355570 - DNA, 33 bp, Homo sapien
tttattgcacttttactatatgccagcagtgtt

SEQ ID NO: 355571 - DNA, 33 bp, Homo sapien
tcgcatatttcaagaccgtattcttaagtgcat

SEQ ID NO: 355572 - DNA, 33 bp, Homo sapien
tcgcatatttcaagactgtattcttaagtgcat

SEQ ID NO: 355573 - DNA, 33 bp, Homo sapien
aaagttccatgtgatcaaatatctgagtgataa

SEQ ID NO: 355574 - DNA, 33 bp, Homo sapien
aaagttccatgtgatccaatatctgagtgataa

SEQ ID NO: 355575 - DNA, 33 bp, Homo sapien
cttggtgatattgacaaaaaggggaagaggggc

SEQ ID NO: 355576 - DNA, 33 bp, Homo sapien
cttggtgatattgacagaaaggggaagaggggc

SEQ ID NO: 355577 - DNA, 33 bp, Homo sapien
tcacaaaagggctaacagaggtggagaaggaag

SEQ ID NO: 355578 - DNA, 33 bp, Homo sapien
tcacaaaagggctaacggaggtggagaaggaag

SEQ ID NO: 355579 - DNA, 33 bp, Homo sapien
gtctgagaaaaaccaagaagttcttttgtggaa

SEQ ID NO: 355580 - DNA, 33 bp, Homo sapien
gtctgagaaaaaccaataagttcttttgtggaa

SEQ ID NO: 355581 - DNA, 33 bp, Homo sapien
aatgatttgtaaatgcaaaacaggtcaagtcct

SEQ ID NO: 355582 - DNA, 33 bp, Homo sapien
aatgatttgtaaatgcgaaacaggtcaagtcct

SEQ ID NO: 355583 - DNA, 33 bp, Homo sapien
gtagcctcctatttcaagagaggaaagtagtcc

SEQ ID NO: 355584 - DNA, 33 bp, Homo sapien
gtagcctcctatttcatgagaggaaagtagtcc

SEQ ID NO: 355585 - DNA, 33 bp, Homo sapien
tggctgttggggaagggacaatcaaggctctaa

SEQ ID NO: 355586 - DNA, 33 bp, Homo sapien
tggctgttggggaaggtacaatcaaggctctaa

SEQ ID NO: 355587 - DNA, 33 bp, Homo sapien
tgtgagctaccatggcaatgtcctctatgacaa

SEQ ID NO: 355588 - DNA, 33 bp, Homo sapien
tgtgagctaccatggcgatgtcctctatgacaa

SEQ ID NO: 355589 - DNA, 33 bp, Homo sapien
aacccagaagtgttaaaaagtggttctgttaca

SEQ ID NO: 355590 - DNA, 33 bp, Homo sapien
aacccagaagtgttaagaagtggttctgttaca

SEQ ID NO: 355591 - DNA, 33 bp, Homo sapien
ctcagctctggctgcccgcacaatgtgtacctc

SEQ ID NO: 355592 - DNA, 33 bp, Homo sapien
ctcagctctggctgcctgcacaatgtgtacctc

SEQ ID NO: 355593 - DNA, 33 bp, Homo sapien
ttctgttgacttcacccagctggtctttattga

SEQ ID NO: 355594 - DNA, 33 bp, Homo sapien
ttctgttgacttcacctagctggtctttattga

SEQ ID NO: 355595 - DNA, 33 bp, Homo sapien
agatcagatgaataataaatgtgaagcccaaca

SEQ ID NO: 355596 - DNA, 33 bp, Homo sapien
agatcagatgaataatgaatgtgaagcccaaca

SEQ ID NO: 355597 - DNA, 33 bp, Homo sapien
cctctttaacttcaggacatgtttattctgaac

SEQ ID NO: 355598 - DNA, 33 bp, Homo sapien
cctctttaacttcagggcatgtttattctgaac

SEQ ID NO: 355599 - DNA, 33 bp, Homo sapien
agggcattggcagttacgcagtggccctgaacc

SEQ ID NO: 355600 - DNA, 33 bp, Homo sapien
agggcattggcagttatgcagtggccctgaacc

SEQ ID NO: 355601 - DNA, 33 bp, Homo sapien
gatgaggaaaaaacagcctcaagagtgaagtcc

SEQ ID NO: 355602 - DNA, 33 bp, Homo sapien
gatgaggaaaaaacaggctcaagagtgaagtcc

SEQ ID NO: 355603 - DNA, 33 bp, Homo sapien
gggatgtgttctgactaagacccgaggaggtga

SEQ ID NO: 355604 - DNA, 33 bp, Homo sapien
gggatgtgttctgactgagacccgaggaggtga

SEQ ID NO: 355605 - DNA, 33 bp, Homo sapien
cagcccttttatgagaccccacaaggccaggtg

SEQ ID NO: 355606 - DNA, 33 bp, Homo sapien
cagcccttttatgagatcccacaaggccaggtg

SEQ ID NO: 355607 - DNA, 33 bp, Homo sapien
tgaaaagaagagattgcactaggaccctcctca

SEQ ID NO: 355608 - DNA, 33 bp, Homo sapien
tgaaaagaagagattggactaggaccctcctca

SEQ ID NO: 355609 - DNA, 33 bp, Homo sapien
aggtcaggcatttgtacggcagagaatccacgc

SEQ ID NO: 355610 - DNA, 33 bp, Homo sapien
aggtcaggcatttgtatggcagagaatccacgc

SEQ ID NO: 355611 - DNA, 33 bp, Homo sapien
ccatctgccagtcacccagactttagctcctgc

SEQ ID NO: 355612 - DNA, 33 bp, Homo sapien
ccatctgccagtcaccgagactttagctcctgc

SEQ ID NO: 355613 - DNA, 33 bp, Homo sapien
ttccatttctcaagcacgtggtttctgtagacc

SEQ ID NO: 355614 - DNA, 33 bp, Homo sapien
ttccatttctcaagcatgtggtttctgtagacc

SEQ ID NO: 355615 - DNA, 33 bp, Homo sapien
attgcaaacgtttccccgcaatgtgccaattgt

SEQ ID NO: 355616 - DNA, 33 bp, Homo sapien
attgcaaacgtttccctgcaatgtgccaattgt

SEQ ID NO: 355617 - DNA, 33 bp, Homo sapien
tttatgaccttgggaaaaggaagaatgtcttta

SEQ ID NO: 355618 - DNA, 33 bp, Homo sapien
tttatgaccttgggaataggaagaatgtcttta

SEQ ID NO: 355619 - DNA, 33 bp, Homo sapien
actatcaaaacaaatcactgcttaacattccca

SEQ ID NO: 355620 - DNA, 33 bp, Homo sapien
actatcaaaacaaatcgctgcttaacattccca

SEQ ID NO: 355621 - DNA, 33 bp, Homo sapien
atttctgttgtagttcaagttacctttatcggc

SEQ ID NO: 355622 - DNA, 33 bp, Homo sapien
atttctgttgtagttcgagttacctttatcggc

SEQ ID NO: 355623 - DNA, 33 bp, Homo sapien
gaatgtgggtaggtaccaagaggtctgctacag

SEQ ID NO: 355624 - DNA, 33 bp, Homo sapien
gaatgtgggtaggtactaagaggtctgctacag

SEQ ID NO: 355625 - DNA, 33 bp, Homo sapien
gattctttgcttaagaacagtggacacatctcc

SEQ ID NO: 355626 - DNA, 33 bp, Homo sapien
gattctttgcttaagatcagtggacacatctcc

SEQ ID NO: 355627 - DNA, 33 bp, Homo sapien
acacacacagaaaggacaggctatgtaaagatg

SEQ ID NO: 355628 - DNA, 33 bp, Homo sapien
acacacacagaaaggataggctatgtaaagatg

SEQ ID NO: 355629 - DNA, 33 bp, Homo sapien
accctcccaacaaatccatcgggaaggagtcat

SEQ ID NO: 355630 - DNA, 33 bp, Homo sapien
accctcccaacaaatctatcgggaaggagtcat

SEQ ID NO: 355631 - DNA, 33 bp, Homo sapien
caagggctctcaaaacagtaactgctgtaaatc

SEQ ID NO: 355632 - DNA, 33 bp, Homo sapien
caagggctctcaaaacggtaactgctgtaaatc

SEQ ID NO: 355633 - DNA, 33 bp, Homo sapien
catacaatggcattcaaacactttctactcaac

SEQ ID NO: 355634 - DNA, 33 bp, Homo sapien
catacaatggcattcatacactttctactcaac

SEQ ID NO: 355635 - DNA, 33 bp, Homo sapien
gtgccattgggagaaacaatactttagtgagaa

SEQ ID NO: 355636 - DNA, 33 bp, Homo sapien
gtgccattgggagaaagaatactttagtgagaa

SEQ ID NO: 355637 - DNA, 33 bp, Homo sapien
ctgctgtgatcgaggacggcaaactggatcata

SEQ ID NO: 355638 - DNA, 33 bp, Homo sapien
ctgctgtgatcgaggagggcaaactggatcata

SEQ ID NO: 355639 - DNA, 33 bp, Homo sapien
agggcccaccaccaaagatcgtgaggactgtag

SEQ ID NO: 355640 - DNA, 33 bp, Homo sapien
agggcccaccaccaaatatcgtgaggactgtag

SEQ ID NO: 355641 - DNA, 33 bp, Homo sapien
ttaaatgatgctgtaaatgaatggtcatttgtt

SEQ ID NO: 355642 - DNA, 33 bp, Homo sapien
ttaaatgatgctgtaagtgaatggtcatttgtt

SEQ ID NO: 355643 - DNA, 33 bp, Homo sapien
acgtctgtttagaataagtgggaagttaacagc

SEQ ID NO: 355644 - DNA, 33 bp, Homo sapien
acgtctgtttagaatatgtgggaagttaacagc

SEQ ID NO: 355645 - DNA, 33 bp, Homo sapien
taggtttagatacacaaagggaagtatttgtgt

SEQ ID NO: 355646 - DNA, 33 bp, Homo sapien
taggtttagatacacagagggaagtatttgtgt

SEQ ID NO: 355647 - DNA, 33 bp, Homo sapien
aaatgaccatcatctaaaatccgaatcctcatt

SEQ ID NO: 355648 - DNA, 33 bp, Homo sapien
aaatgaccatcatctacaatccgaatcctcatt

SEQ ID NO: 355649 - DNA, 33 bp, Homo sapien
cctcactttcccctaccaaatctccacataatg

SEQ ID NO: 355650 - DNA, 33 bp, Homo sapien
cctcactttcccctacgaaatctccacataatg

SEQ ID NO: 355651 - DNA, 33 bp, Homo sapien
tccccttttggtttaaaaagtgcttgcatcaca

SEQ ID NO: 355652 - DNA, 33 bp, Homo sapien
tccccttttggtttaagaagtgcttgcatcaca

SEQ ID NO: 355653 - DNA, 33 bp, Homo sapien
gctttacagcagatgacgataaggaaggtttgt

SEQ ID NO: 355654 - DNA, 33 bp, Homo sapien
gctttacagcagatgatgataaggaaggtttgt

SEQ ID NO: 355655 - DNA, 33 bp, Homo sapien
tattttaggagagaaactagacctaggaagctg

SEQ ID NO: 355656 - DNA, 33 bp, Homo sapien
tattttaggagagaaattagacctaggaagctg

SEQ ID NO: 355657 - DNA, 33 bp, Homo sapien
gagctctctaggtgaacatcttttccctgacat

SEQ ID NO: 355658 - DNA, 33 bp, Homo sapien
gagctctctaggtgaatatcttttccctgacat

SEQ ID NO: 355659 - DNA, 33 bp, Homo sapien
gtttcaattcaagtccaaagggaagaaaaagca

SEQ ID NO: 355660 - DNA, 33 bp, Homo sapien
gtttcaattcaagtcctaagggaagaaaaagca

SEQ ID NO: 355661 - DNA, 33 bp, Homo sapien
agagaaggaggctgcacgtggtttgtgagatat

SEQ ID NO: 355662 - DNA, 33 bp, Homo sapien
agagaaggaggctgcatgtggtttgtgagatat

SEQ ID NO: 355663 - DNA, 33 bp, Homo sapien
gtcctgttttattccacgctttggtgcccactg

SEQ ID NO: 355664 - DNA, 33 bp, Homo sapien
gtcctgttttattccatgctttggtgcccactg

SEQ ID NO: 355665 - DNA, 33 bp, Homo sapien
cctgaggttaccctggaaatgagtcagagcagt

SEQ ID NO: 355666 - DNA, 33 bp, Homo sapien
cctgaggttaccctgggaatgagtcagagcagt

SEQ ID NO: 355667 - DNA, 33 bp, Homo sapien
gttcactcctgggcacaccttaaatgaggtttc

SEQ ID NO: 355668 - DNA, 33 bp, Homo sapien
gttcactcctgggcacgccttaaatgaggtttc

SEQ ID NO: 355669 - DNA, 33 bp, Homo sapien
actttctctttatcaggattatcataagtcttt

SEQ ID NO: 355670 - DNA, 33 bp, Homo sapien
actttctctttatcagtattatcataagtcttt

SEQ ID NO: 355671 - DNA, 33 bp, Homo sapien
ttctcatatggcccatcacttaagaatgatttt

SEQ ID NO: 355672 - DNA, 33 bp, Homo sapien
ttctcatatggcccatgacttaagaatgatttt

SEQ ID NO: 355673 - DNA, 33 bp, Homo sapien
ttcctacttggcctcccactggcgcagcaacag

SEQ ID NO: 355674 - DNA, 33 bp, Homo sapien
ttcctacttggcctcctactggcgcagcaacag

SEQ ID NO: 355675 - DNA, 33 bp, Homo sapien
ggggtagctccactaacgtccccagctgtggag

SEQ ID NO: 355676 - DNA, 33 bp, Homo sapien
ggggtagctccactaatgtccccagctgtggag

SEQ ID NO: 355677 - DNA, 33 bp, Homo sapien
ggccagaggatctctcaaggttagcttcgtgga

SEQ ID NO: 355678 - DNA, 33 bp, Homo sapien
ggccagaggatctctcgaggttagcttcgtgga

SEQ ID NO: 355679 - DNA, 33 bp, Homo sapien
tgcacacttgtaaagacgagtgatgttatcgtt

SEQ ID NO: 355680 - DNA, 33 bp, Homo sapien
tgcacacttgtaaagatgagtgatgttatcgtt

SEQ ID NO: 355681 - DNA, 33 bp, Homo sapien
cattctactcctacaacagtcatcagcctgata

SEQ ID NO: 355682 - DNA, 33 bp, Homo sapien
cattctactcctacaatagtcatcagcctgata

SEQ ID NO: 355683 - DNA, 33 bp, Homo sapien
actacaatatgaatggaactcctcaagctgttc

SEQ ID NO: 355684 - DNA, 33 bp, Homo sapien
actacaatatgaatggcactcctcaagctgttc

SEQ ID NO: 355685 - DNA, 33 bp, Homo sapien
gaaaagatcttgtccaccttttgcctaggtcac

SEQ ID NO: 355686 - DNA, 33 bp, Homo sapien
gaaaagatcttgtccagcttttgcctaggtcac

SEQ ID NO: 355687 - DNA, 33 bp, Homo sapien
taatgacgctaatggacaaaagagaacaggcag

SEQ ID NO: 355688 - DNA, 33 bp, Homo sapien
taatgacgctaatggataaaagagaacaggcag

SEQ ID NO: 355689 - DNA, 33 bp, Homo sapien
gccaatgacttaccaactcaagtaccacaaaga

SEQ ID NO: 355690 - DNA, 33 bp, Homo sapien
gccaatgacttaccaattcaagtaccacaaaga

SEQ ID NO: 355691 - DNA, 33 bp, Homo sapien
agggccatgaaggaaccacaaaggtcccatgcc

SEQ ID NO: 355692 - DNA, 33 bp, Homo sapien
agggccatgaaggaacgacaaaggtcccatgcc

SEQ ID NO: 355693 - DNA, 33 bp, Homo sapien
agaagtggtgcagaaacggagaggttggcaagg

SEQ ID NO: 355694 - DNA, 33 bp, Homo sapien
agaagtggtgcagaaatggagaggttggcaagg

SEQ ID NO: 355695 - DNA, 33 bp, Homo sapien
gggaaggaaactccgacggatccctatcagggc

SEQ ID NO: 355696 - DNA, 33 bp, Homo sapien
gggaaggaaactccgatggatccctatcagggc

SEQ ID NO: 355697 - DNA, 33 bp, Homo sapien
ttctaaaggagactacactcacggctcagagtt

SEQ ID NO: 355698 - DNA, 33 bp, Homo sapien
ttctaaaggagactacgctcacggctcagagtt

SEQ ID NO: 355699 - DNA, 33 bp, Homo sapien
aaaacgagttctattccatgaggtgataaggga

SEQ ID NO: 355700 - DNA, 33 bp, Homo sapien
aaaacgagttctattctatgaggtgataaggga

SEQ ID NO: 355701 - DNA, 33 bp, Homo sapien
attttgttatacaagcactactttatttattta

SEQ ID NO: 355702 - DNA, 33 bp, Homo sapien
attttgttatacaagccctactttatttattta

SEQ ID NO: 355703 - DNA, 33 bp, Homo sapien
tcaagctcaacatcaaatcttggccccacttcc

SEQ ID NO: 355704 - DNA, 33 bp, Homo sapien
tcaagctcaacatcaagtcttggccccacttcc

SEQ ID NO: 355705 - DNA, 33 bp, Homo sapien
tgagttagcatccaacaaagaggtgttactgat

SEQ ID NO: 355706 - DNA, 33 bp, Homo sapien
tgagttagcatccaactaagaggtgttactgat

SEQ ID NO: 355707 - DNA, 33 bp, Homo sapien
gttcatcactgggtcgccactaggcaggccttc

SEQ ID NO: 355708 - DNA, 33 bp, Homo sapien
gttcatcactgggtcgtcactaggcaggccttc

SEQ ID NO: 355709 - DNA, 33 bp, Homo sapien
gtagaaaaatccttgcaacttaaccctaatgct

SEQ ID NO: 355710 - DNA, 33 bp, Homo sapien
gtagaaaaatccttgcgacttaaccctaatgct

SEQ ID NO: 355711 - DNA, 33 bp, Homo sapien
ggccagcaagtccacaaatgaggaagattgccc

SEQ ID NO: 355712 - DNA, 33 bp, Homo sapien
ggccagcaagtccacagatgaggaagattgccc

SEQ ID NO: 355713 - DNA, 33 bp, Homo sapien
cttgtgaccatgtagggatactttctcttggct

SEQ ID NO: 355714 - DNA, 33 bp, Homo sapien
cttgtgaccatgtaggtatactttctcttggct

SEQ ID NO: 355715 - DNA, 33 bp, Homo sapien
ctcaagaacagctaacagtgtactatagttttt

SEQ ID NO: 355716 - DNA, 33 bp, Homo sapien
ctcaagaacagctaacggtgtactatagttttt

SEQ ID NO: 355717 - DNA, 33 bp, Homo sapien; identical to SEQ ID NO: 355715

SEQ ID NO: 355718 - DNA, 33 bp, Homo sapien; identical to SEQ ID NO: 355716

SEQ ID NO: 355719 - DNA, 33 bp, Homo sapien
tggaagaaccagaagccaagtgtggagacaaca

SEQ ID NO: 355720 - DNA, 33 bp, Homo sapien
tggaagaaccagaagctaagtgtggagacaaca

SEQ ID NO: 355721 - DNA, 33 bp, Homo sapien
atgtatgtacattgcaagcatgaataaactctt

SEQ ID NO: 355722 - DNA, 33 bp, Homo sapien
atgtatgtacattgcaggcatgaataaactctt

SEQ ID NO: 355723 - DNA, 33 bp, Homo sapien
ataataacactttctaagtctgataagaaacat

SEQ ID NO: 355724 - DNA, 33 bp, Homo sapien
ataataacactttctacgtctgataagaaacat

SEQ ID NO: 355725 - DNA, 33 bp, Homo sapien
aattgtcagctagatacctctaaatttgcatac

SEQ ID NO: 355726 - DNA, 33 bp, Homo sapien
aattgtcagctagatagctctaaatttgcatac

SEQ ID NO: 355727 - DNA, 33 bp, Homo sapien
tccaggtaaggaataagatccgcagtaccttct

SEQ ID NO: 355728 - DNA, 33 bp, Homo sapien
tccaggtaaggaataatatccgcagtaccttct

SEQ ID NO: 355729 - DNA, 33 bp, Homo sapien
tcttctgcatagttcaccaaatcttcaaataaa

SEQ ID NO: 355730 - DNA, 33 bp, Homo sapien
tcttctgcatagttcatcaaatcttcaaataaa

SEQ ID NO: 355731 - DNA, 33 bp, Homo sapien
ggtcccttctatgccacgtgtttccagattttg

SEQ ID NO: 355732 - DNA, 33 bp, Homo sapien
ggtcccttctatgccaggtgtttccagattttg

SEQ ID NO: 355733 - DNA, 33 bp, Homo sapien
gcgtttctataaacaaataatgaattgcctgaa

SEQ ID NO: 355734 - DNA, 33 bp, Homo sapien
gcgtttctataaacaagtaatgaattgcctgaa

SEQ ID NO: 355735 - DNA, 33 bp, Homo sapien
ccactgcaccttgcccaaaatggtagttttgtg

SEQ ID NO: 355736 - DNA, 33 bp, Homo sapien
ccactgcaccttgcccgaaatggtagttttgtg

SEQ ID NO: 355737 - DNA, 33 bp, Homo sapien
tttattttctcaatgaagcagacattcactcca

SEQ ID NO: 355738 - DNA, 33 bp, Homo sapien
tttattttctcaatgaggcagacattcactcca

SEQ ID NO: 355739 - DNA, 33 bp, Homo sapien
tgagggaatctggtcaacccatacctgttctca

SEQ ID NO: 355740 - DNA, 33 bp, Homo sapien
tgagggaatctggtcatcccatacctgttctca

SEQ ID NO: 355741 - DNA, 33 bp, Homo sapien
gggacaaaatatagtacgggaagcaaaattcat

SEQ ID NO: 355742 - DNA, 33 bp, Homo sapien
gggacaaaatatagtatgggaagcaaaattcat

SEQ ID NO: 355743 - DNA, 33 bp, Homo sapien
aggagatggaagacacaaaagttaagagatatg

SEQ ID NO: 355744 - DNA, 33 bp, Homo sapien
aggagatggaagacacgaaagttaagagatatg

SEQ ID NO: 355745 - DNA, 33 bp, Homo sapien
gaaattgttgcctatacatatactttcagagtt

SEQ ID NO: 355746 - DNA, 33 bp, Homo sapien
gaaattgttgcctatagatatactttcagagtt

SEQ ID NO: 355747 - DNA, 33 bp, Homo sapien
gattttgtaagagggtcaagactctcatgcaca

SEQ ID NO: 355748 - DNA, 33 bp, Homo sapien
gattttgtaagagggtgaagactctcatgcaca

SEQ ID NO: 355749 - DNA, 33 bp, Homo sapien
atttgagaaatcataaagctgattctaattgca

SEQ ID NO: 355750 - DNA, 33 bp, Homo sapien
atttgagaaatcataaggctgattctaattgca

SEQ ID NO: 355751 - DNA, 33 bp, Homo sapien
gacaggctttgggagcaacaagagaagcagaga

SEQ ID NO: 355752 - DNA, 33 bp, Homo sapien
gacaggctttgggagcgacaagagaagcagaga

SEQ ID NO: 355753 - DNA, 33 bp, Homo sapien
ttcatttaagggtttaccagcttgactgaacaa

SEQ ID NO: 355754 - DNA, 33 bp, Homo sapien
ttcatttaagggtttatcagcttgactgaacaa

SEQ ID NO: 355755 - DNA, 33 bp, Homo sapien
agatataaaaacctaaagacttatctgccctct

SEQ ID NO: 355756 - DNA, 33 bp, Homo sapien
agatataaaaacctaaggacttatctgccctct

SEQ ID NO: 355757 - DNA, 33 bp, Homo sapien
tcatgtgatcattcaccggtttattgaagaatg

SEQ ID NO: 355758 - DNA, 33 bp, Homo sapien
tcatgtgatcattcactggtttattgaagaatg

SEQ ID NO: 355759 - DNA, 33 bp, Homo sapien
attttattttgcatacagagtctttgagtcagg

SEQ ID NO: 355760 - DNA, 33 bp, Homo sapien
attttattttgcatacggagtctttgagtcagg

SEQ ID NO: 355761 - DNA, 33 bp, Homo sapien
aacagcacatggacagaagatattggtatgtca

SEQ ID NO: 355762 - DNA, 33 bp, Homo sapien
aacagcacatggacaggagatattggtatgtca

SEQ ID NO: 355763 - DNA, 33 bp, Homo sapien
tctctgaccctcgatcaaaagtaaccacccttg

SEQ ID NO: 355764 - DNA, 33 bp, Homo sapien
tctctgaccctcgatcgaaagtaaccacccttg

SEQ ID NO: 355765 - DNA, 33 bp, Homo sapien
gaccaagaggaaaccacatccagacccaatgta

SEQ ID NO: 355766 - DNA, 33 bp, Homo sapien
gaccaagaggaaaccatatccagacccaatgta

SEQ ID NO: 355767 - DNA, 33 bp, Homo sapien
cattgatctatggacaacttgaaattccactgg

SEQ ID NO: 355768 - DNA, 33 bp, Homo sapien
cattgatctatggacatcttgaaattccactgg

SEQ ID NO: 355769 - DNA, 33 bp, Homo sapien
ggacaataacattcacaatagcaccattcgtaa

SEQ ID NO: 355770 - DNA, 33 bp, Homo sapien
ggacaataacattcacgatagcaccattcgtaa

SEQ ID NO: 355771 - DNA, 33 bp, Homo sapien
tactaagagacaagcacgattctaagagtttta

SEQ ID NO: 355772 - DNA, 33 bp, Homo sapien
tactaagagacaagcatgattctaagagtttta

SEQ ID NO: 355773 - DNA, 33 bp, Homo sapien
gttgtgacaaggaacaatgggctggctcaagtt

SEQ ID NO: 355774 - DNA, 33 bp, Homo sapien
gttgtgacaaggaacagtgggctggctcaagtt

SEQ ID NO: 355775 - DNA, 33 bp, Homo sapien
aaatgttctagttataaagggtggttacacagt

SEQ ID NO: 355776 - DNA, 33 bp, Homo sapien
aaatgttctagttatagagggtggttacacagt

SEQ ID NO: 355777 - DNA, 33 bp, Homo sapien
tttcctttgttaatgcagactataaatggaatt

SEQ ID NO: 355778 - DNA, 33 bp, Homo sapien
tttcctttgttaatgcggactataaatggaatt

SEQ ID NO: 355779 - DNA, 33 bp, Homo sapien
gtgctgtaaatggtagccagaattccatttata

SEQ ID NO: 355780 - DNA, 33 bp, Homo sapien
gtgctgtaaatggtagtcagaattccatttata

SEQ ID NO: 355781 - DNA, 33 bp, Homo sapien
ccagtggcataagagaaactctgtggaaacagg

SEQ ID NO: 355782 - DNA, 33 bp, Homo sapien
ccagtggcataagagatactctgtggaaacagg

SEQ ID NO: 355783 - DNA, 33 bp, Homo sapien
aagtgcctctagaaaacttccgtaattaaaaag

SEQ ID NO: 355784 - DNA, 33 bp, Homo sapien
aagtgcctctagaaaatttccgtaattaaaaag

SEQ ID NO: 355785 - DNA, 33 bp, Homo sapien
tgggtcagcgtgggtgcatggcatcaaaccaga

SEQ ID NO: 355786 - DNA, 33 bp, Homo sapien
tgggtcagcgtgggtgtatggcatcaaaccaga

SEQ ID NO: 355787 - DNA, 33 bp, Homo sapien
ttaaaaagcatttatgaagtttctcactttaca

SEQ ID NO: 355788 - DNA, 33 bp, Homo sapien
ttaaaaagcatttatggagtttctcactttaca

SEQ ID NO: 355789 - DNA, 33 bp, Homo sapien
ttcatcatgccatgcccctgctttaaaccaagt

SEQ ID NO: 355790 - DNA, 33 bp, Homo sapien
ttcatcatgccatgcctctgctttaaaccaagt

SEQ ID NO: 355791 - DNA, 33 bp, Homo sapien
tgggtgtttgggaagccgaatatgttgctgcca

SEQ ID NO: 355792 - DNA, 33 bp, Homo sapien
tgggtgtttgggaagctgaatatgttgctgcca

SEQ ID NO: 355793 - DNA, 33 bp, Homo sapien
gatatgtttggtctcaccacattggttctagat

SEQ ID NO: 355794 - DNA, 33 bp, Homo sapien
gatatgtttggtctcatcacattggttctagat

SEQ ID NO: 355795 - DNA, 33 bp, Homo sapien
gatgataaaacaaacacgataaggacagacaga

SEQ ID NO: 355796 - DNA, 33 bp, Homo sapien
gatgataaaacaaacatgataaggacagacaga

SEQ ID NO: 355797 - DNA, 33 bp, Homo sapien
cagctaaattagagcacggtaactatttcctct

SEQ ID NO: 355798 - DNA, 33 bp, Homo sapien
cagctaaattagagcatggtaactatttcctct

SEQ ID NO: 355799 - DNA, 33 bp, Homo sapien
cacacacacacacgtaagtctttgagcagatga

SEQ ID NO: 355800 - DNA, 33 bp, Homo sapien
cacacacacacacgtacgtctttgagcagatga

SEQ ID NO: 355801 - DNA, 33 bp, Homo sapien
gacatgcaaattagcgcagtaaaaatggaatat

SEQ ID NO: 355802 - DNA, 33 bp, Homo sapien
gacatgcaaattagcgtagtaaaaatggaatat

SEQ ID NO: 355803 - DNA, 33 bp, Homo sapien
ttagttgtaacttggaacatcttcttttcctgg

SEQ ID NO: 355804 - DNA, 33 bp, Homo sapien
ttagttgtaacttggatcatcttcttttcctgg

SEQ ID NO: 355805 - DNA, 33 bp, Homo sapien
actttattcacatctccaaacaactctacgaag

SEQ ID NO: 355806 - DNA, 33 bp, Homo sapien
actttattcacatctctaaacaactctacgaag

SEQ ID NO: 355807 - DNA, 33 bp, Homo sapien
tggcatgagaagagtacggatttacaatggaaa

SEQ ID NO: 355808 - DNA, 33 bp, Homo sapien
tggcatgagaagagtatggatttacaatggaaa

SEQ ID NO: 355809 - DNA, 33 bp, Homo sapien
ttctaaggcccaacctcaaactctgtagggagc

SEQ ID NO: 355810 - DNA, 33 bp, Homo sapien
ttctaaggcccaacctgaaactctgtagggagc

SEQ ID NO: 355811 - DNA, 33 bp, Homo sapien
caatgtatgatatgcaaacaaaacaaggtgagt

SEQ ID NO: 355812 - DNA, 33 bp, Homo sapien
caatgtatgatatgcagacaaaacaaggtgagt

SEQ ID NO: 355813 - DNA, 33 bp, Homo sapien
ggcggatcacaaagaccggtccagtgaactagt

SEQ ID NO: 355814 - DNA, 33 bp, Homo sapien
ggcggatcacaaagactggtccagtgaactagt

SEQ ID NO: 355815 - DNA, 33 bp, Homo sapien
ccttcatggagcttaaagaaaatggggagagaa

SEQ ID NO: 355816 - DNA, 33 bp, Homo sapien
ccttcatggagcttaaggaaaatggggagagaa

SEQ ID NO: 355817 - DNA, 33 bp, Homo sapien
gccttataccattgaaaaggcaaggaaatcgaa

SEQ ID NO: 355818 - DNA, 33 bp, Homo sapien
gccttataccattgaagaggcaaggaaatcgaa

SEQ ID NO: 355819 - DNA, 33 bp, Homo sapien
gcattcctacaaagcacagttagcttgattcaa

SEQ ID NO: 355820 - DNA, 33 bp, Homo sapien
gcattcctacaaagcatagttagcttgattcaa

SEQ ID NO: 355821 - DNA, 33 bp, Homo sapien
agataaagggacagaactggtaactttgaatga

SEQ ID NO: 355822 - DNA, 33 bp, Homo sapien
agataaagggacagaattggtaactttgaatga

SEQ ID NO: 355823 - DNA, 33 bp, Homo sapien
tttgtttattgaaccaggctctgtccctctgta

SEQ ID NO: 355824 - DNA, 33 bp, Homo sapien
tttgtttattgaaccatgctctgtccctctgta

SEQ ID NO: 355825 - DNA, 33 bp, Homo sapien
acctatgaaaagactacatggaagagatttcag

SEQ ID NO: 355826 - DNA, 33 bp, Homo sapien
acctatgaaaagactatatggaagagatttcag

SEQ ID NO: 355827 - DNA, 33 bp, Homo sapien
tagtgtatgctcattacccaagaaacttccttc

SEQ ID NO: 355828 - DNA, 33 bp, Homo sapien
tagtgtatgctcattatccaagaaacttccttc

SEQ ID NO: 355829 - DNA, 33 bp, Homo sapien
agttggaccacctcgcaccataaagagcagtga

SEQ ID NO: 355830 - DNA, 33 bp, Homo sapien
agttggaccacctcgcgccataaagagcagtga

SEQ ID NO: 355831 - DNA, 33 bp, Homo sapien
tgggaggctgccgtgcaacagaactctaagcct

SEQ ID NO: 355832 - DNA, 33 bp, Homo sapien
tgggaggctgccgtgcgacagaactctaagcct

SEQ ID NO: 355833 - DNA, 33 bp, Homo sapien
tggaacaattaaaaacaatacagaagactaata

SEQ ID NO: 355834 - DNA, 33 bp, Homo sapien
tggaacaattaaaaaccatacagaagactaata

SEQ ID NO: 355835 - DNA, 33 bp, Homo sapien
gggaacaaggatccaactgctgcccctgctaga

SEQ ID NO: 355836 - DNA, 33 bp, Homo sapien
gggaacaaggatccaattgctgcccctgctaga

SEQ ID NO: 355837 - DNA, 33 bp, Homo sapien
ggaaggaccttagaacaggccagtctatcaggt

SEQ ID NO: 355838 - DNA, 33 bp, Homo sapien
ggaaggaccttagaaccggccagtctatcaggt

SEQ ID NO: 355839 - DNA, 33 bp, Homo sapien
agaagagctgtctccaaaaatacccactgggga

SEQ ID NO: 355840 - DNA, 33 bp, Homo sapien
agaagagctgtctccagaaatacccactgggga

SEQ ID NO: 355841 - DNA, 33 bp, Homo sapien
gaatgttctttgtgacagagtctatcacccagc

SEQ ID NO: 355842 - DNA, 33 bp, Homo sapien
gaatgttctttgtgacggagtctatcacccagc

SEQ ID NO: 355843 - DNA, 33 bp, Homo sapien
accagaggtaagagaacggcagaggaatgaata

SEQ ID NO: 355844 - DNA, 33 bp, Homo sapien
accagaggtaagagaatggcagaggaatgaata

SEQ ID NO: 355845 - DNA, 33 bp, Homo sapien
agatcatctatggagaataaaggaggagataga

SEQ ID NO: 355846 - DNA, 33 bp, Homo sapien
agatcatctatggagagtaaaggaggagataga

SEQ ID NO: 355847 - DNA, 33 bp, Homo sapien
acatgacttgtggcaaaactttccaatgaaaac

SEQ ID NO: 355848 - DNA, 33 bp, Homo sapien
acatgacttgtggcaacactttccaatgaaaac

SEQ ID NO: 355849 - DNA, 33 bp, Homo sapien
tttgggtctagggctgcacatactagcaggtcc

SEQ ID NO: 355850 - DNA, 33 bp, Homo sapien
tttgggtctagggctgtacatactagcaggtcc

SEQ ID NO: 355851 - DNA, 33 bp, Homo sapien
gaccgcagaaactgttcaaaagagatgagccag

SEQ ID NO: 355852 - DNA, 33 bp, Homo sapien
gaccgcagaaactgttgaaaagagatgagccag

SEQ ID NO: 355853 - DNA, 33 bp, Homo sapien
gctcatcggcggtcccgagcgcgagttcggaca

SEQ ID NO: 355854 - DNA, 33 bp, Homo sapien
gctcatcggcggtccctagcgcgagttcggaca

SEQ ID NO: 355855 - DNA, 33 bp, Homo sapien
ttccattgctttatcactccaaaacccttaagt

SEQ ID NO: 355856 - DNA, 33 bp, Homo sapien
ttccattgctttatcagtccaaaacccttaagt

SEQ ID NO: 355857 - DNA, 33 bp, Homo sapien
atgtatccattacccacatttaagaaataatat

SEQ ID NO: 355858 - DNA, 33 bp, Homo sapien
atgtatccattacccagatttaagaaataatat

SEQ ID NO: 355859 - DNA, 33 bp, Homo sapien
attttactgtcctgcacattaacctgagtcaga

SEQ ID NO: 355860 - DNA, 33 bp, Homo sapien
attttactgtcctgcatattaacctgagtcaga

SEQ ID NO: 355861 - DNA, 33 bp, Homo sapien
taacctccaagttaaccgaaaatgttgattgca

SEQ ID NO: 355862 - DNA, 33 bp, Homo sapien
taacctccaagttaactgaaaatgttgattgca

SEQ ID NO: 355863 - DNA, 33 bp, Homo sapien
tagttttggctttaccagctttttcattaagaa

SEQ ID NO: 355864 - DNA, 33 bp, Homo sapien
tagttttggctttacccgctttttcattaagaa

SEQ ID NO: 355865 - DNA, 33 bp, Homo sapien
gtcccacaacaaagaactatctagcgcaacatg

SEQ ID NO: 355866 - DNA, 33 bp, Homo sapien
gtcccacaacaaagaattatctagcgcaacatg

SEQ ID NO: 355867 - DNA, 33 bp, Homo sapien
tacttatgggacaaaacgacaagagaagaagcc

SEQ ID NO: 355868 - DNA, 33 bp, Homo sapien
tacttatgggacaaaatgacaagagaagaagcc

SEQ ID NO: 355869 - DNA, 33 bp, Homo sapien
ttctgtggttgaagtacgggacaggtacaggta

SEQ ID NO: 355870 - DNA, 33 bp, Homo sapien
ttctgtggttgaagtaggggacaggtacaggta

SEQ ID NO: 355871 - DNA, 33 bp, Homo sapien
gtgatatgatgtttcaaaaatgaaggcagcaga

SEQ ID NO: 355872 - DNA, 33 bp, Homo sapien
gtgatatgatgtttcagaaatgaaggcagcaga

SEQ ID NO: 355873 - DNA, 33 bp, Homo sapien
tgtgacctaagggaccagaaacagagggcagac

SEQ ID NO: 355874 - DNA, 33 bp, Homo sapien
tgtgacctaagggaccggaaacagagggcagac

SEQ ID NO: 355875 - DNA, 33 bp, Homo sapien
gagatagaacagatgggagtactaaaggacagt

SEQ ID NO: 355876 - DNA, 33 bp, Homo sapien
gagatagaacagatggtagtactaaaggacagt

SEQ ID NO: 355877 - DNA, 33 bp, Homo sapien
ctggctccctgcataacaacaaatcggaaaaac

SEQ ID NO: 355878 - DNA, 33 bp, Homo sapien
ctggctccctgcataataacaaatcggaaaaac

SEQ ID NO: 355879 - DNA, 33 bp, Homo sapien
aagacagcagtgtcacaatggtaagggcagttg

SEQ ID NO: 355880 - DNA, 33 bp, Homo sapien
aagacagcagtgtcacgatggtaagggcagttg

SEQ ID NO: 355881 - DNA, 33 bp, Homo sapien
tgagtgccttgctagtctcaccctgggctcaac

SEQ ID NO: 355882 - DNA, 33 bp, Homo sapien
tgagtgccttgctagtgtcaccctgggctcaac

SEQ ID NO: 355883 - DNA, 33 bp, Homo sapien
tgcacatgtatacttactgacctgctgccattc

SEQ ID NO: 355884 - DNA, 33 bp, Homo sapien
tgcacatgtatacttattgacctgctgccattc

SEQ ID NO: 355885 - DNA, 33 bp, Homo sapien
ataaatgaccacaggaagcaagactggcccaat

SEQ ID NO: 355886 - DNA, 33 bp, Homo sapien
ataaatgaccacaggaggcaagactggcccaat

SEQ ID NO: 355887 - DNA, 33 bp, Homo sapien
aattttcagcatacaaaggtcacttcataagac

SEQ ID NO: 355888 - DNA, 33 bp, Homo sapien
aattttcagcatacaagggtcacttcataagac

SEQ ID NO: 355889 - DNA, 33 bp, Homo sapien
ccatggagacattaaacttccactccacaacaa

SEQ ID NO: 355890 - DNA, 33 bp, Homo sapien
ccatggagacattaaatttccactccacaacaa

SEQ ID NO: 355891 - DNA, 33 bp, Homo sapien
tacagcctgggctatcaaggtgtttgctaggcc

SEQ ID NO: 355892 - DNA, 33 bp, Homo sapien
tacagcctgggctatcgaggtgtttgctaggcc

SEQ ID NO: 355893 - DNA, 33 bp, Homo sapien
gccaaatctttgaggccatggtggtaacaggaa

SEQ ID NO: 355894 - DNA, 33 bp, Homo sapien
gccaaatctttgaggctatggtggtaacaggaa

SEQ ID NO: 355895 - DNA, 33 bp, Homo sapien
actgtttctcaggaaccactatcaaggacagac

SEQ ID NO: 355896 - DNA, 33 bp, Homo sapien
actgtttctcaggaactactatcaaggacagac

SEQ ID NO: 355897 - DNA, 33 bp, Homo sapien
ctcttcaccccatttacactcaacccatgtttt

SEQ ID NO: 355898 - DNA, 33 bp, Homo sapien
ctcttcaccccatttatactcaacccatgtttt

SEQ ID NO: 355899 - DNA, 33 bp, Homo sapien
aggcttctggtgctgggagccaatagaatccta

SEQ ID NO: 355900 - DNA, 33 bp, Homo sapien
aggcttctggtgctggtagccaatagaatccta

SEQ ID NO: 355901 - DNA, 33 bp, Homo sapien
gatctgggtggagaacaagctctgtccactgca

SEQ ID NO: 355902 - DNA, 33 bp, Homo sapien
gatctgggtggagaaccagctctgtccactgca

SEQ ID NO: 355903 - DNA, 33 bp, Homo sapien
gcatctgaactgaatcaaaatcaggcttttaat

SEQ ID NO: 355904 - DNA, 33 bp, Homo sapien
gcatctgaactgaatcgaaatcaggcttttaat

SEQ ID NO: 355905 - DNA, 33 bp, Homo sapien
tgggagttcgtggaccagagaaaaggaagcccc

SEQ ID NO: 355906 - DNA, 33 bp, Homo sapien
tgggagttcgtggaccggagaaaaggaagcccc

SEQ ID NO: 355907 - DNA, 33 bp, Homo sapien
gctctggtcaaatcccagctctttgtgtattgc

SEQ ID NO: 355908 - DNA, 33 bp, Homo sapien
gctctggtcaaatcccggctctttgtgtattgc

SEQ ID NO: 355909 - DNA, 33 bp, Homo sapien
atagtccctcctatgcaaggtttgtagctcctg

SEQ ID NO: 355910 - DNA, 33 bp, Homo sapien
atagtccctcctatgcgaggtttgtagctcctg

SEQ ID NO: 355911 - DNA, 33 bp, Homo sapien
agacacggtgaagaaggagatgctaggccaatg

SEQ ID NO: 355912 - DNA, 33 bp, Homo sapien
agacacggtgaagaagtagatgctaggccaatg

SEQ ID NO: 355913 - DNA, 33 bp, Homo sapien
acactggagggattcactatgtgcaccgtggag

SEQ ID NO: 355914 - DNA, 33 bp, Homo sapien
acactggagggattcattatgtgcaccgtggag

SEQ ID NO: 355915 - DNA, 33 bp, Homo sapien
ggtcctgcagcacttaaaaacagggctgactca

SEQ ID NO: 355916 - DNA, 33 bp, Homo sapien
ggtcctgcagcacttacaaacagggctgactca

SEQ ID NO: 355917 - DNA, 33 bp, Homo sapien
cttcagatctcgctctcacctacagggccaaac

SEQ ID NO: 355918 - DNA, 33 bp, Homo sapien
cttcagatctcgctcttacctacagggccaaac

SEQ ID NO: 355919 - DNA, 33 bp, Homo sapien
gaaagtagtgggtatgcaagcaattccaggtct

SEQ ID NO: 355920 - DNA, 33 bp, Homo sapien
gaaagtagtgggtatggaagcaattccaggtct

SEQ ID NO: 355921 - DNA, 33 bp, Homo sapien
ctacctgcttgttctccctggcatggccaggga

SEQ ID NO: 355922 - DNA, 33 bp, Homo sapien
ctacctgcttgttctctctggcatggccaggga

SEQ ID NO: 355923 - DNA, 33 bp, Homo sapien
cctggatctttggtgaggtcaccgagccctgat

SEQ ID NO: 355924 - DNA, 33 bp, Homo sapien
cctggatctttggtgatgtcaccgagccctgat

SEQ ID NO: 355925 - DNA, 33 bp, Homo sapien
cacacaggtgactgaacgcaatgcggtgccctg

SEQ ID NO: 355926 - DNA, 33 bp, Homo sapien
cacacaggtgactgaatgcaatgcggtgccctg

SEQ ID NO: 355927 - DNA, 33 bp, Homo sapien
gaactggtgaataaaccgcaaggatcttcagag

SEQ ID NO: 355928 - DNA, 33 bp, Homo sapien
gaactggtgaataaactgcaaggatcttcagag

SEQ ID NO: 355929 - DNA, 33 bp, Homo sapien
gcagttttagcttgtcactctcttgacactcta

SEQ ID NO: 355930 - DNA, 33 bp, Homo sapien
gcagttttagcttgtcgctctcttgacactcta

SEQ ID NO: 355931 - DNA, 33 bp, Homo sapien
attcgtaatggtgccaatcttgccaaattgccc

SEQ ID NO: 355932 - DNA, 33 bp, Homo sapien
attcgtaatggtgccagtcttgccaaattgccc

SEQ ID NO: 355933 - DNA, 33 bp, Homo sapien
gggcttgctgggccaaagcttatatgcattcgt

SEQ ID NO: 355934 - DNA, 33 bp, Homo sapien
gggcttgctgggccaacgcttatatgcattcgt

SEQ ID NO: 355935 - DNA, 33 bp, Homo sapien
ttattttcacacaaaacgtggcatagtgcacta

SEQ ID NO: 355936 - DNA, 33 bp, Homo sapien
ttattttcacacaaaaggtggcatagtgcacta

SEQ ID NO: 355937 - DNA, 33 bp, Homo sapien
tgcatgacaatgcaaacgtgactcttattttca

SEQ ID NO: 355938 - DNA, 33 bp, Homo sapien
tgcatgacaatgcaaatgtgactcttattttca

SEQ ID NO: 355939 - DNA, 33 bp, Homo sapien
ttctcaatgcctaagcccctagaaaaattcaga

SEQ ID NO: 355940 - DNA, 33 bp, Homo sapien
ttctcaatgcctaagctcctagaaaaattcaga

SEQ ID NO: 355941 - DNA, 33 bp, Homo sapien
gacactggaatcagaaagatctgtgaccttgac

SEQ ID NO: 355942 - DNA, 33 bp, Homo sapien
gacactggaatcagaaggatctgtgaccttgac

SEQ ID NO: 355943 - DNA, 33 bp, Homo sapien
atcaggtagatctgacaaacgtgggcaactgag

SEQ ID NO: 355944 - DNA, 33 bp, Homo sapien
atcaggtagatctgactaacgtgggcaactgag

SEQ ID NO: 355945 - DNA, 33 bp, Homo sapien
tttgatgccccctacaatggattatagctatgg

SEQ ID NO: 355946 - DNA, 33 bp, Homo sapien
tttgatgccccctacagtggattatagctatgg

SEQ ID NO: 355947 - DNA, 33 bp, Homo sapien
cagaggcggtaaaaggcagtatggcaagctctg

SEQ ID NO: 355948 - DNA, 33 bp, Homo sapien
cagaggcggtaaaaggtagtatggcaagctctg

SEQ ID NO: 355949 - DNA, 33 bp, Homo sapien
gccaggagcctgcagaagacttcagccccaccc

SEQ ID NO: 355950 - DNA, 33 bp, Homo sapien
gccaggagcctgcagaggacttcagccccaccc

SEQ ID NO: 355951 - DNA, 33 bp, Homo sapien
cacacccagctgtttccacctctgcagctttag

SEQ ID NO: 355952 - DNA, 33 bp, Homo sapien
cacacccagctgtttctacctctgcagctttag

SEQ ID NO: 355953 - DNA, 33 bp, Homo sapien
caggagctcctcacagcgtagtggaagagaaag

SEQ ID NO: 355954 - DNA, 33 bp, Homo sapien
caggagctcctcacagtgtagtggaagagaaag

SEQ ID NO: 355955 - DNA, 33 bp, Homo sapien
attctggtctctcaaaacccagccctgccctcc

SEQ ID NO: 355956 - DNA, 33 bp, Homo sapien
attctggtctctcaaatcccagccctgccctcc

SEQ ID NO: 355957 - DNA, 33 bp, Homo sapien
ggagagctcttggccaatggagcaggaagcaac

SEQ ID NO: 355958 - DNA, 33 bp, Homo sapien
ggagagctcttggccactggagcaggaagcaac

SEQ ID NO: 355959 - DNA, 33 bp, Homo sapien
cccagcaaattactaccagcaccaccttcactc

SEQ ID NO: 355960 - DNA, 33 bp, Homo sapien
cccagcaaattactacgagcaccaccttcactc

SEQ ID NO: 355961 - DNA, 33 bp, Homo sapien
ggaataccagttgataaaggcggctgctggaga

SEQ ID NO: 355962 - DNA, 33 bp, Homo sapien
ggaataccagttgatataggcggctgctggaga

SEQ ID NO: 355963 - DNA, 33 bp, Homo sapien
tgaccacctcctcttcactcactccactattca

SEQ ID NO: 355964 - DNA, 33 bp, Homo sapien
tgaccacctcctcttcgctcactccactattca

SEQ ID NO: 355965 - DNA, 33 bp, Homo sapien
ggcttttctgatttaactggcctggggagaagc

SEQ ID NO: 355966 - DNA, 33 bp, Homo sapien
ggcttttctgatttaattggcctggggagaagc

SEQ ID NO: 355967 - DNA, 33 bp, Homo sapien
aaattagtagaaattccctaacttcgtagttct

SEQ ID NO: 355968 - DNA, 33 bp, Homo sapien
aaattagtagaaattctctaacttcgtagttct

SEQ ID NO: 355969 - DNA, 33 bp, Homo sapien
tgcctctttggcatgacagtcttggctagttgg

SEQ ID NO: 355970 - DNA, 33 bp, Homo sapien
tgcctctttggcatgagagtcttggctagttgg

SEQ ID NO: 355971 - DNA, 33 bp, Homo sapien
agtagaaactagaacactgaaactcttgctttc

SEQ ID NO: 355972 - DNA, 33 bp, Homo sapien
agtagaaactagaacattgaaactcttgctttc

SEQ ID NO: 355973 - DNA, 33 bp, Homo sapien
tctttctgattgctgacaatatatacttttctg

SEQ ID NO: 355974 - DNA, 33 bp, Homo sapien
tctttctgattgctgagaatatatacttttctg

SEQ ID NO: 355975 - DNA, 33 bp, Homo sapien
ggactcaataaacttacagcttttcctgccttt

SEQ ID NO: 355976 - DNA, 33 bp, Homo sapien
ggactcaataaacttagagcttttcctgccttt

SEQ ID NO: 355977 - DNA, 33 bp, Homo sapien
gcctcatatgtcttcaaattgaccacctggagg

SEQ ID NO: 355978 - DNA, 33 bp, Homo sapien
gcctcatatgtcttcacattgaccacctggagg

SEQ ID NO: 355979 - DNA, 33 bp, Homo sapien
aagaagggtcccagtgcagcagagtatgggtga

SEQ ID NO: 355980 - DNA, 33 bp, Homo sapien
aagaagggtcccagtggagcagagtatgggtga

SEQ ID NO: 355981 - DNA, 33 bp, Homo sapien
tcaccagcttctgaaacgttaccttacacacac

SEQ ID NO: 355982 - DNA, 33 bp, Homo sapien
tcaccagcttctgaaatgttaccttacacacac

SEQ ID NO: 355983 - DNA, 33 bp, Homo sapien
aatgaatacggtacaacaaggctaacgacataa

SEQ ID NO: 355984 - DNA, 33 bp, Homo sapien
aatgaatacggtacaagaaggctaacgacataa

SEQ ID NO: 355985 - DNA, 33 bp, Homo sapien
tgccatgagagtcctcaatgggtacacagcagc

SEQ ID NO: 355986 - DNA, 33 bp, Homo sapien
tgccatgagagtcctcgatgggtacacagcagc

SEQ ID NO: 355987 - DNA, 33 bp, Homo sapien
tgttgtaacaaaatttaaaagtatggtttggta

SEQ ID NO: 355988 - DNA, 33 bp, Homo sapien
tgttgtaacaaaatttgaaagtatggtttggta

SEQ ID NO: 355989 - DNA, 33 bp, Homo sapien
taaaggtcagtggagaaagatccacaaacaggc

SEQ ID NO: 355990 - DNA, 33 bp, Homo sapien
taaaggtcagtggagagagatccacaaacaggc

SEQ ID NO: 355991 - DNA, 33 bp, Homo sapien
gctcaagtcctaacccacagtactcataaatga

SEQ ID NO: 355992 - DNA, 33 bp, Homo sapien
gctcaagtcctaacccgcagtactcataaatga

SEQ ID NO: 355993 - DNA, 33 bp, Homo sapien
ttatgacatgataacactgtccatcttttaggc

SEQ ID NO: 355994 - DNA, 33 bp, Homo sapien
ttatgacatgataacagtgtccatcttttaggc

SEQ ID NO: 355995 - DNA, 33 bp, Homo sapien
tttgtgcagataccgaaaagttaccactagagg

SEQ ID NO: 355996 - DNA, 33 bp, Homo sapien
tttgtgcagataccgacaagttaccactagagg

SEQ ID NO: 355997 - DNA, 33 bp, Homo sapien
gaatgtggtttaaccaagtgaaagatgtgattc

SEQ ID NO: 355998 - DNA, 33 bp, Homo sapien
gaatgtggtttaaccaggtgaaagatgtgattc

SEQ ID NO: 355999 - DNA, 33 bp, Homo sapien
tggtaagctcctaaaccagtaactaacagagtc

SEQ ID NO: 356000 - DNA, 33 bp, Homo sapien
tggtaagctcctaaactagtaactaacagagtc

SEQ ID NO: 356001 - DNA, 33 bp, Homo sapien
ggtttgcagtcttttcaagcatcgggacttttt

SEQ ID NO: 356002 - DNA, 33 bp, Homo sapien
ggtttgcagtcttttccagcatcgggacttttt

SEQ ID NO: 356003 - DNA, 33 bp, Homo sapien
tgcaatgcagggtagacagaatcactacagttt

SEQ ID NO: 356004 - DNA, 33 bp, Homo sapien
tgcaatgcagggtagatagaatcactacagttt

SEQ ID NO: 356005 - DNA, 33 bp, Homo sapien
tctctgtagtttctcaatctctggactattgac

SEQ ID NO: 356006 - DNA, 33 bp, Homo sapien
tctctgtagtttctcagtctctggactattgac

SEQ ID NO: 356007 - DNA, 33 bp, Homo sapien
acagattgatcgaatacggaacagttaccatct

SEQ ID NO: 356008 - DNA, 33 bp, Homo sapien
acagattgatcgaatatggaacagttaccatct

SEQ ID NO: 356009 - DNA, 33 bp, Homo sapien
catatcttctgcagataaggggcgactactcca

SEQ ID NO: 356010 - DNA, 33 bp, Homo sapien
catatcttctgcagatgaggggcgactactcca

SEQ ID NO: 356011 - DNA, 33 bp, Homo sapien
gaagattggaaaatccaaaagtgaatggccaaa

SEQ ID NO: 356012 - DNA, 33 bp, Homo sapien
gaagattggaaaatccgaaagtgaatggccaaa

SEQ ID NO: 356013 - DNA, 33 bp, Homo sapien
aggatccacaaactggaagcaacccttgtgttt

SEQ ID NO: 356014 - DNA, 33 bp, Homo sapien
aggatccacaaactgggagcaacccttgtgttt

SEQ ID NO: 356015 - DNA, 33 bp, Homo sapien
gttttgccagagcctcaaggttagccataggtg

SEQ ID NO: 356016 - DNA, 33 bp, Homo sapien
gttttgccagagcctctaggttagccataggtg

SEQ ID NO: 356017 - DNA, 33 bp, Homo sapien
ttactgccaccttaagaatggtgtagccagcct

SEQ ID NO: 356018 - DNA, 33 bp, Homo sapien
ttactgccaccttaaggatggtgtagccagcct

SEQ ID NO: 356019 - DNA, 33 bp, Homo sapien
cccataatttcccataaggacagaacctacaca

SEQ ID NO: 356020 - DNA, 33 bp, Homo sapien
cccataatttcccatatggacagaacctacaca

SEQ ID NO: 356021 - DNA, 33 bp, Homo sapien
gtacagtgcacgtcacaggaaggcatcagagga

SEQ ID NO: 356022 - DNA, 33 bp, Homo sapien
gtacagtgcacgtcacgggaaggcatcagagga

SEQ ID NO: 356023 - DNA, 33 bp, Homo sapien
caagggccaagtcagcccatcgagagaggtgcc

SEQ ID NO: 356024 - DNA, 33 bp, Homo sapien
caagggccaagtcagcgcatcgagagaggtgcc

SEQ ID NO: 356025 - DNA, 33 bp, Homo sapien
gtgtgggcaggtactcaaatgcagcacagaaca

SEQ ID NO: 356026 - DNA, 33 bp, Homo sapien
gtgtgggcaggtactcgaatgcagcacagaaca

SEQ ID NO: 356027 - DNA, 33 bp, Homo sapien
ccagacaggtaagcaccccactccaaacaggtg

SEQ ID NO: 356028 - DNA, 33 bp, Homo sapien
ccagacaggtaagcactccactccaaacaggtg

SEQ ID NO: 356029 - DNA, 33 bp, Homo sapien
ggaattttagtaagaaactaaggccagaaaaga

SEQ ID NO: 356030 - DNA, 33 bp, Homo sapien
ggaattttagtaagaagctaaggccagaaaaga

SEQ ID NO: 356031 - DNA, 33 bp, Homo sapien
aaacacagctggaatacggcagtgtggggagaa

SEQ ID NO: 356032 - DNA, 33 bp, Homo sapien
aaacacagctggaatatggcagtgtggggagaa

SEQ ID NO: 356033 - DNA, 33 bp, Homo sapien
catattgtggcaggcaaagcggaaagtgcctgc

SEQ ID NO: 356034 - DNA, 33 bp, Homo sapien
catattgtggcaggcagagcggaaagtgcctgc

SEQ ID NO: 356035 - DNA, 33 bp, Homo sapien
gtattagaatcctcaaattaaaaacactcacca

SEQ ID NO: 356036 - DNA, 33 bp, Homo sapien
gtattagaatcctcaagttaaaaacactcacca

SEQ ID NO: 356037 - DNA, 33 bp, Homo sapien
ggtttgcacacctgaccaggagatccaatagta

SEQ ID NO: 356038 - DNA, 33 bp, Homo sapien
ggtttgcacacctgacgaggagatccaatagta

SEQ ID NO: 356039 - DNA, 33 bp, Homo sapien
aattcagataaacagccctctccagaggtaatc

SEQ ID NO: 356040 - DNA, 33 bp, Homo sapien
aattcagataaacagctctctccagaggtaatc

SEQ ID NO: 356041 - DNA, 33 bp, Homo sapien
aattaatggaagcagtcacatgagcaagtttgc

SEQ ID NO: 356042 - DNA, 33 bp, Homo sapien
aattaatggaagcagttacatgagcaagtttgc

SEQ ID NO: 356043 - DNA, 33 bp, Homo sapien
ccctaggatccatctacacccaaggacagcctg

SEQ ID NO: 356044 - DNA, 33 bp, Homo sapien
ccctaggatccatctatacccaaggacagcctg

SEQ ID NO: 356045 - DNA, 33 bp, Homo sapien
cccagcgcacccccaaatagagccaagcctggg

SEQ ID NO: 356046 - DNA, 33 bp, Homo sapien
cccagcgcacccccaagtagagccaagcctggg

SEQ ID NO: 356047 - DNA, 33 bp, Homo sapien
tccaccaggaaaagcacgcatctgtgtgcagag

SEQ ID NO: 356048 - DNA, 33 bp, Homo sapien
tccaccaggaaaagcatgcatctgtgtgcagag

SEQ ID NO: 356049 - DNA, 33 bp, Homo sapien
tgactttctgtgtagacgggctgtttttcaaat

SEQ ID NO: 356050 - DNA, 33 bp, Homo sapien
tgactttctgtgtagaggggctgtttttcaaat

SEQ ID NO: 356051 - DNA, 33 bp, Homo sapien
aactatcccttacacaatcccatgtagatacta

SEQ ID NO: 356052 - DNA, 33 bp, Homo sapien
aactatcccttacacagtcccatgtagatacta

SEQ ID NO: 356053 - DNA, 33 bp, Homo sapien
gaagtcacccggcccccatgcaaggtgcccaca

SEQ ID NO: 356054 - DNA, 33 bp, Homo sapien
gaagtcacccggccccgatgcaaggtgcccaca

SEQ ID NO: 356055 - DNA, 33 bp, Homo sapien
gaaatgaaaggaatccagaaaggaagaagtaaa

SEQ ID NO: 356056 - DNA, 33 bp, Homo sapien
gaaatgaaaggaatccggaaaggaagaagtaaa

SEQ ID NO: 356057 - DNA, 33 bp, Homo sapien
gttccagaaagagataactggaaaaagtgaagg

SEQ ID NO: 356058 - DNA, 33 bp, Homo sapien
gttccagaaagagatacctggaaaaagtgaagg

SEQ ID NO: 356059 - DNA, 33 bp, Homo sapien
cgttgctgaagtctccccgacctttattgtttt

SEQ ID NO: 356060 - DNA, 33 bp, Homo sapien
cgttgctgaagtctccgcgacctttattgtttt

SEQ ID NO: 356061 - DNA, 33 bp, Homo sapien
tgattgaactaatccacgtgtcccttcagttca

SEQ ID NO: 356062 - DNA, 33 bp, Homo sapien
tgattgaactaatccatgtgtcccttcagttca

SEQ ID NO: 356063 - DNA, 33 bp, Homo sapien
tcttagcatctccacaatgcaaaggatgtcttc

SEQ ID NO: 356064 - DNA, 33 bp, Homo sapien
tcttagcatctccacagtgcaaaggatgtcttc

SEQ ID NO: 356065 - DNA, 33 bp, Homo sapien
ttcctcagttctgccaatatgcagcttgtcttc

SEQ ID NO: 356066 - DNA, 33 bp, Homo sapien
ttcctcagttctgccagtatgcagcttgtcttc

SEQ ID NO: 356067 - DNA, 33 bp, Homo sapien
taggcttgaacattcacgggaaaagtcacagta

SEQ ID NO: 356068 - DNA, 33 bp, Homo sapien
taggcttgaacattcatgggaaaagtcacagta

SEQ ID NO: 356069 - DNA, 33 bp, Homo sapien
aggaaagggcttcagaaaataagtagggaagag

SEQ ID NO: 356070 - DNA, 33 bp, Homo sapien
aggaaagggcttcagagaataagtagggaagag

SEQ ID NO: 356071 - DNA, 33 bp, Homo sapien
taccaggtcctcaatactactcataaagatatc

SEQ ID NO: 356072 - DNA, 33 bp, Homo sapien
taccaggtcctcaatagtactcataaagatatc

SEQ ID NO: 356073 - DNA, 33 bp, Homo sapien
aattctaaatacagtacgaatatgccctcaatt

SEQ ID NO: 356074 - DNA, 33 bp, Homo sapien
aattctaaatacagtaggaatatgccctcaatt

SEQ ID NO: 356075 - DNA, 33 bp, Homo sapien
gtgctctaataagaagaaaacatggttgaatct

SEQ ID NO: 356076 - DNA, 33 bp, Homo sapien
gtgctctaataagaaggaaacatggttgaatct

SEQ ID NO: 356077 - DNA, 33 bp, Homo sapien
tttagttcttgtaaaaggtgcgagttaacatac

SEQ ID NO: 356078 - DNA, 33 bp, Homo sapien
tttagttcttgtaaaatgtgcgagttaacatac

SEQ ID NO: 356079 - DNA, 33 bp, Homo sapien
gatgtagaggtggctacagatgcccaaggctct

SEQ ID NO: 356080 - DNA, 33 bp, Homo sapien
gatgtagaggtggctagagatgcccaaggctct

SEQ ID NO: 356081 - DNA, 33 bp, Homo sapien
gtaaacacgtcaattaaatttattcataggaag

SEQ ID NO: 356082 - DNA, 33 bp, Homo sapien
gtaaacacgtcaattacatttattcataggaag

SEQ ID NO: 356083 - DNA, 33 bp, Homo sapien
tatatttgaaatagccaactacaaaaataactg

SEQ ID NO: 356084 - DNA, 33 bp, Homo sapien
tatatttgaaatagccgactacaaaaataactg

SEQ ID NO: 356085 - DNA, 33 bp, Homo sapien
tgaaccactggacccagctgatctttgaaaaga

SEQ ID NO: 356086 - DNA, 33 bp, Homo sapien
tgaaccactggacccatctgatctttgaaaaga

SEQ ID NO: 356087 - DNA, 33 bp, Homo sapien
tgtaactcttcaggacagggtatgattacgtat

SEQ ID NO: 356088 - DNA, 33 bp, Homo sapien
tgtaactcttcaggaccgggtatgattacgtat

SEQ ID NO: 356089 - DNA, 33 bp, Homo sapien
gtttgttccaacaaatgagatcatagaaacacc

SEQ ID NO: 356090 - DNA, 33 bp, Homo sapien
gtttgttccaacaaattagatcatagaaacacc

SEQ ID NO: 356091 - DNA, 33 bp, Homo sapien
tcatggactgttgtgacaagtacgatatcgcaa

SEQ ID NO: 356092 - DNA, 33 bp, Homo sapien
tcatggactgttgtgagaagtacgatatcgcaa

SEQ ID NO: 356093 - DNA, 33 bp, Homo sapien
cctgccctgctgccaacaggacaaatgtctttc

SEQ ID NO: 356094 - DNA, 33 bp, Homo sapien
cctgccctgctgccaataggacaaatgtctttc

SEQ ID NO: 356095 - DNA, 33 bp, Homo sapien
caacatttcttgtaatgatcattgctccatacc

SEQ ID NO: 356096 - DNA, 33 bp, Homo sapien
caacatttcttgtaattatcattgctccatacc

SEQ ID NO: 356097 - DNA, 33 bp, Homo sapien
tgcagttacccacaggaacttcgtggagtgtct

SEQ ID NO: 356098 - DNA, 33 bp, Homo sapien
tgcagttacccacaggcacttcgtggagtgtct

SEQ ID NO: 356099 - DNA, 33 bp, Homo sapien
tagtcctatccagtaagccttatacacaggtct

SEQ ID NO: 356100 - DNA, 33 bp, Homo sapien
tagtcctatccagtaatccttatacacaggtct

SEQ ID NO: 356101 - DNA, 33 bp, Homo sapien
tcatctgttgattttcaaccatagaggatgaag

SEQ ID NO: 356102 - DNA, 33 bp, Homo sapien
tcatctgttgattttccaccatagaggatgaag

SEQ ID NO: 356103 - DNA, 33 bp, Homo sapien
caaattactgcacgtcactcagtcggaagggtt

SEQ ID NO: 356104 - DNA, 33 bp, Homo sapien
caaattactgcacgtcgctcagtcggaagggtt

SEQ ID NO: 356105 - DNA, 33 bp, Homo sapien
ggcaaaagcctcaacacagcagtggtcccttca

SEQ ID NO: 356106 - DNA, 33 bp, Homo sapien
ggcaaaagcctcaacatagcagtggtcccttca

SEQ ID NO: 356107 - DNA, 33 bp, Homo sapien
gggctgaacacagctacaagtttgagggctcat

SEQ ID NO: 356108 - DNA, 33 bp, Homo sapien
gggctgaacacagctataagtttgagggctcat

SEQ ID NO: 356109 - DNA, 33 bp, Homo sapien
tcagggcttactatggacacctgtgtagaatcc

SEQ ID NO: 356110 - DNA, 33 bp, Homo sapien
tcagggcttactatggccacctgtgtagaatcc

SEQ ID NO: 356111 - DNA, 33 bp, Homo sapien
aagaacaaaatgtgaacggaaagtaaacttcaa

SEQ ID NO: 356112 - DNA, 33 bp, Homo sapien
aagaacaaaatgtgaatggaaagtaaacttcaa

SEQ ID NO: 356113 - DNA, 33 bp, Homo sapien
tcccattgtaaagcgacgggccaggatgacaga

SEQ ID NO: 356114 - DNA, 33 bp, Homo sapien
tcccattgtaaagcgatgggccaggatgacaga

SEQ ID NO: 356115 - DNA, 33 bp, Homo sapien
ggcttacgatttgctgaaagtcaagttcttggc

SEQ ID NO: 356116 - DNA, 33 bp, Homo sapien
ggcttacgatttgctggaagtcaagttcttggc

SEQ ID NO: 356117 - DNA, 33 bp, Homo sapien
cattcacgctagaacagtctttctttcaaagct

SEQ ID NO: 356118 - DNA, 33 bp, Homo sapien
cattcacgctagaacattctttctttcaaagct

SEQ ID NO: 356119 - DNA, 33 bp, Homo sapien
aaccctggcaatgtccaatttcttgttttctct

SEQ ID NO: 356120 - DNA, 33 bp, Homo sapien
aaccctggcaatgtccgatttcttgttttctct

SEQ ID NO: 356121 - DNA, 33 bp, Homo sapien
agcccccagttccaggcatatcccattgcatta

SEQ ID NO: 356122 - DNA, 33 bp, Homo sapien
agcccccagttccaggtatatcccattgcatta

SEQ ID NO: 356123 - DNA, 33 bp, Homo sapien
tcctcctctgtaaatacgttttgttgtcaagat

SEQ ID NO: 356124 - DNA, 33 bp, Homo sapien
tcctcctctgtaaataggttttgttgtcaagat

SEQ ID NO: 356125 - DNA, 33 bp, Homo sapien
ggatagaaggaaacacaaggagtcaagagctcc

SEQ ID NO: 356126 - DNA, 33 bp, Homo sapien
ggatagaaggaaacacgaggagtcaagagctcc

SEQ ID NO: 356127 - DNA, 33 bp, Homo sapien
gctcagcatttgcccacagtaatttgtgcagca

SEQ ID NO: 356128 - DNA, 33 bp, Homo sapien
gctcagcatttgcccatagtaatttgtgcagca

SEQ ID NO: 356129 - DNA, 33 bp, Homo sapien
gtgggtgggccaagcgcaatggacagagcagga

SEQ ID NO: 356130 - DNA, 33 bp, Homo sapien
gtgggtgggccaagcgtaatggacagagcagga

SEQ ID NO: 356131 - DNA, 33 bp, Homo sapien
agactctacacttcaaaaagatctctgggccat

SEQ ID NO: 356132 - DNA, 33 bp, Homo sapien
agactctacacttcaagaagatctctgggccat

SEQ ID NO: 356133 - DNA, 33 bp, Homo sapien
tggttcagggacctcacgttgagaacctttgat

SEQ ID NO: 356134 - DNA, 33 bp, Homo sapien
tggttcagggacctcatgttgagaacctttgat

SEQ ID NO: 356135 - DNA, 33 bp, Homo sapien
tgacatcacctttgcaacactcattagcacctg

SEQ ID NO: 356136 - DNA, 33 bp, Homo sapien
tgacatcacctttgcagcactcattagcacctg

SEQ ID NO: 356137 - DNA, 33 bp, Homo sapien
agatggcctactacaacgtgctatagcgcaagc

SEQ ID NO: 356138 - DNA, 33 bp, Homo sapien
agatggcctactacaatgtgctatagcgcaagc

SEQ ID NO: 356139 - DNA, 33 bp, Homo sapien
ggcaaaatctttaaacggattctaactacctgc

SEQ ID NO: 356140 - DNA, 33 bp, Homo sapien
ggcaaaatctttaaactgattctaactacctgc

SEQ ID NO: 356141 - DNA, 33 bp, Homo sapien
gaattaaatgaactcacgcagataaaatgctta

SEQ ID NO: 356142 - DNA, 33 bp, Homo sapien
gaattaaatgaactcatgcagataaaatgctta

SEQ ID NO: 356143 - DNA, 33 bp, Homo sapien
gaacttacacatttgaccacacattggaccacc

SEQ ID NO: 356144 - DNA, 33 bp, Homo sapien
gaacttacacatttgatcacacattggaccacc

SEQ ID NO: 356145 - DNA, 33 bp, Homo sapien
agagagaacttaaggacggtttctgggttgcag

SEQ ID NO: 356146 - DNA, 33 bp, Homo sapien
agagagaacttaaggatggtttctgggttgcag

SEQ ID NO: 356147 - DNA, 33 bp, Homo sapien
ttgagatccaactatgaaactaactcagttcaa

SEQ ID NO: 356148 - DNA, 33 bp, Homo sapien
ttgagatccaactatggaactaactcagttcaa

SEQ ID NO: 356149 - DNA, 33 bp, Homo sapien
actagtgagatcgggacgtgtaaggtagctcac

SEQ ID NO: 356150 - DNA, 33 bp, Homo sapien
actagtgagatcgggatgtgtaaggtagctcac

SEQ ID NO: 356151 - DNA, 33 bp, Homo sapien
ataggagctcacctggaaagagttctgcgatca

SEQ ID NO: 356152 - DNA, 33 bp, Homo sapien
ataggagctcacctgggaagagttctgcgatca

SEQ ID NO: 356153 - DNA, 33 bp, Homo sapien
aactcctgagttccaacgattctcttacctcag

SEQ ID NO: 356154 - DNA, 33 bp, Homo sapien
aactcctgagttccaatgattctcttacctcag

SEQ ID NO: 356155 - DNA, 33 bp, Homo sapien
ctcacgtgtccatataccaagtcatcacgttgt

SEQ ID NO: 356156 - DNA, 33 bp, Homo sapien
ctcacgtgtccatatagcaagtcatcacgttgt

SEQ ID NO: 356157 - DNA, 33 bp, Homo sapien
ctttccctagactttacaggagcctacaacagt

SEQ ID NO: 356158 - DNA, 33 bp, Homo sapien
ctttccctagactttataggagcctacaacagt

SEQ ID NO: 356159 - DNA, 33 bp, Homo sapien
ggaagatgccgtttaacgtattgccctctttgc

SEQ ID NO: 356160 - DNA, 33 bp, Homo sapien
ggaagatgccgtttaatgtattgccctctttgc

SEQ ID NO: 356161 - DNA, 33 bp, Homo sapien
aaaacaaatgctctaaatcacagctagactaca

SEQ ID NO: 356162 - DNA, 33 bp, Homo sapien
aaaacaaatgctctaattcacagctagactaca

SEQ ID NO: 356163 - DNA, 33 bp, Homo sapien
aagcatgggcaagaaaaaaatctttgttgtttt

SEQ ID NO: 356164 - DNA, 33 bp, Homo sapien
aagcatgggcaagaaataaatctttgttgtttt

SEQ ID NO: 356165 - DNA, 33 bp, Homo sapien
gcactatgacagtgaaaacacaaacaggaagta

SEQ ID NO: 356166 - DNA, 33 bp, Homo sapien
gcactatgacagtgaacacacaaacaggaagta

SEQ ID NO: 356167 - DNA, 33 bp, Homo sapien
aaaaatgcagtatctacgaaacgtgatatcttc

SEQ ID NO: 356168 - DNA, 33 bp, Homo sapien
aaaaatgcagtatctatgaaacgtgatatcttc

SEQ ID NO: 356169 - DNA, 33 bp, Homo sapien
tcgccctcatattgaaatgtgttaaaatgaaga

SEQ ID NO: 356170 - DNA, 33 bp, Homo sapien
tcgccctcatattgaactgtgttaaaatgaaga

SEQ ID NO: 356171 - DNA, 33 bp, Homo sapien
gtgctctttaacacacacaagtacaatggctat

SEQ ID NO: 356172 - DNA, 33 bp, Homo sapien
gtgctctttaacacacgcaagtacaatggctat

SEQ ID NO: 356173 - DNA, 33 bp, Homo sapien
aaattcaggcatcccactctctaactcccttct

SEQ ID NO: 356174 - DNA, 33 bp, Homo sapien
aaattcaggcatcccagtctctaactcccttct

SEQ ID NO: 356175 - DNA, 33 bp, Homo sapien
gcattctttggacatacatctcagagaaatgaa

SEQ ID NO: 356176 - DNA, 33 bp, Homo sapien
gcattctttggacatatatctcagagaaatgaa

SEQ ID NO: 356177 - DNA, 33 bp, Homo sapien
agcatggctaaaagtaaaaagcaaatgaacaca

SEQ ID NO: 356178 - DNA, 33 bp, Homo sapien
agcatggctaaaagtataaagcaaatgaacaca

SEQ ID NO: 356179 - DNA, 33 bp, Homo sapien
gctctccaacctaagaatcctggagcaaaagac

SEQ ID NO: 356180 - DNA, 33 bp, Homo sapien
gctctccaacctaagagtcctggagcaaaagac

SEQ ID NO: 356181 - DNA, 33 bp, Homo sapien
gggttacgggtgaagccgaatcttgaacgcaac

SEQ ID NO: 356182 - DNA, 33 bp, Homo sapien
gggttacgggtgaagcggaatcttgaacgcaac

SEQ ID NO: 356183 - DNA, 33 bp, Homo sapien
tcatttcctgttcacacgtcttgtagtgcactg

SEQ ID NO: 356184 - DNA, 33 bp, Homo sapien
tcatttcctgttcacatgtcttgtagtgcactg

SEQ ID NO: 356185 - DNA, 33 bp, Homo sapien
tgcctaagttagaatcgcccaggctaagttcgt

SEQ ID NO: 356186 - DNA, 33 bp, Homo sapien
tgcctaagttagaatctcccaggctaagttcgt

SEQ ID NO: 356187 - DNA, 33 bp, Homo sapien
cctttgagtgacattacacccaaagagaaggaa

SEQ ID NO: 356188 - DNA, 33 bp, Homo sapien
cctttgagtgacattagacccaaagagaaggaa

SEQ ID NO: 356189 - DNA, 33 bp, Homo sapien
gcatggtcaaaatatcaagcaaactaaaatata

SEQ ID NO: 356190 - DNA, 33 bp, Homo sapien
gcatggtcaaaatatcgagcaaactaaaatata

SEQ ID NO: 356191 - DNA, 33 bp, Homo sapien
tccagaaaaacaggcaagaaaggcatggtcaaa

SEQ ID NO: 356192 - DNA, 33 bp, Homo sapien
tccagaaaaacaggcacgaaaggcatggtcaaa

SEQ ID NO: 356193 - DNA, 33 bp, Homo sapien
aggtcccacaccctggaacaaagcgcagccctg

SEQ ID NO: 356194 - DNA, 33 bp, Homo sapien
aggtcccacaccctggcacaaagcgcagccctg

SEQ ID NO: 356195 - DNA, 33 bp, Homo sapien
gttcaaatctacttacccagagtgttgtcttaa

SEQ ID NO: 356196 - DNA, 33 bp, Homo sapien
gttcaaatctacttactcagagtgttgtcttaa

SEQ ID NO: 356197 - DNA, 33 bp, Homo sapien
cccaaagtggctgaaacacagagagccaatagg

SEQ ID NO: 356198 - DNA, 33 bp, Homo sapien
cccaaagtggctgaaagacagagagccaatagg

SEQ ID NO: 356199 - DNA, 33 bp, Homo sapien
tcagggaagcctttcccgactccctagactgcc

SEQ ID NO: 356200 - DNA, 33 bp, Homo sapien
tcagggaagcctttcctgactccctagactgcc

SEQ ID NO: 356201 - DNA, 33 bp, Homo sapien
acacactgtattaacaggtacattccatcattg

SEQ ID NO: 356202 - DNA, 33 bp, Homo sapien
acacactgtattaacatgtacattccatcattg

SEQ ID NO: 356203 - DNA, 33 bp, Homo sapien
aaataactagggtatacgcccatcccaacctga

SEQ ID NO: 356204 - DNA, 33 bp, Homo sapien
aaataactagggtataggcccatcccaacctga

SEQ ID NO: 356205 - DNA, 33 bp, Homo sapien
atccactttgctgtaacggtcatccgaactccc

SEQ ID NO: 356206 - DNA, 33 bp, Homo sapien
atccactttgctgtaatggtcatccgaactccc

SEQ ID NO: 356207 - DNA, 33 bp, Homo sapien
ttggcttatcactttgaacgcaaaatccacttt

SEQ ID NO: 356208 - DNA, 33 bp, Homo sapien
ttggcttatcactttggacgcaaaatccacttt

SEQ ID NO: 356209 - DNA, 33 bp, Homo sapien
tggccaagcatataatcaggacaaatagctgtt

SEQ ID NO: 356210 - DNA, 33 bp, Homo sapien
tggccaagcatataatgaggacaaatagctgtt

SEQ ID NO: 356211 - DNA, 33 bp, Homo sapien
tttccccatcactggccgcactcactgtatgaa

SEQ ID NO: 356212 - DNA, 33 bp, Homo sapien
tttccccatcactggctgcactcactgtatgaa

SEQ ID NO: 356213 - DNA, 33 bp, Homo sapien
atgtgatcaggacgtacactcgcatatcaaact

SEQ ID NO: 356214 - DNA, 33 bp, Homo sapien
atgtgatcaggacgtagactcgcatatcaaact

SEQ ID NO: 356215 - DNA, 33 bp, Homo sapien
aggcccagtgctcagaggaaggccagtttctag

SEQ ID NO: 356216 - DNA, 33 bp, Homo sapien
aggcccagtgctcagatgaaggccagtttctag

SEQ ID NO: 356217 - DNA, 33 bp, Homo sapien
attctgtgttccaccacctgagtgtacccctgt

SEQ ID NO: 356218 - DNA, 33 bp, Homo sapien
attctgtgttccaccagctgagtgtacccctgt

SEQ ID NO: 356219 - DNA, 33 bp, Homo sapien
aaggtatcctgagtctcaccgtatctgctccat

SEQ ID NO: 356220 - DNA, 33 bp, Homo sapien
aaggtatcctgagtcttaccgtatctgctccat

SEQ ID NO: 356221 - DNA, 33 bp, Homo sapien
cagaaaaatgcacctaactatggaagcaccagc

SEQ ID NO: 356222 - DNA, 33 bp, Homo sapien
cagaaaaatgcacctacctatggaagcaccagc

SEQ ID NO: 356223 - DNA, 33 bp, Homo sapien
atcacagaaaattgtaacaacacatgcaacacg

SEQ ID NO: 356224 - DNA, 33 bp, Homo sapien
atcacagaaaattgtagcaacacatgcaacacg

SEQ ID NO: 356225 - DNA, 33 bp, Homo sapien
tgccgtttttgtagacactgttattctttttcc

SEQ ID NO: 356226 - DNA, 33 bp, Homo sapien
tgccgtttttgtagacgctgttattctttttcc

SEQ ID NO: 356227 - DNA, 33 bp, Homo sapien
gatgcctaaaaaccaactggaagtcgctcttcg

SEQ ID NO: 356228 - DNA, 33 bp, Homo sapien
gatgcctaaaaaccaattggaagtcgctcttcg

SEQ ID NO: 356229 - DNA, 33 bp, Homo sapien
tatggttggcgcaaaccggccccagggaccctc

SEQ ID NO: 356230 - DNA, 33 bp, Homo sapien
tatggttggcgcaaactggccccagggaccctc

SEQ ID NO: 356231 - DNA, 33 bp, Homo sapien
caaatgtgttctatccaattcagcattcacagg

SEQ ID NO: 356232 - DNA, 33 bp, Homo sapien
caaatgtgttctatccgattcagcattcacagg

SEQ ID NO: 356233 - DNA, 33 bp, Homo sapien
ttccagtctccagaaaagaaatccaggcctttt

SEQ ID NO: 356234 - DNA, 33 bp, Homo sapien
ttccagtctccagaaaggaaatccaggcctttt

SEQ ID NO: 356235 - DNA, 33 bp, Homo sapien
tagaatgttggctccacaatgctctatgggtca

SEQ ID NO: 356236 - DNA, 33 bp, Homo sapien
tagaatgttggctccagaatgctctatgggtca

SEQ ID NO: 356237 - DNA, 33 bp, Homo sapien
tcttgtgtaatgaagtcaatgctgtcaggccaa

SEQ ID NO: 356238 - DNA, 33 bp, Homo sapien
tcttgtgtaatgaagtgaatgctgtcaggccaa

SEQ ID NO: 356239 - DNA, 33 bp, Homo sapien
gaaaagaagtgtgggacacggaagatcgggggc

SEQ ID NO: 356240 - DNA, 33 bp, Homo sapien
gaaaagaagtgtgggatacggaagatcgggggc

SEQ ID NO: 356241 - DNA, 33 bp, Homo sapien; identical to SEQ ID NO: 356239

SEQ ID NO: 356242 - DNA, 33 bp, Homo sapien; identical to SEQ ID NO: 356240

SEQ ID NO: 356243 - DNA, 33 bp, Homo sapien
gtgcagtttcatagaaaggtcggtcaggaggtg

SEQ ID NO: 356244 - DNA, 33 bp, Homo sapien
gtgcagtttcatagaagggtcggtcaggaggtg

SEQ ID NO: 356245 - DNA, 33 bp, Homo sapien
caccttctgtctcctcacggtgggagccgccct

SEQ ID NO: 356246 - DNA, 33 bp, Homo sapien
caccttctgtctcctcgcggtgggagccgccct

SEQ ID NO: 356247 - DNA, 33 bp, Homo sapien
ccctcggctccaaacaagcggttccgggggacc

SEQ ID NO: 356248 - DNA, 33 bp, Homo sapien
ccctcggctccaaacaggcggttccgggggacc

SEQ ID NO: 356249 - DNA, 33 bp, Homo sapien
gaaacgtagtcccgagcaagacctcaaaggact

SEQ ID NO: 356250 - DNA, 33 bp, Homo sapien
gaaacgtagtcccgaggaagacctcaaaggact

SEQ ID NO: 356251 - DNA, 33 bp, Homo sapien
tttaggaactgatgacccttgataatgtggctg

SEQ ID NO: 356252 - DNA, 33 bp, Homo sapien
tttaggaactgatgacgcttgataatgtggctg

SEQ ID NO: 356253 - DNA, 33 bp, Homo sapien
ctgggtggcattcctgaagaggattctctaagc

SEQ ID NO: 356254 - DNA, 33 bp, Homo sapien
ctgggtggcattcctggagaggattctctaagc

SEQ ID NO: 356255 - DNA, 33 bp, Homo sapien
actgatcttcctgatacgatttttgctctgaaa

SEQ ID NO: 356256 - DNA, 33 bp, Homo sapien
actgatcttcctgatatgatttttgctctgaaa

SEQ ID NO: 356257 - DNA, 33 bp, Homo sapien
tggttgacaaataggaagcaacacaaaggactg

SEQ ID NO: 356258 - DNA, 33 bp, Homo sapien
tggttgacaaataggaggcaacacaaaggactg

SEQ ID NO: 356259 - DNA, 33 bp, Homo sapien
ctaagtgctgtggaaaaaatggaaacaagagaa

SEQ ID NO: 356260 - DNA, 33 bp, Homo sapien
ctaagtgctgtggaaagaatggaaacaagagaa

SEQ ID NO: 356261 - DNA, 33 bp, Homo sapien
ttggtgataacgactcactggagacctactgcg

SEQ ID NO: 356262 - DNA, 33 bp, Homo sapien
ttggtgataacgactcgctggagacctactgcg

SEQ ID NO: 356263 - DNA, 33 bp, Homo sapien
taggcatgataaccctcagaatatctacatgtg

SEQ ID NO: 356264 - DNA, 33 bp, Homo sapien
taggcatgataaccctgagaatatctacatgtg

SEQ ID NO: 356265 - DNA, 33 bp, Homo sapien
ggaggtatcacttatgccagttggtacatgaat

SEQ ID NO: 356266 - DNA, 33 bp, Homo sapien
ggaggtatcacttatgtcagttggtacatgaat

SEQ ID NO: 356267 - DNA, 33 bp, Homo sapien
attcactcttccttcaaactattaaagatactt

SEQ ID NO: 356268 - DNA, 33 bp, Homo sapien
attcactcttccttcagactattaaagatactt

SEQ ID NO: 356269 - DNA, 33 bp, Homo sapien
gaagttaacctgtcaacggacattttctcctca

SEQ ID NO: 356270 - DNA, 33 bp, Homo sapien
gaagttaacctgtcaatggacattttctcctca

SEQ ID NO: 356271 - DNA, 33 bp, Homo sapien
ttacgagagcaaattgacaatatttttgagaac

SEQ ID NO: 356272 - DNA, 33 bp, Homo sapien
ttacgagagcaaattggcaatatttttgagaac

SEQ ID NO: 356273 - DNA, 33 bp, Homo sapien
ctttctcggtaagtgccagagacaggacatgga

SEQ ID NO: 356274 - DNA, 33 bp, Homo sapien
ctttctcggtaagtgcgagagacaggacatgga

SEQ ID NO: 356275 - DNA, 33 bp, Homo sapien
ttctgaacagttgaaacggtggcttcagttacc

SEQ ID NO: 356276 - DNA, 33 bp, Homo sapien
ttctgaacagttgaaatggtggcttcagttacc

SEQ ID NO: 356277 - DNA, 33 bp, Homo sapien
agataatgcacatgaacaaattagtatggtgtc

SEQ ID NO: 356278 - DNA, 33 bp, Homo sapien
agataatgcacatgaataaattagtatggtgtc

SEQ ID NO: 356279 - DNA, 33 bp, Homo sapien
tgatttaacacaattccacaggtatgtatgcaa

SEQ ID NO: 356280 - DNA, 33 bp, Homo sapien
tgatttaacacaattcgacaggtatgtatgcaa

SEQ ID NO: 356281 - DNA, 33 bp, Homo sapien
gtctcttgtttagttaggtaggtccttgccatt

SEQ ID NO: 356282 - DNA, 33 bp, Homo sapien
gtctcttgtttagttatgtaggtccttgccatt

SEQ ID NO: 356283 - DNA, 33 bp, Homo sapien
tcaaaattgctacttacggcatttcctacaatg

SEQ ID NO: 356284 - DNA, 33 bp, Homo sapien
tcaaaattgctacttatggcatttcctacaatg

SEQ ID NO: 356285 - DNA, 33 bp, Homo sapien
aattaataatcagtcaatcaagctaagcaccct

SEQ ID NO: 356286 - DNA, 33 bp, Homo sapien
aattaataatcagtcagtcaagctaagcaccct

SEQ ID NO: 356287 - DNA, 33 bp, Homo sapien
ttaaatacagctcaaaagtggacggaaatgaac

SEQ ID NO: 356288 - DNA, 33 bp, Homo sapien
ttaaatacagctcaaatgtggacggaaatgaac

SEQ ID NO: 356289 - DNA, 33 bp, Homo sapien
ctactttttcaagacaatgctatttcctgagac

SEQ ID NO: 356290 - DNA, 33 bp, Homo sapien
ctactttttcaagacagtgctatttcctgagac

SEQ ID NO: 356291 - DNA, 33 bp, Homo sapien
catactttctgtcagtcaatgctgaggatcctc

SEQ ID NO: 356292 - DNA, 33 bp, Homo sapien
catactttctgtcagttaatgctgaggatcctc

SEQ ID NO: 356293 - DNA, 33 bp, Homo sapien
cttcagccaccatacaagtagcaaactggaatc

SEQ ID NO: 356294 - DNA, 33 bp, Homo sapien
cttcagccaccatacacgtagcaaactggaatc

SEQ ID NO: 356295 - DNA, 33 bp, Homo sapien
cttcaaagtaaatggaacatcttctggaatcct

SEQ ID NO: 356296 - DNA, 33 bp, Homo sapien
cttcaaagtaaatggatcatcttctggaatcct

SEQ ID NO: 356297 - DNA, 33 bp, Homo sapien
tgtttccttctgtttcaaggttggagtttaaga

SEQ ID NO: 356298 - DNA, 33 bp, Homo sapien
tgtttccttctgtttcgaggttggagtttaaga

SEQ ID NO: 356299 - DNA, 33 bp, Homo sapien
tgttctgcttcctacgcatgggaaaaagaagtt

SEQ ID NO: 356300 - DNA, 33 bp, Homo sapien
tgttctgcttcctacggatgggaaaaagaagtt

SEQ ID NO: 356301 - DNA, 33 bp, Homo sapien
aatataaattcacatcaagctgattaaatcgtt

SEQ ID NO: 356302 - DNA, 33 bp, Homo sapien
aatataaattcacatccagctgattaaatcgtt

SEQ ID NO: 356303 - DNA, 33 bp, Homo sapien
gtcaggaagtgcacaaagaacaatgaaaacaca

SEQ ID NO: 356304 - DNA, 33 bp, Homo sapien
gtcaggaagtgcacaaggaacaatgaaaacaca

SEQ ID NO: 356305 - DNA, 33 bp, Homo sapien
gaactgctgaagtcaactgttatatctatctgc

SEQ ID NO: 356306 - DNA, 33 bp, Homo sapien
gaactgctgaagtcaattgttatatctatctgc

SEQ ID NO: 356307 - DNA, 33 bp, Homo sapien
ttaagatcagacccaaataagtgaacatgacct

SEQ ID NO: 356308 - DNA, 33 bp, Homo sapien
ttaagatcagacccaagtaagtgaacatgacct

SEQ ID NO: 356309 - DNA, 33 bp, Homo sapien
gtcaggtccatgaaccacgtgcaaagcaagctg

SEQ ID NO: 356310 - DNA, 33 bp, Homo sapien
gtcaggtccatgaaccgcgtgcaaagcaagctg

SEQ ID NO: 356311 - DNA, 33 bp, Homo sapien
atataaagtagttaaacacataagtgggtgagt

SEQ ID NO: 356312 - DNA, 33 bp, Homo sapien
atataaagtagttaaatacataagtgggtgagt

SEQ ID NO: 356313 - DNA, 33 bp, Homo sapien
ttgaacagtagtggaaaataatgacctataata

SEQ ID NO: 356314 - DNA, 33 bp, Homo sapien
ttgaacagtagtggaagataatgacctataata

SEQ ID NO: 356315 - DNA, 33 bp, Homo sapien
gattggatccgccataagtatacagacatatac

SEQ ID NO: 356316 - DNA, 33 bp, Homo sapien
gattggatccgccataggtatacagacatatac

SEQ ID NO: 356317 - DNA, 33 bp, Homo sapien
caagaagaaaacacggacagaattaatatgtaa

SEQ ID NO: 356318 - DNA, 33 bp, Homo sapien
caagaagaaaacacgggcagaattaatatgtaa

SEQ ID NO: 356319 - DNA, 33 bp, Homo sapien
ttacatttatggtaagaactgcatagctgtgat

SEQ ID NO: 356320 - DNA, 33 bp, Homo sapien
ttacatttatggtaaggactgcatagctgtgat

SEQ ID NO: 356321 - DNA, 33 bp, Homo sapien
tattttgtaggggaacagttcaagaatgaaagt

SEQ ID NO: 356322 - DNA, 33 bp, Homo sapien
tattttgtaggggaacggttcaagaatgaaagt

SEQ ID NO: 356323 - DNA, 33 bp, Homo sapien
aactgctctgagtacaagcatttcaaaaaagga

SEQ ID NO: 356324 - DNA, 33 bp, Homo sapien
aactgctctgagtacatgcatttcaaaaaagga

SEQ ID NO: 356325 - DNA, 33 bp, Homo sapien
tggtgaggatgaaatcagataatacgtgtgaag

SEQ ID NO: 356326 - DNA, 33 bp, Homo sapien
tggtgaggatgaaatcggataatacgtgtgaag

SEQ ID NO: 356327 - DNA, 33 bp, Homo sapien
aactatagcacaaagacgttaactctagtgttc

SEQ ID NO: 356328 - DNA, 33 bp, Homo sapien
aactatagcacaaagatgttaactctagtgttc

SEQ ID NO: 356329 - DNA, 33 bp, Homo sapien
attgcattacccactcaccaacactgaatatca

SEQ ID NO: 356330 - DNA, 33 bp, Homo sapien
attgcattacccactcgccaacactgaatatca

SEQ ID NO: 356331 - DNA, 33 bp, Homo sapien
tggtacaaaaagacaaatagtgtgtaatttaac

SEQ ID NO: 356332 - DNA, 33 bp, Homo sapien
tggtacaaaaagacaactagtgtgtaatttaac

SEQ ID NO: 356333 - DNA, 33 bp, Homo sapien
aaataggagtaattctcaaaaccaaaatgagaa

SEQ ID NO: 356334 - DNA, 33 bp, Homo sapien
aaataggagtaattctgaaaaccaaaatgagaa

SEQ ID NO: 356335 - DNA, 33 bp, Homo sapien
tgagtcacatataaaactggtagcttactgtga

SEQ ID NO: 356336 - DNA, 33 bp, Homo sapien
tgagtcacatataaaattggtagcttactgtga

SEQ ID NO: 356337 - DNA, 33 bp, Homo sapien
tccaaacctggtaacactgccattccctctgtg

SEQ ID NO: 356338 - DNA, 33 bp, Homo sapien
tccaaacctggtaacattgccattccctctgtg

SEQ ID NO: 356339 - DNA, 33 bp, Homo sapien
cttctactcacctcgccctgcaagagttactta

SEQ ID NO: 356340 - DNA, 33 bp, Homo sapien
cttctactcacctcgctctgcaagagttactta

SEQ ID NO: 356341 - DNA, 33 bp, Homo sapien
tttcactctcgctctcccccaagcacggcgggc

SEQ ID NO: 356342 - DNA, 33 bp, Homo sapien
tttcactctcgctctctcccaagcacggcgggc

SEQ ID NO: 356343 - DNA, 33 bp, Homo sapien
aagaatgaatacttcacctcaggtaatttcttt

SEQ ID NO: 356344 - DNA, 33 bp, Homo sapien
aagaatgaatacttcagctcaggtaatttcttt

SEQ ID NO: 356345 - DNA, 33 bp, Homo sapien
gccttgatttgctaagcagaagggaaggcaagg

SEQ ID NO: 356346 - DNA, 33 bp, Homo sapien
gccttgatttgctaagtagaagggaaggcaagg

SEQ ID NO: 356347 - DNA, 33 bp, Homo sapien
gagtgagtgggctatacaactgactcaggctcg

SEQ ID NO: 356348 - DNA, 33 bp, Homo sapien
gagtgagtgggctatataactgactcaggctcg

SEQ ID NO: 356349 - DNA, 33 bp, Homo sapien
acctctgcaacctcccagagaccgtcttactgg

SEQ ID NO: 356350 - DNA, 33 bp, Homo sapien
acctctgcaacctcccggagaccgtcttactgg

SEQ ID NO: 356351 - DNA, 33 bp, Homo sapien
acagtttgagaagtgccgactaccacgccgacc

SEQ ID NO: 356352 - DNA, 33 bp, Homo sapien
acagtttgagaagtgctgactaccacgccgacc

SEQ ID NO: 356353 - DNA, 33 bp, Homo sapien
atggctagagttttcacattcaattcggtcctc

SEQ ID NO: 356354 - DNA, 33 bp, Homo sapien
atggctagagttttcatattcaattcggtcctc

SEQ ID NO: 356355 - DNA, 33 bp, Homo sapien
atgatggaagccagaaactttccccatctctct

SEQ ID NO: 356356 - DNA, 33 bp, Homo sapien
atgatggaagccagaacctttccccatctctct

SEQ ID NO: 356357 - DNA, 33 bp, Homo sapien
aggaggtgagcctttaaaaggtgattaggtcat

SEQ ID NO: 356358 - DNA, 33 bp, Homo sapien
aggaggtgagcctttagaaggtgattaggtcat

SEQ ID NO: 356359 - DNA, 33 bp, Homo sapien
attagttgattaatcacgttgaaacaaggtccc

SEQ ID NO: 356360 - DNA, 33 bp, Homo sapien
attagttgattaatcatgttgaaacaaggtccc

SEQ ID NO: 356361 - DNA, 33 bp, Homo sapien
ttgggtaaataccaagcagtgccgtcactggat

SEQ ID NO: 356362 - DNA, 33 bp, Homo sapien
ttgggtaaataccaaggagtgccgtcactggat

SEQ ID NO: 356363 - DNA, 33 bp, Homo sapien
cctcaacctccaactaagttcctctgacaactt

SEQ ID NO: 356364 - DNA, 33 bp, Homo sapien
cctcaacctccaactaggttcctctgacaactt

SEQ ID NO: 356365 - DNA, 33 bp, Homo sapien
ttgaagacagagagtgaaagttcttggagttat

SEQ ID NO: 356366 - DNA, 33 bp, Homo sapien
ttgaagacagagagtggaagttcttggagttat

SEQ ID NO: 356367 - DNA, 33 bp, Homo sapien
gctacacctatgtaaacgtgtatgtacgtatat

SEQ ID NO: 356368 - DNA, 33 bp, Homo sapien
gctacacctatgtaaatgtgtatgtacgtatat

SEQ ID NO: 356369 - DNA, 33 bp, Homo sapien
ctttagggtttcaagacggcatttttaaggtcc

SEQ ID NO: 356370 - DNA, 33 bp, Homo sapien
ctttagggtttcaagagggcatttttaaggtcc

SEQ ID NO: 356371 - DNA, 33 bp, Homo sapien
ggatgctttgagactacgtaaataccctgctag

SEQ ID NO: 356372 - DNA, 33 bp, Homo sapien
ggatgctttgagactatgtaaataccctgctag

SEQ ID NO: 356373 - DNA, 33 bp, Homo sapien
atacgtgacgtgcaacaacttacacctgaggtc

SEQ ID NO: 356374 - DNA, 33 bp, Homo sapien
atacgtgacgtgcaacgacttacacctgaggtc

SEQ ID NO: 356375 - DNA, 33 bp, Homo sapien
tgacaaagcagggtcacctttcatttcaagaag

SEQ ID NO: 356376 - DNA, 33 bp, Homo sapien
tgacaaagcagggtcatctttcatttcaagaag

SEQ ID NO: 356377 - DNA, 33 bp, Homo sapien
ataaagttgtagatcacgaatccaattaaaacc

SEQ ID NO: 356378 - DNA, 33 bp, Homo sapien
ataaagttgtagatcatgaatccaattaaaacc

SEQ ID NO: 356379 - DNA, 33 bp, Homo sapien
ctctcaatatttcctacaacaaaatgctttgtt

SEQ ID NO: 356380 - DNA, 33 bp, Homo sapien
ctctcaatatttcctataacaaaatgctttgtt

SEQ ID NO: 356381 - DNA, 33 bp, Homo sapien
ttctcctaaattcttccatatggtaattagtcc

SEQ ID NO: 356382 - DNA, 33 bp, Homo sapien
ttctcctaaattcttctatatggtaattagtcc

SEQ ID NO: 356383 - DNA, 33 bp, Homo sapien
ttggatcaaaccttaactgtcactccattaaca

SEQ ID NO: 356384 - DNA, 33 bp, Homo sapien
ttggatcaaaccttaattgtcactccattaaca

SEQ ID NO: 356385 - DNA, 33 bp, Homo sapien
gccctggcagaaaatcaaaaagcggctgtcaga

SEQ ID NO: 356386 - DNA, 33 bp, Homo sapien
gccctggcagaaaatcgaaaagcggctgtcaga

SEQ ID NO: 356387 - DNA, 33 bp, Homo sapien
tcctcttcaaaaacccggggtgttgagccagat

SEQ ID NO: 356388 - DNA, 33 bp, Homo sapien
tcctcttcaaaaaccctgggtgttgagccagat

SEQ ID NO: 356389 - DNA, 33 bp, Homo sapien
gccgagaattttagcactgaggtcttgggcaag

SEQ ID NO: 356390 - DNA, 33 bp, Homo sapien
gccgagaattttagcattgaggtcttgggcaag

SEQ ID NO: 356391 - DNA, 33 bp, Homo sapien
gttcagagaaaggtaactccaaacaattttaga

SEQ ID NO: 356392 - DNA, 33 bp, Homo sapien
gttcagagaaaggtaagtccaaacaattttaga

SEQ ID NO: 356393 - DNA, 33 bp, Homo sapien
agggccctgcttaagaaataggtgggtgatgag

SEQ ID NO: 356394 - DNA, 33 bp, Homo sapien
agggccctgcttaagagataggtgggtgatgag

SEQ ID NO: 356395 - DNA, 33 bp, Homo sapien
aaggaaaatggccatcacgtcacagtacctgtt

SEQ ID NO: 356396 - DNA, 33 bp, Homo sapien
aaggaaaatggccatcgcgtcacagtacctgtt

SEQ ID NO: 356397 - DNA, 33 bp, Homo sapien
ccgtcatcctcaagaacaagtccgagccaggca

SEQ ID NO: 356398 - DNA, 33 bp, Homo sapien
ccgtcatcctcaagaagaagtccgagccaggca

SEQ ID NO: 356399 - DNA, 33 bp, Homo sapien
agtctcctgcttggaaatgtgtacccgtgccca

SEQ ID NO: 356400 - DNA, 33 bp, Homo sapien
agtctcctgcttggaattgtgtacccgtgccca

SEQ ID NO: 356401 - DNA, 33 bp, Homo sapien
aatgatgtaacagcccactgtgcaaacaaaagt

SEQ ID NO: 356402 - DNA, 33 bp, Homo sapien
aatgatgtaacagcccgctgtgcaaacaaaagt

SEQ ID NO: 356403 - DNA, 33 bp, Homo sapien
cccaatcctttctccacgcaagaatataagaaa

SEQ ID NO: 356404 - DNA, 33 bp, Homo sapien
cccaatcctttctccatgcaagaatataagaaa

SEQ ID NO: 356405 - DNA, 33 bp, Homo sapien
tgctctaaccttgatgcagcttcctctcttcct

SEQ ID NO: 356406 - DNA, 33 bp, Homo sapien
tgctctaaccttgatgtagcttcctctcttcct

SEQ ID NO: 356407 - DNA, 33 bp, Homo sapien
gtcactcatccttacactcccagcactttgccc

SEQ ID NO: 356408 - DNA, 33 bp, Homo sapien
gtcactcatccttacattcccagcactttgccc

SEQ ID NO: 356409 - DNA, 33 bp, Homo sapien
gtccagttacagcctcacggtctatcagggctg

SEQ ID NO: 356410 - DNA, 33 bp, Homo sapien
gtccagttacagcctcgcggtctatcagggctg

SEQ ID NO: 356411 - DNA, 33 bp, Homo sapien
ggaacggttcttacccagagatctgtaggcagg

SEQ ID NO: 356412 - DNA, 33 bp, Homo sapien
ggaacggttcttacccggagatctgtaggcagg

SEQ ID NO: 356413 - DNA, 33 bp, Homo sapien
caattccaaagtttcaatctcattggaattaca

SEQ ID NO: 356414 - DNA, 33 bp, Homo sapien
caattccaaagtttcagtctcattggaattaca

SEQ ID NO: 356415 - DNA, 33 bp, Homo sapien
aagataagcagatttcacaaccaaaaaatatcg

SEQ ID NO: 356416 - DNA, 33 bp, Homo sapien
aagataagcagatttcgcaaccaaaaaatatcg

SEQ ID NO: 356417 - DNA, 33 bp, Homo sapien
ttggttacctgtcccacgtggactttgaagtcc

SEQ ID NO: 356418 - DNA, 33 bp, Homo sapien
ttggttacctgtcccatgtggactttgaagtcc

SEQ ID NO: 356419 - DNA, 33 bp, Homo sapien
ccaacaaagcatggaacaaatcacggctcttgg

SEQ ID NO: 356420 - DNA, 33 bp, Homo sapien
ccaacaaagcatggaagaaatcacggctcttgg

SEQ ID NO: 356421 - DNA, 33 bp, Homo sapien
gggcctgggagtttcccgaattcatcctgtacc

SEQ ID NO: 356422 - DNA, 33 bp, Homo sapien
gggcctgggagtttcctgaattcatcctgtacc

SEQ ID NO: 356423 - DNA, 33 bp, Homo sapien
atggaacagaaaaacactaatggccagaggaac

SEQ ID NO: 356424 - DNA, 33 bp, Homo sapien
atggaacagaaaaacattaatggccagaggaac

SEQ ID NO: 356425 - DNA, 33 bp, Homo sapien
ataagggctggacatgaattgtgctgagcacca

SEQ ID NO: 356426 - DNA, 33 bp, Homo sapien
ataagggctggacatggattgtgctgagcacca

SEQ ID NO: 356427 - DNA, 33 bp, Homo sapien
tgtgtgcgcccttccaaatgccccaggatccac

SEQ ID NO: 356428 - DNA, 33 bp, Homo sapien
tgtgtgcgcccttccagatgccccaggatccac

SEQ ID NO: 356429 - DNA, 33 bp, Homo sapien
gttaagtgtttaatgcacagagtttcagcatag

SEQ ID NO: 356430 - DNA, 33 bp, Homo sapien
gttaagtgtttaatgcgcagagtttcagcatag

SEQ ID NO: 356431 - DNA, 33 bp, Homo sapien
gttttatatttctcacaaaaaaattagagtaag

SEQ ID NO: 356432 - DNA, 33 bp, Homo sapien
gttttatatttctcaccaaaaaattagagtaag

SEQ ID NO: 356433 - DNA, 33 bp, Homo sapien
aagacagctcaacccactggaacaaacagactc

SEQ ID NO: 356434 - DNA, 33 bp, Homo sapien
aagacagctcaacccattggaacaaacagactc

SEQ ID NO: 356435 - DNA, 33 bp, Homo sapien
ccctttgttgggggtacgcatgtatgaacacac

SEQ ID NO: 356436 - DNA, 33 bp, Homo sapien
ccctttgttgggggtatgcatgtatgaacacac

SEQ ID NO: 356437 - DNA, 33 bp, Homo sapien
tatctgtctttctcaacagccattcatgcttta

SEQ ID NO: 356438 - DNA, 33 bp, Homo sapien
tatctgtctttctcaatagccattcatgcttta

SEQ ID NO: 356439 - DNA, 33 bp, Homo sapien
aagccagcagatgacagatcagtttggaaaagg

SEQ ID NO: 356440 - DNA, 33 bp, Homo sapien
aagccagcagatgacatatcagtttggaaaagg

SEQ ID NO: 356441 - DNA, 33 bp, Homo sapien
catggtaccacaaggccatctcttggtcttaca

SEQ ID NO: 356442 - DNA, 33 bp, Homo sapien
catggtaccacaaggctatctcttggtcttaca

SEQ ID NO: 356443 - DNA, 33 bp, Homo sapien
aagtaaaattataatgcaaagccacaaaggtat

SEQ ID NO: 356444 - DNA, 33 bp, Homo sapien
aagtaaaattataatggaaagccacaaaggtat

SEQ ID NO: 356445 - DNA, 33 bp, Homo sapien
tccctgctctactcctaactggttaacaagaaa

SEQ ID NO: 356446 - DNA, 33 bp, Homo sapien
tccctgctctactcctgactggttaacaagaaa

SEQ ID NO: 356447 - DNA, 33 bp, Homo sapien
ttgtttggtagtcttacagcatggtagattcat

SEQ ID NO: 356448 - DNA, 33 bp, Homo sapien
ttgtttggtagtcttatagcatggtagattcat

SEQ ID NO: 356449 - DNA, 33 bp, Homo sapien
aaataattagcaccaaacaaagaagaataaaaa

SEQ ID NO: 356450 - DNA, 33 bp, Homo sapien
aaataattagcaccaatcaaagaagaataaaaa

SEQ ID NO: 356451 - DNA, 33 bp, Homo sapien
cagcaagctgtgagcacatatattaaagggatg

SEQ ID NO: 356452 - DNA, 33 bp, Homo sapien
cagcaagctgtgagcatatatattaaagggatg

SEQ ID NO: 356453 - DNA, 33 bp, Homo sapien
tagggagttaataaaaacatccacagagcgcaa

SEQ ID NO: 356454 - DNA, 33 bp, Homo sapien
tagggagttaataaaaccatccacagagcgcaa

SEQ ID NO: 356455 - DNA, 33 bp, Homo sapien
tgtaaagaagtatccacggaactcagcaactgg

SEQ ID NO: 356456 - DNA, 33 bp, Homo sapien
tgtaaagaagtatccatggaactcagcaactgg

SEQ ID NO: 356457 - DNA, 33 bp, Homo sapien
ggtcatcaaggaaacagacttcagtcctacagt

SEQ ID NO: 356458 - DNA, 33 bp, Homo sapien
ggtcatcaaggaaacatacttcagtcctacagt

SEQ ID NO: 356459 - DNA, 33 bp, Homo sapien
ctgtatatcttgctaaaaattacaggtcttctt

SEQ ID NO: 356460 - DNA, 33 bp, Homo sapien
ctgtatatcttgctaacaattacaggtcttctt

SEQ ID NO: 356461 - DNA, 33 bp, Homo sapien
gagcctatccatgcaacagtccgtgcctgacag

SEQ ID NO: 356462 - DNA, 33 bp, Homo sapien
gagcctatccatgcaatagtccgtgcctgacag

SEQ ID NO: 356463 - DNA, 33 bp, Homo sapien
ctcctggggaccaaaacgtcagcagcagtaaga

SEQ ID NO: 356464 - DNA, 33 bp, Homo sapien
ctcctggggaccaaaatgtcagcagcagtaaga

SEQ ID NO: 356465 - DNA, 33 bp, Homo sapien
tttgttaatgaagacacagccttgtaaagtaca

SEQ ID NO: 356466 - DNA, 33 bp, Homo sapien
tttgttaatgaagacagagccttgtaaagtaca

SEQ ID NO: 356467 - DNA, 33 bp, Homo sapien
ggctctgagtagccaaccagtatggaccaggaa

SEQ ID NO: 356468 - DNA, 33 bp, Homo sapien
ggctctgagtagccaatcagtatggaccaggaa

SEQ ID NO: 356469 - DNA, 33 bp, Homo sapien
ctgcctggagctaagggactgcaatccagtgta

SEQ ID NO: 356470 - DNA, 33 bp, Homo sapien
ctgcctggagctaaggtactgcaatccagtgta

SEQ ID NO: 356471 - DNA, 33 bp, Homo sapien
cagttctttttcaaaactgcagtcacatccagt

SEQ ID NO: 356472 - DNA, 33 bp, Homo sapien
cagttctttttcaaaattgcagtcacatccagt

SEQ ID NO: 356473 - DNA, 33 bp, Homo sapien
atgagtagttgtgtaacgaacacctgggagaac

SEQ ID NO: 356474 - DNA, 33 bp, Homo sapien
atgagtagttgtgtaatgaacacctgggagaac

SEQ ID NO: 356475 - DNA, 33 bp, Homo sapien
aatgctttctcacaaagaataattggcacttaa

SEQ ID NO: 356476 - DNA, 33 bp, Homo sapien
aatgctttctcacaaataataattggcacttaa

SEQ ID NO: 356477 - DNA, 33 bp, Homo sapien
tgtagttaggtgggataaataaatccggacatc

SEQ ID NO: 356478 - DNA, 33 bp, Homo sapien
tgtagttaggtgggatgaataaatccggacatc

SEQ ID NO: 356479 - DNA, 33 bp, Homo sapien
ggatgaataatattcaaacgttataacacataa

SEQ ID NO: 356480 - DNA, 33 bp, Homo sapien
ggatgaataatattcagacgttataacacataa

SEQ ID NO: 356481 - DNA, 33 bp, Homo sapien
aattcccaaaaaataacgccctgctatttgcca

SEQ ID NO: 356482 - DNA, 33 bp, Homo sapien
aattcccaaaaaataatgccctgctatttgcca

SEQ ID NO: 356483 - DNA, 33 bp, Homo sapien
caatgacagtttgtaacgtgaaaaattatgtat

SEQ ID NO: 356484 - DNA, 33 bp, Homo sapien
caatgacagtttgtaatgtgaaaaattatgtat

SEQ ID NO: 356485 - DNA, 33 bp, Homo sapien
taccttcaaataataccataccacttcacaagt

SEQ ID NO: 356486 - DNA, 33 bp, Homo sapien
taccttcaaataatacgataccacttcacaagt

SEQ ID NO: 356487 - DNA, 33 bp, Homo sapien
tgataggagggaccaacctacttcttagttatt

SEQ ID NO: 356488 - DNA, 33 bp, Homo sapien
tgataggagggaccaagctacttcttagttatt

SEQ ID NO: 356489 - DNA, 33 bp, Homo sapien
tattcaagaaaaatacaatactttgagaccaaa

SEQ ID NO: 356490 - DNA, 33 bp, Homo sapien
tattcaagaaaaatacgatactttgagaccaaa

SEQ ID NO: 356491 - DNA, 33 bp, Homo sapien
acttattttaaattctcactatgtttgatacaa

SEQ ID NO: 356492 - DNA, 33 bp, Homo sapien
acttattttaaattctgactatgtttgatacaa

SEQ ID NO: 356493 - DNA, 33 bp, Homo sapien
aatagtttgtaaattacatactgcaattttagg

SEQ ID NO: 356494 - DNA, 33 bp, Homo sapien
aatagtttgtaaattatatactgcaattttagg

SEQ ID NO: 356495 - DNA, 33 bp, Homo sapien
gtactgacagatttaactgaaacatccaaacct

SEQ ID NO: 356496 - DNA, 33 bp, Homo sapien
gtactgacagatttaattgaaacatccaaacct

SEQ ID NO: 356497 - DNA, 33 bp, Homo sapien
ttcattacttttggaacactttttgtgtatcct

SEQ ID NO: 356498 - DNA, 33 bp, Homo sapien
ttcattacttttggaatactttttgtgtatcct

SEQ ID NO: 356499 - DNA, 33 bp, Homo sapien
cagaaagtgaaaactacgctgtgcagctgaggc

SEQ ID NO: 356500 - DNA, 33 bp, Homo sapien
cagaaagtgaaaactatgctgtgcagctgaggc

SEQ ID NO: 356501 - DNA, 33 bp, Homo sapien
ccagttcctcatagcaatctctcccttccagat

SEQ ID NO: 356502 - DNA, 33 bp, Homo sapien
ccagttcctcatagcagtctctcccttccagat

SEQ ID NO: 356503 - DNA, 33 bp, Homo sapien
ccctattttcctaaaaccagggcatacatatac

SEQ ID NO: 356504 - DNA, 33 bp, Homo sapien
ccctattttcctaaaagcagggcatacatatac

SEQ ID NO: 356505 - DNA, 33 bp, Homo sapien
ccaactggaacaagcagaacaagtcacctcttc

SEQ ID NO: 356506 - DNA, 33 bp, Homo sapien
ccaactggaacaagcataacaagtcacctcttc

SEQ ID NO: 356507 - DNA, 33 bp, Homo sapien
cattcgagcagagtccagaagaaaaggaaacct

SEQ ID NO: 356508 - DNA, 33 bp, Homo sapien
cattcgagcagagtccggaagaaaaggaaacct

SEQ ID NO: 356509 - DNA, 33 bp, Homo sapien
aagacccagtgacagaacaaaccttcaattatt

SEQ ID NO: 356510 - DNA, 33 bp, Homo sapien
aagacccagtgacagagcaaaccttcaattatt

SEQ ID NO: 356511 - DNA, 33 bp, Homo sapien
ctttgcaaaattagcacagaaattctggcaaac

SEQ ID NO: 356512 - DNA, 33 bp, Homo sapien
ctttgcaaaattagcatagaaattctggcaaac

SEQ ID NO: 356513 - DNA, 33 bp, Homo sapien
cttttagcccttattacgcactggccttaagtg

SEQ ID NO: 356514 - DNA, 33 bp, Homo sapien
cttttagcccttattatgcactggccttaagtg

SEQ ID NO: 356515 - DNA, 33 bp, Homo sapien
ccccaagcggttcttacggacagccctatgtgg

SEQ ID NO: 356516 - DNA, 33 bp, Homo sapien
ccccaagcggttcttatggacagccctatgtgg

SEQ ID NO: 356517 - DNA, 33 bp, Homo sapien
ccctcccataatagaacacagactctaaagaat

SEQ ID NO: 356518 - DNA, 33 bp, Homo sapien
ccctcccataatagaagacagactctaaagaat

SEQ ID NO: 356519 - DNA, 33 bp, Homo sapien
ttccagcttgcccagacgtgccatgcagccact

SEQ ID NO: 356520 - DNA, 33 bp, Homo sapien
ttccagcttgcccagatgtgccatgcagccact

SEQ ID NO: 356521 - DNA, 33 bp, Homo sapien
tgagataggaccagtccatatttttcaatagat

SEQ ID NO: 356522 - DNA, 33 bp, Homo sapien
tgagataggaccagtctatatttttcaatagat

SEQ ID NO: 356523 - DNA, 33 bp, Homo sapien
ggaaattgtatgagtaagaatgaaccatctcac

SEQ ID NO: 356524 - DNA, 33 bp, Homo sapien
ggaaattgtatgagtaggaatgaaccatctcac

SEQ ID NO: 356525 - DNA, 33 bp, Homo sapien
aggtaacacaagccaaacttacacaatttgaca

SEQ ID NO: 356526 - DNA, 33 bp, Homo sapien
aggtaacacaagccaatcttacacaatttgaca

SEQ ID NO: 356527 - DNA, 33 bp, Homo sapien
tccagacaactatctaccttaacggtctggaac

SEQ ID NO: 356528 - DNA, 33 bp, Homo sapien
tccagacaactatctatcttaacggtctggaac

SEQ ID NO: 356529 - DNA, 33 bp, Homo sapien
gaaaacattttaagcaccagattcgtgaaagct

SEQ ID NO: 356530 - DNA, 33 bp, Homo sapien
gaaaacattttaagcatcagattcgtgaaagct

SEQ ID NO: 356531 - DNA, 33 bp, Homo sapien
aacttttacagaaggactaaatgttcccaaagt

SEQ ID NO: 356532 - DNA, 33 bp, Homo sapien
aacttttacagaaggattaaatgttcccaaagt

SEQ ID NO: 356533 - DNA, 33 bp, Homo sapien
ccctcttgaagtccaccgattatttgtctgttt

SEQ ID NO: 356534 - DNA, 33 bp, Homo sapien
ccctcttgaagtccactgattatttgtctgttt

SEQ ID NO: 356535 - DNA, 33 bp, Homo sapien
caaccagcaatgaaacaggaacttcggcctcca

SEQ ID NO: 356536 - DNA, 33 bp, Homo sapien
caaccagcaatgaaacgggaacttcggcctcca

SEQ ID NO: 356537 - DNA, 33 bp, Homo sapien
atccaacagagtgatacggattgctgtttcaga

SEQ ID NO: 356538 - DNA, 33 bp, Homo sapien
atccaacagagtgatatggattgctgtttcaga

SEQ ID NO: 356539 - DNA, 33 bp, Homo sapien
gcccgccaagtacaccaagatgagtaagagcct

SEQ ID NO: 356540 - DNA, 33 bp, Homo sapien
gcccgccaagtacaccgagatgagtaagagcct

SEQ ID NO: 356541 - DNA, 33 bp, Homo sapien
agtatattttctcacacagacactggctggctt

SEQ ID NO: 356542 - DNA, 33 bp, Homo sapien
agtatattttctcacatagacactggctggctt

SEQ ID NO: 356543 - DNA, 33 bp, Homo sapien
tctgaaaagtctaataccaaacaggtttctgaa

SEQ ID NO: 356544 - DNA, 33 bp, Homo sapien
tctgaaaagtctaatatcaaacaggtttctgaa

SEQ ID NO: 356545 - DNA, 33 bp, Homo sapien
atctctgcaatgttccactggctcttcagaaac

SEQ ID NO: 356546 - DNA, 33 bp, Homo sapien
atctctgcaatgttccgctggctcttcagaaac

SEQ ID NO: 356547 - DNA, 33 bp, Homo sapien
attaccattgtgatagccctgcgtgtgatagtt

SEQ ID NO: 356548 - DNA, 33 bp, Homo sapien
attaccattgtgatagtcctgcgtgtgatagtt

SEQ ID NO: 356549 - DNA, 33 bp, Homo sapien
gtagctcattaaaagacggttcaggccactcct

SEQ ID NO: 356550 - DNA, 33 bp, Homo sapien
gtagctcattaaaagatggttcaggccactcct

SEQ ID NO: 356551 - DNA, 33 bp, Homo sapien
ctttctatcagccctgcagctatgtcgctatat

SEQ ID NO: 356552 - DNA, 33 bp, Homo sapien
ctttctatcagccctgtagctatgtcgctatat

SEQ ID NO: 356553 - DNA, 33 bp, Homo sapien
agagaaaagaaaatttcgatgaggttcctataa

SEQ ID NO: 356554 - DNA, 33 bp, Homo sapien
agagaaaagaaaattttgatgaggttcctataa

SEQ ID NO: 356555 - DNA, 33 bp, Homo sapien
agtctcaaagctgtataaatgtcaatgagcaaa

SEQ ID NO: 356556 - DNA, 33 bp, Homo sapien
agtctcaaagctgtatgaatgtcaatgagcaaa

SEQ ID NO: 356557 - DNA, 33 bp, Homo sapien
aacgacgagcagatgacaatgacaacattttca

SEQ ID NO: 356558 - DNA, 33 bp, Homo sapien
aacgacgagcagatgataatgacaacattttca

SEQ ID NO: 356559 - DNA, 33 bp, Homo sapien
catttttaaagaggcaaactattgaaaactact

SEQ ID NO: 356560 - DNA, 33 bp, Homo sapien
catttttaaagaggcacactattgaaaactact

SEQ ID NO: 356561 - DNA, 33 bp, Homo sapien
acttttaagaaaaaccagcaggcagtaacattt

SEQ ID NO: 356562 - DNA, 33 bp, Homo sapien
acttttaagaaaaaccggcaggcagtaacattt

SEQ ID NO: 356563 - DNA, 33 bp, Homo sapien
acgtatgtttagattacctcgtcctctctctga

SEQ ID NO: 356564 - DNA, 33 bp, Homo sapien
acgtatgtttagattatctcgtcctctctctga

SEQ ID NO: 356565 - DNA, 33 bp, Homo sapien
taccttcggcactgaacggatttttctcattgc

SEQ ID NO: 356566 - DNA, 33 bp, Homo sapien
taccttcggcactgaatggatttttctcattgc

SEQ ID NO: 356567 - DNA, 33 bp, Homo sapien
ctgaatatgctgtttcaaatttcaaatgtgcat

SEQ ID NO: 356568 - DNA, 33 bp, Homo sapien
ctgaatatgctgtttcgaatttcaaatgtgcat

SEQ ID NO: 356569 - DNA, 33 bp, Homo sapien
gaggattgttactctacctgttagacctgggtc

SEQ ID NO: 356570 - DNA, 33 bp, Homo sapien
gaggattgttactctatctgttagacctgggtc

SEQ ID NO: 356571 - DNA, 33 bp, Homo sapien
gctctcagggagaaagaagacctcgtgttgttt

SEQ ID NO: 356572 - DNA, 33 bp, Homo sapien
gctctcagggagaaaggagacctcgtgttgttt

SEQ ID NO: 356573 - DNA, 33 bp, Homo sapien
aatccaggatgtgtacaaagagatggagaatag

SEQ ID NO: 356574 - DNA, 33 bp, Homo sapien
aatccaggatgtgtacgaagagatggagaatag

SEQ ID NO: 356575 - DNA, 33 bp, Homo sapien
cctgctgctgtcatccagagtcttgaaaccaaa

SEQ ID NO: 356576 - DNA, 33 bp, Homo sapien
cctgctgctgtcatccggagtcttgaaaccaaa

SEQ ID NO: 356577 - DNA, 33 bp, Homo sapien
gttgtaggctcttcaacagctactagactcatc

SEQ ID NO: 356578 - DNA, 33 bp, Homo sapien
gttgtaggctcttcaatagctactagactcatc

SEQ ID NO: 356579 - DNA, 33 bp, Homo sapien
tgaatctcttgccaaaactgactgcaagtgaag

SEQ ID NO: 356580 - DNA, 33 bp, Homo sapien
tgaatctcttgccaaagctgactgcaagtgaag

SEQ ID NO: 356581 - DNA, 33 bp, Homo sapien
aaaaaatctaacggcaatgaaaccaggtagaag

SEQ ID NO: 356582 - DNA, 33 bp, Homo sapien
aaaaaatctaacggcattgaaaccaggtagaag

SEQ ID NO: 356583 - DNA, 33 bp, Homo sapien
tgacctgggtctgaaactcaattctgctgcaca

SEQ ID NO: 356584 - DNA, 33 bp, Homo sapien
tgacctgggtctgaaattcaattctgctgcaca

SEQ ID NO: 356585 - DNA, 33 bp, Homo sapien
gtgagtggctgaattacagtgaaaattgaattc

SEQ ID NO: 356586 - DNA, 33 bp, Homo sapien
gtgagtggctgaattatagtgaaaattgaattc

SEQ ID NO: 356587 - DNA, 33 bp, Homo sapien
atctcattccttcccaatcaatgttctcacttt

SEQ ID NO: 356588 - DNA, 33 bp, Homo sapien
atctcattccttcccagtcaatgttctcacttt

SEQ ID NO: 356589 - DNA, 33 bp, Homo sapien
cacacatccccatgctaactttcaggatctcat

SEQ ID NO: 356590 - DNA, 33 bp, Homo sapien
cacacatccccatgctgactttcaggatctcat

SEQ ID NO: 356591 - DNA, 33 bp, Homo sapien
cacaatggaaaacttcaccaagaacaaaaaaga

SEQ ID NO: 356592 - DNA, 33 bp, Homo sapien
cacaatggaaaacttcgccaagaacaaaaaaga

SEQ ID NO: 356593 - DNA, 33 bp, Homo sapien
gtttaatacctgaacaaaagccagggttccctt

SEQ ID NO: 356594 - DNA, 33 bp, Homo sapien
gtttaatacctgaacacaagccagggttccctt

SEQ ID NO: 356595 - DNA, 33 bp, Homo sapien
ctgacctccatttttccactggcaagagtaaag

SEQ ID NO: 356596 - DNA, 33 bp, Homo sapien
ctgacctccatttttctactggcaagagtaaag

SEQ ID NO: 356597 - DNA, 33 bp, Homo sapien
tttgcattcccgtatgacactgtacatgcctcc

SEQ ID NO: 356598 - DNA, 33 bp, Homo sapien
tttgcattcccgtatggcactgtacatgcctcc

SEQ ID NO: 356599 - DNA, 33 bp, Homo sapien
tagcagaataagagtaaccgtcataggatgaag

SEQ ID NO: 356600 - DNA, 33 bp, Homo sapien
tagcagaataagagtatccgtcataggatgaag

SEQ ID NO: 356601 - DNA, 33 bp, Homo sapien
ggtaactcctgggtcaaatctcttcatcctatg

SEQ ID NO: 356602 - DNA, 33 bp, Homo sapien
ggtaactcctgggtcagatctcttcatcctatg

SEQ ID NO: 356603 - DNA, 33 bp, Homo sapien
gagtctaataacatagccattccagagacattg

SEQ ID NO: 356604 - DNA, 33 bp, Homo sapien
gagtctaataacatagtcattccagagacattg

SEQ ID NO: 356605 - DNA, 33 bp, Homo sapien
tgagaagtgctgaagacagctttattgaagtaa

SEQ ID NO: 356606 - DNA, 33 bp, Homo sapien
tgagaagtgctgaagatagctttattgaagtaa

SEQ ID NO: 356607 - DNA, 33 bp, Homo sapien
ttaggaaggaagaacacggtagaagtgaaaaac

SEQ ID NO: 356608 - DNA, 33 bp, Homo sapien
ttaggaaggaagaacatggtagaagtgaaaaac

SEQ ID NO: 356609 - DNA, 33 bp, Homo sapien
tcacgcacagttcccgaacgtgaccttgatctt

SEQ ID NO: 356610 - DNA, 33 bp, Homo sapien
tcacgcacagttcccgtacgtgaccttgatctt

SEQ ID NO: 356611 - DNA, 33 bp, Homo sapien
tgcccctgaagctgaccgatagtttaccaccta

SEQ ID NO: 356612 - DNA, 33 bp, Homo sapien
tgcccctgaagctgactgatagtttaccaccta

SEQ ID NO: 356613 - DNA, 33 bp, Homo sapien
tctaaacccttccggacctgcatctcttggtgt

SEQ ID NO: 356614 - DNA, 33 bp, Homo sapien
tctaaacccttccggatctgcatctcttggtgt

SEQ ID NO: 356615 - DNA, 33 bp, Homo sapien
tgcagacattttctacactatttgtacaattaa

SEQ ID NO: 356616 - DNA, 33 bp, Homo sapien
tgcagacattttctacgctatttgtacaattaa

SEQ ID NO: 356617 - DNA, 33 bp, Homo sapien
atggcagattgttaaaggaaacatattctattt

SEQ ID NO: 356618 - DNA, 33 bp, Homo sapien
atggcagattgttaaatgaaacatattctattt

SEQ ID NO: 356619 - DNA, 33 bp, Homo sapien
aagtcagacagtgcagaagcaggcagaggggca

SEQ ID NO: 356620 - DNA, 33 bp, Homo sapien
aagtcagacagtgcaggagcaggcagaggggca

SEQ ID NO: 356621 - DNA, 33 bp, Homo sapien
actgatgagataaggcaaagaagcaacatgtta

SEQ ID NO: 356622 - DNA, 33 bp, Homo sapien
actgatgagataaggcgaagaagcaacatgtta

SEQ ID NO: 356623 - DNA, 33 bp, Homo sapien
tgggcaaacatgatgaagcctggatgattctca

SEQ ID NO: 356624 - DNA, 33 bp, Homo sapien
tgggcaaacatgatgaggcctggatgattctca

SEQ ID NO: 356625 - DNA, 33 bp, Homo sapien
tccgtgtctttgtggacgtgcttgtgtatgccc

SEQ ID NO: 356626 - DNA, 33 bp, Homo sapien
tccgtgtctttgtggatgtgcttgtgtatgccc

SEQ ID NO: 356627 - DNA, 33 bp, Homo sapien
gcaaagaaaggaaaaactgacatttgagaggat

SEQ ID NO: 356628 - DNA, 33 bp, Homo sapien
gcaaagaaaggaaaaattgacatttgagaggat

SEQ ID NO: 356629 - DNA, 33 bp, Homo sapien
aaacatttactgaccacacaccatgaaggccaa

SEQ ID NO: 356630 - DNA, 33 bp, Homo sapien
aaacatttactgaccatacaccatgaaggccaa

SEQ ID NO: 356631 - DNA, 33 bp, Homo sapien
catgctcaccaaaaaacaccttcattttagact

SEQ ID NO: 356632 - DNA, 33 bp, Homo sapien
catgctcaccaaaaaataccttcattttagact

SEQ ID NO: 356633 - DNA, 33 bp, Homo sapien
tttactgagacaccagacgcatatgtgggtgca

SEQ ID NO: 356634 - DNA, 33 bp, Homo sapien
tttactgagacaccaggcgcatatgtgggtgca

SEQ ID NO: 356635 - DNA, 33 bp, Homo sapien
ggatatattaagaaaaacaaaggtctgcaacag

SEQ ID NO: 356636 - DNA, 33 bp, Homo sapien
ggatatattaagaaaagcaaaggtctgcaacag

SEQ ID NO: 356637 - DNA, 33 bp, Homo sapien
gacagattgaatagaaagtaacaggagacaact

SEQ ID NO: 356638 - DNA, 33 bp, Homo sapien
gacagattgaatagaatgtaacaggagacaact

SEQ ID NO: 356639 - DNA, 33 bp, Homo sapien
aacaataatgagttccggaagtttaataagtgt

SEQ ID NO: 356640 - DNA, 33 bp, Homo sapien
aacaataatgagttcctgaagtttaataagtgt

SEQ ID NO: 356641 - DNA, 33 bp, Homo sapien
cagacctctacgagcacaagttcatcaactgtc

SEQ ID NO: 356642 - DNA, 33 bp, Homo sapien
cagacctctacgagcataagttcatcaactgtc

SEQ ID NO: 356643 - DNA, 33 bp, Homo sapien
aactgatcagaacggaagaagatggcctctttc

SEQ ID NO: 356644 - DNA, 33 bp, Homo sapien
aactgatcagaacggatgaagatggcctctttc

SEQ ID NO: 356645 - DNA, 33 bp, Homo sapien
agagagtaggctataaagaatgattaaatatta

SEQ ID NO: 356646 - DNA, 33 bp, Homo sapien
agagagtaggctataaggaatgattaaatatta

SEQ ID NO: 356647 - DNA, 33 bp, Homo sapien
caagcttgcctctagcacagaaacaaaacagag

SEQ ID NO: 356648 - DNA, 33 bp, Homo sapien
caagcttgcctctagcgcagaaacaaaacagag

SEQ ID NO: 356649 - DNA, 33 bp, Homo sapien
aggtgctcagctgatacctatttcactaggata

SEQ ID NO: 356650 - DNA, 33 bp, Homo sapien
aggtgctcagctgatatctatttcactaggata

SEQ ID NO: 356651 - DNA, 33 bp, Homo sapien
aaaacttctactccgccgataacaagaaatgac

SEQ ID NO: 356652 - DNA, 33 bp, Homo sapien
aaaacttctactccgctgataacaagaaatgac

SEQ ID NO: 356653 - DNA, 33 bp, Homo sapien
ctcaattataccttaacgattgatgaccttcgg

SEQ ID NO: 356654 - DNA, 33 bp, Homo sapien
ctcaattataccttaatgattgatgaccttcgg

SEQ ID NO: 356655 - DNA, 33 bp, Homo sapien
aagattactctgccagaactctggtcggcctac

SEQ ID NO: 356656 - DNA, 33 bp, Homo sapien
aagattactctgccagcactctggtcggcctac

SEQ ID NO: 356657 - DNA, 33 bp, Homo sapien
tttcctcttctgaacacccctatctgagaccca

SEQ ID NO: 356658 - DNA, 33 bp, Homo sapien
tttcctcttctgaacatccctatctgagaccca

SEQ ID NO: 356659 - DNA, 33 bp, Homo sapien
caggtatggaatcttacgtttgtactaatcgaa

SEQ ID NO: 356660 - DNA, 33 bp, Homo sapien
caggtatggaatcttaggtttgtactaatcgaa

SEQ ID NO: 356661 - DNA, 33 bp, Homo sapien
tcaatccttgacttccgcatttgtgggcacttt

SEQ ID NO: 356662 - DNA, 33 bp, Homo sapien
tcaatccttgacttcctcatttgtgggcacttt

SEQ ID NO: 356663 - DNA, 33 bp, Homo sapien
taatacctagtgagaacggattgttaagtacag

SEQ ID NO: 356664 - DNA, 33 bp, Homo sapien
taatacctagtgagaatggattgttaagtacag

SEQ ID NO: 356665 - DNA, 33 bp, Homo sapien
ctctgaaaagatatccaagcaaaaatctgaaaa

SEQ ID NO: 356666 - DNA, 33 bp, Homo sapien
ctctgaaaagatatccgagcaaaaatctgaaaa

SEQ ID NO: 356667 - DNA, 33 bp, Homo sapien
tgaaaaccatcttagaaatgcctgcagactccc

SEQ ID NO: 356668 - DNA, 33 bp, Homo sapien
tgaaaaccatcttagatatgcctgcagactccc

SEQ ID NO: 356669 - DNA, 33 bp, Homo sapien
tatagtatagtcatcacggtggagtctccaaag

SEQ ID NO: 356670 - DNA, 33 bp, Homo sapien
tatagtatagtcatcatggtggagtctccaaag

SEQ ID NO: 356671 - DNA, 33 bp, Homo sapien
tctacattctccaagacaaagagtccatgttgg

SEQ ID NO: 356672 - DNA, 33 bp, Homo sapien
tctacattctccaagataaagagtccatgttgg

SEQ ID NO: 356673 - DNA, 33 bp, Homo sapien
ggagtctgctctgtgacgtttccatttactacg

SEQ ID NO: 356674 - DNA, 33 bp, Homo sapien
ggagtctgctctgtgatgtttccatttactacg

SEQ ID NO: 356675 - DNA, 33 bp, Homo sapien
tggacagctttgtgaacgaatgatccacaacca

SEQ ID NO: 356676 - DNA, 33 bp, Homo sapien
tggacagctttgtgaatgaatgatccacaacca

SEQ ID NO: 356677 - DNA, 33 bp, Homo sapien
ttcatatctcaaatgccgatcctcattctgttg

SEQ ID NO: 356678 - DNA, 33 bp, Homo sapien
ttcatatctcaaatgctgatcctcattctgttg

SEQ ID NO: 356679 - DNA, 33 bp, Homo sapien
tttattattgatgagaagtatattagttatgta

SEQ ID NO: 356680 - DNA, 33 bp, Homo sapien
tttattattgatgagatgtatattagttatgta

SEQ ID NO: 356681 - DNA, 33 bp, Homo sapien
agggggtggacaatcaaaagccaaatacactgc

SEQ ID NO: 356682 - DNA, 33 bp, Homo sapien
agggggtggacaatcagaagccaaatacactgc

SEQ ID NO: 356683 - DNA, 33 bp, Homo sapien
attggcccacgtccctaaagcttgaagaactcg

SEQ ID NO: 356684 - DNA, 33 bp, Homo sapien
attggcccacgtccctgaagcttgaagaactcg

SEQ ID NO: 356685 - DNA, 33 bp, Homo sapien
tatcactcagcaagacacctcaactaatttaca

SEQ ID NO: 356686 - DNA, 33 bp, Homo sapien
tatcactcagcaagacgcctcaactaatttaca

SEQ ID NO: 356687 - DNA, 33 bp, Homo sapien
cggctccaggctccagacccatctcagcaccag

SEQ ID NO: 356688 - DNA, 33 bp, Homo sapien
cggctccaggctccaggcccatctcagcaccag

SEQ ID NO: 356689 - DNA, 33 bp, Homo sapien
gatacagatttaggaacataagtctattagcaa

SEQ ID NO: 356690 - DNA, 33 bp, Homo sapien
gatacagatttaggaatataagtctattagcaa

SEQ ID NO: 356691 - DNA, 33 bp, Homo sapien
gagcattcaaaatataaattccatctcctagat

SEQ ID NO: 356692 - DNA, 33 bp, Homo sapien
gagcattcaaaatatagattccatctcctagat

SEQ ID NO: 356693 - DNA, 33 bp, Homo sapien
aaaaaactgtttcataatatcttctaaggctga

SEQ ID NO: 356694 - DNA, 33 bp, Homo sapien
aaaaaactgtttcatagtatcttctaaggctga

SEQ ID NO: 356695 - DNA, 33 bp, Homo sapien
ctatgtgctggctatacccaccgacattcttct

SEQ ID NO: 356696 - DNA, 33 bp, Homo sapien
ctatgtgctggctatatccaccgacattcttct

SEQ ID NO: 356697 - DNA, 33 bp, Homo sapien
tacataatccctctccccaggcaactaatatcc

SEQ ID NO: 356698 - DNA, 33 bp, Homo sapien
tacataatccctctcctcaggcaactaatatcc

SEQ ID NO: 356699 - DNA, 33 bp, Homo sapien
ttttacattttctcacagcatttgatctatagg

SEQ ID NO: 356700 - DNA, 33 bp, Homo sapien
ttttacattttctcacggcatttgatctatagg

SEQ ID NO: 356701 - DNA, 33 bp, Homo sapien
ctggctaaccacaaacaaaacatttcttgttga

SEQ ID NO: 356702 - DNA, 33 bp, Homo sapien
ctggctaaccacaaacgaaacatttcttgttga

SEQ ID NO: 356703 - DNA, 33 bp, Homo sapien
aaatgagcgaggagacagcaaccaattcaggaa

SEQ ID NO: 356704 - DNA, 33 bp, Homo sapien
aaatgagcgaggagacggcaaccaattcaggaa

SEQ ID NO: 356705 - DNA, 33 bp, Homo sapien
caaagccagaagggccacatatgaactgtgggc

SEQ ID NO: 356706 - DNA, 33 bp, Homo sapien
caaagccagaagggccgcatatgaactgtgggc

SEQ ID NO: 356707 - DNA, 33 bp, Homo sapien
gtccaccttcaaataacagtgttgccacacatg

SEQ ID NO: 356708 - DNA, 33 bp, Homo sapien
gtccaccttcaaataagagtgttgccacacatg

SEQ ID NO: 356709 - DNA, 33 bp, Homo sapien
caaagcaggggattacacagcagacagggccca

SEQ ID NO: 356710 - DNA, 33 bp, Homo sapien
caaagcaggggattacgcagcagacagggccca

SEQ ID NO: 356711 - DNA, 33 bp, Homo sapien
tttcagacttttatgacgaaatttacatacaca

SEQ ID NO: 356712 - DNA, 33 bp, Homo sapien
tttcagacttttatgatgaaatttacatacaca

SEQ ID NO: 356713 - DNA, 33 bp, Homo sapien
aagcagccagaaagagcagacaggaaaacacag

SEQ ID NO: 356714 - DNA, 33 bp, Homo sapien
aagcagccagaaagagtagacaggaaaacacag

SEQ ID NO: 356715 - DNA, 33 bp, Homo sapien
gagctgaagacttgccaaaacgtgaagtgtggt

SEQ ID NO: 356716 - DNA, 33 bp, Homo sapien
gagctgaagacttgccgaaacgtgaagtgtggt

SEQ ID NO: 356717 - DNA, 33 bp, Homo sapien
gttcaggttttgccagcctaatccagtcattat

SEQ ID NO: 356718 - DNA, 33 bp, Homo sapien
gttcaggttttgccaggctaatccagtcattat

SEQ ID NO: 356719 - DNA, 33 bp, Homo sapien
cgcccatgacaggaaggaataccatatgctaac

SEQ ID NO: 356720 - DNA, 33 bp, Homo sapien
cgcccatgacaggaagtaataccatatgctaac

SEQ ID NO: 356721 - DNA, 33 bp, Homo sapien
tgtctgcatctgaagacaagagcttcaaaaaaa

SEQ ID NO: 356722 - DNA, 33 bp, Homo sapien
tgtctgcatctgaagagaagagcttcaaaaaaa

SEQ ID NO: 356723 - DNA, 33 bp, Homo sapien
ttctggttatagttcacagtccccagacactaa

SEQ ID NO: 356724 - DNA, 33 bp, Homo sapien
ttctggttatagttcagagtccccagacactaa

SEQ ID NO: 356725 - DNA, 33 bp, Homo sapien
gatgccaagatgagataaaatgtacaaggcttc

SEQ ID NO: 356726 - DNA, 33 bp, Homo sapien
gatgccaagatgagatgaaatgtacaaggcttc

SEQ ID NO: 356727 - DNA, 33 bp, Homo sapien
tgtagggcttgtgaaacgggtgaagaggtaaaa

SEQ ID NO: 356728 - DNA, 33 bp, Homo sapien
tgtagggcttgtgaaatgggtgaagaggtaaaa

SEQ ID NO: 356729 - DNA, 33 bp, Homo sapien
gctttgccttgtttcactcactctgcctactca

SEQ ID NO: 356730 - DNA, 33 bp, Homo sapien
gctttgccttgtttcagtcactctgcctactca

SEQ ID NO: 356731 - DNA, 33 bp, Homo sapien
tggctctctttctgcacagtcactgagcatgac

SEQ ID NO: 356732 - DNA, 33 bp, Homo sapien
tggctctctttctgcatagtcactgagcatgac

SEQ ID NO: 356733 - DNA, 33 bp, Homo sapien
gacttctgtgcccaaaacatctctcttccacct

SEQ ID NO: 356734 - DNA, 33 bp, Homo sapien
gacttctgtgcccaaagcatctctcttccacct

SEQ ID NO: 356735 - DNA, 33 bp, Homo sapien
gagagcagagacccttaaaccatcctggaccac

SEQ ID NO: 356736 - DNA, 33 bp, Homo sapien
gagagcagagacccttgaaccatcctggaccac

SEQ ID NO: 356737 - DNA, 33 bp, Homo sapien
ttaggttttctctcccaactctttactacctgg

SEQ ID NO: 356738 - DNA, 33 bp, Homo sapien
ttaggttttctctcccgactctttactacctgg

SEQ ID NO: 356739 - DNA, 33 bp, Homo sapien
tcgggccttacactgcaatataccatcattatg

SEQ ID NO: 356740 - DNA, 33 bp, Homo sapien
tcgggccttacactgcgatataccatcattatg

SEQ ID NO: 356741 - DNA, 33 bp, Homo sapien
tagcttagggcttaacagctttttggattggtc

SEQ ID NO: 356742 - DNA, 33 bp, Homo sapien
tagcttagggcttaacggctttttggattggtc

SEQ ID NO: 356743 - DNA, 33 bp, Homo sapien
aggggaaacggagtgcaattaatgggtataggg

SEQ ID NO: 356744 - DNA, 33 bp, Homo sapien
aggggaaacggagtgcgattaatgggtataggg

SEQ ID NO: 356745 - DNA, 33 bp, Homo sapien
ttactgtgaaaaaacactgaataaaactcttgc

SEQ ID NO: 356746 - DNA, 33 bp, Homo sapien
ttactgtgaaaaaacattgaataaaactcttgc

SEQ ID NO: 356747 - DNA, 33 bp, Homo sapien
gagaaatctatccacaagctcctgtctctcgct

SEQ ID NO: 356748 - DNA, 33 bp, Homo sapien
gagaaatctatccacaggctcctgtctctcgct

SEQ ID NO: 356749 - DNA, 33 bp, Homo sapien
gttaaacattgaaagcaaacaccacagtccatg

SEQ ID NO: 356750 - DNA, 33 bp, Homo sapien
gttaaacattgaaagcgaacaccacagtccatg

SEQ ID NO: 356751 - DNA, 33 bp, Homo sapien
aagtgctgcggtgaagaatggttttccttggaa

SEQ ID NO: 356752 - DNA, 33 bp, Homo sapien
aagtgctgcggtgaaggatggttttccttggaa

SEQ ID NO: 356753 - DNA, 33 bp, Homo sapien
tgtgcctctcaaaccacattcagcctgtgcata

SEQ ID NO: 356754 - DNA, 33 bp, Homo sapien
tgtgcctctcaaaccagattcagcctgtgcata

SEQ ID NO: 356755 - DNA, 33 bp, Homo sapien
tctgatttacttgccaatagagtttttgagtag

SEQ ID NO: 356756 - DNA, 33 bp, Homo sapien
tctgatttacttgccagtagagtttttgagtag

SEQ ID NO: 356757 - DNA, 33 bp, Homo sapien
tctcatagctgtttcccgactgcacttctccca

SEQ ID NO: 356758 - DNA, 33 bp, Homo sapien
tctcatagctgtttcctgactgcacttctccca

SEQ ID NO: 356759 - DNA, 33 bp, Homo sapien
ttcagattttccaagacaagttgaaaatcaaga

SEQ ID NO: 356760 - DNA, 33 bp, Homo sapien
ttcagattttccaagagaagttgaaaatcaaga

SEQ ID NO: 356761 - DNA, 33 bp, Homo sapien
ccagcctgtattcccacgggcaacaattccatg

SEQ ID NO: 356762 - DNA, 33 bp, Homo sapien
ccagcctgtattcccatgggcaacaattccatg

SEQ ID NO: 356763 - DNA, 33 bp, Homo sapien
gacaggatgtgatttacgtgtttgaaaggaaac

SEQ ID NO: 356764 - DNA, 33 bp, Homo sapien
gacaggatgtgatttatgtgtttgaaaggaaac

SEQ ID NO: 356765 - DNA, 33 bp, Homo sapien
ttcttggtctcttacaatctttcctgtgaagag

SEQ ID NO: 356766 - DNA, 33 bp, Homo sapien
ttcttggtctcttacagtctttcctgtgaagag

SEQ ID NO: 356767 - DNA, 33 bp, Homo sapien
actggtgttggattcaaaattcaagtcagcctg

SEQ ID NO: 356768 - DNA, 33 bp, Homo sapien
actggtgttggattcagaattcaagtcagcctg

SEQ ID NO: 356769 - DNA, 33 bp, Homo sapien
tgtttgccggattcaactattattcaacacatt

SEQ ID NO: 356770 - DNA, 33 bp, Homo sapien
tgtttgccggattcaattattattcaacacatt

SEQ ID NO: 356771 - DNA, 33 bp, Homo sapien
ctgatatctctctacaatggaagagggcagagg

SEQ ID NO: 356772 - DNA, 33 bp, Homo sapien
ctgatatctctctacagtggaagagggcagagg

SEQ ID NO: 356773 - DNA, 33 bp, Homo sapien
ataattttgctagggaatcattagatctaatta

SEQ ID NO: 356774 - DNA, 33 bp, Homo sapien
ataattttgctagggagtcattagatctaatta

SEQ ID NO: 356775 - DNA, 33 bp, Homo sapien
cacctactgccaatggccactaactgttccttc

SEQ ID NO: 356776 - DNA, 33 bp, Homo sapien
cacctactgccaatggtcactaactgttccttc

SEQ ID NO: 356777 - DNA, 33 bp, Homo sapien
atgcgtgatcaggccacgttctctttcagcagt

SEQ ID NO: 356778 - DNA, 33 bp, Homo sapien
atgcgtgatcaggccatgttctctttcagcagt

SEQ ID NO: 356779 - DNA, 33 bp, Homo sapien
ccagtaatttgcacaacgacttgaacatgaaat

SEQ ID NO: 356780 - DNA, 33 bp, Homo sapien
ccagtaatttgcacaatgacttgaacatgaaat

SEQ ID NO: 356781 - DNA, 33 bp, Homo sapien
agaagagttttaagcacggatgggatgccagtt

SEQ ID NO: 356782 - DNA, 33 bp, Homo sapien
agaagagttttaagcatggatgggatgccagtt

SEQ ID NO: 356783 - DNA, 33 bp, Homo sapien
tccatggcagtaagtacgttgcttaccagagta

SEQ ID NO: 356784 - DNA, 33 bp, Homo sapien
tccatggcagtaagtatgttgcttaccagagta

SEQ ID NO: 356785 - DNA, 33 bp, Homo sapien
aaaaacaagccttgaaaaagctactctctaagt

SEQ ID NO: 356786 - DNA, 33 bp, Homo sapien
aaaaacaagccttgaagaagctactctctaagt

SEQ ID NO: 356787 - DNA, 33 bp, Homo sapien
catttttcctttgatgaagagtagttcaaggac

SEQ ID NO: 356788 - DNA, 33 bp, Homo sapien
catttttcctttgatgcagagtagttcaaggac

SEQ ID NO: 356789 - DNA, 33 bp, Homo sapien
agtctagacctaaaagaattaaagcattgagtt

SEQ ID NO: 356790 - DNA, 33 bp, Homo sapien
agtctagacctaaaagtattaaagcattgagtt

SEQ ID NO: 356791 - DNA, 33 bp, Homo sapien
cagcagactataaagacggaaatttggaaaggg

SEQ ID NO: 356792 - DNA, 33 bp, Homo sapien
cagcagactataaagatggaaatttggaaaggg

SEQ ID NO: 356793 - DNA, 33 bp, Homo sapien
attagactagggtgacaaactctataatagact

SEQ ID NO: 356794 - DNA, 33 bp, Homo sapien
attagactagggtgacgaactctataatagact

SEQ ID NO: 356795 - DNA, 33 bp, Homo sapien
agcccagcctttacaaattcctttctttccaca

SEQ ID NO: 356796 - DNA, 33 bp, Homo sapien
agcccagcctttacaagttcctttctttccaca

SEQ ID NO: 356797 - DNA, 33 bp, Homo sapien
cttggagaaagtttccaaaaatgagtcagagga

SEQ ID NO: 356798 - DNA, 33 bp, Homo sapien
cttggagaaagtttcccaaaatgagtcagagga

SEQ ID NO: 356799 - DNA, 33 bp, Homo sapien
aacacctgcccttgtaccatagttcacagccta

SEQ ID NO: 356800 - DNA, 33 bp, Homo sapien
aacacctgcccttgtatcatagttcacagccta

SEQ ID NO: 356801 - DNA, 33 bp, Homo sapien
ggcagaggagtggcaaagactgcttgactgagt

SEQ ID NO: 356802 - DNA, 33 bp, Homo sapien
ggcagaggagtggcaaggactgcttgactgagt

SEQ ID NO: 356803 - DNA, 33 bp, Homo sapien
ccaggtctttctgaacaaacagtctctgctatt

SEQ ID NO: 356804 - DNA, 33 bp, Homo sapien
ccaggtctttctgaaccaacagtctctgctatt

SEQ ID NO: 356805 - DNA, 33 bp, Homo sapien
cagtctaatgatgaaaaaacatccaacaaaccc

SEQ ID NO: 356806 - DNA, 33 bp, Homo sapien
cagtctaatgatgaaagaacatccaacaaaccc

SEQ ID NO: 356807 - DNA, 33 bp, Homo sapien
ctcctcaattctgtgacaggttctcagcctttc

SEQ ID NO: 356808 - DNA, 33 bp, Homo sapien
ctcctcaattctgtgataggttctcagcctttc

SEQ ID NO: 356809 - DNA, 33 bp, Homo sapien
gataatgttccagatacacatgccccaaataat

SEQ ID NO: 356810 - DNA, 33 bp, Homo sapien
gataatgttccagatatacatgccccaaataat

SEQ ID NO: 356811 - DNA, 33 bp, Homo sapien
gttttcttccaagaatcaatattgtgcagccca

SEQ ID NO: 356812 - DNA, 33 bp, Homo sapien
gttttcttccaagaatgaatattgtgcagccca

SEQ ID NO: 356813 - DNA, 33 bp, Homo sapien
ttataattctagtccaaatgtttcatgcccagt

SEQ ID NO: 356814 - DNA, 33 bp, Homo sapien
ttataattctagtccagatgtttcatgcccagt

SEQ ID NO: 356815 - DNA, 33 bp, Homo sapien
ggctttgttctcaggaaagaggctttgttgtgt

SEQ ID NO: 356816 - DNA, 33 bp, Homo sapien
ggctttgttctcaggagagaggctttgttgtgt

SEQ ID NO: 356817 - DNA, 33 bp, Homo sapien
attcaataccattcgaactgatcaagatagaga

SEQ ID NO: 356818 - DNA, 33 bp, Homo sapien
attcaataccattcgagctgatcaagatagaga

SEQ ID NO: 356819 - DNA, 33 bp, Homo sapien
cccttctttgtcactcactaactgcattaattt

SEQ ID NO: 356820 - DNA, 33 bp, Homo sapien
cccttctttgtcactcgctaactgcattaattt

SEQ ID NO: 356821 - DNA, 33 bp, Homo sapien
aagaaaaacacatctcaaaaggaaatgagtccc

SEQ ID NO: 356822 - DNA, 33 bp, Homo sapien
aagaaaaacacatctcgaaaggaaatgagtccc

SEQ ID NO: 356823 - DNA, 33 bp, Homo sapien
ttctccgtcctgctggaaacatgaacctcaggg

SEQ ID NO: 356824 - DNA, 33 bp, Homo sapien
ttctccgtcctgctggcaacatgaacctcaggg

SEQ ID NO: 356825 - DNA, 33 bp, Homo sapien
tgcagaaaaaatgtcactattgcattgtgtgta

SEQ ID NO: 356826 - DNA, 33 bp, Homo sapien
tgcagaaaaaatgtcattattgcattgtgtgta

SEQ ID NO: 356827 - DNA, 33 bp, Homo sapien
aagcttaaaactctgcaaactaagttatatatg

SEQ ID NO: 356828 - DNA, 33 bp, Homo sapien
aagcttaaaactctgcgaactaagttatatatg

SEQ ID NO: 356829 - DNA, 33 bp, Homo sapien
aaaatctgcctgggaacgatatcctcaacatta

SEQ ID NO: 356830 - DNA, 33 bp, Homo sapien
aaaatctgcctgggaatgatatcctcaacatta

SEQ ID NO: 356831 - DNA, 33 bp, Homo sapien
gaaacacctcaaccagactaagatgcattctta

SEQ ID NO: 356832 - DNA, 33 bp, Homo sapien
gaaacacctcaaccagtctaagatgcattctta

SEQ ID NO: 356833 - DNA, 33 bp, Homo sapien
tcagctacatcactaaattaaatactgacaata

SEQ ID NO: 356834 - DNA, 33 bp, Homo sapien
tcagctacatcactaagttaaatactgacaata

SEQ ID NO: 356835 - DNA, 33 bp, Homo sapien
gtaaccaggagatgcaccagatgcacttagaga

SEQ ID NO: 356836 - DNA, 33 bp, Homo sapien
gtaaccaggagatgcagcagatgcacttagaga

SEQ ID NO: 356837 - DNA, 33 bp, Homo sapien
tagtttttaaaaagcaaagatttcattctgaaa

SEQ ID NO: 356838 - DNA, 33 bp, Homo sapien
tagtttttaaaaagcatagatttcattctgaaa

SEQ ID NO: 356839 - DNA, 33 bp, Homo sapien
aatatttgactctcaaaaaagaaattaccaggc

SEQ ID NO: 356840 - DNA, 33 bp, Homo sapien
aatatttgactctcaataaagaaattaccaggc

SEQ ID NO: 356841 - DNA, 33 bp, Homo sapien
tgcgtggaaattgacaacctgaattttgaaatt

SEQ ID NO: 356842 - DNA, 33 bp, Homo sapien
tgcgtggaaattgacatcctgaattttgaaatt

SEQ ID NO: 356843 - DNA, 33 bp, Homo sapien
gaagcatagtagaatccgagccttcctatttta

SEQ ID NO: 356844 - DNA, 33 bp, Homo sapien
gaagcatagtagaatctgagccttcctatttta

SEQ ID NO: 356845 - DNA, 33 bp, Homo sapien
tacccaactacctggcacgttgtgggaaggaga

SEQ ID NO: 356846 - DNA, 33 bp, Homo sapien
tacccaactacctggctcgttgtgggaaggaga

SEQ ID NO: 356847 - DNA, 33 bp, Homo sapien
catcctgcctctgctacacaagctctctcttgc

SEQ ID NO: 356848 - DNA, 33 bp, Homo sapien
catcctgcctctgctatacaagctctctcttgc

SEQ ID NO: 356849 - DNA, 33 bp, Homo sapien
aatttaaggatggtaaatgcgggaaattgtatt

SEQ ID NO: 356850 - DNA, 33 bp, Homo sapien
aatttaaggatggtaattgcgggaaattgtatt

SEQ ID NO: 356851 - DNA, 33 bp, Homo sapien
actctaccgagcaaaactggtttgaggcaaaca

SEQ ID NO: 356852 - DNA, 33 bp, Homo sapien
actctaccgagcaaaattggtttgaggcaaaca

SEQ ID NO: 356853 - DNA, 33 bp, Homo sapien
gtcagggttgactgacgcagcttgctatgggct

SEQ ID NO: 356854 - DNA, 33 bp, Homo sapien
gtcagggttgactgactcagcttgctatgggct

SEQ ID NO: 356855 - DNA, 33 bp, Homo sapien
cagcataagaggagaggcctgctcggtttgata

SEQ ID NO: 356856 - DNA, 33 bp, Homo sapien
cagcataagaggagagtcctgctcggtttgata

SEQ ID NO: 356857 - DNA, 33 bp, Homo sapien
tgctcttctaacttccccactcaatcctcccca

SEQ ID NO: 356858 - DNA, 33 bp, Homo sapien
tgctcttctaacttcctcactcaatcctcccca

SEQ ID NO: 356859 - DNA, 33 bp, Homo sapien
aatgaaaccatcatcaggtggcatctgaagtag

SEQ ID NO: 356860 - DNA, 33 bp, Homo sapien
aatgaaaccatcatcatgtggcatctgaagtag

SEQ ID NO: 356861 - DNA, 33 bp, Homo sapien
tctgaagggtaagcacactgaattcggcagcca

SEQ ID NO: 356862 - DNA, 33 bp, Homo sapien
tctgaagggtaagcacgctgaattcggcagcca

SEQ ID NO: 356863 - DNA, 33 bp, Homo sapien
aagtgatgaaactgcaaagaactacacacacac

SEQ ID NO: 356864 - DNA, 33 bp, Homo sapien
aagtgatgaaactgcagagaactacacacacac

SEQ ID NO: 356865 - DNA, 33 bp, Homo sapien
tgtattaatgttagcaatagctggctgggtaca

SEQ ID NO: 356866 - DNA, 33 bp, Homo sapien
tgtattaatgttagcagtagctggctgggtaca

SEQ ID NO: 356867 - DNA, 33 bp, Homo sapien
gtcctacctcagagaaccaatcgtgactgcacc

SEQ ID NO: 356868 - DNA, 33 bp, Homo sapien
gtcctacctcagagaagcaatcgtgactgcacc

SEQ ID NO: 356869 - DNA, 33 bp, Homo sapien
ttgaccagaaagccataagcacacactggagag

SEQ ID NO: 356870 - DNA, 33 bp, Homo sapien
ttgaccagaaagccatgagcacacactggagag

SEQ ID NO: 356871 - DNA, 33 bp, Homo sapien
acactgccattctagccccactgcctttttcct

SEQ ID NO: 356872 - DNA, 33 bp, Homo sapien
acactgccattctagctccactgcctttttcct

SEQ ID NO: 356873 - DNA, 33 bp, Homo sapien
cccttgctgcaccaagaaaaagagctaacatat

SEQ ID NO: 356874 - DNA, 33 bp, Homo sapien
cccttgctgcaccaagtaaaagagctaacatat

SEQ ID NO: 356875 - DNA, 33 bp, Homo sapien
caggcgtatgtttataggtgcatagatacacgt

SEQ ID NO: 356876 - DNA, 33 bp, Homo sapien
caggcgtatgtttatatgtgcatagatacacgt

SEQ ID NO: 356877 - DNA, 33 bp, Homo sapien
acggttcaaggttccccgaagagagtattggga

SEQ ID NO: 356878 - DNA, 33 bp, Homo sapien
acggttcaaggttccctgaagagagtattggga

SEQ ID NO: 356879 - DNA, 33 bp, Homo sapien
aaaggtaccttaactccctcaaatgacttcata

SEQ ID NO: 356880 - DNA, 33 bp, Homo sapien
aaaggtaccttaactctctcaaatgacttcata

SEQ ID NO: 356881 - DNA, 33 bp, Homo sapien
ttattttaagtgtctcaaaaatacaatactata

SEQ ID NO: 356882 - DNA, 33 bp, Homo sapien
ttattttaagtgtctcgaaaatacaatactata

SEQ ID NO: 356883 - DNA, 33 bp, Homo sapien
ggaaaaacagccattaggaagatgaagtgaaca

SEQ ID NO: 356884 - DNA, 33 bp, Homo sapien
ggaaaaacagccattatgaagatgaagtgaaca

SEQ ID NO: 356885 - DNA, 33 bp, Homo sapien
catcatcattgtcaccaattaaagatcagtgcc

SEQ ID NO: 356886 - DNA, 33 bp, Homo sapien
catcatcattgtcaccgattaaagatcagtgcc

SEQ ID NO: 356887 - DNA, 33 bp, Homo sapien
tacttacaaggtaagaagaacagacacacatac

SEQ ID NO: 356888 - DNA, 33 bp, Homo sapien
tacttacaaggtaagaggaacagacacacatac

SEQ ID NO: 356889 - DNA, 33 bp, Homo sapien
ttcctcggggtcctgacacctgccctttctgat

SEQ ID NO: 356890 - DNA, 33 bp, Homo sapien
ttcctcggggtcctgatacctgccctttctgat

SEQ ID NO: 356891 - DNA, 33 bp, Homo sapien
ctgccctttctgatacacgtgcaatccaataga

SEQ ID NO: 356892 - DNA, 33 bp, Homo sapien
ctgccctttctgatacgcgtgcaatccaataga

SEQ ID NO: 356893 - DNA, 33 bp, Homo sapien
tttcggttttgcaacacgaaacattctggagat

SEQ ID NO: 356894 - DNA, 33 bp, Homo sapien
tttcggttttgcaacatgaaacattctggagat

SEQ ID NO: 356895 - DNA, 33 bp, Homo sapien
atcatatttcattgtaggtgtaaaccatatttt

SEQ ID NO: 356896 - DNA, 33 bp, Homo sapien
atcatatttcattgtatgtgtaaaccatatttt

SEQ ID NO: 356897 - DNA, 33 bp, Homo sapien
ctcagccaggcggagacgggcgggtactgcaca

SEQ ID NO: 356898 - DNA, 33 bp, Homo sapien
ctcagccaggcggagatgggcgggtactgcaca

SEQ ID NO: 356899 - DNA, 33 bp, Homo sapien
agaagactggggagaagtattcaaggtcacaaa

SEQ ID NO: 356900 - DNA, 33 bp, Homo sapien
agaagactggggagaattattcaaggtcacaaa

SEQ ID NO: 356901 - DNA, 33 bp, Homo sapien
caaatcttctggtggcaccttcttttggacttc

SEQ ID NO: 356902 - DNA, 33 bp, Homo sapien
caaatcttctggtggcgccttcttttggacttc

SEQ ID NO: 356903 - DNA, 33 bp, Homo sapien
tgcattgtcagaggacacacagctagtaagggg

SEQ ID NO: 356904 - DNA, 33 bp, Homo sapien
tgcattgtcagaggacgcacagctagtaagggg

SEQ ID NO: 356905 - DNA, 33 bp, Homo sapien
caattttttaaaatgcacacctgtcagccaatt

SEQ ID NO: 356906 - DNA, 33 bp, Homo sapien
caattttttaaaatgcgcacctgtcagccaatt

SEQ ID NO: 356907 - DNA, 33 bp, Homo sapien
cagtttgggaccctcaccacaatcaacatcccc

SEQ ID NO: 356908 - DNA, 33 bp, Homo sapien
cagtttgggaccctcatcacaatcaacatcccc

SEQ ID NO: 356909 - DNA, 33 bp, Homo sapien
gggatcattccataagaagcgtagccctggctg

SEQ ID NO: 356910 - DNA, 33 bp, Homo sapien
gggatcattccataaggagcgtagccctggctg

SEQ ID NO: 356911 - DNA, 33 bp, Homo sapien
tgtgaaaatcagtgttaaaaatgtgtgacaaaa

SEQ ID NO: 356912 - DNA, 33 bp, Homo sapien
tgtgaaaatcagtgtttaaaatgtgtgacaaaa

SEQ ID NO: 356913 - DNA, 33 bp, Homo sapien
gcaggagggtttcaagcagatgtgctcaacata

SEQ ID NO: 356914 - DNA, 33 bp, Homo sapien
gcaggagggtttcaagtagatgtgctcaacata

SEQ ID NO: 356915 - DNA, 33 bp, Homo sapien
taaatattgggtggaaatgctcatcgttagcag

SEQ ID NO: 356916 - DNA, 33 bp, Homo sapien
taaatattgggtggaagtgctcatcgttagcag

SEQ ID NO: 356917 - DNA, 33 bp, Homo sapien
ataataactctagaaccctgcttcccagtatga

SEQ ID NO: 356918 - DNA, 33 bp, Homo sapien
ataataactctagaacgctgcttcccagtatga

SEQ ID NO: 356919 - DNA, 33 bp, Homo sapien
tgtgactttgggctagcaatttaaacatctcta

SEQ ID NO: 356920 - DNA, 33 bp, Homo sapien
tgtgactttgggctagtaatttaaacatctcta

SEQ ID NO: 356921 - DNA, 33 bp, Homo sapien
taagagaagagtgaaccgccttcagaatccagt

SEQ ID NO: 356922 - DNA, 33 bp, Homo sapien
taagagaagagtgaactgccttcagaatccagt

SEQ ID NO: 356923 - DNA, 33 bp, Homo sapien
ttctctgaagccgagacatttgttagcactaac

SEQ ID NO: 356924 - DNA, 33 bp, Homo sapien
ttctctgaagccgagagatttgttagcactaac

SEQ ID NO: 356925 - DNA, 33 bp, Homo sapien
tgtgggtcggatcacaacccttggcagtaggtt

SEQ ID NO: 356926 - DNA, 33 bp, Homo sapien
tgtgggtcggatcacagcccttggcagtaggtt

SEQ ID NO: 356927 - DNA, 33 bp, Homo sapien
ttaaagctgatacttacgaagccctaccccaga

SEQ ID NO: 356928 - DNA, 33 bp, Homo sapien
ttaaagctgatacttatgaagccctaccccaga

SEQ ID NO: 356929 - DNA, 33 bp, Homo sapien
gtctcagtttccttccaacattttgaatgacag

SEQ ID NO: 356930 - DNA, 33 bp, Homo sapien
gtctcagtttccttcctacattttgaatgacag

SEQ ID NO: 356931 - DNA, 33 bp, Homo sapien
ctccctgcaatttcacagcactcttgacagccc

SEQ ID NO: 356932 - DNA, 33 bp, Homo sapien
ctccctgcaatttcaccgcactcttgacagccc

SEQ ID NO: 356933 - DNA, 33 bp, Homo sapien
gaaagtttttgttgaaatatgggatgctagact

SEQ ID NO: 356934 - DNA, 33 bp, Homo sapien
gaaagtttttgttgaattatgggatgctagact

SEQ ID NO: 356935 - DNA, 33 bp, Homo sapien
ccaggctgagccattccaaataacacagcaaat

SEQ ID NO: 356936 - DNA, 33 bp, Homo sapien
ccaggctgagccattctaaataacacagcaaat

SEQ ID NO: 356937 - DNA, 33 bp, Homo sapien
aacaaataaatcaccaatgaatacaaagatgaa

SEQ ID NO: 356938 - DNA, 33 bp, Homo sapien
aacaaataaatcaccagtgaatacaaagatgaa

SEQ ID NO: 356939 - DNA, 33 bp, Homo sapien
ccgccgagttaggttaaacttctcagctgatga

SEQ ID NO: 356940 - DNA, 33 bp, Homo sapien
ccgccgagttaggttacacttctcagctgatga

SEQ ID NO: 356941 - DNA, 33 bp, Homo sapien
tgcccacaacagttacccttagcagcctgttca

SEQ ID NO: 356942 - DNA, 33 bp, Homo sapien
tgcccacaacagttactcttagcagcctgttca

SEQ ID NO: 356943 - DNA, 33 bp, Homo sapien
acctctgcctgcacaaatgagaggcaatgagca

SEQ ID NO: 356944 - DNA, 33 bp, Homo sapien
acctctgcctgcacaagtgagaggcaatgagca

SEQ ID NO: 356945 - DNA, 33 bp, Homo sapien
acagatattcttccaaaccgacttagaaatatt

SEQ ID NO: 356946 - DNA, 33 bp, Homo sapien
acagatattcttccaagccgacttagaaatatt

SEQ ID NO: 356947 - DNA, 33 bp, Homo sapien
acacaacaatgaagccaggaattttacactatt

SEQ ID NO: 356948 - DNA, 33 bp, Homo sapien
acacaacaatgaagccgggaattttacactatt

SEQ ID NO: 356949 - DNA, 33 bp, Homo sapien
tggagagaagatgcaacttacatgagatcacac

SEQ ID NO: 356950 - DNA, 33 bp, Homo sapien
tggagagaagatgcaatttacatgagatcacac

SEQ ID NO: 356951 - DNA, 33 bp, Homo sapien
acaagcacaaccatacaggtgatgatagggata

SEQ ID NO: 356952 - DNA, 33 bp, Homo sapien
acaagcacaaccatactggtgatgatagggata

SEQ ID NO: 356953 - DNA, 33 bp, Homo sapien
gcttaaactgaatccacctttctttacagaaca

SEQ ID NO: 356954 - DNA, 33 bp, Homo sapien
gcttaaactgaatccatctttctttacagaaca

SEQ ID NO: 356955 - DNA, 33 bp, Homo sapien
tcagaatccatctttaccagtgtaatgaaaacc

SEQ ID NO: 356956 - DNA, 33 bp, Homo sapien
tcagaatccatctttatcagtgtaatgaaaacc

SEQ ID NO: 356957 - DNA, 33 bp, Homo sapien
ctctgctcttctgtgaccttcatgggaggttct

SEQ ID NO: 356958 - DNA, 33 bp, Homo sapien
ctctgctcttctgtgatcttcatgggaggttct

SEQ ID NO: 356959 - DNA, 33 bp, Homo sapien
tcactttttatgtttaaagaaggcaaataatga

SEQ ID NO: 356960 - DNA, 33 bp, Homo sapien
tcactttttatgtttatagaaggcaaataatga

SEQ ID NO: 356961 - DNA, 33 bp, Homo sapien
ctattcaaaggcatggaaacagatcagttcttt

SEQ ID NO: 356962 - DNA, 33 bp, Homo sapien
ctattcaaaggcatgggaacagatcagttcttt

SEQ ID NO: 356963 - DNA, 33 bp, Homo sapien
atgagaaaatcccttccagctccgattaggtct

SEQ ID NO: 356964 - DNA, 33 bp, Homo sapien
atgagaaaatcccttctagctccgattaggtct

SEQ ID NO: 356965 - DNA, 33 bp, Homo sapien
gggaaaaactgatagacggtgaatctcatgtga

SEQ ID NO: 356966 - DNA, 33 bp, Homo sapien
gggaaaaactgatagatggtgaatctcatgtga

SEQ ID NO: 356967 - DNA, 33 bp, Homo sapien
ctcccataaaccctacccatgctgctgccagca

SEQ ID NO: 356968 - DNA, 33 bp, Homo sapien
ctcccataaaccctacgcatgctgctgccagca

SEQ ID NO: 356969 - DNA, 33 bp, Homo sapien
atataccatgacagagcagtgacagagtgggtt

SEQ ID NO: 356970 - DNA, 33 bp, Homo sapien
atataccatgacagaggagtgacagagtgggtt

SEQ ID NO: 356971 - DNA, 33 bp, Homo sapien
ttgcaaccggggcacacaccactttctctggca

SEQ ID NO: 356972 - DNA, 33 bp, Homo sapien
ttgcaaccggggcacataccactttctctggca

SEQ ID NO: 356973 - DNA, 33 bp, Homo sapien
cggttcttccctatgacgcactttgtgtgagat

SEQ ID NO: 356974 - DNA, 33 bp, Homo sapien
cggttcttccctatgatgcactttgtgtgagat

SEQ ID NO: 356975 - DNA, 33 bp, Homo sapien
ctgggcaaagcaggaacagcctgggcaaaggca

SEQ ID NO: 356976 - DNA, 33 bp, Homo sapien
ctgggcaaagcaggaagagcctgggcaaaggca

SEQ ID NO: 356977 - DNA, 33 bp, Homo sapien
ttttcacattcttggtcaactcttctgataaat

SEQ ID NO: 356978 - DNA, 33 bp, Homo sapien
ttttcacattcttggtgaactcttctgataaat

SEQ ID NO: 356979 - DNA, 33 bp, Homo sapien
tagaccaactcaccctaaattctctcggtgatg

SEQ ID NO: 356980 - DNA, 33 bp, Homo sapien
tagaccaactcaccctgaattctctcggtgatg

SEQ ID NO: 356981 - DNA, 33 bp, Homo sapien
cttaggagaatgaaacagcaccttttctcagtg

SEQ ID NO: 356982 - DNA, 33 bp, Homo sapien
cttaggagaatgaaacggcaccttttctcagtg

SEQ ID NO: 356983 - DNA, 33 bp, Homo sapien
ggtgcattgtcagtcacggtctttgtttgcgtc

SEQ ID NO: 356984 - DNA, 33 bp, Homo sapien
ggtgcattgtcagtcatggtctttgtttgcgtc

SEQ ID NO: 356985 - DNA, 33 bp, Homo sapien
ttgagaggagaatccagtgaggaagcctggttg

SEQ ID NO: 356986 - DNA, 33 bp, Homo sapien
ttgagaggagaatccattgaggaagcctggttg

SEQ ID NO: 356987 - DNA, 33 bp, Homo sapien
aatgcctcacctaacaataggatctacactccc

SEQ ID NO: 356988 - DNA, 33 bp, Homo sapien
aatgcctcacctaacagtaggatctacactccc

SEQ ID NO: 356989 - DNA, 33 bp, Homo sapien
gtgaacctaaattgaggcagtgagtggggcatt

SEQ ID NO: 356990 - DNA, 33 bp, Homo sapien
gtgaacctaaattgagtcagtgagtggggcatt

SEQ ID NO: 356991 - DNA, 33 bp, Homo sapien
aatctacctctgaacaataaacatttccttgtg

SEQ ID NO: 356992 - DNA, 33 bp, Homo sapien
aatctacctctgaacagtaaacatttccttgtg

SEQ ID NO: 356993 - DNA, 33 bp, Homo sapien
cagatacagacaagcaaagagactgccatggta

SEQ ID NO: 356994 - DNA, 33 bp, Homo sapien
cagatacagacaagcagagagactgccatggta

SEQ ID NO: 356995 - DNA, 33 bp, Homo sapien
ggcagtaacttgatcacatgtgttctgaaaaga

SEQ ID NO: 356996 - DNA, 33 bp, Homo sapien
ggcagtaacttgatcagatgtgttctgaaaaga

SEQ ID NO: 356997 - DNA, 33 bp, Homo sapien
caccatgttgggtctgaataagacgttgctgcc

SEQ ID NO: 356998 - DNA, 33 bp, Homo sapien
caccatgttgggtctggataagacgttgctgcc

SEQ ID NO: 356999 - DNA, 33 bp, Homo sapien
gggagcttatttgttaagtcagttccctgccat

SEQ ID NO: 357000 - DNA, 33 bp, Homo sapien
gggagcttatttgttaggtcagttccctgccat

SEQ ID NO: 357001 - DNA, 33 bp, Homo sapien
acttttatagattcaagtccccacaaaatacct

SEQ ID NO: 357002 - DNA, 33 bp, Homo sapien
acttttatagattcaattccccacaaaatacct

SEQ ID NO: 357003 - DNA, 33 bp, Homo sapien
tgagctccaaagtccacgtgcttaacattcagg

SEQ ID NO: 357004 - DNA, 33 bp, Homo sapien
tgagctccaaagtccatgtgcttaacattcagg

SEQ ID NO: 357005 - DNA, 33 bp, Homo sapien
gctccagtcacttccacatctactaaagccttg

SEQ ID NO: 357006 - DNA, 33 bp, Homo sapien
gctccagtcacttccatatctactaaagccttg

SEQ ID NO: 357007 - DNA, 33 bp, Homo sapien
gccattattttatacaacctcattcagcaaaac

SEQ ID NO: 357008 - DNA, 33 bp, Homo sapien
gccattattttatacatcctcattcagcaaaac

SEQ ID NO: 357009 - DNA, 33 bp, Homo sapien
gcagcctcaccagctgcagaaaccttttcaact

SEQ ID NO: 357010 - DNA, 33 bp, Homo sapien
gcagcctcaccagctggagaaaccttttcaact

SEQ ID NO: 357011 - DNA, 33 bp, Homo sapien
aagaaccctaagatgccgatcttctgtgtagat

SEQ ID NO: 357012 - DNA, 33 bp, Homo sapien
aagaaccctaagatgctgatcttctgtgtagat

SEQ ID NO: 357013 - DNA, 33 bp, Homo sapien
ttaacagacaagctcaataagtcaagaactggc

SEQ ID NO: 357014 - DNA, 33 bp, Homo sapien
ttaacagacaagctcagtaagtcaagaactggc

SEQ ID NO: 357015 - DNA, 33 bp, Homo sapien
tccaccagactgatagaaccaagtgttggggag

SEQ ID NO: 357016 - DNA, 33 bp, Homo sapien
tccaccagactgatagcaccaagtgttggggag

SEQ ID NO: 357017 - DNA, 33 bp, Homo sapien
cttgcacagacattcacggagtacttctgggtg

SEQ ID NO: 357018 - DNA, 33 bp, Homo sapien
cttgcacagacattcatggagtacttctgggtg

SEQ ID NO: 357019 - DNA, 33 bp, Homo sapien
ggggctctgttatggaaccttgcattctcactg

SEQ ID NO: 357020 - DNA, 33 bp, Homo sapien
ggggctctgttatggacccttgcattctcactg

SEQ ID NO: 357021 - DNA, 33 bp, Homo sapien
gaggagggctgcaaaccgtaagcctttggaacc

SEQ ID NO: 357022 - DNA, 33 bp, Homo sapien
gaggagggctgcaaactgtaagcctttggaacc

SEQ ID NO: 357023 - DNA, 33 bp, Homo sapien
cccttctgacaagccactaccaggataagtaca

SEQ ID NO: 357024 - DNA, 33 bp, Homo sapien
cccttctgacaagccattaccaggataagtaca

SEQ ID NO: 357025 - DNA, 33 bp, Homo sapien
ttctctcttccaactcaaaacctgcctgcatca

SEQ ID NO: 357026 - DNA, 33 bp, Homo sapien
ttctctcttccaactccaaacctgcctgcatca

SEQ ID NO: 357027 - DNA, 33 bp, Homo sapien
atgtcacacaagcccaataaaggagcttcctac

SEQ ID NO: 357028 - DNA, 33 bp, Homo sapien
atgtcacacaagcccagtaaaggagcttcctac

SEQ ID NO: 357029 - DNA, 33 bp, Homo sapien
gatccatccatttccaccttttcctcttggaca

SEQ ID NO: 357030 - DNA, 33 bp, Homo sapien
gatccatccatttccagcttttcctcttggaca

SEQ ID NO: 357031 - DNA, 33 bp, Homo sapien
cccctgggtaccctaactgaaccattttcacaa

SEQ ID NO: 357032 - DNA, 33 bp, Homo sapien
cccctgggtaccctaattgaaccattttcacaa

SEQ ID NO: 357033 - DNA, 33 bp, Homo sapien
caatataacttcacgaaaacgtctaataatgaa

SEQ ID NO: 357034 - DNA, 33 bp, Homo sapien
caatataacttcacgagaacgtctaataatgaa

SEQ ID NO: 357035 - DNA, 33 bp, Homo sapien
ttaaactgtgcagcaagttatgcattgaaatat

SEQ ID NO: 357036 - DNA, 33 bp, Homo sapien
ttaaactgtgcagcaatttatgcattgaaatat

SEQ ID NO: 357037 - DNA, 33 bp, Homo sapien
gaatattaaaaggactaaatcttactattacac

SEQ ID NO: 357038 - DNA, 33 bp, Homo sapien
gaatattaaaaggactgaatcttactattacac

SEQ ID NO: 357039 - DNA, 33 bp, Homo sapien
ggcctctaacaaaaaaaatgcagtccgttcgtc

SEQ ID NO: 357040 - DNA, 33 bp, Homo sapien
ggcctctaacaaaaaagatgcagtccgttcgtc

SEQ ID NO: 357041 - DNA, 33 bp, Homo sapien
tcaagtgactttctccaggacttttggcacctt

SEQ ID NO: 357042 - DNA, 33 bp, Homo sapien
tcaagtgactttctccgggacttttggcacctt

SEQ ID NO: 357043 - DNA, 33 bp, Homo sapien
tcacaggtttctaaggaacagggccatctttgc

SEQ ID NO: 357044 - DNA, 33 bp, Homo sapien
tcacaggtttctaagggacagggccatctttgc

SEQ ID NO: 357045 - DNA, 33 bp, Homo sapien
gatattctgttcctaaaagcctggaatctgaga

SEQ ID NO: 357046 - DNA, 33 bp, Homo sapien
gatattctgttcctaagagcctggaatctgaga

SEQ ID NO: 357047 - DNA, 33 bp, Homo sapien
ctatgtgatcttagaaaggttggatttgctgag

SEQ ID NO: 357048 - DNA, 33 bp, Homo sapien
ctatgtgatcttagaacggttggatttgctgag

SEQ ID NO: 357049 - DNA, 33 bp, Homo sapien
ctgtcacctttgtagcgctgggtcaaagtctaa

SEQ ID NO: 357050 - DNA, 33 bp, Homo sapien
ctgtcacctttgtagctctgggtcaaagtctaa

SEQ ID NO: 357051 - DNA, 33 bp, Homo sapien
agagtaggcagtcaaaacaataaagtgctgggt

SEQ ID NO: 357052 - DNA, 33 bp, Homo sapien
agagtaggcagtcaaagcaataaagtgctgggt

SEQ ID NO: 357053 - DNA, 33 bp, Homo sapien
ttagaatcattctacccgaaggcacaagaaaga

SEQ ID NO: 357054 - DNA, 33 bp, Homo sapien
ttagaatcattctacctgaaggcacaagaaaga

SEQ ID NO: 357055 - DNA, 33 bp, Homo sapien
ttatgcaactatggtaagacttaaattagatca

SEQ ID NO: 357056 - DNA, 33 bp, Homo sapien
ttatgcaactatggtacgacttaaattagatca

SEQ ID NO: 357057 - DNA, 33 bp, Homo sapien
atttcacacttaatcaaagagtactggttcaaa

SEQ ID NO: 357058 - DNA, 33 bp, Homo sapien
atttcacacttaatcagagagtactggttcaaa

SEQ ID NO: 357059 - DNA, 33 bp, Homo sapien
ttgtctcctggaaagacggccctggagaaatgg

SEQ ID NO: 357060 - DNA, 33 bp, Homo sapien
ttgtctcctggaaagatggccctggagaaatgg

SEQ ID NO: 357061 - DNA, 33 bp, Homo sapien
aattttagccacagaaattaagtggtaaatgac

SEQ ID NO: 357062 - DNA, 33 bp, Homo sapien
aattttagccacagaagttaagtggtaaatgac

SEQ ID NO: 357063 - DNA, 33 bp, Homo sapien
gaaatcagccgttacaaaagtcaaggctctttg

SEQ ID NO: 357064 - DNA, 33 bp, Homo sapien
gaaatcagccgttacagaagtcaaggctctttg

SEQ ID NO: 357065 - DNA, 33 bp, Homo sapien
catctacgctatctcaaattgttttctaattcc

SEQ ID NO: 357066 - DNA, 33 bp, Homo sapien
catctacgctatctcagattgttttctaattcc

SEQ ID NO: 357067 - DNA, 33 bp, Homo sapien
gccctggaaatgatcacgttgttagataaggtt

SEQ ID NO: 357068 - DNA, 33 bp, Homo sapien
gccctggaaatgatcatgttgttagataaggtt

SEQ ID NO: 357069 - DNA, 33 bp, Homo sapien
tacaatttttctttaaatgagctcacttctttt

SEQ ID NO: 357070 - DNA, 33 bp, Homo sapien
tacaatttttctttaattgagctcacttctttt

SEQ ID NO: 357071 - DNA, 33 bp, Homo sapien
cactttttttcggttgaactgaactgtcatttc

SEQ ID NO: 357072 - DNA, 33 bp, Homo sapien
cactttttttcggttggactgaactgtcatttc

SEQ ID NO: 357073 - DNA, 33 bp, Homo sapien
ccttgctacatatagcacacacaatggtcatct

SEQ ID NO: 357074 - DNA, 33 bp, Homo sapien
ccttgctacatatagcgcacacaatggtcatct

SEQ ID NO: 357075 - DNA, 33 bp, Homo sapien
ttcgaccacaaatggaagatgctggcactgtgc

SEQ ID NO: 357076 - DNA, 33 bp, Homo sapien
ttcgaccacaaatggacgatgctggcactgtgc

SEQ ID NO: 357077 - DNA, 33 bp, Homo sapien
tgaacatagcataggaataatggacactgtaga

SEQ ID NO: 357078 - DNA, 33 bp, Homo sapien
tgaacatagcataggattaatggacactgtaga

SEQ ID NO: 357079 - DNA, 33 bp, Homo sapien
ccctgaataacaagcaacaatacacaggagcta

SEQ ID NO: 357080 - DNA, 33 bp, Homo sapien
ccctgaataacaagcatcaatacacaggagcta

SEQ ID NO: 357081 - DNA, 33 bp, Homo sapien
tgactgtcctattggcaacactgaaggtggtgg

SEQ ID NO: 357082 - DNA, 33 bp, Homo sapien
tgactgtcctattggcgacactgaaggtggtgg

SEQ ID NO: 357083 - DNA, 33 bp, Homo sapien
tcccactttttgaatacgtcagctttaggcaat

SEQ ID NO: 357084 - DNA, 33 bp, Homo sapien
tcccactttttgaatatgtcagctttaggcaat

SEQ ID NO: 357085 - DNA, 33 bp, Homo sapien
gcaaccttataaaagaccctaagccagaacctt

SEQ ID NO: 357086 - DNA, 33 bp, Homo sapien
gcaaccttataaaagatcctaagccagaacctt

SEQ ID NO: 357087 - DNA, 33 bp, Homo sapien
cacaaagcatatcacacagattcaaggtaacat

SEQ ID NO: 357088 - DNA, 33 bp, Homo sapien
cacaaagcatatcacagagattcaaggtaacat

SEQ ID NO: 357089 - DNA, 33 bp, Homo sapien
aatagaaaatatatcaagaaacgcgacagatcc

SEQ ID NO: 357090 - DNA, 33 bp, Homo sapien
aatagaaaatatatcaggaaacgcgacagatcc

SEQ ID NO: 357091 - DNA, 33 bp, Homo sapien
agatgccatgttctacacaatgtgcaagttgaa

SEQ ID NO: 357092 - DNA, 33 bp, Homo sapien
agatgccatgttctacccaatgtgcaagttgaa

SEQ ID NO: 357093 - DNA, 33 bp, Homo sapien
ttttggagaagatacaatcattcaaaccatagc

SEQ ID NO: 357094 - DNA, 33 bp, Homo sapien
ttttggagaagatacagtcattcaaaccatagc

SEQ ID NO: 357095 - DNA, 33 bp, Homo sapien
ttatggaggctaacaaatcccaagatcttcagg

SEQ ID NO: 357096 - DNA, 33 bp, Homo sapien
ttatggaggctaacaagtcccaagatcttcagg

SEQ ID NO: 357097 - DNA, 33 bp, Homo sapien
agtaatctaaagatccaagacagccaatagtgc

SEQ ID NO: 357098 - DNA, 33 bp, Homo sapien
agtaatctaaagatccgagacagccaatagtgc

SEQ ID NO: 357099 - DNA, 33 bp, Homo sapien
ccctcccctaatgcaaatgtactacatctagtc

SEQ ID NO: 357100 - DNA, 33 bp, Homo sapien
ccctcccctaatgcaagtgtactacatctagtc

SEQ ID NO: 357101 - DNA, 33 bp, Homo sapien
agtctgctactgtcctaagcatcaaaactgtag

SEQ ID NO: 357102 - DNA, 33 bp, Homo sapien
agtctgctactgtcctcagcatcaaaactgtag

SEQ ID NO: 357103 - DNA, 33 bp, Homo sapien
ccctgccaactgcccagggcctagtctgctact

SEQ ID NO: 357104 - DNA, 33 bp, Homo sapien
ccctgccaactgcccatggcctagtctgctact

SEQ ID NO: 357105 - DNA, 33 bp, Homo sapien
gaatgtttatagcagcattttaaaaagtagcca

SEQ ID NO: 357106 - DNA, 33 bp, Homo sapien
gaatgtttatagcagcgttttaaaaagtagcca

SEQ ID NO: 357107 - DNA, 33 bp, Homo sapien
tactaatatataccacaatatggataaatcttg

SEQ ID NO: 357108 - DNA, 33 bp, Homo sapien
tactaatatataccacgatatggataaatcttg

SEQ ID NO: 357109 - DNA, 33 bp, Homo sapien
aagaagacagtcacaaaagatcacatgttgtat

SEQ ID NO: 357110 - DNA, 33 bp, Homo sapien
aagaagacagtcacaacagatcacatgttgtat

SEQ ID NO: 357111 - DNA, 33 bp, Homo sapien
tgaaacctcaggaaaactggatgaagggaggct

SEQ ID NO: 357112 - DNA, 33 bp, Homo sapien
tgaaacctcaggaaaattggatgaagggaggct

SEQ ID NO: 357113 - DNA, 33 bp, Homo sapien
tgtgcctcagctgaaaaaaacttcccactagga

SEQ ID NO: 357114 - DNA, 33 bp, Homo sapien
tgtgcctcagctgaaagaaacttcccactagga

SEQ ID NO: 357115 - DNA, 33 bp, Homo sapien
tgcaatgaatctgtcaggagttatttgagcttc

SEQ ID NO: 357116 - DNA, 33 bp, Homo sapien
tgcaatgaatctgtcatgagttatttgagcttc

SEQ ID NO: 357117 - DNA, 33 bp, Homo sapien
ttctataaggaatcccaaattgaaagccttgac

SEQ ID NO: 357118 - DNA, 33 bp, Homo sapien
ttctataaggaatcccgaattgaaagccttgac

SEQ ID NO: 357119 - DNA, 33 bp, Homo sapien
caaggctttcctgacaaaggtgttagtattctc

SEQ ID NO: 357120 - DNA, 33 bp, Homo sapien
caaggctttcctgacacaggtgttagtattctc

SEQ ID NO: 357121 - DNA, 33 bp, Homo sapien
catctgagtaacagaaatatagtgatccttccc

SEQ ID NO: 357122 - DNA, 33 bp, Homo sapien
catctgagtaacagaagtatagtgatccttccc

SEQ ID NO: 357123 - DNA, 33 bp, Homo sapien
gtgaaatgacccatcaaagttgacagcttttag

SEQ ID NO: 357124 - DNA, 33 bp, Homo sapien
gtgaaatgacccatcagagttgacagcttttag

SEQ ID NO: 357125 - DNA, 33 bp, Homo sapien
tctatttatcttctacgcatctatgtccccgaa

SEQ ID NO: 357126 - DNA, 33 bp, Homo sapien
tctatttatcttctactcatctatgtccccgaa

SEQ ID NO: 357127 - DNA, 33 bp, Homo sapien
aggggtaaagaaacagaaatgggatgcctaacc

SEQ ID NO: 357128 - DNA, 33 bp, Homo sapien
aggggtaaagaaacaggaatgggatgcctaacc

SEQ ID NO: 357129 - DNA, 33 bp, Homo sapien
caatggaagccaagaaaaatagtttaattggaa

SEQ ID NO: 357130 - DNA, 33 bp, Homo sapien
caatggaagccaagaagaatagtttaattggaa

SEQ ID NO: 357131 - DNA, 33 bp, Homo sapien
caataaactctcaagacgtttgctattgaaacg

SEQ ID NO: 357132 - DNA, 33 bp, Homo sapien
caataaactctcaagatgtttgctattgaaacg

SEQ ID NO: 357133 - DNA, 33 bp, Homo sapien
tagaaaatacagagaaatggtatgatttttaga

SEQ ID NO: 357134 - DNA, 33 bp, Homo sapien
tagaaaatacagagaagtggtatgatttttaga

SEQ ID NO: 357135 - DNA, 33 bp, Homo sapien
caggcttcaggagagagataacattgagttgga

SEQ ID NO: 357136 - DNA, 33 bp, Homo sapien
caggcttcaggagagatataacattgagttgga

SEQ ID NO: 357137 - DNA, 33 bp, Homo sapien
atatatagtagccaaacaatccacatgtgtccc

SEQ ID NO: 357138 - DNA, 33 bp, Homo sapien
atatatagtagccaaagaatccacatgtgtccc

SEQ ID NO: 357139 - DNA, 33 bp, Homo sapien
acagaaaaaagctacacgaattaactgccggca

SEQ ID NO: 357140 - DNA, 33 bp, Homo sapien
acagaaaaaagctacatgaattaactgccggca

SEQ ID NO: 357141 - DNA, 33 bp, Homo sapien
cagtaagccaaagtacaagctgttgtttatttt

SEQ ID NO: 357142 - DNA, 33 bp, Homo sapien
cagtaagccaaagtacgagctgttgtttatttt

SEQ ID NO: 357143 - DNA, 33 bp, Homo sapien
ggaagtgaacccagccaaggagtatgactcact

SEQ ID NO: 357144 - DNA, 33 bp, Homo sapien
ggaagtgaacccagccgaggagtatgactcact

SEQ ID NO: 357145 - DNA, 33 bp, Homo sapien
atgagttcaattttccgaagtctgcttgcaaaa

SEQ ID NO: 357146 - DNA, 33 bp, Homo sapien
atgagttcaattttcctaagtctgcttgcaaaa

SEQ ID NO: 357147 - DNA, 33 bp, Homo sapien
aattaatgaatttctgcattgtcctgcatattt

SEQ ID NO: 357148 - DNA, 33 bp, Homo sapien
aattaatgaatttctgtattgtcctgcatattt

SEQ ID NO: 357149 - DNA, 33 bp, Homo sapien
tcaagagatgactcataaaagacttgataagct

SEQ ID NO: 357150 - DNA, 33 bp, Homo sapien
tcaagagatgactcatgaaagacttgataagct

SEQ ID NO: 357151 - DNA, 33 bp, Homo sapien
gcccttcacggctagcggagctctaaagttcac

SEQ ID NO: 357152 - DNA, 33 bp, Homo sapien
gcccttcacggctagctgagctctaaagttcac

SEQ ID NO: 357153 - DNA, 33 bp, Homo sapien
catgtttgctgcataacgatggagcaccaaccc

SEQ ID NO: 357154 - DNA, 33 bp, Homo sapien
catgtttgctgcataatgatggagcaccaaccc

SEQ ID NO: 357155 - DNA, 33 bp, Homo sapien
atgattaattacaagaagcagctgcatccctga

SEQ ID NO: 357156 - DNA, 33 bp, Homo sapien
atgattaattacaagaggcagctgcatccctga

SEQ ID NO: 357157 - DNA, 33 bp, Homo sapien
gctgctgataaaaaaccattggccccaaaggga

SEQ ID NO: 357158 - DNA, 33 bp, Homo sapien
gctgctgataaaaaactattggccccaaaggga

SEQ ID NO: 357159 - DNA, 33 bp, Homo sapien
ggcgcgttaaagaaagccagcattattatcatt

SEQ ID NO: 357160 - DNA, 33 bp, Homo sapien
ggcgcgttaaagaaagtcagcattattatcatt

SEQ ID NO: 357161 - DNA, 33 bp, Homo sapien
cctaattgtggagacacggaacaggtacctcct

SEQ ID NO: 357162 - DNA, 33 bp, Homo sapien
cctaattgtggagacatggaacaggtacctcct

SEQ ID NO: 357163 - DNA, 33 bp, Homo sapien
aaatttggcctcaccacgataaatgcctattct

SEQ ID NO: 357164 - DNA, 33 bp, Homo sapien
aaatttggcctcaccatgataaatgcctattct

SEQ ID NO: 357165 - DNA, 33 bp, Homo sapien
aataagtgtagagagacgttaattgtagaaacc

SEQ ID NO: 357166 - DNA, 33 bp, Homo sapien
aataagtgtagagagatgttaattgtagaaacc

SEQ ID NO: 357167 - DNA, 33 bp, Homo sapien
gaaatatctttatatgaagaggcaggaactatc

SEQ ID NO: 357168 - DNA, 33 bp, Homo sapien
gaaatatctttatatggagaggcaggaactatc

SEQ ID NO: 357169 - DNA, 33 bp, Homo sapien
atgtgcttcagcatcacatggaatgatttcgaa

SEQ ID NO: 357170 - DNA, 33 bp, Homo sapien
atgtgcttcagcatcagatggaatgatttcgaa

SEQ ID NO: 357171 - DNA, 33 bp, Homo sapien
ggacttaatttataaaatgagtggcaacatgga

SEQ ID NO: 357172 - DNA, 33 bp, Homo sapien
ggacttaatttataaagtgagtggcaacatgga

SEQ ID NO: 357173 - DNA, 33 bp, Homo sapien
gctcttgatccttgaaagcaagtgttcccagga

SEQ ID NO: 357174 - DNA, 33 bp, Homo sapien
gctcttgatccttgaacgcaagtgttcccagga

SEQ ID NO: 357175 - DNA, 33 bp, Homo sapien
gctctattcagtgaacggcttcttactgcaggt

SEQ ID NO: 357176 - DNA, 33 bp, Homo sapien
gctctattcagtgaactgcttcttactgcaggt

SEQ ID NO: 357177 - DNA, 33 bp, Homo sapien
cagaataaaaacattcacctggttcagtgcccc

SEQ ID NO: 357178 - DNA, 33 bp, Homo sapien
cagaataaaaacattcgcctggttcagtgcccc

SEQ ID NO: 357179 - DNA, 33 bp, Homo sapien
acctaataatcctacaatcggcttttaaaaggt

SEQ ID NO: 357180 - DNA, 33 bp, Homo sapien
acctaataatcctacagtcggcttttaaaaggt

SEQ ID NO: 357181 - DNA, 33 bp, Homo sapien
cctgcttctggaaaaacagacttctgggtgcat

SEQ ID NO: 357182 - DNA, 33 bp, Homo sapien
cctgcttctggaaaaagagacttctgggtgcat

SEQ ID NO: 357183 - DNA, 33 bp, Homo sapien
accaagatgcctttgcagactggaagcttctta

SEQ ID NO: 357184 - DNA, 33 bp, Homo sapien
accaagatgcctttgcggactggaagcttctta

SEQ ID NO: 357185 - DNA, 33 bp, Homo sapien
gcacgccagggttccagggactaacgtattcat

SEQ ID NO: 357186 - DNA, 33 bp, Homo sapien
gcacgccagggttccatggactaacgtattcat

SEQ ID NO: 357187 - DNA, 33 bp, Homo sapien
tgggtctctgaaacaacgtaattctcagaggaa

SEQ ID NO: 357188 - DNA, 33 bp, Homo sapien
tgggtctctgaaacaatgtaattctcagaggaa

SEQ ID NO: 357189 - DNA, 33 bp, Homo sapien
gaggatttgaaaagaccacttagagaaggttgc

SEQ ID NO: 357190 - DNA, 33 bp, Homo sapien
gaggatttgaaaagactacttagagaaggttgc

SEQ ID NO: 357191 - DNA, 33 bp, Homo sapien
atgaagtgataaaagcagatctctggaattttt

SEQ ID NO: 357192 - DNA, 33 bp, Homo sapien
atgaagtgataaaagcggatctctggaattttt

SEQ ID NO: 357193 - DNA, 33 bp, Homo sapien
ataaaaacgtgcatacacgaaggttacatttcc

SEQ ID NO: 357194 - DNA, 33 bp, Homo sapien
ataaaaacgtgcatactcgaaggttacatttcc

SEQ ID NO: 357195 - DNA, 33 bp, Homo sapien
agaaacctggagttaccggaagtagagctgtta

SEQ ID NO: 357196 - DNA, 33 bp, Homo sapien
agaaacctggagttactggaagtagagctgtta

SEQ ID NO: 357197 - DNA, 33 bp, Homo sapien
acctcaaccagtgctgcagtgaaaaactttata

SEQ ID NO: 357198 - DNA, 33 bp, Homo sapien
acctcaaccagtgctgtagtgaaaaactttata

SEQ ID NO: 357199 - DNA, 33 bp, Homo sapien
ggcaaatacaaaataaagataatgccaaatatt

SEQ ID NO: 357200 - DNA, 33 bp, Homo sapien
ggcaaatacaaaataaggataatgccaaatatt

SEQ ID NO: 357201 - DNA, 33 bp, Homo sapien
tctgtaccccctataccgaaccatccttcattg

SEQ ID NO: 357202 - DNA, 33 bp, Homo sapien
tctgtaccccctatactgaaccatccttcattg

SEQ ID NO: 357203 - DNA, 33 bp, Homo sapien
catgagccatgtactgcaaatggattccaatag

SEQ ID NO: 357204 - DNA, 33 bp, Homo sapien
catgagccatgtactggaaatggattccaatag

SEQ ID NO: 357205 - DNA, 33 bp, Homo sapien
aggaagcatgtgcaccacgagagagccaccaga

SEQ ID NO: 357206 - DNA, 33 bp, Homo sapien
aggaagcatgtgcaccgcgagagagccaccaga

SEQ ID NO: 357207 - DNA, 33 bp, Homo sapien
gccagaacaaatcctacgtgaagttaactccat

SEQ ID NO: 357208 - DNA, 33 bp, Homo sapien
gccagaacaaatcctatgtgaagttaactccat

SEQ ID NO: 357209 - DNA, 33 bp, Homo sapien
aagatggttaaaagcacggactttcaggttaca

SEQ ID NO: 357210 - DNA, 33 bp, Homo sapien
aagatggttaaaagcatggactttcaggttaca

SEQ ID NO: 357211 - DNA, 33 bp, Homo sapien
ctgaactatctctacagtggcccagaagagctt

SEQ ID NO: 357212 - DNA, 33 bp, Homo sapien
ctgaactatctctacattggcccagaagagctt

SEQ ID NO: 357213 - DNA, 33 bp, Homo sapien
tgtttctcatagacaacgaatgaatctctgggt

SEQ ID NO: 357214 - DNA, 33 bp, Homo sapien
tgtttctcatagacaaggaatgaatctctgggt

SEQ ID NO: 357215 - DNA, 33 bp, Homo sapien
ttagtagcaatgagacaaagcaaataacttcat

SEQ ID NO: 357216 - DNA, 33 bp, Homo sapien
ttagtagcaatgagacgaagcaaataacttcat

SEQ ID NO: 357217 - DNA, 33 bp, Homo sapien
gttcttgctttattccggctccaaatcttctgg

SEQ ID NO: 357218 - DNA, 33 bp, Homo sapien
gttcttgctttattcctgctccaaatcttctgg

SEQ ID NO: 357219 - DNA, 33 bp, Homo sapien
tatttgtactatcatcaaagccatgttgctaaa

SEQ ID NO: 357220 - DNA, 33 bp, Homo sapien
tatttgtactatcatctaagccatgttgctaaa

SEQ ID NO: 357221 - DNA, 33 bp, Homo sapien
gatgcgggcttgcaaaagtcaaataacttgctg

SEQ ID NO: 357222 - DNA, 33 bp, Homo sapien
gatgcgggcttgcaaaggtcaaataacttgctg

SEQ ID NO: 357223 - DNA, 33 bp, Homo sapien
aattctgagatgggataaagacagattaaagtt

SEQ ID NO: 357224 - DNA, 33 bp, Homo sapien
aattctgagatgggatgaagacagattaaagtt

SEQ ID NO: 357225 - DNA, 33 bp, Homo sapien
acgaagagcatcagaccagtggtgttgacttcc

SEQ ID NO: 357226 - DNA, 33 bp, Homo sapien
acgaagagcatcagacgagtggtgttgacttcc

SEQ ID NO: 357227 - DNA, 33 bp, Homo sapien
tggcttgactcctggacggaaaagcaattttca

SEQ ID NO: 357228 - DNA, 33 bp, Homo sapien
tggcttgactcctggatggaaaagcaattttca

SEQ ID NO: 357229 - DNA, 33 bp, Homo sapien
gctatcttaggaattcaaggctttcaatgccat

SEQ ID NO: 357230 - DNA, 33 bp, Homo sapien
gctatcttaggaattcgaggctttcaatgccat

SEQ ID NO: 357231 - DNA, 33 bp, Homo sapien
caaaccggttgatgaggagatcattctagcatc

SEQ ID NO: 357232 - DNA, 33 bp, Homo sapien
caaaccggttgatgagtagatcattctagcatc

SEQ ID NO: 357233 - DNA, 33 bp, Homo sapien
acaatggaagacaatacatttgatggagcaact

SEQ ID NO: 357234 - DNA, 33 bp, Homo sapien
acaatggaagacaatatatttgatggagcaact

SEQ ID NO: 357235 - DNA, 33 bp, Homo sapien
gtaaacatttactctaagcctcagttatatctg

SEQ ID NO: 357236 - DNA, 33 bp, Homo sapien
gtaaacatttactctatgcctcagttatatctg

SEQ ID NO: 357237 - DNA, 33 bp, Homo sapien
gtccttctagctgcaacctggagaatggggaac

SEQ ID NO: 357238 - DNA, 33 bp, Homo sapien
gtccttctagctgcaatctggagaatggggaac

SEQ ID NO: 357239 - DNA, 33 bp, Homo sapien
ttacactcaagattaaaggccaagaaacaatca

SEQ ID NO: 357240 - DNA, 33 bp, Homo sapien
ttacactcaagattaagggccaagaaacaatca

SEQ ID NO: 357241 - DNA, 33 bp, Homo sapien
gggaaatccagcatccagcctcgctgtgtgggt

SEQ ID NO: 357242 - DNA, 33 bp, Homo sapien
gggaaatccagcatcccgcctcgctgtgtgggt

SEQ ID NO: 357243 - DNA, 33 bp, Homo sapien
gagccccctttcctacggtaaccacattctgct

SEQ ID NO: 357244 - DNA, 33 bp, Homo sapien
gagccccctttcctactgtaaccacattctgct

SEQ ID NO: 357245 - DNA, 33 bp, Homo sapien
ttccagagagagggcacgatatttaaagacaca

SEQ ID NO: 357246 - DNA, 33 bp, Homo sapien
ttccagagagagggcatgatatttaaagacaca

SEQ ID NO: 357247 - DNA, 33 bp, Homo sapien
ctgccttcaatttaaacattagcttgattggat

SEQ ID NO: 357248 - DNA, 33 bp, Homo sapien
ctgccttcaatttaaatattagcttgattggat

SEQ ID NO: 357249 - DNA, 33 bp, Homo sapien
catggtagttttcacactggtaatgggccggca

SEQ ID NO: 357250 - DNA, 33 bp, Homo sapien
catggtagttttcacagtggtaatgggccggca

SEQ ID NO: 357251 - DNA, 33 bp, Homo sapien
actacttataatacagccaggctttctaatcac

SEQ ID NO: 357252 - DNA, 33 bp, Homo sapien
actacttataatacagtcaggctttctaatcac

SEQ ID NO: 357253 - DNA, 33 bp, Homo sapien
cttcagtagacaccaccgagtagtccttgatga

SEQ ID NO: 357254 - DNA, 33 bp, Homo sapien
cttcagtagacaccactgagtagtccttgatga

SEQ ID NO: 357255 - DNA, 33 bp, Homo sapien
tgtgtattgaaaggaaccttgtcattaaatgag

SEQ ID NO: 357256 - DNA, 33 bp, Homo sapien
tgtgtattgaaaggaatcttgtcattaaatgag

SEQ ID NO: 357257 - DNA, 33 bp, Homo sapien
ctcaacagtgcctccactcaaatgtgatcataa

SEQ ID NO: 357258 - DNA, 33 bp, Homo sapien
ctcaacagtgcctccattcaaatgtgatcataa

SEQ ID NO: 357259 - DNA, 33 bp, Homo sapien
cccattctccatcaataacaagtgccccatagc

SEQ ID NO: 357260 - DNA, 33 bp, Homo sapien
cccattctccatcaatgacaagtgccccatagc

SEQ ID NO: 357261 - DNA, 33 bp, Homo sapien
tcacctggcataacacaggcttcattcatagct

SEQ ID NO: 357262 - DNA, 33 bp, Homo sapien
tcacctggcataacacgggcttcattcatagct

SEQ ID NO: 357263 - DNA, 33 bp, Homo sapien
gaggatagagaattgacgagttttgagtaaggc

SEQ ID NO: 357264 - DNA, 33 bp, Homo sapien
gaggatagagaattgatgagttttgagtaaggc

SEQ ID NO: 357265 - DNA, 33 bp, Homo sapien
aagacaatggatgagaagcgccgagcttaccaa

SEQ ID NO: 357266 - DNA, 33 bp, Homo sapien
aagacaatggatgagacgcgccgagcttaccaa

SEQ ID NO: 357267 - DNA, 33 bp, Homo sapien
cactgggcacggttaaatcattgggtgaaattg

SEQ ID NO: 357268 - DNA, 33 bp, Homo sapien
cactgggcacggttaagtcattgggtgaaattg

SEQ ID NO: 357269 - DNA, 33 bp, Homo sapien
agtgatctggtccgaccggagcatattgtgtgg

SEQ ID NO: 357270 - DNA, 33 bp, Homo sapien
agtgatctggtccgactggagcatattgtgtgg

SEQ ID NO: 357271 - DNA, 33 bp, Homo sapien
gaaaaataggtatcgaagcttaggctcacctgc

SEQ ID NO: 357272 - DNA, 33 bp, Homo sapien
gaaaaataggtatcgatgcttaggctcacctgc

SEQ ID NO: 357273 - DNA, 33 bp, Homo sapien
tatcatctactagtcacctagtcattaaattag

SEQ ID NO: 357274 - DNA, 33 bp, Homo sapien
tatcatctactagtcatctagtcattaaattag

SEQ ID NO: 357275 - DNA, 33 bp, Homo sapien
catgccataatcctagcctaagccatcattatt

SEQ ID NO: 357276 - DNA, 33 bp, Homo sapien
catgccataatcctagtctaagccatcattatt

SEQ ID NO: 357277 - DNA, 33 bp, Homo sapien
tgctcagtggtctgaccgcaagtttgcccctgg

SEQ ID NO: 357278 - DNA, 33 bp, Homo sapien
tgctcagtggtctgactgcaagtttgcccctgg

SEQ ID NO: 357279 - DNA, 33 bp, Homo sapien
agatgaaactgtttaacatgatttagtgctttt

SEQ ID NO: 357280 - DNA, 33 bp, Homo sapien
agatgaaactgtttaatatgatttagtgctttt

SEQ ID NO: 357281 - DNA, 33 bp, Homo sapien
atgctgatgtgtggtccaatgtctttatttcta

SEQ ID NO: 357282 - DNA, 33 bp, Homo sapien
atgctgatgtgtggtctaatgtctttatttcta

SEQ ID NO: 357283 - DNA, 33 bp, Homo sapien
cagagtccccgcttccggcctcaagtcgtctgt

SEQ ID NO: 357284 - DNA, 33 bp, Homo sapien
cagagtccccgcttcctgcctcaagtcgtctgt

SEQ ID NO: 357285 - DNA, 33 bp, Homo sapien
aggaatgcagatccgcaaggggacgccctgtgg

SEQ ID NO: 357286 - DNA, 33 bp, Homo sapien
aggaatgcagatccgcgaggggacgccctgtgg

SEQ ID NO: 357287 - DNA, 33 bp, Homo sapien
ggcccaaaagccaaaaatattgatcatctagcc

SEQ ID NO: 357288 - DNA, 33 bp, Homo sapien
ggcccaaaagccaaaactattgatcatctagcc

SEQ ID NO: 357289 - DNA, 33 bp, Homo sapien
cagtgggaatgactgacggggtcctataactcc

SEQ ID NO: 357290 - DNA, 33 bp, Homo sapien
cagtgggaatgactgatggggtcctataactcc

SEQ ID NO: 357291 - DNA, 33 bp, Homo sapien
agtgtcattggggataacattaaggacattcat

SEQ ID NO: 357292 - DNA, 33 bp, Homo sapien
agtgtcattggggatagcattaaggacattcat

SEQ ID NO: 357293 - DNA, 33 bp, Homo sapien
cagcttctgttaagcactcatgattctgacggg

SEQ ID NO: 357294 - DNA, 33 bp, Homo sapien
cagcttctgttaagcattcatgattctgacggg

SEQ ID NO: 357295 - DNA, 33 bp, Homo sapien
tcactagtttatggtccacctccacttctagga

SEQ ID NO: 357296 - DNA, 33 bp, Homo sapien
tcactagtttatggtctacctccacttctagga

SEQ ID NO: 357297 - DNA, 33 bp, Homo sapien
aggggtgatatgcaaagtatttaccaatacaga

SEQ ID NO: 357298 - DNA, 33 bp, Homo sapien
aggggtgatatgcaaattatttaccaatacaga

SEQ ID NO: 357299 - DNA, 33 bp, Homo sapien
ttaacacttttaattccaccaacataacagaac

SEQ ID NO: 357300 - DNA, 33 bp, Homo sapien
ttaacacttttaattctaccaacataacagaac

SEQ ID NO: 357301 - DNA, 33 bp, Homo sapien
ctctttccaggccagaataaaaaaatactgggt

SEQ ID NO: 357302 - DNA, 33 bp, Homo sapien
ctctttccaggccagagtaaaaaaatactgggt

SEQ ID NO: 357303 - DNA, 33 bp, Homo sapien
ttcagagttcccagaaaccaacaactggaattg

SEQ ID NO: 357304 - DNA, 33 bp, Homo sapien
ttcagagttcccagaagccaacaactggaattg

SEQ ID NO: 357305 - DNA, 33 bp, Homo sapien
cagagcaggcgcttaccgcttttcaacatctct

SEQ ID NO: 357306 - DNA, 33 bp, Homo sapien
cagagcaggcgcttactgcttttcaacatctct

SEQ ID NO: 357307 - DNA, 33 bp, Homo sapien
gtgggagtcatcgagacgtgaggtttggagtca

SEQ ID NO: 357308 - DNA, 33 bp, Homo sapien
gtgggagtcatcgagaggtgaggtttggagtca

SEQ ID NO: 357309 - DNA, 33 bp, Homo sapien
cattatggctccatgcgaatgacctcgtcttcc

SEQ ID NO: 357310 - DNA, 33 bp, Homo sapien
cattatggctccatgctaatgacctcgtcttcc

SEQ ID NO: 357311 - DNA, 33 bp, Homo sapien
gctctgtgctggtaaccgggaacaaagaccaga

SEQ ID NO: 357312 - DNA, 33 bp, Homo sapien
gctctgtgctggtaactgggaacaaagaccaga

SEQ ID NO: 357313 - DNA, 33 bp, Homo sapien
aagggccataaaaaacaactcagtttctcttga

SEQ ID NO: 357314 - DNA, 33 bp, Homo sapien
aagggccataaaaaacgactcagtttctcttga

SEQ ID NO: 357315 - DNA, 33 bp, Homo sapien
ttttcttgagaagggacgctaccacctgaggtg

SEQ ID NO: 357316 - DNA, 33 bp, Homo sapien
ttttcttgagaagggatgctaccacctgaggtg

SEQ ID NO: 357317 - DNA, 33 bp, Homo sapien
gagattttactatctaacatctgtatctataaa

SEQ ID NO: 357318 - DNA, 33 bp, Homo sapien
gagattttactatctagcatctgtatctataaa

SEQ ID NO: 357319 - DNA, 33 bp, Homo sapien
aatgaaaaccatttgaacatgaatctgtggcca

SEQ ID NO: 357320 - DNA, 33 bp, Homo sapien
aatgaaaaccatttgaccatgaatctgtggcca

SEQ ID NO: 357321 - DNA, 33 bp, Homo sapien
ttgaatatcaccccacaagtgaaaaagaaaaag

SEQ ID NO: 357322 - DNA, 33 bp, Homo sapien
ttgaatatcaccccacgagtgaaaaagaaaaag

SEQ ID NO: 357323 - DNA, 33 bp, Homo sapien
gtggagataggtccacaaactgtgattggttga

SEQ ID NO: 357324 - DNA, 33 bp, Homo sapien
gtggagataggtccacgaactgtgattggttga

SEQ ID NO: 357325 - DNA, 33 bp, Homo sapien
cctgcttgcattactaccatcacaatttgaatg

SEQ ID NO: 357326 - DNA, 33 bp, Homo sapien
cctgcttgcattactatcatcacaatttgaatg

SEQ ID NO: 357327 - DNA, 33 bp, Homo sapien
agggggctgcagaaaactgatcgtccatccagc

SEQ ID NO: 357328 - DNA, 33 bp, Homo sapien
agggggctgcagaaaagtgatcgtccatccagc

SEQ ID NO: 357329 - DNA, 33 bp, Homo sapien
caactccagaccaaacaagaagactccattgct

SEQ ID NO: 357330 - DNA, 33 bp, Homo sapien
caactccagaccaaaccagaagactccattgct

SEQ ID NO: 357331 - DNA, 33 bp, Homo sapien
gtgaatgaagaggcataatacggatttgagaat

SEQ ID NO: 357332 - DNA, 33 bp, Homo sapien
gtgaatgaagaggcatgatacggatttgagaat

SEQ ID NO: 357333 - DNA, 33 bp, Homo sapien
aatgaggaatgtaacaaagctcaagtctgccca

SEQ ID NO: 357334 - DNA, 33 bp, Homo sapien
aatgaggaatgtaacacagctcaagtctgccca

SEQ ID NO: 357335 - DNA, 33 bp, Homo sapien
ctacccaactcaactaagggaacttctgacatg

SEQ ID NO: 357336 - DNA, 33 bp, Homo sapien
ctacccaactcaactatgggaacttctgacatg

SEQ ID NO: 357337 - DNA, 33 bp, Homo sapien
ctgatactgattgtgcaacaataagttacgttg

SEQ ID NO: 357338 - DNA, 33 bp, Homo sapien
ctgatactgattgtgccacaataagttacgttg

SEQ ID NO: 357339 - DNA, 33 bp, Homo sapien
tctgcctaaattatcaaaaaaagtcctgtggtg

SEQ ID NO: 357340 - DNA, 33 bp, Homo sapien
tctgcctaaattatcagaaaaagtcctgtggtg

SEQ ID NO: 357341 - DNA, 33 bp, Homo sapien
ctatgggatgaaatgacagtcctggatagaaat

SEQ ID NO: 357342 - DNA, 33 bp, Homo sapien
ctatgggatgaaatgagagtcctggatagaaat

SEQ ID NO: 357343 - DNA, 33 bp, Homo sapien
cagttggagtacttagccagtgccacgtagata

SEQ ID NO: 357344 - DNA, 33 bp, Homo sapien
cagttggagtacttagtcagtgccacgtagata

SEQ ID NO: 357345 - DNA, 33 bp, Homo sapien
atgtgttgtcattgctcaactcccatttttgag

SEQ ID NO: 357346 - DNA, 33 bp, Homo sapien
atgtgttgtcattgctgaactcccatttttgag

SEQ ID NO: 357347 - DNA, 33 bp, Homo sapien
gtaatacatttttaagaagtgaagtaagagata

SEQ ID NO: 357348 - DNA, 33 bp, Homo sapien
gtaatacatttttaagcagtgaagtaagagata

SEQ ID NO: 357349 - DNA, 33 bp, Homo sapien
ggctgttgtgtttccgaagagaccccgtatcaa

SEQ ID NO: 357350 - DNA, 33 bp, Homo sapien
ggctgttgtgtttccggagagaccccgtatcaa

SEQ ID NO: 357351 - DNA, 33 bp, Homo sapien
taaacttttattgaccactctatctcgtatctg

SEQ ID NO: 357352 - DNA, 33 bp, Homo sapien
taaacttttattgacctctctatctcgtatctg

SEQ ID NO: 357353 - DNA, 33 bp, Homo sapien
agttgatttggagaaaaagcacacatgcatttg

SEQ ID NO: 357354 - DNA, 33 bp, Homo sapien
agttgatttggagaaacagcacacatgcatttg

SEQ ID NO: 357355 - DNA, 33 bp, Homo sapien
cagctatatactaaccagccttctcagaaatct

SEQ ID NO: 357356 - DNA, 33 bp, Homo sapien
cagctatatactaaccggccttctcagaaatct

SEQ ID NO: 357357 - DNA, 33 bp, Homo sapien
agtcttcttttgcttacagatcaaggaaccact

SEQ ID NO: 357358 - DNA, 33 bp, Homo sapien
agtcttcttttgcttagagatcaaggaaccact

SEQ ID NO: 357359 - DNA, 33 bp, Homo sapien
tttggccttaaggcaaacctcaggtctccaaag

SEQ ID NO: 357360 - DNA, 33 bp, Homo sapien
tttggccttaaggcaaccctcaggtctccaaag

SEQ ID NO: 357361 - DNA, 33 bp, Homo sapien
atgcaaccccctaacccggtgacacaggcatac

SEQ ID NO: 357362 - DNA, 33 bp, Homo sapien
atgcaaccccctaacctggtgacacaggcatac

SEQ ID NO: 357363 - DNA, 33 bp, Homo sapien
tttgattcttccaaacaaaacacaatatctcat

SEQ ID NO: 357364 - DNA, 33 bp, Homo sapien
tttgattcttccaaaccaaacacaatatctcat

SEQ ID NO: 357365 - DNA, 33 bp, Homo sapien
ggggtatagctggagaacacccagtgagcatct

SEQ ID NO: 357366 - DNA, 33 bp, Homo sapien
ggggtatagctggagagcacccagtgagcatct

SEQ ID NO: 357367 - DNA, 33 bp, Homo sapien
gctgttgatttatgaaagctgagaggcacgtgg

SEQ ID NO: 357368 - DNA, 33 bp, Homo sapien
gctgttgatttatgaacgctgagaggcacgtgg

SEQ ID NO: 357369 - DNA, 33 bp, Homo sapien
gtgtcttataacaagcaacacctgtcactctga

SEQ ID NO: 357370 - DNA, 33 bp, Homo sapien
gtgtcttataacaagcgacacctgtcactctga

SEQ ID NO: 357371 - DNA, 33 bp, Homo sapien
attcacaaaaacttacagagagtgtcctaagta

SEQ ID NO: 357372 - DNA, 33 bp, Homo sapien
attcacaaaaacttacggagagtgtcctaagta

SEQ ID NO: 357373 - DNA, 33 bp, Homo sapien
cttgttattcttgttacctcttagatgtcttta

SEQ ID NO: 357374 - DNA, 33 bp, Homo sapien
cttgttattcttgttatctcttagatgtcttta

SEQ ID NO: 357375 - DNA, 33 bp, Homo sapien
acaagaagatgaaaacacagccagataaggaga

SEQ ID NO: 357376 - DNA, 33 bp, Homo sapien
acaagaagatgaaaacgcagccagataaggaga

SEQ ID NO: 357377 - DNA, 33 bp, Homo sapien
ctcaggtgcctgaaaaatctcctacaaaaggag

SEQ ID NO: 357378 - DNA, 33 bp, Homo sapien
ctcaggtgcctgaaaagtctcctacaaaaggag

SEQ ID NO: 357379 - DNA, 33 bp, Homo sapien
tcatgcacccgtctcacgattctttgcatcgac

SEQ ID NO: 357380 - DNA, 33 bp, Homo sapien
tcatgcacccgtctcaggattctttgcatcgac

SEQ ID NO: 357381 - DNA, 33 bp, Homo sapien
gtattctgaagccctccagtgcaatgtccacaa

SEQ ID NO: 357382 - DNA, 33 bp, Homo sapien
gtattctgaagccctcgagtgcaatgtccacaa

SEQ ID NO: 357383 - DNA, 33 bp, Homo sapien
caggatgacaacgaggaagtttctagagtgggc

SEQ ID NO: 357384 - DNA, 33 bp, Homo sapien
caggatgacaacgagggagtttctagagtgggc

SEQ ID NO: 357385 - DNA, 33 bp, Homo sapien
aacctgaaagtctgtacccagggacaggaccct

SEQ ID NO: 357386 - DNA, 33 bp, Homo sapien
aacctgaaagtctgtatccagggacaggaccct

SEQ ID NO: 357387 - DNA, 33 bp, Homo sapien
ctaagagggaaagtgacagcatcacataacgag

SEQ ID NO: 357388 - DNA, 33 bp, Homo sapien
ctaagagggaaagtgagagcatcacataacgag

SEQ ID NO: 357389 - DNA, 33 bp, Homo sapien
ggcccaatcaagaaacagcctcaaaaccgtaca

SEQ ID NO: 357390 - DNA, 33 bp, Homo sapien
ggcccaatcaagaaacggcctcaaaaccgtaca

SEQ ID NO: 357391 - DNA, 33 bp, Homo sapien
cctgtgatgttatgacagaccgtaagccaaact

SEQ ID NO: 357392 - DNA, 33 bp, Homo sapien
cctgtgatgttatgactgaccgtaagccaaact

SEQ ID NO: 357393 - DNA, 33 bp, Homo sapien
tctgggccaaagagataaggtcatatgttccaa

SEQ ID NO: 357394 - DNA, 33 bp, Homo sapien
tctgggccaaagagatcaggtcatatgttccaa

SEQ ID NO: 357395 - DNA, 33 bp, Homo sapien
atctgcgctataggaacgcacctctttggttac

SEQ ID NO: 357396 - DNA, 33 bp, Homo sapien
atctgcgctataggaatgcacctctttggttac

SEQ ID NO: 357397 - DNA, 33 bp, Homo sapien
ctgttatttcttgttacgcttagttagttggtt

SEQ ID NO: 357398 - DNA, 33 bp, Homo sapien
ctgttatttcttgttaggcttagttagttggtt

SEQ ID NO: 357399 - DNA, 33 bp, Homo sapien
actctccagtaagttgacaaaatgaatgaaaac

SEQ ID NO: 357400 - DNA, 33 bp, Homo sapien
actctccagtaagttggcaaaatgaatgaaaac

SEQ ID NO: 357401 - DNA, 33 bp, Homo sapien
gtgtctgttgaatgccaagtcgtagggttgggg

SEQ ID NO: 357402 - DNA, 33 bp, Homo sapien
gtgtctgttgaatgccgagtcgtagggttgggg

SEQ ID NO: 357403 - DNA, 33 bp, Homo sapien
ttataaagcaaggtaaaaagcatagtgtatgtg

SEQ ID NO: 357404 - DNA, 33 bp, Homo sapien
ttataaagcaaggtaacaagcatagtgtatgtg

SEQ ID NO: 357405 - DNA, 33 bp, Homo sapien
aatctctatgtgtctccgaattttctttctgtg

SEQ ID NO: 357406 - DNA, 33 bp, Homo sapien
aatctctatgtgtctctgaattttctttctgtg

SEQ ID NO: 357407 - DNA, 33 bp, Homo sapien
atataaataatggtcaatactccttagtcatgg

SEQ ID NO: 357408 - DNA, 33 bp, Homo sapien
atataaataatggtcagtactccttagtcatgg

SEQ ID NO: 357409 - DNA, 33 bp, Homo sapien
tgcaggttcttcttgacacaccaggcaaatcta

SEQ ID NO: 357410 - DNA, 33 bp, Homo sapien
tgcaggttcttcttgagacaccaggcaaatcta

SEQ ID NO: 357411 - DNA, 33 bp, Homo sapien
tgactgcccccattaacaggactgtgaagacct

SEQ ID NO: 357412 - DNA, 33 bp, Homo sapien
tgactgcccccattaataggactgtgaagacct

SEQ ID NO: 357413 - DNA, 33 bp, Homo sapien
cccagaaaggttcaataaactgcccatatcaga

SEQ ID NO: 357414 - DNA, 33 bp, Homo sapien
cccagaaaggttcaatcaactgcccatatcaga

SEQ ID NO: 357415 - DNA, 33 bp, Homo sapien
gccgaaggattttgccccctggtgttatttggt

SEQ ID NO: 357416 - DNA, 33 bp, Homo sapien
gccgaaggattttgcctcctggtgttatttggt

SEQ ID NO: 357417 - DNA, 33 bp, Homo sapien
gataatacacataagccaaggactgctggtatc

SEQ ID NO: 357418 - DNA, 33 bp, Homo sapien
gataatacacataagctaaggactgctggtatc

SEQ ID NO: 357419 - DNA, 33 bp, Homo sapien
gaataataaaaaaatacgataatcacccacatg

SEQ ID NO: 357420 - DNA, 33 bp, Homo sapien
gaataataaaaaaatatgataatcacccacatg

SEQ ID NO: 357421 - DNA, 33 bp, Homo sapien
ggcatgagggatcttgaagagccttttgtaggt

SEQ ID NO: 357422 - DNA, 33 bp, Homo sapien
ggcatgagggatcttggagagccttttgtaggt

SEQ ID NO: 357423 - DNA, 33 bp, Homo sapien
agttgtgaagaatacaacgactatgaatattgt

SEQ ID NO: 357424 - DNA, 33 bp, Homo sapien
agttgtgaagaatacagcgactatgaatattgt

SEQ ID NO: 357425 - DNA, 33 bp, Homo sapien
tgaaccttgaaggctgcaaaagtgatttatagt

SEQ ID NO: 357426 - DNA, 33 bp, Homo sapien
tgaaccttgaaggctggaaaagtgatttatagt

SEQ ID NO: 357427 - DNA, 33 bp, Homo sapien
tcttcctagacgtcaccagcactcgtcatctgg

SEQ ID NO: 357428 - DNA, 33 bp, Homo sapien
tcttcctagacgtcactagcactcgtcatctgg

SEQ ID NO: 357429 - DNA, 33 bp, Homo sapien
taacaggggcacaaaacgtatctgttgctgtgg

SEQ ID NO: 357430 - DNA, 33 bp, Homo sapien
taacaggggcacaaaatgtatctgttgctgtgg

SEQ ID NO: 357431 - DNA, 33 bp, Homo sapien
cttctgactttaaatacgtgcactcaactcctg

SEQ ID NO: 357432 - DNA, 33 bp, Homo sapien
cttctgactttaaatatgtgcactcaactcctg

SEQ ID NO: 357433 - DNA, 33 bp, Homo sapien
gggttcctgggcctaaatgaaaagaagaatttg

SEQ ID NO: 357434 - DNA, 33 bp, Homo sapien
gggttcctgggcctaactgaaaagaagaatttg

SEQ ID NO: 357435 - DNA, 33 bp, Homo sapien
gtgcacaggaaacacacgcctccttttcacttg

SEQ ID NO: 357436 - DNA, 33 bp, Homo sapien
gtgcacaggaaacacatgcctccttttcacttg

SEQ ID NO: 357437 - DNA, 33 bp, Homo sapien
cccacatgaaattaatcagaggacttcagggct

SEQ ID NO: 357438 - DNA, 33 bp, Homo sapien
cccacatgaaattaattagaggacttcagggct

SEQ ID NO: 357439 - DNA, 33 bp, Homo sapien
catattggcagtcaaaaagaccaacgtatatga

SEQ ID NO: 357440 - DNA, 33 bp, Homo sapien
catattggcagtcaaagagaccaacgtatatga

SEQ ID NO: 357441 - DNA, 33 bp, Homo sapien
aaaaagatcagcaagacggtccgcaccagatgt

SEQ ID NO: 357442 - DNA, 33 bp, Homo sapien
aaaaagatcagcaagatggtccgcaccagatgt

SEQ ID NO: 357443 - DNA, 33 bp, Homo sapien
tcctttgtatacattaaatgcagcaagatgtat

SEQ ID NO: 357444 - DNA, 33 bp, Homo sapien
tcctttgtatacattacatgcagcaagatgtat

SEQ ID NO: 357445 - DNA, 33 bp, Homo sapien
cactggcttatggaaacggcctcctcaccagca

SEQ ID NO: 357446 - DNA, 33 bp, Homo sapien
cactggcttatggaaatggcctcctcaccagca

SEQ ID NO: 357447 - DNA, 33 bp, Homo sapien
atatgccagctaataaataaacaaggagtgata

SEQ ID NO: 357448 - DNA, 33 bp, Homo sapien
atatgccagctaataagtaaacaaggagtgata

SEQ ID NO: 357449 - DNA, 33 bp, Homo sapien
tttagacttccattaaaaggtgtctaatattga

SEQ ID NO: 357450 - DNA, 33 bp, Homo sapien
tttagacttccattaagaggtgtctaatattga

SEQ ID NO: 357451 - DNA, 33 bp, Homo sapien
ccaagcatctatataaataccaatttgcaggac

SEQ ID NO: 357452 - DNA, 33 bp, Homo sapien
ccaagcatctatataattaccaatttgcaggac

SEQ ID NO: 357453 - DNA, 33 bp, Homo sapien
ataaagttggtggagtcaaaagcaatcaatccc

SEQ ID NO: 357454 - DNA, 33 bp, Homo sapien
ataaagttggtggagtgaaaagcaatcaatccc

SEQ ID NO: 357455 - DNA, 33 bp, Homo sapien
ctgtgctaaaagacaccgagaaagattcactct

SEQ ID NO: 357456 - DNA, 33 bp, Homo sapien
ctgtgctaaaagacactgagaaagattcactct

SEQ ID NO: 357457 - DNA, 33 bp, Homo sapien
tttccattttacttaaaagaggcaattttggtt

SEQ ID NO: 357458 - DNA, 33 bp, Homo sapien
tttccattttacttaagagaggcaattttggtt

SEQ ID NO: 357459 - DNA, 33 bp, Homo sapien
tcagccagattctggtaaaaattcaggaagctg

SEQ ID NO: 357460 - DNA, 33 bp, Homo sapien
tcagccagattctggtgaaaattcaggaagctg

SEQ ID NO: 357461 - DNA, 33 bp, Homo sapien
cagacaacttcaagacagaactgttttttgaaa

SEQ ID NO: 357462 - DNA, 33 bp, Homo sapien
cagacaacttcaagaccgaactgttttttgaaa

SEQ ID NO: 357463 - DNA, 33 bp, Homo sapien
tagttacagtttactaagtatggtgaaaccttt

SEQ ID NO: 357464 - DNA, 33 bp, Homo sapien
tagttacagtttactacgtatggtgaaaccttt

SEQ ID NO: 357465 - DNA, 33 bp, Homo sapien
gaaggcacttttgttacgttaaattaagcttag

SEQ ID NO: 357466 - DNA, 33 bp, Homo sapien
gaaggcacttttgttaggttaaattaagcttag

SEQ ID NO: 357467 - DNA, 33 bp, Homo sapien
tttgttccagctggcacacaaggaggggtccca

SEQ ID NO: 357468 - DNA, 33 bp, Homo sapien
tttgttccagctggcagacaaggaggggtccca

SEQ ID NO: 357469 - DNA, 33 bp, Homo sapien
agtagtttggacacaacagaagaaataatcagt

SEQ ID NO: 357470 - DNA, 33 bp, Homo sapien
agtagtttggacacaatagaagaaataatcagt

SEQ ID NO: 357471 - DNA, 33 bp, Homo sapien
agaagatcaaggacagaaaatagagtgaggtca

SEQ ID NO: 357472 - DNA, 33 bp, Homo sapien
agaagatcaaggacagcaaatagagtgaggtca

SEQ ID NO: 357473 - DNA, 33 bp, Homo sapien
tctaaatgtatctcagaaaacaatttaaaaaac

SEQ ID NO: 357474 - DNA, 33 bp, Homo sapien
tctaaatgtatctcaggaaacaatttaaaaaac

SEQ ID NO: 357475 - DNA, 33 bp, Homo sapien
taaaagcaatgtgaaggatatgttttctcatcc

SEQ ID NO: 357476 - DNA, 33 bp, Homo sapien
taaaagcaatgtgaagtatatgttttctcatcc

SEQ ID NO: 357477 - DNA, 33 bp, Homo sapien
ggaagcttggagaatcaacatgattgggtgagg

SEQ ID NO: 357478 - DNA, 33 bp, Homo sapien
ggaagcttggagaatcgacatgattgggtgagg

SEQ ID NO: 357479 - DNA, 33 bp, Homo sapien
atgctagatgcattaaagatttaaacgtaagac

SEQ ID NO: 357480 - DNA, 33 bp, Homo sapien
atgctagatgcattaaggatttaaacgtaagac

SEQ ID NO: 357481 - DNA, 33 bp, Homo sapien
tctgtctagttttagaatcaggataatgctgat

SEQ ID NO: 357482 - DNA, 33 bp, Homo sapien
tctgtctagttttagagtcaggataatgctgat

SEQ ID NO: 357483 - DNA, 33 bp, Homo sapien
tttctcaagaggccccagaagagttgtgtgtta

SEQ ID NO: 357484 - DNA, 33 bp, Homo sapien
tttctcaagaggccccggaagagttgtgtgtta

SEQ ID NO: 357485 - DNA, 33 bp, Homo sapien
tttcagtttgtctctgcactaaattaggtggag

SEQ ID NO: 357486 - DNA, 33 bp, Homo sapien
tttcagtttgtctctgtactaaattaggtggag

SEQ ID NO: 357487 - DNA, 33 bp, Homo sapien
gagttcatccaaattgcatatgccaacagtttc

SEQ ID NO: 357488 - DNA, 33 bp, Homo sapien
gagttcatccaaattgtatatgccaacagtttc

SEQ ID NO: 357489 - DNA, 33 bp, Homo sapien
cacggacgtgcgtaaccagtacctgacctgcgt

SEQ ID NO: 357490 - DNA, 33 bp, Homo sapien
cacggacgtgcgtaactagtacctgacctgcgt

SEQ ID NO: 357491 - DNA, 33 bp, Homo sapien
aaagacaaaacttcccaacttgaataaggctcc

SEQ ID NO: 357492 - DNA, 33 bp, Homo sapien
aaagacaaaacttcccgacttgaataaggctcc

SEQ ID NO: 357493 - DNA, 33 bp, Homo sapien
agaaacggcaaaaacacgtctgtgggagaaagc

SEQ ID NO: 357494 - DNA, 33 bp, Homo sapien
agaaacggcaaaaacatgtctgtgggagaaagc

SEQ ID NO: 357495 - DNA, 33 bp, Homo sapien
ccggtggctcctgctacagctgacttttcacta

SEQ ID NO: 357496 - DNA, 33 bp, Homo sapien
ccggtggctcctgctatagctgacttttcacta

SEQ ID NO: 357497 - DNA, 33 bp, Homo sapien
gttcttgcaagaatgaagtaagacaattcacat

SEQ ID NO: 357498 - DNA, 33 bp, Homo sapien
gttcttgcaagaatgatgtaagacaattcacat

SEQ ID NO: 357499 - DNA, 33 bp, Homo sapien
tattatttatgtgcataaacagactacactgga

SEQ ID NO: 357500 - DNA, 33 bp, Homo sapien
tattatttatgtgcatgaacagactacactgga

SEQ ID NO: 357501 - DNA, 33 bp, Homo sapien
atgtatataaagctcccatacatttatcctgaa

SEQ ID NO: 357502 - DNA, 33 bp, Homo sapien
atgtatataaagctccgatacatttatcctgaa

SEQ ID NO: 357503 - DNA, 33 bp, Homo sapien
cctgtatgtcagtgatcaaaaagtagattttgc

SEQ ID NO: 357504 - DNA, 33 bp, Homo sapien
cctgtatgtcagtgatgaaaaagtagattttgc

SEQ ID NO: 357505 - DNA, 33 bp, Homo sapien
cccaattgtacaaaataaagacgatacaagata

SEQ ID NO: 357506 - DNA, 33 bp, Homo sapien
cccaattgtacaaaatgaagacgatacaagata

SEQ ID NO: 357507 - DNA, 33 bp, Homo sapien
ctctcacaatcatttcacctactgacttgctat

SEQ ID NO: 357508 - DNA, 33 bp, Homo sapien
ctctcacaatcatttcgcctactgacttgctat

SEQ ID NO: 357509 - DNA, 33 bp, Homo sapien
cctatcctaagctcaacacctatcagatacttc

SEQ ID NO: 357510 - DNA, 33 bp, Homo sapien
cctatcctaagctcaatacctatcagatacttc

SEQ ID NO: 357511 - DNA, 33 bp, Homo sapien
cctgcacccactgcggacacagcaaattaaata

SEQ ID NO: 357512 - DNA, 33 bp, Homo sapien
cctgcacccactgcgggcacagcaaattaaata

SEQ ID NO: 357513 - DNA, 33 bp, Homo sapien
agtgactgaaaaaaacactggcttctgcacaca

SEQ ID NO: 357514 - DNA, 33 bp, Homo sapien
agtgactgaaaaaaacgctggcttctgcacaca

SEQ ID NO: 357515 - DNA, 33 bp, Homo sapien
agtaaccagagtaagcacaatgtattatacagt

SEQ ID NO: 357516 - DNA, 33 bp, Homo sapien
agtaaccagagtaagcgcaatgtattatacagt

SEQ ID NO: 357517 - DNA, 33 bp, Homo sapien
gtcaattaagtccagcaagccaaggctgcagtg

SEQ ID NO: 357518 - DNA, 33 bp, Homo sapien
gtcaattaagtccagcgagccaaggctgcagtg

SEQ ID NO: 357519 - DNA, 33 bp, Homo sapien
tcaccagctggccagagaatagcagaaacgaag

SEQ ID NO: 357520 - DNA, 33 bp, Homo sapien
tcaccagctggccagataatagcagaaacgaag

SEQ ID NO: 357521 - DNA, 33 bp, Homo sapien
tcaagccttctaagaactcaaggagcaaaggaa

SEQ ID NO: 357522 - DNA, 33 bp, Homo sapien
tcaagccttctaagaattcaaggagcaaaggaa

SEQ ID NO: 357523 - DNA, 33 bp, Homo sapien
aagcttcctttcagcaatgaggggaaaaatatt

SEQ ID NO: 357524 - DNA, 33 bp, Homo sapien
aagcttcctttcagcattgaggggaaaaatatt

SEQ ID NO: 357525 - DNA, 33 bp, Homo sapien
aatcatttttaagcaactcagaatcattatatc

SEQ ID NO: 357526 - DNA, 33 bp, Homo sapien
aatcatttttaagcaattcagaatcattatatc

SEQ ID NO: 357527 - DNA, 33 bp, Homo sapien
ctggtctggtctaaggaatacctgagtcagaat

SEQ ID NO: 357528 - DNA, 33 bp, Homo sapien
ctggtctggtctaaggcatacctgagtcagaat

SEQ ID NO: 357529 - DNA, 33 bp, Homo sapien
taaaacaaaaaaaccacatgattctgtattctc

SEQ ID NO: 357530 - DNA, 33 bp, Homo sapien
taaaacaaaaaaaccatatgattctgtattctc

SEQ ID NO: 357531 - DNA, 33 bp, Homo sapien
ggaagccatcatcactcacttcagggagtagca

SEQ ID NO: 357532 - DNA, 33 bp, Homo sapien
ggaagccatcatcacttacttcagggagtagca

SEQ ID NO: 357533 - DNA, 33 bp, Homo sapien
attcgattcactgacacagaagtgactttttgc

SEQ ID NO: 357534 - DNA, 33 bp, Homo sapien
attcgattcactgacagagaagtgactttttgc

SEQ ID NO: 357535 - DNA, 33 bp, Homo sapien
cttagctaatgtggctaaaactatcacttaaag

SEQ ID NO: 357536 - DNA, 33 bp, Homo sapien
cttagctaatgtggctgaaactatcacttaaag

SEQ ID NO: 357537 - DNA, 33 bp, Homo sapien
gttacaataaaaaggccaatcaagacctatcga

SEQ ID NO: 357538 - DNA, 33 bp, Homo sapien
gttacaataaaaaggctaatcaagacctatcga

SEQ ID NO: 357539 - DNA, 33 bp, Homo sapien
tcacatgaagaaataaaagcacccatggaataa

SEQ ID NO: 357540 - DNA, 33 bp, Homo sapien
tcacatgaagaaataagagcacccatggaataa

SEQ ID NO: 357541 - DNA, 33 bp, Homo sapien
atttacatgtaaatgcagatttctctcacctgt

SEQ ID NO: 357542 - DNA, 33 bp, Homo sapien
atttacatgtaaatgccgatttctctcacctgt

SEQ ID NO: 357543 - DNA, 33 bp, Homo sapien
gagtcaaaaacaaatactagcaagagttattgg

SEQ ID NO: 357544 - DNA, 33 bp, Homo sapien
gagtcaaaaacaaatattagcaagagttattgg

SEQ ID NO: 357545 - DNA, 33 bp, Homo sapien
cagaaaaggataaaagaacctctgagcgggact

SEQ ID NO: 357546 - DNA, 33 bp, Homo sapien
cagaaaaggataaaaggacctctgagcgggact

SEQ ID NO: 357547 - DNA, 33 bp, Homo sapien
agaaaaaagctggaaggccagtaaaatgagtag

SEQ ID NO: 357548 - DNA, 33 bp, Homo sapien
agaaaaaagctggaagtccagtaaaatgagtag

SEQ ID NO: 357549 - DNA, 33 bp, Homo sapien
acagtaatgagggttcaccccacatggtgctag

SEQ ID NO: 357550 - DNA, 33 bp, Homo sapien
acagtaatgagggttcgccccacatggtgctag

SEQ ID NO: 357551 - DNA, 33 bp, Homo sapien
gactgtttcttcaagacgccctctccccagttc

SEQ ID NO: 357552 - DNA, 33 bp, Homo sapien
gactgtttcttcaagatgccctctccccagttc

SEQ ID NO: 357553 - DNA, 33 bp, Homo sapien
ctagctcacctgcatgaatttcaggaacaagcc

SEQ ID NO: 357554 - DNA, 33 bp, Homo sapien
ctagctcacctgcatgcatttcaggaacaagcc

SEQ ID NO: 357555 - DNA, 33 bp, Homo sapien
tgtgtgtctctcggaacctctggcccacttccc

SEQ ID NO: 357556 - DNA, 33 bp, Homo sapien
tgtgtgtctctcggaagctctggcccacttccc

SEQ ID NO: 357557 - DNA, 33 bp, Homo sapien
tcacatttcatctgtaaaaactacccagtgaat

SEQ ID NO: 357558 - DNA, 33 bp, Homo sapien
tcacatttcatctgtacaaactacccagtgaat

SEQ ID NO: 357559 - DNA, 33 bp, Homo sapien
gggagacaggtgactacgtggtggagagacata

SEQ ID NO: 357560 - DNA, 33 bp, Homo sapien
gggagacaggtgactatgtggtggagagacata

SEQ ID NO: 357561 - DNA, 33 bp, Homo sapien
ttttcctcctcacgataagctgtctttggagct

SEQ ID NO: 357562 - DNA, 33 bp, Homo sapien
ttttcctcctcacgatgagctgtctttggagct

SEQ ID NO: 357563 - DNA, 33 bp, Homo sapien
ctactgtcaaacatcacggcaccagtcaccaca

SEQ ID NO: 357564 - DNA, 33 bp, Homo sapien
ctactgtcaaacatcatggcaccagtcaccaca

SEQ ID NO: 357565 - DNA, 33 bp, Homo sapien
agttttctacttaggggagtggtctaacatttt

SEQ ID NO: 357566 - DNA, 33 bp, Homo sapien
agttttctacttagggtagtggtctaacatttt

SEQ ID NO: 357567 - DNA, 33 bp, Homo sapien
cagtggcgataggaaacgaatatggtttgcaaa

SEQ ID NO: 357568 - DNA, 33 bp, Homo sapien
cagtggcgataggaaatgaatatggtttgcaaa

SEQ ID NO: 357569 - DNA, 33 bp, Homo sapien
gtagcagcaatctcatcaggttcgaggcttagg

SEQ ID NO: 357570 - DNA, 33 bp, Homo sapien
gtagcagcaatctcatgaggttcgaggcttagg

SEQ ID NO: 357571 - DNA, 33 bp, Homo sapien
taggccaccgcgccaggcagttcctgtgtgctg

SEQ ID NO: 357572 - DNA, 33 bp, Homo sapien
taggccaccgcgccagtcagttcctgtgtgctg

SEQ ID NO: 357573 - DNA, 33 bp, Homo sapien
gggtaggtgaagttaaatcaatctggtcctttg

SEQ ID NO: 357574 - DNA, 33 bp, Homo sapien
gggtaggtgaagttaagtcaatctggtcctttg

SEQ ID NO: 357575 - DNA, 33 bp, Homo sapien
aacagatcttacagcaactcctgcaagcggaag

SEQ ID NO: 357576 - DNA, 33 bp, Homo sapien
aacagatcttacagcagctcctgcaagcggaag

SEQ ID NO: 357577 - DNA, 33 bp, Homo sapien
gctatagtggggcaaaaaggagaatccagaagt

SEQ ID NO: 357578 - DNA, 33 bp, Homo sapien
gctatagtggggcaaacaggagaatccagaagt

SEQ ID NO: 357579 - DNA, 33 bp, Homo sapien
tgctgtgaaaagtccactcttgggcaagggcag

SEQ ID NO: 357580 - DNA, 33 bp, Homo sapien
tgctgtgaaaagtccattcttgggcaagggcag

SEQ ID NO: 357581 - DNA, 33 bp, Homo sapien
tggtggctcacatttacaattccagcactttgg

SEQ ID NO: 357582 - DNA, 33 bp, Homo sapien
tggtggctcacatttataattccagcactttgg

SEQ ID NO: 357583 - DNA, 33 bp, Homo sapien
atttaaatgaagccgtaaagtgtgtttagggtg

SEQ ID NO: 357584 - DNA, 33 bp, Homo sapien
atttaaatgaagccgtgaagtgtgtttagggtg

SEQ ID NO: 357585 - DNA, 33 bp, Homo sapien
gatatgtagatttgccaagggagaggttaaaat

SEQ ID NO: 357586 - DNA, 33 bp, Homo sapien
gatatgtagatttgccgagggagaggttaaaat

SEQ ID NO: 357587 - DNA, 33 bp, Homo sapien
gacagcaaattgctccacaccccagtagcacag

SEQ ID NO: 357588 - DNA, 33 bp, Homo sapien
gacagcaaattgctccgcaccccagtagcacag

SEQ ID NO: 357589 - DNA, 33 bp, Homo sapien
gtgagccaagaaccggcagtaggtgctaggact

SEQ ID NO: 357590 - DNA, 33 bp, Homo sapien
gtgagccaagaaccgggagtaggtgctaggact

SEQ ID NO: 357591 - DNA, 33 bp, Homo sapien
atggaacctgtacccccaccagctcagcacagc

SEQ ID NO: 357592 - DNA, 33 bp, Homo sapien
atggaacctgtaccccgaccagctcagcacagc

SEQ ID NO: 357593 - DNA, 33 bp, Homo sapien
ataaggccatgtcgcacacaaccacatagggag

SEQ ID NO: 357594 - DNA, 33 bp, Homo sapien
ataaggccatgtcgcatacaaccacatagggag

SEQ ID NO: 357595 - DNA, 33 bp, Homo sapien
ttattttgaccatcacaccttttcaaaaacatg

SEQ ID NO: 357596 - DNA, 33 bp, Homo sapien
ttattttgaccatcaccccttttcaaaaacatg

SEQ ID NO: 357597 - DNA, 33 bp, Homo sapien
acctctgaaactctcaccaataggtagatcctt

SEQ ID NO: 357598 - DNA, 33 bp, Homo sapien
acctctgaaactctcatcaataggtagatcctt

SEQ ID NO: 357599 - DNA, 33 bp, Homo sapien
atgttgctcttgaaagccacttgccaaactcat

SEQ ID NO: 357600 - DNA, 33 bp, Homo sapien
atgttgctcttgaaagtcacttgccaaactcat

SEQ ID NO: 357601 - DNA, 33 bp, Homo sapien
gagattacaaggacacagagtctaagaaaacta

SEQ ID NO: 357602 - DNA, 33 bp, Homo sapien
gagattacaaggacaccgagtctaagaaaacta

SEQ ID NO: 357603 - DNA, 33 bp, Homo sapien
ggcacaaagcaggaaggactggttgttggagtg

SEQ ID NO: 357604 - DNA, 33 bp, Homo sapien
ggcacaaagcaggaagtactggttgttggagtg

SEQ ID NO: 357605 - DNA, 33 bp, Homo sapien
tgcctatggagattacggacaaatggacaccag

SEQ ID NO: 357606 - DNA, 33 bp, Homo sapien
tgcctatggagattactgacaaatggacaccag

SEQ ID NO: 357607 - DNA, 33 bp, Homo sapien
aattatactgaagtaacagctagaagaggtggc

SEQ ID NO: 357608 - DNA, 33 bp, Homo sapien
aattatactgaagtaagagctagaagaggtggc

SEQ ID NO: 357609 - DNA, 33 bp, Homo sapien
gctcctgctgacaccaagattaatggtttccaa

SEQ ID NO: 357610 - DNA, 33 bp, Homo sapien
gctcctgctgacaccaggattaatggtttccaa

SEQ ID NO: 357611 - DNA, 33 bp, Homo sapien
cctggctcgtgggggagattaactacaagttcc

SEQ ID NO: 357612 - DNA, 33 bp, Homo sapien
cctggctcgtgggggatattaactacaagttcc

SEQ ID NO: 357613 - DNA, 33 bp, Homo sapien
ggggtgactatcctaacaacatttatgggaaaa

SEQ ID NO: 357614 - DNA, 33 bp, Homo sapien
ggggtgactatcctaagaacatttatgggaaaa

SEQ ID NO: 357615 - DNA, 33 bp, Homo sapien
ttgagacagtaactcaaaaggacctcacctgct

SEQ ID NO: 357616 - DNA, 33 bp, Homo sapien
ttgagacagtaactcagaaggacctcacctgct

SEQ ID NO: 357617 - DNA, 33 bp, Homo sapien
agctgcagtttaaaaaccatacagtgatagtga

SEQ ID NO: 357618 - DNA, 33 bp, Homo sapien
agctgcagtttaaaaagcatacagtgatagtga

SEQ ID NO: 357619 - DNA, 33 bp, Homo sapien
gcccacaaattgaggacaagaattcaggaactt

SEQ ID NO: 357620 - DNA, 33 bp, Homo sapien
gcccacaaattgaggataagaattcaggaactt

SEQ ID NO: 357621 - DNA, 33 bp, Homo sapien
ctccaggaataaaaggccctgtttatctctctt

SEQ ID NO: 357622 - DNA, 33 bp, Homo sapien
ctccaggaataaaaggtcctgtttatctctctt

SEQ ID NO: 357623 - DNA, 33 bp, Homo sapien
cacttactggatgtacaggctggctcccaaagg

SEQ ID NO: 357624 - DNA, 33 bp, Homo sapien
cacttactggatgtacgggctggctcccaaagg

SEQ ID NO: 357625 - DNA, 33 bp, Homo sapien
acagtaaggtggtatacaatcgtcatcagctgt

SEQ ID NO: 357626 - DNA, 33 bp, Homo sapien
acagtaaggtggtatagaatcgtcatcagctgt

SEQ ID NO: 357627 - DNA, 33 bp, Homo sapien
agctactttaatcagaaccattagagcctgggc

SEQ ID NO: 357628 - DNA, 33 bp, Homo sapien
agctactttaatcagacccattagagcctgggc

SEQ ID NO: 357629 - DNA, 33 bp, Homo sapien
caaagaatacctgaccacaaatgtcatttgcac

SEQ ID NO: 357630 - DNA, 33 bp, Homo sapien
caaagaatacctgaccgcaaatgtcatttgcac

SEQ ID NO: 357631 - DNA, 33 bp, Homo sapien
ttttagcttttcatggacatacagtcatgtata

SEQ ID NO: 357632 - DNA, 33 bp, Homo sapien
ttttagcttttcatgggcatacagtcatgtata

SEQ ID NO: 357633 - DNA, 33 bp, Homo sapien
tgccattcattagacactgaatctggtagggcc

SEQ ID NO: 357634 - DNA, 33 bp, Homo sapien
tgccattcattagacattgaatctggtagggcc

SEQ ID NO: 357635 - DNA, 33 bp, Homo sapien
tgagaaaatgtgaagaaactttgccaaaacaga

SEQ ID NO: 357636 - DNA, 33 bp, Homo sapien
tgagaaaatgtgaagacactttgccaaaacaga

SEQ ID NO: 357637 - DNA, 33 bp, Homo sapien
gctacaaaaagacaaaaggaggtatagtgattg

SEQ ID NO: 357638 - DNA, 33 bp, Homo sapien
gctacaaaaagacaaacggaggtatagtgattg

SEQ ID NO: 357639 - DNA, 33 bp, Homo sapien
tagaagcttagggaaacgctgttcgtactgagc

SEQ ID NO: 357640 - DNA, 33 bp, Homo sapien
tagaagcttagggaaatgctgttcgtactgagc

SEQ ID NO: 357641 - DNA, 33 bp, Homo sapien
agaaacagcattcagactaaaatagcctactga

SEQ ID NO: 357642 - DNA, 33 bp, Homo sapien
agaaacagcattcagattaaaatagcctactga

SEQ ID NO: 357643 - DNA, 33 bp, Homo sapien
agattataaacagtaacgcatcttaaaccatca

SEQ ID NO: 357644 - DNA, 33 bp, Homo sapien
agattataaacagtaatgcatcttaaaccatca

SEQ ID NO: 357645 - DNA, 33 bp, Homo sapien
gtttttgtatagatgccgaaatccatgatctct

SEQ ID NO: 357646 - DNA, 33 bp, Homo sapien
gtttttgtatagatgctgaaatccatgatctct

SEQ ID NO: 357647 - DNA, 33 bp, Homo sapien
gtgaagaaaaccaacactggccccactgcaaga

SEQ ID NO: 357648 - DNA, 33 bp, Homo sapien
gtgaagaaaaccaacattggccccactgcaaga

SEQ ID NO: 357649 - DNA, 33 bp, Homo sapien
atatctaaaacctactcagccattcatcacgtt

SEQ ID NO: 357650 - DNA, 33 bp, Homo sapien
atatctaaaacctacttagccattcatcacgtt

SEQ ID NO: 357651 - DNA, 33 bp, Homo sapien
tttttaaaataattgacgctgcttccaactacc

SEQ ID NO: 357652 - DNA, 33 bp, Homo sapien
tttttaaaataattgatgctgcttccaactacc

SEQ ID NO: 357653 - DNA, 33 bp, Homo sapien
tgttggagaaagtgtcagaaaacaaatcttcct

SEQ ID NO: 357654 - DNA, 33 bp, Homo sapien
tgttggagaaagtgtcggaaaacaaatcttcct

SEQ ID NO: 357655 - DNA, 33 bp, Homo sapien
aaggtattatgctcagaaaaaagaaggtgatgg

SEQ ID NO: 357656 - DNA, 33 bp, Homo sapien
aaggtattatgctcaggaaaaagaaggtgatgg

SEQ ID NO: 357657 - DNA, 33 bp, Homo sapien
tctctgcgcttgaagtgaagggcatcagagcaa

SEQ ID NO: 357658 - DNA, 33 bp, Homo sapien
tctctgcgcttgaagttaagggcatcagagcaa

SEQ ID NO: 357659 - DNA, 33 bp, Homo sapien
caagcatttctcagaggctacactttacatgag

SEQ ID NO: 357660 - DNA, 33 bp, Homo sapien
caagcatttctcagagtctacactttacatgag

SEQ ID NO: 357661 - DNA, 33 bp, Homo sapien
agcctttgggtcagcactaagttgacgtgttct

SEQ ID NO: 357662 - DNA, 33 bp, Homo sapien
agcctttgggtcagcattaagttgacgtgttct

SEQ ID NO: 357663 - DNA, 33 bp, Homo sapien
tattaatgtacctaaacttgaccaatagcatta

SEQ ID NO: 357664 - DNA, 33 bp, Homo sapien
tattaatgtacctaaatttgaccaatagcatta

SEQ ID NO: 357665 - DNA, 33 bp, Homo sapien
gaataagtaagtaacaactgtagcatatcagtg

SEQ ID NO: 357666 - DNA, 33 bp, Homo sapien
gaataagtaagtaacatctgtagcatatcagtg

SEQ ID NO: 357667 - DNA, 33 bp, Homo sapien
cccttatgaaaaaggacagaaatcactcagcca

SEQ ID NO: 357668 - DNA, 33 bp, Homo sapien
cccttatgaaaaaggagagaaatcactcagcca

SEQ ID NO: 357669 - DNA, 33 bp, Homo sapien
tatttttgtgtttacaagttttggacgcagact

SEQ ID NO: 357670 - DNA, 33 bp, Homo sapien
tatttttgtgtttacacgttttggacgcagact

SEQ ID NO: 357671 - DNA, 33 bp, Homo sapien
aagattgtagagaaaaagttttaaagcctctta

SEQ ID NO: 357672 - DNA, 33 bp, Homo sapien
aagattgtagagaaaatgttttaaagcctctta

SEQ ID NO: 357673 - DNA, 33 bp, Homo sapien
cctgtctcgaatctcaccaacactctgggaggt

SEQ ID NO: 357674 - DNA, 33 bp, Homo sapien
cctgtctcgaatctcagcaacactctgggaggt

SEQ ID NO: 357675 - DNA, 33 bp, Homo sapien
cattgtttccatatgaacatcagccgtgagaca

SEQ ID NO: 357676 - DNA, 33 bp, Homo sapien
cattgtttccatatgagcatcagccgtgagaca

SEQ ID NO: 357677 - DNA, 33 bp, Homo sapien
cagcttgacagcattgcaattttttgagcccaa

SEQ ID NO: 357678 - DNA, 33 bp, Homo sapien
cagcttgacagcattgtaattttttgagcccaa

SEQ ID NO: 357679 - DNA, 33 bp, Homo sapien
ccttggaacactaacaaacattcaggtgcatct

SEQ ID NO: 357680 - DNA, 33 bp, Homo sapien
ccttggaacactaacacacattcaggtgcatct

SEQ ID NO: 357681 - DNA, 33 bp, Homo sapien
tttggtgctccggatgacaagggctacaccacg

SEQ ID NO: 357682 - DNA, 33 bp, Homo sapien
tttggtgctccggatggcaagggctacaccacg

SEQ ID NO: 357683 - DNA, 33 bp, Homo sapien
gctttccaggaccatgaagttagatgtgtgcac

SEQ ID NO: 357684 - DNA, 33 bp, Homo sapien
gctttccaggaccatgcagttagatgtgtgcac

SEQ ID NO: 357685 - DNA, 33 bp, Homo sapien
acagcatttaagaaccaagtcttgagttaagag

SEQ ID NO: 357686 - DNA, 33 bp, Homo sapien
acagcatttaagaaccgagtcttgagttaagag

SEQ ID NO: 357687 - DNA, 33 bp, Homo sapien
cctgaccagaaattcacgggaggacagggatga

SEQ ID NO: 357688 - DNA, 33 bp, Homo sapien
cctgaccagaaattcatgggaggacagggatga

SEQ ID NO: 357689 - DNA, 33 bp, Homo sapien
agggaagaaagagacaacattggttctgggcag

SEQ ID NO: 357690 - DNA, 33 bp, Homo sapien
agggaagaaagagacatcattggttctgggcag

SEQ ID NO: 357691 - DNA, 33 bp, Homo sapien
ggctcccaggaaacacgggggcaaatggttgga

SEQ ID NO: 357692 - DNA, 33 bp, Homo sapien
ggctcccaggaaacactggggcaaatggttgga

SEQ ID NO: 357693 - DNA, 33 bp, Homo sapien
acctgggccacaacaactgctaactctccaccc

SEQ ID NO: 357694 - DNA, 33 bp, Homo sapien
acctgggccacaacaattgctaactctccaccc

SEQ ID NO: 357695 - DNA, 33 bp, Homo sapien
cttccccccagttactaaggctggaaacctaca

SEQ ID NO: 357696 - DNA, 33 bp, Homo sapien
cttccccccagttactgaggctggaaacctaca

SEQ ID NO: 357697 - DNA, 33 bp, Homo sapien
ctacaaactatgtttccctttcatccagggtgt

SEQ ID NO: 357698 - DNA, 33 bp, Homo sapien
ctacaaactatgtttcgctttcatccagggtgt

SEQ ID NO: 357699 - DNA, 33 bp, Homo sapien
caagcagtcccagaggcccctctcagcattgcc

SEQ ID NO: 357700 - DNA, 33 bp, Homo sapien
caagcagtcccagaggtccctctcagcattgcc

SEQ ID NO: 357701 - DNA, 33 bp, Homo sapien
gctgaatcatctttggacactaacagaacagat

SEQ ID NO: 357702 - DNA, 33 bp, Homo sapien
gctgaatcatctttgggcactaacagaacagat

SEQ ID NO: 357703 - DNA, 33 bp, Homo sapien
ttcactgtagaaataaacaagtaagaggaaagg

SEQ ID NO: 357704 - DNA, 33 bp, Homo sapien
ttcactgtagaaataaccaagtaagaggaaagg

SEQ ID NO: 357705 - DNA, 33 bp, Homo sapien
cttgcatccgcctgcaaaacaagcaaggattta

SEQ ID NO: 357706 - DNA, 33 bp, Homo sapien
cttgcatccgcctgcagaacaagcaaggattta

SEQ ID NO: 357707 - DNA, 33 bp, Homo sapien
gtcaatatgtgcaggcagaactctgaaaaaatc

SEQ ID NO: 357708 - DNA, 33 bp, Homo sapien
gtcaatatgtgcaggcggaactctgaaaaaatc

SEQ ID NO: 357709 - DNA, 33 bp, Homo sapien
ataaaaatgtcaactaataagagtgagaactca

SEQ ID NO: 357710 - DNA, 33 bp, Homo sapien
ataaaaatgtcaactagtaagagtgagaactca

SEQ ID NO: 357711 - DNA, 33 bp, Homo sapien
cctcctgcataacacagccagaagcttgaggag

SEQ ID NO: 357712 - DNA, 33 bp, Homo sapien
cctcctgcataacacatccagaagcttgaggag

SEQ ID NO: 357713 - DNA, 33 bp, Homo sapien
tttgagttgatgcagccgaagaagccagctaag

SEQ ID NO: 357714 - DNA, 33 bp, Homo sapien
tttgagttgatgcagcggaagaagccagctaag

SEQ ID NO: 357715 - DNA, 33 bp, Homo sapien
cagtcaacctttcggaatattgcaagcttattt

SEQ ID NO: 357716 - DNA, 33 bp, Homo sapien
cagtcaacctttcggagtattgcaagcttattt

SEQ ID NO: 357717 - DNA, 33 bp, Homo sapien
acacaacaaaatggcacaaaagccaacagcaga

SEQ ID NO: 357718 - DNA, 33 bp, Homo sapien
acacaacaaaatggcagaaaagccaacagcaga

SEQ ID NO: 357719 - DNA, 33 bp, Homo sapien
ccaagccatgcctccaactttccaatatggcgg

SEQ ID NO: 357720 - DNA, 33 bp, Homo sapien
ccaagccatgcctccagctttccaatatggcgg

SEQ ID NO: 357721 - DNA, 33 bp, Homo sapien
acagtcttcaaactgccgaactggagaggttgg

SEQ ID NO: 357722 - DNA, 33 bp, Homo sapien
acagtcttcaaactgctgaactggagaggttgg

SEQ ID NO: 357723 - DNA, 33 bp, Homo sapien
taaaaacaagcacaaaaaaaggctgcctttttc

SEQ ID NO: 357724 - DNA, 33 bp, Homo sapien
taaaaacaagcacaaataaaggctgcctttttc

SEQ ID NO: 357725 - DNA, 33 bp, Homo sapien
tttgctcaggtgcagacaatcacttgcatagaa

SEQ ID NO: 357726 - DNA, 33 bp, Homo sapien
tttgctcaggtgcagagaatcacttgcatagaa

SEQ ID NO: 357727 - DNA, 33 bp, Homo sapien
tattagttatccatccaaagaaactaagcagtg

SEQ ID NO: 357728 - DNA, 33 bp, Homo sapien
tattagttatccatccgaagaaactaagcagtg

SEQ ID NO: 357729 - DNA, 33 bp, Homo sapien
atgggttcataaatgccagtcctagggtatggc

SEQ ID NO: 357730 - DNA, 33 bp, Homo sapien
atgggttcataaatgctagtcctagggtatggc

SEQ ID NO: 357731 - DNA, 33 bp, Homo sapien
gtatttcaaaagcagcaaattatattctgttaa

SEQ ID NO: 357732 - DNA, 33 bp, Homo sapien
gtatttcaaaagcagcgaattatattctgttaa

SEQ ID NO: 357733 - DNA, 33 bp, Homo sapien
gaatacatctaaactaaaacgtggcaagattga

SEQ ID NO: 357734 - DNA, 33 bp, Homo sapien
gaatacatctaaactagaacgtggcaagattga

SEQ ID NO: 357735 - DNA, 33 bp, Homo sapien
gtgattgatgtttcaactcagtgtttcttacta

SEQ ID NO: 357736 - DNA, 33 bp, Homo sapien
gtgattgatgtttcaagtcagtgtttcttacta

SEQ ID NO: 357737 - DNA, 33 bp, Homo sapien
ggagggtgactggatcaaagactagccacaaag

SEQ ID NO: 357738 - DNA, 33 bp, Homo sapien
ggagggtgactggatccaagactagccacaaag

SEQ ID NO: 357739 - DNA, 33 bp, Homo sapien
ctgccaccaaaagaaacagatggtattcccctc

SEQ ID NO: 357740 - DNA, 33 bp, Homo sapien
ctgccaccaaaagaaagagatggtattcccctc

SEQ ID NO: 357741 - DNA, 33 bp, Homo sapien
gggagcaggtgctaccactaagaagtcccagaa

SEQ ID NO: 357742 - DNA, 33 bp, Homo sapien
gggagcaggtgctacctctaagaagtcccagaa

SEQ ID NO: 357743 - DNA, 33 bp, Homo sapien
ggaatacaatccaaaaagttggacgaaatgaag

SEQ ID NO: 357744 - DNA, 33 bp, Homo sapien
ggaatacaatccaaaaggttggacgaaatgaag

SEQ ID NO: 357745 - DNA, 33 bp, Homo sapien
aggtaatttaatgagaacttgaactgtacaaca

SEQ ID NO: 357746 - DNA, 33 bp, Homo sapien
aggtaatttaatgagaccttgaactgtacaaca

SEQ ID NO: 357747 - DNA, 33 bp, Homo sapien
aagaaatcttagaacactgctttgctcacctgc

SEQ ID NO: 357748 - DNA, 33 bp, Homo sapien
aagaaatcttagaacattgctttgctcacctgc

SEQ ID NO: 357749 - DNA, 33 bp, Homo sapien
tattgtgaaggcaacaagtagaatttcgctttg

SEQ ID NO: 357750 - DNA, 33 bp, Homo sapien
tattgtgaaggcaacaggtagaatttcgctttg

SEQ ID NO: 357751 - DNA, 33 bp, Homo sapien
ttcatggattatcgcaatagttatcattaaaat

SEQ ID NO: 357752 - DNA, 33 bp, Homo sapien
ttcatggattatcgcattagttatcattaaaat

SEQ ID NO: 357753 - DNA, 33 bp, Homo sapien
attacaaaataaaatacagctgcacagcctttg

SEQ ID NO: 357754 - DNA, 33 bp, Homo sapien
attacaaaataaaatatagctgcacagcctttg

SEQ ID NO: 357755 - DNA, 33 bp, Homo sapien
accaaccaaccgtcaccgataagtgctctaatt

SEQ ID NO: 357756 - DNA, 33 bp, Homo sapien
accaaccaaccgtcactgataagtgctctaatt

SEQ ID NO: 357757 - DNA, 33 bp, Homo sapien
gacattgctagctgcagtaacaaaggacgcaat

SEQ ID NO: 357758 - DNA, 33 bp, Homo sapien
gacattgctagctgcattaacaaaggacgcaat

SEQ ID NO: 357759 - DNA, 33 bp, Homo sapien
catgacctttccagcaataagccaataatgtat

SEQ ID NO: 357760 - DNA, 33 bp, Homo sapien
catgacctttccagcagtaagccaataatgtat

SEQ ID NO: 357761 - DNA, 33 bp, Homo sapien
aggtagagctaaacccagcactgatagatgagt

SEQ ID NO: 357762 - DNA, 33 bp, Homo sapien
aggtagagctaaacccggcactgatagatgagt

SEQ ID NO: 357763 - DNA, 33 bp, Homo sapien
gaagtggtagtgccaaaatttaaatccagttct

SEQ ID NO: 357764 - DNA, 33 bp, Homo sapien
gaagtggtagtgccaacatttaaatccagttct

SEQ ID NO: 357765 - DNA, 33 bp, Homo sapien
tgtatctacatgtttaccatttccagcaaattt

SEQ ID NO: 357766 - DNA, 33 bp, Homo sapien
tgtatctacatgtttagcatttccagcaaattt

SEQ ID NO: 357767 - DNA, 33 bp, Homo sapien
gttgagtttacatcagaaaaataaatgagggtg

SEQ ID NO: 357768 - DNA, 33 bp, Homo sapien
gttgagtttacatcaggaaaataaatgagggtg

SEQ ID NO: 357769 - DNA, 33 bp, Homo sapien
ctccagtgctccagctcaaatgtcctttccttt

SEQ ID NO: 357770 - DNA, 33 bp, Homo sapien
ctccagtgctccagcttaaatgtcctttccttt

SEQ ID NO: 357771 - DNA, 33 bp, Homo sapien
catcccaggccgattaaatcaacgtctgggggc

SEQ ID NO: 357772 - DNA, 33 bp, Homo sapien
catcccaggccgattacatcaacgtctgggggc

SEQ ID NO: 357773 - DNA, 33 bp, Homo sapien
gaggcataagtacccaatacattcctgtctcag

SEQ ID NO: 357774 - DNA, 33 bp, Homo sapien
gaggcataagtacccagtacattcctgtctcag

SEQ ID NO: 357775 - DNA, 33 bp, Homo sapien
tacatgtctggagttcaaggggacctcaaggcc

SEQ ID NO: 357776 - DNA, 33 bp, Homo sapien
tacatgtctggagttcgaggggacctcaaggcc

SEQ ID NO: 357777 - DNA, 33 bp, Homo sapien
agtttaggccttgcccgcttggaattctaaaac

SEQ ID NO: 357778 - DNA, 33 bp, Homo sapien
agtttaggccttgccctcttggaattctaaaac

SEQ ID NO: 357779 - DNA, 33 bp, Homo sapien
tttttggttagggtaacgctaactgctgtatta

SEQ ID NO: 357780 - DNA, 33 bp, Homo sapien
tttttggttagggtaatgctaactgctgtatta

SEQ ID NO: 357781 - DNA, 33 bp, Homo sapien
gaccatcagcataggacgtagtaactgcctaac

SEQ ID NO: 357782 - DNA, 33 bp, Homo sapien
gaccatcagcataggatgtagtaactgcctaac

SEQ ID NO: 357783 - DNA, 33 bp, Homo sapien
ttgcagaagacgacccaagatttttgaagacac

SEQ ID NO: 357784 - DNA, 33 bp, Homo sapien
ttgcagaagacgacccgagatttttgaagacac

SEQ ID NO: 357785 - DNA, 33 bp, Homo sapien
caacacagggacttaccatgccttttatcttac

SEQ ID NO: 357786 - DNA, 33 bp, Homo sapien
caacacagggacttacgatgccttttatcttac

SEQ ID NO: 357787 - DNA, 33 bp, Homo sapien
ggattgttttgtgtcacgcaaacttccccttga

SEQ ID NO: 357788 - DNA, 33 bp, Homo sapien
ggattgttttgtgtcatgcaaacttccccttga

SEQ ID NO: 357789 - DNA, 33 bp, Homo sapien
tgtctgtctgcagagccgaaattcttgtgttct

SEQ ID NO: 357790 - DNA, 33 bp, Homo sapien
tgtctgtctgcagagctgaaattcttgtgttct

SEQ ID NO: 357791 - DNA, 33 bp, Homo sapien
ctattaaggtggggcccgagaatttacattgtt

SEQ ID NO: 357792 - DNA, 33 bp, Homo sapien
ctattaaggtggggccggagaatttacattgtt

SEQ ID NO: 357793 - DNA, 33 bp, Homo sapien
tattattaggatctcaaattaaaagggaattta

SEQ ID NO: 357794 - DNA, 33 bp, Homo sapien
tattattaggatctcagattaaaagggaattta

SEQ ID NO: 357795 - DNA, 33 bp, Homo sapien
gaaattctgcacacaaagtttcacacctacaga

SEQ ID NO: 357796 - DNA, 33 bp, Homo sapien
gaaattctgcacacaaggtttcacacctacaga

SEQ ID NO: 357797 - DNA, 33 bp, Homo sapien
ctaaaagagtaaattcaaaagttggctctctcc

SEQ ID NO: 357798 - DNA, 33 bp, Homo sapien
ctaaaagagtaaattcgaaagttggctctctcc

SEQ ID NO: 357799 - DNA, 33 bp, Homo sapien
tactcttttagcaccaactttaatgaacgggct

SEQ ID NO: 357800 - DNA, 33 bp, Homo sapien
tactcttttagcaccatctttaatgaacgggct

SEQ ID NO: 357801 - DNA, 33 bp, Homo sapien
tgctgctggaaacatagcaaaacaacacaattg

SEQ ID NO: 357802 - DNA, 33 bp, Homo sapien
tgctgctggaaacatatcaaaacaacacaattg

SEQ ID NO: 357803 - DNA, 33 bp, Homo sapien
aggagttcagtagagacggttccacccagtgca

SEQ ID NO: 357804 - DNA, 33 bp, Homo sapien
aggagttcagtagagatggttccacccagtgca

SEQ ID NO: 357805 - DNA, 33 bp, Homo sapien
aggacgttgtcagccacgtgctttattagggga

SEQ ID NO: 357806 - DNA, 33 bp, Homo sapien
aggacgttgtcagccatgtgctttattagggga

SEQ ID NO: 357807 - DNA, 33 bp, Homo sapien
tgttctagagagtgcaacctttttcagccacac

SEQ ID NO: 357808 - DNA, 33 bp, Homo sapien
tgttctagagagtgcaccctttttcagccacac

SEQ ID NO: 357809 - DNA, 33 bp, Homo sapien
ttcctgggtcacatgcaacacagccaatgactc

SEQ ID NO: 357810 - DNA, 33 bp, Homo sapien
ttcctgggtcacatgctacacagccaatgactc

SEQ ID NO: 357811 - DNA, 33 bp, Homo sapien
agctgctggatccccaatctactccttctctca

SEQ ID NO: 357812 - DNA, 33 bp, Homo sapien
agctgctggatccccattctactccttctctca

SEQ ID NO: 357813 - DNA, 33 bp, Homo sapien
cctggtcggaaacaaactggagagaatgcagag

SEQ ID NO: 357814 - DNA, 33 bp, Homo sapien
cctggtcggaaacaaagtggagagaatgcagag

SEQ ID NO: 357815 - DNA, 33 bp, Homo sapien
gagaaaaaggatgaataagcctatcttagcagg

SEQ ID NO: 357816 - DNA, 33 bp, Homo sapien
gagaaaaaggatgaatgagcctatcttagcagg

SEQ ID NO: 357817 - DNA, 33 bp, Homo sapien
gttctgtatgaactaactgaaatgccagacgtc

SEQ ID NO: 357818 - DNA, 33 bp, Homo sapien
gttctgtatgaactaattgaaatgccagacgtc

SEQ ID NO: 357819 - DNA, 33 bp, Homo sapien
agatgggatttgaaaaggattttgcttatatta

SEQ ID NO: 357820 - DNA, 33 bp, Homo sapien
agatgggatttgaaaatgattttgcttatatta

SEQ ID NO: 357821 - DNA, 33 bp, Homo sapien
ttctgggtcactcaaaaggatgtgaggtgttct

SEQ ID NO: 357822 - DNA, 33 bp, Homo sapien
ttctgggtcactcaaagggatgtgaggtgttct

SEQ ID NO: 357823 - DNA, 33 bp, Homo sapien
tcatgatatgattataagtccagaaccactcga

SEQ ID NO: 357824 - DNA, 33 bp, Homo sapien
tcatgatatgattatatgtccagaaccactcga

SEQ ID NO: 357825 - DNA, 33 bp, Homo sapien
caacagtagccttcacaacctcacagtggtctt

SEQ ID NO: 357826 - DNA, 33 bp, Homo sapien
caacagtagccttcacgacctcacagtggtctt

SEQ ID NO: 357827 - DNA, 33 bp, Homo sapien
tcaccagttacttctacgtacatttgcttttat

SEQ ID NO: 357828 - DNA, 33 bp, Homo sapien
tcaccagttacttctaggtacatttgcttttat

SEQ ID NO: 357829 - DNA, 33 bp, Homo sapien
agcagtgcagattatgcaatgaagagcttcatt

SEQ ID NO: 357830 - DNA, 33 bp, Homo sapien
agcagtgcagattatgtaatgaagagcttcatt

SEQ ID NO: 357831 - DNA, 33 bp, Homo sapien
aagaatggagagaacacagcattttacacaaga

SEQ ID NO: 357832 - DNA, 33 bp, Homo sapien
aagaatggagagaacagagcattttacacaaga

SEQ ID NO: 357833 - DNA, 33 bp, Homo sapien
ggtgcttctcctgtgactcaatgaaacgtgtgt

SEQ ID NO: 357834 - DNA, 33 bp, Homo sapien
ggtgcttctcctgtgagtcaatgaaacgtgtgt

SEQ ID NO: 357835 - DNA, 33 bp, Homo sapien
tacatgtaagaaacaccaagagcagcatgtggc

SEQ ID NO: 357836 - DNA, 33 bp, Homo sapien
tacatgtaagaaacacgaagagcagcatgtggc

SEQ ID NO: 357837 - DNA, 33 bp, Homo sapien
caattttcctaatatcgctgcaaaattcaagca

SEQ ID NO: 357838 - DNA, 33 bp, Homo sapien
caattttcctaatatctctgcaaaattcaagca

SEQ ID NO: 357839 - DNA, 33 bp, Homo sapien
ttgtcattcaatctcacatacccaattttccta

SEQ ID NO: 357840 - DNA, 33 bp, Homo sapien
ttgtcattcaatctcatatacccaattttccta

SEQ ID NO: 357841 - DNA, 33 bp, Homo sapien
tggtccaggctctgtaagatttagaggtgcacc

SEQ ID NO: 357842 - DNA, 33 bp, Homo sapien
tggtccaggctctgtaggatttagaggtgcacc

SEQ ID NO: 357843 - DNA, 33 bp, Homo sapien
gccagtttctcttctgaattgcttccctcttag

SEQ ID NO: 357844 - DNA, 33 bp, Homo sapien
gccagtttctcttctgtattgcttccctcttag

SEQ ID NO: 357845 - DNA, 33 bp, Homo sapien
gcttttgattttttaaactacagagctactcag

SEQ ID NO: 357846 - DNA, 33 bp, Homo sapien
gcttttgattttttaagctacagagctactcag

SEQ ID NO: 357847 - DNA, 33 bp, Homo sapien
ctggcaacctactgacacctttgaaatgggcat

SEQ ID NO: 357848 - DNA, 33 bp, Homo sapien
ctggcaacctactgacccctttgaaatgggcat

SEQ ID NO: 357849 - DNA, 33 bp, Homo sapien
tctcagaccttaccacactttgtctcaggtttt

SEQ ID NO: 357850 - DNA, 33 bp, Homo sapien
tctcagaccttaccactctttgtctcaggtttt

SEQ ID NO: 357851 - DNA, 33 bp, Homo sapien
tgataagccacaagcaatcttcacacatctcct

SEQ ID NO: 357852 - DNA, 33 bp, Homo sapien
tgataagccacaagcagtcttcacacatctcct

SEQ ID NO: 357853 - DNA, 33 bp, Homo sapien
tgtaaatgacaaggaaaagagaataggtgggtg

SEQ ID NO: 357854 - DNA, 33 bp, Homo sapien
tgtaaatgacaaggaagagagaataggtgggtg

SEQ ID NO: 357855 - DNA, 33 bp, Homo sapien
cccactagaagcaacaatatcccaaggaaatga

SEQ ID NO: 357856 - DNA, 33 bp, Homo sapien
cccactagaagcaacactatcccaaggaaatga

SEQ ID NO: 357857 - DNA, 33 bp, Homo sapien
tcagttctgtgatacacctgacaattctgcctt

SEQ ID NO: 357858 - DNA, 33 bp, Homo sapien
tcagttctgtgatacatctgacaattctgcctt

SEQ ID NO: 357859 - DNA, 33 bp, Homo sapien
tgcaaccacaatttaacctttagtaagtttctg

SEQ ID NO: 357860 - DNA, 33 bp, Homo sapien
tgcaaccacaatttaagctttagtaagtttctg

SEQ ID NO: 357861 - DNA, 33 bp, Homo sapien
ttcattcagtcatccaatcattcatttaacagt

SEQ ID NO: 357862 - DNA, 33 bp, Homo sapien
ttcattcagtcatccagtcattcatttaacagt

SEQ ID NO: 357863 - DNA, 33 bp, Homo sapien
ctcaacctgcctcaaaatcaagttacaattatc

SEQ ID NO: 357864 - DNA, 33 bp, Homo sapien
ctcaacctgcctcaaattcaagttacaattatc

SEQ ID NO: 357865 - DNA, 33 bp, Homo sapien
agtgaagacgaccttaacagatggaggcagtct

SEQ ID NO: 357866 - DNA, 33 bp, Homo sapien
agtgaagacgaccttagcagatggaggcagtct

SEQ ID NO: 357867 - DNA, 33 bp, Homo sapien
aaggttgtctatgatggatggccaggcacaaaa

SEQ ID NO: 357868 - DNA, 33 bp, Homo sapien
aaggttgtctatgatgtatggccaggcacaaaa

SEQ ID NO: 357869 - DNA, 33 bp, Homo sapien
cagtcagccctgcaacagtgtaggctcgaggcc

SEQ ID NO: 357870 - DNA, 33 bp, Homo sapien
cagtcagccctgcaacggtgtaggctcgaggcc

SEQ ID NO: 357871 - DNA, 33 bp, Homo sapien
gcaccacaaccaccaccacgcccagctagtttc

SEQ ID NO: 357872 - DNA, 33 bp, Homo sapien
gcaccacaaccaccacgacgcccagctagtttc

SEQ ID NO: 357873 - DNA, 33 bp, Homo sapien
gataaccactccaacaatgatccttcaaggtca

SEQ ID NO: 357874 - DNA, 33 bp, Homo sapien
gataaccactccaacactgatccttcaaggtca

SEQ ID NO: 357875 - DNA, 33 bp, Homo sapien
ccatcatcaatatgggcactccgtagactgcaa

SEQ ID NO: 357876 - DNA, 33 bp, Homo sapien
ccatcatcaatatgggtactccgtagactgcaa

SEQ ID NO: 357877 - DNA, 33 bp, Homo sapien
gctaggacaatagacacggatggaggtgggtgg

SEQ ID NO: 357878 - DNA, 33 bp, Homo sapien
gctaggacaatagacatggatggaggtgggtgg

SEQ ID NO: 357879 - DNA, 33 bp, Homo sapien
tctacgatccggtaaacgtaatctgtagtttga

SEQ ID NO: 357880 - DNA, 33 bp, Homo sapien
tctacgatccggtaaatgtaatctgtagtttga

SEQ ID NO: 357881 - DNA, 33 bp, Homo sapien
tgatgacgttggtgaccgtacgaatggcaatct

SEQ ID NO: 357882 - DNA, 33 bp, Homo sapien
tgatgacgttggtgactgtacgaatggcaatct

SEQ ID NO: 357883 - DNA, 33 bp, Homo sapien
gatgaacagcacgatacagaaccaacaagcaca

SEQ ID NO: 357884 - DNA, 33 bp, Homo sapien
gatgaacagcacgatatagaaccaacaagcaca

SEQ ID NO: 357885 - DNA, 33 bp, Homo sapien
cttcaggagaggctcacaaaatgctgatgggct

SEQ ID NO: 357886 - DNA, 33 bp, Homo sapien
cttcaggagaggctcataaaatgctgatgggct

SEQ ID NO: 357887 - DNA, 33 bp, Homo sapien
gaacagactaatacaaaggtgatacatttgatg

SEQ ID NO: 357888 - DNA, 33 bp, Homo sapien
gaacagactaatacaagggtgatacatttgatg

SEQ ID NO: 357889 - DNA, 33 bp, Homo sapien
ataaaggattatttccccttctgcttggctctc

SEQ ID NO: 357890 - DNA, 33 bp, Homo sapien
ataaaggattatttccgcttctgcttggctctc

SEQ ID NO: 357891 - DNA, 33 bp, Homo sapien
atatttttgctaggtaggaaattctgggttgac

SEQ ID NO: 357892 - DNA, 33 bp, Homo sapien
atatttttgctaggtatgaaattctgggttgac

SEQ ID NO: 357893 - DNA, 33 bp, Homo sapien
atctattctttcttcagcaaaggtaaccattat

SEQ ID NO: 357894 - DNA, 33 bp, Homo sapien
atctattctttcttcatcaaaggtaaccattat

SEQ ID NO: 357895 - DNA, 33 bp, Homo sapien
gatgcagactgggactcaagacgctggctcccc

SEQ ID NO: 357896 - DNA, 33 bp, Homo sapien
gatgcagactgggacttaagacgctggctcccc

SEQ ID NO: 357897 - DNA, 33 bp, Homo sapien
attagtattaggttaactgagggccttaagtca

SEQ ID NO: 357898 - DNA, 33 bp, Homo sapien
attagtattaggttaattgagggccttaagtca

SEQ ID NO: 357899 - DNA, 33 bp, Homo sapien
agaggatcatcatacaagtaagttctgttttta

SEQ ID NO: 357900 - DNA, 33 bp, Homo sapien
agaggatcatcatacacgtaagttctgttttta

SEQ ID NO: 357901 - DNA, 33 bp, Homo sapien
cacctgaaaaccctgcactggcctggaaatctc

SEQ ID NO: 357902 - DNA, 33 bp, Homo sapien
cacctgaaaaccctgcgctggcctggaaatctc

SEQ ID NO: 357903 - DNA, 33 bp, Homo sapien
aaagcatttaattagcaccaggcctagagaaaa

SEQ ID NO: 357904 - DNA, 33 bp, Homo sapien
aaagcatttaattagctccaggcctagagaaaa

SEQ ID NO: 357905 - DNA, 33 bp, Homo sapien
tcagacctggaggcgacggtcgacccaatgttt

SEQ ID NO: 357906 - DNA, 33 bp, Homo sapien
tcagacctggaggcgatggtcgacccaatgttt

SEQ ID NO: 357907 - DNA, 33 bp, Homo sapien
aaaggccatgcaactcagaagtaaagaagctag

SEQ ID NO: 357908 - DNA, 33 bp, Homo sapien
aaaggccatgcaactcggaagtaaagaagctag

SEQ ID NO: 357909 - DNA, 33 bp, Homo sapien
tgctttaagaatcaaccaaaagaatgtgagcaa

SEQ ID NO: 357910 - DNA, 33 bp, Homo sapien
tgctttaagaatcaacgaaaagaatgtgagcaa

SEQ ID NO: 357911 - DNA, 33 bp, Homo sapien
tgctatatctggcaccacttctcagggaaggca

SEQ ID NO: 357912 - DNA, 33 bp, Homo sapien
tgctatatctggcaccgcttctcagggaaggca

SEQ ID NO: 357913 - DNA, 33 bp, Homo sapien
ttctgtgttcctgaacaaatgctctggctgtat

SEQ ID NO: 357914 - DNA, 33 bp, Homo sapien
ttctgtgttcctgaacgaatgctctggctgtat

SEQ ID NO: 357915 - DNA, 33 bp, Homo sapien
ccaagctttggttcacaaggaagagacctgaga

SEQ ID NO: 357916 - DNA, 33 bp, Homo sapien
ccaagctttggttcacgaggaagagacctgaga

SEQ ID NO: 357917 - DNA, 33 bp, Homo sapien
ttctctctgtccgtcagtccttcgcatttcttt

SEQ ID NO: 357918 - DNA, 33 bp, Homo sapien
ttctctctgtccgtcattccttcgcatttcttt

SEQ ID NO: 357919 - DNA, 33 bp, Homo sapien
cagtgagccaagttcaagatcgcaccaccgcac

SEQ ID NO: 357920 - DNA, 33 bp, Homo sapien
cagtgagccaagttcaggatcgcaccaccgcac

SEQ ID NO: 357921 - DNA, 33 bp, Homo sapien
ttagatcttataactcaccagtagctgggaatc

SEQ ID NO: 357922 - DNA, 33 bp, Homo sapien
ttagatcttataactcgccagtagctgggaatc

SEQ ID NO: 357923 - DNA, 33 bp, Homo sapien
ccaaagccaagaagtacgatcgatcgggcaccc

SEQ ID NO: 357924 - DNA, 33 bp, Homo sapien
ccaaagccaagaagtatgatcgatcgggcaccc

SEQ ID NO: 357925 - DNA, 33 bp, Homo sapien
tgcgtagcatttgtgaaaaaactgctgagtaac

SEQ ID NO: 357926 - DNA, 33 bp, Homo sapien
tgcgtagcatttgtgagaaaactgctgagtaac

SEQ ID NO: 357927 - DNA, 33 bp, Homo sapien
gctgataactgatgaaatagacctgagaaatat

SEQ ID NO: 357928 - DNA, 33 bp, Homo sapien
gctgataactgatgaagtagacctgagaaatat

SEQ ID NO: 357929 - DNA, 33 bp, Homo sapien
gctgacccgaggtcaaatgggtgctgcacacta

SEQ ID NO: 357930 - DNA, 33 bp, Homo sapien
gctgacccgaggtcaactgggtgctgcacacta

SEQ ID NO: 357931 - DNA, 33 bp, Homo sapien
tacatatagagtctccacaactgtcgaattaat

SEQ ID NO: 357932 - DNA, 33 bp, Homo sapien
tacatatagagtctccgcaactgtcgaattaat

SEQ ID NO: 357933 - DNA, 33 bp, Homo sapien
cccctgcatcttgggcaaacatgacaatactgg

SEQ ID NO: 357934 - DNA, 33 bp, Homo sapien
cccctgcatcttgggcgaacatgacaatactgg

SEQ ID NO: 357935 - DNA, 33 bp, Homo sapien
agagcacaatacgtccagcaaagtgcaatagga

SEQ ID NO: 357936 - DNA, 33 bp, Homo sapien
agagcacaatacgtccggcaaagtgcaatagga

SEQ ID NO: 357937 - DNA, 33 bp, Homo sapien
attacagtggacactacatatccatcaactgga

SEQ ID NO: 357938 - DNA, 33 bp, Homo sapien
attacagtggacactatatatccatcaactgga

SEQ ID NO: 357939 - DNA, 33 bp, Homo sapien
gttagaatcagaatccaaataaagcccatacgt

SEQ ID NO: 357940 - DNA, 33 bp, Homo sapien
gttagaatcagaatccgaataaagcccatacgt

SEQ ID NO: 357941 - DNA, 33 bp, Homo sapien
cagttattctccacacactcatcctccaacacc

SEQ ID NO: 357942 - DNA, 33 bp, Homo sapien
cagttattctccacactctcatcctccaacacc

SEQ ID NO: 357943 - DNA, 33 bp, Homo sapien
ttaaactgtttctgtcaatttctttctttcttt

SEQ ID NO: 357944 - DNA, 33 bp, Homo sapien
ttaaactgtttctgtcgatttctttctttcttt

SEQ ID NO: 357945 - DNA, 33 bp, Homo sapien
gcacagtaggccataaagagaacatactgtcca

SEQ ID NO: 357946 - DNA, 33 bp, Homo sapien
gcacagtaggccataaggagaacatactgtcca

SEQ ID NO: 357947 - DNA, 33 bp, Homo sapien
ctcactgccccacttcaatctgtcagatattct

SEQ ID NO: 357948 - DNA, 33 bp, Homo sapien
ctcactgccccacttcgatctgtcagatattct

SEQ ID NO: 357949 - DNA, 33 bp, Homo sapien
ggctataaatgctacaagaaagcaaatcaaagt

SEQ ID NO: 357950 - DNA, 33 bp, Homo sapien
ggctataaatgctacaggaaagcaaatcaaagt

SEQ ID NO: 357951 - DNA, 33 bp, Homo sapien
aattaatcaatctacccctctctgatcccttat

SEQ ID NO: 357952 - DNA, 33 bp, Homo sapien
aattaatcaatctaccgctctctgatcccttat

SEQ ID NO: 357953 - DNA, 33 bp, Homo sapien
aaacaggaaaatcaaacggactcctctttctaa

SEQ ID NO: 357954 - DNA, 33 bp, Homo sapien
aaacaggaaaatcaaatggactcctctttctaa

SEQ ID NO: 357955 - DNA, 33 bp, Homo sapien
atgaaaacacaaatcacgcaacctgagtttctc

SEQ ID NO: 357956 - DNA, 33 bp, Homo sapien
atgaaaacacaaatcatgcaacctgagtttctc

SEQ ID NO: 357957 - DNA, 33 bp, Homo sapien
attctttatgcattaacagaggatgagggcaag

SEQ ID NO: 357958 - DNA, 33 bp, Homo sapien
attctttatgcattaagagaggatgagggcaag

SEQ ID NO: 357959 - DNA, 33 bp, Homo sapien
cttcccaccatctctaagaatcttctgcagcct

SEQ ID NO: 357960 - DNA, 33 bp, Homo sapien
cttcccaccatctctaggaatcttctgcagcct

SEQ ID NO: 357961 - DNA, 33 bp, Homo sapien
tcaccattgaacacaaagaatttggcagagatg

SEQ ID NO: 357962 - DNA, 33 bp, Homo sapien
tcaccattgaacacaatgaatttggcagagatg

SEQ ID NO: 357963 - DNA, 33 bp, Homo sapien
ccagggtaggccaacccggaatttaagcatttt

SEQ ID NO: 357964 - DNA, 33 bp, Homo sapien
ccagggtaggccaacctggaatttaagcatttt

SEQ ID NO: 357965 - DNA, 33 bp, Homo sapien
ctcagagacctaaccaatctttgcaccccaggc

SEQ ID NO: 357966 - DNA, 33 bp, Homo sapien
ctcagagacctaaccagtctttgcaccccaggc

SEQ ID NO: 357967 - DNA, 33 bp, Homo sapien
agccacttttaggacactaatactttacatagt

SEQ ID NO: 357968 - DNA, 33 bp, Homo sapien
agccacttttaggacattaatactttacatagt

SEQ ID NO: 357969 - DNA, 33 bp, Homo sapien
caatccagatgggataccatgaactaccgttca

SEQ ID NO: 357970 - DNA, 33 bp, Homo sapien
caatccagatgggatagcatgaactaccgttca

SEQ ID NO: 357971 - DNA, 33 bp, Homo sapien
agcgtcttcatataacaggttaccaataattac

SEQ ID NO: 357972 - DNA, 33 bp, Homo sapien
agcgtcttcatataacgggttaccaataattac

SEQ ID NO: 357973 - DNA, 33 bp, Homo sapien
cttttgcactgaaactaaacattggctctactc

SEQ ID NO: 357974 - DNA, 33 bp, Homo sapien
cttttgcactgaaacttaacattggctctactc

SEQ ID NO: 357975 - DNA, 33 bp, Homo sapien
agtcatgaaaacttgaataagtgaaaagcagca

SEQ ID NO: 357976 - DNA, 33 bp, Homo sapien
agtcatgaaaacttgagtaagtgaaaagcagca

SEQ ID NO: 357977 - DNA, 33 bp, Homo sapien
cttctcttgaccaaaacgtatgcttcaatctcc

SEQ ID NO: 357978 - DNA, 33 bp, Homo sapien
cttctcttgaccaaaatgtatgcttcaatctcc

SEQ ID NO: 357979 - DNA, 33 bp, Homo sapien
accttgctatgggtcaccagtacagtatatctc

SEQ ID NO: 357980 - DNA, 33 bp, Homo sapien
accttgctatgggtcatcagtacagtatatctc

SEQ ID NO: 357981 - DNA, 33 bp, Homo sapien
cagctctttgacattgcatctgatctttcattg

SEQ ID NO: 357982 - DNA, 33 bp, Homo sapien
cagctctttgacattggatctgatctttcattg

SEQ ID NO: 357983 - DNA, 33 bp, Homo sapien
tgtgtaatttccagataagaagctttaagactc

SEQ ID NO: 357984 - DNA, 33 bp, Homo sapien
tgtgtaatttccagatgagaagctttaagactc

SEQ ID NO: 357985 - DNA, 33 bp, Homo sapien
cttgaactaattgtcaaaaaacaagtaagatta

SEQ ID NO: 357986 - DNA, 33 bp, Homo sapien
cttgaactaattgtcacaaaacaagtaagatta

SEQ ID NO: 357987 - DNA, 33 bp, Homo sapien
tacattcactggatccaaagttaataacaataa

SEQ ID NO: 357988 - DNA, 33 bp, Homo sapien
tacattcactggatccgaagttaataacaataa

SEQ ID NO: 357989 - DNA, 33 bp, Homo sapien
ttacatgaatgatgtcactcctatggcttctca

SEQ ID NO: 357990 - DNA, 33 bp, Homo sapien
ttacatgaatgatgtcgctcctatggcttctca

SEQ ID NO: 357991 - DNA, 33 bp, Homo sapien
gcaagatgagattttaaaaactttgtggcatct

SEQ ID NO: 357992 - DNA, 33 bp, Homo sapien
gcaagatgagattttagaaactttgtggcatct

SEQ ID NO: 357993 - DNA, 33 bp, Homo sapien
ttccaggaagaaattaccctagcaagtaaatat

SEQ ID NO: 357994 - DNA, 33 bp, Homo sapien
ttccaggaagaaattatcctagcaagtaaatat

SEQ ID NO: 357995 - DNA, 33 bp, Homo sapien
tgggataagcaccttgcatcatatatgcaacaa

SEQ ID NO: 357996 - DNA, 33 bp, Homo sapien
tgggataagcaccttgtatcatatatgcaacaa

SEQ ID NO: 357997 - DNA, 33 bp, Homo sapien
tagaagaaaattgcaccagccataatgattaga

SEQ ID NO: 357998 - DNA, 33 bp, Homo sapien
tagaagaaaattgcactagccataatgattaga

SEQ ID NO: 357999 - DNA, 33 bp, Homo sapien
tctgtaccagcagaccagactgagaaaagggga

SEQ ID NO: 358000 - DNA, 33 bp, Homo sapien
tctgtaccagcagaccggactgagaaaagggga

SEQ ID NO: 358001 - DNA, 33 bp, Homo sapien
attcagccaaaattacagaattgattatgcatt

SEQ ID NO: 358002 - DNA, 33 bp, Homo sapien
attcagccaaaattacggaattgattatgcatt

SEQ ID NO: 358003 - DNA, 33 bp, Homo sapien
actctaaaatgttttacaagcaatgcctggcat

SEQ ID NO: 358004 - DNA, 33 bp, Homo sapien
actctaaaatgttttataagcaatgcctggcat

SEQ ID NO: 358005 - DNA, 33 bp, Homo sapien
aactgggctgaggtcaataagggatgttggtga

SEQ ID NO: 358006 - DNA, 33 bp, Homo sapien
aactgggctgaggtcagtaagggatgttggtga

SEQ ID NO: 358007 - DNA, 33 bp, Homo sapien
tggttgagatgggtagaaaaatccccatggaat

SEQ ID NO: 358008 - DNA, 33 bp, Homo sapien
tggttgagatgggtaggaaaatccccatggaat

SEQ ID NO: 358009 - DNA, 33 bp, Homo sapien
gaccacacttcagtagaaaaattctatagcccg

SEQ ID NO: 358010 - DNA, 33 bp, Homo sapien
gaccacacttcagtagcaaaattctatagcccg

SEQ ID NO: 358011 - DNA, 33 bp, Homo sapien
gataacaagtgaactacagacgtatgttatatt

SEQ ID NO: 358012 - DNA, 33 bp, Homo sapien
gataacaagtgaactatagacgtatgttatatt

SEQ ID NO: 358013 - DNA, 33 bp, Homo sapien
ttgctcatggcacagagagaatatcaaatgatt

SEQ ID NO: 358014 - DNA, 33 bp, Homo sapien
ttgctcatggcacagatagaatatcaaatgatt

SEQ ID NO: 358015 - DNA, 33 bp, Homo sapien
ggccattgtcttataacgtactgtgtcaaatgt

SEQ ID NO: 358016 - DNA, 33 bp, Homo sapien
ggccattgtcttataatgtactgtgtcaaatgt

SEQ ID NO: 358017 - DNA, 33 bp, Homo sapien
tccccatatttgacaccgtcttctctcatactt

SEQ ID NO: 358018 - DNA, 33 bp, Homo sapien
tccccatatttgacactgtcttctctcatactt

SEQ ID NO: 358019 - DNA, 33 bp, Homo sapien
cgactcatactattgcagagaactatgcatttg

SEQ ID NO: 358020 - DNA, 33 bp, Homo sapien
cgactcatactattgcggagaactatgcatttg

SEQ ID NO: 358021 - DNA, 33 bp, Homo sapien
atggtacgtggtgatacagtccattttgtgaaa

SEQ ID NO: 358022 - DNA, 33 bp, Homo sapien
atggtacgtggtgatatagtccattttgtgaaa

SEQ ID NO: 358023 - DNA, 33 bp, Homo sapien
tcttaatcctcttggcaaatagatgaggagtct

SEQ ID NO: 358024 - DNA, 33 bp, Homo sapien
tcttaatcctcttggcgaatagatgaggagtct

SEQ ID NO: 358025 - DNA, 33 bp, Homo sapien
aactattactacatacagcaaccactgggaagg

SEQ ID NO: 358026 - DNA, 33 bp, Homo sapien
aactattactacatacggcaaccactgggaagg

SEQ ID NO: 358027 - DNA, 33 bp, Homo sapien
atagctattgaaaaaacccacacataagtggac

SEQ ID NO: 358028 - DNA, 33 bp, Homo sapien
atagctattgaaaaaatccacacataagtggac

SEQ ID NO: 358029 - DNA, 33 bp, Homo sapien
aactttattaccattcaaaatcaccaatgccaa

SEQ ID NO: 358030 - DNA, 33 bp, Homo sapien
aactttattaccattctaaatcaccaatgccaa

SEQ ID NO: 358031 - DNA, 33 bp, Homo sapien
accttcagtctgcttgaaatgggagttcagaag

SEQ ID NO: 358032 - DNA, 33 bp, Homo sapien
accttcagtctgcttggaatgggagttcagaag

SEQ ID NO: 358033 - DNA, 33 bp, Homo sapien
gagaactgtaacaacaatgaagtaaactctgag

SEQ ID NO: 358034 - DNA, 33 bp, Homo sapien
gagaactgtaacaacactgaagtaaactctgag

SEQ ID NO: 358035 - DNA, 33 bp, Homo sapien
tctgagtctttgtgaacgtctcaggacccaatg

SEQ ID NO: 358036 - DNA, 33 bp, Homo sapien
tctgagtctttgtgaatgtctcaggacccaatg

SEQ ID NO: 358037 - DNA, 33 bp, Homo sapien
cagacaaactcataaccctaatatccactcaca

SEQ ID NO: 358038 - DNA, 33 bp, Homo sapien
cagacaaactcataactctaatatccactcaca

SEQ ID NO: 358039 - DNA, 33 bp, Homo sapien
cagaagtgaaaatatgacagggattgaggcaca

SEQ ID NO: 358040 - DNA, 33 bp, Homo sapien
cagaagtgaaaatatgccagggattgaggcaca

SEQ ID NO: 358041 - DNA, 33 bp, Homo sapien
tgtattttctttagtgcacttgtcactgtatga

SEQ ID NO: 358042 - DNA, 33 bp, Homo sapien
tgtattttctttagtgtacttgtcactgtatga

SEQ ID NO: 358043 - DNA, 33 bp, Homo sapien
tttactagcaactttccagtttactgcccaaag

SEQ ID NO: 358044 - DNA, 33 bp, Homo sapien
tttactagcaactttctagtttactgcccaaag

SEQ ID NO: 358045 - DNA, 33 bp, Homo sapien
gcagattaaaattccactcgatatctaataaaa

SEQ ID NO: 358046 - DNA, 33 bp, Homo sapien
gcagattaaaattccattcgatatctaataaaa

SEQ ID NO: 358047 - DNA, 33 bp, Homo sapien
aatcttgtccttgccaatccaattaaatctata

SEQ ID NO: 358048 - DNA, 33 bp, Homo sapien
aatcttgtccttgccattccaattaaatctata

SEQ ID NO: 358049 - DNA, 33 bp, Homo sapien
gatgaggttagagaaccaggtgcaaggagctgt

SEQ ID NO: 358050 - DNA, 33 bp, Homo sapien
gatgaggttagagaacgaggtgcaaggagctgt

SEQ ID NO: 358051 - DNA, 33 bp, Homo sapien
gaactcaaagtgggccaatccatgcaccatgga

SEQ ID NO: 358052 - DNA, 33 bp, Homo sapien
gaactcaaagtgggcctatccatgcaccatgga

SEQ ID NO: 358053 - DNA, 33 bp, Homo sapien
cttgttaagtgattgcccccttccccaaataaa

SEQ ID NO: 358054 - DNA, 33 bp, Homo sapien
cttgttaagtgattgctcccttccccaaataaa

SEQ ID NO: 358055 - DNA, 33 bp, Homo sapien
tgtgtttccaaccagacggctatgaagtgaacc

SEQ ID NO: 358056 - DNA, 33 bp, Homo sapien
tgtgtttccaaccagatggctatgaagtgaacc

SEQ ID NO: 358057 - DNA, 33 bp, Homo sapien
aagcgtgttgggactacacatggctggacacag

SEQ ID NO: 358058 - DNA, 33 bp, Homo sapien
aagcgtgttgggactagacatggctggacacag

SEQ ID NO: 358059 - DNA, 33 bp, Homo sapien
tgtagagactacacaacgatggcgagtaagaca

SEQ ID NO: 358060 - DNA, 33 bp, Homo sapien
tgtagagactacacaatgatggcgagtaagaca

SEQ ID NO: 358061 - DNA, 33 bp, Homo sapien
actcatgtaatgggacaatcatcccaccaaatt

SEQ ID NO: 358062 - DNA, 33 bp, Homo sapien
actcatgtaatgggacgatcatcccaccaaatt

SEQ ID NO: 358063 - DNA, 33 bp, Homo sapien
gggacacagtagtatacgagtgtatcagttacg

SEQ ID NO: 358064 - DNA, 33 bp, Homo sapien
gggacacagtagtatatgagtgtatcagttacg

SEQ ID NO: 358065 - DNA, 33 bp, Homo sapien
atgaggatcattccaaatagtgtcttgttttta

SEQ ID NO: 358066 - DNA, 33 bp, Homo sapien
atgaggatcattccaagtagtgtcttgttttta

SEQ ID NO: 358067 - DNA, 33 bp, Homo sapien
tctacaattctcaggacccagggatgtttaagg

SEQ ID NO: 358068 - DNA, 33 bp, Homo sapien
tctacaattctcaggatccagggatgtttaagg

SEQ ID NO: 358069 - DNA, 33 bp, Homo sapien
gaagacagaacggagaaagatttgaagatgctg

SEQ ID NO: 358070 - DNA, 33 bp, Homo sapien
gaagacagaacggagagagatttgaagatgctg

SEQ ID NO: 358071 - DNA, 33 bp, Homo sapien
ttgtggttgtagctgcagaatcgtgtttggata

SEQ ID NO: 358072 - DNA, 33 bp, Homo sapien
ttgtggttgtagctgccgaatcgtgtttggata

SEQ ID NO: 358073 - DNA, 33 bp, Homo sapien
tggtttctctgaaatcacaaaaagacgatgact

SEQ ID NO: 358074 - DNA, 33 bp, Homo sapien
tggtttctctgaaatcgcaaaaagacgatgact

SEQ ID NO: 358075 - DNA, 33 bp, Homo sapien
gcgggatgccctttctcaaattgcatgttagat

SEQ ID NO: 358076 - DNA, 33 bp, Homo sapien
gcgggatgccctttcttaaattgcatgttagat

SEQ ID NO: 358077 - DNA, 33 bp, Homo sapien
tactttggctatgtcacctgtcttttgacctgc

SEQ ID NO: 358078 - DNA, 33 bp, Homo sapien
tactttggctatgtcatctgtcttttgacctgc

SEQ ID NO: 358079 - DNA, 33 bp, Homo sapien
gtcggtaaaatgctccactaggatgcctacatc

SEQ ID NO: 358080 - DNA, 33 bp, Homo sapien
gtcggtaaaatgctcctctaggatgcctacatc

SEQ ID NO: 358081 - DNA, 33 bp, Homo sapien
tgtattggttcagaaacgaaggtcttgttttta

SEQ ID NO: 358082 - DNA, 33 bp, Homo sapien
tgtattggttcagaaatgaaggtcttgttttta

SEQ ID NO: 358083 - DNA, 33 bp, Homo sapien
tagatctaaggcaagagaatctgatatttgaca

SEQ ID NO: 358084 - DNA, 33 bp, Homo sapien
tagatctaaggcaagataatctgatatttgaca

SEQ ID NO: 358085 - DNA, 33 bp, Homo sapien
tgaatattttcctccaatctaagcagggaaaat

SEQ ID NO: 358086 - DNA, 33 bp, Homo sapien
tgaatattttcctccagtctaagcagggaaaat

SEQ ID NO: 358087 - DNA, 33 bp, Homo sapien
ggccgcccttgacctcacctagatacccagggg

SEQ ID NO: 358088 - DNA, 33 bp, Homo sapien
ggccgcccttgacctctcctagatacccagggg

SEQ ID NO: 358089 - DNA, 33 bp, Homo sapien
ataaatcttaaaagtaacactgtactgctctta

SEQ ID NO: 358090 - DNA, 33 bp, Homo sapien
ataaatcttaaaagtagcactgtactgctctta

SEQ ID NO: 358091 - DNA, 33 bp, Homo sapien
aagcacctaggatggcccaagcaatatatggta

SEQ ID NO: 358092 - DNA, 33 bp, Homo sapien
aagcacctaggatggctcaagcaatatatggta

SEQ ID NO: 358093 - DNA, 33 bp, Homo sapien
attccttttcctgatggcatagtagtccatttg

SEQ ID NO: 358094 - DNA, 33 bp, Homo sapien
attccttttcctgatgtcatagtagtccatttg

SEQ ID NO: 358095 - DNA, 33 bp, Homo sapien
tactcacagtagagaacaaaggagggtagagtt

SEQ ID NO: 358096 - DNA, 33 bp, Homo sapien
tactcacagtagagaataaaggagggtagagtt

SEQ ID NO: 358097 - DNA, 33 bp, Homo sapien
atatggaccccagaacaaaatccctagaaaatc

SEQ ID NO: 358098 - DNA, 33 bp, Homo sapien
atatggaccccagaaccaaatccctagaaaatc

SEQ ID NO: 358099 - DNA, 33 bp, Homo sapien
gttggagagagatggacaagtgcctggaggcta

SEQ ID NO: 358100 - DNA, 33 bp, Homo sapien
gttggagagagatggagaagtgcctggaggcta

SEQ ID NO: 358101 - DNA, 33 bp, Homo sapien
tacttccccctcaggaccttgcacatttattgc

SEQ ID NO: 358102 - DNA, 33 bp, Homo sapien
tacttccccctcaggatcttgcacatttattgc

SEQ ID NO: 358103 - DNA, 33 bp, Homo sapien
taaaaagaagattagccagaggagactgttaca

SEQ ID NO: 358104 - DNA, 33 bp, Homo sapien
taaaaagaagattagcgagaggagactgttaca

SEQ ID NO: 358105 - DNA, 33 bp, Homo sapien
aaacactttgaggaggaacttgcaatctccact

SEQ ID NO: 358106 - DNA, 33 bp, Homo sapien
aaacactttgaggagggacttgcaatctccact

SEQ ID NO: 358107 - DNA, 33 bp, Homo sapien
gtgcttagcctggaaacagttttccctcttttt

SEQ ID NO: 358108 - DNA, 33 bp, Homo sapien
gtgcttagcctggaaatagttttccctcttttt

SEQ ID NO: 358109 - DNA, 33 bp, Homo sapien
gcacaggtgagtcttaaaaggtagccatcttta

SEQ ID NO: 358110 - DNA, 33 bp, Homo sapien
gcacaggtgagtcttacaaggtagccatcttta

SEQ ID NO: 358111 - DNA, 33 bp, Homo sapien
gcaaactcaaacagccaaagattccataacaca

SEQ ID NO: 358112 - DNA, 33 bp, Homo sapien
gcaaactcaaacagcctaagattccataacaca

SEQ ID NO: 358113 - DNA, 33 bp, Homo sapien
cgggtcatcataggaagcagaaagctaagatga

SEQ ID NO: 358114 - DNA, 33 bp, Homo sapien
cgggtcatcataggaatcagaaagctaagatga

SEQ ID NO: 358115 - DNA, 33 bp, Homo sapien
gaccagccaatatcaacgtcagacgggtcaaag

SEQ ID NO: 358116 - DNA, 33 bp, Homo sapien
gaccagccaatatcaatgtcagacgggtcaaag

SEQ ID NO: 358117 - DNA, 33 bp, Homo sapien
cacaaatggccatgcacacttcctcttcttcac

SEQ ID NO: 358118 - DNA, 33 bp, Homo sapien
cacaaatggccatgcagacttcctcttcttcac

SEQ ID NO: 358119 - DNA, 33 bp, Homo sapien
tttctcaggacctctcaagattgtaccccacgc

SEQ ID NO: 358120 - DNA, 33 bp, Homo sapien
tttctcaggacctctcgagattgtaccccacgc

SEQ ID NO: 358121 - DNA, 33 bp, Homo sapien
attttgcaattcagtaagtttgttgtaggtgtg

SEQ ID NO: 358122 - DNA, 33 bp, Homo sapien
attttgcaattcagtacgtttgttgtaggtgtg

SEQ ID NO: 358123 - DNA, 33 bp, Homo sapien
tcccaagattggcaataagaatggctcatctta

SEQ ID NO: 358124 - DNA, 33 bp, Homo sapien
tcccaagattggcaatcagaatggctcatctta

SEQ ID NO: 358125 - DNA, 33 bp, Homo sapien
gagtcatcagcatttaagtagtagctatgggtg

SEQ ID NO: 358126 - DNA, 33 bp, Homo sapien
gagtcatcagcatttaggtagtagctatgggtg

SEQ ID NO: 358127 - DNA, 33 bp, Homo sapien
atttttcctcgcattcaatgctttgaagagtaa

SEQ ID NO: 358128 - DNA, 33 bp, Homo sapien
atttttcctcgcattccatgctttgaagagtaa

SEQ ID NO: 358129 - DNA, 33 bp, Homo sapien
tctaggcttattaatcacaaatggacctctgcc

SEQ ID NO: 358130 - DNA, 33 bp, Homo sapien
tctaggcttattaatcccaaatggacctctgcc

SEQ ID NO: 358131 - DNA, 33 bp, Homo sapien
aggtaatttgacctcacgtgagaggcagctggc

SEQ ID NO: 358132 - DNA, 33 bp, Homo sapien
aggtaatttgacctcatgtgagaggcagctggc

SEQ ID NO: 358133 - DNA, 33 bp, Homo sapien
ttccccagctgtaaaactgcaatgataacagct

SEQ ID NO: 358134 - DNA, 33 bp, Homo sapien
ttccccagctgtaaaattgcaatgataacagct

SEQ ID NO: 358135 - DNA, 33 bp, Homo sapien
tcctaaccacacactacccggcatcaggaacca

SEQ ID NO: 358136 - DNA, 33 bp, Homo sapien
tcctaaccacacactagccggcatcaggaacca

SEQ ID NO: 358137 - DNA, 33 bp, Homo sapien
aggcacatgggttttccataacctcaaaactca

SEQ ID NO: 358138 - DNA, 33 bp, Homo sapien
aggcacatgggttttctataacctcaaaactca

SEQ ID NO: 358139 - DNA, 33 bp, Homo sapien
tctactacttaatgtccgaagaaacatatgtat

SEQ ID NO: 358140 - DNA, 33 bp, Homo sapien
tctactacttaatgtctgaagaaacatatgtat

SEQ ID NO: 358141 - DNA, 33 bp, Homo sapien
agcagaccgtgagctcaaattcagtgacagaga

SEQ ID NO: 358142 - DNA, 33 bp, Homo sapien
agcagaccgtgagctccaattcagtgacagaga

SEQ ID NO: 358143 - DNA, 33 bp, Homo sapien
cagcaatgtatttgtaaaccaatgttagtaaca

SEQ ID NO: 358144 - DNA, 33 bp, Homo sapien
cagcaatgtatttgtacaccaatgttagtaaca

SEQ ID NO: 358145 - DNA, 33 bp, Homo sapien
gctactttaaaatatacaatgcactgttgctaa

SEQ ID NO: 358146 - DNA, 33 bp, Homo sapien
gctactttaaaatatataatgcactgttgctaa

SEQ ID NO: 358147 - DNA, 33 bp, Homo sapien
gttcaagagtgaaacccaacaaatcttggctct

SEQ ID NO: 358148 - DNA, 33 bp, Homo sapien
gttcaagagtgaaacctaacaaatcttggctct

SEQ ID NO: 358149 - DNA, 33 bp, Homo sapien
atgatgccataatataagagattacatagtgtc

SEQ ID NO: 358150 - DNA, 33 bp, Homo sapien
atgatgccataatataggagattacatagtgtc

SEQ ID NO: 358151 - DNA, 33 bp, Homo sapien
ttataaaagttagctcaatgcagtattccaata

SEQ ID NO: 358152 - DNA, 33 bp, Homo sapien
ttataaaagttagctcgatgcagtattccaata

SEQ ID NO: 358153 - DNA, 33 bp, Homo sapien
gttggatggcattcacaaatatgtattagtaaa

SEQ ID NO: 358154 - DNA, 33 bp, Homo sapien
gttggatggcattcacgaatatgtattagtaaa

SEQ ID NO: 358155 - DNA, 33 bp, Homo sapien
gattttgcccatttaaagtaaaagtgtgatgtc

SEQ ID NO: 358156 - DNA, 33 bp, Homo sapien
gattttgcccatttaatgtaaaagtgtgatgtc

SEQ ID NO: 358157 - DNA, 33 bp, Homo sapien
tcaacatcatttttcacaggactaaaaaaaact

SEQ ID NO: 358158 - DNA, 33 bp, Homo sapien
tcaacatcatttttcagaggactaaaaaaaact

SEQ ID NO: 358159 - DNA, 33 bp, Homo sapien
taactaatgtgtttgtcaatcactcattgattc

SEQ ID NO: 358160 - DNA, 33 bp, Homo sapien
taactaatgtgtttgtgaatcactcattgattc

SEQ ID NO: 358161 - DNA, 33 bp, Homo sapien
atggagacagatgataaaaagtaagtaaactat

SEQ ID NO: 358162 - DNA, 33 bp, Homo sapien
atggagacagatgatagaaagtaagtaaactat

SEQ ID NO: 358163 - DNA, 33 bp, Homo sapien
tttgttcgggacaccaagaacctgcaactgagt

SEQ ID NO: 358164 - DNA, 33 bp, Homo sapien
tttgttcgggacaccaggaacctgcaactgagt

SEQ ID NO: 358165 - DNA, 33 bp, Homo sapien
tgcaattgattttacaataataaaagacaagac

SEQ ID NO: 358166 - DNA, 33 bp, Homo sapien
tgcaattgattttacagtaataaaagacaagac

SEQ ID NO: 358167 - DNA, 33 bp, Homo sapien
gttcaaatctaaccaccggataggcaaacttgg

SEQ ID NO: 358168 - DNA, 33 bp, Homo sapien
gttcaaatctaaccactggataggcaaacttgg

SEQ ID NO: 358169 - DNA, 33 bp, Homo sapien
gacaatttctaaagataacacttgtcaatggcc

SEQ ID NO: 358170 - DNA, 33 bp, Homo sapien
gacaatttctaaagatcacacttgtcaatggcc

SEQ ID NO: 358171 - DNA, 33 bp, Homo sapien
gaacaaagtgcataaactcaaaagaaaagtctc

SEQ ID NO: 358172 - DNA, 33 bp, Homo sapien
gaacaaagtgcataaattcaaaagaaaagtctc

SEQ ID NO: 358173 - DNA, 33 bp, Homo sapien
tctacgatctctcagacgatttgtgctatagaa

SEQ ID NO: 358174 - DNA, 33 bp, Homo sapien
tctacgatctctcagatgatttgtgctatagaa

SEQ ID NO: 358175 - DNA, 33 bp, Homo sapien
ctatagaatgcctaaaaaggaaattatttgtcc

SEQ ID NO: 358176 - DNA, 33 bp, Homo sapien
ctatagaatgcctaaagaggaaattatttgtcc

SEQ ID NO: 358177 - DNA, 33 bp, Homo sapien
gtccctttaaggtgaaataacctgggaatgttt

SEQ ID NO: 358178 - DNA, 33 bp, Homo sapien
gtccctttaaggtgaagtaacctgggaatgttt

SEQ ID NO: 358179 - DNA, 33 bp, Homo sapien
gtttttgagcagttgaatatcttgacttagtat

SEQ ID NO: 358180 - DNA, 33 bp, Homo sapien
gtttttgagcagttgagtatcttgacttagtat

SEQ ID NO: 358181 - DNA, 33 bp, Homo sapien
ctccagttcagctagacgggagaatgcgtgaag

SEQ ID NO: 358182 - DNA, 33 bp, Homo sapien
ctccagttcagctagatgggagaatgcgtgaag

SEQ ID NO: 358183 - DNA, 33 bp, Homo sapien
tgcaatagaatgttaccggataagagtggtaca

SEQ ID NO: 358184 - DNA, 33 bp, Homo sapien
tgcaatagaatgttactggataagagtggtaca

SEQ ID NO: 358185 - DNA, 33 bp, Homo sapien
gggattatagacttgaacctttgttttcttttg

SEQ ID NO: 358186 - DNA, 33 bp, Homo sapien
gggattatagacttgagcctttgttttcttttg

SEQ ID NO: 358187 - DNA, 33 bp, Homo sapien
aaatctttgtgtaaaaaataaaagcagtatctc

SEQ ID NO: 358188 - DNA, 33 bp, Homo sapien
aaatctttgtgtaaaacataaaagcagtatctc

SEQ ID NO: 358189 - DNA, 33 bp, Homo sapien
cagaaagcaacagaaaagttgtccactaatatg

SEQ ID NO: 358190 - DNA, 33 bp, Homo sapien
cagaaagcaacagaaaggttgtccactaatatg

SEQ ID NO: 358191 - DNA, 33 bp, Homo sapien
catcttaacgatttgagcctcatgttttcttct

SEQ ID NO: 358192 - DNA, 33 bp, Homo sapien
catcttaacgatttgatcctcatgttttcttct

SEQ ID NO: 358193 - DNA, 33 bp, Homo sapien
acaaacagaggattgacgaactccagggtttag

SEQ ID NO: 358194 - DNA, 33 bp, Homo sapien
acaaacagaggattgatgaactccagggtttag

SEQ ID NO: 358195 - DNA, 33 bp, Homo sapien
gatgagttggcacacccctatattcctagctac

SEQ ID NO: 358196 - DNA, 33 bp, Homo sapien
gatgagttggcacacctctatattcctagctac

SEQ ID NO: 358197 - DNA, 33 bp, Homo sapien
tggattttacgtgtgcactatttcaagagatgt

SEQ ID NO: 358198 - DNA, 33 bp, Homo sapien
tggattttacgtgtgctctatttcaagagatgt

SEQ ID NO: 358199 - DNA, 33 bp, Homo sapien
tcaacctactgcctaccgcctttttgaaaaata

SEQ ID NO: 358200 - DNA, 33 bp, Homo sapien
tcaacctactgcctactgcctttttgaaaaata

SEQ ID NO: 358201 - DNA, 33 bp, Homo sapien
tatgtttaggactcaacatcttcagtagaaaat

SEQ ID NO: 358202 - DNA, 33 bp, Homo sapien
tatgtttaggactcaatatcttcagtagaaaat

SEQ ID NO: 358203 - DNA, 33 bp, Homo sapien
ccgttatgtccacattcaaaatccttcaatggg

SEQ ID NO: 358204 - DNA, 33 bp, Homo sapien
ccgttatgtccacatttaaaatccttcaatggg

SEQ ID NO: 358205 - DNA, 33 bp, Homo sapien
ccatctttaaaaaaaaatgctcccttgattaca

SEQ ID NO: 358206 - DNA, 33 bp, Homo sapien
ccatctttaaaaaaaagtgctcccttgattaca

SEQ ID NO: 358207 - DNA, 33 bp, Homo sapien
agcttattgataatgaaagtgatggagtccaga

SEQ ID NO: 358208 - DNA, 33 bp, Homo sapien
agcttattgataatgacagtgatggagtccaga

SEQ ID NO: 358209 - DNA, 33 bp, Homo sapien
gttttgtcattgtttacgctttagaaatattta

SEQ ID NO: 358210 - DNA, 33 bp, Homo sapien
gttttgtcattgtttatgctttagaaatattta

SEQ ID NO: 358211 - DNA, 33 bp, Homo sapien
agacatcagattaaaaatagctgccttcagaaa

SEQ ID NO: 358212 - DNA, 33 bp, Homo sapien
agacatcagattaaaagtagctgccttcagaaa

SEQ ID NO: 358213 - DNA, 33 bp, Homo sapien
ggcaatatacacccagaccctaaggcacacatg

SEQ ID NO: 358214 - DNA, 33 bp, Homo sapien
ggcaatatacacccagcccctaaggcacacatg

SEQ ID NO: 358215 - DNA, 33 bp, Homo sapien
gggcacaagttactgtaaaagcaaaaatcagat

SEQ ID NO: 358216 - DNA, 33 bp, Homo sapien
gggcacaagttactgtgaaagcaaaaatcagat

SEQ ID NO: 358217 - DNA, 33 bp, Homo sapien
ggaagaaacattgaaacgatatttcccagtgtt

SEQ ID NO: 358218 - DNA, 33 bp, Homo sapien
ggaagaaacattgaaaggatatttcccagtgtt

SEQ ID NO: 358219 - DNA, 33 bp, Homo sapien
ataagaaagattgagaaatggaaaaataaaaag

SEQ ID NO: 358220 - DNA, 33 bp, Homo sapien
ataagaaagattgagagatggaaaaataaaaag

SEQ ID NO: 358221 - DNA, 33 bp, Homo sapien
ggcagagaattgtgtcaagcattcatcccagag

SEQ ID NO: 358222 - DNA, 33 bp, Homo sapien
ggcagagaattgtgtctagcattcatcccagag

SEQ ID NO: 358223 - DNA, 33 bp, Homo sapien
ccaatccagtggcgagcaatgtccaaaccaaag

SEQ ID NO: 358224 - DNA, 33 bp, Homo sapien
ccaatccagtggcgaggaatgtccaaaccaaag

SEQ ID NO: 358225 - DNA, 33 bp, Homo sapien
gccctacctttcttccaaaatatgtttgcaaat

SEQ ID NO: 358226 - DNA, 33 bp, Homo sapien
gccctacctttcttcccaaatatgtttgcaaat

SEQ ID NO: 358227 - DNA, 33 bp, Homo sapien
ttcaaagcagctatggaaaagctaaaaggggtt

SEQ ID NO: 358228 - DNA, 33 bp, Homo sapien
ttcaaagcagctatgggaaagctaaaaggggtt

SEQ ID NO: 358229 - DNA, 33 bp, Homo sapien
gtatgtgtgtgagagacaagtggtgaagtcaag

SEQ ID NO: 358230 - DNA, 33 bp, Homo sapien
gtatgtgtgtgagagataagtggtgaagtcaag

SEQ ID NO: 358231 - DNA, 33 bp, Homo sapien
aggcttccggcgtaacaaacatgaaatctaatg

SEQ ID NO: 358232 - DNA, 33 bp, Homo sapien
aggcttccggcgtaacgaacatgaaatctaatg

SEQ ID NO: 358233 - DNA, 33 bp, Homo sapien
caccagatgggacaacactttacttacacagag

SEQ ID NO: 358234 - DNA, 33 bp, Homo sapien
caccagatgggacaacgctttacttacacagag

SEQ ID NO: 358235 - DNA, 33 bp, Homo sapien
ctagaagatccttacaatcacctcaagagctct

SEQ ID NO: 358236 - DNA, 33 bp, Homo sapien
ctagaagatccttacagtcacctcaagagctct

SEQ ID NO: 358237 - DNA, 33 bp, Homo sapien
acaggaaagaaaccctcagctgaagatatctaa

SEQ ID NO: 358238 - DNA, 33 bp, Homo sapien
acaggaaagaaaccctgagctgaagatatctaa

SEQ ID NO: 358239 - DNA, 33 bp, Homo sapien
caactaaaacagaacaaagttgagcagcttccc

SEQ ID NO: 358240 - DNA, 33 bp, Homo sapien
caactaaaacagaacagagttgagcagcttccc

SEQ ID NO: 358241 - DNA, 33 bp, Homo sapien
tctacaaggagcactccgaaacactgatgaaag

SEQ ID NO: 358242 - DNA, 33 bp, Homo sapien
tctacaaggagcactctgaaacactgatgaaag

SEQ ID NO: 358243 - DNA, 33 bp, Homo sapien
ctcagcctactcaataggaaaatgaagaggata

SEQ ID NO: 358244 - DNA, 33 bp, Homo sapien
ctcagcctactcaatatgaaaatgaagaggata

SEQ ID NO: 358245 - DNA, 33 bp, Homo sapien
aatctataaggactaccatgtttttggcaaaca

SEQ ID NO: 358246 - DNA, 33 bp, Homo sapien
aatctataaggactactatgtttttggcaaaca

SEQ ID NO: 358247 - DNA, 33 bp, Homo sapien
aatagtccaaacacaaacattattgtgtttact

SEQ ID NO: 358248 - DNA, 33 bp, Homo sapien
aatagtccaaacacaagcattattgtgtttact

SEQ ID NO: 358249 - DNA, 33 bp, Homo sapien
ggcaccaacattctgcaatatcatgcaatttct

SEQ ID NO: 358250 - DNA, 33 bp, Homo sapien
ggcaccaacattctgctatatcatgcaatttct

SEQ ID NO: 358251 - DNA, 33 bp, Homo sapien
aagcacacataagtagaaagcacacacatccta

SEQ ID NO: 358252 - DNA, 33 bp, Homo sapien
aagcacacataagtaggaagcacacacatccta

SEQ ID NO: 358253 - DNA, 33 bp, Homo sapien
tacccatttatccctgaaaaacatctggattgt

SEQ ID NO: 358254 - DNA, 33 bp, Homo sapien
tacccatttatccctgtaaaacatctggattgt

SEQ ID NO: 358255 - DNA, 33 bp, Homo sapien
ctatagtctagactccactggacactaacactc

SEQ ID NO: 358256 - DNA, 33 bp, Homo sapien
ctatagtctagactccgctggacactaacactc

SEQ ID NO: 358257 - DNA, 33 bp, Homo sapien
tataaactggcacgtaaaatgtctggtcattgt

SEQ ID NO: 358258 - DNA, 33 bp, Homo sapien
tataaactggcacgtacaatgtctggtcattgt

SEQ ID NO: 358259 - DNA, 33 bp, Homo sapien
agcagaaaggttgaaaacgggatccatttagtt

SEQ ID NO: 358260 - DNA, 33 bp, Homo sapien
agcagaaaggttgaaagcgggatccatttagtt

SEQ ID NO: 358261 - DNA, 33 bp, Homo sapien
aatgataaaaggatcaatcaaaaaaccatagta

SEQ ID NO: 358262 - DNA, 33 bp, Homo sapien
aatgataaaaggatcagtcaaaaaaccatagta

SEQ ID NO: 358263 - DNA, 33 bp, Homo sapien
aaggcctgccaccagacgtagccatacaatgga

SEQ ID NO: 358264 - DNA, 33 bp, Homo sapien
aaggcctgccaccagatgtagccatacaatgga

SEQ ID NO: 358265 - DNA, 33 bp, Homo sapien
aatataaggaagtcaggatggaatctagaactt

SEQ ID NO: 358266 - DNA, 33 bp, Homo sapien
aatataaggaagtcagtatggaatctagaactt

SEQ ID NO: 358267 - DNA, 33 bp, Homo sapien
aaatcaagatgtagggaagggacagatgtgtca

SEQ ID NO: 358268 - DNA, 33 bp, Homo sapien
aaatcaagatgtagggcagggacagatgtgtca

SEQ ID NO: 358269 - DNA, 33 bp, Homo sapien
ttgaaatgaacttgcaaatggatgcaaaactgc

SEQ ID NO: 358270 - DNA, 33 bp, Homo sapien
ttgaaatgaacttgcagatggatgcaaaactgc

SEQ ID NO: 358271 - DNA, 33 bp, Homo sapien
acttcttctgactgccaacatatttgaaattct

SEQ ID NO: 358272 - DNA, 33 bp, Homo sapien
acttcttctgactgccgacatatttgaaattct

SEQ ID NO: 358273 - DNA, 33 bp, Homo sapien
caccaagtccagttctcaactgaatgacagcag

SEQ ID NO: 358274 - DNA, 33 bp, Homo sapien
caccaagtccagttcttaactgaatgacagcag

SEQ ID NO: 358275 - DNA, 33 bp, Homo sapien
ttattctttcattttcaagtatccggctagatt

SEQ ID NO: 358276 - DNA, 33 bp, Homo sapien
ttattctttcattttcgagtatccggctagatt

SEQ ID NO: 358277 - DNA, 33 bp, Homo sapien
ggataaggtacaatgggagttcattaagcagag

SEQ ID NO: 358278 - DNA, 33 bp, Homo sapien
ggataaggtacaatggtagttcattaagcagag

SEQ ID NO: 358279 - DNA, 33 bp, Homo sapien
tgagtctgccattcatcagatgggtaaagaaga

SEQ ID NO: 358280 - DNA, 33 bp, Homo sapien
tgagtctgccattcattagatgggtaaagaaga

SEQ ID NO: 358281 - DNA, 33 bp, Homo sapien
ctttatgcaaaagtcaaataaggaacttgattc

SEQ ID NO: 358282 - DNA, 33 bp, Homo sapien
ctttatgcaaaagtcagataaggaacttgattc

SEQ ID NO: 358283 - DNA, 33 bp, Homo sapien
ccttaacgaacagcacacttcattgtaatcact

SEQ ID NO: 358284 - DNA, 33 bp, Homo sapien
ccttaacgaacagcacgcttcattgtaatcact

SEQ ID NO: 358285 - DNA, 33 bp, Homo sapien
acgggcgcatcctcaccatagtttactccctga

SEQ ID NO: 358286 - DNA, 33 bp, Homo sapien
acgggcgcatcctcactatagtttactccctga

SEQ ID NO: 358287 - DNA, 33 bp, Homo sapien
atgcagccattaaaaacgaattctccaatgcta

SEQ ID NO: 358288 - DNA, 33 bp, Homo sapien
atgcagccattaaaaatgaattctccaatgcta

SEQ ID NO: 358289 - DNA, 33 bp, Homo sapien
aactactacatagaacagaaatagttacacaag

SEQ ID NO: 358290 - DNA, 33 bp, Homo sapien
aactactacatagaacggaaatagttacacaag

SEQ ID NO: 358291 - DNA, 33 bp, Homo sapien
agggtctcggtcatgacaaaaggttgtggacac

SEQ ID NO: 358292 - DNA, 33 bp, Homo sapien
agggtctcggtcatgataaaaggttgtggacac

SEQ ID NO: 358293 - DNA, 33 bp, Homo sapien
gaagttaagtaaactgaagccaaatctccaaga

SEQ ID NO: 358294 - DNA, 33 bp, Homo sapien
gaagttaagtaaactgcagccaaatctccaaga

SEQ ID NO: 358295 - DNA, 33 bp, Homo sapien
cctaatgtgtggtataccttgcaaagcttatca

SEQ ID NO: 358296 - DNA, 33 bp, Homo sapien
cctaatgtgtggtatatcttgcaaagcttatca

SEQ ID NO: 358297 - DNA, 33 bp, Homo sapien
aaccactgtcctaaaactgaatttatttcatcc

SEQ ID NO: 358298 - DNA, 33 bp, Homo sapien
aaccactgtcctaaaattgaatttatttcatcc

SEQ ID NO: 358299 - DNA, 33 bp, Homo sapien
atgctgatgaaagaaacgaaggaagacctagat

SEQ ID NO: 358300 - DNA, 33 bp, Homo sapien
atgctgatgaaagaaatgaaggaagacctagat

SEQ ID NO: 358301 - DNA, 33 bp, Homo sapien
atgagttactctcgataaaaaagatactgcaac

SEQ ID NO: 358302 - DNA, 33 bp, Homo sapien
atgagttactctcgattaaaaagatactgcaac

SEQ ID NO: 358303 - DNA, 33 bp, Homo sapien
caaaacaaagaccaagactgattctaccgttca

SEQ ID NO: 358304 - DNA, 33 bp, Homo sapien
caaaacaaagaccaagcctgattctaccgttca

SEQ ID NO: 358305 - DNA, 33 bp, Homo sapien
taccgttcagggttgaggttctctctacttgag

SEQ ID NO: 358306 - DNA, 33 bp, Homo sapien
taccgttcagggttgatgttctctctacttgag

SEQ ID NO: 358307 - DNA, 33 bp, Homo sapien
cttctgttgtgtaccaacgcttctctggtgcca

SEQ ID NO: 358308 - DNA, 33 bp, Homo sapien
cttctgttgtgtaccagcgcttctctggtgcca

SEQ ID NO: 358309 - DNA, 33 bp, Homo sapien
accctgctcagagtaacctccccacttatctca

SEQ ID NO: 358310 - DNA, 33 bp, Homo sapien
accctgctcagagtaatctccccacttatctca

SEQ ID NO: 358311 - DNA, 33 bp, Homo sapien
tgcagtgagctatgaacatgtcagtgcactcca

SEQ ID NO: 358312 - DNA, 33 bp, Homo sapien
tgcagtgagctatgaatatgtcagtgcactcca

SEQ ID NO: 358313 - DNA, 33 bp, Homo sapien
ttcacctgctttataaacctagaaactacatca

SEQ ID NO: 358314 - DNA, 33 bp, Homo sapien
ttcacctgctttataagcctagaaactacatca

SEQ ID NO: 358315 - DNA, 33 bp, Homo sapien
tgaagtccactttatgacaataatcagaacctt

SEQ ID NO: 358316 - DNA, 33 bp, Homo sapien
tgaagtccactttatgccaataatcagaacctt

SEQ ID NO: 358317 - DNA, 33 bp, Homo sapien
aagaaccgcagattacaagaaccttagggcctc

SEQ ID NO: 358318 - DNA, 33 bp, Homo sapien
aagaaccgcagattacgagaaccttagggcctc

SEQ ID NO: 358319 - DNA, 33 bp, Homo sapien
gcaactgggcagaaacaagccctgagtacaaga

SEQ ID NO: 358320 - DNA, 33 bp, Homo sapien
gcaactgggcagaaacgagccctgagtacaaga

SEQ ID NO: 358321 - DNA, 33 bp, Homo sapien
aagcaacaggagaaaccgtccaagaaccgaagc

SEQ ID NO: 358322 - DNA, 33 bp, Homo sapien
aagcaacaggagaaactgtccaagaaccgaagc

SEQ ID NO: 358323 - DNA, 33 bp, Homo sapien
ttttcagaatgaacaggatttagtcacttactc

SEQ ID NO: 358324 - DNA, 33 bp, Homo sapien
ttttcagaatgaacagtatttagtcacttactc

SEQ ID NO: 358325 - DNA, 33 bp, Homo sapien
gtaattaatgaataatcataatgcaagttggcc

SEQ ID NO: 358326 - DNA, 33 bp, Homo sapien
gtaattaatgaataatgataatgcaagttggcc

SEQ ID NO: 358327 - DNA, 33 bp, Homo sapien
cagtggagtggaagaagatggtgtctcccttag

SEQ ID NO: 358328 - DNA, 33 bp, Homo sapien
cagtggagtggaagaatatggtgtctcccttag

SEQ ID NO: 358329 - DNA, 33 bp, Homo sapien
atggtgtagttcagcaatcttcaccaaaactcc

SEQ ID NO: 358330 - DNA, 33 bp, Homo sapien
atggtgtagttcagcagtcttcaccaaaactcc

SEQ ID NO: 358331 - DNA, 33 bp, Homo sapien
acatttgctcttgaacaacaatttttctgatac

SEQ ID NO: 358332 - DNA, 33 bp, Homo sapien
acatttgctcttgaacgacaatttttctgatac

SEQ ID NO: 358333 - DNA, 33 bp, Homo sapien
accccatctcaattcccatgaaataccttggag

SEQ ID NO: 358334 - DNA, 33 bp, Homo sapien
accccatctcaattcctatgaaataccttggag

SEQ ID NO: 358335 - DNA, 33 bp, Homo sapien
aagcaaatagaagacaggctacatttaattcaa

SEQ ID NO: 358336 - DNA, 33 bp, Homo sapien
aagcaaatagaagacatgctacatttaattcaa

SEQ ID NO: 358337 - DNA, 33 bp, Homo sapien
tacatagagagagtctcaagaataacacccttc

SEQ ID NO: 358338 - DNA, 33 bp, Homo sapien
tacatagagagagtctgaagaataacacccttc

SEQ ID NO: 358339 - DNA, 33 bp, Homo sapien
ggaaatcaatcagccactgactataagtcttgt

SEQ ID NO: 358340 - DNA, 33 bp, Homo sapien
ggaaatcaatcagccattgactataagtcttgt

SEQ ID NO: 358341 - DNA, 33 bp, Homo sapien
tggcttcattctcctcaccgagtaccacactac

SEQ ID NO: 358342 - DNA, 33 bp, Homo sapien
tggcttcattctcctcgccgagtaccacactac

SEQ ID NO: 358343 - DNA, 33 bp, Homo sapien
atctttgaaaaggtaactgaaaagtcacactac

SEQ ID NO: 358344 - DNA, 33 bp, Homo sapien
atctttgaaaaggtaattgaaaagtcacactac

SEQ ID NO: 358345 - DNA, 33 bp, Homo sapien
ctttaggtaaatgaccaatccactttgccaata

SEQ ID NO: 358346 - DNA, 33 bp, Homo sapien
ctttaggtaaatgaccgatccactttgccaata

SEQ ID NO: 358347 - DNA, 33 bp, Homo sapien
ttctgtgttggcccagcaagtagtacaagtaaa

SEQ ID NO: 358348 - DNA, 33 bp, Homo sapien
ttctgtgttggcccaggaagtagtacaagtaaa

SEQ ID NO: 358349 - DNA, 33 bp, Homo sapien
agcaagctgtttagagccctacaataaatagtt

SEQ ID NO: 358350 - DNA, 33 bp, Homo sapien
agcaagctgtttagagtcctacaataaatagtt

SEQ ID NO: 358351 - DNA, 33 bp, Homo sapien
gtgttatttcacttaccgaacggacaacgtaaa

SEQ ID NO: 358352 - DNA, 33 bp, Homo sapien
gtgttatttcacttactgaacggacaacgtaaa

SEQ ID NO: 358353 - DNA, 33 bp, Homo sapien
tacagacaagttggaaaatgatttagggaggca

SEQ ID NO: 358354 - DNA, 33 bp, Homo sapien
tacagacaagttggaacatgatttagggaggca

SEQ ID NO: 358355 - DNA, 33 bp, Homo sapien
ttgaaaacctcaaacacatttaaatacagaagc

SEQ ID NO: 358356 - DNA, 33 bp, Homo sapien
ttgaaaacctcaaacagatttaaatacagaagc

SEQ ID NO: 358357 - DNA, 33 bp, Homo sapien
aatttagaggctgtacaaatatagtgaaattgt

SEQ ID NO: 358358 - DNA, 33 bp, Homo sapien
aatttagaggctgtacgaatatagtgaaattgt

SEQ ID NO: 358359 - DNA, 33 bp, Homo sapien
tagaacaggctaaataaattaagtttttcaaaa

SEQ ID NO: 358360 - DNA, 33 bp, Homo sapien
tagaacaggctaaatacattaagtttttcaaaa

SEQ ID NO: 358361 - DNA, 33 bp, Homo sapien
tggtcattgtatttcaaggtcagtttagtgcta

SEQ ID NO: 358362 - DNA, 33 bp, Homo sapien
tggtcattgtatttcagggtcagtttagtgcta

SEQ ID NO: 358363 - DNA, 33 bp, Homo sapien
gaaattatccaagtgcacaaacacagaagaaaa

SEQ ID NO: 358364 - DNA, 33 bp, Homo sapien
gaaattatccaagtgcgcaaacacagaagaaaa

SEQ ID NO: 358365 - DNA, 33 bp, Homo sapien
gaaggatctggtttgtaaaaagcattagcatag

SEQ ID NO: 358366 - DNA, 33 bp, Homo sapien
gaaggatctggtttgtgaaaagcattagcatag

SEQ ID NO: 358367 - DNA, 33 bp, Homo sapien
cccaacatttttatgcaatcaagtatatcagct

SEQ ID NO: 358368 - DNA, 33 bp, Homo sapien
cccaacatttttatgccatcaagtatatcagct

SEQ ID NO: 358369 - DNA, 33 bp, Homo sapien
gccagaaactaaactcaagaaagaggaaatcct

SEQ ID NO: 358370 - DNA, 33 bp, Homo sapien
gccagaaactaaactcgagaaagaggaaatcct

SEQ ID NO: 358371 - DNA, 33 bp, Homo sapien
ttctcattggacaccactgaaaaaaatgcagag

SEQ ID NO: 358372 - DNA, 33 bp, Homo sapien
ttctcattggacaccattgaaaaaaatgcagag

SEQ ID NO: 358373 - DNA, 33 bp, Homo sapien
gctattatatgtgtagacccaaattaggagtgg

SEQ ID NO: 358374 - DNA, 33 bp, Homo sapien
gctattatatgtgtagccccaaattaggagtgg

SEQ ID NO: 358375 - DNA, 33 bp, Homo sapien
acagattttgaatgtaacaggtcaaaaattgaa

SEQ ID NO: 358376 - DNA, 33 bp, Homo sapien
acagattttgaatgtagcaggtcaaaaattgaa

SEQ ID NO: 358377 - DNA, 33 bp, Homo sapien
atacatagggcaactacgaaaggctatttagac

SEQ ID NO: 358378 - DNA, 33 bp, Homo sapien
atacatagggcaactatgaaaggctatttagac

SEQ ID NO: 358379 - DNA, 33 bp, Homo sapien
catagagcaacggctggcaataaggttggagaa

SEQ ID NO: 358380 - DNA, 33 bp, Homo sapien
catagagcaacggctgtcaataaggttggagaa

SEQ ID NO: 358381 - DNA, 33 bp, Homo sapien
aataaatgaatttaacagtggaacagatcaagc

SEQ ID NO: 358382 - DNA, 33 bp, Homo sapien
aataaatgaatttaaccgtggaacagatcaagc

SEQ ID NO: 358383 - DNA, 33 bp, Homo sapien
ggactttgcttttgaacatacctttctctcatt

SEQ ID NO: 358384 - DNA, 33 bp, Homo sapien
ggactttgcttttgaatatacctttctctcatt

SEQ ID NO: 358385 - DNA, 33 bp, Homo sapien
atcataccatctttataaaaaatcatcctattg

SEQ ID NO: 358386 - DNA, 33 bp, Homo sapien
atcataccatctttatgaaaaatcatcctattg

SEQ ID NO: 358387 - DNA, 33 bp, Homo sapien
agagtatccaacaagaagatgaatggaaacatg

SEQ ID NO: 358388 - DNA, 33 bp, Homo sapien
agagtatccaacaagatgatgaatggaaacatg

SEQ ID NO: 358389 - DNA, 33 bp, Homo sapien
cctttctaatacctgacggctcatgtaagaaat

SEQ ID NO: 358390 - DNA, 33 bp, Homo sapien
cctttctaatacctgatggctcatgtaagaaat

SEQ ID NO: 358391 - DNA, 33 bp, Homo sapien
tgtttgttctggagtccctagaaaactagactt

SEQ ID NO: 358392 - DNA, 33 bp, Homo sapien
tgtttgttctggagtctctagaaaactagactt

SEQ ID NO: 358393 - DNA, 33 bp, Homo sapien
gaaaaagtaaaaaagacaagtgcacatttactc

SEQ ID NO: 358394 - DNA, 33 bp, Homo sapien
gaaaaagtaaaaaagataagtgcacatttactc

SEQ ID NO: 358395 - DNA, 33 bp, Homo sapien
gtcaaacattttaagacaatatgttagaacatt

SEQ ID NO: 358396 - DNA, 33 bp, Homo sapien
gtcaaacattttaagagaatatgttagaacatt

SEQ ID NO: 358397 - DNA, 33 bp, Homo sapien
agttagccagactgacaggattgcagaattctg

SEQ ID NO: 358398 - DNA, 33 bp, Homo sapien
agttagccagactgacgggattgcagaattctg

SEQ ID NO: 358399 - DNA, 33 bp, Homo sapien
gatcacacaactagtaactatgtagcttggatt

SEQ ID NO: 358400 - DNA, 33 bp, Homo sapien
gatcacacaactagtagctatgtagcttggatt

SEQ ID NO: 358401 - DNA, 33 bp, Homo sapien
tcacactgtgaatccacaatcgataaattttat

SEQ ID NO: 358402 - DNA, 33 bp, Homo sapien
tcacactgtgaatccataatcgataaattttat

SEQ ID NO: 358403 - DNA, 33 bp, Homo sapien
aaaaaagaggatgaccaagaaattccaagccca

SEQ ID NO: 358404 - DNA, 33 bp, Homo sapien
aaaaaagaggatgaccgagaaattccaagccca

SEQ ID NO: 358405 - DNA, 33 bp, Homo sapien
gatgccagttacattacgcctagttaatcttca

SEQ ID NO: 358406 - DNA, 33 bp, Homo sapien
gatgccagttacattatgcctagttaatcttca

SEQ ID NO: 358407 - DNA, 33 bp, Homo sapien
tagaaatggaaaccacactgggttgagaagtga

SEQ ID NO: 358408 - DNA, 33 bp, Homo sapien
tagaaatggaaaccacgctgggttgagaagtga

SEQ ID NO: 358409 - DNA, 33 bp, Homo sapien
cttgagatggagttagccatattcattattgaa

SEQ ID NO: 358410 - DNA, 33 bp, Homo sapien
cttgagatggagttaggcatattcattattgaa

SEQ ID NO: 358411 - DNA, 33 bp, Homo sapien
atattccctgctctagaagccagtagccactgc

SEQ ID NO: 358412 - DNA, 33 bp, Homo sapien
atattccctgctctaggagccagtagccactgc

SEQ ID NO: 358413 - DNA, 33 bp, Homo sapien
actggcctgaggctaacgtccctgtttttcagg

SEQ ID NO: 358414 - DNA, 33 bp, Homo sapien
actggcctgaggctaatgtccctgtttttcagg

SEQ ID NO: 358415 - DNA, 33 bp, Homo sapien
ctcccaaatgtcagaacaaggaaagctttgttt

SEQ ID NO: 358416 - DNA, 33 bp, Homo sapien
ctcccaaatgtcagaataaggaaagctttgttt

SEQ ID NO: 358417 - DNA, 33 bp, Homo sapien
agggagcttacaatcccgcagaaagaaagatat

SEQ ID NO: 358418 - DNA, 33 bp, Homo sapien
agggagcttacaatcctgcagaaagaaagatat

SEQ ID NO: 358419 - DNA, 33 bp, Homo sapien
ctaaaaatccctgatacgtggaacttaacacta

SEQ ID NO: 358420 - DNA, 33 bp, Homo sapien
ctaaaaatccctgatatgtggaacttaacacta

SEQ ID NO: 358421 - DNA, 33 bp, Homo sapien
ccctgtagacatctcaatatcttagtaagtcag

SEQ ID NO: 358422 - DNA, 33 bp, Homo sapien
ccctgtagacatctcagtatcttagtaagtcag

SEQ ID NO: 358423 - DNA, 33 bp, Homo sapien
ttccttctccaaacagcattgtattttatacac

SEQ ID NO: 358424 - DNA, 33 bp, Homo sapien
ttccttctccaaacagtattgtattttatacac

SEQ ID NO: 358425 - DNA, 33 bp, Homo sapien
aagtggtaaacaatcagaaagccaacacacaca

SEQ ID NO: 358426 - DNA, 33 bp, Homo sapien
aagtggtaaacaatcataaagccaacacacaca

SEQ ID NO: 358427 - DNA, 33 bp, Homo sapien
gagacagggtcccggcactgaactagtaccagt

SEQ ID NO: 358428 - DNA, 33 bp, Homo sapien
gagacagggtcccggcgctgaactagtaccagt

SEQ ID NO: 358429 - DNA, 33 bp, Homo sapien
gttaagacagactcaaatgttgctcactacatg

SEQ ID NO: 358430 - DNA, 33 bp, Homo sapien
gttaagacagactcaagtgttgctcactacatg

SEQ ID NO: 358431 - DNA, 33 bp, Homo sapien
cagaaccattcatcgaactcatggttgcatact

SEQ ID NO: 358432 - DNA, 33 bp, Homo sapien
cagaaccattcatcgagctcatggttgcatact

SEQ ID NO: 358433 - DNA, 33 bp, Homo sapien
atattattctctaaaaaagtctccgttcattaa

SEQ ID NO: 358434 - DNA, 33 bp, Homo sapien
atattattctctaaaacagtctccgttcattaa

SEQ ID NO: 358435 - DNA, 33 bp, Homo sapien
ctggaggcactgctctaaacttctgcttgcttt

SEQ ID NO: 358436 - DNA, 33 bp, Homo sapien
ctggaggcactgctctgaacttctgcttgcttt

SEQ ID NO: 358437 - DNA, 33 bp, Homo sapien
ggatcctgaattacaactgaagctcattctttc

SEQ ID NO: 358438 - DNA, 33 bp, Homo sapien
ggatcctgaattacaattgaagctcattctttc

SEQ ID NO: 358439 - DNA, 33 bp, Homo sapien
gaaatcccctctatgcaatttagctctacagtt

SEQ ID NO: 358440 - DNA, 33 bp, Homo sapien
gaaatcccctctatgcgatttagctctacagtt

SEQ ID NO: 358441 - DNA, 33 bp, Homo sapien
atgttgctggaagtcacctcctcttagcggtgt

SEQ ID NO: 358442 - DNA, 33 bp, Homo sapien
atgttgctggaagtcagctcctcttagcggtgt

SEQ ID NO: 358443 - DNA, 33 bp, Homo sapien
caggcctgaagtatcaaggagagaaggcgaaag

SEQ ID NO: 358444 - DNA, 33 bp, Homo sapien
caggcctgaagtatcatggagagaaggcgaaag

SEQ ID NO: 358445 - DNA, 33 bp, Homo sapien
gacaaaaaaggtatcaggatggttagtggcgta

SEQ ID NO: 358446 - DNA, 33 bp, Homo sapien
gacaaaaaaggtatcatgatggttagtggcgta

SEQ ID NO: 358447 - DNA, 33 bp, Homo sapien
tattctactcatcttacagaagtcaaagctaag

SEQ ID NO: 358448 - DNA, 33 bp, Homo sapien
tattctactcatcttatagaagtcaaagctaag

SEQ ID NO: 358449 - DNA, 33 bp, Homo sapien
aaacaagagaagagtcaatcagcttccaatctt

SEQ ID NO: 358450 - DNA, 33 bp, Homo sapien
aaacaagagaagagtcgatcagcttccaatctt

SEQ ID NO: 358451 - DNA, 33 bp, Homo sapien
agacttatgatgaatacaggcaattgaaggtgc

SEQ ID NO: 358452 - DNA, 33 bp, Homo sapien
agacttatgatgaatagaggcaattgaaggtgc

SEQ ID NO: 358453 - DNA, 33 bp, Homo sapien
ccagtctgactttcagaagaaataaaatgaacc

SEQ ID NO: 358454 - DNA, 33 bp, Homo sapien
ccagtctgactttcaggagaaataaaatgaacc

SEQ ID NO: 358455 - DNA, 33 bp, Homo sapien
ccacccttcatcggtcactggcccatcgtttta

SEQ ID NO: 358456 - DNA, 33 bp, Homo sapien
ccacccttcatcggtctctggcccatcgtttta

SEQ ID NO: 358457 - DNA, 33 bp, Homo sapien
aaatgacttctaaagacattgcacttttatatc

SEQ ID NO: 358458 - DNA, 33 bp, Homo sapien
aaatgacttctaaagatattgcacttttatatc

SEQ ID NO: 358459 - DNA, 33 bp, Homo sapien
acctagagcttggcacacagtggatcttaaata

SEQ ID NO: 358460 - DNA, 33 bp, Homo sapien
acctagagcttggcacgcagtggatcttaaata

SEQ ID NO: 358461 - DNA, 33 bp, Homo sapien
taatttaccatgtgccaactaaataatggcttt

SEQ ID NO: 358462 - DNA, 33 bp, Homo sapien
taatttaccatgtgcccactaaataatggcttt

SEQ ID NO: 358463 - DNA, 33 bp, Homo sapien
cagtggagcaaagcaaaccttcgaacttgtttt

SEQ ID NO: 358464 - DNA, 33 bp, Homo sapien
cagtggagcaaagcaagccttcgaacttgtttt

SEQ ID NO: 358465 - DNA, 33 bp, Homo sapien
gaaagattaatagtaacgatgccaatagctatg

SEQ ID NO: 358466 - DNA, 33 bp, Homo sapien
gaaagattaatagtaatgatgccaatagctatg

SEQ ID NO: 358467 - DNA, 33 bp, Homo sapien
aggcaatactcaactcacttcctggtgggtatc

SEQ ID NO: 358468 - DNA, 33 bp, Homo sapien
aggcaatactcaactcgcttcctggtgggtatc

SEQ ID NO: 358469 - DNA, 33 bp, Homo sapien
atctctattggcaaatcagaaattcatttatca

SEQ ID NO: 358470 - DNA, 33 bp, Homo sapien
atctctattggcaaattagaaattcatttatca

SEQ ID NO: 358471 - DNA, 33 bp, Homo sapien
ttgatgacaatgttgcggagactgttagttaac

SEQ ID NO: 358472 - DNA, 33 bp, Homo sapien
ttgatgacaatgttgctgagactgttagttaac

SEQ ID NO: 358473 - DNA, 33 bp, Homo sapien
actccttccctgttacaagttctgcttcctgtg

SEQ ID NO: 358474 - DNA, 33 bp, Homo sapien
actccttccctgttacgagttctgcttcctgtg

SEQ ID NO: 358475 - DNA, 33 bp, Homo sapien
agatttgtcctagcccagaacattttcctaagc

SEQ ID NO: 358476 - DNA, 33 bp, Homo sapien
agatttgtcctagcccggaacattttcctaagc

SEQ ID NO: 358477 - DNA, 33 bp, Homo sapien
ctaggacaaatctcagaattttgcatgccctcc

SEQ ID NO: 358478 - DNA, 33 bp, Homo sapien
ctaggacaaatctcagtattttgcatgccctcc

SEQ ID NO: 358479 - DNA, 33 bp, Homo sapien
catcttacaggagtgacataagcaagcataatt

SEQ ID NO: 358480 - DNA, 33 bp, Homo sapien
catcttacaggagtgatataagcaagcataatt

SEQ ID NO: 358481 - DNA, 33 bp, Homo sapien
gtgtccctctgcttccaaataattcctgcaaac

SEQ ID NO: 358482 - DNA, 33 bp, Homo sapien
gtgtccctctgcttccgaataattcctgcaaac

SEQ ID NO: 358483 - DNA, 33 bp, Homo sapien
gctgaggctgctatgagacttgttggaaaactc

SEQ ID NO: 358484 - DNA, 33 bp, Homo sapien
gctgaggctgctatgatacttgttggaaaactc

SEQ ID NO: 358485 - DNA, 33 bp, Homo sapien
ttcacttataaatctaccaatgccttttacatt

SEQ ID NO: 358486 - DNA, 33 bp, Homo sapien
ttcacttataaatctatcaatgccttttacatt

SEQ ID NO: 358487 - DNA, 33 bp, Homo sapien
gcgtctttaggtgtaacggtcgtgaggcagcag

SEQ ID NO: 358488 - DNA, 33 bp, Homo sapien
gcgtctttaggtgtaatggtcgtgaggcagcag

SEQ ID NO: 358489 - DNA, 33 bp, Homo sapien
tcatgagcaaaggataccaattagtggtgtgac

SEQ ID NO: 358490 - DNA, 33 bp, Homo sapien
tcatgagcaaaggatatcaattagtggtgtgac

SEQ ID NO: 358491 - DNA, 33 bp, Homo sapien
gttgatgaagagactacggtgcaatgactatct

SEQ ID NO: 358492 - DNA, 33 bp, Homo sapien
gttgatgaagagactatggtgcaatgactatct

SEQ ID NO: 358493 - DNA, 33 bp, Homo sapien
accataccagatcaaactgaagctacttatgcc

SEQ ID NO: 358494 - DNA, 33 bp, Homo sapien
accataccagatcaaattgaagctacttatgcc

SEQ ID NO: 358495 - DNA, 33 bp, Homo sapien
tcttactgtatgaaccagactcgtactgcagtt

SEQ ID NO: 358496 - DNA, 33 bp, Homo sapien
tcttactgtatgaaccggactcgtactgcagtt

SEQ ID NO: 358497 - DNA, 33 bp, Homo sapien
cactctcttgttctgaaagcctttgacagattt

SEQ ID NO: 358498 - DNA, 33 bp, Homo sapien
cactctcttgttctgagagcctttgacagattt

SEQ ID NO: 358499 - DNA, 33 bp, Homo sapien
agctctaacgttctatgaatactttcgctgatg

SEQ ID NO: 358500 - DNA, 33 bp, Homo sapien
agctctaacgttctattaatactttcgctgatg

SEQ ID NO: 358501 - DNA, 33 bp, Homo sapien
tccatcattctttctacctcatctgtcacacta

SEQ ID NO: 358502 - DNA, 33 bp, Homo sapien
tccatcattctttctatctcatctgtcacacta

SEQ ID NO: 358503 - DNA, 33 bp, Homo sapien
acagaagactcacaagactctctgcttctatgc

SEQ ID NO: 358504 - DNA, 33 bp, Homo sapien
acagaagactcacaaggctctctgcttctatgc

SEQ ID NO: 358505 - DNA, 33 bp, Homo sapien
tgaatttagagacatgacaagaagaaaaatctt

SEQ ID NO: 358506 - DNA, 33 bp, Homo sapien
tgaatttagagacatggcaagaagaaaaatctt

SEQ ID NO: 358507 - DNA, 33 bp, Homo sapien
cagtggaagtttatgaaatgtagctgagaaata

SEQ ID NO: 358508 - DNA, 33 bp, Homo sapien
cagtggaagtttatgacatgtagctgagaaata

SEQ ID NO: 358509 - DNA, 33 bp, Homo sapien
ccagctggagagcaccagagtgtatttgcaagt

SEQ ID NO: 358510 - DNA, 33 bp, Homo sapien
ccagctggagagcaccggagtgtatttgcaagt

SEQ ID NO: 358511 - DNA, 33 bp, Homo sapien
tcataaataatgacaaaattctctagcacatca

SEQ ID NO: 358512 - DNA, 33 bp, Homo sapien
tcataaataatgacaacattctctagcacatca

SEQ ID NO: 358513 - DNA, 33 bp, Homo sapien
atatttaatttaaaaaacctgtctatcagctag

SEQ ID NO: 358514 - DNA, 33 bp, Homo sapien
atatttaatttaaaaagcctgtctatcagctag

SEQ ID NO: 358515 - DNA, 33 bp, Homo sapien
tttcaccagcaagatcggagcatttttctgctc

SEQ ID NO: 358516 - DNA, 33 bp, Homo sapien
tttcaccagcaagatctgagcatttttctgctc

SEQ ID NO: 358517 - DNA, 33 bp, Homo sapien
ctttagacctcttgccaatttagctccaagtta

SEQ ID NO: 358518 - DNA, 33 bp, Homo sapien
ctttagacctcttgcccatttagctccaagtta

SEQ ID NO: 358519 - DNA, 33 bp, Homo sapien
ctccagaaatacactaagagagagaagaaagat

SEQ ID NO: 358520 - DNA, 33 bp, Homo sapien
ctccagaaatacactatgagagagaagaaagat

SEQ ID NO: 358521 - DNA, 33 bp, Homo sapien
ttctcacaggtcttgaaatcttgactactatga

SEQ ID NO: 358522 - DNA, 33 bp, Homo sapien
ttctcacaggtcttgagatcttgactactatga

SEQ ID NO: 358523 - DNA, 33 bp, Homo sapien
agccttcaaggaagggaaaaccaaccaggccag

SEQ ID NO: 358524 - DNA, 33 bp, Homo sapien
agccttcaaggaaggggaaaccaaccaggccag

SEQ ID NO: 358525 - DNA, 33 bp, Homo sapien
ttttatttttccactaacattagagctctgata

SEQ ID NO: 358526 - DNA, 33 bp, Homo sapien
ttttatttttccactatcattagagctctgata

SEQ ID NO: 358527 - DNA, 33 bp, Homo sapien
atgtgatagtagagagcaactcagttgagacca

SEQ ID NO: 358528 - DNA, 33 bp, Homo sapien
atgtgatagtagagaggaactcagttgagacca

SEQ ID NO: 358529 - DNA, 33 bp, Homo sapien
ctggtatgctgctgggcaaaggtagctgatgaa

SEQ ID NO: 358530 - DNA, 33 bp, Homo sapien
ctggtatgctgctggggaaaggtagctgatgaa

SEQ ID NO: 358531 - DNA, 33 bp, Homo sapien
ccagcagcataccagaatatatttcaatactgt

SEQ ID NO: 358532 - DNA, 33 bp, Homo sapien
ccagcagcataccagactatatttcaatactgt

SEQ ID NO: 358533 - DNA, 33 bp, Homo sapien
aaattccagacaagacggagatctaatttctca

SEQ ID NO: 358534 - DNA, 33 bp, Homo sapien
aaattccagacaagactgagatctaatttctca

SEQ ID NO: 358535 - DNA, 33 bp, Homo sapien
aaccagaggaaaatggccaagtcctcttactct

SEQ ID NO: 358536 - DNA, 33 bp, Homo sapien
aaccagaggaaaatggtcaagtcctcttactct

SEQ ID NO: 358537 - DNA, 33 bp, Homo sapien
aaccagaattttcaagcctgaggaaggcatcta

SEQ ID NO: 358538 - DNA, 33 bp, Homo sapien
aaccagaattttcaagtctgaggaaggcatcta

SEQ ID NO: 358539 - DNA, 33 bp, Homo sapien
tgtggattttaaaatacaacggcattcacaatt

SEQ ID NO: 358540 - DNA, 33 bp, Homo sapien
tgtggattttaaaatataacggcattcacaatt

SEQ ID NO: 358541 - DNA, 33 bp, Homo sapien
ccaactgcagcattgcactcagaaaccagttcc

SEQ ID NO: 358542 - DNA, 33 bp, Homo sapien
ccaactgcagcattgcgctcagaaaccagttcc

SEQ ID NO: 358543 - DNA, 33 bp, Homo sapien
aagatttcattctgaaacagtcaaccgggaaag

SEQ ID NO: 358544 - DNA, 33 bp, Homo sapien
aagatttcattctgaagcagtcaaccgggaaag

SEQ ID NO: 358545 - DNA, 33 bp, Homo sapien
tttctgaaccaaaataaaggtatatgagtattt

SEQ ID NO: 358546 - DNA, 33 bp, Homo sapien
tttctgaaccaaaatataggtatatgagtattt

SEQ ID NO: 358547 - DNA, 33 bp, Homo sapien
tttgcaggctcagtcacgtgggtttctatagtg

SEQ ID NO: 358548 - DNA, 33 bp, Homo sapien
tttgcaggctcagtcatgtgggtttctatagtg

SEQ ID NO: 358549 - DNA, 33 bp, Homo sapien
ataatgatctactaaacaatccacatatactct

SEQ ID NO: 358550 - DNA, 33 bp, Homo sapien
ataatgatctactaaataatccacatatactct

SEQ ID NO: 358551 - DNA, 33 bp, Homo sapien
ggagctaataaaggacaggaaaaagagggataa

SEQ ID NO: 358552 - DNA, 33 bp, Homo sapien
ggagctaataaaggaccggaaaaagagggataa

SEQ ID NO: 358553 - DNA, 33 bp, Homo sapien
gtagtctgcttaccacaaaagccttactgcaga

SEQ ID NO: 358554 - DNA, 33 bp, Homo sapien
gtagtctgcttaccacgaaagccttactgcaga

SEQ ID NO: 358555 - DNA, 33 bp, Homo sapien
ctgaataacacatccaatattaagctgtacaaa

SEQ ID NO: 358556 - DNA, 33 bp, Homo sapien
ctgaataacacatccactattaagctgtacaaa

SEQ ID NO: 358557 - DNA, 33 bp, Homo sapien
gctccctcatttaccaagaaggtgatcatggtg

SEQ ID NO: 358558 - DNA, 33 bp, Homo sapien
gctccctcatttaccaggaaggtgatcatggtg

SEQ ID NO: 358559 - DNA, 33 bp, Homo sapien
gtgtatttttaaaaatcatgttgctggccgagc

SEQ ID NO: 358560 - DNA, 33 bp, Homo sapien
gtgtatttttaaaaattatgttgctggccgagc

SEQ ID NO: 358561 - DNA, 33 bp, Homo sapien
tgctggggaaaattctcaagtcagtgaattagc

SEQ ID NO: 358562 - DNA, 33 bp, Homo sapien
tgctggggaaaattcttaagtcagtgaattagc

SEQ ID NO: 358563 - DNA, 33 bp, Homo sapien
gtgcacctgattaaaccagctctgctctgggga

SEQ ID NO: 358564 - DNA, 33 bp, Homo sapien
gtgcacctgattaaactagctctgctctgggga

SEQ ID NO: 358565 - DNA, 33 bp, Homo sapien
cctttctgtctttggacgttatgaagaagatgg

SEQ ID NO: 358566 - DNA, 33 bp, Homo sapien
cctttctgtctttggatgttatgaagaagatgg

SEQ ID NO: 358567 - DNA, 33 bp, Homo sapien
ggtgaatgagacagtcaatgtattgttttcata

SEQ ID NO: 358568 - DNA, 33 bp, Homo sapien
ggtgaatgagacagtcgatgtattgttttcata

SEQ ID NO: 358569 - DNA, 33 bp, Homo sapien
acttaacacaggaatacaagtttagcaagattg

SEQ ID NO: 358570 - DNA, 33 bp, Homo sapien
acttaacacaggaatataagtttagcaagattg

SEQ ID NO: 358571 - DNA, 33 bp, Homo sapien
aaattctagcagacaccatttaggttaaatgta

SEQ ID NO: 358572 - DNA, 33 bp, Homo sapien
aaattctagcagacactatttaggttaaatgta

SEQ ID NO: 358573 - DNA, 33 bp, Homo sapien
aaaatcagctttggtcactactgcagcaaggac

SEQ ID NO: 358574 - DNA, 33 bp, Homo sapien
aaaatcagctttggtctctactgcagcaaggac

SEQ ID NO: 358575 - DNA, 33 bp, Homo sapien
tttttagttatttgaaagtttagagaatatata

SEQ ID NO: 358576 - DNA, 33 bp, Homo sapien
tttttagttatttgaaggtttagagaatatata

SEQ ID NO: 358577 - DNA, 33 bp, Homo sapien
agagcaattgtagtgaataaaccataaaaggct

SEQ ID NO: 358578 - DNA, 33 bp, Homo sapien
agagcaattgtagtgagtaaaccataaaaggct

SEQ ID NO: 358579 - DNA, 33 bp, Homo sapien
tcaaatggattaaataaggcatggattagataa

SEQ ID NO: 358580 - DNA, 33 bp, Homo sapien
tcaaatggattaaatagggcatggattagataa

SEQ ID NO: 358581 - DNA, 33 bp, Homo sapien
gtagtacaggatgatacattgagaagaaaaaga

SEQ ID NO: 358582 - DNA, 33 bp, Homo sapien
gtagtacaggatgatatattgagaagaaaaaga

SEQ ID NO: 358583 - DNA, 33 bp, Homo sapien
atgatcagacaagaaaattatatacaggaatct

SEQ ID NO: 358584 - DNA, 33 bp, Homo sapien
atgatcagacaagaaagttatatacaggaatct

SEQ ID NO: 358585 - DNA, 33 bp, Homo sapien
cttgggcagccaggaaaactttgacattttgac

SEQ ID NO: 358586 - DNA, 33 bp, Homo sapien
cttgggcagccaggaagactttgacattttgac

SEQ ID NO: 358587 - DNA, 33 bp, Homo sapien
atgggcctgcaaaaataaccttttgattggtta

SEQ ID NO: 358588 - DNA, 33 bp, Homo sapien
atgggcctgcaaaaatcaccttttgattggtta

SEQ ID NO: 358589 - DNA, 33 bp, Homo sapien
aggaagaccttccttccctatatcagtctgttg

SEQ ID NO: 358590 - DNA, 33 bp, Homo sapien
aggaagaccttccttctctatatcagtctgttg

SEQ ID NO: 358591 - DNA, 33 bp, Homo sapien
agaattaacaatctcaatcctaatcacatagtt

SEQ ID NO: 358592 - DNA, 33 bp, Homo sapien
agaattaacaatctcagtcctaatcacatagtt

SEQ ID NO: 358593 - DNA, 33 bp, Homo sapien
tctttacgctccttaacaaccctgtgagttccg

SEQ ID NO: 358594 - DNA, 33 bp, Homo sapien
tctttacgctccttaataaccctgtgagttccg

SEQ ID NO: 358595 - DNA, 33 bp, Homo sapien
tttcagctgactggataaaataaggaaatacaa

SEQ ID NO: 358596 - DNA, 33 bp, Homo sapien
tttcagctgactggatgaaataaggaaatacaa

SEQ ID NO: 358597 - DNA, 33 bp, Homo sapien
tcattgtaaatttttcacttggctatgttgaac

SEQ ID NO: 358598 - DNA, 33 bp, Homo sapien
tcattgtaaatttttcgcttggctatgttgaac

SEQ ID NO: 358599 - DNA, 33 bp, Homo sapien
gaggctcagtgcatcaactgcctgcagaaaata

SEQ ID NO: 358600 - DNA, 33 bp, Homo sapien
gaggctcagtgcatcatctgcctgcagaaaata

SEQ ID NO: 358601 - DNA, 33 bp, Homo sapien
ctgtttcagctccagacgattaatttatttttt

SEQ ID NO: 358602 - DNA, 33 bp, Homo sapien
ctgtttcagctccagaggattaatttatttttt

SEQ ID NO: 358603 - DNA, 33 bp, Homo sapien
aagtggatattgattcaagaaacctgaggagct

SEQ ID NO: 358604 - DNA, 33 bp, Homo sapien
aagtggatattgattcgagaaacctgaggagct

SEQ ID NO: 358605 - DNA, 33 bp, Homo sapien
tgaagtcataaacaccacctaagatatatgcaa

SEQ ID NO: 358606 - DNA, 33 bp, Homo sapien
tgaagtcataaacaccgcctaagatatatgcaa

SEQ ID NO: 358607 - DNA, 33 bp, Homo sapien
ctgaaaactaagtgtgaaaaatctgggtctcca

SEQ ID NO: 358608 - DNA, 33 bp, Homo sapien
ctgaaaactaagtgtggaaaatctgggtctcca

SEQ ID NO: 358609 - DNA, 33 bp, Homo sapien
tttaagctcccctcaactgtaataaatcatggg

SEQ ID NO: 358610 - DNA, 33 bp, Homo sapien
tttaagctcccctcaagtgtaataaatcatggg

SEQ ID NO: 358611 - DNA, 33 bp, Homo sapien
tttttaaaaaatagcacgttgagtcacaggata

SEQ ID NO: 358612 - DNA, 33 bp, Homo sapien
tttttaaaaaatagcatgttgagtcacaggata

SEQ ID NO: 358613 - DNA, 33 bp, Homo sapien
gactgaccctaggttgcatatagttgtcacatg

SEQ ID NO: 358614 - DNA, 33 bp, Homo sapien
gactgaccctaggttgtatatagttgtcacatg

SEQ ID NO: 358615 - DNA, 33 bp, Homo sapien
tcgatataaaaacagcaacaacgacctcaggga

SEQ ID NO: 358616 - DNA, 33 bp, Homo sapien
tcgatataaaaacagcgacaacgacctcaggga

SEQ ID NO: 358617 - DNA, 33 bp, Homo sapien
tgataagagtagtttacatccctgaggtcgttg

SEQ ID NO: 358618 - DNA, 33 bp, Homo sapien
tgataagagtagtttatatccctgaggtcgttg

SEQ ID NO: 358619 - DNA, 33 bp, Homo sapien
agtgggtcagagaatccatatacaggtcctgga

SEQ ID NO: 358620 - DNA, 33 bp, Homo sapien
agtgggtcagagaatctatatacaggtcctgga

SEQ ID NO: 358621 - DNA, 33 bp, Homo sapien
ctcaattaaagtagaggaaacaagagaaattgg

SEQ ID NO: 358622 - DNA, 33 bp, Homo sapien
ctcaattaaagtagagtaaacaagagaaattgg

SEQ ID NO: 358623 - DNA, 33 bp, Homo sapien
taattggatagtcactaaaagcatcatttttat

SEQ ID NO: 358624 - DNA, 33 bp, Homo sapien
taattggatagtcactgaaagcatcatttttat

SEQ ID NO: 358625 - DNA, 33 bp, Homo sapien
cctgaagcttagataaggctgattgtagtaaga

SEQ ID NO: 358626 - DNA, 33 bp, Homo sapien
cctgaagcttagataatgctgattgtagtaaga

SEQ ID NO: 358627 - DNA, 33 bp, Homo sapien
catgggaatgtaaaaaattgcaaccacttttca

SEQ ID NO: 358628 - DNA, 33 bp, Homo sapien
catgggaatgtaaaaatttgcaaccacttttca

SEQ ID NO: 358629 - DNA, 33 bp, Homo sapien
agatgtcctttccttaggtataatctttgactg

SEQ ID NO: 358630 - DNA, 33 bp, Homo sapien
agatgtcctttccttatgtataatctttgactg

SEQ ID NO: 358631 - DNA, 33 bp, Homo sapien
ttactaggagttcacacggctacactgactcag

SEQ ID NO: 358632 - DNA, 33 bp, Homo sapien
ttactaggagttcacatggctacactgactcag

SEQ ID NO: 358633 - DNA, 33 bp, Homo sapien
tctctgaaaagaaggaactctgattctctctgt

SEQ ID NO: 358634 - DNA, 33 bp, Homo sapien
tctctgaaaagaaggacctctgattctctctgt

SEQ ID NO: 358635 - DNA, 33 bp, Homo sapien
tggaggaaatttctgccgatcacaagtttaagg

SEQ ID NO: 358636 - DNA, 33 bp, Homo sapien
tggaggaaatttctgctgatcacaagtttaagg

SEQ ID NO: 358637 - DNA, 33 bp, Homo sapien
gctgttttcaatgctcaaaatagctttctgtct

SEQ ID NO: 358638 - DNA, 33 bp, Homo sapien
gctgttttcaatgctcgaaatagctttctgtct

SEQ ID NO: 358639 - DNA, 33 bp, Homo sapien
ttttcttgccttcacaaaaatgcttatggtgat

SEQ ID NO: 358640 - DNA, 33 bp, Homo sapien
ttttcttgccttcacagaaatgcttatggtgat

SEQ ID NO: 358641 - DNA, 33 bp, Homo sapien
tgatattaaaccatgagaatacgttgggccgat

SEQ ID NO: 358642 - DNA, 33 bp, Homo sapien
tgatattaaaccatgataatacgttgggccgat

SEQ ID NO: 358643 - DNA, 33 bp, Homo sapien
tcatcttgttataacccagcaattcattatctt

SEQ ID NO: 358644 - DNA, 33 bp, Homo sapien
tcatcttgttataacctagcaattcattatctt

SEQ ID NO: 358645 - DNA, 33 bp, Homo sapien
tcaagcattcaagcacaaggctgcattatagga

SEQ ID NO: 358646 - DNA, 33 bp, Homo sapien
tcaagcattcaagcacgaggctgcattatagga

SEQ ID NO: 358647 - DNA, 33 bp, Homo sapien
aaagcactgaaagtaacggaactactggtaaaa

SEQ ID NO: 358648 - DNA, 33 bp, Homo sapien
aaagcactgaaagtaatggaactactggtaaaa

SEQ ID NO: 358649 - DNA, 33 bp, Homo sapien
gcagtatagtcattgacatagttcggatgtttg

SEQ ID NO: 358650 - DNA, 33 bp, Homo sapien
gcagtatagtcattgatatagttcggatgtttg

SEQ ID NO: 358651 - DNA, 33 bp, Homo sapien
tgctttgtatcttcaactgcccaaaatagatat

SEQ ID NO: 358652 - DNA, 33 bp, Homo sapien
tgctttgtatcttcaattgcccaaaatagatat

SEQ ID NO: 358653 - DNA, 33 bp, Homo sapien
atgaacatgatgggcaataagttcaaattctta

SEQ ID NO: 358654 - DNA, 33 bp, Homo sapien
atgaacatgatgggcagtaagttcaaattctta

SEQ ID NO: 358655 - DNA, 33 bp, Homo sapien
tggccactgccagaaaaagcataaaacaattgt

SEQ ID NO: 358656 - DNA, 33 bp, Homo sapien
tggccactgccagaaagagcataaaacaattgt

SEQ ID NO: 358657 - DNA, 33 bp, Homo sapien
ggtattttttattggccatttattgctgagatg

SEQ ID NO: 358658 - DNA, 33 bp, Homo sapien
ggtattttttattggctatttattgctgagatg

SEQ ID NO: 358659 - DNA, 33 bp, Homo sapien
caccagtaacatttaccaaacacgaatcctacc

SEQ ID NO: 358660 - DNA, 33 bp, Homo sapien
caccagtaacatttactaaacacgaatcctacc

SEQ ID NO: 358661 - DNA, 33 bp, Homo sapien
atatgaataaaaaccaaaatcaatcaaattatg

SEQ ID NO: 358662 - DNA, 33 bp, Homo sapien
atatgaataaaaaccagaatcaatcaaattatg

SEQ ID NO: 358663 - DNA, 33 bp, Homo sapien
agagcaatctcaaggacggtaatagagtgtgtt

SEQ ID NO: 358664 - DNA, 33 bp, Homo sapien
agagcaatctcaaggatggtaatagagtgtgtt

SEQ ID NO: 358665 - DNA, 33 bp, Homo sapien
catccaaggacaaacgcagctgtaattttacag

SEQ ID NO: 358666 - DNA, 33 bp, Homo sapien
catccaaggacaaacgtagctgtaattttacag

SEQ ID NO: 358667 - DNA, 33 bp, Homo sapien
aagaatgcagagtaggcaatttgtgttctgtcc

SEQ ID NO: 358668 - DNA, 33 bp, Homo sapien
aagaatgcagagtaggtaatttgtgttctgtcc

SEQ ID NO: 358669 - DNA, 33 bp, Homo sapien
agaaatgcagagcaggaattcagtagtctggca

SEQ ID NO: 358670 - DNA, 33 bp, Homo sapien
agaaatgcagagcaggtattcagtagtctggca

SEQ ID NO: 358671 - DNA, 33 bp, Homo sapien
gctctagtgccttttacgacttttcagatggta

SEQ ID NO: 358672 - DNA, 33 bp, Homo sapien
gctctagtgccttttatgacttttcagatggta

SEQ ID NO: 358673 - DNA, 33 bp, Homo sapien
gttgctgggtcctagcagatcagtaggatgcag

SEQ ID NO: 358674 - DNA, 33 bp, Homo sapien
gttgctgggtcctagcggatcagtaggatgcag

SEQ ID NO: 358675 - DNA, 33 bp, Homo sapien
atccaattgtaaataccgctataacaaacattc

SEQ ID NO: 358676 - DNA, 33 bp, Homo sapien
atccaattgtaaatactgctataacaaacattc

SEQ ID NO: 358677 - DNA, 33 bp, Homo sapien
aacgcaaaatttgatacgtgaaaattggttttt

SEQ ID NO: 358678 - DNA, 33 bp, Homo sapien
aacgcaaaatttgatatgtgaaaattggttttt

SEQ ID NO: 358679 - DNA, 33 bp, Homo sapien
gccgtacgctagaaaaatgaacacacagacagg

SEQ ID NO: 358680 - DNA, 33 bp, Homo sapien
gccgtacgctagaaaactgaacacacagacagg

SEQ ID NO: 358681 - DNA, 33 bp, Homo sapien
tgccaatggatgacagaagcataacatggatgt

SEQ ID NO: 358682 - DNA, 33 bp, Homo sapien
tgccaatggatgacagtagcataacatggatgt

SEQ ID NO: 358683 - DNA, 33 bp, Homo sapien
aaaataaagcactagaacctaatcattgagaag

SEQ ID NO: 358684 - DNA, 33 bp, Homo sapien
aaaataaagcactagaccctaatcattgagaag

SEQ ID NO: 358685 - DNA, 33 bp, Homo sapien
taattcttagaagacacagcattggtttaagtc

SEQ ID NO: 358686 - DNA, 33 bp, Homo sapien
taattcttagaagacatagcattggtttaagtc

SEQ ID NO: 358687 - DNA, 33 bp, Homo sapien
cagatgttaaatcatacctcatgtggttgtgtg

SEQ ID NO: 358688 - DNA, 33 bp, Homo sapien
cagatgttaaatcatatctcatgtggttgtgtg

SEQ ID NO: 358689 - DNA, 33 bp, Homo sapien
ctggtggcaaggtaaaataatgaagccacattg

SEQ ID NO: 358690 - DNA, 33 bp, Homo sapien
ctggtggcaaggtaaagtaatgaagccacattg

SEQ ID NO: 358691 - DNA, 33 bp, Homo sapien
aggcaagtcaacagtaaactattttataggcaa

SEQ ID NO: 358692 - DNA, 33 bp, Homo sapien
aggcaagtcaacagtatactattttataggcaa

SEQ ID NO: 358693 - DNA, 33 bp, Homo sapien
atgtcactcttttagaaacattttgaccactat

SEQ ID NO: 358694 - DNA, 33 bp, Homo sapien
atgtcactcttttagagacattttgaccactat

SEQ ID NO: 358695 - DNA, 33 bp, Homo sapien
gctacctgggcctttccagagttccaccacaat

SEQ ID NO: 358696 - DNA, 33 bp, Homo sapien
gctacctgggcctttcgagagttccaccacaat

SEQ ID NO: 358697 - DNA, 33 bp, Homo sapien
tgatcttactctcagccaagtccttgtagctca

SEQ ID NO: 358698 - DNA, 33 bp, Homo sapien
tgatcttactctcagctaagtccttgtagctca

SEQ ID NO: 358699 - DNA, 33 bp, Homo sapien
gtgatggctccaacagacattcaagtgactttt

SEQ ID NO: 358700 - DNA, 33 bp, Homo sapien
gtgatggctccaacaggcattcaagtgactttt

SEQ ID NO: 358701 - DNA, 33 bp, Homo sapien
gattaaatgtacaagccgaaatcatactaattt

SEQ ID NO: 358702 - DNA, 33 bp, Homo sapien
gattaaatgtacaagctgaaatcatactaattt

SEQ ID NO: 358703 - DNA, 33 bp, Homo sapien
tggccaatacatgaaactcactgattctagcta

SEQ ID NO: 358704 - DNA, 33 bp, Homo sapien
tggccaatacatgaaagtcactgattctagcta

SEQ ID NO: 358705 - DNA, 33 bp, Homo sapien
aggatacagatacaagaaagttcatagaggcat

SEQ ID NO: 358706 - DNA, 33 bp, Homo sapien
aggatacagatacaaggaagttcatagaggcat

SEQ ID NO: 358707 - DNA, 33 bp, Homo sapien
aggtacaaatacagagaccagacagtaggctaa

SEQ ID NO: 358708 - DNA, 33 bp, Homo sapien
aggtacaaatacagagtccagacagtaggctaa

SEQ ID NO: 358709 - DNA, 33 bp, Homo sapien
agataatgagttgttaccttactttagccaata

SEQ ID NO: 358710 - DNA, 33 bp, Homo sapien
agataatgagttgttatcttactttagccaata

SEQ ID NO: 358711 - DNA, 33 bp, Homo sapien
atatgatcactacatgcaggacaaagagaccag

SEQ ID NO: 358712 - DNA, 33 bp, Homo sapien
atatgatcactacatggaggacaaagagaccag

SEQ ID NO: 358713 - DNA, 33 bp, Homo sapien
agagggaagagtacaaattaaaatgtcagagat

SEQ ID NO: 358714 - DNA, 33 bp, Homo sapien
agagggaagagtacaagttaaaatgtcagagat

SEQ ID NO: 358715 - DNA, 33 bp, Homo sapien
aaaactagagaacatgaatacttctttgataca

SEQ ID NO: 358716 - DNA, 33 bp, Homo sapien
aaaactagagaacatggatacttctttgataca

SEQ ID NO: 358717 - DNA, 33 bp, Homo sapien
caaaagatgactgaaaacattagagtagatgga

SEQ ID NO: 358718 - DNA, 33 bp, Homo sapien
caaaagatgactgaaagcattagagtagatgga

SEQ ID NO: 358719 - DNA, 33 bp, Homo sapien
catctgatgtctactaccatgactaatctaaaa

SEQ ID NO: 358720 - DNA, 33 bp, Homo sapien
catctgatgtctactatcatgactaatctaaaa

SEQ ID NO: 358721 - DNA, 33 bp, Homo sapien
acccagtgagattctgcataaactagaagaata

SEQ ID NO: 358722 - DNA, 33 bp, Homo sapien
acccagtgagattctgtataaactagaagaata

SEQ ID NO: 358723 - DNA, 33 bp, Homo sapien
ctagaatagaagagaacagtttggaatatgtaa

SEQ ID NO: 358724 - DNA, 33 bp, Homo sapien
ctagaatagaagagaagagtttggaatatgtaa

SEQ ID NO: 358725 - DNA, 33 bp, Homo sapien
atccttgatatatggacctttcagtcaagtcac

SEQ ID NO: 358726 - DNA, 33 bp, Homo sapien
atccttgatatatggatctttcagtcaagtcac

SEQ ID NO: 358727 - DNA, 33 bp, Homo sapien
attgtcaagatgtcaacgttggcttgggatgac

SEQ ID NO: 358728 - DNA, 33 bp, Homo sapien
attgtcaagatgtcaatgttggcttgggatgac

SEQ ID NO: 358729 - DNA, 33 bp, Homo sapien
acagtaatgatatcacggggtatactggaccat

SEQ ID NO: 358730 - DNA, 33 bp, Homo sapien
acagtaatgatatcactgggtatactggaccat

SEQ ID NO: 358731 - DNA, 33 bp, Homo sapien
tctcaaggatctaaacagaattcactttgaaac

SEQ ID NO: 358732 - DNA, 33 bp, Homo sapien
tctcaaggatctaaactgaattcactttgaaac

SEQ ID NO: 358733 - DNA, 33 bp, Homo sapien
tattccaaatttctatcaagattattgtcacct

SEQ ID NO: 358734 - DNA, 33 bp, Homo sapien
tattccaaatttctatgaagattattgtcacct

SEQ ID NO: 358735 - DNA, 33 bp, Homo sapien
cctgagacacaaacgccaagagatttgctatga

SEQ ID NO: 358736 - DNA, 33 bp, Homo sapien
cctgagacacaaacgcgaagagatttgctatga

SEQ ID NO: 358737 - DNA, 33 bp, Homo sapien
gactaactgcgtttccaagctatggagaaagtg

SEQ ID NO: 358738 - DNA, 33 bp, Homo sapien
gactaactgcgtttccgagctatggagaaagtg

SEQ ID NO: 358739 - DNA, 33 bp, Homo sapien
agtcttatggttagtacgttgctaagatgctct

SEQ ID NO: 358740 - DNA, 33 bp, Homo sapien
agtcttatggttagtatgttgctaagatgctct

SEQ ID NO: 358741 - DNA, 33 bp, Homo sapien
ggctccaccactaacactggagagcagatgtga

SEQ ID NO: 358742 - DNA, 33 bp, Homo sapien
ggctccaccactaacattggagagcagatgtga

SEQ ID NO: 358743 - DNA, 33 bp, Homo sapien
tatgttcctcaaactacgatctgtgtgaattgc

SEQ ID NO: 358744 - DNA, 33 bp, Homo sapien
tatgttcctcaaactatgatctgtgtgaattgc

SEQ ID NO: 358745 - DNA, 33 bp, Homo sapien
ctgaaacaaaagaatgaatggctagttttacct

SEQ ID NO: 358746 - DNA, 33 bp, Homo sapien
ctgaaacaaaagaatgcatggctagttttacct

SEQ ID NO: 358747 - DNA, 33 bp, Homo sapien
tttcttcgaagaatgcaacaggtctacctatct

SEQ ID NO: 358748 - DNA, 33 bp, Homo sapien
tttcttcgaagaatgcgacaggtctacctatct

SEQ ID NO: 358749 - DNA, 33 bp, Homo sapien
gacactttaatagccaatatatgtaaatgggta

SEQ ID NO: 358750 - DNA, 33 bp, Homo sapien
gacactttaatagccagtatatgtaaatgggta

SEQ ID NO: 358751 - DNA, 33 bp, Homo sapien
ttactttttcttcaaaccaaatcaccacctgac

SEQ ID NO: 358752 - DNA, 33 bp, Homo sapien
ttactttttcttcaaatcaaatcaccacctgac

SEQ ID NO: 358753 - DNA, 33 bp, Homo sapien
atgacaacaccttcacaccttgatacaccagga

SEQ ID NO: 358754 - DNA, 33 bp, Homo sapien
atgacaacaccttcacgccttgatacaccagga

SEQ ID NO: 358755 - DNA, 33 bp, Homo sapien
agaaaacaaattcgtgaacaatgtggaacagtc

SEQ ID NO: 358756 - DNA, 33 bp, Homo sapien
agaaaacaaattcgtgcacaatgtggaacagtc

SEQ ID NO: 358757 - DNA, 33 bp, Homo sapien
aaattatctggactaccgagtaaaacaatgaag

SEQ ID NO: 358758 - DNA, 33 bp, Homo sapien
aaattatctggactactgagtaaaacaatgaag

SEQ ID NO: 358759 - DNA, 33 bp, Homo sapien
aggaagtttatcatcacagcagaattttctgat

SEQ ID NO: 358760 - DNA, 33 bp, Homo sapien
aggaagtttatcatcagagcagaattttctgat

SEQ ID NO: 358761 - DNA, 33 bp, Homo sapien
gctgacataggaaatacgtacccagtatcagaa

SEQ ID NO: 358762 - DNA, 33 bp, Homo sapien
gctgacataggaaataggtacccagtatcagaa

SEQ ID NO: 358763 - DNA, 33 bp, Homo sapien
ccaccagatgccagtactaactttctccttccc

SEQ ID NO: 358764 - DNA, 33 bp, Homo sapien
ccaccagatgccagtagtaactttctccttccc

SEQ ID NO: 358765 - DNA, 33 bp, Homo sapien
caatgaaagtcaataaaaaatgaaaatcaatca

SEQ ID NO: 358766 - DNA, 33 bp, Homo sapien
caatgaaagtcaataagaaatgaaaatcaatca

SEQ ID NO: 358767 - DNA, 33 bp, Homo sapien
cctcgtcatttgatcacatctctcatatccatt

SEQ ID NO: 358768 - DNA, 33 bp, Homo sapien
cctcgtcatttgatcagatctctcatatccatt

SEQ ID NO: 358769 - DNA, 33 bp, Homo sapien
gtggccactatcttctcaataactcagcagtga

SEQ ID NO: 358770 - DNA, 33 bp, Homo sapien
gtggccactatcttcttaataactcagcagtga

SEQ ID NO: 358771 - DNA, 33 bp, Homo sapien
gagagccgaacttaaccacagaatatagttgac

SEQ ID NO: 358772 - DNA, 33 bp, Homo sapien
gagagccgaacttaactacagaatatagttgac

SEQ ID NO: 358773 - DNA, 33 bp, Homo sapien
aaaatcttgggccttacggtatccttagatggc

SEQ ID NO: 358774 - DNA, 33 bp, Homo sapien
aaaatcttgggccttatggtatccttagatggc

SEQ ID NO: 358775 - DNA, 33 bp, Homo sapien
gcaaatatagtgcataaccaagactggctcacc

SEQ ID NO: 358776 - DNA, 33 bp, Homo sapien
gcaaatatagtgcatatccaagactggctcacc

SEQ ID NO: 358777 - DNA, 33 bp, Homo sapien
cagtatgataagaaatcacgccatagactgacc

SEQ ID NO: 358778 - DNA, 33 bp, Homo sapien
cagtatgataagaaattacgccatagactgacc

SEQ ID NO: 358779 - DNA, 33 bp, Homo sapien
gagtttacaagctgagaagagaaggaataacaa

SEQ ID NO: 358780 - DNA, 33 bp, Homo sapien
gagtttacaagctgagcagagaaggaataacaa

SEQ ID NO: 358781 - DNA, 33 bp, Homo sapien
aggcaatagttcataactggctgagcattattt

SEQ ID NO: 358782 - DNA, 33 bp, Homo sapien
aggcaatagttcataattggctgagcattattt

SEQ ID NO: 358783 - DNA, 33 bp, Homo sapien
agggaacaacagcaaccgtaacttggaggacaa

SEQ ID NO: 358784 - DNA, 33 bp, Homo sapien
agggaacaacagcaactgtaacttggaggacaa

SEQ ID NO: 358785 - DNA, 33 bp, Homo sapien
acttggaattgggctacggtaattgacatgaaa

SEQ ID NO: 358786 - DNA, 33 bp, Homo sapien
acttggaattgggctagggtaattgacatgaaa

SEQ ID NO: 358787 - DNA, 33 bp, Homo sapien
ccaaagcacgcgtgtgcattaagggacagcgtg

SEQ ID NO: 358788 - DNA, 33 bp, Homo sapien
ccaaagcacgcgtgtgtattaagggacagcgtg

SEQ ID NO: 358789 - DNA, 33 bp, Homo sapien
aagggcaggctaaaggaaagagttgcaataaag

SEQ ID NO: 358790 - DNA, 33 bp, Homo sapien
aagggcaggctaaagggaagagttgcaataaag

SEQ ID NO: 358791 - DNA, 33 bp, Homo sapien
tactcctagacagcacactttaatacccttgcc

SEQ ID NO: 358792 - DNA, 33 bp, Homo sapien
tactcctagacagcacgctttaatacccttgcc

SEQ ID NO: 358793 - DNA, 33 bp, Homo sapien
catgcacaaggctctacgaaatgacaaatttgt

SEQ ID NO: 358794 - DNA, 33 bp, Homo sapien
catgcacaaggctctatgaaatgacaaatttgt

SEQ ID NO: 358795 - DNA, 33 bp, Homo sapien
ggcccagttagaaatgaagctggcattgagaat

SEQ ID NO: 358796 - DNA, 33 bp, Homo sapien
ggcccagttagaaatggagctggcattgagaat

SEQ ID NO: 358797 - DNA, 33 bp, Homo sapien
taaatcagtatgagaaaaattgcagatcacact

SEQ ID NO: 358798 - DNA, 33 bp, Homo sapien
taaatcagtatgagaacaattgcagatcacact

SEQ ID NO: 358799 - DNA, 33 bp, Homo sapien
tggatctcagcccaaacgttgcagacctcataa

SEQ ID NO: 358800 - DNA, 33 bp, Homo sapien
tggatctcagcccaaatgttgcagacctcataa

SEQ ID NO: 358801 - DNA, 33 bp, Homo sapien
acaggtttcttgccacggaatggtgctgaagct

SEQ ID NO: 358802 - DNA, 33 bp, Homo sapien
acaggtttcttgccactgaatggtgctgaagct

SEQ ID NO: 358803 - DNA, 33 bp, Homo sapien
tttttaaagtgtgccccgagcatttgcaattgt

SEQ ID NO: 358804 - DNA, 33 bp, Homo sapien
tttttaaagtgtgccctgagcatttgcaattgt

SEQ ID NO: 358805 - DNA, 33 bp, Homo sapien
cacagcatcaagcttaaacaaagttacaactgc

SEQ ID NO: 358806 - DNA, 33 bp, Homo sapien
cacagcatcaagcttacacaaagttacaactgc

SEQ ID NO: 358807 - DNA, 33 bp, Homo sapien
tctccttaactcatcacggcgcaccacatcttt

SEQ ID NO: 358808 - DNA, 33 bp, Homo sapien
tctccttaactcatcatggcgcaccacatcttt

SEQ ID NO: 358809 - DNA, 33 bp, Homo sapien
accatttatcgggaacaagctcacactagacac

SEQ ID NO: 358810 - DNA, 33 bp, Homo sapien
accatttatcgggaacgagctcacactagacac

SEQ ID NO: 358811 - DNA, 33 bp, Homo sapien
agtcttcagcactgaactcaggacaaacaaagc

SEQ ID NO: 358812 - DNA, 33 bp, Homo sapien
agtcttcagcactgaagtcaggacaaacaaagc

SEQ ID NO: 358813 - DNA, 33 bp, Homo sapien
gtgactgtactatgaccagcagacatcaaaaca

SEQ ID NO: 358814 - DNA, 33 bp, Homo sapien
gtgactgtactatgactagcagacatcaaaaca

SEQ ID NO: 358815 - DNA, 33 bp, Homo sapien
aaattcaatgggttgagaactgacagaggactg

SEQ ID NO: 358816 - DNA, 33 bp, Homo sapien
aaattcaatgggttgataactgacagaggactg

SEQ ID NO: 358817 - DNA, 33 bp, Homo sapien
ttcttgcactaggttaactacacaattagctaa

SEQ ID NO: 358818 - DNA, 33 bp, Homo sapien
ttcttgcactaggttagctacacaattagctaa

SEQ ID NO: 358819 - DNA, 33 bp, Homo sapien
attttgctgtgttaaaactgtgtatcctgaact

SEQ ID NO: 358820 - DNA, 33 bp, Homo sapien
attttgctgtgttaaagctgtgtatcctgaact

SEQ ID NO: 358821 - DNA, 33 bp, Homo sapien
tagttccatctgcacccctagaatacagcacag

SEQ ID NO: 358822 - DNA, 33 bp, Homo sapien
tagttccatctgcacctctagaatacagcacag

SEQ ID NO: 358823 - DNA, 33 bp, Homo sapien
aaaattaaaacaacccagcattgtgacccacat

SEQ ID NO: 358824 - DNA, 33 bp, Homo sapien
aaaattaaaacaacccggcattgtgacccacat

SEQ ID NO: 358825 - DNA, 33 bp, Homo sapien
cttttcgcaactgaccactggctttgaatgtgt

SEQ ID NO: 358826 - DNA, 33 bp, Homo sapien
cttttcgcaactgaccgctggctttgaatgtgt

SEQ ID NO: 358827 - DNA, 33 bp, Homo sapien
gataaataatttttacacagcatttctatataa

SEQ ID NO: 358828 - DNA, 33 bp, Homo sapien
gataaataatttttactcagcatttctatataa

SEQ ID NO: 358829 - DNA, 33 bp, Homo sapien
tgaatgaagacaactaactaaaataggcaaaga

SEQ ID NO: 358830 - DNA, 33 bp, Homo sapien
tgaatgaagacaactacctaaaataggcaaaga

SEQ ID NO: 358831 - DNA, 33 bp, Homo sapien
gataattcagataggacgttgatggtaacaggc

SEQ ID NO: 358832 - DNA, 33 bp, Homo sapien
gataattcagataggatgttgatggtaacaggc

SEQ ID NO: 358833 - DNA, 33 bp, Homo sapien
gttggaaactagctcaataaacacttcatatgc

SEQ ID NO: 358834 - DNA, 33 bp, Homo sapien
gttggaaactagctcagtaaacacttcatatgc

SEQ ID NO: 358835 - DNA, 33 bp, Homo sapien
ctgttaatcagctcacagaacacaaacaagtgg

SEQ ID NO: 358836 - DNA, 33 bp, Homo sapien
ctgttaatcagctcacggaacacaaacaagtgg

SEQ ID NO: 358837 - DNA, 33 bp, Homo sapien
taatgagccttttctcaaataacaaaagataag

SEQ ID NO: 358838 - DNA, 33 bp, Homo sapien
taatgagccttttctccaataacaaaagataag

SEQ ID NO: 358839 - DNA, 33 bp, Homo sapien
agaaaaatggagcagtaaataaaatagatgcgc

SEQ ID NO: 358840 - DNA, 33 bp, Homo sapien
agaaaaatggagcagtcaataaaatagatgcgc

SEQ ID NO: 358841 - DNA, 33 bp, Homo sapien
aagataatggattctaacggaagaaaggtcacg

SEQ ID NO: 358842 - DNA, 33 bp, Homo sapien
aagataatggattctagcggaagaaaggtcacg

SEQ ID NO: 358843 - DNA, 33 bp, Homo sapien
tgcacagtgggttttgaaaacaccatcaaagtt

SEQ ID NO: 358844 - DNA, 33 bp, Homo sapien
tgcacagtgggttttggaaacaccatcaaagtt

SEQ ID NO: 358845 - DNA, 33 bp, Homo sapien
gtaaactgaactatacaatgtctcaaatgtagc

SEQ ID NO: 358846 - DNA, 33 bp, Homo sapien
gtaaactgaactatacgatgtctcaaatgtagc

SEQ ID NO: 358847 - DNA, 33 bp, Homo sapien
atatagccaacaccacacttttactagggttgg

SEQ ID NO: 358848 - DNA, 33 bp, Homo sapien
atatagccaacaccacgcttttactagggttgg

SEQ ID NO: 358849 - DNA, 33 bp, Homo sapien
tctatatgaatgaagaaagctgtgaatgtactg

SEQ ID NO: 358850 - DNA, 33 bp, Homo sapien
tctatatgaatgaagagagctgtgaatgtactg

SEQ ID NO: 358851 - DNA, 33 bp, Homo sapien
aaagccttactctttcacttagagcctggccaa

SEQ ID NO: 358852 - DNA, 33 bp, Homo sapien
aaagccttactctttcccttagagcctggccaa

SEQ ID NO: 358853 - DNA, 33 bp, Homo sapien
cttccagccctttccagctgtatcacagacagg

SEQ ID NO: 358854 - DNA, 33 bp, Homo sapien
cttccagccctttccatctgtatcacagacagg

SEQ ID NO: 358855 - DNA, 33 bp, Homo sapien
tttacctgaatgggacaatttctacataatggc

SEQ ID NO: 358856 - DNA, 33 bp, Homo sapien
tttacctgaatgggactatttctacataatggc

SEQ ID NO: 358857 - DNA, 33 bp, Homo sapien
ctgtctgatagatcaactaccaaatgaacctct

SEQ ID NO: 358858 - DNA, 33 bp, Homo sapien
ctgtctgatagatcaattaccaaatgaacctct

SEQ ID NO: 358859 - DNA, 33 bp, Homo sapien
gttaaggcttggggcaacatagaggttcatttg

SEQ ID NO: 358860 - DNA, 33 bp, Homo sapien
gttaaggcttggggcagcatagaggttcatttg

SEQ ID NO: 358861 - DNA, 33 bp, Homo sapien
tccagccgtttgtactcacttgtgcaaagcctt

SEQ ID NO: 358862 - DNA, 33 bp, Homo sapien
tccagccgtttgtacttacttgtgcaaagcctt

SEQ ID NO: 358863 - DNA, 33 bp, Homo sapien
aaagacatacgaaagacggcacaatttacaaaa

SEQ ID NO: 358864 - DNA, 33 bp, Homo sapien
aaagacatacgaaagatggcacaatttacaaaa

SEQ ID NO: 358865 - DNA, 33 bp, Homo sapien
gtgcttgagcaaggccagactggaactttgact

SEQ ID NO: 358866 - DNA, 33 bp, Homo sapien
gtgcttgagcaaggcctgactggaactttgact

SEQ ID NO: 358867 - DNA, 33 bp, Homo sapien
ctcccagttgaaaaccactgattgaacccaagc

SEQ ID NO: 358868 - DNA, 33 bp, Homo sapien
ctcccagttgaaaaccgctgattgaacccaagc

SEQ ID NO: 358869 - DNA, 33 bp, Homo sapien
agacttacagggttcccaaagtttgtctgtagc

SEQ ID NO: 358870 - DNA, 33 bp, Homo sapien
agacttacagggttccgaaagtttgtctgtagc

SEQ ID NO: 358871 - DNA, 33 bp, Homo sapien
gtggtctatgatagaaagagaggaattaaagat

SEQ ID NO: 358872 - DNA, 33 bp, Homo sapien
gtggtctatgatagaatgagaggaattaaagat

SEQ ID NO: 358873 - DNA, 33 bp, Homo sapien
cacgaatgtttgtggaataaagaaaaattatca

SEQ ID NO: 358874 - DNA, 33 bp, Homo sapien
cacgaatgtttgtggagtaaagaaaaattatca

SEQ ID NO: 358875 - DNA, 33 bp, Homo sapien
tgcccccttccatacacgaatgaaaacacgtga

SEQ ID NO: 358876 - DNA, 33 bp, Homo sapien
tgcccccttccatacatgaatgaaaacacgtga

SEQ ID NO: 358877 - DNA, 33 bp, Homo sapien
catgggtaacgcacagccataagaggttgtgcc

SEQ ID NO: 358878 - DNA, 33 bp, Homo sapien
catgggtaacgcacagtcataagaggttgtgcc

SEQ ID NO: 358879 - DNA, 33 bp, Homo sapien
caaggatgcaaacctgcataaaaaacttcagtg

SEQ ID NO: 358880 - DNA, 33 bp, Homo sapien
caaggatgcaaacctgtataaaaaacttcagtg

SEQ ID NO: 358881 - DNA, 33 bp, Homo sapien
gccatcaaagaagagacggttcgctggtcctaa

SEQ ID NO: 358882 - DNA, 33 bp, Homo sapien
gccatcaaagaagagatggttcgctggtcctaa

SEQ ID NO: 358883 - DNA, 33 bp, Homo sapien
agggaaggaaatcaggacccataaagtgcagca

SEQ ID NO: 358884 - DNA, 33 bp, Homo sapien
agggaaggaaatcagggcccataaagtgcagca

SEQ ID NO: 358885 - DNA, 33 bp, Homo sapien
ttttgcagtttccttacgtctctcagacttcat

SEQ ID NO: 358886 - DNA, 33 bp, Homo sapien
ttttgcagtttccttatgtctctcagacttcat

SEQ ID NO: 358887 - DNA, 33 bp, Homo sapien
agattgcctataaaagcatgacaattagatcaa

SEQ ID NO: 358888 - DNA, 33 bp, Homo sapien
agattgcctataaaagtatgacaattagatcaa

SEQ ID NO: 358889 - DNA, 33 bp, Homo sapien
gaccccaatttcctaaccaaagcacattactga

SEQ ID NO: 358890 - DNA, 33 bp, Homo sapien
gaccccaatttcctaatcaaagcacattactga

SEQ ID NO: 358891 - DNA, 33 bp, Homo sapien
ccagatgggctgtttcaccaaatctggacatgg

SEQ ID NO: 358892 - DNA, 33 bp, Homo sapien
ccagatgggctgtttcgccaaatctggacatgg

SEQ ID NO: 358893 - DNA, 33 bp, Homo sapien
tgttccagcatttagacggcaagtgtgctcact

SEQ ID NO: 358894 - DNA, 33 bp, Homo sapien
tgttccagcatttagatggcaagtgtgctcact

SEQ ID NO: 358895 - DNA, 33 bp, Homo sapien
ggcagctgtcatcagcaacgcatagttatgtac

SEQ ID NO: 358896 - DNA, 33 bp, Homo sapien
ggcagctgtcatcagcgacgcatagttatgtac

SEQ ID NO: 358897 - DNA, 33 bp, Homo sapien
agaatatagttttgtgcagggttgatgttcacg

SEQ ID NO: 358898 - DNA, 33 bp, Homo sapien
agaatatagttttgtgtagggttgatgttcacg

SEQ ID NO: 358899 - DNA, 33 bp, Homo sapien
gaatcttgccagacaaaagaacgagctccagct

SEQ ID NO: 358900 - DNA, 33 bp, Homo sapien
gaatcttgccagacaacagaacgagctccagct

SEQ ID NO: 358901 - DNA, 33 bp, Homo sapien
gattttaatttgctataacagaacccatattta

SEQ ID NO: 358902 - DNA, 33 bp, Homo sapien
gattttaatttgctatgacagaacccatattta

SEQ ID NO: 358903 - DNA, 33 bp, Homo sapien
actgtaagaaaatgtaaggcaaataaaaaccta

SEQ ID NO: 358904 - DNA, 33 bp, Homo sapien
actgtaagaaaatgtagggcaaataaaaaccta

SEQ ID NO: 358905 - DNA, 33 bp, Homo sapien
atgctttatgtgacaactccctggctgtagtta

SEQ ID NO: 358906 - DNA, 33 bp, Homo sapien
atgctttatgtgacaattccctggctgtagtta

SEQ ID NO: 358907 - DNA, 33 bp, Homo sapien
aaatgcaagggaattgaagagaatatgaaactc

SEQ ID NO: 358908 - DNA, 33 bp, Homo sapien
aaatgcaagggaattgtagagaatatgaaactc

SEQ ID NO: 358909 - DNA, 33 bp, Homo sapien
tatacaagtcaaaggacgccttgatgaaaaaaa

SEQ ID NO: 358910 - DNA, 33 bp, Homo sapien
tatacaagtcaaaggatgccttgatgaaaaaaa

SEQ ID NO: 358911 - DNA, 33 bp, Homo sapien
tccttaagtccataaaaacagattccataaata

SEQ ID NO: 358912 - DNA, 33 bp, Homo sapien
tccttaagtccataaatacagattccataaata

SEQ ID NO: 358913 - DNA, 33 bp, Homo sapien
caatccactgtgccaacgatcggctgattagct

SEQ ID NO: 358914 - DNA, 33 bp, Homo sapien
caatccactgtgccaatgatcggctgattagct

SEQ ID NO: 358915 - DNA, 33 bp, Homo sapien
ggtaggcccttcagacccctaatgcttagctaa

SEQ ID NO: 358916 - DNA, 33 bp, Homo sapien
ggtaggcccttcagactcctaatgcttagctaa

SEQ ID NO: 358917 - DNA, 33 bp, Homo sapien
atatgtatttggagaccgaataactaaattaca

SEQ ID NO: 358918 - DNA, 33 bp, Homo sapien
atatgtatttggagactgaataactaaattaca

SEQ ID NO: 358919 - DNA, 33 bp, Homo sapien
tataggaaaggtagacacggttttctgttcccc

SEQ ID NO: 358920 - DNA, 33 bp, Homo sapien
tataggaaaggtagacgcggttttctgttcccc

SEQ ID NO: 358921 - DNA, 33 bp, Homo sapien
ctgactaacaccgttaccgaatattgttggacc

SEQ ID NO: 358922 - DNA, 33 bp, Homo sapien
ctgactaacaccgttatcgaatattgttggacc

SEQ ID NO: 358923 - DNA, 33 bp, Homo sapien
agctgaggactctctacggctatataccactca

SEQ ID NO: 358924 - DNA, 33 bp, Homo sapien
agctgaggactctctatggctatataccactca

SEQ ID NO: 358925 - DNA, 33 bp, Homo sapien
ttaaacctattacctcaagcctctcactcactt

SEQ ID NO: 358926 - DNA, 33 bp, Homo sapien
ttaaacctattacctcgagcctctcactcactt

SEQ ID NO: 358927 - DNA, 33 bp, Homo sapien
gtgtgttctgtggaaccccagtgtctgccagag

SEQ ID NO: 358928 - DNA, 33 bp, Homo sapien
gtgtgttctgtggaactccagtgtctgccagag

SEQ ID NO: 358929 - DNA, 33 bp, Homo sapien
tgaacttttgaggacaaatattccgcagccata

SEQ ID NO: 358930 - DNA, 33 bp, Homo sapien
tgaacttttgaggacagatattccgcagccata

SEQ ID NO: 358931 - DNA, 33 bp, Homo sapien
ccataattagctttaaaagaaatccatttggta

SEQ ID NO: 358932 - DNA, 33 bp, Homo sapien
ccataattagctttaagagaaatccatttggta

SEQ ID NO: 358933 - DNA, 33 bp, Homo sapien
cattgcacatgggagtaaaaatgcatgtcctaa

SEQ ID NO: 358934 - DNA, 33 bp, Homo sapien
cattgcacatgggagtgaaaatgcatgtcctaa

SEQ ID NO: 358935 - DNA, 33 bp, Homo sapien
gtctgtttgtccaatacgactttaaatgctgat

SEQ ID NO: 358936 - DNA, 33 bp, Homo sapien
gtctgtttgtccaatatgactttaaatgctgat

SEQ ID NO: 358937 - DNA, 33 bp, Homo sapien
aacttctagcacttccgagtgacttggaaaatg

SEQ ID NO: 358938 - DNA, 33 bp, Homo sapien
aacttctagcacttcctagtgacttggaaaatg

SEQ ID NO: 358939 - DNA, 33 bp, Homo sapien
tgaattagggttgagaagcccagcccggttgct

SEQ ID NO: 358940 - DNA, 33 bp, Homo sapien
tgaattagggttgagaggcccagcccggttgct

SEQ ID NO: 358941 - DNA, 33 bp, Homo sapien
cccaattttttgtccaccaatttgaattatttc

SEQ ID NO: 358942 - DNA, 33 bp, Homo sapien
cccaattttttgtccatcaatttgaattatttc

SEQ ID NO: 358943 - DNA, 33 bp, Homo sapien
tgtgtgttcctcactcaatttgccttttgaaag

SEQ ID NO: 358944 - DNA, 33 bp, Homo sapien
tgtgtgttcctcactcgatttgccttttgaaag

SEQ ID NO: 358945 - DNA, 33 bp, Homo sapien
gtaagctctttggagacatagacatgacttatg

SEQ ID NO: 358946 - DNA, 33 bp, Homo sapien
gtaagctctttggagatatagacatgacttatg

SEQ ID NO: 358947 - DNA, 33 bp, Homo sapien
aggaagcttcttagcactgatgtggttcgtcaa

SEQ ID NO: 358948 - DNA, 33 bp, Homo sapien
aggaagcttcttagcattgatgtggttcgtcaa

SEQ ID NO: 358949 - DNA, 33 bp, Homo sapien
tgatgtggttcgtcaaagataaaaagaatttaa

SEQ ID NO: 358950 - DNA, 33 bp, Homo sapien
tgatgtggttcgtcaaggataaaaagaatttaa

SEQ ID NO: 358951 - DNA, 33 bp, Homo sapien
gcatctgcaattgccacgtaattgagagcagac

SEQ ID NO: 358952 - DNA, 33 bp, Homo sapien
gcatctgcaattgccatgtaattgagagcagac

SEQ ID NO: 358953 - DNA, 33 bp, Homo sapien
atatactatgtcattgaaaaatccacccttaag

SEQ ID NO: 358954 - DNA, 33 bp, Homo sapien
atatactatgtcattggaaaatccacccttaag

SEQ ID NO: 358955 - DNA, 33 bp, Homo sapien
ttctttcgctgacctgaaactttttaacattct

SEQ ID NO: 358956 - DNA, 33 bp, Homo sapien
ttctttcgctgacctggaactttttaacattct

SEQ ID NO: 358957 - DNA, 33 bp, Homo sapien
tcccactcctgtaaacaaactttgctgattagt

SEQ ID NO: 358958 - DNA, 33 bp, Homo sapien
tcccactcctgtaaaccaactttgctgattagt

SEQ ID NO: 358959 - DNA, 33 bp, Homo sapien
taagagttcatgtaacagtgacacctttctgtt

SEQ ID NO: 358960 - DNA, 33 bp, Homo sapien
taagagttcatgtaacggtgacacctttctgtt

SEQ ID NO: 358961 - DNA, 33 bp, Homo sapien
tcttgggtgtgcagtgaagtcctgaccccaata

SEQ ID NO: 358962 - DNA, 33 bp, Homo sapien
tcttgggtgtgcagtggagtcctgaccccaata

SEQ ID NO: 358963 - DNA, 33 bp, Homo sapien
tatcaagttttaattacgtcatcctgcttgagt

SEQ ID NO: 358964 - DNA, 33 bp, Homo sapien
tatcaagttttaattaggtcatcctgcttgagt

SEQ ID NO: 358965 - DNA, 33 bp, Homo sapien
gctggcaatgttactaagtccaattaagattta

SEQ ID NO: 358966 - DNA, 33 bp, Homo sapien
gctggcaatgttactacgtccaattaagattta

SEQ ID NO: 358967 - DNA, 33 bp, Homo sapien
aaagattcttcccaaaattctagtctaaaaaga

SEQ ID NO: 358968 - DNA, 33 bp, Homo sapien
aaagattcttcccaaatttctagtctaaaaaga

SEQ ID NO: 358969 - DNA, 33 bp, Homo sapien
taaactggcaatcataataagaaaatacctaca

SEQ ID NO: 358970 - DNA, 33 bp, Homo sapien
taaactggcaatcatagtaagaaaatacctaca

SEQ ID NO: 358971 - DNA, 33 bp, Homo sapien
tcttgctttttatccacgatggcaagattttct

SEQ ID NO: 358972 - DNA, 33 bp, Homo sapien
tcttgctttttatccatgatggcaagattttct

SEQ ID NO: 358973 - DNA, 33 bp, Homo sapien
cctgtctgatatttcacctagcagtggcattgg

SEQ ID NO: 358974 - DNA, 33 bp, Homo sapien
cctgtctgatatttcatctagcagtggcattgg

SEQ ID NO: 358975 - DNA, 33 bp, Homo sapien
ccaagatcatcaattccaattattcctactctt

SEQ ID NO: 358976 - DNA, 33 bp, Homo sapien
ccaagatcatcaattctaattattcctactctt

SEQ ID NO: 358977 - DNA, 33 bp, Homo sapien
ttagaagttttcattgaagggaagtatctgatt

SEQ ID NO: 358978 - DNA, 33 bp, Homo sapien
ttagaagttttcattggagggaagtatctgatt

SEQ ID NO: 358979 - DNA, 33 bp, Homo sapien
ctggaagaaattgcacaggaacagagaggttat

SEQ ID NO: 358980 - DNA, 33 bp, Homo sapien
ctggaagaaattgcacgggaacagagaggttat

SEQ ID NO: 358981 - DNA, 33 bp, Homo sapien
gaagtgaaagtgagtcaaatatgaatgaatgac

SEQ ID NO: 358982 - DNA, 33 bp, Homo sapien
gaagtgaaagtgagtcgaatatgaatgaatgac

SEQ ID NO: 358983 - DNA, 33 bp, Homo sapien
acggttttagtgaggacgaccacaggaggccga

SEQ ID NO: 358984 - DNA, 33 bp, Homo sapien
acggttttagtgaggatgaccacaggaggccga

SEQ ID NO: 358985 - DNA, 33 bp, Homo sapien
tggctggaacactgaccggtttggaggtactgg

SEQ ID NO: 358986 - DNA, 33 bp, Homo sapien
tggctggaacactgactggtttggaggtactgg

SEQ ID NO: 358987 - DNA, 33 bp, Homo sapien
cttagatgtgaagtaagttaaaaaagtgaaagt

SEQ ID NO: 358988 - DNA, 33 bp, Homo sapien
cttagatgtgaagtaatttaaaaaagtgaaagt

SEQ ID NO: 358989 - DNA, 33 bp, Homo sapien
acttattctcaaaaagcccaaaagatgttcaac

SEQ ID NO: 358990 - DNA, 33 bp, Homo sapien
acttattctcaaaaaggccaaaagatgttcaac

SEQ ID NO: 358991 - DNA, 33 bp, Homo sapien
ggggtcggttaatgcacgcccaagacacataag

SEQ ID NO: 358992 - DNA, 33 bp, Homo sapien
ggggtcggttaatgcatgcccaagacacataag

SEQ ID NO: 358993 - DNA, 33 bp, Homo sapien
cactgagcataccgtaaataccacggtactcag

SEQ ID NO: 358994 - DNA, 33 bp, Homo sapien
cactgagcataccgtagataccacggtactcag

SEQ ID NO: 358995 - DNA, 33 bp, Homo sapien
atagtcatgtaaacaacggtgtacaataaaatg

SEQ ID NO: 358996 - DNA, 33 bp, Homo sapien
atagtcatgtaaacaatggtgtacaataaaatg

SEQ ID NO: 358997 - DNA, 33 bp, Homo sapien
aggaagatggacagacccacggagaattgtgga

SEQ ID NO: 358998 - DNA, 33 bp, Homo sapien
aggaagatggacagactcacggagaattgtgga

SEQ ID NO: 358999 - DNA, 33 bp, Homo sapien
acacctgtacaatacccctgagtagcaactaac

SEQ ID NO: 359000 - DNA, 33 bp, Homo sapien
acacctgtacaataccgctgagtagcaactaac

SEQ ID NO: 359001 - DNA, 33 bp, Homo sapien
actttagattagtagaaattgagatgtggtggt

SEQ ID NO: 359002 - DNA, 33 bp, Homo sapien
actttagattagtagagattgagatgtggtggt

SEQ ID NO: 359003 - DNA, 33 bp, Homo sapien
ccttccaacaatgagacgggagaattaatcatt

SEQ ID NO: 359004 - DNA, 33 bp, Homo sapien
ccttccaacaatgagatgggagaattaatcatt

SEQ ID NO: 359005 - DNA, 33 bp, Homo sapien
tgctttaggtttcaacagcactcttgtttaagg

SEQ ID NO: 359006 - DNA, 33 bp, Homo sapien
tgctttaggtttcaacggcactcttgtttaagg

SEQ ID NO: 359007 - DNA, 33 bp, Homo sapien
agagaaagtactgaccagcttcccattcatatc

SEQ ID NO: 359008 - DNA, 33 bp, Homo sapien
agagaaagtactgaccggcttcccattcatatc

SEQ ID NO: 359009 - DNA, 33 bp, Homo sapien
ctcttgacattacctagcaattgacatttggtt

SEQ ID NO: 359010 - DNA, 33 bp, Homo sapien
ctcttgacattacctatcaattgacatttggtt

SEQ ID NO: 359011 - DNA, 33 bp, Homo sapien
gatggcatggcagagccgaccctagcaacccag

SEQ ID NO: 359012 - DNA, 33 bp, Homo sapien
gatggcatggcagagctgaccctagcaacccag

SEQ ID NO: 359013 - DNA, 33 bp, Homo sapien
aataatccagtttaaaaaccaatggaatctttg

SEQ ID NO: 359014 - DNA, 33 bp, Homo sapien
aataatccagtttaaagaccaatggaatctttg

SEQ ID NO: 359015 - DNA, 33 bp, Homo sapien
agcaccaggtactgaccgacttgcctcttactt

SEQ ID NO: 359016 - DNA, 33 bp, Homo sapien
agcaccaggtactgactgacttgcctcttactt

SEQ ID NO: 359017 - DNA, 33 bp, Homo sapien
gtctcatgggattcctataagcattgtattgga

SEQ ID NO: 359018 - DNA, 33 bp, Homo sapien
gtctcatgggattcctgtaagcattgtattgga

SEQ ID NO: 359019 - DNA, 33 bp, Homo sapien
gagggcagactaatgcaaaattggaatgctcat

SEQ ID NO: 359020 - DNA, 33 bp, Homo sapien
gagggcagactaatgccaaattggaatgctcat

SEQ ID NO: 359021 - DNA, 33 bp, Homo sapien
tgatgtaacaatttcaactgaaggtattttggg

SEQ ID NO: 359022 - DNA, 33 bp, Homo sapien
tgatgtaacaatttcagctgaaggtattttggg

SEQ ID NO: 359023 - DNA, 33 bp, Homo sapien
gtgcatctacttaaaagctagaagtgttggttt

SEQ ID NO: 359024 - DNA, 33 bp, Homo sapien
gtgcatctacttaaaatctagaagtgttggttt

SEQ ID NO: 359025 - DNA, 33 bp, Homo sapien
ggaatgttttctcataccagcaaagtggcgttt

SEQ ID NO: 359026 - DNA, 33 bp, Homo sapien
ggaatgttttctcatagcagcaaagtggcgttt

SEQ ID NO: 359027 - DNA, 33 bp, Homo sapien
agcctggagtaacagaccatcaagttgggggaa

SEQ ID NO: 359028 - DNA, 33 bp, Homo sapien
agcctggagtaacagatcatcaagttgggggaa

SEQ ID NO: 359029 - DNA, 33 bp, Homo sapien
tgggctttattctgtcacttctgggcactcaga

SEQ ID NO: 359030 - DNA, 33 bp, Homo sapien
tgggctttattctgtctcttctgggcactcaga

SEQ ID NO: 359031 - DNA, 33 bp, Homo sapien
cactaagtccagactacgcccttgctttgagga

SEQ ID NO: 359032 - DNA, 33 bp, Homo sapien
cactaagtccagactatgcccttgctttgagga

SEQ ID NO: 359033 - DNA, 33 bp, Homo sapien
ctgtatttaaaatgcccgaagagacttctaaat

SEQ ID NO: 359034 - DNA, 33 bp, Homo sapien
ctgtatttaaaatgcctgaagagacttctaaat

SEQ ID NO: 359035 - DNA, 33 bp, Homo sapien
ttcagaagctgaaagtcacagacggttcagggc

SEQ ID NO: 359036 - DNA, 33 bp, Homo sapien
ttcagaagctgaaagttacagacggttcagggc

SEQ ID NO: 359037 - DNA, 33 bp, Homo sapien
ctcacactctagccacaccagatgaataagggt

SEQ ID NO: 359038 - DNA, 33 bp, Homo sapien
ctcacactctagccacgccagatgaataagggt

SEQ ID NO: 359039 - DNA, 33 bp, Homo sapien
ttgatgtgtcttacaccgaattaatgagaggtt

SEQ ID NO: 359040 - DNA, 33 bp, Homo sapien
ttgatgtgtcttacactgaattaatgagaggtt

SEQ ID NO: 359041 - DNA, 33 bp, Homo sapien
taaaaacaatttattcaacatttactggacact

SEQ ID NO: 359042 - DNA, 33 bp, Homo sapien
taaaaacaatttattccacatttactggacact

SEQ ID NO: 359043 - DNA, 33 bp, Homo sapien
gttggatagttattgaacccctctgttatgacc

SEQ ID NO: 359044 - DNA, 33 bp, Homo sapien
gttggatagttattgagcccctctgttatgacc

SEQ ID NO: 359045 - DNA, 33 bp, Homo sapien
atgttagtctgaaatacaagaacttctgtgact

SEQ ID NO: 359046 - DNA, 33 bp, Homo sapien
atgttagtctgaaatataagaacttctgtgact

SEQ ID NO: 359047 - DNA, 33 bp, Homo sapien
cattctatgtcaactacccaacatctcaaacat

SEQ ID NO: 359048 - DNA, 33 bp, Homo sapien
cattctatgtcaactatccaacatctcaaacat

SEQ ID NO: 359049 - DNA, 33 bp, Homo sapien
aagcttagcattgagaagacgatgtcaacagat

SEQ ID NO: 359050 - DNA, 33 bp, Homo sapien
aagcttagcattgagatgacgatgtcaacagat

SEQ ID NO: 359051 - DNA, 33 bp, Homo sapien
tcattagttactaacaacttgccgcagggtgat

SEQ ID NO: 359052 - DNA, 33 bp, Homo sapien
tcattagttactaacaccttgccgcagggtgat

SEQ ID NO: 359053 - DNA, 33 bp, Homo sapien
aaaaggccataagagacacaatagatgagggaa

SEQ ID NO: 359054 - DNA, 33 bp, Homo sapien
aaaaggccataagagagacaatagatgagggaa

SEQ ID NO: 359055 - DNA, 33 bp, Homo sapien
gagggaagaaccaatacggtaatggcatgtgag

SEQ ID NO: 359056 - DNA, 33 bp, Homo sapien
gagggaagaaccaatatggtaatggcatgtgag

SEQ ID NO: 359057 - DNA, 33 bp, Homo sapien
gcacctctagccattcaccctactgatggctgc

SEQ ID NO: 359058 - DNA, 33 bp, Homo sapien
gcacctctagccattcgccctactgatggctgc

SEQ ID NO: 359059 - DNA, 33 bp, Homo sapien
gttcaggtgtccactacagctatttgggcttag

SEQ ID NO: 359060 - DNA, 33 bp, Homo sapien
gttcaggtgtccactagagctatttgggcttag

SEQ ID NO: 359061 - DNA, 33 bp, Homo sapien
tgaaagattatagttgaaaaagaaacagagaag

SEQ ID NO: 359062 - DNA, 33 bp, Homo sapien
tgaaagattatagttggaaaagaaacagagaag

SEQ ID NO: 359063 - DNA, 33 bp, Homo sapien
aaacatgcactcatataacttttccatttctta

SEQ ID NO: 359064 - DNA, 33 bp, Homo sapien
aaacatgcactcatatgacttttccatttctta

SEQ ID NO: 359065 - DNA, 33 bp, Homo sapien
agaattccacagttagacggagaaatggaagaa

SEQ ID NO: 359066 - DNA, 33 bp, Homo sapien
agaattccacagttagtcggagaaatggaagaa

SEQ ID NO: 359067 - DNA, 33 bp, Homo sapien
aagtagaaggtggaaacgaaatgatgggcagag

SEQ ID NO: 359068 - DNA, 33 bp, Homo sapien
aagtagaaggtggaaatgaaatgatgggcagag

SEQ ID NO: 359069 - DNA, 33 bp, Homo sapien
gcccactgctaatttacctatcatgcatttaca

SEQ ID NO: 359070 - DNA, 33 bp, Homo sapien
gcccactgctaatttatctatcatgcatttaca

SEQ ID NO: 359071 - DNA, 33 bp, Homo sapien
ttacgcttttgggcaacggaggtgtcacttagt

SEQ ID NO: 359072 - DNA, 33 bp, Homo sapien
ttacgcttttgggcaatggaggtgtcacttagt

SEQ ID NO: 359073 - DNA, 33 bp, Homo sapien
tgttcaaaattccatccagattgtttgccattt

SEQ ID NO: 359074 - DNA, 33 bp, Homo sapien
tgttcaaaattccatcgagattgtttgccattt

SEQ ID NO: 359075 - DNA, 33 bp, Homo sapien
tgataagagacaaatacgtggagttgatctgaa

SEQ ID NO: 359076 - DNA, 33 bp, Homo sapien
tgataagagacaaatatgtggagttgatctgaa

SEQ ID NO: 359077 - DNA, 33 bp, Homo sapien
agaaaatgctggcacaatgtccttgggaaggca

SEQ ID NO: 359078 - DNA, 33 bp, Homo sapien
agaaaatgctggcacagtgtccttgggaaggca

SEQ ID NO: 359079 - DNA, 33 bp, Homo sapien
atggaaccagattaaaactaagtcaactcagtt

SEQ ID NO: 359080 - DNA, 33 bp, Homo sapien
atggaaccagattaaacctaagtcaactcagtt

SEQ ID NO: 359081 - DNA, 33 bp, Homo sapien
gcattccaaatgtctcacctcaagcaagcactt

SEQ ID NO: 359082 - DNA, 33 bp, Homo sapien
gcattccaaatgtctcgcctcaagcaagcactt

SEQ ID NO: 359083 - DNA, 33 bp, Homo sapien
taccacatcttctggtaaacaactcagcctatc

SEQ ID NO: 359084 - DNA, 33 bp, Homo sapien
taccacatcttctggtgaacaactcagcctatc

SEQ ID NO: 359085 - DNA, 33 bp, Homo sapien
atgaagaaagtttcccaaaagtttagatgattc

SEQ ID NO: 359086 - DNA, 33 bp, Homo sapien
atgaagaaagtttcccgaaagtttagatgattc

SEQ ID NO: 359087 - DNA, 33 bp, Homo sapien
tagtatataaagtagacggtgtagtcgggtgtg

SEQ ID NO: 359088 - DNA, 33 bp, Homo sapien
tagtatataaagtagatggtgtagtcgggtgtg

SEQ ID NO: 359089 - DNA, 33 bp, Homo sapien
atttaaacttgttagacgaacactatatgtaat

SEQ ID NO: 359090 - DNA, 33 bp, Homo sapien
atttaaacttgttagatgaacactatatgtaat

SEQ ID NO: 359091 - DNA, 33 bp, Homo sapien
aagataatagcattcaatagggataaagatgca

SEQ ID NO: 359092 - DNA, 33 bp, Homo sapien
aagataatagcattcagtagggataaagatgca

SEQ ID NO: 359093 - DNA, 33 bp, Homo sapien
atttcaccaacatagacgtctttccatcaacat

SEQ ID NO: 359094 - DNA, 33 bp, Homo sapien
atttcaccaacatagatgtctttccatcaacat

SEQ ID NO: 359095 - DNA, 33 bp, Homo sapien
tagcccaacggatatcaatgaaatactttgctt

SEQ ID NO: 359096 - DNA, 33 bp, Homo sapien
tagcccaacggatatccatgaaatactttgctt

SEQ ID NO: 359097 - DNA, 33 bp, Homo sapien
tcttcgctatattaacagatggtttctgatgga

SEQ ID NO: 359098 - DNA, 33 bp, Homo sapien
tcttcgctatattaacggatggtttctgatgga

SEQ ID NO: 359099 - DNA, 33 bp, Homo sapien
gcaattatgtgagccaatgaaagagagaaagag

SEQ ID NO: 359100 - DNA, 33 bp, Homo sapien
gcaattatgtgagccagtgaaagagagaaagag

SEQ ID NO: 359101 - DNA, 33 bp, Homo sapien
taataagtgattgttcacagataacagtgacta

SEQ ID NO: 359102 - DNA, 33 bp, Homo sapien
taataagtgattgttcgcagataacagtgacta

SEQ ID NO: 359103 - DNA, 33 bp, Homo sapien
tttgtgagcatgacaaatctggtcccagtccag

SEQ ID NO: 359104 - DNA, 33 bp, Homo sapien
tttgtgagcatgacaagtctggtcccagtccag

SEQ ID NO: 359105 - DNA, 33 bp, Homo sapien
gacgtgtgtctgttggcaagagtggaaggggaa

SEQ ID NO: 359106 - DNA, 33 bp, Homo sapien
gacgtgtgtctgttggtaagagtggaaggggaa

SEQ ID NO: 359107 - DNA, 33 bp, Homo sapien
cccctgttaggagatgacaggagcagctattca

SEQ ID NO: 359108 - DNA, 33 bp, Homo sapien
cccctgttaggagatggcaggagcagctattca

SEQ ID NO: 359109 - DNA, 33 bp, Homo sapien
attgcataaaatgttacagaactgaggtgatta

SEQ ID NO: 359110 - DNA, 33 bp, Homo sapien
attgcataaaatgttagagaactgaggtgatta

SEQ ID NO: 359111 - DNA, 33 bp, Homo sapien
tgagaaattcactttcacaatgcttaatgtaaa

SEQ ID NO: 359112 - DNA, 33 bp, Homo sapien
tgagaaattcactttcgcaatgcttaatgtaaa

SEQ ID NO: 359113 - DNA, 33 bp, Homo sapien
tctccaaattcttccaacggatcatacacactc

SEQ ID NO: 359114 - DNA, 33 bp, Homo sapien
tctccaaattcttccagcggatcatacacactc

SEQ ID NO: 359115 - DNA, 33 bp, Homo sapien
ctagagaaacagttgcaagtaaagaaatatata

SEQ ID NO: 359116 - DNA, 33 bp, Homo sapien
ctagagaaacagttgcgagtaaagaaatatata

SEQ ID NO: 359117 - DNA, 33 bp, Homo sapien
gctcctctacttgggcaaaaaggaagctttctc

SEQ ID NO: 359118 - DNA, 33 bp, Homo sapien
gctcctctacttgggcgaaaaggaagctttctc

SEQ ID NO: 359119 - DNA, 33 bp, Homo sapien
gcaacataaaatacaacggaagtctcagagtgg

SEQ ID NO: 359120 - DNA, 33 bp, Homo sapien
gcaacataaaatacaatggaagtctcagagtgg

SEQ ID NO: 359121 - DNA, 33 bp, Homo sapien
ggaattgggtcgtacaatagaaaagaatatttg

SEQ ID NO: 359122 - DNA, 33 bp, Homo sapien
ggaattgggtcgtacagtagaaaagaatatttg

SEQ ID NO: 359123 - DNA, 33 bp, Homo sapien
atggactttacatacaatgatcttactatcttt

SEQ ID NO: 359124 - DNA, 33 bp, Homo sapien
atggactttacatacagtgatcttactatcttt

SEQ ID NO: 359125 - DNA, 33 bp, Homo sapien
tttttctaaacaactccaagccatccttaaagt

SEQ ID NO: 359126 - DNA, 33 bp, Homo sapien
tttttctaaacaactcgaagccatccttaaagt

SEQ ID NO: 359127 - DNA, 33 bp, Homo sapien
ttttactattagtacactggcatcctttggaga

SEQ ID NO: 359128 - DNA, 33 bp, Homo sapien
ttttactattagtacattggcatcctttggaga

SEQ ID NO: 359129 - DNA, 33 bp, Homo sapien
cagactaatacagtaaagaagtacaattgctgg

SEQ ID NO: 359130 - DNA, 33 bp, Homo sapien
cagactaatacagtaaggaagtacaattgctgg

SEQ ID NO: 359131 - DNA, 33 bp, Homo sapien
atgttcatccactatcaccagcaattgtacttc

SEQ ID NO: 359132 - DNA, 33 bp, Homo sapien
atgttcatccactatcgccagcaattgtacttc

SEQ ID NO: 359133 - DNA, 33 bp, Homo sapien
taaaaatattttagggcatatgcaaccaaagaa

SEQ ID NO: 359134 - DNA, 33 bp, Homo sapien
taaaaatattttagggtatatgcaaccaaagaa

SEQ ID NO: 359135 - DNA, 33 bp, Homo sapien
caaatgttagtatctgaagttcattttatatat

SEQ ID NO: 359136 - DNA, 33 bp, Homo sapien
caaatgttagtatctggagttcattttatatat

SEQ ID NO: 359137 - DNA, 33 bp, Homo sapien
ggaaagcccatttccccccactggtctgtaaga

SEQ ID NO: 359138 - DNA, 33 bp, Homo sapien
ggaaagcccatttccctccactggtctgtaaga

SEQ ID NO: 359139 - DNA, 33 bp, Homo sapien
tatcattctattgatgaaaaatggaccacactt

SEQ ID NO: 359140 - DNA, 33 bp, Homo sapien
tatcattctattgatggaaaatggaccacactt

SEQ ID NO: 359141 - DNA, 33 bp, Homo sapien
agagattatttaagcccgaagagattgttttat

SEQ ID NO: 359142 - DNA, 33 bp, Homo sapien
agagattatttaagcctgaagagattgttttat

SEQ ID NO: 359143 - DNA, 33 bp, Homo sapien
acatgatatatttctcccagcaagaatatatag

SEQ ID NO: 359144 - DNA, 33 bp, Homo sapien
acatgatatatttctctcagcaagaatatatag

SEQ ID NO: 359145 - DNA, 33 bp, Homo sapien
aaatcagaacttaattcaaagtgagaagagcaa

SEQ ID NO: 359146 - DNA, 33 bp, Homo sapien
aaatcagaacttaatttaaagtgagaagagcaa

SEQ ID NO: 359147 - DNA, 33 bp, Homo sapien
aatttcataacaatcaaatcatgtgcttatttt

SEQ ID NO: 359148 - DNA, 33 bp, Homo sapien
aatttcataacaatcagatcatgtgcttatttt

SEQ ID NO: 359149 - DNA, 33 bp, Homo sapien
tacaagtttgttgaaacgatggaagccaccagt

SEQ ID NO: 359150 - DNA, 33 bp, Homo sapien
tacaagtttgttgaaatgatggaagccaccagt

SEQ ID NO: 359151 - DNA, 33 bp, Homo sapien
aaagagggaagtcctacgcattccagattggcc

SEQ ID NO: 359152 - DNA, 33 bp, Homo sapien
aaagagggaagtcctaggcattccagattggcc

SEQ ID NO: 359153 - DNA, 33 bp, Homo sapien
aagaagataaaaaatgaatctcacctataatcc

SEQ ID NO: 359154 - DNA, 33 bp, Homo sapien
aagaagataaaaaatgcatctcacctataatcc

SEQ ID NO: 359155 - DNA, 33 bp, Homo sapien
ttgatgacattgtaaagcaactcttcaagtaga

SEQ ID NO: 359156 - DNA, 33 bp, Homo sapien
ttgatgacattgtaaatcaactcttcaagtaga

SEQ ID NO: 359157 - DNA, 33 bp, Homo sapien
cagagtcacaacaatacggaattttctaagtca

SEQ ID NO: 359158 - DNA, 33 bp, Homo sapien
cagagtcacaacaatatggaattttctaagtca

SEQ ID NO: 359159 - DNA, 33 bp, Homo sapien
ttacactgggtatcaccggcatcatcttattct

SEQ ID NO: 359160 - DNA, 33 bp, Homo sapien
ttacactgggtatcactggcatcatcttattct

SEQ ID NO: 359161 - DNA, 33 bp, Homo sapien
tggggatgagagtctgaagaaaagatcagtctt

SEQ ID NO: 359162 - DNA, 33 bp, Homo sapien
tggggatgagagtctggagaaaagatcagtctt

SEQ ID NO: 359163 - DNA, 33 bp, Homo sapien
aacagaaagagaatgagtaaaggaacacatata

SEQ ID NO: 359164 - DNA, 33 bp, Homo sapien
aacagaaagagaatgattaaaggaacacatata

SEQ ID NO: 359165 - DNA, 33 bp, Homo sapien
tggtcctcagaatgacagctactcagtaccaga

SEQ ID NO: 359166 - DNA, 33 bp, Homo sapien
tggtcctcagaatgacggctactcagtaccaga

SEQ ID NO: 359167 - DNA, 33 bp, Homo sapien
cttctcaacagttttacgagctggagctccagt

SEQ ID NO: 359168 - DNA, 33 bp, Homo sapien
cttctcaacagttttatgagctggagctccagt

SEQ ID NO: 359169 - DNA, 33 bp, Homo sapien
agagggatgctgcgaggattaatgaaataattt

SEQ ID NO: 359170 - DNA, 33 bp, Homo sapien
agagggatgctgcgagtattaatgaaataattt

SEQ ID NO: 359171 - DNA, 33 bp, Homo sapien
tagacaaactccaggacagatttgacctgattc

SEQ ID NO: 359172 - DNA, 33 bp, Homo sapien
tagacaaactccaggatagatttgacctgattc

SEQ ID NO: 359173 - DNA, 33 bp, Homo sapien
actctaatcttcactcaacaagcaggaacacca

SEQ ID NO: 359174 - DNA, 33 bp, Homo sapien
actctaatcttcactccacaagcaggaacacca

SEQ ID NO: 359175 - DNA, 33 bp, Homo sapien
tgagcctgaactggaaataaaattttggagaac

SEQ ID NO: 359176 - DNA, 33 bp, Homo sapien
tgagcctgaactggaagtaaaattttggagaac

SEQ ID NO: 359177 - DNA, 33 bp, Homo sapien
tttcaatttctacttacagtgtttgtggatggc

SEQ ID NO: 359178 - DNA, 33 bp, Homo sapien
tttcaatttctacttatagtgtttgtggatggc

SEQ ID NO: 359179 - DNA, 33 bp, Homo sapien
ctccaaatctgtgctacggagacttctttattt

SEQ ID NO: 359180 - DNA, 33 bp, Homo sapien
ctccaaatctgtgctatggagacttctttattt

SEQ ID NO: 359181 - DNA, 33 bp, Homo sapien
ctagatggctcagtatcagtcacagcttctatc

SEQ ID NO: 359182 - DNA, 33 bp, Homo sapien
ctagatggctcagtattagtcacagcttctatc

SEQ ID NO: 359183 - DNA, 33 bp, Homo sapien
ctctacttgacatacacatgagcttgacaataa

SEQ ID NO: 359184 - DNA, 33 bp, Homo sapien
ctctacttgacatacatatgagcttgacaataa

SEQ ID NO: 359185 - DNA, 33 bp, Homo sapien
tcctttatctaatcttgaacactctctctcata

SEQ ID NO: 359186 - DNA, 33 bp, Homo sapien
tcctttatctaatctttaacactctctctcata

SEQ ID NO: 359187 - DNA, 33 bp, Homo sapien
ttttttacaacagaaagaatggaaaggcaaaag

SEQ ID NO: 359188 - DNA, 33 bp, Homo sapien
ttttttacaacagaaataatggaaaggcaaaag

SEQ ID NO: 359189 - DNA, 33 bp, Homo sapien
ccacctactctcatacactgattgaagcacaag

SEQ ID NO: 359190 - DNA, 33 bp, Homo sapien
ccacctactctcatacgctgattgaagcacaag

SEQ ID NO: 359191 - DNA, 33 bp, Homo sapien
cgggctagttgatctgcattgcctagtgttgac

SEQ ID NO: 359192 - DNA, 33 bp, Homo sapien
cgggctagttgatctgtattgcctagtgttgac

SEQ ID NO: 359193 - DNA, 33 bp, Homo sapien
ggaaggttcttgagaaaatttagctaaagaagc

SEQ ID NO: 359194 - DNA, 33 bp, Homo sapien
ggaaggttcttgagaagatttagctaaagaagc

SEQ ID NO: 359195 - DNA, 33 bp, Homo sapien
atacaaattttagagccagaatgcagggtttga

SEQ ID NO: 359196 - DNA, 33 bp, Homo sapien
atacaaattttagagctagaatgcagggtttga

SEQ ID NO: 359197 - DNA, 33 bp, Homo sapien
ccaactacaagaaagcaattgggcctcagaaac

SEQ ID NO: 359198 - DNA, 33 bp, Homo sapien
ccaactacaagaaagccattgggcctcagaaac

SEQ ID NO: 359199 - DNA, 33 bp, Homo sapien
ataagctagatagaccaaagcaagggtcggtgt

SEQ ID NO: 359200 - DNA, 33 bp, Homo sapien
ataagctagatagaccgaagcaagggtcggtgt

SEQ ID NO: 359201 - DNA, 33 bp, Homo sapien
tctagaggtcaaacaacagtgtagagacaaaga

SEQ ID NO: 359202 - DNA, 33 bp, Homo sapien
tctagaggtcaaacaagagtgtagagacaaaga

SEQ ID NO: 359203 - DNA, 33 bp, Homo sapien
tttgcctgatcctttacctttaagcaaacccat

SEQ ID NO: 359204 - DNA, 33 bp, Homo sapien
tttgcctgatcctttatctttaagcaaacccat

SEQ ID NO: 359205 - DNA, 33 bp, Homo sapien
gcaaagactaaatacaatgatacatttaagaca

SEQ ID NO: 359206 - DNA, 33 bp, Homo sapien
gcaaagactaaatacactgatacatttaagaca

SEQ ID NO: 359207 - DNA, 33 bp, Homo sapien
agggaacctcagaccaatatttctctggagggc

SEQ ID NO: 359208 - DNA, 33 bp, Homo sapien
agggaacctcagaccagtatttctctggagggc

SEQ ID NO: 359209 - DNA, 33 bp, Homo sapien
agctgccaagaaggatcagagtgagaacacaca

SEQ ID NO: 359210 - DNA, 33 bp, Homo sapien
agctgccaagaaggatgagagtgagaacacaca

SEQ ID NO: 359211 - DNA, 33 bp, Homo sapien
ttcttgaactatgctcacagaatagtttgtgtt

SEQ ID NO: 359212 - DNA, 33 bp, Homo sapien
ttcttgaactatgctcgcagaatagtttgtgtt

SEQ ID NO: 359213 - DNA, 33 bp, Homo sapien
tttgaaaaagtcctcaaaatatgcagcctaatc

SEQ ID NO: 359214 - DNA, 33 bp, Homo sapien
tttgaaaaagtcctcagaatatgcagcctaatc

SEQ ID NO: 359215 - DNA, 33 bp, Homo sapien
atggaagctaagaaaccagtaagtaagcaagaa

SEQ ID NO: 359216 - DNA, 33 bp, Homo sapien
atggaagctaagaaacgagtaagtaagcaagaa

SEQ ID NO: 359217 - DNA, 33 bp, Homo sapien
tgcaaaatgctaagaacgaaatactgcataggc

SEQ ID NO: 359218 - DNA, 33 bp, Homo sapien
tgcaaaatgctaagaatgaaatactgcataggc

SEQ ID NO: 359219 - DNA, 33 bp, Homo sapien
gcagcctctaaccaaccgctaaggtggactatc

SEQ ID NO: 359220 - DNA, 33 bp, Homo sapien
gcagcctctaaccaactgctaaggtggactatc

SEQ ID NO: 359221 - DNA, 33 bp, Homo sapien
aggttatacttaattacactcatgagccaagtc

SEQ ID NO: 359222 - DNA, 33 bp, Homo sapien
aggttatacttaattatactcatgagccaagtc

SEQ ID NO: 359223 - DNA, 33 bp, Homo sapien
atgatgttaattatgacgacctgaagacattgc

SEQ ID NO: 359224 - DNA, 33 bp, Homo sapien
atgatgttaattatgatgacctgaagacattgc

SEQ ID NO: 359225 - DNA, 33 bp, Homo sapien
tattttcctttccagagattatcatgatcaatt

SEQ ID NO: 359226 - DNA, 33 bp, Homo sapien
tattttcctttccagatattatcatgatcaatt

SEQ ID NO: 359227 - DNA, 33 bp, Homo sapien
gcttcttcgaggagaaaagtagattgttctcca

SEQ ID NO: 359228 - DNA, 33 bp, Homo sapien
gcttcttcgaggagaacagtagattgttctcca

SEQ ID NO: 359229 - DNA, 33 bp, Homo sapien
cttccaaagtgattaactgctttttctaagaag

SEQ ID NO: 359230 - DNA, 33 bp, Homo sapien
cttccaaagtgattaagtgctttttctaagaag

SEQ ID NO: 359231 - DNA, 33 bp, Homo sapien
gcaggttatgtgtgtgcaaacaaaaatatctgg

SEQ ID NO: 359232 - DNA, 33 bp, Homo sapien
gcaggttatgtgtgtggaaacaaaaatatctgg

SEQ ID NO: 359233 - DNA, 33 bp, Homo sapien
caatttctcatttaaacatggagcaagcaggtt

SEQ ID NO: 359234 - DNA, 33 bp, Homo sapien
caatttctcatttaaatatggagcaagcaggtt

SEQ ID NO: 359235 - DNA, 33 bp, Homo sapien
cttttaatattggtcacgtttggcagttgatcc

SEQ ID NO: 359236 - DNA, 33 bp, Homo sapien
cttttaatattggtcatgtttggcagttgatcc

SEQ ID NO: 359237 - DNA, 33 bp, Homo sapien
catgctcctgggataaaactaccttcaagccct

SEQ ID NO: 359238 - DNA, 33 bp, Homo sapien
catgctcctgggataagactaccttcaagccct

SEQ ID NO: 359239 - DNA, 33 bp, Homo sapien
catggcacagaggaaaaagccaggacatgggct

SEQ ID NO: 359240 - DNA, 33 bp, Homo sapien
catggcacagaggaaagagccaggacatgggct

SEQ ID NO: 359241 - DNA, 33 bp, Homo sapien
cagagctactaagaccagagcctacctgtaagg

SEQ ID NO: 359242 - DNA, 33 bp, Homo sapien
cagagctactaagaccggagcctacctgtaagg

SEQ ID NO: 359243 - DNA, 33 bp, Homo sapien
acctttgtatgcagcaaggcggaaggatattat

SEQ ID NO: 359244 - DNA, 33 bp, Homo sapien
acctttgtatgcagcagggcggaaggatattat

SEQ ID NO: 359245 - DNA, 33 bp, Homo sapien
agagaccgagagttcacataagagcaaatgagt

SEQ ID NO: 359246 - DNA, 33 bp, Homo sapien
agagaccgagagttcagataagagcaaatgagt

SEQ ID NO: 359247 - DNA, 33 bp, Homo sapien
tatgtgatagtagctcactgcagtcttatactc

SEQ ID NO: 359248 - DNA, 33 bp, Homo sapien
tatgtgatagtagctccctgcagtcttatactc

SEQ ID NO: 359249 - DNA, 33 bp, Homo sapien
tagctataaatctcctgacagtttagccatggg

SEQ ID NO: 359250 - DNA, 33 bp, Homo sapien
tagctataaatctccttacagtttagccatggg

SEQ ID NO: 359251 - DNA, 33 bp, Homo sapien
tggtttgagaatgaaccggcaactctgttatct

SEQ ID NO: 359252 - DNA, 33 bp, Homo sapien
tggtttgagaatgaactggcaactctgttatct

SEQ ID NO: 359253 - DNA, 33 bp, Homo sapien
ctcaattaaaatttgcactaaaactatgttctc

SEQ ID NO: 359254 - DNA, 33 bp, Homo sapien
ctcaattaaaatttgcgctaaaactatgttctc

SEQ ID NO: 359255 - DNA, 33 bp, Homo sapien
ggcataattcttgataacaactgaattagagag

SEQ ID NO: 359256 - DNA, 33 bp, Homo sapien
ggcataattcttgatagcaactgaattagagag

SEQ ID NO: 359257 - DNA, 33 bp, Homo sapien
agaggagagaaacccaaatggttaggacagacg

SEQ ID NO: 359258 - DNA, 33 bp, Homo sapien
agaggagagaaacccagatggttaggacagacg

SEQ ID NO: 359259 - DNA, 33 bp, Homo sapien
gttctattagtttgtagaggtcagatgtttggt

SEQ ID NO: 359260 - DNA, 33 bp, Homo sapien
gttctattagtttgtataggtcagatgtttggt

SEQ ID NO: 359261 - DNA, 33 bp, Homo sapien
ttttttagcaatttcaacttttagatttagggg

SEQ ID NO: 359262 - DNA, 33 bp, Homo sapien
ttttttagcaatttcagcttttagatttagggg

SEQ ID NO: 359263 - DNA, 33 bp, Homo sapien
gtttttatttgatctacgtacttctcactgttt

SEQ ID NO: 359264 - DNA, 33 bp, Homo sapien
gtttttatttgatctatgtacttctcactgttt

SEQ ID NO: 359265 - DNA, 33 bp, Homo sapien
tctttaagcattttcacgtacaaatcaaacaca

SEQ ID NO: 359266 - DNA, 33 bp, Homo sapien
tctttaagcattttcatgtacaaatcaaacaca

SEQ ID NO: 359267 - DNA, 33 bp, Homo sapien
catgctccatctagaggaatcgacagtgaggtc

SEQ ID NO: 359268 - DNA, 33 bp, Homo sapien
catgctccatctagagtaatcgacagtgaggtc

SEQ ID NO: 359269 - DNA, 33 bp, Homo sapien
aatggcacaaataagacaggcatcgcagaaatg

SEQ ID NO: 359270 - DNA, 33 bp, Homo sapien
aatggcacaaataagataggcatcgcagaaatg

SEQ ID NO: 359271 - DNA, 33 bp, Homo sapien
ttagatgcctgcactacagtaggagctgaacag

SEQ ID NO: 359272 - DNA, 33 bp, Homo sapien
ttagatgcctgcactagagtaggagctgaacag

SEQ ID NO: 359273 - DNA, 33 bp, Homo sapien
gcatcaggtcaacaaaagaagcctgttcatctt

SEQ ID NO: 359274 - DNA, 33 bp, Homo sapien
gcatcaggtcaacaaacgaagcctgttcatctt

SEQ ID NO: 359275 - DNA, 33 bp, Homo sapien
ataggaagtatgtaccaggatatttactaaagt

SEQ ID NO: 359276 - DNA, 33 bp, Homo sapien
ataggaagtatgtaccgggatatttactaaagt

SEQ ID NO: 359277 - DNA, 33 bp, Homo sapien
ctgaattttatttttcacatttctgaacatgat

SEQ ID NO: 359278 - DNA, 33 bp, Homo sapien
ctgaattttatttttcgcatttctgaacatgat

SEQ ID NO: 359279 - DNA, 33 bp, Homo sapien
ctgccgtgtttcaccacgctaaatccgagaaat

SEQ ID NO: 359280 - DNA, 33 bp, Homo sapien
ctgccgtgtttcaccatgctaaatccgagaaat

SEQ ID NO: 359281 - DNA, 33 bp, Homo sapien
tgtggaagaccaactcactctcggctgtagggt

SEQ ID NO: 359282 - DNA, 33 bp, Homo sapien
tgtggaagaccaactcgctctcggctgtagggt

SEQ ID NO: 359283 - DNA, 33 bp, Homo sapien
caagtgcttcagcatacaaggtcttgcaataga

SEQ ID NO: 359284 - DNA, 33 bp, Homo sapien
caagtgcttcagcatagaaggtcttgcaataga

SEQ ID NO: 359285 - DNA, 33 bp, Homo sapien
atacctaattgctttagccatacgttaattaac

SEQ ID NO: 359286 - DNA, 33 bp, Homo sapien
atacctaattgctttatccatacgttaattaac

SEQ ID NO: 359287 - DNA, 33 bp, Homo sapien
taagtgacttctccaacgtcacaaccaataaac

SEQ ID NO: 359288 - DNA, 33 bp, Homo sapien
taagtgacttctccaaggtcacaaccaataaac

SEQ ID NO: 359289 - DNA, 33 bp, Homo sapien
tccagctccgaaacaacgcccagtagttgttga

SEQ ID NO: 359290 - DNA, 33 bp, Homo sapien
tccagctccgaaacaatgcccagtagttgttga

SEQ ID NO: 359291 - DNA, 33 bp, Homo sapien
tgattgtgaagcctaactaaaactccagtttga

SEQ ID NO: 359292 - DNA, 33 bp, Homo sapien
tgattgtgaagcctaattaaaactccagtttga

SEQ ID NO: 359293 - DNA, 33 bp, Homo sapien
caatgcattagaataaactgtcaggatttctct

SEQ ID NO: 359294 - DNA, 33 bp, Homo sapien
caatgcattagaataacctgtcaggatttctct

SEQ ID NO: 359295 - DNA, 33 bp, Homo sapien
aatgaaaaccaaacagaatgagacttaacagag

SEQ ID NO: 359296 - DNA, 33 bp, Homo sapien
aatgaaaaccaaacaggatgagacttaacagag

SEQ ID NO: 359297 - DNA, 33 bp, Homo sapien
cctgcagacattctgaagagttatgacggtccc

SEQ ID NO: 359298 - DNA, 33 bp, Homo sapien
cctgcagacattctgaggagttatgacggtccc

SEQ ID NO: 359299 - DNA, 33 bp, Homo sapien
aatcactgtataatcacctctaataatctaatc

SEQ ID NO: 359300 - DNA, 33 bp, Homo sapien
aatcactgtataatcagctctaataatctaatc

SEQ ID NO: 359301 - DNA, 33 bp, Homo sapien
tccaactcttggttgaagactctgactcagagg

SEQ ID NO: 359302 - DNA, 33 bp, Homo sapien
tccaactcttggttgaggactctgactcagagg

SEQ ID NO: 359303 - DNA, 33 bp, Homo sapien
tcaaaggagcgaatgtcaattttacctttattt

SEQ ID NO: 359304 - DNA, 33 bp, Homo sapien
tcaaaggagcgaatgttaattttacctttattt

SEQ ID NO: 359305 - DNA, 33 bp, Homo sapien
aatcagtggcagagacaaggtttgaatcaaaac

SEQ ID NO: 359306 - DNA, 33 bp, Homo sapien
aatcagtggcagagacgaggtttgaatcaaaac

SEQ ID NO: 359307 - DNA, 33 bp, Homo sapien
cgaacaaatgccagaaatattggtacctttggc

SEQ ID NO: 359308 - DNA, 33 bp, Homo sapien
cgaacaaatgccagaagtattggtacctttggc

SEQ ID NO: 359309 - DNA, 33 bp, Homo sapien
ataatgctcaaaaatgcattctatttcacttgt

SEQ ID NO: 359310 - DNA, 33 bp, Homo sapien
ataatgctcaaaaatgtattctatttcacttgt

SEQ ID NO: 359311 - DNA, 33 bp, Homo sapien
caaagtgcctctgctacggaagtatgtgacatg

SEQ ID NO: 359312 - DNA, 33 bp, Homo sapien
caaagtgcctctgctatggaagtatgtgacatg

SEQ ID NO: 359313 - DNA, 33 bp, Homo sapien
agggtaaagaaagataggatgagcacagttagg

SEQ ID NO: 359314 - DNA, 33 bp, Homo sapien
agggtaaagaaagatatgatgagcacagttagg

SEQ ID NO: 359315 - DNA, 33 bp, Homo sapien
aacgttttttgatgccaaggactttctacttta

SEQ ID NO: 359316 - DNA, 33 bp, Homo sapien
aacgttttttgatgccgaggactttctacttta

SEQ ID NO: 359317 - DNA, 33 bp, Homo sapien
tgaatattgatctgacagaacctcagaccaatc

SEQ ID NO: 359318 - DNA, 33 bp, Homo sapien
tgaatattgatctgacggaacctcagaccaatc

SEQ ID NO: 359319 - DNA, 33 bp, Homo sapien
acagactacagatgtaacaactgtgaattttgc

SEQ ID NO: 359320 - DNA, 33 bp, Homo sapien
acagactacagatgtagcaactgtgaattttgc

SEQ ID NO: 359321 - DNA, 33 bp, Homo sapien
tatttttctgtaaaaaatgccgcagaagatgtt

SEQ ID NO: 359322 - DNA, 33 bp, Homo sapien
tatttttctgtaaaaattgccgcagaagatgtt

SEQ ID NO: 359323 - DNA, 33 bp, Homo sapien
ccatatacctccaacactggttcttctgtaatg

SEQ ID NO: 359324 - DNA, 33 bp, Homo sapien
ccatatacctccaacattggttcttctgtaatg

SEQ ID NO: 359325 - DNA, 33 bp, Homo sapien
aggagagggacataagaagttagggccaaaata

SEQ ID NO: 359326 - DNA, 33 bp, Homo sapien
aggagagggacataaggagttagggccaaaata

SEQ ID NO: 359327 - DNA, 33 bp, Homo sapien
attataatgattccaactgtacctaatcttcgc

SEQ ID NO: 359328 - DNA, 33 bp, Homo sapien
attataatgattccaattgtacctaatcttcgc

SEQ ID NO: 359329 - DNA, 33 bp, Homo sapien
tggctttggctaccaaatgagaaagcgagagag

SEQ ID NO: 359330 - DNA, 33 bp, Homo sapien
tggctttggctaccaagtgagaaagcgagagag

SEQ ID NO: 359331 - DNA, 33 bp, Homo sapien
ctacttttgcaaaagaaaatctgtatgcttgat

SEQ ID NO: 359332 - DNA, 33 bp, Homo sapien
ctacttttgcaaaagagaatctgtatgcttgat

SEQ ID NO: 359333 - DNA, 33 bp, Homo sapien
ccagtggcctggctgacgctcatgtttttcttt

SEQ ID NO: 359334 - DNA, 33 bp, Homo sapien
ccagtggcctggctgatgctcatgtttttcttt

SEQ ID NO: 359335 - DNA, 33 bp, Homo sapien
tgaagccaaagttgagaatcatgcccggttagc

SEQ ID NO: 359336 - DNA, 33 bp, Homo sapien
tgaagccaaagttgaggatcatgcccggttagc

SEQ ID NO: 359337 - DNA, 33 bp, Homo sapien
accatcattaacagcaacaatggtgcttagctc

SEQ ID NO: 359338 - DNA, 33 bp, Homo sapien
accatcattaacagcagcaatggtgcttagctc

SEQ ID NO: 359339 - DNA, 33 bp, Homo sapien
aagtaacacatggaaaagttttaattctcacga

SEQ ID NO: 359340 - DNA, 33 bp, Homo sapien
aagtaacacatggaaaggttttaattctcacga

SEQ ID NO: 359341 - DNA, 33 bp, Homo sapien
tctcgtttctcaaatgcatcctgacctggtctt

SEQ ID NO: 359342 - DNA, 33 bp, Homo sapien
tctcgtttctcaaatgtatcctgacctggtctt

SEQ ID NO: 359343 - DNA, 33 bp, Homo sapien
accaaatcacagtccaactaataatcttccaga

SEQ ID NO: 359344 - DNA, 33 bp, Homo sapien
accaaatcacagtccagctaataatcttccaga

SEQ ID NO: 359345 - DNA, 33 bp, Homo sapien
gctataaaatgttagcaatggctttatttattt

SEQ ID NO: 359346 - DNA, 33 bp, Homo sapien
gctataaaatgttagcgatggctttatttattt

SEQ ID NO: 359347 - DNA, 33 bp, Homo sapien
agttggttagttgtgtcaaatgctgcccagagg

SEQ ID NO: 359348 - DNA, 33 bp, Homo sapien
agttggttagttgtgtgaaatgctgcccagagg

SEQ ID NO: 359349 - DNA, 33 bp, Homo sapien
cttaaggtcagccaccaaagactgggacccact

SEQ ID NO: 359350 - DNA, 33 bp, Homo sapien
cttaaggtcagccaccgaagactgggacccact

SEQ ID NO: 359351 - DNA, 33 bp, Homo sapien
aagctggaaagtccaactcaggtccatatgact

SEQ ID NO: 359352 - DNA, 33 bp, Homo sapien
aagctggaaagtccaattcaggtccatatgact

SEQ ID NO: 359353 - DNA, 33 bp, Homo sapien
aatcactcgcaatgtcaagaaatgatcccacca

SEQ ID NO: 359354 - DNA, 33 bp, Homo sapien
aatcactcgcaatgtcgagaaatgatcccacca

SEQ ID NO: 359355 - DNA, 33 bp, Homo sapien
gaagagtaatagcaaacggctaacccaaagtat

SEQ ID NO: 359356 - DNA, 33 bp, Homo sapien
gaagagtaatagcaaatggctaacccaaagtat

SEQ ID NO: 359357 - DNA, 33 bp, Homo sapien
tagagacacacactgggaagaaacacaagctgt

SEQ ID NO: 359358 - DNA, 33 bp, Homo sapien
tagagacacacactggtaagaaacacaagctgt

SEQ ID NO: 359359 - DNA, 33 bp, Homo sapien
attttgcaacaaaataacttgaagaatgtgttg

SEQ ID NO: 359360 - DNA, 33 bp, Homo sapien
attttgcaacaaaataccttgaagaatgtgttg

SEQ ID NO: 359361 - DNA, 33 bp, Homo sapien
tggtttctgcagaagccctgtaaaacatcatta

SEQ ID NO: 359362 - DNA, 33 bp, Homo sapien
tggtttctgcagaagctctgtaaaacatcatta

SEQ ID NO: 359363 - DNA, 33 bp, Homo sapien
gcaatgcaatgtcaaaagtggagtgggttgggg

SEQ ID NO: 359364 - DNA, 33 bp, Homo sapien
gcaatgcaatgtcaaaggtggagtgggttgggg

SEQ ID NO: 359365 - DNA, 33 bp, Homo sapien
gtcacacacatctgacaactgttgattacctag

SEQ ID NO: 359366 - DNA, 33 bp, Homo sapien
gtcacacacatctgacgactgttgattacctag

SEQ ID NO: 359367 - DNA, 33 bp, Homo sapien
cccaaaaagttgctgaccactagcaaagggcct

SEQ ID NO: 359368 - DNA, 33 bp, Homo sapien
cccaaaaagttgctgagcactagcaaagggcct

SEQ ID NO: 359369 - DNA, 33 bp, Homo sapien
agtcatttttcatacccgatttcatacctggct

SEQ ID NO: 359370 - DNA, 33 bp, Homo sapien
agtcatttttcatacctgatttcatacctggct

SEQ ID NO: 359371 - DNA, 33 bp, Homo sapien
taaatagacatcttgcacatatgtatgtttata

SEQ ID NO: 359372 - DNA, 33 bp, Homo sapien
taaatagacatcttgcgcatatgtatgtttata

SEQ ID NO: 359373 - DNA, 33 bp, Homo sapien
catgaagtctttactccagatggtgtgcgcccc

SEQ ID NO: 359374 - DNA, 33 bp, Homo sapien
catgaagtctttactctagatggtgtgcgcccc

SEQ ID NO: 359375 - DNA, 33 bp, Homo sapien
acagttcaattgacgccattggcattccacagc

SEQ ID NO: 359376 - DNA, 33 bp, Homo sapien
acagttcaattgacgctattggcattccacagc

SEQ ID NO: 359377 - DNA, 33 bp, Homo sapien
tcgcttgcctggaaaacctttctagtatctgcc

SEQ ID NO: 359378 - DNA, 33 bp, Homo sapien
tcgcttgcctggaaaatctttctagtatctgcc

SEQ ID NO: 359379 - DNA, 33 bp, Homo sapien
atgtctgtggtcatgccatcctagaagcagtgc

SEQ ID NO: 359380 - DNA, 33 bp, Homo sapien
atgtctgtggtcatgctatcctagaagcagtgc

SEQ ID NO: 359381 - DNA, 33 bp, Homo sapien
cagtggaaccttgccacgtcatatctgaattgc

SEQ ID NO: 359382 - DNA, 33 bp, Homo sapien
cagtggaaccttgccatgtcatatctgaattgc

SEQ ID NO: 359383 - DNA, 33 bp, Homo sapien
ttctatgctcctagacagtaatgcggaggactc

SEQ ID NO: 359384 - DNA, 33 bp, Homo sapien
ttctatgctcctagacggtaatgcggaggactc

SEQ ID NO: 359385 - DNA, 33 bp, Homo sapien
accttcctgtaatggaccatactgggctagaag

SEQ ID NO: 359386 - DNA, 33 bp, Homo sapien
accttcctgtaatggatcatactgggctagaag

SEQ ID NO: 359387 - DNA, 33 bp, Homo sapien
gttaacacctaatgaccgatcctttttccgaag

SEQ ID NO: 359388 - DNA, 33 bp, Homo sapien
gttaacacctaatgactgatcctttttccgaag

SEQ ID NO: 359389 - DNA, 33 bp, Homo sapien
agacaacgtttgtgcaagaaaagatttttttaa

SEQ ID NO: 359390 - DNA, 33 bp, Homo sapien
agacaacgtttgtgcaggaaaagatttttttaa

SEQ ID NO: 359391 - DNA, 33 bp, Homo sapien
ctctaagatgtgataacgtaatctaaagccagg

SEQ ID NO: 359392 - DNA, 33 bp, Homo sapien
ctctaagatgtgataatgtaatctaaagccagg

SEQ ID NO: 359393 - DNA, 33 bp, Homo sapien
ttaagagcggtcaatgacatatcactactttca

SEQ ID NO: 359394 - DNA, 33 bp, Homo sapien
ttaagagcggtcaatggcatatcactactttca

SEQ ID NO: 359395 - DNA, 33 bp, Homo sapien
gtttttttcagtgttacgtgtttgtgaaaaaga

SEQ ID NO: 359396 - DNA, 33 bp, Homo sapien
gtttttttcagtgttatgtgtttgtgaaaaaga

SEQ ID NO: 359397 - DNA, 33 bp, Homo sapien
tcccagtttggagatcactgctttgcccttttt

SEQ ID NO: 359398 - DNA, 33 bp, Homo sapien
tcccagtttggagatcgctgctttgcccttttt

SEQ ID NO: 359399 - DNA, 33 bp, Homo sapien
tggaatcacatgggaaactttaaaaatgactga

SEQ ID NO: 359400 - DNA, 33 bp, Homo sapien
tggaatcacatgggaacctttaaaaatgactga

SEQ ID NO: 359401 - DNA, 33 bp, Homo sapien
ggtgttgaaaagcctaccttctctttctttctt

SEQ ID NO: 359402 - DNA, 33 bp, Homo sapien
ggtgttgaaaagcctatcttctctttctttctt

SEQ ID NO: 359403 - DNA, 33 bp, Homo sapien
cttctgtacccacctacctccattctgaattga

SEQ ID NO: 359404 - DNA, 33 bp, Homo sapien
cttctgtacccacctatctccattctgaattga

SEQ ID NO: 359405 - DNA, 33 bp, Homo sapien
taatataaagtacttacaccagtgtttggcata

SEQ ID NO: 359406 - DNA, 33 bp, Homo sapien
taatataaagtacttagaccagtgtttggcata

SEQ ID NO: 359407 - DNA, 33 bp, Homo sapien
caatgttgccttttcccgatctctgttttaatt

SEQ ID NO: 359408 - DNA, 33 bp, Homo sapien
caatgttgccttttcctgatctctgttttaatt

SEQ ID NO: 359409 - DNA, 33 bp, Homo sapien
cttaagtatcagagaactgtcatgtgcatggct

SEQ ID NO: 359410 - DNA, 33 bp, Homo sapien
cttaagtatcagagaattgtcatgtgcatggct

SEQ ID NO: 359411 - DNA, 33 bp, Homo sapien
gaacatccttctactacagtttctcctgttctt

SEQ ID NO: 359412 - DNA, 33 bp, Homo sapien
gaacatccttctactagagtttctcctgttctt

SEQ ID NO: 359413 - DNA, 33 bp, Homo sapien
tattcacctttcgggagcagctatgggagatag

SEQ ID NO: 359414 - DNA, 33 bp, Homo sapien
tattcacctttcgggatcagctatgggagatag

SEQ ID NO: 359415 - DNA, 33 bp, Homo sapien
agaagcataagaggaaccttgccaagcccggtc

SEQ ID NO: 359416 - DNA, 33 bp, Homo sapien
agaagcataagaggaatcttgccaagcccggtc

SEQ ID NO: 359417 - DNA, 33 bp, Homo sapien
caaatttgggataatacagtgtgtgctgcatat

SEQ ID NO: 359418 - DNA, 33 bp, Homo sapien
caaatttgggataatatagtgtgtgctgcatat

SEQ ID NO: 359419 - DNA, 33 bp, Homo sapien
ctccttccaaacaataagtcttagtctcctgtt

SEQ ID NO: 359420 - DNA, 33 bp, Homo sapien
ctccttccaaacaatatgtcttagtctcctgtt

SEQ ID NO: 359421 - DNA, 33 bp, Homo sapien
tcggaatcgtgcaaggcattttgcagtgccata

SEQ ID NO: 359422 - DNA, 33 bp, Homo sapien
tcggaatcgtgcaaggtattttgcagtgccata

SEQ ID NO: 359423 - DNA, 33 bp, Homo sapien
aaacatacatgtgaaaaaagagaaatgatgagt

SEQ ID NO: 359424 - DNA, 33 bp, Homo sapien
aaacatacatgtgaaagaagagaaatgatgagt

SEQ ID NO: 359425 - DNA, 33 bp, Homo sapien
aggtagaccttcttaaaacatagctgttacccc

SEQ ID NO: 359426 - DNA, 33 bp, Homo sapien
aggtagaccttcttaacacatagctgttacccc

SEQ ID NO: 359427 - DNA, 33 bp, Homo sapien
agactactatgatatcaaacaaccataacagtg

SEQ ID NO: 359428 - DNA, 33 bp, Homo sapien
agactactatgatatcgaacaaccataacagtg

SEQ ID NO: 359429 - DNA, 33 bp, Homo sapien
attgctatattctctggatatggaacaaatgaa

SEQ ID NO: 359430 - DNA, 33 bp, Homo sapien
attgctatattctctgtatatggaacaaatgaa

SEQ ID NO: 359431 - DNA, 33 bp, Homo sapien
cacaagacctactgaccgcactcttgggcattt

SEQ ID NO: 359432 - DNA, 33 bp, Homo sapien
cacaagacctactgactgcactcttgggcattt

SEQ ID NO: 359433 - DNA, 33 bp, Homo sapien
aaaaggtctgaacttaataaactataatttgtc

SEQ ID NO: 359434 - DNA, 33 bp, Homo sapien
aaaaggtctgaacttactaaactataatttgtc

SEQ ID NO: 359435 - DNA, 33 bp, Homo sapien
cctagagatatcttggacagcagcttcgctggg

SEQ ID NO: 359436 - DNA, 33 bp, Homo sapien
cctagagatatcttggtcagcagcttcgctggg

SEQ ID NO: 359437 - DNA, 33 bp, Homo sapien
gtgatggttgaagtcacacaaagctgccagcct

SEQ ID NO: 359438 - DNA, 33 bp, Homo sapien
gtgatggttgaagtcatacaaagctgccagcct

SEQ ID NO: 359439 - DNA, 33 bp, Homo sapien
tctctttttatggtcaacatacctttacattgt

SEQ ID NO: 359440 - DNA, 33 bp, Homo sapien
tctctttttatggtcatcatacctttacattgt

SEQ ID NO: 359441 - DNA, 33 bp, Homo sapien
tccagggagtatctacactgtcagcaagcttct

SEQ ID NO: 359442 - DNA, 33 bp, Homo sapien
tccagggagtatctactctgtcagcaagcttct

SEQ ID NO: 359443 - DNA, 33 bp, Homo sapien
cttggacaatcactcacgtacccaaatgtgttc

SEQ ID NO: 359444 - DNA, 33 bp, Homo sapien
cttggacaatcactcatgtacccaaatgtgttc

SEQ ID NO: 359445 - DNA, 33 bp, Homo sapien
gcagaaattgtgaacactgactttcccagtttt

SEQ ID NO: 359446 - DNA, 33 bp, Homo sapien
gcagaaattgtgaacagtgactttcccagtttt

SEQ ID NO: 359447 - DNA, 33 bp, Homo sapien
gggtttagtggaccatgatccaaactttctgta

SEQ ID NO: 359448 - DNA, 33 bp, Homo sapien
gggtttagtggaccattatccaaactttctgta

SEQ ID NO: 359449 - DNA, 33 bp, Homo sapien
ctctctctttttttcaatagaatgcgtgcatat

SEQ ID NO: 359450 - DNA, 33 bp, Homo sapien
ctctctctttttttcagtagaatgcgtgcatat

SEQ ID NO: 359451 - DNA, 33 bp, Homo sapien
agaacaaactaacacactagaattttgagactt

SEQ ID NO: 359452 - DNA, 33 bp, Homo sapien
agaacaaactaacacagtagaattttgagactt

SEQ ID NO: 359453 - DNA, 33 bp, Homo sapien
gcggatctgaaagctacgtgtcaggatctcggg

SEQ ID NO: 359454 - DNA, 33 bp, Homo sapien
gcggatctgaaagctatgtgtcaggatctcggg

SEQ ID NO: 359455 - DNA, 33 bp, Homo sapien
gtagcttgtaagatgcaccacacaacatgcctg

SEQ ID NO: 359456 - DNA, 33 bp, Homo sapien
gtagcttgtaagatgcgccacacaacatgcctg

SEQ ID NO: 359457 - DNA, 33 bp, Homo sapien
taaaggagaaatgtgaacgtacccaaatgtaga

SEQ ID NO: 359458 - DNA, 33 bp, Homo sapien
taaaggagaaatgtgagcgtacccaaatgtaga

SEQ ID NO: 359459 - DNA, 33 bp, Homo sapien
aatgagtccatgcctacgtttagaaaatatagc

SEQ ID NO: 359460 - DNA, 33 bp, Homo sapien
aatgagtccatgcctatgtttagaaaatatagc

SEQ ID NO: 359461 - DNA, 33 bp, Homo sapien
ggtttaataacttgcccgaaatatatgtgtaca

SEQ ID NO: 359462 - DNA, 33 bp, Homo sapien
ggtttaataacttgcctgaaatatatgtgtaca

SEQ ID NO: 359463 - DNA, 33 bp, Homo sapien
tgaaatttaacagcaactaaaaatgtgcaacat

SEQ ID NO: 359464 - DNA, 33 bp, Homo sapien
tgaaatttaacagcaagtaaaaatgtgcaacat

SEQ ID NO: 359465 - DNA, 33 bp, Homo sapien
gcctgctggtgggaagaaatctccagatatttt

SEQ ID NO: 359466 - DNA, 33 bp, Homo sapien
gcctgctggtgggaaggaatctccagatatttt

SEQ ID NO: 359467 - DNA, 33 bp, Homo sapien
attttttttagtagtaaccatcttaatggaagt

SEQ ID NO: 359468 - DNA, 33 bp, Homo sapien
attttttttagtagtagccatcttaatggaagt

SEQ ID NO: 359469 - DNA, 33 bp, Homo sapien
ttgagagatatttgtacgccaatattcagagca

SEQ ID NO: 359470 - DNA, 33 bp, Homo sapien
ttgagagatatttgtatgccaatattcagagca

SEQ ID NO: 359471 - DNA, 33 bp, Homo sapien
attcctagggttttaaatcaaatccacatcctt

SEQ ID NO: 359472 - DNA, 33 bp, Homo sapien
attcctagggttttaagtcaaatccacatcctt

SEQ ID NO: 359473 - DNA, 33 bp, Homo sapien
aagctgtgcccctacccggaagagctctccttc

SEQ ID NO: 359474 - DNA, 33 bp, Homo sapien
aagctgtgcccctacctggaagagctctccttc

SEQ ID NO: 359475 - DNA, 33 bp, Homo sapien
ttctcacatgaactgcgaccatcctccgccacc

SEQ ID NO: 359476 - DNA, 33 bp, Homo sapien
ttctcacatgaactgctaccatcctccgccacc

SEQ ID NO: 359477 - DNA, 33 bp, Homo sapien
tggttttgctttctgagattttgattacccaca

SEQ ID NO: 359478 - DNA, 33 bp, Homo sapien
tggttttgctttctgatattttgattacccaca

SEQ ID NO: 359479 - DNA, 33 bp, Homo sapien
atttccaggcgactataaattgtgaggaaatgg

SEQ ID NO: 359480 - DNA, 33 bp, Homo sapien
atttccaggcgactatcaattgtgaggaaatgg

SEQ ID NO: 359481 - DNA, 33 bp, Homo sapien
ccttaggtcatataaccgttacgtgaaagatac

SEQ ID NO: 359482 - DNA, 33 bp, Homo sapien
ccttaggtcatataactgttacgtgaaagatac

SEQ ID NO: 359483 - DNA, 33 bp, Homo sapien
atattgtcataagaacaatgggctgtaaagtgc

SEQ ID NO: 359484 - DNA, 33 bp, Homo sapien
atattgtcataagaacgatgggctgtaaagtgc

SEQ ID NO: 359485 - DNA, 33 bp, Homo sapien
ggtggacaaaaagaaacgggagctcacagttcc

SEQ ID NO: 359486 - DNA, 33 bp, Homo sapien
ggtggacaaaaagaaatgggagctcacagttcc

SEQ ID NO: 359487 - DNA, 33 bp, Homo sapien
ggctacattttgatcacgaggaacatgtaagag

SEQ ID NO: 359488 - DNA, 33 bp, Homo sapien
ggctacattttgatcatgaggaacatgtaagag

SEQ ID NO: 359489 - DNA, 33 bp, Homo sapien
ttctattgatctaagaactgctttataagctct

SEQ ID NO: 359490 - DNA, 33 bp, Homo sapien
ttctattgatctaagagctgctttataagctct

SEQ ID NO: 359491 - DNA, 33 bp, Homo sapien
tgtaaatagctagaccaatagcatctaaatacc

SEQ ID NO: 359492 - DNA, 33 bp, Homo sapien
tgtaaatagctagaccgatagcatctaaatacc

SEQ ID NO: 359493 - DNA, 33 bp, Homo sapien
acacacaatatggtaaccgtggctgagaactgg

SEQ ID NO: 359494 - DNA, 33 bp, Homo sapien
acacacaatatggtaatcgtggctgagaactgg

SEQ ID NO: 359495 - DNA, 33 bp, Homo sapien
aagttcttgtctcatacctgttttgatgattcc

SEQ ID NO: 359496 - DNA, 33 bp, Homo sapien
aagttcttgtctcatatctgttttgatgattcc

SEQ ID NO: 359497 - DNA, 33 bp, Homo sapien
tttttattgtctgaagaagattgtgtaggctag

SEQ ID NO: 359498 - DNA, 33 bp, Homo sapien
tttttattgtctgaagcagattgtgtaggctag

SEQ ID NO: 359499 - DNA, 33 bp, Homo sapien
catgtcttttgctcaactgtttatttggctgct

SEQ ID NO: 359500 - DNA, 33 bp, Homo sapien
catgtcttttgctcaattgtttatttggctgct

SEQ ID NO: 359501 - DNA, 33 bp, Homo sapien
accacagcaaatgtgggagaaaacaagagaaag

SEQ ID NO: 359502 - DNA, 33 bp, Homo sapien
accacagcaaatgtggtagaaaacaagagaaag

SEQ ID NO: 359503 - DNA, 33 bp, Homo sapien
atcatttttgatttggacaatttaattgatatg

SEQ ID NO: 359504 - DNA, 33 bp, Homo sapien
atcatttttgatttggccaatttaattgatatg

SEQ ID NO: 359505 - DNA, 33 bp, Homo sapien
tatctgaagtaacacacggtgaatggactccca

SEQ ID NO: 359506 - DNA, 33 bp, Homo sapien
tatctgaagtaacacatggtgaatggactccca

SEQ ID NO: 359507 - DNA, 33 bp, Homo sapien
agtcctctgtagataccgagggtcaactgttac

SEQ ID NO: 359508 - DNA, 33 bp, Homo sapien
agtcctctgtagatactgagggtcaactgttac

SEQ ID NO: 359509 - DNA, 33 bp, Homo sapien
gcaaacagaacttcagaaatatttgaccttagt

SEQ ID NO: 359510 - DNA, 33 bp, Homo sapien
gcaaacagaacttcaggaatatttgaccttagt

SEQ ID NO: 359511 - DNA, 33 bp, Homo sapien
tattaggaatcaccacgcctgcttttctcaagt

SEQ ID NO: 359512 - DNA, 33 bp, Homo sapien
tattaggaatcaccactcctgcttttctcaagt

SEQ ID NO: 359513 - DNA, 33 bp, Homo sapien
tctgataacaaagacactcaatgtgatccggag

SEQ ID NO: 359514 - DNA, 33 bp, Homo sapien
tctgataacaaagacattcaatgtgatccggag

SEQ ID NO: 359515 - DNA, 33 bp, Homo sapien
aaagtcatcttttctgcaaccaggaatgacctt

SEQ ID NO: 359516 - DNA, 33 bp, Homo sapien
aaagtcatcttttctggaaccaggaatgacctt

SEQ ID NO: 359517 - DNA, 33 bp, Homo sapien
acctctctctttgacacatcttgataagtgtat

SEQ ID NO: 359518 - DNA, 33 bp, Homo sapien
acctctctctttgacagatcttgataagtgtat

SEQ ID NO: 359519 - DNA, 33 bp, Homo sapien
ggacattatactttcccgattccctacaagttc

SEQ ID NO: 359520 - DNA, 33 bp, Homo sapien
ggacattatactttcctgattccctacaagttc

SEQ ID NO: 359521 - DNA, 33 bp, Homo sapien
tcatttgataattgaaagattggttaagaaaag

SEQ ID NO: 359522 - DNA, 33 bp, Homo sapien
tcatttgataattgaaggattggttaagaaaag

SEQ ID NO: 359523 - DNA, 33 bp, Homo sapien
ttagaatacttcaaaaatacgaagaaaactata

SEQ ID NO: 359524 - DNA, 33 bp, Homo sapien
ttagaatacttcaaaactacgaagaaaactata

SEQ ID NO: 359525 - DNA, 33 bp, Homo sapien
agccccagttcctccaagaaatctatctcatct

SEQ ID NO: 359526 - DNA, 33 bp, Homo sapien
agccccagttcctccaggaaatctatctcatct

SEQ ID NO: 359527 - DNA, 33 bp, Homo sapien
agagctggatctgggaggtaagagagagaaagc

SEQ ID NO: 359528 - DNA, 33 bp, Homo sapien
agagctggatctgggatgtaagagagagaaagc

SEQ ID NO: 359529 - DNA, 33 bp, Homo sapien
caacatttggtgaccaggtcagaaaaacgcagg

SEQ ID NO: 359530 - DNA, 33 bp, Homo sapien
caacatttggtgaccatgtcagaaaaacgcagg

SEQ ID NO: 359531 - DNA, 33 bp, Homo sapien
atatctttctgctgcacattactgctgatcatt

SEQ ID NO: 359532 - DNA, 33 bp, Homo sapien
atatctttctgctgcatattactgctgatcatt

SEQ ID NO: 359533 - DNA, 33 bp, Homo sapien
ggatgctttagagtcaaataagttaatatgcat

SEQ ID NO: 359534 - DNA, 33 bp, Homo sapien
ggatgctttagagtcacataagttaatatgcat

SEQ ID NO: 359535 - DNA, 33 bp, Homo sapien
ggggaagaaaaaattacgtcaaatgctgattaa

SEQ ID NO: 359536 - DNA, 33 bp, Homo sapien
ggggaagaaaaaattatgtcaaatgctgattaa

SEQ ID NO: 359537 - DNA, 33 bp, Homo sapien
gatagtgcctaccacactacattgcagagattt

SEQ ID NO: 359538 - DNA, 33 bp, Homo sapien
gatagtgcctaccacattacattgcagagattt

SEQ ID NO: 359539 - DNA, 33 bp, Homo sapien
tagccggaatgttttacggagcatcaaaggaca

SEQ ID NO: 359540 - DNA, 33 bp, Homo sapien
tagccggaatgttttatggagcatcaaaggaca

SEQ ID NO: 359541 - DNA, 33 bp, Homo sapien
ttatccctggaagttgcaaatgcagttgtagta

SEQ ID NO: 359542 - DNA, 33 bp, Homo sapien
ttatccctggaagttgtaaatgcagttgtagta

SEQ ID NO: 359543 - DNA, 33 bp, Homo sapien
catgctaggacacagacagagagtatcatttat

SEQ ID NO: 359544 - DNA, 33 bp, Homo sapien
catgctaggacacagagagagagtatcatttat

SEQ ID NO: 359545 - DNA, 33 bp, Homo sapien
gtttattgtacaaaataatcaaaaggtgttgca

SEQ ID NO: 359546 - DNA, 33 bp, Homo sapien
gtttattgtacaaaattatcaaaaggtgttgca

SEQ ID NO: 359547 - DNA, 33 bp, Homo sapien
ttgagagtaactgttgagactaaggtttagaaa

SEQ ID NO: 359548 - DNA, 33 bp, Homo sapien
ttgagagtaactgttgggactaaggtttagaaa

SEQ ID NO: 359549 - DNA, 33 bp, Homo sapien
aggatcactcagttttcaaaaaatggccaaggg

SEQ ID NO: 359550 - DNA, 33 bp, Homo sapien
aggatcactcagttttgaaaaaatggccaaggg

SEQ ID NO: 359551 - DNA, 33 bp, Homo sapien
gatcttgagtagctcacataagctctttaagcc

SEQ ID NO: 359552 - DNA, 33 bp, Homo sapien
gatcttgagtagctcatataagctctttaagcc

SEQ ID NO: 359553 - DNA, 33 bp, Homo sapien
atctaatcttttcctaagtaccttcccagggtc

SEQ ID NO: 359554 - DNA, 33 bp, Homo sapien
atctaatcttttcctacgtaccttcccagggtc

SEQ ID NO: 359555 - DNA, 33 bp, Homo sapien
gaactgtgataaaataaatttctctggtatttt

SEQ ID NO: 359556 - DNA, 33 bp, Homo sapien
gaactgtgataaaatagatttctctggtatttt

SEQ ID NO: 359557 - DNA, 33 bp, Homo sapien
tatgttatttataacactgtcatttccgacagt

SEQ ID NO: 359558 - DNA, 33 bp, Homo sapien
tatgttatttataacattgtcatttccgacagt

SEQ ID NO: 359559 - DNA, 33 bp, Homo sapien
cttcttatggcagatacatcaagtaaagttact

SEQ ID NO: 359560 - DNA, 33 bp, Homo sapien
cttcttatggcagatatatcaagtaaagttact

SEQ ID NO: 359561 - DNA, 33 bp, Homo sapien
ccattgtcctcctctacaaaatgtgtgtaatca

SEQ ID NO: 359562 - DNA, 33 bp, Homo sapien
ccattgtcctcctctataaaatgtgtgtaatca

SEQ ID NO: 359563 - DNA, 33 bp, Homo sapien
aggtaggggttttgcacgttagcaagctgaagc

SEQ ID NO: 359564 - DNA, 33 bp, Homo sapien
aggtaggggttttgcaggttagcaagctgaagc

SEQ ID NO: 359565 - DNA, 33 bp, Homo sapien
caagtaaatatttcaactcaaatataggccatt

SEQ ID NO: 359566 - DNA, 33 bp, Homo sapien
caagtaaatatttcaagtcaaatataggccatt

SEQ ID NO: 359567 - DNA, 33 bp, Homo sapien
tgaatgaaggattctacgatgtatttgatacat

SEQ ID NO: 359568 - DNA, 33 bp, Homo sapien
tgaatgaaggattctatgatgtatttgatacat

SEQ ID NO: 359569 - DNA, 33 bp, Homo sapien
gggatagaacacagaaccactcaaggccaattc

SEQ ID NO: 359570 - DNA, 33 bp, Homo sapien
gggatagaacacagaatcactcaaggccaattc

SEQ ID NO: 359571 - DNA, 33 bp, Homo sapien
ccataagtaagtacaacgacaaacacagaaaat

SEQ ID NO: 359572 - DNA, 33 bp, Homo sapien
ccataagtaagtacaatgacaaacacagaaaat

SEQ ID NO: 359573 - DNA, 33 bp, Homo sapien
ggagaaatcaccaggacgatgcaacaagaaaaa

SEQ ID NO: 359574 - DNA, 33 bp, Homo sapien
ggagaaatcaccaggatgatgcaacaagaaaaa

SEQ ID NO: 359575 - DNA, 33 bp, Homo sapien
catggaaatgctagtaagaatgtaattccatag

SEQ ID NO: 359576 - DNA, 33 bp, Homo sapien
catggaaatgctagtacgaatgtaattccatag

SEQ ID NO: 359577 - DNA, 33 bp, Homo sapien
ctttcatttttaggtgacaaaaggaagcttagt

SEQ ID NO: 359578 - DNA, 33 bp, Homo sapien
ctttcatttttaggtggcaaaaggaagcttagt

SEQ ID NO: 359579 - DNA, 33 bp, Homo sapien
aattcagcctttactccactaagctgggataaa

SEQ ID NO: 359580 - DNA, 33 bp, Homo sapien
aattcagcctttactctactaagctgggataaa

SEQ ID NO: 359581 - DNA, 33 bp, Homo sapien
tctttccaatgtaagacagaagaagtcacagag

SEQ ID NO: 359582 - DNA, 33 bp, Homo sapien
tctttccaatgtaagatagaagaagtcacagag

SEQ ID NO: 359583 - DNA, 33 bp, Homo sapien
ggtcctgtgcaaggcccaggcgtttaaaaacaa

SEQ ID NO: 359584 - DNA, 33 bp, Homo sapien
ggtcctgtgcaaggcctaggcgtttaaaaacaa

SEQ ID NO: 359585 - DNA, 33 bp, Homo sapien
actctgaatgattgagcctattttgtttgctgg

SEQ ID NO: 359586 - DNA, 33 bp, Homo sapien
actctgaatgattgaggctattttgtttgctgg

SEQ ID NO: 359587 - DNA, 33 bp, Homo sapien
ataatctcctgtcttacgtggctgtcatgagtt

SEQ ID NO: 359588 - DNA, 33 bp, Homo sapien
ataatctcctgtcttatgtggctgtcatgagtt

SEQ ID NO: 359589 - DNA, 33 bp, Homo sapien
ttttctcttttgaagacgatttttgtgtaacat

SEQ ID NO: 359590 - DNA, 33 bp, Homo sapien
ttttctcttttgaagatgatttttgtgtaacat

SEQ ID NO: 359591 - DNA, 33 bp, Homo sapien
tagccctactgtgaaccggacctcagtgaaatt

SEQ ID NO: 359592 - DNA, 33 bp, Homo sapien
tagccctactgtgaactggacctcagtgaaatt

SEQ ID NO: 359593 - DNA, 33 bp, Homo sapien
cactaagccagttttacccaatgttcaatcatg

SEQ ID NO: 359594 - DNA, 33 bp, Homo sapien
cactaagccagttttatccaatgttcaatcatg

SEQ ID NO: 359595 - DNA, 33 bp, Homo sapien
gtactgatagatcaaaatcatgattgaacattg

SEQ ID NO: 359596 - DNA, 33 bp, Homo sapien
gtactgatagatcaaagtcatgattgaacattg

SEQ ID NO: 359597 - DNA, 33 bp, Homo sapien
taaatcaccaagtaaaaagcaattctctcttga

SEQ ID NO: 359598 - DNA, 33 bp, Homo sapien
taaatcaccaagtaaacagcaattctctcttga

SEQ ID NO: 359599 - DNA, 33 bp, Homo sapien
ggctgacagatagcttcaactgattagggaaaa

SEQ ID NO: 359600 - DNA, 33 bp, Homo sapien
ggctgacagatagcttgaactgattagggaaaa

SEQ ID NO: 359601 - DNA, 33 bp, Homo sapien
gatggccacagagaacagaagtaaacacctggc

SEQ ID NO: 359602 - DNA, 33 bp, Homo sapien
gatggccacagagaacggaagtaaacacctggc

SEQ ID NO: 359603 - DNA, 33 bp, Homo sapien
tgtggcaaatttcaagcatctaatatgcaggtc

SEQ ID NO: 359604 - DNA, 33 bp, Homo sapien
tgtggcaaatttcaaggatctaatatgcaggtc

SEQ ID NO: 359605 - DNA, 33 bp, Homo sapien
tcactaattaatgtcaaaagtgaaatatatatg

SEQ ID NO: 359606 - DNA, 33 bp, Homo sapien
tcactaattaatgtcagaagtgaaatatatatg

SEQ ID NO: 359607 - DNA, 33 bp, Homo sapien
ctcttcacagggcgaccggagaaaaagtgccag

SEQ ID NO: 359608 - DNA, 33 bp, Homo sapien
ctcttcacagggcgactggagaaaaagtgccag

SEQ ID NO: 359609 - DNA, 33 bp, Homo sapien
aggtctccagcctgctaaatacatatcttggac

SEQ ID NO: 359610 - DNA, 33 bp, Homo sapien
aggtctccagcctgctgaatacatatcttggac

SEQ ID NO: 359611 - DNA, 33 bp, Homo sapien
cagatatttggttaaacagtattttgcaggtgt

SEQ ID NO: 359612 - DNA, 33 bp, Homo sapien
cagatatttggttaaagagtattttgcaggtgt

SEQ ID NO: 359613 - DNA, 33 bp, Homo sapien
cgtacatctactaaaacgccggttatcgcatgg

SEQ ID NO: 359614 - DNA, 33 bp, Homo sapien
cgtacatctactaaaatgccggttatcgcatgg

SEQ ID NO: 359615 - DNA, 33 bp, Homo sapien
ctaaaagagtaaatgaaactgtacccataatta

SEQ ID NO: 359616 - DNA, 33 bp, Homo sapien
ctaaaagagtaaatgagactgtacccataatta

SEQ ID NO: 359617 - DNA, 33 bp, Homo sapien
gggagcaaatcctaaacctcagaccactcactc

SEQ ID NO: 359618 - DNA, 33 bp, Homo sapien
gggagcaaatcctaaatctcagaccactcactc

SEQ ID NO: 359619 - DNA, 33 bp, Homo sapien
aactgttagaaacatacacaaacaggcctctta

SEQ ID NO: 359620 - DNA, 33 bp, Homo sapien
aactgttagaaacatatacaaacaggcctctta

SEQ ID NO: 359621 - DNA, 33 bp, Homo sapien
catcctgcttccaaggcagatgcttttgctatt

SEQ ID NO: 359622 - DNA, 33 bp, Homo sapien
catcctgcttccaaggtagatgcttttgctatt

SEQ ID NO: 359623 - DNA, 33 bp, Homo sapien
ccaccaaggtaactgcaatacattcattaaagg

SEQ ID NO: 359624 - DNA, 33 bp, Homo sapien
ccaccaaggtaactgcgatacattcattaaagg

SEQ ID NO: 359625 - DNA, 33 bp, Homo sapien
ctattctctgggtctcccacggttattcacagt

SEQ ID NO: 359626 - DNA, 33 bp, Homo sapien
ctattctctgggtctctcacggttattcacagt

SEQ ID NO: 359627 - DNA, 33 bp, Homo sapien
agaacacagaatcctacgtagaacgtccatcat

SEQ ID NO: 359628 - DNA, 33 bp, Homo sapien
agaacacagaatcctatgtagaacgtccatcat

SEQ ID NO: 359629 - DNA, 33 bp, Homo sapien
gtacaggatgtgttccacttggtctaacttctt

SEQ ID NO: 359630 - DNA, 33 bp, Homo sapien
gtacaggatgtgttccgcttggtctaacttctt

SEQ ID NO: 359631 - DNA, 33 bp, Homo sapien
tcatgtacccttttgacagggctcggtgttcat

SEQ ID NO: 359632 - DNA, 33 bp, Homo sapien
tcatgtacccttttgatagggctcggtgttcat

SEQ ID NO: 359633 - DNA, 33 bp, Homo sapien
ttcttgtctcttggtacgtgctgactcaaacac

SEQ ID NO: 359634 - DNA, 33 bp, Homo sapien
ttcttgtctcttggtatgtgctgactcaaacac

SEQ ID NO: 359635 - DNA, 33 bp, Homo sapien
atgtgaaagatggcttaaacatgaactagcaaa

SEQ ID NO: 359636 - DNA, 33 bp, Homo sapien
atgtgaaagatggcttcaacatgaactagcaaa

SEQ ID NO: 359637 - DNA, 33 bp, Homo sapien
atgttatgaagaaggaagctgcaccataggtac

SEQ ID NO: 359638 - DNA, 33 bp, Homo sapien
atgttatgaagaaggaggctgcaccataggtac

SEQ ID NO: 359639 - DNA, 33 bp, Homo sapien
ccccactccaagagtaataagggttgattcaga

SEQ ID NO: 359640 - DNA, 33 bp, Homo sapien
ccccactccaagagtagtaagggttgattcaga

SEQ ID NO: 359641 - DNA, 33 bp, Homo sapien
tgaatcttggatctaaaggcaaatgctaaaata

SEQ ID NO: 359642 - DNA, 33 bp, Homo sapien
tgaatcttggatctaacggcaaatgctaaaata

SEQ ID NO: 359643 - DNA, 33 bp, Homo sapien
tgttctcgtgatagtgaatataacggagagtcc

SEQ ID NO: 359644 - DNA, 33 bp, Homo sapien
tgttctcgtgatagtggatataacggagagtcc

SEQ ID NO: 359645 - DNA, 33 bp, Homo sapien
aagttcagaaaaattacgtgactttcctaacaa

SEQ ID NO: 359646 - DNA, 33 bp, Homo sapien
aagttcagaaaaattaggtgactttcctaacaa

SEQ ID NO: 359647 - DNA, 33 bp, Homo sapien
taggtcctagcagagacaaaacacttgactatg

SEQ ID NO: 359648 - DNA, 33 bp, Homo sapien
taggtcctagcagagataaaacacttgactatg

SEQ ID NO: 359649 - DNA, 33 bp, Homo sapien
atgggttggattaacacgcccaaatttggtata

SEQ ID NO: 359650 - DNA, 33 bp, Homo sapien
atgggttggattaacatgcccaaatttggtata

SEQ ID NO: 359651 - DNA, 33 bp, Homo sapien
gtttctaagtgaaagcacagtacctaagcaaga

SEQ ID NO: 359652 - DNA, 33 bp, Homo sapien
gtttctaagtgaaagcccagtacctaagcaaga

SEQ ID NO: 359653 - DNA, 33 bp, Homo sapien
gaaagggcagtacttacagaaggtcaattgtgg

SEQ ID NO: 359654 - DNA, 33 bp, Homo sapien
gaaagggcagtacttatagaaggtcaattgtgg

SEQ ID NO: 359655 - DNA, 33 bp, Homo sapien
tcttgagatcaaattgaacttttccagggagaa

SEQ ID NO: 359656 - DNA, 33 bp, Homo sapien
tcttgagatcaaattgcacttttccagggagaa

SEQ ID NO: 359657 - DNA, 33 bp, Homo sapien
cagagctgtcctttcacgcatagctgtcctcac

SEQ ID NO: 359658 - DNA, 33 bp, Homo sapien
cagagctgtcctttcatgcatagctgtcctcac

SEQ ID NO: 359659 - DNA, 33 bp, Homo sapien
ggctttgcatcatgtaaaaaaacaaactcaatt

SEQ ID NO: 359660 - DNA, 33 bp, Homo sapien
ggctttgcatcatgtagaaaaacaaactcaatt

SEQ ID NO: 359661 - DNA, 33 bp, Homo sapien
atataatttgcggaaaaattttcaaatctaggc

SEQ ID NO: 359662 - DNA, 33 bp, Homo sapien
atataatttgcggaaatattttcaaatctaggc

SEQ ID NO: 359663 - DNA, 33 bp, Homo sapien
aataactcaaaaggcaaaaatctgtggtgttca

SEQ ID NO: 359664 - DNA, 33 bp, Homo sapien
aataactcaaaaggcagaaatctgtggtgttca

SEQ ID NO: 359665 - DNA, 33 bp, Homo sapien
taaaagtatcgctgtacggaaattttacagaag

SEQ ID NO: 359666 - DNA, 33 bp, Homo sapien
taaaagtatcgctgtatggaaattttacagaag

SEQ ID NO: 359667 - DNA, 33 bp, Homo sapien
tctgggatcaaagaaacatgaacagccagaaaa

SEQ ID NO: 359668 - DNA, 33 bp, Homo sapien
tctgggatcaaagaaagatgaacagccagaaaa

SEQ ID NO: 359669 - DNA, 33 bp, Homo sapien
caccgtgaccttaacaactgtgtgctctattct

SEQ ID NO: 359670 - DNA, 33 bp, Homo sapien
caccgtgaccttaacatctgtgtgctctattct

SEQ ID NO: 359671 - DNA, 33 bp, Homo sapien
actcacattgagacaacaataaaatcaagtttt

SEQ ID NO: 359672 - DNA, 33 bp, Homo sapien
actcacattgagacaataataaaatcaagtttt

SEQ ID NO: 359673 - DNA, 33 bp, Homo sapien
ctgaattgagataacactgaagattttattgct

SEQ ID NO: 359674 - DNA, 33 bp, Homo sapien
ctgaattgagataacattgaagattttattgct

SEQ ID NO: 359675 - DNA, 33 bp, Homo sapien
ggccatacaaagatcaactatgagatttgaaag

SEQ ID NO: 359676 - DNA, 33 bp, Homo sapien
ggccatacaaagatcagctatgagatttgaaag

SEQ ID NO: 359677 - DNA, 33 bp, Homo sapien
atttgattaactcagaagagaaatggcatacat

SEQ ID NO: 359678 - DNA, 33 bp, Homo sapien
atttgattaactcagaggagaaatggcatacat

SEQ ID NO: 359679 - DNA, 33 bp, Homo sapien
atggtatagtagcatcccatttaagtaaaacta

SEQ ID NO: 359680 - DNA, 33 bp, Homo sapien
atggtatagtagcatctcatttaagtaaaacta

SEQ ID NO: 359681 - DNA, 33 bp, Homo sapien
aaacgtgagaagtgcaacgtggcaagaaccggg

SEQ ID NO: 359682 - DNA, 33 bp, Homo sapien
aaacgtgagaagtgcagcgtggcaagaaccggg

SEQ ID NO: 359683 - DNA, 33 bp, Homo sapien
acggtaacaagctaaaacctcattatggattct

SEQ ID NO: 359684 - DNA, 33 bp, Homo sapien
acggtaacaagctaaagcctcattatggattct

SEQ ID NO: 359685 - DNA, 33 bp, Homo sapien
tcaggcaatacttcacaataagacaacatctgc

SEQ ID NO: 359686 - DNA, 33 bp, Homo sapien
tcaggcaatacttcacgataagacaacatctgc

SEQ ID NO: 359687 - DNA, 33 bp, Homo sapien
ttcttactcaaacacaccatgaatctaaagtga

SEQ ID NO: 359688 - DNA, 33 bp, Homo sapien
ttcttactcaaacacatcatgaatctaaagtga

SEQ ID NO: 359689 - DNA, 33 bp, Homo sapien
tcatgacccatggatccaagatgtttacagcta

SEQ ID NO: 359690 - DNA, 33 bp, Homo sapien
tcatgacccatggatcgaagatgtttacagcta

SEQ ID NO: 359691 - DNA, 33 bp, Homo sapien
aactcacagaaatcaccgagaactgttgtactt

SEQ ID NO: 359692 - DNA, 33 bp, Homo sapien
aactcacagaaatcactgagaactgttgtactt

SEQ ID NO: 359693 - DNA, 33 bp, Homo sapien
gaaaataaattacccacgtttagtccagatact

SEQ ID NO: 359694 - DNA, 33 bp, Homo sapien
gaaaataaattacccatgtttagtccagatact

SEQ ID NO: 359695 - DNA, 33 bp, Homo sapien
atgagacctatcactcaccaagggaaaataaat

SEQ ID NO: 359696 - DNA, 33 bp, Homo sapien
atgagacctatcactcgccaagggaaaataaat

SEQ ID NO: 359697 - DNA, 33 bp, Homo sapien
agaaaagaacagtgtaaactcgaagaaactatg

SEQ ID NO: 359698 - DNA, 33 bp, Homo sapien
agaaaagaacagtgtacactcgaagaaactatg

SEQ ID NO: 359699 - DNA, 33 bp, Homo sapien
catgccaaacgaaaaacctggaacataagtgac

SEQ ID NO: 359700 - DNA, 33 bp, Homo sapien
catgccaaacgaaaaatctggaacataagtgac

SEQ ID NO: 359701 - DNA, 33 bp, Homo sapien
caggagtcacatttcaaaattcatcagatgctt

SEQ ID NO: 359702 - DNA, 33 bp, Homo sapien
caggagtcacatttcagaattcatcagatgctt

SEQ ID NO: 359703 - DNA, 33 bp, Homo sapien
gcaatgacttgagagaagagcgggcaagagtca

SEQ ID NO: 359704 - DNA, 33 bp, Homo sapien
gcaatgacttgagagaggagcgggcaagagtca

SEQ ID NO: 359705 - DNA, 33 bp, Homo sapien
ctgagaggtcagtggacagatggaaggcaaatc

SEQ ID NO: 359706 - DNA, 33 bp, Homo sapien
ctgagaggtcagtggagagatggaaggcaaatc

SEQ ID NO: 359707 - DNA, 33 bp, Homo sapien
gtgaatggtgtgtataacggaactgtccaggcc

SEQ ID NO: 359708 - DNA, 33 bp, Homo sapien
gtgaatggtgtgtatagcggaactgtccaggcc

SEQ ID NO: 359709 - DNA, 33 bp, Homo sapien
catttaatatgccaagaaccataccatacactt

SEQ ID NO: 359710 - DNA, 33 bp, Homo sapien
catttaatatgccaagcaccataccatacactt

SEQ ID NO: 359711 - DNA, 33 bp, Homo sapien
taaaaatgcgtaaagaaatgaacagtagctgcg

SEQ ID NO: 359712 - DNA, 33 bp, Homo sapien
taaaaatgcgtaaagacatgaacagtagctgcg

SEQ ID NO: 359713 - DNA, 33 bp, Homo sapien
tagttctgtgcacacaatagatgcctgtggccc

SEQ ID NO: 359714 - DNA, 33 bp, Homo sapien
tagttctgtgcacacattagatgcctgtggccc

SEQ ID NO: 359715 - DNA, 33 bp, Homo sapien
caagcatatctgaatcaagaaaagcagacatga

SEQ ID NO: 359716 - DNA, 33 bp, Homo sapien
caagcatatctgaatcgagaaaagcagacatga

SEQ ID NO: 359717 - DNA, 33 bp, Homo sapien
gagtgcaatggtgtccagaagcaattgcacagt

SEQ ID NO: 359718 - DNA, 33 bp, Homo sapien
gagtgcaatggtgtccggaagcaattgcacagt

SEQ ID NO: 359719 - DNA, 33 bp, Homo sapien
gaagactacactttcacgtctatgtctagtact

SEQ ID NO: 359720 - DNA, 33 bp, Homo sapien
gaagactacactttcatgtctatgtctagtact

SEQ ID NO: 359721 - DNA, 33 bp, Homo sapien
tactgttaccctaatcaatttatcttccacatg

SEQ ID NO: 359722 - DNA, 33 bp, Homo sapien
tactgttaccctaatcgatttatcttccacatg

SEQ ID NO: 359723 - DNA, 33 bp, Homo sapien
gtctccggaagcagaagtaaatcactttggcaa

SEQ ID NO: 359724 - DNA, 33 bp, Homo sapien
gtctccggaagcagaattaaatcactttggcaa

SEQ ID NO: 359725 - DNA, 33 bp, Homo sapien
taatgattattatttcaaagatctgactcaata

SEQ ID NO: 359726 - DNA, 33 bp, Homo sapien
taatgattattatttcgaagatctgactcaata

SEQ ID NO: 359727 - DNA, 33 bp, Homo sapien
gttattttgtttgcaaatctttggagattgtct

SEQ ID NO: 359728 - DNA, 33 bp, Homo sapien
gttattttgtttgcaattctttggagattgtct

SEQ ID NO: 359729 - DNA, 33 bp, Homo sapien
taaaatactaattctacgtaagctctttcagaa

SEQ ID NO: 359730 - DNA, 33 bp, Homo sapien
taaaatactaattctatgtaagctctttcagaa

SEQ ID NO: 359731 - DNA, 33 bp, Homo sapien
tgctgtaatttactgaaccttacacatatttgt

SEQ ID NO: 359732 - DNA, 33 bp, Homo sapien
tgctgtaatttactgagccttacacatatttgt

SEQ ID NO: 359733 - DNA, 33 bp, Homo sapien
catcctgcatgaaactgaaccagcttgtgccca

SEQ ID NO: 359734 - DNA, 33 bp, Homo sapien
catcctgcatgaaacttaaccagcttgtgccca

SEQ ID NO: 359735 - DNA, 33 bp, Homo sapien
ttgcattttatgaccacaacttcatggcattta

SEQ ID NO: 359736 - DNA, 33 bp, Homo sapien
ttgcattttatgaccagaacttcatggcattta

SEQ ID NO: 359737 - DNA, 33 bp, Homo sapien
atttctagattatcaaattgaaactcaaaggta

SEQ ID NO: 359738 - DNA, 33 bp, Homo sapien
atttctagattatcaagttgaaactcaaaggta

SEQ ID NO: 359739 - DNA, 33 bp, Homo sapien
agcttgtccatgggccacattttaattactcat

SEQ ID NO: 359740 - DNA, 33 bp, Homo sapien
agcttgtccatgggccgcattttaattactcat

SEQ ID NO: 359741 - DNA, 33 bp, Homo sapien
acacattaggaatcccaacacctccgaatgagt

SEQ ID NO: 359742 - DNA, 33 bp, Homo sapien
acacattaggaatcccgacacctccgaatgagt

SEQ ID NO: 359743 - DNA, 33 bp, Homo sapien
aagtctcagagtcttacccaaagctcatgatac

SEQ ID NO: 359744 - DNA, 33 bp, Homo sapien
aagtctcagagtcttagccaaagctcatgatac

SEQ ID NO: 359745 - DNA, 33 bp, Homo sapien
cactcaggaagtgtttaaaaaatccaaagcctt

SEQ ID NO: 359746 - DNA, 33 bp, Homo sapien
cactcaggaagtgtttgaaaaatccaaagcctt

SEQ ID NO: 359747 - DNA, 33 bp, Homo sapien
cattgattttcattatcaagatcacgaccaatg

SEQ ID NO: 359748 - DNA, 33 bp, Homo sapien
cattgattttcattattaagatcacgaccaatg

SEQ ID NO: 359749 - DNA, 33 bp, Homo sapien
gaatccttacagtccaagaaaccacccttcctt

SEQ ID NO: 359750 - DNA, 33 bp, Homo sapien
gaatccttacagtccaggaaaccacccttcctt

SEQ ID NO: 359751 - DNA, 33 bp, Homo sapien
ttttagtaacaggacaaaatacttaagacatgt

SEQ ID NO: 359752 - DNA, 33 bp, Homo sapien
ttttagtaacaggacagaatacttaagacatgt

SEQ ID NO: 359753 - DNA, 33 bp, Homo sapien
agaaaatctttgtagccgagccgacctgacttt

SEQ ID NO: 359754 - DNA, 33 bp, Homo sapien
agaaaatctttgtagctgagccgacctgacttt

SEQ ID NO: 359755 - DNA, 33 bp, Homo sapien
gtgttctaggtgcagaagaaaaaaccttgaaga

SEQ ID NO: 359756 - DNA, 33 bp, Homo sapien
gtgttctaggtgcagaggaaaaaaccttgaaga

SEQ ID NO: 359757 - DNA, 33 bp, Homo sapien
gggattagatgagacactatctgtgaaagctct

SEQ ID NO: 359758 - DNA, 33 bp, Homo sapien
gggattagatgagacagtatctgtgaaagctct

SEQ ID NO: 359759 - DNA, 33 bp, Homo sapien
agagaggtgtattaaaattagagagggaatgtg

SEQ ID NO: 359760 - DNA, 33 bp, Homo sapien
agagaggtgtattaaagttagagagggaatgtg

SEQ ID NO: 359761 - DNA, 33 bp, Homo sapien
agaatgttaatggccaatcacccagagttagac

SEQ ID NO: 359762 - DNA, 33 bp, Homo sapien
agaatgttaatggccagtcacccagagttagac

SEQ ID NO: 359763 - DNA, 33 bp, Homo sapien
tgtcgaggtggccaaacggaactttagggtcac

SEQ ID NO: 359764 - DNA, 33 bp, Homo sapien
tgtcgaggtggccaaatggaactttagggtcac

SEQ ID NO: 359765 - DNA, 33 bp, Homo sapien
ttcatgagcctgaaaacgtttattgcccaatta

SEQ ID NO: 359766 - DNA, 33 bp, Homo sapien
ttcatgagcctgaaaatgtttattgcccaatta

SEQ ID NO: 359767 - DNA, 33 bp, Homo sapien
ttcacacattcttttacatgaaatgcgggagac

SEQ ID NO: 359768 - DNA, 33 bp, Homo sapien
ttcacacattcttttatatgaaatgcgggagac

SEQ ID NO: 359769 - DNA, 33 bp, Homo sapien
tttgttttgcactccacgaagttattttccatt

SEQ ID NO: 359770 - DNA, 33 bp, Homo sapien
tttgttttgcactccatgaagttattttccatt

SEQ ID NO: 359771 - DNA, 33 bp, Homo sapien
agcatctctgactctcactgatatttattaacg

SEQ ID NO: 359772 - DNA, 33 bp, Homo sapien
agcatctctgactctcgctgatatttattaacg

SEQ ID NO: 359773 - DNA, 33 bp, Homo sapien
aattacttgatcaccaatggaaatccctatatt

SEQ ID NO: 359774 - DNA, 33 bp, Homo sapien
aattacttgatcaccagtggaaatccctatatt

SEQ ID NO: 359775 - DNA, 33 bp, Homo sapien
catattcatgacctctaacctacattgatacat

SEQ ID NO: 359776 - DNA, 33 bp, Homo sapien
catattcatgacctcttacctacattgatacat

SEQ ID NO: 359777 - DNA, 33 bp, Homo sapien
gtgctttccaaaaaagcagggtcaccacaagtc

SEQ ID NO: 359778 - DNA, 33 bp, Homo sapien
gtgctttccaaaaaaggagggtcaccacaagtc

SEQ ID NO: 359779 - DNA, 33 bp, Homo sapien
accaacatccaggagagatatggagaagcctgg

SEQ ID NO: 359780 - DNA, 33 bp, Homo sapien
accaacatccaggagatatatggagaagcctgg

SEQ ID NO: 359781 - DNA, 33 bp, Homo sapien
gaaatgttgctctaagcaggggcagaaaaaatg

SEQ ID NO: 359782 - DNA, 33 bp, Homo sapien
gaaatgttgctctaagtaggggcagaaaaaatg

SEQ ID NO: 359783 - DNA, 33 bp, Homo sapien
tggctaaatagatacaccccaagctgcctgctg

SEQ ID NO: 359784 - DNA, 33 bp, Homo sapien
tggctaaatagatacatcccaagctgcctgctg

SEQ ID NO: 359785 - DNA, 33 bp, Homo sapien
ctatgtagacgatagacagtggcgaaggtaggg

SEQ ID NO: 359786 - DNA, 33 bp, Homo sapien
ctatgtagacgatagatagtggcgaaggtaggg

SEQ ID NO: 359787 - DNA, 33 bp, Homo sapien
aatataatagcttccacacagtgagtgcttacc

SEQ ID NO: 359788 - DNA, 33 bp, Homo sapien
aatataatagcttccatacagtgagtgcttacc

SEQ ID NO: 359789 - DNA, 33 bp, Homo sapien
atcttgctaggtacagaagacacagttcctgtc

SEQ ID NO: 359790 - DNA, 33 bp, Homo sapien
atcttgctaggtacaggagacacagttcctgtc

SEQ ID NO: 359791 - DNA, 33 bp, Homo sapien
gagatttgagatttacaatgatccagcacatag

SEQ ID NO: 359792 - DNA, 33 bp, Homo sapien
gagatttgagatttacgatgatccagcacatag

SEQ ID NO: 359793 - DNA, 33 bp, Homo sapien
tattctctttcttacacggcatgcccaaattgt

SEQ ID NO: 359794 - DNA, 33 bp, Homo sapien
tattctctttcttacatggcatgcccaaattgt

SEQ ID NO: 359795 - DNA, 33 bp, Homo sapien
aaagccagtcctgaaaaattgtcatagcatggg

SEQ ID NO: 359796 - DNA, 33 bp, Homo sapien
aaagccagtcctgaaatattgtcatagcatggg

SEQ ID NO: 359797 - DNA, 33 bp, Homo sapien
tagcaaatgcctaacacagtccctcacagacag

SEQ ID NO: 359798 - DNA, 33 bp, Homo sapien
tagcaaatgcctaacatagtccctcacagacag

SEQ ID NO: 359799 - DNA, 33 bp, Homo sapien
acccatgtgctaaggacgtcacgctgatgacta

SEQ ID NO: 359800 - DNA, 33 bp, Homo sapien
acccatgtgctaaggatgtcacgctgatgacta

SEQ ID NO: 359801 - DNA, 33 bp, Homo sapien
ttatcctcattatatacacaaggaaataggcta

SEQ ID NO: 359802 - DNA, 33 bp, Homo sapien
ttatcctcattatatagacaaggaaataggcta

SEQ ID NO: 359803 - DNA, 33 bp, Homo sapien
acttatctgtataaaaaactacctaccactttt

SEQ ID NO: 359804 - DNA, 33 bp, Homo sapien
acttatctgtataaaagactacctaccactttt

SEQ ID NO: 359805 - DNA, 33 bp, Homo sapien
tttaataggaccacaacgtgatgctcttctgaa

SEQ ID NO: 359806 - DNA, 33 bp, Homo sapien
tttaataggaccacaatgtgatgctcttctgaa

SEQ ID NO: 359807 - DNA, 33 bp, Homo sapien
atagtatcagtaaaaaggagataaagaaaacat

SEQ ID NO: 359808 - DNA, 33 bp, Homo sapien
atagtatcagtaaaaatgagataaagaaaacat

SEQ ID NO: 359809 - DNA, 33 bp, Homo sapien
tcttggtaaaatgaacggaaaaactgctggaaa

SEQ ID NO: 359810 - DNA, 33 bp, Homo sapien
tcttggtaaaatgaactgaaaaactgctggaaa

SEQ ID NO: 359811 - DNA, 33 bp, Homo sapien
tccatcaatggaaaggacatcctaacagaactt

SEQ ID NO: 359812 - DNA, 33 bp, Homo sapien
tccatcaatggaaagggcatcctaacagaactt

SEQ ID NO: 359813 - DNA, 33 bp, Homo sapien
gtcaaacagttcagagaagacagggaagctaaa

SEQ ID NO: 359814 - DNA, 33 bp, Homo sapien
gtcaaacagttcagaggagacagggaagctaaa

SEQ ID NO: 359815 - DNA, 33 bp, Homo sapien
aacagaaagtgctcaacacatcgaggcctttgt

SEQ ID NO: 359816 - DNA, 33 bp, Homo sapien
aacagaaagtgctcaatacatcgaggcctttgt

SEQ ID NO: 359817 - DNA, 33 bp, Homo sapien
cataaatgaacgtcaacactgaaggcaatagaa

SEQ ID NO: 359818 - DNA, 33 bp, Homo sapien
cataaatgaacgtcaagactgaaggcaatagaa

SEQ ID NO: 359819 - DNA, 33 bp, Homo sapien
atcctctgggcttacccctctcctctgcaatcc

SEQ ID NO: 359820 - DNA, 33 bp, Homo sapien
atcctctgggcttacctctctcctctgcaatcc

SEQ ID NO: 359821 - DNA, 33 bp, Homo sapien
tgaaagaactatgcacaatgcttccaggattgc

SEQ ID NO: 359822 - DNA, 33 bp, Homo sapien
tgaaagaactatgcacgatgcttccaggattgc

SEQ ID NO: 359823 - DNA, 33 bp, Homo sapien
gacttgccttattgaaatgatactggcatatct

SEQ ID NO: 359824 - DNA, 33 bp, Homo sapien
gacttgccttattgaactgatactggcatatct

SEQ ID NO: 359825 - DNA, 33 bp, Homo sapien
ttccctatttcatacaccttctaaatcactgca

SEQ ID NO: 359826 - DNA, 33 bp, Homo sapien
ttccctatttcatacatcttctaaatcactgca

SEQ ID NO: 359827 - DNA, 33 bp, Homo sapien
gtgtcatcttgccccaagtctggtctaagcctg

SEQ ID NO: 359828 - DNA, 33 bp, Homo sapien
gtgtcatcttgccccatgtctggtctaagcctg

SEQ ID NO: 359829 - DNA, 33 bp, Homo sapien
tttacctgaaatcccaacattaactggttttga

SEQ ID NO: 359830 - DNA, 33 bp, Homo sapien
tttacctgaaatcccatcattaactggttttga

SEQ ID NO: 359831 - DNA, 33 bp, Homo sapien
ttggtaatacagggaaggccattcagagcttgt

SEQ ID NO: 359832 - DNA, 33 bp, Homo sapien
ttggtaatacagggaatgccattcagagcttgt

SEQ ID NO: 359833 - DNA, 33 bp, Homo sapien
tgcctctgagatgcaacgtgaggtattttgaaa

SEQ ID NO: 359834 - DNA, 33 bp, Homo sapien
tgcctctgagatgcaatgtgaggtattttgaaa

SEQ ID NO: 359835 - DNA, 33 bp, Homo sapien
agacaataaagagatgaacaaacaaacaaatat

SEQ ID NO: 359836 - DNA, 33 bp, Homo sapien
agacaataaagagatgcacaaacaaacaaatat

SEQ ID NO: 359837 - DNA, 33 bp, Homo sapien
tgtagctctgtggaaacgttagtataggaactg

SEQ ID NO: 359838 - DNA, 33 bp, Homo sapien
tgtagctctgtggaaatgttagtataggaactg

SEQ ID NO: 359839 - DNA, 33 bp, Homo sapien
agtgagagactcttaaaaagacaagtgttggaa

SEQ ID NO: 359840 - DNA, 33 bp, Homo sapien
agtgagagactcttaagaagacaagtgttggaa

SEQ ID NO: 359841 - DNA, 33 bp, Homo sapien
aagaggcaataatccaacatttccaatcaatgt

SEQ ID NO: 359842 - DNA, 33 bp, Homo sapien
aagaggcaataatccagcatttccaatcaatgt

SEQ ID NO: 359843 - DNA, 33 bp, Homo sapien
aatgggatctgcaacaaaatcagactcaaacct

SEQ ID NO: 359844 - DNA, 33 bp, Homo sapien
aatgggatctgcaacacaatcagactcaaacct

SEQ ID NO: 359845 - DNA, 33 bp, Homo sapien
ccccaattaatacatgaatataactggggctca

SEQ ID NO: 359846 - DNA, 33 bp, Homo sapien
ccccaattaatacatggatataactggggctca

SEQ ID NO: 359847 - DNA, 33 bp, Homo sapien
tcattcagtattctccacaggacaggcattaca

SEQ ID NO: 359848 - DNA, 33 bp, Homo sapien
tcattcagtattctccgcaggacaggcattaca

SEQ ID NO: 359849 - DNA, 33 bp, Homo sapien
tattcatggaaatggaaactgtaatgcctgtcc

SEQ ID NO: 359850 - DNA, 33 bp, Homo sapien
tattcatggaaatggacactgtaatgcctgtcc

SEQ ID NO: 359851 - DNA, 33 bp, Homo sapien
atgggtgattggagcaaatacggcacagagcaa

SEQ ID NO: 359852 - DNA, 33 bp, Homo sapien
atgggtgattggagcagatacggcacagagcaa

SEQ ID NO: 359853 - DNA, 33 bp, Homo sapien
gactgctggaaatttacagacttctcttatgcc

SEQ ID NO: 359854 - DNA, 33 bp, Homo sapien
gactgctggaaatttagagacttctcttatgcc

SEQ ID NO: 359855 - DNA, 33 bp, Homo sapien
tcatgccagcagtgtaagttctttctgttttta

SEQ ID NO: 359856 - DNA, 33 bp, Homo sapien
tcatgccagcagtgtatgttctttctgttttta

SEQ ID NO: 359857 - DNA, 33 bp, Homo sapien
agcaaagtcgaagtagaccctaagattagtgtc

SEQ ID NO: 359858 - DNA, 33 bp, Homo sapien
agcaaagtcgaagtagcccctaagattagtgtc

SEQ ID NO: 359859 - DNA, 33 bp, Homo sapien
atcttgggctgtcaaaagccaagaaaaaaaaat

SEQ ID NO: 359860 - DNA, 33 bp, Homo sapien
atcttgggctgtcaaaggccaagaaaaaaaaat

SEQ ID NO: 359861 - DNA, 33 bp, Homo sapien
tagacacaaagtctgcacctcctattcagacct

SEQ ID NO: 359862 - DNA, 33 bp, Homo sapien
tagacacaaagtctgcgcctcctattcagacct

SEQ ID NO: 359863 - DNA, 33 bp, Homo sapien
cccttgctgacccacaataccatgccacaagat

SEQ ID NO: 359864 - DNA, 33 bp, Homo sapien
cccttgctgacccacagtaccatgccacaagat

SEQ ID NO: 359865 - DNA, 33 bp, Homo sapien
ccacagactggagagaataatgactaaccaaaa

SEQ ID NO: 359866 - DNA, 33 bp, Homo sapien
ccacagactggagagattaatgactaaccaaaa

SEQ ID NO: 359867 - DNA, 33 bp, Homo sapien
ttgtgagttaatacacagagcaaatataggtgc

SEQ ID NO: 359868 - DNA, 33 bp, Homo sapien
ttgtgagttaatacacggagcaaatataggtgc

SEQ ID NO: 359869 - DNA, 33 bp, Homo sapien
taattgcttacagtcaagcaaaggcagagtgta

SEQ ID NO: 359870 - DNA, 33 bp, Homo sapien
taattgcttacagtcatgcaaaggcagagtgta

SEQ ID NO: 359871 - DNA, 33 bp, Homo sapien
ctatctgtaaaaatgaataatcagtgatcacca

SEQ ID NO: 359872 - DNA, 33 bp, Homo sapien
ctatctgtaaaaatgactaatcagtgatcacca

SEQ ID NO: 359873 - DNA, 33 bp, Homo sapien
ctaagatcaaagttaacagccataaggccttga

SEQ ID NO: 359874 - DNA, 33 bp, Homo sapien
ctaagatcaaagttaagagccataaggccttga

SEQ ID NO: 359875 - DNA, 33 bp, Homo sapien
gggaaaggaagagacaatcaaggccttatggct

SEQ ID NO: 359876 - DNA, 33 bp, Homo sapien
gggaaaggaagagacagtcaaggccttatggct

SEQ ID NO: 359877 - DNA, 33 bp, Homo sapien
gaaaataggacaaaaacatatgaccatgtgcat

SEQ ID NO: 359878 - DNA, 33 bp, Homo sapien
gaaaataggacaaaaagatatgaccatgtgcat

SEQ ID NO: 359879 - DNA, 33 bp, Homo sapien
ctttcttagcctgggaatatctaagcctttatc

SEQ ID NO: 359880 - DNA, 33 bp, Homo sapien
ctttcttagcctgggactatctaagcctttatc

SEQ ID NO: 359881 - DNA, 33 bp, Homo sapien
cttttaattgggatcacgccaggggattagacc

SEQ ID NO: 359882 - DNA, 33 bp, Homo sapien
cttttaattgggatcatgccaggggattagacc

SEQ ID NO: 359883 - DNA, 33 bp, Homo sapien
ttgcatagaaaggaaacatgctgaaggatggga

SEQ ID NO: 359884 - DNA, 33 bp, Homo sapien
ttgcatagaaaggaaagatgctgaaggatggga

SEQ ID NO: 359885 - DNA, 33 bp, Homo sapien
gctgtgagtgatcaatcaccaacttaaggctca

SEQ ID NO: 359886 - DNA, 33 bp, Homo sapien
gctgtgagtgatcaattaccaacttaaggctca

SEQ ID NO: 359887 - DNA, 33 bp, Homo sapien
ccacctgcctattaaaatgcagaaggttttaga

SEQ ID NO: 359888 - DNA, 33 bp, Homo sapien
ccacctgcctattaaactgcagaaggttttaga

SEQ ID NO: 359889 - DNA, 33 bp, Homo sapien
tttattaatgggttaacctacggccatcagcct

SEQ ID NO: 359890 - DNA, 33 bp, Homo sapien
tttattaatgggttaatctacggccatcagcct

SEQ ID NO: 359891 - DNA, 33 bp, Homo sapien
gagtagtttaatcccaagtttccaccagggttc

SEQ ID NO: 359892 - DNA, 33 bp, Homo sapien
gagtagtttaatcccacgtttccaccagggttc

SEQ ID NO: 359893 - DNA, 33 bp, Homo sapien
agtgtgagagccaggactatggaggcttggtgg

SEQ ID NO: 359894 - DNA, 33 bp, Homo sapien
agtgtgagagccaggagtatggaggcttggtgg

SEQ ID NO: 359895 - DNA, 33 bp, Homo sapien
cctgttggaacatctcccctgcaaagatacaca

SEQ ID NO: 359896 - DNA, 33 bp, Homo sapien
cctgttggaacatctctcctgcaaagatacaca

SEQ ID NO: 359897 - DNA, 33 bp, Homo sapien
gggatttgtttggcgaatatccacatctacgag

SEQ ID NO: 359898 - DNA, 33 bp, Homo sapien
gggatttgtttggcgactatccacatctacgag

SEQ ID NO: 359899 - DNA, 33 bp, Homo sapien
ctctaacctcatccagacctcttgcttccacat

SEQ ID NO: 359900 - DNA, 33 bp, Homo sapien
ctctaacctcatccaggcctcttgcttccacat

SEQ ID NO: 359901 - DNA, 33 bp, Homo sapien
cacattaaacttcagaggtccagaagaggcctg

SEQ ID NO: 359902 - DNA, 33 bp, Homo sapien
cacattaaacttcagatgtccagaagaggcctg

SEQ ID NO: 359903 - DNA, 33 bp, Homo sapien
aaagacgtaaaaggtaccagccattaagaaaaa

SEQ ID NO: 359904 - DNA, 33 bp, Homo sapien
aaagacgtaaaaggtatcagccattaagaaaaa

SEQ ID NO: 359905 - DNA, 33 bp, Homo sapien
aaggttgttatttgacagcactaaaatcaagaa

SEQ ID NO: 359906 - DNA, 33 bp, Homo sapien
aaggttgttatttgactgcactaaaatcaagaa

SEQ ID NO: 359907 - DNA, 33 bp, Homo sapien
ttgtactatatgacaaattaatgctaggataca

SEQ ID NO: 359908 - DNA, 33 bp, Homo sapien
ttgtactatatgacaagttaatgctaggataca

SEQ ID NO: 359909 - DNA, 33 bp, Homo sapien
ccgtgtttcttttgcccatcttttttccaactc

SEQ ID NO: 359910 - DNA, 33 bp, Homo sapien
ccgtgtttcttttgcctatcttttttccaactc

SEQ ID NO: 359911 - DNA, 33 bp, Homo sapien
tgtgtctgcaggtatcgagagtgcttccagggc

SEQ ID NO: 359912 - DNA, 33 bp, Homo sapien
tgtgtctgcaggtatctagagtgcttccagggc

SEQ ID NO: 359913 - DNA, 33 bp, Homo sapien
gattttggttaccaacagtcaactgtgttccaa

SEQ ID NO: 359914 - DNA, 33 bp, Homo sapien
gattttggttaccaacggtcaactgtgttccaa

SEQ ID NO: 359915 - DNA, 33 bp, Homo sapien
cacagtacaagcctgaagtctagttattggaaa

SEQ ID NO: 359916 - DNA, 33 bp, Homo sapien
cacagtacaagcctgaggtctagttattggaaa

SEQ ID NO: 359917 - DNA, 33 bp, Homo sapien
ttccaactctaaactgcatggcttcatgaaaga

SEQ ID NO: 359918 - DNA, 33 bp, Homo sapien
ttccaactctaaactgtatggcttcatgaaaga

SEQ ID NO: 359919 - DNA, 33 bp, Homo sapien
ggatgcctcaaggtaaatgccaggaggaaagga

SEQ ID NO: 359920 - DNA, 33 bp, Homo sapien
ggatgcctcaaggtaagtgccaggaggaaagga

SEQ ID NO: 359921 - DNA, 33 bp, Homo sapien
taccagctatccggcactgcaagaccagccaag

SEQ ID NO: 359922 - DNA, 33 bp, Homo sapien
taccagctatccggcattgcaagaccagccaag

SEQ ID NO: 359923 - DNA, 33 bp, Homo sapien
catatcccataaaataccattacacagtgttca

SEQ ID NO: 359924 - DNA, 33 bp, Homo sapien
catatcccataaaatatcattacacagtgttca

SEQ ID NO: 359925 - DNA, 33 bp, Homo sapien
aaatagggattttaaccgctgctcttaaagaac

SEQ ID NO: 359926 - DNA, 33 bp, Homo sapien
aaatagggattttaactgctgctcttaaagaac

SEQ ID NO: 359927 - DNA, 33 bp, Homo sapien
tatgtagaggaaacgacgtctgcttttacttgt

SEQ ID NO: 359928 - DNA, 33 bp, Homo sapien
tatgtagaggaaacgatgtctgcttttacttgt

SEQ ID NO: 359929 - DNA, 33 bp, Homo sapien
gacctagggagatgcacgtctaagaggaaaagt

SEQ ID NO: 359930 - DNA, 33 bp, Homo sapien
gacctagggagatgcaggtctaagaggaaaagt

SEQ ID NO: 359931 - DNA, 33 bp, Homo sapien
cattgctagatatccaatgaagaactaacagcc

SEQ ID NO: 359932 - DNA, 33 bp, Homo sapien
cattgctagatatccagtgaagaactaacagcc

SEQ ID NO: 359933 - DNA, 33 bp, Homo sapien
ttctaccacccatacacgctggaaaagacggca

SEQ ID NO: 359934 - DNA, 33 bp, Homo sapien
ttctaccacccatacatgctggaaaagacggca

SEQ ID NO: 359935 - DNA, 33 bp, Homo sapien
agtacactgtaaaatagaaggtatcgtatagta

SEQ ID NO: 359936 - DNA, 33 bp, Homo sapien
agtacactgtaaaatataaggtatcgtatagta

SEQ ID NO: 359937 - DNA, 33 bp, Homo sapien
ggtggttttcagaacacattgttattctaaatg

SEQ ID NO: 359938 - DNA, 33 bp, Homo sapien
ggtggttttcagaacatattgttattctaaatg

SEQ ID NO: 359939 - DNA, 33 bp, Homo sapien
gtgataaacttgacaaaaatttgctataatttt

SEQ ID NO: 359940 - DNA, 33 bp, Homo sapien
gtgataaacttgacaacaatttgctataatttt

SEQ ID NO: 359941 - DNA, 33 bp, Homo sapien
gcaaggctggaaggaaccttagagcctatcata

SEQ ID NO: 359942 - DNA, 33 bp, Homo sapien
gcaaggctggaaggaatcttagagcctatcata

SEQ ID NO: 359943 - DNA, 33 bp, Homo sapien
attggaagagtccatcgaatgctaagcaggata

SEQ ID NO: 359944 - DNA, 33 bp, Homo sapien
attggaagagtccatctaatgctaagcaggata

SEQ ID NO: 359945 - DNA, 33 bp, Homo sapien
tctaagttagtttctccatgttttggattctat

SEQ ID NO: 359946 - DNA, 33 bp, Homo sapien
tctaagttagtttctctatgttttggattctat

SEQ ID NO: 359947 - DNA, 33 bp, Homo sapien
gctcactctgagataccggtttcttgtacattt

SEQ ID NO: 359948 - DNA, 33 bp, Homo sapien
gctcactctgagatactggtttcttgtacattt

SEQ ID NO: 359949 - DNA, 33 bp, Homo sapien
tgacctgctaatgtgccaccaccaaactctgtg

SEQ ID NO: 359950 - DNA, 33 bp, Homo sapien
tgacctgctaatgtgctaccaccaaactctgtg

SEQ ID NO: 359951 - DNA, 33 bp, Homo sapien
atatttcctctcctacggctgcttttgctcatc

SEQ ID NO: 359952 - DNA, 33 bp, Homo sapien
atatttcctctcctactgctgcttttgctcatc

SEQ ID NO: 359953 - DNA, 33 bp, Homo sapien
gagccatatgccattgcatgagagatcttatgg

SEQ ID NO: 359954 - DNA, 33 bp, Homo sapien
gagccatatgccattgtatgagagatcttatgg

SEQ ID NO: 359955 - DNA, 33 bp, Homo sapien
tggggtggcaccaataacaatctaccaatgtgg

SEQ ID NO: 359956 - DNA, 33 bp, Homo sapien
tggggtggcaccaatagcaatctaccaatgtgg

SEQ ID NO: 359957 - DNA, 33 bp, Homo sapien
agtcattattatcccaaagaagaagacctctca

SEQ ID NO: 359958 - DNA, 33 bp, Homo sapien
agtcattattatcccacagaagaagacctctca

SEQ ID NO: 359959 - DNA, 33 bp, Homo sapien
aacagtcccattttatcactgagaaaaccgagg

SEQ ID NO: 359960 - DNA, 33 bp, Homo sapien
aacagtcccattttattactgagaaaaccgagg

SEQ ID NO: 359961 - DNA, 33 bp, Homo sapien
gtaggttagtttaaaccgaaaattgcaaactgg

SEQ ID NO: 359962 - DNA, 33 bp, Homo sapien
gtaggttagtttaaactgaaaattgcaaactgg

SEQ ID NO: 359963 - DNA, 33 bp, Homo sapien
agcaacatccaagtagaataacctatgtgaata

SEQ ID NO: 359964 - DNA, 33 bp, Homo sapien
agcaacatccaagtaggataacctatgtgaata

SEQ ID NO: 359965 - DNA, 33 bp, Homo sapien
aatgatctctctgatacactggttaaagcatga

SEQ ID NO: 359966 - DNA, 33 bp, Homo sapien
aatgatctctctgatatactggttaaagcatga

SEQ ID NO: 359967 - DNA, 33 bp, Homo sapien
attattatcaaccagagtatggacttcccatgg

SEQ ID NO: 359968 - DNA, 33 bp, Homo sapien
attattatcaaccagattatggacttcccatgg

SEQ ID NO: 359969 - DNA, 33 bp, Homo sapien
gtctatttatcacagaagcccagtactcacact

SEQ ID NO: 359970 - DNA, 33 bp, Homo sapien
gtctatttatcacagaggcccagtactcacact

SEQ ID NO: 359971 - DNA, 33 bp, Homo sapien
actgtcattttgaagcagaaaaaaagtgcaagt

SEQ ID NO: 359972 - DNA, 33 bp, Homo sapien
actgtcattttgaagcggaaaaaaagtgcaagt

SEQ ID NO: 359973 - DNA, 33 bp, Homo sapien
ttccttcttagggcccaaaatactcgagttcag

SEQ ID NO: 359974 - DNA, 33 bp, Homo sapien
ttccttcttagggcccgaaatactcgagttcag

SEQ ID NO: 359975 - DNA, 33 bp, Homo sapien
taagtcatttggaaacagaagtctacactcctg

SEQ ID NO: 359976 - DNA, 33 bp, Homo sapien
taagtcatttggaaacggaagtctacactcctg

SEQ ID NO: 359977 - DNA, 33 bp, Homo sapien
ccacagatgataaaataactcacaaacctgtca

SEQ ID NO: 359978 - DNA, 33 bp, Homo sapien
ccacagatgataaaatcactcacaaacctgtca

SEQ ID NO: 359979 - DNA, 33 bp, Homo sapien
tgaaataggtgttccaaatccagtcaattcttt

SEQ ID NO: 359980 - DNA, 33 bp, Homo sapien
tgaaataggtgttccagatccagtcaattcttt

SEQ ID NO: 359981 - DNA, 33 bp, Homo sapien
aggaaagctggaagtgcaagacttggaaatgga

SEQ ID NO: 359982 - DNA, 33 bp, Homo sapien
aggaaagctggaagtggaagacttggaaatgga

SEQ ID NO: 359983 - DNA, 33 bp, Homo sapien
caaatattccttagtcacataccactaccatgg

SEQ ID NO: 359984 - DNA, 33 bp, Homo sapien
caaatattccttagtcgcataccactaccatgg

SEQ ID NO: 359985 - DNA, 33 bp, Homo sapien
ccaggacagctgtgaacgctcagttgggggtgt

SEQ ID NO: 359986 - DNA, 33 bp, Homo sapien
ccaggacagctgtgaatgctcagttgggggtgt

SEQ ID NO: 359987 - DNA, 33 bp, Homo sapien
aaggaacaaggagacccagcacgctcggagtca

SEQ ID NO: 359988 - DNA, 33 bp, Homo sapien
aaggaacaaggagacctagcacgctcggagtca

SEQ ID NO: 359989 - DNA, 33 bp, Homo sapien
ctatttcatcctcagcaaagagtcagataggaa

SEQ ID NO: 359990 - DNA, 33 bp, Homo sapien
ctatttcatcctcagcgaagagtcagataggaa

SEQ ID NO: 359991 - DNA, 33 bp, Homo sapien
agccctgacttctacacgcaagtgaagagctgt

SEQ ID NO: 359992 - DNA, 33 bp, Homo sapien
agccctgacttctacatgcaagtgaagagctgt

SEQ ID NO: 359993 - DNA, 33 bp, Homo sapien
acttgcaagcgtaatccattgttatgagttatt

SEQ ID NO: 359994 - DNA, 33 bp, Homo sapien
acttgcaagcgtaatctattgttatgagttatt

SEQ ID NO: 359995 - DNA, 33 bp, Homo sapien
gaagcacattcacttaactgcggctgctcctgc

SEQ ID NO: 359996 - DNA, 33 bp, Homo sapien
gaagcacattcacttatctgcggctgctcctgc

SEQ ID NO: 359997 - DNA, 33 bp, Homo sapien
gatgttgtgacttataagtttctactgagccct

SEQ ID NO: 359998 - DNA, 33 bp, Homo sapien
gatgttgtgacttatatgtttctactgagccct

SEQ ID NO: 359999 - DNA, 33 bp, Homo sapien
gcacaggtcactctaacgaatgacagctgtaat

SEQ ID NO: 360000 - DNA, 33 bp, Homo sapien
gcacaggtcactctaatgaatgacagctgtaat

SEQ ID NO: 360001 - DNA, 33 bp, Homo sapien
cattccgtttcctaaactcgttcaactgatccc

SEQ ID NO: 360002 - DNA, 33 bp, Homo sapien
cattccgtttcctaaagtcgttcaactgatccc

SEQ ID NO: 360003 - DNA, 33 bp, Homo sapien
catacaactgaacaaaaattacaggaggaccag

SEQ ID NO: 360004 - DNA, 33 bp, Homo sapien
catacaactgaacaaagattacaggaggaccag

SEQ ID NO: 360005 - DNA, 33 bp, Homo sapien
tttgccaagggagacgacaaaaaagcctccttg

SEQ ID NO: 360006 - DNA, 33 bp, Homo sapien
tttgccaagggagacggcaaaaaagcctccttg

SEQ ID NO: 360007 - DNA, 33 bp, Homo sapien
cttcctcacagtatagaaaaactatgcgacctg

SEQ ID NO: 360008 - DNA, 33 bp, Homo sapien
cttcctcacagtataggaaaactatgcgacctg

SEQ ID NO: 360009 - DNA, 33 bp, Homo sapien
actaccaaacacgccactgctgaatgtggaaca

SEQ ID NO: 360010 - DNA, 33 bp, Homo sapien
actaccaaacacgccattgctgaatgtggaaca

SEQ ID NO: 360011 - DNA, 33 bp, Homo sapien
gagaaatgactgacagacaggtacaagagtgct

SEQ ID NO: 360012 - DNA, 33 bp, Homo sapien
gagaaatgactgacaggcaggtacaagagtgct

SEQ ID NO: 360013 - DNA, 33 bp, Homo sapien
acaattcccattcctacgtctacacccaagaga

SEQ ID NO: 360014 - DNA, 33 bp, Homo sapien
acaattcccattcctatgtctacacccaagaga

SEQ ID NO: 360015 - DNA, 33 bp, Homo sapien
tccacatatataaccacgatagatgtgagttta

SEQ ID NO: 360016 - DNA, 33 bp, Homo sapien
tccacatatataaccatgatagatgtgagttta

SEQ ID NO: 360017 - DNA, 33 bp, Homo sapien
agtttgttactcagcaataatgaaaagcatgtc

SEQ ID NO: 360018 - DNA, 33 bp, Homo sapien
agtttgttactcagcactaatgaaaagcatgtc

SEQ ID NO: 360019 - DNA, 33 bp, Homo sapien
ttcaaagtcttgtcagcctcagaattctagtcc

SEQ ID NO: 360020 - DNA, 33 bp, Homo sapien
ttcaaagtcttgtcagtctcagaattctagtcc

SEQ ID NO: 360021 - DNA, 33 bp, Homo sapien
atgagatgtgctgaaaaaaatgtgtgagtgctt

SEQ ID NO: 360022 - DNA, 33 bp, Homo sapien
atgagatgtgctgaaagaaatgtgtgagtgctt

SEQ ID NO: 360023 - DNA, 33 bp, Homo sapien
actgacctttggtgtaagtccagcattattgtc

SEQ ID NO: 360024 - DNA, 33 bp, Homo sapien
actgacctttggtgtaggtccagcattattgtc

SEQ ID NO: 360025 - DNA, 33 bp, Homo sapien
atggactaatgcaagacccataaagtctgtgtg

SEQ ID NO: 360026 - DNA, 33 bp, Homo sapien
atggactaatgcaagatccataaagtctgtgtg

SEQ ID NO: 360027 - DNA, 33 bp, Homo sapien
cctcaagaactttcagacatagaaaactagagg

SEQ ID NO: 360028 - DNA, 33 bp, Homo sapien
cctcaagaactttcaggcatagaaaactagagg

SEQ ID NO: 360029 - DNA, 33 bp, Homo sapien
aagttcttgaggatgacggggacttttcacagg

SEQ ID NO: 360030 - DNA, 33 bp, Homo sapien
aagttcttgaggatgatggggacttttcacagg

SEQ ID NO: 360031 - DNA, 33 bp, Homo sapien
acatgggagcaagtcactcaatatgaaaacaga

SEQ ID NO: 360032 - DNA, 33 bp, Homo sapien
acatgggagcaagtcattcaatatgaaaacaga

SEQ ID NO: 360033 - DNA, 33 bp, Homo sapien
gagactgtcttcctatacattttcagaaaggca

SEQ ID NO: 360034 - DNA, 33 bp, Homo sapien
gagactgtcttcctattcattttcagaaaggca

SEQ ID NO: 360035 - DNA, 33 bp, Homo sapien
ttgctgccaacccataagaatttgctgctggta

SEQ ID NO: 360036 - DNA, 33 bp, Homo sapien
ttgctgccaacccatatgaatttgctgctggta

SEQ ID NO: 360037 - DNA, 33 bp, Homo sapien
agtccttctggtcatgaaacatgggaaatttgc

SEQ ID NO: 360038 - DNA, 33 bp, Homo sapien
agtccttctggtcatgcaacatgggaaatttgc

SEQ ID NO: 360039 - DNA, 33 bp, Homo sapien
ctgcgttccaatattaagggtcatgttgatttg

SEQ ID NO: 360040 - DNA, 33 bp, Homo sapien
ctgcgttccaatattaggggtcatgttgatttg

SEQ ID NO: 360041 - DNA, 33 bp, Homo sapien
ctctcaacaggggatacgatgtttattaactgc

SEQ ID NO: 360042 - DNA, 33 bp, Homo sapien
ctctcaacaggggatatgatgtttattaactgc

SEQ ID NO: 360043 - DNA, 33 bp, Homo sapien
ggtcatgtcgctaaagaccttccttggaggaag

SEQ ID NO: 360044 - DNA, 33 bp, Homo sapien
ggtcatgtcgctaaagtccttccttggaggaag

SEQ ID NO: 360045 - DNA, 33 bp, Homo sapien
acctctgctggtagggaaggtgtttttcaagag

SEQ ID NO: 360046 - DNA, 33 bp, Homo sapien
acctctgctggtaggggaggtgtttttcaagag

SEQ ID NO: 360047 - DNA, 33 bp, Homo sapien
aaacacaggccaggcaactttcaaaagcatcac

SEQ ID NO: 360048 - DNA, 33 bp, Homo sapien
aaacacaggccaggcacctttcaaaagcatcac

SEQ ID NO: 360049 - DNA, 33 bp, Homo sapien
ccttccttcctgtagaacagacgtgggcaaatt

SEQ ID NO: 360050 - DNA, 33 bp, Homo sapien
ccttccttcctgtagagcagacgtgggcaaatt

SEQ ID NO: 360051 - DNA, 33 bp, Homo sapien
tttgccgcgtgctaaaactcaaagaaggcaggt

SEQ ID NO: 360052 - DNA, 33 bp, Homo sapien
tttgccgcgtgctaaacctcaaagaaggcaggt

SEQ ID NO: 360053 - DNA, 33 bp, Homo sapien
ggaggctggtgtgctacgtcaggtttctcttcc

SEQ ID NO: 360054 - DNA, 33 bp, Homo sapien
ggaggctggtgtgctaggtcaggtttctcttcc

SEQ ID NO: 360055 - DNA, 33 bp, Homo sapien
actgaatgcactaatcgcagcctggagctaggg

SEQ ID NO: 360056 - DNA, 33 bp, Homo sapien
actgaatgcactaatctcagcctggagctaggg

SEQ ID NO: 360057 - DNA, 33 bp, Homo sapien
aatggatggtcaacacaatgggatttctgcatt

SEQ ID NO: 360058 - DNA, 33 bp, Homo sapien
aatggatggtcaacacgatgggatttctgcatt

SEQ ID NO: 360059 - DNA, 33 bp, Homo sapien
gtcaggaatttggatacatcttagccaggtggt

SEQ ID NO: 360060 - DNA, 33 bp, Homo sapien
gtcaggaatttggatatatcttagccaggtggt

SEQ ID NO: 360061 - DNA, 33 bp, Homo sapien
tctctcctttccatccacatcacctttgttcag

SEQ ID NO: 360062 - DNA, 33 bp, Homo sapien
tctctcctttccatccgcatcacctttgttcag

SEQ ID NO: 360063 - DNA, 33 bp, Homo sapien
tgctttggccacttcaatagttgaaatgacaag

SEQ ID NO: 360064 - DNA, 33 bp, Homo sapien
tgctttggccacttcagtagttgaaatgacaag

SEQ ID NO: 360065 - DNA, 33 bp, Homo sapien
actgcacttatttcaacgtaaaggaaaagcaga

SEQ ID NO: 360066 - DNA, 33 bp, Homo sapien
actgcacttatttcaaggtaaaggaaaagcaga

SEQ ID NO: 360067 - DNA, 33 bp, Homo sapien
tacggtcatgttctaccgcacttggctaatttt

SEQ ID NO: 360068 - DNA, 33 bp, Homo sapien
tacggtcatgttctactgcacttggctaatttt

SEQ ID NO: 360069 - DNA, 33 bp, Homo sapien
catggccagagtccccagatgggtctactcagg

SEQ ID NO: 360070 - DNA, 33 bp, Homo sapien
catggccagagtccccggatgggtctactcagg

SEQ ID NO: 360071 - DNA, 33 bp, Homo sapien
tttaggaactgtcaacaattaacttagggaaat

SEQ ID NO: 360072 - DNA, 33 bp, Homo sapien
tttaggaactgtcaacgattaacttagggaaat

SEQ ID NO: 360073 - DNA, 33 bp, Homo sapien
aaacaaaaatgactccaattctaatcagccaga

SEQ ID NO: 360074 - DNA, 33 bp, Homo sapien
aaacaaaaatgactccgattctaatcagccaga

SEQ ID NO: 360075 - DNA, 33 bp, Homo sapien
tgaaccttgtgtctccaacattcgcaaacccac

SEQ ID NO: 360076 - DNA, 33 bp, Homo sapien
tgaaccttgtgtctcccacattcgcaaacccac

SEQ ID NO: 360077 - DNA, 33 bp, Homo sapien
tcttattacaaacccaatcatgaacaggggctg

SEQ ID NO: 360078 - DNA, 33 bp, Homo sapien
tcttattacaaacccagtcatgaacaggggctg

SEQ ID NO: 360079 - DNA, 33 bp, Homo sapien
gtggtgtgatgtagtaacaacgtccagcaggga

SEQ ID NO: 360080 - DNA, 33 bp, Homo sapien
gtggtgtgatgtagtagcaacgtccagcaggga

SEQ ID NO: 360081 - DNA, 33 bp, Homo sapien
ttgaaaacatggaataaattgttgctaactgga

SEQ ID NO: 360082 - DNA, 33 bp, Homo sapien
ttgaaaacatggaatacattgttgctaactgga

SEQ ID NO: 360083 - DNA, 33 bp, Homo sapien
atatcctattgctgaactaacctctttatcatt

SEQ ID NO: 360084 - DNA, 33 bp, Homo sapien
atatcctattgctgaagtaacctctttatcatt

SEQ ID NO: 360085 - DNA, 33 bp, Homo sapien
tctctgtaattatacaatgacaggaatggccaa

SEQ ID NO: 360086 - DNA, 33 bp, Homo sapien
tctctgtaattatacagtgacaggaatggccaa

SEQ ID NO: 360087 - DNA, 33 bp, Homo sapien
agaaagagctaatataactggatggaaggaccc

SEQ ID NO: 360088 - DNA, 33 bp, Homo sapien
agaaagagctaatatagctggatggaaggaccc

SEQ ID NO: 360089 - DNA, 33 bp, Homo sapien
aagagaaatgagaacacatccccaatgcaaaaa

SEQ ID NO: 360090 - DNA, 33 bp, Homo sapien
aagagaaatgagaacatatccccaatgcaaaaa

SEQ ID NO: 360091 - DNA, 33 bp, Homo sapien
atgtgtcaaaatcacaaaagtgttttctgggag

SEQ ID NO: 360092 - DNA, 33 bp, Homo sapien
atgtgtcaaaatcacacaagtgttttctgggag

SEQ ID NO: 360093 - DNA, 33 bp, Homo sapien
tggatgagaggacttgaaaccttttgagcaacg

SEQ ID NO: 360094 - DNA, 33 bp, Homo sapien
tggatgagaggacttggaaccttttgagcaacg

SEQ ID NO: 360095 - DNA, 33 bp, Homo sapien
tggggacttccccaggaacaatctgagtctgtt

SEQ ID NO: 360096 - DNA, 33 bp, Homo sapien
tggggacttccccagggacaatctgagtctgtt

SEQ ID NO: 360097 - DNA, 33 bp, Homo sapien
tgcgtgttgtgctagaaaagtatggatttcaga

SEQ ID NO: 360098 - DNA, 33 bp, Homo sapien
tgcgtgttgtgctagagaagtatggatttcaga

SEQ ID NO: 360099 - DNA, 33 bp, Homo sapien
ttacctacttcacaagacagtcgtgagaatgaa

SEQ ID NO: 360100 - DNA, 33 bp, Homo sapien
ttacctacttcacaagtcagtcgtgagaatgaa

SEQ ID NO: 360101 - DNA, 33 bp, Homo sapien
tttgcaaaatggaaacagcttacctacttcaca

SEQ ID NO: 360102 - DNA, 33 bp, Homo sapien
tttgcaaaatggaaacggcttacctacttcaca

SEQ ID NO: 360103 - DNA, 33 bp, Homo sapien
tgcaagttcaacggaaaagcattgattgaccag

SEQ ID NO: 360104 - DNA, 33 bp, Homo sapien
tgcaagttcaacggaagagcattgattgaccag

SEQ ID NO: 360105 - DNA, 33 bp, Homo sapien
gagttcagtgcccttgcaaaaatatagtcatct

SEQ ID NO: 360106 - DNA, 33 bp, Homo sapien
gagttcagtgcccttgtaaaaatatagtcatct

SEQ ID NO: 360107 - DNA, 33 bp, Homo sapien
gtaaactggaaaactcgatgcaaatgtcaggtt

SEQ ID NO: 360108 - DNA, 33 bp, Homo sapien
gtaaactggaaaactctatgcaaatgtcaggtt

SEQ ID NO: 360109 - DNA, 33 bp, Homo sapien
gttagtcaactttcaacgtcctctctgcccagt

SEQ ID NO: 360110 - DNA, 33 bp, Homo sapien
gttagtcaactttcaatgtcctctctgcccagt

SEQ ID NO: 360111 - DNA, 33 bp, Homo sapien
catttcttcatcccacacatattttttgagcat

SEQ ID NO: 360112 - DNA, 33 bp, Homo sapien
catttcttcatcccacgcatattttttgagcat

SEQ ID NO: 360113 - DNA, 33 bp, Homo sapien
cagtatctagggttccaattcctaaaagattgc

SEQ ID NO: 360114 - DNA, 33 bp, Homo sapien
cagtatctagggttccgattcctaaaagattgc

SEQ ID NO: 360115 - DNA, 33 bp, Homo sapien
ctggcgcatgtctatacagctggcagggaggcc

SEQ ID NO: 360116 - DNA, 33 bp, Homo sapien
ctggcgcatgtctatagagctggcagggaggcc

SEQ ID NO: 360117 - DNA, 33 bp, Homo sapien
gcctttggaagcgggaatatttagtaatgacat

SEQ ID NO: 360118 - DNA, 33 bp, Homo sapien
gcctttggaagcgggagtatttagtaatgacat

SEQ ID NO: 360119 - DNA, 33 bp, Homo sapien
tatccctgttttccaaaaaaaggcagctgactc

SEQ ID NO: 360120 - DNA, 33 bp, Homo sapien
tatccctgttttccaagaaaaggcagctgactc

SEQ ID NO: 360121 - DNA, 33 bp, Homo sapien
atcatagttccattccagagctaccacgtatca

SEQ ID NO: 360122 - DNA, 33 bp, Homo sapien
atcatagttccattccggagctaccacgtatca

SEQ ID NO: 360123 - DNA, 33 bp, Homo sapien
atgtttaaatacatcaacgtaatttgttttcag

SEQ ID NO: 360124 - DNA, 33 bp, Homo sapien
atgtttaaatacatcagcgtaatttgttttcag

SEQ ID NO: 360125 - DNA, 33 bp, Homo sapien
gcagacaaccttcgtaaagcctgtgagagtgcc

SEQ ID NO: 360126 - DNA, 33 bp, Homo sapien
gcagacaaccttcgtagagcctgtgagagtgcc

SEQ ID NO: 360127 - DNA, 33 bp, Homo sapien
tatcacaggaatacaaatgttcacaggtactct

SEQ ID NO: 360128 - DNA, 33 bp, Homo sapien
tatcacaggaatacaagtgttcacaggtactct

SEQ ID NO: 360129 - DNA, 33 bp, Homo sapien
cttctatttttggaaaacacacctgaatctcag

SEQ ID NO: 360130 - DNA, 33 bp, Homo sapien
cttctatttttggaaatcacacctgaatctcag

SEQ ID NO: 360131 - DNA, 33 bp, Homo sapien
caaaatcaaaacaacacgcccaacaatgaaacc

SEQ ID NO: 360132 - DNA, 33 bp, Homo sapien
caaaatcaaaacaacaggcccaacaatgaaacc

SEQ ID NO: 360133 - DNA, 33 bp, Homo sapien
atctacaagcaagctgaaaagtctatattactt

SEQ ID NO: 360134 - DNA, 33 bp, Homo sapien
atctacaagcaagctggaaagtctatattactt

SEQ ID NO: 360135 - DNA, 33 bp, Homo sapien
ttgtctttgtgccacacgggaattgtgtagtgt

SEQ ID NO: 360136 - DNA, 33 bp, Homo sapien
ttgtctttgtgccacatgggaattgtgtagtgt

SEQ ID NO: 360137 - DNA, 33 bp, Homo sapien
tgaactaaatatgtgaagttcaaaaaactggaa

SEQ ID NO: 360138 - DNA, 33 bp, Homo sapien
tgaactaaatatgtgaggttcaaaaaactggaa

SEQ ID NO: 360139 - DNA, 33 bp, Homo sapien
gagcaagtgttaatcaatccactagtgtgatct

SEQ ID NO: 360140 - DNA, 33 bp, Homo sapien
gagcaagtgttaatcagtccactagtgtgatct

SEQ ID NO: 360141 - DNA, 33 bp, Homo sapien
acaaactcacacataaccctttttgctttatat

SEQ ID NO: 360142 - DNA, 33 bp, Homo sapien
acaaactcacacataatcctttttgctttatat

SEQ ID NO: 360143 - DNA, 33 bp, Homo sapien
tggatggaagaaatcaatagcaattcgtcacat

SEQ ID NO: 360144 - DNA, 33 bp, Homo sapien
tggatggaagaaatcagtagcaattcgtcacat

SEQ ID NO: 360145 - DNA, 33 bp, Homo sapien
agcctgcttttctcaccgtattgttactcgttg

SEQ ID NO: 360146 - DNA, 33 bp, Homo sapien
agcctgcttttctcactgtattgttactcgttg

SEQ ID NO: 360147 - DNA, 33 bp, Homo sapien
cacctgccaagacaaaaagacacgaatgagtac

SEQ ID NO: 360148 - DNA, 33 bp, Homo sapien
cacctgccaagacaaagagacacgaatgagtac

SEQ ID NO: 360149 - DNA, 33 bp, Homo sapien
atagcaaacaatactaccagcttgccctctggc

SEQ ID NO: 360150 - DNA, 33 bp, Homo sapien
atagcaaacaatactatcagcttgccctctggc

SEQ ID NO: 360151 - DNA, 33 bp, Homo sapien
caggaacccagctccaagagggtttaaaagcac

SEQ ID NO: 360152 - DNA, 33 bp, Homo sapien
caggaacccagctccaggagggtttaaaagcac

SEQ ID NO: 360153 - DNA, 33 bp, Homo sapien
acttgctccaacaggtcaacgtgattgaaaatt

SEQ ID NO: 360154 - DNA, 33 bp, Homo sapien
acttgctccaacaggtgaacgtgattgaaaatt

SEQ ID NO: 360155 - DNA, 33 bp, Homo sapien
gcctggttaaaccaaaagatgacaaccaagcag

SEQ ID NO: 360156 - DNA, 33 bp, Homo sapien
gcctggttaaaccaaaggatgacaaccaagcag

SEQ ID NO: 360157 - DNA, 33 bp, Homo sapien
tgcagaatgaacagcacgcttaaaaaagcagat

SEQ ID NO: 360158 - DNA, 33 bp, Homo sapien
tgcagaatgaacagcaggcttaaaaaagcagat

SEQ ID NO: 360159 - DNA, 33 bp, Homo sapien
aaatactacatacaaccgagctataatttttaa

SEQ ID NO: 360160 - DNA, 33 bp, Homo sapien
aaatactacatacaactgagctataatttttaa

SEQ ID NO: 360161 - DNA, 33 bp, Homo sapien
ggactactgttacagacgaggtccaccattgac

SEQ ID NO: 360162 - DNA, 33 bp, Homo sapien
ggactactgttacagatgaggtccaccattgac

SEQ ID NO: 360163 - DNA, 33 bp, Homo sapien
taacacttaatacttaacacagccctcagtgaa

SEQ ID NO: 360164 - DNA, 33 bp, Homo sapien
taacacttaatacttagcacagccctcagtgaa

SEQ ID NO: 360165 - DNA, 33 bp, Homo sapien
catccaggcatctaaacaactcaacatctacca

SEQ ID NO: 360166 - DNA, 33 bp, Homo sapien
catccaggcatctaaagaactcaacatctacca

SEQ ID NO: 360167 - DNA, 33 bp, Homo sapien
aagggctaaagaaaagcatttggctgagaaaac

SEQ ID NO: 360168 - DNA, 33 bp, Homo sapien
aagggctaaagaaaagtatttggctgagaaaac

SEQ ID NO: 360169 - DNA, 33 bp, Homo sapien
aggtggctgcaattggaaagttccagagagctt

SEQ ID NO: 360170 - DNA, 33 bp, Homo sapien
aggtggctgcaattgggaagttccagagagctt

SEQ ID NO: 360171 - DNA, 33 bp, Homo sapien
gagacaaggagagaagaagaacgtctggaattc

SEQ ID NO: 360172 - DNA, 33 bp, Homo sapien
gagacaaggagagaaggagaacgtctggaattc

SEQ ID NO: 360173 - DNA, 33 bp, Homo sapien
ggttagtagtattttgaaggcaggataaaggaa

SEQ ID NO: 360174 - DNA, 33 bp, Homo sapien
ggttagtagtattttggaggcaggataaaggaa

SEQ ID NO: 360175 - DNA, 33 bp, Homo sapien
caggtggcaccatgaacgttatggttaagtagt

SEQ ID NO: 360176 - DNA, 33 bp, Homo sapien
caggtggcaccatgaatgttatggttaagtagt

SEQ ID NO: 360177 - DNA, 33 bp, Homo sapien
tgaattttgatgaaaacgactccccagacagca

SEQ ID NO: 360178 - DNA, 33 bp, Homo sapien
tgaattttgatgaaaatgactccccagacagca

SEQ ID NO: 360179 - DNA, 33 bp, Homo sapien
gtctttgcctctgtaaatatctccatattcctc

SEQ ID NO: 360180 - DNA, 33 bp, Homo sapien
gtctttgcctctgtaagtatctccatattcctc

SEQ ID NO: 360181 - DNA, 33 bp, Homo sapien
acctttcaagtgccagacaacccttctaggtat

SEQ ID NO: 360182 - DNA, 33 bp, Homo sapien
acctttcaagtgccagtcaacccttctaggtat

SEQ ID NO: 360183 - DNA, 33 bp, Homo sapien
aggatttgagattttccatccccttccgtctgc

SEQ ID NO: 360184 - DNA, 33 bp, Homo sapien
aggatttgagattttctatccccttccgtctgc

SEQ ID NO: 360185 - DNA, 33 bp, Homo sapien
cctcacctgcgacatcaccgtttactgggtctc

SEQ ID NO: 360186 - DNA, 33 bp, Homo sapien
cctcacctgcgacatcgccgtttactgggtctc

SEQ ID NO: 360187 - DNA, 33 bp, Homo sapien
acatacttcttgagaacgccttgtctggagcgg

SEQ ID NO: 360188 - DNA, 33 bp, Homo sapien
acatacttcttgagaatgccttgtctggagcgg

SEQ ID NO: 360189 - DNA, 33 bp, Homo sapien
tgaaacatcaacaatacagccatccatggcgtg

SEQ ID NO: 360190 - DNA, 33 bp, Homo sapien
tgaaacatcaacaatatagccatccatggcgtg

SEQ ID NO: 360191 - DNA, 33 bp, Homo sapien
gaccccatcagctacgcaaagaccatacaggta

SEQ ID NO: 360192 - DNA, 33 bp, Homo sapien
gaccccatcagctacggaaagaccatacaggta

SEQ ID NO: 360193 - DNA, 33 bp, Homo sapien
atgctcttcccaaaaccgtgctcaaggatacaa

SEQ ID NO: 360194 - DNA, 33 bp, Homo sapien
atgctcttcccaaaactgtgctcaaggatacaa

SEQ ID NO: 360195 - DNA, 33 bp, Homo sapien
tctcacagataagaagaacaggataattatttg

SEQ ID NO: 360196 - DNA, 33 bp, Homo sapien
tctcacagataagaagtacaggataattatttg

SEQ ID NO: 360197 - DNA, 33 bp, Homo sapien
gaaaagaaaaccctgacgaggtctatatattcc

SEQ ID NO: 360198 - DNA, 33 bp, Homo sapien
gaaaagaaaaccctgatgaggtctatatattcc

SEQ ID NO: 360199 - DNA, 33 bp, Homo sapien
atgaagaaaaacaaaaatcaaggagaactcagg

SEQ ID NO: 360200 - DNA, 33 bp, Homo sapien
atgaagaaaaacaaaagtcaaggagaactcagg

SEQ ID NO: 360201 - DNA, 33 bp, Homo sapien
gccttcgaggtagggccaggactgtgcaccaca

SEQ ID NO: 360202 - DNA, 33 bp, Homo sapien
gccttcgaggtagggcgaggactgtgcaccaca

SEQ ID NO: 360203 - DNA, 33 bp, Homo sapien
ctggctcttttcccataaccacttcctctttgg

SEQ ID NO: 360204 - DNA, 33 bp, Homo sapien
ctggctcttttcccatgaccacttcctctttgg

SEQ ID NO: 360205 - DNA, 33 bp, Homo sapien
gttcctattggtagtaagcctccaaaatttgga

SEQ ID NO: 360206 - DNA, 33 bp, Homo sapien
gttcctattggtagtacgcctccaaaatttgga

SEQ ID NO: 360207 - DNA, 33 bp, Homo sapien
gaagacatgagaactaacttatgtcctttgttt

SEQ ID NO: 360208 - DNA, 33 bp, Homo sapien
gaagacatgagaactaccttatgtcctttgttt

SEQ ID NO: 360209 - DNA, 33 bp, Homo sapien
aggagatggaagagaaaaaagccagaataaggg

SEQ ID NO: 360210 - DNA, 33 bp, Homo sapien
aggagatggaagagaagaaagccagaataaggg

SEQ ID NO: 360211 - DNA, 33 bp, Homo sapien
atggagatgttatctacgctataggactgcaga

SEQ ID NO: 360212 - DNA, 33 bp, Homo sapien
atggagatgttatctatgctataggactgcaga

SEQ ID NO: 360213 - DNA, 33 bp, Homo sapien
taatggcagatatttaaacccagctctcaagca

SEQ ID NO: 360214 - DNA, 33 bp, Homo sapien
taatggcagatatttagacccagctctcaagca

SEQ ID NO: 360215 - DNA, 33 bp, Homo sapien
accggaacaacttggaggcttgcttgagagctg

SEQ ID NO: 360216 - DNA, 33 bp, Homo sapien
accggaacaacttggatgcttgcttgagagctg

SEQ ID NO: 360217 - DNA, 33 bp, Homo sapien
ataatttgatacattcaaggactctggagaggg

SEQ ID NO: 360218 - DNA, 33 bp, Homo sapien
ataatttgatacattcgaggactctggagaggg

SEQ ID NO: 360219 - DNA, 33 bp, Homo sapien
tatatttgttagtttacagcagcttctattttc

SEQ ID NO: 360220 - DNA, 33 bp, Homo sapien
tatatttgttagtttatagcagcttctattttc

SEQ ID NO: 360221 - DNA, 33 bp, Homo sapien
aatcccacacttgctcacgttctcttgcttgcc

SEQ ID NO: 360222 - DNA, 33 bp, Homo sapien
aatcccacacttgctcgcgttctcttgcttgcc

SEQ ID NO: 360223 - DNA, 33 bp, Homo sapien
atctgtgaggttcagtaaaactggttacagaaa

SEQ ID NO: 360224 - DNA, 33 bp, Homo sapien
atctgtgaggttcagtgaaactggttacagaaa

SEQ ID NO: 360225 - DNA, 33 bp, Homo sapien
acaagtgggtgagtagcatctccgagcccacag

SEQ ID NO: 360226 - DNA, 33 bp, Homo sapien
acaagtgggtgagtagtatctccgagcccacag

SEQ ID NO: 360227 - DNA, 33 bp, Homo sapien
gcaaattaaaagtaaacgaggaaatgcagacac

SEQ ID NO: 360228 - DNA, 33 bp, Homo sapien
gcaaattaaaagtaaatgaggaaatgcagacac

SEQ ID NO: 360229 - DNA, 33 bp, Homo sapien
cggcagacgggggtgcacttagggcttttctgc

SEQ ID NO: 360230 - DNA, 33 bp, Homo sapien
cggcagacgggggtgcgcttagggcttttctgc

SEQ ID NO: 360231 - DNA, 33 bp, Homo sapien
agaccaactgctgtcactcttggcagaaaagcc

SEQ ID NO: 360232 - DNA, 33 bp, Homo sapien
agaccaactgctgtcattcttggcagaaaagcc

SEQ ID NO: 360233 - DNA, 33 bp, Homo sapien
ttgttagaaagaaacccggattcacgagatggt

SEQ ID NO: 360234 - DNA, 33 bp, Homo sapien
ttgttagaaagaaacctggattcacgagatggt

SEQ ID NO: 360235 - DNA, 33 bp, Homo sapien
aaataaacggctactacgtattatgatctgaca

SEQ ID NO: 360236 - DNA, 33 bp, Homo sapien
aaataaacggctactatgtattatgatctgaca

SEQ ID NO: 360237 - DNA, 33 bp, Homo sapien
ccttccagtttgataccaagtttagaccaagaa

SEQ ID NO: 360238 - DNA, 33 bp, Homo sapien
ccttccagtttgatacgaagtttagaccaagaa

SEQ ID NO: 360239 - DNA, 33 bp, Homo sapien
cattcaaatccatgacaaggactctgctctctg

SEQ ID NO: 360240 - DNA, 33 bp, Homo sapien
cattcaaatccatgacgaggactctgctctctg

SEQ ID NO: 360241 - DNA, 33 bp, Homo sapien
aaatggagcagcaaagccagacaggaacatgtc

SEQ ID NO: 360242 - DNA, 33 bp, Homo sapien
aaatggagcagcaaaggcagacaggaacatgtc

SEQ ID NO: 360243 - DNA, 33 bp, Homo sapien
ccgcaagcatgcgtgaaaggattgagtttctca

SEQ ID NO: 360244 - DNA, 33 bp, Homo sapien
ccgcaagcatgcgtgagaggattgagtttctca

SEQ ID NO: 360245 - DNA, 33 bp, Homo sapien
gaaagttcctgaaaagccaaaatgcagcacagg

SEQ ID NO: 360246 - DNA, 33 bp, Homo sapien
gaaagttcctgaaaagtcaaaatgcagcacagg

SEQ ID NO: 360247 - DNA, 33 bp, Homo sapien
atttaatcttcaaacagtagatacatgtctctg

SEQ ID NO: 360248 - DNA, 33 bp, Homo sapien
atttaatcttcaaacattagatacatgtctctg

SEQ ID NO: 360249 - DNA, 33 bp, Homo sapien
gaacagggcacaaatcagagttcagtgtgagac

SEQ ID NO: 360250 - DNA, 33 bp, Homo sapien
gaacagggcacaaatcggagttcagtgtgagac

SEQ ID NO: 360251 - DNA, 33 bp, Homo sapien
ctacccacaaactcaccgcgtctcacactgaac

SEQ ID NO: 360252 - DNA, 33 bp, Homo sapien
ctacccacaaactcactgcgtctcacactgaac

SEQ ID NO: 360253 - DNA, 33 bp, Homo sapien
cctgtacctgttgtgcacctgatgactgaactg

SEQ ID NO: 360254 - DNA, 33 bp, Homo sapien
cctgtacctgttgtgcgcctgatgactgaactg

SEQ ID NO: 360255 - DNA, 33 bp, Homo sapien
tctttcatgtcttgtaacaacagaactcccatg

SEQ ID NO: 360256 - DNA, 33 bp, Homo sapien
tctttcatgtcttgtagcaacagaactcccatg

SEQ ID NO: 360257 - DNA, 33 bp, Homo sapien
gcttgaatccattgaccgcttttcttcttactg

SEQ ID NO: 360258 - DNA, 33 bp, Homo sapien
gcttgaatccattgactgcttttcttcttactg

SEQ ID NO: 360259 - DNA, 33 bp, Homo sapien
cagctgtttttcgtggaatggaaggattaaata

SEQ ID NO: 360260 - DNA, 33 bp, Homo sapien
cagctgtttttcgtgggatggaaggattaaata

SEQ ID NO: 360261 - DNA, 33 bp, Homo sapien
tcacatttcaatggtacgaaaagtggcttcgta

SEQ ID NO: 360262 - DNA, 33 bp, Homo sapien
tcacatttcaatggtaggaaaagtggcttcgta

SEQ ID NO: 360263 - DNA, 33 bp, Homo sapien
aacaaagcagtaatcaatcatgatacgaggcat

SEQ ID NO: 360264 - DNA, 33 bp, Homo sapien
aacaaagcagtaatcagtcatgatacgaggcat

SEQ ID NO: 360265 - DNA, 33 bp, Homo sapien
agaattgcccatagcacagacagatctccacat

SEQ ID NO: 360266 - DNA, 33 bp, Homo sapien
agaattgcccatagcagagacagatctccacat

SEQ ID NO: 360267 - DNA, 33 bp, Homo sapien
ggaccagatgtgatgaagttaataaaacataca

SEQ ID NO: 360268 - DNA, 33 bp, Homo sapien
ggaccagatgtgatgaggttaataaaacataca

SEQ ID NO: 360269 - DNA, 33 bp, Homo sapien
atccaaccgtggaggccaatgttcagataaccc

SEQ ID NO: 360270 - DNA, 33 bp, Homo sapien
atccaaccgtggaggcgaatgttcagataaccc

SEQ ID NO: 360271 - DNA, 33 bp, Homo sapien
taaagtgagaacacacaattagagaaaaaagag

SEQ ID NO: 360272 - DNA, 33 bp, Homo sapien
taaagtgagaacacacgattagagaaaaaagag

SEQ ID NO: 360273 - DNA, 33 bp, Homo sapien; identical to SEQ ID NO: 360271

SEQ ID NO: 360274 - DNA, 33 bp, Homo sapien; identical to SEQ ID NO: 360272

SEQ ID NO: 360275 - DNA, 33 bp, Homo sapien
gctcagtatagtcacgaagttacatattcatca

SEQ ID NO: 360276 - DNA, 33 bp, Homo sapien
gctcagtatagtcacggagttacatattcatca

SEQ ID NO: 360277 - DNA, 33 bp, Homo sapien
ggctcattcgcttcaaataactctcgagtggcg

SEQ ID NO: 360278 - DNA, 33 bp, Homo sapien
ggctcattcgcttcaagtaactctcgagtggcg

SEQ ID NO: 360279 - DNA, 33 bp, Homo sapien
ccagcacagtgtcaagaaagcacttttcgcagg

SEQ ID NO: 360280 - DNA, 33 bp, Homo sapien
ccagcacagtgtcaagcaagcacttttcgcagg

SEQ ID NO: 360281 - DNA, 33 bp, Homo sapien
ttcaaaacgtggtatacgcccatagtcctggct

SEQ ID NO: 360282 - DNA, 33 bp, Homo sapien
ttcaaaacgtggtatatgcccatagtcctggct

SEQ ID NO: 360283 - DNA, 33 bp, Homo sapien
ctttatatcaggaggacaattcagcagatggag

SEQ ID NO: 360284 - DNA, 33 bp, Homo sapien
ctttatatcaggaggataattcagcagatggag

SEQ ID NO: 360285 - DNA, 33 bp, Homo sapien
taaaatgcaaggagacggggtagagtaagacag

SEQ ID NO: 360286 - DNA, 33 bp, Homo sapien
taaaatgcaaggagactgggtagagtaagacag

SEQ ID NO: 360287 - DNA, 33 bp, Homo sapien
tggaactgcaaacttgaaggggcactgggagcc

SEQ ID NO: 360288 - DNA, 33 bp, Homo sapien
tggaactgcaaacttggaggggcactgggagcc

SEQ ID NO: 360289 - DNA, 33 bp, Homo sapien
tggaggaggaaaatgaaggacagtgccaaagag

SEQ ID NO: 360290 - DNA, 33 bp, Homo sapien
tggaggaggaaaatgagggacagtgccaaagag

SEQ ID NO: 360291 - DNA, 33 bp, Homo sapien
gtaccagccaaagaaaagtttatgtgtctgggt

SEQ ID NO: 360292 - DNA, 33 bp, Homo sapien
gtaccagccaaagaaaggtttatgtgtctgggt

SEQ ID NO: 360293 - DNA, 33 bp, Homo sapien
ggcaggctccaggaagacaggagacagggcaga

SEQ ID NO: 360294 - DNA, 33 bp, Homo sapien
ggcaggctccaggaagtcaggagacagggcaga

SEQ ID NO: 360295 - DNA, 33 bp, Homo sapien
gtcacatctgtatttaacgacctgtgtcagtgc

SEQ ID NO: 360296 - DNA, 33 bp, Homo sapien
gtcacatctgtatttaccgacctgtgtcagtgc

SEQ ID NO: 360297 - DNA, 33 bp, Homo sapien
aagggccagttctacaaatttgtttggtttcct

SEQ ID NO: 360298 - DNA, 33 bp, Homo sapien
aagggccagttctacagatttgtttggtttcct

SEQ ID NO: 360299 - DNA, 33 bp, Homo sapien
tctaggtgcagtgcacacttagggcaacattca

SEQ ID NO: 360300 - DNA, 33 bp, Homo sapien
tctaggtgcagtgcacgcttagggcaacattca

SEQ ID NO: 360301 - DNA, 33 bp, Homo sapien
gcaatctgatgcaattcaaaccagtgcctgagc

SEQ ID NO: 360302 - DNA, 33 bp, Homo sapien
gcaatctgatgcaatttaaaccagtgcctgagc

SEQ ID NO: 360303 - DNA, 33 bp, Homo sapien
ccactgacattatatccacatgtgtaattagcc

SEQ ID NO: 360304 - DNA, 33 bp, Homo sapien
ccactgacattatatctacatgtgtaattagcc

SEQ ID NO: 360305 - DNA, 33 bp, Homo sapien
cctgctgtatactaacggtgtgacattggataa

SEQ ID NO: 360306 - DNA, 33 bp, Homo sapien
cctgctgtatactaactgtgtgacattggataa

SEQ ID NO: 360307 - DNA, 33 bp, Homo sapien
ggtcacactccttaaaatctttgtgctcccact

SEQ ID NO: 360308 - DNA, 33 bp, Homo sapien
ggtcacactccttaaactctttgtgctcccact

SEQ ID NO: 360309 - DNA, 33 bp, Homo sapien
ggtggctaattttacaagtatgtcgtctttgtt

SEQ ID NO: 360310 - DNA, 33 bp, Homo sapien
ggtggctaattttacaggtatgtcgtctttgtt

SEQ ID NO: 360311 - DNA, 33 bp, Homo sapien
ttttctgctatgttaaccagagctaattcctgc

SEQ ID NO: 360312 - DNA, 33 bp, Homo sapien
ttttctgctatgttaatcagagctaattcctgc

SEQ ID NO: 360313 - DNA, 33 bp, Homo sapien
tttcctgcccaatttccaagccttcttctcctg

SEQ ID NO: 360314 - DNA, 33 bp, Homo sapien
tttcctgcccaatttctaagccttcttctcctg

SEQ ID NO: 360315 - DNA, 33 bp, Homo sapien
gtattgtggcaggggcactataacccaaagtgt

SEQ ID NO: 360316 - DNA, 33 bp, Homo sapien
gtattgtggcaggggcgctataacccaaagtgt

SEQ ID NO: 360317 - DNA, 33 bp, Homo sapien
cattttggaaaatggaaacccattcaaaaccct

SEQ ID NO: 360318 - DNA, 33 bp, Homo sapien
cattttggaaaatggagacccattcaaaaccct

SEQ ID NO: 360319 - DNA, 33 bp, Homo sapien
gtttcttctagtcttaccttcccagcagccatt

SEQ ID NO: 360320 - DNA, 33 bp, Homo sapien
gtttcttctagtcttatcttcccagcagccatt

SEQ ID NO: 360321 - DNA, 33 bp, Homo sapien
gactaaactgactggcgcggactgcatagggtc

SEQ ID NO: 360322 - DNA, 33 bp, Homo sapien
gactaaactgactggctcggactgcatagggtc

SEQ ID NO: 360323 - DNA, 33 bp, Homo sapien
atcaggagctagaggaagaggcaaaatccaaga

SEQ ID NO: 360324 - DNA, 33 bp, Homo sapien
atcaggagctagaggaggaggcaaaatccaaga

SEQ ID NO: 360325 - DNA, 33 bp, Homo sapien
caaatgtctcctgatactaatgaggataattct

SEQ ID NO: 360326 - DNA, 33 bp, Homo sapien
caaatgtctcctgatattaatgaggataattct

SEQ ID NO: 360327 - DNA, 33 bp, Homo sapien
tgttatggaggtttgacgtacagactattttgt

SEQ ID NO: 360328 - DNA, 33 bp, Homo sapien
tgttatggaggtttgatgtacagactattttgt

SEQ ID NO: 360329 - DNA, 33 bp, Homo sapien
aaatatgcagaaaggacgtgactgggcaataca

SEQ ID NO: 360330 - DNA, 33 bp, Homo sapien
aaatatgcagaaaggatgtgactgggcaataca

SEQ ID NO: 360331 - DNA, 33 bp, Homo sapien
tcttcagttgttcagcactatttattggaaaga

SEQ ID NO: 360332 - DNA, 33 bp, Homo sapien
tcttcagttgttcagcgctatttattggaaaga

SEQ ID NO: 360333 - DNA, 33 bp, Homo sapien
tgacccaacaatttcactcccagcaataaattc

SEQ ID NO: 360334 - DNA, 33 bp, Homo sapien
tgacccaacaatttcagtcccagcaataaattc

SEQ ID NO: 360335 - DNA, 33 bp, Homo sapien
caccagaagttaatcaacaaaccagaacttgaa

SEQ ID NO: 360336 - DNA, 33 bp, Homo sapien
caccagaagttaatcaccaaaccagaacttgaa

SEQ ID NO: 360337 - DNA, 33 bp, Homo sapien
tctttaaaggcagccaagtaggccctgtgactc

SEQ ID NO: 360338 - DNA, 33 bp, Homo sapien
tctttaaaggcagccacgtaggccctgtgactc

SEQ ID NO: 360339 - DNA, 33 bp, Homo sapien
ttctgccagaagactacgcagaggccacaaatg

SEQ ID NO: 360340 - DNA, 33 bp, Homo sapien
ttctgccagaagactatgcagaggccacaaatg

SEQ ID NO: 360341 - DNA, 33 bp, Homo sapien
tcatgtcatccacagaaccctgcccaagacaca

SEQ ID NO: 360342 - DNA, 33 bp, Homo sapien
tcatgtcatccacagagccctgcccaagacaca

SEQ ID NO: 360343 - DNA, 33 bp, Homo sapien
ctccaggcagtcaatcactctctaaagagaata

SEQ ID NO: 360344 - DNA, 33 bp, Homo sapien
ctccaggcagtcaatcgctctctaaagagaata

SEQ ID NO: 360345 - DNA, 33 bp, Homo sapien
acaatcaagcagatagacacagacttcctgggt

SEQ ID NO: 360346 - DNA, 33 bp, Homo sapien
acaatcaagcagataggcacagacttcctgggt

SEQ ID NO: 360347 - DNA, 33 bp, Homo sapien
gggtatctggctgatacgttgcttgtagtttac

SEQ ID NO: 360348 - DNA, 33 bp, Homo sapien
gggtatctggctgatatgttgcttgtagtttac

SEQ ID NO: 360349 - DNA, 33 bp, Homo sapien
taaataccacactagcacagtcctcagggcctc

SEQ ID NO: 360350 - DNA, 33 bp, Homo sapien
taaataccacactagctcagtcctcagggcctc

SEQ ID NO: 360351 - DNA, 33 bp, Homo sapien
agtgtggtatttatgacagtgcccgtctctggg

SEQ ID NO: 360352 - DNA, 33 bp, Homo sapien
agtgtggtatttatgagagtgcccgtctctggg

SEQ ID NO: 360353 - DNA, 33 bp, Homo sapien
ttttgcatacagatagccacagagagttttgtg

SEQ ID NO: 360354 - DNA, 33 bp, Homo sapien
ttttgcatacagatagtcacagagagttttgtg

SEQ ID NO: 360355 - DNA, 33 bp, Homo sapien
agaaggcccagctttaagagtctgcatcccttg

SEQ ID NO: 360356 - DNA, 33 bp, Homo sapien
agaaggcccagctttaggagtctgcatcccttg

SEQ ID NO: 360357 - DNA, 33 bp, Homo sapien
ctcagagggtcatcaactgtcccacaaggtctg

SEQ ID NO: 360358 - DNA, 33 bp, Homo sapien
ctcagagggtcatcaattgtcccacaaggtctg

SEQ ID NO: 360359 - DNA, 33 bp, Homo sapien
gtaaacaaatttgttacgcaggaaataaaatga

SEQ ID NO: 360360 - DNA, 33 bp, Homo sapien
gtaaacaaatttgttatgcaggaaataaaatga

SEQ ID NO: 360361 - DNA, 33 bp, Homo sapien
ccaactaatgtgcagacggctcctaacctcaga

SEQ ID NO: 360362 - DNA, 33 bp, Homo sapien
ccaactaatgtgcagatggctcctaacctcaga

SEQ ID NO: 360363 - DNA, 33 bp, Homo sapien
aaggcttgtgattgcacaaagattcccaattca

SEQ ID NO: 360364 - DNA, 33 bp, Homo sapien
aaggcttgtgattgcagaaagattcccaattca

SEQ ID NO: 360365 - DNA, 33 bp, Homo sapien
aaaaaaaagacggagaaactcaggagcaagcaa

SEQ ID NO: 360366 - DNA, 33 bp, Homo sapien
aaaaaaaagacggagagactcaggagcaagcaa

SEQ ID NO: 360367 - DNA, 33 bp, Homo sapien
gatgctctacctattacgcggggataagaaaaa

SEQ ID NO: 360368 - DNA, 33 bp, Homo sapien
gatgctctacctattatgcggggataagaaaaa

SEQ ID NO: 360369 - DNA, 33 bp, Homo sapien
ttatgttagcatttcacgtagaaaaatgtttaa

SEQ ID NO: 360370 - DNA, 33 bp, Homo sapien
ttatgttagcatttcatgtagaaaaatgtttaa

SEQ ID NO: 360371 - DNA, 33 bp, Homo sapien
ttcctcctcagcttcaagatgacagttgataaa

SEQ ID NO: 360372 - DNA, 33 bp, Homo sapien
ttcctcctcagcttcaggatgacagttgataaa

SEQ ID NO: 360373 - DNA, 33 bp, Homo sapien
tcttttatgaacatgacgaggaaaaagatgaat

SEQ ID NO: 360374 - DNA, 33 bp, Homo sapien
tcttttatgaacatgatgaggaaaaagatgaat

SEQ ID NO: 360375 - DNA, 33 bp, Homo sapien
aaactgattttaaaacaagcagaagatctgaat

SEQ ID NO: 360376 - DNA, 33 bp, Homo sapien
aaactgattttaaaacgagcagaagatctgaat

SEQ ID NO: 360377 - DNA, 33 bp, Homo sapien
tcagaaaaggaaagacagaaatgcagtgctcta

SEQ ID NO: 360378 - DNA, 33 bp, Homo sapien
tcagaaaaggaaagacggaaatgcagtgctcta

SEQ ID NO: 360379 - DNA, 33 bp, Homo sapien
actaatatgaaacaaaatggagcaaaaaaaaat

SEQ ID NO: 360380 - DNA, 33 bp, Homo sapien
actaatatgaaacaaagtggagcaaaaaaaaat

SEQ ID NO: 360381 - DNA, 33 bp, Homo sapien
acattgtaaatgaaccagattattatagactgt

SEQ ID NO: 360382 - DNA, 33 bp, Homo sapien
acattgtaaatgaaccggattattatagactgt

SEQ ID NO: 360383 - DNA, 33 bp, Homo sapien
aaacagctcactatacaaatgggcaatttattt

SEQ ID NO: 360384 - DNA, 33 bp, Homo sapien
aaacagctcactatacgaatgggcaatttattt

SEQ ID NO: 360385 - DNA, 33 bp, Homo sapien
aataaaactgacagtgcaatttaagatggctag

SEQ ID NO: 360386 - DNA, 33 bp, Homo sapien
aataaaactgacagtggaatttaagatggctag

SEQ ID NO: 360387 - DNA, 33 bp, Homo sapien
actggtgtctcacttccagtacacaggtgcctc

SEQ ID NO: 360388 - DNA, 33 bp, Homo sapien
actggtgtctcacttctagtacacaggtgcctc

SEQ ID NO: 360389 - DNA, 33 bp, Homo sapien
agtgcctaactgttagacccatcgaatcagtca

SEQ ID NO: 360390 - DNA, 33 bp, Homo sapien
agtgcctaactgttagtcccatcgaatcagtca

SEQ ID NO: 360391 - DNA, 33 bp, Homo sapien
acgttatgtaagtaaggcacttgtacacggatc

SEQ ID NO: 360392 - DNA, 33 bp, Homo sapien
acgttatgtaagtaagtcacttgtacacggatc

SEQ ID NO: 360393 - DNA, 33 bp, Homo sapien
ggtaaagtgtgcagaactcataccttcatattc

SEQ ID NO: 360394 - DNA, 33 bp, Homo sapien
ggtaaagtgtgcagaattcataccttcatattc

SEQ ID NO: 360395 - DNA, 33 bp, Homo sapien
tcaagaatgagcagagaaagatacagatgttaa

SEQ ID NO: 360396 - DNA, 33 bp, Homo sapien
tcaagaatgagcagaggaagatacagatgttaa

SEQ ID NO: 360397 - DNA, 33 bp, Homo sapien
agtaactttaggtctaggaaagtcattgagggc

SEQ ID NO: 360398 - DNA, 33 bp, Homo sapien
agtaactttaggtctatgaaagtcattgagggc

SEQ ID NO: 360399 - DNA, 33 bp, Homo sapien
ctatttatctctgaaaggtatctgtctcataat

SEQ ID NO: 360400 - DNA, 33 bp, Homo sapien
ctatttatctctgaaatgtatctgtctcataat

SEQ ID NO: 360401 - DNA, 33 bp, Homo sapien
aggtgtgagccatttcacctggctttgttattt

SEQ ID NO: 360402 - DNA, 33 bp, Homo sapien
aggtgtgagccatttcgcctggctttgttattt

SEQ ID NO: 360403 - DNA, 33 bp, Homo sapien
tgttaacgtatttatcaaaaacatactttgcca

SEQ ID NO: 360404 - DNA, 33 bp, Homo sapien
tgttaacgtatttatcgaaaacatactttgcca

SEQ ID NO: 360405 - DNA, 33 bp, Homo sapien
ctccttcaagccattacgtgtttcttcagcgtc

SEQ ID NO: 360406 - DNA, 33 bp, Homo sapien
ctccttcaagccattatgtgtttcttcagcgtc

SEQ ID NO: 360407 - DNA, 33 bp, Homo sapien
ctttcgcttacttacacggatttttgtcttaca

SEQ ID NO: 360408 - DNA, 33 bp, Homo sapien
ctttcgcttacttacatggatttttgtcttaca

SEQ ID NO: 360409 - DNA, 33 bp, Homo sapien
tggtctgcggccactgaacaagtgaggtagttt

SEQ ID NO: 360410 - DNA, 33 bp, Homo sapien
tggtctgcggccactggacaagtgaggtagttt

SEQ ID NO: 360411 - DNA, 33 bp, Homo sapien
aacctaagtcttctgacgagatcaatgaaaaac

SEQ ID NO: 360412 - DNA, 33 bp, Homo sapien
aacctaagtcttctgatgagatcaatgaaaaac

SEQ ID NO: 360413 - DNA, 33 bp, Homo sapien
gtaggtgagagaaagcactagcctctagcaggt

SEQ ID NO: 360414 - DNA, 33 bp, Homo sapien
gtaggtgagagaaagcgctagcctctagcaggt

SEQ ID NO: 360415 - DNA, 33 bp, Homo sapien
tgcagaagctactgacactaggccagatggaaa

SEQ ID NO: 360416 - DNA, 33 bp, Homo sapien
tgcagaagctactgacgctaggccagatggaaa

SEQ ID NO: 360417 - DNA, 33 bp, Homo sapien
gtgaagggcacagaaaacagctgcagcaaacaa

SEQ ID NO: 360418 - DNA, 33 bp, Homo sapien
gtgaagggcacagaaaccagctgcagcaaacaa

SEQ ID NO: 360419 - DNA, 33 bp, Homo sapien
aaagtccgagaagttgaagtgagttctgtgttt

SEQ ID NO: 360420 - DNA, 33 bp, Homo sapien
aaagtccgagaagttggagtgagttctgtgttt

SEQ ID NO: 360421 - DNA, 33 bp, Homo sapien
ttgagtagaaggtatgaaaggtgtgatagctgc

SEQ ID NO: 360422 - DNA, 33 bp, Homo sapien
ttgagtagaaggtatggaaggtgtgatagctgc

SEQ ID NO: 360423 - DNA, 33 bp, Homo sapien
ttgttacaaatacttacaaaaagacagagctca

SEQ ID NO: 360424 - DNA, 33 bp, Homo sapien
ttgttacaaatacttagaaaaagacagagctca

SEQ ID NO: 360425 - DNA, 33 bp, Homo sapien
tgtttggaacttaagaactttactgaaagctat

SEQ ID NO: 360426 - DNA, 33 bp, Homo sapien
tgtttggaacttaagatctttactgaaagctat

SEQ ID NO: 360427 - DNA, 33 bp, Homo sapien
gtttctattaacatgactacaagcaaaatgctt

SEQ ID NO: 360428 - DNA, 33 bp, Homo sapien
gtttctattaacatgattacaagcaaaatgctt

SEQ ID NO: 360429 - DNA, 33 bp, Homo sapien
cccactcctgtgataacggcactcatgagggca

SEQ ID NO: 360430 - DNA, 33 bp, Homo sapien
cccactcctgtgataatggcactcatgagggca

SEQ ID NO: 360431 - DNA, 33 bp, Homo sapien
ccaagtgagattctgaagttgggctggcgagta

SEQ ID NO: 360432 - DNA, 33 bp, Homo sapien
ccaagtgagattctgaggttgggctggcgagta

SEQ ID NO: 360433 - DNA, 33 bp, Homo sapien
aggcattttagctctgaagctcaatcatgacat

SEQ ID NO: 360434 - DNA, 33 bp, Homo sapien
aggcattttagctctggagctcaatcatgacat

SEQ ID NO: 360435 - DNA, 33 bp, Homo sapien
ctgttgtttaacacaccgtagttcataataggt

SEQ ID NO: 360436 - DNA, 33 bp, Homo sapien
ctgttgtttaacacactgtagttcataataggt

SEQ ID NO: 360437 - DNA, 33 bp, Homo sapien
attaaaaatctgggcacaaggtgaaaaaacaat

SEQ ID NO: 360438 - DNA, 33 bp, Homo sapien
attaaaaatctgggcataaggtgaaaaaacaat

SEQ ID NO: 360439 - DNA, 33 bp, Homo sapien
aggcccaggaatctgactaaagtttggtcaagc

SEQ ID NO: 360440 - DNA, 33 bp, Homo sapien
aggcccaggaatctgagtaaagtttggtcaagc

SEQ ID NO: 360441 - DNA, 33 bp, Homo sapien
ctactgggtccagtcaaggattttgtgatgtgg

SEQ ID NO: 360442 - DNA, 33 bp, Homo sapien
ctactgggtccagtcagggattttgtgatgtgg

SEQ ID NO: 360443 - DNA, 33 bp, Homo sapien
ctctctgctgcaggacagaagaagtctcactgc

SEQ ID NO: 360444 - DNA, 33 bp, Homo sapien
ctctctgctgcaggacggaagaagtctcactgc

SEQ ID NO: 360445 - DNA, 33 bp, Homo sapien
cacctgtgttcacaaccggaaaatgagaaagca

SEQ ID NO: 360446 - DNA, 33 bp, Homo sapien
cacctgtgttcacaactggaaaatgagaaagca

SEQ ID NO: 360447 - DNA, 33 bp, Homo sapien
ttcacacctgcaagagccgcctagttcgggagg

SEQ ID NO: 360448 - DNA, 33 bp, Homo sapien
ttcacacctgcaagagtcgcctagttcgggagg

SEQ ID NO: 360449 - DNA, 33 bp, Homo sapien
ccctaaaccagcatacagaatatgctctcagct

SEQ ID NO: 360450 - DNA, 33 bp, Homo sapien
ccctaaaccagcatacggaatatgctctcagct

SEQ ID NO: 360451 - DNA, 33 bp, Homo sapien
tgggccactcctcctaggtgctccttgttcttc

SEQ ID NO: 360452 - DNA, 33 bp, Homo sapien
tgggccactcctcctatgtgctccttgttcttc

SEQ ID NO: 360453 - DNA, 33 bp, Homo sapien
gccattgcaaatgttacggcaaagatgaatttt

SEQ ID NO: 360454 - DNA, 33 bp, Homo sapien
gccattgcaaatgttatggcaaagatgaatttt

SEQ ID NO: 360455 - DNA, 33 bp, Homo sapien
taaatgcccatcaaccgcagactggataaagaa

SEQ ID NO: 360456 - DNA, 33 bp, Homo sapien
taaatgcccatcaacctcagactggataaagaa

SEQ ID NO: 360457 - DNA, 33 bp, Homo sapien
tcctaacaaccccaaacgacagggatgtgtatc

SEQ ID NO: 360458 - DNA, 33 bp, Homo sapien
tcctaacaaccccaaatgacagggatgtgtatc

SEQ ID NO: 360459 - DNA, 33 bp, Homo sapien
ggggctcactctggtcactcacctttgtatcca

SEQ ID NO: 360460 - DNA, 33 bp, Homo sapien
ggggctcactctggtcgctcacctttgtatcca

SEQ ID NO: 360461 - DNA, 33 bp, Homo sapien
atagcatagagatgaagtgcattggctcatggg

SEQ ID NO: 360462 - DNA, 33 bp, Homo sapien
atagcatagagatgaattgcattggctcatggg

SEQ ID NO: 360463 - DNA, 33 bp, Homo sapien
aagtctcaatgagatcacaatatgcctgatagg

SEQ ID NO: 360464 - DNA, 33 bp, Homo sapien
aagtctcaatgagatcgcaatatgcctgatagg

SEQ ID NO: 360465 - DNA, 33 bp, Homo sapien
cgaggcagcttcttccggccttctgagtacagg

SEQ ID NO: 360466 - DNA, 33 bp, Homo sapien
cgaggcagcttcttcctgccttctgagtacagg

SEQ ID NO: 360467 - DNA, 33 bp, Homo sapien
aggtcagaaggctccaagtgctctgtgtgcagg

SEQ ID NO: 360468 - DNA, 33 bp, Homo sapien
aggtcagaaggctccaggtgctctgtgtgcagg

SEQ ID NO: 360469 - DNA, 33 bp, Homo sapien
acacaggctatgttagaagacatggcatttatc

SEQ ID NO: 360470 - DNA, 33 bp, Homo sapien
acacaggctatgttaggagacatggcatttatc

SEQ ID NO: 360471 - DNA, 33 bp, Homo sapien
tctgtgggccttcataatactggcgctaaattt

SEQ ID NO: 360472 - DNA, 33 bp, Homo sapien
tctgtgggccttcatagtactggcgctaaattt

SEQ ID NO: 360473 - DNA, 33 bp, Homo sapien
gtctgtctcccttgtaaccctgggatctctttt

SEQ ID NO: 360474 - DNA, 33 bp, Homo sapien
gtctgtctcccttgtacccctgggatctctttt

SEQ ID NO: 360475 - DNA, 33 bp, Homo sapien
cagccttgagagatgacgacctttcagtgccct

SEQ ID NO: 360476 - DNA, 33 bp, Homo sapien
cagccttgagagatgaggacctttcagtgccct

SEQ ID NO: 360477 - DNA, 33 bp, Homo sapien
gagtccacatttgtaactgagatgagagaagga

SEQ ID NO: 360478 - DNA, 33 bp, Homo sapien
gagtccacatttgtaattgagatgagagaagga

SEQ ID NO: 360479 - DNA, 33 bp, Homo sapien
ttccaagtgcctacacaccctcttacacacaca

SEQ ID NO: 360480 - DNA, 33 bp, Homo sapien
ttccaagtgcctacacgccctcttacacacaca

SEQ ID NO: 360481 - DNA, 33 bp, Homo sapien
ggggttaggagctgcactaaattcaatcaaaaa

SEQ ID NO: 360482 - DNA, 33 bp, Homo sapien
ggggttaggagctgcattaaattcaatcaaaaa

SEQ ID NO: 360483 - DNA, 33 bp, Homo sapien
atgctagctagtgttacgaagcgagcataaaca

SEQ ID NO: 360484 - DNA, 33 bp, Homo sapien
atgctagctagtgttaggaagcgagcataaaca

SEQ ID NO: 360485 - DNA, 33 bp, Homo sapien
aaccagatagaagtgacggttggtacaacattg

SEQ ID NO: 360486 - DNA, 33 bp, Homo sapien
aaccagatagaagtgatggttggtacaacattg

SEQ ID NO: 360487 - DNA, 33 bp, Homo sapien
catgtggcagatgggacggattcactgctaaat

SEQ ID NO: 360488 - DNA, 33 bp, Homo sapien
catgtggcagatgggatggattcactgctaaat

SEQ ID NO: 360489 - DNA, 33 bp, Homo sapien
tataatatcctacatcaacagggtttttcattc

SEQ ID NO: 360490 - DNA, 33 bp, Homo sapien
tataatatcctacatcgacagggtttttcattc

SEQ ID NO: 360491 - DNA, 33 bp, Homo sapien
gaagacatggcaacagaaactatccaaaatgaa

SEQ ID NO: 360492 - DNA, 33 bp, Homo sapien
gaagacatggcaacagcaactatccaaaatgaa

SEQ ID NO: 360493 - DNA, 33 bp, Homo sapien
ttctcatcatgggtcacagttttctgctgtttt

SEQ ID NO: 360494 - DNA, 33 bp, Homo sapien
ttctcatcatgggtcatagttttctgctgtttt

SEQ ID NO: 360495 - DNA, 33 bp, Homo sapien
gtgtcacattgagacactgggttgtatggcttc

SEQ ID NO: 360496 - DNA, 33 bp, Homo sapien
gtgtcacattgagacattgggttgtatggcttc

SEQ ID NO: 360497 - DNA, 33 bp, Homo sapien
gcaatcggtactcaaaccactggtccagttcat

SEQ ID NO: 360498 - DNA, 33 bp, Homo sapien
gcaatcggtactcaaagcactggtccagttcat

SEQ ID NO: 360499 - DNA, 33 bp, Homo sapien
ttcaaaaaaggaataaatacctatcaaagtgag

SEQ ID NO: 360500 - DNA, 33 bp, Homo sapien
ttcaaaaaaggaataagtacctatcaaagtgag

SEQ ID NO: 360501 - DNA, 33 bp, Homo sapien
tctgctccaagaggacaagaagagtttaatact

SEQ ID NO: 360502 - DNA, 33 bp, Homo sapien
tctgctccaagaggacgagaagagtttaatact

SEQ ID NO: 360503 - DNA, 33 bp, Homo sapien
catgtcagccacgaagccctctcagtgtttctt

SEQ ID NO: 360504 - DNA, 33 bp, Homo sapien
catgtcagccacgaaggcctctcagtgtttctt

SEQ ID NO: 360505 - DNA, 33 bp, Homo sapien
tgggtggggggaggtactacactcttgaacaac

SEQ ID NO: 360506 - DNA, 33 bp, Homo sapien
tgggtggggggaggtattacactcttgaacaac

SEQ ID NO: 360507 - DNA, 33 bp, Homo sapien
acacagaagtcttaaaagaacactatcaaccaa

SEQ ID NO: 360508 - DNA, 33 bp, Homo sapien
acacagaagtcttaaatgaacactatcaaccaa

SEQ ID NO: 360509 - DNA, 33 bp, Homo sapien
catgccagaggtgttacaatctttcaagcttca

SEQ ID NO: 360510 - DNA, 33 bp, Homo sapien
catgccagaggtgttataatctttcaagcttca

SEQ ID NO: 360511 - DNA, 33 bp, Homo sapien
ccccaaatcccagccacgtaatgtagcatcagc

SEQ ID NO: 360512 - DNA, 33 bp, Homo sapien
ccccaaatcccagccaggtaatgtagcatcagc

SEQ ID NO: 360513 - DNA, 33 bp, Homo sapien
actacctggctgctcaatatccagctcctggga

SEQ ID NO: 360514 - DNA, 33 bp, Homo sapien
actacctggctgctcagtatccagctcctggga

SEQ ID NO: 360515 - DNA, 33 bp, Homo sapien
aatgagccagctataactctgtgtaactctatg

SEQ ID NO: 360516 - DNA, 33 bp, Homo sapien
aatgagccagctataattctgtgtaactctatg

SEQ ID NO: 360517 - DNA, 33 bp, Homo sapien
cagcttactaagaagaacaagactaattaacta

SEQ ID NO: 360518 - DNA, 33 bp, Homo sapien
cagcttactaagaagagcaagactaattaacta

SEQ ID NO: 360519 - DNA, 33 bp, Homo sapien
gatgagcaagaatcaccgatacataattggcct

SEQ ID NO: 360520 - DNA, 33 bp, Homo sapien
gatgagcaagaatcactgatacataattggcct

SEQ ID NO: 360521 - DNA, 33 bp, Homo sapien
ttactttggttttgcaccggggtaatgctgacc

SEQ ID NO: 360522 - DNA, 33 bp, Homo sapien
ttactttggttttgcagcggggtaatgctgacc

SEQ ID NO: 360523 - DNA, 33 bp, Homo sapien
ataatataattcaaaaaatttacagctgactag

SEQ ID NO: 360524 - DNA, 33 bp, Homo sapien
ataatataattcaaaacatttacagctgactag

SEQ ID NO: 360525 - DNA, 33 bp, Homo sapien
ctaaaagcactcctacaatcactgtaatattct

SEQ ID NO: 360526 - DNA, 33 bp, Homo sapien
ctaaaagcactcctacgatcactgtaatattct

SEQ ID NO: 360527 - DNA, 33 bp, Homo sapien
cactgataggaaaagacagtgtgtaggccagga

SEQ ID NO: 360528 - DNA, 33 bp, Homo sapien
cactgataggaaaagagagtgtgtaggccagga

SEQ ID NO: 360529 - DNA, 33 bp, Homo sapien
tctacagatactcaccaaagcagtcaatggcaa

SEQ ID NO: 360530 - DNA, 33 bp, Homo sapien
tctacagatactcaccgaagcagtcaatggcaa

SEQ ID NO: 360531 - DNA, 33 bp, Homo sapien
atcctcgcaacacctcgaaggtgcaagtcgcac

SEQ ID NO: 360532 - DNA, 33 bp, Homo sapien
atcctcgcaacacctctaaggtgcaagtcgcac

SEQ ID NO: 360533 - DNA, 33 bp, Homo sapien
cattagcgtcgtccccactctaggctggtttcc

SEQ ID NO: 360534 - DNA, 33 bp, Homo sapien
cattagcgtcgtcccctctctaggctggtttcc

SEQ ID NO: 360535 - DNA, 33 bp, Homo sapien
ttttatcaaatggtgaagacaatgctaaaggtt

SEQ ID NO: 360536 - DNA, 33 bp, Homo sapien
ttttatcaaatggtgacgacaatgctaaaggtt

SEQ ID NO: 360537 - DNA, 33 bp, Homo sapien
gacttagataagggcaccaaggtccctcgacag

SEQ ID NO: 360538 - DNA, 33 bp, Homo sapien
gacttagataagggcatcaaggtccctcgacag

SEQ ID NO: 360539 - DNA, 33 bp, Homo sapien
taatagctgtttcacaaccttatctgctaattc

SEQ ID NO: 360540 - DNA, 33 bp, Homo sapien
taatagctgtttcacatccttatctgctaattc

SEQ ID NO: 360541 - DNA, 33 bp, Homo sapien
ctcagctttcttcccaacaccttgcctttgagt

SEQ ID NO: 360542 - DNA, 33 bp, Homo sapien
ctcagctttcttcccagcaccttgcctttgagt

SEQ ID NO: 360543 - DNA, 33 bp, Homo sapien
ctacttgagataatggaaatacaattgatctag

SEQ ID NO: 360544 - DNA, 33 bp, Homo sapien
ctacttgagataatgggaatacaattgatctag

SEQ ID NO: 360545 - DNA, 33 bp, Homo sapien
ggcctcacaataagaaaagttagatccattgcc

SEQ ID NO: 360546 - DNA, 33 bp, Homo sapien
ggcctcacaataagaagagttagatccattgcc

SEQ ID NO: 360547 - DNA, 33 bp, Homo sapien
tcaatcttaaattagaaaccagaatgatcttca

SEQ ID NO: 360548 - DNA, 33 bp, Homo sapien
tcaatcttaaattagagaccagaatgatcttca

SEQ ID NO: 360549 - DNA, 33 bp, Homo sapien
caggatattgagcgtgcagtgcagtcagaaatc

SEQ ID NO: 360550 - DNA, 33 bp, Homo sapien
caggatattgagcgtggagtgcagtcagaaatc

SEQ ID NO: 360551 - DNA, 33 bp, Homo sapien
cggtcactgtggtctcagaagacgggctcagaa

SEQ ID NO: 360552 - DNA, 33 bp, Homo sapien
cggtcactgtggtctcggaagacgggctcagaa

SEQ ID NO: 360553 - DNA, 33 bp, Homo sapien
cagccaacagatctcaatcaaatcaatcatttc

SEQ ID NO: 360554 - DNA, 33 bp, Homo sapien
cagccaacagatctcattcaaatcaatcatttc

SEQ ID NO: 360555 - DNA, 33 bp, Homo sapien
agagacttcatatgaacaggaaagatgctaaga

SEQ ID NO: 360556 - DNA, 33 bp, Homo sapien
agagacttcatatgaataggaaagatgctaaga

SEQ ID NO: 360557 - DNA, 33 bp, Homo sapien
gtttaagatgctgttaggatctctatcactagc

SEQ ID NO: 360558 - DNA, 33 bp, Homo sapien
gtttaagatgctgttatgatctctatcactagc

SEQ ID NO: 360559 - DNA, 33 bp, Homo sapien
caagtggagtctcacacaggtttgaagggtggc

SEQ ID NO: 360560 - DNA, 33 bp, Homo sapien
caagtggagtctcacataggtttgaagggtggc

SEQ ID NO: 360561 - DNA, 33 bp, Homo sapien
aggcatcatcactgtaggatcagaacctgagcc

SEQ ID NO: 360562 - DNA, 33 bp, Homo sapien
aggcatcatcactgtatgatcagaacctgagcc

SEQ ID NO: 360563 - DNA, 33 bp, Homo sapien
catctttgttcaaatgccactcattggtaacgc

SEQ ID NO: 360564 - DNA, 33 bp, Homo sapien
catctttgttcaaatgtcactcattggtaacgc

SEQ ID NO: 360565 - DNA, 33 bp, Homo sapien
gttctcagatcaggcaaactggccacaggaatc

SEQ ID NO: 360566 - DNA, 33 bp, Homo sapien
gttctcagatcaggcagactggccacaggaatc

SEQ ID NO: 360567 - DNA, 33 bp, Homo sapien
aaattctgcatggccaaggaaattatttaaaaa

SEQ ID NO: 360568 - DNA, 33 bp, Homo sapien
aaattctgcatggccagggaaattatttaaaaa

SEQ ID NO: 360569 - DNA, 33 bp, Homo sapien
aactaatatcttcaaactgtacttgaattgact

SEQ ID NO: 360570 - DNA, 33 bp, Homo sapien
aactaatatcttcaaattgtacttgaattgact

SEQ ID NO: 360571 - DNA, 33 bp, Homo sapien
tggagctgagacaggggatcatttcctttctaa

SEQ ID NO: 360572 - DNA, 33 bp, Homo sapien
tggagctgagacagggtatcatttcctttctaa

SEQ ID NO: 360573 - DNA, 33 bp, Homo sapien
tgaaccaaccacaaacaaaaagaattcaattgt

SEQ ID NO: 360574 - DNA, 33 bp, Homo sapien
tgaaccaaccacaaacgaaaagaattcaattgt

SEQ ID NO: 360575 - DNA, 33 bp, Homo sapien
cttccatctttataaccagcaatcgctaggtga

SEQ ID NO: 360576 - DNA, 33 bp, Homo sapien
cttccatctttataacgagcaatcgctaggtga

SEQ ID NO: 360577 - DNA, 33 bp, Homo sapien
gtgatctaagataaaaacttgagagtcccatac

SEQ ID NO: 360578 - DNA, 33 bp, Homo sapien
gtgatctaagataaaaccttgagagtcccatac

SEQ ID NO: 360579 - DNA, 33 bp, Homo sapien
tcatgctaccaggacaactgtctactcaggttt

SEQ ID NO: 360580 - DNA, 33 bp, Homo sapien
tcatgctaccaggacacctgtctactcaggttt

SEQ ID NO: 360581 - DNA, 33 bp, Homo sapien
actagtgtactaattgcatgcattattttatta

SEQ ID NO: 360582 - DNA, 33 bp, Homo sapien
actagtgtactaattgtatgcattattttatta

SEQ ID NO: 360583 - DNA, 33 bp, Homo sapien
atgtactgtaacgaatcataaagtcataaacac

SEQ ID NO: 360584 - DNA, 33 bp, Homo sapien
atgtactgtaacgaatgataaagtcataaacac

SEQ ID NO: 360585 - DNA, 33 bp, Homo sapien
gcctattgctactttgaatagtatgtgtttatg

SEQ ID NO: 360586 - DNA, 33 bp, Homo sapien
gcctattgctactttgcatagtatgtgtttatg

SEQ ID NO: 360587 - DNA, 33 bp, Homo sapien
tacattgagagtgaacagaaattatttctcagc

SEQ ID NO: 360588 - DNA, 33 bp, Homo sapien
tacattgagagtgaacggaaattatttctcagc

SEQ ID NO: 360589 - DNA, 33 bp, Homo sapien
gtgcggaggatttctaagaattagtagacttta

SEQ ID NO: 360590 - DNA, 33 bp, Homo sapien
gtgcggaggatttctatgaattagtagacttta

SEQ ID NO: 360591 - DNA, 33 bp, Homo sapien; identical to SEQ ID NO: 360589

SEQ ID NO: 360592 - DNA, 33 bp, Homo sapien; identical to SEQ ID NO: 360590

SEQ ID NO: 360593 - DNA, 33 bp, Homo sapien
tggtagacataagagaaaggactggagacttgg

SEQ ID NO: 360594 - DNA, 33 bp, Homo sapien
tggtagacataagagataggactggagacttgg

SEQ ID NO: 360595 - DNA, 33 bp, Homo sapien; identical to SEQ ID NO: 360593

SEQ ID NO: 360596 - DNA, 33 bp, Homo sapien; identical to SEQ ID NO: 360594

SEQ ID NO: 360597 - DNA, 33 bp, Homo sapien
agtgagcaatgtgaggaatccaaagactaggga

SEQ ID NO: 360598 - DNA, 33 bp, Homo sapien
agtgagcaatgtgagggatccaaagactaggga

SEQ ID NO: 360599 - DNA, 33 bp, Homo sapien
cacataggtatcctgccatttacattccacatg

SEQ ID NO: 360600 - DNA, 33 bp, Homo sapien
cacataggtatcctgctatttacattccacatg

SEQ ID NO: 360601 - DNA, 33 bp, Homo sapien
ctcctgtctgtaagtacctttcctttcttagag

SEQ ID NO: 360602 - DNA, 33 bp, Homo sapien
ctcctgtctgtaagtatctttcctttcttagag

SEQ ID NO: 360603 - DNA, 33 bp, Homo sapien; identical to SEQ ID NO: 360601

SEQ ID NO: 360604 - DNA, 33 bp, Homo sapien; identical to SEQ ID NO: 360602

SEQ ID NO: 360605 - DNA, 33 bp, Homo sapien
tgttgtatagttgaaactggccaagaatagatc

SEQ ID NO: 360606 - DNA, 33 bp, Homo sapien
tgttgtatagttgaaattggccaagaatagatc

SEQ ID NO: 360607 - DNA, 33 bp, Homo sapien
atgctccctattaacaactcttcaactgagcgc

SEQ ID NO: 360608 - DNA, 33 bp, Homo sapien
atgctccctattaacagctcttcaactgagcgc

SEQ ID NO: 360609 - DNA, 33 bp, Homo sapien
atgtcccaataatcaactcagaacagatcacag

SEQ ID NO: 360610 - DNA, 33 bp, Homo sapien
atgtcccaataatcaagtcagaacagatcacag

SEQ ID NO: 360611 - DNA, 33 bp, Homo sapien
ggaagtaatcttggaaagtttctggaaattaaa

SEQ ID NO: 360612 - DNA, 33 bp, Homo sapien
ggaagtaatcttggaacgtttctggaaattaaa

SEQ ID NO: 360613 - DNA, 33 bp, Homo sapien
agacatttctgacagcagaatcctatagtgggt

SEQ ID NO: 360614 - DNA, 33 bp, Homo sapien
agacatttctgacagcggaatcctatagtgggt

SEQ ID NO: 360615 - DNA, 33 bp, Homo sapien
ctgtaagtaaaatcaacgatactatgccacatt

SEQ ID NO: 360616 - DNA, 33 bp, Homo sapien
ctgtaagtaaaatcaatgatactatgccacatt

SEQ ID NO: 360617 - DNA, 33 bp, Homo sapien; identical to SEQ ID NO: 360615

SEQ ID NO: 360618 - DNA, 33 bp, Homo sapien; identical to SEQ ID NO: 360616

SEQ ID NO: 360619 - DNA, 33 bp, Homo sapien
taaggcaatgtgaataacaaaagtctcacttac

SEQ ID NO: 360620 - DNA, 33 bp, Homo sapien
taaggcaatgtgaatagcaaaagtctcacttac

SEQ ID NO: 360621 - DNA, 33 bp, Homo sapien
agaggattgaagtgtgcataatcaccagctaga

SEQ ID NO: 360622 - DNA, 33 bp, Homo sapien
agaggattgaagtgtgtataatcaccagctaga

SEQ ID NO: 360623 - DNA, 33 bp, Homo sapien; identical to SEQ ID NO: 360621

SEQ ID NO: 360624 - DNA, 33 bp, Homo sapien; identical to SEQ ID NO: 360622

SEQ ID NO: 360625 - DNA, 33 bp, Homo sapien
ggaggctttactttgacggataaaataggagca

SEQ ID NO: 360626 - DNA, 33 bp, Homo sapien
ggaggctttactttgatggataaaataggagca

SEQ ID NO: 360627 - DNA, 33 bp, Homo sapien; identical to SEQ ID NO: 360625

SEQ ID NO: 360628 - DNA, 33 bp, Homo sapien; identical to SEQ ID NO: 360626

SEQ ID NO: 360629 - DNA, 33 bp, Homo sapien
ttctggatactaagcaaataatcacacctcaag

SEQ ID NO: 360630 - DNA, 33 bp, Homo sapien
ttctggatactaagcagataatcacacctcaag

SEQ ID NO: 360631 - DNA, 33 bp, Homo sapien; identical to SEQ ID NO: 360629

SEQ ID NO: 360632 - DNA, 33 bp, Homo sapien; identical to SEQ ID NO: 360630

SEQ ID NO: 360633 - DNA, 33 bp, Homo sapien
ttacaaggtcatagaaagccaggttaacatata

SEQ ID NO: 360634 - DNA, 33 bp, Homo sapien
ttacaaggtcatagaatgccaggttaacatata

SEQ ID NO: 360635 - DNA, 33 bp, Homo sapien
ggtaaagaataattcaagcaagaaatatcagga

SEQ ID NO: 360636 - DNA, 33 bp, Homo sapien
ggtaaagaataattcaggcaagaaatatcagga

SEQ ID NO: 360637 - DNA, 33 bp, Homo sapien
tcttccttggcaataacccatttgcacttaatt

SEQ ID NO: 360638 - DNA, 33 bp, Homo sapien
tcttccttggcaataatccatttgcacttaatt

SEQ ID NO: 360639 - DNA, 33 bp, Homo sapien
aggacttggtgacttacaggagatcgagtggca

SEQ ID NO: 360640 - DNA, 33 bp, Homo sapien
aggacttggtgacttataggagatcgagtggca

SEQ ID NO: 360641 - DNA, 33 bp, Homo sapien
caagtcctggctatgacatttacttgtaaacct

SEQ ID NO: 360642 - DNA, 33 bp, Homo sapien
caagtcctggctatgatatttacttgtaaacct

SEQ ID NO: 360643 - DNA, 33 bp, Homo sapien
ccgtcacttgcaccccaattcattgctctttgc

SEQ ID NO: 360644 - DNA, 33 bp, Homo sapien
ccgtcacttgcacccccattcattgctctttgc

SEQ ID NO: 360645 - DNA, 33 bp, Homo sapien
acaaatatttgcattacgaaagttccagaagga

SEQ ID NO: 360646 - DNA, 33 bp, Homo sapien
acaaatatttgcattatgaaagttccagaagga

SEQ ID NO: 360647 - DNA, 33 bp, Homo sapien
tccagtttcgtggcataatacaactctgaattt

SEQ ID NO: 360648 - DNA, 33 bp, Homo sapien
tccagtttcgtggcatgatacaactctgaattt

SEQ ID NO: 360649 - DNA, 33 bp, Homo sapien
aggagagagatgtcagcagataacagggtgatg

SEQ ID NO: 360650 - DNA, 33 bp, Homo sapien
aggagagagatgtcagtagataacagggtgatg

SEQ ID NO: 360651 - DNA, 33 bp, Homo sapien
agctgtctctcgtacacggccccccactgtctc

SEQ ID NO: 360652 - DNA, 33 bp, Homo sapien
agctgtctctcgtacatggccccccactgtctc

SEQ ID NO: 360653 - DNA, 33 bp, Homo sapien
tcccttcctctgccatcaaagtagctaggttgc

SEQ ID NO: 360654 - DNA, 33 bp, Homo sapien
tcccttcctctgccatgaaagtagctaggttgc

SEQ ID NO: 360655 - DNA, 33 bp, Homo sapien
ctgtgtgaccttgacaaaaatcttcactctcta

SEQ ID NO: 360656 - DNA, 33 bp, Homo sapien
ctgtgtgaccttgacagaaatcttcactctcta

SEQ ID NO: 360657 - DNA, 33 bp, Homo sapien
cttaaccagctcatccagcttagcccagaaaca

SEQ ID NO: 360658 - DNA, 33 bp, Homo sapien
cttaaccagctcatccggcttagcccagaaaca

SEQ ID NO: 360659 - DNA, 33 bp, Homo sapien
ccactaacatctcaaactaacaccactgcgaca

SEQ ID NO: 360660 - DNA, 33 bp, Homo sapien
ccactaacatctcaaattaacaccactgcgaca

SEQ ID NO: 360661 - DNA, 33 bp, Homo sapien
gtgggcagattagagacatcctttggaggtaga

SEQ ID NO: 360662 - DNA, 33 bp, Homo sapien
gtgggcagattagagatatcctttggaggtaga

SEQ ID NO: 360663 - DNA, 33 bp, Homo sapien
atttcatctaacaaaccggaatcactggggcca

SEQ ID NO: 360664 - DNA, 33 bp, Homo sapien
atttcatctaacaaactggaatcactggggcca

SEQ ID NO: 360665 - DNA, 33 bp, Homo sapien
tgaccgttgctggatacgatcagaatgcaggaa

SEQ ID NO: 360666 - DNA, 33 bp, Homo sapien
tgaccgttgctggataggatcagaatgcaggaa

SEQ ID NO: 360667 - DNA, 33 bp, Homo sapien
ctccctgatttcagacagaaggtctcacttgga

SEQ ID NO: 360668 - DNA, 33 bp, Homo sapien
ctccctgatttcagacggaaggtctcacttgga

SEQ ID NO: 360669 - DNA, 33 bp, Homo sapien
tcctctgtgctctcaaagaggccactctgcttg

SEQ ID NO: 360670 - DNA, 33 bp, Homo sapien
tcctctgtgctctcaacgaggccactctgcttg

SEQ ID NO: 360671 - DNA, 33 bp, Homo sapien
aaagcgagtcaagacaagaacactaaatgatgt

SEQ ID NO: 360672 - DNA, 33 bp, Homo sapien
aaagcgagtcaagacaggaacactaaatgatgt

SEQ ID NO: 360673 - DNA, 33 bp, Homo sapien
acgctcatgttctatgcagttggattcttgtgg

SEQ ID NO: 360674 - DNA, 33 bp, Homo sapien
acgctcatgttctatgtagttggattcttgtgg

SEQ ID NO: 360675 - DNA, 33 bp, Homo sapien
ggaggatcagaatcaaagtgctaacaaatccag

SEQ ID NO: 360676 - DNA, 33 bp, Homo sapien
ggaggatcagaatcaaggtgctaacaaatccag

SEQ ID NO: 360677 - DNA, 33 bp, Homo sapien
ccacggcagcacggaacgttccacaacaatcct

SEQ ID NO: 360678 - DNA, 33 bp, Homo sapien
ccacggcagcacggaatgttccacaacaatcct

SEQ ID NO: 360679 - DNA, 33 bp, Homo sapien
catatcaccactctgaacctcagcttgctcatc

SEQ ID NO: 360680 - DNA, 33 bp, Homo sapien
catatcaccactctgagcctcagcttgctcatc

SEQ ID NO: 360681 - DNA, 33 bp, Homo sapien
gaacgtgctttgtaaactctaaagcaacggcaa

SEQ ID NO: 360682 - DNA, 33 bp, Homo sapien
gaacgtgctttgtaaattctaaagcaacggcaa

SEQ ID NO: 360683 - DNA, 33 bp, Homo sapien
ttattgggatcagtgacattggcccgtgacatt

SEQ ID NO: 360684 - DNA, 33 bp, Homo sapien
ttattgggatcagtgatattggcccgtgacatt

SEQ ID NO: 360685 - DNA, 33 bp, Homo sapien
gagttccatgaccttaacaatgaacgaaccttg

SEQ ID NO: 360686 - DNA, 33 bp, Homo sapien
gagttccatgaccttagcaatgaacgaaccttg

SEQ ID NO: 360687 - DNA, 33 bp, Homo sapien
cctcagcggtaacgaacgtagcactctggcggg

SEQ ID NO: 360688 - DNA, 33 bp, Homo sapien
cctcagcggtaacgaatgtagcactctggcggg

SEQ ID NO: 360689 - DNA, 33 bp, Homo sapien
gactatttaagacacaacaaacaatactctctt

SEQ ID NO: 360690 - DNA, 33 bp, Homo sapien
gactatttaagacacagcaaacaatactctctt

SEQ ID NO: 360691 - DNA, 33 bp, Homo sapien
gcataatgacgtggcacagttttcccaggacag

SEQ ID NO: 360692 - DNA, 33 bp, Homo sapien
gcataatgacgtggcatagttttcccaggacag

SEQ ID NO: 360693 - DNA, 33 bp, Homo sapien
caaaaatgatctttgcactgatctccagggcat

SEQ ID NO: 360694 - DNA, 33 bp, Homo sapien
caaaaatgatctttgcgctgatctccagggcat

SEQ ID NO: 360695 - DNA, 33 bp, Homo sapien
accagtgcatacctggccatttgggtaggtgcc

SEQ ID NO: 360696 - DNA, 33 bp, Homo sapien
accagtgcatacctggtcatttgggtaggtgcc

SEQ ID NO: 360697 - DNA, 33 bp, Homo sapien
ctccaggaaaggtagactccaggattacaattc

SEQ ID NO: 360698 - DNA, 33 bp, Homo sapien
ctccaggaaaggtagattccaggattacaattc

SEQ ID NO: 360699 - DNA, 33 bp, Homo sapien
atgacccaggtttcaccatattagctctgacag

SEQ ID NO: 360700 - DNA, 33 bp, Homo sapien
atgacccaggtttcacgatattagctctgacag

SEQ ID NO: 360701 - DNA, 33 bp, Homo sapien
gccacgactttggttacgttcttattttcactg

SEQ ID NO: 360702 - DNA, 33 bp, Homo sapien
gccacgactttggttatgttcttattttcactg

SEQ ID NO: 360703 - DNA, 33 bp, Homo sapien
agcaggaatcagtggaccttgtttagtggctgc

SEQ ID NO: 360704 - DNA, 33 bp, Homo sapien
agcaggaatcagtggatcttgtttagtggctgc

SEQ ID NO: 360705 - DNA, 33 bp, Homo sapien
taaaaaatgaactcacaaaaaagtgcgcactta

SEQ ID NO: 360706 - DNA, 33 bp, Homo sapien
taaaaaatgaactcacgaaaaagtgcgcactta

SEQ ID NO: 360707 - DNA, 33 bp, Homo sapien
aagagtaacaataacacagaaaggctctttcac

SEQ ID NO: 360708 - DNA, 33 bp, Homo sapien
aagagtaacaataacatagaaaggctctttcac

SEQ ID NO: 360709 - DNA, 33 bp, Homo sapien
tttgaagctcttgcaaatcctaacaagatagat

SEQ ID NO: 360710 - DNA, 33 bp, Homo sapien
tttgaagctcttgcaattcctaacaagatagat

SEQ ID NO: 360711 - DNA, 33 bp, Homo sapien
ctctgtggcactcattaatagagtctgcactca

SEQ ID NO: 360712 - DNA, 33 bp, Homo sapien
ctctgtggcactcatttatagagtctgcactca

SEQ ID NO: 360713 - DNA, 33 bp, Homo sapien
ttagaagcaacaaagagatactctacaaaaaca

SEQ ID NO: 360714 - DNA, 33 bp, Homo sapien
ttagaagcaacaaagatatactctacaaaaaca

SEQ ID NO: 360715 - DNA, 33 bp, Homo sapien
aattagaagaaaagaacgttaaagcagctattg

SEQ ID NO: 360716 - DNA, 33 bp, Homo sapien
aattagaagaaaagaatgttaaagcagctattg

SEQ ID NO: 360717 - DNA, 33 bp, Homo sapien
ctacagataacaattaagaactctggagacagt

SEQ ID NO: 360718 - DNA, 33 bp, Homo sapien
ctacagataacaattacgaactctggagacagt

SEQ ID NO: 360719 - DNA, 33 bp, Homo sapien
ggaggtgccattctcgcagaataccaggctata

SEQ ID NO: 360720 - DNA, 33 bp, Homo sapien
ggaggtgccattctcgtagaataccaggctata

SEQ ID NO: 360721 - DNA, 33 bp, Homo sapien
tacggccgcaccgccccaaatgtgtctgatctt

SEQ ID NO: 360722 - DNA, 33 bp, Homo sapien
tacggccgcaccgccctaaatgtgtctgatctt

SEQ ID NO: 360723 - DNA, 33 bp, Homo sapien
gtcaaatattcctggagagaatgtacacctttg

SEQ ID NO: 360724 - DNA, 33 bp, Homo sapien
gtcaaatattcctggatagaatgtacacctttg

SEQ ID NO: 360725 - DNA, 33 bp, Homo sapien
ctattgtgtaacttatcagatgcaattttgtcc

SEQ ID NO: 360726 - DNA, 33 bp, Homo sapien
ctattgtgtaacttatgagatgcaattttgtcc

SEQ ID NO: 360727 - DNA, 33 bp, Homo sapien
tattagagaaactggcagaaaaatgcataacaa

SEQ ID NO: 360728 - DNA, 33 bp, Homo sapien
tattagagaaactggcggaaaaatgcataacaa

SEQ ID NO: 360729 - DNA, 33 bp, Homo sapien
tgtgagaatcactgagacaaacacaggtgctgc

SEQ ID NO: 360730 - DNA, 33 bp, Homo sapien
tgtgagaatcactgagtcaaacacaggtgctgc

SEQ ID NO: 360731 - DNA, 33 bp, Homo sapien
ttgttttcaggtcttcaaaagataacctgaaaa

SEQ ID NO: 360732 - DNA, 33 bp, Homo sapien
ttgttttcaggtcttccaaagataacctgaaaa

SEQ ID NO: 360733 - DNA, 33 bp, Homo sapien
ggctggagacacgtccactaggtgtgatgacca

SEQ ID NO: 360734 - DNA, 33 bp, Homo sapien
ggctggagacacgtccgctaggtgtgatgacca

SEQ ID NO: 360735 - DNA, 33 bp, Homo sapien
gaggtcatcatttgtacgctcttactgaacaca

SEQ ID NO: 360736 - DNA, 33 bp, Homo sapien
gaggtcatcatttgtatgctcttactgaacaca

SEQ ID NO: 360737 - DNA, 33 bp, Homo sapien
aaatatgagaaaactaaactccccagcttgata

SEQ ID NO: 360738 - DNA, 33 bp, Homo sapien
aaatatgagaaaactagactccccagcttgata

SEQ ID NO: 360739 - DNA, 33 bp, Homo sapien
gaaattgacctctaaccccaacgcagaaggctg

SEQ ID NO: 360740 - DNA, 33 bp, Homo sapien
gaaattgacctctaacgccaacgcagaaggctg

SEQ ID NO: 360741 - DNA, 33 bp, Homo sapien
ataaattcttggcaatcaaagtcgtccattgaa

SEQ ID NO: 360742 - DNA, 33 bp, Homo sapien
ataaattcttggcaatgaaagtcgtccattgaa

SEQ ID NO: 360743 - DNA, 33 bp, Homo sapien
tgcagggctggtgtccgacccaaattacacact

SEQ ID NO: 360744 - DNA, 33 bp, Homo sapien
tgcagggctggtgtcctacccaaattacacact

SEQ ID NO: 360745 - DNA, 33 bp, Homo sapien
cagcacccacctgaaacgaatagataactactt

SEQ ID NO: 360746 - DNA, 33 bp, Homo sapien
cagcacccacctgaaatgaatagataactactt

SEQ ID NO: 360747 - DNA, 33 bp, Homo sapien
atctaactggtctccagtcaaagcccatgagca

SEQ ID NO: 360748 - DNA, 33 bp, Homo sapien
atctaactggtctccattcaaagcccatgagca

SEQ ID NO: 360749 - DNA, 33 bp, Homo sapien
ttgctctctgaacatgaaaaatggcaaaggagg

SEQ ID NO: 360750 - DNA, 33 bp, Homo sapien
ttgctctctgaacatggaaaatggcaaaggagg

SEQ ID NO: 360751 - DNA, 33 bp, Homo sapien
ccatctgcggcatagacaagacagaaggagaat

SEQ ID NO: 360752 - DNA, 33 bp, Homo sapien
ccatctgcggcatagagaagacagaaggagaat

SEQ ID NO: 360753 - DNA, 33 bp, Homo sapien
gtgtctatcaaggccccgaggactccacttcag

SEQ ID NO: 360754 - DNA, 33 bp, Homo sapien
gtgtctatcaaggccctgaggactccacttcag

SEQ ID NO: 360755 - DNA, 33 bp, Homo sapien
ggtttgctgtattaaacgaagacagaccagaag

SEQ ID NO: 360756 - DNA, 33 bp, Homo sapien
ggtttgctgtattaaatgaagacagaccagaag

SEQ ID NO: 360757 - DNA, 33 bp, Homo sapien
ttagaatgctgtggccaagagcacaaaggaggc

SEQ ID NO: 360758 - DNA, 33 bp, Homo sapien
ttagaatgctgtggccgagagcacaaaggaggc

SEQ ID NO: 360759 - DNA, 33 bp, Homo sapien
caggaggatatcagaacctctgaatgtctgaag

SEQ ID NO: 360760 - DNA, 33 bp, Homo sapien
caggaggatatcagaatctctgaatgtctgaag

SEQ ID NO: 360761 - DNA, 33 bp, Homo sapien
caaactgacactcataacgctgtagggtttgga

SEQ ID NO: 360762 - DNA, 33 bp, Homo sapien
caaactgacactcatatcgctgtagggtttgga

SEQ ID NO: 360763 - DNA, 33 bp, Homo sapien
aaacatctgcatagaagagacgcacaactgtgc

SEQ ID NO: 360764 - DNA, 33 bp, Homo sapien
aaacatctgcatagaatagacgcacaactgtgc

SEQ ID NO: 360765 - DNA, 33 bp, Homo sapien
ctaagtacttgagcaaacgtttagttgatataa

SEQ ID NO: 360766 - DNA, 33 bp, Homo sapien
ctaagtacttgagcaagcgtttagttgatataa

SEQ ID NO: 360767 - DNA, 33 bp, Homo sapien
acagaaaggacattgacggaaaaactggtgaaa

SEQ ID NO: 360768 - DNA, 33 bp, Homo sapien
acagaaaggacattgatggaaaaactggtgaaa

SEQ ID NO: 360769 - DNA, 33 bp, Homo sapien
aggcgacaaggaggcacagaatggacactacct

SEQ ID NO: 360770 - DNA, 33 bp, Homo sapien
aggcgacaaggaggcagagaatggacactacct

SEQ ID NO: 360771 - DNA, 33 bp, Homo sapien
tatcctggttcaccaagtctttgaaatctatcc

SEQ ID NO: 360772 - DNA, 33 bp, Homo sapien
tatcctggttcaccaattctttgaaatctatcc

SEQ ID NO: 360773 - DNA, 33 bp, Homo sapien
gattagaatgtcaactaagtaaagcaaccaata

SEQ ID NO: 360774 - DNA, 33 bp, Homo sapien
gattagaatgtcaacttagtaaagcaaccaata

SEQ ID NO: 360775 - DNA, 33 bp, Homo sapien
aaggacgtttatccacactgtagtgctgcttct

SEQ ID NO: 360776 - DNA, 33 bp, Homo sapien
aaggacgtttatccacgctgtagtgctgcttct

SEQ ID NO: 360777 - DNA, 33 bp, Homo sapien
taggatgaatgcaatcaaaagtacttccaaaag

SEQ ID NO: 360778 - DNA, 33 bp, Homo sapien
taggatgaatgcaatcgaaagtacttccaaaag

SEQ ID NO: 360779 - DNA, 33 bp, Homo sapien
gatcattctgtaagtcaaggtctaggatggtac

SEQ ID NO: 360780 - DNA, 33 bp, Homo sapien
gatcattctgtaagtccaggtctaggatggtac

SEQ ID NO: 360781 - DNA, 33 bp, Homo sapien
actgaagaaattatcagacaaatatggccagtg

SEQ ID NO: 360782 - DNA, 33 bp, Homo sapien
actgaagaaattatcatacaaatatggccagtg

SEQ ID NO: 360783 - DNA, 33 bp, Homo sapien
aattaagtattctaaccgtgcacttggacaagc

SEQ ID NO: 360784 - DNA, 33 bp, Homo sapien
aattaagtattctaactgtgcacttggacaagc

SEQ ID NO: 360785 - DNA, 33 bp, Homo sapien
attcaggtgctccccaaatgcagagccaccaac

SEQ ID NO: 360786 - DNA, 33 bp, Homo sapien
attcaggtgctccccagatgcagagccaccaac

SEQ ID NO: 360787 - DNA, 33 bp, Homo sapien
gaggtttgtggcttgtaaaggtgaagaaccctg

SEQ ID NO: 360788 - DNA, 33 bp, Homo sapien
gaggtttgtggcttgtcaaggtgaagaaccctg

SEQ ID NO: 360789 - DNA, 33 bp, Homo sapien
acaggcatcttttaccagctgatccttgctaag

SEQ ID NO: 360790 - DNA, 33 bp, Homo sapien
acaggcatcttttacccgctgatccttgctaag

SEQ ID NO: 360791 - DNA, 33 bp, Homo sapien
aacacaaggacttgtcaatgagcctgaatctgc

SEQ ID NO: 360792 - DNA, 33 bp, Homo sapien
aacacaaggacttgtcgatgagcctgaatctgc

SEQ ID NO: 360793 - DNA, 33 bp, Homo sapien
agattacccacctgccagagaagatgatgctcg

SEQ ID NO: 360794 - DNA, 33 bp, Homo sapien
agattacccacctgccggagaagatgatgctcg

SEQ ID NO: 360795 - DNA, 33 bp, Homo sapien
aggccatttcagcaaaaagacaaaggcggtaga

SEQ ID NO: 360796 - DNA, 33 bp, Homo sapien
aggccatttcagcaaagagacaaaggcggtaga

SEQ ID NO: 360797 - DNA, 33 bp, Homo sapien
aatgtcactgtatttgcagacagggccttcagg

SEQ ID NO: 360798 - DNA, 33 bp, Homo sapien
aatgtcactgtatttggagacagggccttcagg

SEQ ID NO: 360799 - DNA, 33 bp, Homo sapien
acacagttattccttacgggtctggaagctgga

SEQ ID NO: 360800 - DNA, 33 bp, Homo sapien
acacagttattccttatgggtctggaagctgga

SEQ ID NO: 360801 - DNA, 33 bp, Homo sapien
cctaggagatgttctaaaaacactcaaacacag

SEQ ID NO: 360802 - DNA, 33 bp, Homo sapien
cctaggagatgttctagaaacactcaaacacag

SEQ ID NO: 360803 - DNA, 33 bp, Homo sapien
taaatgaataatgagaaaagaagcaatgttcag

SEQ ID NO: 360804 - DNA, 33 bp, Homo sapien
taaatgaataatgagagaagaagcaatgttcag

SEQ ID NO: 360805 - DNA, 33 bp, Homo sapien
aaaaacattgcttttaagaaaattttgaccttg

SEQ ID NO: 360806 - DNA, 33 bp, Homo sapien
aaaaacattgcttttaggaaaattttgaccttg

SEQ ID NO: 360807 - DNA, 33 bp, Homo sapien
ccttgaagttgccatacattctccttgtccatg

SEQ ID NO: 360808 - DNA, 33 bp, Homo sapien
ccttgaagttgccatagattctccttgtccatg

SEQ ID NO: 360809 - DNA, 33 bp, Homo sapien
tttttgttgaactgaaataaatccatcctaagt

SEQ ID NO: 360810 - DNA, 33 bp, Homo sapien
tttttgttgaactgaagtaaatccatcctaagt

SEQ ID NO: 360811 - DNA, 33 bp, Homo sapien
ataggtccgtgcagaaacttgtacgtgaataat

SEQ ID NO: 360812 - DNA, 33 bp, Homo sapien
ataggtccgtgcagaagcttgtacgtgaataat

SEQ ID NO: 360813 - DNA, 33 bp, Homo sapien
ccctgttaagaggagcagaagttcttggaagta

SEQ ID NO: 360814 - DNA, 33 bp, Homo sapien
ccctgttaagaggagccgaagttcttggaagta

SEQ ID NO: 360815 - DNA, 33 bp, Homo sapien
cacagacttaaccacccgcattccatctggacc

SEQ ID NO: 360816 - DNA, 33 bp, Homo sapien
cacagacttaaccacctgcattccatctggacc

SEQ ID NO: 360817 - DNA, 33 bp, Homo sapien
ggtgagtcctaatgtacgtaaaggcagggaagt

SEQ ID NO: 360818 - DNA, 33 bp, Homo sapien
ggtgagtcctaatgtaggtaaaggcagggaagt

SEQ ID NO: 360819 - DNA, 33 bp, Homo sapien
gagaacagaagaggacaaggactggcgatcccg

SEQ ID NO: 360820 - DNA, 33 bp, Homo sapien
gagaacagaagaggacgaggactggcgatcccg

SEQ ID NO: 360821 - DNA, 33 bp, Homo sapien
tgtgtaggagctgttacgcctaagagaacagaa

SEQ ID NO: 360822 - DNA, 33 bp, Homo sapien
tgtgtaggagctgttatgcctaagagaacagaa

SEQ ID NO: 360823 - DNA, 33 bp, Homo sapien
atagtattgcattgccagaatcaaaattgtgaa

SEQ ID NO: 360824 - DNA, 33 bp, Homo sapien
atagtattgcattgccggaatcaaaattgtgaa

SEQ ID NO: 360825 - DNA, 33 bp, Homo sapien
catcaataacttcaaaacatttcaggaaaataa

SEQ ID NO: 360826 - DNA, 33 bp, Homo sapien
catcaataacttcaaatcatttcaggaaaataa

SEQ ID NO: 360827 - DNA, 33 bp, Homo sapien
cttccagcaactgttacgtatagaatagttcat

SEQ ID NO: 360828 - DNA, 33 bp, Homo sapien
cttccagcaactgttatgtatagaatagttcat

SEQ ID NO: 360829 - DNA, 33 bp, Homo sapien
tgtagggttcacttcacgaatgaaaagagggct

SEQ ID NO: 360830 - DNA, 33 bp, Homo sapien
tgtagggttcacttcaggaatgaaaagagggct

SEQ ID NO: 360831 - DNA, 33 bp, Homo sapien
aataggcatgttgttaagaactcaggcttggaa

SEQ ID NO: 360832 - DNA, 33 bp, Homo sapien
aataggcatgttgttaggaactcaggcttggaa

SEQ ID NO: 360833 - DNA, 33 bp, Homo sapien
gattgcacagcaatgcaaacctaagaataccga

SEQ ID NO: 360834 - DNA, 33 bp, Homo sapien
gattgcacagcaatgcgaacctaagaataccga

SEQ ID NO: 360835 - DNA, 33 bp, Homo sapien
gcatggttaaaaagaaaaactgcaccaagaaag

SEQ ID NO: 360836 - DNA, 33 bp, Homo sapien
gcatggttaaaaagaataactgcaccaagaaag

SEQ ID NO: 360837 - DNA, 33 bp, Homo sapien
gatggtgtagacataggcctaccttgatgagct

SEQ ID NO: 360838 - DNA, 33 bp, Homo sapien
gatggtgtagacatagtcctaccttgatgagct

SEQ ID NO: 360839 - DNA, 33 bp, Homo sapien
acactgttatacactaacactactacctatccc

SEQ ID NO: 360840 - DNA, 33 bp, Homo sapien
acactgttatacactatcactactacctatccc

SEQ ID NO: 360841 - DNA, 33 bp, Homo sapien
ataagcagcagactgaaagaggttcttctgtta

SEQ ID NO: 360842 - DNA, 33 bp, Homo sapien
ataagcagcagactgagagaggttcttctgtta

SEQ ID NO: 360843 - DNA, 33 bp, Homo sapien
tgctcctccttttctcagacaatggctccacca

SEQ ID NO: 360844 - DNA, 33 bp, Homo sapien
tgctcctccttttctcggacaatggctccacca

SEQ ID NO: 360845 - DNA, 33 bp, Homo sapien
aaagaaatggattatcaacactgactttgagaa

SEQ ID NO: 360846 - DNA, 33 bp, Homo sapien
aaagaaatggattatcgacactgactttgagaa

SEQ ID NO: 360847 - DNA, 33 bp, Homo sapien
cgacctgcccagaaaacgcagtcacctgagcca

SEQ ID NO: 360848 - DNA, 33 bp, Homo sapien
cgacctgcccagaaaatgcagtcacctgagcca

SEQ ID NO: 360849 - DNA, 33 bp, Homo sapien
gtgactgctggggataataactttccaggtgga

SEQ ID NO: 360850 - DNA, 33 bp, Homo sapien
gtgactgctggggatagtaactttccaggtgga

SEQ ID NO: 360851 - DNA, 33 bp, Homo sapien
gaactatggaatatgccctctcctcgagctgtc

SEQ ID NO: 360852 - DNA, 33 bp, Homo sapien
gaactatggaatatgctctctcctcgagctgtc

SEQ ID NO: 360853 - DNA, 33 bp, Homo sapien
cgagcatgggagaaaccaacaagttatggcgct

SEQ ID NO: 360854 - DNA, 33 bp, Homo sapien
cgagcatgggagaaacgaacaagttatggcgct

SEQ ID NO: 360855 - DNA, 33 bp, Homo sapien
cctttggtacattaaacttatacttaggctcat

SEQ ID NO: 360856 - DNA, 33 bp, Homo sapien
cctttggtacattaaagttatacttaggctcat

SEQ ID NO: 360857 - DNA, 33 bp, Homo sapien
tccatacttcttttcacggagctataatactaa

SEQ ID NO: 360858 - DNA, 33 bp, Homo sapien
tccatacttcttttcatggagctataatactaa

SEQ ID NO: 360859 - DNA, 33 bp, Homo sapien
tgtcctgtaaatgggacgtgtgcttttcagcag

SEQ ID NO: 360860 - DNA, 33 bp, Homo sapien
tgtcctgtaaatgggatgtgtgcttttcagcag

SEQ ID NO: 360861 - DNA, 33 bp, Homo sapien
cagaatttgagctcacagtataaaattacaatc

SEQ ID NO: 360862 - DNA, 33 bp, Homo sapien
cagaatttgagctcacggtataaaattacaatc

SEQ ID NO: 360863 - DNA, 33 bp, Homo sapien
cttgaaggtgctcaaacgggaaaatccactccc

SEQ ID NO: 360864 - DNA, 33 bp, Homo sapien
cttgaaggtgctcaaatgggaaaatccactccc

SEQ ID NO: 360865 - DNA, 33 bp, Homo sapien
gagaactgtggggaaaaaagtgcaatttatatg

SEQ ID NO: 360866 - DNA, 33 bp, Homo sapien
gagaactgtggggaaagaagtgcaatttatatg

SEQ ID NO: 360867 - DNA, 33 bp, Homo sapien
gggtgggtagagaggccgcacacagggaccaac

SEQ ID NO: 360868 - DNA, 33 bp, Homo sapien
gggtgggtagagaggctgcacacagggaccaac

SEQ ID NO: 360869 - DNA, 33 bp, Homo sapien
gtcacgtggccagagaaaagaaagcatcaaacc

SEQ ID NO: 360870 - DNA, 33 bp, Homo sapien
gtcacgtggccagagataagaaagcatcaaacc

SEQ ID NO: 360871 - DNA, 33 bp, Homo sapien
gctgcctgggcagtcactacctctaacccctgc

SEQ ID NO: 360872 - DNA, 33 bp, Homo sapien
gctgcctgggcagtcagtacctctaacccctgc

SEQ ID NO: 360873 - DNA, 33 bp, Homo sapien
ccctcattgtggaagacaaaggatgatatgaat

SEQ ID NO: 360874 - DNA, 33 bp, Homo sapien
ccctcattgtggaagataaaggatgatatgaat

SEQ ID NO: 360875 - DNA, 33 bp, Homo sapien
actttgacttatatacacagttgcaatcctgga

SEQ ID NO: 360876 - DNA, 33 bp, Homo sapien
actttgacttatatacgcagttgcaatcctgga

SEQ ID NO: 360877 - DNA, 33 bp, Homo sapien
cgaagagccaacctcaaatagacctgggttgcc

SEQ ID NO: 360878 - DNA, 33 bp, Homo sapien
cgaagagccaacctcatatagacctgggttgcc

SEQ ID NO: 360879 - DNA, 33 bp, Homo sapien
acctagggttcttggtaaactacagattctcat

SEQ ID NO: 360880 - DNA, 33 bp, Homo sapien
acctagggttcttggttaactacagattctcat

SEQ ID NO: 360881 - DNA, 33 bp, Homo sapien
atggtcacgtctttcaaaggaatggaactgact

SEQ ID NO: 360882 - DNA, 33 bp, Homo sapien
atggtcacgtctttcagaggaatggaactgact

SEQ ID NO: 360883 - DNA, 33 bp, Homo sapien
cttatatagcactatgaatttagagtctttcaa

SEQ ID NO: 360884 - DNA, 33 bp, Homo sapien
cttatatagcactatggatttagagtctttcaa

SEQ ID NO: 360885 - DNA, 33 bp, Homo sapien
tttcataaagaatgccaaaagactgctatattc

SEQ ID NO: 360886 - DNA, 33 bp, Homo sapien
tttcataaagaatgccgaaagactgctatattc

SEQ ID NO: 360887 - DNA, 33 bp, Homo sapien
agttttcttcaactacccagtcatttagaaact

SEQ ID NO: 360888 - DNA, 33 bp, Homo sapien
agttttcttcaactactcagtcatttagaaact

SEQ ID NO: 360889 - DNA, 33 bp, Homo sapien
ttgctacatttcctgcaattgataactgtattg

SEQ ID NO: 360890 - DNA, 33 bp, Homo sapien
ttgctacatttcctgcgattgataactgtattg

SEQ ID NO: 360891 - DNA, 33 bp, Homo sapien
agtgtgggaaaatagcacactaccccgacaatc

SEQ ID NO: 360892 - DNA, 33 bp, Homo sapien
agtgtgggaaaatagcgcactaccccgacaatc

SEQ ID NO: 360893 - DNA, 33 bp, Homo sapien
gtataacacagcatctaaaagtctagtggctta

SEQ ID NO: 360894 - DNA, 33 bp, Homo sapien
gtataacacagcatctgaaagtctagtggctta

SEQ ID NO: 360895 - DNA, 33 bp, Homo sapien
tccaggatggactctcacatgtagcaacttaac

SEQ ID NO: 360896 - DNA, 33 bp, Homo sapien
tccaggatggactctcgcatgtagcaacttaac

SEQ ID NO: 360897 - DNA, 33 bp, Homo sapien
cgggtgtggagagaaacgcccaaattcagagtg

SEQ ID NO: 360898 - DNA, 33 bp, Homo sapien
cgggtgtggagagaaaggcccaaattcagagtg

SEQ ID NO: 360899 - DNA, 33 bp, Homo sapien
gccttcacatctaccactctcactcgtaagtga

SEQ ID NO: 360900 - DNA, 33 bp, Homo sapien
gccttcacatctaccattctcactcgtaagtga

SEQ ID NO: 360901 - DNA, 33 bp, Homo sapien
aaacaaaccctaaaacacactattcaagtaagc

SEQ ID NO: 360902 - DNA, 33 bp, Homo sapien
aaacaaaccctaaaacgcactattcaagtaagc

SEQ ID NO: 360903 - DNA, 33 bp, Homo sapien
aagggaagtcaactacagcaaaatcaaaggtgg

SEQ ID NO: 360904 - DNA, 33 bp, Homo sapien
aagggaagtcaactacggcaaaatcaaaggtgg

SEQ ID NO: 360905 - DNA, 33 bp, Homo sapien
tatatacaggtaggtcaatcatgtatttcaccc

SEQ ID NO: 360906 - DNA, 33 bp, Homo sapien
tatatacaggtaggtcgatcatgtatttcaccc

SEQ ID NO: 360907 - DNA, 33 bp, Homo sapien
aaactggtttatctaacattaaatgtcattgta

SEQ ID NO: 360908 - DNA, 33 bp, Homo sapien
aaactggtttatctaatattaaatgtcattgta

SEQ ID NO: 360909 - DNA, 33 bp, Homo sapien
ataaactacaccgtaaataaaaggctggtttgt

SEQ ID NO: 360910 - DNA, 33 bp, Homo sapien
ataaactacaccgtaagtaaaaggctggtttgt

SEQ ID NO: 360911 - DNA, 33 bp, Homo sapien
gaaaacccactgaaaaaccattcagaaacgaat

SEQ ID NO: 360912 - DNA, 33 bp, Homo sapien
gaaaacccactgaaaagccattcagaaacgaat

SEQ ID NO: 360913 - DNA, 33 bp, Homo sapien
agatgaaaaagtctaacgtgcatattttaagac

SEQ ID NO: 360914 - DNA, 33 bp, Homo sapien
agatgaaaaagtctaatgtgcatattttaagac

SEQ ID NO: 360915 - DNA, 33 bp, Homo sapien
tctttaaagaagggtacggtagctggagtaacc

SEQ ID NO: 360916 - DNA, 33 bp, Homo sapien
tctttaaagaagggtagggtagctggagtaacc

SEQ ID NO: 360917 - DNA, 33 bp, Homo sapien
tttacctcactgaggaactactaacctaattta

SEQ ID NO: 360918 - DNA, 33 bp, Homo sapien
tttacctcactgaggagctactaacctaattta

SEQ ID NO: 360919 - DNA, 33 bp, Homo sapien
ttaaagtcatgctgaactctgaacctggttata

SEQ ID NO: 360920 - DNA, 33 bp, Homo sapien
ttaaagtcatgctgaagtctgaacctggttata

SEQ ID NO: 360921 - DNA, 33 bp, Homo sapien
ttcagactgttagcaacaaacaagtgacattct

SEQ ID NO: 360922 - DNA, 33 bp, Homo sapien
ttcagactgttagcaagaaacaagtgacattct

SEQ ID NO: 360923 - DNA, 33 bp, Homo sapien
aggtgtgaagttggtacgatgcctttcccattg

SEQ ID NO: 360924 - DNA, 33 bp, Homo sapien
aggtgtgaagttggtatgatgcctttcccattg

SEQ ID NO: 360925 - DNA, 33 bp, Homo sapien
taactgtgtaagcatcacaatacttcaacaata

SEQ ID NO: 360926 - DNA, 33 bp, Homo sapien
taactgtgtaagcatcgcaatacttcaacaata

SEQ ID NO: 360927 - DNA, 33 bp, Homo sapien
ggtatctctccatctcaatgttttgtaactgtc

SEQ ID NO: 360928 - DNA, 33 bp, Homo sapien
ggtatctctccatctcgatgttttgtaactgtc

SEQ ID NO: 360929 - DNA, 33 bp, Homo sapien
cctatactgtaatgaacaggagcaattaactta

SEQ ID NO: 360930 - DNA, 33 bp, Homo sapien
cctatactgtaatgaagaggagcaattaactta

SEQ ID NO: 360931 - DNA, 33 bp, Homo sapien
attattttttgtcttgcagtaagttaattgctc

SEQ ID NO: 360932 - DNA, 33 bp, Homo sapien
attattttttgtcttgtagtaagttaattgctc

SEQ ID NO: 360933 - DNA, 33 bp, Homo sapien
acagtctacctggaaacaatacaaaccatagct

SEQ ID NO: 360934 - DNA, 33 bp, Homo sapien
acagtctacctggaaataatacaaaccatagct

SEQ ID NO: 360935 - DNA, 33 bp, Homo sapien
aaaagacaaactgcagaagaggagacatttgcc

SEQ ID NO: 360936 - DNA, 33 bp, Homo sapien
aaaagacaaactgcaggagaggagacatttgcc

SEQ ID NO: 360937 - DNA, 33 bp, Homo sapien
aaatcaactagggaacaatagaccaatggaatg

SEQ ID NO: 360938 - DNA, 33 bp, Homo sapien
aaatcaactagggaacgatagaccaatggaatg

SEQ ID NO: 360939 - DNA, 33 bp, Homo sapien
cagtaatggttaaaaacgtttgaaaatcactgc

SEQ ID NO: 360940 - DNA, 33 bp, Homo sapien
cagtaatggttaaaaatgtttgaaaatcactgc

SEQ ID NO: 360941 - DNA, 33 bp, Homo sapien
gtaatctacacaacaaccacttaggaaaattca

SEQ ID NO: 360942 - DNA, 33 bp, Homo sapien
gtaatctacacaacaatcacttaggaaaattca

SEQ ID NO: 360943 - DNA, 33 bp, Homo sapien
attgtcacctaactcacattcccattctcattt

SEQ ID NO: 360944 - DNA, 33 bp, Homo sapien
attgtcacctaactcatattcccattctcattt

SEQ ID NO: 360945 - DNA, 33 bp, Homo sapien
ggagctaaggatgtcaagaataaaaatatagca

SEQ ID NO: 360946 - DNA, 33 bp, Homo sapien
ggagctaaggatgtcaggaataaaaatatagca

SEQ ID NO: 360947 - DNA, 33 bp, Homo sapien
actcaagaaggggtacgctctcttcagcctgtg

SEQ ID NO: 360948 - DNA, 33 bp, Homo sapien
actcaagaaggggtactctctcttcagcctgtg

SEQ ID NO: 360949 - DNA, 33 bp, Homo sapien
ctttcttgctccagaaatatgacttctttatgc

SEQ ID NO: 360950 - DNA, 33 bp, Homo sapien
ctttcttgctccagaactatgacttctttatgc

SEQ ID NO: 360951 - DNA, 33 bp, Homo sapien
caattaaatgtctggactaaccattagaggata

SEQ ID NO: 360952 - DNA, 33 bp, Homo sapien
caattaaatgtctggagtaaccattagaggata

SEQ ID NO: 360953 - DNA, 33 bp, Homo sapien
gaatgaatatgtaagagccaagagttgtgcaag

SEQ ID NO: 360954 - DNA, 33 bp, Homo sapien
gaatgaatatgtaagatccaagagttgtgcaag

SEQ ID NO: 360955 - DNA, 33 bp, Homo sapien
gagtacaacacaagagcagtctgtaacctcacc

SEQ ID NO: 360956 - DNA, 33 bp, Homo sapien
gagtacaacacaagaggagtctgtaacctcacc

SEQ ID NO: 360957 - DNA, 33 bp, Homo sapien
aaggagattgcatttgcatcgctaggaaaacct

SEQ ID NO: 360958 - DNA, 33 bp, Homo sapien
aaggagattgcatttgtatcgctaggaaaacct

SEQ ID NO: 360959 - DNA, 33 bp, Homo sapien
ttcttcagcaagtgaaatgaaaggtaattctcc

SEQ ID NO: 360960 - DNA, 33 bp, Homo sapien
ttcttcagcaagtgaagtgaaaggtaattctcc

SEQ ID NO: 360961 - DNA, 33 bp, Homo sapien
gggttgagataaaagacgtaatcatggctgtca

SEQ ID NO: 360962 - DNA, 33 bp, Homo sapien
gggttgagataaaagatgtaatcatggctgtca

SEQ ID NO: 360963 - DNA, 33 bp, Homo sapien
gttttgtgtattataaaatgtttggcagcattc

SEQ ID NO: 360964 - DNA, 33 bp, Homo sapien
gttttgtgtattataagatgtttggcagcattc

SEQ ID NO: 360965 - DNA, 33 bp, Homo sapien
aatacagattcaaaatcagcctttagagacaga

SEQ ID NO: 360966 - DNA, 33 bp, Homo sapien
aatacagattcaaaatgagcctttagagacaga

SEQ ID NO: 360967 - DNA, 33 bp, Homo sapien
taaactgtttcttccactatcctcttacaacat

SEQ ID NO: 360968 - DNA, 33 bp, Homo sapien
taaactgtttcttccattatcctcttacaacat

SEQ ID NO: 360969 - DNA, 33 bp, Homo sapien
tctcaatttgtgccaaatggttaaatgaaaggt

SEQ ID NO: 360970 - DNA, 33 bp, Homo sapien
tctcaatttgtgccaactggttaaatgaaaggt

SEQ ID NO: 360971 - DNA, 33 bp, Homo sapien
ttctattgttcttggacgcataaacaaaaaata

SEQ ID NO: 360972 - DNA, 33 bp, Homo sapien
ttctattgttcttggaggcataaacaaaaaata

SEQ ID NO: 360973 - DNA, 33 bp, Homo sapien; identical to SEQ ID NO: 360971

SEQ ID NO: 360974 - DNA, 33 bp, Homo sapien; identical to SEQ ID NO: 360972

SEQ ID NO: 360975 - DNA, 33 bp, Homo sapien
actccctggcaaaaaacggcataatatttgcat

SEQ ID NO: 360976 - DNA, 33 bp, Homo sapien
actccctggcaaaaaatggcataatatttgcat

SEQ ID NO: 360977 - DNA, 33 bp, Homo sapien
aatatttgcatataaactgtgcacatcctgcca

SEQ ID NO: 360978 - DNA, 33 bp, Homo sapien
aatatttgcatataaagtgtgcacatcctgcca

SEQ ID NO: 360979 - DNA, 33 bp, Homo sapien
gattcgtgatcattaaccaaaatcaaagacccc

SEQ ID NO: 360980 - DNA, 33 bp, Homo sapien
gattcgtgatcattaatcaaaatcaaagacccc

SEQ ID NO: 360981 - DNA, 33 bp, Homo sapien
gctgctgtcagtgacacggttttctggaattgt

SEQ ID NO: 360982 - DNA, 33 bp, Homo sapien
gctgctgtcagtgacatggttttctggaattgt

SEQ ID NO: 360983 - DNA, 33 bp, Homo sapien
ctgccctaagttttcaacagggaacagtcattg

SEQ ID NO: 360984 - DNA, 33 bp, Homo sapien
ctgccctaagttttcaccagggaacagtcattg

SEQ ID NO: 360985 - DNA, 33 bp, Homo sapien
caaatcagtgtccccaatgatgagcctcacaca

SEQ ID NO: 360986 - DNA, 33 bp, Homo sapien
caaatcagtgtccccagtgatgagcctcacaca

SEQ ID NO: 360987 - DNA, 33 bp, Homo sapien
ttcatggaaacagtaacagtccaaagtgaaatg

SEQ ID NO: 360988 - DNA, 33 bp, Homo sapien
ttcatggaaacagtaagagtccaaagtgaaatg

SEQ ID NO: 360989 - DNA, 33 bp, Homo sapien
ttttattttttgagaacggctggaattttcaca

SEQ ID NO: 360990 - DNA, 33 bp, Homo sapien
ttttattttttgagaatggctggaattttcaca

SEQ ID NO: 360991 - DNA, 33 bp, Homo sapien
gtgtcttgtttaggaaatatactgcagggtcat

SEQ ID NO: 360992 - DNA, 33 bp, Homo sapien
gtgtcttgtttaggaagtatactgcagggtcat

SEQ ID NO: 360993 - DNA, 33 bp, Homo sapien
ttagttacacacttcaccttgaaaaacaattac

SEQ ID NO: 360994 - DNA, 33 bp, Homo sapien
ttagttacacacttcatcttgaaaaacaattac

SEQ ID NO: 360995 - DNA, 33 bp, Homo sapien
atcccaaagatcccccaactgtgcctgtgtcag

SEQ ID NO: 360996 - DNA, 33 bp, Homo sapien
atcccaaagatccccccactgtgcctgtgtcag

SEQ ID NO: 360997 - DNA, 33 bp, Homo sapien
atttatgttagaatgacgtttttcagtgtggac

SEQ ID NO: 360998 - DNA, 33 bp, Homo sapien
atttatgttagaatgatgtttttcagtgtggac

SEQ ID NO: 360999 - DNA, 33 bp, Homo sapien
tgcaaacaagcttctaaactgatcacaagaaat

SEQ ID NO: 361000 - DNA, 33 bp, Homo sapien
tgcaaacaagcttctacactgatcacaagaaat

SEQ ID NO: 361001 - DNA, 33 bp, Homo sapien
aatatccaccatcccacggttgtgaaaaggatc

SEQ ID NO: 361002 - DNA, 33 bp, Homo sapien
aatatccaccatcccagggttgtgaaaaggatc

SEQ ID NO: 361003 - DNA, 33 bp, Homo sapien
tagtacctgcctggcacggtgcctttcacactg

SEQ ID NO: 361004 - DNA, 33 bp, Homo sapien
tagtacctgcctggcatggtgcctttcacactg

SEQ ID NO: 361005 - DNA, 33 bp, Homo sapien
atgaagacagaaataacagagtgagacccgttt

SEQ ID NO: 361006 - DNA, 33 bp, Homo sapien
atgaagacagaaataagagagtgagacccgttt

SEQ ID NO: 361007 - DNA, 33 bp, Homo sapien
gtacactcaagtcacccgacgtcggcaagctca

SEQ ID NO: 361008 - DNA, 33 bp, Homo sapien
gtacactcaagtcacctgacgtcggcaagctca

SEQ ID NO: 361009 - DNA, 33 bp, Homo sapien
aggcccctatgttgcaataaccaggctggcttc

SEQ ID NO: 361010 - DNA, 33 bp, Homo sapien
aggcccctatgttgcactaaccaggctggcttc

SEQ ID NO: 361011 - DNA, 33 bp, Homo sapien
gaaaattcttactcggcattaacttctgccaca

SEQ ID NO: 361012 - DNA, 33 bp, Homo sapien
gaaaattcttactcggtattaacttctgccaca

SEQ ID NO: 361013 - DNA, 33 bp, Homo sapien
ccctttcatgttaccacgtgcagatataatgaa

SEQ ID NO: 361014 - DNA, 33 bp, Homo sapien
ccctttcatgttaccatgtgcagatataatgaa

SEQ ID NO: 361015 - DNA, 33 bp, Homo sapien
gttgttggctaaataacattccacattcaattt

SEQ ID NO: 361016 - DNA, 33 bp, Homo sapien
gttgttggctaaataatattccacattcaattt

SEQ ID NO: 361017 - DNA, 33 bp, Homo sapien
ccttgcatagaagccaagtgccagagagcccac

SEQ ID NO: 361018 - DNA, 33 bp, Homo sapien
ccttgcatagaagccaggtgccagagagcccac

SEQ ID NO: 361019 - DNA, 33 bp, Homo sapien
ggccaacaagtatgcacgataaaactactaggc

SEQ ID NO: 361020 - DNA, 33 bp, Homo sapien
ggccaacaagtatgcatgataaaactactaggc

SEQ ID NO: 361021 - DNA, 33 bp, Homo sapien
ggctgtggttactgacaacttagcaacctgggt

SEQ ID NO: 361022 - DNA, 33 bp, Homo sapien
ggctgtggttactgacgacttagcaacctgggt

SEQ ID NO: 361023 - DNA, 33 bp, Homo sapien
gacagtaaaagtgacccgacctaaccaactcca

SEQ ID NO: 361024 - DNA, 33 bp, Homo sapien
gacagtaaaagtgacctgacctaaccaactcca

SEQ ID NO: 361025 - DNA, 33 bp, Homo sapien
ccagtcaaataccgcaatagacaaaagctccaa

SEQ ID NO: 361026 - DNA, 33 bp, Homo sapien
ccagtcaaataccgcagtagacaaaagctccaa

SEQ ID NO: 361027 - DNA, 33 bp, Homo sapien
ggatcagaaaaatagcgattgggtactaggctt

SEQ ID NO: 361028 - DNA, 33 bp, Homo sapien
ggatcagaaaaatagctattgggtactaggctt

SEQ ID NO: 361029 - DNA, 33 bp, Homo sapien
cgtatagcctcccttcacgcctactggggaatg

SEQ ID NO: 361030 - DNA, 33 bp, Homo sapien
cgtatagcctcccttcgcgcctactggggaatg

SEQ ID NO: 361031 - DNA, 33 bp, Homo sapien
gctaatttccccacaacagctgagaccagcacc

SEQ ID NO: 361032 - DNA, 33 bp, Homo sapien
gctaatttccccacaatagctgagaccagcacc

SEQ ID NO: 361033 - DNA, 33 bp, Homo sapien
atggccctgtctgagaagggaggaaaatagaaa

SEQ ID NO: 361034 - DNA, 33 bp, Homo sapien
atggccctgtctgagacgggaggaaaatagaaa

SEQ ID NO: 361035 - DNA, 33 bp, Homo sapien
aaaattccttctacctcagaacgtattaacctg

SEQ ID NO: 361036 - DNA, 33 bp, Homo sapien
aaaattccttctaccttagaacgtattaacctg

SEQ ID NO: 361037 - DNA, 33 bp, Homo sapien
tacctgacttccactacgaaaccatcactggcc

SEQ ID NO: 361038 - DNA, 33 bp, Homo sapien
tacctgacttccactatgaaaccatcactggcc

SEQ ID NO: 361039 - DNA, 33 bp, Homo sapien
tcatgttcccaaatccccctcacagctctgtga

SEQ ID NO: 361040 - DNA, 33 bp, Homo sapien
tcatgttcccaaatcctcctcacagctctgtga

SEQ ID NO: 361041 - DNA, 33 bp, Homo sapien
gacatttccgtagcccaactccctttctgtggc

SEQ ID NO: 361042 - DNA, 33 bp, Homo sapien
gacatttccgtagcccgactccctttctgtggc

SEQ ID NO: 361043 - DNA, 33 bp, Homo sapien
taatgaattaatgaaaaggagtcacctgtttga

SEQ ID NO: 361044 - DNA, 33 bp, Homo sapien
taatgaattaatgaaagggagtcacctgtttga

SEQ ID NO: 361045 - DNA, 33 bp, Homo sapien
tcacagggccacttaacgacatgggcatcagaa

SEQ ID NO: 361046 - DNA, 33 bp, Homo sapien
tcacagggccacttaatgacatgggcatcagaa

SEQ ID NO: 361047 - DNA, 33 bp, Homo sapien
tggctaatttccgtaccattagtagagatggag

SEQ ID NO: 361048 - DNA, 33 bp, Homo sapien
tggctaatttccgtactattagtagagatggag

SEQ ID NO: 361049 - DNA, 33 bp, Homo sapien
ccagtaatggtgatcccctcaaacaggcaaaaa

SEQ ID NO: 361050 - DNA, 33 bp, Homo sapien
ccagtaatggtgatcctctcaaacaggcaaaaa

SEQ ID NO: 361051 - DNA, 33 bp, Homo sapien
gtggggaaattcagtcactcacagatggctggt

SEQ ID NO: 361052 - DNA, 33 bp, Homo sapien
gtggggaaattcagtcgctcacagatggctggt

SEQ ID NO: 361053 - DNA, 33 bp, Homo sapien
gcacacagtccctcaagcacatatagctctttt

SEQ ID NO: 361054 - DNA, 33 bp, Homo sapien
gcacacagtccctcaatcacatatagctctttt

SEQ ID NO: 361055 - DNA, 33 bp, Homo sapien
ctgctctcagaagcacacacaaggatgatagct

SEQ ID NO: 361056 - DNA, 33 bp, Homo sapien
ctgctctcagaagcacgcacaaggatgatagct

SEQ ID NO: 361057 - DNA, 33 bp, Homo sapien
ccggcttccccggcaacgggacagatgtgaaaa

SEQ ID NO: 361058 - DNA, 33 bp, Homo sapien
ccggcttccccggcaatgggacagatgtgaaaa

SEQ ID NO: 361059 - DNA, 33 bp, Homo sapien
agacaaacacgcggcccagttcactcggtaagc

SEQ ID NO: 361060 - DNA, 33 bp, Homo sapien
agacaaacacgcggcctagttcactcggtaagc

SEQ ID NO: 361061 - DNA, 33 bp, Homo sapien
ctgcccgatctcccacagagacagaaatcatcc

SEQ ID NO: 361062 - DNA, 33 bp, Homo sapien
ctgcccgatctcccacggagacagaaatcatcc

SEQ ID NO: 361063 - DNA, 33 bp, Homo sapien
gcaaggagagatgtagcataactcagccaagag

SEQ ID NO: 361064 - DNA, 33 bp, Homo sapien
gcaaggagagatgtaggataactcagccaagag

SEQ ID NO: 361065 - DNA, 33 bp, Homo sapien
ttgccttcttgctcaccggcatcggatgcaccg

SEQ ID NO: 361066 - DNA, 33 bp, Homo sapien
ttgccttcttgctcactggcatcggatgcaccg

SEQ ID NO: 361067 - DNA, 33 bp, Homo sapien
tacacccaccacagaaatctctattccctcctc

SEQ ID NO: 361068 - DNA, 33 bp, Homo sapien
tacacccaccacagaactctctattccctcctc

SEQ ID NO: 361069 - DNA, 33 bp, Homo sapien
catatggaaaggcaaaacttcttatcctgaact

SEQ ID NO: 361070 - DNA, 33 bp, Homo sapien
catatggaaaggcaaaccttcttatcctgaact

SEQ ID NO: 361071 - DNA, 33 bp, Homo sapien
tacagattcaagagcacagtgaaccccaaatag

SEQ ID NO: 361072 - DNA, 33 bp, Homo sapien
tacagattcaagagcagagtgaaccccaaatag

SEQ ID NO: 361073 - DNA, 33 bp, Homo sapien
gggagtagggttgaaacatatttgaagaaataa

SEQ ID NO: 361074 - DNA, 33 bp, Homo sapien
gggagtagggttgaaagatatttgaagaaataa

SEQ ID NO: 361075 - DNA, 33 bp, Homo sapien
caggccaaaattaaacaaaccaggcaggaagag

SEQ ID NO: 361076 - DNA, 33 bp, Homo sapien
caggccaaaattaaactaaccaggcaggaagag

SEQ ID NO: 361077 - DNA, 33 bp, Homo sapien
gaagacgctggtactacggagaccctctgaaat

SEQ ID NO: 361078 - DNA, 33 bp, Homo sapien
gaagacgctggtactatggagaccctctgaaat

SEQ ID NO: 361079 - DNA, 33 bp, Homo sapien
gataactctgaacccaatgcataaacctatctt

SEQ ID NO: 361080 - DNA, 33 bp, Homo sapien
gataactctgaacccagtgcataaacctatctt

SEQ ID NO: 361081 - DNA, 33 bp, Homo sapien
tcttaatgaaatacaaagtccttgctggaaggg

SEQ ID NO: 361082 - DNA, 33 bp, Homo sapien
tcttaatgaaatacaaggtccttgctggaaggg

SEQ ID NO: 361083 - DNA, 33 bp, Homo sapien
gatacccagagtcaaaaaagggcattttggcca

SEQ ID NO: 361084 - DNA, 33 bp, Homo sapien
gatacccagagtcaaacaagggcattttggcca

SEQ ID NO: 361085 - DNA, 33 bp, Homo sapien
agaagtaccagggcaacactattaacaagaggt

SEQ ID NO: 361086 - DNA, 33 bp, Homo sapien
agaagtaccagggcaagactattaacaagaggt

SEQ ID NO: 361087 - DNA, 33 bp, Homo sapien
taaaaaaaaatgcgctcaaattcatgatagctg

SEQ ID NO: 361088 - DNA, 33 bp, Homo sapien
taaaaaaaaatgcgctgaaattcatgatagctg

SEQ ID NO: 361089 - DNA, 33 bp, Homo sapien
caccccaggactcacagcatggcaaaaatccaa

SEQ ID NO: 361090 - DNA, 33 bp, Homo sapien
caccccaggactcacatcatggcaaaaatccaa

SEQ ID NO: 361091 - DNA, 33 bp, Homo sapien
aggccactcagctaaactcaaaaagaatatgtt

SEQ ID NO: 361092 - DNA, 33 bp, Homo sapien
aggccactcagctaaattcaaaaagaatatgtt

SEQ ID NO: 361093 - DNA, 33 bp, Homo sapien
aactttgtacttcaacactggtttattatcaag

SEQ ID NO: 361094 - DNA, 33 bp, Homo sapien
aactttgtacttcaacgctggtttattatcaag

SEQ ID NO: 361095 - DNA, 33 bp, Homo sapien
ccattttctaacctcacctacatgcactgctgg

SEQ ID NO: 361096 - DNA, 33 bp, Homo sapien
ccattttctaacctcagctacatgcactgctgg

SEQ ID NO: 361097 - DNA, 33 bp, Homo sapien
tccacaggttcttgaactgattcctggcaaaac

SEQ ID NO: 361098 - DNA, 33 bp, Homo sapien
tccacaggttcttgaattgattcctggcaaaac

SEQ ID NO: 361099 - DNA, 33 bp, Homo sapien
ggaggggcaggtgtaacaagtgatgaagcaggg

SEQ ID NO: 361100 - DNA, 33 bp, Homo sapien
ggaggggcaggtgtaagaagtgatgaagcaggg

SEQ ID NO: 361101 - DNA, 33 bp, Homo sapien
taagcgtctccatggcacgttctggacacacag

SEQ ID NO: 361102 - DNA, 33 bp, Homo sapien
taagcgtctccatggcgcgttctggacacacag

SEQ ID NO: 361103 - DNA, 33 bp, Homo sapien
ttgtgcagtgacctaacacagagaacacagagt

SEQ ID NO: 361104 - DNA, 33 bp, Homo sapien
ttgtgcagtgacctaatacagagaacacagagt

SEQ ID NO: 361105 - DNA, 33 bp, Homo sapien
aaactctgagtatgggcataaattagtagcttc

SEQ ID NO: 361106 - DNA, 33 bp, Homo sapien
aaactctgagtatgggtataaattagtagcttc

SEQ ID NO: 361107 - DNA, 33 bp, Homo sapien
ggagcaggctttgatacgggttaggtgagtgac

SEQ ID NO: 361108 - DNA, 33 bp, Homo sapien
ggagcaggctttgatatgggttaggtgagtgac

SEQ ID NO: 361109 - DNA, 33 bp, Homo sapien
tgagttacagtttgtaaagcaaagtcggggtaa

SEQ ID NO: 361110 - DNA, 33 bp, Homo sapien
tgagttacagtttgtacagcaaagtcggggtaa

SEQ ID NO: 361111 - DNA, 33 bp, Homo sapien
gtttgaatgtgacttacgaatgcacggaggtca

SEQ ID NO: 361112 - DNA, 33 bp, Homo sapien
gtttgaatgtgacttatgaatgcacggaggtca

SEQ ID NO: 361113 - DNA, 33 bp, Homo sapien
ttggacccatatcttacgccatgcacagaaatt

SEQ ID NO: 361114 - DNA, 33 bp, Homo sapien
ttggacccatatcttatgccatgcacagaaatt

SEQ ID NO: 361115 - DNA, 33 bp, Homo sapien
attcttctccattgtgcattttaggcacctttc

SEQ ID NO: 361116 - DNA, 33 bp, Homo sapien
attcttctccattgtgtattttaggcacctttc

SEQ ID NO: 361117 - DNA, 33 bp, Homo sapien
tcaacaaccagaaatacgttcacttacaagctc

SEQ ID NO: 361118 - DNA, 33 bp, Homo sapien
tcaacaaccagaaatatgttcacttacaagctc

SEQ ID NO: 361119 - DNA, 33 bp, Homo sapien
cctaatgtctatactccaaatgcatggcttgcc

SEQ ID NO: 361120 - DNA, 33 bp, Homo sapien
cctaatgtctatactctaaatgcatggcttgcc

SEQ ID NO: 361121 - DNA, 33 bp, Homo sapien
gtggatcgtggccatacggtagacagtgagttt

SEQ ID NO: 361122 - DNA, 33 bp, Homo sapien
gtggatcgtggccatatggtagacagtgagttt

SEQ ID NO: 361123 - DNA, 33 bp, Homo sapien
aaggaataagattatcactttgcagggacatgg

SEQ ID NO: 361124 - DNA, 33 bp, Homo sapien
aaggaataagattatctctttgcagggacatgg

SEQ ID NO: 361125 - DNA, 33 bp, Homo sapien
caccctactctgctatcaaacattgaatttatt

SEQ ID NO: 361126 - DNA, 33 bp, Homo sapien
caccctactctgctatgaaacattgaatttatt

SEQ ID NO: 361127 - DNA, 33 bp, Homo sapien
aacttacaggcagtcaacaaccctcttcggcaa

SEQ ID NO: 361128 - DNA, 33 bp, Homo sapien
aacttacaggcagtcaccaaccctcttcggcaa

SEQ ID NO: 361129 - DNA, 33 bp, Homo sapien
aaagaatcagggagaagacagaacagtagaaat

SEQ ID NO: 361130 - DNA, 33 bp, Homo sapien
aaagaatcagggagaatacagaacagtagaaat

SEQ ID NO: 361131 - DNA, 33 bp, Homo sapien
agtataaaacaggaagaaggcctctctctatgc

SEQ ID NO: 361132 - DNA, 33 bp, Homo sapien
agtataaaacaggaagtaggcctctctctatgc

SEQ ID NO: 361133 - DNA, 33 bp, Homo sapien
tctctgttgcatccaagacttcctggaaacatg

SEQ ID NO: 361134 - DNA, 33 bp, Homo sapien
tctctgttgcatccaatacttcctggaaacatg

SEQ ID NO: 361135 - DNA, 33 bp, Homo sapien
tggaaaccctcaaacaagaccactatataaggg

SEQ ID NO: 361136 - DNA, 33 bp, Homo sapien
tggaaaccctcaaacaggaccactatataaggg

SEQ ID NO: 361137 - DNA, 33 bp, Homo sapien
atcactcggcattatccgacaagcaggtgggtg

SEQ ID NO: 361138 - DNA, 33 bp, Homo sapien
atcactcggcattatctgacaagcaggtgggtg

SEQ ID NO: 361139 - DNA, 33 bp, Homo sapien
ctcttggctctcaaatcacctctgtgaggagac

SEQ ID NO: 361140 - DNA, 33 bp, Homo sapien
ctcttggctctcaaattacctctgtgaggagac

SEQ ID NO: 361141 - DNA, 33 bp, Homo sapien
tgcccagcagttatccaggaaaaacagtgagta

SEQ ID NO: 361142 - DNA, 33 bp, Homo sapien
tgcccagcagttatccgggaaaaacagtgagta

SEQ ID NO: 361143 - DNA, 33 bp, Homo sapien
aattgagagtggtaataaaaattatgaatcttc

SEQ ID NO: 361144 - DNA, 33 bp, Homo sapien
aattgagagtggtaatcaaaattatgaatcttc

SEQ ID NO: 361145 - DNA, 33 bp, Homo sapien
acggaggctaaacccacggggcaaaaggatgca

SEQ ID NO: 361146 - DNA, 33 bp, Homo sapien
acggaggctaaacccatggggcaaaaggatgca

SEQ ID NO: 361147 - DNA, 33 bp, Homo sapien
accagcctgagctcgacgaacatggtgaaacac

SEQ ID NO: 361148 - DNA, 33 bp, Homo sapien
accagcctgagctcgaggaacatggtgaaacac

SEQ ID NO: 361149 - DNA, 33 bp, Homo sapien
ttaatcagcagtgctacgagtgcagattgatgc

SEQ ID NO: 361150 - DNA, 33 bp, Homo sapien
ttaatcagcagtgctatgagtgcagattgatgc

SEQ ID NO: 361151 - DNA, 33 bp, Homo sapien
ttcatcactggcattaacattcctagtttggcc

SEQ ID NO: 361152 - DNA, 33 bp, Homo sapien
ttcatcactggcattatcattcctagtttggcc

SEQ ID NO: 361153 - DNA, 33 bp, Homo sapien
gggccttccccttcaaagccctgttgcaatgcc

SEQ ID NO: 361154 - DNA, 33 bp, Homo sapien
gggccttccccttcaatgccctgttgcaatgcc

SEQ ID NO: 361155 - DNA, 33 bp, Homo sapien
atgtttatgaagccaacgatttcagtcttttta

SEQ ID NO: 361156 - DNA, 33 bp, Homo sapien
atgtttatgaagccaatgatttcagtcttttta

SEQ ID NO: 361157 - DNA, 33 bp, Homo sapien
taaatgaagagccttaggactgtagaaattgag

SEQ ID NO: 361158 - DNA, 33 bp, Homo sapien
taaatgaagagccttatgactgtagaaattgag

SEQ ID NO: 361159 - DNA, 33 bp, Homo sapien
aattttactatcctaccgcaaacaagctgtctt

SEQ ID NO: 361160 - DNA, 33 bp, Homo sapien
aattttactatcctactgcaaacaagctgtctt

SEQ ID NO: 361161 - DNA, 33 bp, Homo sapien
aggaagacggagtagcaatgcaatgatacacac

SEQ ID NO: 361162 - DNA, 33 bp, Homo sapien
aggaagacggagtagcgatgcaatgatacacac

SEQ ID NO: 361163 - DNA, 33 bp, Homo sapien
aacactaattccaaagcctttctcctggaggat

SEQ ID NO: 361164 - DNA, 33 bp, Homo sapien
aacactaattccaaaggctttctcctggaggat

SEQ ID NO: 361165 - DNA, 33 bp, Homo sapien
ccgcacagagtcacgcaatatggtctctaattg

SEQ ID NO: 361166 - DNA, 33 bp, Homo sapien
ccgcacagagtcacgcgatatggtctctaattg

SEQ ID NO: 361167 - DNA, 33 bp, Homo sapien
aacagcagagtcggtaagcccaaccttaggccc

SEQ ID NO: 361168 - DNA, 33 bp, Homo sapien
aacagcagagtcggtaggcccaaccttaggccc

SEQ ID NO: 361169 - DNA, 33 bp, Homo sapien
acctggccgtgatcacactgatggtcttgttca

SEQ ID NO: 361170 - DNA, 33 bp, Homo sapien
acctggccgtgatcacgctgatggtcttgttca

SEQ ID NO: 361171 - DNA, 33 bp, Homo sapien
ctggtgaaggaggcacaaggaagattgcagtca

SEQ ID NO: 361172 - DNA, 33 bp, Homo sapien
ctggtgaaggaggcacgaggaagattgcagtca

SEQ ID NO: 361173 - DNA, 33 bp, Homo sapien
tgtctgcttgtagcaaagttgacttctccttag

SEQ ID NO: 361174 - DNA, 33 bp, Homo sapien
tgtctgcttgtagcaaggttgacttctccttag

SEQ ID NO: 361175 - DNA, 33 bp, Homo sapien
ctgtttacagcctctacaatgttactgaatcaa

SEQ ID NO: 361176 - DNA, 33 bp, Homo sapien
ctgtttacagcctctataatgttactgaatcaa

SEQ ID NO: 361177 - DNA, 33 bp, Homo sapien
ggagaagagtgaaagaacaagctggcatcccct

SEQ ID NO: 361178 - DNA, 33 bp, Homo sapien
ggagaagagtgaaagagcaagctggcatcccct

SEQ ID NO: 361179 - DNA, 33 bp, Homo sapien
tttgcgtcaggttttacgccactcggactgagg

SEQ ID NO: 361180 - DNA, 33 bp, Homo sapien
tttgcgtcaggttttatgccactcggactgagg

SEQ ID NO: 361181 - DNA, 33 bp, Homo sapien
acgagtctatccaatcaattcagaactgcaggc

SEQ ID NO: 361182 - DNA, 33 bp, Homo sapien
acgagtctatccaatcgattcagaactgcaggc

SEQ ID NO: 361183 - DNA, 33 bp, Homo sapien
tctctggggaatagatgacgggctattttctgt

SEQ ID NO: 361184 - DNA, 33 bp, Homo sapien
tctctggggaatagattacgggctattttctgt

SEQ ID NO: 361185 - DNA, 33 bp, Homo sapien
gtgtgcctttctccaccgactgcgaggactcag

SEQ ID NO: 361186 - DNA, 33 bp, Homo sapien
gtgtgcctttctccactgactgcgaggactcag

SEQ ID NO: 361187 - DNA, 33 bp, Homo sapien
gcctcacatcactgcaaccatgtagaccatgtc

SEQ ID NO: 361188 - DNA, 33 bp, Homo sapien
gcctcacatcactgcagccatgtagaccatgtc

SEQ ID NO: 361189 - DNA, 33 bp, Homo sapien
cagtccgagtgcacccacttagcctttacattc

SEQ ID NO: 361190 - DNA, 33 bp, Homo sapien
cagtccgagtgcacccgcttagcctttacattc

SEQ ID NO: 361191 - DNA, 33 bp, Homo sapien
gtggtcataagcgctcaaaagacagaggccaca

SEQ ID NO: 361192 - DNA, 33 bp, Homo sapien
gtggtcataagcgctcgaaagacagaggccaca

SEQ ID NO: 361193 - DNA, 33 bp, Homo sapien
tgtcatcaacaattcccgatgggatcggcacag

SEQ ID NO: 361194 - DNA, 33 bp, Homo sapien
tgtcatcaacaattcctgatgggatcggcacag

SEQ ID NO: 361195 - DNA, 33 bp, Homo sapien
ccttgagaagcccttacgggaaacacaagcagt

SEQ ID NO: 361196 - DNA, 33 bp, Homo sapien
ccttgagaagcccttaggggaaacacaagcagt

SEQ ID NO: 361197 - DNA, 33 bp, Homo sapien
tctgtgtctcacacacaactcctgagttttggc

SEQ ID NO: 361198 - DNA, 33 bp, Homo sapien
tctgtgtctcacacacgactcctgagttttggc

SEQ ID NO: 361199 - DNA, 33 bp, Homo sapien
ccagacacgttgcccaaaggcgccatcagacct

SEQ ID NO: 361200 - DNA, 33 bp, Homo sapien
ccagacacgttgcccagaggcgccatcagacct

SEQ ID NO: 361201 - DNA, 33 bp, Homo sapien
cgcgcctggctgataacggacactctgtagcag

SEQ ID NO: 361202 - DNA, 33 bp, Homo sapien
cgcgcctggctgataatggacactctgtagcag

SEQ ID NO: 361203 - DNA, 33 bp, Homo sapien
taagatgagcgcttaacgaagacactacaaaca

SEQ ID NO: 361204 - DNA, 33 bp, Homo sapien
taagatgagcgcttaatgaagacactacaaaca

SEQ ID NO: 361205 - DNA, 33 bp, Homo sapien
ccaagtgacaaacagaatatcctcatgtgcaag

SEQ ID NO: 361206 - DNA, 33 bp, Homo sapien
ccaagtgacaaacagagtatcctcatgtgcaag

SEQ ID NO: 361207 - DNA, 33 bp, Homo sapien
tgggccttaaacccaaggacgagtgtctccata

SEQ ID NO: 361208 - DNA, 33 bp, Homo sapien
tgggccttaaacccaatgacgagtgtctccata

SEQ ID NO: 361209 - DNA, 33 bp, Homo sapien
tcattttacgtgaaagaagctatttctgtgata

SEQ ID NO: 361210 - DNA, 33 bp, Homo sapien
tcattttacgtgaaagcagctatttctgtgata

SEQ ID NO: 361211 - DNA, 33 bp, Homo sapien
tctgcagctccaggacaatgatatcggggcagg

SEQ ID NO: 361212 - DNA, 33 bp, Homo sapien
tctgcagctccaggacgatgatatcggggcagg

SEQ ID NO: 361213 - DNA, 33 bp, Homo sapien
cagagggtgaccagcaagtgtagcctgagagcc

SEQ ID NO: 361214 - DNA, 33 bp, Homo sapien
cagagggtgaccagcaggtgtagcctgagagcc

SEQ ID NO: 361215 - DNA, 33 bp, Homo sapien
ttgcagtgaattaaaacgtcagagattctttgc

SEQ ID NO: 361216 - DNA, 33 bp, Homo sapien
ttgcagtgaattaaaatgtcagagattctttgc

SEQ ID NO: 361217 - DNA, 33 bp, Homo sapien
ttacctcttgggaaagaagcctgttagcagccc

SEQ ID NO: 361218 - DNA, 33 bp, Homo sapien
ttacctcttgggaaaggagcctgttagcagccc

SEQ ID NO: 361219 - DNA, 33 bp, Homo sapien
atacaatcctctcccacagtcactgttcaggag

SEQ ID NO: 361220 - DNA, 33 bp, Homo sapien
atacaatcctctcccatagtcactgttcaggag

SEQ ID NO: 361221 - DNA, 33 bp, Homo sapien
gtgagctgacaacaaacgctgaattccgaaatg

SEQ ID NO: 361222 - DNA, 33 bp, Homo sapien
gtgagctgacaacaaatgctgaattccgaaatg

SEQ ID NO: 361223 - DNA, 33 bp, Homo sapien
gatctgttataaagcccggctcttgcagtttta

SEQ ID NO: 361224 - DNA, 33 bp, Homo sapien
gatctgttataaagcctggctcttgcagtttta

SEQ ID NO: 361225 - DNA, 33 bp, Homo sapien
gatgcccacgtctcacaagaagaaactgagttt

SEQ ID NO: 361226 - DNA, 33 bp, Homo sapien
gatgcccacgtctcacgagaagaaactgagttt

SEQ ID NO: 361227 - DNA, 33 bp, Homo sapien
caagactccccacatacgaccaggtctgccgag

SEQ ID NO: 361228 - DNA, 33 bp, Homo sapien
caagactccccacatatgaccaggtctgccgag

SEQ ID NO: 361229 - DNA, 33 bp, Homo sapien
atacctgggtgtgcgaaacacttgtttttcaaa

SEQ ID NO: 361230 - DNA, 33 bp, Homo sapien
atacctgggtgtgcgagacacttgtttttcaaa

SEQ ID NO: 361231 - DNA, 33 bp, Homo sapien
ccctgctggttgctccaaaacttggattctgtc

SEQ ID NO: 361232 - DNA, 33 bp, Homo sapien
ccctgctggttgctccgaaacttggattctgtc

SEQ ID NO: 361233 - DNA, 33 bp, Homo sapien
gaattgtctgagaggacgtcgaattgccaactt

SEQ ID NO: 361234 - DNA, 33 bp, Homo sapien
gaattgtctgagaggatgtcgaattgccaactt

SEQ ID NO: 361235 - DNA, 33 bp, Homo sapien
ctgaggctataaatgaaattcccctttctgagc

SEQ ID NO: 361236 - DNA, 33 bp, Homo sapien
ctgaggctataaatgagattcccctttctgagc

SEQ ID NO: 361237 - DNA, 33 bp, Homo sapien
ttaactgtcattacacggtaaatatacctatcc

SEQ ID NO: 361238 - DNA, 33 bp, Homo sapien
ttaactgtcattacactgtaaatatacctatcc

SEQ ID NO: 361239 - DNA, 33 bp, Homo sapien
tcaaagagatccagtacggctaccgccgggtga

SEQ ID NO: 361240 - DNA, 33 bp, Homo sapien
tcaaagagatccagtatggctaccgccgggtga

SEQ ID NO: 361241 - DNA, 33 bp, Homo sapien
cattttttgcaaactactactctgcattccaac

SEQ ID NO: 361242 - DNA, 33 bp, Homo sapien
cattttttgcaaactattactctgcattccaac

SEQ ID NO: 361243 - DNA, 33 bp, Homo sapien
gagtgtaacgcatgacccaaagctgggttggga

SEQ ID NO: 361244 - DNA, 33 bp, Homo sapien
gagtgtaacgcatgacgcaaagctgggttggga

SEQ ID NO: 361245 - DNA, 33 bp, Homo sapien
aattcagagttctaaacgcctccctcgtggctc

SEQ ID NO: 361246 - DNA, 33 bp, Homo sapien
aattcagagttctaaatgcctccctcgtggctc

SEQ ID NO: 361247 - DNA, 33 bp, Homo sapien
caacatgtttaaactgacagccagccctttcac

SEQ ID NO: 361248 - DNA, 33 bp, Homo sapien
caacatgtttaaactgtcagccagccctttcac

SEQ ID NO: 361249 - DNA, 33 bp, Homo sapien
aataagcattttttaaaattgggtgcctctgaa

SEQ ID NO: 361250 - DNA, 33 bp, Homo sapien
aataagcattttttaacattgggtgcctctgaa

SEQ ID NO: 361251 - DNA, 33 bp, Homo sapien
atctcttggttctagccactttgtacttcaaga

SEQ ID NO: 361252 - DNA, 33 bp, Homo sapien
atctcttggttctagctactttgtacttcaaga

SEQ ID NO: 361253 - DNA, 33 bp, Homo sapien
ctattccagacaacaccgcctgaggtgaacaac

SEQ ID NO: 361254 - DNA, 33 bp, Homo sapien
ctattccagacaacactgcctgaggtgaacaac

SEQ ID NO: 361255 - DNA, 33 bp, Homo sapien
aaaagcaaagcccttcagaactcattccctgag

SEQ ID NO: 361256 - DNA, 33 bp, Homo sapien
aaaagcaaagcccttcggaactcattccctgag

SEQ ID NO: 361257 - DNA, 33 bp, Homo sapien
gtaagtttaggacataacacagtggccagcatg

SEQ ID NO: 361258 - DNA, 33 bp, Homo sapien
gtaagtttaggacatagcacagtggccagcatg

SEQ ID NO: 361259 - DNA, 33 bp, Homo sapien
acctaagaacttctcaactctataaaacaaaaa

SEQ ID NO: 361260 - DNA, 33 bp, Homo sapien
acctaagaacttctcagctctataaaacaaaaa

SEQ ID NO: 361261 - DNA, 33 bp, Homo sapien
agtgatttacatgaagcacgaatctggccagat

SEQ ID NO: 361262 - DNA, 33 bp, Homo sapien
agtgatttacatgaagtacgaatctggccagat

SEQ ID NO: 361263 - DNA, 33 bp, Homo sapien
ggggagtttccagccgacagcttttaattcaac

SEQ ID NO: 361264 - DNA, 33 bp, Homo sapien
ggggagtttccagccggcagcttttaattcaac

SEQ ID NO: 361265 - DNA, 33 bp, Homo sapien
agtctgggaagaatcacggccacggactccaag

SEQ ID NO: 361266 - DNA, 33 bp, Homo sapien
agtctgggaagaatcatggccacggactccaag

SEQ ID NO: 361267 - DNA, 33 bp, Homo sapien
gagtgtattggtcagaacaggagtcttcacatt

SEQ ID NO: 361268 - DNA, 33 bp, Homo sapien
gagtgtattggtcagagcaggagtcttcacatt

SEQ ID NO: 361269 - DNA, 33 bp, Homo sapien
tttttattacaacctccaactattacttatttc

SEQ ID NO: 361270 - DNA, 33 bp, Homo sapien
tttttattacaacctctaactattacttatttc

SEQ ID NO: 361271 - DNA, 33 bp, Homo sapien
cactgcaggagccagacgctaatccagcccagg

SEQ ID NO: 361272 - DNA, 33 bp, Homo sapien
cactgcaggagccagatgctaatccagcccagg

SEQ ID NO: 361273 - DNA, 33 bp, Homo sapien
atcaaaacttgtaagacgtatttcagtactttt

SEQ ID NO: 361274 - DNA, 33 bp, Homo sapien
atcaaaacttgtaagatgtatttcagtactttt

SEQ ID NO: 361275 - DNA, 33 bp, Homo sapien
tgagataacaatagtaccaaacctcaaaaggtt

SEQ ID NO: 361276 - DNA, 33 bp, Homo sapien
tgagataacaatagtagcaaacctcaaaaggtt

SEQ ID NO: 361277 - DNA, 33 bp, Homo sapien
gggcaaccatgatgttcgtgttgcaatttgtac

SEQ ID NO: 361278 - DNA, 33 bp, Homo sapien
gggcaaccatgatgtttgtgttgcaatttgtac

SEQ ID NO: 361279 - DNA, 33 bp, Homo sapien
gagcacccgtaccacaccttcagtgcccatcag

SEQ ID NO: 361280 - DNA, 33 bp, Homo sapien
gagcacccgtaccacatcttcagtgcccatcag

SEQ ID NO: 361281 - DNA, 33 bp, Homo sapien
acagagagtgtaataaaaatgaagtctctcttc

SEQ ID NO: 361282 - DNA, 33 bp, Homo sapien
acagagagtgtaataataatgaagtctctcttc

SEQ ID NO: 361283 - DNA, 33 bp, Homo sapien
agataaatgtctcccaaattaccattgtctaaa

SEQ ID NO: 361284 - DNA, 33 bp, Homo sapien
agataaatgtctcccagattaccattgtctaaa

SEQ ID NO: 361285 - DNA, 33 bp, Homo sapien
agctttacacttctcaaataaaaggatctaata

SEQ ID NO: 361286 - DNA, 33 bp, Homo sapien
agctttacacttctcagataaaaggatctaata

SEQ ID NO: 361287 - DNA, 33 bp, Homo sapien
attggaacactgtgccaaacaacagaataatac

SEQ ID NO: 361288 - DNA, 33 bp, Homo sapien
attggaacactgtgccgaacaacagaataatac

SEQ ID NO: 361289 - DNA, 33 bp, Homo sapien
agtgtttctggaaataagtaataaagtcaaatg

SEQ ID NO: 361290 - DNA, 33 bp, Homo sapien
agtgtttctggaaataggtaataaagtcaaatg

SEQ ID NO: 361291 - DNA, 33 bp, Homo sapien
tggacatggctcacaaacagttgttgattgact

SEQ ID NO: 361292 - DNA, 33 bp, Homo sapien
tggacatggctcacaagcagttgttgattgact

SEQ ID NO: 361293 - DNA, 33 bp, Homo sapien
gccaatgaaaaaagaacgcctggttgcgacgta

SEQ ID NO: 361294 - DNA, 33 bp, Homo sapien
gccaatgaaaaaagaatgcctggttgcgacgta

SEQ ID NO: 361295 - DNA, 33 bp, Homo sapien
aagacccgggacccaacgtaggcattgttcgca

SEQ ID NO: 361296 - DNA, 33 bp, Homo sapien
aagacccgggacccaatgtaggcattgttcgca

SEQ ID NO: 361297 - DNA, 33 bp, Homo sapien
tgcatagttctgagacagcccaaagaaaacgag

SEQ ID NO: 361298 - DNA, 33 bp, Homo sapien
tgcatagttctgagactgcccaaagaaaacgag

SEQ ID NO: 361299 - DNA, 33 bp, Homo sapien
gccgtgcggatcagacacaggtcaacccagctc

SEQ ID NO: 361300 - DNA, 33 bp, Homo sapien
gccgtgcggatcagacgcaggtcaacccagctc

SEQ ID NO: 361301 - DNA, 33 bp, Homo sapien
cagaaaggagttaggaacttaggcccagaggtg

SEQ ID NO: 361302 - DNA, 33 bp, Homo sapien
cagaaaggagttaggagcttaggcccagaggtg

SEQ ID NO: 361303 - DNA, 33 bp, Homo sapien
cgagcgactggaaagtaaacggcgcgggtcata

SEQ ID NO: 361304 - DNA, 33 bp, Homo sapien
cgagcgactggaaagtgaacggcgcgggtcata

SEQ ID NO: 361305 - DNA, 33 bp, Homo sapien
tagacctggaaatgacactgtgaatagacagga

SEQ ID NO: 361306 - DNA, 33 bp, Homo sapien
tagacctggaaatgacgctgtgaatagacagga

SEQ ID NO: 361307 - DNA, 33 bp, Homo sapien
agcccagccttctccacagagtgagttagcctg

SEQ ID NO: 361308 - DNA, 33 bp, Homo sapien
agcccagccttctccagagagtgagttagcctg

SEQ ID NO: 361309 - DNA, 33 bp, Homo sapien
ctgagccacctgggtacctctagctgctctgaa

SEQ ID NO: 361310 - DNA, 33 bp, Homo sapien
ctgagccacctgggtatctctagctgctctgaa

SEQ ID NO: 361311 - DNA, 33 bp, Homo sapien
ctaccactcaggctgacgtgtatctcccgttgg

SEQ ID NO: 361312 - DNA, 33 bp, Homo sapien
ctaccactcaggctgatgtgtatctcccgttgg

SEQ ID NO: 361313 - DNA, 33 bp, Homo sapien
gccagccgaccttaaaccaggaagattatcctg

SEQ ID NO: 361314 - DNA, 33 bp, Homo sapien
gccagccgaccttaaagcaggaagattatcctg

SEQ ID NO: 361315 - DNA, 33 bp, Homo sapien
cagactcagagggacaaagaatgcaggcggaca

SEQ ID NO: 361316 - DNA, 33 bp, Homo sapien
cagactcagagggacagagaatgcaggcggaca

SEQ ID NO: 361317 - DNA, 33 bp, Homo sapien
cccgggcagtgaccaaaacaaagtatattttct

SEQ ID NO: 361318 - DNA, 33 bp, Homo sapien
cccgggcagtgaccaagacaaagtatattttct

SEQ ID NO: 361319 - DNA, 33 bp, Homo sapien
caggggtgcgtactccagcagaaaaggaaaata

SEQ ID NO: 361320 - DNA, 33 bp, Homo sapien
caggggtgcgtactccggcagaaaaggaaaata

SEQ ID NO: 361321 - DNA, 33 bp, Homo sapien
gaacaatttgagcctgaaggtaaaccccagtcc

SEQ ID NO: 361322 - DNA, 33 bp, Homo sapien
gaacaatttgagcctggaggtaaaccccagtcc

SEQ ID NO: 361323 - DNA, 33 bp, Homo sapien
gattacagatgatggaagaatttacaactttaa

SEQ ID NO: 361324 - DNA, 33 bp, Homo sapien
gattacagatgatggaggaatttacaactttaa

SEQ ID NO: 361325 - DNA, 33 bp, Homo sapien
tttgcaaatttagctcgctctgcaagaagggta

SEQ ID NO: 361326 - DNA, 33 bp, Homo sapien
tttgcaaatttagctctctctgcaagaagggta

SEQ ID NO: 361327 - DNA, 33 bp, Homo sapien
ttctcacctggaataaagacaggctctgatggg

SEQ ID NO: 361328 - DNA, 33 bp, Homo sapien
ttctcacctggaataaggacaggctctgatggg

SEQ ID NO: 361329 - DNA, 33 bp, Homo sapien
tctacagtctctcaccaccgggccacatcatct

SEQ ID NO: 361330 - DNA, 33 bp, Homo sapien
tctacagtctctcaccgccgggccacatcatct

SEQ ID NO: 361331 - DNA, 33 bp, Homo sapien
gacctcagtatttcacaaaactgtgacaagaat

SEQ ID NO: 361332 - DNA, 33 bp, Homo sapien
gacctcagtatttcacgaaactgtgacaagaat

SEQ ID NO: 361333 - DNA, 33 bp, Homo sapien
tatctactagaatccaagaagagtgtgtccatg

SEQ ID NO: 361334 - DNA, 33 bp, Homo sapien
tatctactagaatccaggaagagtgtgtccatg

SEQ ID NO: 361335 - DNA, 33 bp, Homo sapien
actcaggaagcgacagcctaattttatttgctc

SEQ ID NO: 361336 - DNA, 33 bp, Homo sapien
actcaggaagcgacagtctaattttatttgctc

SEQ ID NO: 361337 - DNA, 33 bp, Homo sapien
tagcatcagaaggctacgattgcaaaggtggaa

SEQ ID NO: 361338 - DNA, 33 bp, Homo sapien
tagcatcagaaggctatgattgcaaaggtggaa

SEQ ID NO: 361339 - DNA, 33 bp, Homo sapien
agcaacatgaacaagaacagagggacccgacga

SEQ ID NO: 361340 - DNA, 33 bp, Homo sapien
agcaacatgaacaagaccagagggacccgacga

SEQ ID NO: 361341 - DNA, 33 bp, Homo sapien
acatagacatgataaacacccaagatgacggat

SEQ ID NO: 361342 - DNA, 33 bp, Homo sapien
acatagacatgataaatacccaagatgacggat

SEQ ID NO: 361343 - DNA, 33 bp, Homo sapien
accttgtaaatagctacaaaatgtgtacagcga

SEQ ID NO: 361344 - DNA, 33 bp, Homo sapien
accttgtaaatagctataaaatgtgtacagcga

SEQ ID NO: 361345 - DNA, 33 bp, Homo sapien
ttgaaaacttgagtaaacatttacaaatcacag

SEQ ID NO: 361346 - DNA, 33 bp, Homo sapien
ttgaaaacttgagtaagcatttacaaatcacag

SEQ ID NO: 361347 - DNA, 33 bp, Homo sapien
cttcattgtttccagaaaggagagtggggtacc

SEQ ID NO: 361348 - DNA, 33 bp, Homo sapien
cttcattgtttccagagaggagagtggggtacc

SEQ ID NO: 361349 - DNA, 33 bp, Homo sapien
agaaaactatgctggaaagaattaggaagatga

SEQ ID NO: 361350 - DNA, 33 bp, Homo sapien
agaaaactatgctggagagaattaggaagatga

SEQ ID NO: 361351 - DNA, 33 bp, Homo sapien
gccttgtgaaattgccaataaattatctggtga

SEQ ID NO: 361352 - DNA, 33 bp, Homo sapien
gccttgtgaaattgccgataaattatctggtga

SEQ ID NO: 361353 - DNA, 33 bp, Homo sapien
tttgaagccagctacactcacatttaaagaaac

SEQ ID NO: 361354 - DNA, 33 bp, Homo sapien
tttgaagccagctacattcacatttaaagaaac

SEQ ID NO: 361355 - DNA, 33 bp, Homo sapien
tctttatcagttgtaagggcccctaatgtagta

SEQ ID NO: 361356 - DNA, 33 bp, Homo sapien
tctttatcagttgtaatggcccctaatgtagta

SEQ ID NO: 361357 - DNA, 33 bp, Homo sapien
tgggtgtgcaataccactcgtgtctggcaatcc

SEQ ID NO: 361358 - DNA, 33 bp, Homo sapien
tgggtgtgcaataccattcgtgtctggcaatcc

SEQ ID NO: 361359 - DNA, 33 bp, Homo sapien
atctgtgagggtattgcagacaccagatgtcag

SEQ ID NO: 361360 - DNA, 33 bp, Homo sapien
atctgtgagggtattggagacaccagatgtcag

SEQ ID NO: 361361 - DNA, 33 bp, Homo sapien
gttgcaagccacctaaaacgtggctggacccag

SEQ ID NO: 361362 - DNA, 33 bp, Homo sapien
gttgcaagccacctaagacgtggctggacccag

SEQ ID NO: 361363 - DNA, 33 bp, Homo sapien
ggagaagagggtgtggcaataacagtgcctacc

SEQ ID NO: 361364 - DNA, 33 bp, Homo sapien
ggagaagagggtgtggtaataacagtgcctacc

SEQ ID NO: 361365 - DNA, 33 bp, Homo sapien
tctacctgacctcacaactttggtaggcactgt

SEQ ID NO: 361366 - DNA, 33 bp, Homo sapien
tctacctgacctcacagctttggtaggcactgt

SEQ ID NO: 361367 - DNA, 33 bp, Homo sapien
tggtaaaatatgtgaacaggcataattcgcctg

SEQ ID NO: 361368 - DNA, 33 bp, Homo sapien
tggtaaaatatgtgaataggcataattcgcctg

SEQ ID NO: 361369 - DNA, 33 bp, Homo sapien
caacttgtacctcccaagtcaataagtcttcta

SEQ ID NO: 361370 - DNA, 33 bp, Homo sapien
caacttgtacctcccacgtcaataagtcttcta

SEQ ID NO: 361371 - DNA, 33 bp, Homo sapien
tctgaaggtcagggaaactttcttggataccct

SEQ ID NO: 361372 - DNA, 33 bp, Homo sapien
tctgaaggtcagggaacctttcttggataccct

SEQ ID NO: 361373 - DNA, 33 bp, Homo sapien
aaactacagcatcacaaagagggtgtcctcatg

SEQ ID NO: 361374 - DNA, 33 bp, Homo sapien
aaactacagcatcacagagagggtgtcctcatg

SEQ ID NO: 361375 - DNA, 33 bp, Homo sapien
ctttttggagtcactcaataggccctgccacgt

SEQ ID NO: 361376 - DNA, 33 bp, Homo sapien
ctttttggagtcactcgataggccctgccacgt

SEQ ID NO: 361377 - DNA, 33 bp, Homo sapien
acctgcttcccagacaaaggtaaatcatcagac

SEQ ID NO: 361378 - DNA, 33 bp, Homo sapien
acctgcttcccagacagaggtaaatcatcagac

SEQ ID NO: 361379 - DNA, 33 bp, Homo sapien
catgatgtatttctgcactcagcttctcaaaac

SEQ ID NO: 361380 - DNA, 33 bp, Homo sapien
catgatgtatttctgcgctcagcttctcaaaac

SEQ ID NO: 361381 - DNA, 33 bp, Homo sapien
tgagcttggcatcgaaagaaaacatagcaggaa

SEQ ID NO: 361382 - DNA, 33 bp, Homo sapien
tgagcttggcatcgaacgaaaacatagcaggaa

SEQ ID NO: 361383 - DNA, 33 bp, Homo sapien
gcatgacatggggcccaataggctgctcatgcc

SEQ ID NO: 361384 - DNA, 33 bp, Homo sapien
gcatgacatggggcccgataggctgctcatgcc

SEQ ID NO: 361385 - DNA, 33 bp, Homo sapien
tgcagggtcacctgccacaatgtccaactcctg

SEQ ID NO: 361386 - DNA, 33 bp, Homo sapien
tgcagggtcacctgccgcaatgtccaactcctg

SEQ ID NO: 361387 - DNA, 33 bp, Homo sapien
ctcacctttgatagacaggaagtctggaacctt

SEQ ID NO: 361388 - DNA, 33 bp, Homo sapien
ctcacctttgatagacgggaagtctggaacctt

SEQ ID NO: 361389 - DNA, 33 bp, Homo sapien
gaaccttcttagtcacagcctctcaggcagaag

SEQ ID NO: 361390 - DNA, 33 bp, Homo sapien
gaaccttcttagtcacggcctctcaggcagaag

SEQ ID NO: 361391 - DNA, 33 bp, Homo sapien
cgctttagaagtcaagcctatccctgctagtgg

SEQ ID NO: 361392 - DNA, 33 bp, Homo sapien
cgctttagaagtcaaggctatccctgctagtgg

SEQ ID NO: 361393 - DNA, 33 bp, Homo sapien
ctgctttcgtaaaataagttcagatataaccaa

SEQ ID NO: 361394 - DNA, 33 bp, Homo sapien
ctgctttcgtaaaatatgttcagatataaccaa

SEQ ID NO: 361395 - DNA, 33 bp, Homo sapien
aatttgaagtgcaaaaatgtgagtgagaatatc

SEQ ID NO: 361396 - DNA, 33 bp, Homo sapien
aatttgaagtgcaaaactgtgagtgagaatatc

SEQ ID NO: 361397 - DNA, 33 bp, Homo sapien
taaaaatctggaaggacgcaaacattcattcca

SEQ ID NO: 361398 - DNA, 33 bp, Homo sapien
taaaaatctggaaggatgcaaacattcattcca

SEQ ID NO: 361399 - DNA, 33 bp, Homo sapien
gcatagttctgaataccagaaatctagaggaat

SEQ ID NO: 361400 - DNA, 33 bp, Homo sapien
gcatagttctgaatactagaaatctagaggaat

SEQ ID NO: 361401 - DNA, 33 bp, Homo sapien
ttgcctcccactaagacggttcacttctcaaat

SEQ ID NO: 361402 - DNA, 33 bp, Homo sapien
ttgcctcccactaagatggttcacttctcaaat

SEQ ID NO: 361403 - DNA, 33 bp, Homo sapien
ggtgtcttgtacggacacttcattatccctgtc

SEQ ID NO: 361404 - DNA, 33 bp, Homo sapien
ggtgtcttgtacggacgcttcattatccctgtc

SEQ ID NO: 361405 - DNA, 33 bp, Homo sapien
ctcttccttccatctccaggaccatcaccaccg

SEQ ID NO: 361406 - DNA, 33 bp, Homo sapien
ctcttccttccatctctaggaccatcaccaccg

SEQ ID NO: 361407 - DNA, 33 bp, Homo sapien
tgtggcttttgctggaacctgaggtaggcagca

SEQ ID NO: 361408 - DNA, 33 bp, Homo sapien
tgtggcttttgctggaccctgaggtaggcagca

SEQ ID NO: 361409 - DNA, 33 bp, Homo sapien
agtgggctttgcagacacagttgaagttcagga

SEQ ID NO: 361410 - DNA, 33 bp, Homo sapien
agtgggctttgcagacgcagttgaagttcagga

SEQ ID NO: 361411 - DNA, 33 bp, Homo sapien
ttgaagtgagagatgacgctttgttcttgattt

SEQ ID NO: 361412 - DNA, 33 bp, Homo sapien
ttgaagtgagagatgatgctttgttcttgattt

SEQ ID NO: 361413 - DNA, 33 bp, Homo sapien
ggatttcttggttctcaaaataagacacaagga

SEQ ID NO: 361414 - DNA, 33 bp, Homo sapien
ggatttcttggttctcgaaataagacacaagga

SEQ ID NO: 361415 - DNA, 33 bp, Homo sapien
agataaaaggaaaagacgaggagattttattac

SEQ ID NO: 361416 - DNA, 33 bp, Homo sapien
agataaaaggaaaagatgaggagattttattac

SEQ ID NO: 361417 - DNA, 33 bp, Homo sapien
agggattctttctgagaccaaaaaccctttccc

SEQ ID NO: 361418 - DNA, 33 bp, Homo sapien
agggattctttctgaggccaaaaaccctttccc

SEQ ID NO: 361419 - DNA, 33 bp, Homo sapien
ccgaggagctgaaacaaacgagctttgacgagt

SEQ ID NO: 361420 - DNA, 33 bp, Homo sapien
ccgaggagctgaaacagacgagctttgacgagt

SEQ ID NO: 361421 - DNA, 33 bp, Homo sapien
ctacatctctaagccaaagaaacagaagttctc

SEQ ID NO: 361422 - DNA, 33 bp, Homo sapien
ctacatctctaagccagagaaacagaagttctc

SEQ ID NO: 361423 - DNA, 33 bp, Homo sapien
aaatagaatccaacaacgtagaaaaaagtacat

SEQ ID NO: 361424 - DNA, 33 bp, Homo sapien
aaatagaatccaacaatgtagaaaaaagtacat

SEQ ID NO: 361425 - DNA, 33 bp, Homo sapien
aaactcaccatttatactagcaccaaaaatgaa

SEQ ID NO: 361426 - DNA, 33 bp, Homo sapien
aaactcaccatttatattagcaccaaaaatgaa

SEQ ID NO: 361427 - DNA, 33 bp, Homo sapien
cctcattaatatgaacagcttttcccctaaatc

SEQ ID NO: 361428 - DNA, 33 bp, Homo sapien
cctcattaatatgaacggcttttcccctaaatc

SEQ ID NO: 361429 - DNA, 33 bp, Homo sapien
gttcttttctttcggcacttgttaaatgttgtg

SEQ ID NO: 361430 - DNA, 33 bp, Homo sapien
gttcttttctttcggctcttgttaaatgttgtg

SEQ ID NO: 361431 - DNA, 33 bp, Homo sapien
ctccatctagcaagacactccaggtcaccgggg

SEQ ID NO: 361432 - DNA, 33 bp, Homo sapien
ctccatctagcaagacgctccaggtcaccgggg

SEQ ID NO: 361433 - DNA, 33 bp, Homo sapien
tgggccgtgctgaggaaaccagtcaagatgacc

SEQ ID NO: 361434 - DNA, 33 bp, Homo sapien
tgggccgtgctgaggacaccagtcaagatgacc

SEQ ID NO: 361435 - DNA, 33 bp, Homo sapien
gtaggaaaactctagcaccaaggacacaggaga

SEQ ID NO: 361436 - DNA, 33 bp, Homo sapien
gtaggaaaactctagccccaaggacacaggaga

SEQ ID NO: 361437 - DNA, 33 bp, Homo sapien
ctcaaatgaagatatacgggagggaaatcataa

SEQ ID NO: 361438 - DNA, 33 bp, Homo sapien
ctcaaatgaagatatatgggagggaaatcataa

SEQ ID NO: 361439 - DNA, 33 bp, Homo sapien
acagttgggaagaagacgaatatgactactatt

SEQ ID NO: 361440 - DNA, 33 bp, Homo sapien
acagttgggaagaagatgaatatgactactatt

SEQ ID NO: 361441 - DNA, 33 bp, Homo sapien
caggtgtcttccatacaactaaaatgaagagga

SEQ ID NO: 361442 - DNA, 33 bp, Homo sapien
caggtgtcttccatacgactaaaatgaagagga

SEQ ID NO: 361443 - DNA, 33 bp, Homo sapien
tggtacagagtgttaaaccatgaagcattgctt

SEQ ID NO: 361444 - DNA, 33 bp, Homo sapien
tggtacagagtgttaagccatgaagcattgctt

SEQ ID NO: 361445 - DNA, 33 bp, Homo sapien
taatggagaaaacatcactctgggattaggagg

SEQ ID NO: 361446 - DNA, 33 bp, Homo sapien
taatggagaaaacatcgctctgggattaggagg

SEQ ID NO: 361447 - DNA, 33 bp, Homo sapien
ggttgtcagtcctccaagttcaaaaagttgata

SEQ ID NO: 361448 - DNA, 33 bp, Homo sapien
ggttgtcagtcctccacgttcaaaaagttgata

SEQ ID NO: 361449 - DNA, 33 bp, Homo sapien
atggtaagcttgggaccatctgtagaactgaga

SEQ ID NO: 361450 - DNA, 33 bp, Homo sapien
atggtaagcttgggactatctgtagaactgaga

SEQ ID NO: 361451 - DNA, 33 bp, Homo sapien
tagaagatactaagaacaaccattcagtgaaga

SEQ ID NO: 361452 - DNA, 33 bp, Homo sapien
tagaagatactaagaagaaccattcagtgaaga

SEQ ID NO: 361453 - DNA, 33 bp, Homo sapien; identical to SEQ ID NO: 361451

SEQ ID NO: 361454 - DNA, 33 bp, Homo sapien; identical to SEQ ID NO: 361452

SEQ ID NO: 361455 - DNA, 33 bp, Homo sapien
tatctgtaggaaatagccatcatacaaatcagt

SEQ ID NO: 361456 - DNA, 33 bp, Homo sapien
tatctgtaggaaataggcatcatacaaatcagt

SEQ ID NO: 361457 - DNA, 33 bp, Homo sapien
acgctctgtacctgcaactaggagtcgtccacg

SEQ ID NO: 361458 - DNA, 33 bp, Homo sapien
acgctctgtacctgcagctaggagtcgtccacg

SEQ ID NO: 361459 - DNA, 33 bp, Homo sapien
ggagttttgggagaaaaggtccaagataggcag

SEQ ID NO: 361460 - DNA, 33 bp, Homo sapien
ggagttttgggagaaagggtccaagataggcag

SEQ ID NO: 361461 - DNA, 33 bp, Homo sapien
tgaggttactggacacaaaagccatcagctcct

SEQ ID NO: 361462 - DNA, 33 bp, Homo sapien
tgaggttactggacacgaaagccatcagctcct

SEQ ID NO: 361463 - DNA, 33 bp, Homo sapien
attgcggccataagaaatcattagggtttcaga

SEQ ID NO: 361464 - DNA, 33 bp, Homo sapien
attgcggccataagaagtcattagggtttcaga

SEQ ID NO: 361465 - DNA, 33 bp, Homo sapien
cagagaggaggcaaacaggaagaagaaagtccc

SEQ ID NO: 361466 - DNA, 33 bp, Homo sapien
cagagaggaggcaaacgggaagaagaaagtccc

SEQ ID NO: 361467 - DNA, 33 bp, Homo sapien
cttggtaaggggcatacgggcaccctctggact

SEQ ID NO: 361468 - DNA, 33 bp, Homo sapien
cttggtaaggggcatatgggcaccctctggact

SEQ ID NO: 361469 - DNA, 33 bp, Homo sapien
tataccaaaaccaacactgccgtggacaccttc

SEQ ID NO: 361470 - DNA, 33 bp, Homo sapien
tataccaaaaccaacattgccgtggacaccttc

SEQ ID NO: 361471 - DNA, 33 bp, Homo sapien
ttttaagtaaaggagccatcctgatacgtttta

SEQ ID NO: 361472 - DNA, 33 bp, Homo sapien
ttttaagtaaaggagctatcctgatacgtttta

SEQ ID NO: 361473 - DNA, 33 bp, Homo sapien
atggccacgtatagacaaaaatcaaaggaccaa

SEQ ID NO: 361474 - DNA, 33 bp, Homo sapien
atggccacgtatagacgaaaatcaaaggaccaa

SEQ ID NO: 361475 - DNA, 33 bp, Homo sapien
tagtcaaagtttggcaataaaaagacagaatga

SEQ ID NO: 361476 - DNA, 33 bp, Homo sapien
tagtcaaagtttggcagtaaaaagacagaatga

SEQ ID NO: 361477 - DNA, 33 bp, Homo sapien
aaacccaacattacccagataccaaatccaaac

SEQ ID NO: 361478 - DNA, 33 bp, Homo sapien
aaacccaacattaccccgataccaaatccaaac

SEQ ID NO: 361479 - DNA, 33 bp, Homo sapien
aggattactcaaggccagaagtttgagagtgtc

SEQ ID NO: 361480 - DNA, 33 bp, Homo sapien
aggattactcaaggccggaagtttgagagtgtc

SEQ ID NO: 361481 - DNA, 33 bp, Homo sapien
aaagacctcaaaagcaatatagaaagtcatatt

SEQ ID NO: 361482 - DNA, 33 bp, Homo sapien
aaagacctcaaaagcagtatagaaagtcatatt

SEQ ID NO: 361483 - DNA, 33 bp, Homo sapien
tatattctctcaatccacagcctacctcaacta

SEQ ID NO: 361484 - DNA, 33 bp, Homo sapien
tatattctctcaatccgcagcctacctcaacta

SEQ ID NO: 361485 - DNA, 33 bp, Homo sapien
acactgcgatctgcaaacctctccactatccaa

SEQ ID NO: 361486 - DNA, 33 bp, Homo sapien
acactgcgatctgcaagcctctccactatccaa

SEQ ID NO: 361487 - DNA, 33 bp, Homo sapien
aaattgagaagtggaacctaataaaacaatagc

SEQ ID NO: 361488 - DNA, 33 bp, Homo sapien
aaattgagaagtggaatctaataaaacaatagc

SEQ ID NO: 361489 - DNA, 33 bp, Homo sapien
gccctggagacagtgacggtcgggagcccacag

SEQ ID NO: 361490 - DNA, 33 bp, Homo sapien
gccctggagacagtgatggtcgggagcccacag

SEQ ID NO: 361491 - DNA, 33 bp, Homo sapien
gtctgcagctgggtcaatcggcctttctgagct

SEQ ID NO: 361492 - DNA, 33 bp, Homo sapien
gtctgcagctgggtcagtcggcctttctgagct

SEQ ID NO: 361493 - DNA, 33 bp, Homo sapien
ttaattcctgttccaacgcaatcccagctcact

SEQ ID NO: 361494 - DNA, 33 bp, Homo sapien
ttaattcctgttccaatgcaatcccagctcact

SEQ ID NO: 361495 - DNA, 33 bp, Homo sapien
tattcaataatgacaaagctgacatctgaagat

SEQ ID NO: 361496 - DNA, 33 bp, Homo sapien
tattcaataatgacaacgctgacatctgaagat

SEQ ID NO: 361497 - DNA, 33 bp, Homo sapien
tactgtgtgctcagcaccgactttctctgtgcc

SEQ ID NO: 361498 - DNA, 33 bp, Homo sapien
tactgtgtgctcagcatcgactttctctgtgcc

SEQ ID NO: 361499 - DNA, 33 bp, Homo sapien
tgggagggttgaagagaactttggggtttgcaa

SEQ ID NO: 361500 - DNA, 33 bp, Homo sapien
tgggagggttgaagagcactttggggtttgcaa

SEQ ID NO: 361501 - DNA, 33 bp, Homo sapien
cagaagagaaataccactgccaggagttgggtg

SEQ ID NO: 361502 - DNA, 33 bp, Homo sapien
cagaagagaaataccagtgccaggagttgggtg

SEQ ID NO: 361503 - DNA, 33 bp, Homo sapien
tgtgatacaacaaaacagcacgtgtggcaggtg

SEQ ID NO: 361504 - DNA, 33 bp, Homo sapien
tgtgatacaacaaaacggcacgtgtggcaggtg

SEQ ID NO: 361505 - DNA, 33 bp, Homo sapien
ccacactggccatgacagctcttctggggcgca

SEQ ID NO: 361506 - DNA, 33 bp, Homo sapien
ccacactggccatgacggctcttctggggcgca

SEQ ID NO: 361507 - DNA, 33 bp, Homo sapien
cgctaaacctgacagaactctcagtgcggtctt

SEQ ID NO: 361508 - DNA, 33 bp, Homo sapien
cgctaaacctgacagagctctcagtgcggtctt

SEQ ID NO: 361509 - DNA, 33 bp, Homo sapien
cctagtgagaggttgcaaaggtgctattccacg

SEQ ID NO: 361510 - DNA, 33 bp, Homo sapien
cctagtgagaggttgcgaaggtgctattccacg

SEQ ID NO: 361511 - DNA, 33 bp, Homo sapien
cctggctaattaaataaaaatttttggcagaga

SEQ ID NO: 361512 - DNA, 33 bp, Homo sapien
cctggctaattaaatacaaatttttggcagaga

SEQ ID NO: 361513 - DNA, 33 bp, Homo sapien
gaagcctcacaatgacaccagttctaaaatagg

SEQ ID NO: 361514 - DNA, 33 bp, Homo sapien
gaagcctcacaatgactccagttctaaaatagg

SEQ ID NO: 361515 - DNA, 33 bp, Homo sapien
tttctaatgctccatacaatttgattacaatta

SEQ ID NO: 361516 - DNA, 33 bp, Homo sapien
tttctaatgctccatataatttgattacaatta

SEQ ID NO: 361517 - DNA, 33 bp, Homo sapien
cttcacaggtcctgtccagttctaaggttagga

SEQ ID NO: 361518 - DNA, 33 bp, Homo sapien
cttcacaggtcctgtctagttctaaggttagga

SEQ ID NO: 361519 - DNA, 33 bp, Homo sapien
atccgtgggaccagagaatgcagaggtttgcag

SEQ ID NO: 361520 - DNA, 33 bp, Homo sapien
atccgtgggaccagaggatgcagaggtttgcag

SEQ ID NO: 361521 - DNA, 33 bp, Homo sapien
tggagagtttgttacaagtgtctctttatgttt

SEQ ID NO: 361522 - DNA, 33 bp, Homo sapien
tggagagtttgttacaggtgtctctttatgttt

SEQ ID NO: 361523 - DNA, 33 bp, Homo sapien
gtcctgaaggatgagaagctcttcccagcagaa

SEQ ID NO: 361524 - DNA, 33 bp, Homo sapien
gtcctgaaggatgagacgctcttcccagcagaa

SEQ ID NO: 361525 - DNA, 33 bp, Homo sapien
gcccagttatctgctccctcaagtgttttcaca

SEQ ID NO: 361526 - DNA, 33 bp, Homo sapien
gcccagttatctgctctctcaagtgttttcaca

SEQ ID NO: 361527 - DNA, 33 bp, Homo sapien
ggcctccagaagcactaagtcatggttggccca

SEQ ID NO: 361528 - DNA, 33 bp, Homo sapien
ggcctccagaagcactgagtcatggttggccca

SEQ ID NO: 361529 - DNA, 33 bp, Homo sapien
aattttaaaccctgaaatagagagagcagactg

SEQ ID NO: 361530 - DNA, 33 bp, Homo sapien
aattttaaaccctgaactagagagagcagactg

SEQ ID NO: 361531 - DNA, 33 bp, Homo sapien
agatgcacagttcataccaagtgtctaatcagg

SEQ ID NO: 361532 - DNA, 33 bp, Homo sapien
agatgcacagttcatagcaagtgtctaatcagg

SEQ ID NO: 361533 - DNA, 33 bp, Homo sapien
tgactttgaaggagtcaaaacttcagtggagga

SEQ ID NO: 361534 - DNA, 33 bp, Homo sapien
tgactttgaaggagtcgaaacttcagtggagga

SEQ ID NO: 361535 - DNA, 33 bp, Homo sapien
caactttagaagaaaacataggtgaaactcttt

SEQ ID NO: 361536 - DNA, 33 bp, Homo sapien
caactttagaagaaaatataggtgaaactcttt

SEQ ID NO: 361537 - DNA, 33 bp, Homo sapien
agggattgcttccagaagatacacagaattcta

SEQ ID NO: 361538 - DNA, 33 bp, Homo sapien
agggattgcttccagacgatacacagaattcta

SEQ ID NO: 361539 - DNA, 33 bp, Homo sapien
gtctcatttctgtgaactgtgatctgactgtct

SEQ ID NO: 361540 - DNA, 33 bp, Homo sapien
gtctcatttctgtgaattgtgatctgactgtct

SEQ ID NO: 361541 - DNA, 33 bp, Homo sapien
ataggaagttgtacacaggtatctacagtatga

SEQ ID NO: 361542 - DNA, 33 bp, Homo sapien
ataggaagttgtacacgggtatctacagtatga

SEQ ID NO: 361543 - DNA, 33 bp, Homo sapien
cctagccattggagatgaactgatggaaatatt

SEQ ID NO: 361544 - DNA, 33 bp, Homo sapien
cctagccattggagattaactgatggaaatatt

SEQ ID NO: 361545 - DNA, 33 bp, Homo sapien
tccagtctttacaacagacaccagcacagaatg

SEQ ID NO: 361546 - DNA, 33 bp, Homo sapien
tccagtctttacaacatacaccagcacagaatg

SEQ ID NO: 361547 - DNA, 33 bp, Homo sapien
actccatctcaaaaaaaacagccgcagaggagc

SEQ ID NO: 361548 - DNA, 33 bp, Homo sapien
actccatctcaaaaaacacagccgcagaggagc

SEQ ID NO: 361549 - DNA, 33 bp, Homo sapien
gttttgtgttgtgccaccccttcaagaaatcaa

SEQ ID NO: 361550 - DNA, 33 bp, Homo sapien
gttttgtgttgtgccatcccttcaagaaatcaa

SEQ ID NO: 361551 - DNA, 33 bp, Homo sapien
accagtttgcaaataaagacaccatgagacagg

SEQ ID NO: 361552 - DNA, 33 bp, Homo sapien
accagtttgcaaataaggacaccatgagacagg

SEQ ID NO: 361553 - DNA, 33 bp, Homo sapien
ggtaagtatttggggaatattgttataaatgct

SEQ ID NO: 361554 - DNA, 33 bp, Homo sapien
ggtaagtatttggggagtattgttataaatgct

SEQ ID NO: 361555 - DNA, 33 bp, Homo sapien
gctaccacaaaactccactattgatattcttcc

SEQ ID NO: 361556 - DNA, 33 bp, Homo sapien
gctaccacaaaactccgctattgatattcttcc

SEQ ID NO: 361557 - DNA, 33 bp, Homo sapien
tacaaaatgctgtgatcataccaaatgttacta

SEQ ID NO: 361558 - DNA, 33 bp, Homo sapien
tacaaaatgctgtgattataccaaatgttacta

SEQ ID NO: 361559 - DNA, 33 bp, Homo sapien
ctgctctgggctccacacagattgtccgaacgc

SEQ ID NO: 361560 - DNA, 33 bp, Homo sapien
ctgctctgggctccacgcagattgtccgaacgc

SEQ ID NO: 361561 - DNA, 33 bp, Homo sapien
ggcaccgccctaccgccgagagagttgaagctg

SEQ ID NO: 361562 - DNA, 33 bp, Homo sapien
ggcaccgccctaccgctgagagagttgaagctg

SEQ ID NO: 361563 - DNA, 33 bp, Homo sapien
gggatcccgctggagacgaagagacggtgagcc

SEQ ID NO: 361564 - DNA, 33 bp, Homo sapien
gggatcccgctggagatgaagagacggtgagcc

SEQ ID NO: 361565 - DNA, 33 bp, Homo sapien
gtgtgcttctagtaggacaggttcccattttga

SEQ ID NO: 361566 - DNA, 33 bp, Homo sapien
gtgtgcttctagtagggcaggttcccattttga

SEQ ID NO: 361567 - DNA, 33 bp, Homo sapien
tttatcatccccttaccggcaggcacatgcgta

SEQ ID NO: 361568 - DNA, 33 bp, Homo sapien
tttatcatccccttactggcaggcacatgcgta

SEQ ID NO: 361569 - DNA, 33 bp, Homo sapien
cctttacaattacttgcaagtttcacgttttca

SEQ ID NO: 361570 - DNA, 33 bp, Homo sapien
cctttacaattacttggaagtttcacgttttca

SEQ ID NO: 361571 - DNA, 33 bp, Homo sapien
aacgtggacctggaaagacctctcaggatgcaa

SEQ ID NO: 361572 - DNA, 33 bp, Homo sapien
aacgtggacctggaaatacctctcaggatgcaa

SEQ ID NO: 361573 - DNA, 33 bp, Homo sapien
aagtttaagaagtctacgtccacggcacacggg

SEQ ID NO: 361574 - DNA, 33 bp, Homo sapien
aagtttaagaagtctatgtccacggcacacggg

SEQ ID NO: 361575 - DNA, 33 bp, Homo sapien
gaggagtctgtcactacctggctctacagggtc

SEQ ID NO: 361576 - DNA, 33 bp, Homo sapien
gaggagtctgtcactatctggctctacagggtc

SEQ ID NO: 361577 - DNA, 33 bp, Homo sapien
ccttctgtgatgggcacgtttttccctaagtca

SEQ ID NO: 361578 - DNA, 33 bp, Homo sapien
ccttctgtgatgggcatgtttttccctaagtca

SEQ ID NO: 361579 - DNA, 33 bp, Homo sapien
ccgaaggccccgtcataagagaagatggagcta

SEQ ID NO: 361580 - DNA, 33 bp, Homo sapien
ccgaaggccccgtcatgagagaagatggagcta

SEQ ID NO: 361581 - DNA, 33 bp, Homo sapien
gtgacaaaggcacagcacacaaaatgcagatgc

SEQ ID NO: 361582 - DNA, 33 bp, Homo sapien
gtgacaaaggcacagcgcacaaaatgcagatgc

SEQ ID NO: 361583 - DNA, 33 bp, Homo sapien
ggccaccgtcagctataaaaatctctattttac

SEQ ID NO: 361584 - DNA, 33 bp, Homo sapien
ggccaccgtcagctatgaaaatctctattttac

SEQ ID NO: 361585 - DNA, 33 bp, Homo sapien
atttctcagcctgtagaaagaagcttagaagat

SEQ ID NO: 361586 - DNA, 33 bp, Homo sapien
atttctcagcctgtaggaagaagcttagaagat

SEQ ID NO: 361587 - DNA, 33 bp, Homo sapien
aattccctttcgtcaccgcttaggcatatgctc

SEQ ID NO: 361588 - DNA, 33 bp, Homo sapien
aattccctttcgtcactgcttaggcatatgctc

SEQ ID NO: 361589 - DNA, 33 bp, Homo sapien
tgtgttttctccaaaacagggcctgtggatcca

SEQ ID NO: 361590 - DNA, 33 bp, Homo sapien
tgtgttttctccaaaatagggcctgtggatcca

SEQ ID NO: 361591 - DNA, 33 bp, Homo sapien
caagaagactcaaaacagtccacgtgttattag

SEQ ID NO: 361592 - DNA, 33 bp, Homo sapien
caagaagactcaaaacggtccacgtgttattag

SEQ ID NO: 361593 - DNA, 33 bp, Homo sapien
tcatcgatgaggcttacgggctcgacttttaca

SEQ ID NO: 361594 - DNA, 33 bp, Homo sapien
tcatcgatgaggcttatgggctcgacttttaca

SEQ ID NO: 361595 - DNA, 33 bp, Homo sapien
gaccatccagcacatccataggaatgttccaga

SEQ ID NO: 361596 - DNA, 33 bp, Homo sapien
gaccatccagcacatctataggaatgttccaga

SEQ ID NO: 361597 - DNA, 33 bp, Homo sapien
gctgtgctatctacccaaatattaccgtacctg

SEQ ID NO: 361598 - DNA, 33 bp, Homo sapien
gctgtgctatctaccccaatattaccgtacctg

SEQ ID NO: 361599 - DNA, 33 bp, Homo sapien
aaggaggagccgcagacagtaaacgtgggcact

SEQ ID NO: 361600 - DNA, 33 bp, Homo sapien
aaggaggagccgcagagagtaaacgtgggcact

SEQ ID NO: 361601 - DNA, 33 bp, Homo sapien
ggaatgagcttaggaacgaggacttttgtgaga

SEQ ID NO: 361602 - DNA, 33 bp, Homo sapien
ggaatgagcttaggaatgaggacttttgtgaga

SEQ ID NO: 361603 - DNA, 33 bp, Homo sapien
ttggtttcatagaagacgcctttccacagacgg

SEQ ID NO: 361604 - DNA, 33 bp, Homo sapien
ttggtttcatagaagatgcctttccacagacgg

SEQ ID NO: 361605 - DNA, 33 bp, Homo sapien
caaagatttcatgatgacaatttgagaattttc

SEQ ID NO: 361606 - DNA, 33 bp, Homo sapien
caaagatttcatgatgccaatttgagaattttc

SEQ ID NO: 361607 - DNA, 33 bp, Homo sapien
tcctatctcactgcatgagagcttgagccaggc

SEQ ID NO: 361608 - DNA, 33 bp, Homo sapien
tcctatctcactgcattagagcttgagccaggc

SEQ ID NO: 361609 - DNA, 33 bp, Homo sapien
aggggaacaaaaagacagatacacgtgagaaag

SEQ ID NO: 361610 - DNA, 33 bp, Homo sapien
aggggaacaaaaagacggatacacgtgagaaag

SEQ ID NO: 361611 - DNA, 33 bp, Homo sapien
gactgtatgaaccggacggtctgcacccagacg

SEQ ID NO: 361612 - DNA, 33 bp, Homo sapien
gactgtatgaaccggatggtctgcacccagacg

SEQ ID NO: 361613 - DNA, 33 bp, Homo sapien
ttggtcctcagtgtgacgttgcatgtgggcctt

SEQ ID NO: 361614 - DNA, 33 bp, Homo sapien
ttggtcctcagtgtgatgttgcatgtgggcctt

SEQ ID NO: 361615 - DNA, 33 bp, Homo sapien
tcattttccagcttcgcatagatctgttggctt

SEQ ID NO: 361616 - DNA, 33 bp, Homo sapien
tcattttccagcttcgtatagatctgttggctt

SEQ ID NO: 361617 - DNA, 33 bp, Homo sapien
tcctgagctgatgtctcacaggcctctggtaga

SEQ ID NO: 361618 - DNA, 33 bp, Homo sapien
tcctgagctgatgtcttacaggcctctggtaga

SEQ ID NO: 361619 - DNA, 33 bp, Homo sapien
gtcaaaacgtccccgggattaagagaagagtgg

SEQ ID NO: 361620 - DNA, 33 bp, Homo sapien
gtcaaaacgtccccggtattaagagaagagtgg

SEQ ID NO: 361621 - DNA, 33 bp, Homo sapien
cctgggcgtggaagaacaggtgctcagacctac

SEQ ID NO: 361622 - DNA, 33 bp, Homo sapien
cctgggcgtggaagaagaggtgctcagacctac

SEQ ID NO: 361623 - DNA, 33 bp, Homo sapien
agttgatgaggtccaccagcagatggatcaggc

SEQ ID NO: 361624 - DNA, 33 bp, Homo sapien
agttgatgaggtccacgagcagatggatcaggc

SEQ ID NO: 361625 - DNA, 33 bp, Homo sapien
gccaccttcacaatcaacttggccgcccaccac

SEQ ID NO: 361626 - DNA, 33 bp, Homo sapien
gccaccttcacaatcagcttggccgcccaccac

SEQ ID NO: 361627 - DNA, 33 bp, Homo sapien
taaactgtctgtgtgacgcacgtaggcaccaaa

SEQ ID NO: 361628 - DNA, 33 bp, Homo sapien
taaactgtctgtgtgatgcacgtaggcaccaaa

SEQ ID NO: 361629 - DNA, 33 bp, Homo sapien
tttgtaatcattgaaaataatctgagagctatg

SEQ ID NO: 361630 - DNA, 33 bp, Homo sapien
tttgtaatcattgaaagtaatctgagagctatg

SEQ ID NO: 361631 - DNA, 33 bp, Homo sapien
ccactgcctctgggaccggctctcgacgcacct

SEQ ID NO: 361632 - DNA, 33 bp, Homo sapien
ccactgcctctgggactggctctcgacgcacct

SEQ ID NO: 361633 - DNA, 33 bp, Homo sapien
tggttgtagcagaggaccggaggttgggttcct

SEQ ID NO: 361634 - DNA, 33 bp, Homo sapien
tggttgtagcagaggatcggaggttgggttcct

SEQ ID NO: 361635 - DNA, 33 bp, Homo sapien
aagtgtggatgttagcgctgagattggggtgtg

SEQ ID NO: 361636 - DNA, 33 bp, Homo sapien
aagtgtggatgttagctctgagattggggtgtg

SEQ ID NO: 361637 - DNA, 33 bp, Homo sapien
ccaggtccatctctgaccggctcctggtcaacc

SEQ ID NO: 361638 - DNA, 33 bp, Homo sapien
ccaggtccatctctgatcggctcctggtcaacc

SEQ ID NO: 361639 - DNA, 33 bp, Homo sapien
gaagtggaatcctgtcaaggctccggggctcac

SEQ ID NO: 361640 - DNA, 33 bp, Homo sapien
gaagtggaatcctgtcgaggctccggggctcac

SEQ ID NO: 361641 - DNA, 33 bp, Homo sapien
aaagggatgggctctcactattctgccccctgg

SEQ ID NO: 361642 - DNA, 33 bp, Homo sapien
aaagggatgggctctcgctattctgccccctgg

SEQ ID NO: 361643 - DNA, 33 bp, Homo sapien
ggggtggccactatggcaggtctgcacagtcag

SEQ ID NO: 361644 - DNA, 33 bp, Homo sapien
ggggtggccactatggtaggtctgcacagtcag

SEQ ID NO: 361645 - DNA, 33 bp, Homo sapien
ccacgcccatcccgacagcaattccgttccaca

SEQ ID NO: 361646 - DNA, 33 bp, Homo sapien
ccacgcccatcccgacggcaattccgttccaca

SEQ ID NO: 361647 - DNA, 33 bp, Homo sapien
gcaacccctgcttgacacctgccggagaagaga

SEQ ID NO: 361648 - DNA, 33 bp, Homo sapien
gcaacccctgcttgacgcctgccggagaagaga

SEQ ID NO: 361649 - DNA, 33 bp, Homo sapien
agaaataaaacctcaccgatgagttgaatgaca

SEQ ID NO: 361650 - DNA, 33 bp, Homo sapien
agaaataaaacctcactgatgagttgaatgaca

SEQ ID NO: 361651 - DNA, 33 bp, Homo sapien
gatgccgccaaaggcaatgacggagtgaaagtt

SEQ ID NO: 361652 - DNA, 33 bp, Homo sapien
gatgccgccaaaggcactgacggagtgaaagtt

SEQ ID NO: 361653 - DNA, 33 bp, Homo sapien
gtcaggccctggctgcaatccctactatagctg

SEQ ID NO: 361654 - DNA, 33 bp, Homo sapien
gtcaggccctggctgcgatccctactatagctg

SEQ ID NO: 361655 - DNA, 33 bp, Homo sapien
ggaaatgtaaaggagcaaaaatagctaaaacca

SEQ ID NO: 361656 - DNA, 33 bp, Homo sapien
ggaaatgtaaaggagcgaaaatagctaaaacca

SEQ ID NO: 361657 - DNA, 33 bp, Homo sapien
tcctacaaagacaacgacgtcatctgtaaacag

SEQ ID NO: 361658 - DNA, 33 bp, Homo sapien
tcctacaaagacaacggcgtcatctgtaaacag

SEQ ID NO: 361659 - DNA, 33 bp, Homo sapien
acattggtgaaaaaggacagtcgacagatgata

SEQ ID NO: 361660 - DNA, 33 bp, Homo sapien
acattggtgaaaaagggcagtcgacagatgata

SEQ ID NO: 361661 - DNA, 33 bp, Homo sapien
cagagaagaaccggaacgcctggtctgccactt

SEQ ID NO: 361662 - DNA, 33 bp, Homo sapien
cagagaagaaccggaatgcctggtctgccactt

SEQ ID NO: 361663 - DNA, 33 bp, Homo sapien
tacaggttatattttaagctgaaaagttatgaa

SEQ ID NO: 361664 - DNA, 33 bp, Homo sapien
tacaggttatattttaggctgaaaagttatgaa

SEQ ID NO: 361665 - DNA, 33 bp, Homo sapien
acagaagcacagggccaaggagctcgtggaagg

SEQ ID NO: 361666 - DNA, 33 bp, Homo sapien
acagaagcacagggcccaggagctcgtggaagg

SEQ ID NO: 361667 - DNA, 33 bp, Homo sapien
ccttaggtgctttgtcaaaacggcctccagcac

SEQ ID NO: 361668 - DNA, 33 bp, Homo sapien
ccttaggtgctttgtcgaaacggcctccagcac

SEQ ID NO: 361669 - DNA, 33 bp, Homo sapien
agaatgggatgcggccaaggggttacaccttcc

SEQ ID NO: 361670 - DNA, 33 bp, Homo sapien
agaatgggatgcggccgaggggttacaccttcc

SEQ ID NO: 361671 - DNA, 33 bp, Homo sapien
tggccagctttgtggcacagggatattttgcag

SEQ ID NO: 361672 - DNA, 33 bp, Homo sapien
tggccagctttgtggcgcagggatattttgcag

SEQ ID NO: 361673 - DNA, 33 bp, Homo sapien
cctggaaggaaaaagacgttacactcaaagaat

SEQ ID NO: 361674 - DNA, 33 bp, Homo sapien
cctggaaggaaaaagatgttacactcaaagaat

SEQ ID NO: 361675 - DNA, 33 bp, Homo sapien
catatgttagcccacccggtgctacgtgcccca

SEQ ID NO: 361676 - DNA, 33 bp, Homo sapien
catatgttagcccaccgggtgctacgtgcccca

SEQ ID NO: 361677 - DNA, 33 bp, Homo sapien
tgggatgtactcttcgaagtcaaagaaatacat

SEQ ID NO: 361678 - DNA, 33 bp, Homo sapien
tgggatgtactcttcggagtcaaagaaatacat

SEQ ID NO: 361679 - DNA, 33 bp, Homo sapien
ggtttgttcctagtcacgcttgttttgtcttct

SEQ ID NO: 361680 - DNA, 33 bp, Homo sapien
ggtttgttcctagtcatgcttgttttgtcttct

SEQ ID NO: 361681 - DNA, 33 bp, Homo sapien
agatctaactatatgaagagatagaccatgttc

SEQ ID NO: 361682 - DNA, 33 bp, Homo sapien
agatctaactatatgacgagatagaccatgttc

SEQ ID NO: 361683 - DNA, 33 bp, Homo sapien
aatggaatggaagagacggcccagacacagccc

SEQ ID NO: 361684 - DNA, 33 bp, Homo sapien
aatggaatggaagagatggcccagacacagccc

SEQ ID NO: 361685 - DNA, 33 bp, Homo sapien
ggtggggtcaggagtcaacgagtgatgagggct

SEQ ID NO: 361686 - DNA, 33 bp, Homo sapien
ggtggggtcaggagtccacgagtgatgagggct

SEQ ID NO: 361687 - DNA, 33 bp, Homo sapien
ctgtgaccttgagttaccaagacatggtagaag

SEQ ID NO: 361688 - DNA, 33 bp, Homo sapien
ctgtgaccttgagttatcaagacatggtagaag

SEQ ID NO: 361689 - DNA, 33 bp, Homo sapien
tgggctcccgtgagaactgagagtgaggaaggc

SEQ ID NO: 361690 - DNA, 33 bp, Homo sapien
tgggctcccgtgagaattgagagtgaggaaggc

SEQ ID NO: 361691 - DNA, 33 bp, Homo sapien
aggaaggtttatccaccgaagtccaggccggcc

SEQ ID NO: 361692 - DNA, 33 bp, Homo sapien
aggaaggtttatccactgaagtccaggccggcc

SEQ ID NO: 361693 - DNA, 33 bp, Homo sapien
acaattctgctgggaccaagcacaggcctgggc

SEQ ID NO: 361694 - DNA, 33 bp, Homo sapien
acaattctgctgggacgaagcacaggcctgggc

SEQ ID NO: 361695 - DNA, 33 bp, Homo sapien
gacagtgaggctgaaacgtttgcacttcacatt

SEQ ID NO: 361696 - DNA, 33 bp, Homo sapien
gacagtgaggctgaaatgtttgcacttcacatt

SEQ ID NO: 361697 - DNA, 33 bp, Homo sapien
tggcccggggtccagacagaaacagggagaccc

SEQ ID NO: 361698 - DNA, 33 bp, Homo sapien
tggcccggggtccagagagaaacagggagaccc

SEQ ID NO: 361699 - DNA, 33 bp, Homo sapien
cgcctcccggcccaaagaggcgagttttggaaa

SEQ ID NO: 361700 - DNA, 33 bp, Homo sapien
cgcctcccggcccaaataggcgagttttggaaa

SEQ ID NO: 361701 - DNA, 33 bp, Homo sapien
gggcagaggaaggaccaaacggtggcatctccc

SEQ ID NO: 361702 - DNA, 33 bp, Homo sapien
gggcagaggaaggaccgaacggtggcatctccc

SEQ ID NO: 361703 - DNA, 33 bp, Homo sapien
ctggtcgtcacataaacaagtaaaaaaaaaatg

SEQ ID NO: 361704 - DNA, 33 bp, Homo sapien
ctggtcgtcacataaataagtaaaaaaaaaatg

SEQ ID NO: 361705 - DNA, 33 bp, Homo sapien
gcatggtgcttagaaaagacgacctgagcccca

SEQ ID NO: 361706 - DNA, 33 bp, Homo sapien
gcatggtgcttagaaaggacgacctgagcccca

SEQ ID NO: 361707 - DNA, 33 bp, Homo sapien
tggggagattccttgacaccctgtaactagcca

SEQ ID NO: 361708 - DNA, 33 bp, Homo sapien
tggggagattccttgagaccctgtaactagcca

SEQ ID NO: 361709 - DNA, 33 bp, Homo sapien
tctaaataccgtttgccatcgataggagctggg

SEQ ID NO: 361710 - DNA, 33 bp, Homo sapien
tctaaataccgtttgctatcgataggagctggg

SEQ ID NO: 361711 - DNA, 33 bp, Homo sapien
gtgctcagaattacaacaaaacctaaacaggtc

SEQ ID NO: 361712 - DNA, 33 bp, Homo sapien
gtgctcagaattacaataaaacctaaacaggtc

SEQ ID NO: 361713 - DNA, 33 bp, Homo sapien
agagaatcttgacttacgacttttgaaatccaa

SEQ ID NO: 361714 - DNA, 33 bp, Homo sapien
agagaatcttgacttaggacttttgaaatccaa

SEQ ID NO: 361715 - DNA, 33 bp, Homo sapien
ggtgctgagaggaagacgcccccgaacaagaat

SEQ ID NO: 361716 - DNA, 33 bp, Homo sapien
ggtgctgagaggaagatgcccccgaacaagaat

SEQ ID NO: 361717 - DNA, 33 bp, Homo sapien
cgatctgaaacccgcaaacatgcttcacaaagg

SEQ ID NO: 361718 - DNA, 33 bp, Homo sapien
cgatctgaaacccgcacacatgcttcacaaagg

SEQ ID NO: 361719 - DNA, 33 bp, Homo sapien
atcacactggctttaagtgaagggacaggctct

SEQ ID NO: 361720 - DNA, 33 bp, Homo sapien
atcacactggctttaattgaagggacaggctct

SEQ ID NO: 361721 - DNA, 33 bp, Homo sapien
gaagagaactgttccaaattaaaacactaaaga

SEQ ID NO: 361722 - DNA, 33 bp, Homo sapien
gaagagaactgttccagattaaaacactaaaga

SEQ ID NO: 361723 - DNA, 33 bp, Homo sapien
gtctccctataagaagaaacttggacagacact

SEQ ID NO: 361724 - DNA, 33 bp, Homo sapien
gtctccctataagaaggaacttggacagacact

SEQ ID NO: 361725 - DNA, 33 bp, Homo sapien
gctccgtagctctccggaaaggacacggcacct

SEQ ID NO: 361726 - DNA, 33 bp, Homo sapien
gctccgtagctctccgtaaaggacacggcacct

SEQ ID NO: 361727 - DNA, 33 bp, Homo sapien
catttctgtttgagaccgagattaacttggtgg

SEQ ID NO: 361728 - DNA, 33 bp, Homo sapien
catttctgtttgagactgagattaacttggtgg

SEQ ID NO: 361729 - DNA, 33 bp, Homo sapien
tggtggcaggcccaaacccaccaagatacacag

SEQ ID NO: 361730 - DNA, 33 bp, Homo sapien
tggtggcaggcccaaatccaccaagatacacag

SEQ ID NO: 361731 - DNA, 33 bp, Homo sapien
ctttgcaaaaaagcaaaattatctggctacggt

SEQ ID NO: 361732 - DNA, 33 bp, Homo sapien
ctttgcaaaaaagcaacattatctggctacggt

SEQ ID NO: 361733 - DNA, 33 bp, Homo sapien
ctggtgggagcaattccatctcttacaggaaat

SEQ ID NO: 361734 - DNA, 33 bp, Homo sapien
ctggtgggagcaattctatctcttacaggaaat

SEQ ID NO: 361735 - DNA, 33 bp, Homo sapien
cgttagagagaagtgccgacatcttgagtgatg

SEQ ID NO: 361736 - DNA, 33 bp, Homo sapien
cgttagagagaagtgctgacatcttgagtgatg

SEQ ID NO: 361737 - DNA, 33 bp, Homo sapien
gcaggaggccatcggcaagtccgatgctcagag

SEQ ID NO: 361738 - DNA, 33 bp, Homo sapien
gcaggaggccatcggcgagtccgatgctcagag

SEQ ID NO: 361739 - DNA, 33 bp, Homo sapien
cgtcaggaaagctccccgatcttaggagataca

SEQ ID NO: 361740 - DNA, 33 bp, Homo sapien
cgtcaggaaagctcccggatcttaggagataca

SEQ ID NO: 361741 - DNA, 33 bp, Homo sapien
caattcaaaacctgacaataatcataatgagta

SEQ ID NO: 361742 - DNA, 33 bp, Homo sapien
caattcaaaacctgactataatcataatgagta

SEQ ID NO: 361743 - DNA, 33 bp, Homo sapien
gccctgatgtttaccaatctgcttctgtaacat

SEQ ID NO: 361744 - DNA, 33 bp, Homo sapien
gccctgatgtttaccactctgcttctgtaacat

SEQ ID NO: 361745 - DNA, 33 bp, Homo sapien
ggagggggcaatccaggaagacacctaaagagg

SEQ ID NO: 361746 - DNA, 33 bp, Homo sapien
ggagggggcaatccagtaagacacctaaagagg

SEQ ID NO: 361747 - DNA, 33 bp, Homo sapien
tgtgatttgcttgtcaagttccacgcactcctg

SEQ ID NO: 361748 - DNA, 33 bp, Homo sapien
tgtgatttgcttgtcaggttccacgcactcctg

SEQ ID NO: 361749 - DNA, 33 bp, Homo sapien
gtctggcagacgtggccgagaaagacccggacg

SEQ ID NO: 361750 - DNA, 33 bp, Homo sapien
gtctggcagacgtggctgagaaagacccggacg

SEQ ID NO: 361751 - DNA, 33 bp, Homo sapien
ctttgccacagctgacaaaaaaattccagaaga

SEQ ID NO: 361752 - DNA, 33 bp, Homo sapien
ctttgccacagctgacgaaaaaattccagaaga

SEQ ID NO: 361753 - DNA, 33 bp, Homo sapien
gtaaaatcttagctaccggttccaatatctggg

SEQ ID NO: 361754 - DNA, 33 bp, Homo sapien
gtaaaatcttagctactggttccaatatctggg

SEQ ID NO: 361755 - DNA, 33 bp, Homo sapien
taactctagtgtggtaagtatgtttatggtaat

SEQ ID NO: 361756 - DNA, 33 bp, Homo sapien
taactctagtgtggtaggtatgtttatggtaat

SEQ ID NO: 361757 - DNA, 33 bp, Homo sapien
ccccgaagccctgaacacctactgctatcagag

SEQ ID NO: 361758 - DNA, 33 bp, Homo sapien
ccccgaagccctgaacgcctactgctatcagag

SEQ ID NO: 361759 - DNA, 33 bp, Homo sapien
ggggcaccgctttgtacgaccttgttcaaagga

SEQ ID NO: 361760 - DNA, 33 bp, Homo sapien
ggggcaccgctttgtatgaccttgttcaaagga

SEQ ID NO: 361761 - DNA, 33 bp, Homo sapien
ttggaaaaggttctccaataaggaaaacagccc

SEQ ID NO: 361762 - DNA, 33 bp, Homo sapien
ttggaaaaggttctccgataaggaaaacagccc

SEQ ID NO: 361763 - DNA, 33 bp, Homo sapien
gttttcaggagaggccaagatgctaagtttatt

SEQ ID NO: 361764 - DNA, 33 bp, Homo sapien
gttttcaggagaggccgagatgctaagtttatt

SEQ ID NO: 361765 - DNA, 33 bp, Homo sapien
actcagacacaagtgcaccgagcctgcccgggg

SEQ ID NO: 361766 - DNA, 33 bp, Homo sapien
actcagacacaagtgcgccgagcctgcccgggg

SEQ ID NO: 361767 - DNA, 33 bp, Homo sapien
aagtttaaaaatacacaggtgagttctggcttt

SEQ ID NO: 361768 - DNA, 33 bp, Homo sapien
aagtttaaaaatacacgggtgagttctggcttt

SEQ ID NO: 361769 - DNA, 33 bp, Homo sapien
ctcttgcgttcctccaatcacagggccgcgtgt

SEQ ID NO: 361770 - DNA, 33 bp, Homo sapien
ctcttgcgttcctccagtcacagggccgcgtgt

SEQ ID NO: 361771 - DNA, 33 bp, Homo sapien
gcctgacctgttctagacctcttagctgggaag

SEQ ID NO: 361772 - DNA, 33 bp, Homo sapien
gcctgacctgttctaggcctcttagctgggaag

SEQ ID NO: 361773 - DNA, 33 bp, Homo sapien
tcctctcaacgctctacacccagcaacctggga

SEQ ID NO: 361774 - DNA, 33 bp, Homo sapien
tcctctcaacgctctagacccagcaacctggga

SEQ ID NO: 361775 - DNA, 33 bp, Homo sapien
tgagcctctgcatgcccaacttcgaaaagggta

SEQ ID NO: 361776 - DNA, 33 bp, Homo sapien
tgagcctctgcatgcctaacttcgaaaagggta

SEQ ID NO: 361777 - DNA, 33 bp, Homo sapien
ctcattcgttcttacaatcagttgggtgggggc

SEQ ID NO: 361778 - DNA, 33 bp, Homo sapien
ctcattcgttcttacagtcagttgggtgggggc

SEQ ID NO: 361779 - DNA, 33 bp, Homo sapien
atggccaatctctaccacgtgcaggaatcggaa

SEQ ID NO: 361780 - DNA, 33 bp, Homo sapien
atggccaatctctaccgcgtgcaggaatcggaa

SEQ ID NO: 361781 - DNA, 33 bp, Homo sapien
atataacccaaaattccctggacatgacatcgg

SEQ ID NO: 361782 - DNA, 33 bp, Homo sapien
atataacccaaaattctctggacatgacatcgg

SEQ ID NO: 361783 - DNA, 33 bp, Homo sapien
gcagagggcacattccacactggtagaaatgcc

SEQ ID NO: 361784 - DNA, 33 bp, Homo sapien
gcagagggcacattccgcactggtagaaatgcc

SEQ ID NO: 361785 - DNA, 33 bp, Homo sapien
ctcccacacacattcccgaagcctccaggtgct

SEQ ID NO: 361786 - DNA, 33 bp, Homo sapien
ctcccacacacattccggaagcctccaggtgct

SEQ ID NO: 361787 - DNA, 33 bp, Homo sapien
accaacaacctgacatcagcctgtgcccggtcc

SEQ ID NO: 361788 - DNA, 33 bp, Homo sapien
accaacaacctgacattagcctgtgcccggtcc

SEQ ID NO: 361789 - DNA, 33 bp, Homo sapien
taacaggtatgtcgcgaatgcataaaatatagg

SEQ ID NO: 361790 - DNA, 33 bp, Homo sapien
taacaggtatgtcgcgtatgcataaaatatagg

SEQ ID NO: 361791 - DNA, 33 bp, Homo sapien
ggaaccccacaaaagcacggtggttgtttacgc

SEQ ID NO: 361792 - DNA, 33 bp, Homo sapien
ggaaccccacaaaagcgcggtggttgtttacgc

SEQ ID NO: 361793 - DNA, 33 bp, Homo sapien
gactctaacagcttgacgaagacaaaaataaaa

SEQ ID NO: 361794 - DNA, 33 bp, Homo sapien
gactctaacagcttgatgaagacaaaaataaaa

SEQ ID NO: 361795 - DNA, 33 bp, Homo sapien
tgaagaaaacgacatccatgaggccaggcgcag

SEQ ID NO: 361796 - DNA, 33 bp, Homo sapien
tgaagaaaacgacatctatgaggccaggcgcag

SEQ ID NO: 361797 - DNA, 33 bp, Homo sapien
tttaaataaaacaaacaatatgactgtacatgg

SEQ ID NO: 361798 - DNA, 33 bp, Homo sapien
tttaaataaaacaaactatatgactgtacatgg

SEQ ID NO: 361799 - DNA, 33 bp, Homo sapien
tagctggggtctcttaccaagatagtaagaaaa

SEQ ID NO: 361800 - DNA, 33 bp, Homo sapien
tagctggggtctcttatcaagatagtaagaaaa

SEQ ID NO: 361801 - DNA, 33 bp, Homo sapien
tcctgcctccgcctatcagaactacctctccag

SEQ ID NO: 361802 - DNA, 33 bp, Homo sapien
tcctgcctccgcctatgagaactacctctccag

SEQ ID NO: 361803 - DNA, 33 bp, Homo sapien
cccccgctgggcagcacatctgtgttttggcaa

SEQ ID NO: 361804 - DNA, 33 bp, Homo sapien
cccccgctgggcagcatatctgtgttttggcaa

SEQ ID NO: 361805 - DNA, 33 bp, Homo sapien
tgattgtcctttttctgaaggaagctagtgttg

SEQ ID NO: 361806 - DNA, 33 bp, Homo sapien
tgattgtcctttttcttaaggaagctagtgttg

SEQ ID NO: 361807 - DNA, 33 bp, Homo sapien
tagctgcacctttcccagagtgtcgtcgtcaca

SEQ ID NO: 361808 - DNA, 33 bp, Homo sapien
tagctgcacctttcccggagtgtcgtcgtcaca

SEQ ID NO: 361809 - DNA, 33 bp, Homo sapien
gtttgtttgtaaatacaaatgtctgctggtcaa

SEQ ID NO: 361810 - DNA, 33 bp, Homo sapien
gtttgtttgtaaatacgaatgtctgctggtcaa

SEQ ID NO: 361811 - DNA, 33 bp, Homo sapien
acacatccatcccataaaacggctgacaagaca

SEQ ID NO: 361812 - DNA, 33 bp, Homo sapien
acacatccatcccatagaacggctgacaagaca

SEQ ID NO: 361813 - DNA, 33 bp, Homo sapien
accagacaatatgggaaaggatcagtataaaga

SEQ ID NO: 361814 - DNA, 33 bp, Homo sapien
accagacaatatgggagaggatcagtataaaga

SEQ ID NO: 361815 - DNA, 33 bp, Homo sapien
ctggataattcttgacacttatggaatcataca

SEQ ID NO: 361816 - DNA, 33 bp, Homo sapien
ctggataattcttgacgcttatggaatcataca

SEQ ID NO: 361817 - DNA, 33 bp, Homo sapien
aagcagttgatcactacgggagaagggctcttt

SEQ ID NO: 361818 - DNA, 33 bp, Homo sapien
aagcagttgatcactatgggagaagggctcttt

SEQ ID NO: 361819 - DNA, 33 bp, Homo sapien
gtctgcgcagctacatcactctggcccctgggc

SEQ ID NO: 361820 - DNA, 33 bp, Homo sapien
gtctgcgcagctacattactctggcccctgggc

SEQ ID NO: 361821 - DNA, 33 bp, Homo sapien
gtggattaaagatctaagtacacaattacgagg

SEQ ID NO: 361822 - DNA, 33 bp, Homo sapien
gtggattaaagatctaggtacacaattacgagg

SEQ ID NO: 361823 - DNA, 33 bp, Homo sapien
tgctttgcgcctgttcaagcctgagtcataggt

SEQ ID NO: 361824 - DNA, 33 bp, Homo sapien
tgctttgcgcctgttcgagcctgagtcataggt

SEQ ID NO: 361825 - DNA, 33 bp, Homo sapien
gaagccttttagaaccgcatgtgagcagctccc

SEQ ID NO: 361826 - DNA, 33 bp, Homo sapien
gaagccttttagaacctcatgtgagcagctccc

SEQ ID NO: 361827 - DNA, 33 bp, Homo sapien
gctcagtacaggaagacgtcacagactgcaggg

SEQ ID NO: 361828 - DNA, 33 bp, Homo sapien
gctcagtacaggaagatgtcacagactgcaggg

SEQ ID NO: 361829 - DNA, 33 bp, Homo sapien
tggtatgttcctgtaaactattctaactcatgt

SEQ ID NO: 361830 - DNA, 33 bp, Homo sapien
tggtatgttcctgtaagctattctaactcatgt

SEQ ID NO: 361831 - DNA, 33 bp, Homo sapien
tcacaatgctgcagccacctctcgcgtgttctg

SEQ ID NO: 361832 - DNA, 33 bp, Homo sapien
tcacaatgctgcagccgcctctcgcgtgttctg

SEQ ID NO: 361833 - DNA, 33 bp, Homo sapien
cagaagtgcttagggacccatttagtaacacgt

SEQ ID NO: 361834 - DNA, 33 bp, Homo sapien
cagaagtgcttagggatccatttagtaacacgt

SEQ ID NO: 361835 - DNA, 33 bp, Homo sapien
tgggaacaggctgggcactttttacacacgcag

SEQ ID NO: 361836 - DNA, 33 bp, Homo sapien
tgggaacaggctgggcgctttttacacacgcag

SEQ ID NO: 361837 - DNA, 33 bp, Homo sapien
agcagaacccaggacacgccatgaggggccgct

SEQ ID NO: 361838 - DNA, 33 bp, Homo sapien
agcagaacccaggacatgccatgaggggccgct

SEQ ID NO: 361839 - DNA, 33 bp, Homo sapien
gggaggtgagaataaggagctgatgcaacagca

SEQ ID NO: 361840 - DNA, 33 bp, Homo sapien
gggaggtgagaataagtagctgatgcaacagca

SEQ ID NO: 361841 - DNA, 33 bp, Homo sapien
tgtttaaaattgctaaagtaaggcttgcttcag

SEQ ID NO: 361842 - DNA, 33 bp, Homo sapien
tgtttaaaattgctaacgtaaggcttgcttcag

SEQ ID NO: 361843 - DNA, 33 bp, Homo sapien
taaaacatacgctcacactgctggtctgtaaca

SEQ ID NO: 361844 - DNA, 33 bp, Homo sapien
taaaacatacgctcacgctgctggtctgtaaca

SEQ ID NO: 361845 - DNA, 33 bp, Homo sapien
catgaagctatgagtacagtatgtagtgtatca

SEQ ID NO: 361846 - DNA, 33 bp, Homo sapien
catgaagctatgagtatagtatgtagtgtatca

SEQ ID NO: 361847 - DNA, 33 bp, Homo sapien
gtcaagccagtactgccaaagaaatggagtaat

SEQ ID NO: 361848 - DNA, 33 bp, Homo sapien
gtcaagccagtactgctaaagaaatggagtaat

SEQ ID NO: 361849 - DNA, 33 bp, Homo sapien
ggaactgatttcaaaaatgtcttcaacccatca

SEQ ID NO: 361850 - DNA, 33 bp, Homo sapien
ggaactgatttcaaaagtgtcttcaacccatca

SEQ ID NO: 361851 - DNA, 33 bp, Homo sapien
aatattaaactagcaacaaccagtaatatatag

SEQ ID NO: 361852 - DNA, 33 bp, Homo sapien
aatattaaactagcaagaaccagtaatatatag

SEQ ID NO: 361853 - DNA, 33 bp, Homo sapien
ctcatgtgactgaatgaactcaggctctctggg

SEQ ID NO: 361854 - DNA, 33 bp, Homo sapien
ctcatgtgactgaatggactcaggctctctggg

SEQ ID NO: 361855 - DNA, 33 bp, Homo sapien
tgcccagagaaagggacctagaaaggacagcca

SEQ ID NO: 361856 - DNA, 33 bp, Homo sapien
tgcccagagaaagggatctagaaaggacagcca

SEQ ID NO: 361857 - DNA, 33 bp, Homo sapien
ggagaaggaataagcccgctatatgatcatctt

SEQ ID NO: 361858 - DNA, 33 bp, Homo sapien
ggagaaggaataagcctgctatatgatcatctt

SEQ ID NO: 361859 - DNA, 33 bp, Homo sapien
tgaattgcttgttatagtaaatggtgactgaga

SEQ ID NO: 361860 - DNA, 33 bp, Homo sapien
tgaattgcttgttatattaaatggtgactgaga

SEQ ID NO: 361861 - DNA, 33 bp, Homo sapien
ctgaaatttggtaaaaagagatatagacttcct

SEQ ID NO: 361862 - DNA, 33 bp, Homo sapien
ctgaaatttggtaaaaggagatatagacttcct

SEQ ID NO: 361863 - DNA, 33 bp, Homo sapien
ctttattttcaatcaccagatggagcataataa

SEQ ID NO: 361864 - DNA, 33 bp, Homo sapien
ctttattttcaatcactagatggagcataataa

SEQ ID NO: 361865 - DNA, 33 bp, Homo sapien
taagcaaatcaccacagtattgaaacctaccag

SEQ ID NO: 361866 - DNA, 33 bp, Homo sapien
taagcaaatcaccacattattgaaacctaccag

SEQ ID NO: 361867 - DNA, 33 bp, Homo sapien
ctggtgcccgctaccacgtgaggtttcgccatg

SEQ ID NO: 361868 - DNA, 33 bp, Homo sapien
ctggtgcccgctaccatgtgaggtttcgccatg

SEQ ID NO: 361869 - DNA, 33 bp, Homo sapien
caaaaaaaaaatgtcccattgaatcatcttgca

SEQ ID NO: 361870 - DNA, 33 bp, Homo sapien
caaaaaaaaaatgtcctattgaatcatcttgca

SEQ ID NO: 361871 - DNA, 33 bp, Homo sapien
gtggtttgtccctcaacatcatcactctaaaag

SEQ ID NO: 361872 - DNA, 33 bp, Homo sapien
gtggtttgtccctcaatatcatcactctaaaag

SEQ ID NO: 361873 - DNA, 33 bp, Homo sapien
atacaagatgcctcgacgttcacaggctcacag

SEQ ID NO: 361874 - DNA, 33 bp, Homo sapien
atacaagatgcctcgatgttcacaggctcacag

SEQ ID NO: 361875 - DNA, 33 bp, Homo sapien
tacaaaaactggtacactggataatattgacaa

SEQ ID NO: 361876 - DNA, 33 bp, Homo sapien
tacaaaaactggtacattggataatattgacaa

SEQ ID NO: 361877 - DNA, 33 bp, Homo sapien
gaatgaaaaacttgacacagcttaattcccaaa

SEQ ID NO: 361878 - DNA, 33 bp, Homo sapien
gaatgaaaaacttgacgcagcttaattcccaaa

SEQ ID NO: 361879 - DNA, 33 bp, Homo sapien
agaccaggccaaagaacgaatgaaaaacttgac

SEQ ID NO: 361880 - DNA, 33 bp, Homo sapien
agaccaggccaaagaatgaatgaaaaacttgac

SEQ ID NO: 361881 - DNA, 33 bp, Homo sapien
gttttagatagtgacactgcattgtgagccaca

SEQ ID NO: 361882 - DNA, 33 bp, Homo sapien
gttttagatagtgacattgcattgtgagccaca

SEQ ID NO: 361883 - DNA, 33 bp, Homo sapien
ctaattatgccagtaactgatctattagtattt

SEQ ID NO: 361884 - DNA, 33 bp, Homo sapien
ctaattatgccagtaattgatctattagtattt

SEQ ID NO: 361885 - DNA, 33 bp, Homo sapien
caaagtaattttttcaagattagcaccatgttc

SEQ ID NO: 361886 - DNA, 33 bp, Homo sapien
caaagtaattttttcaggattagcaccatgttc

SEQ ID NO: 361887 - DNA, 33 bp, Homo sapien
agagtcatcctatggaacatcatggtttaaggg

SEQ ID NO: 361888 - DNA, 33 bp, Homo sapien
agagtcatcctatggagcatcatggtttaaggg

SEQ ID NO: 361889 - DNA, 33 bp, Homo sapien
aattctggaagttctcagaatggccttgttttc

SEQ ID NO: 361890 - DNA, 33 bp, Homo sapien
aattctggaagttctcggaatggccttgttttc

SEQ ID NO: 361891 - DNA, 33 bp, Homo sapien
tcaaggagaaacacgacgtgcacctgataccaa

SEQ ID NO: 361892 - DNA, 33 bp, Homo sapien
tcaaggagaaacacgatgtgcacctgataccaa

SEQ ID NO: 361893 - DNA, 33 bp, Homo sapien
ctggtctagcttgaaacggtattgttcccaacg

SEQ ID NO: 361894 - DNA, 33 bp, Homo sapien
ctggtctagcttgaaatggtattgttcccaacg

SEQ ID NO: 361895 - DNA, 33 bp, Homo sapien
tgtgaggagcatggagaagaagttcctgaaatt

SEQ ID NO: 361896 - DNA, 33 bp, Homo sapien
tgtgaggagcatggaggagaagttcctgaaatt

SEQ ID NO: 361897 - DNA, 33 bp, Homo sapien
ctgggggacagaaggaaaccaagtaactcttgg

SEQ ID NO: 361898 - DNA, 33 bp, Homo sapien
ctgggggacagaaggagaccaagtaactcttgg

SEQ ID NO: 361899 - DNA, 33 bp, Homo sapien
aagccacagactcaaacgcctcatcggtttgga

SEQ ID NO: 361900 - DNA, 33 bp, Homo sapien
aagccacagactcaaatgcctcatcggtttgga

SEQ ID NO: 361901 - DNA, 33 bp, Homo sapien
ggtcccagatgatacagatcttgtcacggccgg

SEQ ID NO: 361902 - DNA, 33 bp, Homo sapien
ggtcccagatgatacatatcttgtcacggccgg

SEQ ID NO: 361903 - DNA, 33 bp, Homo sapien
gggagcgagcctcgtagagcaacaggttgtggt

SEQ ID NO: 361904 - DNA, 33 bp, Homo sapien
gggagcgagcctcgtatagcaacaggttgtggt

SEQ ID NO: 361905 - DNA, 33 bp, Homo sapien
gaggctccagcccaaacatgtggaacagaacag

SEQ ID NO: 361906 - DNA, 33 bp, Homo sapien
gaggctccagcccaaagatgtggaacagaacag

SEQ ID NO: 361907 - DNA, 33 bp, Homo sapien
gtatttttggggggcacagatggaggtctcaac

SEQ ID NO: 361908 - DNA, 33 bp, Homo sapien
gtatttttggggggcatagatggaggtctcaac

SEQ ID NO: 361909 - DNA, 33 bp, Homo sapien
ggtggtcagccagagcccatgggacagctagcc

SEQ ID NO: 361910 - DNA, 33 bp, Homo sapien
ggtggtcagccagagctcatgggacagctagcc

SEQ ID NO: 361911 - DNA, 33 bp, Homo sapien
cttcctgtcaggggaactaggggtagaagccat

SEQ ID NO: 361912 - DNA, 33 bp, Homo sapien
cttcctgtcaggggaagtaggggtagaagccat

SEQ ID NO: 361913 - DNA, 33 bp, Homo sapien
agctcagtgtgacccacgttagagtctggactc

SEQ ID NO: 361914 - DNA, 33 bp, Homo sapien
agctcagtgtgacccatgttagagtctggactc

SEQ ID NO: 361915 - DNA, 33 bp, Homo sapien
tgcctatgggaatccaactctggccaattctgc

SEQ ID NO: 361916 - DNA, 33 bp, Homo sapien
tgcctatgggaatccagctctggccaattctgc

SEQ ID NO: 361917 - DNA, 33 bp, Homo sapien
tctaccagcaacctgcactcccaaaatgaccac

SEQ ID NO: 361918 - DNA, 33 bp, Homo sapien
tctaccagcaacctgcgctcccaaaatgaccac

SEQ ID NO: 361919 - DNA, 33 bp, Homo sapien
aacgtgctggccgtacactaccaaagataggtg

SEQ ID NO: 361920 - DNA, 33 bp, Homo sapien
aacgtgctggccgtacgctaccaaagataggtg

SEQ ID NO: 361921 - DNA, 33 bp, Homo sapien
gatcaggtgacctcagaccctgctttgcccaga

SEQ ID NO: 361922 - DNA, 33 bp, Homo sapien
gatcaggtgacctcaggccctgctttgcccaga

SEQ ID NO: 361923 - DNA, 33 bp, Homo sapien
gtatttgggtgtactacagtttttgaaacaatt

SEQ ID NO: 361924 - DNA, 33 bp, Homo sapien
gtatttgggtgtactatagtttttgaaacaatt

SEQ ID NO: 361925 - DNA, 33 bp, Homo sapien
agggaaagaagggtcacgccaacgcccagctac

SEQ ID NO: 361926 - DNA, 33 bp, Homo sapien
agggaaagaagggtcatgccaacgcccagctac

SEQ ID NO: 361927 - DNA, 33 bp, Homo sapien
tctggcatcccagggaaatcctcaaggcctctg

SEQ ID NO: 361928 - DNA, 33 bp, Homo sapien
tctggcatcccagggacatcctcaaggcctctg

SEQ ID NO: 361929 - DNA, 33 bp, Homo sapien
gtccctttcctacgtgaagctacctgggtcaca

SEQ ID NO: 361930 - DNA, 33 bp, Homo sapien
gtccctttcctacgtggagctacctgggtcaca

SEQ ID NO: 361931 - DNA, 33 bp, Homo sapien
ccactgtcctcgctccacactgctctctccagc

SEQ ID NO: 361932 - DNA, 33 bp, Homo sapien
ccactgtcctcgctccgcactgctctctccagc

SEQ ID NO: 361933 - DNA, 33 bp, Homo sapien
tgctggagcttgtgtcccgtgtagatggcaagt

SEQ ID NO: 361934 - DNA, 33 bp, Homo sapien
tgctggagcttgtgtctcgtgtagatggcaagt

SEQ ID NO: 361935 - DNA, 33 bp, Homo sapien
aatctcattgaaattcgaaccgaagacacatga

SEQ ID NO: 361936 - DNA, 33 bp, Homo sapien
aatctcattgaaattctaaccgaagacacatga

SEQ ID NO: 361937 - DNA, 33 bp, Homo sapien
ctgggcagcctcaaaacgagcccctagccaggt

SEQ ID NO: 361938 - DNA, 33 bp, Homo sapien
ctgggcagcctcaaaatgagcccctagccaggt

SEQ ID NO: 361939 - DNA, 33 bp, Homo sapien
aagtgacaatcacatcactcttctcatttgctg

SEQ ID NO: 361940 - DNA, 33 bp, Homo sapien
aagtgacaatcacatctctcttctcatttgctg

SEQ ID NO: 361941 - DNA, 33 bp, Homo sapien
ctgagtatttgctacaaggaattaaagcccggg

SEQ ID NO: 361942 - DNA, 33 bp, Homo sapien
ctgagtatttgctacagggaattaaagcccggg

SEQ ID NO: 361943 - DNA, 33 bp, Homo sapien
tttaccatttgataaacgctattaggatgttct

SEQ ID NO: 361944 - DNA, 33 bp, Homo sapien
tttaccatttgataaatgctattaggatgttct

SEQ ID NO: 361945 - DNA, 33 bp, Homo sapien
gcacagctctctccaaaccttagaaatcaccca

SEQ ID NO: 361946 - DNA, 33 bp, Homo sapien
gcacagctctctccaagccttagaaatcaccca

SEQ ID NO: 361947 - DNA, 33 bp, Homo sapien
aaaaatcagaacaaacaattcctgctttcacag

SEQ ID NO: 361948 - DNA, 33 bp, Homo sapien
aaaaatcagaacaaacgattcctgctttcacag

SEQ ID NO: 361949 - DNA, 33 bp, Homo sapien
caaagacactgaagaacagcctaaaactacaga

SEQ ID NO: 361950 - DNA, 33 bp, Homo sapien
caaagacactgaagaatagcctaaaactacaga

SEQ ID NO: 361951 - DNA, 33 bp, Homo sapien
catatctcctttggaaataagatgacaaagctg

SEQ ID NO: 361952 - DNA, 33 bp, Homo sapien
catatctcctttggaagtaagatgacaaagctg

SEQ ID NO: 361953 - DNA, 33 bp, Homo sapien
tagtcagcattaagaactgaattgtaggacact

SEQ ID NO: 361954 - DNA, 33 bp, Homo sapien
tagtcagcattaagaagtgaattgtaggacact

SEQ ID NO: 361955 - DNA, 33 bp, Homo sapien
catggaagttctgcaccgcttttcacacacctt

SEQ ID NO: 361956 - DNA, 33 bp, Homo sapien
catggaagttctgcactgcttttcacacacctt

SEQ ID NO: 361957 - DNA, 33 bp, Homo sapien
ccatcataatgttctacaatgaaggcttctatt

SEQ ID NO: 361958 - DNA, 33 bp, Homo sapien
ccatcataatgttctataatgaaggcttctatt

SEQ ID NO: 361959 - DNA, 33 bp, Homo sapien
ctcaaaaaatgaaaaccgagctacaggtttaat

SEQ ID NO: 361960 - DNA, 33 bp, Homo sapien
ctcaaaaaatgaaaactgagctacaggtttaat

SEQ ID NO: 361961 - DNA, 33 bp, Homo sapien
tggaaaaagagctagacaggaaagctaatccaa

SEQ ID NO: 361962 - DNA, 33 bp, Homo sapien
tggaaaaagagctagataggaaagctaatccaa

SEQ ID NO: 361963 - DNA, 33 bp, Homo sapien
ccaagggcggtggccagggggtgactacagtac

SEQ ID NO: 361964 - DNA, 33 bp, Homo sapien
ccaagggcggtggccatggggtgactacagtac

SEQ ID NO: 361965 - DNA, 33 bp, Homo sapien
ggtctggaagttgggaatattccctgtcccgga

SEQ ID NO: 361966 - DNA, 33 bp, Homo sapien
ggtctggaagttgggactattccctgtcccgga

SEQ ID NO: 361967 - DNA, 33 bp, Homo sapien
gggcaagagacagagtaaacaggtgatcacagc

SEQ ID NO: 361968 - DNA, 33 bp, Homo sapien
gggcaagagacagagtgaacaggtgatcacagc

SEQ ID NO: 361969 - DNA, 33 bp, Homo sapien
ccccacaatcctggaaactctagacaaccccta

SEQ ID NO: 361970 - DNA, 33 bp, Homo sapien
ccccacaatcctggaacctctagacaaccccta

SEQ ID NO: 361971 - DNA, 33 bp, Homo sapien
tagtgtttcaggagagaagagccctccaggatg

SEQ ID NO: 361972 - DNA, 33 bp, Homo sapien
tagtgtttcaggagagtagagccctccaggatg

SEQ ID NO: 361973 - DNA, 33 bp, Homo sapien
ctttacttgatgttcaatcactctactcaccat

SEQ ID NO: 361974 - DNA, 33 bp, Homo sapien
ctttacttgatgttcagtcactctactcaccat

SEQ ID NO: 361975 - DNA, 33 bp, Homo sapien
attcaggcccaagagcacatctgaagacagctc

SEQ ID NO: 361976 - DNA, 33 bp, Homo sapien
attcaggcccaagagcgcatctgaagacagctc

SEQ ID NO: 361977 - DNA, 33 bp, Homo sapien
cagacagaaagcagcaaggctgttaggcagact

SEQ ID NO: 361978 - DNA, 33 bp, Homo sapien
cagacagaaagcagcagggctgttaggcagact

SEQ ID NO: 361979 - DNA, 33 bp, Homo sapien
acaacaatcaaattgacgacattttcactttcc

SEQ ID NO: 361980 - DNA, 33 bp, Homo sapien
acaacaatcaaattgatgacattttcactttcc

SEQ ID NO: 361981 - DNA, 33 bp, Homo sapien
agggccaagacctgtcaagaagagctgcccaag

SEQ ID NO: 361982 - DNA, 33 bp, Homo sapien
agggccaagacctgtcgagaagagctgcccaag

SEQ ID NO: 361983 - DNA, 33 bp, Homo sapien
cttctcaaagagtaacaaggcatgggttgtgtg

SEQ ID NO: 361984 - DNA, 33 bp, Homo sapien
cttctcaaagagtaacgaggcatgggttgtgtg

SEQ ID NO: 361985 - DNA, 33 bp, Homo sapien
tcccatggacgatgtaaagaaactggtatccat

SEQ ID NO: 361986 - DNA, 33 bp, Homo sapien
tcccatggacgatgtagagaaactggtatccat

SEQ ID NO: 361987 - DNA, 33 bp, Homo sapien
caagttcccccttacacggaagcaagctaaaac

SEQ ID NO: 361988 - DNA, 33 bp, Homo sapien
caagttcccccttacatggaagcaagctaaaac

SEQ ID NO: 361989 - DNA, 33 bp, Homo sapien
aaaggaatgtaaggaaatatcaagagttgagca

SEQ ID NO: 361990 - DNA, 33 bp, Homo sapien
aaaggaatgtaaggaagtatcaagagttgagca

SEQ ID NO: 361991 - DNA, 33 bp, Homo sapien
aaaacacctgtaggaacagcaatacgtggctct

SEQ ID NO: 361992 - DNA, 33 bp, Homo sapien
aaaacacctgtaggaagagcaatacgtggctct

SEQ ID NO: 361993 - DNA, 33 bp, Homo sapien
tatactccgaggctcacggagacaaaggcagca

SEQ ID NO: 361994 - DNA, 33 bp, Homo sapien
tatactccgaggctcatggagacaaaggcagca

SEQ ID NO: 361995 - DNA, 33 bp, Homo sapien
aggctgctcctttcaaatctcttcctaactgga

SEQ ID NO: 361996 - DNA, 33 bp, Homo sapien
aggctgctcctttcaagtctcttcctaactgga

SEQ ID NO: 361997 - DNA, 33 bp, Homo sapien
ctcgacatgacgacacaagagcgtccacgtctg

SEQ ID NO: 361998 - DNA, 33 bp, Homo sapien
ctcgacatgacgacacgagagcgtccacgtctg

SEQ ID NO: 361999 - DNA, 33 bp, Homo sapien
ggatgctaacttgaggcatcaggactttcaaaa

SEQ ID NO: 362000 - DNA, 33 bp, Homo sapien
ggatgctaacttgaggtatcaggactttcaaaa

SEQ ID NO: 362001 - DNA, 33 bp, Homo sapien
gcctagcctgaacttacggaacggaaaggtgga

SEQ ID NO: 362002 - DNA, 33 bp, Homo sapien
gcctagcctgaacttatggaacggaaaggtgga

SEQ ID NO: 362003 - DNA, 33 bp, Homo sapien
ttactgaacctgaaaactggcaaaatccaaatc

SEQ ID NO: 362004 - DNA, 33 bp, Homo sapien
ttactgaacctgaaaagtggcaaaatccaaatc

SEQ ID NO: 362005 - DNA, 33 bp, Homo sapien
gggtttcggtgatacacagcatagagcctggta

SEQ ID NO: 362006 - DNA, 33 bp, Homo sapien
gggtttcggtgatacatagcatagagcctggta

SEQ ID NO: 362007 - DNA, 33 bp, Homo sapien
tgaggtctgcacctgacgtctgaggaaagaaga

SEQ ID NO: 362008 - DNA, 33 bp, Homo sapien
tgaggtctgcacctgatgtctgaggaaagaaga

SEQ ID NO: 362009 - DNA, 33 bp, Homo sapien
gcctcgcttgggcatccgacggcctttatctct

SEQ ID NO: 362010 - DNA, 33 bp, Homo sapien
gcctcgcttgggcatctgacggcctttatctct

SEQ ID NO: 362011 - DNA, 33 bp, Homo sapien
tgcagcctacataaacaaagctgagaacagtga

SEQ ID NO: 362012 - DNA, 33 bp, Homo sapien
tgcagcctacataaacgaagctgagaacagtga

SEQ ID NO: 362013 - DNA, 33 bp, Homo sapien
cactgattctgcagaacctttatttattggtgg

SEQ ID NO: 362014 - DNA, 33 bp, Homo sapien
cactgattctgcagaagctttatttattggtgg

SEQ ID NO: 362015 - DNA, 33 bp, Homo sapien
catcaagtggtggtgccgatagataccggtctc

SEQ ID NO: 362016 - DNA, 33 bp, Homo sapien
catcaagtggtggtgcggatagataccggtctc

SEQ ID NO: 362017 - DNA, 33 bp, Homo sapien
tgttgattgagttaacaaggacaaggagagtgt

SEQ ID NO: 362018 - DNA, 33 bp, Homo sapien
tgttgattgagttaacgaggacaaggagagtgt

SEQ ID NO: 362019 - DNA, 33 bp, Homo sapien
gaaatggagttgccaaattgaattacatagttg

SEQ ID NO: 362020 - DNA, 33 bp, Homo sapien
gaaatggagttgccaagttgaattacatagttg

SEQ ID NO: 362021 - DNA, 33 bp, Homo sapien
gcctgaatgctaacaactgaaagcgtttcaaaa

SEQ ID NO: 362022 - DNA, 33 bp, Homo sapien
gcctgaatgctaacaattgaaagcgtttcaaaa

SEQ ID NO: 362023 - DNA, 33 bp, Homo sapien
tgtgcattgataatcactaattccaaaaatgtt

SEQ ID NO: 362024 - DNA, 33 bp, Homo sapien
tgtgcattgataatcattaattccaaaaatgtt

SEQ ID NO: 362025 - DNA, 33 bp, Homo sapien
gtagtatcaaggaagaatatccacaattatctg

SEQ ID NO: 362026 - DNA, 33 bp, Homo sapien
gtagtatcaaggaagactatccacaattatctg

SEQ ID NO: 362027 - DNA, 33 bp, Homo sapien
gaggcagaattgcttaaaccagagccgcgggtg

SEQ ID NO: 362028 - DNA, 33 bp, Homo sapien
gaggcagaattgcttacaccagagccgcgggtg

SEQ ID NO: 362029 - DNA, 33 bp, Homo sapien
tcaataactaacagtgaaaatgatggcggcagg

SEQ ID NO: 362030 - DNA, 33 bp, Homo sapien
tcaataactaacagtgtaaatgatggcggcagg

SEQ ID NO: 362031 - DNA, 33 bp, Homo sapien
tatcaggggctgttaaaagatgacaggcaaggg

SEQ ID NO: 362032 - DNA, 33 bp, Homo sapien
tatcaggggctgttaatagatgacaggcaaggg

SEQ ID NO: 362033 - DNA, 33 bp, Homo sapien
tctggaatgcgctgcccactggctccttcacaa

SEQ ID NO: 362034 - DNA, 33 bp, Homo sapien
tctggaatgcgctgcctactggctccttcacaa

SEQ ID NO: 362035 - DNA, 33 bp, Homo sapien
caccaactcaggacatcatcccttaccacgacc

SEQ ID NO: 362036 - DNA, 33 bp, Homo sapien
caccaactcaggacatgatcccttaccacgacc

SEQ ID NO: 362037 - DNA, 33 bp, Homo sapien
gggtatatcaggcataaagggagagagatttga

SEQ ID NO: 362038 - DNA, 33 bp, Homo sapien
gggtatatcaggcatagagggagagagatttga

SEQ ID NO: 362039 - DNA, 33 bp, Homo sapien
tttaccaaggcaataggaacatttcaggagcaa

SEQ ID NO: 362040 - DNA, 33 bp, Homo sapien
tttaccaaggcaatagtaacatttcaggagcaa

SEQ ID NO: 362041 - DNA, 33 bp, Homo sapien
gcagcaatactccatagggccacaagatggtgg

SEQ ID NO: 362042 - DNA, 33 bp, Homo sapien
gcagcaatactccatatggccacaagatggtgg

SEQ ID NO: 362043 - DNA, 33 bp, Homo sapien
caagccagtaagatcacgggtcgtatgctacac

SEQ ID NO: 362044 - DNA, 33 bp, Homo sapien
caagccagtaagatcatgggtcgtatgctacac

SEQ ID NO: 362045 - DNA, 33 bp, Homo sapien
tttgaaataaaacttaggggatgcactgaaagc

SEQ ID NO: 362046 - DNA, 33 bp, Homo sapien
tttgaaataaaacttatgggatgcactgaaagc

SEQ ID NO: 362047 - DNA, 33 bp, Homo sapien
tgatcaggctgaagaaactccttttattcctag

SEQ ID NO: 362048 - DNA, 33 bp, Homo sapien
tgatcaggctgaagaagctccttttattcctag

SEQ ID NO: 362049 - DNA, 33 bp, Homo sapien
agcactgttctccgccaacatgaggacaccatc

SEQ ID NO: 362050 - DNA, 33 bp, Homo sapien
agcactgttctccgccgacatgaggacaccatc

SEQ ID NO: 362051 - DNA, 33 bp, Homo sapien
actcgccctgtttttcccatcaggtgcgactac

SEQ ID NO: 362052 - DNA, 33 bp, Homo sapien
actcgccctgtttttcgcatcaggtgcgactac

SEQ ID NO: 362053 - DNA, 33 bp, Homo sapien
cagaacaaatcactagaaatttatcatctcgaa

SEQ ID NO: 362054 - DNA, 33 bp, Homo sapien
cagaacaaatcactagtaatttatcatctcgaa

SEQ ID NO: 362055 - DNA, 33 bp, Homo sapien
agcagcgtgtcccgcaagtagccccagacctgg

SEQ ID NO: 362056 - DNA, 33 bp, Homo sapien
agcagcgtgtcccgcaggtagccccagacctgg

SEQ ID NO: 362057 - DNA, 33 bp, Homo sapien
ttgctcttaacccgacggcaagaccctcaagaa

SEQ ID NO: 362058 - DNA, 33 bp, Homo sapien
ttgctcttaacccgactgcaagaccctcaagaa

SEQ ID NO: 362059 - DNA, 33 bp, Homo sapien
aagcctgttggcacctaagccatgacactcctg

SEQ ID NO: 362060 - DNA, 33 bp, Homo sapien
aagcctgttggcacctgagccatgacactcctg

SEQ ID NO: 362061 - DNA, 33 bp, Homo sapien
ctcgggaaggccccgaaccagatggagtgggtg

SEQ ID NO: 362062 - DNA, 33 bp, Homo sapien
ctcgggaaggccccgagccagatggagtgggtg

SEQ ID NO: 362063 - DNA, 33 bp, Homo sapien
ccatgtggaaggtgaccgctttcatcggcaaca

SEQ ID NO: 362064 - DNA, 33 bp, Homo sapien
ccatgtggaaggtgactgctttcatcggcaaca

SEQ ID NO: 362065 - DNA, 33 bp, Homo sapien
gactgcaggcatgtgccactaattattctttat

SEQ ID NO: 362066 - DNA, 33 bp, Homo sapien
gactgcaggcatgtgctactaattattctttat

SEQ ID NO: 362067 - DNA, 33 bp, Homo sapien
tgtcttgtgctagtaggcactcagtgtgtatgt

SEQ ID NO: 362068 - DNA, 33 bp, Homo sapien
tgtcttgtgctagtagtcactcagtgtgtatgt

SEQ ID NO: 362069 - DNA, 33 bp, Homo sapien
acgaagtagagaggaaccgaaaagttggttatg

SEQ ID NO: 362070 - DNA, 33 bp, Homo sapien
acgaagtagagaggaatcgaaaagttggttatg

SEQ ID NO: 362071 - DNA, 33 bp, Homo sapien
gtcttcctggcacaaagactcagctggttttat

SEQ ID NO: 362072 - DNA, 33 bp, Homo sapien
gtcttcctggcacaaatactcagctggttttat

SEQ ID NO: 362073 - DNA, 33 bp, Homo sapien
agaaacttgctaggaactggagtaaaggagacc

SEQ ID NO: 362074 - DNA, 33 bp, Homo sapien
agaaacttgctaggaattggagtaaaggagacc

SEQ ID NO: 362075 - DNA, 33 bp, Homo sapien
ccaggaacttctctaccctgtagttttagcaaa

SEQ ID NO: 362076 - DNA, 33 bp, Homo sapien
ccaggaacttctctacgctgtagttttagcaaa

SEQ ID NO: 362077 - DNA, 33 bp, Homo sapien
aaaaaccagtgaaacgcaatcccattttcttcc

SEQ ID NO: 362078 - DNA, 33 bp, Homo sapien
aaaaaccagtgaaacgtaatcccattttcttcc

SEQ ID NO: 362079 - DNA, 33 bp, Homo sapien
cagctcttagcccaaaagaaagacgggcagacc

SEQ ID NO: 362080 - DNA, 33 bp, Homo sapien
cagctcttagcccaaaggaaagacgggcagacc

SEQ ID NO: 362081 - DNA, 33 bp, Homo sapien
actgaaaactgcccacgggctacccatagcaga

SEQ ID NO: 362082 - DNA, 33 bp, Homo sapien
actgaaaactgcccactggctacccatagcaga

SEQ ID NO: 362083 - DNA, 33 bp, Homo sapien
aatagagtgagaagaacgtgatagggattcgtg

SEQ ID NO: 362084 - DNA, 33 bp, Homo sapien
aatagagtgagaagaatgtgatagggattcgtg

SEQ ID NO: 362085 - DNA, 33 bp, Homo sapien
aggacactattcaagccactacacttggtttct

SEQ ID NO: 362086 - DNA, 33 bp, Homo sapien
aggacactattcaagctactacacttggtttct

SEQ ID NO: 362087 - DNA, 33 bp, Homo sapien
gtatctgagctcgagacaagtgggtaacctgca

SEQ ID NO: 362088 - DNA, 33 bp, Homo sapien
gtatctgagctcgagagaagtgggtaacctgca

SEQ ID NO: 362089 - DNA, 33 bp, Homo sapien
cctggtattctgatcacctcctatgaactccat

SEQ ID NO: 362090 - DNA, 33 bp, Homo sapien
cctggtattctgatcatctcctatgaactccat

SEQ ID NO: 362091 - DNA, 33 bp, Homo sapien
gagattaagagtctcacgctttgccgactgagc

SEQ ID NO: 362092 - DNA, 33 bp, Homo sapien
gagattaagagtctcatgctttgccgactgagc

SEQ ID NO: 362093 - DNA, 33 bp, Homo sapien
agtggtcagattgatgaatttgggaggaggcct

SEQ ID NO: 362094 - DNA, 33 bp, Homo sapien
agtggtcagattgatggatttgggaggaggcct

SEQ ID NO: 362095 - DNA, 33 bp, Homo sapien
agagactctggttctcagacaccggctgtgaga

SEQ ID NO: 362096 - DNA, 33 bp, Homo sapien
agagactctggttctcggacaccggctgtgaga

SEQ ID NO: 362097 - DNA, 33 bp, Homo sapien
ggccaccatccaaacactgagagagataagtaa

SEQ ID NO: 362098 - DNA, 33 bp, Homo sapien
ggccaccatccaaacagtgagagagataagtaa

SEQ ID NO: 362099 - DNA, 33 bp, Homo sapien
ttggtgaaagaagaaactcaagcagaagattta

SEQ ID NO: 362100 - DNA, 33 bp, Homo sapien
ttggtgaaagaagaaagtcaagcagaagattta

SEQ ID NO: 362101 - DNA, 33 bp, Homo sapien
ccagtccgtgccctccgctgaaaaggccttctt

SEQ ID NO: 362102 - DNA, 33 bp, Homo sapien
ccagtccgtgccctcctctgaaaaggccttctt

SEQ ID NO: 362103 - DNA, 33 bp, Homo sapien
atgaagatctatgacaaaaaaggcttcgtcttc

SEQ ID NO: 362104 - DNA, 33 bp, Homo sapien
atgaagatctatgacagaaaaggcttcgtcttc

SEQ ID NO: 362105 - DNA, 33 bp, Homo sapien
caataattaaacaagcagacaaaaatgacaagt

SEQ ID NO: 362106 - DNA, 33 bp, Homo sapien
caataattaaacaagcggacaaaaatgacaagt

SEQ ID NO: 362107 - DNA, 33 bp, Homo sapien
agaatgatgagagtaccctgttcttccatgcag

SEQ ID NO: 362108 - DNA, 33 bp, Homo sapien
agaatgatgagagtactctgttcttccatgcag

SEQ ID NO: 362109 - DNA, 33 bp, Homo sapien
tggctcttttgtgtccaacactgacgataaagc

SEQ ID NO: 362110 - DNA, 33 bp, Homo sapien
tggctcttttgtgtccgacactgacgataaagc

SEQ ID NO: 362111 - DNA, 33 bp, Homo sapien
agagttcataaatcacagcatcctggattctcc

SEQ ID NO: 362112 - DNA, 33 bp, Homo sapien
agagttcataaatcacggcatcctggattctcc

SEQ ID NO: 362113 - DNA, 33 bp, Homo sapien
aacagaactaaaccaacaaactattgaaaatta

SEQ ID NO: 362114 - DNA, 33 bp, Homo sapien
aacagaactaaaccaagaaactattgaaaatta

SEQ ID NO: 362115 - DNA, 33 bp, Homo sapien
tttcactgaaagacttcaaatgtttgttctctt

SEQ ID NO: 362116 - DNA, 33 bp, Homo sapien
tttcactgaaagacttgaaatgtttgttctctt

SEQ ID NO: 362117 - DNA, 33 bp, Homo sapien
ttgacagattcaaatacgtacaaaaggctgggg

SEQ ID NO: 362118 - DNA, 33 bp, Homo sapien
ttgacagattcaaatatgtacaaaaggctgggg

SEQ ID NO: 362119 - DNA, 33 bp, Homo sapien
cctcaaatacacatggcagtttagtgtgtgata

SEQ ID NO: 362120 - DNA, 33 bp, Homo sapien
cctcaaatacacatgggagtttagtgtgtgata

SEQ ID NO: 362121 - DNA, 33 bp, Homo sapien
tgttttattcaatgtagcagagccttgccacag

SEQ ID NO: 362122 - DNA, 33 bp, Homo sapien
tgttttattcaatgtatcagagccttgccacag

SEQ ID NO: 362123 - DNA, 33 bp, Homo sapien
ggggcggattatgcaacgactccgtacttcctc

SEQ ID NO: 362124 - DNA, 33 bp, Homo sapien
ggggcggattatgcaatgactccgtacttcctc

SEQ ID NO: 362125 - DNA, 33 bp, Homo sapien
atcccatctttctgcaatagtcaccggcatagg

SEQ ID NO: 362126 - DNA, 33 bp, Homo sapien
atcccatctttctgcagtagtcaccggcatagg

SEQ ID NO: 362127 - DNA, 33 bp, Homo sapien
gagaccacactggagaacattttactaattgtc

SEQ ID NO: 362128 - DNA, 33 bp, Homo sapien
gagaccacactggagaccattttactaattgtc

SEQ ID NO: 362129 - DNA, 33 bp, Homo sapien
gtggatgttctcagagcatacagacggaacacc

SEQ ID NO: 362130 - DNA, 33 bp, Homo sapien
gtggatgttctcagaggatacagacggaacacc

SEQ ID NO: 362131 - DNA, 33 bp, Homo sapien
ggaaacttcctgttaaatgtttcatgtactaga

SEQ ID NO: 362132 - DNA, 33 bp, Homo sapien
ggaaacttcctgttaactgtttcatgtactaga

SEQ ID NO: 362133 - DNA, 33 bp, Homo sapien
ggaaaggctcaaggaacgtttgtgggcttcaaa

SEQ ID NO: 362134 - DNA, 33 bp, Homo sapien
ggaaaggctcaaggaatgtttgtgggcttcaaa

SEQ ID NO: 362135 - DNA, 33 bp, Homo sapien
agaatctttacctagacaaatgacagtcttaca

SEQ ID NO: 362136 - DNA, 33 bp, Homo sapien
agaatctttacctagagaaatgacagtcttaca

SEQ ID NO: 362137 - DNA, 33 bp, Homo sapien
gatactcaagtcagcgaccttcacattggcttt

SEQ ID NO: 362138 - DNA, 33 bp, Homo sapien
gatactcaagtcagcgtccttcacattggcttt

SEQ ID NO: 362139 - DNA, 33 bp, Homo sapien
ctacaggtaaatataccatgggaagtggagaaa

SEQ ID NO: 362140 - DNA, 33 bp, Homo sapien
ctacaggtaaatatactatgggaagtggagaaa

SEQ ID NO: 362141 - DNA, 33 bp, Homo sapien
cccttgcaaaagttcacatcaaggcacatttct

SEQ ID NO: 362142 - DNA, 33 bp, Homo sapien
cccttgcaaaagttcatatcaaggcacatttct

SEQ ID NO: 362143 - DNA, 33 bp, Homo sapien
tttaggcaaagtacacacattatcagatttggg

SEQ ID NO: 362144 - DNA, 33 bp, Homo sapien
tttaggcaaagtacacgcattatcagatttggg

SEQ ID NO: 362145 - DNA, 33 bp, Homo sapien
cttcttgaaactgggacatagatgagccttagg

SEQ ID NO: 362146 - DNA, 33 bp, Homo sapien
cttcttgaaactgggagatagatgagccttagg

SEQ ID NO: 362147 - DNA, 33 bp, Homo sapien
tattacctaaaaaacacagccaaaactgtgaac

SEQ ID NO: 362148 - DNA, 33 bp, Homo sapien
tattacctaaaaaacagagccaaaactgtgaac

SEQ ID NO: 362149 - DNA, 33 bp, Homo sapien
acctccactcctcataacaactgcttgcttttt

SEQ ID NO: 362150 - DNA, 33 bp, Homo sapien
acctccactcctcatatcaactgcttgcttttt

SEQ ID NO: 362151 - DNA, 33 bp, Homo sapien
tctacgttgttagggacgcacttaatgtttgta

SEQ ID NO: 362152 - DNA, 33 bp, Homo sapien
tctacgttgttagggatgcacttaatgtttgta

SEQ ID NO: 362153 - DNA, 33 bp, Homo sapien
tggcctgtggcgacacaagtctcaaccaggctg

SEQ ID NO: 362154 - DNA, 33 bp, Homo sapien
tggcctgtggcgacacgagtctcaaccaggctg

SEQ ID NO: 362155 - DNA, 33 bp, Homo sapien
gcagtgctgaaaatccactctgcagaggggagg

SEQ ID NO: 362156 - DNA, 33 bp, Homo sapien
gcagtgctgaaaatccgctctgcagaggggagg

SEQ ID NO: 362157 - DNA, 33 bp, Homo sapien
aattatagtaacattacgtaagatactgcaagt

SEQ ID NO: 362158 - DNA, 33 bp, Homo sapien
aattatagtaacattatgtaagatactgcaagt

SEQ ID NO: 362159 - DNA, 33 bp, Homo sapien
tatactgcattattaacaagagacaggccaggt

SEQ ID NO: 362160 - DNA, 33 bp, Homo sapien
tatactgcattattaagaagagacaggccaggt

SEQ ID NO: 362161 - DNA, 33 bp, Homo sapien
actccacatctcaatccagtagctccctcttca

SEQ ID NO: 362162 - DNA, 33 bp, Homo sapien
actccacatctcaatctagtagctccctcttca

SEQ ID NO: 362163 - DNA, 33 bp, Homo sapien
atttggactgataagcaagttttctgaacaggt

SEQ ID NO: 362164 - DNA, 33 bp, Homo sapien
atttggactgataagcgagttttctgaacaggt

SEQ ID NO: 362165 - DNA, 33 bp, Homo sapien
agacaatcaggaactacgatgagggcaataata

SEQ ID NO: 362166 - DNA, 33 bp, Homo sapien
agacaatcaggaactatgatgagggcaataata

SEQ ID NO: 362167 - DNA, 33 bp, Homo sapien
gaaggtagcagtattacggtgggtgcctagagg

SEQ ID NO: 362168 - DNA, 33 bp, Homo sapien
gaaggtagcagtattatggtgggtgcctagagg

SEQ ID NO: 362169 - DNA, 33 bp, Homo sapien
gcattcatttcctcataaaagatacaaggctca

SEQ ID NO: 362170 - DNA, 33 bp, Homo sapien
gcattcatttcctcatgaaagatacaaggctca

SEQ ID NO: 362171 - DNA, 33 bp, Homo sapien
caaagaataggtcaatcagatctgtcagttaga

SEQ ID NO: 362172 - DNA, 33 bp, Homo sapien
caaagaataggtcaattagatctgtcagttaga

SEQ ID NO: 362173 - DNA, 33 bp, Homo sapien
tgtttacaagaggacaatatactcaagtcttga

SEQ ID NO: 362174 - DNA, 33 bp, Homo sapien
tgtttacaagaggacagtatactcaagtcttga

SEQ ID NO: 362175 - DNA, 33 bp, Homo sapien
tcagtagtcctgagtacattcatcttgttgtgc

SEQ ID NO: 362176 - DNA, 33 bp, Homo sapien
tcagtagtcctgagtatattcatcttgttgtgc

SEQ ID NO: 362177 - DNA, 33 bp, Homo sapien
ctggaccccaagaggcgctctcccagctccgac

SEQ ID NO: 362178 - DNA, 33 bp, Homo sapien
ctggaccccaagaggctctctcccagctccgac

SEQ ID NO: 362179 - DNA, 33 bp, Homo sapien
attcatcctttgctataaacagctagtaattac

SEQ ID NO: 362180 - DNA, 33 bp, Homo sapien
attcatcctttgctatcaacagctagtaattac

SEQ ID NO: 362181 - DNA, 33 bp, Homo sapien
cctacctggaacatcccgccacagggctcgctc

SEQ ID NO: 362182 - DNA, 33 bp, Homo sapien
cctacctggaacatccggccacagggctcgctc

SEQ ID NO: 362183 - DNA, 33 bp, Homo sapien
gaacgctgggcttctaagtagcctacatcgagt

SEQ ID NO: 362184 - DNA, 33 bp, Homo sapien
gaacgctgggcttctaggtagcctacatcgagt

SEQ ID NO: 362185 - DNA, 33 bp, Homo sapien
gctgtgattgttccaccgtactcaccctgggtg

SEQ ID NO: 362186 - DNA, 33 bp, Homo sapien
gctgtgattgttccactgtactcaccctgggtg

SEQ ID NO: 362187 - DNA, 33 bp, Homo sapien
ctgagagacatctaaaagacgatctcctgtagg

SEQ ID NO: 362188 - DNA, 33 bp, Homo sapien
ctgagagacatctaaaggacgatctcctgtagg

SEQ ID NO: 362189 - DNA, 33 bp, Homo sapien
gctataactatttgaaggtaatacttgtataag

SEQ ID NO: 362190 - DNA, 33 bp, Homo sapien
gctataactatttgaatgtaatacttgtataag

SEQ ID NO: 362191 - DNA, 33 bp, Homo sapien
atgtctgcagaactggcaaaatataaataaatt

SEQ ID NO: 362192 - DNA, 33 bp, Homo sapien
atgtctgcagaactgggaaaatataaataaatt

SEQ ID NO: 362193 - DNA, 33 bp, Homo sapien
cactagtttagtgacacggattttgcatcccta

SEQ ID NO: 362194 - DNA, 33 bp, Homo sapien
cactagtttagtgacatggattttgcatcccta

SEQ ID NO: 362195 - DNA, 33 bp, Homo sapien
gatactgcctaaatcaaggttgtgctgagaatt

SEQ ID NO: 362196 - DNA, 33 bp, Homo sapien
gatactgcctaaatcacggttgtgctgagaatt

SEQ ID NO: 362197 - DNA, 33 bp, Homo sapien
acagccaatctacttaaaagaatggctgacaaa

SEQ ID NO: 362198 - DNA, 33 bp, Homo sapien
acagccaatctacttacaagaatggctgacaaa

SEQ ID NO: 362199 - DNA, 33 bp, Homo sapien
aaggttcttgagcgcacaagtagggcaaatggg

SEQ ID NO: 362200 - DNA, 33 bp, Homo sapien
aaggttcttgagcgcagaagtagggcaaatggg

SEQ ID NO: 362201 - DNA, 33 bp, Homo sapien
tgggagaatcctgtaaactttatctctttatga

SEQ ID NO: 362202 - DNA, 33 bp, Homo sapien
tgggagaatcctgtaacctttatctctttatga

SEQ ID NO: 362203 - DNA, 33 bp, Homo sapien
acaccaaacgtagtgaccaattcattctggaaa

SEQ ID NO: 362204 - DNA, 33 bp, Homo sapien
acaccaaacgtagtgagcaattcattctggaaa

SEQ ID NO: 362205 - DNA, 33 bp, Homo sapien
cctattagtttcaactcaaggctaaatgaaact

SEQ ID NO: 362206 - DNA, 33 bp, Homo sapien
cctattagtttcaacttaaggctaaatgaaact

SEQ ID NO: 362207 - DNA, 33 bp, Homo sapien
ctaccaccaagcctcactagtttttgcattttt

SEQ ID NO: 362208 - DNA, 33 bp, Homo sapien
ctaccaccaagcctcagtagtttttgcattttt

SEQ ID NO: 362209 - DNA, 33 bp, Homo sapien
ggggtcttgttgaatgcagattctgaattaagt

SEQ ID NO: 362210 - DNA, 33 bp, Homo sapien
ggggtcttgttgaatggagattctgaattaagt

SEQ ID NO: 362211 - DNA, 33 bp, Homo sapien
gagtctgcgtgtcaaactgtcccctagtatcca

SEQ ID NO: 362212 - DNA, 33 bp, Homo sapien
gagtctgcgtgtcaaattgtcccctagtatcca

SEQ ID NO: 362213 - DNA, 33 bp, Homo sapien
ccagagctctcagtgcagacaacagaggccttg

SEQ ID NO: 362214 - DNA, 33 bp, Homo sapien
ccagagctctcagtgcggacaacagaggccttg

SEQ ID NO: 362215 - DNA, 33 bp, Homo sapien
tactattttctagactcacttttttcctttaat

SEQ ID NO: 362216 - DNA, 33 bp, Homo sapien
tactattttctagactgacttttttcctttaat

SEQ ID NO: 362217 - DNA, 33 bp, Homo sapien
aggctggtctctgatacggtgggccgagacatc

SEQ ID NO: 362218 - DNA, 33 bp, Homo sapien
aggctggtctctgatatggtgggccgagacatc

SEQ ID NO: 362219 - DNA, 33 bp, Homo sapien
ccatcctatgggaagaagacgggagcacctggg

SEQ ID NO: 362220 - DNA, 33 bp, Homo sapien
ccatcctatgggaagacgacgggagcacctggg

SEQ ID NO: 362221 - DNA, 33 bp, Homo sapien
acacagtttgaaagtcaccctaacaaggagtca

SEQ ID NO: 362222 - DNA, 33 bp, Homo sapien
acacagtttgaaagtcgccctaacaaggagtca

SEQ ID NO: 362223 - DNA, 33 bp, Homo sapien
ggtagctggtatgtgaaactagagcccagggaa

SEQ ID NO: 362224 - DNA, 33 bp, Homo sapien
ggtagctggtatgtgagactagagcccagggaa

SEQ ID NO: 362225 - DNA, 33 bp, Homo sapien
gccccagataatacaaaaaaatggccaacgttt

SEQ ID NO: 362226 - DNA, 33 bp, Homo sapien
gccccagataatacaacaaaatggccaacgttt

SEQ ID NO: 362227 - DNA, 33 bp, Homo sapien
gagggaggatttagcccagaaggttgaggctgc

SEQ ID NO: 362228 - DNA, 33 bp, Homo sapien
gagggaggatttagcctagaaggttgaggctgc

SEQ ID NO: 362229 - DNA, 33 bp, Homo sapien
caggtttacagaaaaactgatgggaaagtacag

SEQ ID NO: 362230 - DNA, 33 bp, Homo sapien
caggtttacagaaaaattgatgggaaagtacag

SEQ ID NO: 362231 - DNA, 33 bp, Homo sapien
ggttaggtcaatagacagagatttttctgggaa

SEQ ID NO: 362232 - DNA, 33 bp, Homo sapien
ggttaggtcaatagacggagatttttctgggaa

SEQ ID NO: 362233 - DNA, 33 bp, Homo sapien
acagacagttcacccacaggattcactcgctgt

SEQ ID NO: 362234 - DNA, 33 bp, Homo sapien
acagacagttcacccagaggattcactcgctgt

SEQ ID NO: 362235 - DNA, 33 bp, Homo sapien
gttataaatataacgaaaattcatatgtatggc

SEQ ID NO: 362236 - DNA, 33 bp, Homo sapien
gttataaatataacgacaattcatatgtatggc

SEQ ID NO: 362237 - DNA, 33 bp, Homo sapien
aaccacatggtagcttaaacaagggaagtttag

SEQ ID NO: 362238 - DNA, 33 bp, Homo sapien
aaccacatggtagcttcaacaagggaagtttag

SEQ ID NO: 362239 - DNA, 33 bp, Homo sapien
gctttctgcacgtgtcccggcccccagagaaga

SEQ ID NO: 362240 - DNA, 33 bp, Homo sapien
gctttctgcacgtgtcgcggcccccagagaaga

SEQ ID NO: 362241 - DNA, 33 bp, Homo sapien
gcaacgtgagacttcaacaaacaccaagatcca

SEQ ID NO: 362242 - DNA, 33 bp, Homo sapien
gcaacgtgagacttcagcaaacaccaagatcca

SEQ ID NO: 362243 - DNA, 33 bp, Homo sapien
tccgcagcatcttctacgtgcccgacatggtga

SEQ ID NO: 362244 - DNA, 33 bp, Homo sapien
tccgcagcatcttctatgtgcccgacatggtga

SEQ ID NO: 362245 - DNA, 33 bp, Homo sapien
atgatctgactgaggacaccaggaagcaggtgt

SEQ ID NO: 362246 - DNA, 33 bp, Homo sapien
atgatctgactgaggagaccaggaagcaggtgt

SEQ ID NO: 362247 - DNA, 33 bp, Homo sapien
cccacattcgcctcacaggtgacacctcgcatc

SEQ ID NO: 362248 - DNA, 33 bp, Homo sapien
cccacattcgcctcacgggtgacacctcgcatc

SEQ ID NO: 362249 - DNA, 33 bp, Homo sapien
gaggcaccaaaaacgcaatccatgaacattctc

SEQ ID NO: 362250 - DNA, 33 bp, Homo sapien
gaggcaccaaaaacgccatccatgaacattctc

SEQ ID NO: 362251 - DNA, 33 bp, Homo sapien
gaaaagaacagccggaaagcaccagaaattcac

SEQ ID NO: 362252 - DNA, 33 bp, Homo sapien
gaaaagaacagccggagagcaccagaaattcac

SEQ ID NO: 362253 - DNA, 33 bp, Homo sapien
ttctgacttccccccaaatcctgccgctgccgc

SEQ ID NO: 362254 - DNA, 33 bp, Homo sapien
ttctgacttccccccacatcctgccgctgccgc

SEQ ID NO: 362255 - DNA, 33 bp, Homo sapien
tcaaactatgaagccacacagtgaaaggctgag

SEQ ID NO: 362256 - DNA, 33 bp, Homo sapien
tcaaactatgaagccagacagtgaaaggctgag

SEQ ID NO: 362257 - DNA, 33 bp, Homo sapien
cctccttgcgccgctccaagtggtccacgctct

SEQ ID NO: 362258 - DNA, 33 bp, Homo sapien
cctccttgcgccgctctaagtggtccacgctct

SEQ ID NO: 362259 - DNA, 33 bp, Homo sapien
caaagtcttggaaggacgacctcaaactcaaga

SEQ ID NO: 362260 - DNA, 33 bp, Homo sapien
caaagtcttggaaggatgacctcaaactcaaga

SEQ ID NO: 362261 - DNA, 33 bp, Homo sapien
taaacactggtgaagcaagagaatggaccaccc

SEQ ID NO: 362262 - DNA, 33 bp, Homo sapien
taaacactggtgaagcgagagaatggaccaccc

SEQ ID NO: 362263 - DNA, 33 bp, Homo sapien
ctctaggatttcacatcatcgtcctgtctgtgt

SEQ ID NO: 362264 - DNA, 33 bp, Homo sapien
ctctaggatttcacattatcgtcctgtctgtgt

SEQ ID NO: 362265 - DNA, 33 bp, Homo sapien
gtgtatttctaagaacagagaattagaatatct

SEQ ID NO: 362266 - DNA, 33 bp, Homo sapien
gtgtatttctaagaacggagaattagaatatct

SEQ ID NO: 362267 - DNA, 33 bp, Homo sapien
tcttgctgaattcccaatgactttataggacat

SEQ ID NO: 362268 - DNA, 33 bp, Homo sapien
tcttgctgaattcccagtgactttataggacat

SEQ ID NO: 362269 - DNA, 33 bp, Homo sapien
tggcacagcaagcaacaaaaacattgcttcatt

SEQ ID NO: 362270 - DNA, 33 bp, Homo sapien
tggcacagcaagcaacgaaaacattgcttcatt

SEQ ID NO: 362271 - DNA, 33 bp, Homo sapien
gagaagaacttaaaagaaacaaagtatggagcc

SEQ ID NO: 362272 - DNA, 33 bp, Homo sapien
gagaagaacttaaaagcaacaaagtatggagcc

SEQ ID NO: 362273 - DNA, 33 bp, Homo sapien
taatgtgcacactaatcacccaggatttttata

SEQ ID NO: 362274 - DNA, 33 bp, Homo sapien
taatgtgcacactaattacccaggatttttata

SEQ ID NO: 362275 - DNA, 33 bp, Homo sapien
aaaccatccttataacggcctgagtgttgtgaa

SEQ ID NO: 362276 - DNA, 33 bp, Homo sapien
aaaccatccttataactgcctgagtgttgtgaa

SEQ ID NO: 362277 - DNA, 33 bp, Homo sapien
tagagggaaaccttcacaaatgtctgtgtggga

SEQ ID NO: 362278 - DNA, 33 bp, Homo sapien
tagagggaaaccttcataaatgtctgtgtggga

SEQ ID NO: 362279 - DNA, 33 bp, Homo sapien
taactgtcaggaaataccatgtcttcgtgttgg

SEQ ID NO: 362280 - DNA, 33 bp, Homo sapien
taactgtcaggaaatatcatgtcttcgtgttgg

SEQ ID NO: 362281 - DNA, 33 bp, Homo sapien
ggggacagaaaattatcaaaatatgacaaacaa

SEQ ID NO: 362282 - DNA, 33 bp, Homo sapien
ggggacagaaaattatgaaaatatgacaaacaa

SEQ ID NO: 362283 - DNA, 33 bp, Homo sapien
ggtgaagtctccataacgcagttcttaaaaaaa

SEQ ID NO: 362284 - DNA, 33 bp, Homo sapien
ggtgaagtctccataatgcagttcttaaaaaaa

SEQ ID NO: 362285 - DNA, 33 bp, Homo sapien
gtgcgttcttttgtccagcctctcttgttcacc

SEQ ID NO: 362286 - DNA, 33 bp, Homo sapien
gtgcgttcttttgtccggcctctcttgttcacc

SEQ ID NO: 362287 - DNA, 33 bp, Homo sapien
ccaccttccctacagacatcaagaatacttcag

SEQ ID NO: 362288 - DNA, 33 bp, Homo sapien
ccaccttccctacagatatcaagaatacttcag

SEQ ID NO: 362289 - DNA, 33 bp, Homo sapien
gacagaaggtggaatactagagctttgcaaaaa

SEQ ID NO: 362290 - DNA, 33 bp, Homo sapien
gacagaaggtggaatattagagctttgcaaaaa

SEQ ID NO: 362291 - DNA, 33 bp, Homo sapien
tgacagaacacccacactcattttccctcgatc

SEQ ID NO: 362292 - DNA, 33 bp, Homo sapien
tgacagaacacccacagtcattttccctcgatc

SEQ ID NO: 362293 - DNA, 33 bp, Homo sapien
atctattctccattaaccaaactgagcactgtg

SEQ ID NO: 362294 - DNA, 33 bp, Homo sapien
atctattctccattaatcaaactgagcactgtg

SEQ ID NO: 362295 - DNA, 33 bp, Homo sapien
ctttcccatgctgaaaagtcgggcagaacgaga

SEQ ID NO: 362296 - DNA, 33 bp, Homo sapien
ctttcccatgctgaaaggtcgggcagaacgaga

SEQ ID NO: 362297 - DNA, 33 bp, Homo sapien
agtgtgcacttcaaaaggacgtttggagatgaa

SEQ ID NO: 362298 - DNA, 33 bp, Homo sapien
agtgtgcacttcaaaatgacgtttggagatgaa

SEQ ID NO: 362299 - DNA, 33 bp, Homo sapien
cctatatgcgaagcaccaagatgagcagctgcg

SEQ ID NO: 362300 - DNA, 33 bp, Homo sapien
cctatatgcgaagcactaagatgagcagctgcg

SEQ ID NO: 362301 - DNA, 33 bp, Homo sapien
gctactcgcagtgagtaacaactgagggttctg

SEQ ID NO: 362302 - DNA, 33 bp, Homo sapien
gctactcgcagtgagtgacaactgagggttctg

SEQ ID NO: 362303 - DNA, 33 bp, Homo sapien
atactgagaaatgccaactttagacattgtctt

SEQ ID NO: 362304 - DNA, 33 bp, Homo sapien
atactgagaaatgccagctttagacattgtctt

SEQ ID NO: 362305 - DNA, 33 bp, Homo sapien
tgccacattcttatccaaaaatatgtaataatt

SEQ ID NO: 362306 - DNA, 33 bp, Homo sapien
tgccacattcttatcccaaaatatgtaataatt

SEQ ID NO: 362307 - DNA, 33 bp, Homo sapien
aatattgtgcaaattacaccttcatcaagagtg

SEQ ID NO: 362308 - DNA, 33 bp, Homo sapien
aatattgtgcaaattataccttcatcaagagtg

SEQ ID NO: 362309 - DNA, 33 bp, Homo sapien
ctcaccctaaccctaacagacccatcatgtcta

SEQ ID NO: 362310 - DNA, 33 bp, Homo sapien
ctcaccctaaccctaagagacccatcatgtcta

SEQ ID NO: 362311 - DNA, 33 bp, Homo sapien
tgaagccttattcagagcaccctttctggttcc

SEQ ID NO: 362312 - DNA, 33 bp, Homo sapien
tgaagccttattcagatcaccctttctggttcc

SEQ ID NO: 362313 - DNA, 33 bp, Homo sapien
ctcaatcctgtttgaccctagaactctttttag

SEQ ID NO: 362314 - DNA, 33 bp, Homo sapien
ctcaatcctgtttgacgctagaactctttttag

SEQ ID NO: 362315 - DNA, 33 bp, Homo sapien
gaggacatgggttccacgcccagacttgccatg

SEQ ID NO: 362316 - DNA, 33 bp, Homo sapien
gaggacatgggttccaggcccagacttgccatg

SEQ ID NO: 362317 - DNA, 33 bp, Homo sapien
aacaaaatgttaaaaaatgaactgggcgtggtg

SEQ ID NO: 362318 - DNA, 33 bp, Homo sapien
aacaaaatgttaaaaagtgaactgggcgtggtg

SEQ ID NO: 362319 - DNA, 33 bp, Homo sapien
ttgcagggcacagagaagaacatcatgaatggt

SEQ ID NO: 362320 - DNA, 33 bp, Homo sapien
ttgcagggcacagagaggaacatcatgaatggt

SEQ ID NO: 362321 - DNA, 33 bp, Homo sapien
attcttcaaatcgcctaaactgggaaggtattg

SEQ ID NO: 362322 - DNA, 33 bp, Homo sapien
attcttcaaatcgcctcaactgggaaggtattg

SEQ ID NO: 362323 - DNA, 33 bp, Homo sapien
aatatggattggagaaaactctaaatttgtgtc

SEQ ID NO: 362324 - DNA, 33 bp, Homo sapien
aatatggattggagaagactctaaatttgtgtc

SEQ ID NO: 362325 - DNA, 33 bp, Homo sapien
ggaagggaggtaatacagatcaattacagatgt

SEQ ID NO: 362326 - DNA, 33 bp, Homo sapien
ggaagggaggtaatacggatcaattacagatgt

SEQ ID NO: 362327 - DNA, 33 bp, Homo sapien
atgaagataatgttgaagaaaattggattcttc

SEQ ID NO: 362328 - DNA, 33 bp, Homo sapien
atgaagataatgttgaggaaaattggattcttc

SEQ ID NO: 362329 - DNA, 33 bp, Homo sapien
aatatctagtaacatacaaaagatcgttttcca

SEQ ID NO: 362330 - DNA, 33 bp, Homo sapien
aatatctagtaacatagaaaagatcgttttcca

SEQ ID NO: 362331 - DNA, 33 bp, Homo sapien
tccttccccgcatcccacatacatagatcatat

SEQ ID NO: 362332 - DNA, 33 bp, Homo sapien
tccttccccgcatcccgcatacatagatcatat

SEQ ID NO: 362333 - DNA, 33 bp, Homo sapien
gagaaagctcggtaccagcaggacctccaagtt

SEQ ID NO: 362334 - DNA, 33 bp, Homo sapien
gagaaagctcggtaccggcaggacctccaagtt

SEQ ID NO: 362335 - DNA, 33 bp, Homo sapien
gggccatttagcaagaactgtcaaaatgtaaaa

SEQ ID NO: 362336 - DNA, 33 bp, Homo sapien
gggccatttagcaagagctgtcaaaatgtaaaa

SEQ ID NO: 362337 - DNA, 33 bp, Homo sapien
ggtgtgtgcagcggatgagtaacatgatacaaa

SEQ ID NO: 362338 - DNA, 33 bp, Homo sapien
ggtgtgtgcagcggattagtaacatgatacaaa

SEQ ID NO: 362339 - DNA, 33 bp, Homo sapien
gcttaggagccgagaaccatagaaagttctgtc

SEQ ID NO: 362340 - DNA, 33 bp, Homo sapien
gcttaggagccgagaatcatagaaagttctgtc

SEQ ID NO: 362341 - DNA, 33 bp, Homo sapien
ggactttagaagtctacggatgtccttcattta

SEQ ID NO: 362342 - DNA, 33 bp, Homo sapien
ggactttagaagtctatggatgtccttcattta

SEQ ID NO: 362343 - DNA, 33 bp, Homo sapien
cctactccaagaaccacgacagcggaggggtga

SEQ ID NO: 362344 - DNA, 33 bp, Homo sapien
cctactccaagaaccatgacagcggaggggtga

SEQ ID NO: 362345 - DNA, 33 bp, Homo sapien
ggtcacgcggcaccgaactattgcacgggttcc

SEQ ID NO: 362346 - DNA, 33 bp, Homo sapien
ggtcacgcggcaccgagctattgcacgggttcc

SEQ ID NO: 362347 - DNA, 33 bp, Homo sapien
gggacagaggctccgaatagaccacaggtgcgt

SEQ ID NO: 362348 - DNA, 33 bp, Homo sapien
gggacagaggctccgagtagaccacaggtgcgt

SEQ ID NO: 362349 - DNA, 33 bp, Homo sapien
gaccatgtgagaacaacaaacacattctttagt

SEQ ID NO: 362350 - DNA, 33 bp, Homo sapien
gaccatgtgagaacaataaacacattctttagt

SEQ ID NO: 362351 - DNA, 33 bp, Homo sapien
cctgttgcgttcgtgcccgggtttctgtgtgtt

SEQ ID NO: 362352 - DNA, 33 bp, Homo sapien
cctgttgcgttcgtgcgcgggtttctgtgtgtt

SEQ ID NO: 362353 - DNA, 33 bp, Homo sapien
tccctcatctataaacaaagagtgaagatatgt

SEQ ID NO: 362354 - DNA, 33 bp, Homo sapien
tccctcatctataaaccaagagtgaagatatgt

SEQ ID NO: 362355 - DNA, 33 bp, Homo sapien
atcaccaccgcactgaagaggaaaactctcact

SEQ ID NO: 362356 - DNA, 33 bp, Homo sapien
atcaccaccgcactgatgaggaaaactctcact

SEQ ID NO: 362357 - DNA, 33 bp, Homo sapien
gctttgctgccttcacagggaggtcctgggacc

SEQ ID NO: 362358 - DNA, 33 bp, Homo sapien
gctttgctgccttcacggggaggtcctgggacc

SEQ ID NO: 362359 - DNA, 33 bp, Homo sapien
cacaacaccatgaatacactaaaaaccaccaaa

SEQ ID NO: 362360 - DNA, 33 bp, Homo sapien
cacaacaccatgaatatactaaaaaccaccaaa

SEQ ID NO: 362361 - DNA, 33 bp, Homo sapien
agaactttctgtttccaattcattcctttcacc

SEQ ID NO: 362362 - DNA, 33 bp, Homo sapien
agaactttctgtttccgattcattcctttcacc

SEQ ID NO: 362363 - DNA, 33 bp, Homo sapien
aaatatgcaagattcccgattccaaatggaggc

SEQ ID NO: 362364 - DNA, 33 bp, Homo sapien
aaatatgcaagattcctgattccaaatggaggc

SEQ ID NO: 362365 - DNA, 33 bp, Homo sapien
gtcggttaaagggtacaatcatgcagtaacgta

SEQ ID NO: 362366 - DNA, 33 bp, Homo sapien
gtcggttaaagggtaccatcatgcagtaacgta

SEQ ID NO: 362367 - DNA, 33 bp, Homo sapien
aagtacgtggggaagcagcaaagatggaggaca

SEQ ID NO: 362368 - DNA, 33 bp, Homo sapien
aagtacgtggggaagcggcaaagatggaggaca

SEQ ID NO: 362369 - DNA, 33 bp, Homo sapien
actcatccagaggaaaccgtgagttctcaatga

SEQ ID NO: 362370 - DNA, 33 bp, Homo sapien
actcatccagaggaaatcgtgagttctcaatga

SEQ ID NO: 362371 - DNA, 33 bp, Homo sapien
gataccatccaagtcaaatggtttgtttcagct

SEQ ID NO: 362372 - DNA, 33 bp, Homo sapien
gataccatccaagtcacatggtttgtttcagct

SEQ ID NO: 362373 - DNA, 33 bp, Homo sapien
tgtatccatctgtcccactcgtatctatgtatc

SEQ ID NO: 362374 - DNA, 33 bp, Homo sapien
tgtatccatctgtcccgctcgtatctatgtatc

SEQ ID NO: 362375 - DNA, 33 bp, Homo sapien
tcccgattttcccaaactgtggtggattgcaga

SEQ ID NO: 362376 - DNA, 33 bp, Homo sapien
tcccgattttcccaaagtgtggtggattgcaga

SEQ ID NO: 362377 - DNA, 33 bp, Homo sapien
gttggttgccacaaccagcattgcaggctcagg

SEQ ID NO: 362378 - DNA, 33 bp, Homo sapien
gttggttgccacaaccggcattgcaggctcagg

SEQ ID NO: 362379 - DNA, 33 bp, Homo sapien
tcgtgggcaaagacaacggcaaataaggatatt

SEQ ID NO: 362380 - DNA, 33 bp, Homo sapien
tcgtgggcaaagacaatggcaaataaggatatt

SEQ ID NO: 362381 - DNA, 33 bp, Homo sapien
atagcaacagaaaactcaaacacaaaatgacca

SEQ ID NO: 362382 - DNA, 33 bp, Homo sapien
atagcaacagaaaactgaaacacaaaatgacca

SEQ ID NO: 362383 - DNA, 33 bp, Homo sapien
tgcttagtttccatgccagtaaaataagacatg

SEQ ID NO: 362384 - DNA, 33 bp, Homo sapien
tgcttagtttccatgctagtaaaataagacatg

SEQ ID NO: 362385 - DNA, 33 bp, Homo sapien
cagccactttgtgccacaagggaagacatctcc

SEQ ID NO: 362386 - DNA, 33 bp, Homo sapien
cagccactttgtgccataagggaagacatctcc

SEQ ID NO: 362387 - DNA, 33 bp, Homo sapien
aaaacagatgaaggacaaggagaaaaaaaatca

SEQ ID NO: 362388 - DNA, 33 bp, Homo sapien
aaaacagatgaaggacgaggagaaaaaaaatca

SEQ ID NO: 362389 - DNA, 33 bp, Homo sapien
gcgcttgtccttcatcacaggcctgggtgatgt

SEQ ID NO: 362390 - DNA, 33 bp, Homo sapien
gcgcttgtccttcatcgcaggcctgggtgatgt

SEQ ID NO: 362391 - DNA, 33 bp, Homo sapien
aatgatccacatcaggaattttaagagggaaat

SEQ ID NO: 362392 - DNA, 33 bp, Homo sapien
aatgatccacatcagggattttaagagggaaat

SEQ ID NO: 362393 - DNA, 33 bp, Homo sapien
ggacgttaagaaaccaactcagctgggtgcctt

SEQ ID NO: 362394 - DNA, 33 bp, Homo sapien
ggacgttaagaaaccatctcagctgggtgcctt

SEQ ID NO: 362395 - DNA, 33 bp, Homo sapien
cattttatcactcaaaaaacctcagccgtgggt

SEQ ID NO: 362396 - DNA, 33 bp, Homo sapien
cattttatcactcaaagaacctcagccgtgggt

SEQ ID NO: 362397 - DNA, 33 bp, Homo sapien
agggaggtgagtatgaccattacttgtgtctaa

SEQ ID NO: 362398 - DNA, 33 bp, Homo sapien
agggaggtgagtatgatcattacttgtgtctaa

SEQ ID NO: 362399 - DNA, 33 bp, Homo sapien
cgattcacagaagatacggggcagatgcaatag

SEQ ID NO: 362400 - DNA, 33 bp, Homo sapien
cgattcacagaagatagggggcagatgcaatag

SEQ ID NO: 362401 - DNA, 33 bp, Homo sapien
aatgattgagttgtagccattctcatcacaccg

SEQ ID NO: 362402 - DNA, 33 bp, Homo sapien
aatgattgagttgtaggcattctcatcacaccg

SEQ ID NO: 362403 - DNA, 33 bp, Homo sapien
ggacgcatgatcaggcaatagcagggaatccca

SEQ ID NO: 362404 - DNA, 33 bp, Homo sapien
ggacgcatgatcaggccatagcagggaatccca

SEQ ID NO: 362405 - DNA, 33 bp, Homo sapien
aagcaggtttcaaacacagtgtggagaatgagg

SEQ ID NO: 362406 - DNA, 33 bp, Homo sapien
aagcaggtttcaaacagagtgtggagaatgagg

SEQ ID NO: 362407 - DNA, 33 bp, Homo sapien
gtgattctcgtaatcacgtgttgtttagaataa

SEQ ID NO: 362408 - DNA, 33 bp, Homo sapien
gtgattctcgtaatcatgtgttgtttagaataa

SEQ ID NO: 362409 - DNA, 33 bp, Homo sapien
atgtaagtacagaaacaaatccgtaaggcaggt

SEQ ID NO: 362410 - DNA, 33 bp, Homo sapien
atgtaagtacagaaacgaatccgtaaggcaggt

SEQ ID NO: 362411 - DNA, 33 bp, Homo sapien
gtgcagaaagacaggaagttcatgtggacagag

SEQ ID NO: 362412 - DNA, 33 bp, Homo sapien
gtgcagaaagacaggaggttcatgtggacagag

SEQ ID NO: 362413 - DNA, 33 bp, Homo sapien
ctcaggctgagtttcaaaaagctgtggagggct

SEQ ID NO: 362414 - DNA, 33 bp, Homo sapien
ctcaggctgagtttcagaaagctgtggagggct

SEQ ID NO: 362415 - DNA, 33 bp, Homo sapien
gaggacaggacaaaccagccccctcggacagac

SEQ ID NO: 362416 - DNA, 33 bp, Homo sapien
gaggacaggacaaaccggccccctcggacagac

SEQ ID NO: 362417 - DNA, 33 bp, Homo sapien
aagcgaaacccagagaactagggcagcactgcc

SEQ ID NO: 362418 - DNA, 33 bp, Homo sapien
aagcgaaacccagagagctagggcagcactgcc

SEQ ID NO: 362419 - DNA, 33 bp, Homo sapien
agtgccctggtttccaaagtgatagaggtcaga

SEQ ID NO: 362420 - DNA, 33 bp, Homo sapien
agtgccctggtttccagagtgatagaggtcaga

SEQ ID NO: 362421 - DNA, 33 bp, Homo sapien
agtgatagaggtcagacgtgcctggccacacgc

SEQ ID NO: 362422 - DNA, 33 bp, Homo sapien
agtgatagaggtcagatgtgcctggccacacgc

SEQ ID NO: 362423 - DNA, 33 bp, Homo sapien
cagatgctgctgtgaacgtattgttttaggtgt

SEQ ID NO: 362424 - DNA, 33 bp, Homo sapien
cagatgctgctgtgaaggtattgttttaggtgt

SEQ ID NO: 362425 - DNA, 33 bp, Homo sapien
tggaacacagccttacgagctgtcatgtccccc

SEQ ID NO: 362426 - DNA, 33 bp, Homo sapien
tggaacacagccttactagctgtcatgtccccc

SEQ ID NO: 362427 - DNA, 33 bp, Homo sapien
cactttgtcctctccaactggttattgcaatca

SEQ ID NO: 362428 - DNA, 33 bp, Homo sapien
cactttgtcctctccatctggttattgcaatca

SEQ ID NO: 362429 - DNA, 33 bp, Homo sapien
ctggctgattttaagaactgctataaacagcag

SEQ ID NO: 362430 - DNA, 33 bp, Homo sapien
ctggctgattttaagacctgctataaacagcag

SEQ ID NO: 362431 - DNA, 33 bp, Homo sapien
ggaaaactagtaccccacagaatcagtggaaat

SEQ ID NO: 362432 - DNA, 33 bp, Homo sapien
ggaaaactagtaccccgcagaatcagtggaaat

SEQ ID NO: 362433 - DNA, 33 bp, Homo sapien
agatttcattagatcacaaagggctggaatgca

SEQ ID NO: 362434 - DNA, 33 bp, Homo sapien
agatttcattagatcagaaagggctggaatgca

SEQ ID NO: 362435 - DNA, 33 bp, Homo sapien
tttctcctgggtgacaacttgcctggaatttct

SEQ ID NO: 362436 - DNA, 33 bp, Homo sapien
tttctcctgggtgacaccttgcctggaatttct

SEQ ID NO: 362437 - DNA, 33 bp, Homo sapien
gggtgttgcagctgagcacaaacaggggagaaa

SEQ ID NO: 362438 - DNA, 33 bp, Homo sapien
gggtgttgcagctgagtacaaacaggggagaaa

SEQ ID NO: 362439 - DNA, 33 bp, Homo sapien
catacaagtcatgaagaaatgaatttaatagtg

SEQ ID NO: 362440 - DNA, 33 bp, Homo sapien
catacaagtcatgaaggaatgaatttaatagtg

SEQ ID NO: 362441 - DNA, 33 bp, Homo sapien
acagatgcagcattaaagatgaatgcatttgaa

SEQ ID NO: 362442 - DNA, 33 bp, Homo sapien
acagatgcagcattaaggatgaatgcatttgaa

SEQ ID NO: 362443 - DNA, 33 bp, Homo sapien
tgcccttcctgtcaccacggaattagccctggg

SEQ ID NO: 362444 - DNA, 33 bp, Homo sapien
tgcccttcctgtcaccgcggaattagccctggg

SEQ ID NO: 362445 - DNA, 33 bp, Homo sapien
gtccatgcaccaagctcaaccctggagacagag

SEQ ID NO: 362446 - DNA, 33 bp, Homo sapien
gtccatgcaccaagcttaaccctggagacagag

SEQ ID NO: 362447 - DNA, 33 bp, Homo sapien
tcactcatttagcaaccattttctgagcagaat

SEQ ID NO: 362448 - DNA, 33 bp, Homo sapien
tcactcatttagcaactattttctgagcagaat

SEQ ID NO: 362449 - DNA, 33 bp, Homo sapien
atcttcctactcgtcaagagtccccattcatcc

SEQ ID NO: 362450 - DNA, 33 bp, Homo sapien
atcttcctactcgtcaggagtccccattcatcc

SEQ ID NO: 362451 - DNA, 33 bp, Homo sapien
ttcccataacacccaacacagacagatgctagg

SEQ ID NO: 362452 - DNA, 33 bp, Homo sapien
ttcccataacacccaagacagacagatgctagg

SEQ ID NO: 362453 - DNA, 33 bp, Homo sapien
taagccactgtgtctggcaagagagctttgaat

SEQ ID NO: 362454 - DNA, 33 bp, Homo sapien
taagccactgtgtctgtcaagagagctttgaat

SEQ ID NO: 362455 - DNA, 33 bp, Homo sapien
acaaatttgaaactctcaaggaaaacacaagga

SEQ ID NO: 362456 - DNA, 33 bp, Homo sapien
acaaatttgaaactctgaaggaaaacacaagga

SEQ ID NO: 362457 - DNA, 33 bp, Homo sapien
acctgtttccccacacgcatggactttacatat

SEQ ID NO: 362458 - DNA, 33 bp, Homo sapien
acctgtttccccacactcatggactttacatat

SEQ ID NO: 362459 - DNA, 33 bp, Homo sapien
tgaggcttgtgaaacactacaattttgaggcag

SEQ ID NO: 362460 - DNA, 33 bp, Homo sapien
tgaggcttgtgaaacagtacaattttgaggcag

SEQ ID NO: 362461 - DNA, 33 bp, Homo sapien
gggaaaaacaaaaaaaaatgcacaactgtgtgg

SEQ ID NO: 362462 - DNA, 33 bp, Homo sapien
gggaaaaacaaaaaaagatgcacaactgtgtgg

SEQ ID NO: 362463 - DNA, 33 bp, Homo sapien
aattggatatgtttgccaagctattggggcttt

SEQ ID NO: 362464 - DNA, 33 bp, Homo sapien
aattggatatgtttgctaagctattggggcttt

SEQ ID NO: 362465 - DNA, 33 bp, Homo sapien
agaactgcaagtctccacgtcgggtggcacaga

SEQ ID NO: 362466 - DNA, 33 bp, Homo sapien
agaactgcaagtctccgcgtcgggtggcacaga

SEQ ID NO: 362467 - DNA, 33 bp, Homo sapien
gtttctcaagagtctacaataacctagctcccg

SEQ ID NO: 362468 - DNA, 33 bp, Homo sapien
gtttctcaagagtctataataacctagctcccg

SEQ ID NO: 362469 - DNA, 33 bp, Homo sapien
ggctttgaagagcctcacacacaggcccgctgg

SEQ ID NO: 362470 - DNA, 33 bp, Homo sapien
ggctttgaagagcctcgcacacaggcccgctgg

SEQ ID NO: 362471 - DNA, 33 bp, Homo sapien
ggataatgatacttgccctatttccagcatggg

SEQ ID NO: 362472 - DNA, 33 bp, Homo sapien
ggataatgatacttgctctatttccagcatggg

SEQ ID NO: 362473 - DNA, 33 bp, Homo sapien
gggatgagggaggctgaaaatagatggaacagg

SEQ ID NO: 362474 - DNA, 33 bp, Homo sapien
gggatgagggaggctggaaatagatggaacagg

SEQ ID NO: 362475 - DNA, 33 bp, Homo sapien
ccactgtgtccgaccaacgtgttaccttcttga

SEQ ID NO: 362476 - DNA, 33 bp, Homo sapien
ccactgtgtccgaccaccgtgttaccttcttga

SEQ ID NO: 362477 - DNA, 33 bp, Homo sapien
caacaccccttttaagcatgaagtagccagaaa

SEQ ID NO: 362478 - DNA, 33 bp, Homo sapien
caacaccccttttaagtatgaagtagccagaaa

SEQ ID NO: 362479 - DNA, 33 bp, Homo sapien
gattggagagcgtgtaagcaaaactgctcggca

SEQ ID NO: 362480 - DNA, 33 bp, Homo sapien
gattggagagcgtgtatgcaaaactgctcggca

SEQ ID NO: 362481 - DNA, 33 bp, Homo sapien
agatcccgcacacccacagttcattcacaataa

SEQ ID NO: 362482 - DNA, 33 bp, Homo sapien
agatcccgcacacccatagttcattcacaataa

SEQ ID NO: 362483 - DNA, 33 bp, Homo sapien
ggactgcgatttcatacatggggaaaccgaggc

SEQ ID NO: 362484 - DNA, 33 bp, Homo sapien
ggactgcgatttcatagatggggaaaccgaggc

SEQ ID NO: 362485 - DNA, 33 bp, Homo sapien
cacagaggccctgttcgagttcctcctctctct

SEQ ID NO: 362486 - DNA, 33 bp, Homo sapien
cacagaggccctgttctagttcctcctctctct

SEQ ID NO: 362487 - DNA, 33 bp, Homo sapien
gaagctcagagacccccccatgctgagttaaag

SEQ ID NO: 362488 - DNA, 33 bp, Homo sapien
gaagctcagagacccctccatgctgagttaaag

SEQ ID NO: 362489 - DNA, 33 bp, Homo sapien
gaagggacttgcttccagccccagtggagccag

SEQ ID NO: 362490 - DNA, 33 bp, Homo sapien
gaagggacttgcttccggccccagtggagccag

SEQ ID NO: 362491 - DNA, 33 bp, Homo sapien
ctgggcaacgtccagaaagcgccaagtagtgcc

SEQ ID NO: 362492 - DNA, 33 bp, Homo sapien
ctgggcaacgtccagagagcgccaagtagtgcc

SEQ ID NO: 362493 - DNA, 33 bp, Homo sapien
cacatggaagattgcaactttttagtccaaacg

SEQ ID NO: 362494 - DNA, 33 bp, Homo sapien
cacatggaagattgcagctttttagtccaaacg

SEQ ID NO: 362495 - DNA, 33 bp, Homo sapien
acttgcttcacatacacactggtaaaatctgtt

SEQ ID NO: 362496 - DNA, 33 bp, Homo sapien
acttgcttcacatacatactggtaaaatctgtt

SEQ ID NO: 362497 - DNA, 33 bp, Homo sapien
aggacaagtaaccatgaaagtgacaaaggatct

SEQ ID NO: 362498 - DNA, 33 bp, Homo sapien
aggacaagtaaccatggaagtgacaaaggatct

SEQ ID NO: 362499 - DNA, 33 bp, Homo sapien
tccagtgagggagactcaaatgcagggacccag

SEQ ID NO: 362500 - DNA, 33 bp, Homo sapien
tccagtgagggagactgaaatgcagggacccag

SEQ ID NO: 362501 - DNA, 33 bp, Homo sapien
gtgacctggcattcaaccagagggtaaggagtg

SEQ ID NO: 362502 - DNA, 33 bp, Homo sapien
gtgacctggcattcaagcagagggtaaggagtg

SEQ ID NO: 362503 - DNA, 33 bp, Homo sapien
tctgttgttgccttcacgtccacgtgtacccat

SEQ ID NO: 362504 - DNA, 33 bp, Homo sapien
tctgttgttgccttcatgtccacgtgtacccat

SEQ ID NO: 362505 - DNA, 33 bp, Homo sapien
gtgtaaattgcagatacgtgtacaccgcccttc

SEQ ID NO: 362506 - DNA, 33 bp, Homo sapien
gtgtaaattgcagatatgtgtacaccgcccttc

SEQ ID NO: 362507 - DNA, 33 bp, Homo sapien
agtagcagcaacttcaaaagtgagttagggctg

SEQ ID NO: 362508 - DNA, 33 bp, Homo sapien
agtagcagcaacttcagaagtgagttagggctg

SEQ ID NO: 362509 - DNA, 33 bp, Homo sapien
gagaacttgtactgaacccattaggacagagga

SEQ ID NO: 362510 - DNA, 33 bp, Homo sapien
gagaacttgtactgaatccattaggacagagga

SEQ ID NO: 362511 - DNA, 33 bp, Homo sapien
agcactggaggctagaatacccacattgcagat

SEQ ID NO: 362512 - DNA, 33 bp, Homo sapien
agcactggaggctagagtacccacattgcagat

SEQ ID NO: 362513 - DNA, 33 bp, Homo sapien
tggtgctgcattttgtcaaacattcatgcgtgt

SEQ ID NO: 362514 - DNA, 33 bp, Homo sapien
tggtgctgcattttgtgaaacattcatgcgtgt

SEQ ID NO: 362515 - DNA, 33 bp, Homo sapien
atgctgtaaggcagatcatcagaccttatttct

SEQ ID NO: 362516 - DNA, 33 bp, Homo sapien
atgctgtaaggcagatgatcagaccttatttct

SEQ ID NO: 362517 - DNA, 33 bp, Homo sapien
cattgcaagctgtagaataagcctcacatgggc

SEQ ID NO: 362518 - DNA, 33 bp, Homo sapien
cattgcaagctgtagagtaagcctcacatgggc

SEQ ID NO: 362519 - DNA, 33 bp, Homo sapien
gcttatctcctcctccacgctgtgtaaatgctc

SEQ ID NO: 362520 - DNA, 33 bp, Homo sapien
gcttatctcctcctccgcgctgtgtaaatgctc

SEQ ID NO: 362521 - DNA, 33 bp, Homo sapien
gggtggcagggggctgacaatgagcttgtgtgt

SEQ ID NO: 362522 - DNA, 33 bp, Homo sapien
gggtggcagggggctggcaatgagcttgtgtgt

SEQ ID NO: 362523 - DNA, 33 bp, Homo sapien
gatcgtgtgattgaaacattattcttgtagttt

SEQ ID NO: 362524 - DNA, 33 bp, Homo sapien
gatcgtgtgattgaaagattattcttgtagttt

SEQ ID NO: 362525 - DNA, 33 bp, Homo sapien
aattcctagcttgcgacctgcgcttctgacaga

SEQ ID NO: 362526 - DNA, 33 bp, Homo sapien
aattcctagcttgcgatctgcgcttctgacaga

SEQ ID NO: 362527 - DNA, 33 bp, Homo sapien
tgatcatggatcacttaaagagaacttgtgttc

SEQ ID NO: 362528 - DNA, 33 bp, Homo sapien
tgatcatggatcacttgaagagaacttgtgttc

SEQ ID NO: 362529 - DNA, 33 bp, Homo sapien
gagagaggaagtacacaagaaaaaagaagacac

SEQ ID NO: 362530 - DNA, 33 bp, Homo sapien
gagagaggaagtacacgagaaaaaagaagacac

SEQ ID NO: 362531 - DNA, 33 bp, Homo sapien
ggggagcttctgtgtacaggtatgtatggtgac

SEQ ID NO: 362532 - DNA, 33 bp, Homo sapien
ggggagcttctgtgtataggtatgtatggtgac

SEQ ID NO: 362533 - DNA, 33 bp, Homo sapien
gggtgagggggtccagcagcattctgattcttt

SEQ ID NO: 362534 - DNA, 33 bp, Homo sapien
gggtgagggggtccaggagcattctgattcttt

SEQ ID NO: 362535 - DNA, 33 bp, Homo sapien
cctcaaagtggagacaaattttcacagggccta

SEQ ID NO: 362536 - DNA, 33 bp, Homo sapien
cctcaaagtggagacagattttcacagggccta

SEQ ID NO: 362537 - DNA, 33 bp, Homo sapien
cctaatagcaatttcacggggctgttgcgagga

SEQ ID NO: 362538 - DNA, 33 bp, Homo sapien
cctaatagcaatttcatggggctgttgcgagga

SEQ ID NO: 362539 - DNA, 33 bp, Homo sapien
agagaggagcacccaactaatgtctggtcatgg

SEQ ID NO: 362540 - DNA, 33 bp, Homo sapien
agagaggagcacccaagtaatgtctggtcatgg

SEQ ID NO: 362541 - DNA, 33 bp, Homo sapien
tgcctgactctaaagcacccttcttcccactct

SEQ ID NO: 362542 - DNA, 33 bp, Homo sapien
tgcctgactctaaagcccccttcttcccactct

SEQ ID NO: 362543 - DNA, 33 bp, Homo sapien
tgaggttgtataactaccacctccatctagttc

SEQ ID NO: 362544 - DNA, 33 bp, Homo sapien
tgaggttgtataactatcacctccatctagttc

SEQ ID NO: 362545 - DNA, 33 bp, Homo sapien
agtggtaacttgggaacgctctgaaaatggccc

SEQ ID NO: 362546 - DNA, 33 bp, Homo sapien
agtggtaacttgggaatgctctgaaaatggccc

SEQ ID NO: 362547 - DNA, 33 bp, Homo sapien
agctgtgcagtttgcaccattctagaaccagct

SEQ ID NO: 362548 - DNA, 33 bp, Homo sapien
agctgtgcagtttgcatcattctagaaccagct

SEQ ID NO: 362549 - DNA, 33 bp, Homo sapien
agccaattcaaagagaatccctcacatggctgt

SEQ ID NO: 362550 - DNA, 33 bp, Homo sapien
agccaattcaaagagattccctcacatggctgt

SEQ ID NO: 362551 - DNA, 33 bp, Homo sapien
caggcacccaggccgcgctgaaccactccatgt

SEQ ID NO: 362552 - DNA, 33 bp, Homo sapien
caggcacccaggccgctctgaaccactccatgt

SEQ ID NO: 362553 - DNA, 33 bp, Homo sapien
ccgcattcatggcagtcacacatctgcacgcag

SEQ ID NO: 362554 - DNA, 33 bp, Homo sapien
ccgcattcatggcagttacacatctgcacgcag

SEQ ID NO: 362555 - DNA, 33 bp, Homo sapien
gctaggaggctagctacaggcggtgacgtgcgg

SEQ ID NO: 362556 - DNA, 33 bp, Homo sapien
gctaggaggctagctataggcggtgacgtgcgg

SEQ ID NO: 362557 - DNA, 33 bp, Homo sapien
atttttctgtgcttacccacacccagatggaag

SEQ ID NO: 362558 - DNA, 33 bp, Homo sapien
atttttctgtgcttactcacacccagatggaag

SEQ ID NO: 362559 - DNA, 33 bp, Homo sapien
ttctttccattgaatcacgtaactcacgtacat

SEQ ID NO: 362560 - DNA, 33 bp, Homo sapien
ttctttccattgaatcccgtaactcacgtacat

SEQ ID NO: 362561 - DNA, 33 bp, Homo sapien
cctttccaccacaaagaaccccacgaggagatg

SEQ ID NO: 362562 - DNA, 33 bp, Homo sapien
cctttccaccacaaaggaccccacgaggagatg

SEQ ID NO: 362563 - DNA, 33 bp, Homo sapien
ctgcttactatgattacggtcattagctagtca

SEQ ID NO: 362564 - DNA, 33 bp, Homo sapien
ctgcttactatgattatggtcattagctagtca

SEQ ID NO: 362565 - DNA, 33 bp, Homo sapien
ttttatcaataacaagaagaaatacgaaaaaac

SEQ ID NO: 362566 - DNA, 33 bp, Homo sapien
ttttatcaataacaagtagaaatacgaaaaaac

SEQ ID NO: 362567 - DNA, 33 bp, Homo sapien
gcatgaaatgatgaccacagagactgcatgaaa

SEQ ID NO: 362568 - DNA, 33 bp, Homo sapien
gcatgaaatgatgaccgcagagactgcatgaaa

SEQ ID NO: 362569 - DNA, 33 bp, Homo sapien
tgaagttgcagttttcaaactttcagggccaga

SEQ ID NO: 362570 - DNA, 33 bp, Homo sapien
tgaagttgcagttttccaactttcagggccaga

SEQ ID NO: 362571 - DNA, 33 bp, Homo sapien
tgtgtactgttggggcacataagacctgtttca

SEQ ID NO: 362572 - DNA, 33 bp, Homo sapien
tgtgtactgttggggcgcataagacctgtttca

SEQ ID NO: 362573 - DNA, 33 bp, Homo sapien
cccgaagcgcgtctggaaggtcacgtaccggct

SEQ ID NO: 362574 - DNA, 33 bp, Homo sapien
cccgaagcgcgtctgggaggtcacgtaccggct

SEQ ID NO: 362575 - DNA, 33 bp, Homo sapien
tgaattgttaaagccacgaccggaacacgggag

SEQ ID NO: 362576 - DNA, 33 bp, Homo sapien
tgaattgttaaagccatgaccggaacacgggag

SEQ ID NO: 362577 - DNA, 33 bp, Homo sapien
taacagaaatctgtgaccccctcaagcacaccg

SEQ ID NO: 362578 - DNA, 33 bp, Homo sapien
taacagaaatctgtgatcccctcaagcacaccg

SEQ ID NO: 362579 - DNA, 33 bp, Homo sapien
tattgcttttaatggacaaacaaatgttactct

SEQ ID NO: 362580 - DNA, 33 bp, Homo sapien
tattgcttttaatggagaaacaaatgttactct

SEQ ID NO: 362581 - DNA, 33 bp, Homo sapien
ccagtggcctccccgcactgcaactgacaggga

SEQ ID NO: 362582 - DNA, 33 bp, Homo sapien
ccagtggcctccccgcgctgcaactgacaggga

SEQ ID NO: 362583 - DNA, 33 bp, Homo sapien
gcagactgataacccaatgcagtcaaccccggg

SEQ ID NO: 362584 - DNA, 33 bp, Homo sapien
gcagactgataacccagtgcagtcaaccccggg

SEQ ID NO: 362585 - DNA, 33 bp, Homo sapien
caactgcttgtcctaaatgtctctcccttaacc

SEQ ID NO: 362586 - DNA, 33 bp, Homo sapien
caactgcttgtcctaattgtctctcccttaacc

SEQ ID NO: 362587 - DNA, 33 bp, Homo sapien
ttggccatcctcagaccgcatggtgccgagcgc

SEQ ID NO: 362588 - DNA, 33 bp, Homo sapien
ttggccatcctcagactgcatggtgccgagcgc

SEQ ID NO: 362589 - DNA, 33 bp, Homo sapien
agtatgcaggaagccacaaaataaggcttaggt

SEQ ID NO: 362590 - DNA, 33 bp, Homo sapien
agtatgcaggaagccagaaaataaggcttaggt

SEQ ID NO: 362591 - DNA, 33 bp, Homo sapien
gccagagcctatggtaaaaaaggtctgtggggc

SEQ ID NO: 362592 - DNA, 33 bp, Homo sapien
gccagagcctatggtagaaaaggtctgtggggc

SEQ ID NO: 362593 - DNA, 33 bp, Homo sapien
tgggcctactgtgtatcaggcaccgctatgtgc

SEQ ID NO: 362594 - DNA, 33 bp, Homo sapien
tgggcctactgtgtatgaggcaccgctatgtgc

SEQ ID NO: 362595 - DNA, 33 bp, Homo sapien
aggcgctggaccagtccgacaacgatatgtccg

SEQ ID NO: 362596 - DNA, 33 bp, Homo sapien
aggcgctggaccagtctgacaacgatatgtccg

SEQ ID NO: 362597 - DNA, 33 bp, Homo sapien
ccccatttaaaagaataaacctcagcatttact

SEQ ID NO: 362598 - DNA, 33 bp, Homo sapien
ccccatttaaaagaatgaacctcagcatttact

SEQ ID NO: 362599 - DNA, 33 bp, Homo sapien
taataagatgactaccacacttgaacttctaaa

SEQ ID NO: 362600 - DNA, 33 bp, Homo sapien
taataagatgactaccgcacttgaacttctaaa

SEQ ID NO: 362601 - DNA, 33 bp, Homo sapien
gagtgcctaggatgataaactgcttcacaagtg

SEQ ID NO: 362602 - DNA, 33 bp, Homo sapien
gagtgcctaggatgatgaactgcttcacaagtg

SEQ ID NO: 362603 - DNA, 33 bp, Homo sapien
cggtgtattgcccagaacaactagcccagaagc

SEQ ID NO: 362604 - DNA, 33 bp, Homo sapien
cggtgtattgcccagagcaactagcccagaagc

SEQ ID NO: 362605 - DNA, 33 bp, Homo sapien
ccaccctggaaagaaacaccttctcgttggata

SEQ ID NO: 362606 - DNA, 33 bp, Homo sapien
ccaccctggaaagaaataccttctcgttggata

SEQ ID NO: 362607 - DNA, 33 bp, Homo sapien
ccaggtaacacagaaaaaaaggcgaagggagac

SEQ ID NO: 362608 - DNA, 33 bp, Homo sapien
ccaggtaacacagaaagaaaggcgaagggagac

SEQ ID NO: 362609 - DNA, 33 bp, Homo sapien
tgtagatattctagaacttcccaatatttaaca

SEQ ID NO: 362610 - DNA, 33 bp, Homo sapien
tgtagatattctagaagttcccaatatttaaca

SEQ ID NO: 362611 - DNA, 33 bp, Homo sapien
tgaagattggctcccaatgataggaaactgctg

SEQ ID NO: 362612 - DNA, 33 bp, Homo sapien
tgaagattggctcccagtgataggaaactgctg

SEQ ID NO: 362613 - DNA, 33 bp, Homo sapien
cccctttgttcccagaagcgctgcaggtttaac

SEQ ID NO: 362614 - DNA, 33 bp, Homo sapien
cccctttgttcccagaggcgctgcaggtttaac

SEQ ID NO: 362615 - DNA, 33 bp, Homo sapien
tgtatagtccttaatagtatgaaggcattgtgc

SEQ ID NO: 362616 - DNA, 33 bp, Homo sapien
tgtatagtccttaatattatgaaggcattgtgc

SEQ ID NO: 362617 - DNA, 33 bp, Homo sapien
cagttacataaccactcaagttatatgcgatca

SEQ ID NO: 362618 - DNA, 33 bp, Homo sapien
cagttacataaccactgaagttatatgcgatca

SEQ ID NO: 362619 - DNA, 33 bp, Homo sapien
aattaactgtggccttcaacttcatcagctatg

SEQ ID NO: 362620 - DNA, 33 bp, Homo sapien
aattaactgtggccttgaacttcatcagctatg

SEQ ID NO: 362621 - DNA, 33 bp, Homo sapien
attttcagtaactactcaccgcctcagagttat

SEQ ID NO: 362622 - DNA, 33 bp, Homo sapien
attttcagtaactacttaccgcctcagagttat

SEQ ID NO: 362623 - DNA, 33 bp, Homo sapien
gtgcaaagtgggtctcaagagagatgtgactgt

SEQ ID NO: 362624 - DNA, 33 bp, Homo sapien
gtgcaaagtgggtctcgagagagatgtgactgt

SEQ ID NO: 362625 - DNA, 33 bp, Homo sapien
gattccctggggcctacacaaatgtacaataca

SEQ ID NO: 362626 - DNA, 33 bp, Homo sapien
gattccctggggcctatacaaatgtacaataca

SEQ ID NO: 362627 - DNA, 33 bp, Homo sapien
caaccaaaactaagtcagaagaaaatgcgcaaa

SEQ ID NO: 362628 - DNA, 33 bp, Homo sapien
caaccaaaactaagtcggaagaaaatgcgcaaa

SEQ ID NO: 362629 - DNA, 33 bp, Homo sapien
ctgctgcctaagatcaaggaggtctatcgcttc

SEQ ID NO: 362630 - DNA, 33 bp, Homo sapien
ctgctgcctaagatcagggaggtctatcgcttc

SEQ ID NO: 362631 - DNA, 33 bp, Homo sapien
gtaggctggactcatacgaagaacgtttttgtt

SEQ ID NO: 362632 - DNA, 33 bp, Homo sapien
gtaggctggactcatatgaagaacgtttttgtt

SEQ ID NO: 362633 - DNA, 33 bp, Homo sapien
tggggctgcagggtcgaagggtgcctcccaggg

SEQ ID NO: 362634 - DNA, 33 bp, Homo sapien
tggggctgcagggtcggagggtgcctcccaggg

SEQ ID NO: 362635 - DNA, 33 bp, Homo sapien
taggtcaaagctgagacaccatgagacttccca

SEQ ID NO: 362636 - DNA, 33 bp, Homo sapien
taggtcaaagctgagataccatgagacttccca

SEQ ID NO: 362637 - DNA, 33 bp, Homo sapien
ggataaggggagagccactcgtatggaagccag

SEQ ID NO: 362638 - DNA, 33 bp, Homo sapien
ggataaggggagagccgctcgtatggaagccag

SEQ ID NO: 362639 - DNA, 33 bp, Homo sapien
gcacgttgagagtatacggtgtcctcagcacat

SEQ ID NO: 362640 - DNA, 33 bp, Homo sapien
gcacgttgagagtatatggtgtcctcagcacat

SEQ ID NO: 362641 - DNA, 33 bp, Homo sapien
gcccaatgtgaaacacagattggttcttatgta

SEQ ID NO: 362642 - DNA, 33 bp, Homo sapien
gcccaatgtgaaacacggattggttcttatgta

SEQ ID NO: 362643 - DNA, 33 bp, Homo sapien
agacccgaaggctccaatcggaaatcaacatgg

SEQ ID NO: 362644 - DNA, 33 bp, Homo sapien
agacccgaaggctccagtcggaaatcaacatgg

SEQ ID NO: 362645 - DNA, 33 bp, Homo sapien
agagtttaaaatgaaaccacggtctcccacctc

SEQ ID NO: 362646 - DNA, 33 bp, Homo sapien
agagtttaaaatgaaagcacggtctcccacctc

SEQ ID NO: 362647 - DNA, 33 bp, Homo sapien
tggagaatggaaggagaagccacgtgagcaaga

SEQ ID NO: 362648 - DNA, 33 bp, Homo sapien
tggagaatggaaggagcagccacgtgagcaaga

SEQ ID NO: 362649 - DNA, 33 bp, Homo sapien
ccacaggtaggaaggaccggagccttgctctgt

SEQ ID NO: 362650 - DNA, 33 bp, Homo sapien
ccacaggtaggaaggatcggagccttgctctgt

SEQ ID NO: 362651 - DNA, 33 bp, Homo sapien
atacagataaaagtagaagctatagttactgat

SEQ ID NO: 362652 - DNA, 33 bp, Homo sapien
atacagataaaagtaggagctatagttactgat

SEQ ID NO: 362653 - DNA, 33 bp, Homo sapien
gacaggggacagagtccgaatctccaccgcttg

SEQ ID NO: 362654 - DNA, 33 bp, Homo sapien
gacaggggacagagtctgaatctccaccgcttg

SEQ ID NO: 362655 - DNA, 33 bp, Homo sapien
cgctggggctcagggacgctatgtttcttttca

SEQ ID NO: 362656 - DNA, 33 bp, Homo sapien
cgctggggctcagggatgctatgtttcttttca

SEQ ID NO: 362657 - DNA, 33 bp, Homo sapien
ggtgagggaggacttcacagaggaggcatctga

SEQ ID NO: 362658 - DNA, 33 bp, Homo sapien
ggtgagggaggacttcgcagaggaggcatctga

SEQ ID NO: 362659 - DNA, 33 bp, Homo sapien
tgcacacttagtacaaggtcagcaacactgctg

SEQ ID NO: 362660 - DNA, 33 bp, Homo sapien
tgcacacttagtacaatgtcagcaacactgctg

SEQ ID NO: 362661 - DNA, 33 bp, Homo sapien
ggcttcccagcccaaaagtacatccaagtgtgc

SEQ ID NO: 362662 - DNA, 33 bp, Homo sapien
ggcttcccagcccaaaggtacatccaagtgtgc

SEQ ID NO: 362663 - DNA, 33 bp, Homo sapien
tcatgtaaatattcagcaatgtgcttcctgtga

SEQ ID NO: 362664 - DNA, 33 bp, Homo sapien
tcatgtaaatattcagtaatgtgcttcctgtga

SEQ ID NO: 362665 - DNA, 33 bp, Homo sapien
tctgggttaccttttcactttcttgcttgtatc

SEQ ID NO: 362666 - DNA, 33 bp, Homo sapien
tctgggttaccttttcgctttcttgcttgtatc

SEQ ID NO: 362667 - DNA, 33 bp, Homo sapien
atcatcgtgaaaacgacccagcaaggcaggatc

SEQ ID NO: 362668 - DNA, 33 bp, Homo sapien
atcatcgtgaaaacgatccagcaaggcaggatc

SEQ ID NO: 362669 - DNA, 33 bp, Homo sapien
tcatcaatgagaacaccaggcggaagttcctca

SEQ ID NO: 362670 - DNA, 33 bp, Homo sapien
tcatcaatgagaacactaggcggaagttcctca

SEQ ID NO: 362671 - DNA, 33 bp, Homo sapien
tgccacagcagaaatgaaggagaaggtctggag

SEQ ID NO: 362672 - DNA, 33 bp, Homo sapien
tgccacagcagaaatgcaggagaaggtctggag

SEQ ID NO: 362673 - DNA, 33 bp, Homo sapien
tctgtaaaagcacttacgattttgcaccctgct

SEQ ID NO: 362674 - DNA, 33 bp, Homo sapien
tctgtaaaagcacttatgattttgcaccctgct

SEQ ID NO: 362675 - DNA, 33 bp, Homo sapien
gcaccctgcttcatgacggatctgcactggttt

SEQ ID NO: 362676 - DNA, 33 bp, Homo sapien
gcaccctgcttcatgatggatctgcactggttt

SEQ ID NO: 362677 - DNA, 33 bp, Homo sapien
aatatggaacgtgacactggactgagatctaag

SEQ ID NO: 362678 - DNA, 33 bp, Homo sapien
aatatggaacgtgacattggactgagatctaag

SEQ ID NO: 362679 - DNA, 33 bp, Homo sapien
cacagaagccttttacagaaggaagctggaact

SEQ ID NO: 362680 - DNA, 33 bp, Homo sapien
cacagaagccttttacggaaggaagctggaact

SEQ ID NO: 362681 - DNA, 33 bp, Homo sapien
ataggttgtagtgggacgaaatgagggagtagc

SEQ ID NO: 362682 - DNA, 33 bp, Homo sapien
ataggttgtagtgggatgaaatgagggagtagc

SEQ ID NO: 362683 - DNA, 33 bp, Homo sapien
ctgtttaatgcaggtacaattgtgtatcatata

SEQ ID NO: 362684 - DNA, 33 bp, Homo sapien
ctgtttaatgcaggtataattgtgtatcatata

SEQ ID NO: 362685 - DNA, 33 bp, Homo sapien
caccagctccaaaacgacgaaggcttttcagag

SEQ ID NO: 362686 - DNA, 33 bp, Homo sapien
caccagctccaaaacgtcgaaggcttttcagag

SEQ ID NO: 362687 - DNA, 33 bp, Homo sapien
tcccagcttagccatcaatgacttgtctaccca

SEQ ID NO: 362688 - DNA, 33 bp, Homo sapien
tcccagcttagccatcgatgacttgtctaccca

SEQ ID NO: 362689 - DNA, 33 bp, Homo sapien
acaaggaagccaatgaagggccgtaacagggat

SEQ ID NO: 362690 - DNA, 33 bp, Homo sapien
acaaggaagccaatgacgggccgtaacagggat

SEQ ID NO: 362691 - DNA, 33 bp, Homo sapien
tcccactcaggatcagaacaagctttatcatca

SEQ ID NO: 362692 - DNA, 33 bp, Homo sapien
tcccactcaggatcagtacaagctttatcatca

SEQ ID NO: 362693 - DNA, 33 bp, Homo sapien
gaaggcttcagttaccaaaccagggagagggtg

SEQ ID NO: 362694 - DNA, 33 bp, Homo sapien
gaaggcttcagttaccgaaccagggagagggtg

SEQ ID NO: 362695 - DNA, 33 bp, Homo sapien
caacagataaccctgaaaggcagcacatactca

SEQ ID NO: 362696 - DNA, 33 bp, Homo sapien
caacagataaccctgagaggcagcacatactca

SEQ ID NO: 362697 - DNA, 33 bp, Homo sapien
ctggtaagatgacatagacacacaatctcatga

SEQ ID NO: 362698 - DNA, 33 bp, Homo sapien
ctggtaagatgacatatacacacaatctcatga

SEQ ID NO: 362699 - DNA, 33 bp, Homo sapien
cctcagattttgttcaagttgactgagcaccca

SEQ ID NO: 362700 - DNA, 33 bp, Homo sapien
cctcagattttgttcaggttgactgagcaccca

SEQ ID NO: 362701 - DNA, 33 bp, Homo sapien
caagggtagctgcacacggacgtagctaccagc

SEQ ID NO: 362702 - DNA, 33 bp, Homo sapien
caagggtagctgcacagggacgtagctaccagc

SEQ ID NO: 362703 - DNA, 33 bp, Homo sapien
aattccactatccagacaatctagattagttta

SEQ ID NO: 362704 - DNA, 33 bp, Homo sapien
aattccactatccagagaatctagattagttta

SEQ ID NO: 362705 - DNA, 33 bp, Homo sapien
ggactaatgtggccaaaagtcagccttcttcct

SEQ ID NO: 362706 - DNA, 33 bp, Homo sapien
ggactaatgtggccaagagtcagccttcttcct

SEQ ID NO: 362707 - DNA, 33 bp, Homo sapien
cagatgtctgtagagaaaaggagacatcagtct

SEQ ID NO: 362708 - DNA, 33 bp, Homo sapien
cagatgtctgtagagagaaggagacatcagtct

SEQ ID NO: 362709 - DNA, 33 bp, Homo sapien
gtactgggtcatcagaccgcaaactgccgttct

SEQ ID NO: 362710 - DNA, 33 bp, Homo sapien
gtactgggtcatcagatcgcaaactgccgttct

SEQ ID NO: 362711 - DNA, 33 bp, Homo sapien
tccacaatgagtgaaccaaaaagattttatgtt

SEQ ID NO: 362712 - DNA, 33 bp, Homo sapien
tccacaatgagtgaacgaaaaagattttatgtt

SEQ ID NO: 362713 - DNA, 33 bp, Homo sapien
tgtatggattcagtgacgggtaatttggcaaaa

SEQ ID NO: 362714 - DNA, 33 bp, Homo sapien
tgtatggattcagtgaggggtaatttggcaaaa

SEQ ID NO: 362715 - DNA, 33 bp, Homo sapien; identical to SEQ ID NO: 362713

SEQ ID NO: 362716 - DNA, 33 bp, Homo sapien; identical to SEQ ID NO: 362714

SEQ ID NO: 362717 - DNA, 33 bp, Homo sapien
gaaaacaatgtagaaacagttccatgtggccag

SEQ ID NO: 362718 - DNA, 33 bp, Homo sapien
gaaaacaatgtagaaagagttccatgtggccag

SEQ ID NO: 362719 - DNA, 33 bp, Homo sapien; identical to SEQ ID NO: 362717

SEQ ID NO: 362720 - DNA, 33 bp, Homo sapien; identical to SEQ ID NO: 362718

SEQ ID NO: 362721 - DNA, 33 bp, Homo sapien
ccagcactgtgtaaagcccttcactttcatgat

SEQ ID NO: 362722 - DNA, 33 bp, Homo sapien
ccagcactgtgtaaagtccttcactttcatgat

SEQ ID NO: 362723 - DNA, 33 bp, Homo sapien
gagctcagttagatgaagtgactcataccctcc

SEQ ID NO: 362724 - DNA, 33 bp, Homo sapien
gagctcagttagatgaggtgactcataccctcc

SEQ ID NO: 362725 - DNA, 33 bp, Homo sapien
tgatatgaacgttaaaaacctgctcactgaacg

SEQ ID NO: 362726 - DNA, 33 bp, Homo sapien
tgatatgaacgttaaatacctgctcactgaacg

SEQ ID NO: 362727 - DNA, 33 bp, Homo sapien
agagtcaaattaccgaccacttgtgcgggaaaa

SEQ ID NO: 362728 - DNA, 33 bp, Homo sapien
agagtcaaattaccgagcacttgtgcgggaaaa

SEQ ID NO: 362729 - DNA, 33 bp, Homo sapien
gaaaacggtgcactcacgtactcatgttctgcc

SEQ ID NO: 362730 - DNA, 33 bp, Homo sapien
gaaaacggtgcactcatgtactcatgttctgcc

SEQ ID NO: 362731 - DNA, 33 bp, Homo sapien
caaccatgaaggaaaaaccaagagaattgtaga

SEQ ID NO: 362732 - DNA, 33 bp, Homo sapien
caaccatgaaggaaaatccaagagaattgtaga

SEQ ID NO: 362733 - DNA, 33 bp, Homo sapien
ttatgtgctatgttcgcatgacacacactggta

SEQ ID NO: 362734 - DNA, 33 bp, Homo sapien
ttatgtgctatgttcgtatgacacacactggta

SEQ ID NO: 362735 - DNA, 33 bp, Homo sapien
gaggaacaaaggttgaactcaatgtcatcagtc

SEQ ID NO: 362736 - DNA, 33 bp, Homo sapien
gaggaacaaaggttgatctcaatgtcatcagtc

SEQ ID NO: 362737 - DNA, 33 bp, Homo sapien
gccagtcagtgtacggcatttttgtcatagcag

SEQ ID NO: 362738 - DNA, 33 bp, Homo sapien
gccagtcagtgtacggtatttttgtcatagcag

SEQ ID NO: 362739 - DNA, 33 bp, Homo sapien
cccctgtgggattctcaccacgtctctcctccc

SEQ ID NO: 362740 - DNA, 33 bp, Homo sapien
cccctgtgggattctcgccacgtctctcctccc

SEQ ID NO: 362741 - DNA, 33 bp, Homo sapien
tttgtagctctcacaactcccaagtgtcatggg

SEQ ID NO: 362742 - DNA, 33 bp, Homo sapien
tttgtagctctcacaattcccaagtgtcatggg

SEQ ID NO: 362743 - DNA, 33 bp, Homo sapien
ccccatgtagtagagtcaaagacatgaacccag

SEQ ID NO: 362744 - DNA, 33 bp, Homo sapien
ccccatgtagtagagtgaaagacatgaacccag

SEQ ID NO: 362745 - DNA, 33 bp, Homo sapien
gtctccagcttgtagaaagtttgtcgtgggact

SEQ ID NO: 362746 - DNA, 33 bp, Homo sapien
gtctccagcttgtagacagtttgtcgtgggact

SEQ ID NO: 362747 - DNA, 33 bp, Homo sapien
ggcaaggtcagtctgaaagtgaaatacagaaca

SEQ ID NO: 362748 - DNA, 33 bp, Homo sapien
ggcaaggtcagtctgagagtgaaatacagaaca

SEQ ID NO: 362749 - DNA, 33 bp, Homo sapien
cagagagaggtgtccacgaacaatcctagtagt

SEQ ID NO: 362750 - DNA, 33 bp, Homo sapien
cagagagaggtgtccatgaacaatcctagtagt

SEQ ID NO: 362751 - DNA, 33 bp, Homo sapien
ttttactctgttttgaagatcaagggtgtctcc

SEQ ID NO: 362752 - DNA, 33 bp, Homo sapien
ttttactctgttttgatgatcaagggtgtctcc

SEQ ID NO: 362753 - DNA, 33 bp, Homo sapien
gactggtatctgaagaagagagaatgaaggggg

SEQ ID NO: 362754 - DNA, 33 bp, Homo sapien
gactggtatctgaagatgagagaatgaaggggg

SEQ ID NO: 362755 - DNA, 33 bp, Homo sapien
agacaacctttgctcacagtaaagttctgcccc

SEQ ID NO: 362756 - DNA, 33 bp, Homo sapien
agacaacctttgctcatagtaaagttctgcccc

SEQ ID NO: 362757 - DNA, 33 bp, Homo sapien
cctctctgcccacggaaggttcactgaaatgac

SEQ ID NO: 362758 - DNA, 33 bp, Homo sapien
cctctctgcccacggacggttcactgaaatgac

SEQ ID NO: 362759 - DNA, 33 bp, Homo sapien
ggaaagaaaatgtgaccgacaaaagtgggttat

SEQ ID NO: 362760 - DNA, 33 bp, Homo sapien
ggaaagaaaatgtgactgacaaaagtgggttat

SEQ ID NO: 362761 - DNA, 33 bp, Homo sapien
agaacgttaaaggcaacgcccacacagcctgtg

SEQ ID NO: 362762 - DNA, 33 bp, Homo sapien
agaacgttaaaggcaatgcccacacagcctgtg

SEQ ID NO: 362763 - DNA, 33 bp, Homo sapien
aaaaaccatacacacaatgaaatgtcagtggat

SEQ ID NO: 362764 - DNA, 33 bp, Homo sapien
aaaaaccatacacacagtgaaatgtcagtggat

SEQ ID NO: 362765 - DNA, 33 bp, Homo sapien; identical to SEQ ID NO: 362763

SEQ ID NO: 362766 - DNA, 33 bp, Homo sapien; identical to SEQ ID NO: 362764

SEQ ID NO: 362767 - DNA, 33 bp, Homo sapien
gcctaatcccccttacaagtgactggctcaaaa

SEQ ID NO: 362768 - DNA, 33 bp, Homo sapien
gcctaatcccccttacgagtgactggctcaaaa

SEQ ID NO: 362769 - DNA, 33 bp, Homo sapien
ctcaggtgggctttgcaagggggtagatactga

SEQ ID NO: 362770 - DNA, 33 bp, Homo sapien
ctcaggtgggctttgcgagggggtagatactga

SEQ ID NO: 362771 - DNA, 33 bp, Homo sapien
aaacatgtggtactcaacttggtcccaggctga

SEQ ID NO: 362772 - DNA, 33 bp, Homo sapien
aaacatgtggtactcagcttggtcccaggctga

SEQ ID NO: 362773 - DNA, 33 bp, Homo sapien
aagaaatgggaaatcccacacatgcagaagcaa

SEQ ID NO: 362774 - DNA, 33 bp, Homo sapien
aagaaatgggaaatcctacacatgcagaagcaa

SEQ ID NO: 362775 - DNA, 33 bp, Homo sapien
aaatattgaaaaaaaaagtaacacatagcaaag

SEQ ID NO: 362776 - DNA, 33 bp, Homo sapien
aaatattgaaaaaaaatgtaacacatagcaaag

SEQ ID NO: 362777 - DNA, 33 bp, Homo sapien
aggttagaatcgattcacaatttatgaacaact

SEQ ID NO: 362778 - DNA, 33 bp, Homo sapien
aggttagaatcgattcccaatttatgaacaact

SEQ ID NO: 362779 - DNA, 33 bp, Homo sapien
atgggagtcaagagaaagaacaatgtcagagct

SEQ ID NO: 362780 - DNA, 33 bp, Homo sapien
atgggagtcaagagaaggaacaatgtcagagct

SEQ ID NO: 362781 - DNA, 33 bp, Homo sapien
gtaaactccagcaaaacgctaaactcactcatc

SEQ ID NO: 362782 - DNA, 33 bp, Homo sapien
gtaaactccagcaaaatgctaaactcactcatc

SEQ ID NO: 362783 - DNA, 33 bp, Homo sapien
tcttctttaatcctccagcaagactaggtctcc

SEQ ID NO: 362784 - DNA, 33 bp, Homo sapien
tcttctttaatcctccggcaagactaggtctcc

SEQ ID NO: 362785 - DNA, 33 bp, Homo sapien
tgactcataaggagatcactgggggaggtgtca

SEQ ID NO: 362786 - DNA, 33 bp, Homo sapien
tgactcataaggagattactgggggaggtgtca

SEQ ID NO: 362787 - DNA, 33 bp, Homo sapien
ctctttttaattggaacggataacctctgctaa

SEQ ID NO: 362788 - DNA, 33 bp, Homo sapien
ctctttttaattggaatggataacctctgctaa

SEQ ID NO: 362789 - DNA, 33 bp, Homo sapien
tattttacaatcagagactagaaataggtccag

SEQ ID NO: 362790 - DNA, 33 bp, Homo sapien
tattttacaatcagaggctagaaataggtccag

SEQ ID NO: 362791 - DNA, 33 bp, Homo sapien
attattttctgttcccaagtcaccaggtaggaa

SEQ ID NO: 362792 - DNA, 33 bp, Homo sapien
attattttctgttcccgagtcaccaggtaggaa

SEQ ID NO: 362793 - DNA, 33 bp, Homo sapien
ctctgccattgtctcccaaaagagaaagcagac

SEQ ID NO: 362794 - DNA, 33 bp, Homo sapien
ctctgccattgtctcctaaaagagaaagcagac

SEQ ID NO: 362795 - DNA, 33 bp, Homo sapien
gaagttctacagggcccgagcttctctcctgga

SEQ ID NO: 362796 - DNA, 33 bp, Homo sapien
gaagttctacagggcctgagcttctctcctgga

SEQ ID NO: 362797 - DNA, 33 bp, Homo sapien
agcttctctcctggaggcaagtgcttcagtgta

SEQ ID NO: 362798 - DNA, 33 bp, Homo sapien
agcttctctcctggagtcaagtgcttcagtgta

SEQ ID NO: 362799 - DNA, 33 bp, Homo sapien
acaaatgcctaccagactcagtaaaataacatg

SEQ ID NO: 362800 - DNA, 33 bp, Homo sapien
acaaatgcctaccagattcagtaaaataacatg

SEQ ID NO: 362801 - DNA, 33 bp, Homo sapien
caaataaaaaaactcacggaatatctcagttct

SEQ ID NO: 362802 - DNA, 33 bp, Homo sapien
caaataaaaaaactcagggaatatctcagttct

SEQ ID NO: 362803 - DNA, 33 bp, Homo sapien
ctttagaagtttgaacccatcattgtacaagtg

SEQ ID NO: 362804 - DNA, 33 bp, Homo sapien
ctttagaagtttgaactcatcattgtacaagtg

SEQ ID NO: 362805 - DNA, 33 bp, Homo sapien
ctctgctctgtagtcccccaaggctttctcagc

SEQ ID NO: 362806 - DNA, 33 bp, Homo sapien
ctctgctctgtagtccgccaaggctttctcagc

SEQ ID NO: 362807 - DNA, 33 bp, Homo sapien
gaaacagggaaaggacccaaaaatgcaaaatgc

SEQ ID NO: 362808 - DNA, 33 bp, Homo sapien
gaaacagggaaaggactcaaaaatgcaaaatgc

SEQ ID NO: 362809 - DNA, 33 bp, Homo sapien
atacctttatttctccaaaaacgagaataggat

SEQ ID NO: 362810 - DNA, 33 bp, Homo sapien
atacctttatttctccgaaaacgagaataggat

SEQ ID NO: 362811 - DNA, 33 bp, Homo sapien
aacgatgtcttcacgacgggctccatgactctg

SEQ ID NO: 362812 - DNA, 33 bp, Homo sapien
aacgatgtcttcacgatgggctccatgactctg

SEQ ID NO: 362813 - DNA, 33 bp, Homo sapien
cccacaggagaccggacgcgagcaagcgcacag

SEQ ID NO: 362814 - DNA, 33 bp, Homo sapien
cccacaggagaccggatgcgagcaagcgcacag

SEQ ID NO: 362815 - DNA, 33 bp, Homo sapien
ccagcagcctttctggaaaggaattgtaagtat

SEQ ID NO: 362816 - DNA, 33 bp, Homo sapien
ccagcagcctttctgggaaggaattgtaagtat

SEQ ID NO: 362817 - DNA, 33 bp, Homo sapien
attattgagtcacgaaaaaagtttagtccctat

SEQ ID NO: 362818 - DNA, 33 bp, Homo sapien
attattgagtcacgaagaaagtttagtccctat

SEQ ID NO: 362819 - DNA, 33 bp, Homo sapien
aattaatagtatcagtcaaagttatgatgggaa

SEQ ID NO: 362820 - DNA, 33 bp, Homo sapien
aattaatagtatcagtgaaagttatgatgggaa

SEQ ID NO: 362821 - DNA, 33 bp, Homo sapien
tattactatcggcaacaaacataaggacaatga

SEQ ID NO: 362822 - DNA, 33 bp, Homo sapien
tattactatcggcaaccaacataaggacaatga

SEQ ID NO: 362823 - DNA, 33 bp, Homo sapien
cgtgatgacacagttcaacagcagtagagttag

SEQ ID NO: 362824 - DNA, 33 bp, Homo sapien
cgtgatgacacagttcgacagcagtagagttag

SEQ ID NO: 362825 - DNA, 33 bp, Homo sapien
gtatcaaaacacatacaaaggatgaataagatg

SEQ ID NO: 362826 - DNA, 33 bp, Homo sapien
gtatcaaaacacataccaaggatgaataagatg

SEQ ID NO: 362827 - DNA, 33 bp, Homo sapien
tctgcttcttgaaactcaatgtgcacgtggttt

SEQ ID NO: 362828 - DNA, 33 bp, Homo sapien
tctgcttcttgaaactgaatgtgcacgtggttt

SEQ ID NO: 362829 - DNA, 33 bp, Homo sapien
gcctctgcttccacaacgtacgattcatccttc

SEQ ID NO: 362830 - DNA, 33 bp, Homo sapien
gcctctgcttccacaatgtacgattcatccttc

SEQ ID NO: 362831 - DNA, 33 bp, Homo sapien
ttcataactgcgctaaaaggtagaggccattat

SEQ ID NO: 362832 - DNA, 33 bp, Homo sapien
ttcataactgcgctaagaggtagaggccattat

SEQ ID NO: 362833 - DNA, 33 bp, Homo sapien
acaagggaggtagatacagcagtctgctagggc

SEQ ID NO: 362834 - DNA, 33 bp, Homo sapien
acaagggaggtagatagagcagtctgctagggc

SEQ ID NO: 362835 - DNA, 33 bp, Homo sapien
cagaccactaatctataaagcagatcaaaggga

SEQ ID NO: 362836 - DNA, 33 bp, Homo sapien
cagaccactaatctattaagcagatcaaaggga

SEQ ID NO: 362837 - DNA, 33 bp, Homo sapien
gggggaaagcagaaaacatcgggaatatgaagc

SEQ ID NO: 362838 - DNA, 33 bp, Homo sapien
gggggaaagcagaaaatatcgggaatatgaagc

SEQ ID NO: 362839 - DNA, 33 bp, Homo sapien
ggtgggggtggaagaactctattacagcaaaat

SEQ ID NO: 362840 - DNA, 33 bp, Homo sapien
ggtgggggtggaagaattctattacagcaaaat

SEQ ID NO: 362841 - DNA, 33 bp, Homo sapien
tcctaacacaacctaacgtgtatgtctggtttt

SEQ ID NO: 362842 - DNA, 33 bp, Homo sapien
tcctaacacaacctaatgtgtatgtctggtttt

SEQ ID NO: 362843 - DNA, 33 bp, Homo sapien
ctctttgcaatggttacgtgaaacaaggcatct

SEQ ID NO: 362844 - DNA, 33 bp, Homo sapien
ctctttgcaatggttatgtgaaacaaggcatct

SEQ ID NO: 362845 - DNA, 33 bp, Homo sapien
atcactgatcgggagaaactttctctaagtgac

SEQ ID NO: 362846 - DNA, 33 bp, Homo sapien
atcactgatcgggagagactttctctaagtgac

SEQ ID NO: 362847 - DNA, 33 bp, Homo sapien
ttcctgagacctacaaagtgcagtccacagaga

SEQ ID NO: 362848 - DNA, 33 bp, Homo sapien
ttcctgagacctacaaggtgcagtccacagaga

SEQ ID NO: 362849 - DNA, 33 bp, Homo sapien
ttgatagattccaaagcagttgagagagagcga

SEQ ID NO: 362850 - DNA, 33 bp, Homo sapien
ttgatagattccaaaggagttgagagagagcga

SEQ ID NO: 362851 - DNA, 33 bp, Homo sapien
aaacaagtgctttcatgatccccagttagagat

SEQ ID NO: 362852 - DNA, 33 bp, Homo sapien
aaacaagtgctttcattatccccagttagagat

SEQ ID NO: 362853 - DNA, 33 bp, Homo sapien
ctgcgtccatgttcctaaaagctcatgactcta

SEQ ID NO: 362854 - DNA, 33 bp, Homo sapien
ctgcgtccatgttcctgaaagctcatgactcta

SEQ ID NO: 362855 - DNA, 33 bp, Homo sapien
aaacactgaatctggaacctagcagctgagtaa

SEQ ID NO: 362856 - DNA, 33 bp, Homo sapien
aaacactgaatctggaccctagcagctgagtaa

SEQ ID NO: 362857 - DNA, 33 bp, Homo sapien
gacataacgtgacataaagagttgggggtaggc

SEQ ID NO: 362858 - DNA, 33 bp, Homo sapien
gacataacgtgacatatagagttgggggtaggc

SEQ ID NO: 362859 - DNA, 33 bp, Homo sapien
tcttacactgggaaacacctgtacatctcgttt

SEQ ID NO: 362860 - DNA, 33 bp, Homo sapien
tcttacactgggaaacgcctgtacatctcgttt

SEQ ID NO: 362861 - DNA, 33 bp, Homo sapien
cacacgtgcgccctcaaaatctaaaataaaata

SEQ ID NO: 362862 - DNA, 33 bp, Homo sapien
cacacgtgcgccctcagaatctaaaataaaata

SEQ ID NO: 362863 - DNA, 33 bp, Homo sapien
ctggccagttgtagctcaagactgtttgagtgg

SEQ ID NO: 362864 - DNA, 33 bp, Homo sapien
ctggccagttgtagctgaagactgtttgagtgg

SEQ ID NO: 362865 - DNA, 33 bp, Homo sapien
gttgtcttgtctctaaagtcctcggtctcctac

SEQ ID NO: 362866 - DNA, 33 bp, Homo sapien
gttgtcttgtctctaacgtcctcggtctcctac

SEQ ID NO: 362867 - DNA, 33 bp, Homo sapien
aatgttaaaacaaaacacagctatgactggcag

SEQ ID NO: 362868 - DNA, 33 bp, Homo sapien
aatgttaaaacaaaacgcagctatgactggcag

SEQ ID NO: 362869 - DNA, 33 bp, Homo sapien
actgaagagtaggaaacgaccctgaattatctg

SEQ ID NO: 362870 - DNA, 33 bp, Homo sapien
actgaagagtaggaaatgaccctgaattatctg

SEQ ID NO: 362871 - DNA, 33 bp, Homo sapien
ttgttagagcaataaacattcttcaaactcaat

SEQ ID NO: 362872 - DNA, 33 bp, Homo sapien
ttgttagagcaataaagattcttcaaactcaat

SEQ ID NO: 362873 - DNA, 33 bp, Homo sapien
agacaaatccaggaaacttagattcaaacatgc

SEQ ID NO: 362874 - DNA, 33 bp, Homo sapien
agacaaatccaggaaagttagattcaaacatgc

SEQ ID NO: 362875 - DNA, 33 bp, Homo sapien
ctctcatatcaccctgcattttcttcctggaac

SEQ ID NO: 362876 - DNA, 33 bp, Homo sapien
ctctcatatcaccctggattttcttcctggaac

SEQ ID NO: 362877 - DNA, 33 bp, Homo sapien
cttcttttcggggaacagatttgaaaggttggg

SEQ ID NO: 362878 - DNA, 33 bp, Homo sapien
cttcttttcggggaacggatttgaaaggttggg

SEQ ID NO: 362879 - DNA, 33 bp, Homo sapien
gagtgctccatgcagacgaaagagttaactcaa

SEQ ID NO: 362880 - DNA, 33 bp, Homo sapien
gagtgctccatgcagaggaaagagttaactcaa

SEQ ID NO: 362881 - DNA, 33 bp, Homo sapien
tttagacctcctctctgaatcccaggctcacgt

SEQ ID NO: 362882 - DNA, 33 bp, Homo sapien
tttagacctcctctcttaatcccaggctcacgt

SEQ ID NO: 362883 - DNA, 33 bp, Homo sapien
ggctcacgtgaccaaccgcctgaccactctaaa

SEQ ID NO: 362884 - DNA, 33 bp, Homo sapien
ggctcacgtgaccaacggcctgaccactctaaa

SEQ ID NO: 362885 - DNA, 33 bp, Homo sapien
tcttgtcaaaacgtcacacctttcagggtcccc

SEQ ID NO: 362886 - DNA, 33 bp, Homo sapien
tcttgtcaaaacgtcagacctttcagggtcccc

SEQ ID NO: 362887 - DNA, 33 bp, Homo sapien
tcagttgcttgcacagaaaggaccctggcttag

SEQ ID NO: 362888 - DNA, 33 bp, Homo sapien
tcagttgcttgcacaggaaggaccctggcttag

SEQ ID NO: 362889 - DNA, 33 bp, Homo sapien
gttgcagggctgtgacacaagatttttctattg

SEQ ID NO: 362890 - DNA, 33 bp, Homo sapien
gttgcagggctgtgacgcaagatttttctattg

SEQ ID NO: 362891 - DNA, 33 bp, Homo sapien
agtgattgcccaacaccgtgaaggtactaaata

SEQ ID NO: 362892 - DNA, 33 bp, Homo sapien
agtgattgcccaacactgtgaaggtactaaata

SEQ ID NO: 362893 - DNA, 33 bp, Homo sapien
aatgtcagcacagagacgatccaggtcaagcca

SEQ ID NO: 362894 - DNA, 33 bp, Homo sapien
aatgtcagcacagagaggatccaggtcaagcca

SEQ ID NO: 362895 - DNA, 33 bp, Homo sapien
tgctttggaactacataaaggtatggtggcacc

SEQ ID NO: 362896 - DNA, 33 bp, Homo sapien
tgctttggaactacatgaaggtatggtggcacc

SEQ ID NO: 362897 - DNA, 33 bp, Homo sapien
catttctgccttttcaatatttcagtgactggg

SEQ ID NO: 362898 - DNA, 33 bp, Homo sapien
catttctgccttttcagtatttcagtgactggg

SEQ ID NO: 362899 - DNA, 33 bp, Homo sapien
ttacttgaccactacacgaatgagtaatgagct

SEQ ID NO: 362900 - DNA, 33 bp, Homo sapien
ttacttgaccactacatgaatgagtaatgagct

SEQ ID NO: 362901 - DNA, 33 bp, Homo sapien
tggtggtttgtgcagcaataaattaaaaggcat
